United States Patent Application Publication US 2005/0244851 A1 - sequence listing, part 111

SEQ ID NO: 4329048 - DNA, 25 bp, Homo sapien
tagtaccaccaaggtgatgctggag

SEQ ID NO: 4329049 - DNA, 25 bp, Homo sapien
tagcagcacatagtaccaccaaggt

SEQ ID NO: 4329050 - DNA, 25 bp, Homo sapien
agttttgctccacggccagggtagg

SEQ ID NO: 4329051 - DNA, 25 bp, Homo sapien
gccgcagttttgctccacggccagg

SEQ ID NO: 4329052 - DNA, 25 bp, Homo sapien
acagtaatgccgcagttttgctcca

SEQ ID NO: 4329053 - DNA, 25 bp, Homo sapien
aggatctttggcaattctgccaggg

SEQ ID NO: 4329054 - DNA, 25 bp, Homo sapien
tagtccatcagtgacccaacagcca

SEQ ID NO: 4329055 - DNA, 25 bp, Homo sapien
tgggcctgctcatgtgtatttctgt

SEQ ID NO: 4329056 - DNA, 25 bp, Homo sapien
tgagcattttaggatctgtgactac

SEQ ID NO: 4329057 - DNA, 25 bp, Homo sapien
tcagtgacccaacagccaaaatggg

SEQ ID NO: 4329058 - DNA, 25 bp, Homo sapien
gatcagggactgtaaccactacaga

SEQ ID NO: 4329059 - DNA, 25 bp, Homo sapien
agatcagggactgtaaccactacag

SEQ ID NO: 4329060 - DNA, 25 bp, Homo sapien
tcagggactgtaaccactacagatc

SEQ ID NO: 4329061 - DNA, 25 bp, Homo sapien
ggtgaaggacacaggaaagtaagat

SEQ ID NO: 4329062 - DNA, 25 bp, Homo sapien
aaaagacattccgtaggtgaggctc

SEQ ID NO: 4329063 - DNA, 25 bp, Homo sapien
ttgctgggagctacaacaacttgcc

SEQ ID NO: 4329064 - DNA, 25 bp, Homo sapien
gaagaggttcacattcccgcgtgcc

SEQ ID NO: 4329065 - DNA, 25 bp, Homo sapien
tgagattctcgagggccaatgtcct

SEQ ID NO: 4329066 - DNA, 25 bp, Homo sapien
tcagctcttaaaaaaagcctgccac

SEQ ID NO: 4329067 - DNA, 25 bp, Homo sapien
tttcagctcttaaaaaaagcctgcc

SEQ ID NO: 4329068 - DNA, 25 bp, Homo sapien
cagctcttaaaaaaagcctgccacg

SEQ ID NO: 4329069 - DNA, 25 bp, Homo sapien
gctcttaaaaaaagcctgccacgaa

SEQ ID NO: 4329070 - DNA, 25 bp, Homo sapien
ctttgagaagctggcgcccagtgat

SEQ ID NO: 4329071 - DNA, 25 bp, Homo sapien
ttcgttgctcgaactccctgggtgc

SEQ ID NO: 4329072 - DNA, 25 bp, Homo sapien
ccaacagcaaactgcctgggagcgg

SEQ ID NO: 4329073 - DNA, 25 bp, Homo sapien
tgctgcgaacgtagctttgagaagc

SEQ ID NO: 4329074 - DNA, 25 bp, Homo sapien
ctccgtgtgccaggagtgcgtcccg

SEQ ID NO: 4329075 - DNA, 25 bp, Homo sapien
acggtgtggcgtggcgcaaggagcg

SEQ ID NO: 4329076 - DNA, 25 bp, Homo sapien
gccgagttggttgccgccggttgcg

SEQ ID NO: 4329077 - DNA, 25 bp, Homo sapien
cgggaacgggctgcaccaatggcca

SEQ ID NO: 4329078 - DNA, 25 bp, Homo sapien
gcggcgccagcgtagagcggcggtt

SEQ ID NO: 4329079 - DNA, 25 bp, Homo sapien
tagagcggcggtttggaggaaagat

SEQ ID NO: 4329080 - DNA, 25 bp, Homo sapien
aaagatgagacggtgagtgggctcc

SEQ ID NO: 4329081 - DNA, 25 bp, Homo sapien
gggcaaaggctaggcgctagggcgg

SEQ ID NO: 4329082 - DNA, 25 bp, Homo sapien
cctgagaaagagaaggtccgctgct

SEQ ID NO: 4329083 - DNA, 25 bp, Homo sapien
gatccttgggatagctccctgagaa

SEQ ID NO: 4329084 - DNA, 25 bp, Homo sapien
tccagagtgattgtagaaaacaggc

SEQ ID NO: 4329085 - DNA, 25 bp, Homo sapien
gaaccccgttgtgcatgactctcgg

SEQ ID NO: 4329086 - DNA, 25 bp, Homo sapien
tgatttcgatttggcctttgacccc

SEQ ID NO: 4329087 - DNA, 25 bp, Homo sapien
agtttacagtgtggccgtctcggca

SEQ ID NO: 4329088 - DNA, 25 bp, Homo sapien
agctttaaccgccaaaagcggctga

SEQ ID NO: 4329089 - DNA, 25 bp, Homo sapien
aaagtttacagtgtggccgtctcgg

SEQ ID NO: 4329090 - DNA, 25 bp, Homo sapien
caactctgaagtagctctaaagagc

SEQ ID NO: 4329091 - DNA, 25 bp, Homo sapien
gaaatctttatcctgcaactctgaa

SEQ ID NO: 4329092 - DNA, 25 bp, Homo sapien
tctcggtaaactacccgtggctgga

SEQ ID NO: 4329093 - DNA, 25 bp, Homo sapien
gcccgcagctttttctctcggtaaa

SEQ ID NO: 4329094 - DNA, 25 bp, Homo sapien
ccagaggtttgcagatctcagcctg

SEQ ID NO: 4329095 - DNA, 25 bp, Homo sapien
tcttttggtgttgagatcgtctgcc

SEQ ID NO: 4329096 - DNA, 25 bp, Homo sapien
caggcctcaatctgttttatgcagc

SEQ ID NO: 4329097 - DNA, 25 bp, Homo sapien
cgtctgccacgagtgtcgcctggat

SEQ ID NO: 4329098 - DNA, 25 bp, Homo sapien
gaccaagctgaaactcgttagcaac

SEQ ID NO: 4329099 - DNA, 25 bp, Homo sapien
tcctccgttcaataactgtgaccaa

SEQ ID NO: 4329100 - DNA, 25 bp, Homo sapien
gaaactcgttagcaacctttccaga

SEQ ID NO: 4329101 - DNA, 25 bp, Homo sapien
taactgtgaccaagctgaaactcgt

SEQ ID NO: 4329102 - DNA, 25 bp, Homo sapien
aagttgtacaccatagcctgattaa

SEQ ID NO: 4329103 - DNA, 25 bp, Homo sapien
cagaaaagttgtacaccatagcctg

SEQ ID NO: 4329104 - DNA, 25 bp, Homo sapien
tacaccatagcctgattaattacaa

SEQ ID NO: 4329105 - DNA, 25 bp, Homo sapien
ccatagcctgattaattacaaacat

SEQ ID NO: 4329106 - DNA, 25 bp, Homo sapien
acctggtgaattccgaggatgtgtc

SEQ ID NO: 4329107 - DNA, 25 bp, Homo sapien
tgtcacctggtgaattccgaggatg

SEQ ID NO: 4329108 - DNA, 25 bp, Homo sapien
cctgtcacctggtgaattccgagga

SEQ ID NO: 4329109 - DNA, 25 bp, Homo sapien
tcacctggtgaattccgaggatgtg

SEQ ID NO: 4329110 - DNA, 25 bp, Homo sapien
cgtagaagttggtactctacacatt

SEQ ID NO: 4329111 - DNA, 25 bp, Homo sapien
gcgtagaagttggtactctacacat

SEQ ID NO: 4329112 - DNA, 25 bp, Homo sapien
tctttagtgcagcttttatagggcc

SEQ ID NO: 4329113 - DNA, 25 bp, Homo sapien
gactttcttctgatgcaccttggac

SEQ ID NO: 4329114 - DNA, 25 bp, Homo sapien
tagggccagtgtgtctcagtgcaac

SEQ ID NO: 4329115 - DNA, 25 bp, Homo sapien
gcatgtgtcagtgattcaaacttga

SEQ ID NO: 4329116 - DNA, 25 bp, Homo sapien
gtttcactgtctgaaatagcattca

SEQ ID NO: 4329117 - DNA, 25 bp, Homo sapien
caagcctttgaatactgcgtttcac

SEQ ID NO: 4329118 - DNA, 25 bp, Homo sapien
ctgttcacaagcctttgaatactgc

SEQ ID NO: 4329119 - DNA, 25 bp, Homo sapien
tactgcgtttcactgtctgaaatag

SEQ ID NO: 4329120 - DNA, 25 bp, Homo sapien
ccctgtagggatggcttaagcaaat

SEQ ID NO: 4329121 - DNA, 25 bp, Homo sapien
tatcctacttgagatgagtgcgttg

SEQ ID NO: 4329122 - DNA, 25 bp, Homo sapien
aatttgtgagccgatattcctggca

SEQ ID NO: 4329123 - DNA, 25 bp, Homo sapien
ttttggatcacaacctgaatggtgg

SEQ ID NO: 4329124 - DNA, 25 bp, Homo sapien
catacaatgctttgttaaggcatca

SEQ ID NO: 4329125 - DNA, 25 bp, Homo sapien
ggtgtgaatactctgcatgaaacta

SEQ ID NO: 4329126 - DNA, 25 bp, Homo sapien
tttcattgaaaggtaggtagagcac

SEQ ID NO: 4329127 - DNA, 25 bp, Homo sapien
ccactccaaatactaatggtgtgaa

SEQ ID NO: 4329128 - DNA, 25 bp, Homo sapien
taactgctccctcaacataactatg

SEQ ID NO: 4329129 - DNA, 25 bp, Homo sapien
taaaggcaaccagtagccaatgtcc

SEQ ID NO: 4329130 - DNA, 25 bp, Homo sapien
tctttttgttgtggagcacacctgc

SEQ ID NO: 4329131 - DNA, 25 bp, Homo sapien
tggtgtagttctataaaacggcaaa

SEQ ID NO: 4329132 - DNA, 25 bp, Homo sapien
gtaaaggtgttctaatccaattgca

SEQ ID NO: 4329133 - DNA, 25 bp, Homo sapien
taagattttgcaactggatgacaca

SEQ ID NO: 4329134 - DNA, 25 bp, Homo sapien
ccaattgcatgatgtagtaagcctc

SEQ ID NO: 4329135 - DNA, 25 bp, Homo sapien
tctgcactgtactctcttcatagga

SEQ ID NO: 4329136 - DNA, 25 bp, Homo sapien
gcaagtgattgccacctaaatcaga

SEQ ID NO: 4329137 - DNA, 25 bp, Homo sapien
cagaagacgttctaaagtcagtaag

SEQ ID NO: 4329138 - DNA, 25 bp, Homo sapien
tacagtgatacaaggagctatttct

SEQ ID NO: 4329139 - DNA, 25 bp, Homo sapien
actaaagtgaggtgtagattgagcc

SEQ ID NO: 4329140 - DNA, 25 bp, Homo sapien
gcagagactacctttgtgaccagct

SEQ ID NO: 4329141 - DNA, 25 bp, Homo sapien
aaagtgttaatgaagccgacctgac

SEQ ID NO: 4329142 - DNA, 25 bp, Homo sapien
gaagcttgcacttagtttcccctga

SEQ ID NO: 4329143 - DNA, 25 bp, Homo sapien
gagacctgctttacaaggttggccc

SEQ ID NO: 4329144 - DNA, 25 bp, Homo sapien
tgctgacgattgtatttggtgggtc

SEQ ID NO: 4329145 - DNA, 25 bp, Homo sapien
tcattttctatcagagcagccgtca

SEQ ID NO: 4329146 - DNA, 25 bp, Homo sapien
tctatcagagcagccgtcactgcat

SEQ ID NO: 4329147 - DNA, 25 bp, Homo sapien
ttcaagtggctgctgacgattgtat

SEQ ID NO: 4329148 - DNA, 25 bp, Homo sapien
gaggctgggatactcccgagcatga

SEQ ID NO: 4329149 - DNA, 25 bp, Homo sapien
ttcatgcggcatgggttgagtccag

SEQ ID NO: 4329150 - DNA, 25 bp, Homo sapien
tcccagttacaaacccagtcataga

SEQ ID NO: 4329151 - DNA, 25 bp, Homo sapien
gtttttacatcctccagtggacaat

SEQ ID NO: 4329152 - DNA, 25 bp, Homo sapien
cactgttggaggtcactggtattct

SEQ ID NO: 4329153 - DNA, 25 bp, Homo sapien
tggctctaagcccagtaaaacagct

SEQ ID NO: 4329154 - DNA, 25 bp, Homo sapien
tagggtcagcgggtatgtcccactg

SEQ ID NO: 4329155 - DNA, 25 bp, Homo sapien
tgtctgaaagcagtgctctaccaag

SEQ ID NO: 4329156 - DNA, 25 bp, Homo sapien
tttgagcacactactatcactttgg

SEQ ID NO: 4329157 - DNA, 25 bp, Homo sapien
gttgtgatacaagaagaaccactct

SEQ ID NO: 4329158 - DNA, 25 bp, Homo sapien
tatatagctagttacagacgggagc

SEQ ID NO: 4329159 - DNA, 25 bp, Homo sapien
taaggctgtttaatatctgctctgg

SEQ ID NO: 4329160 - DNA, 25 bp, Homo sapien
actgatgatctgtcgctgggtctac

SEQ ID NO: 4329161 - DNA, 25 bp, Homo sapien
ggctgaaggctccacaaacctgtga

SEQ ID NO: 4329162 - DNA, 25 bp, Homo sapien
cctaaaattaggacagtagccgtga

SEQ ID NO: 4329163 - DNA, 25 bp, Homo sapien
tgtcgcttagctggtccaagggcct

SEQ ID NO: 4329164 - DNA, 25 bp, Homo sapien
gcagagggctttctatttagcatac

SEQ ID NO: 4329165 - DNA, 25 bp, Homo sapien
gctgatccctggtttagaggataga

SEQ ID NO: 4329166 - DNA, 25 bp, Homo sapien
tctttagggcctatggtccatgtca

SEQ ID NO: 4329167 - DNA, 25 bp, Homo sapien
taatcaggacacatagaggagtgct

SEQ ID NO: 4329168 - DNA, 25 bp, Homo sapien
ggattacgggatctccaaggatcgt

SEQ ID NO: 4329169 - DNA, 25 bp, Homo sapien
taagagggcttgtggtatacaaacc

SEQ ID NO: 4329170 - DNA, 25 bp, Homo sapien
cccttgggcacacttagtatgatga

SEQ ID NO: 4329171 - DNA, 25 bp, Homo sapien
cagaagagcagagccccttgtggtg

SEQ ID NO: 4329172 - DNA, 25 bp, Homo sapien
aacaaatgctagtccagccacttca

SEQ ID NO: 4329173 - DNA, 25 bp, Homo sapien
ttatttgttggtgctaaacaaatgc

SEQ ID NO: 4329174 - DNA, 25 bp, Homo sapien
gactttgtgtcccatccctgcttca

SEQ ID NO: 4329175 - DNA, 25 bp, Homo sapien
gctggagggactttgtgtcccatcc

SEQ ID NO: 4329176 - DNA, 25 bp, Homo sapien
aactgagtctcagaaggggccataa

SEQ ID NO: 4329177 - DNA, 25 bp, Homo sapien
actgagtctcagaaggggccataag

SEQ ID NO: 4329178 - DNA, 25 bp, Homo sapien
tgagtctcagaaggggccataagtg

SEQ ID NO: 4329179 - DNA, 25 bp, Homo sapien
gtctcagaaggggccataagtggac

SEQ ID NO: 4329180 - DNA, 25 bp, Homo sapien
gaagtgaatactcagtctcagttcc

SEQ ID NO: 4329181 - DNA, 25 bp, Homo sapien
tggccttgtacagagaacccgatga

SEQ ID NO: 4329182 - DNA, 25 bp, Homo sapien
gctcctctgagtaggtctggtcaac

SEQ ID NO: 4329183 - DNA, 25 bp, Homo sapien
ttgatgagggtatagcacagctcct

SEQ ID NO: 4329184 - DNA, 25 bp, Homo sapien
gatgggagtagatgacattctttca

SEQ ID NO: 4329185 - DNA, 25 bp, Homo sapien
atgggagtagatgacattctttcat

SEQ ID NO: 4329186 - DNA, 25 bp, Homo sapien
acatctccataagctcctataggca

SEQ ID NO: 4329187 - DNA, 25 bp, Homo sapien
catatggtatatggattgacattct

SEQ ID NO: 4329188 - DNA, 25 bp, Homo sapien
taagctcctataggcatctaaaact

SEQ ID NO: 4329189 - DNA, 25 bp, Homo sapien
catcttcagcatagagttttagcat

SEQ ID NO: 4329190 - DNA, 25 bp, Homo sapien
ttttgggaatcttgcctcttttcaa

SEQ ID NO: 4329191 - DNA, 25 bp, Homo sapien
tttgggaatcttgcctcttttcaaa

SEQ ID NO: 4329192 - DNA, 25 bp, Homo sapien
gttttgggaatcttgcctcttttca

SEQ ID NO: 4329193 - DNA, 25 bp, Homo sapien
tgggaatcttgcctcttttcaaaaa

SEQ ID NO: 4329194 - DNA, 25 bp, Homo sapien
ttcagcgatatggtgatcccagcat

SEQ ID NO: 4329195 - DNA, 25 bp, Homo sapien
gaaacacccttcagcgatatggtga

SEQ ID NO: 4329196 - DNA, 25 bp, Homo sapien
cagaaacacccttcagcgatatggt

SEQ ID NO: 4329197 - DNA, 25 bp, Homo sapien
cacccttcagcgatatggtgatccc

SEQ ID NO: 4329198 - DNA, 25 bp, Homo sapien
tcattctagataacttggacacatc

SEQ ID NO: 4329199 - DNA, 25 bp, Homo sapien
tctctcatggtagaatgcctttgtc

SEQ ID NO: 4329200 - DNA, 25 bp, Homo sapien
ccccgcaagcgtgtttcattctaga

SEQ ID NO: 4329201 - DNA, 25 bp, Homo sapien
tctgcagctttgttaaggtgactcc

SEQ ID NO: 4329202 - DNA, 25 bp, Homo sapien
tatccccaggaaatcaaggtacaag

SEQ ID NO: 4329203 - DNA, 25 bp, Homo sapien
ggctgactgcatcgtgaccttggct

SEQ ID NO: 4329204 - DNA, 25 bp, Homo sapien
ccatgaagtttcatcaggaggagca

SEQ ID NO: 4329205 - DNA, 25 bp, Homo sapien
gctgtgatcacctgcttggctgagc

SEQ ID NO: 4329206 - DNA, 25 bp, Homo sapien
gatgtgaagtccagggcttgacata

SEQ ID NO: 4329207 - DNA, 25 bp, Homo sapien
atgtgaagtccagggcttgacatac

SEQ ID NO: 4329208 - DNA, 25 bp, Homo sapien
tgggatgtgaagtccagggcttgac

SEQ ID NO: 4329209 - DNA, 25 bp, Homo sapien
ggatgtgaagtccagggcttgacat

SEQ ID NO: 4329210 - DNA, 25 bp, Homo sapien
ggggtgtttggttgattttgctctc

SEQ ID NO: 4329211 - DNA, 25 bp, Homo sapien
tcgttctccttgggcaaggtctggg

SEQ ID NO: 4329212 - DNA, 25 bp, Homo sapien
ggtgtttggttgattttgctctcac

SEQ ID NO: 4329213 - DNA, 25 bp, Homo sapien
ctccttgggcaaggtctggggggtg

SEQ ID NO: 4329214 - DNA, 25 bp, Homo sapien
ggatgttctctgtttggggctttgc

SEQ ID NO: 4329215 - DNA, 25 bp, Homo sapien
ctgtttggggctttgcattctcaca

SEQ ID NO: 4329216 - DNA, 25 bp, Homo sapien
catctcttgagtgttctgctgccgc

SEQ ID NO: 4329217 - DNA, 25 bp, Homo sapien
tctcacattccaaggcatctcttga

SEQ ID NO: 4329218 - DNA, 25 bp, Homo sapien
gactggttgccctcacacatgttaa

SEQ ID NO: 4329219 - DNA, 25 bp, Homo sapien
tcctcaagcacatgtcgcaagctac

SEQ ID NO: 4329220 - DNA, 25 bp, Homo sapien
taagtatttcctaaacaggcctgtc

SEQ ID NO: 4329221 - DNA, 25 bp, Homo sapien
catatcagaaacaggctaagtattt

SEQ ID NO: 4329222 - DNA, 25 bp, Homo sapien
tctccattgccacagcaacagccca

SEQ ID NO: 4329223 - DNA, 25 bp, Homo sapien
catgaacaagtgatcctaaatcatc

SEQ ID NO: 4329224 - DNA, 25 bp, Homo sapien
ccaaatatccagggatcctcgtcat

SEQ ID NO: 4329225 - DNA, 25 bp, Homo sapien
gcaacagcccactgatgttctccaa

SEQ ID NO: 4329226 - DNA, 25 bp, Homo sapien
tttccacctttcagctattctccat

SEQ ID NO: 4329227 - DNA, 25 bp, Homo sapien
attatatagaccttccttggtaaag

SEQ ID NO: 4329228 - DNA, 25 bp, Homo sapien
tcatttcttaggtggtaacctatta

SEQ ID NO: 4329229 - DNA, 25 bp, Homo sapien
cctccttgtggagcatgaggagctc

SEQ ID NO: 4329230 - DNA, 25 bp, Homo sapien
gttttctctcagcagagaatttccc

SEQ ID NO: 4329231 - DNA, 25 bp, Homo sapien
tggctctggccacccgtgcagagac

SEQ ID NO: 4329232 - DNA, 25 bp, Homo sapien
ctctcagggcttcccctccgtccct

SEQ ID NO: 4329233 - DNA, 25 bp, Homo sapien
ggctctggccacccgtgcagagaca

SEQ ID NO: 4329234 - DNA, 25 bp, Homo sapien
gtaaaactaatatagaacatggaag

SEQ ID NO: 4329235 - DNA, 25 bp, Homo sapien
tgagaataaatgacccttgggaaga

SEQ ID NO: 4329236 - DNA, 25 bp, Homo sapien
gggtgggacagcacttctctgagaa

SEQ ID NO: 4329237 - DNA, 25 bp, Homo sapien
ttagtaaaactaatatagaacatgg

SEQ ID NO: 4329238 - DNA, 25 bp, Homo sapien
tcataaagtgaaccaaaccattatt

SEQ ID NO: 4329239 - DNA, 25 bp, Homo sapien
gcaaaatatctagatggctataaac

SEQ ID NO: 4329240 - DNA, 25 bp, Homo sapien
tattgctgtaagagcaatatgcaaa

SEQ ID NO: 4329241 - DNA, 25 bp, Homo sapien
gtatatatgttgaactgctggtttc

SEQ ID NO: 4329242 - DNA, 25 bp, Homo sapien
ccacacaggatccaacctgaagtta

SEQ ID NO: 4329243 - DNA, 25 bp, Homo sapien
tgtagggaagtgtgtttctgcagca

SEQ ID NO: 4329244 - DNA, 25 bp, Homo sapien
catgcttcggtcttcttaacagtct

SEQ ID NO: 4329245 - DNA, 25 bp, Homo sapien
agcaggaggcctctcatagccacag

SEQ ID NO: 4329246 - DNA, 25 bp, Homo sapien
tgccttctggtaggttttgtcttct

SEQ ID NO: 4329247 - DNA, 25 bp, Homo sapien
aattcacactatcacataaagggca

SEQ ID NO: 4329248 - DNA, 25 bp, Homo sapien
ttcagtctgtatctccagggacaga

SEQ ID NO: 4329249 - DNA, 25 bp, Homo sapien
taattcacactatcacataaagggc

SEQ ID NO: 4329250 - DNA, 25 bp, Homo sapien
cagatgtgctcctgatcctgttgag

SEQ ID NO: 4329251 - DNA, 25 bp, Homo sapien
tctaggggactccttacagttgaac

SEQ ID NO: 4329252 - DNA, 25 bp, Homo sapien
ggactccttacagttgaactttgtc

SEQ ID NO: 4329253 - DNA, 25 bp, Homo sapien
tattctaggggactccttacagttg

SEQ ID NO: 4329254 - DNA, 25 bp, Homo sapien
ttacagttgaactttgtccccagca

SEQ ID NO: 4329255 - DNA, 25 bp, Homo sapien
catttctttcttcttgaatgccttc

SEQ ID NO: 4329256 - DNA, 25 bp, Homo sapien
ccttcttccaatgttccaactgaac

SEQ ID NO: 4329257 - DNA, 25 bp, Homo sapien
atgccttcttccaatgttccaactg

SEQ ID NO: 4329258 - DNA, 25 bp, Homo sapien
cttgaatgccttcttccaatgttcc

SEQ ID NO: 4329259 - DNA, 25 bp, Homo sapien
tagcgcatacgtatattgacaattg

SEQ ID NO: 4329260 - DNA, 25 bp, Homo sapien
tctgttaggctcatttggtgtaggg

SEQ ID NO: 4329261 - DNA, 25 bp, Homo sapien
gacccattggtcatctaggtgcaag

SEQ ID NO: 4329262 - DNA, 25 bp, Homo sapien
tctgtcttcataatctgcccattgc

SEQ ID NO: 4329263 - DNA, 25 bp, Homo sapien
ggagtttgaataatcactacttttg

SEQ ID NO: 4329264 - DNA, 25 bp, Homo sapien
ctattaatcctggtgtaagataact

SEQ ID NO: 4329265 - DNA, 25 bp, Homo sapien
ttttgtgaaatcttcaatactttgt

SEQ ID NO: 4329266 - DNA, 25 bp, Homo sapien
catgttaatcggagtttgaataatc

SEQ ID NO: 4329267 - DNA, 25 bp, Homo sapien
cactggtacccaaatccacaatgag

SEQ ID NO: 4329268 - DNA, 25 bp, Homo sapien
tcaatatagtttgaatcacactggt

SEQ ID NO: 4329269 - DNA, 25 bp, Homo sapien
ctttctgccatatagaaatatttca

SEQ ID NO: 4329270 - DNA, 25 bp, Homo sapien
aaaatattcttccaccttgtggttg

SEQ ID NO: 4329271 - DNA, 25 bp, Homo sapien
tataagtttttcgtaacagacaatc

SEQ ID NO: 4329272 - DNA, 25 bp, Homo sapien
ggtactcattggtatatctactaca

SEQ ID NO: 4329273 - DNA, 25 bp, Homo sapien
gctttagttgcatattgtagttcca

SEQ ID NO: 4329274 - DNA, 25 bp, Homo sapien
cagacaatcttctacagctccatgt

SEQ ID NO: 4329275 - DNA, 25 bp, Homo sapien
gtaatagcgagtccaagttttagcc

SEQ ID NO: 4329276 - DNA, 25 bp, Homo sapien
ctcataagataagtgttctctgatt

SEQ ID NO: 4329277 - DNA, 25 bp, Homo sapien
tagcgagtccaagttttagccacat

SEQ ID NO: 4329278 - DNA, 25 bp, Homo sapien
tctggctgtaatagcgagtccaagt

SEQ ID NO: 4329279 - DNA, 25 bp, Homo sapien
gaggagagcattgctcaaaagcatc

SEQ ID NO: 4329280 - DNA, 25 bp, Homo sapien
tttttgtttaatgagaggagagcat

SEQ ID NO: 4329281 - DNA, 25 bp, Homo sapien
agcatcatacaagtgagttttggga

SEQ ID NO: 4329282 - DNA, 25 bp, Homo sapien
gagcattgctcaaaagcatcataca

SEQ ID NO: 4329283 - DNA, 25 bp, Homo sapien
cagttttgcaggtggcagaatattt

SEQ ID NO: 4329284 - DNA, 25 bp, Homo sapien
ggtggcagaatatttcataggttca

SEQ ID NO: 4329285 - DNA, 25 bp, Homo sapien
ggttcattagttaagcagtttatct

SEQ ID NO: 4329286 - DNA, 25 bp, Homo sapien
tatttcataggttcattagttaagc

SEQ ID NO: 4329287 - DNA, 25 bp, Homo sapien
tgtgtcaattatcggaaaatctttc

SEQ ID NO: 4329288 - DNA, 25 bp, Homo sapien
tccaccatttgatcaatccctaaac

SEQ ID NO: 4329289 - DNA, 25 bp, Homo sapien
ctgtgtcaattatcggaaaatcttt

SEQ ID NO: 4329290 - DNA, 25 bp, Homo sapien
ccatttgatcaatccctaaacctgg

SEQ ID NO: 4329291 - DNA, 25 bp, Homo sapien
tccacaatcaaatgttacaactttg

SEQ ID NO: 4329292 - DNA, 25 bp, Homo sapien
ccatgcctgaaataatgatatagat

SEQ ID NO: 4329293 - DNA, 25 bp, Homo sapien
atttccacaatcaaatgttacaact

SEQ ID NO: 4329294 - DNA, 25 bp, Homo sapien
caatcaaatgttacaactttggctt

SEQ ID NO: 4329295 - DNA, 25 bp, Homo sapien
tgtttttatctagccacggaatatg

SEQ ID NO: 4329296 - DNA, 25 bp, Homo sapien
cctgataatagattgagaatcaagc

SEQ ID NO: 4329297 - DNA, 25 bp, Homo sapien
tcaacagtaagaggcctgataatag

SEQ ID NO: 4329298 - DNA, 25 bp, Homo sapien
aacttcttcaacagtaagaggcctg

SEQ ID NO: 4329299 - DNA, 25 bp, Homo sapien
ggcaccaggtgttatacaagaccaa

SEQ ID NO: 4329300 - DNA, 25 bp, Homo sapien
tattcacagtctgttccagtccagg

SEQ ID NO: 4329301 - DNA, 25 bp, Homo sapien
gaaatgccaggtgcatcccttcagc

SEQ ID NO: 4329302 - DNA, 25 bp, Homo sapien
tccaagcagggtattcacgcatggg

SEQ ID NO: 4329303 - DNA, 25 bp, Homo sapien
agcctcaattcagttgctttctcat

SEQ ID NO: 4329304 - DNA, 25 bp, Homo sapien
tcagttgctttctcattgaagcagg

SEQ ID NO: 4329305 - DNA, 25 bp, Homo sapien
tgctttctcattgaagcaggtcccc

SEQ ID NO: 4329306 - DNA, 25 bp, Homo sapien
aattcagttgctttctcattgaagc

SEQ ID NO: 4329307 - DNA, 25 bp, Homo sapien
gaagcaaagaaggccctaggatgag

SEQ ID NO: 4329308 - DNA, 25 bp, Homo sapien
caaagaaggccctaggatgagaacc

SEQ ID NO: 4329309 - DNA, 25 bp, Homo sapien
aagcaaagaaggccctaggatgaga

SEQ ID NO: 4329310 - DNA, 25 bp, Homo sapien
gcaaagaaggccctaggatgagaac

SEQ ID NO: 4329311 - DNA, 25 bp, Homo sapien
aattcagcatctcatcagcccttgg

SEQ ID NO: 4329312 - DNA, 25 bp, Homo sapien
gccacaaaagtggtgcctttccaaa

SEQ ID NO: 4329313 - DNA, 25 bp, Homo sapien
gggagtaggaactgtgactccctct

SEQ ID NO: 4329314 - DNA, 25 bp, Homo sapien
tatgatgaaaaaacgttagaagggc

SEQ ID NO: 4329315 - DNA, 25 bp, Homo sapien
tactgacctttgacctaccacttgg

SEQ ID NO: 4329316 - DNA, 25 bp, Homo sapien
cccctgaggctacaaaccgtgatgc

SEQ ID NO: 4329317 - DNA, 25 bp, Homo sapien
agcaagacaatacaccaccgggata

SEQ ID NO: 4329318 - DNA, 25 bp, Homo sapien
caagcccttgagatgcccagaggta

SEQ ID NO: 4329319 - DNA, 25 bp, Homo sapien
tgcttcactcgtcccctgccacttg

SEQ ID NO: 4329320 - DNA, 25 bp, Homo sapien
tctgcttcactcgtcccctgccact

SEQ ID NO: 4329321 - DNA, 25 bp, Homo sapien
cactctgcttcactcgtcccctgcc

SEQ ID NO: 4329322 - DNA, 25 bp, Homo sapien
cctccagcaatagtgggacaggagg

SEQ ID NO: 4329323 - DNA, 25 bp, Homo sapien
caaggccttaagtccagtaggccaa

SEQ ID NO: 4329324 - DNA, 25 bp, Homo sapien
tgtcagtcagacaggcaaggcctta

SEQ ID NO: 4329325 - DNA, 25 bp, Homo sapien
gggtattgaggacaatccacatata

SEQ ID NO: 4329326 - DNA, 25 bp, Homo sapien
tatataaggagatagaggctgtcag

SEQ ID NO: 4329327 - DNA, 25 bp, Homo sapien
ggtacaaagacttgcacaggggccc

SEQ ID NO: 4329328 - DNA, 25 bp, Homo sapien
gtacaaagacttgcacaggggcccc

SEQ ID NO: 4329329 - DNA, 25 bp, Homo sapien
aggtacaaagacttgcacaggggcc

SEQ ID NO: 4329330 - DNA, 25 bp, Homo sapien
ccttcagggagggcgtccgcacgat

SEQ ID NO: 4329331 - DNA, 25 bp, Homo sapien
gagggcaccagacgctggtagcgca

SEQ ID NO: 4329332 - DNA, 25 bp, Homo sapien
agtgccctcctcctcgtaagcaggg

SEQ ID NO: 4329333 - DNA, 25 bp, Homo sapien
tccggaggcgtgcacgctcgtgcca

SEQ ID NO: 4329334 - DNA, 25 bp, Homo sapien
gggtggtgggcgaccagctctctgc

SEQ ID NO: 4329335 - DNA, 25 bp, Homo sapien
ggggtggtgggcgaccagctctctg

SEQ ID NO: 4329336 - DNA, 25 bp, Homo sapien
ggtggtgggcgaccagctctctgct

SEQ ID NO: 4329337 - DNA, 25 bp, Homo sapien
taaatagtgacaaaggctccagcac

SEQ ID NO: 4329338 - DNA, 25 bp, Homo sapien
ggtatattgaccctgctttctaagt

SEQ ID NO: 4329339 - DNA, 25 bp, Homo sapien
ctagctatctgaccttggtgcaagt

SEQ ID NO: 4329340 - DNA, 25 bp, Homo sapien
gaaaaagagtccagaaacttatcca

SEQ ID NO: 4329341 - DNA, 25 bp, Homo sapien
ttttggtggtagctatcctaatgga

SEQ ID NO: 4329342 - DNA, 25 bp, Homo sapien
gaatgtaggtgtacaaataactcct

SEQ ID NO: 4329343 - DNA, 25 bp, Homo sapien
catgttgttattggccacttgagtg

SEQ ID NO: 4329344 - DNA, 25 bp, Homo sapien
caccctcaccgaaacaatgatattt

SEQ ID NO: 4329345 - DNA, 25 bp, Homo sapien
tttctgggtgatcatactctaagta

SEQ ID NO: 4329346 - DNA, 25 bp, Homo sapien
ttctgggtgatcatactctaagtag

SEQ ID NO: 4329347 - DNA, 25 bp, Homo sapien
gccttaagaatttctgtagccatat

SEQ ID NO: 4329348 - DNA, 25 bp, Homo sapien
tctgggtgatcatactctaagtagc

SEQ ID NO: 4329349 - DNA, 25 bp, Homo sapien
tccttatcacttgctttaataacat

SEQ ID NO: 4329350 - DNA, 25 bp, Homo sapien
taatctgtttagaacttgtaatctg

SEQ ID NO: 4329351 - DNA, 25 bp, Homo sapien
ctgtttaatctgtttagaacttgta

SEQ ID NO: 4329352 - DNA, 25 bp, Homo sapien
cttgtaatctgatcaattatggtca

SEQ ID NO: 4329353 - DNA, 25 bp, Homo sapien
tctgtttagaacttgtaatctgatc

SEQ ID NO: 4329354 - DNA, 25 bp, Homo sapien
ttggacatagccttttagtattcca

SEQ ID NO: 4329355 - DNA, 25 bp, Homo sapien
gacatagccttttagtattccatac

SEQ ID NO: 4329356 - DNA, 25 bp, Homo sapien
tatgtctgcttcgccttggacatag

SEQ ID NO: 4329357 - DNA, 25 bp, Homo sapien
tctgcttcgccttggacatagcctt

SEQ ID NO: 4329358 - DNA, 25 bp, Homo sapien
tttgcagcaactttggtgctatgag

SEQ ID NO: 4329359 - DNA, 25 bp, Homo sapien
tattatttgcagcaactttggtgct

SEQ ID NO: 4329360 - DNA, 25 bp, Homo sapien
tatttgcagcaactttggtgctatg

SEQ ID NO: 4329361 - DNA, 25 bp, Homo sapien
ttttatctattatttgcagcaactt

SEQ ID NO: 4329362 - DNA, 25 bp, Homo sapien
caataagctttccaggggaagagac

SEQ ID NO: 4329363 - DNA, 25 bp, Homo sapien
tcttctacaataagctttccagggg

SEQ ID NO: 4329364 - DNA, 25 bp, Homo sapien
tctacaataagctttccaggggaag

SEQ ID NO: 4329365 - DNA, 25 bp, Homo sapien
tacaataagctttccaggggaagag

SEQ ID NO: 4329366 - DNA, 25 bp, Homo sapien
tgcgtagtatacgaaaaaattgaac

SEQ ID NO: 4329367 - DNA, 25 bp, Homo sapien
gtaagatgccaattaatgtaattgc

SEQ ID NO: 4329368 - DNA, 25 bp, Homo sapien
tgctaactcgaatatgttccaggca

SEQ ID NO: 4329369 - DNA, 25 bp, Homo sapien
caataagtattacatgtaagatgcc

SEQ ID NO: 4329370 - DNA, 25 bp, Homo sapien
gtagtgcctctagaatataaagtgt

SEQ ID NO: 4329371 - DNA, 25 bp, Homo sapien
tgtatggcatatacgaaaaaagaag

SEQ ID NO: 4329372 - DNA, 25 bp, Homo sapien
taactgggatatccaagagattata

SEQ ID NO: 4329373 - DNA, 25 bp, Homo sapien
tcacaaggtatccaacatgttcaaa

SEQ ID NO: 4329374 - DNA, 25 bp, Homo sapien
tacttatcaacagctgcagagcctt

SEQ ID NO: 4329375 - DNA, 25 bp, Homo sapien
agctgcagagccttctttaataatt

SEQ ID NO: 4329376 - DNA, 25 bp, Homo sapien
tcaacagctgcagagccttctttaa

SEQ ID NO: 4329377 - DNA, 25 bp, Homo sapien
ctacttatcaacagctgcagagcct

SEQ ID NO: 4329378 - DNA, 25 bp, Homo sapien
tggtattatacacccaattaagtag

SEQ ID NO: 4329379 - DNA, 25 bp, Homo sapien
tcctttctggtattatacacccaat

SEQ ID NO: 4329380 - DNA, 25 bp, Homo sapien
ttctggtattatacacccaattaag

SEQ ID NO: 4329381 - DNA, 25 bp, Homo sapien
tttcctttctggtattatacaccca

SEQ ID NO: 4329382 - DNA, 25 bp, Homo sapien
ttcttctcaccaaaactttctgctg

SEQ ID NO: 4329383 - DNA, 25 bp, Homo sapien
actttctgctgcaccaaccaacacc

SEQ ID NO: 4329384 - DNA, 25 bp, Homo sapien
tggacagcactctgggacagaatct

SEQ ID NO: 4329385 - DNA, 25 bp, Homo sapien
agcactctgggacagaatctcattc

SEQ ID NO: 4329386 - DNA, 25 bp, Homo sapien
cattgcttcagtgttaaagatctca

SEQ ID NO: 4329387 - DNA, 25 bp, Homo sapien
tctcatctatttccttgttacagtg

SEQ ID NO: 4329388 - DNA, 25 bp, Homo sapien
tggccagctccattgcttcagtgtt

SEQ ID NO: 4329389 - DNA, 25 bp, Homo sapien
tctatttccttgttacagtgtggac

SEQ ID NO: 4329390 - DNA, 25 bp, Homo sapien
aagtgttgaaatgtgcaacaaaccg

SEQ ID NO: 4329391 - DNA, 25 bp, Homo sapien
tttctcaatcatgttccaatcagca

SEQ ID NO: 4329392 - DNA, 25 bp, Homo sapien
cagcattagcaagatctttgtcaaa

SEQ ID NO: 4329393 - DNA, 25 bp, Homo sapien
gttccaatcagcattagcaagatct

SEQ ID NO: 4329394 - DNA, 25 bp, Homo sapien
ggcatactaacactccatgaaataa

SEQ ID NO: 4329395 - DNA, 25 bp, Homo sapien
taaatctattgacaacaagggttat

SEQ ID NO: 4329396 - DNA, 25 bp, Homo sapien
caacaagggttattaggcatactaa

SEQ ID NO: 4329397 - DNA, 25 bp, Homo sapien
tagtatagtaactgccactggcaaa

SEQ ID NO: 4329398 - DNA, 25 bp, Homo sapien
caccaaggttgttaaccaggaagct

SEQ ID NO: 4329399 - DNA, 25 bp, Homo sapien
agagactagaggcagcaccaaggtt

SEQ ID NO: 4329400 - DNA, 25 bp, Homo sapien
cagcaccaaggttgttaaccaggaa

SEQ ID NO: 4329401 - DNA, 25 bp, Homo sapien
gcagcaccaaggttgttaaccagga

SEQ ID NO: 4329402 - DNA, 25 bp, Homo sapien
catgaccaactcgagacaaaacagg

SEQ ID NO: 4329403 - DNA, 25 bp, Homo sapien
tatccagcgccaactgaactcatga

SEQ ID NO: 4329404 - DNA, 25 bp, Homo sapien
tcagagtaggcaagcagaagggcca

SEQ ID NO: 4329405 - DNA, 25 bp, Homo sapien
tacagaccattatgaatatccagcg

SEQ ID NO: 4329406 - DNA, 25 bp, Homo sapien
gaaaagcaatacgtgatagaaaagt

SEQ ID NO: 4329407 - DNA, 25 bp, Homo sapien
tgagaaaagcaatacgtgatagaaa

SEQ ID NO: 4329408 - DNA, 25 bp, Homo sapien
gagaaaagcaatacgtgatagaaaa

SEQ ID NO: 4329409 - DNA, 25 bp, Homo sapien
agaagtcccacaatggccagagtaa

SEQ ID NO: 4329410 - DNA, 25 bp, Homo sapien
aagtcccacaatggccagagtaaat

SEQ ID NO: 4329411 - DNA, 25 bp, Homo sapien
gtcccacaatggccagagtaaatat

SEQ ID NO: 4329412 - DNA, 25 bp, Homo sapien
gaagtcccacaatggccagagtaaa

SEQ ID NO: 4329413 - DNA, 25 bp, Homo sapien
gcactgcttcgcataccccattgag

SEQ ID NO: 4329414 - DNA, 25 bp, Homo sapien
taaagcctactatgggcatctttgc

SEQ ID NO: 4329415 - DNA, 25 bp, Homo sapien
tgaggctagagcacactttagaggt

SEQ ID NO: 4329416 - DNA, 25 bp, Homo sapien
cagctgatgatttcgtgaacttgcc

SEQ ID NO: 4329417 - DNA, 25 bp, Homo sapien
gacttatatgattgacatcatcacc

SEQ ID NO: 4329418 - DNA, 25 bp, Homo sapien
tgaaaagatgagacttatatgattg

SEQ ID NO: 4329419 - DNA, 25 bp, Homo sapien
taaaagatgagatacagaattgaaa

SEQ ID NO: 4329420 - DNA, 25 bp, Homo sapien
gatgagacttatatgattgacatca

SEQ ID NO: 4329421 - DNA, 25 bp, Homo sapien
caaattccacccacgatctcttcag

SEQ ID NO: 4329422 - DNA, 25 bp, Homo sapien
aacaaattccacccacgatctcttc

SEQ ID NO: 4329423 - DNA, 25 bp, Homo sapien
acaaattccacccacgatctcttca

SEQ ID NO: 4329424 - DNA, 25 bp, Homo sapien
gaacaaattccacccacgatctctt

SEQ ID NO: 4329425 - DNA, 25 bp, Homo sapien
tccataatactagtaaatgtaatta

SEQ ID NO: 4329426 - DNA, 25 bp, Homo sapien
caaaatccataatactagtaaatgt

SEQ ID NO: 4329427 - DNA, 25 bp, Homo sapien
tgatataacagaggtcatcagactt

SEQ ID NO: 4329428 - DNA, 25 bp, Homo sapien
ggtcaaaatccataatactagtaaa

SEQ ID NO: 4329429 - DNA, 25 bp, Homo sapien
caaggtctcttatagcagctgcggt

SEQ ID NO: 4329430 - DNA, 25 bp, Homo sapien
tctcttatagcagctgcggttagca

SEQ ID NO: 4329431 - DNA, 25 bp, Homo sapien
cttatagcagctgcggttagcatgg

SEQ ID NO: 4329432 - DNA, 25 bp, Homo sapien
tagcagctgcggttagcatgggatc

SEQ ID NO: 4329433 - DNA, 25 bp, Homo sapien
tgccagatgccaaagaactaagata

SEQ ID NO: 4329434 - DNA, 25 bp, Homo sapien
ccattgggtaggcttcaaaagtaat

SEQ ID NO: 4329435 - DNA, 25 bp, Homo sapien
acagatgccagatgccaaagaacta

SEQ ID NO: 4329436 - DNA, 25 bp, Homo sapien
tgaaaataataaccattgggtaggc

SEQ ID NO: 4329437 - DNA, 25 bp, Homo sapien
tgtatggcgtttgcgtatctttgga

SEQ ID NO: 4329438 - DNA, 25 bp, Homo sapien
tctggactcatccattgtatggcgt

SEQ ID NO: 4329439 - DNA, 25 bp, Homo sapien
gaaaactactggtgtaaatatacga

SEQ ID NO: 4329440 - DNA, 25 bp, Homo sapien
tgtacgtatccatgtcaaatgcagt

SEQ ID NO: 4329441 - DNA, 25 bp, Homo sapien
gaagatgtaaagcttaatacttcaa

SEQ ID NO: 4329442 - DNA, 25 bp, Homo sapien
aagatgtaaagcttaatacttcaaa

SEQ ID NO: 4329443 - DNA, 25 bp, Homo sapien
acttcaaaactgcatccaagtaaaa

SEQ ID NO: 4329444 - DNA, 25 bp, Homo sapien
atacttcaaaactgcatccaagtaa

SEQ ID NO: 4329445 - DNA, 25 bp, Homo sapien
aatctccatatgatcatccatcttg

SEQ ID NO: 4329446 - DNA, 25 bp, Homo sapien
aatgacttcagggaggtcctcagta

SEQ ID NO: 4329447 - DNA, 25 bp, Homo sapien
tcaaagacaatgttagaatgacttc

SEQ ID NO: 4329448 - DNA, 25 bp, Homo sapien
gatttatgttagaagcaatctccat

SEQ ID NO: 4329449 - DNA, 25 bp, Homo sapien
ttgccttcttggtggccttctaata

SEQ ID NO: 4329450 - DNA, 25 bp, Homo sapien
cttcttggtggccttctaataattt

SEQ ID NO: 4329451 - DNA, 25 bp, Homo sapien
ctaagaaacataagatttgccttct

SEQ ID NO: 4329452 - DNA, 25 bp, Homo sapien
taagaaacataagatttgccttctt

SEQ ID NO: 4329453 - DNA, 25 bp, Homo sapien
cctcaggaggagtatcccgtggtgt

SEQ ID NO: 4329454 - DNA, 25 bp, Homo sapien
gggcagctatttcgctcacagccaa

SEQ ID NO: 4329455 - DNA, 25 bp, Homo sapien
tagtctgcaccggttagcttcaggc

SEQ ID NO: 4329456 - DNA, 25 bp, Homo sapien
agaccaactgcaacctcactgacag

SEQ ID NO: 4329457 - DNA, 25 bp, Homo sapien
ttgattggctgatgaaatgcaacgt

SEQ ID NO: 4329458 - DNA, 25 bp, Homo sapien
tgattggctgatgaaatgcaacgtc

SEQ ID NO: 4329459 - DNA, 25 bp, Homo sapien
gattggctgatgaaatgcaacgtca

SEQ ID NO: 4329460 - DNA, 25 bp, Homo sapien
attggctgatgaaatgcaacgtcat

SEQ ID NO: 4329461 - DNA, 25 bp, Homo sapien
gaagcctctggcagtccatcaaaat

SEQ ID NO: 4329462 - DNA, 25 bp, Homo sapien
taacaccagtgactttcattccgag

SEQ ID NO: 4329463 - DNA, 25 bp, Homo sapien
tatgaaaagctgataaggttcctgg

SEQ ID NO: 4329464 - DNA, 25 bp, Homo sapien
tccgagtaagctgatctcagtgcct

SEQ ID NO: 4329465 - DNA, 25 bp, Homo sapien
tcagaatctccaatgtgtcaaacac

SEQ ID NO: 4329466 - DNA, 25 bp, Homo sapien
ggtatgagactagtccttccaagag

SEQ ID NO: 4329467 - DNA, 25 bp, Homo sapien
cctcgaagtcatctgtttatatctg

SEQ ID NO: 4329468 - DNA, 25 bp, Homo sapien
aagtcaatttgaattcctcgaagtc

SEQ ID NO: 4329469 - DNA, 25 bp, Homo sapien
cagctgctggcgtccagattctcca

SEQ ID NO: 4329470 - DNA, 25 bp, Homo sapien
ttgatccgcgctgacgaagctggcg

SEQ ID NO: 4329471 - DNA, 25 bp, Homo sapien
ctcttgctgagaaacggattttgcc

SEQ ID NO: 4329472 - DNA, 25 bp, Homo sapien
gattctccattccaattgcctgaaa

SEQ ID NO: 4329473 - DNA, 25 bp, Homo sapien
ggctcggctcactggctccagctcc

SEQ ID NO: 4329474 - DNA, 25 bp, Homo sapien
cctccgggcaggctcggctcggctc

SEQ ID NO: 4329475 - DNA, 25 bp, Homo sapien
cggctcactggctccagctcccaaa

SEQ ID NO: 4329476 - DNA, 25 bp, Homo sapien
tcggctcactggctccagctcccaa

SEQ ID NO: 4329477 - DNA, 25 bp, Homo sapien
caagatctggaagctgtggcatggc

SEQ ID NO: 4329478 - DNA, 25 bp, Homo sapien
caggctcataaaagtaagaccttac

SEQ ID NO: 4329479 - DNA, 25 bp, Homo sapien
gaatggctcaagcaaaaataccaag

SEQ ID NO: 4329480 - DNA, 25 bp, Homo sapien
aaagcagatgggtgtgttcagacaa

SEQ ID NO: 4329481 - DNA, 25 bp, Homo sapien
gagagagatctacatacatataaag

SEQ ID NO: 4329482 - DNA, 25 bp, Homo sapien
gacatggacttaccttgtcacccag

SEQ ID NO: 4329483 - DNA, 25 bp, Homo sapien
gagtcttctactttgacttgccaaa

SEQ ID NO: 4329484 - DNA, 25 bp, Homo sapien
gtacatgacgctacggctggctaat

SEQ ID NO: 4329485 - DNA, 25 bp, Homo sapien
taattatcttgtgggctccaaagcc

SEQ ID NO: 4329486 - DNA, 25 bp, Homo sapien
catgcgtctaattcactggtccagc

SEQ ID NO: 4329487 - DNA, 25 bp, Homo sapien
aaaactgccctagtgcctctgatag

SEQ ID NO: 4329488 - DNA, 25 bp, Homo sapien
tacaggacacatgtatggcagtgct

SEQ ID NO: 4329489 - DNA, 25 bp, Homo sapien
tagacgaccattacttttcttgtga

SEQ ID NO: 4329490 - DNA, 25 bp, Homo sapien
tttttccaactgcgaagtagcacag

SEQ ID NO: 4329491 - DNA, 25 bp, Homo sapien
gatcctgtataatgccagagagcat

SEQ ID NO: 4329492 - DNA, 25 bp, Homo sapien
tgatgttatttttacgtagaagtta

SEQ ID NO: 4329493 - DNA, 25 bp, Homo sapien
aaacgtcatttcctggataacagca

SEQ ID NO: 4329494 - DNA, 25 bp, Homo sapien
aagaaacttcactttgaggcagatc

SEQ ID NO: 4329495 - DNA, 25 bp, Homo sapien
gagtcaaggctgctttggagaacaa

SEQ ID NO: 4329496 - DNA, 25 bp, Homo sapien
gaggcagatcatcatagacaatcac

SEQ ID NO: 4329497 - DNA, 25 bp, Homo sapien
taagcatcccgtaaacacaagttca

SEQ ID NO: 4329498 - DNA, 25 bp, Homo sapien
tcatagaggaagcaattctgacttc

SEQ ID NO: 4329499 - DNA, 25 bp, Homo sapien
ctttgtcttcgtcataagcatcccg

SEQ ID NO: 4329500 - DNA, 25 bp, Homo sapien
cttttcatagaggaagcaattctga

SEQ ID NO: 4329501 - DNA, 25 bp, Homo sapien
catgaaataagaaactgaatgtgat

SEQ ID NO: 4329502 - DNA, 25 bp, Homo sapien
gaagttattactccttatctaactg

SEQ ID NO: 4329503 - DNA, 25 bp, Homo sapien
ttttcatcttaaccaaggccacatg

SEQ ID NO: 4329504 - DNA, 25 bp, Homo sapien
cttaacatgtgcattgcctcacata

SEQ ID NO: 4329505 - DNA, 25 bp, Homo sapien
ttgtagatccaaagctgccctaggt

SEQ ID NO: 4329506 - DNA, 25 bp, Homo sapien
tcctgtccttaccacaacttggctg

SEQ ID NO: 4329507 - DNA, 25 bp, Homo sapien
aattactcactgaagctagtgcgag

SEQ ID NO: 4329508 - DNA, 25 bp, Homo sapien
cgcatgtcaggaagagcggctacct

SEQ ID NO: 4329509 - DNA, 25 bp, Homo sapien
agaatcacattctctacaagtgtcc

SEQ ID NO: 4329510 - DNA, 25 bp, Homo sapien
gaatcacattctctacaagtgtcct

SEQ ID NO: 4329511 - DNA, 25 bp, Homo sapien
tgttagtcactttacctcatccaaa

SEQ ID NO: 4329512 - DNA, 25 bp, Homo sapien
actgagctcacagactgacttgggc

SEQ ID NO: 4329513 - DNA, 25 bp, Homo sapien
tgagctcacagactgacttgggctc

SEQ ID NO: 4329514 - DNA, 25 bp, Homo sapien
caaagggggaagaattgaaagagag

SEQ ID NO: 4329515 - DNA, 25 bp, Homo sapien
ttctgttgatgttacatctcttctt

SEQ ID NO: 4329516 - DNA, 25 bp, Homo sapien
taggtctatgagtctgtttccccat

SEQ ID NO: 4329517 - DNA, 25 bp, Homo sapien
tcctatgttcttaggtctatgagtc

SEQ ID NO: 4329518 - DNA, 25 bp, Homo sapien
tcttaggtctatgagtctgtttccc

SEQ ID NO: 4329519 - DNA, 25 bp, Homo sapien
cagttcctgcttactgctttgctaa

SEQ ID NO: 4329520 - DNA, 25 bp, Homo sapien
catgtgcttctatgagatttactcc

SEQ ID NO: 4329521 - DNA, 25 bp, Homo sapien
gctggccttgctagaatccttggtt

SEQ ID NO: 4329522 - DNA, 25 bp, Homo sapien
catttggtatctagtccagttcctg

SEQ ID NO: 4329523 - DNA, 25 bp, Homo sapien
gactcaatccaagcaaaccaacatt

SEQ ID NO: 4329524 - DNA, 25 bp, Homo sapien
gaggtgagtgactttgctcggcctt

SEQ ID NO: 4329525 - DNA, 25 bp, Homo sapien
cacagttgctcaggctaataattca

SEQ ID NO: 4329526 - DNA, 25 bp, Homo sapien
tgtgaggtcctgaaggtaattaacc

SEQ ID NO: 4329527 - DNA, 25 bp, Homo sapien
cttatgtgaggttcagtgttcccat

SEQ ID NO: 4329528 - DNA, 25 bp, Homo sapien
ttatgtgaggttcagtgttcccatc

SEQ ID NO: 4329529 - DNA, 25 bp, Homo sapien
catttaggaccacaggacttcaggc

SEQ ID NO: 4329530 - DNA, 25 bp, Homo sapien
catccatttgggcacagggttcact

SEQ ID NO: 4329531 - DNA, 25 bp, Homo sapien
cagctggaaatctctcagtgttcag

SEQ ID NO: 4329532 - DNA, 25 bp, Homo sapien
gccatcttgtggctgaacccttctc

SEQ ID NO: 4329533 - DNA, 25 bp, Homo sapien
gctaatgtgctccacgatgctttcc

SEQ ID NO: 4329534 - DNA, 25 bp, Homo sapien
gaaagcctgctaatgtgctccacga

SEQ ID NO: 4329535 - DNA, 25 bp, Homo sapien
tggagaaagcctgctaatgtgctcc

SEQ ID NO: 4329536 - DNA, 25 bp, Homo sapien
gtgctccacgatgctttcctttttc

SEQ ID NO: 4329537 - DNA, 25 bp, Homo sapien
agaggaactggcagtctctggaaag

SEQ ID NO: 4329538 - DNA, 25 bp, Homo sapien
tgcccttcagaacccaaggcagagg

SEQ ID NO: 4329539 - DNA, 25 bp, Homo sapien
gtcatccaaaggcacagcttcactg

SEQ ID NO: 4329540 - DNA, 25 bp, Homo sapien
tctggaaagctcacaatgcagtcat

SEQ ID NO: 4329541 - DNA, 25 bp, Homo sapien
catggtttcggtgtggtatctataa

SEQ ID NO: 4329542 - DNA, 25 bp, Homo sapien
taataaacattcatggccccaaaca

SEQ ID NO: 4329543 - DNA, 25 bp, Homo sapien
caaagtcacctagataggagatggc

SEQ ID NO: 4329544 - DNA, 25 bp, Homo sapien
tagtggcctcgacagagcagaaacc

SEQ ID NO: 4329545 - DNA, 25 bp, Homo sapien
gcataaggtggagaataaatgtttc

SEQ ID NO: 4329546 - DNA, 25 bp, Homo sapien
caaaagtagtggcatggcataaggt

SEQ ID NO: 4329547 - DNA, 25 bp, Homo sapien
tgcattctcagtgtcccaagctcat

SEQ ID NO: 4329548 - DNA, 25 bp, Homo sapien
aaataaatgtacctcaataggtcca

SEQ ID NO: 4329549 - DNA, 25 bp, Homo sapien
gaaggaaattcacagggttaatcac

SEQ ID NO: 4329550 - DNA, 25 bp, Homo sapien
cagggttaatcactcagttaagatg

SEQ ID NO: 4329551 - DNA, 25 bp, Homo sapien
cacagggttaatcactcagttaaga

SEQ ID NO: 4329552 - DNA, 25 bp, Homo sapien
gggttaatcactcagttaagatggg

SEQ ID NO: 4329553 - DNA, 25 bp, Homo sapien
ccagacaggggagatagtttccaaa

SEQ ID NO: 4329554 - DNA, 25 bp, Homo sapien
gggagatagtttccaaacaagtgga

SEQ ID NO: 4329555 - DNA, 25 bp, Homo sapien
agacaacaagagacttcagaagggg

SEQ ID NO: 4329556 - DNA, 25 bp, Homo sapien
gacaggggagatagtttccaaacaa

SEQ ID NO: 4329557 - DNA, 25 bp, Homo sapien
catctgggcatatacgtgcaagtca

SEQ ID NO: 4329558 - DNA, 25 bp, Homo sapien
tcaaagagggtttgttctctggcag

SEQ ID NO: 4329559 - DNA, 25 bp, Homo sapien
gggcagagcatattcacttcttttg

SEQ ID NO: 4329560 - DNA, 25 bp, Homo sapien
gcaggcaggagtgggggttgcaagg

SEQ ID NO: 4329561 - DNA, 25 bp, Homo sapien
cgagcgggattaggggcggcgtggg

SEQ ID NO: 4329562 - DNA, 25 bp, Homo sapien
tgcttcgagcgggattaggggcggc

SEQ ID NO: 4329563 - DNA, 25 bp, Homo sapien
ggctgcttcgagcgggattaggggc

SEQ ID NO: 4329564 - DNA, 25 bp, Homo sapien
cttcgagcgggattaggggcggcgt

SEQ ID NO: 4329565 - DNA, 25 bp, Homo sapien
tggcagggagagcacgtatgttttt

SEQ ID NO: 4329566 - DNA, 25 bp, Homo sapien
agatcagtcggacacgattggcagg

SEQ ID NO: 4329567 - DNA, 25 bp, Homo sapien
gagactcaacaaggagtgagtacag

SEQ ID NO: 4329568 - DNA, 25 bp, Homo sapien
cagaaaggctacagagtgtggtcct

SEQ ID NO: 4329569 - DNA, 25 bp, Homo sapien
tgatggtctagggggctcacgaggc

SEQ ID NO: 4329570 - DNA, 25 bp, Homo sapien
tctagggggctcacgaggcgatcgg

SEQ ID NO: 4329571 - DNA, 25 bp, Homo sapien
cttcagccactaagccgagaagatc

SEQ ID NO: 4329572 - DNA, 25 bp, Homo sapien
ttcagccactaagccgagaagatct

SEQ ID NO: 4329573 - DNA, 25 bp, Homo sapien
cccacacagatgggacgcggcttag

SEQ ID NO: 4329574 - DNA, 25 bp, Homo sapien
atgggacgcggcttaggaggaatcc

SEQ ID NO: 4329575 - DNA, 25 bp, Homo sapien
gatgggacgcggcttaggaggaatc

SEQ ID NO: 4329576 - DNA, 25 bp, Homo sapien
ggtcccacacagatgggacgcggct

SEQ ID NO: 4329577 - DNA, 25 bp, Homo sapien
caaatttcatgcgcgtctgtgtgaa

SEQ ID NO: 4329578 - DNA, 25 bp, Homo sapien
atgtttcttgggctggtcgatctca

SEQ ID NO: 4329579 - DNA, 25 bp, Homo sapien
ttcttgggctggtcgatctcaggac

SEQ ID NO: 4329580 - DNA, 25 bp, Homo sapien
tttcttgggctggtcgatctcagga

SEQ ID NO: 4329581 - DNA, 25 bp, Homo sapien
cattctcttctagcatatatgaaaa

SEQ ID NO: 4329582 - DNA, 25 bp, Homo sapien
agaatcacattctcttctagcatat

SEQ ID NO: 4329583 - DNA, 25 bp, Homo sapien
atcacattctcttctagcatatatg

SEQ ID NO: 4329584 - DNA, 25 bp, Homo sapien
cacattctcttctagcatatatgaa

SEQ ID NO: 4329585 - DNA, 25 bp, Homo sapien
ttttcagacgtaaggaattcatttc

SEQ ID NO: 4329586 - DNA, 25 bp, Homo sapien
gggttaggtttgtgagaacataagc

SEQ ID NO: 4329587 - DNA, 25 bp, Homo sapien
taacccacacttgataccttgaatc

SEQ ID NO: 4329588 - DNA, 25 bp, Homo sapien
acaggcataacccacacttgatacc

SEQ ID NO: 4329589 - DNA, 25 bp, Homo sapien
gcagttagtcaatctgtgggccagc

SEQ ID NO: 4329590 - DNA, 25 bp, Homo sapien
catagaaagccctaaagcataggtc

SEQ ID NO: 4329591 - DNA, 25 bp, Homo sapien
agtttaaagaacaacgcagtctgtc

SEQ ID NO: 4329592 - DNA, 25 bp, Homo sapien
gggccagctccactattacttggaa

SEQ ID NO: 4329593 - DNA, 25 bp, Homo sapien
gcagagcttctcacccttttaacca

SEQ ID NO: 4329594 - DNA, 25 bp, Homo sapien
cttgcaggcttctccttacagaaag

SEQ ID NO: 4329595 - DNA, 25 bp, Homo sapien
gaaagaacgtcttgcatcaaaggca

SEQ ID NO: 4329596 - DNA, 25 bp, Homo sapien
tataaggtcctcctatgatctgccc

SEQ ID NO: 4329597 - DNA, 25 bp, Homo sapien
cctctataaactaatgaaataagcc

SEQ ID NO: 4329598 - DNA, 25 bp, Homo sapien
gatttgtgattttggcaaacagtac

SEQ ID NO: 4329599 - DNA, 25 bp, Homo sapien
cattgagcacaatcacaagcttaaa

SEQ ID NO: 4329600 - DNA, 25 bp, Homo sapien
tgtctctgacaccattttgaaaagg

SEQ ID NO: 4329601 - DNA, 25 bp, Homo sapien
aatgtgctatacgttgactgctcca

SEQ ID NO: 4329602 - DNA, 25 bp, Homo sapien
caatagcttcaaaggcaagatcgag

SEQ ID NO: 4329603 - DNA, 25 bp, Homo sapien
gaactgatgcaggtaacacaaacct

SEQ ID NO: 4329604 - DNA, 25 bp, Homo sapien
gaacatctaccctatatccaattgg

SEQ ID NO: 4329605 - DNA, 25 bp, Homo sapien
atggtccctgttggagtcagaaaca

SEQ ID NO: 4329606 - DNA, 25 bp, Homo sapien
tgacatcctgttgagcccagacaat

SEQ ID NO: 4329607 - DNA, 25 bp, Homo sapien
caacatgctgatcattcaatggtcc

SEQ ID NO: 4329608 - DNA, 25 bp, Homo sapien
tatggacccttaagacccaagcact

SEQ ID NO: 4329609 - DNA, 25 bp, Homo sapien
ccaggcatggattagaataaacttc

SEQ ID NO: 4329610 - DNA, 25 bp, Homo sapien
caatgacagaatggttcagggaagc

SEQ ID NO: 4329611 - DNA, 25 bp, Homo sapien
tcttgccagtcttgagttcggtcca

SEQ ID NO: 4329612 - DNA, 25 bp, Homo sapien
gcatcctgaaacaaaggtcagggtc

SEQ ID NO: 4329613 - DNA, 25 bp, Homo sapien
caagataaaaagcatagcccaaatt

SEQ ID NO: 4329614 - DNA, 25 bp, Homo sapien
tactggtcacttttgaggtcacaga

SEQ ID NO: 4329615 - DNA, 25 bp, Homo sapien
aaaatatcctatgaaaacttcaggc

SEQ ID NO: 4329616 - DNA, 25 bp, Homo sapien
ggcttgagaatcactatgtcacccc

SEQ ID NO: 4329617 - DNA, 25 bp, Homo sapien
caggttaatttcccttcctgctgtg

SEQ ID NO: 4329618 - DNA, 25 bp, Homo sapien
cttcctgctgtgtcagagagttcat

SEQ ID NO: 4329619 - DNA, 25 bp, Homo sapien
tgtgtcagagagttcattttgcttt

SEQ ID NO: 4329620 - DNA, 25 bp, Homo sapien
tgctgtgtcagagagttcattttgc

SEQ ID NO: 4329621 - DNA, 25 bp, Homo sapien
cagctctctctctggttcatcactt

SEQ ID NO: 4329622 - DNA, 25 bp, Homo sapien
tctctctctggttcatcacttttca

SEQ ID NO: 4329623 - DNA, 25 bp, Homo sapien
tctctctggttcatcacttttcagt

SEQ ID NO: 4329624 - DNA, 25 bp, Homo sapien
gctctctctctggttcatcactttt

SEQ ID NO: 4329625 - DNA, 25 bp, Homo sapien
catttcgtccttggagggtcgttct

SEQ ID NO: 4329626 - DNA, 25 bp, Homo sapien
ccagggtctgcttgccatttcgtcc

SEQ ID NO: 4329627 - DNA, 25 bp, Homo sapien
aaacaggtagtgatgagtagaggca

SEQ ID NO: 4329628 - DNA, 25 bp, Homo sapien
gtaaacgatacaggagccagggtct

SEQ ID NO: 4329629 - DNA, 25 bp, Homo sapien
tctgggtctgttgcaactcaatgtg

SEQ ID NO: 4329630 - DNA, 25 bp, Homo sapien
ttgtgtgttgatcctgtatcatgtg

SEQ ID NO: 4329631 - DNA, 25 bp, Homo sapien
ggtctgttgcaactcaatgtgaatt

SEQ ID NO: 4329632 - DNA, 25 bp, Homo sapien
tgtgttgatcctgtatcatgtggaa

SEQ ID NO: 4329633 - DNA, 25 bp, Homo sapien
gacccattgtcattaggaagcactg

SEQ ID NO: 4329634 - DNA, 25 bp, Homo sapien
gcagaacagcggtatgacccattgt

SEQ ID NO: 4329635 - DNA, 25 bp, Homo sapien
caaagggatctcctgctaagatgga

SEQ ID NO: 4329636 - DNA, 25 bp, Homo sapien
ccaagtcacatgaggcctgttagca

SEQ ID NO: 4329637 - DNA, 25 bp, Homo sapien
tctggctgggtcaatcaggaaaggc

SEQ ID NO: 4329638 - DNA, 25 bp, Homo sapien
gaagacagtctttctggctgggtca

SEQ ID NO: 4329639 - DNA, 25 bp, Homo sapien
tcagagctttcagatccctcaagag

SEQ ID NO: 4329640 - DNA, 25 bp, Homo sapien
caattttgccattagatttttgttg

SEQ ID NO: 4329641 - DNA, 25 bp, Homo sapien
ttgacagtagcatcagtgagtgcct

SEQ ID NO: 4329642 - DNA, 25 bp, Homo sapien
gttgacagtagcatcagtgagtgcc

SEQ ID NO: 4329643 - DNA, 25 bp, Homo sapien
agtgagtgcctctggcatttgatca

SEQ ID NO: 4329644 - DNA, 25 bp, Homo sapien
ctggcatttgatcagaaaccaacat

SEQ ID NO: 4329645 - DNA, 25 bp, Homo sapien
atttcccagttccaagcatggcagg

SEQ ID NO: 4329646 - DNA, 25 bp, Homo sapien
tgttccagatgtccagatatgggat

SEQ ID NO: 4329647 - DNA, 25 bp, Homo sapien
agtgctgcagagttgggtcagttta

SEQ ID NO: 4329648 - DNA, 25 bp, Homo sapien
tgctgcagagttgggtcagtttacc

SEQ ID NO: 4329649 - DNA, 25 bp, Homo sapien
tgcagagttgggtcagtttacctac

SEQ ID NO: 4329650 - DNA, 25 bp, Homo sapien
ctgagtgctgcagagttgggtcagt

SEQ ID NO: 4329651 - DNA, 25 bp, Homo sapien
gagtaggaagagcctggatgatttt

SEQ ID NO: 4329652 - DNA, 25 bp, Homo sapien
gagagtaggaagagcctggatgatt

SEQ ID NO: 4329653 - DNA, 25 bp, Homo sapien
agagtaggaagagcctggatgattt

SEQ ID NO: 4329654 - DNA, 25 bp, Homo sapien
gttcaacaagcaagccactgtattt

SEQ ID NO: 4329655 - DNA, 25 bp, Homo sapien
agggcctatgcaaagttaatgttta

SEQ ID NO: 4329656 - DNA, 25 bp, Homo sapien
cccttggaaagcgatgtattaaaag

SEQ ID NO: 4329657 - DNA, 25 bp, Homo sapien
tatataagtgtggaagggagatgca

SEQ ID NO: 4329658 - DNA, 25 bp, Homo sapien
tgatggtggcagcagcatagttttt

SEQ ID NO: 4329659 - DNA, 25 bp, Homo sapien
atggtggcagcagcatagtttttaa

SEQ ID NO: 4329660 - DNA, 25 bp, Homo sapien
ttaaatctttccaaatactcacatc

SEQ ID NO: 4329661 - DNA, 25 bp, Homo sapien
ttttaaatctttccaaatactcaca

SEQ ID NO: 4329662 - DNA, 25 bp, Homo sapien
caggcataaatctgcatacaacaac

SEQ ID NO: 4329663 - DNA, 25 bp, Homo sapien
caacaggcataaatctgcatacaac

SEQ ID NO: 4329664 - DNA, 25 bp, Homo sapien
aacaggcataaatctgcatacaaca

SEQ ID NO: 4329665 - DNA, 25 bp, Homo sapien
ggcataaatctgcatacaacaactt

SEQ ID NO: 4329666 - DNA, 25 bp, Homo sapien
tccacagggcgctttgaatgtccct

SEQ ID NO: 4329667 - DNA, 25 bp, Homo sapien
cgcagcctccacagggcgctttgaa

SEQ ID NO: 4329668 - DNA, 25 bp, Homo sapien
gcgcagcctccacagggcgctttga

SEQ ID NO: 4329669 - DNA, 25 bp, Homo sapien
gcctccacagggcgctttgaatgtc

SEQ ID NO: 4329670 - DNA, 25 bp, Homo sapien
aactgaacagaatactatctaaata

SEQ ID NO: 4329671 - DNA, 25 bp, Homo sapien
aaactgaacagaatactatctaaat

SEQ ID NO: 4329672 - DNA, 25 bp, Homo sapien
ctctgctatgcgactgcatgtccac

SEQ ID NO: 4329673 - DNA, 25 bp, Homo sapien
tgactctgctatgcgactgcatgtc

SEQ ID NO: 4329674 - DNA, 25 bp, Homo sapien
atgactctgctatgcgactgcatgt

SEQ ID NO: 4329675 - DNA, 25 bp, Homo sapien
ttaagagatgactctgctatgcgac

SEQ ID NO: 4329676 - DNA, 25 bp, Homo sapien
gtgaaaccaatgtcagcccaggaga

SEQ ID NO: 4329677 - DNA, 25 bp, Homo sapien
aaaccaatgtcagcccaggagaggt

SEQ ID NO: 4329678 - DNA, 25 bp, Homo sapien
tgaaaccaatgtcagcccaggagag

SEQ ID NO: 4329679 - DNA, 25 bp, Homo sapien
ccaatgtcagcccaggagaggttgg

SEQ ID NO: 4329680 - DNA, 25 bp, Homo sapien
aggacgggctgcagttctggatcct

SEQ ID NO: 4329681 - DNA, 25 bp, Homo sapien
ggacagggacagcccagcgaggacg

SEQ ID NO: 4329682 - DNA, 25 bp, Homo sapien
acagggacagcccagcgaggacggg

SEQ ID NO: 4329683 - DNA, 25 bp, Homo sapien
agggacagcccagcgaggacgggct

SEQ ID NO: 4329684 - DNA, 25 bp, Homo sapien
taaattctagtattctaccaggcaa

SEQ ID NO: 4329685 - DNA, 25 bp, Homo sapien
tatgcatcctagagcagaaaacttg

SEQ ID NO: 4329686 - DNA, 25 bp, Homo sapien
agattagccattccactttgtgcag

SEQ ID NO: 4329687 - DNA, 25 bp, Homo sapien
ggcacacagtaagcgcttcataaat

SEQ ID NO: 4329688 - DNA, 25 bp, Homo sapien
cactgatttttattaaacaagtaag

SEQ ID NO: 4329689 - DNA, 25 bp, Homo sapien
gcactgatttttattaaacaagtaa

SEQ ID NO: 4329690 - DNA, 25 bp, Homo sapien
cacatctatgggttaattctttaaa

SEQ ID NO: 4329691 - DNA, 25 bp, Homo sapien
tattgatgaatatggtcaatggtca

SEQ ID NO: 4329692 - DNA, 25 bp, Homo sapien
ggtcaatggtcacatctatgggtta

SEQ ID NO: 4329693 - DNA, 25 bp, Homo sapien
accaataattaggatagattttatg

SEQ ID NO: 4329694 - DNA, 25 bp, Homo sapien
tattctattgttggaatgacagctt

SEQ ID NO: 4329695 - DNA, 25 bp, Homo sapien
tgtgtagtcatattctattgttgga

SEQ ID NO: 4329696 - DNA, 25 bp, Homo sapien
gaagtgtcttgtgtagtcatattct

SEQ ID NO: 4329697 - DNA, 25 bp, Homo sapien
tgtgaagtgtcttgtgtagtcatat

SEQ ID NO: 4329698 - DNA, 25 bp, Homo sapien
ccagttaggcataataggacttcag

SEQ ID NO: 4329699 - DNA, 25 bp, Homo sapien
tctgtaacaagggtgagctactgct

SEQ ID NO: 4329700 - DNA, 25 bp, Homo sapien
taacacatagtagccgaaaccacca

SEQ ID NO: 4329701 - DNA, 25 bp, Homo sapien
tagggacacactttattagcaatgc

SEQ ID NO: 4329702 - DNA, 25 bp, Homo sapien
aacagccattttgccactaatctta

SEQ ID NO: 4329703 - DNA, 25 bp, Homo sapien
aaaatcgttaacagccattttgcca

SEQ ID NO: 4329704 - DNA, 25 bp, Homo sapien
cattaaggttacactaaatttctca

SEQ ID NO: 4329705 - DNA, 25 bp, Homo sapien
ctactgtatcattaaggttacacta

SEQ ID NO: 4329706 - DNA, 25 bp, Homo sapien
ctccttctgcaacagtctcaatgat

SEQ ID NO: 4329707 - DNA, 25 bp, Homo sapien
ccttctgcaacagtctcaatgattt

SEQ ID NO: 4329708 - DNA, 25 bp, Homo sapien
tccttctgcaacagtctcaatgatt

SEQ ID NO: 4329709 - DNA, 25 bp, Homo sapien
aaaagacacatggtatcagttggac

SEQ ID NO: 4329710 - DNA, 25 bp, Homo sapien
tgccatgccaacagttttaccaggg

SEQ ID NO: 4329711 - DNA, 25 bp, Homo sapien
agctatggtagtcacagcagacacc

SEQ ID NO: 4329712 - DNA, 25 bp, Homo sapien
gaaatcgaccctattactctcagtg

SEQ ID NO: 4329713 - DNA, 25 bp, Homo sapien
aaggctgacaagctctcaactgaag

SEQ ID NO: 4329714 - DNA, 25 bp, Homo sapien
gatttggctctgtgaaaaaacactg

SEQ ID NO: 4329715 - DNA, 25 bp, Homo sapien
gcccatggaatggtctaaaatgtcc

SEQ ID NO: 4329716 - DNA, 25 bp, Homo sapien
tacctcagagagatacgcttcagtt

SEQ ID NO: 4329717 - DNA, 25 bp, Homo sapien
taaatccatgaaatatacaatcaca

SEQ ID NO: 4329718 - DNA, 25 bp, Homo sapien
tccatgaaatatacaatcacatcaa

SEQ ID NO: 4329719 - DNA, 25 bp, Homo sapien
ataaatccatgaaatatacaatcac

SEQ ID NO: 4329720 - DNA, 25 bp, Homo sapien
aatccatgaaatatacaatcacatc

SEQ ID NO: 4329721 - DNA, 25 bp, Homo sapien
tcttcacatgatcctgactgatgtc

SEQ ID NO: 4329722 - DNA, 25 bp, Homo sapien
tgctcaactgttaaaggctgccgtt

SEQ ID NO: 4329723 - DNA, 25 bp, Homo sapien
tggcagatgagggtgattttcaatg

SEQ ID NO: 4329724 - DNA, 25 bp, Homo sapien
catacatgtgctcaactgttaaagg

SEQ ID NO: 4329725 - DNA, 25 bp, Homo sapien
tgctttgaaattactatttaaggcc

SEQ ID NO: 4329726 - DNA, 25 bp, Homo sapien
taagtgatgtaaaggtcataagttc

SEQ ID NO: 4329727 - DNA, 25 bp, Homo sapien
tcgtggagtctggtaatatttatca

SEQ ID NO: 4329728 - DNA, 25 bp, Homo sapien
tagccaaacaaccataatcgtggag

SEQ ID NO: 4329729 - DNA, 25 bp, Homo sapien
aatagcatcttcaccgccagcatca

SEQ ID NO: 4329730 - DNA, 25 bp, Homo sapien
tttccaacaatccactctcttcata

SEQ ID NO: 4329731 - DNA, 25 bp, Homo sapien
tgtttccaacaatccactctcttca

SEQ ID NO: 4329732 - DNA, 25 bp, Homo sapien
atctgtttccaacaatccactctct

SEQ ID NO: 4329733 - DNA, 25 bp, Homo sapien
tctgtttccaacaatccactctctt

SEQ ID NO: 4329734 - DNA, 25 bp, Homo sapien
ggaacagacatagctaggtttcatg

SEQ ID NO: 4329735 - DNA, 25 bp, Homo sapien
aacagacatagctaggtttcatggg

SEQ ID NO: 4329736 - DNA, 25 bp, Homo sapien
tgaaaataaggacaagaatctcact

SEQ ID NO: 4329737 - DNA, 25 bp, Homo sapien
aaggaacagcagtttaccatgaaaa

SEQ ID NO: 4329738 - DNA, 25 bp, Homo sapien
tcttcacatagtgctgagcaatctt

SEQ ID NO: 4329739 - DNA, 25 bp, Homo sapien
tcacatagtgctgagcaatcttgaa

SEQ ID NO: 4329740 - DNA, 25 bp, Homo sapien
catagtgctgagcaatcttgaagcc

SEQ ID NO: 4329741 - DNA, 25 bp, Homo sapien
tagtgctgagcaatcttgaagcctt

SEQ ID NO: 4329742 - DNA, 25 bp, Homo sapien
taatacttctgcttggatggcaagt

SEQ ID NO: 4329743 - DNA, 25 bp, Homo sapien
gaattaccataagcccgtccaagaa

SEQ ID NO: 4329744 - DNA, 25 bp, Homo sapien
aacatctgggtatcgttttcacaaa

SEQ ID NO: 4329745 - DNA, 25 bp, Homo sapien
taaaagtaacgtgctaagtgctgtg

SEQ ID NO: 4329746 - DNA, 25 bp, Homo sapien
gtgatctctttaacggcttccgtta

SEQ ID NO: 4329747 - DNA, 25 bp, Homo sapien
ccagtgtgatctctttaacggcttc

SEQ ID NO: 4329748 - DNA, 25 bp, Homo sapien
agtgtgatctctttaacggcttccg

SEQ ID NO: 4329749 - DNA, 25 bp, Homo sapien
gtgtgatctctttaacggcttccgt

SEQ ID NO: 4329750 - DNA, 25 bp, Homo sapien
tgtgttgtgatatgtatctacccat

SEQ ID NO: 4329751 - DNA, 25 bp, Homo sapien
tgtttgcaccgcttatagcacggca

SEQ ID NO: 4329752 - DNA, 25 bp, Homo sapien
gatatgtatctacccatccgccatc

SEQ ID NO: 4329753 - DNA, 25 bp, Homo sapien
ccatctgtttgcaccgcttatagca

SEQ ID NO: 4329754 - DNA, 25 bp, Homo sapien
ttgcctgttggtaggtatgccttca

SEQ ID NO: 4329755 - DNA, 25 bp, Homo sapien
gtttgcctgttggtaggtatgcctt

SEQ ID NO: 4329756 - DNA, 25 bp, Homo sapien
tgcctgttggtaggtatgccttcac

SEQ ID NO: 4329757 - DNA, 25 bp, Homo sapien
gcctgttggtaggtatgccttcact

SEQ ID NO: 4329758 - DNA, 25 bp, Homo sapien
ttttaatcctaaagtactgctgctc

SEQ ID NO: 4329759 - DNA, 25 bp, Homo sapien
tttttaatcctaaagtactgctgct

SEQ ID NO: 4329760 - DNA, 25 bp, Homo sapien
ttaatcctaaagtactgctgctcat

SEQ ID NO: 4329761 - DNA, 25 bp, Homo sapien
tttaatcctaaagtactgctgctca

SEQ ID NO: 4329762 - DNA, 25 bp, Homo sapien
ctcttcttaagaatttgtgggtcat

SEQ ID NO: 4329763 - DNA, 25 bp, Homo sapien
gagaggtggagtggtatgtggtgcc

SEQ ID NO: 4329764 - DNA, 25 bp, Homo sapien
ccataaatttggagttcagctgtct

SEQ ID NO: 4329765 - DNA, 25 bp, Homo sapien
ttttcaagcttcagtctaaagttca

SEQ ID NO: 4329766 - DNA, 25 bp, Homo sapien
tcagtctaaagttcaaaccatagat

SEQ ID NO: 4329767 - DNA, 25 bp, Homo sapien
catgttggacagtggtggactaggt

SEQ ID NO: 4329768 - DNA, 25 bp, Homo sapien
tgccatgttggacagtggtggacta

SEQ ID NO: 4329769 - DNA, 25 bp, Homo sapien
ccatgttggacagtggtggactagg

SEQ ID NO: 4329770 - DNA, 25 bp, Homo sapien
gccatgttggacagtggtggactag

SEQ ID NO: 4329771 - DNA, 25 bp, Homo sapien
accgcgcagagttatgacgggagaa

SEQ ID NO: 4329772 - DNA, 25 bp, Homo sapien
cgacgtacccgaccgcgcagagtta

SEQ ID NO: 4329773 - DNA, 25 bp, Homo sapien
gcagagcgtcgctccaagtttaccc

SEQ ID NO: 4329774 - DNA, 25 bp, Homo sapien
aggaacacgcagagcgtcgctccaa

SEQ ID NO: 4329775 - DNA, 25 bp, Homo sapien
accggggtcaggtactcagccactt

SEQ ID NO: 4329776 - DNA, 25 bp, Homo sapien
cttgaggaccggggtcaggtactca

SEQ ID NO: 4329777 - DNA, 25 bp, Homo sapien
gtcaggtactcagccacttccagtg

SEQ ID NO: 4329778 - DNA, 25 bp, Homo sapien
aggaccggggtcaggtactcagcca

SEQ ID NO: 4329779 - DNA, 25 bp, Homo sapien
gccccgcgacgggatggaaagtgca

SEQ ID NO: 4329780 - DNA, 25 bp, Homo sapien
aagacggggtgcgcgatcctcgcac

SEQ ID NO: 4329781 - DNA, 25 bp, Homo sapien
tcagaaaatgtcctcgctgccaccg

SEQ ID NO: 4329782 - DNA, 25 bp, Homo sapien
gactcgcatcagcacccggctggca

SEQ ID NO: 4329783 - DNA, 25 bp, Homo sapien
ggcagcggggccgaagggagacctg

SEQ ID NO: 4329784 - DNA, 25 bp, Homo sapien
agggagacctgaggtgagaagcgga

SEQ ID NO: 4329785 - DNA, 25 bp, Homo sapien
gggccgaagggagacctgaggtgag

SEQ ID NO: 4329786 - DNA, 25 bp, Homo sapien
agctgtcacccagccgcgagggagg

SEQ ID NO: 4329787 - DNA, 25 bp, Homo sapien
ctccttccggaagcgtaacactgaa

SEQ ID NO: 4329788 - DNA, 25 bp, Homo sapien
gactctcccggcacgtgacgtgaga

SEQ ID NO: 4329789 - DNA, 25 bp, Homo sapien
gggcctcacgtgacactagactctc

SEQ ID NO: 4329790 - DNA, 25 bp, Homo sapien
cgcaatgggtgtcgggtccgctttt

SEQ ID NO: 4329791 - DNA, 25 bp, Homo sapien
tgactgtgaagggaaatctggcccc

SEQ ID NO: 4329792 - DNA, 25 bp, Homo sapien
ctcttctgagggaggtaaccgcgcc

SEQ ID NO: 4329793 - DNA, 25 bp, Homo sapien
gaagagccctactgcgcatgtgtga

SEQ ID NO: 4329794 - DNA, 25 bp, Homo sapien
tccacgtatggaccctaaaggctac

SEQ ID NO: 4329795 - DNA, 25 bp, Homo sapien
gatcggccgtgaaaggactgcaaga

SEQ ID NO: 4329796 - DNA, 25 bp, Homo sapien
catatggtctgggatcggccgtgaa

SEQ ID NO: 4329797 - DNA, 25 bp, Homo sapien
tcggccgtgaaaggactgcaagaaa

SEQ ID NO: 4329798 - DNA, 25 bp, Homo sapien
ccgtgaaaggactgcaagaaaacca

SEQ ID NO: 4329799 - DNA, 25 bp, Homo sapien
ctttcttacacctgttttaatgtag

SEQ ID NO: 4329800 - DNA, 25 bp, Homo sapien
agtcatttaaacaagccacggtggg

SEQ ID NO: 4329801 - DNA, 25 bp, Homo sapien
tttgcatgcagccagttaactctcg

SEQ ID NO: 4329802 - DNA, 25 bp, Homo sapien
tcagtgaagctgatgcctaggaact

SEQ ID NO: 4329803 - DNA, 25 bp, Homo sapien
taaacattggttccctagtcaccat

SEQ ID NO: 4329804 - DNA, 25 bp, Homo sapien
gatttttcccatgaacatctacctt

SEQ ID NO: 4329805 - DNA, 25 bp, Homo sapien
tatagacccaataggctcgattaaa

SEQ ID NO: 4329806 - DNA, 25 bp, Homo sapien
tgcttttctttatagacccaatagg

SEQ ID NO: 4329807 - DNA, 25 bp, Homo sapien
gctcgattaaataggccatatcctc

SEQ ID NO: 4329808 - DNA, 25 bp, Homo sapien
gtaccaccctatggctgtcaagata

SEQ ID NO: 4329809 - DNA, 25 bp, Homo sapien
aattccttcaagtaccaccctatgg

SEQ ID NO: 4329810 - DNA, 25 bp, Homo sapien
gctgtcaagataacagacttgttga

SEQ ID NO: 4329811 - DNA, 25 bp, Homo sapien
taacagacttgttgactttgcaaat

SEQ ID NO: 4329812 - DNA, 25 bp, Homo sapien
cttttcctgaccaatgtttgaatgc

SEQ ID NO: 4329813 - DNA, 25 bp, Homo sapien
ttcctgaccaatgtttgaatgccat

SEQ ID NO: 4329814 - DNA, 25 bp, Homo sapien
taatccctcttttcctgaccaatgt

SEQ ID NO: 4329815 - DNA, 25 bp, Homo sapien
ctaatccctcttttcctgaccaatg

SEQ ID NO: 4329816 - DNA, 25 bp, Homo sapien
taaaggcagagcataacgatgtcac

SEQ ID NO: 4329817 - DNA, 25 bp, Homo sapien
cacaggtaagtacatggcagggcaa

SEQ ID NO: 4329818 - DNA, 25 bp, Homo sapien
tagccggagctgatccttacatggg

SEQ ID NO: 4329819 - DNA, 25 bp, Homo sapien
tgatgaccccagagattatgacagt

SEQ ID NO: 4329820 - DNA, 25 bp, Homo sapien
cacagtttcagagatatgccttgta

SEQ ID NO: 4329821 - DNA, 25 bp, Homo sapien
gtgacaaccagcaatttcggcaaag

SEQ ID NO: 4329822 - DNA, 25 bp, Homo sapien
ccagaagacagagattcaggttagc

SEQ ID NO: 4329823 - DNA, 25 bp, Homo sapien
ttttggttgcaggagctagaaccct

SEQ ID NO: 4329824 - DNA, 25 bp, Homo sapien
agtgctccatcaaggaagagggatg

SEQ ID NO: 4329825 - DNA, 25 bp, Homo sapien
aaaagcagtacacttcgacgtggct

SEQ ID NO: 4329826 - DNA, 25 bp, Homo sapien
aactttgggctatgcttcatcctgg

SEQ ID NO: 4329827 - DNA, 25 bp, Homo sapien
tcaggcagcttgtacagactatcca

SEQ ID NO: 4329828 - DNA, 25 bp, Homo sapien
catgatgctaaatgcctatctgagg

SEQ ID NO: 4329829 - DNA, 25 bp, Homo sapien
aaatctgaacatacagtaggcacag

SEQ ID NO: 4329830 - DNA, 25 bp, Homo sapien
gccttcccattattgttagaggatg

SEQ ID NO: 4329831 - DNA, 25 bp, Homo sapien
taacagtggaaaatagccttcccat

SEQ ID NO: 4329832 - DNA, 25 bp, Homo sapien
caaccctgcatcaaggaagtctgtt

SEQ ID NO: 4329833 - DNA, 25 bp, Homo sapien
tgattgctccaacaaccaacctttc

SEQ ID NO: 4329834 - DNA, 25 bp, Homo sapien
tttcaagtgagaggaagttgcaatc

SEQ ID NO: 4329835 - DNA, 25 bp, Homo sapien
gctaagcctcttatgccaaacaacc

SEQ ID NO: 4329836 - DNA, 25 bp, Homo sapien
tccccaaatcctacgacttttcaga

SEQ ID NO: 4329837 - DNA, 25 bp, Homo sapien
aggccgaggccaaagtcagtagttc

SEQ ID NO: 4329838 - DNA, 25 bp, Homo sapien
cactttttgagtcttactgctcaga

SEQ ID NO: 4329839 - DNA, 25 bp, Homo sapien
aatgacagcatgtctatggacagca

SEQ ID NO: 4329840 - DNA, 25 bp, Homo sapien
gaagttgtactactggtaaaatgct

SEQ ID NO: 4329841 - DNA, 25 bp, Homo sapien
gaaaaagtcaatcgaagtggcaaac

SEQ ID NO: 4329842 - DNA, 25 bp, Homo sapien
gatggaatctactcgcgtaagttgc

SEQ ID NO: 4329843 - DNA, 25 bp, Homo sapien
taatagactactaaagagtgtaaac

SEQ ID NO: 4329844 - DNA, 25 bp, Homo sapien
tccatggtatgcctgtgctgtacag

SEQ ID NO: 4329845 - DNA, 25 bp, Homo sapien
catagcagcctactagaactctgga

SEQ ID NO: 4329846 - DNA, 25 bp, Homo sapien
ggccaatattactggactcccgtgg

SEQ ID NO: 4329847 - DNA, 25 bp, Homo sapien
tatttagcactagagcccctccagt

SEQ ID NO: 4329848 - DNA, 25 bp, Homo sapien
gaaactggctgagtctaaggttaca

SEQ ID NO: 4329849 - DNA, 25 bp, Homo sapien
caggaaatgtagtacgcagtgtgga

SEQ ID NO: 4329850 - DNA, 25 bp, Homo sapien
tggccacatgtagttttagcagctg

SEQ ID NO: 4329851 - DNA, 25 bp, Homo sapien
tggagctggccacatgtagttttag

SEQ ID NO: 4329852 - DNA, 25 bp, Homo sapien
tcatgatgacggtagtcatcctggt

SEQ ID NO: 4329853 - DNA, 25 bp, Homo sapien
gtgataactctcatgatgacggtag

SEQ ID NO: 4329854 - DNA, 25 bp, Homo sapien
tcagtaagggtatccatggtgataa

SEQ ID NO: 4329855 - DNA, 25 bp, Homo sapien
agggtatccatggtgataactctca

SEQ ID NO: 4329856 - DNA, 25 bp, Homo sapien
atagcctgcatactcatcttctggg

SEQ ID NO: 4329857 - DNA, 25 bp, Homo sapien
cacaatcaccatggaccacattggg

SEQ ID NO: 4329858 - DNA, 25 bp, Homo sapien
catttccgtcttttccgactagaag

SEQ ID NO: 4329859 - DNA, 25 bp, Homo sapien
gaatcgccatttcctgtctccgaag

SEQ ID NO: 4329860 - DNA, 25 bp, Homo sapien
tacgtcttctcgctcaacaacagag

SEQ ID NO: 4329861 - DNA, 25 bp, Homo sapien
tctttcaccaaatgggctggtacgt

SEQ ID NO: 4329862 - DNA, 25 bp, Homo sapien
tactccgggctcacttgaaaatagt

SEQ ID NO: 4329863 - DNA, 25 bp, Homo sapien
aaatagttacgaatgtctttcacca

SEQ ID NO: 4329864 - DNA, 25 bp, Homo sapien
cattaattgggaacagttctaacac

SEQ ID NO: 4329865 - DNA, 25 bp, Homo sapien
ttcagaatggttatgtggcgcagac

SEQ ID NO: 4329866 - DNA, 25 bp, Homo sapien
tctccaacgcctaaaagcttcagaa

SEQ ID NO: 4329867 - DNA, 25 bp, Homo sapien
taattgggaacagttctaacactcc

SEQ ID NO: 4329868 - DNA, 25 bp, Homo sapien
gatgaactgtgattctcattctact

SEQ ID NO: 4329869 - DNA, 25 bp, Homo sapien
agaaaagatgaagcaattcattgga

SEQ ID NO: 4329870 - DNA, 25 bp, Homo sapien
aagaaaagatgaagcaattcattgg

SEQ ID NO: 4329871 - DNA, 25 bp, Homo sapien
actgtgattctcattctactaaatg

SEQ ID NO: 4329872 - DNA, 25 bp, Homo sapien
aaattgcacgcctgaccactgaggg

SEQ ID NO: 4329873 - DNA, 25 bp, Homo sapien
taggcccagtcttcatcgttaggag

SEQ ID NO: 4329874 - DNA, 25 bp, Homo sapien
cgttaggagcagagatcaccagcaa

SEQ ID NO: 4329875 - DNA, 25 bp, Homo sapien
gagagctgctgtgaataggcccagt

SEQ ID NO: 4329876 - DNA, 25 bp, Homo sapien
ccagagtgacttaggctagcaattt

SEQ ID NO: 4329877 - DNA, 25 bp, Homo sapien
aaaaccaatgtaggaaaccagagtg

SEQ ID NO: 4329878 - DNA, 25 bp, Homo sapien
cagagtgacttaggctagcaatttt

SEQ ID NO: 4329879 - DNA, 25 bp, Homo sapien
accaatgtaggaaaccagagtgact

SEQ ID NO: 4329880 - DNA, 25 bp, Homo sapien
tgcttctcaaagccattaaactgca

SEQ ID NO: 4329881 - DNA, 25 bp, Homo sapien
attgctacactcctgtagtttttct

SEQ ID NO: 4329882 - DNA, 25 bp, Homo sapien
gcattgctacactcctgtagttttt

SEQ ID NO: 4329883 - DNA, 25 bp, Homo sapien
catgcttctcaaagccattaaactg

SEQ ID NO: 4329884 - DNA, 25 bp, Homo sapien
gagctgacagccagttaattttatt

SEQ ID NO: 4329885 - DNA, 25 bp, Homo sapien
tttgatccctgtgccccttctagca

SEQ ID NO: 4329886 - DNA, 25 bp, Homo sapien
cctgtgccccttctagcatcaggag

SEQ ID NO: 4329887 - DNA, 25 bp, Homo sapien
tgtgccccttctagcatcaggagtg

SEQ ID NO: 4329888 - DNA, 25 bp, Homo sapien
cccttctagcatcaggagtgaacat

SEQ ID NO: 4329889 - DNA, 25 bp, Homo sapien
aaggagcctctgagactgtccaagg

SEQ ID NO: 4329890 - DNA, 25 bp, Homo sapien
gaacagtaactgctgtcggatcaca

SEQ ID NO: 4329891 - DNA, 25 bp, Homo sapien
acagggagctgaatgtgtctggcac

SEQ ID NO: 4329892 - DNA, 25 bp, Homo sapien
tccttaggaggcatgccagaccagc

SEQ ID NO: 4329893 - DNA, 25 bp, Homo sapien
gacactctacctagggatggtgaga

SEQ ID NO: 4329894 - DNA, 25 bp, Homo sapien
tacaaatcaggcaccgctatgggac

SEQ ID NO: 4329895 - DNA, 25 bp, Homo sapien
tgtagctgccagtctcacgacagat

SEQ ID NO: 4329896 - DNA, 25 bp, Homo sapien
taactgtctgctttatagggtgggc

SEQ ID NO: 4329897 - DNA, 25 bp, Homo sapien
gaggatttctccttttgaggtctta

SEQ ID NO: 4329898 - DNA, 25 bp, Homo sapien
tcaataaacgacagtgtcgaaaaat

SEQ ID NO: 4329899 - DNA, 25 bp, Homo sapien
cgacagtgtcgaaaaattcgtgaaa

SEQ ID NO: 4329900 - DNA, 25 bp, Homo sapien
aattcgtgaaactgggtcaagagga

SEQ ID NO: 4329901 - DNA, 25 bp, Homo sapien
tctttagcgactccaaaggtgatgt

SEQ ID NO: 4329902 - DNA, 25 bp, Homo sapien
tttagcgactccaaaggtgatgtac

SEQ ID NO: 4329903 - DNA, 25 bp, Homo sapien
cctctttagcgactccaaaggtgat

SEQ ID NO: 4329904 - DNA, 25 bp, Homo sapien
ttcctctttagcgactccaaaggtg

SEQ ID NO: 4329905 - DNA, 25 bp, Homo sapien
catatctttgattcgggactggaaa

SEQ ID NO: 4329906 - DNA, 25 bp, Homo sapien
actggaaagtatcgatcagatcaaa

SEQ ID NO: 4329907 - DNA, 25 bp, Homo sapien
tttgattcgggactggaaagtatcg

SEQ ID NO: 4329908 - DNA, 25 bp, Homo sapien
tctgcttctccatatctttgattcg

SEQ ID NO: 4329909 - DNA, 25 bp, Homo sapien
gaagaagtcattgtaggtcattccg

SEQ ID NO: 4329910 - DNA, 25 bp, Homo sapien
tcagctcgctgatgagacgctggtc

SEQ ID NO: 4329911 - DNA, 25 bp, Homo sapien
caccactcgcatgggcttctcatta

SEQ ID NO: 4329912 - DNA, 25 bp, Homo sapien
ggtcattccgtactctttcctcagc

SEQ ID NO: 4329913 - DNA, 25 bp, Homo sapien
tggaccgacccagacaatttgttaa

SEQ ID NO: 4329914 - DNA, 25 bp, Homo sapien
actggaccgacccagacaatttgtt

SEQ ID NO: 4329915 - DNA, 25 bp, Homo sapien
cgacccagacaatttgttaagttct

SEQ ID NO: 4329916 - DNA, 25 bp, Homo sapien
gaactggaccgacccagacaatttg

SEQ ID NO: 4329917 - DNA, 25 bp, Homo sapien
gaattggttctgtgctgagtgctag

SEQ ID NO: 4329918 - DNA, 25 bp, Homo sapien
cttcctatgggaaatgggttgagct

SEQ ID NO: 4329919 - DNA, 25 bp, Homo sapien
tctgagcgcatctatatcacttgct

SEQ ID NO: 4329920 - DNA, 25 bp, Homo sapien
gcacaatgacacaagcagaagctag

SEQ ID NO: 4329921 - DNA, 25 bp, Homo sapien
cctggactactttagcctctcgcat

SEQ ID NO: 4329922 - DNA, 25 bp, Homo sapien
tgtgacatccgtggattctcctcct

SEQ ID NO: 4329923 - DNA, 25 bp, Homo sapien
ggcaattccactaatgcctggacta

SEQ ID NO: 4329924 - DNA, 25 bp, Homo sapien
tttccttgtgacatccgtggattct

SEQ ID NO: 4329925 - DNA, 25 bp, Homo sapien
gaaagagaggccttccaggaattag

SEQ ID NO: 4329926 - DNA, 25 bp, Homo sapien
cttttagcaagatggaccagctggt

SEQ ID NO: 4329927 - DNA, 25 bp, Homo sapien
ctttcaaggcccagtaaaagtctgg

SEQ ID NO: 4329928 - DNA, 25 bp, Homo sapien
caggtcccggctaccattcagtgag

SEQ ID NO: 4329929 - DNA, 25 bp, Homo sapien
gaggtggaagatgtaatgatttttc

SEQ ID NO: 4329930 - DNA, 25 bp, Homo sapien
catatagaagttgaggtggaagatg

SEQ ID NO: 4329931 - DNA, 25 bp, Homo sapien
ggtggaagatgtaatgatttttcca

SEQ ID NO: 4329932 - DNA, 25 bp, Homo sapien
agttgaggtggaagatgtaatgatt

SEQ ID NO: 4329933 - DNA, 25 bp, Homo sapien
aacactgggctgtacgcctcatgag

SEQ ID NO: 4329934 - DNA, 25 bp, Homo sapien
gtaaatcttgcaacgttcccaggag

SEQ ID NO: 4329935 - DNA, 25 bp, Homo sapien
tattttgggcttctgactatgaggc

SEQ ID NO: 4329936 - DNA, 25 bp, Homo sapien
gctctagagatctgccgtacaatat

SEQ ID NO: 4329937 - DNA, 25 bp, Homo sapien
gagtcaagtacttccgagagtctgg

SEQ ID NO: 4329938 - DNA, 25 bp, Homo sapien
gagagtctggcaagtcccatctgtg

SEQ ID NO: 4329939 - DNA, 25 bp, Homo sapien
tcaggcttgccagagtcaagtactt

SEQ ID NO: 4329940 - DNA, 25 bp, Homo sapien
tgatgagtcacctgcagcggagagt

SEQ ID NO: 4329941 - DNA, 25 bp, Homo sapien
tgtgttatcacaaccaaagagccct

SEQ ID NO: 4329942 - DNA, 25 bp, Homo sapien
ttttggatcccccatgtacctctac

SEQ ID NO: 4329943 - DNA, 25 bp, Homo sapien
cattttcttttggatcccccatgta

SEQ ID NO: 4329944 - DNA, 25 bp, Homo sapien
aataagcaggcaaactgacctgtgt

SEQ ID NO: 4329945 - DNA, 25 bp, Homo sapien
tatgagaaaaacaataatataatta

SEQ ID NO: 4329946 - DNA, 25 bp, Homo sapien
tagatatgagaaaaacaataatata

SEQ ID NO: 4329947 - DNA, 25 bp, Homo sapien
gatatgagaaaaacaataatataat

SEQ ID NO: 4329948 - DNA, 25 bp, Homo sapien
cttagatatgagaaaaacaataata

SEQ ID NO: 4329949 - DNA, 25 bp, Homo sapien
gaaagtggtcgattttcatggtgct

SEQ ID NO: 4329950 - DNA, 25 bp, Homo sapien
gaaactttccagatattcatcacgt

SEQ ID NO: 4329951 - DNA, 25 bp, Homo sapien
tgctgttgttgacagggccgaagat

SEQ ID NO: 4329952 - DNA, 25 bp, Homo sapien
cctggtagccatcttgcagaaactt

SEQ ID NO: 4329953 - DNA, 25 bp, Homo sapien
cattacatgaatacttggcatgcaa

SEQ ID NO: 4329954 - DNA, 25 bp, Homo sapien
gaacagttagcataattaggaccaa

SEQ ID NO: 4329955 - DNA, 25 bp, Homo sapien
tagtttcacactgaagcaaaaccca

SEQ ID NO: 4329956 - DNA, 25 bp, Homo sapien
ggctggtagtgactgcatctaagct

SEQ ID NO: 4329957 - DNA, 25 bp, Homo sapien
tctttgttgagatccttgatcccaa

SEQ ID NO: 4329958 - DNA, 25 bp, Homo sapien
ccttgatcccaaatagatcaccagg

SEQ ID NO: 4329959 - DNA, 25 bp, Homo sapien
caccaggctgatgtctgcaatgaac

SEQ ID NO: 4329960 - DNA, 25 bp, Homo sapien
gtctgcaatgaacgctgtctatttg

SEQ ID NO: 4329961 - DNA, 25 bp, Homo sapien
atccaatctattgtttttgactgac

SEQ ID NO: 4329962 - DNA, 25 bp, Homo sapien
tatagtctcactatcgtcaacctca

SEQ ID NO: 4329963 - DNA, 25 bp, Homo sapien
aactgacaccaagcagactgaagaa

SEQ ID NO: 4329964 - DNA, 25 bp, Homo sapien
gactgaagaattaggttaactggaa

SEQ ID NO: 4329965 - DNA, 25 bp, Homo sapien
gtagcagttatgtgatacgtccaca

SEQ ID NO: 4329966 - DNA, 25 bp, Homo sapien
gtgatacgtccacatctaaagaatg

SEQ ID NO: 4329967 - DNA, 25 bp, Homo sapien
tgttaagtagcagttatgtgatacg

SEQ ID NO: 4329968 - DNA, 25 bp, Homo sapien
ttctgtaattgttaagtagcagtta

SEQ ID NO: 4329969 - DNA, 25 bp, Homo sapien
ctttgtaccacagggccatgagttg

SEQ ID NO: 4329970 - DNA, 25 bp, Homo sapien
ccactgactttgtaccacagggcca

SEQ ID NO: 4329971 - DNA, 25 bp, Homo sapien
cagccactgactttgtaccacaggg

SEQ ID NO: 4329972 - DNA, 25 bp, Homo sapien
tgactttgtaccacagggccatgag

SEQ ID NO: 4329973 - DNA, 25 bp, Homo sapien
gaaggagctactggcctgctgccct

SEQ ID NO: 4329974 - DNA, 25 bp, Homo sapien
gccctcttttgccagacttctgagc

SEQ ID NO: 4329975 - DNA, 25 bp, Homo sapien
cataggtcactaaaccagaaggagc

SEQ ID NO: 4329976 - DNA, 25 bp, Homo sapien
cagaaggagctactggcctgctgcc

SEQ ID NO: 4329977 - DNA, 25 bp, Homo sapien
ggcatctagcaatatgatttttaca

SEQ ID NO: 4329978 - DNA, 25 bp, Homo sapien
cacagtacaggttcagtcacagtct

SEQ ID NO: 4329979 - DNA, 25 bp, Homo sapien
tgacacagtacaggttcagtcacag

SEQ ID NO: 4329980 - DNA, 25 bp, Homo sapien
ttcagtcacagtctggcatctagca

SEQ ID NO: 4329981 - DNA, 25 bp, Homo sapien
gagtcttcgtttgccttcaaaggac

SEQ ID NO: 4329982 - DNA, 25 bp, Homo sapien
aggagtcttcgtttgccttcaaagg

SEQ ID NO: 4329983 - DNA, 25 bp, Homo sapien
ggagtcttcgtttgccttcaaagga

SEQ ID NO: 4329984 - DNA, 25 bp, Homo sapien
aaggagtcttcgtttgccttcaaag

SEQ ID NO: 4329985 - DNA, 25 bp, Homo sapien
ctgcgtgaagtgtttgttggtgggt

SEQ ID NO: 4329986 - DNA, 25 bp, Homo sapien
tgcgtgaagtgtttgttggtgggtt

SEQ ID NO: 4329987 - DNA, 25 bp, Homo sapien
ttgcttttcactcttaagtaacttg

SEQ ID NO: 4329988 - DNA, 25 bp, Homo sapien
aagtaacttgtctgcgttctcattc

SEQ ID NO: 4329989 - DNA, 25 bp, Homo sapien
ttcatgctttttagactcctttgct

SEQ ID NO: 4329990 - DNA, 25 bp, Homo sapien
tcatgctttttagactcctttgctt

SEQ ID NO: 4329991 - DNA, 25 bp, Homo sapien
tgtccatgcggttgtcccggaaacg

SEQ ID NO: 4329992 - DNA, 25 bp, Homo sapien
taggccggctgaggtcatacttctc

SEQ ID NO: 4329993 - DNA, 25 bp, Homo sapien
ggtggccatgttcccgcctgtccat

SEQ ID NO: 4329994 - DNA, 25 bp, Homo sapien
caccacatttgggtctcggtggcca

SEQ ID NO: 4329995 - DNA, 25 bp, Homo sapien
tgtgaagctctccaagctggtggcc

SEQ ID NO: 4329996 - DNA, 25 bp, Homo sapien
gcatttgtgaagctctccaagctgg

SEQ ID NO: 4329997 - DNA, 25 bp, Homo sapien
gaggggcatttgtgaagctctccaa

SEQ ID NO: 4329998 - DNA, 25 bp, Homo sapien
tgggaggggcatttgtgaagctctc

SEQ ID NO: 4329999 - DNA, 25 bp, Homo sapien
gcaacattcttgaccgagctgagga

SEQ ID NO: 4330000 - DNA, 25 bp, Homo sapien
gcctaacgggatatggatagcgctc

SEQ ID NO: 4330001 - DNA, 25 bp, Homo sapien
caatctgttggatgtgcctctccgc

SEQ ID NO: 4330002 - DNA, 25 bp, Homo sapien
gcagtggcggccagttttctcagga

SEQ ID NO: 4330003 - DNA, 25 bp, Homo sapien
ttgggcgagctagtctcaacacggg

SEQ ID NO: 4330004 - DNA, 25 bp, Homo sapien
gagtggatctctcaattccgcgaga

SEQ ID NO: 4330005 - DNA, 25 bp, Homo sapien
gaaggtttggttcctccagagtgga

SEQ ID NO: 4330006 - DNA, 25 bp, Homo sapien
tactgctgtccggagaaaccaaagg

SEQ ID NO: 4330007 - DNA, 25 bp, Homo sapien
tagtgaaacggggtcccattctcca

SEQ ID NO: 4330008 - DNA, 25 bp, Homo sapien
aacagcatagtgaaacggggtccca

SEQ ID NO: 4330009 - DNA, 25 bp, Homo sapien
agcatagtgaaacggggtcccattc

SEQ ID NO: 4330010 - DNA, 25 bp, Homo sapien
ctagccacatggccaacagcatagt

SEQ ID NO: 4330011 - DNA, 25 bp, Homo sapien
taccgagggtgagcaatacaaaagg

SEQ ID NO: 4330012 - DNA, 25 bp, Homo sapien
tggctcatagagatggaatgcagag

SEQ ID NO: 4330013 - DNA, 25 bp, Homo sapien
gaaatcagaagtttggttcccagga

SEQ ID NO: 4330014 - DNA, 25 bp, Homo sapien
caggacagtttcctagatgaactac

SEQ ID NO: 4330015 - DNA, 25 bp, Homo sapien
cttctggacaagtaggatgaggtga

SEQ ID NO: 4330016 - DNA, 25 bp, Homo sapien
gctgacacaggacgtcccttaaagt

SEQ ID NO: 4330017 - DNA, 25 bp, Homo sapien
gcagtttctcctcggtctcgtgtgt

SEQ ID NO: 4330018 - DNA, 25 bp, Homo sapien
cagtcctggcgatttctgaatctca

SEQ ID NO: 4330019 - DNA, 25 bp, Homo sapien
aacacaggaatgtgatgtcgaaaag

SEQ ID NO: 4330020 - DNA, 25 bp, Homo sapien
ggaatgtgatgtcgaaaagggactt

SEQ ID NO: 4330021 - DNA, 25 bp, Homo sapien
agggaaaacacaggaatgtgatgtc

SEQ ID NO: 4330022 - DNA, 25 bp, Homo sapien
caggaatgtgatgtcgaaaagggac

SEQ ID NO: 4330023 - DNA, 25 bp, Homo sapien
ccagaaatgttaggactacctcagt

SEQ ID NO: 4330024 - DNA, 25 bp, Homo sapien
aatgttaggactacctcagttttgc

SEQ ID NO: 4330025 - DNA, 25 bp, Homo sapien
gtcccagaaatgttaggactacctc

SEQ ID NO: 4330026 - DNA, 25 bp, Homo sapien
gttaggactacctcagttttgctcc

SEQ ID NO: 4330027 - DNA, 25 bp, Homo sapien
actttagaagaggatgactggtgcc

SEQ ID NO: 4330028 - DNA, 25 bp, Homo sapien
ccttcccattttagcacgttcagag

SEQ ID NO: 4330029 - DNA, 25 bp, Homo sapien
taacagatcagcaaaacaccgcctc

SEQ ID NO: 4330030 - DNA, 25 bp, Homo sapien
cacgttcagagtggactcagtgagg

SEQ ID NO: 4330031 - DNA, 25 bp, Homo sapien
catttcccacattcgtagaagagtt

SEQ ID NO: 4330032 - DNA, 25 bp, Homo sapien
tcccacattcgtagaagagtttcat

SEQ ID NO: 4330033 - DNA, 25 bp, Homo sapien
tttcccacattcgtagaagagtttc

SEQ ID NO: 4330034 - DNA, 25 bp, Homo sapien
gcatttcccacattcgtagaagagt

SEQ ID NO: 4330035 - DNA, 25 bp, Homo sapien
tcaagtccgttatttaagagctcca

SEQ ID NO: 4330036 - DNA, 25 bp, Homo sapien
gattaatggcttgtaataattctca

SEQ ID NO: 4330037 - DNA, 25 bp, Homo sapien
taataagagcaatgataaattctca

SEQ ID NO: 4330038 - DNA, 25 bp, Homo sapien
ttggaggcacgtacctaataagagc

SEQ ID NO: 4330039 - DNA, 25 bp, Homo sapien
aatgagtagcctaccctcatctttg

SEQ ID NO: 4330040 - DNA, 25 bp, Homo sapien
tgccttgggaatgagtagcctaccc

SEQ ID NO: 4330041 - DNA, 25 bp, Homo sapien
caaacacatccagcgcaaacactga

SEQ ID NO: 4330042 - DNA, 25 bp, Homo sapien
cacatccagcgcaaacactgagaac

SEQ ID NO: 4330043 - DNA, 25 bp, Homo sapien
tagattcttgcactggattcttcag

SEQ ID NO: 4330044 - DNA, 25 bp, Homo sapien
tccagacaagatgaaaattttgcct

SEQ ID NO: 4330045 - DNA, 25 bp, Homo sapien
ttcttgcttgcatagattcttgcac

SEQ ID NO: 4330046 - DNA, 25 bp, Homo sapien
tcttcagtgtaagaacaggaaccaa

SEQ ID NO: 4330047 - DNA, 25 bp, Homo sapien
tgtttctcatctgggcagagaaaca

SEQ ID NO: 4330048 - DNA, 25 bp, Homo sapien
cagaggtgatgggtgtttctcatct

SEQ ID NO: 4330049 - DNA, 25 bp, Homo sapien
ttctcatctgggcagagaaacaaac

SEQ ID NO: 4330050 - DNA, 25 bp, Homo sapien
tgagaacaaatcctaatttccagtc

SEQ ID NO: 4330051 - DNA, 25 bp, Homo sapien
gaagacacagctttcacatcgtcct

SEQ ID NO: 4330052 - DNA, 25 bp, Homo sapien
agagaagacacagctttcacatcgt

SEQ ID NO: 4330053 - DNA, 25 bp, Homo sapien
gaaacaccacactgtcctgttttcc

SEQ ID NO: 4330054 - DNA, 25 bp, Homo sapien
taaccagtccacagataccagctgg

SEQ ID NO: 4330055 - DNA, 25 bp, Homo sapien
cataaccagtccacagataccagct

SEQ ID NO: 4330056 - DNA, 25 bp, Homo sapien
aaccagtccacagataccagctggc

SEQ ID NO: 4330057 - DNA, 25 bp, Homo sapien
acttttctgagtggacacattctcc

SEQ ID NO: 4330058 - DNA, 25 bp, Homo sapien
ttcaaaataattgcccaggtctttg

SEQ ID NO: 4330059 - DNA, 25 bp, Homo sapien
caatctttcgaatctgcaggacacc

SEQ ID NO: 4330060 - DNA, 25 bp, Homo sapien
caggttccctatcataatcttcagg

SEQ ID NO: 4330061 - DNA, 25 bp, Homo sapien
tttgccttgacaacagagaatttcc

SEQ ID NO: 4330062 - DNA, 25 bp, Homo sapien
accagacatacgtaataaacctcca

SEQ ID NO: 4330063 - DNA, 25 bp, Homo sapien
cagacatacgtaataaacctccaaa

SEQ ID NO: 4330064 - DNA, 25 bp, Homo sapien
gagaaccagacatacgtaataaacc

SEQ ID NO: 4330065 - DNA, 25 bp, Homo sapien
gaaccagacatacgtaataaacctc

SEQ ID NO: 4330066 - DNA, 25 bp, Homo sapien
ttttctgtaggacaccttggcctac

SEQ ID NO: 4330067 - DNA, 25 bp, Homo sapien
tgtaccacaccagccaagtcagctt

SEQ ID NO: 4330068 - DNA, 25 bp, Homo sapien
cagatcccctgtaggtctaacccaa

SEQ ID NO: 4330069 - DNA, 25 bp, Homo sapien
agtcagctttctccacggccagctg

SEQ ID NO: 4330070 - DNA, 25 bp, Homo sapien
tacgccataccccagaatacaataa

SEQ ID NO: 4330071 - DNA, 25 bp, Homo sapien
taaaggaatcatggtgttgagagaa

SEQ ID NO: 4330072 - DNA, 25 bp, Homo sapien
aaggaatcatggtgttgagagaaaa

SEQ ID NO: 4330073 - DNA, 25 bp, Homo sapien
ggcttctctgtacttacgccatacc

SEQ ID NO: 4330074 - DNA, 25 bp, Homo sapien
aacactgggaggagttattgtgcag

SEQ ID NO: 4330075 - DNA, 25 bp, Homo sapien
cagaaagctcattggacctggtttt

SEQ ID NO: 4330076 - DNA, 25 bp, Homo sapien
ctgttcagaaagctcattggacctg

SEQ ID NO: 4330077 - DNA, 25 bp, Homo sapien
taaaacactgggaggagttattgtg

SEQ ID NO: 4330078 - DNA, 25 bp, Homo sapien
ctgtttttctagaactaggagttgg

SEQ ID NO: 4330079 - DNA, 25 bp, Homo sapien
tgcctgtttttctagaactaggagt

SEQ ID NO: 4330080 - DNA, 25 bp, Homo sapien
agaccctcaggtactgccctgtgac

SEQ ID NO: 4330081 - DNA, 25 bp, Homo sapien
accctcaggtactgccctgtgactt

SEQ ID NO: 4330082 - DNA, 25 bp, Homo sapien
aagtactttacgtgcgtattacaag

SEQ ID NO: 4330083 - DNA, 25 bp, Homo sapien
ctttacgtgcgtattacaaggacat

SEQ ID NO: 4330084 - DNA, 25 bp, Homo sapien
actttacgtgcgtattacaaggaca

SEQ ID NO: 4330085 - DNA, 25 bp, Homo sapien
acgtgcgtattacaaggacattttc

SEQ ID NO: 4330086 - DNA, 25 bp, Homo sapien
aggttctgggccccaggtctagcat

SEQ ID NO: 4330087 - DNA, 25 bp, Homo sapien
atggatgtctggcctctgcctgaaa

SEQ ID NO: 4330088 - DNA, 25 bp, Homo sapien
attcttcatttctccaaaggttctg

SEQ ID NO: 4330089 - DNA, 25 bp, Homo sapien
ggatgtctggcctctgcctgaaagt

SEQ ID NO: 4330090 - DNA, 25 bp, Homo sapien
caggctacatggttcatctatgaat

SEQ ID NO: 4330091 - DNA, 25 bp, Homo sapien
tttttttatatttccaggctacatg

SEQ ID NO: 4330092 - DNA, 25 bp, Homo sapien
ctacatggttcatctatgaattttt

SEQ ID NO: 4330093 - DNA, 25 bp, Homo sapien
tccaggctacatggttcatctatga

SEQ ID NO: 4330094 - DNA, 25 bp, Homo sapien
tgcagttgagggtcctgtctgttag

SEQ ID NO: 4330095 - DNA, 25 bp, Homo sapien
caaaaacccatctgtacatcaccat

SEQ ID NO: 4330096 - DNA, 25 bp, Homo sapien
catcatcaaagacaaaaagtagata

SEQ ID NO: 4330097 - DNA, 25 bp, Homo sapien
gatgggggaaaaaacagagcagaaa

SEQ ID NO: 4330098 - DNA, 25 bp, Homo sapien
ctgtagcggcgggaagatgtgatac

SEQ ID NO: 4330099 - DNA, 25 bp, Homo sapien
cactgtagcggcgggaagatgtgat

SEQ ID NO: 4330100 - DNA, 25 bp, Homo sapien
tagcggcgggaagatgtgatacttt

SEQ ID NO: 4330101 - DNA, 25 bp, Homo sapien
agcggcgggaagatgtgatactttt

SEQ ID NO: 4330102 - DNA, 25 bp, Homo sapien
tggcccaaaagctcatgttcgtctt

SEQ ID NO: 4330103 - DNA, 25 bp, Homo sapien
ccaaaagctcatgttcgtctttcaa

SEQ ID NO: 4330104 - DNA, 25 bp, Homo sapien
tcagtggcccaaaagctcatgttcg

SEQ ID NO: 4330105 - DNA, 25 bp, Homo sapien
agtggcccaaaagctcatgttcgtc

SEQ ID NO: 4330106 - DNA, 25 bp, Homo sapien
tccctctgcacacgtggtacagtag

SEQ ID NO: 4330107 - DNA, 25 bp, Homo sapien
ctgcacacgtggtacagtagatgac

SEQ ID NO: 4330108 - DNA, 25 bp, Homo sapien
cctctgcacacgtggtacagtagat

SEQ ID NO: 4330109 - DNA, 25 bp, Homo sapien
tcttccctctgcacacgtggtacag

SEQ ID NO: 4330110 - DNA, 25 bp, Homo sapien
agtgctggttgacagggatgaaatc

SEQ ID NO: 4330111 - DNA, 25 bp, Homo sapien
tgctggttgacagggatgaaatcac

SEQ ID NO: 4330112 - DNA, 25 bp, Homo sapien
gtgctggttgacagggatgaaatca

SEQ ID NO: 4330113 - DNA, 25 bp, Homo sapien
tacaggtagaacaatagtatctcac

SEQ ID NO: 4330114 - DNA, 25 bp, Homo sapien
tgttcacttgcattacaggtagaac

SEQ ID NO: 4330115 - DNA, 25 bp, Homo sapien
cacaaaagtaggatagttttcccag

SEQ ID NO: 4330116 - DNA, 25 bp, Homo sapien
tatttgtccttattaagatctgttc

SEQ ID NO: 4330117 - DNA, 25 bp, Homo sapien
ctttgaaagtccaaactgtagtgag

SEQ ID NO: 4330118 - DNA, 25 bp, Homo sapien
gttttgcatgttttgagagaaatgc

SEQ ID NO: 4330119 - DNA, 25 bp, Homo sapien
tgtagtgagttatccataaccttct

SEQ ID NO: 4330120 - DNA, 25 bp, Homo sapien
aaatgcagaatttcctgtagggtgc

SEQ ID NO: 4330121 - DNA, 25 bp, Homo sapien
caaagtgggcacatggtgaactctc

SEQ ID NO: 4330122 - DNA, 25 bp, Homo sapien
tgctagacaagacattggagctccc

SEQ ID NO: 4330123 - DNA, 25 bp, Homo sapien
tttaaagaatcggagaggacatctc

SEQ ID NO: 4330124 - DNA, 25 bp, Homo sapien
tcttgcaaacaacagaggaggtggg

SEQ ID NO: 4330125 - DNA, 25 bp, Homo sapien
tttgattgcctccctaggaaagatg

SEQ ID NO: 4330126 - DNA, 25 bp, Homo sapien
gacgtatctgttgggcagttggtaa

SEQ ID NO: 4330127 - DNA, 25 bp, Homo sapien
gtgaattgcttgatagaacatcttg

SEQ ID NO: 4330128 - DNA, 25 bp, Homo sapien
aattgcttgatagaacatcttgcag

SEQ ID NO: 4330129 - DNA, 25 bp, Homo sapien
catcttgcagttgacgtatctgttg

SEQ ID NO: 4330130 - DNA, 25 bp, Homo sapien
catcttaaaatctgtgcgcaagacc

SEQ ID NO: 4330131 - DNA, 25 bp, Homo sapien
cactcagtgttcttgtaagtgagaa

SEQ ID NO: 4330132 - DNA, 25 bp, Homo sapien
gcgcaagacctcagggggactattt

SEQ ID NO: 4330133 - DNA, 25 bp, Homo sapien
gacctcagggggactatttctccat

SEQ ID NO: 4330134 - DNA, 25 bp, Homo sapien
ctgtgggcccttcagagcaggttcc

SEQ ID NO: 4330135 - DNA, 25 bp, Homo sapien
cttctgctgtgggcccttcagagca

SEQ ID NO: 4330136 - DNA, 25 bp, Homo sapien
ggccctcatggggactaagaatcat

SEQ ID NO: 4330137 - DNA, 25 bp, Homo sapien
ctggcacccagacaagggcaggaac

SEQ ID NO: 4330138 - DNA, 25 bp, Homo sapien
ccttctacagaaatgcacttctttc

SEQ ID NO: 4330139 - DNA, 25 bp, Homo sapien
ccaacttaaaatcgcatttccagac

SEQ ID NO: 4330140 - DNA, 25 bp, Homo sapien
gattacatttgatccggaggccatg

SEQ ID NO: 4330141 - DNA, 25 bp, Homo sapien
tgaaattggccagttgattataccc

SEQ ID NO: 4330142 - DNA, 25 bp, Homo sapien
gcagaagatttccaggttataacct

SEQ ID NO: 4330143 - DNA, 25 bp, Homo sapien
ccaggttataacctggaaatttcat

SEQ ID NO: 4330144 - DNA, 25 bp, Homo sapien
tccaggttataacctggaaatttca

SEQ ID NO: 4330145 - DNA, 25 bp, Homo sapien
attgcagaagatttccaggttataa

SEQ ID NO: 4330146 - DNA, 25 bp, Homo sapien
gatactgtagagtctggtgtctgtg

SEQ ID NO: 4330147 - DNA, 25 bp, Homo sapien
tgtctgtgtagaatcccctgctgtc

SEQ ID NO: 4330148 - DNA, 25 bp, Homo sapien
caggatactgtagagtctggtgtct

SEQ ID NO: 4330149 - DNA, 25 bp, Homo sapien
ctggtgtctgtgtagaatcccctgc

SEQ ID NO: 4330150 - DNA, 25 bp, Homo sapien
gacatttactgtagcttcttggagc

SEQ ID NO: 4330151 - DNA, 25 bp, Homo sapien
ccctctcctgataggcagttggaaa

SEQ ID NO: 4330152 - DNA, 25 bp, Homo sapien
gttatgtcgcagatggtgtcctcag

SEQ ID NO: 4330153 - DNA, 25 bp, Homo sapien
gacagatgcttcttgctggaatgcc

SEQ ID NO: 4330154 - DNA, 25 bp, Homo sapien
cacacaaaagacctggtctggctcc

SEQ ID NO: 4330155 - DNA, 25 bp, Homo sapien
gcttcactcaggtccgcggaagtgt

SEQ ID NO: 4330156 - DNA, 25 bp, Homo sapien
caaggctcggcagtaacatctgaga

SEQ ID NO: 4330157 - DNA, 25 bp, Homo sapien
gaagtgtttatgtccattccaaggc

SEQ ID NO: 4330158 - DNA, 25 bp, Homo sapien
aagcagcatggtagataaaatgtcc

SEQ ID NO: 4330159 - DNA, 25 bp, Homo sapien
ccaggaagcagcatggtagataaaa

SEQ ID NO: 4330160 - DNA, 25 bp, Homo sapien
tgtccttcagaagtatagtaaactc

SEQ ID NO: 4330161 - DNA, 25 bp, Homo sapien
cagaagtatagtaaactctcatctt

SEQ ID NO: 4330162 - DNA, 25 bp, Homo sapien
tcatccatggcccaagttcactgct

SEQ ID NO: 4330163 - DNA, 25 bp, Homo sapien
ccaatgttgcagtccagagacaagg

SEQ ID NO: 4330164 - DNA, 25 bp, Homo sapien
tgagggtttatagggaaacttcatg

SEQ ID NO: 4330165 - DNA, 25 bp, Homo sapien
tgagtggcttctatccttaacatca

SEQ ID NO: 4330166 - DNA, 25 bp, Homo sapien
aggacaacgctggagatcctgaggt

SEQ ID NO: 4330167 - DNA, 25 bp, Homo sapien
cgctggagatcctgaggttctgaga

SEQ ID NO: 4330168 - DNA, 25 bp, Homo sapien
aaaacaaatcctgtggtgaccagaa

SEQ ID NO: 4330169 - DNA, 25 bp, Homo sapien
gagagtttcacataaagaatgatca

SEQ ID NO: 4330170 - DNA, 25 bp, Homo sapien
taaaatatgttgagccttaacggaa

SEQ ID NO: 4330171 - DNA, 25 bp, Homo sapien
gagacctgagttatgtaaacaagca

SEQ ID NO: 4330172 - DNA, 25 bp, Homo sapien
tagtaaataagtgcattcctgagtg

SEQ ID NO: 4330173 - DNA, 25 bp, Homo sapien
taaacaagcagctatgacctaggca

SEQ ID NO: 4330174 - DNA, 25 bp, Homo sapien
tcttctacaagaaacaggcgcttac

SEQ ID NO: 4330175 - DNA, 25 bp, Homo sapien
tagtggcaagaatagatccctctgg

SEQ ID NO: 4330176 - DNA, 25 bp, Homo sapien
aactttacggacagactcttgttgc

SEQ ID NO: 4330177 - DNA, 25 bp, Homo sapien
tgctttgaaataggttcacttcggg

SEQ ID NO: 4330178 - DNA, 25 bp, Homo sapien
gagacatggcaggtcacagtagact

SEQ ID NO: 4330179 - DNA, 25 bp, Homo sapien
tctgtaatacccgtcatgagtggtg

SEQ ID NO: 4330180 - DNA, 25 bp, Homo sapien
tgtccaccggacgaatctgaaggtc

SEQ ID NO: 4330181 - DNA, 25 bp, Homo sapien
gaaattcccatcaggtgttaccact

SEQ ID NO: 4330182 - DNA, 25 bp, Homo sapien
ccgaattctgatcaggtctagagac

SEQ ID NO: 4330183 - DNA, 25 bp, Homo sapien
atttcccatgttattatgatcaaat

SEQ ID NO: 4330184 - DNA, 25 bp, Homo sapien
ctggcctctcaggattatttcccat

SEQ ID NO: 4330185 - DNA, 25 bp, Homo sapien
taatgcgataggagggcaacaaagc

SEQ ID NO: 4330186 - DNA, 25 bp, Homo sapien
tgcgataggagggcaacaaagcaca

SEQ ID NO: 4330187 - DNA, 25 bp, Homo sapien
cttaatgcgataggagggcaacaaa

SEQ ID NO: 4330188 - DNA, 25 bp, Homo sapien
ggagggcaacaaagcacagcattta

SEQ ID NO: 4330189 - DNA, 25 bp, Homo sapien
gctggccactactaagggagcatat

SEQ ID NO: 4330190 - DNA, 25 bp, Homo sapien
gtgctggccactactaagggagcat

SEQ ID NO: 4330191 - DNA, 25 bp, Homo sapien
ggccactactaagggagcatattac

SEQ ID NO: 4330192 - DNA, 25 bp, Homo sapien
tggccactactaagggagcatatta

SEQ ID NO: 4330193 - DNA, 25 bp, Homo sapien
ctgcaaaaattgttgaatagttctg

SEQ ID NO: 4330194 - DNA, 25 bp, Homo sapien
tagttctgtgtcatctgctttccac

SEQ ID NO: 4330195 - DNA, 25 bp, Homo sapien
caaaaattgttgaatagttctgtgt

SEQ ID NO: 4330196 - DNA, 25 bp, Homo sapien
cttctgcaaaaattgttgaatagtt

SEQ ID NO: 4330197 - DNA, 25 bp, Homo sapien
caggagatctgtgcagctggctttg

SEQ ID NO: 4330198 - DNA, 25 bp, Homo sapien
taactttgtatttccagttgtgtca

SEQ ID NO: 4330199 - DNA, 25 bp, Homo sapien
gtcatcagacaggaattattatctg

SEQ ID NO: 4330200 - DNA, 25 bp, Homo sapien
ttaagacgtattctctaactttgta

SEQ ID NO: 4330201 - DNA, 25 bp, Homo sapien
ttcattaagacgtattctctaactt

SEQ ID NO: 4330202 - DNA, 25 bp, Homo sapien
aaatcagtaatcttggagctgacat

SEQ ID NO: 4330203 - DNA, 25 bp, Homo sapien
atccactttaaatcaatcaacagac

SEQ ID NO: 4330204 - DNA, 25 bp, Homo sapien
tttgactgattaaccactgatggga

SEQ ID NO: 4330205 - DNA, 25 bp, Homo sapien
ctgattaaccactgatgggaaatgt

SEQ ID NO: 4330206 - DNA, 25 bp, Homo sapien
tcaacagacttggtgaatctgtttc

SEQ ID NO: 4330207 - DNA, 25 bp, Homo sapien
catgctgaaatagattggtccctaa

SEQ ID NO: 4330208 - DNA, 25 bp, Homo sapien
tagttaagatgtggccatgctgaaa

SEQ ID NO: 4330209 - DNA, 25 bp, Homo sapien
tccaatatgactggcgtctttggtt

SEQ ID NO: 4330210 - DNA, 25 bp, Homo sapien
gggcgcatacacaggaacaccatgt

SEQ ID NO: 4330211 - DNA, 25 bp, Homo sapien
atccccaagtgctccgggtagccat

SEQ ID NO: 4330212 - DNA, 25 bp, Homo sapien
agtgctccgggtagccattttccca

SEQ ID NO: 4330213 - DNA, 25 bp, Homo sapien
tacaactagtttgcttcaccatccc

SEQ ID NO: 4330214 - DNA, 25 bp, Homo sapien
gggtgtacaggaacaccatctacaa

SEQ ID NO: 4330215 - DNA, 25 bp, Homo sapien
ttagctgctggagcaatataaagct

SEQ ID NO: 4330216 - DNA, 25 bp, Homo sapien
tagctgctggagcaatataaagctc

SEQ ID NO: 4330217 - DNA, 25 bp, Homo sapien
caatataaagctctatctgataact

SEQ ID NO: 4330218 - DNA, 25 bp, Homo sapien
gcaatataaagctctatctgataac

SEQ ID NO: 4330219 - DNA, 25 bp, Homo sapien
tgtaagtgaagcataaccccaatag

SEQ ID NO: 4330220 - DNA, 25 bp, Homo sapien
tatatgcagaaacctaatggacact

SEQ ID NO: 4330221 - DNA, 25 bp, Homo sapien
tcaagtatcaacacctctgtggaga

SEQ ID NO: 4330222 - DNA, 25 bp, Homo sapien
tgttccagccccatagtagagattt

SEQ ID NO: 4330223 - DNA, 25 bp, Homo sapien
gacctgacaattccactcaagaaag

SEQ ID NO: 4330224 - DNA, 25 bp, Homo sapien
tcccactggtgccttgacaaagata

SEQ ID NO: 4330225 - DNA, 25 bp, Homo sapien
tacaagggtatgaatgagaatccat

SEQ ID NO: 4330226 - DNA, 25 bp, Homo sapien
taaattgacacatataccataggca

SEQ ID NO: 4330227 - DNA, 25 bp, Homo sapien
aagtatggaggtctgtgtcaacttc

SEQ ID NO: 4330228 - DNA, 25 bp, Homo sapien
gtagctggcatagggctgcatttca

SEQ ID NO: 4330229 - DNA, 25 bp, Homo sapien
cttcaccttgtttgtagtatcatag

SEQ ID NO: 4330230 - DNA, 25 bp, Homo sapien
agtatcatagagaggattgttcttc

SEQ ID NO: 4330231 - DNA, 25 bp, Homo sapien
tagagatgctttcaaattggtgaca

SEQ ID NO: 4330232 - DNA, 25 bp, Homo sapien
tataagcactgcaagtcagaactgt

SEQ ID NO: 4330233 - DNA, 25 bp, Homo sapien
tgatatgagtactccaaaggagagc

SEQ ID NO: 4330234 - DNA, 25 bp, Homo sapien
caaaagattacagtctaaaggagcc

SEQ ID NO: 4330235 - DNA, 25 bp, Homo sapien
ctcctcaacaactggagtagattct

SEQ ID NO: 4330236 - DNA, 25 bp, Homo sapien
ctcaacaactggagtagattctgtt

SEQ ID NO: 4330237 - DNA, 25 bp, Homo sapien
tcctcaacaactggagtagattctg

SEQ ID NO: 4330238 - DNA, 25 bp, Homo sapien
caacaactggagtagattctgtttt

SEQ ID NO: 4330239 - DNA, 25 bp, Homo sapien
tactgctcgtggttaatatccccaa

SEQ ID NO: 4330240 - DNA, 25 bp, Homo sapien
catcattgtttagatcgaaaatggg

SEQ ID NO: 4330241 - DNA, 25 bp, Homo sapien
tatccccaactaagaatattccgga

SEQ ID NO: 4330242 - DNA, 25 bp, Homo sapien
tagaagcttgatgcaattgaatgca

SEQ ID NO: 4330243 - DNA, 25 bp, Homo sapien
gccattgactttcaacaaccaaatg

SEQ ID NO: 4330244 - DNA, 25 bp, Homo sapien
gaatcccacgatggtcaaaataata

SEQ ID NO: 4330245 - DNA, 25 bp, Homo sapien
taatagtaaggatgatatatggaat

SEQ ID NO: 4330246 - DNA, 25 bp, Homo sapien
ctgcagccattgactttcaacaacc

SEQ ID NO: 4330247 - DNA, 25 bp, Homo sapien
caggtcacggtagacacattgtgga

SEQ ID NO: 4330248 - DNA, 25 bp, Homo sapien
tagctctatgtacagactcttgttg

SEQ ID NO: 4330249 - DNA, 25 bp, Homo sapien
agacgtggcaggtcacggtagacac

SEQ ID NO: 4330250 - DNA, 25 bp, Homo sapien
caggaagtagctctatgtacagact

SEQ ID NO: 4330251 - DNA, 25 bp, Homo sapien
ggcacaatcgccctctgggatccag

SEQ ID NO: 4330252 - DNA, 25 bp, Homo sapien
gtggcacaatcgccctctgggatcc

SEQ ID NO: 4330253 - DNA, 25 bp, Homo sapien
tggcacaatcgccctctgggatcca

SEQ ID NO: 4330254 - DNA, 25 bp, Homo sapien
ttgaaacagggtcacttcaggtgta

SEQ ID NO: 4330255 - DNA, 25 bp, Homo sapien
ttttgaaacagggtcacttcaggtg

SEQ ID NO: 4330256 - DNA, 25 bp, Homo sapien
tttgaaacagggtcacttcaggtgt

SEQ ID NO: 4330257 - DNA, 25 bp, Homo sapien
tgaaacagggtcacttcaggtgtaa

SEQ ID NO: 4330258 - DNA, 25 bp, Homo sapien
ttcacataaagcatatggaattcag

SEQ ID NO: 4330259 - DNA, 25 bp, Homo sapien
tttcacataaagcatatggaattca

SEQ ID NO: 4330260 - DNA, 25 bp, Homo sapien
gaaatacctcaatatatgatgctcc

SEQ ID NO: 4330261 - DNA, 25 bp, Homo sapien
aatctggtgatgtgaaatacctcaa

SEQ ID NO: 4330262 - DNA, 25 bp, Homo sapien
tacctcaatatatgatgctccttac

SEQ ID NO: 4330263 - DNA, 25 bp, Homo sapien
tgatgtgaaatacctcaatatatga

SEQ ID NO: 4330264 - DNA, 25 bp, Homo sapien
gacccaggttattctctcatcagta

SEQ ID NO: 4330265 - DNA, 25 bp, Homo sapien
tctgtaatacccgtcatgagtgatg

SEQ ID NO: 4330266 - DNA, 25 bp, Homo sapien
tggccacggtacgaatctgaaggtc

SEQ ID NO: 4330267 - DNA, 25 bp, Homo sapien
ggaaattcccatcaggtgttaccat

SEQ ID NO: 4330268 - DNA, 25 bp, Homo sapien
tgtgtaatctgtttttcatccatac

SEQ ID NO: 4330269 - DNA, 25 bp, Homo sapien
gcgagtactttcgagtagttctgtg

SEQ ID NO: 4330270 - DNA, 25 bp, Homo sapien
ctttcgagtagttctgtgtaatctg

SEQ ID NO: 4330271 - DNA, 25 bp, Homo sapien
cttctgcgagtactttcgagtagtt

SEQ ID NO: 4330272 - DNA, 25 bp, Homo sapien
taaagcatgattctccttgctagtt

SEQ ID NO: 4330273 - DNA, 25 bp, Homo sapien
ccttgctagtttgcagcattaatga

SEQ ID NO: 4330274 - DNA, 25 bp, Homo sapien
agttgtttggttgagcagcaccctc

SEQ ID NO: 4330275 - DNA, 25 bp, Homo sapien
gttgtttggttgagcagcaccctcc

SEQ ID NO: 4330276 - DNA, 25 bp, Homo sapien
atagaaaagctactaatttttaatg

SEQ ID NO: 4330277 - DNA, 25 bp, Homo sapien
cctgcaactttactaaattcatttt

SEQ ID NO: 4330278 - DNA, 25 bp, Homo sapien
tgtatagaaaagctactaattttta

SEQ ID NO: 4330279 - DNA, 25 bp, Homo sapien
tcattttttagttctaagaatcaac

SEQ ID NO: 4330280 - DNA, 25 bp, Homo sapien
tttattggccaattggttgttcagg

SEQ ID NO: 4330281 - DNA, 25 bp, Homo sapien
ttattggccaattggttgttcagga

SEQ ID NO: 4330282 - DNA, 25 bp, Homo sapien
ctaggttagcagttctccaagggca

SEQ ID NO: 4330283 - DNA, 25 bp, Homo sapien
cggccactaagaagatagtcaaaat

SEQ ID NO: 4330284 - DNA, 25 bp, Homo sapien
aacagtagccctaggttagcagttc

SEQ ID NO: 4330285 - DNA, 25 bp, Homo sapien
gatagtcaaaatcaacagtagccct

SEQ ID NO: 4330286 - DNA, 25 bp, Homo sapien
ttctcagtacaggatcctcttaccc

SEQ ID NO: 4330287 - DNA, 25 bp, Homo sapien
tctggtcaacttctcagtacaggat

SEQ ID NO: 4330288 - DNA, 25 bp, Homo sapien
gtacagaaggaactgtgcgcatggt

SEQ ID NO: 4330289 - DNA, 25 bp, Homo sapien
ggaactgtgcgcatggtgagaccct

SEQ ID NO: 4330290 - DNA, 25 bp, Homo sapien
gcctggttagtaacttggacgaaca

SEQ ID NO: 4330291 - DNA, 25 bp, Homo sapien
tagtaacttggacgaacagaagctt

SEQ ID NO: 4330292 - DNA, 25 bp, Homo sapien
tagccccttccttcacgtctatgtg

SEQ ID NO: 4330293 - DNA, 25 bp, Homo sapien
ctatgtggtttagcctggttagtaa

SEQ ID NO: 4330294 - DNA, 25 bp, Homo sapien
aaattcactaaatagatttggcagg

SEQ ID NO: 4330295 - DNA, 25 bp, Homo sapien
caagtgatgggtatcaaaaaccata

SEQ ID NO: 4330296 - DNA, 25 bp, Homo sapien
ttaagaatcaagtgatgggtatcaa

SEQ ID NO: 4330297 - DNA, 25 bp, Homo sapien
aaaattcactaaatagatttggcag

SEQ ID NO: 4330298 - DNA, 25 bp, Homo sapien
caaaacacttagaccggaacgagcg

SEQ ID NO: 4330299 - DNA, 25 bp, Homo sapien
tagtgctgcggacttacgacaaacg

SEQ ID NO: 4330300 - DNA, 25 bp, Homo sapien
taagacataatcgttaagcccacgg

SEQ ID NO: 4330301 - DNA, 25 bp, Homo sapien
aaatgcctgcggtgctagagcgact

SEQ ID NO: 4330302 - DNA, 25 bp, Homo sapien
tgtttttataacgttatgtactgaa

SEQ ID NO: 4330303 - DNA, 25 bp, Homo sapien
ctttatccacttgttagttgaattg

SEQ ID NO: 4330304 - DNA, 25 bp, Homo sapien
tgtagtcttttttcgctcacccctc

SEQ ID NO: 4330305 - DNA, 25 bp, Homo sapien
attgtttttataacgttatgtactg

SEQ ID NO: 4330306 - DNA, 25 bp, Homo sapien
tactgtaaacgtgaaagctattaag

SEQ ID NO: 4330307 - DNA, 25 bp, Homo sapien
tctgttaagcatcgataggtaagtt

SEQ ID NO: 4330308 - DNA, 25 bp, Homo sapien
gaatggttttacagcaggtaacatg

SEQ ID NO: 4330309 - DNA, 25 bp, Homo sapien
ggtaacatgtgagaagacagctaca

SEQ ID NO: 4330310 - DNA, 25 bp, Homo sapien
tgtacatacccaagtgctaggcagt

SEQ ID NO: 4330311 - DNA, 25 bp, Homo sapien
aacaaatgctagactggcagcccag

SEQ ID NO: 4330312 - DNA, 25 bp, Homo sapien
cccagagcaagaggcaaggttcagc

SEQ ID NO: 4330313 - DNA, 25 bp, Homo sapien
gacacacaggaggtctcaaacactg

SEQ ID NO: 4330314 - DNA, 25 bp, Homo sapien
ttggaatcaatcactggtacccaaa

SEQ ID NO: 4330315 - DNA, 25 bp, Homo sapien
tggaatcaatcactggtacccaaat

SEQ ID NO: 4330316 - DNA, 25 bp, Homo sapien
tgaactgaaatgaactcctgtgcaa

SEQ ID NO: 4330317 - DNA, 25 bp, Homo sapien
gcggacctatgtataatggagccaa

SEQ ID NO: 4330318 - DNA, 25 bp, Homo sapien
caggtggtacttccagatcttagca

SEQ ID NO: 4330319 - DNA, 25 bp, Homo sapien
cacctgacatgtagttgaagccaaa

SEQ ID NO: 4330320 - DNA, 25 bp, Homo sapien
gaagttttgatacctgagccacgaa

SEQ ID NO: 4330321 - DNA, 25 bp, Homo sapien
tgtgagagtctccacttagcactgg

SEQ ID NO: 4330322 - DNA, 25 bp, Homo sapien
gatcagttctatgcacagtacagtg

SEQ ID NO: 4330323 - DNA, 25 bp, Homo sapien
tccgagtcccttgagagaactgctg

SEQ ID NO: 4330324 - DNA, 25 bp, Homo sapien
gaaaaaatctgccagtacgtattaa

SEQ ID NO: 4330325 - DNA, 25 bp, Homo sapien
tctgttcataatgtaatgagtggac

SEQ ID NO: 4330326 - DNA, 25 bp, Homo sapien
cagtacgtattaatccgaatctgga

SEQ ID NO: 4330327 - DNA, 25 bp, Homo sapien
gacatgaggaaacatcacaaatgaa

SEQ ID NO: 4330328 - DNA, 25 bp, Homo sapien
tcaatacgtggttcatccccaggaa

SEQ ID NO: 4330329 - DNA, 25 bp, Homo sapien
tgagtacatcccaatttagccccgc

SEQ ID NO: 4330330 - DNA, 25 bp, Homo sapien
cattaccgttaagccctgaagtgtc

SEQ ID NO: 4330331 - DNA, 25 bp, Homo sapien
cagtagcaagtagcaacagtacaac

SEQ ID NO: 4330332 - DNA, 25 bp, Homo sapien
ctagtaccttgagcttccagatgtt

SEQ ID NO: 4330333 - DNA, 25 bp, Homo sapien
tgcaccatacaactgccatctggat

SEQ ID NO: 4330334 - DNA, 25 bp, Homo sapien
tccagatgtttaagccggttgcttt

SEQ ID NO: 4330335 - DNA, 25 bp, Homo sapien
tgagcttccagatgtttaagccggt

SEQ ID NO: 4330336 - DNA, 25 bp, Homo sapien
ggagttcctatcactttctgagaag

SEQ ID NO: 4330337 - DNA, 25 bp, Homo sapien
aggagttcctatcactttctgagaa

SEQ ID NO: 4330338 - DNA, 25 bp, Homo sapien
tactgacttgtaattatatgacaac

SEQ ID NO: 4330339 - DNA, 25 bp, Homo sapien
aaaatatattggacatgttactgac

SEQ ID NO: 4330340 - DNA, 25 bp, Homo sapien
ggaaagctagctcacaatcaaaatt

SEQ ID NO: 4330341 - DNA, 25 bp, Homo sapien
taaaaattagaattatcagtcccta

SEQ ID NO: 4330342 - DNA, 25 bp, Homo sapien
cttcttccaaatttcttacactcaa

SEQ ID NO: 4330343 - DNA, 25 bp, Homo sapien
cttccaaatttcttacactcaaaag

SEQ ID NO: 4330344 - DNA, 25 bp, Homo sapien
tccaaatttcttacactcaaaagga

SEQ ID NO: 4330345 - DNA, 25 bp, Homo sapien
tcttccaaatttcttacactcaaaa

SEQ ID NO: 4330346 - DNA, 25 bp, Homo sapien
cttggtaagaagcatcctctacaaa

SEQ ID NO: 4330347 - DNA, 25 bp, Homo sapien
aagcatcctctacaaattagcagaa

SEQ ID NO: 4330348 - DNA, 25 bp, Homo sapien
tacaaattagcagaaatcataagct

SEQ ID NO: 4330349 - DNA, 25 bp, Homo sapien
cctctacaaattagcagaaatcata

SEQ ID NO: 4330350 - DNA, 25 bp, Homo sapien
aagccctcacatcaaattctgatga

SEQ ID NO: 4330351 - DNA, 25 bp, Homo sapien
cagaaagccctcacatcaaattctg

SEQ ID NO: 4330352 - DNA, 25 bp, Homo sapien
cctcacatcaaattctgatgactct

SEQ ID NO: 4330353 - DNA, 25 bp, Homo sapien
gaaagccctcacatcaaattctgat

SEQ ID NO: 4330354 - DNA, 25 bp, Homo sapien
aagatccacattattctgtacattg

SEQ ID NO: 4330355 - DNA, 25 bp, Homo sapien
tctcttattctttactggctgtcca

SEQ ID NO: 4330356 - DNA, 25 bp, Homo sapien
caagatccacattattctgtacatt

SEQ ID NO: 4330357 - DNA, 25 bp, Homo sapien
ccaagatccacattattctgtacat

SEQ ID NO: 4330358 - DNA, 25 bp, Homo sapien
gaatcctagcgacctcttgaagcaa

SEQ ID NO: 4330359 - DNA, 25 bp, Homo sapien
atggctgtcctaaaaattcagtgat

SEQ ID NO: 4330360 - DNA, 25 bp, Homo sapien
tcagtgatatcagaaggaaaggtaa

SEQ ID NO: 4330361 - DNA, 25 bp, Homo sapien
taaaggcttcaaaatatggctgtcc

SEQ ID NO: 4330362 - DNA, 25 bp, Homo sapien
aataggagctcattaattagccagt

SEQ ID NO: 4330363 - DNA, 25 bp, Homo sapien
gaaagaaataggagctcattaatta

SEQ ID NO: 4330364 - DNA, 25 bp, Homo sapien
taggagctcattaattagccagtaa

SEQ ID NO: 4330365 - DNA, 25 bp, Homo sapien
agaaataggagctcattaattagcc

SEQ ID NO: 4330366 - DNA, 25 bp, Homo sapien
tgtaagacagtctaccaggaaagat

SEQ ID NO: 4330367 - DNA, 25 bp, Homo sapien
agaatcaagtgatacagccagccca

SEQ ID NO: 4330368 - DNA, 25 bp, Homo sapien
tattactgcaattcccagtcacagg

SEQ ID NO: 4330369 - DNA, 25 bp, Homo sapien
aaacggcctgttgcaatatgactac

SEQ ID NO: 4330370 - DNA, 25 bp, Homo sapien
ttgcaaacctagatgtttcacagtc

SEQ ID NO: 4330371 - DNA, 25 bp, Homo sapien
acctgctcaccagcccaaccatcac

SEQ ID NO: 4330372 - DNA, 25 bp, Homo sapien
gaattcctgtaggttgtaactccta

SEQ ID NO: 4330373 - DNA, 25 bp, Homo sapien
tgacaggcagtctctggcaatggct

SEQ ID NO: 4330374 - DNA, 25 bp, Homo sapien
gctcttaggataatacgtgctgaac

SEQ ID NO: 4330375 - DNA, 25 bp, Homo sapien
tataaacactctgctagagttccca

SEQ ID NO: 4330376 - DNA, 25 bp, Homo sapien
cactggctgactggggacaacacat

SEQ ID NO: 4330377 - DNA, 25 bp, Homo sapien
ggagcaacaacttgcaggctcccaa

SEQ ID NO: 4330378 - DNA, 25 bp, Homo sapien
caacacatactttggtagttaaggg

SEQ ID NO: 4330379 - DNA, 25 bp, Homo sapien
ttgcagcagcagtccaacaagcgga

SEQ ID NO: 4330380 - DNA, 25 bp, Homo sapien
caaattcatgtttttcaaacgcttt

SEQ ID NO: 4330381 - DNA, 25 bp, Homo sapien
tcaaacaggtcttgaattgagccct

SEQ ID NO: 4330382 - DNA, 25 bp, Homo sapien
caggtcttgaattgagccctccaaa

SEQ ID NO: 4330383 - DNA, 25 bp, Homo sapien
tcaaacgctttaaacattgctcaac

SEQ ID NO: 4330384 - DNA, 25 bp, Homo sapien
tatctgccagcatgccctacatgta

SEQ ID NO: 4330385 - DNA, 25 bp, Homo sapien
gcatgccctacatgtactccacaga

SEQ ID NO: 4330386 - DNA, 25 bp, Homo sapien
actttatctgccagcatgccctaca

SEQ ID NO: 4330387 - DNA, 25 bp, Homo sapien
agcatgccctacatgtactccacag

SEQ ID NO: 4330388 - DNA, 25 bp, Homo sapien
tagaagtggtaatagcagctgcagc

SEQ ID NO: 4330389 - DNA, 25 bp, Homo sapien
ttgtaaggcagtagtagaagtggta

SEQ ID NO: 4330390 - DNA, 25 bp, Homo sapien
attaagcagttgtaaggcagtagta

SEQ ID NO: 4330391 - DNA, 25 bp, Homo sapien
cagtagtagaagtggtaatagcagc

SEQ ID NO: 4330392 - DNA, 25 bp, Homo sapien
cttcagggatcacatggaatataaa

SEQ ID NO: 4330393 - DNA, 25 bp, Homo sapien
tttcctacttcagggatcacatgga

SEQ ID NO: 4330394 - DNA, 25 bp, Homo sapien
cagggatcacatggaatataaaata

SEQ ID NO: 4330395 - DNA, 25 bp, Homo sapien
gtttcctacttcagggatcacatgg

SEQ ID NO: 4330396 - DNA, 25 bp, Homo sapien
tggcagtgtgatctacattttcaag

SEQ ID NO: 4330397 - DNA, 25 bp, Homo sapien
cattttcaagtgaacaggttgggtc

SEQ ID NO: 4330398 - DNA, 25 bp, Homo sapien
caggttgggtctcacctaccgggct

SEQ ID NO: 4330399 - DNA, 25 bp, Homo sapien
caatatagtaagtggcagtgtgatc

SEQ ID NO: 4330400 - DNA, 25 bp, Homo sapien
ggtttggctcttcagcgacagtatg

SEQ ID NO: 4330401 - DNA, 25 bp, Homo sapien
cgacagtatgacgagatggcattct

SEQ ID NO: 4330402 - DNA, 25 bp, Homo sapien
tgtttctgcatctaaggtttggctc

SEQ ID NO: 4330403 - DNA, 25 bp, Homo sapien
tttgtggcggcccattctgttgtga

SEQ ID NO: 4330404 - DNA, 25 bp, Homo sapien
ggtaacagatgatataaagtccagg

SEQ ID NO: 4330405 - DNA, 25 bp, Homo sapien
aaactaatgtaatcagtctcaactg

SEQ ID NO: 4330406 - DNA, 25 bp, Homo sapien
ctcaactgtaagaacgtaaggattc

SEQ ID NO: 4330407 - DNA, 25 bp, Homo sapien
acaagaagctgtatctttgcattgc

SEQ ID NO: 4330408 - DNA, 25 bp, Homo sapien
gggattctcacacggttccacggct

SEQ ID NO: 4330409 - DNA, 25 bp, Homo sapien
cgctgcggttccccgccttagggat

SEQ ID NO: 4330410 - DNA, 25 bp, Homo sapien
cgcgccggggttctgcactgtcact

SEQ ID NO: 4330411 - DNA, 25 bp, Homo sapien
cttagggattctcacacggttccac

SEQ ID NO: 4330412 - DNA, 25 bp, Homo sapien
cgcgagagcacgtccagcgaccgga

SEQ ID NO: 4330413 - DNA, 25 bp, Homo sapien
ggacttacgaaaggcggagctacgc

SEQ ID NO: 4330414 - DNA, 25 bp, Homo sapien
gcggagctacgcgagagcacgtcca

SEQ ID NO: 4330415 - DNA, 25 bp, Homo sapien
agcacgtccagcgaccggaggtggg

SEQ ID NO: 4330416 - DNA, 25 bp, Homo sapien
tgattgttcacgaaaaggaagagca

SEQ ID NO: 4330417 - DNA, 25 bp, Homo sapien
tgagaaaccagttcgcagcaaacag

SEQ ID NO: 4330418 - DNA, 25 bp, Homo sapien
tgaagtgtaattattccccgtggac

SEQ ID NO: 4330419 - DNA, 25 bp, Homo sapien
tggacctttgcgctgacacttcaca

SEQ ID NO: 4330420 - DNA, 25 bp, Homo sapien
aatgagtcattctggcttcagtgag

SEQ ID NO: 4330421 - DNA, 25 bp, Homo sapien
gaagccacgtggaggaacctactac

SEQ ID NO: 4330422 - DNA, 25 bp, Homo sapien
gcaagaggccgcaccaagattactc

SEQ ID NO: 4330423 - DNA, 25 bp, Homo sapien
tcagagatcagtcgttatggcttgt

SEQ ID NO: 4330424 - DNA, 25 bp, Homo sapien
ggttttggacaggaatggcatcact

SEQ ID NO: 4330425 - DNA, 25 bp, Homo sapien
tattttcaaggagcagagtcacctg

SEQ ID NO: 4330426 - DNA, 25 bp, Homo sapien
gacaaatcgccttatccctggcaga

SEQ ID NO: 4330427 - DNA, 25 bp, Homo sapien
ggcttgccctctgaagaaggagtca

SEQ ID NO: 4330428 - DNA, 25 bp, Homo sapien
ttgacagccttgagacaaaatttcc

SEQ ID NO: 4330429 - DNA, 25 bp, Homo sapien
ctgcgttaaatacgaaatgcccaag

SEQ ID NO: 4330430 - DNA, 25 bp, Homo sapien
taaggcctcggatttggttgcttgt

SEQ ID NO: 4330431 - DNA, 25 bp, Homo sapien
caagtcaaatttataaggcctcgga

SEQ ID NO: 4330432 - DNA, 25 bp, Homo sapien
taacaccctagaactatgccaagag

SEQ ID NO: 4330433 - DNA, 25 bp, Homo sapien
tcagtaagatccctttgctgtggct

SEQ ID NO: 4330434 - DNA, 25 bp, Homo sapien
tgtgcctgatttgacgagattctga

SEQ ID NO: 4330435 - DNA, 25 bp, Homo sapien
gattctgaaaaggtaccagtgcctc

SEQ ID NO: 4330436 - DNA, 25 bp, Homo sapien
agtggtagggagtcataagacttca

SEQ ID NO: 4330437 - DNA, 25 bp, Homo sapien
ttaccgaagagtgggtgactcaaac

SEQ ID NO: 4330438 - DNA, 25 bp, Homo sapien
cagtgtttcacgattatgagtggag

SEQ ID NO: 4330439 - DNA, 25 bp, Homo sapien
ggctgctgcaacacattaccgaaga

SEQ ID NO: 4330440 - DNA, 25 bp, Homo sapien
caaagtcgagcagtattaacccgcc

SEQ ID NO: 4330441 - DNA, 25 bp, Homo sapien
tggtaggaatcacaaatccagcact

SEQ ID NO: 4330442 - DNA, 25 bp, Homo sapien
tctttgcaatatggcctggtaggaa

SEQ ID NO: 4330443 - DNA, 25 bp, Homo sapien
ccgcctgagccaaagatactgcatt

SEQ ID NO: 4330444 - DNA, 25 bp, Homo sapien
ttacagactcgagccactgcgtctg

SEQ ID NO: 4330445 - DNA, 25 bp, Homo sapien
gggattacagactcgagccactgcg

SEQ ID NO: 4330446 - DNA, 25 bp, Homo sapien
gattacagactcgagccactgcgtc

SEQ ID NO: 4330447 - DNA, 25 bp, Homo sapien
ggtgatccactcgccgcggcctgcc

SEQ ID NO: 4330448 - DNA, 25 bp, Homo sapien
caccatagacttgaagagtctgtcc

SEQ ID NO: 4330449 - DNA, 25 bp, Homo sapien
tgttcccactgggaaaggcaccata

SEQ ID NO: 4330450 - DNA, 25 bp, Homo sapien
ccttgatcttgtcttgcatggtttc

SEQ ID NO: 4330451 - DNA, 25 bp, Homo sapien
gcctttggtgctgtggaccactgcc

SEQ ID NO: 4330452 - DNA, 25 bp, Homo sapien
gagtcaatccatctttaccaagctc

SEQ ID NO: 4330453 - DNA, 25 bp, Homo sapien
gaggttagagtcaatccatctttac

SEQ ID NO: 4330454 - DNA, 25 bp, Homo sapien
gcttctttaattgaggttagagtca

SEQ ID NO: 4330455 - DNA, 25 bp, Homo sapien
tccatttctcgccatgatggtgagg

SEQ ID NO: 4330456 - DNA, 25 bp, Homo sapien
caggataagccggaagtagactaga

SEQ ID NO: 4330457 - DNA, 25 bp, Homo sapien
gtagactagaatgtgtgaaactgca

SEQ ID NO: 4330458 - DNA, 25 bp, Homo sapien
tgaaactgcaagatgcctgaccgcc

SEQ ID NO: 4330459 - DNA, 25 bp, Homo sapien
ccaacaaggaattgccaggataagc

SEQ ID NO: 4330460 - DNA, 25 bp, Homo sapien
ggaagaatgtgttcttctcttcagc

SEQ ID NO: 4330461 - DNA, 25 bp, Homo sapien
ggattgattttgcattgctcctcca

SEQ ID NO: 4330462 - DNA, 25 bp, Homo sapien
atgttccttcaagaaagtgcttcct

SEQ ID NO: 4330463 - DNA, 25 bp, Homo sapien
tcccagagcaccttatgcagagtag

SEQ ID NO: 4330464 - DNA, 25 bp, Homo sapien
tcagggtagtggttcagagttccaa

SEQ ID NO: 4330465 - DNA, 25 bp, Homo sapien
tagtggttcagagttccaacatgct

SEQ ID NO: 4330466 - DNA, 25 bp, Homo sapien
tatcagcccacatggaatattgctt

SEQ ID NO: 4330467 - DNA, 25 bp, Homo sapien
catgcttaccactttgtagggtcac

SEQ ID NO: 4330468 - DNA, 25 bp, Homo sapien
aatggctgttgctatttatggtctc

SEQ ID NO: 4330469 - DNA, 25 bp, Homo sapien
gaagatgcagggactactaggttgt

SEQ ID NO: 4330470 - DNA, 25 bp, Homo sapien
tagcgaatccctttaattctaccat

SEQ ID NO: 4330471 - DNA, 25 bp, Homo sapien
ttctaaaatgccctctggaaggtgt

SEQ ID NO: 4330472 - DNA, 25 bp, Homo sapien
tgactttccggtccaggtgcaagtt

SEQ ID NO: 4330473 - DNA, 25 bp, Homo sapien
tcctgacgctggataattccaggca

SEQ ID NO: 4330474 - DNA, 25 bp, Homo sapien
tgctgttgtccctaagcaatgctct

SEQ ID NO: 4330475 - DNA, 25 bp, Homo sapien
tactttccagccaagggtcctgact

SEQ ID NO: 4330476 - DNA, 25 bp, Homo sapien
gatgaggtaagttagccatgggact

SEQ ID NO: 4330477 - DNA, 25 bp, Homo sapien
aaagtttgagagcattgaagaaaag

SEQ ID NO: 4330478 - DNA, 25 bp, Homo sapien
ccatgggactttccccatagtcaaa

SEQ ID NO: 4330479 - DNA, 25 bp, Homo sapien
gctttgcagggggtagtttatataa

SEQ ID NO: 4330480 - DNA, 25 bp, Homo sapien
actaatctgttgatagaagcaaacc

SEQ ID NO: 4330481 - DNA, 25 bp, Homo sapien
tgtcttcttaactaatctgttgata

SEQ ID NO: 4330482 - DNA, 25 bp, Homo sapien
tcttaactaatctgttgatagaagc

SEQ ID NO: 4330483 - DNA, 25 bp, Homo sapien
tgttgatagaagcaaaccttccaat

SEQ ID NO: 4330484 - DNA, 25 bp, Homo sapien
tgaagaggcgttcaaccttgcagga

SEQ ID NO: 4330485 - DNA, 25 bp, Homo sapien
caggacttcatgcaagcacaaggct

SEQ ID NO: 4330486 - DNA, 25 bp, Homo sapien
ccttgcaggacttcatgcaagcaca

SEQ ID NO: 4330487 - DNA, 25 bp, Homo sapien
tctgcagaatgagtcacctccaccg

SEQ ID NO: 4330488 - DNA, 25 bp, Homo sapien
tataagattccactcaaccatagga

SEQ ID NO: 4330489 - DNA, 25 bp, Homo sapien
gctgctggctattgtaccaaagaca

SEQ ID NO: 4330490 - DNA, 25 bp, Homo sapien
tactgaagctacgtattcattacat

SEQ ID NO: 4330491 - DNA, 25 bp, Homo sapien
aactttgcttattgtagtcacctgg

SEQ ID NO: 4330492 - DNA, 25 bp, Homo sapien
taataaggcattcgggagacactcg

SEQ ID NO: 4330493 - DNA, 25 bp, Homo sapien
tgggacaacataggcactaccagct

SEQ ID NO: 4330494 - DNA, 25 bp, Homo sapien
ttagacaccaaggaaggaatgcccg

SEQ ID NO: 4330495 - DNA, 25 bp, Homo sapien
tctgggagaaaggaagccatgtgcc

SEQ ID NO: 4330496 - DNA, 25 bp, Homo sapien
tcccctcgcgtatcatctttctgtt

SEQ ID NO: 4330497 - DNA, 25 bp, Homo sapien
gctctctcgcactcatatcccctcg

SEQ ID NO: 4330498 - DNA, 25 bp, Homo sapien
tctcgcactcatatcccctcgcgta

SEQ ID NO: 4330499 - DNA, 25 bp, Homo sapien
tctttctgattgccccgctctctcg

SEQ ID NO: 4330500 - DNA, 25 bp, Homo sapien
catgagggatgaacctttgggacgc

SEQ ID NO: 4330501 - DNA, 25 bp, Homo sapien
tggccttcccatgagggatgaacct

SEQ ID NO: 4330502 - DNA, 25 bp, Homo sapien
tgcactgtgcgtaggagggatgtct

SEQ ID NO: 4330503 - DNA, 25 bp, Homo sapien
cctttgggacgccatgcactgtgcg

SEQ ID NO: 4330504 - DNA, 25 bp, Homo sapien
gacttgcccatgatctctccacaag

SEQ ID NO: 4330505 - DNA, 25 bp, Homo sapien
agttagaaagtagatccgtcctcct

SEQ ID NO: 4330506 - DNA, 25 bp, Homo sapien
caaggagggagacacggttttccat

SEQ ID NO: 4330507 - DNA, 25 bp, Homo sapien
gaaacttagaccagggtgacttgcc

SEQ ID NO: 4330508 - DNA, 25 bp, Homo sapien
gcttctaagttttcagaagcgacag

SEQ ID NO: 4330509 - DNA, 25 bp, Homo sapien
gcctctggtgttcttacagcatcag

SEQ ID NO: 4330510 - DNA, 25 bp, Homo sapien
gaaaagctggccacttatgaaccca

SEQ ID NO: 4330511 - DNA, 25 bp, Homo sapien
gctggccacttatgaacccacacat

SEQ ID NO: 4330512 - DNA, 25 bp, Homo sapien
actgccagcttaatgcacagctctc

SEQ ID NO: 4330513 - DNA, 25 bp, Homo sapien
aactgccagcttaatgcacagctct

SEQ ID NO: 4330514 - DNA, 25 bp, Homo sapien
ccaactgccagcttaatgcacagct

SEQ ID NO: 4330515 - DNA, 25 bp, Homo sapien
caactgccagcttaatgcacagctc

SEQ ID NO: 4330516 - DNA, 25 bp, Homo sapien
gggactgacactccccacataggat

SEQ ID NO: 4330517 - DNA, 25 bp, Homo sapien
tccctgccaagccatcggaaagctg

SEQ ID NO: 4330518 - DNA, 25 bp, Homo sapien
ctgtcagagttcagcgttccctgcc

SEQ ID NO: 4330519 - DNA, 25 bp, Homo sapien
tgcagatgggaatgggactgacact

SEQ ID NO: 4330520 - DNA, 25 bp, Homo sapien
agatgcattgctccttttccctttg

SEQ ID NO: 4330521 - DNA, 25 bp, Homo sapien
gcctgctgccaagtttcagacccat

SEQ ID NO: 4330522 - DNA, 25 bp, Homo sapien
cggtgtgcctttcggatctgtttcc

SEQ ID NO: 4330523 - DNA, 25 bp, Homo sapien
tccttgccattctcggtgtgccttt

SEQ ID NO: 4330524 - DNA, 25 bp, Homo sapien
tcagcatctacgcaagcaacacagg

SEQ ID NO: 4330525 - DNA, 25 bp, Homo sapien
gcaacacaggctccttaacacacaa

SEQ ID NO: 4330526 - DNA, 25 bp, Homo sapien
aggtgtataaatatcatccaggaaa

SEQ ID NO: 4330527 - DNA, 25 bp, Homo sapien
tccagatattctaacacatgtgtga

SEQ ID NO: 4330528 - DNA, 25 bp, Homo sapien
tttgccaagctttacttgcaggggt

SEQ ID NO: 4330529 - DNA, 25 bp, Homo sapien
gtttgccaagctttacttgcagggg

SEQ ID NO: 4330530 - DNA, 25 bp, Homo sapien
gctgttgttccccaggattgggcag

SEQ ID NO: 4330531 - DNA, 25 bp, Homo sapien
gatgcgttcgggaaagtgaagaaca

SEQ ID NO: 4330532 - DNA, 25 bp, Homo sapien
ccacccacactgtgtaatatggcat

SEQ ID NO: 4330533 - DNA, 25 bp, Homo sapien
tgaagaacaatgtggtgggacaccc

SEQ ID NO: 4330534 - DNA, 25 bp, Homo sapien
cggctaaacgtggacaccttgagca

SEQ ID NO: 4330535 - DNA, 25 bp, Homo sapien
aacgatctcaccagtcagtccacag

SEQ ID NO: 4330536 - DNA, 25 bp, Homo sapien
ataaatgctaacgatctcaccagtc

SEQ ID NO: 4330537 - DNA, 25 bp, Homo sapien
aatgctaacgatctcaccagtcagt

SEQ ID NO: 4330538 - DNA, 25 bp, Homo sapien
ctgacatctgaataaatgctaacga

SEQ ID NO: 4330539 - DNA, 25 bp, Homo sapien
cctcagccataagactggcctgctt

SEQ ID NO: 4330540 - DNA, 25 bp, Homo sapien
tgcttcctcagccataagactggcc

SEQ ID NO: 4330541 - DNA, 25 bp, Homo sapien
ttcctcagccataagactggcctgc

SEQ ID NO: 4330542 - DNA, 25 bp, Homo sapien
gcttcctcagccataagactggcct

SEQ ID NO: 4330543 - DNA, 25 bp, Homo sapien
aatgtgaagttcacaggccgcgttc

SEQ ID NO: 4330544 - DNA, 25 bp, Homo sapien
gtgaagttcacaggccgcgttcagg

SEQ ID NO: 4330545 - DNA, 25 bp, Homo sapien
ctccaggttttgtaggatccagggt

SEQ ID NO: 4330546 - DNA, 25 bp, Homo sapien
tgtgaagttcacaggccgcgttcag

SEQ ID NO: 4330547 - DNA, 25 bp, Homo sapien
tccagtgacatagacaccttcgcca

SEQ ID NO: 4330548 - DNA, 25 bp, Homo sapien
tgagctctgcatagggaagaacatc

SEQ ID NO: 4330549 - DNA, 25 bp, Homo sapien
gcagatccagtgacatagacacctt

SEQ ID NO: 4330550 - DNA, 25 bp, Homo sapien
gacaacttgatccttgcagatccag

SEQ ID NO: 4330551 - DNA, 25 bp, Homo sapien
tgcaaaatactgtgtacagacagct

SEQ ID NO: 4330552 - DNA, 25 bp, Homo sapien
gatgaaaggcatagagactctctct

SEQ ID NO: 4330553 - DNA, 25 bp, Homo sapien
tatagctaagacaaaccaggcttca

SEQ ID NO: 4330554 - DNA, 25 bp, Homo sapien
gctttaggtccacaaattagtttga

SEQ ID NO: 4330555 - DNA, 25 bp, Homo sapien
ataacaatgttatccctgggtagta

SEQ ID NO: 4330556 - DNA, 25 bp, Homo sapien
tgcctgaattaccagatgcattaaa

SEQ ID NO: 4330557 - DNA, 25 bp, Homo sapien
tgggatagtacacagcagttaagtc

SEQ ID NO: 4330558 - DNA, 25 bp, Homo sapien
catatactcagtgtcgataacgtgt

SEQ ID NO: 4330559 - DNA, 25 bp, Homo sapien
caaaagaagttggaggagagcgcgg

SEQ ID NO: 4330560 - DNA, 25 bp, Homo sapien
ggaaggattgtacatggaagagcaa

SEQ ID NO: 4330561 - DNA, 25 bp, Homo sapien
gaagagcaagggtgcgaggtgaagc

SEQ ID NO: 4330562 - DNA, 25 bp, Homo sapien
tgcttttggtatgggaaagcaaaag

SEQ ID NO: 4330563 - DNA, 25 bp, Homo sapien
gtagagtcactcaacacgcactcgg

SEQ ID NO: 4330564 - DNA, 25 bp, Homo sapien
tctcgggtggaagaaggatccagcc

SEQ ID NO: 4330565 - DNA, 25 bp, Homo sapien
cgtggcggcaaatgcgtagagtcac

SEQ ID NO: 4330566 - DNA, 25 bp, Homo sapien
tcagcggttcccagaagcttctcgg

SEQ ID NO: 4330567 - DNA, 25 bp, Homo sapien
ctctttgcaactggtggagcctaag

SEQ ID NO: 4330568 - DNA, 25 bp, Homo sapien
gccttgcaccgaggccactgagctt

SEQ ID NO: 4330569 - DNA, 25 bp, Homo sapien
gctggcaaggctccatgtgtttgtt

SEQ ID NO: 4330570 - DNA, 25 bp, Homo sapien
gactgtttgacagaccaactgcagc

SEQ ID NO: 4330571 - DNA, 25 bp, Homo sapien
tacttggtcatcctgtggctgtagg

SEQ ID NO: 4330572 - DNA, 25 bp, Homo sapien
cagtagctgcctagtaatgcccagt

SEQ ID NO: 4330573 - DNA, 25 bp, Homo sapien
taaaatgggccttaactgcagaaat

SEQ ID NO: 4330574 - DNA, 25 bp, Homo sapien
caccacagttacagtcggagcaggg

SEQ ID NO: 4330575 - DNA, 25 bp, Homo sapien
aatcctggaagcctgacaatgagcc

SEQ ID NO: 4330576 - DNA, 25 bp, Homo sapien
cagtaaagtctgttgtcccgaaagg

SEQ ID NO: 4330577 - DNA, 25 bp, Homo sapien
aaaccacaacttgaggctccagcag

SEQ ID NO: 4330578 - DNA, 25 bp, Homo sapien
tgaaatcgaaagtcagcattcgggc

SEQ ID NO: 4330579 - DNA, 25 bp, Homo sapien
caggaggcccacagataagctggca

SEQ ID NO: 4330580 - DNA, 25 bp, Homo sapien
caggcacatggttcatcacgagcat

SEQ ID NO: 4330581 - DNA, 25 bp, Homo sapien
gaagctgccacctaacaggagtcac

SEQ ID NO: 4330582 - DNA, 25 bp, Homo sapien
cacagatggctggatccggtgctac

SEQ ID NO: 4330583 - DNA, 25 bp, Homo sapien
gatgaagtttaggtcatattgaaga

SEQ ID NO: 4330584 - DNA, 25 bp, Homo sapien
tagctaagtgctgtgccacacatgg

SEQ ID NO: 4330585 - DNA, 25 bp, Homo sapien
tccaaaatactgtttagctaagtgc

SEQ ID NO: 4330586 - DNA, 25 bp, Homo sapien
ggttcatagttctcttaccaactgg

SEQ ID NO: 4330587 - DNA, 25 bp, Homo sapien
cattgctttgctatccagaggcccc

SEQ ID NO: 4330588 - DNA, 25 bp, Homo sapien
tactgtgatttcagacaacctggca

SEQ ID NO: 4330589 - DNA, 25 bp, Homo sapien
tggccaaaataagtatagcacctgc

SEQ ID NO: 4330590 - DNA, 25 bp, Homo sapien
tctgactgtttagggcaagtgcatc

SEQ ID NO: 4330591 - DNA, 25 bp, Homo sapien
gcaaatggcccaagtaaaacctgaa

SEQ ID NO: 4330592 - DNA, 25 bp, Homo sapien
ttaggaagacaataggccaagtggc

SEQ ID NO: 4330593 - DNA, 25 bp, Homo sapien
ttagcaggctaatcacaggtgagga

SEQ ID NO: 4330594 - DNA, 25 bp, Homo sapien
gcacacatggcttaggatatacaac

SEQ ID NO: 4330595 - DNA, 25 bp, Homo sapien
tcataacagaggttgggtgctgcag

SEQ ID NO: 4330596 - DNA, 25 bp, Homo sapien
gaaacacagccttccgagacttcat

SEQ ID NO: 4330597 - DNA, 25 bp, Homo sapien
ggttttacactttcaggcgagttca

SEQ ID NO: 4330598 - DNA, 25 bp, Homo sapien
aactgtgggcaatccaagaaggctg

SEQ ID NO: 4330599 - DNA, 25 bp, Homo sapien
tgggaggataagactgcctttccta

SEQ ID NO: 4330600 - DNA, 25 bp, Homo sapien
tcctacgcaaaagagcaatctcctc

SEQ ID NO: 4330601 - DNA, 25 bp, Homo sapien
ccgaaatcctttccgcctggagttg

SEQ ID NO: 4330602 - DNA, 25 bp, Homo sapien
ggtctgcgggctgtatctctttctc

SEQ ID NO: 4330603 - DNA, 25 bp, Homo sapien
aactcatgcccagtcattccagtgg

SEQ ID NO: 4330604 - DNA, 25 bp, Homo sapien
tgtaagaagcaatggagtcagcgtt

SEQ ID NO: 4330605 - DNA, 25 bp, Homo sapien
tgtttaaggtactctcaatagggct

SEQ ID NO: 4330606 - DNA, 25 bp, Homo sapien
agcgtgtagtcatctccctctagac

SEQ ID NO: 4330607 - DNA, 25 bp, Homo sapien
tcagaggaccaaactgttggaacac

SEQ ID NO: 4330608 - DNA, 25 bp, Homo sapien
caaactgttggaacacttagcttag

SEQ ID NO: 4330609 - DNA, 25 bp, Homo sapien
gttggaacacttagcttagaccatt

SEQ ID NO: 4330610 - DNA, 25 bp, Homo sapien
aacacttagcttagaccatttccag

SEQ ID NO: 4330611 - DNA, 25 bp, Homo sapien
tacgtgagttcatggcacccaagag

SEQ ID NO: 4330612 - DNA, 25 bp, Homo sapien
tatgtaatagcaagttgaaacccac

SEQ ID NO: 4330613 - DNA, 25 bp, Homo sapien
ttcaataaagctagtccctcaggcc

SEQ ID NO: 4330614 - DNA, 25 bp, Homo sapien
caaacccagggcgtataatggtgtc

SEQ ID NO: 4330615 - DNA, 25 bp, Homo sapien
cacaaatcattcatctgataaagct

SEQ ID NO: 4330616 - DNA, 25 bp, Homo sapien
gtcttcatcatcagttcccatcgca

SEQ ID NO: 4330617 - DNA, 25 bp, Homo sapien
tcccatcgcatttgagcaatctttt

SEQ ID NO: 4330618 - DNA, 25 bp, Homo sapien
tctgtagtgtattcaaccgagaatc

SEQ ID NO: 4330619 - DNA, 25 bp, Homo sapien
aacttgctgatcatgagctgccgga

SEQ ID NO: 4330620 - DNA, 25 bp, Homo sapien
gctagctcctttcgaagttttctga

SEQ ID NO: 4330621 - DNA, 25 bp, Homo sapien
taacagaaagcgtttgaagggcttc

SEQ ID NO: 4330622 - DNA, 25 bp, Homo sapien
gaagggcttctagatttaccacacg

SEQ ID NO: 4330623 - DNA, 25 bp, Homo sapien
ccaaagtaccagaaagatcgctagg

SEQ ID NO: 4330624 - DNA, 25 bp, Homo sapien
catggattcgttcttgcagccgtct

SEQ ID NO: 4330625 - DNA, 25 bp, Homo sapien
gcagccgtctcaaggcatggttaga

SEQ ID NO: 4330626 - DNA, 25 bp, Homo sapien
tctcggatgagctgtttacgtctct

SEQ ID NO: 4330627 - DNA, 25 bp, Homo sapien
caactagcagttcattcagccgctg

SEQ ID NO: 4330628 - DNA, 25 bp, Homo sapien
tgcttctctcgctgataagcctcca

SEQ ID NO: 4330629 - DNA, 25 bp, Homo sapien
tgcattcagattagttgccacaatt

SEQ ID NO: 4330630 - DNA, 25 bp, Homo sapien
ctggtggagcttgagcggaatcaca

SEQ ID NO: 4330631 - DNA, 25 bp, Homo sapien
gaagggccagctcaaaaagagccac

SEQ ID NO: 4330632 - DNA, 25 bp, Homo sapien
caatgtatcatattcctttttgagg

SEQ ID NO: 4330633 - DNA, 25 bp, Homo sapien
aagcctcctcaatgtccagcctttt

SEQ ID NO: 4330634 - DNA, 25 bp, Homo sapien
cttttctctcgaaggtgaagggcca

SEQ ID NO: 4330635 - DNA, 25 bp, Homo sapien
aatagaatcatcaaaaacctcatct

SEQ ID NO: 4330636 - DNA, 25 bp, Homo sapien
ctctccaagctagattcttcttcac

SEQ ID NO: 4330637 - DNA, 25 bp, Homo sapien
tctccaagctagattcttcttcact

SEQ ID NO: 4330638 - DNA, 25 bp, Homo sapien
tgttttctccaatggctgcttgaaa

SEQ ID NO: 4330639 - DNA, 25 bp, Homo sapien
ccttcatgaggaagtttgcaaattt

SEQ ID NO: 4330640 - DNA, 25 bp, Homo sapien
cctggagtttggtgatttcattctt

SEQ ID NO: 4330641 - DNA, 25 bp, Homo sapien
aaccagcatagagtgccttttcttg

SEQ ID NO: 4330642 - DNA, 25 bp, Homo sapien
aaataaggtgacatggtgcaggtca

SEQ ID NO: 4330643 - DNA, 25 bp, Homo sapien
taaggagacggagttctgcatcgaa

SEQ ID NO: 4330644 - DNA, 25 bp, Homo sapien
gcatcgaaagtgacaaccagttctt

SEQ ID NO: 4330645 - DNA, 25 bp, Homo sapien
ggaattaacacgttcttgaagtatg

SEQ ID NO: 4330646 - DNA, 25 bp, Homo sapien
cactttggtatatctaggctgaatg

SEQ ID NO: 4330647 - DNA, 25 bp, Homo sapien
ctgttgcatgtacacgtgtttaatc

SEQ ID NO: 4330648 - DNA, 25 bp, Homo sapien
catccgttggctctgctttttcaaa

SEQ ID NO: 4330649 - DNA, 25 bp, Homo sapien
acgtgtttaatctcgtctctcttca

SEQ ID NO: 4330650 - DNA, 25 bp, Homo sapien
cagaccctgtctgttccactccggg

SEQ ID NO: 4330651 - DNA, 25 bp, Homo sapien
cacgggttgtcaaatccccatcctt

SEQ ID NO: 4330652 - DNA, 25 bp, Homo sapien
gatgatctagatattgaatcacggg

SEQ ID NO: 4330653 - DNA, 25 bp, Homo sapien
tttgctgttgcttaaaatttaggag

SEQ ID NO: 4330654 - DNA, 25 bp, Homo sapien
ttaaggtctctaagagagagaatgc

SEQ ID NO: 4330655 - DNA, 25 bp, Homo sapien
tatctgaggaattttgggaatgggt

SEQ ID NO: 4330656 - DNA, 25 bp, Homo sapien
tgtatttcctcaacaacagccactt

SEQ ID NO: 4330657 - DNA, 25 bp, Homo sapien
tatgtgaagagtcgactgaatgttc

SEQ ID NO: 4330658 - DNA, 25 bp, Homo sapien
catgtgctcaggtatcttgtagtct

SEQ ID NO: 4330659 - DNA, 25 bp, Homo sapien
tattctcatgtgctcaggtatcttg

SEQ ID NO: 4330660 - DNA, 25 bp, Homo sapien
tgatggcttgaagatctttgggatc

SEQ ID NO: 4330661 - DNA, 25 bp, Homo sapien
gaaatctcccatatacacctgggct

SEQ ID NO: 4330662 - DNA, 25 bp, Homo sapien
taaaagatccagctgacctgtttat

SEQ ID NO: 4330663 - DNA, 25 bp, Homo sapien
gatggttaaagataaaggtacgagc

SEQ ID NO: 4330664 - DNA, 25 bp, Homo sapien
tggaattcctggaccggaaactcta

SEQ ID NO: 4330665 - DNA, 25 bp, Homo sapien
ggtacgagccaaaactataagatgt

SEQ ID NO: 4330666 - DNA, 25 bp, Homo sapien
tcgctgttgaatctttagttgtgcc

SEQ ID NO: 4330667 - DNA, 25 bp, Homo sapien
gatgatttcacttagggttttaggc

SEQ ID NO: 4330668 - DNA, 25 bp, Homo sapien
tttagttgtgccctttcagctttta

SEQ ID NO: 4330669 - DNA, 25 bp, Homo sapien
tcttcttgtatggtaacactcccac

SEQ ID NO: 4330670 - DNA, 25 bp, Homo sapien
aagaggatatcttgtggtcactcag

SEQ ID NO: 4330671 - DNA, 25 bp, Homo sapien
cactcagtatggcatgaaccacaat

SEQ ID NO: 4330672 - DNA, 25 bp, Homo sapien
tttggagtacttagagggctgcacc

SEQ ID NO: 4330673 - DNA, 25 bp, Homo sapien
gattgactagctcgtttgaatttgg

SEQ ID NO: 4330674 - DNA, 25 bp, Homo sapien
tcattaggccgagttcatgtttctc

SEQ ID NO: 4330675 - DNA, 25 bp, Homo sapien
cacggatttgggaatctacatcaaa

SEQ ID NO: 4330676 - DNA, 25 bp, Homo sapien
cgattctttagcttcattaggccga

SEQ ID NO: 4330677 - DNA, 25 bp, Homo sapien
tctgtgcatctcagcacggatttgg

SEQ ID NO: 4330678 - DNA, 25 bp, Homo sapien
acactgttagtgctgtccagattct

SEQ ID NO: 4330679 - DNA, 25 bp, Homo sapien
tatacactgttagtgctgtccagat

SEQ ID NO: 4330680 - DNA, 25 bp, Homo sapien
tacactgttagtgctgtccagattc

SEQ ID NO: 4330681 - DNA, 25 bp, Homo sapien
atacactgttagtgctgtccagatt

SEQ ID NO: 4330682 - DNA, 25 bp, Homo sapien
atgttatcgatgtaaaaaagttgtg

SEQ ID NO: 4330683 - DNA, 25 bp, Homo sapien
aaagttgtggaatatgttccaagtc

SEQ ID NO: 4330684 - DNA, 25 bp, Homo sapien
caagtctatggaaagaagatgtttc

SEQ ID NO: 4330685 - DNA, 25 bp, Homo sapien
aactggagctaatggtctgctggaa

SEQ ID NO: 4330686 - DNA, 25 bp, Homo sapien
tttcactaggcatagcttcacagtc

SEQ ID NO: 4330687 - DNA, 25 bp, Homo sapien
acagtacactagaaggcactcctcg

SEQ ID NO: 4330688 - DNA, 25 bp, Homo sapien
cagtgtaccggagtgctctgtgaag

SEQ ID NO: 4330689 - DNA, 25 bp, Homo sapien
caatttttgtctgatacagtgtacc

SEQ ID NO: 4330690 - DNA, 25 bp, Homo sapien
tgtcttagagttacccaaactgaca

SEQ ID NO: 4330691 - DNA, 25 bp, Homo sapien
agagttacccaaactgacaatcttt

SEQ ID NO: 4330692 - DNA, 25 bp, Homo sapien
cttagagttacccaaactgacaatc

SEQ ID NO: 4330693 - DNA, 25 bp, Homo sapien
gtcttagagttacccaaactgacaa

SEQ ID NO: 4330694 - DNA, 25 bp, Homo sapien
tttttcacacagtcttccgatagca

SEQ ID NO: 4330695 - DNA, 25 bp, Homo sapien
tcacacagtcttccgatagcaatac

SEQ ID NO: 4330696 - DNA, 25 bp, Homo sapien
acagtcttccgatagcaataccagt

SEQ ID NO: 4330697 - DNA, 25 bp, Homo sapien
catttttcacacagtcttccgatag

SEQ ID NO: 4330698 - DNA, 25 bp, Homo sapien
cttccccatgtattcctttcatgtg

SEQ ID NO: 4330699 - DNA, 25 bp, Homo sapien
atagtcatctctatccagaaatagc

SEQ ID NO: 4330700 - DNA, 25 bp, Homo sapien
gttctataacaacagttgatgtaaa

SEQ ID NO: 4330701 - DNA, 25 bp, Homo sapien
tgtaaaacaatttgtgtcaacaaga

SEQ ID NO: 4330702 - DNA, 25 bp, Homo sapien
ttcactcctcaaagctttgatttgc

SEQ ID NO: 4330703 - DNA, 25 bp, Homo sapien
tctcttccgtgcctttatttctccc

SEQ ID NO: 4330704 - DNA, 25 bp, Homo sapien
gttcgtttaaactgcatatgctttg

SEQ ID NO: 4330705 - DNA, 25 bp, Homo sapien
tctaatagattacaaaattcactcc

SEQ ID NO: 4330706 - DNA, 25 bp, Homo sapien
gtaggctttgggatcttcaatgtct

SEQ ID NO: 4330707 - DNA, 25 bp, Homo sapien
ctgtaggctttgggatcttcaatgt

SEQ ID NO: 4330708 - DNA, 25 bp, Homo sapien
tgtaggctttgggatcttcaatgtc

SEQ ID NO: 4330709 - DNA, 25 bp, Homo sapien
taggctttgggatcttcaatgtctt

SEQ ID NO: 4330710 - DNA, 25 bp, Homo sapien
tggaattggctctgtttcaattcca

SEQ ID NO: 4330711 - DNA, 25 bp, Homo sapien
ggaattggctctgtttcaattccaa

SEQ ID NO: 4330712 - DNA, 25 bp, Homo sapien
gaattggctctgtttcaattccaaa

SEQ ID NO: 4330713 - DNA, 25 bp, Homo sapien
ctggaattggctctgtttcaattcc

SEQ ID NO: 4330714 - DNA, 25 bp, Homo sapien
tccttagcataaattcagaaaaaat

SEQ ID NO: 4330715 - DNA, 25 bp, Homo sapien
tgctccagcagtcaccaagaaacga

SEQ ID NO: 4330716 - DNA, 25 bp, Homo sapien
tacatccataattattgtcatgcat

SEQ ID NO: 4330717 - DNA, 25 bp, Homo sapien
cctgggagatggaactttggccttc

SEQ ID NO: 4330718 - DNA, 25 bp, Homo sapien
attgaagtgccagtagtccaccaaa

SEQ ID NO: 4330719 - DNA, 25 bp, Homo sapien
catagactcgaattgctccattttt

SEQ ID NO: 4330720 - DNA, 25 bp, Homo sapien
gatttaggacatagactcgaattgc

SEQ ID NO: 4330721 - DNA, 25 bp, Homo sapien
attttgatttaggacatagactcga

SEQ ID NO: 4330722 - DNA, 25 bp, Homo sapien
acatagactcgaattgctccatttt

SEQ ID NO: 4330723 - DNA, 25 bp, Homo sapien
caaggggggaactcacagtgatata

SEQ ID NO: 4330724 - DNA, 25 bp, Homo sapien
agtgatatagaaaaccagaatcata

SEQ ID NO: 4330725 - DNA, 25 bp, Homo sapien
caagataacggacatcaataggttc

SEQ ID NO: 4330726 - DNA, 25 bp, Homo sapien
agtgatagtttggatgggattgtcc

SEQ ID NO: 4330727 - DNA, 25 bp, Homo sapien
tatttcaggtaatggctcttcttcc

SEQ ID NO: 4330728 - DNA, 25 bp, Homo sapien
gttgacggaataaatatttcaggta

SEQ ID NO: 4330729 - DNA, 25 bp, Homo sapien
gtaaaatccacagaggatgggagag

SEQ ID NO: 4330730 - DNA, 25 bp, Homo sapien
ttccctggctctgagtaaaatccac

SEQ ID NO: 4330731 - DNA, 25 bp, Homo sapien
ctctgctgctagcttgttcctcctt

SEQ ID NO: 4330732 - DNA, 25 bp, Homo sapien
ttctccttcaactccctttgtctct

SEQ ID NO: 4330733 - DNA, 25 bp, Homo sapien
catctctgctgctagcttgttcctc

SEQ ID NO: 4330734 - DNA, 25 bp, Homo sapien
tccctcttttcaatttctattaatc

SEQ ID NO: 4330735 - DNA, 25 bp, Homo sapien
cagaatcttagatttgacacttgaa

SEQ ID NO: 4330736 - DNA, 25 bp, Homo sapien
cataggagactacatcatgatcatc

SEQ ID NO: 4330737 - DNA, 25 bp, Homo sapien
cagataattagtaaagtactttcag

SEQ ID NO: 4330738 - DNA, 25 bp, Homo sapien
cttgctttatggttggaagtggagc

SEQ ID NO: 4330739 - DNA, 25 bp, Homo sapien
tttgatctatcccagagaaagttcc

SEQ ID NO: 4330740 - DNA, 25 bp, Homo sapien
gatcaaccaggtagtcagaagatga

SEQ ID NO: 4330741 - DNA, 25 bp, Homo sapien
tattctacagctgtcggtggactgc

SEQ ID NO: 4330742 - DNA, 25 bp, Homo sapien
tatttggcctatggtgttatacagg

SEQ ID NO: 4330743 - DNA, 25 bp, Homo sapien
cccgttggagcaaagcctgatataa

SEQ ID NO: 4330744 - DNA, 25 bp, Homo sapien
gcttctgattgttagagagactgac

SEQ ID NO: 4330745 - DNA, 25 bp, Homo sapien
tgcctgtggccaaaagtcccgttgg

SEQ ID NO: 4330746 - DNA, 25 bp, Homo sapien
catttcgacatgctgtgcctgtggc

SEQ ID NO: 4330747 - DNA, 25 bp, Homo sapien
ataaccaatcggcttataatccctt

SEQ ID NO: 4330748 - DNA, 25 bp, Homo sapien
tcggcttataatccctttccacttc

SEQ ID NO: 4330749 - DNA, 25 bp, Homo sapien
gagtattaatataaccaatcggctt

SEQ ID NO: 4330750 - DNA, 25 bp, Homo sapien
caggagtattaatataaccaatcgg

SEQ ID NO: 4330751 - DNA, 25 bp, Homo sapien
tcttccgtcccgcaaaaatcgtgag

SEQ ID NO: 4330752 - DNA, 25 bp, Homo sapien
catcacgttcataagctaaagcagt

SEQ ID NO: 4330753 - DNA, 25 bp, Homo sapien
aaatcgtgagcccttttggatcata

SEQ ID NO: 4330754 - DNA, 25 bp, Homo sapien
taaagcagtgacacaagcagtatgg

SEQ ID NO: 4330755 - DNA, 25 bp, Homo sapien
caataatttgtgctccagtgaagtt

SEQ ID NO: 4330756 - DNA, 25 bp, Homo sapien
tacaataatttgtgctccagtgaag

SEQ ID NO: 4330757 - DNA, 25 bp, Homo sapien
taatttgtgctccagtgaagtttac

SEQ ID NO: 4330758 - DNA, 25 bp, Homo sapien
ctacaataatttgtgctccagtgaa

SEQ ID NO: 4330759 - DNA, 25 bp, Homo sapien
ctgggccaaaggagttttgctagca

SEQ ID NO: 4330760 - DNA, 25 bp, Homo sapien
gcaaaatcatagattcgaacagagc

SEQ ID NO: 4330761 - DNA, 25 bp, Homo sapien
cccaaacaagggcagtacctccttg

SEQ ID NO: 4330762 - DNA, 25 bp, Homo sapien
aagggcagtacctccttgtttgaat

SEQ ID NO: 4330763 - DNA, 25 bp, Homo sapien
cagttgtggccatgagataagtgag

SEQ ID NO: 4330764 - DNA, 25 bp, Homo sapien
caatagctccagaatggaaggagaa

SEQ ID NO: 4330765 - DNA, 25 bp, Homo sapien
gagaggagaaacagccacggcttca

SEQ ID NO: 4330766 - DNA, 25 bp, Homo sapien
ccaaggcagttgtggccatgagata

SEQ ID NO: 4330767 - DNA, 25 bp, Homo sapien
aaggtcaagcttccatatggctcca

SEQ ID NO: 4330768 - DNA, 25 bp, Homo sapien
tgaaaaactaaggtcaagcttccat

SEQ ID NO: 4330769 - DNA, 25 bp, Homo sapien
aactaaggtcaagcttccatatggc

SEQ ID NO: 4330770 - DNA, 25 bp, Homo sapien
gaaaaactaaggtcaagcttccata

SEQ ID NO: 4330771 - DNA, 25 bp, Homo sapien
tctcatctattacatcagcagtgtc

SEQ ID NO: 4330772 - DNA, 25 bp, Homo sapien
taggctcaatctccaacaatccagt

SEQ ID NO: 4330773 - DNA, 25 bp, Homo sapien
acttgaagttcattaataggctcaa

SEQ ID NO: 4330774 - DNA, 25 bp, Homo sapien
catttttatcatagagaagagattc

SEQ ID NO: 4330775 - DNA, 25 bp, Homo sapien
gacagagctccactttgatcagacc

SEQ ID NO: 4330776 - DNA, 25 bp, Homo sapien
catgacttgcttgtccctcgacaga

SEQ ID NO: 4330777 - DNA, 25 bp, Homo sapien
tctgacccaacagtgataacttcac

SEQ ID NO: 4330778 - DNA, 25 bp, Homo sapien
cagcattatctggttaatgggacca

SEQ ID NO: 4330779 - DNA, 25 bp, Homo sapien
tgagaccggtgaacgtaaaagccat

SEQ ID NO: 4330780 - DNA, 25 bp, Homo sapien
tagtgattgttttgccaaatcgacc

SEQ ID NO: 4330781 - DNA, 25 bp, Homo sapien
aaatcgacctagtgatccctgcagc

SEQ ID NO: 4330782 - DNA, 25 bp, Homo sapien
catgtagccttctatatcagtagtg

SEQ ID NO: 4330783 - DNA, 25 bp, Homo sapien
gggttactaccaacagaggccagca

SEQ ID NO: 4330784 - DNA, 25 bp, Homo sapien
ccgctgtagttaaagtccacataag

SEQ ID NO: 4330785 - DNA, 25 bp, Homo sapien
gatgtggcctgatcccgatgtagta

SEQ ID NO: 4330786 - DNA, 25 bp, Homo sapien
ccagttccagatagtcagtgtgtag

SEQ ID NO: 4330787 - DNA, 25 bp, Homo sapien
tctgtcttccactagttctgtttct

SEQ ID NO: 4330788 - DNA, 25 bp, Homo sapien
ttcagaatgttgttatccttgaaca

SEQ ID NO: 4330789 - DNA, 25 bp, Homo sapien
ttcttcagaatgttgttatccttga

SEQ ID NO: 4330790 - DNA, 25 bp, Homo sapien
gaatgttgttatccttgaacatgaa

SEQ ID NO: 4330791 - DNA, 25 bp, Homo sapien
ctcgaaggactctgtatggtctcag

SEQ ID NO: 4330792 - DNA, 25 bp, Homo sapien
ctcagagaaggatattcatagatga

SEQ ID NO: 4330793 - DNA, 25 bp, Homo sapien
gaaggactctgtatggtctcagaga

SEQ ID NO: 4330794 - DNA, 25 bp, Homo sapien
tctcagagaaggatattcatagatg

SEQ ID NO: 4330795 - DNA, 25 bp, Homo sapien
tctgaattcatacaggtcatgagtt

SEQ ID NO: 4330796 - DNA, 25 bp, Homo sapien
tctgtgtagtgttggatgcacagta

SEQ ID NO: 4330797 - DNA, 25 bp, Homo sapien
tagtcttataacaaactctccgagg

SEQ ID NO: 4330798 - DNA, 25 bp, Homo sapien
tatgtctacatcctatgtgtgtgtc

SEQ ID NO: 4330799 - DNA, 25 bp, Homo sapien
tatgaaaaacttgcacgactatggg

SEQ ID NO: 4330800 - DNA, 25 bp, Homo sapien
gtcacctaacctctataagcccatt

SEQ ID NO: 4330801 - DNA, 25 bp, Homo sapien
cactcatctccacttctaatctaaa

SEQ ID NO: 4330802 - DNA, 25 bp, Homo sapien
cagtcttcagattaagattctttaa

SEQ ID NO: 4330803 - DNA, 25 bp, Homo sapien
cttcaccactgctacttcgcaggta

SEQ ID NO: 4330804 - DNA, 25 bp, Homo sapien
ccactgctacttcgcaggtagatct

SEQ ID NO: 4330805 - DNA, 25 bp, Homo sapien
acttcgcaggtagatctgttccttg

SEQ ID NO: 4330806 - DNA, 25 bp, Homo sapien
aatgacgccaattccttcaccactg

SEQ ID NO: 4330807 - DNA, 25 bp, Homo sapien
ggctcgctttctacagtcataacca

SEQ ID NO: 4330808 - DNA, 25 bp, Homo sapien
gttgtaggttggctcgctttctaca

SEQ ID NO: 4330809 - DNA, 25 bp, Homo sapien
tatatggcgatactgtcgtccagaa

SEQ ID NO: 4330810 - DNA, 25 bp, Homo sapien
gatactgtcgtccagaagttgtagg

SEQ ID NO: 4330811 - DNA, 25 bp, Homo sapien
aaaactgaagtagagggctaggcgc

SEQ ID NO: 4330812 - DNA, 25 bp, Homo sapien
gagtaggctagagtctaactccctt

SEQ ID NO: 4330813 - DNA, 25 bp, Homo sapien
tcagtaactggctcaagagtaggct

SEQ ID NO: 4330814 - DNA, 25 bp, Homo sapien
tcaagaattcggcagccttctgagc

SEQ ID NO: 4330815 - DNA, 25 bp, Homo sapien
gccacgtggtgataagtactaacta

SEQ ID NO: 4330816 - DNA, 25 bp, Homo sapien
agtaggtcccggaaggcatcagagc

SEQ ID NO: 4330817 - DNA, 25 bp, Homo sapien
aaaactgagtcagggagtacaccac

SEQ ID NO: 4330818 - DNA, 25 bp, Homo sapien
gaagcacagtacattgccagctaag

SEQ ID NO: 4330819 - DNA, 25 bp, Homo sapien
cctctgacctaagaaatgaaaatcc

SEQ ID NO: 4330820 - DNA, 25 bp, Homo sapien
tgacctctgacctaagaaatgaaaa

SEQ ID NO: 4330821 - DNA, 25 bp, Homo sapien
aaaaggcatcgaagcaagctccata

SEQ ID NO: 4330822 - DNA, 25 bp, Homo sapien
tgtgagaagatccagtggtatgttt

SEQ ID NO: 4330823 - DNA, 25 bp, Homo sapien
gcaagctccatataatcatagaaga

SEQ ID NO: 4330824 - DNA, 25 bp, Homo sapien
gatccagtggtatgtttgaatccag

SEQ ID NO: 4330825 - DNA, 25 bp, Homo sapien
tgtagtgctttgcaaatcaccatac

SEQ ID NO: 4330826 - DNA, 25 bp, Homo sapien
gcaaatcaccatactgaaatgaact

SEQ ID NO: 4330827 - DNA, 25 bp, Homo sapien
tctaaatatgatccttcccctttgg

SEQ ID NO: 4330828 - DNA, 25 bp, Homo sapien
ttccttccaaacgttcctcatctga

SEQ ID NO: 4330829 - DNA, 25 bp, Homo sapien
gtcctgaaggcaatgctagacaaag

SEQ ID NO: 4330830 - DNA, 25 bp, Homo sapien
caatgctagacaaagggtcattatc

SEQ ID NO: 4330831 - DNA, 25 bp, Homo sapien
ggaaagttgagagtagcatccagga

SEQ ID NO: 4330832 - DNA, 25 bp, Homo sapien
aaaggtctgcgcctaacagcatctg

SEQ ID NO: 4330833 - DNA, 25 bp, Homo sapien
tttctccccatcagtatcctgatca

SEQ ID NO: 4330834 - DNA, 25 bp, Homo sapien
ccccatcagtatcctgatcatctgg

SEQ ID NO: 4330835 - DNA, 25 bp, Homo sapien
tcagtatcctgatcatctggttcct

SEQ ID NO: 4330836 - DNA, 25 bp, Homo sapien
atttctccccatcagtatcctgatc

SEQ ID NO: 4330837 - DNA, 25 bp, Homo sapien
taaagcagatatggtacactacacg

SEQ ID NO: 4330838 - DNA, 25 bp, Homo sapien
gagggttacttaaactgccacactg

SEQ ID NO: 4330839 - DNA, 25 bp, Homo sapien
tcttctacgatatgcctggcaagca

SEQ ID NO: 4330840 - DNA, 25 bp, Homo sapien
tctctgaagatagactggtatgcct

SEQ ID NO: 4330841 - DNA, 25 bp, Homo sapien
tccttccacctaattgtagaatata

SEQ ID NO: 4330842 - DNA, 25 bp, Homo sapien
tactctacagtgagtaactgttttt

SEQ ID NO: 4330843 - DNA, 25 bp, Homo sapien
tttgggatacacagacttgctttct

SEQ ID NO: 4330844 - DNA, 25 bp, Homo sapien
aaagcagtctagtgtgttggccagg

SEQ ID NO: 4330845 - DNA, 25 bp, Homo sapien
ctgggtcataaaaggtaactgaaga

SEQ ID NO: 4330846 - DNA, 25 bp, Homo sapien
tgggtcataaaaggtaactgaagaa

SEQ ID NO: 4330847 - DNA, 25 bp, Homo sapien
tcctgggtcataaaaggtaactgaa

SEQ ID NO: 4330848 - DNA, 25 bp, Homo sapien
cctgggtcataaaaggtaactgaag

SEQ ID NO: 4330849 - DNA, 25 bp, Homo sapien
caaaagtttgctgagctaccgcagg

SEQ ID NO: 4330850 - DNA, 25 bp, Homo sapien
gacgaaggctataacactggtccag

SEQ ID NO: 4330851 - DNA, 25 bp, Homo sapien
gctgctctgacttggccgggtctaa

SEQ ID NO: 4330852 - DNA, 25 bp, Homo sapien
cacagtgtctagctccgagcctgag

SEQ ID NO: 4330853 - DNA, 25 bp, Homo sapien
tcctctcttcacagcgtctgccgga

SEQ ID NO: 4330854 - DNA, 25 bp, Homo sapien
agcgtctgccggaggcctccgttta

SEQ ID NO: 4330855 - DNA, 25 bp, Homo sapien
gaaggtactgaccgccgcggctcct

SEQ ID NO: 4330856 - DNA, 25 bp, Homo sapien
tactccggttaccgagacaacgcca

SEQ ID NO: 4330857 - DNA, 25 bp, Homo sapien
cttccagggaggcggaaccagggcg

SEQ ID NO: 4330858 - DNA, 25 bp, Homo sapien
aaccagggcgggccgtggggcgcat

SEQ ID NO: 4330859 - DNA, 25 bp, Homo sapien
gaaccagggcgggccgtggggcgca

SEQ ID NO: 4330860 - DNA, 25 bp, Homo sapien
tgaaaaatctatcctgagccgggtg

SEQ ID NO: 4330861 - DNA, 25 bp, Homo sapien
gcttatagtacggtgtctgccacag

SEQ ID NO: 4330862 - DNA, 25 bp, Homo sapien
tatcccataaggtgtcatgaagcac

SEQ ID NO: 4330863 - DNA, 25 bp, Homo sapien
ttcctatcatagagccagggagcag

SEQ ID NO: 4330864 - DNA, 25 bp, Homo sapien
tgttacatattcctgaaagccagac

SEQ ID NO: 4330865 - DNA, 25 bp, Homo sapien
gaaaagtgggtgttacatattcctg

SEQ ID NO: 4330866 - DNA, 25 bp, Homo sapien
caaccactcttacctgcttaagcaa

SEQ ID NO: 4330867 - DNA, 25 bp, Homo sapien
ggaaaaagtgatgaacagcaatgac

SEQ ID NO: 4330868 - DNA, 25 bp, Homo sapien
atgcaaagcaaattagttcttcagg

SEQ ID NO: 4330869 - DNA, 25 bp, Homo sapien
caaagcaaattagttcttcaggaaa

SEQ ID NO: 4330870 - DNA, 25 bp, Homo sapien
tgcaaagcaaattagttcttcagga

SEQ ID NO: 4330871 - DNA, 25 bp, Homo sapien
gcaaagcaaattagttcttcaggaa

SEQ ID NO: 4330872 - DNA, 25 bp, Homo sapien
caaaaaataattgctttatttctct

SEQ ID NO: 4330873 - DNA, 25 bp, Homo sapien
aaataattgctttatttctctgttt

SEQ ID NO: 4330874 - DNA, 25 bp, Homo sapien
taattgctttatttctctgtttcat

SEQ ID NO: 4330875 - DNA, 25 bp, Homo sapien
gctttatttctctgtttcattagta

SEQ ID NO: 4330876 - DNA, 25 bp, Homo sapien
attcacaggatctttgtaggtttta

SEQ ID NO: 4330877 - DNA, 25 bp, Homo sapien
taattcacaggatctttgtaggttt

SEQ ID NO: 4330878 - DNA, 25 bp, Homo sapien
aattcacaggatctttgtaggtttt

SEQ ID NO: 4330879 - DNA, 25 bp, Homo sapien
ctaattcacaggatctttgtaggtt

SEQ ID NO: 4330880 - DNA, 25 bp, Homo sapien
aacttaaaagtcagagcagggaaag

SEQ ID NO: 4330881 - DNA, 25 bp, Homo sapien
aattattaagaacaaactcagtgag

SEQ ID NO: 4330882 - DNA, 25 bp, Homo sapien
caaactcagtgagacttgacttcac

SEQ ID NO: 4330883 - DNA, 25 bp, Homo sapien
ataaaaacttaaaagtcagagcagg

SEQ ID NO: 4330884 - DNA, 25 bp, Homo sapien
tagaaagagcaaaccagccttcttc

SEQ ID NO: 4330885 - DNA, 25 bp, Homo sapien
tgggtagaaagagcaaaccagcctt

SEQ ID NO: 4330886 - DNA, 25 bp, Homo sapien
gaaagagcaaaccagccttcttcat

SEQ ID NO: 4330887 - DNA, 25 bp, Homo sapien
gggtagaaagagcaaaccagccttc

SEQ ID NO: 4330888 - DNA, 25 bp, Homo sapien
gattaagaggtgtgaatctcccact

SEQ ID NO: 4330889 - DNA, 25 bp, Homo sapien
catttagtggagaacaagaattacc

SEQ ID NO: 4330890 - DNA, 25 bp, Homo sapien
aggtggcatttagtggagaacaaga

SEQ ID NO: 4330891 - DNA, 25 bp, Homo sapien
agaacaagaattaccagtagccccg

SEQ ID NO: 4330892 - DNA, 25 bp, Homo sapien
tatttatcccgctgacgggagagac

SEQ ID NO: 4330893 - DNA, 25 bp, Homo sapien
tcccgctgacgggagagacagtact

SEQ ID NO: 4330894 - DNA, 25 bp, Homo sapien
ggagagacagtactacattttgagc

SEQ ID NO: 4330895 - DNA, 25 bp, Homo sapien
ttcttgtatttatcccgctgacggg

SEQ ID NO: 4330896 - DNA, 25 bp, Homo sapien
ctggaatagatacctcaattgtcct

SEQ ID NO: 4330897 - DNA, 25 bp, Homo sapien
ggaatagatacctcaattgtcctct

SEQ ID NO: 4330898 - DNA, 25 bp, Homo sapien
tggaatagatacctcaattgtcctc

SEQ ID NO: 4330899 - DNA, 25 bp, Homo sapien
aatagatacctcaattgtcctcttt

SEQ ID NO: 4330900 - DNA, 25 bp, Homo sapien
gcagcatatgacctaagtgaaccgt

SEQ ID NO: 4330901 - DNA, 25 bp, Homo sapien
tcttcatgtagctgtcccttgaggg

SEQ ID NO: 4330902 - DNA, 25 bp, Homo sapien
gaagcctagaataaacagagagccc

SEQ ID NO: 4330903 - DNA, 25 bp, Homo sapien
tattcaagcccacacatggcaggca

SEQ ID NO: 4330904 - DNA, 25 bp, Homo sapien
acttgcaaaatcaagaaaactgaaa

SEQ ID NO: 4330905 - DNA, 25 bp, Homo sapien
tttaaatcatgaatttgtgaccaac

SEQ ID NO: 4330906 - DNA, 25 bp, Homo sapien
aaactgaaaaccttcatatttctag

SEQ ID NO: 4330907 - DNA, 25 bp, Homo sapien
aatataaacttgcaaaatcaagaaa

SEQ ID NO: 4330908 - DNA, 25 bp, Homo sapien
caattctgcaatccgttcctccata

SEQ ID NO: 4330909 - DNA, 25 bp, Homo sapien
gctctatcaactgcagtagttttcc

SEQ ID NO: 4330910 - DNA, 25 bp, Homo sapien
tctgagaggtaactgaacaggtgac

SEQ ID NO: 4330911 - DNA, 25 bp, Homo sapien
gagcctccatactttgtcgattcaa

SEQ ID NO: 4330912 - DNA, 25 bp, Homo sapien
ccagtactgggagctcttctgagaa

SEQ ID NO: 4330913 - DNA, 25 bp, Homo sapien
tgtgagaggttaacaaaaggagcct

SEQ ID NO: 4330914 - DNA, 25 bp, Homo sapien
tgtgccttgatagctgaattctgca

SEQ ID NO: 4330915 - DNA, 25 bp, Homo sapien
tcttgtttgttcaactcccggagtc

SEQ ID NO: 4330916 - DNA, 25 bp, Homo sapien
tctgcctgggtggtgttaacaacac

SEQ ID NO: 4330917 - DNA, 25 bp, Homo sapien
agtttaacgggcaactcttcctgtg

SEQ ID NO: 4330918 - DNA, 25 bp, Homo sapien
ccagattcatgttatctggagggtc

SEQ ID NO: 4330919 - DNA, 25 bp, Homo sapien
tggagggtctggcacctgagacagt

SEQ ID NO: 4330920 - DNA, 25 bp, Homo sapien
ccagctcctgaccgcgagtgatctg

SEQ ID NO: 4330921 - DNA, 25 bp, Homo sapien
cggagtctcgctcactcagtgctca

SEQ ID NO: 4330922 - DNA, 25 bp, Homo sapien
cgctcactcagtgctcaatgttgcc

SEQ ID NO: 4330923 - DNA, 25 bp, Homo sapien
tccagctcctgaccgcgagtgatct

SEQ ID NO: 4330924 - DNA, 25 bp, Homo sapien
tagcaagactccaccagaagacaga

SEQ ID NO: 4330925 - DNA, 25 bp, Homo sapien
cagagatgtgccctagccaatgagt

SEQ ID NO: 4330926 - DNA, 25 bp, Homo sapien
tattagctggaaaagtagtggcaac

SEQ ID NO: 4330927 - DNA, 25 bp, Homo sapien
taatagcaagacttgccaggtgcgg

SEQ ID NO: 4330928 - DNA, 25 bp, Homo sapien
tcacaggacagttcttaatagcatg

SEQ ID NO: 4330929 - DNA, 25 bp, Homo sapien
tgtccataactcttctacctgtggc

SEQ ID NO: 4330930 - DNA, 25 bp, Homo sapien
catgtgtgagtgatatcagttgctc

SEQ ID NO: 4330931 - DNA, 25 bp, Homo sapien
tgttgtgaccatgtactgctgaagt

SEQ ID NO: 4330932 - DNA, 25 bp, Homo sapien
cttctctaagacgaagaatttcagc

SEQ ID NO: 4330933 - DNA, 25 bp, Homo sapien
tctacttctttacgtagctggatct

SEQ ID NO: 4330934 - DNA, 25 bp, Homo sapien
gatgatcacctaatacttgttccag

SEQ ID NO: 4330935 - DNA, 25 bp, Homo sapien
cagttgttgccttgtctctacttct

SEQ ID NO: 4330936 - DNA, 25 bp, Homo sapien
gaaccaggcgacagagggagctcac

SEQ ID NO: 4330937 - DNA, 25 bp, Homo sapien
aaggtaccgaaccaggcgacagagg

SEQ ID NO: 4330938 - DNA, 25 bp, Homo sapien
accgaaccaggcgacagagggagct

SEQ ID NO: 4330939 - DNA, 25 bp, Homo sapien
ttaaggtaccgaaccaggcgacaga

SEQ ID NO: 4330940 - DNA, 25 bp, Homo sapien
cagcgacaaagtgaagcctgtaaga

SEQ ID NO: 4330941 - DNA, 25 bp, Homo sapien
agtctgcagaggttgtgctacctga

SEQ ID NO: 4330942 - DNA, 25 bp, Homo sapien
cctgtaagaccctgactgctctgca

SEQ ID NO: 4330943 - DNA, 25 bp, Homo sapien
tcttcggcttggaaagagcatgcaa

SEQ ID NO: 4330944 - DNA, 25 bp, Homo sapien
gttcagcacgtgtcccacaacgtag

SEQ ID NO: 4330945 - DNA, 25 bp, Homo sapien
gtctcagtagattcttcaggctgaa

SEQ ID NO: 4330946 - DNA, 25 bp, Homo sapien
gaagcctggtttggagtctcttgac

SEQ ID NO: 4330947 - DNA, 25 bp, Homo sapien
cacaacgtagcttgagtctagagtc

SEQ ID NO: 4330948 - DNA, 25 bp, Homo sapien
aatgaacctaataaagcaggcacct

SEQ ID NO: 4330949 - DNA, 25 bp, Homo sapien
aaattactgcattcaagaatgaacc

SEQ ID NO: 4330950 - DNA, 25 bp, Homo sapien
tctcaagtgaacaaacttcttaaga

SEQ ID NO: 4330951 - DNA, 25 bp, Homo sapien
tagtcaattaggcaaaggcagtcaa

SEQ ID NO: 4330952 - DNA, 25 bp, Homo sapien
tctgctgaatgtcagtccacaactt

SEQ ID NO: 4330953 - DNA, 25 bp, Homo sapien
tgaaagagcagatgatggcgttcct

SEQ ID NO: 4330954 - DNA, 25 bp, Homo sapien
cctggaggagttatttgtgactggg

SEQ ID NO: 4330955 - DNA, 25 bp, Homo sapien
gtccacaacttactaattaactcaa

SEQ ID NO: 4330956 - DNA, 25 bp, Homo sapien
tgtggtatggctccatcctcctctc

SEQ ID NO: 4330957 - DNA, 25 bp, Homo sapien
gcagttttgtggtatggctccatcc

SEQ ID NO: 4330958 - DNA, 25 bp, Homo sapien
aacataggtatgtttgccctttctg

SEQ ID NO: 4330959 - DNA, 25 bp, Homo sapien
ttgtggtatggctccatcctcctct

SEQ ID NO: 4330960 - DNA, 25 bp, Homo sapien
ctgtctgtattcgtgttagactgag

SEQ ID NO: 4330961 - DNA, 25 bp, Homo sapien
tgagagtttagagagttatccaact

SEQ ID NO: 4330962 - DNA, 25 bp, Homo sapien
ttcgtgttagactgagagtttagag

SEQ ID NO: 4330963 - DNA, 25 bp, Homo sapien
tagagagttatccaactcattctca

SEQ ID NO: 4330964 - DNA, 25 bp, Homo sapien
tcttgaaagagttgttccaccctcc

SEQ ID NO: 4330965 - DNA, 25 bp, Homo sapien
taagccctccacatgttgtagaaca

SEQ ID NO: 4330966 - DNA, 25 bp, Homo sapien
tactcaaactgctctctacaaggtc

SEQ ID NO: 4330967 - DNA, 25 bp, Homo sapien
acatttaaatgtgagcaagcctctc

SEQ ID NO: 4330968 - DNA, 25 bp, Homo sapien
ttaccacaatgggaccctgagagga

SEQ ID NO: 4330969 - DNA, 25 bp, Homo sapien
gaggaatcaggagccactgttacat

SEQ ID NO: 4330970 - DNA, 25 bp, Homo sapien
cagactcattaaagatagattgggt

SEQ ID NO: 4330971 - DNA, 25 bp, Homo sapien
ggtgatagggtcttgatttaccaca

SEQ ID NO: 4330972 - DNA, 25 bp, Homo sapien
tcttttgctgcagctattagatgat

SEQ ID NO: 4330973 - DNA, 25 bp, Homo sapien
tgtgcgcctacgaggaaacagctct

SEQ ID NO: 4330974 - DNA, 25 bp, Homo sapien
atgatcagatttctccaacacatct

SEQ ID NO: 4330975 - DNA, 25 bp, Homo sapien
ctgtgcgcctacgaggaaacagctc

SEQ ID NO: 4330976 - DNA, 25 bp, Homo sapien
taattaaccttgctccatgagaacc

SEQ ID NO: 4330977 - DNA, 25 bp, Homo sapien
tattcacaattgtgacccaccacat

SEQ ID NO: 4330978 - DNA, 25 bp, Homo sapien
tctttgagccataaacttagaggtg

SEQ ID NO: 4330979 - DNA, 25 bp, Homo sapien
tagaggtgtttcaaccactagagtg

SEQ ID NO: 4330980 - DNA, 25 bp, Homo sapien
cacaggctagagtaaaagccagata

SEQ ID NO: 4330981 - DNA, 25 bp, Homo sapien
agtttccaacacttgactcaaattg

SEQ ID NO: 4330982 - DNA, 25 bp, Homo sapien
tacagtagtgcctctggattatgca

SEQ ID NO: 4330983 - DNA, 25 bp, Homo sapien
tgtgtcaagtcatgacctacaactt

SEQ ID NO: 4330984 - DNA, 25 bp, Homo sapien
gtcaagagcacatcagacccagaag

SEQ ID NO: 4330985 - DNA, 25 bp, Homo sapien
tctaagattatgctggccaaagagc

SEQ ID NO: 4330986 - DNA, 25 bp, Homo sapien
ggcatgggtacatcttacagcaaat

SEQ ID NO: 4330987 - DNA, 25 bp, Homo sapien
taaagcccatccatttgacaggtaa

SEQ ID NO: 4330988 - DNA, 25 bp, Homo sapien
catctttgtaagtgggaatggccat

SEQ ID NO: 4330989 - DNA, 25 bp, Homo sapien
cagaagctgtgtaataaaggactgc

SEQ ID NO: 4330990 - DNA, 25 bp, Homo sapien
cagaacttctgggtgacatgtaata

SEQ ID NO: 4330991 - DNA, 25 bp, Homo sapien
cctgctggctggcatatagctgaat

SEQ ID NO: 4330992 - DNA, 25 bp, Homo sapien
caaagctgccgtgaaaggtcagaca

SEQ ID NO: 4330993 - DNA, 25 bp, Homo sapien
tcaggacatgagcaggaaccactag

SEQ ID NO: 4330994 - DNA, 25 bp, Homo sapien
cactatactagtgcctgaggcagca

SEQ ID NO: 4330995 - DNA, 25 bp, Homo sapien
tgaacaccccacgtctggcaaaagg

SEQ ID NO: 4330996 - DNA, 25 bp, Homo sapien
agtgtactaatgctctattcttcga

SEQ ID NO: 4330997 - DNA, 25 bp, Homo sapien
tctattcttcgatttgtgtatttca

SEQ ID NO: 4330998 - DNA, 25 bp, Homo sapien
gagttcccagtgtactaatgctcta

SEQ ID NO: 4330999 - DNA, 25 bp, Homo sapien
tcttggagttcccagtgtactaatg

SEQ ID NO: 4331000 - DNA, 25 bp, Homo sapien
cagaagagaaaagtacataaaggaa

SEQ ID NO: 4331001 - DNA, 25 bp, Homo sapien
atacagaagagaaaagtacataaag

SEQ ID NO: 4331002 - DNA, 25 bp, Homo sapien
tacagaagagaaaagtacataaagg

SEQ ID NO: 4331003 - DNA, 25 bp, Homo sapien
gaagagaaaagtacataaaggaatg

SEQ ID NO: 4331004 - DNA, 25 bp, Homo sapien
gaacggttagatcagtcacggtatt

SEQ ID NO: 4331005 - DNA, 25 bp, Homo sapien
ggagttgcccgatgaacggttagat

SEQ ID NO: 4331006 - DNA, 25 bp, Homo sapien
cttcgggagttgcccgatgaacggt

SEQ ID NO: 4331007 - DNA, 25 bp, Homo sapien
cccgatgaacggttagatcagtcac

SEQ ID NO: 4331008 - DNA, 25 bp, Homo sapien
gactagggccatatcactgtgtcca

SEQ ID NO: 4331009 - DNA, 25 bp, Homo sapien
tgttacattatttactatcccacct

SEQ ID NO: 4331010 - DNA, 25 bp, Homo sapien
cagaacaccatcttgcatgactagg

SEQ ID NO: 4331011 - DNA, 25 bp, Homo sapien
tatttactatcccacctatactcac

SEQ ID NO: 4331012 - DNA, 25 bp, Homo sapien
cttacaccaactcggggaccacagc

SEQ ID NO: 4331013 - DNA, 25 bp, Homo sapien
ttcttacaccaactcggggaccaca

SEQ ID NO: 4331014 - DNA, 25 bp, Homo sapien
cagcggttcactctgacaaatgaca

SEQ ID NO: 4331015 - DNA, 25 bp, Homo sapien
cccattcttgtttcactgaagtttt

SEQ ID NO: 4331016 - DNA, 25 bp, Homo sapien
gaagcccctctgacatccatcgatt

SEQ ID NO: 4331017 - DNA, 25 bp, Homo sapien
tcgatttaaatgacgctcccggtcc

SEQ ID NO: 4331018 - DNA, 25 bp, Homo sapien
ccaaagcaccctggatagtttgcct

SEQ ID NO: 4331019 - DNA, 25 bp, Homo sapien
gcaccctggatagtttgcctctctc

SEQ ID NO: 4331020 - DNA, 25 bp, Homo sapien
tgtgcaaaagctcccgaaagcggtg

SEQ ID NO: 4331021 - DNA, 25 bp, Homo sapien
aaaagctcccgaaagcggtgcgcac

SEQ ID NO: 4331022 - DNA, 25 bp, Homo sapien
tcccgaaagcggtgcgcacgcgcat

SEQ ID NO: 4331023 - DNA, 25 bp, Homo sapien
cagctctgtgcaaaagctcccgaaa

SEQ ID NO: 4331024 - DNA, 25 bp, Homo sapien
ttgcactctcaaaacacagagccgc

SEQ ID NO: 4331025 - DNA, 25 bp, Homo sapien
tccctaaggctcgttgggactgcga

SEQ ID NO: 4331026 - DNA, 25 bp, Homo sapien
gcggctgcgcttcctgaagtaagga

SEQ ID NO: 4331027 - DNA, 25 bp, Homo sapien
gggcgcctggatcccaggcaacaga

SEQ ID NO: 4331028 - DNA, 25 bp, Homo sapien
cacgcccttgcgtatatccggcgag

SEQ ID NO: 4331029 - DNA, 25 bp, Homo sapien
ttgcctgggttaccagagctccgcc

SEQ ID NO: 4331030 - DNA, 25 bp, Homo sapien
agccagcggcttccgggctgttgcc

SEQ ID NO: 4331031 - DNA, 25 bp, Homo sapien
ggagcgcgccacaggttaacccagc

SEQ ID NO: 4331032 - DNA, 25 bp, Homo sapien
tatcacttaatttgctttcatctct

SEQ ID NO: 4331033 - DNA, 25 bp, Homo sapien
gcctcgagaattctccaaaagaaag

SEQ ID NO: 4331034 - DNA, 25 bp, Homo sapien
acaaatgtgcgggagagctaggttc

SEQ ID NO: 4331035 - DNA, 25 bp, Homo sapien
gagagctaggttctatggggctaaa

SEQ ID NO: 4331036 - DNA, 25 bp, Homo sapien
tttattacaacctacaaatgtgcgg

SEQ ID NO: 4331037 - DNA, 25 bp, Homo sapien
acaacctacaaatgtgcgggagagc

SEQ ID NO: 4331038 - DNA, 25 bp, Homo sapien
gaaggattttccaggcgagcagttc

SEQ ID NO: 4331039 - DNA, 25 bp, Homo sapien
tcttcatccagggtaagagctagtg

SEQ ID NO: 4331040 - DNA, 25 bp, Homo sapien
taaagcctgaagattatgcctgtgg

SEQ ID NO: 4331041 - DNA, 25 bp, Homo sapien
ggctgcttagcaaaacctgaaggaa

SEQ ID NO: 4331042 - DNA, 25 bp, Homo sapien
tttgattcttgtattcgttatctat

SEQ ID NO: 4331043 - DNA, 25 bp, Homo sapien
gattcttgtattcgttatctattac

SEQ ID NO: 4331044 - DNA, 25 bp, Homo sapien
tcttgtattcgttatctattaccac

SEQ ID NO: 4331045 - DNA, 25 bp, Homo sapien
ttcttgtattcgttatctattacca

SEQ ID NO: 4331046 - DNA, 25 bp, Homo sapien
gaaggagcctgccatgtaaggatct

SEQ ID NO: 4331047 - DNA, 25 bp, Homo sapien
gaaacagtatagatccctgctgtga

SEQ ID NO: 4331048 - DNA, 25 bp, Homo sapien
tgtgccagctatatcctagaagttg

SEQ ID NO: 4331049 - DNA, 25 bp, Homo sapien
gaacgattgcattggagaagctgct

SEQ ID NO: 4331050 - DNA, 25 bp, Homo sapien
ggtgcttacatattccttcgtgtct

SEQ ID NO: 4331051 - DNA, 25 bp, Homo sapien
gtaactgtcactgggaccgagtcct

SEQ ID NO: 4331052 - DNA, 25 bp, Homo sapien
ttggaaaggccctgtcactccacag

SEQ ID NO: 4331053 - DNA, 25 bp, Homo sapien
cactgacctgtgtggacctcatcac

SEQ ID NO: 4331054 - DNA, 25 bp, Homo sapien
agctgcatctgtaggatttacacaa

SEQ ID NO: 4331055 - DNA, 25 bp, Homo sapien
attcagctgcatctgtaggatttac

SEQ ID NO: 4331056 - DNA, 25 bp, Homo sapien
ttcagctgcatctgtaggatttaca

SEQ ID NO: 4331057 - DNA, 25 bp, Homo sapien
tgcatctgtaggatttacacaaggg

SEQ ID NO: 4331058 - DNA, 25 bp, Homo sapien
tgactgaaggaggtcaccgagccag

SEQ ID NO: 4331059 - DNA, 25 bp, Homo sapien
cacggtttactgagggattcgcccg

SEQ ID NO: 4331060 - DNA, 25 bp, Homo sapien
tcgcccggttttattttagcagcag

SEQ ID NO: 4331061 - DNA, 25 bp, Homo sapien
cagtggaatgctggactctatctgg

SEQ ID NO: 4331062 - DNA, 25 bp, Homo sapien
agggcaagagtggatccatcagcca

SEQ ID NO: 4331063 - DNA, 25 bp, Homo sapien
cagggcaagagtggatccatcagcc

SEQ ID NO: 4331064 - DNA, 25 bp, Homo sapien
tcaagcagttagtgatttctgaaag

SEQ ID NO: 4331065 - DNA, 25 bp, Homo sapien
caagcagttagtgatttctgaaagt

SEQ ID NO: 4331066 - DNA, 25 bp, Homo sapien
gattaatgctttagctacatcacac

SEQ ID NO: 4331067 - DNA, 25 bp, Homo sapien
gagccatcgcgtttgacctcttttt

SEQ ID NO: 4331068 - DNA, 25 bp, Homo sapien
cttacattggacttaagttactatt

SEQ ID NO: 4331069 - DNA, 25 bp, Homo sapien
ttctctgtcagctatctgctttgta

SEQ ID NO: 4331070 - DNA, 25 bp, Homo sapien
cacacttcataagtttgtgtagtcc

SEQ ID NO: 4331071 - DNA, 25 bp, Homo sapien
cctgaatgaggaataaacgtttgaa

SEQ ID NO: 4331072 - DNA, 25 bp, Homo sapien
tgtagtcctgaatgaggaataaacg

SEQ ID NO: 4331073 - DNA, 25 bp, Homo sapien
taagtttgtgtagtcctgaatgagg

SEQ ID NO: 4331074 - DNA, 25 bp, Homo sapien
tgaagcatctgaccacatacgcgtg

SEQ ID NO: 4331075 - DNA, 25 bp, Homo sapien
gaaacatcagctgtacttgtcgaga

SEQ ID NO: 4331076 - DNA, 25 bp, Homo sapien
tacgcgtgccagaaaaagattacag

SEQ ID NO: 4331077 - DNA, 25 bp, Homo sapien
cactgctgccatggtaatagataca

SEQ ID NO: 4331078 - DNA, 25 bp, Homo sapien
caaaaatggcttccaggctcctaaa

SEQ ID NO: 4331079 - DNA, 25 bp, Homo sapien
ggtgccatctctggtaccgcaaaag

SEQ ID NO: 4331080 - DNA, 25 bp, Homo sapien
caagggacagagctatatggcacac

SEQ ID NO: 4331081 - DNA, 25 bp, Homo sapien
cataagtgcctacctatcaaaggga

SEQ ID NO: 4331082 - DNA, 25 bp, Homo sapien
accactttttataacggactctgtg

SEQ ID NO: 4331083 - DNA, 25 bp, Homo sapien
caaccactttttataacggactctg

SEQ ID NO: 4331084 - DNA, 25 bp, Homo sapien
ttataacggactctgtgatcaataa

SEQ ID NO: 4331085 - DNA, 25 bp, Homo sapien
ataacggactctgtgatcaataatg

SEQ ID NO: 4331086 - DNA, 25 bp, Homo sapien
tcagacataacttcgtgtatttcca

SEQ ID NO: 4331087 - DNA, 25 bp, Homo sapien
atgactgtcactcatgactcagaca

SEQ ID NO: 4331088 - DNA, 25 bp, Homo sapien
cttgttgctctttaagagaatacga

SEQ ID NO: 4331089 - DNA, 25 bp, Homo sapien
cactcatgactcagacataacttcg

SEQ ID NO: 4331090 - DNA, 25 bp, Homo sapien
tcatcccgctaaggaaaagaccagc

SEQ ID NO: 4331091 - DNA, 25 bp, Homo sapien
tatgctttagcaggtctcaggtctc

SEQ ID NO: 4331092 - DNA, 25 bp, Homo sapien
tagccagcacttgattatgagccac

SEQ ID NO: 4331093 - DNA, 25 bp, Homo sapien
ttcaattatgtctagcagtccccag

SEQ ID NO: 4331094 - DNA, 25 bp, Homo sapien
cagctgaactgcaatcatgacctag

SEQ ID NO: 4331095 - DNA, 25 bp, Homo sapien
caaaggtgacattgctgagccatca

SEQ ID NO: 4331096 - DNA, 25 bp, Homo sapien
gagtattttgcggatctaccgggat

SEQ ID NO: 4331097 - DNA, 25 bp, Homo sapien
tgagcaaacccaacaggtctgggag

SEQ ID NO: 4331098 - DNA, 25 bp, Homo sapien
gactaattcgaaaagcctgggactg

SEQ ID NO: 4331099 - DNA, 25 bp, Homo sapien
tcaggctgacgaattttggaaccac

SEQ ID NO: 4331100 - DNA, 25 bp, Homo sapien
aattagcttgacgtacagcagggcc

SEQ ID NO: 4331101 - DNA, 25 bp, Homo sapien
gatgaaacccctgaaccttgctgtc

SEQ ID NO: 4331102 - DNA, 25 bp, Homo sapien
tataagtgatgcctctctcttaact

SEQ ID NO: 4331103 - DNA, 25 bp, Homo sapien
catttgatataagtgatgcctctct

SEQ ID NO: 4331104 - DNA, 25 bp, Homo sapien
ctgcatgaggtacatgatgctgcat

SEQ ID NO: 4331105 - DNA, 25 bp, Homo sapien
catgatgctgcatttgatataagtg

SEQ ID NO: 4331106 - DNA, 25 bp, Homo sapien
gtagagatggttactatgaaggtga

SEQ ID NO: 4331107 - DNA, 25 bp, Homo sapien
gatggttactatgaaggtgagatac

SEQ ID NO: 4331108 - DNA, 25 bp, Homo sapien
tggttactatgaaggtgagatacac

SEQ ID NO: 4331109 - DNA, 25 bp, Homo sapien
gagatggttactatgaaggtgagat

SEQ ID NO: 4331110 - DNA, 25 bp, Homo sapien
cctgtagatgctgacttgcctgggt

SEQ ID NO: 4331111 - DNA, 25 bp, Homo sapien
actgaaggctgagaaccacactgaa

SEQ ID NO: 4331112 - DNA, 25 bp, Homo sapien
ttcagtttgcctcaatgcaggagtc

SEQ ID NO: 4331113 - DNA, 25 bp, Homo sapien
ttgctgctgttcagcaactgaaggc

SEQ ID NO: 4331114 - DNA, 25 bp, Homo sapien
ccatgagctgggttgctaacaggca

SEQ ID NO: 4331115 - DNA, 25 bp, Homo sapien
tctccatgagctgggttgctaacag

SEQ ID NO: 4331116 - DNA, 25 bp, Homo sapien
gtggaaataatcgtgtaaggccatc

SEQ ID NO: 4331117 - DNA, 25 bp, Homo sapien
ataatcgtgtaaggccatctccatg

SEQ ID NO: 4331118 - DNA, 25 bp, Homo sapien
catttgagtttggtcagaaatggtg

SEQ ID NO: 4331119 - DNA, 25 bp, Homo sapien
agaattaggagggatctgactgacc

SEQ ID NO: 4331120 - DNA, 25 bp, Homo sapien
ctgactgaccatcatttgagtttgg

SEQ ID NO: 4331121 - DNA, 25 bp, Homo sapien
aatggtgtctggagttctgctcatc

SEQ ID NO: 4331122 - DNA, 25 bp, Homo sapien
ccataggagctagatgaaacggtca

SEQ ID NO: 4331123 - DNA, 25 bp, Homo sapien
acatgggagagtcggcctgtctacc

SEQ ID NO: 4331124 - DNA, 25 bp, Homo sapien
tcagattaaccgttgcaggcacagt

SEQ ID NO: 4331125 - DNA, 25 bp, Homo sapien
gaaactacgactactgccagagctg

SEQ ID NO: 4331126 - DNA, 25 bp, Homo sapien
gacacgctgacttgtttgctgctaa

SEQ ID NO: 4331127 - DNA, 25 bp, Homo sapien
cacagagacagatggtaacacagca

SEQ ID NO: 4331128 - DNA, 25 bp, Homo sapien
tctagcagtccatcattacagggtg

SEQ ID NO: 4331129 - DNA, 25 bp, Homo sapien
gattcagagcttagaacacccaaag

SEQ ID NO: 4331130 - DNA, 25 bp, Homo sapien
gaggctggccaaagcaccaaatgta

SEQ ID NO: 4331131 - DNA, 25 bp, Homo sapien
tgatatgctttgattgaggctggcc

SEQ ID NO: 4331132 - DNA, 25 bp, Homo sapien
cagttgcaaagtagtccacgttgtc

SEQ ID NO: 4331133 - DNA, 25 bp, Homo sapien
aagagtccaaccattgtccaaaggg

SEQ ID NO: 4331134 - DNA, 25 bp, Homo sapien
cctgtatgctcaggcaggacttgtt

SEQ ID NO: 4331135 - DNA, 25 bp, Homo sapien
tttccatggtgcactttagtggcag

SEQ ID NO: 4331136 - DNA, 25 bp, Homo sapien
caattgaaacagcaatcagtgagcc

SEQ ID NO: 4331137 - DNA, 25 bp, Homo sapien
ggagaagaatcacctgcagttctgg

SEQ ID NO: 4331138 - DNA, 25 bp, Homo sapien
gatacaggagtcacaagattgcaag

SEQ ID NO: 4331139 - DNA, 25 bp, Homo sapien
agattgcaagtcctctgtactggca

SEQ ID NO: 4331140 - DNA, 25 bp, Homo sapien
tactggcaccacattggcggtctgc

SEQ ID NO: 4331141 - DNA, 25 bp, Homo sapien
caggaactgtggtctgatgccatgg

SEQ ID NO: 4331142 - DNA, 25 bp, Homo sapien
ctttccagtgaattgtcgggtcatc

SEQ ID NO: 4331143 - DNA, 25 bp, Homo sapien
tcagtaattcaatatatcggccatt

SEQ ID NO: 4331144 - DNA, 25 bp, Homo sapien
catcatataagcatatgtcattagc

SEQ ID NO: 4331145 - DNA, 25 bp, Homo sapien
gtaattcaatatatcggccattttc

SEQ ID NO: 4331146 - DNA, 25 bp, Homo sapien
tactagtatcatgagttaggcaaac

SEQ ID NO: 4331147 - DNA, 25 bp, Homo sapien
taccctgagctttacgcttgcctgg

SEQ ID NO: 4331148 - DNA, 25 bp, Homo sapien
tcttatgggattgccctaactgcaa

SEQ ID NO: 4331149 - DNA, 25 bp, Homo sapien
tcaggcagtttgatgcacacattac

SEQ ID NO: 4331150 - DNA, 25 bp, Homo sapien
atttaaaggcttggtccaggatcat

SEQ ID NO: 4331151 - DNA, 25 bp, Homo sapien
attgtttcctccattaagcaggagt

SEQ ID NO: 4331152 - DNA, 25 bp, Homo sapien
tatttaaaggcttggtccaggatca

SEQ ID NO: 4331153 - DNA, 25 bp, Homo sapien
cattgtttcctccattaagcaggag

SEQ ID NO: 4331154 - DNA, 25 bp, Homo sapien
gcaggagaacatgggatcagctctc

SEQ ID NO: 4331155 - DNA, 25 bp, Homo sapien
agctctcctattctgtttatcccag

SEQ ID NO: 4331156 - DNA, 25 bp, Homo sapien
attttcttctttctatgcctctcca

SEQ ID NO: 4331157 - DNA, 25 bp, Homo sapien
gtttatcccagcattaattttcttc

SEQ ID NO: 4331158 - DNA, 25 bp, Homo sapien
tgcattgtgtgtctcccggtttttc

SEQ ID NO: 4331159 - DNA, 25 bp, Homo sapien
ctgcattgtgtgtctcccggttttt

SEQ ID NO: 4331160 - DNA, 25 bp, Homo sapien
cattgtgtgtctcccggtttttctt

SEQ ID NO: 4331161 - DNA, 25 bp, Homo sapien
gcattgtgtgtctcccggtttttct

SEQ ID NO: 4331162 - DNA, 25 bp, Homo sapien
tttttgtaggcgtctcattctctgt

SEQ ID NO: 4331163 - DNA, 25 bp, Homo sapien
cttttttgtaggcgtctcattctct

SEQ ID NO: 4331164 - DNA, 25 bp, Homo sapien
tgcttttttgtaggcgtctcattct

SEQ ID NO: 4331165 - DNA, 25 bp, Homo sapien
tttgtaggcgtctcattctctgtca

SEQ ID NO: 4331166 - DNA, 25 bp, Homo sapien
aatgcctcccgtttctgatccaaat

SEQ ID NO: 4331167 - DNA, 25 bp, Homo sapien
tggtctatgggttatgctttcttct

SEQ ID NO: 4331168 - DNA, 25 bp, Homo sapien
gatggtctatgggttatgctttctt

SEQ ID NO: 4331169 - DNA, 25 bp, Homo sapien
atggtctatgggttatgctttcttc

SEQ ID NO: 4331170 - DNA, 25 bp, Homo sapien
aagatggtctatgggttatgctttc

SEQ ID NO: 4331171 - DNA, 25 bp, Homo sapien
atttctgtggtatccaatgtactgt

SEQ ID NO: 4331172 - DNA, 25 bp, Homo sapien
ttgggtctcctctttatgtctcggt

SEQ ID NO: 4331173 - DNA, 25 bp, Homo sapien
ctatttttcttaacaggactggtat

SEQ ID NO: 4331174 - DNA, 25 bp, Homo sapien
ggtatccaatgtactgtctactttt

SEQ ID NO: 4331175 - DNA, 25 bp, Homo sapien
gagtatcttacacactagaattaca

SEQ ID NO: 4331176 - DNA, 25 bp, Homo sapien
tcttcctattcaagacatgagtatc

SEQ ID NO: 4331177 - DNA, 25 bp, Homo sapien
taccacgtaccttcagacaatttct

SEQ ID NO: 4331178 - DNA, 25 bp, Homo sapien
atgtatttactgttaccacgtacct

SEQ ID NO: 4331179 - DNA, 25 bp, Homo sapien
ggaatctttaggagtctacttggtg

SEQ ID NO: 4331180 - DNA, 25 bp, Homo sapien
ccagcacagtattgggtttcgccca

SEQ ID NO: 4331181 - DNA, 25 bp, Homo sapien
gctggtacctgagttataaaacaaa

SEQ ID NO: 4331182 - DNA, 25 bp, Homo sapien
gatggagtcacgcaatgctcctttg

SEQ ID NO: 4331183 - DNA, 25 bp, Homo sapien
tttcccacaatcaactgcatcatat

SEQ ID NO: 4331184 - DNA, 25 bp, Homo sapien
agactctacagtactatttcccaca

SEQ ID NO: 4331185 - DNA, 25 bp, Homo sapien
tgctgcagactctacagtactattt

SEQ ID NO: 4331186 - DNA, 25 bp, Homo sapien
ccacaatcaactgcatcatatccaa

SEQ ID NO: 4331187 - DNA, 25 bp, Homo sapien
tctttttgcggccaccgcagccgct

SEQ ID NO: 4331188 - DNA, 25 bp, Homo sapien
tctgggcgaatctctccgtccgcgg

SEQ ID NO: 4331189 - DNA, 25 bp, Homo sapien
gctgcgcggtctcggccgcggtggc

SEQ ID NO: 4331190 - DNA, 25 bp, Homo sapien
ggaaggcaggagtgtctgaccgtct

SEQ ID NO: 4331191 - DNA, 25 bp, Homo sapien
cgtaggctgtggtctcttgtcatcc

SEQ ID NO: 4331192 - DNA, 25 bp, Homo sapien
cgataactggaagattgttgctgac

SEQ ID NO: 4331193 - DNA, 25 bp, Homo sapien
gacttgacgctgctcgcattcgtag

SEQ ID NO: 4331194 - DNA, 25 bp, Homo sapien
gaatcagacgtttccgacttctcga

SEQ ID NO: 4331195 - DNA, 25 bp, Homo sapien
cccggctgccaggcccgtagatgcg

SEQ ID NO: 4331196 - DNA, 25 bp, Homo sapien
tgccaggcccgtagatgcgcgcggg

SEQ ID NO: 4331197 - DNA, 25 bp, Homo sapien
gctgccaggcccgtagatgcgcgcg

SEQ ID NO: 4331198 - DNA, 25 bp, Homo sapien
gcgcgcggggcgacagggctcccat

SEQ ID NO: 4331199 - DNA, 25 bp, Homo sapien
caaagctctggagttgggctacatg

SEQ ID NO: 4331200 - DNA, 25 bp, Homo sapien
tatctcatatctgctacgggacaca

SEQ ID NO: 4331201 - DNA, 25 bp, Homo sapien
tatgccctgcaagttacaaggagca

SEQ ID NO: 4331202 - DNA, 25 bp, Homo sapien
tgtggtgctaccatgcctcagtgga

SEQ ID NO: 4331203 - DNA, 25 bp, Homo sapien
tgtcccagggtacattatataggct

SEQ ID NO: 4331204 - DNA, 25 bp, Homo sapien
tgaagggactctagacaattctatg

SEQ ID NO: 4331205 - DNA, 25 bp, Homo sapien
gaccaagctagtaggtactgagcag

SEQ ID NO: 4331206 - DNA, 25 bp, Homo sapien
tacacttgaaggagttagcactgtt

SEQ ID NO: 4331207 - DNA, 25 bp, Homo sapien
gaatttctgccccagtaacagatcg

SEQ ID NO: 4331208 - DNA, 25 bp, Homo sapien
taggctgttaacaagtagcaactcc

SEQ ID NO: 4331209 - DNA, 25 bp, Homo sapien
tcttgcaagggagaaccaattcagg

SEQ ID NO: 4331210 - DNA, 25 bp, Homo sapien
tcagatgtcctacgaaagctacagt

SEQ ID NO: 4331211 - DNA, 25 bp, Homo sapien
caagatggtacagtcctggctaaca

SEQ ID NO: 4331212 - DNA, 25 bp, Homo sapien
gacagaaccacccagttaagcagct

SEQ ID NO: 4331213 - DNA, 25 bp, Homo sapien
gatattgggcactgtacctagcaag

SEQ ID NO: 4331214 - DNA, 25 bp, Homo sapien
gcttgactgcaaccttctgagatct

SEQ ID NO: 4331215 - DNA, 25 bp, Homo sapien
tttgccccacagtaaaaactatctg

SEQ ID NO: 4331216 - DNA, 25 bp, Homo sapien
ggttaagtcactgactaccgtggaa

SEQ ID NO: 4331217 - DNA, 25 bp, Homo sapien
taggcatatgaacttgtgcccagct

SEQ ID NO: 4331218 - DNA, 25 bp, Homo sapien
ctatatataatgatagggagcctac

SEQ ID NO: 4331219 - DNA, 25 bp, Homo sapien
ggcactgagtataagcaaatctggg

SEQ ID NO: 4331220 - DNA, 25 bp, Homo sapien
taacaatgttccaactcccgagaga

SEQ ID NO: 4331221 - DNA, 25 bp, Homo sapien
gcataaaccagtcctctcagtggag

SEQ ID NO: 4331222 - DNA, 25 bp, Homo sapien
tgtcaaagccactccgtgtgtgccg

SEQ ID NO: 4331223 - DNA, 25 bp, Homo sapien
tctgtcttttgcacatctgcattct

SEQ ID NO: 4331224 - DNA, 25 bp, Homo sapien
gtcttttgcacatctgcattctgac

SEQ ID NO: 4331225 - DNA, 25 bp, Homo sapien
tcagttgtctgtcttttgcacatct

SEQ ID NO: 4331226 - DNA, 25 bp, Homo sapien
cagttgtctgtcttttgcacatctg

SEQ ID NO: 4331227 - DNA, 25 bp, Homo sapien
gcacatgagcatctgcgggctctat

SEQ ID NO: 4331228 - DNA, 25 bp, Homo sapien
agcatctgcgggctctatcctctta

SEQ ID NO: 4331229 - DNA, 25 bp, Homo sapien
acatgagcatctgcgggctctatcc

SEQ ID NO: 4331230 - DNA, 25 bp, Homo sapien
catctgcgggctctatcctcttata

SEQ ID NO: 4331231 - DNA, 25 bp, Homo sapien
caacaagggttaggcatgcttacct

SEQ ID NO: 4331232 - DNA, 25 bp, Homo sapien
cagctggctgagattagaaggctca

SEQ ID NO: 4331233 - DNA, 25 bp, Homo sapien
taattcaatctctcacatggccaaa

SEQ ID NO: 4331234 - DNA, 25 bp, Homo sapien
aaaactagggtctcaaagcttgaag

SEQ ID NO: 4331235 - DNA, 25 bp, Homo sapien
aaatgttgtcaaaagtaccatcttt

SEQ ID NO: 4331236 - DNA, 25 bp, Homo sapien
tcacagatgtttaagacatgattta

SEQ ID NO: 4331237 - DNA, 25 bp, Homo sapien
tttcacagatgtttaagacatgatt

SEQ ID NO: 4331238 - DNA, 25 bp, Homo sapien
ttcacagatgtttaagacatgattt

SEQ ID NO: 4331239 - DNA, 25 bp, Homo sapien
tagccttcggtaaggtgccagacat

SEQ ID NO: 4331240 - DNA, 25 bp, Homo sapien
ctattcctagccttcggtaaggtgc

SEQ ID NO: 4331241 - DNA, 25 bp, Homo sapien
tcctagccttcggtaaggtgccaga

SEQ ID NO: 4331242 - DNA, 25 bp, Homo sapien
attcctagccttcggtaaggtgcca

SEQ ID NO: 4331243 - DNA, 25 bp, Homo sapien
atgatccaccctacagcatactgca

SEQ ID NO: 4331244 - DNA, 25 bp, Homo sapien
gaatgatccaccctacagcatactg

SEQ ID NO: 4331245 - DNA, 25 bp, Homo sapien
aatgatccaccctacagcatactgc

SEQ ID NO: 4331246 - DNA, 25 bp, Homo sapien
gtgtcacatctcccagctcgatccg

SEQ ID NO: 4331247 - DNA, 25 bp, Homo sapien
tgtcacatctcccagctcgatccgg

SEQ ID NO: 4331248 - DNA, 25 bp, Homo sapien
cttgtcattgtagctgactggaaag

SEQ ID NO: 4331249 - DNA, 25 bp, Homo sapien
caaaattcacattcctggatacaca

SEQ ID NO: 4331250 - DNA, 25 bp, Homo sapien
atatgcaaaattcacattcctggat

SEQ ID NO: 4331251 - DNA, 25 bp, Homo sapien
aattcacattcctggatacacatac

SEQ ID NO: 4331252 - DNA, 25 bp, Homo sapien
tgcaaaattcacattcctggataca

SEQ ID NO: 4331253 - DNA, 25 bp, Homo sapien
tccttcacttcgctctcatttctcc

SEQ ID NO: 4331254 - DNA, 25 bp, Homo sapien
aaaatcaccccaggatgaaaactat

SEQ ID NO: 4331255 - DNA, 25 bp, Homo sapien
acctccctatccctgcgcaactgtg

SEQ ID NO: 4331256 - DNA, 25 bp, Homo sapien
gaaagcaacaggagtgatatggttt

SEQ ID NO: 4331257 - DNA, 25 bp, Homo sapien
tgttttaacacgtcagcagtctgat

SEQ ID NO: 4331258 - DNA, 25 bp, Homo sapien
taaaagtctgcgtgtggacatacgc

SEQ ID NO: 4331259 - DNA, 25 bp, Homo sapien
caaaattccttaggtgcatccgcaa

SEQ ID NO: 4331260 - DNA, 25 bp, Homo sapien
ctgtggtaggtacaataatgcccct

SEQ ID NO: 4331261 - DNA, 25 bp, Homo sapien
ttagccctgagaataaacctagaat

SEQ ID NO: 4331262 - DNA, 25 bp, Homo sapien
gcgtaagagataaggcatttcagcc

SEQ ID NO: 4331263 - DNA, 25 bp, Homo sapien
aactgcaatttgtgaacctttctgg

SEQ ID NO: 4331264 - DNA, 25 bp, Homo sapien
tctcttgcccatggtttagccctga

SEQ ID NO: 4331265 - DNA, 25 bp, Homo sapien
ttaaagtaacagaacactcaatact

SEQ ID NO: 4331266 - DNA, 25 bp, Homo sapien
aattaaagtaacagaacactcaata

SEQ ID NO: 4331267 - DNA, 25 bp, Homo sapien
attaaagtaacagaacactcaatac

SEQ ID NO: 4331268 - DNA, 25 bp, Homo sapien
ataagaaaccgctactgccaaagtg

SEQ ID NO: 4331269 - DNA, 25 bp, Homo sapien
taatttcacgtacataacttctggg

SEQ ID NO: 4331270 - DNA, 25 bp, Homo sapien
gactcccatcggctattaatttgtg

SEQ ID NO: 4331271 - DNA, 25 bp, Homo sapien
gactaaggaaaagtgggacagactg

SEQ ID NO: 4331272 - DNA, 25 bp, Homo sapien
ccaactgtagctagtcacgactgta

SEQ ID NO: 4331273 - DNA, 25 bp, Homo sapien
cagactgcagacatcttacccggga

SEQ ID NO: 4331274 - DNA, 25 bp, Homo sapien
aatatagctctcacgttcacgatgg

SEQ ID NO: 4331275 - DNA, 25 bp, Homo sapien
gctgaaagccataagcaatacctgg

SEQ ID NO: 4331276 - DNA, 25 bp, Homo sapien
caatgcacacaactgtataggcagc

SEQ ID NO: 4331277 - DNA, 25 bp, Homo sapien
aacacttgatcttatgctttatggc

SEQ ID NO: 4331278 - DNA, 25 bp, Homo sapien
ggcaacacaacatgagtcaacaatg

SEQ ID NO: 4331279 - DNA, 25 bp, Homo sapien
gatgagtgcttggactactaagtga

SEQ ID NO: 4331280 - DNA, 25 bp, Homo sapien
tttaagaccagttttcgctctgttg

SEQ ID NO: 4331281 - DNA, 25 bp, Homo sapien
gcccaggctgaaatatagtgacaag

SEQ ID NO: 4331282 - DNA, 25 bp, Homo sapien
tacgtcagcctgactagcttttggt

SEQ ID NO: 4331283 - DNA, 25 bp, Homo sapien
aaaggtgtcaaatgctacgtcagcc

SEQ ID NO: 4331284 - DNA, 25 bp, Homo sapien
tgcacctctttactacaattgaagg

SEQ ID NO: 4331285 - DNA, 25 bp, Homo sapien
tatattactgctacctactttccca

SEQ ID NO: 4331286 - DNA, 25 bp, Homo sapien
tcccagtccatatgctgtcagaggt

SEQ ID NO: 4331287 - DNA, 25 bp, Homo sapien
ttcccatcttagtcacgtattcaca

SEQ ID NO: 4331288 - DNA, 25 bp, Homo sapien
cgtgttgggacttccgcagtttcca

SEQ ID NO: 4331289 - DNA, 25 bp, Homo sapien
tacaagttttggaactcaaggcgct

SEQ ID NO: 4331290 - DNA, 25 bp, Homo sapien
tacaggccattccaaattaagagtc

SEQ ID NO: 4331291 - DNA, 25 bp, Homo sapien
cagtatccgaacaagcacaagtaag

SEQ ID NO: 4331292 - DNA, 25 bp, Homo sapien
tgtcaaacaccgcagttccagagtt

SEQ ID NO: 4331293 - DNA, 25 bp, Homo sapien
caatcacctgaaaggagcagcgtgg

SEQ ID NO: 4331294 - DNA, 25 bp, Homo sapien
caagtctacagtgatcgcgctctct

SEQ ID NO: 4331295 - DNA, 25 bp, Homo sapien
gctcccaagcgtgaattaaactgaa

SEQ ID NO: 4331296 - DNA, 25 bp, Homo sapien
ctgctgaggccgtcgttaccaccga

SEQ ID NO: 4331297 - DNA, 25 bp, Homo sapien
ttaggtctccgcacccttagctcgg

SEQ ID NO: 4331298 - DNA, 25 bp, Homo sapien
gtagtcgccgcccttaggtctccgc

SEQ ID NO: 4331299 - DNA, 25 bp, Homo sapien
gatatcaacgccgtcgtagtcgccg

SEQ ID NO: 4331300 - DNA, 25 bp, Homo sapien
ccgcgagagtcgagtgagggcttga

SEQ ID NO: 4331301 - DNA, 25 bp, Homo sapien
ctgtgcgagcaacgaaggccgcgag

SEQ ID NO: 4331302 - DNA, 25 bp, Homo sapien
gctgccgcgctgtgacctttcaccc

SEQ ID NO: 4331303 - DNA, 25 bp, Homo sapien
acacgtgcactcgggtctctcggct

SEQ ID NO: 4331304 - DNA, 25 bp, Homo sapien
aggccctggcggtaaaatccagatt

SEQ ID NO: 4331305 - DNA, 25 bp, Homo sapien
ttgtggggctggctcggtaggccct

SEQ ID NO: 4331306 - DNA, 25 bp, Homo sapien
gacactgcttgtggggctggctcgg

SEQ ID NO: 4331307 - DNA, 25 bp, Homo sapien
gctggctcggtaggccctggcggta

SEQ ID NO: 4331308 - DNA, 25 bp, Homo sapien
gtcctcggtcggtacagtctctgca

SEQ ID NO: 4331309 - DNA, 25 bp, Homo sapien
agctgaggacttcccctccgtggtg

SEQ ID NO: 4331310 - DNA, 25 bp, Homo sapien
tattcaagggatccgtaaaaattca

SEQ ID NO: 4331311 - DNA, 25 bp, Homo sapien
cggagctcgacgtcatgtgactggt

SEQ ID NO: 4331312 - DNA, 25 bp, Homo sapien
aaaagcctatccaaaagccagtcat

SEQ ID NO: 4331313 - DNA, 25 bp, Homo sapien
cataggcagtttatctgacaaaagc

SEQ ID NO: 4331314 - DNA, 25 bp, Homo sapien
gccagtcattgcagtgctaatacac

SEQ ID NO: 4331315 - DNA, 25 bp, Homo sapien
gagtttgctgatgacagtccttggc

SEQ ID NO: 4331316 - DNA, 25 bp, Homo sapien
taatagtagcaaagttgtatcgagt

SEQ ID NO: 4331317 - DNA, 25 bp, Homo sapien
tctgattatcctcaaatatgcccat

SEQ ID NO: 4331318 - DNA, 25 bp, Homo sapien
taattgaccagaaattttccacttc

SEQ ID NO: 4331319 - DNA, 25 bp, Homo sapien
tatcgagtctgtgggcattaatatt

SEQ ID NO: 4331320 - DNA, 25 bp, Homo sapien
tacagcaagtatatgcgtgccttgg

SEQ ID NO: 4331321 - DNA, 25 bp, Homo sapien
gaagacctggcagaaattgtacagc

SEQ ID NO: 4331322 - DNA, 25 bp, Homo sapien
gataagaaactagctcaacgtaagc

SEQ ID NO: 4331323 - DNA, 25 bp, Homo sapien
cacagagttcgttcctctgaggacg

SEQ ID NO: 4331324 - DNA, 25 bp, Homo sapien
tcaggcggtcaaacttagagcaaca

SEQ ID NO: 4331325 - DNA, 25 bp, Homo sapien
cgcctggccagggactatactcttt

SEQ ID NO: 4331326 - DNA, 25 bp, Homo sapien
tgcacctttaaggaccagctgggct

SEQ ID NO: 4331327 - DNA, 25 bp, Homo sapien
gaatttttgaacagccagttgacca

SEQ ID NO: 4331328 - DNA, 25 bp, Homo sapien
ttccaaagtggcctactcaagaggc

SEQ ID NO: 4331329 - DNA, 25 bp, Homo sapien
tgttacagagtttcagatcggtcac

SEQ ID NO: 4331330 - DNA, 25 bp, Homo sapien
tcaagaggccctaagactggtagaa

SEQ ID NO: 4331331 - DNA, 25 bp, Homo sapien
tgtgaagatgctagcgaacctatgc

SEQ ID NO: 4331332 - DNA, 25 bp, Homo sapien
tgtgctgtgtctggtcctaagtgga

SEQ ID NO: 4331333 - DNA, 25 bp, Homo sapien
tccttccatcctgaataacgaatag

SEQ ID NO: 4331334 - DNA, 25 bp, Homo sapien
ttttccagtgttgaatctcacacac

SEQ ID NO: 4331335 - DNA, 25 bp, Homo sapien
tagaagaggccatatatattgcctc

SEQ ID NO: 4331336 - DNA, 25 bp, Homo sapien
cacagtgctgtagccagttgcatac

SEQ ID NO: 4331337 - DNA, 25 bp, Homo sapien
gggaatagtctgtccttggaacaca

SEQ ID NO: 4331338 - DNA, 25 bp, Homo sapien
ggtgtccgtgaatacatatcacagc

SEQ ID NO: 4331339 - DNA, 25 bp, Homo sapien
tacaaatacgtactcaggtgtccgt

SEQ ID NO: 4331340 - DNA, 25 bp, Homo sapien
gctgattcacatgtattctgactca

SEQ ID NO: 4331341 - DNA, 25 bp, Homo sapien
ttaaactgtgctctgctgattcaca

SEQ ID NO: 4331342 - DNA, 25 bp, Homo sapien
tctgctgattcacatgtattctgac

SEQ ID NO: 4331343 - DNA, 25 bp, Homo sapien
gtgctctgctgattcacatgtattc

SEQ ID NO: 4331344 - DNA, 25 bp, Homo sapien
agagaaaatggactgttctgtgttt

SEQ ID NO: 4331345 - DNA, 25 bp, Homo sapien
gagaaaatggactgttctgtgtttt

SEQ ID NO: 4331346 - DNA, 25 bp, Homo sapien
ccttttcttcgtgctctttggagta

SEQ ID NO: 4331347 - DNA, 25 bp, Homo sapien
ccttcccttttcttcgtgctctttg

SEQ ID NO: 4331348 - DNA, 25 bp, Homo sapien
ctctttggagtaatacggaaagttg

SEQ ID NO: 4331349 - DNA, 25 bp, Homo sapien
tcttcgtgctctttggagtaatacg

SEQ ID NO: 4331350 - DNA, 25 bp, Homo sapien
tctgcgagccctttccctacgggcg

SEQ ID NO: 4331351 - DNA, 25 bp, Homo sapien
cgttgagggcttgaatttggtcccg

SEQ ID NO: 4331352 - DNA, 25 bp, Homo sapien
tgtcctggtgcggatgtctcagccc

SEQ ID NO: 4331353 - DNA, 25 bp, Homo sapien
tttgcttccctgtgggcgttgaggg

SEQ ID NO: 4331354 - DNA, 25 bp, Homo sapien
acgtccacgaccaaatctgccttta

SEQ ID NO: 4331355 - DNA, 25 bp, Homo sapien
acgaccaaatctgcctttaaactgg

SEQ ID NO: 4331356 - DNA, 25 bp, Homo sapien
ctgacacagccccagcctcgacttt

SEQ ID NO: 4331357 - DNA, 25 bp, Homo sapien
tgctgacacagccccagcctcgact

SEQ ID NO: 4331358 - DNA, 25 bp, Homo sapien
agcgtagggtggcagcacagtctcc

SEQ ID NO: 4331359 - DNA, 25 bp, Homo sapien
tggctgcagcgtagggtggcagcac

SEQ ID NO: 4331360 - DNA, 25 bp, Homo sapien
tctctggatggctgcagcgtagggt

SEQ ID NO: 4331361 - DNA, 25 bp, Homo sapien
tgcagcgtagggtggcagcacagtc

SEQ ID NO: 4331362 - DNA, 25 bp, Homo sapien
cttgtctgccagctcgggtgcttag

SEQ ID NO: 4331363 - DNA, 25 bp, Homo sapien
agctcgggtgcttaggcatgtggac

SEQ ID NO: 4331364 - DNA, 25 bp, Homo sapien
cattcttgtctgccagctcgggtgc

SEQ ID NO: 4331365 - DNA, 25 bp, Homo sapien
tctgccagctcgggtgcttaggcat

SEQ ID NO: 4331366 - DNA, 25 bp, Homo sapien
catctccgctgctgtagggtccggg

SEQ ID NO: 4331367 - DNA, 25 bp, Homo sapien
tgctctggttctgacatgtcattgt

SEQ ID NO: 4331368 - DNA, 25 bp, Homo sapien
ctgctctggttctgacatgtcattg

SEQ ID NO: 4331369 - DNA, 25 bp, Homo sapien
ttctcctttagcctgcgcaacatta

SEQ ID NO: 4331370 - DNA, 25 bp, Homo sapien
cagtagtgctatcaatctaataaat

SEQ ID NO: 4331371 - DNA, 25 bp, Homo sapien
gctatcaatctaataaatgcaacat

SEQ ID NO: 4331372 - DNA, 25 bp, Homo sapien
tgcgcaacattatcaaatccccttg

SEQ ID NO: 4331373 - DNA, 25 bp, Homo sapien
cagcagaactatggcactgagctag

SEQ ID NO: 4331374 - DNA, 25 bp, Homo sapien
ggcaactgctccagcagaactatgg

SEQ ID NO: 4331375 - DNA, 25 bp, Homo sapien
ctagacaggaattctggcaactgct

SEQ ID NO: 4331376 - DNA, 25 bp, Homo sapien
gacaggaattctggcaactgctcca

SEQ ID NO: 4331377 - DNA, 25 bp, Homo sapien
ctctttatttgcaatctctccttcc

SEQ ID NO: 4331378 - DNA, 25 bp, Homo sapien
ttgtgctcccattgtatttaatagg

SEQ ID NO: 4331379 - DNA, 25 bp, Homo sapien
tcacctccatcctgttgagcattgg

SEQ ID NO: 4331380 - DNA, 25 bp, Homo sapien
tgagcattggaaattagatcagttg

SEQ ID NO: 4331381 - DNA, 25 bp, Homo sapien
tttgattagttactgttacggccat

SEQ ID NO: 4331382 - DNA, 25 bp, Homo sapien
atttgattagttactgttacggcca

SEQ ID NO: 4331383 - DNA, 25 bp, Homo sapien
caagctttgtggttgtacacaaatg

SEQ ID NO: 4331384 - DNA, 25 bp, Homo sapien
agctttgtggttgtacacaaatgaa

SEQ ID NO: 4331385 - DNA, 25 bp, Homo sapien
tggagctggagtgggttcaaattcc

SEQ ID NO: 4331386 - DNA, 25 bp, Homo sapien
taaggtatgtagcacaatgtctaac

SEQ ID NO: 4331387 - DNA, 25 bp, Homo sapien
tcactagccatggagcctcggcaat

SEQ ID NO: 4331388 - DNA, 25 bp, Homo sapien
ccagggcatatgagaataggtgagc

SEQ ID NO: 4331389 - DNA, 25 bp, Homo sapien
gagtatgttgctggctagacctaga

SEQ ID NO: 4331390 - DNA, 25 bp, Homo sapien
ggatacctgttaatgttacactgcc

SEQ ID NO: 4331391 - DNA, 25 bp, Homo sapien
tgatcatgactgcaaagcatactgc

SEQ ID NO: 4331392 - DNA, 25 bp, Homo sapien
cccaggaggaattaggacgttgttg

SEQ ID NO: 4331393 - DNA, 25 bp, Homo sapien
gtgggtagcctgttgtttccataac

SEQ ID NO: 4331394 - DNA, 25 bp, Homo sapien
tgatccaatgtaagtgggtagcctg

SEQ ID NO: 4331395 - DNA, 25 bp, Homo sapien
caatgtaagtgggtagcctgttgtt

SEQ ID NO: 4331396 - DNA, 25 bp, Homo sapien
ctaatgatccaatgtaagtgggtag

SEQ ID NO: 4331397 - DNA, 25 bp, Homo sapien
tatcttatagttgaggagctttcct

SEQ ID NO: 4331398 - DNA, 25 bp, Homo sapien
cattgaagaccctggaaaacttact

SEQ ID NO: 4331399 - DNA, 25 bp, Homo sapien
tgaagaatctgtattaaatcaggcc

SEQ ID NO: 4331400 - DNA, 25 bp, Homo sapien
aacttactggcctacgaaggagaag

SEQ ID NO: 4331401 - DNA, 25 bp, Homo sapien
gaacaaaagtactagcgaggcctgc

SEQ ID NO: 4331402 - DNA, 25 bp, Homo sapien
ggtccaatgtaaaggctgctagcca

SEQ ID NO: 4331403 - DNA, 25 bp, Homo sapien
taaatgaacagatccggcagcagtg

SEQ ID NO: 4331404 - DNA, 25 bp, Homo sapien
tagtgaaacgtgtacatgggcccac

SEQ ID NO: 4331405 - DNA, 25 bp, Homo sapien
tctcggtgcggaggcgagggaaccg

SEQ ID NO: 4331406 - DNA, 25 bp, Homo sapien
tgaaattctctgctaacgctgcagg

SEQ ID NO: 4331407 - DNA, 25 bp, Homo sapien
gcccgtcctgaagcacagcatgtct

SEQ ID NO: 4331408 - DNA, 25 bp, Homo sapien
atgtctgtgcactctcggtgcggag

SEQ ID NO: 4331409 - DNA, 25 bp, Homo sapien
tacatccaggtaagcacagggctgc

SEQ ID NO: 4331410 - DNA, 25 bp, Homo sapien
gaatgtctcggtgttcctacatcca

SEQ ID NO: 4331411 - DNA, 25 bp, Homo sapien
cctcagcattggactggaaagaatg

SEQ ID NO: 4331412 - DNA, 25 bp, Homo sapien
gttgggagtcgtccatcgtcttttc

SEQ ID NO: 4331413 - DNA, 25 bp, Homo sapien
caggtgggagcatgaacagataatt

SEQ ID NO: 4331414 - DNA, 25 bp, Homo sapien
gctgagtactagaagacaaactgag

SEQ ID NO: 4331415 - DNA, 25 bp, Homo sapien
aattgctggactgtcatgatagagc

SEQ ID NO: 4331416 - DNA, 25 bp, Homo sapien
tctcaggactgcacaggactttctc

SEQ ID NO: 4331417 - DNA, 25 bp, Homo sapien
tcaaggtgcacggaagagaagcatc

SEQ ID NO: 4331418 - DNA, 25 bp, Homo sapien
caaggtgcacggaagagaagcatct

SEQ ID NO: 4331419 - DNA, 25 bp, Homo sapien
tagagaaccttttcatacatggtct

SEQ ID NO: 4331420 - DNA, 25 bp, Homo sapien
tgtagagaaccttttcatacatggt

SEQ ID NO: 4331421 - DNA, 25 bp, Homo sapien
gtagagaaccttttcatacatggtc

SEQ ID NO: 4331422 - DNA, 25 bp, Homo sapien
tgtgtagagaaccttttcatacatg

SEQ ID NO: 4331423 - DNA, 25 bp, Homo sapien
tcattaaggtcacatcagcaactcc

SEQ ID NO: 4331424 - DNA, 25 bp, Homo sapien
tagtgaatgactagcaatccaggaa

SEQ ID NO: 4331425 - DNA, 25 bp, Homo sapien
tgatgctactgcactagaaggctga

SEQ ID NO: 4331426 - DNA, 25 bp, Homo sapien
caactcctgtcgtgctatacggaca

SEQ ID NO: 4331427 - DNA, 25 bp, Homo sapien
tgattgctgatatagctcgtggtac

SEQ ID NO: 4331428 - DNA, 25 bp, Homo sapien
tctgattgctgatatagctcgtggt

SEQ ID NO: 4331429 - DNA, 25 bp, Homo sapien
gacttgtcttactcaaggaccaagt

SEQ ID NO: 4331430 - DNA, 25 bp, Homo sapien
tatctgattgctgatatagctcgtg

SEQ ID NO: 4331431 - DNA, 25 bp, Homo sapien
ggaagtctggaagaatttcaactac

SEQ ID NO: 4331432 - DNA, 25 bp, Homo sapien
tggaagtctggaagaatttcaacta

SEQ ID NO: 4331433 - DNA, 25 bp, Homo sapien
ctggaagtctggaagaatttcaact

SEQ ID NO: 4331434 - DNA, 25 bp, Homo sapien
cttcctacgaagttgctgtcgcctt

SEQ ID NO: 4331435 - DNA, 25 bp, Homo sapien
cctacgaagttgctgtcgcctttct

SEQ ID NO: 4331436 - DNA, 25 bp, Homo sapien
tcctacgaagttgctgtcgcctttc

SEQ ID NO: 4331437 - DNA, 25 bp, Homo sapien
tacgaagttgctgtcgcctttcttc

SEQ ID NO: 4331438 - DNA, 25 bp, Homo sapien
ttccatgtccgaagggtgatccaga

SEQ ID NO: 4331439 - DNA, 25 bp, Homo sapien
ttttacaaacttcttccatgtccga

SEQ ID NO: 4331440 - DNA, 25 bp, Homo sapien
tacaaacttcttccatgtccgaagg

SEQ ID NO: 4331441 - DNA, 25 bp, Homo sapien
aacttcttccatgtccgaagggtga

SEQ ID NO: 4331442 - DNA, 25 bp, Homo sapien
gctcttccgtaactaatagagtgag

SEQ ID NO: 4331443 - DNA, 25 bp, Homo sapien
tttctaatgaggacttcaggctgct

SEQ ID NO: 4331444 - DNA, 25 bp, Homo sapien
ctatcatgtgcagagatccaatggc

SEQ ID NO: 4331445 - DNA, 25 bp, Homo sapien
gactccacttccgtccaacattgag

SEQ ID NO: 4331446 - DNA, 25 bp, Homo sapien
gactttcctatacgtggatatgtct

SEQ ID NO: 4331447 - DNA, 25 bp, Homo sapien
tgtctcctggcctataccgtttctg

SEQ ID NO: 4331448 - DNA, 25 bp, Homo sapien
agagtttaggtcaaatctgtttggt

SEQ ID NO: 4331449 - DNA, 25 bp, Homo sapien
tcctctttgtccttgacgtttgaga

SEQ ID NO: 4331450 - DNA, 25 bp, Homo sapien
tgaccatgttaaaccaggccctgaa

SEQ ID NO: 4331451 - DNA, 25 bp, Homo sapien
ctgtcactgtgctccgctgcaatct

SEQ ID NO: 4331452 - DNA, 25 bp, Homo sapien
cttcttcctgcagatcaatcacgta

SEQ ID NO: 4331453 - DNA, 25 bp, Homo sapien
tgcaatctcatgcttgccctgagaa

SEQ ID NO: 4331454 - DNA, 25 bp, Homo sapien
cacttgagcactgtgagacaagaaa

SEQ ID NO: 4331455 - DNA, 25 bp, Homo sapien
tacacactccgtgaaacaaacacag

SEQ ID NO: 4331456 - DNA, 25 bp, Homo sapien
tcttgaaaaaacataatgaccctgg

SEQ ID NO: 4331457 - DNA, 25 bp, Homo sapien
caaagcagtgaatgggattgactac

SEQ ID NO: 4331458 - DNA, 25 bp, Homo sapien
ggaaccacgtcagcatgtatttcct

SEQ ID NO: 4331459 - DNA, 25 bp, Homo sapien
gccagactttcctgactacgctgga

SEQ ID NO: 4331460 - DNA, 25 bp, Homo sapien
ctctcttaagcagtatttgggaata

SEQ ID NO: 4331461 - DNA, 25 bp, Homo sapien
gaataaaattgatcagcctgggcca

SEQ ID NO: 4331462 - DNA, 25 bp, Homo sapien
aacaaagagtaatgttcttctgcca

SEQ ID NO: 4331463 - DNA, 25 bp, Homo sapien
gaacaaagagtaatgttcttctgcc

SEQ ID NO: 4331464 - DNA, 25 bp, Homo sapien
acaaagagtaatgttcttctgccac

SEQ ID NO: 4331465 - DNA, 25 bp, Homo sapien
ttctttggctattgcttccagctgc

SEQ ID NO: 4331466 - DNA, 25 bp, Homo sapien
cataatgttctttggctattgcttc

SEQ ID NO: 4331467 - DNA, 25 bp, Homo sapien
ctcttccaaggctctagaccttttt

SEQ ID NO: 4331468 - DNA, 25 bp, Homo sapien
ttagcaagaccctttcataatgttc

SEQ ID NO: 4331469 - DNA, 25 bp, Homo sapien
gacacaagagcaacaaagactgaag

SEQ ID NO: 4331470 - DNA, 25 bp, Homo sapien
catagtcgtcatctttgcagcataa

SEQ ID NO: 4331471 - DNA, 25 bp, Homo sapien
gacaaaaacttaatgatcgacccta

SEQ ID NO: 4331472 - DNA, 25 bp, Homo sapien
gtggtgaactggctgatcctggcaa

SEQ ID NO: 4331473 - DNA, 25 bp, Homo sapien
tattcctgcttacccactcctgtga

SEQ ID NO: 4331474 - DNA, 25 bp, Homo sapien
aaaagtacagggcaattgacactgc

SEQ ID NO: 4331475 - DNA, 25 bp, Homo sapien
tcatagaacacagatcactgaggct

SEQ ID NO: 4331476 - DNA, 25 bp, Homo sapien
tcacgaatttctccctcactactgg

SEQ ID NO: 4331477 - DNA, 25 bp, Homo sapien
ttctcttctcgttttctttcaagct

SEQ ID NO: 4331478 - DNA, 25 bp, Homo sapien
gagattagaacccagaaatatcaga

SEQ ID NO: 4331479 - DNA, 25 bp, Homo sapien
gatccgcctacattcagctcgttga

SEQ ID NO: 4331480 - DNA, 25 bp, Homo sapien
ttctctgccaagatccgcctacatt

SEQ ID NO: 4331481 - DNA, 25 bp, Homo sapien
cattcagctcgttgaattgctctct

SEQ ID NO: 4331482 - DNA, 25 bp, Homo sapien
gctcgttgaattgctctctcttcca

SEQ ID NO: 4331483 - DNA, 25 bp, Homo sapien
tatatactctacaggttaaagacct

SEQ ID NO: 4331484 - DNA, 25 bp, Homo sapien
ggaatactgcaagagaaatgtctcc

SEQ ID NO: 4331485 - DNA, 25 bp, Homo sapien
tattatcccatcctcagcaatgagg

SEQ ID NO: 4331486 - DNA, 25 bp, Homo sapien
tactttgagagtagaatcgttcctc

SEQ ID NO: 4331487 - DNA, 25 bp, Homo sapien
ggaattgtaccaggcatttggagaa

SEQ ID NO: 4331488 - DNA, 25 bp, Homo sapien
aggaaatggaattgtaccaggcatt

SEQ ID NO: 4331489 - DNA, 25 bp, Homo sapien
gcctggatatacagatgggcaggaa

SEQ ID NO: 4331490 - DNA, 25 bp, Homo sapien
ttgaatctagttttaaggcctggat

SEQ ID NO: 4331491 - DNA, 25 bp, Homo sapien
tattaaatatcgatccaaaagaaac

SEQ ID NO: 4331492 - DNA, 25 bp, Homo sapien
ggctattaaatatcgatccaaaaga

SEQ ID NO: 4331493 - DNA, 25 bp, Homo sapien
caggctattaaatatcgatccaaaa

SEQ ID NO: 4331494 - DNA, 25 bp, Homo sapien
taaatatcgatccaaaagaaacaaa

SEQ ID NO: 4331495 - DNA, 25 bp, Homo sapien
tgctgaaaaagaatggtagtgccac

SEQ ID NO: 4331496 - DNA, 25 bp, Homo sapien
aatggtagtgccacagatggcgaga

SEQ ID NO: 4331497 - DNA, 25 bp, Homo sapien
tgctttgctgaaaaagaatggtagt

SEQ ID NO: 4331498 - DNA, 25 bp, Homo sapien
ggtagtgccacagatggcgagagtg

SEQ ID NO: 4331499 - DNA, 25 bp, Homo sapien
gtgaaggactaagcatatagtaaaa

SEQ ID NO: 4331500 - DNA, 25 bp, Homo sapien
gggttctgaagaatgcttctattcg

SEQ ID NO: 4331501 - DNA, 25 bp, Homo sapien
aacaattagcagattcactaggtgg

SEQ ID NO: 4331502 - DNA, 25 bp, Homo sapien
tcccaacacctagggatgttgaggt

SEQ ID NO: 4331503 - DNA, 25 bp, Homo sapien
gagagaagataacaaccaccaaggc

SEQ ID NO: 4331504 - DNA, 25 bp, Homo sapien
gggctctctggtgtactccactcct

SEQ ID NO: 4331505 - DNA, 25 bp, Homo sapien
caagtctcaaaacctcaagagttgc

SEQ ID NO: 4331506 - DNA, 25 bp, Homo sapien
tgtacacattctactctaggagaga

SEQ ID NO: 4331507 - DNA, 25 bp, Homo sapien
gaatttcgggagtcacttctgcctt

SEQ ID NO: 4331508 - DNA, 25 bp, Homo sapien
tgggatgcggtgtcatcaattgctt

SEQ ID NO: 4331509 - DNA, 25 bp, Homo sapien
tttagtatgggatgcggtgtcatca

SEQ ID NO: 4331510 - DNA, 25 bp, Homo sapien
gaaagagaatttcgggagtcacttc

SEQ ID NO: 4331511 - DNA, 25 bp, Homo sapien
gcgagttctgatagaacagacatac

SEQ ID NO: 4331512 - DNA, 25 bp, Homo sapien
cttaaaatgagtccagcgagttctg

SEQ ID NO: 4331513 - DNA, 25 bp, Homo sapien
tccagcgagttctgatagaacagac

SEQ ID NO: 4331514 - DNA, 25 bp, Homo sapien
tgagtccagcgagttctgatagaac

SEQ ID NO: 4331515 - DNA, 25 bp, Homo sapien
ggtttttcttcagctcgagaattgt

SEQ ID NO: 4331516 - DNA, 25 bp, Homo sapien
gcttctgtgactgctaaggcatgct

SEQ ID NO: 4331517 - DNA, 25 bp, Homo sapien
gctaaggcatgctctgctgcccact

SEQ ID NO: 4331518 - DNA, 25 bp, Homo sapien
tgactgctaaggcatgctctgctgc

SEQ ID NO: 4331519 - DNA, 25 bp, Homo sapien
gcttattgccaggtgcactcagaga

SEQ ID NO: 4331520 - DNA, 25 bp, Homo sapien
catggcggttgtggaaatgacccaa

SEQ ID NO: 4331521 - DNA, 25 bp, Homo sapien
gagacattctgaagggaaccctgca

SEQ ID NO: 4331522 - DNA, 25 bp, Homo sapien
gggaggactgagcatacaaccactg

SEQ ID NO: 4331523 - DNA, 25 bp, Homo sapien
catgtattgcaggtaaaggtggtct

SEQ ID NO: 4331524 - DNA, 25 bp, Homo sapien
attgctgctcaccatgaaaactggg

SEQ ID NO: 4331525 - DNA, 25 bp, Homo sapien
tttgtttaatggcacaactgccatg

SEQ ID NO: 4331526 - DNA, 25 bp, Homo sapien
gaaatccaacatttatgaggtcagt

SEQ ID NO: 4331527 - DNA, 25 bp, Homo sapien
taaagcctagctaaccgtttccagc

SEQ ID NO: 4331528 - DNA, 25 bp, Homo sapien
tcaaagccctgagtaaagcgacagg

SEQ ID NO: 4331529 - DNA, 25 bp, Homo sapien
catgttttgctgtacacgctggaaa

SEQ ID NO: 4331530 - DNA, 25 bp, Homo sapien
tagttatttcagcatcaaggtcccg

SEQ ID NO: 4331531 - DNA, 25 bp, Homo sapien
tctcaatggagacaaaattatctgc

SEQ ID NO: 4331532 - DNA, 25 bp, Homo sapien
gggaccctctagtgcacaatttaat

SEQ ID NO: 4331533 - DNA, 25 bp, Homo sapien
taaggtaaaaggttccatacagctc

SEQ ID NO: 4331534 - DNA, 25 bp, Homo sapien
ttttctaaacatgacaagagcagtg

SEQ ID NO: 4331535 - DNA, 25 bp, Homo sapien
gaagagacaagtcactatatatctg

SEQ ID NO: 4331536 - DNA, 25 bp, Homo sapien
aagagacaagtcactatatatctgt

SEQ ID NO: 4331537 - DNA, 25 bp, Homo sapien
catgaagagacaagtcactatatat

SEQ ID NO: 4331538 - DNA, 25 bp, Homo sapien
tgaagagacaagtcactatatatct

SEQ ID NO: 4331539 - DNA, 25 bp, Homo sapien
tcacaatggcggcaaactggaaaca

SEQ ID NO: 4331540 - DNA, 25 bp, Homo sapien
ccagcttatggttcattacagagta

SEQ ID NO: 4331541 - DNA, 25 bp, Homo sapien
aatggtggcacagaatactagtcct

SEQ ID NO: 4331542 - DNA, 25 bp, Homo sapien
gatatgtattacgtccacttgcgga

SEQ ID NO: 4331543 - DNA, 25 bp, Homo sapien
caagagttatagacagtgctttacc

SEQ ID NO: 4331544 - DNA, 25 bp, Homo sapien
ggtagtgcattgaggcagctctaat

SEQ ID NO: 4331545 - DNA, 25 bp, Homo sapien
tctgacaatgactgacataccagct

SEQ ID NO: 4331546 - DNA, 25 bp, Homo sapien
tctgatagcctagacaaagcaatct

SEQ ID NO: 4331547 - DNA, 25 bp, Homo sapien
ggtggacccaccatggctgttgcct

SEQ ID NO: 4331548 - DNA, 25 bp, Homo sapien
gactgatgcctgataacccattggc

SEQ ID NO: 4331549 - DNA, 25 bp, Homo sapien
tgtttccggttatactcagtggcca

SEQ ID NO: 4331550 - DNA, 25 bp, Homo sapien
gctgttgcctcctcaggtagactga

SEQ ID NO: 4331551 - DNA, 25 bp, Homo sapien
tccccagcttaatcctatgatcaag

SEQ ID NO: 4331552 - DNA, 25 bp, Homo sapien
gtgtagtctctccaggcccgcagga

SEQ ID NO: 4331553 - DNA, 25 bp, Homo sapien
gatcaagaatcagcttgtgccaggc

SEQ ID NO: 4331554 - DNA, 25 bp, Homo sapien
tttccaaggcttgagtctcccgctc

SEQ ID NO: 4331555 - DNA, 25 bp, Homo sapien
agaaaagcattggttaggaacatat

SEQ ID NO: 4331556 - DNA, 25 bp, Homo sapien
tggtagaaaagcattggttaggaac

SEQ ID NO: 4331557 - DNA, 25 bp, Homo sapien
gtagaaaagcattggttaggaacat

SEQ ID NO: 4331558 - DNA, 25 bp, Homo sapien
cgtggtagaaaagcattggttagga

SEQ ID NO: 4331559 - DNA, 25 bp, Homo sapien
aaggcagacctacggctccctatca

SEQ ID NO: 4331560 - DNA, 25 bp, Homo sapien
acggctccctatcaccttctctttg

SEQ ID NO: 4331561 - DNA, 25 bp, Homo sapien
agaaaaggcagacctacggctccct

SEQ ID NO: 4331562 - DNA, 25 bp, Homo sapien
ctggagaaaaggcagacctacggct

SEQ ID NO: 4331563 - DNA, 25 bp, Homo sapien
gtgtactgccctgcataccaggtca

SEQ ID NO: 4331564 - DNA, 25 bp, Homo sapien
tgtgtactgccctgcataccaggtc

SEQ ID NO: 4331565 - DNA, 25 bp, Homo sapien
ttgtgtactgccctgcataccaggt

SEQ ID NO: 4331566 - DNA, 25 bp, Homo sapien
tgtactgccctgcataccaggtcag

SEQ ID NO: 4331567 - DNA, 25 bp, Homo sapien
gaatgtgagtactttgaaacatgac

SEQ ID NO: 4331568 - DNA, 25 bp, Homo sapien
ctggaagaatgtgagtactttgaaa

SEQ ID NO: 4331569 - DNA, 25 bp, Homo sapien
gtgagtactttgaaacatgactttt

SEQ ID NO: 4331570 - DNA, 25 bp, Homo sapien
tggaagaatgtgagtactttgaaac

SEQ ID NO: 4331571 - DNA, 25 bp, Homo sapien
tgctgctttcacagtgcgtctcctc

SEQ ID NO: 4331572 - DNA, 25 bp, Homo sapien
tcttcttgcaccagacactgagcct

SEQ ID NO: 4331573 - DNA, 25 bp, Homo sapien
cagttctttctcacgtcttaagcga

SEQ ID NO: 4331574 - DNA, 25 bp, Homo sapien
ctccaagaaggccgattttttcagg

SEQ ID NO: 4331575 - DNA, 25 bp, Homo sapien
tgtctcatctccatggtaagacgag

SEQ ID NO: 4331576 - DNA, 25 bp, Homo sapien
cagaatctaccacatttttatggag

SEQ ID NO: 4331577 - DNA, 25 bp, Homo sapien
tatggagcagatggtctataaattt

SEQ ID NO: 4331578 - DNA, 25 bp, Homo sapien
taagacgaggatccttctgctgctt

SEQ ID NO: 4331579 - DNA, 25 bp, Homo sapien
cagtgtttttagcatcaccttcttc

SEQ ID NO: 4331580 - DNA, 25 bp, Homo sapien
gcataatagtgacacttgacacagt

SEQ ID NO: 4331581 - DNA, 25 bp, Homo sapien
tggccattggcttccggcataatag

SEQ ID NO: 4331582 - DNA, 25 bp, Homo sapien
ggtgtctaaccagtcattgaccagc

SEQ ID NO: 4331583 - DNA, 25 bp, Homo sapien
gatttcatcatgatcctctatttgc

SEQ ID NO: 4331584 - DNA, 25 bp, Homo sapien
gatcctctatttgctcagatgtttt

SEQ ID NO: 4331585 - DNA, 25 bp, Homo sapien
tcatcatgatcctctatttgctcag

SEQ ID NO: 4331586 - DNA, 25 bp, Homo sapien
gttttcaaatctgtgatttggcccc

SEQ ID NO: 4331587 - DNA, 25 bp, Homo sapien
tgcaaactctgaggctttctccact

SEQ ID NO: 4331588 - DNA, 25 bp, Homo sapien
atttgacactgcaaactctgaggct

SEQ ID NO: 4331589 - DNA, 25 bp, Homo sapien
gacactgcaaactctgaggctttct

SEQ ID NO: 4331590 - DNA, 25 bp, Homo sapien
aaaatgcatttgacactgcaaactc

SEQ ID NO: 4331591 - DNA, 25 bp, Homo sapien
cctgccctttatggaaagactggtg

SEQ ID NO: 4331592 - DNA, 25 bp, Homo sapien
gccaaaacttgccatgggcttttcc

SEQ ID NO: 4331593 - DNA, 25 bp, Homo sapien
gaaaacagaacatacaggcaaagac

SEQ ID NO: 4331594 - DNA, 25 bp, Homo sapien
gtgcttggcactcaacaggtgtcca

SEQ ID NO: 4331595 - DNA, 25 bp, Homo sapien
aaatgctcaatatgtgttccttgtg

SEQ ID NO: 4331596 - DNA, 25 bp, Homo sapien
tattcccacgatcttataaatgctc

SEQ ID NO: 4331597 - DNA, 25 bp, Homo sapien
tgtaaaggaactatctcagttattc

SEQ ID NO: 4331598 - DNA, 25 bp, Homo sapien
gtcccacagcagacatcaatcccat

SEQ ID NO: 4331599 - DNA, 25 bp, Homo sapien
tgttccacactgtcaggaccaaaag

SEQ ID NO: 4331600 - DNA, 25 bp, Homo sapien
ttatccagtgttccacactgtcagg

SEQ ID NO: 4331601 - DNA, 25 bp, Homo sapien
tccacactgtcaggaccaaaagtag

SEQ ID NO: 4331602 - DNA, 25 bp, Homo sapien
ccacactgtcaggaccaaaagtagg

SEQ ID NO: 4331603 - DNA, 25 bp, Homo sapien
gtgaagctctctcccgttaataaag

SEQ ID NO: 4331604 - DNA, 25 bp, Homo sapien
taaatcgcaagaacaatcgcctggg

SEQ ID NO: 4331605 - DNA, 25 bp, Homo sapien
tataacttaagggtgaaaacagctg

SEQ ID NO: 4331606 - DNA, 25 bp, Homo sapien
accaaagccgtaatgtgcccagacc

SEQ ID NO: 4331607 - DNA, 25 bp, Homo sapien
tcggcttccttgtgaaccgtttcca

SEQ ID NO: 4331608 - DNA, 25 bp, Homo sapien
gcttccttgtgaaccgtttccagcg

SEQ ID NO: 4331609 - DNA, 25 bp, Homo sapien
tgaaccgtttccagcgattcagccc

SEQ ID NO: 4331610 - DNA, 25 bp, Homo sapien
ccttgtgaaccgtttccagcgattc

SEQ ID NO: 4331611 - DNA, 25 bp, Homo sapien
cgaacctcggccaaagctgcagcaa

SEQ ID NO: 4331612 - DNA, 25 bp, Homo sapien
ttcctccgcccgcaaggaaagcagg

SEQ ID NO: 4331613 - DNA, 25 bp, Homo sapien
aagcaggcataggacaccgtcgaac

SEQ ID NO: 4331614 - DNA, 25 bp, Homo sapien
ctccgggtcacgctgggaattgtag

SEQ ID NO: 4331615 - DNA, 25 bp, Homo sapien
ggcagaggtccctcgctcttgccgt

SEQ ID NO: 4331616 - DNA, 25 bp, Homo sapien
gcagaggtccctcgctcttgccgtc

SEQ ID NO: 4331617 - DNA, 25 bp, Homo sapien
cagaggtccctcgctcttgccgtca

SEQ ID NO: 4331618 - DNA, 25 bp, Homo sapien
gctcgcttgaatgtcggctttgctt

SEQ ID NO: 4331619 - DNA, 25 bp, Homo sapien
tcaaggctcgcttgaatgtcggctt

SEQ ID NO: 4331620 - DNA, 25 bp, Homo sapien
cagtgatgacgcagtactccctgat

SEQ ID NO: 4331621 - DNA, 25 bp, Homo sapien
tgctttttttctggcgcccagtgat

SEQ ID NO: 4331622 - DNA, 25 bp, Homo sapien
gcagtgattttggggcagagaattt

SEQ ID NO: 4331623 - DNA, 25 bp, Homo sapien
ctggaggcagtgattttggggcaga

SEQ ID NO: 4331624 - DNA, 25 bp, Homo sapien
gtgattttggggcagagaattttgc

SEQ ID NO: 4331625 - DNA, 25 bp, Homo sapien
tttggggcagagaattttgcaacac

SEQ ID NO: 4331626 - DNA, 25 bp, Homo sapien
ctgaaagagtcgaatggtttgttgg

SEQ ID NO: 4331627 - DNA, 25 bp, Homo sapien
gggtctgaagactgaaagagtcgaa

SEQ ID NO: 4331628 - DNA, 25 bp, Homo sapien
ttgttggcaggtaagtgcccctttg

SEQ ID NO: 4331629 - DNA, 25 bp, Homo sapien
tggcaggtaagtgcccctttgccct

SEQ ID NO: 4331630 - DNA, 25 bp, Homo sapien
cagacgcttcctggttgtgttgcag

SEQ ID NO: 4331631 - DNA, 25 bp, Homo sapien
gtaacggtgattgtactcccgccat

SEQ ID NO: 4331632 - DNA, 25 bp, Homo sapien
gtcgcgtccagacgcttcctggttg

SEQ ID NO: 4331633 - DNA, 25 bp, Homo sapien
cctggttgtgttgcagtaacggtga

SEQ ID NO: 4331634 - DNA, 25 bp, Homo sapien
gacacctctgagataaaagggcccc

SEQ ID NO: 4331635 - DNA, 25 bp, Homo sapien
aagggcccctttcgactagcctctg

SEQ ID NO: 4331636 - DNA, 25 bp, Homo sapien
tgtcctggtggattggtttctgtaa

SEQ ID NO: 4331637 - DNA, 25 bp, Homo sapien
cataaatcgtgtgagcgtcgccgac

SEQ ID NO: 4331638 - DNA, 25 bp, Homo sapien
gtattacaggcatgtgctgctacac

SEQ ID NO: 4331639 - DNA, 25 bp, Homo sapien
ggtattacaggcatgtgctgctaca

SEQ ID NO: 4331640 - DNA, 25 bp, Homo sapien
cttctagctctggacaaaattccat

SEQ ID NO: 4331641 - DNA, 25 bp, Homo sapien
taacctgaacaatgaatgaagaaag

SEQ ID NO: 4331642 - DNA, 25 bp, Homo sapien
cataacctgaacaatgaatgaagaa

SEQ ID NO: 4331643 - DNA, 25 bp, Homo sapien
gaaaggaagacttggttcttctagc

SEQ ID NO: 4331644 - DNA, 25 bp, Homo sapien
cctttctgaaatagcttcgggcaac

SEQ ID NO: 4331645 - DNA, 25 bp, Homo sapien
tgatagtaggaaatgcgtaagttac

SEQ ID NO: 4331646 - DNA, 25 bp, Homo sapien
catactttacacagctcagatgaga

SEQ ID NO: 4331647 - DNA, 25 bp, Homo sapien
acacagtttcttccgttctcagacg

SEQ ID NO: 4331648 - DNA, 25 bp, Homo sapien
aatctcttgaacccgagaagcagag

SEQ ID NO: 4331649 - DNA, 25 bp, Homo sapien
tacaaaagtcatctgggcatggcgg

SEQ ID NO: 4331650 - DNA, 25 bp, Homo sapien
atctcttgaacccgagaagcagagg

SEQ ID NO: 4331651 - DNA, 25 bp, Homo sapien
actacaaatacaaaagtcatctggg

SEQ ID NO: 4331652 - DNA, 25 bp, Homo sapien
tcagaaagtctgttgaccgatcact

SEQ ID NO: 4331653 - DNA, 25 bp, Homo sapien
tcttttcttggataactgtctgcgg

SEQ ID NO: 4331654 - DNA, 25 bp, Homo sapien
tgttgcaggacgagtggaaatgact

SEQ ID NO: 4331655 - DNA, 25 bp, Homo sapien
tggttccagtgcctctccgatggag

SEQ ID NO: 4331656 - DNA, 25 bp, Homo sapien
gagtgtgatcattggagtgattgaa

SEQ ID NO: 4331657 - DNA, 25 bp, Homo sapien
cgcttgctgtcatcagtcactgcag

SEQ ID NO: 4331658 - DNA, 25 bp, Homo sapien
gcacgagagacagccaagcggcctg

SEQ ID NO: 4331659 - DNA, 25 bp, Homo sapien
tccaacaaccctggaggctagacta

SEQ ID NO: 4331660 - DNA, 25 bp, Homo sapien
gctaggatacagactttgggctgga

SEQ ID NO: 4331661 - DNA, 25 bp, Homo sapien
gagttgcttgaagtaggttttcagg

SEQ ID NO: 4331662 - DNA, 25 bp, Homo sapien
ttcaggagagtgtcgcctgcccagt

SEQ ID NO: 4331663 - DNA, 25 bp, Homo sapien
gaaaaggagctaggatacagacttt

SEQ ID NO: 4331664 - DNA, 25 bp, Homo sapien
catattgccattttaagcaggtgca

SEQ ID NO: 4331665 - DNA, 25 bp, Homo sapien
taacccgctggtgagaggatgttcc

SEQ ID NO: 4331666 - DNA, 25 bp, Homo sapien
tgaccaatgagctgctggccggagt

SEQ ID NO: 4331667 - DNA, 25 bp, Homo sapien
taagaatcacactcgggcatacatc

SEQ ID NO: 4331668 - DNA, 25 bp, Homo sapien
acctttgtgctccaaacacctccca

SEQ ID NO: 4331669 - DNA, 25 bp, Homo sapien
ggcctccggaagcttatagtcatga

SEQ ID NO: 4331670 - DNA, 25 bp, Homo sapien
tcaacttgaggtttgggcgggaaca

SEQ ID NO: 4331671 - DNA, 25 bp, Homo sapien
ctttttcttagtatgggagtgtcca

SEQ ID NO: 4331672 - DNA, 25 bp, Homo sapien
ccatagtaccagaaatgttgtagag

SEQ ID NO: 4331673 - DNA, 25 bp, Homo sapien
tggctttctgtaaatgtagtaggtc

SEQ ID NO: 4331674 - DNA, 25 bp, Homo sapien
tctgtaaatgtagtaggtctgttaa

SEQ ID NO: 4331675 - DNA, 25 bp, Homo sapien
tgttgtagagatttctcattggaag

SEQ ID NO: 4331676 - DNA, 25 bp, Homo sapien
caagtgaacgaatattctgagtagt

SEQ ID NO: 4331677 - DNA, 25 bp, Homo sapien
ttactgtttgtcaagtgaacgaata

SEQ ID NO: 4331678 - DNA, 25 bp, Homo sapien
cttgcacaacactatgtggtaggac

SEQ ID NO: 4331679 - DNA, 25 bp, Homo sapien
caactgagtgctggttagaagtgac

SEQ ID NO: 4331680 - DNA, 25 bp, Homo sapien
tcctttccgcacactattcctaatg

SEQ ID NO: 4331681 - DNA, 25 bp, Homo sapien
ctgaactgctctcgcctgctgtcgg

SEQ ID NO: 4331682 - DNA, 25 bp, Homo sapien
cagtgtgattcagagggatccgtgc

SEQ ID NO: 4331683 - DNA, 25 bp, Homo sapien
tcaaacggccgatgcttcccagtgt

SEQ ID NO: 4331684 - DNA, 25 bp, Homo sapien
tggcagcctgaatttctagggccgc

SEQ ID NO: 4331685 - DNA, 25 bp, Homo sapien
gcagcctgaatttctagggccgcca

SEQ ID NO: 4331686 - DNA, 25 bp, Homo sapien
caaggctaaactggcagcctgaatt

SEQ ID NO: 4331687 - DNA, 25 bp, Homo sapien
cagcctgaatttctagggccgccat

SEQ ID NO: 4331688 - DNA, 25 bp, Homo sapien
tattaatatacagggctggggacca

SEQ ID NO: 4331689 - DNA, 25 bp, Homo sapien
gattatatatcctttctcagaggca

SEQ ID NO: 4331690 - DNA, 25 bp, Homo sapien
tcagtgggttacagaagattatata

SEQ ID NO: 4331691 - DNA, 25 bp, Homo sapien
gctggggaccacagaatgattaccc

SEQ ID NO: 4331692 - DNA, 25 bp, Homo sapien
cctcgcccgcgacgtgctcaaagat

SEQ ID NO: 4331693 - DNA, 25 bp, Homo sapien
agcctcgcccgcgacgtgctcaaag

SEQ ID NO: 4331694 - DNA, 25 bp, Homo sapien
gcctcgcccgcgacgtgctcaaaga

SEQ ID NO: 4331695 - DNA, 25 bp, Homo sapien
tcttctgcgccgtagtcacccacct

SEQ ID NO: 4331696 - DNA, 25 bp, Homo sapien
cttctgcgccgtagtcacccacctc

SEQ ID NO: 4331697 - DNA, 25 bp, Homo sapien
agcttctcattgaatcgtttctttc

SEQ ID NO: 4331698 - DNA, 25 bp, Homo sapien
tcttgattgaaaggatttactcctc

SEQ ID NO: 4331699 - DNA, 25 bp, Homo sapien
cgtttctttctaacaagtatctcac

SEQ ID NO: 4331700 - DNA, 25 bp, Homo sapien
tcttcttgattgaaaggatttactc

SEQ ID NO: 4331701 - DNA, 25 bp, Homo sapien
ctgcaactcttgagcaagccccgcc

SEQ ID NO: 4331702 - DNA, 25 bp, Homo sapien
ctctgcaactcttgagcaagccccg

SEQ ID NO: 4331703 - DNA, 25 bp, Homo sapien
tctgcaactcttgagcaagccccgc

SEQ ID NO: 4331704 - DNA, 25 bp, Homo sapien
ctagaaatgggtacaaagagtgttc

SEQ ID NO: 4331705 - DNA, 25 bp, Homo sapien
ctcgatattgaaggtggtatagatc

SEQ ID NO: 4331706 - DNA, 25 bp, Homo sapien
tgaggaaggctttccggaactcgat

SEQ ID NO: 4331707 - DNA, 25 bp, Homo sapien
ggtatagatcacagggttgagggcg

SEQ ID NO: 4331708 - DNA, 25 bp, Homo sapien
gcaagacaggatcttgaggaaggct

SEQ ID NO: 4331709 - DNA, 25 bp, Homo sapien
cagccatgtcgtggcactgtaaagc

SEQ ID NO: 4331710 - DNA, 25 bp, Homo sapien
ccagccatgtcgtggcactgtaaag

SEQ ID NO: 4331711 - DNA, 25 bp, Homo sapien
agccatgtcgtggcactgtaaagct

SEQ ID NO: 4331712 - DNA, 25 bp, Homo sapien
gtctggcagtgggtattgagaacat

SEQ ID NO: 4331713 - DNA, 25 bp, Homo sapien
agtgggtattgagaacatgggtcaa

SEQ ID NO: 4331714 - DNA, 25 bp, Homo sapien
cagtgggtattgagaacatgggtca

SEQ ID NO: 4331715 - DNA, 25 bp, Homo sapien
tctggcagtgggtattgagaacatg

SEQ ID NO: 4331716 - DNA, 25 bp, Homo sapien
aagcacaatggccaccatttgggtt

SEQ ID NO: 4331717 - DNA, 25 bp, Homo sapien
ggttgccttcttctcccgaagtggc

SEQ ID NO: 4331718 - DNA, 25 bp, Homo sapien
cacaatggccaccatttgggttgcc

SEQ ID NO: 4331719 - DNA, 25 bp, Homo sapien
aatggccaccatttgggttgccttc

SEQ ID NO: 4331720 - DNA, 25 bp, Homo sapien
ctccccgaggttgcaggggccccag

SEQ ID NO: 4331721 - DNA, 25 bp, Homo sapien
caaagatgtcgataatctgccattg

SEQ ID NO: 4331722 - DNA, 25 bp, Homo sapien
tctgccattgctgagttttcgaact

SEQ ID NO: 4331723 - DNA, 25 bp, Homo sapien
ctaagctgagcttgggcgctatggt

SEQ ID NO: 4331724 - DNA, 25 bp, Homo sapien
gagttttcgaacttctaagctgagc

SEQ ID NO: 4331725 - DNA, 25 bp, Homo sapien
ggcagatgctgtagtaacgcttcag

SEQ ID NO: 4331726 - DNA, 25 bp, Homo sapien
cagatgctgtagtaacgcttcagct

SEQ ID NO: 4331727 - DNA, 25 bp, Homo sapien
agatgctgtagtaacgcttcagctc

SEQ ID NO: 4331728 - DNA, 25 bp, Homo sapien
cttggaagcctggtccacccaaggc

SEQ ID NO: 4331729 - DNA, 25 bp, Homo sapien
gcaggtgtgacaagagggaatcttg

SEQ ID NO: 4331730 - DNA, 25 bp, Homo sapien
acatttctgggggtattgtttatct

SEQ ID NO: 4331731 - DNA, 25 bp, Homo sapien
aagagggaatcttgacatttctggg

SEQ ID NO: 4331732 - DNA, 25 bp, Homo sapien
catttctgggggtattgtttatctt

SEQ ID NO: 4331733 - DNA, 25 bp, Homo sapien
ggaaatcaggcccttactgacaact

SEQ ID NO: 4331734 - DNA, 25 bp, Homo sapien
atggaaatcaggcccttactgacaa

SEQ ID NO: 4331735 - DNA, 25 bp, Homo sapien
gacaactgctgaatggggtgcaggt

SEQ ID NO: 4331736 - DNA, 25 bp, Homo sapien
gtgatggaaatcaggcccttactga

SEQ ID NO: 4331737 - DNA, 25 bp, Homo sapien
cacatttggcaaacatcctattcag

SEQ ID NO: 4331738 - DNA, 25 bp, Homo sapien
gcaaacatcctattcagctctggga

SEQ ID NO: 4331739 - DNA, 25 bp, Homo sapien
ggcagatgctgtttaatgttaccac

SEQ ID NO: 4331740 - DNA, 25 bp, Homo sapien
gaaggcagatgctgtttaatgttac

SEQ ID NO: 4331741 - DNA, 25 bp, Homo sapien
ctgactgttctgtcgagtgaggatc

SEQ ID NO: 4331742 - DNA, 25 bp, Homo sapien
aggcctgacactgttgcactgactg

SEQ ID NO: 4331743 - DNA, 25 bp, Homo sapien
tgcactgactgttctgtcgagtgag

SEQ ID NO: 4331744 - DNA, 25 bp, Homo sapien
caggcctgacactgttgcactgact

SEQ ID NO: 4331745 - DNA, 25 bp, Homo sapien
gggcaggtagaaggacaccactgaa

SEQ ID NO: 4331746 - DNA, 25 bp, Homo sapien
catagattctggcatagacaaggac

SEQ ID NO: 4331747 - DNA, 25 bp, Homo sapien
ccacatagattctggcatagacaag

SEQ ID NO: 4331748 - DNA, 25 bp, Homo sapien
aggtagaaggacaccactgaagagt

SEQ ID NO: 4331749 - DNA, 25 bp, Homo sapien
gagatggagcagacagtggggtccc

SEQ ID NO: 4331750 - DNA, 25 bp, Homo sapien
gctctgtcccgtgccatgctggtag

SEQ ID NO: 4331751 - DNA, 25 bp, Homo sapien
cagacggccgtgatcatgagggcca

SEQ ID NO: 4331752 - DNA, 25 bp, Homo sapien
gcgccgacaggagctctgtcccgtg

SEQ ID NO: 4331753 - DNA, 25 bp, Homo sapien
agcaaaggccagtacccagacggcc

SEQ ID NO: 4331754 - DNA, 25 bp, Homo sapien
tgctgccaggttccaaaaataaatt

SEQ ID NO: 4331755 - DNA, 25 bp, Homo sapien
ctgatttctatgatggctacagcct

SEQ ID NO: 4331756 - DNA, 25 bp, Homo sapien
tcctgctgccaggttccaaaaataa

SEQ ID NO: 4331757 - DNA, 25 bp, Homo sapien
gatttctatgatggctacagcctcc

SEQ ID NO: 4331758 - DNA, 25 bp, Homo sapien
gggatctaaggtataagctggatct

SEQ ID NO: 4331759 - DNA, 25 bp, Homo sapien
ctggagcctccttaacccttgttgt

SEQ ID NO: 4331760 - DNA, 25 bp, Homo sapien
aggtataagctggatctaccaatgg

SEQ ID NO: 4331761 - DNA, 25 bp, Homo sapien
taacccttgttgtgcacctcaaggc

SEQ ID NO: 4331762 - DNA, 25 bp, Homo sapien
cggaattggccatcggagggcacta

SEQ ID NO: 4331763 - DNA, 25 bp, Homo sapien
aactctgccagcacggctggggtga

SEQ ID NO: 4331764 - DNA, 25 bp, Homo sapien
gccatcggagggcactataatgcag

SEQ ID NO: 4331765 - DNA, 25 bp, Homo sapien
cggagggcactataatgcagcaaga

SEQ ID NO: 4331766 - DNA, 25 bp, Homo sapien
aggccgaccgcttagcctctgactt

SEQ ID NO: 4331767 - DNA, 25 bp, Homo sapien
ttgcacgtgaccgactgcaggcgag

SEQ ID NO: 4331768 - DNA, 25 bp, Homo sapien
tctgacttcctctcggagcgattgc

SEQ ID NO: 4331769 - DNA, 25 bp, Homo sapien
cttggccgggagagagaggcttggc

SEQ ID NO: 4331770 - DNA, 25 bp, Homo sapien
tggctgtacacatcatgacatccag

SEQ ID NO: 4331771 - DNA, 25 bp, Homo sapien
gctggctgtacacatcatgacatcc

SEQ ID NO: 4331772 - DNA, 25 bp, Homo sapien
agcaaatgcggctgaaattccagac

SEQ ID NO: 4331773 - DNA, 25 bp, Homo sapien
tcacagcaaatgcggctgaaattcc

SEQ ID NO: 4331774 - DNA, 25 bp, Homo sapien
cagatactgaccaaatgactgtgca

SEQ ID NO: 4331775 - DNA, 25 bp, Homo sapien
gaaaaatggtacagtagcctctgaa

SEQ ID NO: 4331776 - DNA, 25 bp, Homo sapien
tcatggaccgcgaggctttgtgcag

SEQ ID NO: 4331777 - DNA, 25 bp, Homo sapien
aaggatcttcttatatgaccaggtc

SEQ ID NO: 4331778 - DNA, 25 bp, Homo sapien
tcacctgaacactggagacccatga

SEQ ID NO: 4331779 - DNA, 25 bp, Homo sapien
tagagacaacatgcacctgaagtct

SEQ ID NO: 4331780 - DNA, 25 bp, Homo sapien
tcagggaagacaagtactagcacag

SEQ ID NO: 4331781 - DNA, 25 bp, Homo sapien
taactctctcattacagggagaatg

SEQ ID NO: 4331782 - DNA, 25 bp, Homo sapien
ccaccagcaagtctgccacagccag

SEQ ID NO: 4331783 - DNA, 25 bp, Homo sapien
aggtataccacccagggcatcacca

SEQ ID NO: 4331784 - DNA, 25 bp, Homo sapien
gccaccagcaagtctgccacagcca

SEQ ID NO: 4331785 - DNA, 25 bp, Homo sapien
ctccaggtataccacccagggcatc

SEQ ID NO: 4331786 - DNA, 25 bp, Homo sapien
taggagagggcatagtaggcatgtg

SEQ ID NO: 4331787 - DNA, 25 bp, Homo sapien
ttgccgaagacgatggccaggatga

SEQ ID NO: 4331788 - DNA, 25 bp, Homo sapien
cccacaggtgtagttcaggtggcca

SEQ ID NO: 4331789 - DNA, 25 bp, Homo sapien
aggatgagcgcgcagtaggagaggg

SEQ ID NO: 4331790 - DNA, 25 bp, Homo sapien
agcccagagggaggtgcgtgatgcc

SEQ ID NO: 4331791 - DNA, 25 bp, Homo sapien
gggaggtgcgtgatgccaaggggct

SEQ ID NO: 4331792 - DNA, 25 bp, Homo sapien
ccagagggaggtgcgtgatgccaag

SEQ ID NO: 4331793 - DNA, 25 bp, Homo sapien
ggaggtgcgtgatgccaaggggctt

SEQ ID NO: 4331794 - DNA, 25 bp, Homo sapien
ctgtgaggagacagaaaacaatatt

SEQ ID NO: 4331795 - DNA, 25 bp, Homo sapien
agaaaacaatattaataaaatcaga

SEQ ID NO: 4331796 - DNA, 25 bp, Homo sapien
gtgaggagacagaaaacaatattaa

SEQ ID NO: 4331797 - DNA, 25 bp, Homo sapien
acagaaaacaatattaataaaatca

SEQ ID NO: 4331798 - DNA, 25 bp, Homo sapien
tatctgtagctctcccttgattagg

SEQ ID NO: 4331799 - DNA, 25 bp, Homo sapien
tagattctatgtagcctgaggttgg

SEQ ID NO: 4331800 - DNA, 25 bp, Homo sapien
taggagaccggcctaatcatggctg

SEQ ID NO: 4331801 - DNA, 25 bp, Homo sapien
tgacttggtggccagaatttgccct

SEQ ID NO: 4331802 - DNA, 25 bp, Homo sapien
gattgttcaaggatattcccacttt

SEQ ID NO: 4331803 - DNA, 25 bp, Homo sapien
gaacacagtggccagaatccctctt

SEQ ID NO: 4331804 - DNA, 25 bp, Homo sapien
ttcagaggagggcagccgctaccct

SEQ ID NO: 4331805 - DNA, 25 bp, Homo sapien
ctggagatagcaccgctgctgccaa

SEQ ID NO: 4331806 - DNA, 25 bp, Homo sapien
caattctgagcctgatgttggaatc

SEQ ID NO: 4331807 - DNA, 25 bp, Homo sapien
tttttccacatctgatcttagatcc

SEQ ID NO: 4331808 - DNA, 25 bp, Homo sapien
gaatcacagttgcatggatttctga

SEQ ID NO: 4331809 - DNA, 25 bp, Homo sapien
ttagatcctttatagcagcaggtgg

SEQ ID NO: 4331810 - DNA, 25 bp, Homo sapien
gaacagagagttgtcaggtccccat

SEQ ID NO: 4331811 - DNA, 25 bp, Homo sapien
catctcttagagtgagtgcataacc

SEQ ID NO: 4331812 - DNA, 25 bp, Homo sapien
gctttgctgatgttcaatccctcag

SEQ ID NO: 4331813 - DNA, 25 bp, Homo sapien
tagcacctcattaagacttacagag

SEQ ID NO: 4331814 - DNA, 25 bp, Homo sapien
caatcatcatctcaagtactacata

SEQ ID NO: 4331815 - DNA, 25 bp, Homo sapien
aagtactacatatctctgctgggaa

SEQ ID NO: 4331816 - DNA, 25 bp, Homo sapien
tcatctcaagtactacatatctctg

SEQ ID NO: 4331817 - DNA, 25 bp, Homo sapien
tctcaagtactacatatctctgctg

SEQ ID NO: 4331818 - DNA, 25 bp, Homo sapien
tctgatttctggagaccgaggagtt

SEQ ID NO: 4331819 - DNA, 25 bp, Homo sapien
gcagacatacccaagcaaagcaaac

SEQ ID NO: 4331820 - DNA, 25 bp, Homo sapien
gcaaagcaaactttgcctttctcag

SEQ ID NO: 4331821 - DNA, 25 bp, Homo sapien
agtttaccacttcggctcctgcagc

SEQ ID NO: 4331822 - DNA, 25 bp, Homo sapien
gtgaaattacttgagtgctgctttt

SEQ ID NO: 4331823 - DNA, 25 bp, Homo sapien
ggtgaaattacttgagtgctgcttt

SEQ ID NO: 4331824 - DNA, 25 bp, Homo sapien
cccatttttgcctctaaggtgaaat

SEQ ID NO: 4331825 - DNA, 25 bp, Homo sapien
aggtgaaattacttgagtgctgctt

SEQ ID NO: 4331826 - DNA, 25 bp, Homo sapien
tgggtcagccgctcagaggttctgt

SEQ ID NO: 4331827 - DNA, 25 bp, Homo sapien
tcatagctgctttcgaatgtatccg

SEQ ID NO: 4331828 - DNA, 25 bp, Homo sapien
ggagggaccctaaactgagcgttgc

SEQ ID NO: 4331829 - DNA, 25 bp, Homo sapien
gaatgtatccgttttctttagagga

SEQ ID NO: 4331830 - DNA, 25 bp, Homo sapien
tctttgtctctctatctgctcggat

SEQ ID NO: 4331831 - DNA, 25 bp, Homo sapien
taggcataggcagtatccgttttct

SEQ ID NO: 4331832 - DNA, 25 bp, Homo sapien
tatccgttttctacctcgctctctt

SEQ ID NO: 4331833 - DNA, 25 bp, Homo sapien
ctgaaagagggatggagtaggcata

SEQ ID NO: 4331834 - DNA, 25 bp, Homo sapien
atttgattatcatgatgatcttaaa

SEQ ID NO: 4331835 - DNA, 25 bp, Homo sapien
ttgattatcatgatgatcttaaact

SEQ ID NO: 4331836 - DNA, 25 bp, Homo sapien
tgattatcatgatgatcttaaactg

SEQ ID NO: 4331837 - DNA, 25 bp, Homo sapien
gattatcatgatgatcttaaactgc

SEQ ID NO: 4331838 - DNA, 25 bp, Homo sapien
ccatcaatagtgcatgagtgttcca

SEQ ID NO: 4331839 - DNA, 25 bp, Homo sapien
tttcctcccattatgatcagggaag

SEQ ID NO: 4331840 - DNA, 25 bp, Homo sapien
tctatctgtgattgaaggtggaatg

SEQ ID NO: 4331841 - DNA, 25 bp, Homo sapien
cagggaagactttgtatgacatttg

SEQ ID NO: 4331842 - DNA, 25 bp, Homo sapien
catgggaaagactgacatggtcttg

SEQ ID NO: 4331843 - DNA, 25 bp, Homo sapien
gcttccttccatgggaaagactgac

SEQ ID NO: 4331844 - DNA, 25 bp, Homo sapien
ttccatgggaaagactgacatggtc

SEQ ID NO: 4331845 - DNA, 25 bp, Homo sapien
attgcttccttccatgggaaagact

SEQ ID NO: 4331846 - DNA, 25 bp, Homo sapien
gtagctgggaccacatgctcacatc

SEQ ID NO: 4331847 - DNA, 25 bp, Homo sapien
actgaagcctgcagttcctgggctc

SEQ ID NO: 4331848 - DNA, 25 bp, Homo sapien
agctcactgaagcctgcagttcctg

SEQ ID NO: 4331849 - DNA, 25 bp, Homo sapien
agctgggaccacatgctcacatcac

SEQ ID NO: 4331850 - DNA, 25 bp, Homo sapien
tctgacttaagagttacctgtggca

SEQ ID NO: 4331851 - DNA, 25 bp, Homo sapien
agttacctgtggcattacttttact

SEQ ID NO: 4331852 - DNA, 25 bp, Homo sapien
taagagttacctgtggcattacttt

SEQ ID NO: 4331853 - DNA, 25 bp, Homo sapien
cattttctgacttaagagttacctg

SEQ ID NO: 4331854 - DNA, 25 bp, Homo sapien
ctaggttcttccattggacagaaag

SEQ ID NO: 4331855 - DNA, 25 bp, Homo sapien
ggttcttccattggacagaaaggta

SEQ ID NO: 4331856 - DNA, 25 bp, Homo sapien
taggttcttccattggacagaaagg

SEQ ID NO: 4331857 - DNA, 25 bp, Homo sapien
aggttcttccattggacagaaaggt

SEQ ID NO: 4331858 - DNA, 25 bp, Homo sapien
cagcatttcatgctactccctagag

SEQ ID NO: 4331859 - DNA, 25 bp, Homo sapien
catgctactccctagagagccagca

SEQ ID NO: 4331860 - DNA, 25 bp, Homo sapien
gctgccatttacacgctgctcaggt

SEQ ID NO: 4331861 - DNA, 25 bp, Homo sapien
gaaatcttcagccaacccagaattc

SEQ ID NO: 4331862 - DNA, 25 bp, Homo sapien
ctagattagtgtgagcagcgagcga

SEQ ID NO: 4331863 - DNA, 25 bp, Homo sapien
gcaagagcgtgtgacaacagaggat

SEQ ID NO: 4331864 - DNA, 25 bp, Homo sapien
agcgaatgagcaagagcgtgtgaca

SEQ ID NO: 4331865 - DNA, 25 bp, Homo sapien
tgaggttcgaagcaggaaggacaca

SEQ ID NO: 4331866 - DNA, 25 bp, Homo sapien
gggagaaacgccatactgggaagtc

SEQ ID NO: 4331867 - DNA, 25 bp, Homo sapien
cataagtctcggcactgctcatcag

SEQ ID NO: 4331868 - DNA, 25 bp, Homo sapien
ctgctggtgtgggacaagttacaag

SEQ ID NO: 4331869 - DNA, 25 bp, Homo sapien
gcccatgtgtcagcacgctcttgct

SEQ ID NO: 4331870 - DNA, 25 bp, Homo sapien
gatgtgagcaaagggctatgctttc

SEQ ID NO: 4331871 - DNA, 25 bp, Homo sapien
ggtgtaggaagtgttggccattatt

SEQ ID NO: 4331872 - DNA, 25 bp, Homo sapien
ggcacaggtagacagattgatgtga

SEQ ID NO: 4331873 - DNA, 25 bp, Homo sapien
tattggatgtggaaagatcaagctc

SEQ ID NO: 4331874 - DNA, 25 bp, Homo sapien
gcccaactggcggcagaaacaagct

SEQ ID NO: 4331875 - DNA, 25 bp, Homo sapien
gagcccaactggcggcagaaacaag

SEQ ID NO: 4331876 - DNA, 25 bp, Homo sapien
agcccaactggcggcagaaacaagc

SEQ ID NO: 4331877 - DNA, 25 bp, Homo sapien
cccaactggcggcagaaacaagctg

SEQ ID NO: 4331878 - DNA, 25 bp, Homo sapien
gcaggccttattcctgcccaattct

SEQ ID NO: 4331879 - DNA, 25 bp, Homo sapien
tctgcaggccttattcctgcccaat

SEQ ID NO: 4331880 - DNA, 25 bp, Homo sapien
tcttgtggtccagcagtcatttcct

SEQ ID NO: 4331881 - DNA, 25 bp, Homo sapien
ctttcttctgcaggccttattcctg

SEQ ID NO: 4331882 - DNA, 25 bp, Homo sapien
cctgcccctaagctctcatgggaga

SEQ ID NO: 4331883 - DNA, 25 bp, Homo sapien
tctgatacctaagatatctttgcct

SEQ ID NO: 4331884 - DNA, 25 bp, Homo sapien
tcatgggagacttgcttatatctga

SEQ ID NO: 4331885 - DNA, 25 bp, Homo sapien
ttgcttttctgattggctagctcca

SEQ ID NO: 4331886 - DNA, 25 bp, Homo sapien
gagtctgagagttgccccttagccc

SEQ ID NO: 4331887 - DNA, 25 bp, Homo sapien
gtccttggacctgactctgcttcct

SEQ ID NO: 4331888 - DNA, 25 bp, Homo sapien
cccttagcccagatgaggtaggtgg

SEQ ID NO: 4331889 - DNA, 25 bp, Homo sapien
ttgggagccacatgactgagtctga

SEQ ID NO: 4331890 - DNA, 25 bp, Homo sapien
tacccaaatgatcaatctaggcatg

SEQ ID NO: 4331891 - DNA, 25 bp, Homo sapien
gaagctctaaatacccaaatgatca

SEQ ID NO: 4331892 - DNA, 25 bp, Homo sapien
ggttgtagtaaggatcagaagctct

SEQ ID NO: 4331893 - DNA, 25 bp, Homo sapien
tcaatctaggcatgagcatggtgag

SEQ ID NO: 4331894 - DNA, 25 bp, Homo sapien
attggttcagagtaatggcaatcag

SEQ ID NO: 4331895 - DNA, 25 bp, Homo sapien
agtcacagcctgaagttcgcagggg

SEQ ID NO: 4331896 - DNA, 25 bp, Homo sapien
aagctggcagagatctccattcagg

SEQ ID NO: 4331897 - DNA, 25 bp, Homo sapien
agctggcagagatctccattcaggc

SEQ ID NO: 4331898 - DNA, 25 bp, Homo sapien
ctccagaacccaaggtgcagcgagt

SEQ ID NO: 4331899 - DNA, 25 bp, Homo sapien
cagaacccaaggtgcagcgagtagc

SEQ ID NO: 4331900 - DNA, 25 bp, Homo sapien
acccaaggtgcagcgagtagcagag

SEQ ID NO: 4331901 - DNA, 25 bp, Homo sapien
ctgagcgggagctccagaacccaag

SEQ ID NO: 4331902 - DNA, 25 bp, Homo sapien
aggcaatggcacaataagggcatgt

SEQ ID NO: 4331903 - DNA, 25 bp, Homo sapien
gcaccaaaaagaggcaatggcacaa

SEQ ID NO: 4331904 - DNA, 25 bp, Homo sapien
caatggcacaataagggcatgtggc

SEQ ID NO: 4331905 - DNA, 25 bp, Homo sapien
gcacaataagggcatgtggcagcag

SEQ ID NO: 4331906 - DNA, 25 bp, Homo sapien
gtaggacccactagctccagtctct

SEQ ID NO: 4331907 - DNA, 25 bp, Homo sapien
gtgacaggcagtgtgacatggtggg

SEQ ID NO: 4331908 - DNA, 25 bp, Homo sapien
acagtgacaggcagtgtgacatggt

SEQ ID NO: 4331909 - DNA, 25 bp, Homo sapien
gcagtaggacccactagctccagtc

SEQ ID NO: 4331910 - DNA, 25 bp, Homo sapien
cttgcagcaatgattcctcaaagtt

SEQ ID NO: 4331911 - DNA, 25 bp, Homo sapien
ttcctcaaagttgcccagcagggta

SEQ ID NO: 4331912 - DNA, 25 bp, Homo sapien
gcaatgattcctcaaagttgcccag

SEQ ID NO: 4331913 - DNA, 25 bp, Homo sapien
ctcaaagttgcccagcagggtacag

SEQ ID NO: 4331914 - DNA, 25 bp, Homo sapien
tgatagcaggggtaggaacagggga

SEQ ID NO: 4331915 - DNA, 25 bp, Homo sapien
tagcaggggtaggaacaggggaggc

SEQ ID NO: 4331916 - DNA, 25 bp, Homo sapien
gaggcactacgggggctcagcaggc

SEQ ID NO: 4331917 - DNA, 25 bp, Homo sapien
acaggggaggcactacgggggctca

SEQ ID NO: 4331918 - DNA, 25 bp, Homo sapien
cagggttccctggcacgtccaaagg

SEQ ID NO: 4331919 - DNA, 25 bp, Homo sapien
caaagggctggaccctcttccttag

SEQ ID NO: 4331920 - DNA, 25 bp, Homo sapien
cttccttagaactgacatttggggc

SEQ ID NO: 4331921 - DNA, 25 bp, Homo sapien
ccagggttccctggcacgtccaaag

SEQ ID NO: 4331922 - DNA, 25 bp, Homo sapien
aatcagtgtccagcgtgtgtagctg

SEQ ID NO: 4331923 - DNA, 25 bp, Homo sapien
tcagtgtccagcgtgtgtagctggc

SEQ ID NO: 4331924 - DNA, 25 bp, Homo sapien
aaatcagtgtccagcgtgtgtagct

SEQ ID NO: 4331925 - DNA, 25 bp, Homo sapien
caaatcagtgtccagcgtgtgtagc

SEQ ID NO: 4331926 - DNA, 25 bp, Homo sapien
ccacggtgggagaaatggtggctgg

SEQ ID NO: 4331927 - DNA, 25 bp, Homo sapien
aggccacggtgggagaaatggtggc

SEQ ID NO: 4331928 - DNA, 25 bp, Homo sapien
ccacaacacagaggccacggtggga

SEQ ID NO: 4331929 - DNA, 25 bp, Homo sapien
caacacagaggccacggtgggagaa

SEQ ID NO: 4331930 - DNA, 25 bp, Homo sapien
cagccccagtccccctgggcccaat

SEQ ID NO: 4331931 - DNA, 25 bp, Homo sapien
cagtccccctgggcccaatagccct

SEQ ID NO: 4331932 - DNA, 25 bp, Homo sapien
agctcctgaggacccttagtgggtg

SEQ ID NO: 4331933 - DNA, 25 bp, Homo sapien
gctcctgaggacccttagtgggtgg

SEQ ID NO: 4331934 - DNA, 25 bp, Homo sapien
ctcctgaggacccttagtgggtggg

SEQ ID NO: 4331935 - DNA, 25 bp, Homo sapien
ctggtagagcctgggggatgtcact

SEQ ID NO: 4331936 - DNA, 25 bp, Homo sapien
cctgggggatgtcactgccccctgc

SEQ ID NO: 4331937 - DNA, 25 bp, Homo sapien
agagcctgggggatgtcactgcccc

SEQ ID NO: 4331938 - DNA, 25 bp, Homo sapien
tgggggatgtcactgccccctgccc

SEQ ID NO: 4331939 - DNA, 25 bp, Homo sapien
gctgtgaagggccagcctctggctc

SEQ ID NO: 4331940 - DNA, 25 bp, Homo sapien
ggagacagctctgcctgcatgtggc

SEQ ID NO: 4331941 - DNA, 25 bp, Homo sapien
atgagcaggccaccccggagggccc

SEQ ID NO: 4331942 - DNA, 25 bp, Homo sapien
gtagtccatgagcaggccaccccgg

SEQ ID NO: 4331943 - DNA, 25 bp, Homo sapien
ccacacggcctttatgctgggcctg

SEQ ID NO: 4331944 - DNA, 25 bp, Homo sapien
acacggcctttatgctgggcctgtg

SEQ ID NO: 4331945 - DNA, 25 bp, Homo sapien
ccccacacggcctttatgctgggcc

SEQ ID NO: 4331946 - DNA, 25 bp, Homo sapien
ggtcacccccacacggcctttatgc

SEQ ID NO: 4331947 - DNA, 25 bp, Homo sapien
tcaactatatatatgctggctcatc

SEQ ID NO: 4331948 - DNA, 25 bp, Homo sapien
ttcattgaagagcagcctatgctga

SEQ ID NO: 4331949 - DNA, 25 bp, Homo sapien
agagcatttatgttaccagcagttt

SEQ ID NO: 4331950 - DNA, 25 bp, Homo sapien
tgaatgttcattgaagagcagccta

SEQ ID NO: 4331951 - DNA, 25 bp, Homo sapien
gcagcgattattctttgcacgcaca

SEQ ID NO: 4331952 - DNA, 25 bp, Homo sapien
gaaaactagtgacatgctcttggag

SEQ ID NO: 4331953 - DNA, 25 bp, Homo sapien
tagattgttctcaacgtttcacaca

SEQ ID NO: 4331954 - DNA, 25 bp, Homo sapien
cagagataccttattgtttcacagt

SEQ ID NO: 4331955 - DNA, 25 bp, Homo sapien
tgggaaagcaacacagcttcaccat

SEQ ID NO: 4331956 - DNA, 25 bp, Homo sapien
gaaagcaacacagcttcaccatcat

SEQ ID NO: 4331957 - DNA, 25 bp, Homo sapien
cagcttcaccatcattctctcgtcc

SEQ ID NO: 4331958 - DNA, 25 bp, Homo sapien
ctgggaaagcaacacagcttcacca

SEQ ID NO: 4331959 - DNA, 25 bp, Homo sapien
tcaatgccaagtgaggatgagctgc

SEQ ID NO: 4331960 - DNA, 25 bp, Homo sapien
taagtgcacaataaccaacaggtct

SEQ ID NO: 4331961 - DNA, 25 bp, Homo sapien
ttctctgacgttgactgatgtgggc

SEQ ID NO: 4331962 - DNA, 25 bp, Homo sapien
gaagatatttcctgtggccaaaaga

SEQ ID NO: 4331963 - DNA, 25 bp, Homo sapien
ccacaaattcccacatcatttgcac

SEQ ID NO: 4331964 - DNA, 25 bp, Homo sapien
aacccacaaattcccacatcatttg

SEQ ID NO: 4331965 - DNA, 25 bp, Homo sapien
agaaaacccacaaattcccacatca

SEQ ID NO: 4331966 - DNA, 25 bp, Homo sapien
aaaacccacaaattcccacatcatt

SEQ ID NO: 4331967 - DNA, 25 bp, Homo sapien
gttttttcctccagagtggatctta

SEQ ID NO: 4331968 - DNA, 25 bp, Homo sapien
aggttttttcctccagagtggatct

SEQ ID NO: 4331969 - DNA, 25 bp, Homo sapien
ttttttcctccagagtggatcttac

SEQ ID NO: 4331970 - DNA, 25 bp, Homo sapien
cctgcagtgtgggtcatactatgtc

SEQ ID NO: 4331971 - DNA, 25 bp, Homo sapien
tactatgtcggaagaaaacagagcg

SEQ ID NO: 4331972 - DNA, 25 bp, Homo sapien
gcactcgtagggctttcctgcagtg

SEQ ID NO: 4331973 - DNA, 25 bp, Homo sapien
ccagtgtgactccttgtatgtcgag

SEQ ID NO: 4331974 - DNA, 25 bp, Homo sapien
gaatcctcatgggtcgaacgaagtc

SEQ ID NO: 4331975 - DNA, 25 bp, Homo sapien
gtgcgacctgcggttgaagaccttc

SEQ ID NO: 4331976 - DNA, 25 bp, Homo sapien
tgtgggtcacacgatgctggatgaa

SEQ ID NO: 4331977 - DNA, 25 bp, Homo sapien
cagagtgatagctgaaggtctttcc

SEQ ID NO: 4331978 - DNA, 25 bp, Homo sapien
ccagaaggtctccgtgtgggagact

SEQ ID NO: 4331979 - DNA, 25 bp, Homo sapien
cagctcttaaggcttaaggcggcgc

SEQ ID NO: 4331980 - DNA, 25 bp, Homo sapien
gctcttaaggcttaaggcggcgcgt

SEQ ID NO: 4331981 - DNA, 25 bp, Homo sapien
ggagactgcagccaaactcaagtgc

SEQ ID NO: 4331982 - DNA, 25 bp, Homo sapien
tccgcatatgcagagagtacttccg

SEQ ID NO: 4331983 - DNA, 25 bp, Homo sapien
tacttccgactacagataccagaga

SEQ ID NO: 4331984 - DNA, 25 bp, Homo sapien
gaactacaagtctcagaggcctcag

SEQ ID NO: 4331985 - DNA, 25 bp, Homo sapien
actgcctcggatgtcgctgcaatgg

SEQ ID NO: 4331986 - DNA, 25 bp, Homo sapien
gacaaagtaggagtgtctggaccac

SEQ ID NO: 4331987 - DNA, 25 bp, Homo sapien
ttagtgaggaagaatccacaatgac

SEQ ID NO: 4331988 - DNA, 25 bp, Homo sapien
ttaagggcttggtaattggatgttg

SEQ ID NO: 4331989 - DNA, 25 bp, Homo sapien
gttcagaatgacttgtagcagcgaa

SEQ ID NO: 4331990 - DNA, 25 bp, Homo sapien
cagacagggtaattgtggaaccaga

SEQ ID NO: 4331991 - DNA, 25 bp, Homo sapien
ggtaacttcaattctgtaaggcaaa

SEQ ID NO: 4331992 - DNA, 25 bp, Homo sapien
ccttgccctctagccgccccatgag

SEQ ID NO: 4331993 - DNA, 25 bp, Homo sapien
tctgaaagggtaacttcaattctgt

SEQ ID NO: 4331994 - DNA, 25 bp, Homo sapien
ccacgccaaccctgactcatggctg

SEQ ID NO: 4331995 - DNA, 25 bp, Homo sapien
ggctgccggcctccccaatgttttc

SEQ ID NO: 4331996 - DNA, 25 bp, Homo sapien
ggcacctttgttgataatgaattca

SEQ ID NO: 4331997 - DNA, 25 bp, Homo sapien
gccaaccctgactcatggctgccgg

SEQ ID NO: 4331998 - DNA, 25 bp, Homo sapien
gatggctgtgattattatgggtctt

SEQ ID NO: 4331999 - DNA, 25 bp, Homo sapien
caggatggctgtgattattatgggt

SEQ ID NO: 4332000 - DNA, 25 bp, Homo sapien
aggatggctgtgattattatgggtc

SEQ ID NO: 4332001 - DNA, 25 bp, Homo sapien
ggatggctgtgattattatgggtct

SEQ ID NO: 4332002 - DNA, 25 bp, Homo sapien
taggcccacagcaagtactagcact

SEQ ID NO: 4332003 - DNA, 25 bp, Homo sapien
actgtctggctactgcgtgtgttca

SEQ ID NO: 4332004 - DNA, 25 bp, Homo sapien
ccatttgggatctagggcctggagt

SEQ ID NO: 4332005 - DNA, 25 bp, Homo sapien
tacagtcagcagctagtgaatccag

SEQ ID NO: 4332006 - DNA, 25 bp, Homo sapien
ccatcaaaaagtgggctaaggacat

SEQ ID NO: 4332007 - DNA, 25 bp, Homo sapien
aacacatgaaaaaatgctcaccatc

SEQ ID NO: 4332008 - DNA, 25 bp, Homo sapien
aacagacacttctcaaaagaagaca

SEQ ID NO: 4332009 - DNA, 25 bp, Homo sapien
tttatgcagccaaaaaacacatgaa

SEQ ID NO: 4332010 - DNA, 25 bp, Homo sapien
tgtcagccaagtcccatggcttgtt

SEQ ID NO: 4332011 - DNA, 25 bp, Homo sapien
ttaataagcctcagatcacgggcag

SEQ ID NO: 4332012 - DNA, 25 bp, Homo sapien
tttcgcgtggagtctgattttctga

SEQ ID NO: 4332013 - DNA, 25 bp, Homo sapien
tggctttggaactccatcactcagg

SEQ ID NO: 4332014 - DNA, 25 bp, Homo sapien
ccaggaggcgctgttctacaggatg

SEQ ID NO: 4332015 - DNA, 25 bp, Homo sapien
gctgttctacaggatggagagtggg

SEQ ID NO: 4332016 - DNA, 25 bp, Homo sapien
ccataatataacctgccaccaggag

SEQ ID NO: 4332017 - DNA, 25 bp, Homo sapien
cccgccataatataacctgccacca

SEQ ID NO: 4332018 - DNA, 25 bp, Homo sapien
cagctgcatcaaggcggaccagact

SEQ ID NO: 4332019 - DNA, 25 bp, Homo sapien
aactcacagccccaaaagtcagggc

SEQ ID NO: 4332020 - DNA, 25 bp, Homo sapien
ccccaaaagtcagggcagaataaag

SEQ ID NO: 4332021 - DNA, 25 bp, Homo sapien
gcggaccagacttgtccaactcaca

SEQ ID NO: 4332022 - DNA, 25 bp, Homo sapien
ttttaaaatagaaatgtgagtcagc

SEQ ID NO: 4332023 - DNA, 25 bp, Homo sapien
ttaaaatagaaatgtgagtcagcac

SEQ ID NO: 4332024 - DNA, 25 bp, Homo sapien
tttaaaatagaaatgtgagtcagca

SEQ ID NO: 4332025 - DNA, 25 bp, Homo sapien
tggccttaaaagctcagggtggccc

SEQ ID NO: 4332026 - DNA, 25 bp, Homo sapien
ctgatggacctcacagatccctgct

SEQ ID NO: 4332027 - DNA, 25 bp, Homo sapien
tccctgctatgccacgagggctgct

SEQ ID NO: 4332028 - DNA, 25 bp, Homo sapien
accagccaggttccccgtggagtct

SEQ ID NO: 4332029 - DNA, 25 bp, Homo sapien
ccttctttgcatttccagctctcat

SEQ ID NO: 4332030 - DNA, 25 bp, Homo sapien
cactgaactagattctcctctgaga

SEQ ID NO: 4332031 - DNA, 25 bp, Homo sapien
gtgtatattcggcagaggttggact

SEQ ID NO: 4332032 - DNA, 25 bp, Homo sapien
tgtggccatcaaccacttaagatgg

SEQ ID NO: 4332033 - DNA, 25 bp, Homo sapien
tggagacatgcgctatccaccacgt

SEQ ID NO: 4332034 - DNA, 25 bp, Homo sapien
cagtctctgaaaggaactcgaggcc

SEQ ID NO: 4332035 - DNA, 25 bp, Homo sapien
tgggttcagacactagcacatgctt

SEQ ID NO: 4332036 - DNA, 25 bp, Homo sapien
taatggacattctggactccgggca

SEQ ID NO: 4332037 - DNA, 25 bp, Homo sapien
gcatacatgaaacgcgagtccaagg

SEQ ID NO: 4332038 - DNA, 25 bp, Homo sapien
caagagagagtttttagacagaaga

SEQ ID NO: 4332039 - DNA, 25 bp, Homo sapien
aagagagagtttttagacagaagaa

SEQ ID NO: 4332040 - DNA, 25 bp, Homo sapien
gagagagtttttagacagaagaaag

SEQ ID NO: 4332041 - DNA, 25 bp, Homo sapien
atccacagagtcaaagaggaggtgg

SEQ ID NO: 4332042 - DNA, 25 bp, Homo sapien
caagatcccttgtgctcagtggtct

SEQ ID NO: 4332043 - DNA, 25 bp, Homo sapien
aatatggaaaagctattgaacagcc

SEQ ID NO: 4332044 - DNA, 25 bp, Homo sapien
tattgaacagccttagggcactgcc

SEQ ID NO: 4332045 - DNA, 25 bp, Homo sapien
tcccatccatggaatgtgggctgct

SEQ ID NO: 4332046 - DNA, 25 bp, Homo sapien
tctcctcaggcagtgttagcagtgt

SEQ ID NO: 4332047 - DNA, 25 bp, Homo sapien
gataacagtaacaggagggtctcag

SEQ ID NO: 4332048 - DNA, 25 bp, Homo sapien
tacaaaaaagggcaacgcacagcag

SEQ ID NO: 4332049 - DNA, 25 bp, Homo sapien
cagggcttcggtggctttgataatc

SEQ ID NO: 4332050 - DNA, 25 bp, Homo sapien
catttgtatgggtaaacgggccagt

SEQ ID NO: 4332051 - DNA, 25 bp, Homo sapien
tctcaaaagggagctcaagcataag

SEQ ID NO: 4332052 - DNA, 25 bp, Homo sapien
gagtcagttggctaggaaaaatacc

SEQ ID NO: 4332053 - DNA, 25 bp, Homo sapien
gcatatgctgataccaatgagtcac

SEQ ID NO: 4332054 - DNA, 25 bp, Homo sapien
tttgggcattaattgcaataatgac

SEQ ID NO: 4332055 - DNA, 25 bp, Homo sapien
gcattaattgcaataatgacaagat

SEQ ID NO: 4332056 - DNA, 25 bp, Homo sapien
gtttgggcattaattgcaataatga

SEQ ID NO: 4332057 - DNA, 25 bp, Homo sapien
gggcattaattgcaataatgacaag

SEQ ID NO: 4332058 - DNA, 25 bp, Homo sapien
gagctcggtagccaactagtgtgaa

SEQ ID NO: 4332059 - DNA, 25 bp, Homo sapien
taggattagctacagaccccaatgt

SEQ ID NO: 4332060 - DNA, 25 bp, Homo sapien
gatctaggtttcacccagggatgga

SEQ ID NO: 4332061 - DNA, 25 bp, Homo sapien
tagtactcactacgacaagaaaggc

SEQ ID NO: 4332062 - DNA, 25 bp, Homo sapien
catgcatgctgtaagtctcaagaga

SEQ ID NO: 4332063 - DNA, 25 bp, Homo sapien
tccaaaggtaagtctgcttgtctgc

SEQ ID NO: 4332064 - DNA, 25 bp, Homo sapien
ggcccctctcagaatgatcaattga

SEQ ID NO: 4332065 - DNA, 25 bp, Homo sapien
aaattggtacaaatagctcagtgac

SEQ ID NO: 4332066 - DNA, 25 bp, Homo sapien
gatctctctgtacactcctctcggg

SEQ ID NO: 4332067 - DNA, 25 bp, Homo sapien
taaagtttgtcccaaggagagcaag

SEQ ID NO: 4332068 - DNA, 25 bp, Homo sapien
tctccggtaaccttgacaactggct

SEQ ID NO: 4332069 - DNA, 25 bp, Homo sapien
aactgaggttcaaatcaacgggcct

SEQ ID NO: 4332070 - DNA, 25 bp, Homo sapien
tacaaaatgcatggtcttcatctgc

SEQ ID NO: 4332071 - DNA, 25 bp, Homo sapien
tgttctatcctcaaagtaaagagag

SEQ ID NO: 4332072 - DNA, 25 bp, Homo sapien
gcagttatttgactgtccatggaca

SEQ ID NO: 4332073 - DNA, 25 bp, Homo sapien
gttactgttccctctagtgcctggg

SEQ ID NO: 4332074 - DNA, 25 bp, Homo sapien
tactagatgcatgcctcataaaggc

SEQ ID NO: 4332075 - DNA, 25 bp, Homo sapien
tcattaaagctgagaggcgatgtgg

SEQ ID NO: 4332076 - DNA, 25 bp, Homo sapien
ccagtgcctaaggagaggattactt

SEQ ID NO: 4332077 - DNA, 25 bp, Homo sapien
gcagggagatctagcatgacaacca

SEQ ID NO: 4332078 - DNA, 25 bp, Homo sapien
ggacactagtttcaggcacctggga

SEQ ID NO: 4332079 - DNA, 25 bp, Homo sapien
ggaattccccagtgttcacgctgag

SEQ ID NO: 4332080 - DNA, 25 bp, Homo sapien
gaagaaacagcctcactaacagtca

SEQ ID NO: 4332081 - DNA, 25 bp, Homo sapien
tatatctgctggaacactttggaga

SEQ ID NO: 4332082 - DNA, 25 bp, Homo sapien
gccaccattttacggattcctcaga

SEQ ID NO: 4332083 - DNA, 25 bp, Homo sapien
cattttacggattcctcagatttaa

SEQ ID NO: 4332084 - DNA, 25 bp, Homo sapien
agggctggatacccaagagccacca

SEQ ID NO: 4332085 - DNA, 25 bp, Homo sapien
agagccaccattttacggattcctc

SEQ ID NO: 4332086 - DNA, 25 bp, Homo sapien
gatcatgtggcacttaagtagcccc

SEQ ID NO: 4332087 - DNA, 25 bp, Homo sapien
tatagacagtgacagtcctacaggg

SEQ ID NO: 4332088 - DNA, 25 bp, Homo sapien
gaagactggccctttgaaacgcagc

SEQ ID NO: 4332089 - DNA, 25 bp, Homo sapien
tgagtgggtcagctaaacaagatca

SEQ ID NO: 4332090 - DNA, 25 bp, Homo sapien
tggaggaaaacagcctgtccctgtg

SEQ ID NO: 4332091 - DNA, 25 bp, Homo sapien
gtgggtttgctgtggattcaacaag

SEQ ID NO: 4332092 - DNA, 25 bp, Homo sapien
ggtttgctgtggattcaacaagctg

SEQ ID NO: 4332093 - DNA, 25 bp, Homo sapien
gtttgctgtggattcaacaagctgc

SEQ ID NO: 4332094 - DNA, 25 bp, Homo sapien
tagattatgctcttgcaccggagac

SEQ ID NO: 4332095 - DNA, 25 bp, Homo sapien
caactctacacggaaagcccttggg

SEQ ID NO: 4332096 - DNA, 25 bp, Homo sapien
cattcccagggatcggctaaggtac

SEQ ID NO: 4332097 - DNA, 25 bp, Homo sapien
gaagttatgtctagccccagaaggc

SEQ ID NO: 4332098 - DNA, 25 bp, Homo sapien
acagagttgtttgtgttggaagatt

SEQ ID NO: 4332099 - DNA, 25 bp, Homo sapien
aaagatccaagttaaccaaatgtct

SEQ ID NO: 4332100 - DNA, 25 bp, Homo sapien
aagattttccctcgtttgctgcaca

SEQ ID NO: 4332101 - DNA, 25 bp, Homo sapien
taaaaccaatttagtcattacagag

SEQ ID NO: 4332102 - DNA, 25 bp, Homo sapien
tctggaagcagtatcgctaacctta

SEQ ID NO: 4332103 - DNA, 25 bp, Homo sapien
tataacaccttgatcaggaccgagg

SEQ ID NO: 4332104 - DNA, 25 bp, Homo sapien
aattcaaattacagcagggatgggc

SEQ ID NO: 4332105 - DNA, 25 bp, Homo sapien
tattcagccctcttaaccatggtgg

SEQ ID NO: 4332106 - DNA, 25 bp, Homo sapien
cagtagctagagatccaaccagtgg

SEQ ID NO: 4332107 - DNA, 25 bp, Homo sapien
tgtccactgaaacactgcaagcggt

SEQ ID NO: 4332108 - DNA, 25 bp, Homo sapien
caagcctccggaaatgtaatgtacc

SEQ ID NO: 4332109 - DNA, 25 bp, Homo sapien
gttactgtgaagtccaagcggccag

SEQ ID NO: 4332110 - DNA, 25 bp, Homo sapien
cctcatgtggtcgttgaactgctcg

SEQ ID NO: 4332111 - DNA, 25 bp, Homo sapien
aactgctcgatttggtcaaactttg

SEQ ID NO: 4332112 - DNA, 25 bp, Homo sapien
ggtcgttgaactgctcgatttggtc

SEQ ID NO: 4332113 - DNA, 25 bp, Homo sapien
atgcatcctcatgtggtcgttgaac

SEQ ID NO: 4332114 - DNA, 25 bp, Homo sapien
cagacggagcagacgtaagtggtcc

SEQ ID NO: 4332115 - DNA, 25 bp, Homo sapien
gggcagacggagcagacgtaagtgg

SEQ ID NO: 4332116 - DNA, 25 bp, Homo sapien
agacgtaagtggtcccctccgtgca

SEQ ID NO: 4332117 - DNA, 25 bp, Homo sapien
cggagcagacgtaagtggtcccctc

SEQ ID NO: 4332118 - DNA, 25 bp, Homo sapien
gcttgttgcagatactacactggta

SEQ ID NO: 4332119 - DNA, 25 bp, Homo sapien
ttctctccccggtggaggcgcatgt

SEQ ID NO: 4332120 - DNA, 25 bp, Homo sapien
gtagcactcgtaggacttctctccc

SEQ ID NO: 4332121 - DNA, 25 bp, Homo sapien
ccacgtgtcgctccaggagggtctt

SEQ ID NO: 4332122 - DNA, 25 bp, Homo sapien
ctttaaggagaaggagcgccaacag

SEQ ID NO: 4332123 - DNA, 25 bp, Homo sapien
cgccaacagatgctgcattggtggg

SEQ ID NO: 4332124 - DNA, 25 bp, Homo sapien
ggagcgccaacagatgctgcattgg

SEQ ID NO: 4332125 - DNA, 25 bp, Homo sapien
gagaaggagcgccaacagatgctgc

SEQ ID NO: 4332126 - DNA, 25 bp, Homo sapien
gtttttcctcgaggcaaggtcactg

SEQ ID NO: 4332127 - DNA, 25 bp, Homo sapien
taaattgattcctcatagttgtcat

SEQ ID NO: 4332128 - DNA, 25 bp, Homo sapien
tttcctcgaggcaaggtcactgatg

SEQ ID NO: 4332129 - DNA, 25 bp, Homo sapien
tcacactcttctaatctgtctataa

SEQ ID NO: 4332130 - DNA, 25 bp, Homo sapien
gggcatgtcatttaacctctataag

SEQ ID NO: 4332131 - DNA, 25 bp, Homo sapien
tagtaagtacctgtctcgtgaaggc

SEQ ID NO: 4332132 - DNA, 25 bp, Homo sapien
taaactgttccattcatcacaaagg

SEQ ID NO: 4332133 - DNA, 25 bp, Homo sapien
cacttagtacagagcatgtggtcat

SEQ ID NO: 4332134 - DNA, 25 bp, Homo sapien
gatttccaaactgccactgccaaat

SEQ ID NO: 4332135 - DNA, 25 bp, Homo sapien
taggttaggggatccttcagttaga

SEQ ID NO: 4332136 - DNA, 25 bp, Homo sapien
cactgtcacaaactgggtctgctgg

SEQ ID NO: 4332137 - DNA, 25 bp, Homo sapien
tagagtgccgagtagatcctgtcca

SEQ ID NO: 4332138 - DNA, 25 bp, Homo sapien
caggtaggtgttgccagctgtgcca

SEQ ID NO: 4332139 - DNA, 25 bp, Homo sapien
tagcacgccgctgtacatgaagtca

SEQ ID NO: 4332140 - DNA, 25 bp, Homo sapien
tgacctgagggaaaaggaccttgaa

SEQ ID NO: 4332141 - DNA, 25 bp, Homo sapien
aattccggcctttagtgccgcagcc

SEQ ID NO: 4332142 - DNA, 25 bp, Homo sapien
gagatggacaggctgcggcatacaa

SEQ ID NO: 4332143 - DNA, 25 bp, Homo sapien
caagctgtaggtacgatgacctgag

SEQ ID NO: 4332144 - DNA, 25 bp, Homo sapien
tcatctctgacaacctgtttgagca

SEQ ID NO: 4332145 - DNA, 25 bp, Homo sapien
catgctttccggatgatggatgggc

SEQ ID NO: 4332146 - DNA, 25 bp, Homo sapien
tcactttagacaggcctaagcccag

SEQ ID NO: 4332147 - DNA, 25 bp, Homo sapien
cactttctagggtggttgcatgtga

SEQ ID NO: 4332148 - DNA, 25 bp, Homo sapien
agtgtggaggaaccatcaaggattt

SEQ ID NO: 4332149 - DNA, 25 bp, Homo sapien
ggatttcagcacgtttttttagcca

SEQ ID NO: 4332150 - DNA, 25 bp, Homo sapien
tgttttgggccatctcccaataaag

SEQ ID NO: 4332151 - DNA, 25 bp, Homo sapien
cagattgtctaagcccagtgtggag

SEQ ID NO: 4332152 - DNA, 25 bp, Homo sapien
cgcacctagggtatagaaccaggca

SEQ ID NO: 4332153 - DNA, 25 bp, Homo sapien
gaccttctatcccaaagcaacaggg

SEQ ID NO: 4332154 - DNA, 25 bp, Homo sapien
gctgaaattcatctgcgcacctagg

SEQ ID NO: 4332155 - DNA, 25 bp, Homo sapien
ccggccaatttctctatggacttga

SEQ ID NO: 4332156 - DNA, 25 bp, Homo sapien
ctccacctgtaggaatgaatggcca

SEQ ID NO: 4332157 - DNA, 25 bp, Homo sapien
gaattggatagcattactggagaga

SEQ ID NO: 4332158 - DNA, 25 bp, Homo sapien
ggtttcagagcccattaagccctaa

SEQ ID NO: 4332159 - DNA, 25 bp, Homo sapien
ggtctctacttgcatacagctccag

SEQ ID NO: 4332160 - DNA, 25 bp, Homo sapien
aaaggaccaccatgcatgcctctag

SEQ ID NO: 4332161 - DNA, 25 bp, Homo sapien
tgttcgattgtcttactagctgagc

SEQ ID NO: 4332162 - DNA, 25 bp, Homo sapien
tacagcaatacacaatagccaggtc

SEQ ID NO: 4332163 - DNA, 25 bp, Homo sapien
ggctcacaatatgctcagagtgtat

SEQ ID NO: 4332164 - DNA, 25 bp, Homo sapien
tctatgccaagctcttgtttccctg

SEQ ID NO: 4332165 - DNA, 25 bp, Homo sapien
ccagcaggagggcactaagatttct

SEQ ID NO: 4332166 - DNA, 25 bp, Homo sapien
gcactaagatttctatgccaagctc

SEQ ID NO: 4332167 - DNA, 25 bp, Homo sapien
tgttttcctacacatccatctactg

SEQ ID NO: 4332168 - DNA, 25 bp, Homo sapien
ctttgcaaagggctctctgatatgg

SEQ ID NO: 4332169 - DNA, 25 bp, Homo sapien
ctctgatatggtagcacagaagttt

SEQ ID NO: 4332170 - DNA, 25 bp, Homo sapien
ttgcacattctaaggatctgatgtt

SEQ ID NO: 4332171 - DNA, 25 bp, Homo sapien
gatgttttgccctcttcgggtatcc

SEQ ID NO: 4332172 - DNA, 25 bp, Homo sapien
tgttagcatgtcaacccaggattac

SEQ ID NO: 4332173 - DNA, 25 bp, Homo sapien
ccagtaatggtaccagtagagtcca

SEQ ID NO: 4332174 - DNA, 25 bp, Homo sapien
tagccccagtcttagtccattagca

SEQ ID NO: 4332175 - DNA, 25 bp, Homo sapien
cctgaaggcatatcggagggacccg

SEQ ID NO: 4332176 - DNA, 25 bp, Homo sapien
tccagttagtttagacacatctgct

SEQ ID NO: 4332177 - DNA, 25 bp, Homo sapien
ttagacacatctgctgagatacatg

SEQ ID NO: 4332178 - DNA, 25 bp, Homo sapien
ttgaacatttatggaggttttctgg

SEQ ID NO: 4332179 - DNA, 25 bp, Homo sapien
catgcatttgaatccaaatgaagct

SEQ ID NO: 4332180 - DNA, 25 bp, Homo sapien
ctacagctttactaagggaattaat

SEQ ID NO: 4332181 - DNA, 25 bp, Homo sapien
tacatgcttgcatattccttccatt

SEQ ID NO: 4332182 - DNA, 25 bp, Homo sapien
cagctttactaagggaattaattat

SEQ ID NO: 4332183 - DNA, 25 bp, Homo sapien
ctatttacatgcttgcatattcctt

SEQ ID NO: 4332184 - DNA, 25 bp, Homo sapien
agcactcaaggggacagtttctgtt

SEQ ID NO: 4332185 - DNA, 25 bp, Homo sapien
gccagcactcaaggggacagtttct

SEQ ID NO: 4332186 - DNA, 25 bp, Homo sapien
tgatgccagcactcaaggggacagt

SEQ ID NO: 4332187 - DNA, 25 bp, Homo sapien
tgccagcactcaaggggacagtttc

SEQ ID NO: 4332188 - DNA, 25 bp, Homo sapien
cattagatttttagcaatggtgaag

SEQ ID NO: 4332189 - DNA, 25 bp, Homo sapien
gatttttagcaatggtgaagaggtg

SEQ ID NO: 4332190 - DNA, 25 bp, Homo sapien
tttttagcaatggtgaagaggtggt

SEQ ID NO: 4332191 - DNA, 25 bp, Homo sapien
tagatttttagcaatggtgaagagg

SEQ ID NO: 4332192 - DNA, 25 bp, Homo sapien
ccaaggagatgtatggtgacaccat

SEQ ID NO: 4332193 - DNA, 25 bp, Homo sapien
aaagtgactgtctaaaaacagctgg

SEQ ID NO: 4332194 - DNA, 25 bp, Homo sapien
gtgactgtctaaaaacagctggaga

SEQ ID NO: 4332195 - DNA, 25 bp, Homo sapien
ggccaccaaggagatgtatggtgac

SEQ ID NO: 4332196 - DNA, 25 bp, Homo sapien
taaaactttgcaggtcttatgttac

SEQ ID NO: 4332197 - DNA, 25 bp, Homo sapien
gcatgttaccagacatcctttatgg

SEQ ID NO: 4332198 - DNA, 25 bp, Homo sapien
gagttgttgggtatgttaagactaa

SEQ ID NO: 4332199 - DNA, 25 bp, Homo sapien
tcagaagagttgttgggtatgttaa

SEQ ID NO: 4332200 - DNA, 25 bp, Homo sapien
tagaattagaagaagtgactcccag

SEQ ID NO: 4332201 - DNA, 25 bp, Homo sapien
taattgtggaagtgccattatccag

SEQ ID NO: 4332202 - DNA, 25 bp, Homo sapien
tagcgacgatctcattaagctgccc

SEQ ID NO: 4332203 - DNA, 25 bp, Homo sapien
gaaattcagccaagctacatgagac

SEQ ID NO: 4332204 - DNA, 25 bp, Homo sapien
gatccacccggctgagtaatctcat

SEQ ID NO: 4332205 - DNA, 25 bp, Homo sapien
cctcagatgccttctggttttcagc

SEQ ID NO: 4332206 - DNA, 25 bp, Homo sapien
aatcagatgacccggtgtgagcgtg

SEQ ID NO: 4332207 - DNA, 25 bp, Homo sapien
ttgtcagtgaatgtgttgagtggat

SEQ ID NO: 4332208 - DNA, 25 bp, Homo sapien
gggccctttgaaggaactgactgca

SEQ ID NO: 4332209 - DNA, 25 bp, Homo sapien
ggccctttgaaggaactgactgcat

SEQ ID NO: 4332210 - DNA, 25 bp, Homo sapien
aagggccctttgaaggaactgactg

SEQ ID NO: 4332211 - DNA, 25 bp, Homo sapien
agggccctttgaaggaactgactgc

SEQ ID NO: 4332212 - DNA, 25 bp, Homo sapien
gtcaggagacttgagctaccgtact

SEQ ID NO: 4332213 - DNA, 25 bp, Homo sapien
taccgtactagctgtgcctctaact

SEQ ID NO: 4332214 - DNA, 25 bp, Homo sapien
tgtcaggaagcttagagacaggact

SEQ ID NO: 4332215 - DNA, 25 bp, Homo sapien
actcgtggagtaatgggaggagcac

SEQ ID NO: 4332216 - DNA, 25 bp, Homo sapien
tattgcacacatacagtgatggcaa

SEQ ID NO: 4332217 - DNA, 25 bp, Homo sapien
cagatcggcggcatttgatgtatat

SEQ ID NO: 4332218 - DNA, 25 bp, Homo sapien
tgcacacatacagtgatggcaatgc

SEQ ID NO: 4332219 - DNA, 25 bp, Homo sapien
gatcggcggcatttgatgtatatat

SEQ ID NO: 4332220 - DNA, 25 bp, Homo sapien
ttctctcttatactttcaattatac

SEQ ID NO: 4332221 - DNA, 25 bp, Homo sapien
tctctcttatactttcaattatact

SEQ ID NO: 4332222 - DNA, 25 bp, Homo sapien
tgtccattctctagggcccatgaga

SEQ ID NO: 4332223 - DNA, 25 bp, Homo sapien
cagatgaaatacttcctacgacagg

SEQ ID NO: 4332224 - DNA, 25 bp, Homo sapien
cccatgagaagtaaaagcaggcact

SEQ ID NO: 4332225 - DNA, 25 bp, Homo sapien
tctgtaatctgtaggcaacatcagc

SEQ ID NO: 4332226 - DNA, 25 bp, Homo sapien
gcctaagagggatgttagtctccca

SEQ ID NO: 4332227 - DNA, 25 bp, Homo sapien
agcctaagagggatgttagtctccc

SEQ ID NO: 4332228 - DNA, 25 bp, Homo sapien
tgggcctagtgcagatgttcattgg

SEQ ID NO: 4332229 - DNA, 25 bp, Homo sapien
tcaatggtgtcactcttcaggtaaa

SEQ ID NO: 4332230 - DNA, 25 bp, Homo sapien
caggtaaattactccaaggcttggg

SEQ ID NO: 4332231 - DNA, 25 bp, Homo sapien
caaggcttgggcctagtgcagatgt

SEQ ID NO: 4332232 - DNA, 25 bp, Homo sapien
taatagtgtttacctaggtgaggaa

SEQ ID NO: 4332233 - DNA, 25 bp, Homo sapien
tgttagctccaatactacaagacct

SEQ ID NO: 4332234 - DNA, 25 bp, Homo sapien
cttgtagtagaggaaacattagttg

SEQ ID NO: 4332235 - DNA, 25 bp, Homo sapien
tctctcacccaaagatgaaaagccc

SEQ ID NO: 4332236 - DNA, 25 bp, Homo sapien
taatgggcttacgtaacaggtcgaa

SEQ ID NO: 4332237 - DNA, 25 bp, Homo sapien
tttgccttagtacacacctgagcgt

SEQ ID NO: 4332238 - DNA, 25 bp, Homo sapien
tgcagcatggacacgggacacattt

SEQ ID NO: 4332239 - DNA, 25 bp, Homo sapien
tcagaggcgaacagacagtaggtca

SEQ ID NO: 4332240 - DNA, 25 bp, Homo sapien
cagatgagaatgtcctctaacagtc

SEQ ID NO: 4332241 - DNA, 25 bp, Homo sapien
tggagcttgtgatcctgcatttctg

SEQ ID NO: 4332242 - DNA, 25 bp, Homo sapien
tgaacaaacgaatcacccagggctt

SEQ ID NO: 4332243 - DNA, 25 bp, Homo sapien
gaaactgccaataagtatagtccct

SEQ ID NO: 4332244 - DNA, 25 bp, Homo sapien
gtctaacagcaattcccaggtgaag

SEQ ID NO: 4332245 - DNA, 25 bp, Homo sapien
ggtcatcaggcattacacagaattc

SEQ ID NO: 4332246 - DNA, 25 bp, Homo sapien
tctttgccccaaatgtagtggtgag

SEQ ID NO: 4332247 - DNA, 25 bp, Homo sapien
tctaggccagtttgtcaggtcatca

SEQ ID NO: 4332248 - DNA, 25 bp, Homo sapien
ggttcattagtaggccccagttggc

SEQ ID NO: 4332249 - DNA, 25 bp, Homo sapien
ccatgatcaaccatttcaacactgt

SEQ ID NO: 4332250 - DNA, 25 bp, Homo sapien
tgtccagtttgatcttgccccatga

SEQ ID NO: 4332251 - DNA, 25 bp, Homo sapien
ggccttaccagatgtatttgtccag

SEQ ID NO: 4332252 - DNA, 25 bp, Homo sapien
cagaatatgcttcgggaaaagatgc

SEQ ID NO: 4332253 - DNA, 25 bp, Homo sapien
cctcagaatatgcttcgggaaaaga

SEQ ID NO: 4332254 - DNA, 25 bp, Homo sapien
aatatgcttcgggaaaagatgcttt

SEQ ID NO: 4332255 - DNA, 25 bp, Homo sapien
atatgcttcgggaaaagatgcttta

SEQ ID NO: 4332256 - DNA, 25 bp, Homo sapien
aaggcagctccgttcttaggtgaaa

SEQ ID NO: 4332257 - DNA, 25 bp, Homo sapien
tttatacactacagagaccccagct

SEQ ID NO: 4332258 - DNA, 25 bp, Homo sapien
gaccccagctttttgagcacagtag

SEQ ID NO: 4332259 - DNA, 25 bp, Homo sapien
tattgggaagaaacactacccgcca

SEQ ID NO: 4332260 - DNA, 25 bp, Homo sapien
gcagcttggcaacgactggcacaac

SEQ ID NO: 4332261 - DNA, 25 bp, Homo sapien
tagtgggcctacgactagaagtttg

SEQ ID NO: 4332262 - DNA, 25 bp, Homo sapien
tgacacaacatacaacagcgcaggg

SEQ ID NO: 4332263 - DNA, 25 bp, Homo sapien
tattgggtgtgtaacaggccaccgg

SEQ ID NO: 4332264 - DNA, 25 bp, Homo sapien
tgagtagtagaacttaatctaaaac

SEQ ID NO: 4332265 - DNA, 25 bp, Homo sapien
aagggcagtttaagcgggctagcta

SEQ ID NO: 4332266 - DNA, 25 bp, Homo sapien
cgggctagctaatgagtagtagaac

SEQ ID NO: 4332267 - DNA, 25 bp, Homo sapien
gtttaagcgggctagctaatgagta

SEQ ID NO: 4332268 - DNA, 25 bp, Homo sapien
cacagtgaatcctgagccacaacac

SEQ ID NO: 4332269 - DNA, 25 bp, Homo sapien
tcaagttccaacctttctgagtaga

SEQ ID NO: 4332270 - DNA, 25 bp, Homo sapien
tgaatcctgagccacaacacaggtg

SEQ ID NO: 4332271 - DNA, 25 bp, Homo sapien
acaggtgacaatcactgttcctcca

SEQ ID NO: 4332272 - DNA, 25 bp, Homo sapien
cctaagtgctctgattgaaaggcag

SEQ ID NO: 4332273 - DNA, 25 bp, Homo sapien
gatccagaattagcaggagcctcct

SEQ ID NO: 4332274 - DNA, 25 bp, Homo sapien
gagaatggctgtaccgagtcggcat

SEQ ID NO: 4332275 - DNA, 25 bp, Homo sapien
gaggtggttactgttactacaagca

SEQ ID NO: 4332276 - DNA, 25 bp, Homo sapien
atttttcccatgagtacactctctg

SEQ ID NO: 4332277 - DNA, 25 bp, Homo sapien
tgactaggcactctggttacccatg

SEQ ID NO: 4332278 - DNA, 25 bp, Homo sapien
catgttgatctagtgagcgtctcca

SEQ ID NO: 4332279 - DNA, 25 bp, Homo sapien
gaaatcagtctgtagtaatgggcca

SEQ ID NO: 4332280 - DNA, 25 bp, Homo sapien
gaagtccctggtaagcataaagctg

SEQ ID NO: 4332281 - DNA, 25 bp, Homo sapien
gagaaaagttgtagccatgtacggg

SEQ ID NO: 4332282 - DNA, 25 bp, Homo sapien
aatcctagctttaagaacaagccca

SEQ ID NO: 4332283 - DNA, 25 bp, Homo sapien
caagcccaatatagaagctgtggta

SEQ ID NO: 4332284 - DNA, 25 bp, Homo sapien
aactttcaagggttgcagtgtcctc

SEQ ID NO: 4332285 - DNA, 25 bp, Homo sapien
taaacagatggtagggctctggcat

SEQ ID NO: 4332286 - DNA, 25 bp, Homo sapien
tgtgaattgctactttcctaaagac

SEQ ID NO: 4332287 - DNA, 25 bp, Homo sapien
acatggctaactgcaaatctctgtg

SEQ ID NO: 4332288 - DNA, 25 bp, Homo sapien
aatctgggtaggctgcatttggctg

SEQ ID NO: 4332289 - DNA, 25 bp, Homo sapien
taacggccacagactgagctatagc

SEQ ID NO: 4332290 - DNA, 25 bp, Homo sapien
tagccaactggcgtcactgtcccag

SEQ ID NO: 4332291 - DNA, 25 bp, Homo sapien
aatcctctctgctaaatgtattttc

SEQ ID NO: 4332292 - DNA, 25 bp, Homo sapien
tttttcagacccatcgcctctaaat

SEQ ID NO: 4332293 - DNA, 25 bp, Homo sapien
cagttttccacaactttgctgttga

SEQ ID NO: 4332294 - DNA, 25 bp, Homo sapien
ccacaactttgctgttgacagcatc

SEQ ID NO: 4332295 - DNA, 25 bp, Homo sapien
ttccacaactttgctgttgacagca

SEQ ID NO: 4332296 - DNA, 25 bp, Homo sapien
ttttccacaactttgctgttgacag

SEQ ID NO: 4332297 - DNA, 25 bp, Homo sapien
caaagaactgcctagtgggagagca

SEQ ID NO: 4332298 - DNA, 25 bp, Homo sapien
aagctgcccaaagcaacacactgtg

SEQ ID NO: 4332299 - DNA, 25 bp, Homo sapien
taaggtcctcgccttcatacatcac

SEQ ID NO: 4332300 - DNA, 25 bp, Homo sapien
cctggtgtgctctgttaacccaatt

SEQ ID NO: 4332301 - DNA, 25 bp, Homo sapien
ccccgtagacagttgatatagcaca

SEQ ID NO: 4332302 - DNA, 25 bp, Homo sapien
tagctattgctgactgtacaggtcc

SEQ ID NO: 4332303 - DNA, 25 bp, Homo sapien
tgaaaactccgttctgaagataccc

SEQ ID NO: 4332304 - DNA, 25 bp, Homo sapien
aaacggtatgttcatggctgaaggc

SEQ ID NO: 4332305 - DNA, 25 bp, Homo sapien
tcagctgaacaatggatgccaggac

SEQ ID NO: 4332306 - DNA, 25 bp, Homo sapien
gacaaggtccatctaacaggtgaga

SEQ ID NO: 4332307 - DNA, 25 bp, Homo sapien
tatgttgggattcatcaggcagctc

SEQ ID NO: 4332308 - DNA, 25 bp, Homo sapien
gggaccttctcaggcaactcagaga

SEQ ID NO: 4332309 - DNA, 25 bp, Homo sapien
ttgagccgcccattttctggaggag

SEQ ID NO: 4332310 - DNA, 25 bp, Homo sapien
tcatccagggacacatcgagttagt

SEQ ID NO: 4332311 - DNA, 25 bp, Homo sapien
aacaggaagtaacagggccagagcc

SEQ ID NO: 4332312 - DNA, 25 bp, Homo sapien
aaattaaatatcagcctcagcacgg

SEQ ID NO: 4332313 - DNA, 25 bp, Homo sapien
caaagatccattgtgtaatgttgtc

SEQ ID NO: 4332314 - DNA, 25 bp, Homo sapien
atttaatgtttgttcgcacacggta

SEQ ID NO: 4332315 - DNA, 25 bp, Homo sapien
tctgtgtatccctgccaaagatcca

SEQ ID NO: 4332316 - DNA, 25 bp, Homo sapien
atgttgtcctcacatgacattaaaa

SEQ ID NO: 4332317 - DNA, 25 bp, Homo sapien
cagtctgggttggaattatgttcca

SEQ ID NO: 4332318 - DNA, 25 bp, Homo sapien
tgcttccctgtagggcacccattgg

SEQ ID NO: 4332319 - DNA, 25 bp, Homo sapien
tatccccattgcgactggcagtctg

SEQ ID NO: 4332320 - DNA, 25 bp, Homo sapien
tgaacgaataaaaaggtgtcttgcc

SEQ ID NO: 4332321 - DNA, 25 bp, Homo sapien
cagacggcagcaatgagccgacgtt

SEQ ID NO: 4332322 - DNA, 25 bp, Homo sapien
cttttgtactgggtcatgccgtagc

SEQ ID NO: 4332323 - DNA, 25 bp, Homo sapien
taaacagcttcactgcagacggcag

SEQ ID NO: 4332324 - DNA, 25 bp, Homo sapien
taatcgagtttcaagcctgcagtag

SEQ ID NO: 4332325 - DNA, 25 bp, Homo sapien
tgtatcttagtgcaatctcccatgg

SEQ ID NO: 4332326 - DNA, 25 bp, Homo sapien
tctcactacggcatgatagagggta

SEQ ID NO: 4332327 - DNA, 25 bp, Homo sapien
caatgggattcaaagctcacctaga

SEQ ID NO: 4332328 - DNA, 25 bp, Homo sapien
ggaatggccccaaagactaatctgc

SEQ ID NO: 4332329 - DNA, 25 bp, Homo sapien
tgtaatgcacgccaaaaagaaggag

SEQ ID NO: 4332330 - DNA, 25 bp, Homo sapien
caactcatctcgcagggaaactaga

SEQ ID NO: 4332331 - DNA, 25 bp, Homo sapien
tatgataattcacaaagggaggcca

SEQ ID NO: 4332332 - DNA, 25 bp, Homo sapien
ggatttcaactctgcgacactgagt

SEQ ID NO: 4332333 - DNA, 25 bp, Homo sapien
caaaagccagtttgtgtcagcctgg

SEQ ID NO: 4332334 - DNA, 25 bp, Homo sapien
tctctacttagatggctgctagccc

SEQ ID NO: 4332335 - DNA, 25 bp, Homo sapien
gaatactgactgagacgatcctgca

SEQ ID NO: 4332336 - DNA, 25 bp, Homo sapien
tacttagtaggcaacaaggtgtcgc

SEQ ID NO: 4332337 - DNA, 25 bp, Homo sapien
agttccctctttagtcctccagtgg

SEQ ID NO: 4332338 - DNA, 25 bp, Homo sapien
tctaacctgtcagcatccggtgcca

SEQ ID NO: 4332339 - DNA, 25 bp, Homo sapien
tccctgtaggtctgcttgtctaacc

SEQ ID NO: 4332340 - DNA, 25 bp, Homo sapien
tgtgaattatagactcccagcactg

SEQ ID NO: 4332341 - DNA, 25 bp, Homo sapien
ccacataagcctgcatctacggaat

SEQ ID NO: 4332342 - DNA, 25 bp, Homo sapien
tccttccgctgagaatacaccctct

SEQ ID NO: 4332343 - DNA, 25 bp, Homo sapien
ctgcatctacggaataatccctcat

SEQ ID NO: 4332344 - DNA, 25 bp, Homo sapien
cagcaagtcgcttttgtcttctggc

SEQ ID NO: 4332345 - DNA, 25 bp, Homo sapien
gatttccaagatgattaccagccaa

SEQ ID NO: 4332346 - DNA, 25 bp, Homo sapien
tgtcaaccgctatgcacatgatagg

SEQ ID NO: 4332347 - DNA, 25 bp, Homo sapien
gcagagcactcgttttggcaatcaa

SEQ ID NO: 4332348 - DNA, 25 bp, Homo sapien
ccaaagaaatatgtccctcacggga

SEQ ID NO: 4332349 - DNA, 25 bp, Homo sapien
acatacaccccagttcacgttctag

SEQ ID NO: 4332350 - DNA, 25 bp, Homo sapien
tctcatatatgaaggcctagatgtg

SEQ ID NO: 4332351 - DNA, 25 bp, Homo sapien
gagtttctcctcgtgctaagctggg

SEQ ID NO: 4332352 - DNA, 25 bp, Homo sapien
cgttctagtttcacgcgggatagga

SEQ ID NO: 4332353 - DNA, 25 bp, Homo sapien
ggtagacaggaagtgcgtccaccaa

SEQ ID NO: 4332354 - DNA, 25 bp, Homo sapien
aatgctaacttgtggcatggcacag

SEQ ID NO: 4332355 - DNA, 25 bp, Homo sapien
tagcttttcggtcaagtggcacaaa

SEQ ID NO: 4332356 - DNA, 25 bp, Homo sapien
cattgacagctactgcagtttggtc

SEQ ID NO: 4332357 - DNA, 25 bp, Homo sapien
caggtccatggataagcttgaaaca

SEQ ID NO: 4332358 - DNA, 25 bp, Homo sapien
ggccaagttaaaagtcatgaccacg

SEQ ID NO: 4332359 - DNA, 25 bp, Homo sapien
aaaccatttggtgtgctgggatgcc

SEQ ID NO: 4332360 - DNA, 25 bp, Homo sapien
gaccacgtctaagctcaagtcagga

SEQ ID NO: 4332361 - DNA, 25 bp, Homo sapien
ttcatggcatgaaatcagtgttggg

SEQ ID NO: 4332362 - DNA, 25 bp, Homo sapien
ggctctagatttcctatcaacctga

SEQ ID NO: 4332363 - DNA, 25 bp, Homo sapien
ctagtagggactaagctggaattca

SEQ ID NO: 4332364 - DNA, 25 bp, Homo sapien
tacgtaaatatcctttggtcacaca

SEQ ID NO: 4332365 - DNA, 25 bp, Homo sapien
taactggagggcctctgagaacagg

SEQ ID NO: 4332366 - DNA, 25 bp, Homo sapien
gctgtgagtcagcttgaacatcagt

SEQ ID NO: 4332367 - DNA, 25 bp, Homo sapien
caacggtgcatttcctggcaacaaa

SEQ ID NO: 4332368 - DNA, 25 bp, Homo sapien
ggaattaccacctcctgtaactgga

SEQ ID NO: 4332369 - DNA, 25 bp, Homo sapien
cagagttcacaggaggtagaagccc

SEQ ID NO: 4332370 - DNA, 25 bp, Homo sapien
taggagttcccgtatcagacagaaa

SEQ ID NO: 4332371 - DNA, 25 bp, Homo sapien
gaaaagctagatctccctagaggcc

SEQ ID NO: 4332372 - DNA, 25 bp, Homo sapien
ggtgacccagaagaaaacctgtgtc

SEQ ID NO: 4332373 - DNA, 25 bp, Homo sapien
tcagtgtttggcctacggcggctgc

SEQ ID NO: 4332374 - DNA, 25 bp, Homo sapien
tgagaagccggcctgattggtccag

SEQ ID NO: 4332375 - DNA, 25 bp, Homo sapien
tatcaaactcagacacgtggtatgc

SEQ ID NO: 4332376 - DNA, 25 bp, Homo sapien
catttagagaaccttagctgcccag

SEQ ID NO: 4332377 - DNA, 25 bp, Homo sapien
tacatatgccacaattttctctggt

SEQ ID NO: 4332378 - DNA, 25 bp, Homo sapien
cctacatatgccacaattttctctg

SEQ ID NO: 4332379 - DNA, 25 bp, Homo sapien
aattatcgtatcatatttattactg

SEQ ID NO: 4332380 - DNA, 25 bp, Homo sapien
tatgccacaattttctctggtattt

SEQ ID NO: 4332381 - DNA, 25 bp, Homo sapien
catcgcagacttgagaaaggtaacc

SEQ ID NO: 4332382 - DNA, 25 bp, Homo sapien
tctccagaggcaaactatgactact

SEQ ID NO: 4332383 - DNA, 25 bp, Homo sapien
tattactgactgacactgaaaggtg

SEQ ID NO: 4332384 - DNA, 25 bp, Homo sapien
cacagtaacagattcggaacaaagc

SEQ ID NO: 4332385 - DNA, 25 bp, Homo sapien
ctgaaaagttaaggcaggcaactcc

SEQ ID NO: 4332386 - DNA, 25 bp, Homo sapien
gcaggcaactcctataaaaaaggaa

SEQ ID NO: 4332387 - DNA, 25 bp, Homo sapien
aggcaggcaactcctataaaaaagg

SEQ ID NO: 4332388 - DNA, 25 bp, Homo sapien
ggcaggcaactcctataaaaaagga

SEQ ID NO: 4332389 - DNA, 25 bp, Homo sapien
ggtgtccaggtctaaactcagctct

SEQ ID NO: 4332390 - DNA, 25 bp, Homo sapien
ggtctaaactcagctctcgcctttt

SEQ ID NO: 4332391 - DNA, 25 bp, Homo sapien
gcaagccttaatggggcaatttact

SEQ ID NO: 4332392 - DNA, 25 bp, Homo sapien
aagtgtaatgtgcaagccttaatgg

SEQ ID NO: 4332393 - DNA, 25 bp, Homo sapien
gatacagcgcatgctcagcaggcaa

SEQ ID NO: 4332394 - DNA, 25 bp, Homo sapien
taaaactatgaataaagtcagatac

SEQ ID NO: 4332395 - DNA, 25 bp, Homo sapien
aatcaacagccttacctgtggccat

SEQ ID NO: 4332396 - DNA, 25 bp, Homo sapien
tacctgtggccattcagaagactgc

SEQ ID NO: 4332397 - DNA, 25 bp, Homo sapien
tcaagttacttcaaacataaggcac

SEQ ID NO: 4332398 - DNA, 25 bp, Homo sapien
gctaacactggccacctagtacttg

SEQ ID NO: 4332399 - DNA, 25 bp, Homo sapien
gatatgtattacacccttaagaagc

SEQ ID NO: 4332400 - DNA, 25 bp, Homo sapien
tgatgagcatcacactctgccctga

SEQ ID NO: 4332401 - DNA, 25 bp, Homo sapien
aaaatgctgaaaaatccccgggcag

SEQ ID NO: 4332402 - DNA, 25 bp, Homo sapien
tctttgttctctagtgaaaatgctg

SEQ ID NO: 4332403 - DNA, 25 bp, Homo sapien
caagtgcaaaacacttagaggcttt

SEQ ID NO: 4332404 - DNA, 25 bp, Homo sapien
cgggcagctactccctgaaacaagt

SEQ ID NO: 4332405 - DNA, 25 bp, Homo sapien
catacctggtgtgaatgctaatcag

SEQ ID NO: 4332406 - DNA, 25 bp, Homo sapien
catgctccctcggtctcctaaaaaa

SEQ ID NO: 4332407 - DNA, 25 bp, Homo sapien
gggtagcgaacatctcatacctggt

SEQ ID NO: 4332408 - DNA, 25 bp, Homo sapien
aaaggcttttccatctcggttgcga

SEQ ID NO: 4332409 - DNA, 25 bp, Homo sapien
tctcccaagtcccgatacttcttta

SEQ ID NO: 4332410 - DNA, 25 bp, Homo sapien
aaaaaatggcttcggagctccttct

SEQ ID NO: 4332411 - DNA, 25 bp, Homo sapien
ggtctattgataagtccctggaggc

SEQ ID NO: 4332412 - DNA, 25 bp, Homo sapien
aatggcttcggagctccttctattc

SEQ ID NO: 4332413 - DNA, 25 bp, Homo sapien
tcagcaagcagaccacgtttaggag

SEQ ID NO: 4332414 - DNA, 25 bp, Homo sapien
tgaaggcgatttgcagacccagaga

SEQ ID NO: 4332415 - DNA, 25 bp, Homo sapien
tctttgtgacaaacagagctggcaa

SEQ ID NO: 4332416 - DNA, 25 bp, Homo sapien
cagacagattttaggcacggcacga

SEQ ID NO: 4332417 - DNA, 25 bp, Homo sapien
gctatgccatgcctaaaacacacgg

SEQ ID NO: 4332418 - DNA, 25 bp, Homo sapien
tgtagaggcctcgtctcagcaagat

SEQ ID NO: 4332419 - DNA, 25 bp, Homo sapien
cactgatgagattttccacctggag

SEQ ID NO: 4332420 - DNA, 25 bp, Homo sapien
aaaatacctgataggccagagccca

SEQ ID NO: 4332421 - DNA, 25 bp, Homo sapien
aattccagttcggataattacatcg

SEQ ID NO: 4332422 - DNA, 25 bp, Homo sapien
ttaaatatctgacggcattttcagc

SEQ ID NO: 4332423 - DNA, 25 bp, Homo sapien
aatatctgacggcattttcagcact

SEQ ID NO: 4332424 - DNA, 25 bp, Homo sapien
ggataattacatcgtgtctctttaa

SEQ ID NO: 4332425 - DNA, 25 bp, Homo sapien
aaaatgctgaaaaggtcacatccag

SEQ ID NO: 4332426 - DNA, 25 bp, Homo sapien
tctcctggagcagacctggtttcaa

SEQ ID NO: 4332427 - DNA, 25 bp, Homo sapien
ggaaactagtcctgaccagcataca

SEQ ID NO: 4332428 - DNA, 25 bp, Homo sapien
gcatacaacactcaagaaaggttct

SEQ ID NO: 4332429 - DNA, 25 bp, Homo sapien
aaatgggacgtcaaaattttgcctg

SEQ ID NO: 4332430 - DNA, 25 bp, Homo sapien
gtctaacctatcaagttcatctaac

SEQ ID NO: 4332431 - DNA, 25 bp, Homo sapien
ggttaatccagtctaacctatcaag

SEQ ID NO: 4332432 - DNA, 25 bp, Homo sapien
tgtttttacagtctaggttaatcca

SEQ ID NO: 4332433 - DNA, 25 bp, Homo sapien
ctctgtgaggctaggtaaataagct

SEQ ID NO: 4332434 - DNA, 25 bp, Homo sapien
cacagcactctagagttgaacatct

SEQ ID NO: 4332435 - DNA, 25 bp, Homo sapien
tatgtcgtactatacttaacacagc

SEQ ID NO: 4332436 - DNA, 25 bp, Homo sapien
gacaactgttgaagcagagtgagga

SEQ ID NO: 4332437 - DNA, 25 bp, Homo sapien
cgcgcccggtccgtaccctgcactc

SEQ ID NO: 4332438 - DNA, 25 bp, Homo sapien
cgcccggtccgtaccctgcactctt

SEQ ID NO: 4332439 - DNA, 25 bp, Homo sapien
caccgcgcccggtccgtaccctgca

SEQ ID NO: 4332440 - DNA, 25 bp, Homo sapien
cggtccgtaccctgcactcttttgc

SEQ ID NO: 4332441 - DNA, 25 bp, Homo sapien
tgagggcagtataggtacagcaagc

SEQ ID NO: 4332442 - DNA, 25 bp, Homo sapien
ggagagtaaataagcagcacaccat

SEQ ID NO: 4332443 - DNA, 25 bp, Homo sapien
catataagcatacggcctgaatcca

SEQ ID NO: 4332444 - DNA, 25 bp, Homo sapien
tcatgtaggacatgggtcgaggtca

SEQ ID NO: 4332445 - DNA, 25 bp, Homo sapien
tatttgggggaattatgatgtgagc

SEQ ID NO: 4332446 - DNA, 25 bp, Homo sapien
gggggaattatgatgtgagctttat

SEQ ID NO: 4332447 - DNA, 25 bp, Homo sapien
tgggggaattatgatgtgagcttta

SEQ ID NO: 4332448 - DNA, 25 bp, Homo sapien
tttgggggaattatgatgtgagctt

SEQ ID NO: 4332449 - DNA, 25 bp, Homo sapien
tcaagagaagatctgccagacaagc

SEQ ID NO: 4332450 - DNA, 25 bp, Homo sapien
cactgtcatgtgcaggtagatgtcc

SEQ ID NO: 4332451 - DNA, 25 bp, Homo sapien
caagctcttcgagggctctgtctgt

SEQ ID NO: 4332452 - DNA, 25 bp, Homo sapien
tatactgcaatacacaaagggcttt

SEQ ID NO: 4332453 - DNA, 25 bp, Homo sapien
catttcctaggcctggttccttcca

SEQ ID NO: 4332454 - DNA, 25 bp, Homo sapien
gactgttcaggtagaggataagcca

SEQ ID NO: 4332455 - DNA, 25 bp, Homo sapien
gaagggacttcctagactctaacat

SEQ ID NO: 4332456 - DNA, 25 bp, Homo sapien
tagcttgtagttggcctgaagggac

SEQ ID NO: 4332457 - DNA, 25 bp, Homo sapien
tcataggtctctggtggtgctttgc

SEQ ID NO: 4332458 - DNA, 25 bp, Homo sapien
cacaacactcccctgaagggcggtg

SEQ ID NO: 4332459 - DNA, 25 bp, Homo sapien
acccagaaatgtcataggtctctgg

SEQ ID NO: 4332460 - DNA, 25 bp, Homo sapien
aacactcccctgaagggcggtgagg

SEQ ID NO: 4332461 - DNA, 25 bp, Homo sapien
gcagagcttgaggtggccttggagg

SEQ ID NO: 4332462 - DNA, 25 bp, Homo sapien
gaagcagagcttgaggtggccttgg

SEQ ID NO: 4332463 - DNA, 25 bp, Homo sapien
aagcagagcttgaggtggccttgga

SEQ ID NO: 4332464 - DNA, 25 bp, Homo sapien
agcagagcttgaggtggccttggag

SEQ ID NO: 4332465 - DNA, 25 bp, Homo sapien
accaggctttgatttgaaggcccaa

SEQ ID NO: 4332466 - DNA, 25 bp, Homo sapien
cctgaagaggttgtcgcagtgcagt

SEQ ID NO: 4332467 - DNA, 25 bp, Homo sapien
tacaacggaaatggcttagtagctg

SEQ ID NO: 4332468 - DNA, 25 bp, Homo sapien
catgaaactttctagcctgcaaggc

SEQ ID NO: 4332469 - DNA, 25 bp, Homo sapien
gagggaggtaatattcctggctata

SEQ ID NO: 4332470 - DNA, 25 bp, Homo sapien
aaaaatagccactcttatcactagg

SEQ ID NO: 4332471 - DNA, 25 bp, Homo sapien
cctggctatagtcgattggtgttca

SEQ ID NO: 4332472 - DNA, 25 bp, Homo sapien
ccatctgataggtagaaaggctaag

SEQ ID NO: 4332473 - DNA, 25 bp, Homo sapien
gcccagtgttgcatgttcccagatg

SEQ ID NO: 4332474 - DNA, 25 bp, Homo sapien
ggaatccctctgtcgaaatcatagt

SEQ ID NO: 4332475 - DNA, 25 bp, Homo sapien
tgaattgtttcaacacccggctgtg

SEQ ID NO: 4332476 - DNA, 25 bp, Homo sapien
tggcagcccaaagtgaacaagagaa

SEQ ID NO: 4332477 - DNA, 25 bp, Homo sapien
ggtctttgctgaagatcccataagg

SEQ ID NO: 4332478 - DNA, 25 bp, Homo sapien
cccactatgggcagtaggaggcacg

SEQ ID NO: 4332479 - DNA, 25 bp, Homo sapien
gcaaagattatgcaataggccaaga

SEQ ID NO: 4332480 - DNA, 25 bp, Homo sapien
ctactgcacagttcaggcctttggc

SEQ ID NO: 4332481 - DNA, 25 bp, Homo sapien
aaactcctctgcacggcatacaagg

SEQ ID NO: 4332482 - DNA, 25 bp, Homo sapien
cacggcatacaaggtcctccgtatg

SEQ ID NO: 4332483 - DNA, 25 bp, Homo sapien
ccgtatggcaggcaaggtcccctgc

SEQ ID NO: 4332484 - DNA, 25 bp, Homo sapien
ctgcctgctttccagcccaatctca

SEQ ID NO: 4332485 - DNA, 25 bp, Homo sapien
gagtttccagaaccaagcacagtga

SEQ ID NO: 4332486 - DNA, 25 bp, Homo sapien
tgaatctcgctgctacttaacgcct

SEQ ID NO: 4332487 - DNA, 25 bp, Homo sapien
tcaaaacgaagccaagtagtagtgt

SEQ ID NO: 4332488 - DNA, 25 bp, Homo sapien
tatgtatctcccctatcagactgag

SEQ ID NO: 4332489 - DNA, 25 bp, Homo sapien
gagggcagcttcaagatttggaaca

SEQ ID NO: 4332490 - DNA, 25 bp, Homo sapien
gatacttgaggacagtaggactgtc

SEQ ID NO: 4332491 - DNA, 25 bp, Homo sapien
taggactgtcataagcccggtcacc

SEQ ID NO: 4332492 - DNA, 25 bp, Homo sapien
tttggaacaagccaagcaaacatga

SEQ ID NO: 4332493 - DNA, 25 bp, Homo sapien
tgcaccctcatggatagcaacttag

SEQ ID NO: 4332494 - DNA, 25 bp, Homo sapien
cataattgcccaatgattgacaggg

SEQ ID NO: 4332495 - DNA, 25 bp, Homo sapien
actattggacctagggatgggtaca

SEQ ID NO: 4332496 - DNA, 25 bp, Homo sapien
tttataaaccttctggcacacgtga

SEQ ID NO: 4332497 - DNA, 25 bp, Homo sapien
caggtcacagactgatggtcaaaga

SEQ ID NO: 4332498 - DNA, 25 bp, Homo sapien
aggtcacagactgatggtcaaagat

SEQ ID NO: 4332499 - DNA, 25 bp, Homo sapien
gcaggtcacagactgatggtcaaag

SEQ ID NO: 4332500 - DNA, 25 bp, Homo sapien
ctctccttttttgaacttgctgtct

SEQ ID NO: 4332501 - DNA, 25 bp, Homo sapien
ccttttttgaacttgctgtcttctc

SEQ ID NO: 4332502 - DNA, 25 bp, Homo sapien
ccctctccttttttgaacttgctgt

SEQ ID NO: 4332503 - DNA, 25 bp, Homo sapien
ctccttttttgaacttgctgtcttc

SEQ ID NO: 4332504 - DNA, 25 bp, Homo sapien
gtccatgggcttttctgaacatgag

SEQ ID NO: 4332505 - DNA, 25 bp, Homo sapien
taggcactattactgtccatgggct

SEQ ID NO: 4332506 - DNA, 25 bp, Homo sapien
gggtgataaagagtgagacaaattc

SEQ ID NO: 4332507 - DNA, 25 bp, Homo sapien
tcttgactaactccaagcctaggca

SEQ ID NO: 4332508 - DNA, 25 bp, Homo sapien
tcaatttttgtcctagagtctgaag

SEQ ID NO: 4332509 - DNA, 25 bp, Homo sapien
tgtcctagagtctgaaggttcatgg

SEQ ID NO: 4332510 - DNA, 25 bp, Homo sapien
taattttgtcagtctgcacatgcat

SEQ ID NO: 4332511 - DNA, 25 bp, Homo sapien
ttccaaaggcaatcaatttttgtcc

SEQ ID NO: 4332512 - DNA, 25 bp, Homo sapien
gatgaacccacatgtatgttctcct

SEQ ID NO: 4332513 - DNA, 25 bp, Homo sapien
gaaaaagcacaaaactgtacagctt

SEQ ID NO: 4332514 - DNA, 25 bp, Homo sapien
gagctcagatgaacccacatgtatg

SEQ ID NO: 4332515 - DNA, 25 bp, Homo sapien
ctggagctcagatgaacccacatgt

SEQ ID NO: 4332516 - DNA, 25 bp, Homo sapien
taaaattcatccttgctatactcat

SEQ ID NO: 4332517 - DNA, 25 bp, Homo sapien
ccaagccgctttgcttcatatacaa

SEQ ID NO: 4332518 - DNA, 25 bp, Homo sapien
ttccccacataacccattgtctggt

SEQ ID NO: 4332519 - DNA, 25 bp, Homo sapien
ccttatatgttggaggcctgtaaaa

SEQ ID NO: 4332520 - DNA, 25 bp, Homo sapien
caggcagtgtgcaggcttaaagtgt

SEQ ID NO: 4332521 - DNA, 25 bp, Homo sapien
tagaggcacgttaaaccacaggcag

SEQ ID NO: 4332522 - DNA, 25 bp, Homo sapien
aatgaggtctcatactagaggcacg

SEQ ID NO: 4332523 - DNA, 25 bp, Homo sapien
tctaaatcactgaacaaagcttgga

SEQ ID NO: 4332524 - DNA, 25 bp, Homo sapien
tagtagaactgtggacagagccaac

SEQ ID NO: 4332525 - DNA, 25 bp, Homo sapien
ggtactattacccactgagctcaca

SEQ ID NO: 4332526 - DNA, 25 bp, Homo sapien
cacctgggtcagaggactggcccat

SEQ ID NO: 4332527 - DNA, 25 bp, Homo sapien
tactgtataccaggccctatgctga

SEQ ID NO: 4332528 - DNA, 25 bp, Homo sapien
taaatcaaagccgttttgaggttca

SEQ ID NO: 4332529 - DNA, 25 bp, Homo sapien
gaactaatcacttgccaagtttcat

SEQ ID NO: 4332530 - DNA, 25 bp, Homo sapien
aagccgttttgaggttcataaactg

SEQ ID NO: 4332531 - DNA, 25 bp, Homo sapien
atgaactaatcacttgccaagtttc

SEQ ID NO: 4332532 - DNA, 25 bp, Homo sapien
tttcttggccctcagttggcttgaa

SEQ ID NO: 4332533 - DNA, 25 bp, Homo sapien
cttggccctcagttggcttgaagca

SEQ ID NO: 4332534 - DNA, 25 bp, Homo sapien
tcttggccctcagttggcttgaagc

SEQ ID NO: 4332535 - DNA, 25 bp, Homo sapien
cttttcttggccctcagttggcttg

SEQ ID NO: 4332536 - DNA, 25 bp, Homo sapien
acctgctagttaggaacatgtggca

SEQ ID NO: 4332537 - DNA, 25 bp, Homo sapien
tatccctggtaagtagaagagtgcc

SEQ ID NO: 4332538 - DNA, 25 bp, Homo sapien
ggcatgcatgtactagaaggtaagc

SEQ ID NO: 4332539 - DNA, 25 bp, Homo sapien
gaaggtaagctccacaagatcatga

SEQ ID NO: 4332540 - DNA, 25 bp, Homo sapien
agtcagatcctctgcatatttggaa

SEQ ID NO: 4332541 - DNA, 25 bp, Homo sapien
tatttggaatgaagttcagtcctaa

SEQ ID NO: 4332542 - DNA, 25 bp, Homo sapien
ctgggagtcagatcctctgcatatt

SEQ ID NO: 4332543 - DNA, 25 bp, Homo sapien
ggagtcagatcctctgcatatttgg

SEQ ID NO: 4332544 - DNA, 25 bp, Homo sapien
cacataccaattctttgagtcccag

SEQ ID NO: 4332545 - DNA, 25 bp, Homo sapien
catttcaccgagtaaagtcatttca

SEQ ID NO: 4332546 - DNA, 25 bp, Homo sapien
cagcttaggtcttacttctcggatg

SEQ ID NO: 4332547 - DNA, 25 bp, Homo sapien
tatattcttgggttcacacaacagc

SEQ ID NO: 4332548 - DNA, 25 bp, Homo sapien
gagctttctcacaatcaggactgga

SEQ ID NO: 4332549 - DNA, 25 bp, Homo sapien
gaagttttgcttgctgctggtcctt

SEQ ID NO: 4332550 - DNA, 25 bp, Homo sapien
ttatcagcctgaagagaaccaggag

SEQ ID NO: 4332551 - DNA, 25 bp, Homo sapien
catcataccagagttccattatcag

SEQ ID NO: 4332552 - DNA, 25 bp, Homo sapien
tattacacaaacttcctcttttgct

SEQ ID NO: 4332553 - DNA, 25 bp, Homo sapien
tcttcaacattagtaataacttcct

SEQ ID NO: 4332554 - DNA, 25 bp, Homo sapien
ataacttcctatatagtatctgtgg

SEQ ID NO: 4332555 - DNA, 25 bp, Homo sapien
tcctatatagtatctgtggtccttt

SEQ ID NO: 4332556 - DNA, 25 bp, Homo sapien
gcttctctaccttaggacataagca

SEQ ID NO: 4332557 - DNA, 25 bp, Homo sapien
cataagcaatgtggtgttataccca

SEQ ID NO: 4332558 - DNA, 25 bp, Homo sapien
tgttgattctccactatttttggcg

SEQ ID NO: 4332559 - DNA, 25 bp, Homo sapien
tggatcacacatggtaagcctcgag

SEQ ID NO: 4332560 - DNA, 25 bp, Homo sapien
catcagcctgtcgagtaactggaac

SEQ ID NO: 4332561 - DNA, 25 bp, Homo sapien
tcagctatgtcaaaaatcctatgag

SEQ ID NO: 4332562 - DNA, 25 bp, Homo sapien
caaatatgtgagagtatctctcagc

SEQ ID NO: 4332563 - DNA, 25 bp, Homo sapien
aaaactaggttttcaaatatgtgag

SEQ ID NO: 4332564 - DNA, 25 bp, Homo sapien
gctttggtaccagagacatcagtgt

SEQ ID NO: 4332565 - DNA, 25 bp, Homo sapien
taaaaggcatcagggtgcgaggatc

SEQ ID NO: 4332566 - DNA, 25 bp, Homo sapien
caccattgtgtgagccacttgatca

SEQ ID NO: 4332567 - DNA, 25 bp, Homo sapien
caaagctacttactagtggtacacc

SEQ ID NO: 4332568 - DNA, 25 bp, Homo sapien
tattttccctgaagcaatccatgtg

SEQ ID NO: 4332569 - DNA, 25 bp, Homo sapien
catcagattttattaggtgggctaa

SEQ ID NO: 4332570 - DNA, 25 bp, Homo sapien
cctacagaaacttgagacagtcagc

SEQ ID NO: 4332571 - DNA, 25 bp, Homo sapien
caagcttctagttaaagtaatggcc

SEQ ID NO: 4332572 - DNA, 25 bp, Homo sapien
actatatgacttagtacagtgggac

SEQ ID NO: 4332573 - DNA, 25 bp, Homo sapien
ttatcaaagtaatagcaaaattctg

SEQ ID NO: 4332574 - DNA, 25 bp, Homo sapien
tacagtgggacaattacatataaca

SEQ ID NO: 4332575 - DNA, 25 bp, Homo sapien
ttctatcagccctatgtttctatgt

SEQ ID NO: 4332576 - DNA, 25 bp, Homo sapien
tggtgactctatcagttaagaggta

SEQ ID NO: 4332577 - DNA, 25 bp, Homo sapien
taagaggtataccttgtacctgaca

SEQ ID NO: 4332578 - DNA, 25 bp, Homo sapien
tctatcagttaagaggtataccttg

SEQ ID NO: 4332579 - DNA, 25 bp, Homo sapien
gttttggtgactctatcagttaaga

SEQ ID NO: 4332580 - DNA, 25 bp, Homo sapien
gaaacatagagtagacgtgtcccaa

SEQ ID NO: 4332581 - DNA, 25 bp, Homo sapien
gtgtcccaattgtaccccagatgtg

SEQ ID NO: 4332582 - DNA, 25 bp, Homo sapien
gctaaaaatatagtggcggctcaca

SEQ ID NO: 4332583 - DNA, 25 bp, Homo sapien
caatgactttcgttgcatgggagag

SEQ ID NO: 4332584 - DNA, 25 bp, Homo sapien
tagcctcaagtgtcagcagatctct

SEQ ID NO: 4332585 - DNA, 25 bp, Homo sapien
cagacaaagggaattgacaaaggcc

SEQ ID NO: 4332586 - DNA, 25 bp, Homo sapien
cacatgtgtaatctggataggcagc

SEQ ID NO: 4332587 - DNA, 25 bp, Homo sapien
tatcagatctgccactgcaaggcta

SEQ ID NO: 4332588 - DNA, 25 bp, Homo sapien
cctcaggcatgggataatgctccat

SEQ ID NO: 4332589 - DNA, 25 bp, Homo sapien
gaagagtaatgaccctcaggcatgg

SEQ ID NO: 4332590 - DNA, 25 bp, Homo sapien
tttatcacaactgtcagtgcccctg

SEQ ID NO: 4332591 - DNA, 25 bp, Homo sapien
tgcccctgtggaagagtaatgaccc

SEQ ID NO: 4332592 - DNA, 25 bp, Homo sapien
ttgggccagtttgaaccgaatccca

SEQ ID NO: 4332593 - DNA, 25 bp, Homo sapien
tgcaaagacaccttgggccagtttg

SEQ ID NO: 4332594 - DNA, 25 bp, Homo sapien
tgggccagtttgaaccgaatcccat

SEQ ID NO: 4332595 - DNA, 25 bp, Homo sapien
gcaaagacaccttgggccagtttga

SEQ ID NO: 4332596 - DNA, 25 bp, Homo sapien
agctgaaattcataaaccataatta

SEQ ID NO: 4332597 - DNA, 25 bp, Homo sapien
gctgaaattcataaaccataattac

SEQ ID NO: 4332598 - DNA, 25 bp, Homo sapien
ctccttccgtctgggcgtctggcac

SEQ ID NO: 4332599 - DNA, 25 bp, Homo sapien
ttccgtctgggcgtctggcaccttg

SEQ ID NO: 4332600 - DNA, 25 bp, Homo sapien
ccgattgtcgcaatcttttggtcca

SEQ ID NO: 4332601 - DNA, 25 bp, Homo sapien
gcaatcttttggtccacattctcct

SEQ ID NO: 4332602 - DNA, 25 bp, Homo sapien
cagcagagatttagcacagattaca

SEQ ID NO: 4332603 - DNA, 25 bp, Homo sapien
gcagagatttagcacagattacaaa

SEQ ID NO: 4332604 - DNA, 25 bp, Homo sapien
gattacaaaatatctgttcttggca

SEQ ID NO: 4332605 - DNA, 25 bp, Homo sapien
gttttccagcagagatttagcacag

SEQ ID NO: 4332606 - DNA, 25 bp, Homo sapien
tcattacaccccagagagacggaga

SEQ ID NO: 4332607 - DNA, 25 bp, Homo sapien
ttcagaagggcatgccgagtttccc

SEQ ID NO: 4332608 - DNA, 25 bp, Homo sapien
taatctgtccctagacctgaggatg

SEQ ID NO: 4332609 - DNA, 25 bp, Homo sapien
tctcagtgcaatggccacacagggt

SEQ ID NO: 4332610 - DNA, 25 bp, Homo sapien
tttagccattctatttgactgaaca

SEQ ID NO: 4332611 - DNA, 25 bp, Homo sapien
ttctgattgtaacaccatagtctga

SEQ ID NO: 4332612 - DNA, 25 bp, Homo sapien
tagatatccactatcactatgagtg

SEQ ID NO: 4332613 - DNA, 25 bp, Homo sapien
taaatcatgactttgaatcctagtg

SEQ ID NO: 4332614 - DNA, 25 bp, Homo sapien
catcatgtctgcctggtctgtattc

SEQ ID NO: 4332615 - DNA, 25 bp, Homo sapien
gatgccgaacagttattttgaaaat

SEQ ID NO: 4332616 - DNA, 25 bp, Homo sapien
tgcctggtctgtattccaggtttct

SEQ ID NO: 4332617 - DNA, 25 bp, Homo sapien
acactgatgccgaacagttattttg

SEQ ID NO: 4332618 - DNA, 25 bp, Homo sapien
tgtgtgtaaccaaacaggtccacca

SEQ ID NO: 4332619 - DNA, 25 bp, Homo sapien
cctactttgtgctagaaaccctcta

SEQ ID NO: 4332620 - DNA, 25 bp, Homo sapien
aatactcgactactctggactgctg

SEQ ID NO: 4332621 - DNA, 25 bp, Homo sapien
ggtccaccattcacttaacactcaa

SEQ ID NO: 4332622 - DNA, 25 bp, Homo sapien
tgtcacatgtatactcatcaaggta

SEQ ID NO: 4332623 - DNA, 25 bp, Homo sapien
aatttcaccttcaaggggcacatac

SEQ ID NO: 4332624 - DNA, 25 bp, Homo sapien
accttgggttgggtgttgtcacatg

SEQ ID NO: 4332625 - DNA, 25 bp, Homo sapien
gggcacatacaaaggattcttctta

SEQ ID NO: 4332626 - DNA, 25 bp, Homo sapien
taatcgaggtaaaggaaagcactag

SEQ ID NO: 4332627 - DNA, 25 bp, Homo sapien
catgcattgccagactttacttaca

SEQ ID NO: 4332628 - DNA, 25 bp, Homo sapien
gatatagacagatgctgccaatgca

SEQ ID NO: 4332629 - DNA, 25 bp, Homo sapien
tatcagtactgctattggctggcgg

SEQ ID NO: 4332630 - DNA, 25 bp, Homo sapien
catacttctaatggacctgcctggt

SEQ ID NO: 4332631 - DNA, 25 bp, Homo sapien
gctaacttcagcagataaagggtct

SEQ ID NO: 4332632 - DNA, 25 bp, Homo sapien
tgcaagaacaatctttgaaaccgtc

SEQ ID NO: 4332633 - DNA, 25 bp, Homo sapien
gctctgttagggttcttctgcataa

SEQ ID NO: 4332634 - DNA, 25 bp, Homo sapien
ttagctcggaggaaggcttagcaga

SEQ ID NO: 4332635 - DNA, 25 bp, Homo sapien
cagggcctgtttgttccatactttc

SEQ ID NO: 4332636 - DNA, 25 bp, Homo sapien
gcttagcagagccaaaacgtcagca

SEQ ID NO: 4332637 - DNA, 25 bp, Homo sapien
gagccaaaacgtcagcagggcctgt

SEQ ID NO: 4332638 - DNA, 25 bp, Homo sapien
ctgcaatgacaagtttgtgacaagc

SEQ ID NO: 4332639 - DNA, 25 bp, Homo sapien
aaatgttagattactgcaatgacaa

SEQ ID NO: 4332640 - DNA, 25 bp, Homo sapien
caatgacaagtttgtgacaagcaag

SEQ ID NO: 4332641 - DNA, 25 bp, Homo sapien
gattactgcaatgacaagtttgtga

SEQ ID NO: 4332642 - DNA, 25 bp, Homo sapien
catgacaaggatcactgaaacagtc

SEQ ID NO: 4332643 - DNA, 25 bp, Homo sapien
gtatcctttgttcggtcttctgctt

SEQ ID NO: 4332644 - DNA, 25 bp, Homo sapien
atgtatcctttgttcggtcttctgc

SEQ ID NO: 4332645 - DNA, 25 bp, Homo sapien
gacaaggatcactgaaacagtctca

SEQ ID NO: 4332646 - DNA, 25 bp, Homo sapien
tatgtaactcagagctatgcaaatc

SEQ ID NO: 4332647 - DNA, 25 bp, Homo sapien
gagtcccattcgtatgtaactcaga

SEQ ID NO: 4332648 - DNA, 25 bp, Homo sapien
cccattcgtatgtaactcagagcta

SEQ ID NO: 4332649 - DNA, 25 bp, Homo sapien
tcgtatgtaactcagagctatgcaa

SEQ ID NO: 4332650 - DNA, 25 bp, Homo sapien
tcacgagaaaatcatgggagtaact

SEQ ID NO: 4332651 - DNA, 25 bp, Homo sapien
catcacgagaaaatcatgggagtaa

SEQ ID NO: 4332652 - DNA, 25 bp, Homo sapien
tcctgggtgatcagccatagagcac

SEQ ID NO: 4332653 - DNA, 25 bp, Homo sapien
taaatggttgctgggtccatgacgg

SEQ ID NO: 4332654 - DNA, 25 bp, Homo sapien
tgtcccctgggatatgtgaattgaa

SEQ ID NO: 4332655 - DNA, 25 bp, Homo sapien
cttccaggccactatgacataggga

SEQ ID NO: 4332656 - DNA, 25 bp, Homo sapien
ggtaaggtcttagtctagcaggtaa

SEQ ID NO: 4332657 - DNA, 25 bp, Homo sapien
ccacagcaaaaagagggtaaggtct

SEQ ID NO: 4332658 - DNA, 25 bp, Homo sapien
tctaagccacccatggaaaatacca

SEQ ID NO: 4332659 - DNA, 25 bp, Homo sapien
tatatcttgaggtgaagttttggcc

SEQ ID NO: 4332660 - DNA, 25 bp, Homo sapien
tagaacgaccaagtattccttagaa

SEQ ID NO: 4332661 - DNA, 25 bp, Homo sapien
ttattgcacgatattaagggatgcc

SEQ ID NO: 4332662 - DNA, 25 bp, Homo sapien
tactgaaagtagtgacccctagtgg

SEQ ID NO: 4332663 - DNA, 25 bp, Homo sapien
gagccatggttataactagaacgac

SEQ ID NO: 4332664 - DNA, 25 bp, Homo sapien
cacaccgtttttagttgccaggaca

SEQ ID NO: 4332665 - DNA, 25 bp, Homo sapien
aacagccttgtaattctctgaccca

SEQ ID NO: 4332666 - DNA, 25 bp, Homo sapien
catggagttgaaggcaacagtggcc

SEQ ID NO: 4332667 - DNA, 25 bp, Homo sapien
taaccactgtcgaatttttgctgcg

SEQ ID NO: 4332668 - DNA, 25 bp, Homo sapien
cacagagatgcttccctgtaaggag

SEQ ID NO: 4332669 - DNA, 25 bp, Homo sapien
gaaatagtttcgtgaggactcagaa

SEQ ID NO: 4332670 - DNA, 25 bp, Homo sapien
ggagctctgtcttagaacttcttca

SEQ ID NO: 4332671 - DNA, 25 bp, Homo sapien
tcttctgaatgcacagagatgcttc

SEQ ID NO: 4332672 - DNA, 25 bp, Homo sapien
cagattatctcgcacatggcagcag

SEQ ID NO: 4332673 - DNA, 25 bp, Homo sapien
tgcgcagacctcaagaaaaacagtt

SEQ ID NO: 4332674 - DNA, 25 bp, Homo sapien
cagcagcctgggagtccttaagaca

SEQ ID NO: 4332675 - DNA, 25 bp, Homo sapien
taggaagtaagagccgacctcagca

SEQ ID NO: 4332676 - DNA, 25 bp, Homo sapien
tcagcttgatcaaaaggttgcaggc

SEQ ID NO: 4332677 - DNA, 25 bp, Homo sapien
catgctgggctgacaagggagatta

SEQ ID NO: 4332678 - DNA, 25 bp, Homo sapien
aatgagtgcataggccactgccacg

SEQ ID NO: 4332679 - DNA, 25 bp, Homo sapien
ccttaaggatgtctggcatagctga

SEQ ID NO: 4332680 - DNA, 25 bp, Homo sapien
catccatgaaatcaggagagtccaa

SEQ ID NO: 4332681 - DNA, 25 bp, Homo sapien
tctactgtggggcatatacattttg

SEQ ID NO: 4332682 - DNA, 25 bp, Homo sapien
tccatgaaatcaggagagtccaaag

SEQ ID NO: 4332683 - DNA, 25 bp, Homo sapien
tactggtggtctactgtggggcata

SEQ ID NO: 4332684 - DNA, 25 bp, Homo sapien
catgcaatgtacacggccaggagaa

SEQ ID NO: 4332685 - DNA, 25 bp, Homo sapien
tctgatacgcagcaggatatccttt

SEQ ID NO: 4332686 - DNA, 25 bp, Homo sapien
cagtttacgatgtcaatagaacccc

SEQ ID NO: 4332687 - DNA, 25 bp, Homo sapien
tagaacccctaaatgaaattacagc

SEQ ID NO: 4332688 - DNA, 25 bp, Homo sapien
gactcgaggtgcacttgatagccat

SEQ ID NO: 4332689 - DNA, 25 bp, Homo sapien
gttttgccaatagcttgaacccatg

SEQ ID NO: 4332690 - DNA, 25 bp, Homo sapien
ggataacacatctaatgactcgagg

SEQ ID NO: 4332691 - DNA, 25 bp, Homo sapien
gtttcagtgaacacagacgcatgcc

SEQ ID NO: 4332692 - DNA, 25 bp, Homo sapien
ggctcaagggataagggatcctccc

SEQ ID NO: 4332693 - DNA, 25 bp, Homo sapien
ctaaaaaatacatgggtgaatgaat

SEQ ID NO: 4332694 - DNA, 25 bp, Homo sapien
tgggctcaagggataagggatcctc

SEQ ID NO: 4332695 - DNA, 25 bp, Homo sapien
ctcaagggataagggatcctcccat

SEQ ID NO: 4332696 - DNA, 25 bp, Homo sapien
tgtctagttcacagggcatccatag

SEQ ID NO: 4332697 - DNA, 25 bp, Homo sapien
tactttagaggctagctcgacttgg

SEQ ID NO: 4332698 - DNA, 25 bp, Homo sapien
tgatgagaaacaactgcagtaggct

SEQ ID NO: 4332699 - DNA, 25 bp, Homo sapien
ttgtcagcacaataccatctagggt

SEQ ID NO: 4332700 - DNA, 25 bp, Homo sapien
tgtccggctgtttctttcactatga

SEQ ID NO: 4332701 - DNA, 25 bp, Homo sapien
gcactgacatgtagatatccattca

SEQ ID NO: 4332702 - DNA, 25 bp, Homo sapien
tcactgtcaatgcactgacatgtag

SEQ ID NO: 4332703 - DNA, 25 bp, Homo sapien
atcacctattcattgatcctccact

SEQ ID NO: 4332704 - DNA, 25 bp, Homo sapien
tttcctgcttgccttagagacacca

SEQ ID NO: 4332705 - DNA, 25 bp, Homo sapien
gaataaaatccttgacacatcaaat

SEQ ID NO: 4332706 - DNA, 25 bp, Homo sapien
ctgatccaaggagtgacgactgaga

SEQ ID NO: 4332707 - DNA, 25 bp, Homo sapien
gctccctgctctgattagtttgtcg

SEQ ID NO: 4332708 - DNA, 25 bp, Homo sapien
tgagaatcagcacacagtctcttga

SEQ ID NO: 4332709 - DNA, 25 bp, Homo sapien
tagtttgtcgagttcacagtgttcc

SEQ ID NO: 4332710 - DNA, 25 bp, Homo sapien
aaggaaaatcactggagcctcttac

SEQ ID NO: 4332711 - DNA, 25 bp, Homo sapien
ctgaagcacagaaattagggagggg

SEQ ID NO: 4332712 - DNA, 25 bp, Homo sapien
aggtggaaggaaaatcactggagcc

SEQ ID NO: 4332713 - DNA, 25 bp, Homo sapien
gaagcacagaaattagggaggggag

SEQ ID NO: 4332714 - DNA, 25 bp, Homo sapien
tctaacttccactaactgggaggaa

SEQ ID NO: 4332715 - DNA, 25 bp, Homo sapien
acttccactaactgggaggaaatgt

SEQ ID NO: 4332716 - DNA, 25 bp, Homo sapien
gatctaacttccactaactgggagg

SEQ ID NO: 4332717 - DNA, 25 bp, Homo sapien
aacttccactaactgggaggaaatg

SEQ ID NO: 4332718 - DNA, 25 bp, Homo sapien
tgtacattattgtctcccgacggaa

SEQ ID NO: 4332719 - DNA, 25 bp, Homo sapien
tcccagtagacaaactaaactaagc

SEQ ID NO: 4332720 - DNA, 25 bp, Homo sapien
gaagttcatgtgagttcccagtaga

SEQ ID NO: 4332721 - DNA, 25 bp, Homo sapien
cccttgaattctgttgggaagttca

SEQ ID NO: 4332722 - DNA, 25 bp, Homo sapien
taccgtaagcaacaagtgaaatgag

SEQ ID NO: 4332723 - DNA, 25 bp, Homo sapien
cagtgatctcattctagtccttcga

SEQ ID NO: 4332724 - DNA, 25 bp, Homo sapien
cagctcatgctggactgtaccgtaa

SEQ ID NO: 4332725 - DNA, 25 bp, Homo sapien
ttcgactcctgtccacatcactaag

SEQ ID NO: 4332726 - DNA, 25 bp, Homo sapien
gcctaattgattaattgtgggtctg

SEQ ID NO: 4332727 - DNA, 25 bp, Homo sapien
gggaaaacgtagtccagttgatcat

SEQ ID NO: 4332728 - DNA, 25 bp, Homo sapien
taattgattaattgtgggtctgacc

SEQ ID NO: 4332729 - DNA, 25 bp, Homo sapien
ccagttgatcatcgcagcctaattg

SEQ ID NO: 4332730 - DNA, 25 bp, Homo sapien
gattcccctggagcatactttactg

SEQ ID NO: 4332731 - DNA, 25 bp, Homo sapien
taggagtatcccatgaagaagattc

SEQ ID NO: 4332732 - DNA, 25 bp, Homo sapien
cacctggagatgacttgtacatgga

SEQ ID NO: 4332733 - DNA, 25 bp, Homo sapien
gacaaggttcaatagcaatgccatc

SEQ ID NO: 4332734 - DNA, 25 bp, Homo sapien
caggatttaggatggcatactaata

SEQ ID NO: 4332735 - DNA, 25 bp, Homo sapien
accacccattgccaagcaggattta

SEQ ID NO: 4332736 - DNA, 25 bp, Homo sapien
tcccatttgggctctgtttcccagt

SEQ ID NO: 4332737 - DNA, 25 bp, Homo sapien
gagccaagaggacgatctgtcattt

SEQ ID NO: 4332738 - DNA, 25 bp, Homo sapien
ggttgtctcacaatcacactgtagg

SEQ ID NO: 4332739 - DNA, 25 bp, Homo sapien
ccagtggtatccagcaaagcaagcc

SEQ ID NO: 4332740 - DNA, 25 bp, Homo sapien
tagactatactgaggtcaggaccac

SEQ ID NO: 4332741 - DNA, 25 bp, Homo sapien
ccgtgtgattcaggcaggcaagtcc

SEQ ID NO: 4332742 - DNA, 25 bp, Homo sapien
tctgtgaagccagtttccatttcac

SEQ ID NO: 4332743 - DNA, 25 bp, Homo sapien
gcatttcagagttccctctgtgaag

SEQ ID NO: 4332744 - DNA, 25 bp, Homo sapien
tcagcatttcagagttccctctgtg

SEQ ID NO: 4332745 - DNA, 25 bp, Homo sapien
tttcagagttccctctgtgaagcca

SEQ ID NO: 4332746 - DNA, 25 bp, Homo sapien
ttgtactgagccttgtgcgaccatt

SEQ ID NO: 4332747 - DNA, 25 bp, Homo sapien
tactgagccttgtgcgaccattaga

SEQ ID NO: 4332748 - DNA, 25 bp, Homo sapien
tgagccttgtgcgaccattagaact

SEQ ID NO: 4332749 - DNA, 25 bp, Homo sapien
cttgtgcgaccattagaacttggtt

SEQ ID NO: 4332750 - DNA, 25 bp, Homo sapien
atccctttgcagctggcactgctct

SEQ ID NO: 4332751 - DNA, 25 bp, Homo sapien
gcactgctctgtataataagaaaaa

SEQ ID NO: 4332752 - DNA, 25 bp, Homo sapien
caaaaactaaaaggagcaggcatcc

SEQ ID NO: 4332753 - DNA, 25 bp, Homo sapien
aggcatccctttgcagctggcactg

SEQ ID NO: 4332754 - DNA, 25 bp, Homo sapien
ttgaaattatgtagtcaggagcaca

SEQ ID NO: 4332755 - DNA, 25 bp, Homo sapien
cagagatccctgaattaactgacaa

SEQ ID NO: 4332756 - DNA, 25 bp, Homo sapien
gaacactgagagatagctaaataaa

SEQ ID NO: 4332757 - DNA, 25 bp, Homo sapien
aaagcagacctaatcaagcagaaga

SEQ ID NO: 4332758 - DNA, 25 bp, Homo sapien
gaagatagcaagacacatggatggc

SEQ ID NO: 4332759 - DNA, 25 bp, Homo sapien
tccagcccgtaacttgttgctcaga

SEQ ID NO: 4332760 - DNA, 25 bp, Homo sapien
gggtcacctttcaatggagcatttc

SEQ ID NO: 4332761 - DNA, 25 bp, Homo sapien
gatggcacatagcaataggttctca

SEQ ID NO: 4332762 - DNA, 25 bp, Homo sapien
caatcactcgaagactgactatatc

SEQ ID NO: 4332763 - DNA, 25 bp, Homo sapien
tttgtcttgttatccagaaattggc

SEQ ID NO: 4332764 - DNA, 25 bp, Homo sapien
tcttgttatccagaaattggcttta

SEQ ID NO: 4332765 - DNA, 25 bp, Homo sapien
ccagagatgcttcaactgtagtttc

SEQ ID NO: 4332766 - DNA, 25 bp, Homo sapien
tttatcacgatagaatagtttcgcc

SEQ ID NO: 4332767 - DNA, 25 bp, Homo sapien
gactgtccaaggctgtatctgggct

SEQ ID NO: 4332768 - DNA, 25 bp, Homo sapien
acttgcccaagcgttcgactgtcca

SEQ ID NO: 4332769 - DNA, 25 bp, Homo sapien
tgaaggttaattaggacagggacca

SEQ ID NO: 4332770 - DNA, 25 bp, Homo sapien
caatatggtaggcatatgcttaacc

SEQ ID NO: 4332771 - DNA, 25 bp, Homo sapien
aagatactgatccaatgttccaaag

SEQ ID NO: 4332772 - DNA, 25 bp, Homo sapien
catctataaataacggatttttctc

SEQ ID NO: 4332773 - DNA, 25 bp, Homo sapien
aaaatgacactttagaaatactgag

SEQ ID NO: 4332774 - DNA, 25 bp, Homo sapien
gcctgtctcataaatcaggaagtgt

SEQ ID NO: 4332775 - DNA, 25 bp, Homo sapien
tgtttttacctcctatgttttctga

SEQ ID NO: 4332776 - DNA, 25 bp, Homo sapien
aatgttatatagaattctccaggga

SEQ ID NO: 4332777 - DNA, 25 bp, Homo sapien
tgttttctgaaagagtccgtgtagg

SEQ ID NO: 4332778 - DNA, 25 bp, Homo sapien
ttctccaagtgggaatagtgttctg

SEQ ID NO: 4332779 - DNA, 25 bp, Homo sapien
tctccaggtgggaatagaacacatt

SEQ ID NO: 4332780 - DNA, 25 bp, Homo sapien
taaagtagaacatacatacaggact

SEQ ID NO: 4332781 - DNA, 25 bp, Homo sapien
tgatgaaccagattagggtctactt

SEQ ID NO: 4332782 - DNA, 25 bp, Homo sapien
tctgcaagtactatagactcatgag

SEQ ID NO: 4332783 - DNA, 25 bp, Homo sapien
gtttgaatacagtgcctacatgtga

SEQ ID NO: 4332784 - DNA, 25 bp, Homo sapien
actgccacccagtactttgtagtat

SEQ ID NO: 4332785 - DNA, 25 bp, Homo sapien
cgatgtttgattattcccctgtagg

SEQ ID NO: 4332786 - DNA, 25 bp, Homo sapien
ttttctccaggcacttataggctcc

SEQ ID NO: 4332787 - DNA, 25 bp, Homo sapien
accgcaccgggcctgaaaacatatt

SEQ ID NO: 4332788 - DNA, 25 bp, Homo sapien
taaagcctgagacatttaccaaacc

SEQ ID NO: 4332789 - DNA, 25 bp, Homo sapien
gatccttctgggattcataaagcct

SEQ ID NO: 4332790 - DNA, 25 bp, Homo sapien
gactccagagttaaattccaaccat

SEQ ID NO: 4332791 - DNA, 25 bp, Homo sapien
actccagagttaaattccaaccatt

SEQ ID NO: 4332792 - DNA, 25 bp, Homo sapien
cagactccagagttaaattccaacc

SEQ ID NO: 4332793 - DNA, 25 bp, Homo sapien
agactccagagttaaattccaacca

SEQ ID NO: 4332794 - DNA, 25 bp, Homo sapien
aaaactcatccacagcagtcatcat

SEQ ID NO: 4332795 - DNA, 25 bp, Homo sapien
gataaaactcatccacagcagtcat

SEQ ID NO: 4332796 - DNA, 25 bp, Homo sapien
ctgctcagaattgagataaaactca

SEQ ID NO: 4332797 - DNA, 25 bp, Homo sapien
agataaaactcatccacagcagtca

SEQ ID NO: 4332798 - DNA, 25 bp, Homo sapien
aacttgctctctatcatctccgtgc

SEQ ID NO: 4332799 - DNA, 25 bp, Homo sapien
tcatggagcagccataaaatggaga

SEQ ID NO: 4332800 - DNA, 25 bp, Homo sapien
gaagcagtgaatagccaagaagcat

SEQ ID NO: 4332801 - DNA, 25 bp, Homo sapien
tcaatgaacctgagacagcctgttc

SEQ ID NO: 4332802 - DNA, 25 bp, Homo sapien
tggtcccttgttctttgccctctgg

SEQ ID NO: 4332803 - DNA, 25 bp, Homo sapien
ttggtcccttgttctttgccctctg

SEQ ID NO: 4332804 - DNA, 25 bp, Homo sapien
tactggcttttgaactggcggtttg

SEQ ID NO: 4332805 - DNA, 25 bp, Homo sapien
ctggcggtttgaaaacgaaggcatt

SEQ ID NO: 4332806 - DNA, 25 bp, Homo sapien
tggcttttgaactggcggtttgaaa

SEQ ID NO: 4332807 - DNA, 25 bp, Homo sapien
actggcggtttgaaaacgaaggcat

SEQ ID NO: 4332808 - DNA, 25 bp, Homo sapien
catttggtgtctcttggcattagga

SEQ ID NO: 4332809 - DNA, 25 bp, Homo sapien
ttaggaaagctcacgaaaatgaccc

SEQ ID NO: 4332810 - DNA, 25 bp, Homo sapien
ggagatgtgaatcccgttcttccca

SEQ ID NO: 4332811 - DNA, 25 bp, Homo sapien
aacagattcatagtctgggcacaca

SEQ ID NO: 4332812 - DNA, 25 bp, Homo sapien
gaacaagctgccaaggaacagtcca

SEQ ID NO: 4332813 - DNA, 25 bp, Homo sapien
ttccaagagggccagtagacgccag

SEQ ID NO: 4332814 - DNA, 25 bp, Homo sapien
agggcccactcacgtaaacaggaag

SEQ ID NO: 4332815 - DNA, 25 bp, Homo sapien
cctttcctggaagcgctgtagcgta

SEQ ID NO: 4332816 - DNA, 25 bp, Homo sapien
tccagatagcccaaagcaccaaagt

SEQ ID NO: 4332817 - DNA, 25 bp, Homo sapien
cagatagcccaaagcaccaaagtaa

SEQ ID NO: 4332818 - DNA, 25 bp, Homo sapien
ttagctgctctcaatagtatcattt

SEQ ID NO: 4332819 - DNA, 25 bp, Homo sapien
gtaaggacagcgggccattttccca

SEQ ID NO: 4332820 - DNA, 25 bp, Homo sapien
tgtgacacaggcagtacttccgtag

SEQ ID NO: 4332821 - DNA, 25 bp, Homo sapien
ccccacagggtgatataaggattaa

SEQ ID NO: 4332822 - DNA, 25 bp, Homo sapien
tgaatcggttgcttacaatctgcct

SEQ ID NO: 4332823 - DNA, 25 bp, Homo sapien
tatgtgactgtacctaccccacagg

SEQ ID NO: 4332824 - DNA, 25 bp, Homo sapien
tatgcgagggattgagtctgcacac

SEQ ID NO: 4332825 - DNA, 25 bp, Homo sapien
aaaaacgttggtggctgctggccca

SEQ ID NO: 4332826 - DNA, 25 bp, Homo sapien
ggaaacagaagctcacctcggtcat

SEQ ID NO: 4332827 - DNA, 25 bp, Homo sapien
tgaacagtggacaagcaagcattac

SEQ ID NO: 4332828 - DNA, 25 bp, Homo sapien
atcttgacaaaattcccagaggcaa

SEQ ID NO: 4332829 - DNA, 25 bp, Homo sapien
caaagcagttaaaatcaatgtggat

SEQ ID NO: 4332830 - DNA, 25 bp, Homo sapien
tccgtaacccagattgcagtgcagt

SEQ ID NO: 4332831 - DNA, 25 bp, Homo sapien
ggctgggagccaggattaaaaaaca

SEQ ID NO: 4332832 - DNA, 25 bp, Homo sapien
tgtgagatttcaccctcagtgatag

SEQ ID NO: 4332833 - DNA, 25 bp, Homo sapien
caaaagtcccttataactcatcagg

SEQ ID NO: 4332834 - DNA, 25 bp, Homo sapien
catgaaatgagcagagactttaggt

SEQ ID NO: 4332835 - DNA, 25 bp, Homo sapien
gctggaatagaattcgcactcttca

SEQ ID NO: 4332836 - DNA, 25 bp, Homo sapien
ctgcaatgtcatctgaatcctcgaa

SEQ ID NO: 4332837 - DNA, 25 bp, Homo sapien
ctgtttattcacactgtctgcaatg

SEQ ID NO: 4332838 - DNA, 25 bp, Homo sapien
tgaatcctcgaaaaaccacaagact

SEQ ID NO: 4332839 - DNA, 25 bp, Homo sapien
gtttattcacactgtctgcaatgtc

SEQ ID NO: 4332840 - DNA, 25 bp, Homo sapien
catctggtcggttttagattcccct

SEQ ID NO: 4332841 - DNA, 25 bp, Homo sapien
caaagtcttcttagtggccgggcgc

SEQ ID NO: 4332842 - DNA, 25 bp, Homo sapien
tgcaaatatgcacagggcccttaac

SEQ ID NO: 4332843 - DNA, 25 bp, Homo sapien
gaataacaaattcatgtaccggcac

SEQ ID NO: 4332844 - DNA, 25 bp, Homo sapien
tctacaaagggctggataagtcatc

SEQ ID NO: 4332845 - DNA, 25 bp, Homo sapien
cttccccaagggttaggcacatcaa

SEQ ID NO: 4332846 - DNA, 25 bp, Homo sapien
gctcctaagattaaatagacctgag

SEQ ID NO: 4332847 - DNA, 25 bp, Homo sapien
tgtgctttgctctaccagttttggc

SEQ ID NO: 4332848 - DNA, 25 bp, Homo sapien
tatatatgctctctgtttgctcagg

SEQ ID NO: 4332849 - DNA, 25 bp, Homo sapien
tatactgatgcagtatgttgcatag

SEQ ID NO: 4332850 - DNA, 25 bp, Homo sapien
tgaatttctgatgcgtgtaatacac

SEQ ID NO: 4332851 - DNA, 25 bp, Homo sapien
tcctgaatttctgatgcgtgtaata

SEQ ID NO: 4332852 - DNA, 25 bp, Homo sapien
tgttgcatagttacatcctgaattt

SEQ ID NO: 4332853 - DNA, 25 bp, Homo sapien
tacagatacaggttctctacagaca

SEQ ID NO: 4332854 - DNA, 25 bp, Homo sapien
cagcctgatttgtacagagcattcc

SEQ ID NO: 4332855 - DNA, 25 bp, Homo sapien
tagtcactgacctacaattcaaaga

SEQ ID NO: 4332856 - DNA, 25 bp, Homo sapien
tgagacagcacaagactacagatac

SEQ ID NO: 4332857 - DNA, 25 bp, Homo sapien
gggaaaatgagagtaaggaaatata

SEQ ID NO: 4332858 - DNA, 25 bp, Homo sapien
aaatatttcttcattactggaaaag

SEQ ID NO: 4332859 - DNA, 25 bp, Homo sapien
tttcttcattttactcctatgtgtt

SEQ ID NO: 4332860 - DNA, 25 bp, Homo sapien
tggaaaagatatgttctccttcccc

SEQ ID NO: 4332861 - DNA, 25 bp, Homo sapien
cagcaatagggaagaaactggcttg

SEQ ID NO: 4332862 - DNA, 25 bp, Homo sapien
tagaagggaaatacacccacaggaa

SEQ ID NO: 4332863 - DNA, 25 bp, Homo sapien
cctgaggcttactaatacgagtttc

SEQ ID NO: 4332864 - DNA, 25 bp, Homo sapien
ccagcaaaagcgtgaaattcagtcc

SEQ ID NO: 4332865 - DNA, 25 bp, Homo sapien
ttaaaggtttggatgaatatgatgt

SEQ ID NO: 4332866 - DNA, 25 bp, Homo sapien
taaaggtttggatgaatatgatgtt

SEQ ID NO: 4332867 - DNA, 25 bp, Homo sapien
tggtcttggtcctcttacttaactg

SEQ ID NO: 4332868 - DNA, 25 bp, Homo sapien
taactggtaaaagaggatagcctta

SEQ ID NO: 4332869 - DNA, 25 bp, Homo sapien
tttgcttgttggtaagtacaagagc

SEQ ID NO: 4332870 - DNA, 25 bp, Homo sapien
tgttggtaagtacaagagcaaccat

SEQ ID NO: 4332871 - DNA, 25 bp, Homo sapien
gacttctttgcacctcaatattttg

SEQ ID NO: 4332872 - DNA, 25 bp, Homo sapien
gactgccatttagagataatgagag

SEQ ID NO: 4332873 - DNA, 25 bp, Homo sapien
caatattttggactgccatttagag

SEQ ID NO: 4332874 - DNA, 25 bp, Homo sapien
caccacagcctttggatctcatatt

SEQ ID NO: 4332875 - DNA, 25 bp, Homo sapien
cagacagcaatgtcatgaggaatat

SEQ ID NO: 4332876 - DNA, 25 bp, Homo sapien
cagcaatgtcatgaggaatatcctg

SEQ ID NO: 4332877 - DNA, 25 bp, Homo sapien
ggaatatcctgttagtaatgatgaa

SEQ ID NO: 4332878 - DNA, 25 bp, Homo sapien
tatcctgttagtaatgatgaaacat

SEQ ID NO: 4332879 - DNA, 25 bp, Homo sapien
taggaggaacacgtattctggtccc

SEQ ID NO: 4332880 - DNA, 25 bp, Homo sapien
gagcagaagttaggaggaacacgta

SEQ ID NO: 4332881 - DNA, 25 bp, Homo sapien
tttggagcagaagttaggaggaaca

SEQ ID NO: 4332882 - DNA, 25 bp, Homo sapien
aagttaggaggaacacgtattctgg

SEQ ID NO: 4332883 - DNA, 25 bp, Homo sapien
cctacaacaagctgaaggggagata

SEQ ID NO: 4332884 - DNA, 25 bp, Homo sapien
ttctttgaatgttcctacaacaagc

SEQ ID NO: 4332885 - DNA, 25 bp, Homo sapien
gcttctttgaatgttcctacaacaa

SEQ ID NO: 4332886 - DNA, 25 bp, Homo sapien
cttctttgaatgttcctacaacaag

SEQ ID NO: 4332887 - DNA, 25 bp, Homo sapien
cattctcagagttcattcttcgtac

SEQ ID NO: 4332888 - DNA, 25 bp, Homo sapien
tctcagagttcattcttcgtaccct

SEQ ID NO: 4332889 - DNA, 25 bp, Homo sapien
attcttcgtaccctgtaggcttatg

SEQ ID NO: 4332890 - DNA, 25 bp, Homo sapien
gagttcattcttcgtaccctgtagg

SEQ ID NO: 4332891 - DNA, 25 bp, Homo sapien
ggtaataggaagccttggtaggtgc

SEQ ID NO: 4332892 - DNA, 25 bp, Homo sapien
taataggaagccttggtaggtgctt

SEQ ID NO: 4332893 - DNA, 25 bp, Homo sapien
gtaataggaagccttggtaggtgct

SEQ ID NO: 4332894 - DNA, 25 bp, Homo sapien
taggaagccttggtaggtgctttcc

SEQ ID NO: 4332895 - DNA, 25 bp, Homo sapien
ataattaatggcaggcattatgcaa

SEQ ID NO: 4332896 - DNA, 25 bp, Homo sapien
taattaatggcaggcattatgcaaa

SEQ ID NO: 4332897 - DNA, 25 bp, Homo sapien
gcattagtctcacaataattaatgg

SEQ ID NO: 4332898 - DNA, 25 bp, Homo sapien
ttagtctcacaataattaatggcag

SEQ ID NO: 4332899 - DNA, 25 bp, Homo sapien
ctggatcaataagaatgatgcccat

SEQ ID NO: 4332900 - DNA, 25 bp, Homo sapien
ggtggccatacctgaaagttctgag

SEQ ID NO: 4332901 - DNA, 25 bp, Homo sapien
aacttgaagttgacctctgcctctg

SEQ ID NO: 4332902 - DNA, 25 bp, Homo sapien
tatagattttcaacccttatgcact

SEQ ID NO: 4332903 - DNA, 25 bp, Homo sapien
ctacttagattctgaaaacttgaag

SEQ ID NO: 4332904 - DNA, 25 bp, Homo sapien
ctttctactagagatttgaggcttt

SEQ ID NO: 4332905 - DNA, 25 bp, Homo sapien
tactagagatttgaggctttgattc

SEQ ID NO: 4332906 - DNA, 25 bp, Homo sapien
ttctactagagatttgaggctttga

SEQ ID NO: 4332907 - DNA, 25 bp, Homo sapien
tctactagagatttgaggctttgat

SEQ ID NO: 4332908 - DNA, 25 bp, Homo sapien
tttgtaggagtggagtctaggaacc

SEQ ID NO: 4332909 - DNA, 25 bp, Homo sapien
tagccaagcatttatcccccaaata

SEQ ID NO: 4332910 - DNA, 25 bp, Homo sapien
ctaggaaccatccaggtgattctga

SEQ ID NO: 4332911 - DNA, 25 bp, Homo sapien
tattttaatgatcacctggaaatga

SEQ ID NO: 4332912 - DNA, 25 bp, Homo sapien
cctaaaatacatagggtgaagccct

SEQ ID NO: 4332913 - DNA, 25 bp, Homo sapien
tggcactctaatccactaggactgg

SEQ ID NO: 4332914 - DNA, 25 bp, Homo sapien
tgtttgctagtccacccaccttgtg

SEQ ID NO: 4332915 - DNA, 25 bp, Homo sapien
cagaatatcagtgttagcagagtcc

SEQ ID NO: 4332916 - DNA, 25 bp, Homo sapien
tcatatacttgaagatagttattac

SEQ ID NO: 4332917 - DNA, 25 bp, Homo sapien
aaggctgctacaaagttagtgtttc

SEQ ID NO: 4332918 - DNA, 25 bp, Homo sapien
cactggctgatggtctatttgttgg

SEQ ID NO: 4332919 - DNA, 25 bp, Homo sapien
ttattcttgtaggtttcatcactgg

SEQ ID NO: 4332920 - DNA, 25 bp, Homo sapien
tgccacaggaatcccctatattatg

SEQ ID NO: 4332921 - DNA, 25 bp, Homo sapien
tagtgtggtcaatcaaccagttact

SEQ ID NO: 4332922 - DNA, 25 bp, Homo sapien
cttgtgaccaagataaggccgaaaa

SEQ ID NO: 4332923 - DNA, 25 bp, Homo sapien
taatccggctgtgcctagtttagta

SEQ ID NO: 4332924 - DNA, 25 bp, Homo sapien
cattcatcagataggattgtaggcg

SEQ ID NO: 4332925 - DNA, 25 bp, Homo sapien
ggattgtaggcgttcattttggtag

SEQ ID NO: 4332926 - DNA, 25 bp, Homo sapien
tcagataggattgtaggcgttcatt

SEQ ID NO: 4332927 - DNA, 25 bp, Homo sapien
ctgcctcattcatcagataggattg

SEQ ID NO: 4332928 - DNA, 25 bp, Homo sapien
tatcaagacagcatgaacaaaccca

SEQ ID NO: 4332929 - DNA, 25 bp, Homo sapien
ggaaacccaagctttatgaacagcc

SEQ ID NO: 4332930 - DNA, 25 bp, Homo sapien
gagacggtaaagtaacatcatgcct

SEQ ID NO: 4332931 - DNA, 25 bp, Homo sapien
ttttttctagatatggacccacctc

SEQ ID NO: 4332932 - DNA, 25 bp, Homo sapien
tgactctgatgtatccacctccatg

SEQ ID NO: 4332933 - DNA, 25 bp, Homo sapien
gctgactctgatgtatccacctcca

SEQ ID NO: 4332934 - DNA, 25 bp, Homo sapien
actctgatgtatccacctccatggg

SEQ ID NO: 4332935 - DNA, 25 bp, Homo sapien
ccagctgactctgatgtatccacct

SEQ ID NO: 4332936 - DNA, 25 bp, Homo sapien
aggacaaggaggtcattaagctaca

SEQ ID NO: 4332937 - DNA, 25 bp, Homo sapien
gagactccaggacaaggaggtcatt

SEQ ID NO: 4332938 - DNA, 25 bp, Homo sapien
tcagccaaactcagactctccggaa

SEQ ID NO: 4332939 - DNA, 25 bp, Homo sapien
cagactctccggaaagctgtaaatg

SEQ ID NO: 4332940 - DNA, 25 bp, Homo sapien
atttattagattgagccatgtgcag

SEQ ID NO: 4332941 - DNA, 25 bp, Homo sapien
ccttgtggcgtcatgctagcagaga

SEQ ID NO: 4332942 - DNA, 25 bp, Homo sapien
tacactatccacactacagcttgaa

SEQ ID NO: 4332943 - DNA, 25 bp, Homo sapien
cacttgtctggatgcttcgttctag

SEQ ID NO: 4332944 - DNA, 25 bp, Homo sapien
caggactcactatcttaaagagaag

SEQ ID NO: 4332945 - DNA, 25 bp, Homo sapien
ggaaatagccaaatgtattcatatt

SEQ ID NO: 4332946 - DNA, 25 bp, Homo sapien
agttgaagatccttgggattaacag

SEQ ID NO: 4332947 - DNA, 25 bp, Homo sapien
ttatttccaggactcactatcttaa

SEQ ID NO: 4332948 - DNA, 25 bp, Homo sapien
tgcaatctggtgaactcaatggtcc

SEQ ID NO: 4332949 - DNA, 25 bp, Homo sapien
taactctcagtccttgctcaaagca

SEQ ID NO: 4332950 - DNA, 25 bp, Homo sapien
aattttcacgagatccttttagagg

SEQ ID NO: 4332951 - DNA, 25 bp, Homo sapien
tcaatggtccaactgcataaaggca

SEQ ID NO: 4332952 - DNA, 25 bp, Homo sapien
taaaagaaggcatggcattacatcc

SEQ ID NO: 4332953 - DNA, 25 bp, Homo sapien
gttgatactcaatttctggcgctgc

SEQ ID NO: 4332954 - DNA, 25 bp, Homo sapien
tcaccaatgaaactgcaagctcttg

SEQ ID NO: 4332955 - DNA, 25 bp, Homo sapien
tgtaacttgtggagcaaagagtgcc

SEQ ID NO: 4332956 - DNA, 25 bp, Homo sapien
cagtttgttgtcgatgaaagcgcat

SEQ ID NO: 4332957 - DNA, 25 bp, Homo sapien
aacagtttgttgtcgatgaaagcgc

SEQ ID NO: 4332958 - DNA, 25 bp, Homo sapien
aaaacagtttgttgtcgatgaaagc

SEQ ID NO: 4332959 - DNA, 25 bp, Homo sapien
acagtttgttgtcgatgaaagcgca

SEQ ID NO: 4332960 - DNA, 25 bp, Homo sapien
agtctgaaacatcagtctatgtatt

SEQ ID NO: 4332961 - DNA, 25 bp, Homo sapien
cacaagtctgaaacatcagtctatg

SEQ ID NO: 4332962 - DNA, 25 bp, Homo sapien
ctgaaacatcagtctatgtattttt

SEQ ID NO: 4332963 - DNA, 25 bp, Homo sapien
ctgcacaagtctgaaacatcagtct

SEQ ID NO: 4332964 - DNA, 25 bp, Homo sapien
tactgcagggtgaagttgagaaatc

SEQ ID NO: 4332965 - DNA, 25 bp, Homo sapien
cattcacaaaagaggtctctagcct

SEQ ID NO: 4332966 - DNA, 25 bp, Homo sapien
cactttatctgctagggactccctg

SEQ ID NO: 4332967 - DNA, 25 bp, Homo sapien
cagtcattgggcagacaacattcac

SEQ ID NO: 4332968 - DNA, 25 bp, Homo sapien
aataatatagttgaactggttgtgt

SEQ ID NO: 4332969 - DNA, 25 bp, Homo sapien
aatatagttgaactggttgtgttta

SEQ ID NO: 4332970 - DNA, 25 bp, Homo sapien
ataatatagttgaactggttgtgtt

SEQ ID NO: 4332971 - DNA, 25 bp, Homo sapien
taatatagttgaactggttgtgttt

SEQ ID NO: 4332972 - DNA, 25 bp, Homo sapien
ttcaaataatcccatgctgctaact

SEQ ID NO: 4332973 - DNA, 25 bp, Homo sapien
catttgccaactccgggcactctga

SEQ ID NO: 4332974 - DNA, 25 bp, Homo sapien
aactttacagctaactgccagcatt

SEQ ID NO: 4332975 - DNA, 25 bp, Homo sapien
gggaagccaccactcagtataatca

SEQ ID NO: 4332976 - DNA, 25 bp, Homo sapien
gcatcctgcttagaaccacctgctg

SEQ ID NO: 4332977 - DNA, 25 bp, Homo sapien
gaaccacagtgggtgctcatcagca

SEQ ID NO: 4332978 - DNA, 25 bp, Homo sapien
tcaaagactcgattcagccgtggct

SEQ ID NO: 4332979 - DNA, 25 bp, Homo sapien
gaaccacatgggctacccttgatag

SEQ ID NO: 4332980 - DNA, 25 bp, Homo sapien
caggtcaaggaattccaacgattgc

SEQ ID NO: 4332981 - DNA, 25 bp, Homo sapien
aagcaagaggcatgaaacagattcc

SEQ ID NO: 4332982 - DNA, 25 bp, Homo sapien
tcagggagatgccttacaggtcaag

SEQ ID NO: 4332983 - DNA, 25 bp, Homo sapien
cacagcctaatatggatgaaacggt

SEQ ID NO: 4332984 - DNA, 25 bp, Homo sapien
gaatgcagagcaggtacaaaggtaa

SEQ ID NO: 4332985 - DNA, 25 bp, Homo sapien
tatcctggattatctagatgggccc

SEQ ID NO: 4332986 - DNA, 25 bp, Homo sapien
gatgggccctaactacaattctatg

SEQ ID NO: 4332987 - DNA, 25 bp, Homo sapien
gcctggctgacagtgctagcggaaa

SEQ ID NO: 4332988 - DNA, 25 bp, Homo sapien
gatggtttaagtcaccaggcttgtg

SEQ ID NO: 4332989 - DNA, 25 bp, Homo sapien
aaattctctgtggagatactggaga

SEQ ID NO: 4332990 - DNA, 25 bp, Homo sapien
gagagtgcacaagggcattcaacag

SEQ ID NO: 4332991 - DNA, 25 bp, Homo sapien
gggcacttataatctacagcaagta

SEQ ID NO: 4332992 - DNA, 25 bp, Homo sapien
gatccactgcccaatcataaaagaa

SEQ ID NO: 4332993 - DNA, 25 bp, Homo sapien
tttcatctagctcaacatcatggct

SEQ ID NO: 4332994 - DNA, 25 bp, Homo sapien
catcatggctttgtagtctaagcag

SEQ ID NO: 4332995 - DNA, 25 bp, Homo sapien
tactaactgatccaatatatactgc

SEQ ID NO: 4332996 - DNA, 25 bp, Homo sapien
cactatcatctgctggactcaggga

SEQ ID NO: 4332997 - DNA, 25 bp, Homo sapien
ggaaggtgtgctatgtggttatcat

SEQ ID NO: 4332998 - DNA, 25 bp, Homo sapien
tcatttgagtgctctgtgtttaagt

SEQ ID NO: 4332999 - DNA, 25 bp, Homo sapien
gtcctcaagatacacagcatgagag

SEQ ID NO: 4333000 - DNA, 25 bp, Homo sapien
agtcatttgctctagatcaccaggg

SEQ ID NO: 4333001 - DNA, 25 bp, Homo sapien
aaatgagactggatcagatgtgaac

SEQ ID NO: 4333002 - DNA, 25 bp, Homo sapien
tggagtactaaccatgtgcaaagca

SEQ ID NO: 4333003 - DNA, 25 bp, Homo sapien
tcagaatagtctgaccccaaaagac

SEQ ID NO: 4333004 - DNA, 25 bp, Homo sapien
taaatttttacacaggatgctcaac

SEQ ID NO: 4333005 - DNA, 25 bp, Homo sapien
agaaagtgtcccctacagataagga

SEQ ID NO: 4333006 - DNA, 25 bp, Homo sapien
cactaagaactcagataaaggacct

SEQ ID NO: 4333007 - DNA, 25 bp, Homo sapien
taaaggaccttactcttgagacctc

SEQ ID NO: 4333008 - DNA, 25 bp, Homo sapien
tctgtattcagtgtctcttgacccc

SEQ ID NO: 4333009 - DNA, 25 bp, Homo sapien
gcatttagagccaacctgaagtgta

SEQ ID NO: 4333010 - DNA, 25 bp, Homo sapien
tccagttgactcagagaacggtgct

SEQ ID NO: 4333011 - DNA, 25 bp, Homo sapien
tattgttcctgagaaacgtgtgccc

SEQ ID NO: 4333012 - DNA, 25 bp, Homo sapien
tttgagaacaaaacattgaaccaga

SEQ ID NO: 4333013 - DNA, 25 bp, Homo sapien
ctttgagaacaaaacattgaaccag

SEQ ID NO: 4333014 - DNA, 25 bp, Homo sapien
tgagaacaaaacattgaaccagaat

SEQ ID NO: 4333015 - DNA, 25 bp, Homo sapien
gagaacaaaacattgaaccagaatt

SEQ ID NO: 4333016 - DNA, 25 bp, Homo sapien
gaactaatgacctctgtgaccacac

SEQ ID NO: 4333017 - DNA, 25 bp, Homo sapien
caggaattcagaccataggcagaga

SEQ ID NO: 4333018 - DNA, 25 bp, Homo sapien
tatagtacatacaacccggtaggtg

SEQ ID NO: 4333019 - DNA, 25 bp, Homo sapien
tctctgatggaaatgacccctggca

SEQ ID NO: 4333020 - DNA, 25 bp, Homo sapien
gatttcagtctctaaatgtaacttc

SEQ ID NO: 4333021 - DNA, 25 bp, Homo sapien
ttcagtctctaaatgtaacttcagg

SEQ ID NO: 4333022 - DNA, 25 bp, Homo sapien
gtgatttcagtctctaaatgtaact

SEQ ID NO: 4333023 - DNA, 25 bp, Homo sapien
agtctctaaatgtaacttcaggcag

SEQ ID NO: 4333024 - DNA, 25 bp, Homo sapien
cactgttggcgactacatatcttgg

SEQ ID NO: 4333025 - DNA, 25 bp, Homo sapien
tgctgtactactcatcacgaggaga

SEQ ID NO: 4333026 - DNA, 25 bp, Homo sapien
gatggatcttactttgcgccaggac

SEQ ID NO: 4333027 - DNA, 25 bp, Homo sapien
cggctgggcaaaacagatggatctt

SEQ ID NO: 4333028 - DNA, 25 bp, Homo sapien
cttaaattgggtatgagtcacactc

SEQ ID NO: 4333029 - DNA, 25 bp, Homo sapien
aacacctagggccactatgctaacg

SEQ ID NO: 4333030 - DNA, 25 bp, Homo sapien
ggacttgcctaacataactctgtgc

SEQ ID NO: 4333031 - DNA, 25 bp, Homo sapien
ggtcagccaacgatcagtcacaggt

SEQ ID NO: 4333032 - DNA, 25 bp, Homo sapien
gagaatttggcctgtgctctatagg

SEQ ID NO: 4333033 - DNA, 25 bp, Homo sapien
gaatacctggatgatctctataaag

SEQ ID NO: 4333034 - DNA, 25 bp, Homo sapien
gcacaccacatgttgccctggagta

SEQ ID NO: 4333035 - DNA, 25 bp, Homo sapien
taggcaccattgaaatgtggccacc

SEQ ID NO: 4333036 - DNA, 25 bp, Homo sapien
ggagaccatgcagcctctttactca

SEQ ID NO: 4333037 - DNA, 25 bp, Homo sapien
aaaggcacttgactggagaccagag

SEQ ID NO: 4333038 - DNA, 25 bp, Homo sapien
tgtctaactcttcacgtcaggcaac

SEQ ID NO: 4333039 - DNA, 25 bp, Homo sapien
catatagcgcttacagcctgctagg

SEQ ID NO: 4333040 - DNA, 25 bp, Homo sapien
tatagtggataagggcgcaagctca

SEQ ID NO: 4333041 - DNA, 25 bp, Homo sapien
cacctggaccctgcttaaatttcat

SEQ ID NO: 4333042 - DNA, 25 bp, Homo sapien
cctggaccctgcttaaatttcatta

SEQ ID NO: 4333043 - DNA, 25 bp, Homo sapien
ggaccctgcttaaatttcattactc

SEQ ID NO: 4333044 - DNA, 25 bp, Homo sapien
tggaccctgcttaaatttcattact

SEQ ID NO: 4333045 - DNA, 25 bp, Homo sapien
taacctaaagtcctactctgccaag

SEQ ID NO: 4333046 - DNA, 25 bp, Homo sapien
gactggtatcagtatcaaggcaatt

SEQ ID NO: 4333047 - DNA, 25 bp, Homo sapien
taagcctctgagagtctatagacag

SEQ ID NO: 4333048 - DNA, 25 bp, Homo sapien
ccatccccagatctagtgaaggcat

SEQ ID NO: 4333049 - DNA, 25 bp, Homo sapien
acctggccgagggtcttatagatag

SEQ ID NO: 4333050 - DNA, 25 bp, Homo sapien
tagattgcactgatatagtaaggac

SEQ ID NO: 4333051 - DNA, 25 bp, Homo sapien
gcaatctcactaactaatgtacgta

SEQ ID NO: 4333052 - DNA, 25 bp, Homo sapien
tgctatgaagcagtttggtaatacc

SEQ ID NO: 4333053 - DNA, 25 bp, Homo sapien
ccgcacatggccatatttttataaa

SEQ ID NO: 4333054 - DNA, 25 bp, Homo sapien
aattatagtatgtctatacagtgga

SEQ ID NO: 4333055 - DNA, 25 bp, Homo sapien
ctaaatgcccatccttaagtgaatg

SEQ ID NO: 4333056 - DNA, 25 bp, Homo sapien
catgctatgacataaatggatctca

SEQ ID NO: 4333057 - DNA, 25 bp, Homo sapien
gaattgtgcactaatcatctcctaa

SEQ ID NO: 4333058 - DNA, 25 bp, Homo sapien
taatcatctcctaacatactacatg

SEQ ID NO: 4333059 - DNA, 25 bp, Homo sapien
tgggtcattcataaatgaattgtgc

SEQ ID NO: 4333060 - DNA, 25 bp, Homo sapien
ttatcaacttattcttttatgggtc

SEQ ID NO: 4333061 - DNA, 25 bp, Homo sapien
gctaactaggcaacagggataatct

SEQ ID NO: 4333062 - DNA, 25 bp, Homo sapien
caatgagaataaaggcatagcaaac

SEQ ID NO: 4333063 - DNA, 25 bp, Homo sapien
ttatcttccatatacaaccaaggca

SEQ ID NO: 4333064 - DNA, 25 bp, Homo sapien
catagcaaactataagtcttacctg

SEQ ID NO: 4333065 - DNA, 25 bp, Homo sapien
aaacatcctgtatatagcaacactc

SEQ ID NO: 4333066 - DNA, 25 bp, Homo sapien
aataatggacccgattacaggttca

SEQ ID NO: 4333067 - DNA, 25 bp, Homo sapien
tggcagaataatggacccgattaca

SEQ ID NO: 4333068 - DNA, 25 bp, Homo sapien
tagcaacactcataactactacttt

SEQ ID NO: 4333069 - DNA, 25 bp, Homo sapien
gaaaaacaggattagcacacagtct

SEQ ID NO: 4333070 - DNA, 25 bp, Homo sapien
taatggaggtcttcaaactactagt

SEQ ID NO: 4333071 - DNA, 25 bp, Homo sapien
aataaaatgtccgagtgattcctgg

SEQ ID NO: 4333072 - DNA, 25 bp, Homo sapien
taaaattcgtggtgggtgaatcctc

SEQ ID NO: 4333073 - DNA, 25 bp, Homo sapien
tatagcatgctctaagcaaaggcag

SEQ ID NO: 4333074 - DNA, 25 bp, Homo sapien
taaaagactgcaatagctagtgaag

SEQ ID NO: 4333075 - DNA, 25 bp, Homo sapien
cacagagcaaacgacagtacagtat

SEQ ID NO: 4333076 - DNA, 25 bp, Homo sapien
aaatgactaacccaatctttcaggt

SEQ ID NO: 4333077 - DNA, 25 bp, Homo sapien
tttgtgaagatgagctgtgcttaga

SEQ ID NO: 4333078 - DNA, 25 bp, Homo sapien
cttcagtttgtgaagatgagctgtg

SEQ ID NO: 4333079 - DNA, 25 bp, Homo sapien
gcagggaagcctaagctcatttgta

SEQ ID NO: 4333080 - DNA, 25 bp, Homo sapien
cagaacagaagtgcaccaaaagagc

SEQ ID NO: 4333081 - DNA, 25 bp, Homo sapien
tcaccctaatagtggtctgctcctt

SEQ ID NO: 4333082 - DNA, 25 bp, Homo sapien
ttaatgtgttttgggtgcaaatccc

SEQ ID NO: 4333083 - DNA, 25 bp, Homo sapien
cagagaactgttattgaggtgcaaa

SEQ ID NO: 4333084 - DNA, 25 bp, Homo sapien
gagtaaatctgcaataactagagca

SEQ ID NO: 4333085 - DNA, 25 bp, Homo sapien
tagtataatgctctactcaaggtgt

SEQ ID NO: 4333086 - DNA, 25 bp, Homo sapien
cagtaaatattagccatgactaggt

SEQ ID NO: 4333087 - DNA, 25 bp, Homo sapien
ctgtgcagctatggggcacaaactt

SEQ ID NO: 4333088 - DNA, 25 bp, Homo sapien
agctatggggcacaaacttgcaatt

SEQ ID NO: 4333089 - DNA, 25 bp, Homo sapien
gcagctatggggcacaaacttgcaa

SEQ ID NO: 4333090 - DNA, 25 bp, Homo sapien
gtgcagctatggggcacaaacttgc

SEQ ID NO: 4333091 - DNA, 25 bp, Homo sapien
ggtgcttttgtagagcagtccacaa

SEQ ID NO: 4333092 - DNA, 25 bp, Homo sapien
tgacaaaactgccagcgaagtaggt

SEQ ID NO: 4333093 - DNA, 25 bp, Homo sapien
tcctaatacaaatatgactgctgct

SEQ ID NO: 4333094 - DNA, 25 bp, Homo sapien
gaaggaatgctaacaccacgtcgga

SEQ ID NO: 4333095 - DNA, 25 bp, Homo sapien
gaaaaaatcaatttgggtcatggta

SEQ ID NO: 4333096 - DNA, 25 bp, Homo sapien
tgttcttaatagaccagactgtctg

SEQ ID NO: 4333097 - DNA, 25 bp, Homo sapien
tatggtcagatttgataggcctatc

SEQ ID NO: 4333098 - DNA, 25 bp, Homo sapien
taagccctactacctagtcctagaa

SEQ ID NO: 4333099 - DNA, 25 bp, Homo sapien
taagtctgataactgattgctcatg

SEQ ID NO: 4333100 - DNA, 25 bp, Homo sapien
tacaaatatctctagtcccagaagg

SEQ ID NO: 4333101 - DNA, 25 bp, Homo sapien
ggtaaggagaataggcagaagcaaa

SEQ ID NO: 4333102 - DNA, 25 bp, Homo sapien
gaatgtctaagaaccccaagcagga

SEQ ID NO: 4333103 - DNA, 25 bp, Homo sapien
aagagcaaagtgtttcactctcatc

SEQ ID NO: 4333104 - DNA, 25 bp, Homo sapien
gagcaaagtgtttcactctcatctc

SEQ ID NO: 4333105 - DNA, 25 bp, Homo sapien
agagcaaagtgtttcactctcatct

SEQ ID NO: 4333106 - DNA, 25 bp, Homo sapien
tgaaactaggaagcggaagaagttg

SEQ ID NO: 4333107 - DNA, 25 bp, Homo sapien
taggaagcggaagaagttgccatga

SEQ ID NO: 4333108 - DNA, 25 bp, Homo sapien
aggaagcggaagaagttgccatgag

SEQ ID NO: 4333109 - DNA, 25 bp, Homo sapien
ttgagctaagcacaaaaatgaacat

SEQ ID NO: 4333110 - DNA, 25 bp, Homo sapien
ttctctcaagaagcttaccatctag

SEQ ID NO: 4333111 - DNA, 25 bp, Homo sapien
tgtatacaactgaccatgtagtttc

SEQ ID NO: 4333112 - DNA, 25 bp, Homo sapien
ggagccaggcatgagttaaaaactt

SEQ ID NO: 4333113 - DNA, 25 bp, Homo sapien
gacaggttgctaacttgattcttag

SEQ ID NO: 4333114 - DNA, 25 bp, Homo sapien
gagaattctcgttaactaccttcag

SEQ ID NO: 4333115 - DNA, 25 bp, Homo sapien
ggcaaggcagggataaaaattagaa

SEQ ID NO: 4333116 - DNA, 25 bp, Homo sapien
gctgtgaaaacttacgtgcaaagag

SEQ ID NO: 4333117 - DNA, 25 bp, Homo sapien
ccaaaggcaattcttaacacttctt

SEQ ID NO: 4333118 - DNA, 25 bp, Homo sapien
caaaggcaattcttaacacttcttt

SEQ ID NO: 4333119 - DNA, 25 bp, Homo sapien
caaagctgttgtgccatcacaaaag

SEQ ID NO: 4333120 - DNA, 25 bp, Homo sapien
aagtcacatggcagactgtttcatg

SEQ ID NO: 4333121 - DNA, 25 bp, Homo sapien
tcataagagtaatgggaaactactg

SEQ ID NO: 4333122 - DNA, 25 bp, Homo sapien
tctttatatgcctgaccttctgaaa

SEQ ID NO: 4333123 - DNA, 25 bp, Homo sapien
catataaccgtagcaaaatggagct

SEQ ID NO: 4333124 - DNA, 25 bp, Homo sapien
tgagcctcttctacagcatcaagtg

SEQ ID NO: 4333125 - DNA, 25 bp, Homo sapien
tgaagggcaccttagagcccaccta

SEQ ID NO: 4333126 - DNA, 25 bp, Homo sapien
gtggccactgagacataccaggctg

SEQ ID NO: 4333127 - DNA, 25 bp, Homo sapien
tctactccttttgaataaggaggaa

SEQ ID NO: 4333128 - DNA, 25 bp, Homo sapien
tcttgagtcgtctaaaaaaatatgt

SEQ ID NO: 4333129 - DNA, 25 bp, Homo sapien
aatttgccaattatgtctactcctt

SEQ ID NO: 4333130 - DNA, 25 bp, Homo sapien
tggaaatacttgtcctctatatatt

SEQ ID NO: 4333131 - DNA, 25 bp, Homo sapien
taaacatgcatgattatctcccatc

SEQ ID NO: 4333132 - DNA, 25 bp, Homo sapien
catataaacatgcatgattatctcc

SEQ ID NO: 4333133 - DNA, 25 bp, Homo sapien
atttctagtcaaatctttgaagaga

SEQ ID NO: 4333134 - DNA, 25 bp, Homo sapien
gcatgattatctcccatcaaatata

SEQ ID NO: 4333135 - DNA, 25 bp, Homo sapien
gaaaaaaggccctcactagatgccc

SEQ ID NO: 4333136 - DNA, 25 bp, Homo sapien
gccttctaccacgttgggatacaga

SEQ ID NO: 4333137 - DNA, 25 bp, Homo sapien
ggcttcacagcctcgagaacagtga

SEQ ID NO: 4333138 - DNA, 25 bp, Homo sapien
tccagagctggcaagtagaggttac

SEQ ID NO: 4333139 - DNA, 25 bp, Homo sapien
tctctgctatcccctctcgtagtca

SEQ ID NO: 4333140 - DNA, 25 bp, Homo sapien
ctgtctctgctatcccctctcgtag

SEQ ID NO: 4333141 - DNA, 25 bp, Homo sapien
ctctgctatcccctctcgtagtcat

SEQ ID NO: 4333142 - DNA, 25 bp, Homo sapien
tgtctctgctatcccctctcgtagt

SEQ ID NO: 4333143 - DNA, 25 bp, Homo sapien
gtacttccaagcataactagttcaa

SEQ ID NO: 4333144 - DNA, 25 bp, Homo sapien
gactaaatgagaggactactgttgg

SEQ ID NO: 4333145 - DNA, 25 bp, Homo sapien
catttcataactatactacatggtc

SEQ ID NO: 4333146 - DNA, 25 bp, Homo sapien
catggtctaatgtatagcatatgga

SEQ ID NO: 4333147 - DNA, 25 bp, Homo sapien
caggcttacaaataaccgatgttca

SEQ ID NO: 4333148 - DNA, 25 bp, Homo sapien
tattgtgacaatcagacggactcaa

SEQ ID NO: 4333149 - DNA, 25 bp, Homo sapien
ttaatgagagacactgaagacccag

SEQ ID NO: 4333150 - DNA, 25 bp, Homo sapien
tcaactgtacaaatgctggacccca

SEQ ID NO: 4333151 - DNA, 25 bp, Homo sapien
ggcttcttgactatatcctatggtg

SEQ ID NO: 4333152 - DNA, 25 bp, Homo sapien
tcctatggtgtgtcatgcagtcctt

SEQ ID NO: 4333153 - DNA, 25 bp, Homo sapien
tcctttgagcttgaaactcccatgt

SEQ ID NO: 4333154 - DNA, 25 bp, Homo sapien
tgtccaaaggcttcttgactatatc

SEQ ID NO: 4333155 - DNA, 25 bp, Homo sapien
aaaggaggctactgagcactgttac

SEQ ID NO: 4333156 - DNA, 25 bp, Homo sapien
cagttatttctgagtaaacatccat

SEQ ID NO: 4333157 - DNA, 25 bp, Homo sapien
tattccacctaattgaaatgtcata

SEQ ID NO: 4333158 - DNA, 25 bp, Homo sapien
cctaaaacagtacagcaaaggaggc

SEQ ID NO: 4333159 - DNA, 25 bp, Homo sapien
ttctttgtcactaatatttccccac

SEQ ID NO: 4333160 - DNA, 25 bp, Homo sapien
atatttccccactattccttgcact

SEQ ID NO: 4333161 - DNA, 25 bp, Homo sapien
ggggttgatacctaatgaatggctt

SEQ ID NO: 4333162 - DNA, 25 bp, Homo sapien
tggttttaatatgtgtcccctccaa

SEQ ID NO: 4333163 - DNA, 25 bp, Homo sapien
tcacatgatggagggccaagagaca

SEQ ID NO: 4333164 - DNA, 25 bp, Homo sapien
catgaccaggttttgatgaatgcct

SEQ ID NO: 4333165 - DNA, 25 bp, Homo sapien
ttccatgagaatagatgcactagcc

SEQ ID NO: 4333166 - DNA, 25 bp, Homo sapien
ttcaaacagcatgcgaaaacccctt

SEQ ID NO: 4333167 - DNA, 25 bp, Homo sapien
gaggcctatatttctctcgggaact

SEQ ID NO: 4333168 - DNA, 25 bp, Homo sapien
cacccaggtactcgagaaaaacatc

SEQ ID NO: 4333169 - DNA, 25 bp, Homo sapien
gataccattctggttcttgagccaa

SEQ ID NO: 4333170 - DNA, 25 bp, Homo sapien
tataaggcacttcatgataggcacc

SEQ ID NO: 4333171 - DNA, 25 bp, Homo sapien
aagtgcccagaatgaactaatgttg

SEQ ID NO: 4333172 - DNA, 25 bp, Homo sapien
catggatgacggagcagaaatagag

SEQ ID NO: 4333173 - DNA, 25 bp, Homo sapien
catgggtgtgagatcaactggagat

SEQ ID NO: 4333174 - DNA, 25 bp, Homo sapien
gattcaaggaagctaaagtgcccag

SEQ ID NO: 4333175 - DNA, 25 bp, Homo sapien
actgttcttgtgcatccaggcagcc

SEQ ID NO: 4333176 - DNA, 25 bp, Homo sapien
tccaggcagcctattgaaactaaca

SEQ ID NO: 4333177 - DNA, 25 bp, Homo sapien
ctgctgccgaagaggatcatccaaa

SEQ ID NO: 4333178 - DNA, 25 bp, Homo sapien
gctgccgaagaggatcatccaaact

SEQ ID NO: 4333179 - DNA, 25 bp, Homo sapien
cttcctctgtttacaggataaacgt

SEQ ID NO: 4333180 - DNA, 25 bp, Homo sapien
agtacacacaatagacttggcaatc

SEQ ID NO: 4333181 - DNA, 25 bp, Homo sapien
ctgtttacaggataaacgtgaaagg

SEQ ID NO: 4333182 - DNA, 25 bp, Homo sapien
tttcattgcccttaacagtacacac

SEQ ID NO: 4333183 - DNA, 25 bp, Homo sapien
gtgaatctccccgatcccaactgtt

SEQ ID NO: 4333184 - DNA, 25 bp, Homo sapien
gttgactacaggtacaatgctatac

SEQ ID NO: 4333185 - DNA, 25 bp, Homo sapien
gcacagtgtcctcaagttttagcca

SEQ ID NO: 4333186 - DNA, 25 bp, Homo sapien
tgttcccagtcacagtaaagatatt

SEQ ID NO: 4333187 - DNA, 25 bp, Homo sapien
catgaccggccactgcttagagttg

SEQ ID NO: 4333188 - DNA, 25 bp, Homo sapien
tatgtggcggcatgaccggccactg

SEQ ID NO: 4333189 - DNA, 25 bp, Homo sapien
tggggtaacacgtttgctcagggcc

SEQ ID NO: 4333190 - DNA, 25 bp, Homo sapien
ctgaatttggcttcctatgtggcgg

SEQ ID NO: 4333191 - DNA, 25 bp, Homo sapien
tatccttttgatgaatataggcttc

SEQ ID NO: 4333192 - DNA, 25 bp, Homo sapien
tttcatggggaaagtatgcagctgc

SEQ ID NO: 4333193 - DNA, 25 bp, Homo sapien
gttaattagcacaaggactaatcat

SEQ ID NO: 4333194 - DNA, 25 bp, Homo sapien
gaaaaagtttaaactggcatatgct

SEQ ID NO: 4333195 - DNA, 25 bp, Homo sapien
tttccaaatccctatacagcagagt

SEQ ID NO: 4333196 - DNA, 25 bp, Homo sapien
tttttctggcattctatagcgctcc

SEQ ID NO: 4333197 - DNA, 25 bp, Homo sapien
gtaacgcaagcctttcagctttcca

SEQ ID NO: 4333198 - DNA, 25 bp, Homo sapien
tccttctgtatttagattgtgacag

SEQ ID NO: 4333199 - DNA, 25 bp, Homo sapien
tgctcttgatgttgtgtatatacac

SEQ ID NO: 4333200 - DNA, 25 bp, Homo sapien
tgcctgcctccctaatgagtccatt

SEQ ID NO: 4333201 - DNA, 25 bp, Homo sapien
ccctggaagtacagtgtgagtggta

SEQ ID NO: 4333202 - DNA, 25 bp, Homo sapien
tcttcttataatcggtgtctccctg

SEQ ID NO: 4333203 - DNA, 25 bp, Homo sapien
gaatgtgaacaaatcagctctgaca

SEQ ID NO: 4333204 - DNA, 25 bp, Homo sapien
ccagcaaaatgcaactcgtctaatg

SEQ ID NO: 4333205 - DNA, 25 bp, Homo sapien
caaaccacagagacgggaagagaga

SEQ ID NO: 4333206 - DNA, 25 bp, Homo sapien
cagtattgccagactaacagagtga

SEQ ID NO: 4333207 - DNA, 25 bp, Homo sapien
taaacatgggagtgcgggtgttcct

SEQ ID NO: 4333208 - DNA, 25 bp, Homo sapien
gggatactcaatagagagattgcaa

SEQ ID NO: 4333209 - DNA, 25 bp, Homo sapien
acatgagtgagaacacgagatatct

SEQ ID NO: 4333210 - DNA, 25 bp, Homo sapien
ccttctgtcttacggccaaatagta

SEQ ID NO: 4333211 - DNA, 25 bp, Homo sapien
ttacagcaaatccagcattgacagg

SEQ ID NO: 4333212 - DNA, 25 bp, Homo sapien
gcagaaagggtaacactctccagag

SEQ ID NO: 4333213 - DNA, 25 bp, Homo sapien
tgaatatacatagggtgacaccata

SEQ ID NO: 4333214 - DNA, 25 bp, Homo sapien
tattatactgttgcagaaagtgcag

SEQ ID NO: 4333215 - DNA, 25 bp, Homo sapien
attcatgggccatacactctatctc

SEQ ID NO: 4333216 - DNA, 25 bp, Homo sapien
aaccagaggtagagaaaaactagct

SEQ ID NO: 4333217 - DNA, 25 bp, Homo sapien
tgcttcggtagaaagaacgtggctt

SEQ ID NO: 4333218 - DNA, 25 bp, Homo sapien
ctatctctaggtgtatgggaagcag

SEQ ID NO: 4333219 - DNA, 25 bp, Homo sapien
gtcactctgtaatcatactttaacc

SEQ ID NO: 4333220 - DNA, 25 bp, Homo sapien
tactttaacctaggtcaaccagcgc

SEQ ID NO: 4333221 - DNA, 25 bp, Homo sapien
ttgtgtggtaataacttaactgcag

SEQ ID NO: 4333222 - DNA, 25 bp, Homo sapien
cctggtttgtattatagatctcttc

SEQ ID NO: 4333223 - DNA, 25 bp, Homo sapien
cgggctcacgccaagtacaaatgtt

SEQ ID NO: 4333224 - DNA, 25 bp, Homo sapien
cccgggctcacgccaagtacaaatg

SEQ ID NO: 4333225 - DNA, 25 bp, Homo sapien
gggctcacgccaagtacaaatgttt

SEQ ID NO: 4333226 - DNA, 25 bp, Homo sapien
ggctcacgccaagtacaaatgtttt

SEQ ID NO: 4333227 - DNA, 25 bp, Homo sapien
gcacacaagcaagagtgtaatactg

SEQ ID NO: 4333228 - DNA, 25 bp, Homo sapien
tacagtacaaacacttagtgctagg

SEQ ID NO: 4333229 - DNA, 25 bp, Homo sapien
caccagaaccatgattaaagcacac

SEQ ID NO: 4333230 - DNA, 25 bp, Homo sapien
ggtacatgggaagctcaatgcctgg

SEQ ID NO: 4333231 - DNA, 25 bp, Homo sapien
tccaagactggctttgatgctaatg

SEQ ID NO: 4333232 - DNA, 25 bp, Homo sapien
gctaaatatgacctaagacctgaca

SEQ ID NO: 4333233 - DNA, 25 bp, Homo sapien
gaagttcctccagccaaagctaaat

SEQ ID NO: 4333234 - DNA, 25 bp, Homo sapien
gaaaatggcaatgactgagggaagt

SEQ ID NO: 4333235 - DNA, 25 bp, Homo sapien
tccttacgtttaagtgacaacatct

SEQ ID NO: 4333236 - DNA, 25 bp, Homo sapien
ccatggcctagaatgatttaaatta

SEQ ID NO: 4333237 - DNA, 25 bp, Homo sapien
gctttctacttcttcttaggtcaat

SEQ ID NO: 4333238 - DNA, 25 bp, Homo sapien
gaatcatgcttacattcccacttaa

SEQ ID NO: 4333239 - DNA, 25 bp, Homo sapien
ttagtaggacgtggctgtgcgcgcc

SEQ ID NO: 4333240 - DNA, 25 bp, Homo sapien
aaattagtaggacgtggctgtgcgc

SEQ ID NO: 4333241 - DNA, 25 bp, Homo sapien
aaaaaattagtaggacgtggctgtg

SEQ ID NO: 4333242 - DNA, 25 bp, Homo sapien
aaaattagtaggacgtggctgtgcg

SEQ ID NO: 4333243 - DNA, 25 bp, Homo sapien
ttctgtaggctctttcaaactgtag

SEQ ID NO: 4333244 - DNA, 25 bp, Homo sapien
tagatcgcaggaacttagctgtagc

SEQ ID NO: 4333245 - DNA, 25 bp, Homo sapien
tctttcctatcactgccaactggta

SEQ ID NO: 4333246 - DNA, 25 bp, Homo sapien
tatttcagagactaaagcaaagccc

SEQ ID NO: 4333247 - DNA, 25 bp, Homo sapien
ttagcttgttaaaattaggacctca

SEQ ID NO: 4333248 - DNA, 25 bp, Homo sapien
taacctgatactttctttagcttgt

SEQ ID NO: 4333249 - DNA, 25 bp, Homo sapien
tagcttgttaaaattaggacctcac

SEQ ID NO: 4333250 - DNA, 25 bp, Homo sapien
cctgatactttctttagcttgttaa

SEQ ID NO: 4333251 - DNA, 25 bp, Homo sapien
aaatatccaattgcccaactcactg

SEQ ID NO: 4333252 - DNA, 25 bp, Homo sapien
cactgagcagctaatatagttctag

SEQ ID NO: 4333253 - DNA, 25 bp, Homo sapien
gcaaacttgtcacctgatcttcata

SEQ ID NO: 4333254 - DNA, 25 bp, Homo sapien
tcatatgcacaaggcctgtattcca

SEQ ID NO: 4333255 - DNA, 25 bp, Homo sapien
tgtgtgcctagcatatgtttgtgca

SEQ ID NO: 4333256 - DNA, 25 bp, Homo sapien
cgccatattgtgtttttcgctaatg

SEQ ID NO: 4333257 - DNA, 25 bp, Homo sapien
ctaggtaccgtagctgtacgccata

SEQ ID NO: 4333258 - DNA, 25 bp, Homo sapien
tatgtttgtgcaagtgtgtttatca

SEQ ID NO: 4333259 - DNA, 25 bp, Homo sapien
tcctcgcgctctttaatcttctttc

SEQ ID NO: 4333260 - DNA, 25 bp, Homo sapien
tttaatcttctttcctcaactccta

SEQ ID NO: 4333261 - DNA, 25 bp, Homo sapien
ctcctcgcgctctttaatcttcttt

SEQ ID NO: 4333262 - DNA, 25 bp, Homo sapien
atcttctttcctcaactcctaaact

SEQ ID NO: 4333263 - DNA, 25 bp, Homo sapien
gcggcctggggccaattgccgagag

SEQ ID NO: 4333264 - DNA, 25 bp, Homo sapien
ctggggccaattgccgagagggctg

SEQ ID NO: 4333265 - DNA, 25 bp, Homo sapien
ggcctggggccaattgccgagaggg

SEQ ID NO: 4333266 - DNA, 25 bp, Homo sapien
cctggggccaattgccgagagggct

SEQ ID NO: 4333267 - DNA, 25 bp, Homo sapien
ggcctgtggagccgggatgccccag

SEQ ID NO: 4333268 - DNA, 25 bp, Homo sapien
tgtctggcgcggcgagctgcgccgg

SEQ ID NO: 4333269 - DNA, 25 bp, Homo sapien
gctgtctggcgcggcgagctgcgcc

SEQ ID NO: 4333270 - DNA, 25 bp, Homo sapien
cgctgtctggcgcggcgagctgcgc

SEQ ID NO: 4333271 - DNA, 25 bp, Homo sapien
gaggggggtgtcgctgtcttggaca

SEQ ID NO: 4333272 - DNA, 25 bp, Homo sapien
caggttgccagaccgggtccccagt

SEQ ID NO: 4333273 - DNA, 25 bp, Homo sapien
tcacgcttgattcccgcggaatggg

SEQ ID NO: 4333274 - DNA, 25 bp, Homo sapien
tctggctggcggcagcgcgcaaggc

SEQ ID NO: 4333275 - DNA, 25 bp, Homo sapien
aggccgcaccgggtcacgcttgatt

SEQ ID NO: 4333276 - DNA, 25 bp, Homo sapien
caataaaatcttcgtcctcaaccat

SEQ ID NO: 4333277 - DNA, 25 bp, Homo sapien
acagaattcaatatcctgggtggta

SEQ ID NO: 4333278 - DNA, 25 bp, Homo sapien
aagcaacacggaaaattaagtgtgg

SEQ ID NO: 4333279 - DNA, 25 bp, Homo sapien
cggaaaattaagtgtggttcaaatg

SEQ ID NO: 4333280 - DNA, 25 bp, Homo sapien
catgaagttcaagtaagaaatataa

SEQ ID NO: 4333281 - DNA, 25 bp, Homo sapien
aattttattcggcatatgggcgtag

SEQ ID NO: 4333282 - DNA, 25 bp, Homo sapien
tattcggcatatgggcgtaggaaag

SEQ ID NO: 4333283 - DNA, 25 bp, Homo sapien
tttcaattttattcggcatatgggc

SEQ ID NO: 4333284 - DNA, 25 bp, Homo sapien
gattcttgtgagataaccttgcatg

SEQ ID NO: 4333285 - DNA, 25 bp, Homo sapien
ccggtgaacttgtgattcttgtgag

SEQ ID NO: 4333286 - DNA, 25 bp, Homo sapien
gagataaccttgcatgggtctctgg

SEQ ID NO: 4333287 - DNA, 25 bp, Homo sapien
agctctccggtgaacttgtgattct

SEQ ID NO: 4333288 - DNA, 25 bp, Homo sapien
gagtaggtttgccacaaaagcaact

SEQ ID NO: 4333289 - DNA, 25 bp, Homo sapien
cagagtaggtttgccacaaaagcaa

SEQ ID NO: 4333290 - DNA, 25 bp, Homo sapien
aggtttgccacaaaagcaactctga

SEQ ID NO: 4333291 - DNA, 25 bp, Homo sapien
gtaggtttgccacaaaagcaactct

SEQ ID NO: 4333292 - DNA, 25 bp, Homo sapien
gcatggcccatatccacaaatggca

SEQ ID NO: 4333293 - DNA, 25 bp, Homo sapien
actgcaagttaataccgagggagac

SEQ ID NO: 4333294 - DNA, 25 bp, Homo sapien
gagaggtaagcagccagtaacagga

SEQ ID NO: 4333295 - DNA, 25 bp, Homo sapien
taaaagcgattgaagaagggttgac

SEQ ID NO: 4333296 - DNA, 25 bp, Homo sapien
cgtggcagtcttgctcagactcaga

SEQ ID NO: 4333297 - DNA, 25 bp, Homo sapien
tattgcacaggtataaatgaagtca

SEQ ID NO: 4333298 - DNA, 25 bp, Homo sapien
tcacagagcccaacatattgcacag

SEQ ID NO: 4333299 - DNA, 25 bp, Homo sapien
tgcctttgtcccttgattgggcgtg

SEQ ID NO: 4333300 - DNA, 25 bp, Homo sapien
tcctggatacgtgggcttggttgct

SEQ ID NO: 4333301 - DNA, 25 bp, Homo sapien
ctgaaattctgggaagtgctggaaa

SEQ ID NO: 4333302 - DNA, 25 bp, Homo sapien
attctgggaagtgctggaaatcccc

SEQ ID NO: 4333303 - DNA, 25 bp, Homo sapien
gccagatgccatttctggatcctgg

SEQ ID NO: 4333304 - DNA, 25 bp, Homo sapien
cagggagttgatgtacgcagagcac

SEQ ID NO: 4333305 - DNA, 25 bp, Homo sapien
aaacatcatatcaagggcagtgagc

SEQ ID NO: 4333306 - DNA, 25 bp, Homo sapien
ttcagctgacgcctgagcgacaggg

SEQ ID NO: 4333307 - DNA, 25 bp, Homo sapien
gacatcatcctagctgtgcagggct

SEQ ID NO: 4333308 - DNA, 25 bp, Homo sapien
gctgaaacctgggcttggatattac

SEQ ID NO: 4333309 - DNA, 25 bp, Homo sapien
gaaacctgggcttggatattacagc

SEQ ID NO: 4333310 - DNA, 25 bp, Homo sapien
tgaaacctgggcttggatattacag

SEQ ID NO: 4333311 - DNA, 25 bp, Homo sapien
cagctgaaacctgggcttggatatt

SEQ ID NO: 4333312 - DNA, 25 bp, Homo sapien
aacaaatggaatgtgatctgggtct

SEQ ID NO: 4333313 - DNA, 25 bp, Homo sapien
tcttcttggggtttcagaacaaatg

SEQ ID NO: 4333314 - DNA, 25 bp, Homo sapien
caggtcttcagaggaagaggagcaa

SEQ ID NO: 4333315 - DNA, 25 bp, Homo sapien
agcaatttcttcttggggtttcaga

SEQ ID NO: 4333316 - DNA, 25 bp, Homo sapien
gaaggaggaatctgaagaagttagc

SEQ ID NO: 4333317 - DNA, 25 bp, Homo sapien
ggatatcacatttgaggaagctgtc

SEQ ID NO: 4333318 - DNA, 25 bp, Homo sapien
ggaagctgtcccagtaacttgagat

SEQ ID NO: 4333319 - DNA, 25 bp, Homo sapien
tcattggatatcacatttgaggaag

SEQ ID NO: 4333320 - DNA, 25 bp, Homo sapien
gattccttgtatgctctcttttcct

SEQ ID NO: 4333321 - DNA, 25 bp, Homo sapien
tcttttccttttcccgcactgaggc

SEQ ID NO: 4333322 - DNA, 25 bp, Homo sapien
aatctccctgggtagttccttcctg

SEQ ID NO: 4333323 - DNA, 25 bp, Homo sapien
cactgaggcttaatctccctgggta

SEQ ID NO: 4333324 - DNA, 25 bp, Homo sapien
taaaagaagaccctgtatagccaag

SEQ ID NO: 4333325 - DNA, 25 bp, Homo sapien
aagttaccacgatgttcttcacaga

SEQ ID NO: 4333326 - DNA, 25 bp, Homo sapien
gctattcccatcaagttaccacgat

SEQ ID NO: 4333327 - DNA, 25 bp, Homo sapien
aggctacagtaccaaaagcagtatg

SEQ ID NO: 4333328 - DNA, 25 bp, Homo sapien
gcctgccatacatcgaaggtattgt

SEQ ID NO: 4333329 - DNA, 25 bp, Homo sapien
aaggtattgtatccatgatggcatg

SEQ ID NO: 4333330 - DNA, 25 bp, Homo sapien
agaatctgtgcctgccatacatcga

SEQ ID NO: 4333331 - DNA, 25 bp, Homo sapien
tacatcgaaggtattgtatccatga

SEQ ID NO: 4333332 - DNA, 25 bp, Homo sapien
cagtcttctttatgatcatgtacat

SEQ ID NO: 4333333 - DNA, 25 bp, Homo sapien
ctgagtcagaggcaatgttatatcc

SEQ ID NO: 4333334 - DNA, 25 bp, Homo sapien
gttttaaagggtctgtgatgttcat

SEQ ID NO: 4333335 - DNA, 25 bp, Homo sapien
ggttttaaagggtctgtgatgttca

SEQ ID NO: 4333336 - DNA, 25 bp, Homo sapien
tgagtcagaggcaatgttatatcct

SEQ ID NO: 4333337 - DNA, 25 bp, Homo sapien
tggtatgtaattgaattggtatcgc

SEQ ID NO: 4333338 - DNA, 25 bp, Homo sapien
gaattggtatcgctgctgtcaccat

SEQ ID NO: 4333339 - DNA, 25 bp, Homo sapien
tgtcaccatcaatttgtgcaggaaa

SEQ ID NO: 4333340 - DNA, 25 bp, Homo sapien
cagaatcattactgggaaccagaag

SEQ ID NO: 4333341 - DNA, 25 bp, Homo sapien
ggctcctgtggctgcatttaattgc

SEQ ID NO: 4333342 - DNA, 25 bp, Homo sapien
gctccatttggactgattcaacggt

SEQ ID NO: 4333343 - DNA, 25 bp, Homo sapien
taactcctggactggaacactcgtg

SEQ ID NO: 4333344 - DNA, 25 bp, Homo sapien
aacactcgtgatcgtctttggctcc

SEQ ID NO: 4333345 - DNA, 25 bp, Homo sapien
ccactcctgctaaggaacccagtga

SEQ ID NO: 4333346 - DNA, 25 bp, Homo sapien
gcctggtagcccgttccatcttctt

SEQ ID NO: 4333347 - DNA, 25 bp, Homo sapien
tgaccccatggcatttagcttcagc

SEQ ID NO: 4333348 - DNA, 25 bp, Homo sapien
gctaaggaacccagtgaccccatgg

SEQ ID NO: 4333349 - DNA, 25 bp, Homo sapien
cagtggctgaaggcccttattctgc

SEQ ID NO: 4333350 - DNA, 25 bp, Homo sapien
tccagttttatcctgaggtttagac

SEQ ID NO: 4333351 - DNA, 25 bp, Homo sapien
tgaaggcccttattctgcagattgg

SEQ ID NO: 4333352 - DNA, 25 bp, Homo sapien
cagattggggcctatgcatgtgatt

SEQ ID NO: 4333353 - DNA, 25 bp, Homo sapien
atggtgtctgtactgtagaatatgg

SEQ ID NO: 4333354 - DNA, 25 bp, Homo sapien
ttgatggtgtctgtactgtagaata

SEQ ID NO: 4333355 - DNA, 25 bp, Homo sapien
gatggtgtctgtactgtagaatatg

SEQ ID NO: 4333356 - DNA, 25 bp, Homo sapien
tgatggtgtctgtactgtagaatat

SEQ ID NO: 4333357 - DNA, 25 bp, Homo sapien
tcttttctcagtagaccatcctggg

SEQ ID NO: 4333358 - DNA, 25 bp, Homo sapien
ctcagtagaccatcctgggctttct

SEQ ID NO: 4333359 - DNA, 25 bp, Homo sapien
tctcagtagaccatcctgggctttc

SEQ ID NO: 4333360 - DNA, 25 bp, Homo sapien
ttttctcagtagaccatcctgggct

SEQ ID NO: 4333361 - DNA, 25 bp, Homo sapien
tatgggacgtagacaaacagtttca

SEQ ID NO: 4333362 - DNA, 25 bp, Homo sapien
gggaagctatgaccccgtcatccat

SEQ ID NO: 4333363 - DNA, 25 bp, Homo sapien
catgcatatacttggatatgggacg

SEQ ID NO: 4333364 - DNA, 25 bp, Homo sapien
aatgaatactcctctgtcagaaggc

SEQ ID NO: 4333365 - DNA, 25 bp, Homo sapien
ccatgctctctgtcactctcaggag

SEQ ID NO: 4333366 - DNA, 25 bp, Homo sapien
atgtccttccatgctctctgtcact

SEQ ID NO: 4333367 - DNA, 25 bp, Homo sapien
ccttccatgctctctgtcactctca

SEQ ID NO: 4333368 - DNA, 25 bp, Homo sapien
tgctctctgtcactctcaggagcat

SEQ ID NO: 4333369 - DNA, 25 bp, Homo sapien
gaaatagctgtagtgatgggcctct

SEQ ID NO: 4333370 - DNA, 25 bp, Homo sapien
gagtctcagtagttcctatgggggc

SEQ ID NO: 4333371 - DNA, 25 bp, Homo sapien
gcctctttatttacgcagaaagcca

SEQ ID NO: 4333372 - DNA, 25 bp, Homo sapien
tagaccagggtgtactctgcttcag

SEQ ID NO: 4333373 - DNA, 25 bp, Homo sapien
tatctttcactctcgaccctttccc

SEQ ID NO: 4333374 - DNA, 25 bp, Homo sapien
ctggattaactgctgtttattggct

SEQ ID NO: 4333375 - DNA, 25 bp, Homo sapien
ttattggctgacaccctagcaagag

SEQ ID NO: 4333376 - DNA, 25 bp, Homo sapien
actaaatagaagctctggaaagacg

SEQ ID NO: 4333377 - DNA, 25 bp, Homo sapien
gagggggaattcttgctgtgtcact

SEQ ID NO: 4333378 - DNA, 25 bp, Homo sapien
atccaagagggggaattcttgctgt

SEQ ID NO: 4333379 - DNA, 25 bp, Homo sapien
tccaagagggggaattcttgctgtg

SEQ ID NO: 4333380 - DNA, 25 bp, Homo sapien
ctgatccaagagggggaattcttgc

SEQ ID NO: 4333381 - DNA, 25 bp, Homo sapien
gatctacataaaacttgtgtctctt

SEQ ID NO: 4333382 - DNA, 25 bp, Homo sapien
tggggtagtgaacccttgatctaca

SEQ ID NO: 4333383 - DNA, 25 bp, Homo sapien
cacattgattagaaaaggttgttgt

SEQ ID NO: 4333384 - DNA, 25 bp, Homo sapien
gaaaaggttgttgtagatttctctg

SEQ ID NO: 4333385 - DNA, 25 bp, Homo sapien
ctctgcaccaggattcctgccccag

SEQ ID NO: 4333386 - DNA, 25 bp, Homo sapien
caactctgcaccaggattcctgccc

SEQ ID NO: 4333387 - DNA, 25 bp, Homo sapien
agtcttcctgcctagcccagtctcc

SEQ ID NO: 4333388 - DNA, 25 bp, Homo sapien
cttttgcttggaccaactctgcacc

SEQ ID NO: 4333389 - DNA, 25 bp, Homo sapien
cagtcactgtgcgaagagctagggc

SEQ ID NO: 4333390 - DNA, 25 bp, Homo sapien
tgtagtagcaagatatgttcccagc

SEQ ID NO: 4333391 - DNA, 25 bp, Homo sapien
taccttgcataccatggagcttgcc

SEQ ID NO: 4333392 - DNA, 25 bp, Homo sapien
cacctgggatgtagttagagatgcc

SEQ ID NO: 4333393 - DNA, 25 bp, Homo sapien
tcagcgctccaccccaggaactgga

SEQ ID NO: 4333394 - DNA, 25 bp, Homo sapien
tgtcagcgctccaccccaggaactg

SEQ ID NO: 4333395 - DNA, 25 bp, Homo sapien
ctggcacctgtcagcgctccacccc

SEQ ID NO: 4333396 - DNA, 25 bp, Homo sapien
tggcacctgtcagcgctccacccca

SEQ ID NO: 4333397 - DNA, 25 bp, Homo sapien
tgtaaccttccaatgctgtatagtc

SEQ ID NO: 4333398 - DNA, 25 bp, Homo sapien
aatctgtgtacaagtgaatccatgc

SEQ ID NO: 4333399 - DNA, 25 bp, Homo sapien
tagggagactatggtatggatcaaa

SEQ ID NO: 4333400 - DNA, 25 bp, Homo sapien
cagagtaactagttggtgacaagaa

SEQ ID NO: 4333401 - DNA, 25 bp, Homo sapien
tagaggcaattgtctcattatttac

SEQ ID NO: 4333402 - DNA, 25 bp, Homo sapien
atagaggcaattgtctcattattta

SEQ ID NO: 4333403 - DNA, 25 bp, Homo sapien
cacctcttgagtgaaaccagtatgg

SEQ ID NO: 4333404 - DNA, 25 bp, Homo sapien
cttacacctcttgagtgaaaccagt

SEQ ID NO: 4333405 - DNA, 25 bp, Homo sapien
tacacctcttgagtgaaaccagtat

SEQ ID NO: 4333406 - DNA, 25 bp, Homo sapien
ctcttgagtgaaaccagtatggagg

SEQ ID NO: 4333407 - DNA, 25 bp, Homo sapien
ctgattctgccaagtagtttgcaaa

SEQ ID NO: 4333408 - DNA, 25 bp, Homo sapien
gcaaactctttaagggtaagatatc

SEQ ID NO: 4333409 - DNA, 25 bp, Homo sapien
gccaagtagtttgcaaactctttaa

SEQ ID NO: 4333410 - DNA, 25 bp, Homo sapien
gggtaagatatccagtacagtgcat

SEQ ID NO: 4333411 - DNA, 25 bp, Homo sapien
ccacaatctcttgtttgggagataa

SEQ ID NO: 4333412 - DNA, 25 bp, Homo sapien
tggagaacaaaagcgtcagcccagg

SEQ ID NO: 4333413 - DNA, 25 bp, Homo sapien
cgaacacccgggagttcgctttcat

SEQ ID NO: 4333414 - DNA, 25 bp, Homo sapien
tggcctcagccgctgagaccctggg

SEQ ID NO: 4333415 - DNA, 25 bp, Homo sapien
tggaggcggcaaaaagcactttagc

SEQ ID NO: 4333416 - DNA, 25 bp, Homo sapien
gcactttagcattcttcgggctgtt

SEQ ID NO: 4333417 - DNA, 25 bp, Homo sapien
ggctgtttgcgcctctttctctaac

SEQ ID NO: 4333418 - DNA, 25 bp, Homo sapien
ctttgtcagcaaaagcggacctttg

SEQ ID NO: 4333419 - DNA, 25 bp, Homo sapien
tgtcaaattgcaaaccacagggcat

SEQ ID NO: 4333420 - DNA, 25 bp, Homo sapien
gctgtcaaattgcaaaccacagggc

SEQ ID NO: 4333421 - DNA, 25 bp, Homo sapien
ctgtcaaattgcaaaccacagggca

SEQ ID NO: 4333422 - DNA, 25 bp, Homo sapien
gaaagtgccactaaagcttccactg

SEQ ID NO: 4333423 - DNA, 25 bp, Homo sapien
gaggagcctaaacaagccgatgtgc

SEQ ID NO: 4333424 - DNA, 25 bp, Homo sapien
tgatgagcccggcaaagcaggagaa

SEQ ID NO: 4333425 - DNA, 25 bp, Homo sapien
gcaggagaaactccttccgaggaga

SEQ ID NO: 4333426 - DNA, 25 bp, Homo sapien
ggatgtggatagagattctttactt

SEQ ID NO: 4333427 - DNA, 25 bp, Homo sapien
gatgtggatagagattctttacttc

SEQ ID NO: 4333428 - DNA, 25 bp, Homo sapien
gggatgtggatagagattctttact

SEQ ID NO: 4333429 - DNA, 25 bp, Homo sapien
cagaattacactggtgccctctgct

SEQ ID NO: 4333430 - DNA, 25 bp, Homo sapien
ttcctggagagtgacgcctgacacg

SEQ ID NO: 4333431 - DNA, 25 bp, Homo sapien
tggaggtggcgattccaggcccact

SEQ ID NO: 4333432 - DNA, 25 bp, Homo sapien
caatggtgtcctcgtcttttcaaca

SEQ ID NO: 4333433 - DNA, 25 bp, Homo sapien
taagtatggacctaaataattaaca

SEQ ID NO: 4333434 - DNA, 25 bp, Homo sapien
taattaacatcaaatacacgaggta

SEQ ID NO: 4333435 - DNA, 25 bp, Homo sapien
ggaggtcggtgctaacttcaatcat

SEQ ID NO: 4333436 - DNA, 25 bp, Homo sapien
tgtagaaaatccttcgtggagggtg

SEQ ID NO: 4333437 - DNA, 25 bp, Homo sapien
gccgctgctgcatatgctcctggta

SEQ ID NO: 4333438 - DNA, 25 bp, Homo sapien
gctcctggtatttgctcaccaacag

SEQ ID NO: 4333439 - DNA, 25 bp, Homo sapien
tggctgagcgcacaagcagccgctg

SEQ ID NO: 4333440 - DNA, 25 bp, Homo sapien
gcaatggcagctgggaacatcgcca

SEQ ID NO: 4333441 - DNA, 25 bp, Homo sapien
aatgaatggaatgcataaaggcaag

SEQ ID NO: 4333442 - DNA, 25 bp, Homo sapien
tcaaggaaatgaatggaatgcataa

SEQ ID NO: 4333443 - DNA, 25 bp, Homo sapien
taaaggcaagaactgcttccaaact

SEQ ID NO: 4333444 - DNA, 25 bp, Homo sapien
atggaatgcataaaggcaagaactg

SEQ ID NO: 4333445 - DNA, 25 bp, Homo sapien
gaggagtccaaaatatcgagtgaat

SEQ ID NO: 4333446 - DNA, 25 bp, Homo sapien
tcctgtcctgctcacgtctgtgagt

SEQ ID NO: 4333447 - DNA, 25 bp, Homo sapien
tatttgatctggtgcgtgtggccct

SEQ ID NO: 4333448 - DNA, 25 bp, Homo sapien
gtgtgcaatgttccgttcatctgag

SEQ ID NO: 4333449 - DNA, 25 bp, Homo sapien
gaataaaactgggtctatcaaacca

SEQ ID NO: 4333450 - DNA, 25 bp, Homo sapien
cagggttgcacttgggaagagtaca

SEQ ID NO: 4333451 - DNA, 25 bp, Homo sapien
tattgtttatatgccacctggtctg

SEQ ID NO: 4333452 - DNA, 25 bp, Homo sapien
tacagttatgaaactagacgtggtc

SEQ ID NO: 4333453 - DNA, 25 bp, Homo sapien
tttgtcagatggagagattgaaaaa

SEQ ID NO: 4333454 - DNA, 25 bp, Homo sapien
acctttgtcagatggagagattgaa

SEQ ID NO: 4333455 - DNA, 25 bp, Homo sapien
cagatggagagattgaaaaattttc

SEQ ID NO: 4333456 - DNA, 25 bp, Homo sapien
tgtcagatggagagattgaaaaatt

SEQ ID NO: 4333457 - DNA, 25 bp, Homo sapien
ctgtcttattttagcaagatagtgt

SEQ ID NO: 4333458 - DNA, 25 bp, Homo sapien
cattttatgatggttcttaacttct

SEQ ID NO: 4333459 - DNA, 25 bp, Homo sapien
ggtaccctaatcagttataggttca

SEQ ID NO: 4333460 - DNA, 25 bp, Homo sapien
taacttctttgcactgggatagaac

SEQ ID NO: 4333461 - DNA, 25 bp, Homo sapien
tgacaccgggtgagcagccgtccgc

SEQ ID NO: 4333462 - DNA, 25 bp, Homo sapien
tgtcagccgcggtgacgggtgacac

SEQ ID NO: 4333463 - DNA, 25 bp, Homo sapien
aatcgtttgcttattctctgcgccc

SEQ ID NO: 4333464 - DNA, 25 bp, Homo sapien
gcccgcactcatcagaaatcgtttg

SEQ ID NO: 4333465 - DNA, 25 bp, Homo sapien
tggctgggctacatgactcatcagg

SEQ ID NO: 4333466 - DNA, 25 bp, Homo sapien
aagtctttgtgtcttgggagtgcca

SEQ ID NO: 4333467 - DNA, 25 bp, Homo sapien
tcatcaggcctggtaggttcagggc

SEQ ID NO: 4333468 - DNA, 25 bp, Homo sapien
ccttgactcacttcttggctgggct

SEQ ID NO: 4333469 - DNA, 25 bp, Homo sapien
catgattgttaatatagagcctggg

SEQ ID NO: 4333470 - DNA, 25 bp, Homo sapien
ggacttaaagtccaagtgagaggtg

SEQ ID NO: 4333471 - DNA, 25 bp, Homo sapien
tatatctgggtaaatcaatgctgct

SEQ ID NO: 4333472 - DNA, 25 bp, Homo sapien
ctcttgcacctaggaagtatcttca

SEQ ID NO: 4333473 - DNA, 25 bp, Homo sapien
ttctcttaacctgacctgcatcctc

SEQ ID NO: 4333474 - DNA, 25 bp, Homo sapien
agggttggaactgcactatttctct

SEQ ID NO: 4333475 - DNA, 25 bp, Homo sapien
atttctcttaacctgacctgcatcc

SEQ ID NO: 4333476 - DNA, 25 bp, Homo sapien
tttctcttaacctgacctgcatcct

SEQ ID NO: 4333477 - DNA, 25 bp, Homo sapien
taaaaggtgagttagaagatgtccc

SEQ ID NO: 4333478 - DNA, 25 bp, Homo sapien
tctctggtagcacctgagaatggtt

SEQ ID NO: 4333479 - DNA, 25 bp, Homo sapien
gcacctgagaatggttgggtttgta

SEQ ID NO: 4333480 - DNA, 25 bp, Homo sapien
ccctcaatgaacgttctcagacaca

SEQ ID NO: 4333481 - DNA, 25 bp, Homo sapien
tagatcctcaacagtttgaaatcca

SEQ ID NO: 4333482 - DNA, 25 bp, Homo sapien
aatccattgaccaggacatagcttt

SEQ ID NO: 4333483 - DNA, 25 bp, Homo sapien
gatatcccaattggccagtagccag

SEQ ID NO: 4333484 - DNA, 25 bp, Homo sapien
agctttgactgataaaaggatatcc

SEQ ID NO: 4333485 - DNA, 25 bp, Homo sapien
gagagtatatgggtttggcagcatg

SEQ ID NO: 4333486 - DNA, 25 bp, Homo sapien
tgaaagcgaagagaggctgggatta

SEQ ID NO: 4333487 - DNA, 25 bp, Homo sapien
agagtatatgggtttggcagcatgg

SEQ ID NO: 4333488 - DNA, 25 bp, Homo sapien
ctgggattaagggtgcaaaggaata

SEQ ID NO: 4333489 - DNA, 25 bp, Homo sapien
tctaggggtcttccaaggcgatcgg

SEQ ID NO: 4333490 - DNA, 25 bp, Homo sapien
gggacgggcttaccttccactgtga

SEQ ID NO: 4333491 - DNA, 25 bp, Homo sapien
taggggtcttccaaggcgatcgggc

SEQ ID NO: 4333492 - DNA, 25 bp, Homo sapien
ggtctaggggtcttccaaggcgatc

SEQ ID NO: 4333493 - DNA, 25 bp, Homo sapien
cacacagatgggacgtggcttagga

SEQ ID NO: 4333494 - DNA, 25 bp, Homo sapien
ggtcccacacagatgggacgtggct

SEQ ID NO: 4333495 - DNA, 25 bp, Homo sapien
tcccacacagatgggacgtggctta

SEQ ID NO: 4333496 - DNA, 25 bp, Homo sapien
ccacacagatgggacgtggcttagg

SEQ ID NO: 4333497 - DNA, 25 bp, Homo sapien
aagtagatccaggagcactgcccaa

SEQ ID NO: 4333498 - DNA, 25 bp, Homo sapien
tgcagcgtgccatgaagctaggact

SEQ ID NO: 4333499 - DNA, 25 bp, Homo sapien
gaagatcagttcatgtctacagggc

SEQ ID NO: 4333500 - DNA, 25 bp, Homo sapien
cacagagctagtacccagggaaaaa

SEQ ID NO: 4333501 - DNA, 25 bp, Homo sapien
cagcacaagcaaagagtttccaaag

SEQ ID NO: 4333502 - DNA, 25 bp, Homo sapien
aatgaggtacttggcccaggatgac

SEQ ID NO: 4333503 - DNA, 25 bp, Homo sapien
cacacatttactgtaatgaggtact

SEQ ID NO: 4333504 - DNA, 25 bp, Homo sapien
tttcttatgcacaatgtcctcattt

SEQ ID NO: 4333505 - DNA, 25 bp, Homo sapien
acagcaacagttgggacaatctcca

SEQ ID NO: 4333506 - DNA, 25 bp, Homo sapien
ttttagagacgtcagccgaatccct

SEQ ID NO: 4333507 - DNA, 25 bp, Homo sapien
tggatacagcagacatatagccctt

SEQ ID NO: 4333508 - DNA, 25 bp, Homo sapien
tcgggtgagacaactacagcaacag

SEQ ID NO: 4333509 - DNA, 25 bp, Homo sapien
tagtaaaccttagcagtagttgggc

SEQ ID NO: 4333510 - DNA, 25 bp, Homo sapien
caaggtctctataagtagccccagt

SEQ ID NO: 4333511 - DNA, 25 bp, Homo sapien
tgcccatggcaagcgagaagtctgt

SEQ ID NO: 4333512 - DNA, 25 bp, Homo sapien
tcaagatcctgctagagacacaggc

SEQ ID NO: 4333513 - DNA, 25 bp, Homo sapien
aactgagggaacaaacggtgctgac

SEQ ID NO: 4333514 - DNA, 25 bp, Homo sapien
tataattaaggcctgtgacatgcca

SEQ ID NO: 4333515 - DNA, 25 bp, Homo sapien
tgctgcataggaatatggctcacct

SEQ ID NO: 4333516 - DNA, 25 bp, Homo sapien
gaccttgtcctcatgataaagtgga

SEQ ID NO: 4333517 - DNA, 25 bp, Homo sapien
gcataggataacagtggaccaccat

SEQ ID NO: 4333518 - DNA, 25 bp, Homo sapien
cagaacagggattatgcaggcaacc

SEQ ID NO: 4333519 - DNA, 25 bp, Homo sapien
gcaattcttagcaccctggcatagg

SEQ ID NO: 4333520 - DNA, 25 bp, Homo sapien
cactgggagttgacacttggagacc

SEQ ID NO: 4333521 - DNA, 25 bp, Homo sapien
atattctgagtgactccccactcgg

SEQ ID NO: 4333522 - DNA, 25 bp, Homo sapien
actaggaggaatatggggtcctgcc

SEQ ID NO: 4333523 - DNA, 25 bp, Homo sapien
ccccactcggttctgatgatgggac

SEQ ID NO: 4333524 - DNA, 25 bp, Homo sapien
tagtaggcactttcatttacagtga

SEQ ID NO: 4333525 - DNA, 25 bp, Homo sapien
gatagtctgaagtggctacaagtca

SEQ ID NO: 4333526 - DNA, 25 bp, Homo sapien
gcatttgcggcatgactagtgctct

SEQ ID NO: 4333527 - DNA, 25 bp, Homo sapien
tacacccacgtgagagcgaaagact

SEQ ID NO: 4333528 - DNA, 25 bp, Homo sapien
cagccatggatgtagggaggactct

SEQ ID NO: 4333529 - DNA, 25 bp, Homo sapien
tatttcccccttcatgtataaacac

SEQ ID NO: 4333530 - DNA, 25 bp, Homo sapien
tcactttcttatttcccccttcatg

SEQ ID NO: 4333531 - DNA, 25 bp, Homo sapien
tgaaataaacggtctcccccatctc

SEQ ID NO: 4333532 - DNA, 25 bp, Homo sapien
ttaatgatggactgtaaaattgttt

SEQ ID NO: 4333533 - DNA, 25 bp, Homo sapien
cggccagactgatggatccatttat

SEQ ID NO: 4333534 - DNA, 25 bp, Homo sapien
agtggtacggccagactgatggatc

SEQ ID NO: 4333535 - DNA, 25 bp, Homo sapien
ggtacggccagactgatggatccat

SEQ ID NO: 4333536 - DNA, 25 bp, Homo sapien
agactgatggatccatttattcctc

SEQ ID NO: 4333537 - DNA, 25 bp, Homo sapien
ttcccaatgtggacacaatttgggg

SEQ ID NO: 4333538 - DNA, 25 bp, Homo sapien
atggccatccgtgtttcctgctgcc

SEQ ID NO: 4333539 - DNA, 25 bp, Homo sapien
tgctgccaccttagttttcccaatg

SEQ ID NO: 4333540 - DNA, 25 bp, Homo sapien
ccagattaacctggaatggccatcc

SEQ ID NO: 4333541 - DNA, 25 bp, Homo sapien
tcaaggcttttaatgttgactcaag

SEQ ID NO: 4333542 - DNA, 25 bp, Homo sapien
caaggcttttaatgttgactcaagg

SEQ ID NO: 4333543 - DNA, 25 bp, Homo sapien
ggtcaaggcttttaatgttgactca

SEQ ID NO: 4333544 - DNA, 25 bp, Homo sapien
gggtcaaggcttttaatgttgactc

SEQ ID NO: 4333545 - DNA, 25 bp, Homo sapien
tttgcttgaagtgcacggtggtacc

SEQ ID NO: 4333546 - DNA, 25 bp, Homo sapien
ttgaagtgcacggtggtaccaattt

SEQ ID NO: 4333547 - DNA, 25 bp, Homo sapien
tgcttgaagtgcacggtggtaccaa

SEQ ID NO: 4333548 - DNA, 25 bp, Homo sapien
ctttttgcttgaagtgcacggtggt

SEQ ID NO: 4333549 - DNA, 25 bp, Homo sapien
caatggtctctagctgttgacgact

SEQ ID NO: 4333550 - DNA, 25 bp, Homo sapien
tctaaccactgatgttttaagttgt

SEQ ID NO: 4333551 - DNA, 25 bp, Homo sapien
tctgtatatgtctcatcatctaacc

SEQ ID NO: 4333552 - DNA, 25 bp, Homo sapien
gtttcctttcataatacgagctttg

SEQ ID NO: 4333553 - DNA, 25 bp, Homo sapien
tagatcttagctcctgatgaggtgg

SEQ ID NO: 4333554 - DNA, 25 bp, Homo sapien
gccacattagcctgcaccattaaaa

SEQ ID NO: 4333555 - DNA, 25 bp, Homo sapien
gcaagtgcctcgagacatttattta

SEQ ID NO: 4333556 - DNA, 25 bp, Homo sapien
tcagattcattacacccagccacat

SEQ ID NO: 4333557 - DNA, 25 bp, Homo sapien
caggaaaaggtccaaattcagtagg

SEQ ID NO: 4333558 - DNA, 25 bp, Homo sapien
aaaattctgggccagagttagtaag

SEQ ID NO: 4333559 - DNA, 25 bp, Homo sapien
tgggacaggaaaaggtccaaattca

SEQ ID NO: 4333560 - DNA, 25 bp, Homo sapien
gagtgtgtgtttgcagaagtgggac

SEQ ID NO: 4333561 - DNA, 25 bp, Homo sapien
gatgtactgggtattgtcgtataaa

SEQ ID NO: 4333562 - DNA, 25 bp, Homo sapien
cagaggcttgatgtactgggtattg

SEQ ID NO: 4333563 - DNA, 25 bp, Homo sapien
cgtataaagtaagtataggtgcatg

SEQ ID NO: 4333564 - DNA, 25 bp, Homo sapien
taggtgcatgatttgactttaacca

SEQ ID NO: 4333565 - DNA, 25 bp, Homo sapien
ctaccgcagtgcagaacttggtaaa

SEQ ID NO: 4333566 - DNA, 25 bp, Homo sapien
gttctgctttggactacttccagca

SEQ ID NO: 4333567 - DNA, 25 bp, Homo sapien
ctctattgcactaactaccgcagtg

SEQ ID NO: 4333568 - DNA, 25 bp, Homo sapien
cactaactaccgcagtgcagaactt

SEQ ID NO: 4333569 - DNA, 25 bp, Homo sapien
tggctagtaaccagtgtttagaagt

SEQ ID NO: 4333570 - DNA, 25 bp, Homo sapien
gaatgtcaatactatcaaaaccttt

SEQ ID NO: 4333571 - DNA, 25 bp, Homo sapien
ggctgcaatgactgtataagggaaa

SEQ ID NO: 4333572 - DNA, 25 bp, Homo sapien
tttagaagtgaatgtcaatactatc

SEQ ID NO: 4333573 - DNA, 25 bp, Homo sapien
ctattgttcccataaacgagccagg

SEQ ID NO: 4333574 - DNA, 25 bp, Homo sapien
gagaaaacctccctattacactgtg

SEQ ID NO: 4333575 - DNA, 25 bp, Homo sapien
tgaaattagatgtaccgatgccaga

SEQ ID NO: 4333576 - DNA, 25 bp, Homo sapien
tatgaagggcatccgctgaaagtgt

SEQ ID NO: 4333577 - DNA, 25 bp, Homo sapien
ctctcctctaactgtagataggata

SEQ ID NO: 4333578 - DNA, 25 bp, Homo sapien
tgatttcaagaatgtattactggga

SEQ ID NO: 4333579 - DNA, 25 bp, Homo sapien
tagataggatatggctgttctgatg

SEQ ID NO: 4333580 - DNA, 25 bp, Homo sapien
tgagggcaggtacgccctctcctct

SEQ ID NO: 4333581 - DNA, 25 bp, Homo sapien
gatatttgggtacttaactggcacc

SEQ ID NO: 4333582 - DNA, 25 bp, Homo sapien
tggtgccatgcctgaacctgaaaga

SEQ ID NO: 4333583 - DNA, 25 bp, Homo sapien
gaacctacggtcctcaatgtgagaa

SEQ ID NO: 4333584 - DNA, 25 bp, Homo sapien
gagaatgtctctgggtgcacttcca

SEQ ID NO: 4333585 - DNA, 25 bp, Homo sapien
cttgaatggggtgggggattgtggg

SEQ ID NO: 4333586 - DNA, 25 bp, Homo sapien
tacggctgaaaatgcgctgacacac

SEQ ID NO: 4333587 - DNA, 25 bp, Homo sapien
tcactgtggtggatacggctgaaaa

SEQ ID NO: 4333588 - DNA, 25 bp, Homo sapien
tggtggatacggctgaaaatgcgct

SEQ ID NO: 4333589 - DNA, 25 bp, Homo sapien
tggatacggctgaaaatgcgctgac

SEQ ID NO: 4333590 - DNA, 25 bp, Homo sapien
gaagatgaataatcgccaactcttc

SEQ ID NO: 4333591 - DNA, 25 bp, Homo sapien
gctggcagaggctcacgagctgcct

SEQ ID NO: 4333592 - DNA, 25 bp, Homo sapien
atgaataatcgccaactcttcaggg

SEQ ID NO: 4333593 - DNA, 25 bp, Homo sapien
gaggctcacgagctgcctgttcttc

SEQ ID NO: 4333594 - DNA, 25 bp, Homo sapien
cacacagtgcttccgtcagggccgt

SEQ ID NO: 4333595 - DNA, 25 bp, Homo sapien
tgcccacacagtgcttccgtcaggg

SEQ ID NO: 4333596 - DNA, 25 bp, Homo sapien
cagtgcttccgtcagggccgtggcc

SEQ ID NO: 4333597 - DNA, 25 bp, Homo sapien
ctgcccacacagtgcttccgtcagg

SEQ ID NO: 4333598 - DNA, 25 bp, Homo sapien
caggtcaactcagatttggtaaatc

SEQ ID NO: 4333599 - DNA, 25 bp, Homo sapien
gaatgttgttctgcttaaccaggtc

SEQ ID NO: 4333600 - DNA, 25 bp, Homo sapien
ttttaagtgaatgttgttctgctta

SEQ ID NO: 4333601 - DNA, 25 bp, Homo sapien
gcttaaccaggtcaactcagatttg

SEQ ID NO: 4333602 - DNA, 25 bp, Homo sapien
tcagcatgggctaacttttcggttt

SEQ ID NO: 4333603 - DNA, 25 bp, Homo sapien
gaagtatattctcaagcgtcttagg

SEQ ID NO: 4333604 - DNA, 25 bp, Homo sapien
gctcatagtcacctgcccaacaagg

SEQ ID NO: 4333605 - DNA, 25 bp, Homo sapien
tacaaatgagaaactaaaggccgaa

SEQ ID NO: 4333606 - DNA, 25 bp, Homo sapien
gcttttacatcacctctgcttctta

SEQ ID NO: 4333607 - DNA, 25 bp, Homo sapien
aagactatagagagaagttgttcca

SEQ ID NO: 4333608 - DNA, 25 bp, Homo sapien
taatagctaagggaatggttttcac

SEQ ID NO: 4333609 - DNA, 25 bp, Homo sapien
tataaatctctgctatgcacaggag

SEQ ID NO: 4333610 - DNA, 25 bp, Homo sapien
cgtcagggaagactggccctccgtg

SEQ ID NO: 4333611 - DNA, 25 bp, Homo sapien
tccgtgctcttaatctcaaggccat

SEQ ID NO: 4333612 - DNA, 25 bp, Homo sapien
cagtgacgttggtcaccgtcaggga

SEQ ID NO: 4333613 - DNA, 25 bp, Homo sapien
acaggtgtagttgccgtagtgctcc

SEQ ID NO: 4333614 - DNA, 25 bp, Homo sapien
tgccgaggcctcacatttgagtgaa

SEQ ID NO: 4333615 - DNA, 25 bp, Homo sapien
tggtggcttcattgctcttggattc

SEQ ID NO: 4333616 - DNA, 25 bp, Homo sapien
tgagtgaagcttgtcgtcctgtggt

SEQ ID NO: 4333617 - DNA, 25 bp, Homo sapien
ggtaccactcaaagtcaggtgcagg

SEQ ID NO: 4333618 - DNA, 25 bp, Homo sapien
acctgctggctcctgccgtactcac

SEQ ID NO: 4333619 - DNA, 25 bp, Homo sapien
cacctgctggctcctgccgtactca

SEQ ID NO: 4333620 - DNA, 25 bp, Homo sapien
agcacctgctggctcctgccgtact

SEQ ID NO: 4333621 - DNA, 25 bp, Homo sapien
ctagcacctgctggctcctgccgta

SEQ ID NO: 4333622 - DNA, 25 bp, Homo sapien
gacctcgttggcagctttgcactca

SEQ ID NO: 4333623 - DNA, 25 bp, Homo sapien
ttgcactcatatttgcctgactgct

SEQ ID NO: 4333624 - DNA, 25 bp, Homo sapien
agttcacagtgaccttgacttgttt

SEQ ID NO: 4333625 - DNA, 25 bp, Homo sapien
tgacttgtttgacatccgccgagga

SEQ ID NO: 4333626 - DNA, 25 bp, Homo sapien
aaaacagaggttttcatgattcttt

SEQ ID NO: 4333627 - DNA, 25 bp, Homo sapien
aaacagaggttttcatgattctttt

SEQ ID NO: 4333628 - DNA, 25 bp, Homo sapien
ctaagcagaacaggactagcctcaa

SEQ ID NO: 4333629 - DNA, 25 bp, Homo sapien
aaaacttcccaggacatgacaacca

SEQ ID NO: 4333630 - DNA, 25 bp, Homo sapien
tcaaatatttgctcactaagcagaa

SEQ ID NO: 4333631 - DNA, 25 bp, Homo sapien
aggactagcctcaaaaacttcccag

SEQ ID NO: 4333632 - DNA, 25 bp, Homo sapien
caatctgggctcaggatttttagcc

SEQ ID NO: 4333633 - DNA, 25 bp, Homo sapien
tcaatctgggctcaggatttttagc

SEQ ID NO: 4333634 - DNA, 25 bp, Homo sapien
cctcaatctgggctcaggattttta

SEQ ID NO: 4333635 - DNA, 25 bp, Homo sapien
ccctcaatctgggctcaggattttt

SEQ ID NO: 4333636 - DNA, 25 bp, Homo sapien
taggttaaccccagacacagaagcc

SEQ ID NO: 4333637 - DNA, 25 bp, Homo sapien
ttaggttaaccccagacacagaagc

SEQ ID NO: 4333638 - DNA, 25 bp, Homo sapien
gagttaggttaaccccagacacaga

SEQ ID NO: 4333639 - DNA, 25 bp, Homo sapien
aaccaggagcattatagagcagggc

SEQ ID NO: 4333640 - DNA, 25 bp, Homo sapien
tatgtcccatgagccaaatttgatc

SEQ ID NO: 4333641 - DNA, 25 bp, Homo sapien
tttgaatatgatgaacagtgcccag

SEQ ID NO: 4333642 - DNA, 25 bp, Homo sapien
gaacaaaaatcctgtagtgctaggc

SEQ ID NO: 4333643 - DNA, 25 bp, Homo sapien
tagaattttgccatcaagagaaaag

SEQ ID NO: 4333644 - DNA, 25 bp, Homo sapien
aattcatgatttgtgaactgacatc

SEQ ID NO: 4333645 - DNA, 25 bp, Homo sapien
tgacatccgggataacaaaacctta

SEQ ID NO: 4333646 - DNA, 25 bp, Homo sapien
ttccagttagaattttgccatcaag

SEQ ID NO: 4333647 - DNA, 25 bp, Homo sapien
agtggattctgcatcaggatgaaaa

SEQ ID NO: 4333648 - DNA, 25 bp, Homo sapien
taaaaatgtctaaagcagcacaaac

SEQ ID NO: 4333649 - DNA, 25 bp, Homo sapien
tcatggctatagatcctggagttaa

SEQ ID NO: 4333650 - DNA, 25 bp, Homo sapien
tctgcatcaggatgaaaacagctga

SEQ ID NO: 4333651 - DNA, 25 bp, Homo sapien
tgctggaaccttatggaaagcaatt

SEQ ID NO: 4333652 - DNA, 25 bp, Homo sapien
gggattcagtctgttcctctgacca

SEQ ID NO: 4333653 - DNA, 25 bp, Homo sapien
ccttatggaaagcaattagagcttc

SEQ ID NO: 4333654 - DNA, 25 bp, Homo sapien
ccactggaccttgaaaacaggtgct

SEQ ID NO: 4333655 - DNA, 25 bp, Homo sapien
tgcagactagacttcgaagagaagg

SEQ ID NO: 4333656 - DNA, 25 bp, Homo sapien
actagacttcgaagagaaggcagtt

SEQ ID NO: 4333657 - DNA, 25 bp, Homo sapien
ttatcatggttattgcaacatctag

SEQ ID NO: 4333658 - DNA, 25 bp, Homo sapien
tggttattgcaacatctagtttcct

SEQ ID NO: 4333659 - DNA, 25 bp, Homo sapien
tgaagttgcttataacctgaccttt

SEQ ID NO: 4333660 - DNA, 25 bp, Homo sapien
tggagtcctgttctgatcctccaaa

SEQ ID NO: 4333661 - DNA, 25 bp, Homo sapien
ctagatgtttgaccttctgtccggc

SEQ ID NO: 4333662 - DNA, 25 bp, Homo sapien
ctctttaggattccaaaccaagtca

SEQ ID NO: 4333663 - DNA, 25 bp, Homo sapien
ttgaccttctgtccggcacttctgt

SEQ ID NO: 4333664 - DNA, 25 bp, Homo sapien
cagtcaagagtgacataagctgttc

SEQ ID NO: 4333665 - DNA, 25 bp, Homo sapien
gcagcaatgtaagaatcctgcttct

SEQ ID NO: 4333666 - DNA, 25 bp, Homo sapien
ttcttccaatccccgtccagtacat

SEQ ID NO: 4333667 - DNA, 25 bp, Homo sapien
tgcttcttccaatccccgtccagta

SEQ ID NO: 4333668 - DNA, 25 bp, Homo sapien
cagcaatgtaagaatcctgcttctt

SEQ ID NO: 4333669 - DNA, 25 bp, Homo sapien
tccatgtggactctactgaaaccca

SEQ ID NO: 4333670 - DNA, 25 bp, Homo sapien
ccatcttggcaagggatactgtgtt

SEQ ID NO: 4333671 - DNA, 25 bp, Homo sapien
ctttgacaccaaccccactgggagg

SEQ ID NO: 4333672 - DNA, 25 bp, Homo sapien
ggtgtggaaagccagactctccatg

SEQ ID NO: 4333673 - DNA, 25 bp, Homo sapien
ctctctggccctctgatccttcagg

SEQ ID NO: 4333674 - DNA, 25 bp, Homo sapien
tggccctctgatccttcaggtcact

SEQ ID NO: 4333675 - DNA, 25 bp, Homo sapien
ctctgatccttcaggtcactggcca

SEQ ID NO: 4333676 - DNA, 25 bp, Homo sapien
tctgatccttcaggtcactggccat

SEQ ID NO: 4333677 - DNA, 25 bp, Homo sapien
tcttttagtgcatcaaatgaggaaa

SEQ ID NO: 4333678 - DNA, 25 bp, Homo sapien
gaaagataggaagactagtcaaaac

SEQ ID NO: 4333679 - DNA, 25 bp, Homo sapien
gctagttaggtagcgcttagctgta

SEQ ID NO: 4333680 - DNA, 25 bp, Homo sapien
ctgcaatgaagagtagaaagatagg

SEQ ID NO: 4333681 - DNA, 25 bp, Homo sapien
aactaagcttagtgatgcactgagc

SEQ ID NO: 4333682 - DNA, 25 bp, Homo sapien
aaacttttccctcatcaggataact

SEQ ID NO: 4333683 - DNA, 25 bp, Homo sapien
gggttttctgcaatattatctgcag

SEQ ID NO: 4333684 - DNA, 25 bp, Homo sapien
aattccttgtagatcagcaatttgg

SEQ ID NO: 4333685 - DNA, 25 bp, Homo sapien
gattggcttctgtggattcctgagc

SEQ ID NO: 4333686 - DNA, 25 bp, Homo sapien
ctgatcctgttccagattggcttct

SEQ ID NO: 4333687 - DNA, 25 bp, Homo sapien
ttggcttctgtggattcctgagccc

SEQ ID NO: 4333688 - DNA, 25 bp, Homo sapien
ggcttctgtggattcctgagcccat

SEQ ID NO: 4333689 - DNA, 25 bp, Homo sapien
gatatgatgacccacttatccagaa

SEQ ID NO: 4333690 - DNA, 25 bp, Homo sapien
ctttcttggaagatatgatgaccca

SEQ ID NO: 4333691 - DNA, 25 bp, Homo sapien
tggaagatatgatgacccacttatc

SEQ ID NO: 4333692 - DNA, 25 bp, Homo sapien
atgatgacccacttatccagaagag

SEQ ID NO: 4333693 - DNA, 25 bp, Homo sapien
tagaggctttttgtctactagctgt

SEQ ID NO: 4333694 - DNA, 25 bp, Homo sapien
tttttgtctactagctgtataccac

SEQ ID NO: 4333695 - DNA, 25 bp, Homo sapien
tctcaaaccataggatttccaaagg

SEQ ID NO: 4333696 - DNA, 25 bp, Homo sapien
tgagttatcaccttgttgtagaggc

SEQ ID NO: 4333697 - DNA, 25 bp, Homo sapien
ttctatgcagatgtgttttccagcc

SEQ ID NO: 4333698 - DNA, 25 bp, Homo sapien
ttaacgaggtaagggagctggcatc

SEQ ID NO: 4333699 - DNA, 25 bp, Homo sapien
gcaaatgctatttcagagggactgg

SEQ ID NO: 4333700 - DNA, 25 bp, Homo sapien
caatccccgggtctgcttttcagca

SEQ ID NO: 4333701 - DNA, 25 bp, Homo sapien
catgtctataatcaccacaattaca

SEQ ID NO: 4333702 - DNA, 25 bp, Homo sapien
ctcatgtctataatcaccacaatta

SEQ ID NO: 4333703 - DNA, 25 bp, Homo sapien
tgtctataatcaccacaattacagc

SEQ ID NO: 4333704 - DNA, 25 bp, Homo sapien
atgtctataatcaccacaattacag

SEQ ID NO: 4333705 - DNA, 25 bp, Homo sapien
tgaggaatctccattgcctaaaatc

SEQ ID NO: 4333706 - DNA, 25 bp, Homo sapien
tcatgtaaccttggattgaacttcc

SEQ ID NO: 4333707 - DNA, 25 bp, Homo sapien
ggagtactatggttccacgaatagt

SEQ ID NO: 4333708 - DNA, 25 bp, Homo sapien
tcaaagaacatgaggtcccttggag

SEQ ID NO: 4333709 - DNA, 25 bp, Homo sapien
taaatccagtctaaggcaaagtatg

SEQ ID NO: 4333710 - DNA, 25 bp, Homo sapien
tatgaatagcttgccagagaggtca

SEQ ID NO: 4333711 - DNA, 25 bp, Homo sapien
cagcctctccagttaccagtagtgc

SEQ ID NO: 4333712 - DNA, 25 bp, Homo sapien
gctgcccctgccaataccaaaatat

SEQ ID NO: 4333713 - DNA, 25 bp, Homo sapien
cttgtgggcaacgatgatgaggctt

SEQ ID NO: 4333714 - DNA, 25 bp, Homo sapien
aaatcccttgaaaagcgatgccagg

SEQ ID NO: 4333715 - DNA, 25 bp, Homo sapien
gaatcttccgaatcacaagcagcag

SEQ ID NO: 4333716 - DNA, 25 bp, Homo sapien
catattcagtgacaggaatcttccg

SEQ ID NO: 4333717 - DNA, 25 bp, Homo sapien
tcatgggcttttgagttgaccaact

SEQ ID NO: 4333718 - DNA, 25 bp, Homo sapien
cagacaaagccgcaatcttgtgact

SEQ ID NO: 4333719 - DNA, 25 bp, Homo sapien
tgcatgaaatgaaacgaaggcaggt

SEQ ID NO: 4333720 - DNA, 25 bp, Homo sapien
cagtcaactgcagacaaagccgcaa

SEQ ID NO: 4333721 - DNA, 25 bp, Homo sapien
ttatttccttccctgaacatctctt

SEQ ID NO: 4333722 - DNA, 25 bp, Homo sapien
tccttccctgaacatctcttggaac

SEQ ID NO: 4333723 - DNA, 25 bp, Homo sapien
tctggcccctttgcttctgacaacc

SEQ ID NO: 4333724 - DNA, 25 bp, Homo sapien
ctttctggctcagacaatttttatt

SEQ ID NO: 4333725 - DNA, 25 bp, Homo sapien
ttattgtgctggaatgaaggataga

SEQ ID NO: 4333726 - DNA, 25 bp, Homo sapien
tattgtgctggaatgaaggatagac

SEQ ID NO: 4333727 - DNA, 25 bp, Homo sapien
ctggtcttttgttgacttgaaacat

SEQ ID NO: 4333728 - DNA, 25 bp, Homo sapien
tggtcttttgttgacttgaaacatc

SEQ ID NO: 4333729 - DNA, 25 bp, Homo sapien
cagcttagtccatgtctgatgcaca

SEQ ID NO: 4333730 - DNA, 25 bp, Homo sapien
tagctgggactcataatgagttcat

SEQ ID NO: 4333731 - DNA, 25 bp, Homo sapien
ctgatgcacagaaccagatgccaag

SEQ ID NO: 4333732 - DNA, 25 bp, Homo sapien
caagggcaggacaataaaagtcaga

SEQ ID NO: 4333733 - DNA, 25 bp, Homo sapien
ttcaggacggccattggccatgcag

SEQ ID NO: 4333734 - DNA, 25 bp, Homo sapien
ccatgcagaccagagtcacgttgct

SEQ ID NO: 4333735 - DNA, 25 bp, Homo sapien
cagtgacatccgaggagatattgga

SEQ ID NO: 4333736 - DNA, 25 bp, Homo sapien
tgtctccaggtgataacaggttcag

SEQ ID NO: 4333737 - DNA, 25 bp, Homo sapien
ttgtttgagctgtccctgagaaagt

SEQ ID NO: 4333738 - DNA, 25 bp, Homo sapien
tgtttgagctgtccctgagaaagta

SEQ ID NO: 4333739 - DNA, 25 bp, Homo sapien
gagctgtccctgagaaagtatgtgt

SEQ ID NO: 4333740 - DNA, 25 bp, Homo sapien
tttgagctgtccctgagaaagtatg

SEQ ID NO: 4333741 - DNA, 25 bp, Homo sapien
gagactctgtgtagtgacgaataaa

SEQ ID NO: 4333742 - DNA, 25 bp, Homo sapien
agactctgtgtagtgacgaataaaa

SEQ ID NO: 4333743 - DNA, 25 bp, Homo sapien
gactctgtgtagtgacgaataaaac

SEQ ID NO: 4333744 - DNA, 25 bp, Homo sapien
agagactctgtgtagtgacgaataa

SEQ ID NO: 4333745 - DNA, 25 bp, Homo sapien
ggtacttgggcaactgactggttca

SEQ ID NO: 4333746 - DNA, 25 bp, Homo sapien
tcagcattccactcttgtagggcct

SEQ ID NO: 4333747 - DNA, 25 bp, Homo sapien
tggttcagagtgtcacaaggaggaa

SEQ ID NO: 4333748 - DNA, 25 bp, Homo sapien
gatccctgcaaatcttcattaggag

SEQ ID NO: 4333749 - DNA, 25 bp, Homo sapien
ggcagactgtgttaatggcctcaaa

SEQ ID NO: 4333750 - DNA, 25 bp, Homo sapien
gcttttgccaacaggatgtcagcat

SEQ ID NO: 4333751 - DNA, 25 bp, Homo sapien
cacagctattggtttgttgggactc

SEQ ID NO: 4333752 - DNA, 25 bp, Homo sapien
caaggagtgggtacaagacctaagc

SEQ ID NO: 4333753 - DNA, 25 bp, Homo sapien
tgtacaggagggtaatgtgaacaaa

SEQ ID NO: 4333754 - DNA, 25 bp, Homo sapien
ggctgtacaggagggtaatgtgaac

SEQ ID NO: 4333755 - DNA, 25 bp, Homo sapien
ctgtacaggagggtaatgtgaacaa

SEQ ID NO: 4333756 - DNA, 25 bp, Homo sapien
gctgtacaggagggtaatgtgaaca

SEQ ID NO: 4333757 - DNA, 25 bp, Homo sapien
ttaacttgtttactgggaactgcac

SEQ ID NO: 4333758 - DNA, 25 bp, Homo sapien
cattctgggctacattgcctttggg

SEQ ID NO: 4333759 - DNA, 25 bp, Homo sapien
aactgcacctggtagaggcatctcc

SEQ ID NO: 4333760 - DNA, 25 bp, Homo sapien
gtggtccaatcagaacccattaagc

SEQ ID NO: 4333761 - DNA, 25 bp, Homo sapien
tgcaggttccatgtgactcgtcact

SEQ ID NO: 4333762 - DNA, 25 bp, Homo sapien
tagcctcccgtacatttggcatgca

SEQ ID NO: 4333763 - DNA, 25 bp, Homo sapien
gccagcacaaaagggttgattagtg

SEQ ID NO: 4333764 - DNA, 25 bp, Homo sapien
gcaaggtgaatgacggtgacctccc

SEQ ID NO: 4333765 - DNA, 25 bp, Homo sapien
actagctttgggcagacagaatcca

SEQ ID NO: 4333766 - DNA, 25 bp, Homo sapien
gagcaatggcttcttgaccagatct

SEQ ID NO: 4333767 - DNA, 25 bp, Homo sapien
ccactagctttgggcagacagaatc

SEQ ID NO: 4333768 - DNA, 25 bp, Homo sapien
cactagctttgggcagacagaatcc

SEQ ID NO: 4333769 - DNA, 25 bp, Homo sapien
ctgcccacccagaaagcgatgaggg

SEQ ID NO: 4333770 - DNA, 25 bp, Homo sapien
ccagaaagcgatgagggcctctctt

SEQ ID NO: 4333771 - DNA, 25 bp, Homo sapien
cccacccagaaagcgatgagggcct

SEQ ID NO: 4333772 - DNA, 25 bp, Homo sapien
cacccagaaagcgatgagggcctct

SEQ ID NO: 4333773 - DNA, 25 bp, Homo sapien
gagagggcctgcactcatccattct

SEQ ID NO: 4333774 - DNA, 25 bp, Homo sapien
tgctcgtgtgctcccagaccaattt

SEQ ID NO: 4333775 - DNA, 25 bp, Homo sapien
catccattctggtagcaaacaagtc

SEQ ID NO: 4333776 - DNA, 25 bp, Homo sapien
tcagtgtgacatcgttcaaggtgct

SEQ ID NO: 4333777 - DNA, 25 bp, Homo sapien
gatatctagctcctgaaaattctga

SEQ ID NO: 4333778 - DNA, 25 bp, Homo sapien
aaataattatcaccttcgttctact

SEQ ID NO: 4333779 - DNA, 25 bp, Homo sapien
tagctctgcttcttttggaaccccc

SEQ ID NO: 4333780 - DNA, 25 bp, Homo sapien
tggaagagttgtggcagaagatatc

SEQ ID NO: 4333781 - DNA, 25 bp, Homo sapien
cagtttccttccaacatctaatttt

SEQ ID NO: 4333782 - DNA, 25 bp, Homo sapien
tttctcttcattttgagcatacttt

SEQ ID NO: 4333783 - DNA, 25 bp, Homo sapien
cttcattttgagcatactttaaacc

SEQ ID NO: 4333784 - DNA, 25 bp, Homo sapien
cattttgagcatactttaaaccact

SEQ ID NO: 4333785 - DNA, 25 bp, Homo sapien
tcatagatggctgacttttcacttt

SEQ ID NO: 4333786 - DNA, 25 bp, Homo sapien
acagtagtgtctttatgcaggctgc

SEQ ID NO: 4333787 - DNA, 25 bp, Homo sapien
ccatagacagtgacttatacaacag

SEQ ID NO: 4333788 - DNA, 25 bp, Homo sapien
cataagtgagggtcgagcctaatca

SEQ ID NO: 4333789 - DNA, 25 bp, Homo sapien
tgaaatgtggacctcatacagcagc

SEQ ID NO: 4333790 - DNA, 25 bp, Homo sapien
gccgggcggcattcttgaacaggtt

SEQ ID NO: 4333791 - DNA, 25 bp, Homo sapien
caatcatgggccatttggccgggcg

SEQ ID NO: 4333792 - DNA, 25 bp, Homo sapien
gccttccagtagagaacaccagctg

SEQ ID NO: 4333793 - DNA, 25 bp, Homo sapien
catattgacaaggaggaaaatcccc

SEQ ID NO: 4333794 - DNA, 25 bp, Homo sapien
tataagctcactggtacaagtgcca

SEQ ID NO: 4333795 - DNA, 25 bp, Homo sapien
aaagcctggatctcatgctgaagcc

SEQ ID NO: 4333796 - DNA, 25 bp, Homo sapien
tactgggtggtaatgtctgcctccc

SEQ ID NO: 4333797 - DNA, 25 bp, Homo sapien
gcatttatgttctctccattgttta

SEQ ID NO: 4333798 - DNA, 25 bp, Homo sapien
caagaattatttcgttctattgtaa

SEQ ID NO: 4333799 - DNA, 25 bp, Homo sapien
gataaatgcacaagttaccaaacta

SEQ ID NO: 4333800 - DNA, 25 bp, Homo sapien
taaagttggttatttatgcctgtcc

SEQ ID NO: 4333801 - DNA, 25 bp, Homo sapien
cagctgtggcttttgccgtgtgttt

SEQ ID NO: 4333802 - DNA, 25 bp, Homo sapien
gcttttgccgtgtgttttcacactc

SEQ ID NO: 4333803 - DNA, 25 bp, Homo sapien
ctaggcattctgtgtgttctggtat

SEQ ID NO: 4333804 - DNA, 25 bp, Homo sapien
attctgtgtgttctggtatccctga

SEQ ID NO: 4333805 - DNA, 25 bp, Homo sapien
ccaccttctggattcggaggctgta

SEQ ID NO: 4333806 - DNA, 25 bp, Homo sapien
aaaatgatgccagaacggttcaacc

SEQ ID NO: 4333807 - DNA, 25 bp, Homo sapien
gaactgagcaagtgtaggaaccctc

SEQ ID NO: 4333808 - DNA, 25 bp, Homo sapien
cagagaatggcgtttctccagctca

SEQ ID NO: 4333809 - DNA, 25 bp, Homo sapien
agcaagagtcttgcaatggaaaaat

SEQ ID NO: 4333810 - DNA, 25 bp, Homo sapien
cagcgtaacacaagaatggtcagat

SEQ ID NO: 4333811 - DNA, 25 bp, Homo sapien
tgtttctcacctgcacagcgtaaca

SEQ ID NO: 4333812 - DNA, 25 bp, Homo sapien
ggtcagatttgctacattatagatg

SEQ ID NO: 4333813 - DNA, 25 bp, Homo sapien
tgaatgcctcttagcaccaaatatg

SEQ ID NO: 4333814 - DNA, 25 bp, Homo sapien
agcaaaattgccagatgcataaaag

SEQ ID NO: 4333815 - DNA, 25 bp, Homo sapien
tcagcaaaattgccagatgcataaa

SEQ ID NO: 4333816 - DNA, 25 bp, Homo sapien
ttcagcaaaattgccagatgcataa

SEQ ID NO: 4333817 - DNA, 25 bp, Homo sapien
cagcaaaattgccagatgcataaaa

SEQ ID NO: 4333818 - DNA, 25 bp, Homo sapien
tctgggagagctcttctaatgaact

SEQ ID NO: 4333819 - DNA, 25 bp, Homo sapien
caacaatcaggtcgtaaatgggagt

SEQ ID NO: 4333820 - DNA, 25 bp, Homo sapien
caatggtgtgaggaggacttcatcc

SEQ ID NO: 4333821 - DNA, 25 bp, Homo sapien
tcatccttgtgtaacaccctgtgtg

SEQ ID NO: 4333822 - DNA, 25 bp, Homo sapien
cacagccaatctgaattaaagagac

SEQ ID NO: 4333823 - DNA, 25 bp, Homo sapien
tcaccatgtaagttccttcggaaat

SEQ ID NO: 4333824 - DNA, 25 bp, Homo sapien
actgcattcaccatgtaagttcctt

SEQ ID NO: 4333825 - DNA, 25 bp, Homo sapien
ccaatctgaattaaagagacagctg

SEQ ID NO: 4333826 - DNA, 25 bp, Homo sapien
caggctttgttcatcggggagaaat

SEQ ID NO: 4333827 - DNA, 25 bp, Homo sapien
ccaggctttgttcatcggggagaaa

SEQ ID NO: 4333828 - DNA, 25 bp, Homo sapien
gagcacagcggtggaagagaactat

SEQ ID NO: 4333829 - DNA, 25 bp, Homo sapien
tttggcactttcatagcaggcaccc

SEQ ID NO: 4333830 - DNA, 25 bp, Homo sapien
cacccgtgtcaaatatagggcagaa

SEQ ID NO: 4333831 - DNA, 25 bp, Homo sapien
ggaagagaactattgctttggcact

SEQ ID NO: 4333832 - DNA, 25 bp, Homo sapien
aaggacttaccttccactgtgagag

SEQ ID NO: 4333833 - DNA, 25 bp, Homo sapien
gaaggacttaccttccactgtgaga

SEQ ID NO: 4333834 - DNA, 25 bp, Homo sapien
aggacttaccttccactgtgagagt

SEQ ID NO: 4333835 - DNA, 25 bp, Homo sapien
gggaaggacttaccttccactgtga

SEQ ID NO: 4333836 - DNA, 25 bp, Homo sapien
agagctatggtatccatgagagaca

SEQ ID NO: 4333837 - DNA, 25 bp, Homo sapien
tatcacaggtaactggaaaccttgg

SEQ ID NO: 4333838 - DNA, 25 bp, Homo sapien
ggaagccaaaagaagctcctcgatt

SEQ ID NO: 4333839 - DNA, 25 bp, Homo sapien
taaaacactgggtcaagagctatgg

SEQ ID NO: 4333840 - DNA, 25 bp, Homo sapien
gggccatgcccaaagtatatcaatt

SEQ ID NO: 4333841 - DNA, 25 bp, Homo sapien
ttgagcacctatgtccacagtcaga

SEQ ID NO: 4333842 - DNA, 25 bp, Homo sapien
tcccttaagaggttaagaatccagc

SEQ ID NO: 4333843 - DNA, 25 bp, Homo sapien
tctcaagggtgctataaatgggcca

SEQ ID NO: 4333844 - DNA, 25 bp, Homo sapien
caaattaggtgattgggacccttgg

SEQ ID NO: 4333845 - DNA, 25 bp, Homo sapien
atgcctggttggatgtaattgtcaa

SEQ ID NO: 4333846 - DNA, 25 bp, Homo sapien
cacactgcttagcatttctagtaga

SEQ ID NO: 4333847 - DNA, 25 bp, Homo sapien
ttatcacaactaggccaaattaggt

SEQ ID NO: 4333848 - DNA, 25 bp, Homo sapien
gggatgaatccagcccttcggggat

SEQ ID NO: 4333849 - DNA, 25 bp, Homo sapien
ggagcatatgcaatgtttccatgga

SEQ ID NO: 4333850 - DNA, 25 bp, Homo sapien
tgtgcacataggagcatatgcaatg

SEQ ID NO: 4333851 - DNA, 25 bp, Homo sapien
cggggatgtaccgtctcttctggag

SEQ ID NO: 4333852 - DNA, 25 bp, Homo sapien
cctgtgatgttcacgtgagagaacc

SEQ ID NO: 4333853 - DNA, 25 bp, Homo sapien
gatcttggttataaatggtgcctca

SEQ ID NO: 4333854 - DNA, 25 bp, Homo sapien
caaaatacatgtgcttgaattaccc

SEQ ID NO: 4333855 - DNA, 25 bp, Homo sapien
gtaattatgtcttggcttgcttcag

SEQ ID NO: 4333856 - DNA, 25 bp, Homo sapien
gattacgaagtttcaaatgagattg

SEQ ID NO: 4333857 - DNA, 25 bp, Homo sapien
taaaagcaataaactgtgcttgtcc

SEQ ID NO: 4333858 - DNA, 25 bp, Homo sapien
gcttgtccgttgtttcgattacgaa

SEQ ID NO: 4333859 - DNA, 25 bp, Homo sapien
aaactgtgcttgtccgttgtttcga

SEQ ID NO: 4333860 - DNA, 25 bp, Homo sapien
gacctgtaatgcttctcgtgatgcc

SEQ ID NO: 4333861 - DNA, 25 bp, Homo sapien
gttaattgccaagtagatgctgcca

SEQ ID NO: 4333862 - DNA, 25 bp, Homo sapien
tctccaccaattagaggaccaaggt

SEQ ID NO: 4333863 - DNA, 25 bp, Homo sapien
taagtctttcatcgtcaacctaggg

SEQ ID NO: 4333864 - DNA, 25 bp, Homo sapien
tctttagtttatctacaaggtggct

SEQ ID NO: 4333865 - DNA, 25 bp, Homo sapien
tcaggccatttttggaattcccatt

SEQ ID NO: 4333866 - DNA, 25 bp, Homo sapien
tattaacctggtcaaatgtatttgg

SEQ ID NO: 4333867 - DNA, 25 bp, Homo sapien
ccagagaaccagaactaatagctta

SEQ ID NO: 4333868 - DNA, 25 bp, Homo sapien
catgatgcccacagtaattgcaaaa

SEQ ID NO: 4333869 - DNA, 25 bp, Homo sapien
gatgcccacagtaattgcaaaactg

SEQ ID NO: 4333870 - DNA, 25 bp, Homo sapien
cccacagtaattgcaaaactgtttg

SEQ ID NO: 4333871 - DNA, 25 bp, Homo sapien
gtccatgatgcccacagtaattgca

SEQ ID NO: 4333872 - DNA, 25 bp, Homo sapien
ctccctgttctaagcaaacaggagg

SEQ ID NO: 4333873 - DNA, 25 bp, Homo sapien
caaggtgctccttgacaggatcaat

SEQ ID NO: 4333874 - DNA, 25 bp, Homo sapien
ttctccctctcaaggtgctccttga

SEQ ID NO: 4333875 - DNA, 25 bp, Homo sapien
tgctccttgacaggatcaattttgg

SEQ ID NO: 4333876 - DNA, 25 bp, Homo sapien
cttgacaggatcaattttggttgcc

SEQ ID NO: 4333877 - DNA, 25 bp, Homo sapien
gatgcatttcacacagttaccattg

SEQ ID NO: 4333878 - DNA, 25 bp, Homo sapien
tgccagatttgtgcattgtcacagg

SEQ ID NO: 4333879 - DNA, 25 bp, Homo sapien
tatttccaaaggctgtttagctgcc

SEQ ID NO: 4333880 - DNA, 25 bp, Homo sapien
ttatagctgcagtatgagctgccac

SEQ ID NO: 4333881 - DNA, 25 bp, Homo sapien
gaagcagccgccatagggtaataag

SEQ ID NO: 4333882 - DNA, 25 bp, Homo sapien
tgccttttatgtgagctgatcccaa

SEQ ID NO: 4333883 - DNA, 25 bp, Homo sapien
ttttggcctactcatggaccagagg

SEQ ID NO: 4333884 - DNA, 25 bp, Homo sapien
tcatggacaatgactctctgccgtc

SEQ ID NO: 4333885 - DNA, 25 bp, Homo sapien
tctacagactgtacaggagcatagc

SEQ ID NO: 4333886 - DNA, 25 bp, Homo sapien
cccattggagaataccatctatgct

SEQ ID NO: 4333887 - DNA, 25 bp, Homo sapien
tgtactcaagcactccccattggag

SEQ ID NO: 4333888 - DNA, 25 bp, Homo sapien
catctatgcttgatggttgcacatc

SEQ ID NO: 4333889 - DNA, 25 bp, Homo sapien
cacctactgttaagaaatacatggt

SEQ ID NO: 4333890 - DNA, 25 bp, Homo sapien
tgcctttcctgatattcaatcccaa

SEQ ID NO: 4333891 - DNA, 25 bp, Homo sapien
tcaatcccaacaattaggtgttctt

SEQ ID NO: 4333892 - DNA, 25 bp, Homo sapien
gaaaagtgtctaagagtgggactgt

SEQ ID NO: 4333893 - DNA, 25 bp, Homo sapien
ttagtttgttcctatgcatatagtt

SEQ ID NO: 4333894 - DNA, 25 bp, Homo sapien
tagtttgttcctatgcatatagttt

SEQ ID NO: 4333895 - DNA, 25 bp, Homo sapien
ttgttcctatgcatatagttttcca

SEQ ID NO: 4333896 - DNA, 25 bp, Homo sapien
gtttgttcctatgcatatagttttc

SEQ ID NO: 4333897 - DNA, 25 bp, Homo sapien
aaatgtttccctgctaaaaagccag

SEQ ID NO: 4333898 - DNA, 25 bp, Homo sapien
aatgctctataattctccagcccag

SEQ ID NO: 4333899 - DNA, 25 bp, Homo sapien
aatgtgtatattaagctcagcgctg

SEQ ID NO: 4333900 - DNA, 25 bp, Homo sapien
ctcagcgctgtaggtcaggtcgtgt

SEQ ID NO: 4333901 - DNA, 25 bp, Homo sapien
tgtctggaccactctgtaacggatc

SEQ ID NO: 4333902 - DNA, 25 bp, Homo sapien
agaattgaacatgctaccctaggta

SEQ ID NO: 4333903 - DNA, 25 bp, Homo sapien
taatcaggatacaccatggtaggcg

SEQ ID NO: 4333904 - DNA, 25 bp, Homo sapien
aaacagaggcacgaagaaattggca

SEQ ID NO: 4333905 - DNA, 25 bp, Homo sapien
ggcagaaccttcatgaacacagatt

SEQ ID NO: 4333906 - DNA, 25 bp, Homo sapien
aaagtctctctgtttgtgtgagaaa

SEQ ID NO: 4333907 - DNA, 25 bp, Homo sapien
ggaagtcattcagccattccacttg

SEQ ID NO: 4333908 - DNA, 25 bp, Homo sapien
ttccacttgtatgagcctccactca

SEQ ID NO: 4333909 - DNA, 25 bp, Homo sapien
atcctggtgtctcactacttccatc

SEQ ID NO: 4333910 - DNA, 25 bp, Homo sapien
agatcctggtgtctcactacttcca

SEQ ID NO: 4333911 - DNA, 25 bp, Homo sapien
tggtgtctcactacttccatcctca

SEQ ID NO: 4333912 - DNA, 25 bp, Homo sapien
gaagatcctggtgtctcactacttc

SEQ ID NO: 4333913 - DNA, 25 bp, Homo sapien
tggagagatgcgaaggaacacttac

SEQ ID NO: 4333914 - DNA, 25 bp, Homo sapien
gaacacttacaattaactttacaga

SEQ ID NO: 4333915 - DNA, 25 bp, Homo sapien
attctgcgtgatcctaaaaagaagt

SEQ ID NO: 4333916 - DNA, 25 bp, Homo sapien
gaacagattgaaaacctctatgtgc

SEQ ID NO: 4333917 - DNA, 25 bp, Homo sapien
gtaaagtattctctagtgtaataga

SEQ ID NO: 4333918 - DNA, 25 bp, Homo sapien
tgcacaaagggtgtaaagtattctc

SEQ ID NO: 4333919 - DNA, 25 bp, Homo sapien
acataaactgcacaaagggtgtaaa

SEQ ID NO: 4333920 - DNA, 25 bp, Homo sapien
gtaatagacacaatgccaagaaagc

SEQ ID NO: 4333921 - DNA, 25 bp, Homo sapien
aggcttgtcaagcttataccagtca

SEQ ID NO: 4333922 - DNA, 25 bp, Homo sapien
tgcatatcttcacaacgtgttcacg

SEQ ID NO: 4333923 - DNA, 25 bp, Homo sapien
gaactcagaactaggtaatgcaact

SEQ ID NO: 4333924 - DNA, 25 bp, Homo sapien
gcaatggaatctgatagaaggatac

SEQ ID NO: 4333925 - DNA, 25 bp, Homo sapien
ctctacaccttgtattggctctttt

SEQ ID NO: 4333926 - DNA, 25 bp, Homo sapien
tttgcaacttatgttctgtgcatct

SEQ ID NO: 4333927 - DNA, 25 bp, Homo sapien
acaccttgtattggctctttttgca

SEQ ID NO: 4333928 - DNA, 25 bp, Homo sapien
ttgcaacttatgttctgtgcatctt

SEQ ID NO: 4333929 - DNA, 25 bp, Homo sapien
aaagacaacataacttatcttgaaa

SEQ ID NO: 4333930 - DNA, 25 bp, Homo sapien
gagaagtatagtgttattctatgaa

SEQ ID NO: 4333931 - DNA, 25 bp, Homo sapien
cttatcttgaaagtgtttcttttgg

SEQ ID NO: 4333932 - DNA, 25 bp, Homo sapien
ttgggagaagtatagtgttattcta

SEQ ID NO: 4333933 - DNA, 25 bp, Homo sapien
tagtgctgtctctagtccataggct

SEQ ID NO: 4333934 - DNA, 25 bp, Homo sapien
ggttcccatatgacagtagactcag

SEQ ID NO: 4333935 - DNA, 25 bp, Homo sapien
gaacccactcggcttttgtgcgctg

SEQ ID NO: 4333936 - DNA, 25 bp, Homo sapien
gaaatactcaacgttgggcagtcct

SEQ ID NO: 4333937 - DNA, 25 bp, Homo sapien
taagagcttgggtgtgaaaatctga

SEQ ID NO: 4333938 - DNA, 25 bp, Homo sapien
tctccatgctgaagcaaaggcccag

SEQ ID NO: 4333939 - DNA, 25 bp, Homo sapien
gcttgggtgtgaaaatctgactgtt

SEQ ID NO: 4333940 - DNA, 25 bp, Homo sapien
tcaatcattgatgataagagcttgg

SEQ ID NO: 4333941 - DNA, 25 bp, Homo sapien
ttccaagtgtggaaaatcaatccta

SEQ ID NO: 4333942 - DNA, 25 bp, Homo sapien
tgtggaaaatcaatcctacctccag

SEQ ID NO: 4333943 - DNA, 25 bp, Homo sapien
tcaatcctacctccagctagttcag

SEQ ID NO: 4333944 - DNA, 25 bp, Homo sapien
ggttttggcttggctgtgtagcatt

SEQ ID NO: 4333945 - DNA, 25 bp, Homo sapien
gcagctgatgaactactcaaactgg

SEQ ID NO: 4333946 - DNA, 25 bp, Homo sapien
aacacagaggaagtagaactattag

SEQ ID NO: 4333947 - DNA, 25 bp, Homo sapien
ttccagcaggtagatttgctgccag

SEQ ID NO: 4333948 - DNA, 25 bp, Homo sapien
ggaaggtcctagtctcagatgagca

SEQ ID NO: 4333949 - DNA, 25 bp, Homo sapien
attcttttctcgctgcctttaatta

SEQ ID NO: 4333950 - DNA, 25 bp, Homo sapien
aagaaattagcaagccagggaaatt

SEQ ID NO: 4333951 - DNA, 25 bp, Homo sapien
tcaagttttgtggtattgactaagc

SEQ ID NO: 4333952 - DNA, 25 bp, Homo sapien
ttgactaagctaaaatacacagttg

SEQ ID NO: 4333953 - DNA, 25 bp, Homo sapien
tactcaggaaaaaggacaagccgtg

SEQ ID NO: 4333954 - DNA, 25 bp, Homo sapien
taaacgcttccattgagcggtgcaa

SEQ ID NO: 4333955 - DNA, 25 bp, Homo sapien
tgggagacctaaaaccagatgctgg

SEQ ID NO: 4333956 - DNA, 25 bp, Homo sapien
tacgaaattgtatgcctccctggtt

SEQ ID NO: 4333957 - DNA, 25 bp, Homo sapien
cagaggatgcccttcagccttagat

SEQ ID NO: 4333958 - DNA, 25 bp, Homo sapien
gcagggacccaagcgttatagttac

SEQ ID NO: 4333959 - DNA, 25 bp, Homo sapien
catgggacggtgtgtgctcttcaaa

SEQ ID NO: 4333960 - DNA, 25 bp, Homo sapien
tatgctggaggcacttctgggcaag

SEQ ID NO: 4333961 - DNA, 25 bp, Homo sapien
gggccagtgctcttatgcattttta

SEQ ID NO: 4333962 - DNA, 25 bp, Homo sapien
cttggcatcacattgaattatcagc

SEQ ID NO: 4333963 - DNA, 25 bp, Homo sapien
gagctatagggtacaggtttcctgt

SEQ ID NO: 4333964 - DNA, 25 bp, Homo sapien
taatagcatgtgtctgttgggccag

SEQ ID NO: 4333965 - DNA, 25 bp, Homo sapien
tcttcttcatagcattcttccactt

SEQ ID NO: 4333966 - DNA, 25 bp, Homo sapien
catctgatgctctcttcttcatagc

SEQ ID NO: 4333967 - DNA, 25 bp, Homo sapien
tctttctcatatctttgaattccat

SEQ ID NO: 4333968 - DNA, 25 bp, Homo sapien
tcttccactttagctccatctttct

SEQ ID NO: 4333969 - DNA, 25 bp, Homo sapien
cctagaggcttcgtctgaaagtgat

SEQ ID NO: 4333970 - DNA, 25 bp, Homo sapien
gaaaagtacagaacatctcctagag

SEQ ID NO: 4333971 - DNA, 25 bp, Homo sapien
taactgcttacaagactgagaactg

SEQ ID NO: 4333972 - DNA, 25 bp, Homo sapien
tacttagaggagaaaggtacactcg

SEQ ID NO: 4333973 - DNA, 25 bp, Homo sapien
ccgaagaaattcgatagcgtatacc

SEQ ID NO: 4333974 - DNA, 25 bp, Homo sapien
tgacggttcatagcctgccatctgc

SEQ ID NO: 4333975 - DNA, 25 bp, Homo sapien
gccatctgctctcgtatccgaagaa

SEQ ID NO: 4333976 - DNA, 25 bp, Homo sapien
cttttcaaatccacacattgacggt

SEQ ID NO: 4333977 - DNA, 25 bp, Homo sapien
cacactaatggcgtaacagcagtcc

SEQ ID NO: 4333978 - DNA, 25 bp, Homo sapien
agtcccaagaggtggtatatcatcc

SEQ ID NO: 4333979 - DNA, 25 bp, Homo sapien
agcagtcccaagaggtggtatatca

SEQ ID NO: 4333980 - DNA, 25 bp, Homo sapien
ctaatggcgtaacagcagtcccaag

SEQ ID NO: 4333981 - DNA, 25 bp, Homo sapien
atccttagagcactgtaactggtgg

SEQ ID NO: 4333982 - DNA, 25 bp, Homo sapien
tagtaggcaagatgcaaccattcct

SEQ ID NO: 4333983 - DNA, 25 bp, Homo sapien
cctaaactattaggagtggccatta

SEQ ID NO: 4333984 - DNA, 25 bp, Homo sapien
gataagtagagtggtcatgtacacc

SEQ ID NO: 4333985 - DNA, 25 bp, Homo sapien
cagggcactacaattgctggagcct

SEQ ID NO: 4333986 - DNA, 25 bp, Homo sapien
gctggagcctggacaactgtgaact

SEQ ID NO: 4333987 - DNA, 25 bp, Homo sapien
tctgagatctcaacaaagcttgctt

SEQ ID NO: 4333988 - DNA, 25 bp, Homo sapien
ttaagtcagaaaatgcagttcaggc

SEQ ID NO: 4333989 - DNA, 25 bp, Homo sapien
catcaggtactggtgtagttataca

SEQ ID NO: 4333990 - DNA, 25 bp, Homo sapien
caaaaggttttgtgcctaaatgcag

SEQ ID NO: 4333991 - DNA, 25 bp, Homo sapien
ttcttataaacacggccacaaagga

SEQ ID NO: 4333992 - DNA, 25 bp, Homo sapien
tataggcacgctgtagtctttttcc

SEQ ID NO: 4333993 - DNA, 25 bp, Homo sapien
tataagcgagtacacatggagcaga

SEQ ID NO: 4333994 - DNA, 25 bp, Homo sapien
caagaacagaggcagtagtggcagt

SEQ ID NO: 4333995 - DNA, 25 bp, Homo sapien
tgacagtcatgattgtggcagatcc

SEQ ID NO: 4333996 - DNA, 25 bp, Homo sapien
tagtggcagtaggacactcagtcca

SEQ ID NO: 4333997 - DNA, 25 bp, Homo sapien
gatgacaccaccttacagaacttag

SEQ ID NO: 4333998 - DNA, 25 bp, Homo sapien
taagtgattacacatgtgctgctgc

SEQ ID NO: 4333999 - DNA, 25 bp, Homo sapien
catgctgggcaggacttcattgaaa

SEQ ID NO: 4334000 - DNA, 25 bp, Homo sapien
catgctcggaaaacagactgcgctc

SEQ ID NO: 4334001 - DNA, 25 bp, Homo sapien
cagctggccaccttctataagcatc

SEQ ID NO: 4334002 - DNA, 25 bp, Homo sapien
caaggtgcttcttaccctcatcctg

SEQ ID NO: 4334003 - DNA, 25 bp, Homo sapien
acccatgaccctatcaagattccat

SEQ ID NO: 4334004 - DNA, 25 bp, Homo sapien
ccataacaagttgcccttccttggc

SEQ ID NO: 4334005 - DNA, 25 bp, Homo sapien
caaatttttatcagtagaagagcct

SEQ ID NO: 4334006 - DNA, 25 bp, Homo sapien
aaggtctatggaaaggacactgcca

SEQ ID NO: 4334007 - DNA, 25 bp, Homo sapien
gctcatttaccttgattagcagagg

SEQ ID NO: 4334008 - DNA, 25 bp, Homo sapien
ttgcctacctcccataccatgtgta

SEQ ID NO: 4334009 - DNA, 25 bp, Homo sapien
tcattttaacaccttcaccctatca

SEQ ID NO: 4334010 - DNA, 25 bp, Homo sapien
aacaccttcaccctatcatatgtac

SEQ ID NO: 4334011 - DNA, 25 bp, Homo sapien
ttaacaccttcaccctatcatatgt

SEQ ID NO: 4334012 - DNA, 25 bp, Homo sapien
ttttaacaccttcaccctatcatat

SEQ ID NO: 4334013 - DNA, 25 bp, Homo sapien
gaacatctcttttggatgtccaatg

SEQ ID NO: 4334014 - DNA, 25 bp, Homo sapien
tgttactggttctgctaccaaggtg

SEQ ID NO: 4334015 - DNA, 25 bp, Homo sapien
tcacaccagggaactttaccaagga

SEQ ID NO: 4334016 - DNA, 25 bp, Homo sapien
ttccctgtgagataagaacatctct

SEQ ID NO: 4334017 - DNA, 25 bp, Homo sapien
tagagggcctgatgctggtaaaaag

SEQ ID NO: 4334018 - DNA, 25 bp, Homo sapien
aatgtttagagtcaggcagtggaga

SEQ ID NO: 4334019 - DNA, 25 bp, Homo sapien
tcttacacttgtacttagagggcct

SEQ ID NO: 4334020 - DNA, 25 bp, Homo sapien
tagatggcttgtaatgggaatgacg

SEQ ID NO: 4334021 - DNA, 25 bp, Homo sapien
ggcttagtggaataaacgtccacaa

SEQ ID NO: 4334022 - DNA, 25 bp, Homo sapien
ggaataaacgtccacaagattttgc

SEQ ID NO: 4334023 - DNA, 25 bp, Homo sapien
taaacgtccacaagattttgctgtc

SEQ ID NO: 4334024 - DNA, 25 bp, Homo sapien
ctcatccctgggcttagtggaataa

SEQ ID NO: 4334025 - DNA, 25 bp, Homo sapien
gcagggcagcctttgaactacaact

SEQ ID NO: 4334026 - DNA, 25 bp, Homo sapien
caagtttcccaagagtcgtctgagg

SEQ ID NO: 4334027 - DNA, 25 bp, Homo sapien
aaattatagggtatatgagcttccc

SEQ ID NO: 4334028 - DNA, 25 bp, Homo sapien
tcagcaggcatgtctctaaatagaa

SEQ ID NO: 4334029 - DNA, 25 bp, Homo sapien
gaggcacaggcaacctttacctact

SEQ ID NO: 4334030 - DNA, 25 bp, Homo sapien
ggaaggtgccgattctcagtcaaga

SEQ ID NO: 4334031 - DNA, 25 bp, Homo sapien
tatatacagctattcagatgcagac

SEQ ID NO: 4334032 - DNA, 25 bp, Homo sapien
caattgggttcctaataaatgatgc

SEQ ID NO: 4334033 - DNA, 25 bp, Homo sapien
gagaccagtcattgcagtagtagag

SEQ ID NO: 4334034 - DNA, 25 bp, Homo sapien
tctcccaagcgattctgatgcagca

SEQ ID NO: 4334035 - DNA, 25 bp, Homo sapien
tttagaaccggacaaccagacacat

SEQ ID NO: 4334036 - DNA, 25 bp, Homo sapien
tgccactacgagctggaggaaatta

SEQ ID NO: 4334037 - DNA, 25 bp, Homo sapien
attaagataatagccagtagcatgc

SEQ ID NO: 4334038 - DNA, 25 bp, Homo sapien
agctattaagataatagccagtagc

SEQ ID NO: 4334039 - DNA, 25 bp, Homo sapien
tattaagataatagccagtagcatg

SEQ ID NO: 4334040 - DNA, 25 bp, Homo sapien
ctattaagataatagccagtagcat

SEQ ID NO: 4334041 - DNA, 25 bp, Homo sapien
caactagagagcgaaagaagccacc

SEQ ID NO: 4334042 - DNA, 25 bp, Homo sapien
tacccacgctatgggatgtctctca

SEQ ID NO: 4334043 - DNA, 25 bp, Homo sapien
gctacctacattcccctcaagaagg

SEQ ID NO: 4334044 - DNA, 25 bp, Homo sapien
gcatgcagggcttagcagctaccta

SEQ ID NO: 4334045 - DNA, 25 bp, Homo sapien
aataaagttggccatccccagccac

SEQ ID NO: 4334046 - DNA, 25 bp, Homo sapien
actgtgaaggtctgctgctcaattc

SEQ ID NO: 4334047 - DNA, 25 bp, Homo sapien
aagaggtcactcaatttggccagag

SEQ ID NO: 4334048 - DNA, 25 bp, Homo sapien
tgctgctcactgtctaggttcgtgc

SEQ ID NO: 4334049 - DNA, 25 bp, Homo sapien
taataacactaatgaggcaggacgt

SEQ ID NO: 4334050 - DNA, 25 bp, Homo sapien
tacatgtaacaaccgctgtgagaca

SEQ ID NO: 4334051 - DNA, 25 bp, Homo sapien
tcctagggtgttgtaccatatagct

SEQ ID NO: 4334052 - DNA, 25 bp, Homo sapien
tgattgtgttgctcagaaatcctgg

SEQ ID NO: 4334053 - DNA, 25 bp, Homo sapien
ctgaatcacaacataaggctttagt

SEQ ID NO: 4334054 - DNA, 25 bp, Homo sapien
cacaacataaggctttagtctcccc

SEQ ID NO: 4334055 - DNA, 25 bp, Homo sapien
acataaggctttagtctcccctgga

SEQ ID NO: 4334056 - DNA, 25 bp, Homo sapien
taaggctttagtctcccctggatgc

SEQ ID NO: 4334057 - DNA, 25 bp, Homo sapien
gaatatctaattttggatttccagt

SEQ ID NO: 4334058 - DNA, 25 bp, Homo sapien
acttccatcccatttttagtggatg

SEQ ID NO: 4334059 - DNA, 25 bp, Homo sapien
tgttacagagcagaatatctaattt

SEQ ID NO: 4334060 - DNA, 25 bp, Homo sapien
tggatttccagtaacttccatccca

SEQ ID NO: 4334061 - DNA, 25 bp, Homo sapien
gaaagaaggtagtatggcacattca

SEQ ID NO: 4334062 - DNA, 25 bp, Homo sapien
tgatccatggcacagaaacagccta

SEQ ID NO: 4334063 - DNA, 25 bp, Homo sapien
ctgaggagggcctaagtttaactct

SEQ ID NO: 4334064 - DNA, 25 bp, Homo sapien
gaactaatggcagatttacctgaca

SEQ ID NO: 4334065 - DNA, 25 bp, Homo sapien
ttgattaaactctatagtaaaaata

SEQ ID NO: 4334066 - DNA, 25 bp, Homo sapien
tatggattagtagaatgcataaaaa

SEQ ID NO: 4334067 - DNA, 25 bp, Homo sapien
gttatgaggcatataggaagtaagt

SEQ ID NO: 4334068 - DNA, 25 bp, Homo sapien
ggaagtaagtagcaaaaagatagaa

SEQ ID NO: 4334069 - DNA, 25 bp, Homo sapien
cttgtgtgaaagatttgtggaaagg

SEQ ID NO: 4334070 - DNA, 25 bp, Homo sapien
ccttgtgtgaaagatttgtggaaag

SEQ ID NO: 4334071 - DNA, 25 bp, Homo sapien
aagacactaaaccttgtgtgaaaga

SEQ ID NO: 4334072 - DNA, 25 bp, Homo sapien
aaagacactaaaccttgtgtgaaag

SEQ ID NO: 4334073 - DNA, 25 bp, Homo sapien
cagagatgacttgtagccatggtta

SEQ ID NO: 4334074 - DNA, 25 bp, Homo sapien
atagatttatcgtgctttccagaga

SEQ ID NO: 4334075 - DNA, 25 bp, Homo sapien
tgaatgaccgtcacagccactaatg

SEQ ID NO: 4334076 - DNA, 25 bp, Homo sapien
gaagtagggtctgcattctctcccc

SEQ ID NO: 4334077 - DNA, 25 bp, Homo sapien
tactacataaccacatccagttggg

SEQ ID NO: 4334078 - DNA, 25 bp, Homo sapien
tgcttattgcggatcagtgaaccca

SEQ ID NO: 4334079 - DNA, 25 bp, Homo sapien
caaagatctctacataccccagtgt

SEQ ID NO: 4334080 - DNA, 25 bp, Homo sapien
tatcagtatagatctgtcacacagc

SEQ ID NO: 4334081 - DNA, 25 bp, Homo sapien
gtaaaacagttgctagaaatccttg

SEQ ID NO: 4334082 - DNA, 25 bp, Homo sapien
ccatatgtttatttatccgccagag

SEQ ID NO: 4334083 - DNA, 25 bp, Homo sapien
tacacatatcctagagcagtggtct

SEQ ID NO: 4334084 - DNA, 25 bp, Homo sapien
cacatagatatttcaggcaggcctg

SEQ ID NO: 4334085 - DNA, 25 bp, Homo sapien
taaatataaatggactaaattctgc

SEQ ID NO: 4334086 - DNA, 25 bp, Homo sapien
tataaatggactaaattctgcaatt

SEQ ID NO: 4334087 - DNA, 25 bp, Homo sapien
aatataaatggactaaattctgcaa

SEQ ID NO: 4334088 - DNA, 25 bp, Homo sapien
ttaaatataaatggactaaattctg

SEQ ID NO: 4334089 - DNA, 25 bp, Homo sapien
gaggattctagaaagatgatggaga

SEQ ID NO: 4334090 - DNA, 25 bp, Homo sapien
ggaactctagagtgtactgaaggct

SEQ ID NO: 4334091 - DNA, 25 bp, Homo sapien
cctttaccagataacagttgtactg

SEQ ID NO: 4334092 - DNA, 25 bp, Homo sapien
tctgtctgcttaattattttggaac

SEQ ID NO: 4334093 - DNA, 25 bp, Homo sapien
gaaaattgtataccagcaaattgga

SEQ ID NO: 4334094 - DNA, 25 bp, Homo sapien
cttattcatgaagctagcattaccc

SEQ ID NO: 4334095 - DNA, 25 bp, Homo sapien
aatctcttgaaaacaacagcccagt

SEQ ID NO: 4334096 - DNA, 25 bp, Homo sapien
cagcccagtaactgatggcttcact

SEQ ID NO: 4334097 - DNA, 25 bp, Homo sapien
aactgaaagatcacaaactgagctc

SEQ ID NO: 4334098 - DNA, 25 bp, Homo sapien
tgaccctagactcaagaactgaaag

SEQ ID NO: 4334099 - DNA, 25 bp, Homo sapien
taaacagggtttcacgctgaacatt

SEQ ID NO: 4334100 - DNA, 25 bp, Homo sapien
tacacatttctctacaggctatgca

SEQ ID NO: 4334101 - DNA, 25 bp, Homo sapien
gaggtgctgggcactaagcagtcac

SEQ ID NO: 4334102 - DNA, 25 bp, Homo sapien
aaagctgtatgtcaaaacaacaccg

SEQ ID NO: 4334103 - DNA, 25 bp, Homo sapien
aaacaacaccgactagaatacgtga

SEQ ID NO: 4334104 - DNA, 25 bp, Homo sapien
cgtgaaatgaattattgaggtgctg

SEQ ID NO: 4334105 - DNA, 25 bp, Homo sapien
gatttttgtcagtggtctgctcata

SEQ ID NO: 4334106 - DNA, 25 bp, Homo sapien
gttcactcagaacagctgacacctg

SEQ ID NO: 4334107 - DNA, 25 bp, Homo sapien
cacctgaaagtctttgtcagtgggc

SEQ ID NO: 4334108 - DNA, 25 bp, Homo sapien
ttcatgtacactgccttccagcggg

SEQ ID NO: 4334109 - DNA, 25 bp, Homo sapien
gtgactggtgcccacttcagggatc

SEQ ID NO: 4334110 - DNA, 25 bp, Homo sapien
agaccgtctggagcggctggagcat

SEQ ID NO: 4334111 - DNA, 25 bp, Homo sapien
gagaaatgggagcagtgactggtgc

SEQ ID NO: 4334112 - DNA, 25 bp, Homo sapien
cagcagaccgtctggagcggctgga

SEQ ID NO: 4334113 - DNA, 25 bp, Homo sapien
tgaggcccaccctccatcagggtga

SEQ ID NO: 4334114 - DNA, 25 bp, Homo sapien
cagggcttcaatccactcccaaagg

SEQ ID NO: 4334115 - DNA, 25 bp, Homo sapien
tcccaaaggcaccccatgggcaggg

SEQ ID NO: 4334116 - DNA, 25 bp, Homo sapien
tgtcggtttcttgcgccttgggaag

SEQ ID NO: 4334117 - DNA, 25 bp, Homo sapien
tggacacttgatgggacaccttggc

SEQ ID NO: 4334118 - DNA, 25 bp, Homo sapien
catgcttccaagtcgcaggacaaga

SEQ ID NO: 4334119 - DNA, 25 bp, Homo sapien
ggacctgctgaatgtcgaggctaaa

SEQ ID NO: 4334120 - DNA, 25 bp, Homo sapien
ttggctatggagacaagctgcccac

SEQ ID NO: 4334121 - DNA, 25 bp, Homo sapien
cagagctctgggagttgcaagcaag

SEQ ID NO: 4334122 - DNA, 25 bp, Homo sapien
ccggctgtctgggtgcagatagaaa

SEQ ID NO: 4334123 - DNA, 25 bp, Homo sapien
gccacattggagatcttaactacta

SEQ ID NO: 4334124 - DNA, 25 bp, Homo sapien
atgcaaataaaacgaaatgaagtcc

SEQ ID NO: 4334125 - DNA, 25 bp, Homo sapien
gaatctataggtaccagcctgtgca

SEQ ID NO: 4334126 - DNA, 25 bp, Homo sapien
tatgcagcacctagactacatggga

SEQ ID NO: 4334127 - DNA, 25 bp, Homo sapien
gctaaatccccagtccataggagag

SEQ ID NO: 4334128 - DNA, 25 bp, Homo sapien
ttgatgaaatagaaagagacggtcc

SEQ ID NO: 4334129 - DNA, 25 bp, Homo sapien
tatatgcacataaatgactgggctg

SEQ ID NO: 4334130 - DNA, 25 bp, Homo sapien
gagtatgcactataactgtcttcag

SEQ ID NO: 4334131 - DNA, 25 bp, Homo sapien
tttgcgatttcacatgttagggcta

SEQ ID NO: 4334132 - DNA, 25 bp, Homo sapien
catgttacttatacctgtgccactc

SEQ ID NO: 4334133 - DNA, 25 bp, Homo sapien
gtaccagactggcttaaatagatag

SEQ ID NO: 4334134 - DNA, 25 bp, Homo sapien
gttaccatgtatttttagatgccaa

SEQ ID NO: 4334135 - DNA, 25 bp, Homo sapien
tgccaaaaatgggtacaaatagtct

SEQ ID NO: 4334136 - DNA, 25 bp, Homo sapien
aaaatatgccagttagtaccagact

SEQ ID NO: 4334137 - DNA, 25 bp, Homo sapien
gatgacaataaaactctctacagat

SEQ ID NO: 4334138 - DNA, 25 bp, Homo sapien
cagatcacatgattctaaggtgaca

SEQ ID NO: 4334139 - DNA, 25 bp, Homo sapien
gcacctcaggacttgagatatgtta

SEQ ID NO: 4334140 - DNA, 25 bp, Homo sapien
aagagcccaaaatcattggattcag

SEQ ID NO: 4334141 - DNA, 25 bp, Homo sapien
atcttccggataagaacagaagaca

SEQ ID NO: 4334142 - DNA, 25 bp, Homo sapien
ttatcttccggataagaacagaaga

SEQ ID NO: 4334143 - DNA, 25 bp, Homo sapien
agaacagaagacaagtggagagcat

SEQ ID NO: 4334144 - DNA, 25 bp, Homo sapien
taagaacagaagacaagtggagagc

SEQ ID NO: 4334145 - DNA, 25 bp, Homo sapien
cagatgctgatatggaatccacaga

SEQ ID NO: 4334146 - DNA, 25 bp, Homo sapien
tctataaggctcattagaggtgcaa

SEQ ID NO: 4334147 - DNA, 25 bp, Homo sapien
tgcatgaagcagtacaggccacaac

SEQ ID NO: 4334148 - DNA, 25 bp, Homo sapien
tagctctggtaaaaatctggacgtg

SEQ ID NO: 4334149 - DNA, 25 bp, Homo sapien
gaaattgacaaatctacagtgtgga

SEQ ID NO: 4334150 - DNA, 25 bp, Homo sapien
tgtaatcctcatagccaccgtgcat

SEQ ID NO: 4334151 - DNA, 25 bp, Homo sapien
ctccatttaacaggctcggagaagc

SEQ ID NO: 4334152 - DNA, 25 bp, Homo sapien
catccagtcttaactatgggcagag

SEQ ID NO: 4334153 - DNA, 25 bp, Homo sapien
agatgctttaggatgacttcagtca

SEQ ID NO: 4334154 - DNA, 25 bp, Homo sapien
tactgctgagggacatctcaaggag

SEQ ID NO: 4334155 - DNA, 25 bp, Homo sapien
ctggtgtgggcaaagtgtagtttcc

SEQ ID NO: 4334156 - DNA, 25 bp, Homo sapien
tttccagcccaaatttggcacagag

SEQ ID NO: 4334157 - DNA, 25 bp, Homo sapien
ttctcactgaggctagtgccacagg

SEQ ID NO: 4334158 - DNA, 25 bp, Homo sapien
tcatagacagttataccgaataggg

SEQ ID NO: 4334159 - DNA, 25 bp, Homo sapien
tatatagcacctcaatcacgactct

SEQ ID NO: 4334160 - DNA, 25 bp, Homo sapien
tattggcacgtttagagccagctct

SEQ ID NO: 4334161 - DNA, 25 bp, Homo sapien
catgtccatagaaacacatcagctc

SEQ ID NO: 4334162 - DNA, 25 bp, Homo sapien
gctctttcattaaacatgtccatag

SEQ ID NO: 4334163 - DNA, 25 bp, Homo sapien
gctcacggcattttttgaatagcca

SEQ ID NO: 4334164 - DNA, 25 bp, Homo sapien
cattaaacatgtccatagaaacaca

SEQ ID NO: 4334165 - DNA, 25 bp, Homo sapien
taatgtctacatacgaccaccgcca

SEQ ID NO: 4334166 - DNA, 25 bp, Homo sapien
agacatggatttgcagacgacatca

SEQ ID NO: 4334167 - DNA, 25 bp, Homo sapien
taggaagacagccaatatgagacat

SEQ ID NO: 4334168 - DNA, 25 bp, Homo sapien
gggttcagagggagcaaaaattgca

SEQ ID NO: 4334169 - DNA, 25 bp, Homo sapien
ggcagaagagaaacttgacatttac

SEQ ID NO: 4334170 - DNA, 25 bp, Homo sapien
taaagaaccagaggcttagtaggga

SEQ ID NO: 4334171 - DNA, 25 bp, Homo sapien
gatgaaaatgtagttccttaacagg

SEQ ID NO: 4334172 - DNA, 25 bp, Homo sapien
tcttaggtgagaagtttaatatcat

SEQ ID NO: 4334173 - DNA, 25 bp, Homo sapien
taggtacgctaacatttaactggga

SEQ ID NO: 4334174 - DNA, 25 bp, Homo sapien
taattgaactcttactcctgtggga

SEQ ID NO: 4334175 - DNA, 25 bp, Homo sapien
aagtcctgcggataagcgtgtctca

SEQ ID NO: 4334176 - DNA, 25 bp, Homo sapien
tgtttagaaaagcacctgaggcagc

SEQ ID NO: 4334177 - DNA, 25 bp, Homo sapien
ctatttagggaggaccgccaaggct

SEQ ID NO: 4334178 - DNA, 25 bp, Homo sapien
ctgtgaatcacactttgattctttg

SEQ ID NO: 4334179 - DNA, 25 bp, Homo sapien
gctgccgccactactctgtgaatca

SEQ ID NO: 4334180 - DNA, 25 bp, Homo sapien
tgaatcacactttgattctttgtcc

SEQ ID NO: 4334181 - DNA, 25 bp, Homo sapien
gacagaagttggtattgtggttatc

SEQ ID NO: 4334182 - DNA, 25 bp, Homo sapien
tatataatttctcacacaggtctgt

SEQ ID NO: 4334183 - DNA, 25 bp, Homo sapien
aagacctgaagcctagtgtgcactc

SEQ ID NO: 4334184 - DNA, 25 bp, Homo sapien
gcaagagcaccattcttcaccagga

SEQ ID NO: 4334185 - DNA, 25 bp, Homo sapien
tctcggtgccagacatctactgtgg

SEQ ID NO: 4334186 - DNA, 25 bp, Homo sapien
aaactcctgtcactggattaccaga

SEQ ID NO: 4334187 - DNA, 25 bp, Homo sapien
cagctaagaagacaaagggaattct

SEQ ID NO: 4334188 - DNA, 25 bp, Homo sapien
ccatagttaattctgatgaagctcc

SEQ ID NO: 4334189 - DNA, 25 bp, Homo sapien
gatgaagctccaccaaccccaaaat

SEQ ID NO: 4334190 - DNA, 25 bp, Homo sapien
attgagaagaaggtcagctaagaag

SEQ ID NO: 4334191 - DNA, 25 bp, Homo sapien
ggattcgtaatcacccaaagctcag

SEQ ID NO: 4334192 - DNA, 25 bp, Homo sapien
ccagggtttatgcactatcagctcc

SEQ ID NO: 4334193 - DNA, 25 bp, Homo sapien
taacaaggctagagctcccaaagca

SEQ ID NO: 4334194 - DNA, 25 bp, Homo sapien
aagaaaactttgctgctgtcggcag

SEQ ID NO: 4334195 - DNA, 25 bp, Homo sapien
tagacgcgcgcagcagaaaagttgc

SEQ ID NO: 4334196 - DNA, 25 bp, Homo sapien
cactgctgcttgacagggaccagaa

SEQ ID NO: 4334197 - DNA, 25 bp, Homo sapien
caatagtgagaatactgcccagaag

SEQ ID NO: 4334198 - DNA, 25 bp, Homo sapien
aatgccaaccagtcagtaaaacagg

SEQ ID NO: 4334199 - DNA, 25 bp, Homo sapien
gagcaatctcagtaggaccagtggc

SEQ ID NO: 4334200 - DNA, 25 bp, Homo sapien
gtggcaactgtttccgatccggctg

SEQ ID NO: 4334201 - DNA, 25 bp, Homo sapien
taaaatccacgctgcgaacaggcag

SEQ ID NO: 4334202 - DNA, 25 bp, Homo sapien
tgatgttgtccgtgcctcggttaaa

SEQ ID NO: 4334203 - DNA, 25 bp, Homo sapien
gaggtgcgggtccgcggggtgctct

SEQ ID NO: 4334204 - DNA, 25 bp, Homo sapien
cgaggtgcgggtccgcggggtgctc

SEQ ID NO: 4334205 - DNA, 25 bp, Homo sapien
ggtgcgggtccgcggggtgctctgg

SEQ ID NO: 4334206 - DNA, 25 bp, Homo sapien
aggtgcgggtccgcggggtgctctg

SEQ ID NO: 4334207 - DNA, 25 bp, Homo sapien
ctttcatccacagcgagcgcagagc

SEQ ID NO: 4334208 - DNA, 25 bp, Homo sapien
gcgcagagcgggctttgccagttta

SEQ ID NO: 4334209 - DNA, 25 bp, Homo sapien
caagcctgccagtgagtgtacagaa

SEQ ID NO: 4334210 - DNA, 25 bp, Homo sapien
gtgcaaatagcaagccctctggaag

SEQ ID NO: 4334211 - DNA, 25 bp, Homo sapien
ttttccattcggtatttagtcacca

SEQ ID NO: 4334212 - DNA, 25 bp, Homo sapien
cctatgccccacattggattattaa

SEQ ID NO: 4334213 - DNA, 25 bp, Homo sapien
caccaagcactcttgattaggaggg

SEQ ID NO: 4334214 - DNA, 25 bp, Homo sapien
taggagggtttcgagatgaaagcaa

SEQ ID NO: 4334215 - DNA, 25 bp, Homo sapien
tggagcagattgtatgaccgatggt

SEQ ID NO: 4334216 - DNA, 25 bp, Homo sapien
ggctcggagaccatcaaccttgaaa

SEQ ID NO: 4334217 - DNA, 25 bp, Homo sapien
gaccgatggtggtcgttcgcctagc

SEQ ID NO: 4334218 - DNA, 25 bp, Homo sapien
tatctacaggattcaagagctgtgc

SEQ ID NO: 4334219 - DNA, 25 bp, Homo sapien
tagacttcaaccatatccttctttt

SEQ ID NO: 4334220 - DNA, 25 bp, Homo sapien
ttttatcatcaacataatcaactat

SEQ ID NO: 4334221 - DNA, 25 bp, Homo sapien
tcatcaacataatcaactatctttt

SEQ ID NO: 4334222 - DNA, 25 bp, Homo sapien
ttagacttcaaccatatccttcttt

SEQ ID NO: 4334223 - DNA, 25 bp, Homo sapien
ttccagtatttccaagaagggccat

SEQ ID NO: 4334224 - DNA, 25 bp, Homo sapien
tatctttcttaataagcgtagaaag

SEQ ID NO: 4334225 - DNA, 25 bp, Homo sapien
cttccagtatttccaagaagggcca

SEQ ID NO: 4334226 - DNA, 25 bp, Homo sapien
aggattatctttcttaataagcgta

SEQ ID NO: 4334227 - DNA, 25 bp, Homo sapien
gatgaacatgttagtcgactgtggt

SEQ ID NO: 4334228 - DNA, 25 bp, Homo sapien
cctaatgaacaatatggtggctatc

SEQ ID NO: 4334229 - DNA, 25 bp, Homo sapien
catctgcaacatgggtgactcttga

SEQ ID NO: 4334230 - DNA, 25 bp, Homo sapien
tatcagaacctaacaaattgcccac

SEQ ID NO: 4334231 - DNA, 25 bp, Homo sapien
gagtgatttctaacaccacgatatg

SEQ ID NO: 4334232 - DNA, 25 bp, Homo sapien
gttacggaaatagctaggagtcttc

SEQ ID NO: 4334233 - DNA, 25 bp, Homo sapien
catgttccataaatctaagtgtccc

SEQ ID NO: 4334234 - DNA, 25 bp, Homo sapien
ccacgatatggaaacgaagaaagca

SEQ ID NO: 4334235 - DNA, 25 bp, Homo sapien
gtagttccatgttgtcaccaccaca

SEQ ID NO: 4334236 - DNA, 25 bp, Homo sapien
ctcccatttgagtctgtcctgaaca

SEQ ID NO: 4334237 - DNA, 25 bp, Homo sapien
taggacgaagtgatacgtagttcca

SEQ ID NO: 4334238 - DNA, 25 bp, Homo sapien
gaccagtttgtcagtgccattcact

SEQ ID NO: 4334239 - DNA, 25 bp, Homo sapien
ggtcaatctgacagtttccattaag

SEQ ID NO: 4334240 - DNA, 25 bp, Homo sapien
caatggtcaatctgacagtttccat

SEQ ID NO: 4334241 - DNA, 25 bp, Homo sapien
aatgttccaatggtcaatctgacag

SEQ ID NO: 4334242 - DNA, 25 bp, Homo sapien
caatctgacagtttccattaagtct

SEQ ID NO: 4334243 - DNA, 25 bp, Homo sapien
atcctgctagagaactcctaggctc

SEQ ID NO: 4334244 - DNA, 25 bp, Homo sapien
ctgatcctgctagagaactcctagg

SEQ ID NO: 4334245 - DNA, 25 bp, Homo sapien
gatcctgctagagaactcctaggct

SEQ ID NO: 4334246 - DNA, 25 bp, Homo sapien
tgatcctgctagagaactcctaggc

SEQ ID NO: 4334247 - DNA, 25 bp, Homo sapien
gcttccttggagctgccttagaggc

SEQ ID NO: 4334248 - DNA, 25 bp, Homo sapien
tccttggagctgccttagaggcaag

SEQ ID NO: 4334249 - DNA, 25 bp, Homo sapien
tgcttccttggagctgccttagagg

SEQ ID NO: 4334250 - DNA, 25 bp, Homo sapien
caatgggtagaagtgacaatctgct

SEQ ID NO: 4334251 - DNA, 25 bp, Homo sapien
gttgctcagactggcacatacccct

SEQ ID NO: 4334252 - DNA, 25 bp, Homo sapien
gatttactgatgaaagaaggcaaac

SEQ ID NO: 4334253 - DNA, 25 bp, Homo sapien
caggtggccccagtactttgctata

SEQ ID NO: 4334254 - DNA, 25 bp, Homo sapien
gagacaagcgatgatttcaggacat

SEQ ID NO: 4334255 - DNA, 25 bp, Homo sapien
ttcaggacattcactgtgatgtgtc

SEQ ID NO: 4334256 - DNA, 25 bp, Homo sapien
cattcactgtgatgtgtcaacccca

SEQ ID NO: 4334257 - DNA, 25 bp, Homo sapien
gtaccccagagacaagcgatgattt

SEQ ID NO: 4334258 - DNA, 25 bp, Homo sapien
gcagatttggtgactctcagctaca

SEQ ID NO: 4334259 - DNA, 25 bp, Homo sapien
ttgacctgaaggcataacaaggctg

SEQ ID NO: 4334260 - DNA, 25 bp, Homo sapien
tgtctggcacagtataggtcctaag

SEQ ID NO: 4334261 - DNA, 25 bp, Homo sapien
ggccctattcctataccaagagaga

SEQ ID NO: 4334262 - DNA, 25 bp, Homo sapien
tagtctctaaccattaaagagggtg

SEQ ID NO: 4334263 - DNA, 25 bp, Homo sapien
tctcccatctagcttttggaatgga

SEQ ID NO: 4334264 - DNA, 25 bp, Homo sapien
tctgagtgaatgtaggagccttgaa

SEQ ID NO: 4334265 - DNA, 25 bp, Homo sapien
ttggcttccccaatcaccatgtgtt

SEQ ID NO: 4334266 - DNA, 25 bp, Homo sapien
gtcagctatctctttccaacatgag

SEQ ID NO: 4334267 - DNA, 25 bp, Homo sapien
gatttgccagtgattgtgtgtgcca

SEQ ID NO: 4334268 - DNA, 25 bp, Homo sapien
tgtgtgccactgttagctactttca

SEQ ID NO: 4334269 - DNA, 25 bp, Homo sapien
tgtttacaacgctctctagtcactg

SEQ ID NO: 4334270 - DNA, 25 bp, Homo sapien
gttgtacactcatgtcctggattgt

SEQ ID NO: 4334271 - DNA, 25 bp, Homo sapien
gatttttgtatgcagtgaaagatag

SEQ ID NO: 4334272 - DNA, 25 bp, Homo sapien
cctggattgtctcactaaagttttc

SEQ ID NO: 4334273 - DNA, 25 bp, Homo sapien
gggcgtagtttcactcttctagata

SEQ ID NO: 4334274 - DNA, 25 bp, Homo sapien
acttttggctcataagaatggcacc

SEQ ID NO: 4334275 - DNA, 25 bp, Homo sapien
tccaggctagtttcaccagttaaaa

SEQ ID NO: 4334276 - DNA, 25 bp, Homo sapien
ttaagagaacgaagccagtccagta

SEQ ID NO: 4334277 - DNA, 25 bp, Homo sapien
tggtccacgtactcaagattcatgt

SEQ ID NO: 4334278 - DNA, 25 bp, Homo sapien
gaaccaggacacatgagacatgaca

SEQ ID NO: 4334279 - DNA, 25 bp, Homo sapien
ggtaggaagatgtaagaaccaggac

SEQ ID NO: 4334280 - DNA, 25 bp, Homo sapien
tatcatgcttgatacagggaggtag

SEQ ID NO: 4334281 - DNA, 25 bp, Homo sapien
tccagcaaccatagaaacagttaaa

SEQ ID NO: 4334282 - DNA, 25 bp, Homo sapien
agggtgtagtttcaaaattcagtca

SEQ ID NO: 4334283 - DNA, 25 bp, Homo sapien
ctgagggtgtagtttcaaaattcag

SEQ ID NO: 4334284 - DNA, 25 bp, Homo sapien
gggtgtagtttcaaaattcagtcac

SEQ ID NO: 4334285 - DNA, 25 bp, Homo sapien
gagggtgtagtttcaaaattcagtc

SEQ ID NO: 4334286 - DNA, 25 bp, Homo sapien
tcttcccctttgcaacatgtgcatc

SEQ ID NO: 4334287 - DNA, 25 bp, Homo sapien
aaaatgggctcctcgctcaggactt

SEQ ID NO: 4334288 - DNA, 25 bp, Homo sapien
catttgctcaaggaaaacactcttc

SEQ ID NO: 4334289 - DNA, 25 bp, Homo sapien
tgtgcatctttataccacttcaaaa

SEQ ID NO: 4334290 - DNA, 25 bp, Homo sapien
gaatgttgtcatagcaatactcctg

SEQ ID NO: 4334291 - DNA, 25 bp, Homo sapien
cttcagtaacagagtcagctcagac

SEQ ID NO: 4334292 - DNA, 25 bp, Homo sapien
ctggaaggctttcatgaaatgaatg

SEQ ID NO: 4334293 - DNA, 25 bp, Homo sapien
aaagcaccactattttctggaaggc

SEQ ID NO: 4334294 - DNA, 25 bp, Homo sapien
gggctgtattgcttcaagtgcttga

SEQ ID NO: 4334295 - DNA, 25 bp, Homo sapien
taaaggcagcaagtagagggctgta

SEQ ID NO: 4334296 - DNA, 25 bp, Homo sapien
cttgagtagtaaaggcagcaagtag

SEQ ID NO: 4334297 - DNA, 25 bp, Homo sapien
caagtagagggctgtattgcttcaa

SEQ ID NO: 4334298 - DNA, 25 bp, Homo sapien
gagctccttacgagctccgatggtt

SEQ ID NO: 4334299 - DNA, 25 bp, Homo sapien
cattaagtgttccattagccagaag

SEQ ID NO: 4334300 - DNA, 25 bp, Homo sapien
tgtgaagtgttcaacactttgctta

SEQ ID NO: 4334301 - DNA, 25 bp, Homo sapien
tttccgaagacttgcagctactgca

SEQ ID NO: 4334302 - DNA, 25 bp, Homo sapien
gcttgactaagctaaggatgtccag

SEQ ID NO: 4334303 - DNA, 25 bp, Homo sapien
ggccaaagttccaataagggatgaa

SEQ ID NO: 4334304 - DNA, 25 bp, Homo sapien
gaaggcggtcatatagtcacatggg

SEQ ID NO: 4334305 - DNA, 25 bp, Homo sapien
gagagattgtttttaggtcatagca

SEQ ID NO: 4334306 - DNA, 25 bp, Homo sapien
ccggtagccgaggatgcaaagagta

SEQ ID NO: 4334307 - DNA, 25 bp, Homo sapien
gagtaggaactagaccctggaggaa

SEQ ID NO: 4334308 - DNA, 25 bp, Homo sapien
ggattaaagcagagccgcagccggt

SEQ ID NO: 4334309 - DNA, 25 bp, Homo sapien
gttccacggggattaaagcagagcc

SEQ ID NO: 4334310 - DNA, 25 bp, Homo sapien
gcaaagtttgaagtaggtacctaga

SEQ ID NO: 4334311 - DNA, 25 bp, Homo sapien
gacactgagtaggaggaggaaaaac

SEQ ID NO: 4334312 - DNA, 25 bp, Homo sapien
tagaaatatagaacaatgtccccag

SEQ ID NO: 4334313 - DNA, 25 bp, Homo sapien
gatgttagacaatctgactcttggg

SEQ ID NO: 4334314 - DNA, 25 bp, Homo sapien
ggcattaaccccatagatattcctg

SEQ ID NO: 4334315 - DNA, 25 bp, Homo sapien
taacaaagagtgcttcccaaggtca

SEQ ID NO: 4334316 - DNA, 25 bp, Homo sapien
gactaccctgggaattagaagtgtg

SEQ ID NO: 4334317 - DNA, 25 bp, Homo sapien
gcccttagggtacagccatacaatg

SEQ ID NO: 4334318 - DNA, 25 bp, Homo sapien
tagcctcttaattggtctccctgtg

SEQ ID NO: 4334319 - DNA, 25 bp, Homo sapien
gcctcttaattggtctccctgtgat

SEQ ID NO: 4334320 - DNA, 25 bp, Homo sapien
tcttaattggtctccctgtgatatt

SEQ ID NO: 4334321 - DNA, 25 bp, Homo sapien
acaatagcctcttaattggtctccc

SEQ ID NO: 4334322 - DNA, 25 bp, Homo sapien
tctgcgtaggtaacaatgagctgaa

SEQ ID NO: 4334323 - DNA, 25 bp, Homo sapien
gagacctgatctagggtatctggca

SEQ ID NO: 4334324 - DNA, 25 bp, Homo sapien
cccatgtgatgttgggcctgcgagt

SEQ ID NO: 4334325 - DNA, 25 bp, Homo sapien
ccagaggcctagacgggaaaaatga

SEQ ID NO: 4334326 - DNA, 25 bp, Homo sapien
taatagatactatagaggagaaggg

SEQ ID NO: 4334327 - DNA, 25 bp, Homo sapien
actggcagcttgtgtaaaaaagctg

SEQ ID NO: 4334328 - DNA, 25 bp, Homo sapien
caaatcatatggaactgatgcagta

SEQ ID NO: 4334329 - DNA, 25 bp, Homo sapien
aaaaagctgactaagttaatccgtg

SEQ ID NO: 4334330 - DNA, 25 bp, Homo sapien
catcagccactatattaatgaggcc

SEQ ID NO: 4334331 - DNA, 25 bp, Homo sapien
gtttactttttctacatgaccttga

SEQ ID NO: 4334332 - DNA, 25 bp, Homo sapien
gcgacccattgaaggttagtaggta

SEQ ID NO: 4334333 - DNA, 25 bp, Homo sapien
tcttttcttgatctagtctaccctg

SEQ ID NO: 4334334 - DNA, 25 bp, Homo sapien
tatttagcagctacattgcaggaca

SEQ ID NO: 4334335 - DNA, 25 bp, Homo sapien
ggaactcagtctatcccttgaacag

SEQ ID NO: 4334336 - DNA, 25 bp, Homo sapien
taataacggatagaaccatgtctcc

SEQ ID NO: 4334337 - DNA, 25 bp, Homo sapien
tgccaattcaccatactgccatcgg

SEQ ID NO: 4334338 - DNA, 25 bp, Homo sapien
gaaataatactgctctttttagtgg

SEQ ID NO: 4334339 - DNA, 25 bp, Homo sapien
tgaccattaatatgctcagggtcct

SEQ ID NO: 4334340 - DNA, 25 bp, Homo sapien
ctgcagggtggattcttgccctccg

SEQ ID NO: 4334341 - DNA, 25 bp, Homo sapien
tcttgccctccgtattgaccattaa

SEQ ID NO: 4334342 - DNA, 25 bp, Homo sapien
accatcaaaccatctgccgaaaggg

SEQ ID NO: 4334343 - DNA, 25 bp, Homo sapien
catcgtgcttatgcgtttggaaaag

SEQ ID NO: 4334344 - DNA, 25 bp, Homo sapien
aaaatgcaatcactgctctggccag

SEQ ID NO: 4334345 - DNA, 25 bp, Homo sapien
gctaggttcaagctcagagaatttc

SEQ ID NO: 4334346 - DNA, 25 bp, Homo sapien
cctgtgacagtagtaactgcaggat

SEQ ID NO: 4334347 - DNA, 25 bp, Homo sapien
taactgcaggattcaggcctttgtg

SEQ ID NO: 4334348 - DNA, 25 bp, Homo sapien
gcttatccctgtgacagtagtaact

SEQ ID NO: 4334349 - DNA, 25 bp, Homo sapien
agtaactgcaggattcaggcctttg

SEQ ID NO: 4334350 - DNA, 25 bp, Homo sapien
tcctggaatcatacttcttgataag

SEQ ID NO: 4334351 - DNA, 25 bp, Homo sapien
tagatgtgggcggaagttaatagca

SEQ ID NO: 4334352 - DNA, 25 bp, Homo sapien
gggtatcctaattaaagtgtgttga

SEQ ID NO: 4334353 - DNA, 25 bp, Homo sapien
taatagcaatgatctcaggacttcc

SEQ ID NO: 4334354 - DNA, 25 bp, Homo sapien
taatttgctgaaatttatctgcaat

SEQ ID NO: 4334355 - DNA, 25 bp, Homo sapien
gatttgtatgcattaccaaggtttc

SEQ ID NO: 4334356 - DNA, 25 bp, Homo sapien
tatgcattaccaaggtttctaattc

SEQ ID NO: 4334357 - DNA, 25 bp, Homo sapien
tttgtatgcattaccaaggtttcta

SEQ ID NO: 4334358 - DNA, 25 bp, Homo sapien
caggtagaaccaatatgctggctca

SEQ ID NO: 4334359 - DNA, 25 bp, Homo sapien
ggtagaaccaatatgctggctcaaa

SEQ ID NO: 4334360 - DNA, 25 bp, Homo sapien
aaccaatatgctggctcaaaatgga

SEQ ID NO: 4334361 - DNA, 25 bp, Homo sapien
cagcaggtagaaccaatatgctggc

SEQ ID NO: 4334362 - DNA, 25 bp, Homo sapien
gacctttatcctgtattctgtatgg

SEQ ID NO: 4334363 - DNA, 25 bp, Homo sapien
catttctggaccgttatagagatta

SEQ ID NO: 4334364 - DNA, 25 bp, Homo sapien
gctctagaccccaatgctttcattt

SEQ ID NO: 4334365 - DNA, 25 bp, Homo sapien
ttctgtatggactatgaacattcct

SEQ ID NO: 4334366 - DNA, 25 bp, Homo sapien
ttgaagtgtgatcctcaatgtgaga

SEQ ID NO: 4334367 - DNA, 25 bp, Homo sapien
tgagtgagttcttaccctattcgtt

SEQ ID NO: 4334368 - DNA, 25 bp, Homo sapien
tgagttcttaccctattcgttcatg

SEQ ID NO: 4334369 - DNA, 25 bp, Homo sapien
cacacctagagatatagtttggatg

SEQ ID NO: 4334370 - DNA, 25 bp, Homo sapien
agctgcgtgcttttcattgttctgt

SEQ ID NO: 4334371 - DNA, 25 bp, Homo sapien
tcggtgatttgttgctgactcccct

SEQ ID NO: 4334372 - DNA, 25 bp, Homo sapien
cagctgcgtgcttttcattgttctg

SEQ ID NO: 4334373 - DNA, 25 bp, Homo sapien
ttcttcggtgatttgttgctgactc

SEQ ID NO: 4334374 - DNA, 25 bp, Homo sapien
agaagctcttcacctgcaacgctaa

SEQ ID NO: 4334375 - DNA, 25 bp, Homo sapien
ggacactccgaatgtttagcacagc

SEQ ID NO: 4334376 - DNA, 25 bp, Homo sapien
gcaacgctaattaatcgtaaacacg

SEQ ID NO: 4334377 - DNA, 25 bp, Homo sapien
cagcacgccgaaatgttgatgtaac

SEQ ID NO: 4334378 - DNA, 25 bp, Homo sapien
gaagagtactgaacttggtctcaaa

SEQ ID NO: 4334379 - DNA, 25 bp, Homo sapien
tagatggcaagatgacacagtctgc

SEQ ID NO: 4334380 - DNA, 25 bp, Homo sapien
tactgtactcgcaacacatcgctgg

SEQ ID NO: 4334381 - DNA, 25 bp, Homo sapien
acatcgctgggtctttggaaacttg

SEQ ID NO: 4334382 - DNA, 25 bp, Homo sapien
tcagagtccactttctcattcttaa

SEQ ID NO: 4334383 - DNA, 25 bp, Homo sapien
tctcattcttaaaaccctcttcatt

SEQ ID NO: 4334384 - DNA, 25 bp, Homo sapien
taatgtcctcagagtccactttctc

SEQ ID NO: 4334385 - DNA, 25 bp, Homo sapien
taaaaccctcttcattggccttcat

SEQ ID NO: 4334386 - DNA, 25 bp, Homo sapien
ccatgggcccacagactaatttgac

SEQ ID NO: 4334387 - DNA, 25 bp, Homo sapien
ggaagttggcccacttagataagta

SEQ ID NO: 4334388 - DNA, 25 bp, Homo sapien
tctaaaggaaagtgtgggtgcctca

SEQ ID NO: 4334389 - DNA, 25 bp, Homo sapien
ggtagtatctagaataaggccatca

SEQ ID NO: 4334390 - DNA, 25 bp, Homo sapien
aaatcttttaccaaagacagctcac

SEQ ID NO: 4334391 - DNA, 25 bp, Homo sapien
aatcttttaccaaagacagctcaca

SEQ ID NO: 4334392 - DNA, 25 bp, Homo sapien
ggctggcccgttaccactgataaat

SEQ ID NO: 4334393 - DNA, 25 bp, Homo sapien
tgaatggctggcccgttaccactga

SEQ ID NO: 4334394 - DNA, 25 bp, Homo sapien
actcctgcatttgtgacatagcagc

SEQ ID NO: 4334395 - DNA, 25 bp, Homo sapien
atggagatgatagctttatcagcaa

SEQ ID NO: 4334396 - DNA, 25 bp, Homo sapien
tgtgcaatgacttcacagcaaggtt

SEQ ID NO: 4334397 - DNA, 25 bp, Homo sapien
catttgtgacatagcagcaggttgt

SEQ ID NO: 4334398 - DNA, 25 bp, Homo sapien
tatcgcctttatcgtttttactgtg

SEQ ID NO: 4334399 - DNA, 25 bp, Homo sapien
gccaggagatatgctgttagtctaa

SEQ ID NO: 4334400 - DNA, 25 bp, Homo sapien
taatcggtgtcttttaattcaggca

SEQ ID NO: 4334401 - DNA, 25 bp, Homo sapien
taaagtcatgtagcgtgacgtctcc

SEQ ID NO: 4334402 - DNA, 25 bp, Homo sapien
cctgtcctatctgatgtagcttcat

SEQ ID NO: 4334403 - DNA, 25 bp, Homo sapien
tcaaagagcacaacaggcagctgcc

SEQ ID NO: 4334404 - DNA, 25 bp, Homo sapien
ttggggacctttttagtattgctgc

SEQ ID NO: 4334405 - DNA, 25 bp, Homo sapien
gcatcaaagagcacaacaggcagct

SEQ ID NO: 4334406 - DNA, 25 bp, Homo sapien
gggacctttttagtattgctgccat

SEQ ID NO: 4334407 - DNA, 25 bp, Homo sapien
atgtatccgaatttgcattatagcc

SEQ ID NO: 4334408 - DNA, 25 bp, Homo sapien
tagactccggtgatacagctggctt

SEQ ID NO: 4334409 - DNA, 25 bp, Homo sapien
taaagaaatgtatccgaatttgcat

SEQ ID NO: 4334410 - DNA, 25 bp, Homo sapien
taaataaaagtagactccggtgata

SEQ ID NO: 4334411 - DNA, 25 bp, Homo sapien
gataaagtactagatgtgctttcac

SEQ ID NO: 4334412 - DNA, 25 bp, Homo sapien
aaagtactagatgtgctttcactgt

SEQ ID NO: 4334413 - DNA, 25 bp, Homo sapien
cttgtgataaagtactagatgtgct

SEQ ID NO: 4334414 - DNA, 25 bp, Homo sapien
ttccttgtgataaagtactagatgt

SEQ ID NO: 4334415 - DNA, 25 bp, Homo sapien
ataaagactcataactgttcctccc

SEQ ID NO: 4334416 - DNA, 25 bp, Homo sapien
gataaagactcataactgttcctcc

SEQ ID NO: 4334417 - DNA, 25 bp, Homo sapien
ctggtgaaacacgaggcctcagaaa

SEQ ID NO: 4334418 - DNA, 25 bp, Homo sapien
gaaacttgcagggtaaccatgaccc

SEQ ID NO: 4334419 - DNA, 25 bp, Homo sapien
taacccctaagttgctctggagtcc

SEQ ID NO: 4334420 - DNA, 25 bp, Homo sapien
tctggagtccactgtactgtgttgt

SEQ ID NO: 4334421 - DNA, 25 bp, Homo sapien
catgacccctgagacaataagacta

SEQ ID NO: 4334422 - DNA, 25 bp, Homo sapien
tatcagcagagttgcgggagggagc

SEQ ID NO: 4334423 - DNA, 25 bp, Homo sapien
ctttatcagcagagttgcgggaggg

SEQ ID NO: 4334424 - DNA, 25 bp, Homo sapien
aatcatgtaggggtctttcctgtgc

SEQ ID NO: 4334425 - DNA, 25 bp, Homo sapien
cctgtgctgatagtgaatggttctc

SEQ ID NO: 4334426 - DNA, 25 bp, Homo sapien
gaaaatgtttagactcctcactggc

SEQ ID NO: 4334427 - DNA, 25 bp, Homo sapien
gaactttgaaaagtaggaaggcaca

SEQ ID NO: 4334428 - DNA, 25 bp, Homo sapien
ctcaggaattagttgcagcactctt

SEQ ID NO: 4334429 - DNA, 25 bp, Homo sapien
tataaccccagacataaataaagca

SEQ ID NO: 4334430 - DNA, 25 bp, Homo sapien
ctaacttgggagtcaattccatcct

SEQ ID NO: 4334431 - DNA, 25 bp, Homo sapien
tatctaacttgggagtcaattccat

SEQ ID NO: 4334432 - DNA, 25 bp, Homo sapien
ttttatctaacttgggagtcaattc

SEQ ID NO: 4334433 - DNA, 25 bp, Homo sapien
tctaacttgggagtcaattccatcc

SEQ ID NO: 4334434 - DNA, 25 bp, Homo sapien
ctaagcactctaggcctccagaaga

SEQ ID NO: 4334435 - DNA, 25 bp, Homo sapien
gcttcagggcctactaacaggctgg

SEQ ID NO: 4334436 - DNA, 25 bp, Homo sapien
tacagggatgatactctgaaggagc

SEQ ID NO: 4334437 - DNA, 25 bp, Homo sapien
ggagtactgagcctgttaaaagaaa

SEQ ID NO: 4334438 - DNA, 25 bp, Homo sapien
aagtaggagacccataattcttcat

SEQ ID NO: 4334439 - DNA, 25 bp, Homo sapien
atctttggaagtaggagacccataa

SEQ ID NO: 4334440 - DNA, 25 bp, Homo sapien
tggaagtaggagacccataattctt

SEQ ID NO: 4334441 - DNA, 25 bp, Homo sapien
tttggaagtaggagacccataattc

SEQ ID NO: 4334442 - DNA, 25 bp, Homo sapien
tattaccatttcaaggatccctgcc

SEQ ID NO: 4334443 - DNA, 25 bp, Homo sapien
tggccatgtgagacacttctatgta

SEQ ID NO: 4334444 - DNA, 25 bp, Homo sapien
taagagaaccgccacctgcacagtt

SEQ ID NO: 4334445 - DNA, 25 bp, Homo sapien
tgtgagacacttctatgtatatgaa

SEQ ID NO: 4334446 - DNA, 25 bp, Homo sapien
ccccttctgatgttgtaattctctt

SEQ ID NO: 4334447 - DNA, 25 bp, Homo sapien
tttcaatagaaatgttgccacgtgg

SEQ ID NO: 4334448 - DNA, 25 bp, Homo sapien
actgcctctctcattgttgccattg

SEQ ID NO: 4334449 - DNA, 25 bp, Homo sapien
gccacgtggagagcataatgaagca

SEQ ID NO: 4334450 - DNA, 25 bp, Homo sapien
cccctgagagccgaaggtaatgtgg

SEQ ID NO: 4334451 - DNA, 25 bp, Homo sapien
gtaactatgtgctccaccactcgca

SEQ ID NO: 4334452 - DNA, 25 bp, Homo sapien
taatgtgggagtcgcctgttagcag

SEQ ID NO: 4334453 - DNA, 25 bp, Homo sapien
tacatcatctcggtaactatgtgct

SEQ ID NO: 4334454 - DNA, 25 bp, Homo sapien
acaggagctccgaaatcgccaccaa

SEQ ID NO: 4334455 - DNA, 25 bp, Homo sapien
atgaagatgacgatgtcaataccag

SEQ ID NO: 4334456 - DNA, 25 bp, Homo sapien
gaagatgacgatgtcaataccagga

SEQ ID NO: 4334457 - DNA, 25 bp, Homo sapien
tgaagatgacgatgtcaataccagg

SEQ ID NO: 4334458 - DNA, 25 bp, Homo sapien
agatgacgatgtcaataccaggaag

SEQ ID NO: 4334459 - DNA, 25 bp, Homo sapien
gcagagaatgacagccaaggacaga

SEQ ID NO: 4334460 - DNA, 25 bp, Homo sapien
ggcagagaatgacagccaaggacag

SEQ ID NO: 4334461 - DNA, 25 bp, Homo sapien
cagagaatgacagccaaggacagat

SEQ ID NO: 4334462 - DNA, 25 bp, Homo sapien
ccttcgtggcctttgtgtaatatca

SEQ ID NO: 4334463 - DNA, 25 bp, Homo sapien
atatgaggacacgatgctagaaact

SEQ ID NO: 4334464 - DNA, 25 bp, Homo sapien
ggacacgatgctagaaactgctgca

SEQ ID NO: 4334465 - DNA, 25 bp, Homo sapien
cctttgtgtaatatcatatgaggac

SEQ ID NO: 4334466 - DNA, 25 bp, Homo sapien
cctgcaggtaagagctaggcagttt

SEQ ID NO: 4334467 - DNA, 25 bp, Homo sapien
agtgatgctctattggtttgaaaag

SEQ ID NO: 4334468 - DNA, 25 bp, Homo sapien
taagagctaggcagtttagtgatgc

SEQ ID NO: 4334469 - DNA, 25 bp, Homo sapien
ttacagatttccttagccctgcagg

SEQ ID NO: 4334470 - DNA, 25 bp, Homo sapien
gcctaggttgaagtgcaatggtaca

SEQ ID NO: 4334471 - DNA, 25 bp, Homo sapien
ttcattcttgttgcctaggttgaag

SEQ ID NO: 4334472 - DNA, 25 bp, Homo sapien
tcctgagtagctgcatgtgccacta

SEQ ID NO: 4334473 - DNA, 25 bp, Homo sapien
ctgagtagctgcatgtgccactatg

SEQ ID NO: 4334474 - DNA, 25 bp, Homo sapien
tcatgaatactacaatagaggccac

SEQ ID NO: 4334475 - DNA, 25 bp, Homo sapien
gccacagccctgtcatatttaatgg

SEQ ID NO: 4334476 - DNA, 25 bp, Homo sapien
ttaatggttccaacactcagggtga

SEQ ID NO: 4334477 - DNA, 25 bp, Homo sapien
gttccaacactcagggtgacacctg

SEQ ID NO: 4334478 - DNA, 25 bp, Homo sapien
gaacctcaacaatgacagcaagtct

SEQ ID NO: 4334479 - DNA, 25 bp, Homo sapien
gccacgattcatcactataagcaat

SEQ ID NO: 4334480 - DNA, 25 bp, Homo sapien
catacatttaaagtggaacctcaac

SEQ ID NO: 4334481 - DNA, 25 bp, Homo sapien
tattccactactatatgtgagcagc

SEQ ID NO: 4334482 - DNA, 25 bp, Homo sapien
ggcagagtctgtgctatggacaaga

SEQ ID NO: 4334483 - DNA, 25 bp, Homo sapien
tggacaagactctgtgtggttagtc

SEQ ID NO: 4334484 - DNA, 25 bp, Homo sapien
acctgtccagactcaattgctataa

SEQ ID NO: 4334485 - DNA, 25 bp, Homo sapien
tggttagtcttctgcttacctgtcc

SEQ ID NO: 4334486 - DNA, 25 bp, Homo sapien
tgtgtagatacagtgtggtccctgc

SEQ ID NO: 4334487 - DNA, 25 bp, Homo sapien
tcaggttagcataggctctgcaccg

SEQ ID NO: 4334488 - DNA, 25 bp, Homo sapien
tctaacggtaacacaattcttcagt

SEQ ID NO: 4334489 - DNA, 25 bp, Homo sapien
gttccatcactcgtacctctaacgg

SEQ ID NO: 4334490 - DNA, 25 bp, Homo sapien
ctccatgctttaagccatcagccat

SEQ ID NO: 4334491 - DNA, 25 bp, Homo sapien
ggttccaggttctatcttgccatcc

SEQ ID NO: 4334492 - DNA, 25 bp, Homo sapien
tttcttggttccaggttctatcttg

SEQ ID NO: 4334493 - DNA, 25 bp, Homo sapien
tccaggttctatcttgccatcctct

SEQ ID NO: 4334494 - DNA, 25 bp, Homo sapien
gactgagtatacaaattgcacagag

SEQ ID NO: 4334495 - DNA, 25 bp, Homo sapien
tctgattgcatagatgtttggctgt

SEQ ID NO: 4334496 - DNA, 25 bp, Homo sapien
ctgtgtgtataatctgattgcatag

SEQ ID NO: 4334497 - DNA, 25 bp, Homo sapien
gacacaattgtagactgagtataca

SEQ ID NO: 4334498 - DNA, 25 bp, Homo sapien
tagtgaactgcacacacttctccag

SEQ ID NO: 4334499 - DNA, 25 bp, Homo sapien
aatagtgaactgcacacacttctcc

SEQ ID NO: 4334500 - DNA, 25 bp, Homo sapien
cagttgagtggagtgccatgcgctg

SEQ ID NO: 4334501 - DNA, 25 bp, Homo sapien
gaactgcacacacttctccagaaca

SEQ ID NO: 4334502 - DNA, 25 bp, Homo sapien
tcatatcaaggctcaagttccaaaa

SEQ ID NO: 4334503 - DNA, 25 bp, Homo sapien
aaaagttggcttacaggatctggcc

SEQ ID NO: 4334504 - DNA, 25 bp, Homo sapien
tatgttctgtccactcagtaggtca

SEQ ID NO: 4334505 - DNA, 25 bp, Homo sapien
ggcagtgtccaccactctttggata

SEQ ID NO: 4334506 - DNA, 25 bp, Homo sapien
gaatctcatgctagaatcttggcag

SEQ ID NO: 4334507 - DNA, 25 bp, Homo sapien
cacagaactatagattgggaacaag

SEQ ID NO: 4334508 - DNA, 25 bp, Homo sapien
caaactgggatgttgctatgccagc

SEQ ID NO: 4334509 - DNA, 25 bp, Homo sapien
aatggcccaatctagaactctgtag

SEQ ID NO: 4334510 - DNA, 25 bp, Homo sapien
caccttggggctgacaacaaaagcc

SEQ ID NO: 4334511 - DNA, 25 bp, Homo sapien
tttgagtggatccaatgaaagcact

SEQ ID NO: 4334512 - DNA, 25 bp, Homo sapien
tcactcagtttgagtggatccaatg

SEQ ID NO: 4334513 - DNA, 25 bp, Homo sapien
cactggagattaaggcaagaaaaac

SEQ ID NO: 4334514 - DNA, 25 bp, Homo sapien
aatacagggactccatcagcagtca

SEQ ID NO: 4334515 - DNA, 25 bp, Homo sapien
atgcctaatacagggactccatcag

SEQ ID NO: 4334516 - DNA, 25 bp, Homo sapien
gtgcatgagcacactgtattgtatt

SEQ ID NO: 4334517 - DNA, 25 bp, Homo sapien
ggaagtgcatgagcacactgtattg

SEQ ID NO: 4334518 - DNA, 25 bp, Homo sapien
tcggccatacataattactttaatt

SEQ ID NO: 4334519 - DNA, 25 bp, Homo sapien
ctgtgctcggccatacataattact

SEQ ID NO: 4334520 - DNA, 25 bp, Homo sapien
gtgctcggccatacataattacttt

SEQ ID NO: 4334521 - DNA, 25 bp, Homo sapien
gctcggccatacataattactttaa

SEQ ID NO: 4334522 - DNA, 25 bp, Homo sapien
gggagagctcatgcagggaaactcc

SEQ ID NO: 4334523 - DNA, 25 bp, Homo sapien
aagggagagctcatgcagggaaact

SEQ ID NO: 4334524 - DNA, 25 bp, Homo sapien
gcaggcaaagggagagctcatgcag

SEQ ID NO: 4334525 - DNA, 25 bp, Homo sapien
ggcaaagggagagctcatgcaggga

SEQ ID NO: 4334526 - DNA, 25 bp, Homo sapien
tttctgcaaagccaactaaagataa

SEQ ID NO: 4334527 - DNA, 25 bp, Homo sapien
tgcaaagccaactaaagataactgg

SEQ ID NO: 4334528 - DNA, 25 bp, Homo sapien
tctgcaaagccaactaaagataact

SEQ ID NO: 4334529 - DNA, 25 bp, Homo sapien
caaagccaactaaagataactggaa

SEQ ID NO: 4334530 - DNA, 25 bp, Homo sapien
ggaaggaacctctcacaagaagtta

SEQ ID NO: 4334531 - DNA, 25 bp, Homo sapien
taaggatcattgctgaggagaaaga

SEQ ID NO: 4334532 - DNA, 25 bp, Homo sapien
gagatgaagagtaatcaggctcata

SEQ ID NO: 4334533 - DNA, 25 bp, Homo sapien
gccaggttcggtgaagagtaaacag

SEQ ID NO: 4334534 - DNA, 25 bp, Homo sapien
gagtaagggaacattgacacatgca

SEQ ID NO: 4334535 - DNA, 25 bp, Homo sapien
tattcatatatggaggaaaaccgac

SEQ ID NO: 4334536 - DNA, 25 bp, Homo sapien
caagaacccttcatggagagagagt

SEQ ID NO: 4334537 - DNA, 25 bp, Homo sapien
cgagtgatagttgcctttcccaaga

SEQ ID NO: 4334538 - DNA, 25 bp, Homo sapien
gtccactctgccaaataccacagga

SEQ ID NO: 4334539 - DNA, 25 bp, Homo sapien
aagctaactgagctttggagcagcc

SEQ ID NO: 4334540 - DNA, 25 bp, Homo sapien
tcaaaagggatagtgcacagtccac

SEQ ID NO: 4334541 - DNA, 25 bp, Homo sapien
cacttggcatgttcatgaaccttta

SEQ ID NO: 4334542 - DNA, 25 bp, Homo sapien
gggtgccactaccatgctcattatt

SEQ ID NO: 4334543 - DNA, 25 bp, Homo sapien
cattattagactgcgaacttcatca

SEQ ID NO: 4334544 - DNA, 25 bp, Homo sapien
ttgggtgccactaccatgctcatta

SEQ ID NO: 4334545 - DNA, 25 bp, Homo sapien
taccatgctcattattagactgcga

SEQ ID NO: 4334546 - DNA, 25 bp, Homo sapien
tgcaccaagtgtgggccccaaatat

SEQ ID NO: 4334547 - DNA, 25 bp, Homo sapien
gcttgtatgaccaattttctcccac

SEQ ID NO: 4334548 - DNA, 25 bp, Homo sapien
agtgtgggccccaaatattgtagat

SEQ ID NO: 4334549 - DNA, 25 bp, Homo sapien
ggcttgtatgaccaattttctccca

SEQ ID NO: 4334550 - DNA, 25 bp, Homo sapien
aatgaggcaccagctaatgggccat

SEQ ID NO: 4334551 - DNA, 25 bp, Homo sapien
ccagctaatgggccatgagatcgac

SEQ ID NO: 4334552 - DNA, 25 bp, Homo sapien
gtaagtaaatgaggcaccagctaat

SEQ ID NO: 4334553 - DNA, 25 bp, Homo sapien
ctagaaccaggaaagtaagtaaatg

SEQ ID NO: 4334554 - DNA, 25 bp, Homo sapien
tttcaagtggtccagtcagcaacag

SEQ ID NO: 4334555 - DNA, 25 bp, Homo sapien
ggcccatgcttgtcgatattttcaa

SEQ ID NO: 4334556 - DNA, 25 bp, Homo sapien
gtgctcctaatcttttccaagtctg

SEQ ID NO: 4334557 - DNA, 25 bp, Homo sapien
tggaagaggagattgcaggtgagat

SEQ ID NO: 4334558 - DNA, 25 bp, Homo sapien
ggataacaaatagggcaccaggcag

SEQ ID NO: 4334559 - DNA, 25 bp, Homo sapien
gagactccttccttgcactcgagga

SEQ ID NO: 4334560 - DNA, 25 bp, Homo sapien
gccaggccagccaagtaagttcttg

SEQ ID NO: 4334561 - DNA, 25 bp, Homo sapien
taagggctgcaattcctaggcaagc

SEQ ID NO: 4334562 - DNA, 25 bp, Homo sapien
tatcaatttagacagcatgctatgt

SEQ ID NO: 4334563 - DNA, 25 bp, Homo sapien
tattatccctacatgtcgttgcggg

SEQ ID NO: 4334564 - DNA, 25 bp, Homo sapien
catgctatgtattctggtttctctg

SEQ ID NO: 4334565 - DNA, 25 bp, Homo sapien
tctgcacgttttcctgccaccatgt

SEQ ID NO: 4334566 - DNA, 25 bp, Homo sapien
gagattgagaaaatagctgggtttt

SEQ ID NO: 4334567 - DNA, 25 bp, Homo sapien
cattattctagttgaaaaaagagca

SEQ ID NO: 4334568 - DNA, 25 bp, Homo sapien
gggatgggccacttctgtcctaaac

SEQ ID NO: 4334569 - DNA, 25 bp, Homo sapien
aacactgaaaattgtctaccacttt

SEQ ID NO: 4334570 - DNA, 25 bp, Homo sapien
acttactggagcaatatatattcac

SEQ ID NO: 4334571 - DNA, 25 bp, Homo sapien
gatttggaacaatcagcactggagg

SEQ ID NO: 4334572 - DNA, 25 bp, Homo sapien
gaaagttgctatttaaaggctgctc

SEQ ID NO: 4334573 - DNA, 25 bp, Homo sapien
tatgacccgtaaccagtacttactg

SEQ ID NO: 4334574 - DNA, 25 bp, Homo sapien
gttgggcaccagaacaaatatcctg

SEQ ID NO: 4334575 - DNA, 25 bp, Homo sapien
aacatagcccgggatgttgggcacc

SEQ ID NO: 4334576 - DNA, 25 bp, Homo sapien
tcctgcatttgttctggtgagtaac

SEQ ID NO: 4334577 - DNA, 25 bp, Homo sapien
ggtgagtaactcgaaggcaacatag

SEQ ID NO: 4334578 - DNA, 25 bp, Homo sapien
tagtgctctaatagctccattacct

SEQ ID NO: 4334579 - DNA, 25 bp, Homo sapien
tgggatgagtactggttttttctta

SEQ ID NO: 4334580 - DNA, 25 bp, Homo sapien
ctcttgagtagtgctctaatagctc

SEQ ID NO: 4334581 - DNA, 25 bp, Homo sapien
ctgtgttaacccattgtgtgggggt

SEQ ID NO: 4334582 - DNA, 25 bp, Homo sapien
tattagccaactgttctggaaagat

SEQ ID NO: 4334583 - DNA, 25 bp, Homo sapien
tgaggaaggccatgatattagccaa

SEQ ID NO: 4334584 - DNA, 25 bp, Homo sapien
tctcttaagagattgtatgctgcct

SEQ ID NO: 4334585 - DNA, 25 bp, Homo sapien
gaaataacactagacagcagatgtc

SEQ ID NO: 4334586 - DNA, 25 bp, Homo sapien
ttcagtgtcactcgggcttctcgta

SEQ ID NO: 4334587 - DNA, 25 bp, Homo sapien
gctgattcagtgtcactcgggcttc

SEQ ID NO: 4334588 - DNA, 25 bp, Homo sapien
gattcagtgtcactcgggcttctcg

SEQ ID NO: 4334589 - DNA, 25 bp, Homo sapien
tgaagctgattcagtgtcactcggg

SEQ ID NO: 4334590 - DNA, 25 bp, Homo sapien
ttctcagcatagttcctctttggct

SEQ ID NO: 4334591 - DNA, 25 bp, Homo sapien
ttgtgggcattctcagcatagttcc

SEQ ID NO: 4334592 - DNA, 25 bp, Homo sapien
tcacttcagtgctttgtgggcattc

SEQ ID NO: 4334593 - DNA, 25 bp, Homo sapien
tcagtgctttgtgggcattctcagc

SEQ ID NO: 4334594 - DNA, 25 bp, Homo sapien
tttatgactgtctttgaacgacaca

SEQ ID NO: 4334595 - DNA, 25 bp, Homo sapien
acgacacagttaatgcttctttgcc

SEQ ID NO: 4334596 - DNA, 25 bp, Homo sapien
ctttgaacgacacagttaatgcttc

SEQ ID NO: 4334597 - DNA, 25 bp, Homo sapien
actggctttatgactgtctttgaac

SEQ ID NO: 4334598 - DNA, 25 bp, Homo sapien
caaacttcgtattatagttttcagg

SEQ ID NO: 4334599 - DNA, 25 bp, Homo sapien
cagggcattagtgaccttgtttacc

SEQ ID NO: 4334600 - DNA, 25 bp, Homo sapien
tcaccatggcaagcaaacttcgtat

SEQ ID NO: 4334601 - DNA, 25 bp, Homo sapien
gttttcagggcattagtgaccttgt

SEQ ID NO: 4334602 - DNA, 25 bp, Homo sapien
ttgtttgagctacttccagtgcttc

SEQ ID NO: 4334603 - DNA, 25 bp, Homo sapien
tctaccactatgctcctttggccca

SEQ ID NO: 4334604 - DNA, 25 bp, Homo sapien
tcctttggcccattgcccaaggctt

SEQ ID NO: 4334605 - DNA, 25 bp, Homo sapien
tttgtttgagctacttccagtgctt

SEQ ID NO: 4334606 - DNA, 25 bp, Homo sapien
cccatcagtgtgaggagagtaacat

SEQ ID NO: 4334607 - DNA, 25 bp, Homo sapien
aggccccatcagtgtgaggagagta

SEQ ID NO: 4334608 - DNA, 25 bp, Homo sapien
tctgaggccccatcagtgtgaggag

SEQ ID NO: 4334609 - DNA, 25 bp, Homo sapien
ttaccacaagccgctgtctgaggcc

SEQ ID NO: 4334610 - DNA, 25 bp, Homo sapien
gctactactcccataggaagatctt

SEQ ID NO: 4334611 - DNA, 25 bp, Homo sapien
tactactcccataggaagatctttt

SEQ ID NO: 4334612 - DNA, 25 bp, Homo sapien
tgctactactcccataggaagatct

SEQ ID NO: 4334613 - DNA, 25 bp, Homo sapien
ctactcccataggaagatcttttga

SEQ ID NO: 4334614 - DNA, 25 bp, Homo sapien
tttgtgtcgcagcaccagagaatga

SEQ ID NO: 4334615 - DNA, 25 bp, Homo sapien
ggtgcacatgagctctcaatccata

SEQ ID NO: 4334616 - DNA, 25 bp, Homo sapien
tctaactctatggaagcaacccagg

SEQ ID NO: 4334617 - DNA, 25 bp, Homo sapien
tactgtacatggacaggtgatcctg

SEQ ID NO: 4334618 - DNA, 25 bp, Homo sapien
gatttaagccatatgacaccttcct

SEQ ID NO: 4334619 - DNA, 25 bp, Homo sapien
cagagtaacagtttttgcaagtgta

SEQ ID NO: 4334620 - DNA, 25 bp, Homo sapien
ccagctttgctttcctatgaacaca

SEQ ID NO: 4334621 - DNA, 25 bp, Homo sapien
tcaatattgtttgctgtgtagccaa

SEQ ID NO: 4334622 - DNA, 25 bp, Homo sapien
caagcatggattggtcttttcaata

SEQ ID NO: 4334623 - DNA, 25 bp, Homo sapien
ccatctgtgcaaggcctaaggtcta

SEQ ID NO: 4334624 - DNA, 25 bp, Homo sapien
gaataattggtaactgatgggccca

SEQ ID NO: 4334625 - DNA, 25 bp, Homo sapien
tacttaaagtggagcctcagcccag

SEQ ID NO: 4334626 - DNA, 25 bp, Homo sapien
tacccagtttatgccgttgccagct

SEQ ID NO: 4334627 - DNA, 25 bp, Homo sapien
tattatccatttcaggccccatttt

SEQ ID NO: 4334628 - DNA, 25 bp, Homo sapien
tgcctaggatttatacgccctttcc

SEQ ID NO: 4334629 - DNA, 25 bp, Homo sapien
tcaggttaaagcatgctgcctagga

SEQ ID NO: 4334630 - DNA, 25 bp, Homo sapien
ctttccttaggccatggcatttgta

SEQ ID NO: 4334631 - DNA, 25 bp, Homo sapien
ttttcccaaatcctggtagattgct

SEQ ID NO: 4334632 - DNA, 25 bp, Homo sapien
gagttgtggtcacaactccaaggtg

SEQ ID NO: 4334633 - DNA, 25 bp, Homo sapien
tccaaggtggtagttcttgcctact

SEQ ID NO: 4334634 - DNA, 25 bp, Homo sapien
cctggtagattgctggtgtttctga

SEQ ID NO: 4334635 - DNA, 25 bp, Homo sapien
caaaagaggttgtaagtgtgacaag

SEQ ID NO: 4334636 - DNA, 25 bp, Homo sapien
aataagggcagttgttatgaaaact

SEQ ID NO: 4334637 - DNA, 25 bp, Homo sapien
gattcttccagaatgaggagttaaa

SEQ ID NO: 4334638 - DNA, 25 bp, Homo sapien
gttacttattattgtggcaaaagag

SEQ ID NO: 4334639 - DNA, 25 bp, Homo sapien
ttcatcatctttgtatccggtgtcc

SEQ ID NO: 4334640 - DNA, 25 bp, Homo sapien
tgtttctgttgataagaggtagagc

SEQ ID NO: 4334641 - DNA, 25 bp, Homo sapien
tcatctttgtatccggtgtccaggg

SEQ ID NO: 4334642 - DNA, 25 bp, Homo sapien
tctgttgataagaggtagagcttgt

SEQ ID NO: 4334643 - DNA, 25 bp, Homo sapien
aacaactgagtgtttggccagggca

SEQ ID NO: 4334644 - DNA, 25 bp, Homo sapien
cacatgggccgctggatttcgagag

SEQ ID NO: 4334645 - DNA, 25 bp, Homo sapien
cagcaggtcaccaactggcagaaca

SEQ ID NO: 4334646 - DNA, 25 bp, Homo sapien
cgacacacaggtggctggacatcga

SEQ ID NO: 4334647 - DNA, 25 bp, Homo sapien
caaggatagggtttccagatttgat

SEQ ID NO: 4334648 - DNA, 25 bp, Homo sapien
aacaaggatagggtttccagatttg

SEQ ID NO: 4334649 - DNA, 25 bp, Homo sapien
gatagggtttccagatttgatataa

SEQ ID NO: 4334650 - DNA, 25 bp, Homo sapien
ggataacaaggatagggtttccaga

SEQ ID NO: 4334651 - DNA, 25 bp, Homo sapien
tttcctccaccaaatcaaaaggcat

SEQ ID NO: 4334652 - DNA, 25 bp, Homo sapien
tgctccgtgggaaggatctcgtaac

SEQ ID NO: 4334653 - DNA, 25 bp, Homo sapien
tatagaacatgataaacagccagtg

SEQ ID NO: 4334654 - DNA, 25 bp, Homo sapien
tgataaaccaatagtagcaggcatt

SEQ ID NO: 4334655 - DNA, 25 bp, Homo sapien
tgccaatgcttgctgtcccatcact

SEQ ID NO: 4334656 - DNA, 25 bp, Homo sapien
ctggctttatccatcatcgccaaca

SEQ ID NO: 4334657 - DNA, 25 bp, Homo sapien
tgtttcacagatcaaaagcaggcac

SEQ ID NO: 4334658 - DNA, 25 bp, Homo sapien
tcttacatcataactctctctggct

SEQ ID NO: 4334659 - DNA, 25 bp, Homo sapien
gctgaatgtcttacatcataactct

SEQ ID NO: 4334660 - DNA, 25 bp, Homo sapien
caatatagttgccagaatttatagt

SEQ ID NO: 4334661 - DNA, 25 bp, Homo sapien
tatagttgccagaatttatagtcca

SEQ ID NO: 4334662 - DNA, 25 bp, Homo sapien
tcaggcaatatagttgccagaattt

SEQ ID NO: 4334663 - DNA, 25 bp, Homo sapien
ggcaatatagttgccagaatttata

SEQ ID NO: 4334664 - DNA, 25 bp, Homo sapien
cagcacttggcttgagagagtgtcc

SEQ ID NO: 4334665 - DNA, 25 bp, Homo sapien
cattcatgtggaaaagatcaactct

SEQ ID NO: 4334666 - DNA, 25 bp, Homo sapien
tccataacaggtggccctttctgtc

SEQ ID NO: 4334667 - DNA, 25 bp, Homo sapien
tgtctgagtcccacagcacttggct

SEQ ID NO: 4334668 - DNA, 25 bp, Homo sapien
tcagcagtggggcaccatcactgtg

SEQ ID NO: 4334669 - DNA, 25 bp, Homo sapien
gggagaacgtaacagattctgatcg

SEQ ID NO: 4334670 - DNA, 25 bp, Homo sapien
aaagagaaggatcgtccagcagcag

SEQ ID NO: 4334671 - DNA, 25 bp, Homo sapien
tttcagggctgtgataatctttaca

SEQ ID NO: 4334672 - DNA, 25 bp, Homo sapien
gatcgatcgtgatgtctggatgagc

SEQ ID NO: 4334673 - DNA, 25 bp, Homo sapien
gatttgggtttgtgattcgatcttc

SEQ ID NO: 4334674 - DNA, 25 bp, Homo sapien
tttgtgattcgatcttccatatgtc

SEQ ID NO: 4334675 - DNA, 25 bp, Homo sapien
gcctcctgtttgaattaatctcttc

SEQ ID NO: 4334676 - DNA, 25 bp, Homo sapien
gctgcctcctgtttgaattaatctc

SEQ ID NO: 4334677 - DNA, 25 bp, Homo sapien
ctgatatttcatctaatgtcatgtg

SEQ ID NO: 4334678 - DNA, 25 bp, Homo sapien
atgtcatgtggaaagacaaagatac

SEQ ID NO: 4334679 - DNA, 25 bp, Homo sapien
tttacaaaatgacgtggctgatatt

SEQ ID NO: 4334680 - DNA, 25 bp, Homo sapien
tggctgatatttcatctaatgtcat

SEQ ID NO: 4334681 - DNA, 25 bp, Homo sapien
ctggtggtagtgagcacgataggtc

SEQ ID NO: 4334682 - DNA, 25 bp, Homo sapien
cacgataggtcagtttgagacaaaa

SEQ ID NO: 4334683 - DNA, 25 bp, Homo sapien
tgagcacgataggtcagtttgagac

SEQ ID NO: 4334684 - DNA, 25 bp, Homo sapien
tacaatctgaggacactgtcgcagg

SEQ ID NO: 4334685 - DNA, 25 bp, Homo sapien
ttgcttcagaaaatggccaaccttc

SEQ ID NO: 4334686 - DNA, 25 bp, Homo sapien
ttcagaaaatggccaaccttcactg

SEQ ID NO: 4334687 - DNA, 25 bp, Homo sapien
gcttcagaaaatggccaaccttcac

SEQ ID NO: 4334688 - DNA, 25 bp, Homo sapien
tcagaaaatggccaaccttcactga

SEQ ID NO: 4334689 - DNA, 25 bp, Homo sapien
aaaaatacagattttcccttcatat

SEQ ID NO: 4334690 - DNA, 25 bp, Homo sapien
gattttcccttcatattttctagcc

SEQ ID NO: 4334691 - DNA, 25 bp, Homo sapien
ttttcccttcatattttctagccat

SEQ ID NO: 4334692 - DNA, 25 bp, Homo sapien
aaatacagattttcccttcatattt

SEQ ID NO: 4334693 - DNA, 25 bp, Homo sapien
cagctagctggaccttagtatcggg

SEQ ID NO: 4334694 - DNA, 25 bp, Homo sapien
taaatcctggatatctgaccctcag

SEQ ID NO: 4334695 - DNA, 25 bp, Homo sapien
gaaacacgaggtactcaaggtggcc

SEQ ID NO: 4334696 - DNA, 25 bp, Homo sapien
gaatgtcctgcctgttctcaagtgc

SEQ ID NO: 4334697 - DNA, 25 bp, Homo sapien
cctggtgccgtatgtagattaaaaa

SEQ ID NO: 4334698 - DNA, 25 bp, Homo sapien
tctcccctgaatttgcactgctttg

SEQ ID NO: 4334699 - DNA, 25 bp, Homo sapien
tgtgatatgctctccttaactggct

SEQ ID NO: 4334700 - DNA, 25 bp, Homo sapien
gaagccaagtttggattctcctgag

SEQ ID NO: 4334701 - DNA, 25 bp, Homo sapien
tctcactacccgaggcatgagtgtg

SEQ ID NO: 4334702 - DNA, 25 bp, Homo sapien
gagggaggctgtttgtattctatgc

SEQ ID NO: 4334703 - DNA, 25 bp, Homo sapien
tctgataaacccatacttgacatac

SEQ ID NO: 4334704 - DNA, 25 bp, Homo sapien
tttagggtacacactagactcaggc

SEQ ID NO: 4334705 - DNA, 25 bp, Homo sapien
tgctaccacccaggacagaaatcag

SEQ ID NO: 4334706 - DNA, 25 bp, Homo sapien
taggcgaggctcagatatgatgttc

SEQ ID NO: 4334707 - DNA, 25 bp, Homo sapien
gcatctgtacttcgaacggcatctg

SEQ ID NO: 4334708 - DNA, 25 bp, Homo sapien
actgcaaatgggagagctagtccac

SEQ ID NO: 4334709 - DNA, 25 bp, Homo sapien
gccccgtgaataagctatgacagcc

SEQ ID NO: 4334710 - DNA, 25 bp, Homo sapien
tatgacagccctacattcagaaact

SEQ ID NO: 4334711 - DNA, 25 bp, Homo sapien
tggttaacagaggaaagccccgtga

SEQ ID NO: 4334712 - DNA, 25 bp, Homo sapien
taaaatggtaattatctgccaagca

SEQ ID NO: 4334713 - DNA, 25 bp, Homo sapien
tgtgatggggtgaaaattgctttgg

SEQ ID NO: 4334714 - DNA, 25 bp, Homo sapien
tgtgtgatggggtgaaaattgcttt

SEQ ID NO: 4334715 - DNA, 25 bp, Homo sapien
gtgtgatggggtgaaaattgctttg

SEQ ID NO: 4334716 - DNA, 25 bp, Homo sapien
attgctttattctgtaactgtttgg

SEQ ID NO: 4334717 - DNA, 25 bp, Homo sapien
ctttgatgggatatttgttctcatt

SEQ ID NO: 4334718 - DNA, 25 bp, Homo sapien
tattctgtaactgtttggcttccat

SEQ ID NO: 4334719 - DNA, 25 bp, Homo sapien
ggatatttgttctcatttgaattgc

SEQ ID NO: 4334720 - DNA, 25 bp, Homo sapien
aacagcaatctgtagaccagcctta

SEQ ID NO: 4334721 - DNA, 25 bp, Homo sapien
ttcttaaacagcaatctgtagacca

SEQ ID NO: 4334722 - DNA, 25 bp, Homo sapien
gcaatctgtagaccagccttatagg

SEQ ID NO: 4334723 - DNA, 25 bp, Homo sapien
taaacagcaatctgtagaccagcct

SEQ ID NO: 4334724 - DNA, 25 bp, Homo sapien
gtgagaacctgaacacaatttactg

SEQ ID NO: 4334725 - DNA, 25 bp, Homo sapien
tccagcttgtaaagaacatattaga

SEQ ID NO: 4334726 - DNA, 25 bp, Homo sapien
tatctacccaggaatatttggtttc

SEQ ID NO: 4334727 - DNA, 25 bp, Homo sapien
tataccacataaatttccacccatg

SEQ ID NO: 4334728 - DNA, 25 bp, Homo sapien
gagtaaatgatgtgctcccacgttc

SEQ ID NO: 4334729 - DNA, 25 bp, Homo sapien
gcctatatattaggtcccgccagaa

SEQ ID NO: 4334730 - DNA, 25 bp, Homo sapien
gaggattatacctgctctccggaag

SEQ ID NO: 4334731 - DNA, 25 bp, Homo sapien
tattgactgaccatgacacttctgt

SEQ ID NO: 4334732 - DNA, 25 bp, Homo sapien
gctgagggcagcgttgaaacttttt

SEQ ID NO: 4334733 - DNA, 25 bp, Homo sapien
gaagagtgtaacaaatggatccatc

SEQ ID NO: 4334734 - DNA, 25 bp, Homo sapien
tgggagtttcacaaggattgcctct

SEQ ID NO: 4334735 - DNA, 25 bp, Homo sapien
gaccgaaatgagatagcaagagctg

SEQ ID NO: 4334736 - DNA, 25 bp, Homo sapien
catgagaagctatatccagggtcac

SEQ ID NO: 4334737 - DNA, 25 bp, Homo sapien
aggtcatgctccttgtgccccaaga

SEQ ID NO: 4334738 - DNA, 25 bp, Homo sapien
tacccggtgtagtgcttgcgaatct

SEQ ID NO: 4334739 - DNA, 25 bp, Homo sapien
gactgctctgcaggccttgaaacaa

SEQ ID NO: 4334740 - DNA, 25 bp, Homo sapien
cactggtcttagcacacttacacaa

SEQ ID NO: 4334741 - DNA, 25 bp, Homo sapien
ggtttagtagtctcccacacaacaa

SEQ ID NO: 4334742 - DNA, 25 bp, Homo sapien
tgtgaattgggtacccacctgtggc

SEQ ID NO: 4334743 - DNA, 25 bp, Homo sapien
ctgtggcctattgagcactggtctt

SEQ ID NO: 4334744 - DNA, 25 bp, Homo sapien
cagagtcataggctctgagtcatcc

SEQ ID NO: 4334745 - DNA, 25 bp, Homo sapien
tactcagagtcataggctctgagtc

SEQ ID NO: 4334746 - DNA, 25 bp, Homo sapien
ctcagagtcataggctctgagtcat

SEQ ID NO: 4334747 - DNA, 25 bp, Homo sapien
agagtcataggctctgagtcatcct

SEQ ID NO: 4334748 - DNA, 25 bp, Homo sapien
gacaggtgccaatgagcttgtttca

SEQ ID NO: 4334749 - DNA, 25 bp, Homo sapien
aatcatgactcattggcttagccat

SEQ ID NO: 4334750 - DNA, 25 bp, Homo sapien
tcgctaagtagtgatattctccaag

SEQ ID NO: 4334751 - DNA, 25 bp, Homo sapien
catcaatcagcttcggaggtcaaac

SEQ ID NO: 4334752 - DNA, 25 bp, Homo sapien
tccagtagtgtagacagcacaggca

SEQ ID NO: 4334753 - DNA, 25 bp, Homo sapien
catttatacctgacaaagacccctt

SEQ ID NO: 4334754 - DNA, 25 bp, Homo sapien
gacctatatgtggacaaccgtgcta

SEQ ID NO: 4334755 - DNA, 25 bp, Homo sapien
accattttgccgaaggtcagaccta

SEQ ID NO: 4334756 - DNA, 25 bp, Homo sapien
tatcagggtagagaatgggaagctc

SEQ ID NO: 4334757 - DNA, 25 bp, Homo sapien
gaagctcttgacagttaaaagggac

SEQ ID NO: 4334758 - DNA, 25 bp, Homo sapien
taaagctacagatcgaagggttgga

SEQ ID NO: 4334759 - DNA, 25 bp, Homo sapien
tttgccataccaatcctaacacatg

SEQ ID NO: 4334760 - DNA, 25 bp, Homo sapien
tcagatgcctgcaatgtctgagact

SEQ ID NO: 4334761 - DNA, 25 bp, Homo sapien
tactcagggcagcagtcacatacat

SEQ ID NO: 4334762 - DNA, 25 bp, Homo sapien
taatcagtggaaggcataatgcaac

SEQ ID NO: 4334763 - DNA, 25 bp, Homo sapien
ggagagtttcccaggcaaatctaac

SEQ ID NO: 4334764 - DNA, 25 bp, Homo sapien
tactgaaggcaagcttaggtttctc

SEQ ID NO: 4334765 - DNA, 25 bp, Homo sapien
tacttccaatctcacatctctcctt

SEQ ID NO: 4334766 - DNA, 25 bp, Homo sapien
ttttcctacttccaatctcacatct

SEQ ID NO: 4334767 - DNA, 25 bp, Homo sapien
cttccaatctcacatctctccttac

SEQ ID NO: 4334768 - DNA, 25 bp, Homo sapien
ctttttcctacttccaatctcacat

SEQ ID NO: 4334769 - DNA, 25 bp, Homo sapien
gagatactgtaacaggctcttgcct

SEQ ID NO: 4334770 - DNA, 25 bp, Homo sapien
tggagatactgtaacaggctcttgc

SEQ ID NO: 4334771 - DNA, 25 bp, Homo sapien
actgtaacaggctcttgcctggcct

SEQ ID NO: 4334772 - DNA, 25 bp, Homo sapien
gatactgtaacaggctcttgcctgg

SEQ ID NO: 4334773 - DNA, 25 bp, Homo sapien
gaactaatcatcattagtacttcaa

SEQ ID NO: 4334774 - DNA, 25 bp, Homo sapien
ggtctgtgctggcttaaatgaacta

SEQ ID NO: 4334775 - DNA, 25 bp, Homo sapien
tgtgctggcttaaatgaactaatca

SEQ ID NO: 4334776 - DNA, 25 bp, Homo sapien
tacttcaaaacctgtctggctatgc

SEQ ID NO: 4334777 - DNA, 25 bp, Homo sapien
gtgaccattttactgggacattcag

SEQ ID NO: 4334778 - DNA, 25 bp, Homo sapien
cagggtttccactctcagacacgtg

SEQ ID NO: 4334779 - DNA, 25 bp, Homo sapien
tctcagacacgtgaccattttactg

SEQ ID NO: 4334780 - DNA, 25 bp, Homo sapien
agggtttccactctcagacacgtga

SEQ ID NO: 4334781 - DNA, 25 bp, Homo sapien
ttccgaaagagtaatgatctttggt

SEQ ID NO: 4334782 - DNA, 25 bp, Homo sapien
accaaagatcattactctttcggaa

SEQ ID NO: 4334783 - DNA, 25 bp, Homo sapien
gttaaatgatggactgaagagaaac

SEQ ID NO: 4334784 - DNA, 25 bp, Homo sapien
cttatgcaggccaaaactaggttca

SEQ ID NO: 4334785 - DNA, 25 bp, Homo sapien
gagaaacctagttagggttatgcga

SEQ ID NO: 4334786 - DNA, 25 bp, Homo sapien
atattacccggaacttttacatctg

SEQ ID NO: 4334787 - DNA, 25 bp, Homo sapien
agatgacctccaaaatctcatctgg

SEQ ID NO: 4334788 - DNA, 25 bp, Homo sapien
tcagatgacctccaaaatctcatct

SEQ ID NO: 4334789 - DNA, 25 bp, Homo sapien
atgacctccaaaatctcatctggac

SEQ ID NO: 4334790 - DNA, 25 bp, Homo sapien
gatgacctccaaaatctcatctgga

SEQ ID NO: 4334791 - DNA, 25 bp, Homo sapien
caatagaaactttctccttatcttc

SEQ ID NO: 4334792 - DNA, 25 bp, Homo sapien
tcttcacaatagaaactttctcctt

SEQ ID NO: 4334793 - DNA, 25 bp, Homo sapien
cctgtgaaggaaagctccttttggc

SEQ ID NO: 4334794 - DNA, 25 bp, Homo sapien
gaagctagataatatcctgtgaagg

SEQ ID NO: 4334795 - DNA, 25 bp, Homo sapien
tccaaatctggatcttaagtgatcc

SEQ ID NO: 4334796 - DNA, 25 bp, Homo sapien
gtcttcttcaagcagttctagtcat

SEQ ID NO: 4334797 - DNA, 25 bp, Homo sapien
caattagtctccttcaaattacaga

SEQ ID NO: 4334798 - DNA, 25 bp, Homo sapien
gtcataaacgttacaattagtctcc

SEQ ID NO: 4334799 - DNA, 25 bp, Homo sapien
cctaactttcagtgtggtaccacag

SEQ ID NO: 4334800 - DNA, 25 bp, Homo sapien
gagcaacggtcccatcaggcagtta

SEQ ID NO: 4334801 - DNA, 25 bp, Homo sapien
gggacaccgagttagatctttgaag

SEQ ID NO: 4334802 - DNA, 25 bp, Homo sapien
agatagggcttcatcgtttctcagc

SEQ ID NO: 4334803 - DNA, 25 bp, Homo sapien
gtgttctttccctctatgtccatgt

SEQ ID NO: 4334804 - DNA, 25 bp, Homo sapien
gatgttgagcttatttgctgagttg

SEQ ID NO: 4334805 - DNA, 25 bp, Homo sapien
tattgttatatcattgagatcattc

SEQ ID NO: 4334806 - DNA, 25 bp, Homo sapien
attgagatcattcactatattgtcc

SEQ ID NO: 4334807 - DNA, 25 bp, Homo sapien
tcaaagtcagtgtcccaatcctaga

SEQ ID NO: 4334808 - DNA, 25 bp, Homo sapien
catcttcaggttcaagtggctgcag

SEQ ID NO: 4334809 - DNA, 25 bp, Homo sapien
cacacaataggtgaaagagcccttc

SEQ ID NO: 4334810 - DNA, 25 bp, Homo sapien
tattttgggcctaacaactggctca

SEQ ID NO: 4334811 - DNA, 25 bp, Homo sapien
tctatgcttcgcaggcagagcacca

SEQ ID NO: 4334812 - DNA, 25 bp, Homo sapien
tacggccttgtgttctccaatcaca

SEQ ID NO: 4334813 - DNA, 25 bp, Homo sapien
tgcacgaaatggaattacggccttg

SEQ ID NO: 4334814 - DNA, 25 bp, Homo sapien
catactccttcagcgaaagagaaca

SEQ ID NO: 4334815 - DNA, 25 bp, Homo sapien
tgctttagtttgcttcaactggagg

SEQ ID NO: 4334816 - DNA, 25 bp, Homo sapien
ccagtggtttcgaacagatttttga

SEQ ID NO: 4334817 - DNA, 25 bp, Homo sapien
gaatattggcgcaaaagaacaccag

SEQ ID NO: 4334818 - DNA, 25 bp, Homo sapien
aaccttggaactatattgaagtgcc

SEQ ID NO: 4334819 - DNA, 25 bp, Homo sapien
tagaggccagactatgggaagagac

SEQ ID NO: 4334820 - DNA, 25 bp, Homo sapien
gaagcctagaacaggttattccctc

SEQ ID NO: 4334821 - DNA, 25 bp, Homo sapien
gtgggcccgaatccctgatacctga

SEQ ID NO: 4334822 - DNA, 25 bp, Homo sapien
tattggagttctaatgcccagtccc

SEQ ID NO: 4334823 - DNA, 25 bp, Homo sapien
acatagtgtttgctagatttctcca

SEQ ID NO: 4334824 - DNA, 25 bp, Homo sapien
ggaagaatactagacaggcagcatg

SEQ ID NO: 4334825 - DNA, 25 bp, Homo sapien
gagttatatgataccaacatgcctg

SEQ ID NO: 4334826 - DNA, 25 bp, Homo sapien
catcccatcccattagagttatatg

SEQ ID NO: 4334827 - DNA, 25 bp, Homo sapien
ggcagattcccaacacttgacatag

SEQ ID NO: 4334828 - DNA, 25 bp, Homo sapien
ccaggtggtcctgagacaacttaac

SEQ ID NO: 4334829 - DNA, 25 bp, Homo sapien
gtttcagataccatcaaggctcccc

SEQ ID NO: 4334830 - DNA, 25 bp, Homo sapien
gacatagcttcggtatagaacaaca

SEQ ID NO: 4334831 - DNA, 25 bp, Homo sapien
gaatcagatctcactccttaacctg

SEQ ID NO: 4334832 - DNA, 25 bp, Homo sapien
tgttactttgcaatactagcctcag

SEQ ID NO: 4334833 - DNA, 25 bp, Homo sapien
gcagaacagatacgatatttatggg

SEQ ID NO: 4334834 - DNA, 25 bp, Homo sapien
aggaacgtgacactggctagagtga

SEQ ID NO: 4334835 - DNA, 25 bp, Homo sapien
ctttgtttcgtttgtgaaccttcat

SEQ ID NO: 4334836 - DNA, 25 bp, Homo sapien
ttttggccacataaaaaagcaggtc

SEQ ID NO: 4334837 - DNA, 25 bp, Homo sapien
aataaagttacgagccttgatttct

SEQ ID NO: 4334838 - DNA, 25 bp, Homo sapien
aattcagcattcaagggttggttaa

SEQ ID NO: 4334839 - DNA, 25 bp, Homo sapien
cattagctgtggcatcactctgcaa

SEQ ID NO: 4334840 - DNA, 25 bp, Homo sapien
gagtcactgtatggacaatgtccag

SEQ ID NO: 4334841 - DNA, 25 bp, Homo sapien
gcactgtggctcttgtctctgacca

SEQ ID NO: 4334842 - DNA, 25 bp, Homo sapien
caatcagagagcactactagagagg

SEQ ID NO: 4334843 - DNA, 25 bp, Homo sapien
aggcatctgcctattcctgctgaga

SEQ ID NO: 4334844 - DNA, 25 bp, Homo sapien
tacaaacaaggtcgattttctcctg

SEQ ID NO: 4334845 - DNA, 25 bp, Homo sapien
gatagtactctagaacttttctggg

SEQ ID NO: 4334846 - DNA, 25 bp, Homo sapien
tcaaaatatataatgggcccattcc

SEQ ID NO: 4334847 - DNA, 25 bp, Homo sapien
ctctggagctggctgtagtcacctg

SEQ ID NO: 4334848 - DNA, 25 bp, Homo sapien
tctggagctggctgtagtcacctga

SEQ ID NO: 4334849 - DNA, 25 bp, Homo sapien
tcaatgggttggcatagctcacaag

SEQ ID NO: 4334850 - DNA, 25 bp, Homo sapien
catgattggatgaaaacacactagg

SEQ ID NO: 4334851 - DNA, 25 bp, Homo sapien
tactcgctatttaaccttggtcagg

SEQ ID NO: 4334852 - DNA, 25 bp, Homo sapien
gaattaaactttgcaggttcactgg

SEQ ID NO: 4334853 - DNA, 25 bp, Homo sapien
ctgataacatcaaaccaaatttcct

SEQ ID NO: 4334854 - DNA, 25 bp, Homo sapien
tgataacatcaaaccaaatttcctt

SEQ ID NO: 4334855 - DNA, 25 bp, Homo sapien
tatgaatgctttaacaatgacacta

SEQ ID NO: 4334856 - DNA, 25 bp, Homo sapien
ttcaaatttaccataggctgctttt

SEQ ID NO: 4334857 - DNA, 25 bp, Homo sapien
ctttagcctaatataaggtacttag

SEQ ID NO: 4334858 - DNA, 25 bp, Homo sapien
gcgttattgaaatgagctttgttac

SEQ ID NO: 4334859 - DNA, 25 bp, Homo sapien
cctggatgccagaagtgctcttgaa

SEQ ID NO: 4334860 - DNA, 25 bp, Homo sapien
acaaggaagcggcatctttcacagc

SEQ ID NO: 4334861 - DNA, 25 bp, Homo sapien
gcatcattctctgaagtgacaagga

SEQ ID NO: 4334862 - DNA, 25 bp, Homo sapien
ttttttcagtctagcatttggcagc

SEQ ID NO: 4334863 - DNA, 25 bp, Homo sapien
ggcattggcagcagaaacaatatat

SEQ ID NO: 4334864 - DNA, 25 bp, Homo sapien
cattggcagcagaaacaatatatct

SEQ ID NO: 4334865 - DNA, 25 bp, Homo sapien
ctggcattggcagcagaaacaatat

SEQ ID NO: 4334866 - DNA, 25 bp, Homo sapien
tggcattggcagcagaaacaatata

SEQ ID NO: 4334867 - DNA, 25 bp, Homo sapien
gcggtggctcactgggattacagaa

SEQ ID NO: 4334868 - DNA, 25 bp, Homo sapien
ggctcactgggattacagaatccca

SEQ ID NO: 4334869 - DNA, 25 bp, Homo sapien
gcgcggtggctcactgggattacag

SEQ ID NO: 4334870 - DNA, 25 bp, Homo sapien
gtggctcactgggattacagaatcc

SEQ ID NO: 4334871 - DNA, 25 bp, Homo sapien
cctgaagattgaaggaatggtctcc

SEQ ID NO: 4334872 - DNA, 25 bp, Homo sapien
tccctggctgaattaagaacactag

SEQ ID NO: 4334873 - DNA, 25 bp, Homo sapien
tctgtgtgtctgaggctatggccgc

SEQ ID NO: 4334874 - DNA, 25 bp, Homo sapien
gatatagcccattgatctccctggc

SEQ ID NO: 4334875 - DNA, 25 bp, Homo sapien
tctacttgttctaaagctgctgact

SEQ ID NO: 4334876 - DNA, 25 bp, Homo sapien
aatctagtcccgttacttgtctggg

SEQ ID NO: 4334877 - DNA, 25 bp, Homo sapien
aaatctagtcccgttacttgtctgg

SEQ ID NO: 4334878 - DNA, 25 bp, Homo sapien
atgactgaattctctacttgttcta

SEQ ID NO: 4334879 - DNA, 25 bp, Homo sapien
gactcaagctgagcacaaatacgtt

SEQ ID NO: 4334880 - DNA, 25 bp, Homo sapien
tgtaatccacttctagtccactttg

SEQ ID NO: 4334881 - DNA, 25 bp, Homo sapien
tacgttgtcaataagtcagcagtta

SEQ ID NO: 4334882 - DNA, 25 bp, Homo sapien
cagcagttaatgctaggaaaaatga

SEQ ID NO: 4334883 - DNA, 25 bp, Homo sapien
ggtggagtactcataatctaaaaac

SEQ ID NO: 4334884 - DNA, 25 bp, Homo sapien
aaaatgctggtcacaataaactggc

SEQ ID NO: 4334885 - DNA, 25 bp, Homo sapien
tgtgccataggctcttacaaaatgc

SEQ ID NO: 4334886 - DNA, 25 bp, Homo sapien
gttatagtgatatagatggcaaacc

SEQ ID NO: 4334887 - DNA, 25 bp, Homo sapien
tctaactgggataagaataaagcct

SEQ ID NO: 4334888 - DNA, 25 bp, Homo sapien
gggagactgcaagctttttagtaac

SEQ ID NO: 4334889 - DNA, 25 bp, Homo sapien
gcattattgttgattctctgactca

SEQ ID NO: 4334890 - DNA, 25 bp, Homo sapien
taaaagagtagagaaaggtgcaagg

SEQ ID NO: 4334891 - DNA, 25 bp, Homo sapien
gaattaatgtcttaatccccacaac

SEQ ID NO: 4334892 - DNA, 25 bp, Homo sapien
gtgcctgactccacatcataagatg

SEQ ID NO: 4334893 - DNA, 25 bp, Homo sapien
gagacccagcaagattaagtgcctg

SEQ ID NO: 4334894 - DNA, 25 bp, Homo sapien
tagaacctaggtttaggctctgact

SEQ ID NO: 4334895 - DNA, 25 bp, Homo sapien
ccatgatgctatagtggagctgaca

SEQ ID NO: 4334896 - DNA, 25 bp, Homo sapien
tggaagatattgaaatgtctccccg

SEQ ID NO: 4334897 - DNA, 25 bp, Homo sapien
ccagtaaccattgctgtgctgtaaa

SEQ ID NO: 4334898 - DNA, 25 bp, Homo sapien
tccccgtggcatattcagtgaagaa

SEQ ID NO: 4334899 - DNA, 25 bp, Homo sapien
tacatgttgacagattccagtaacc

SEQ ID NO: 4334900 - DNA, 25 bp, Homo sapien
agcctgagggctgaagaagcaaggc

SEQ ID NO: 4334901 - DNA, 25 bp, Homo sapien
gagggctgaagaagcaaggcagagc

SEQ ID NO: 4334902 - DNA, 25 bp, Homo sapien
gctgaagaagcaaggcagagcagct

SEQ ID NO: 4334903 - DNA, 25 bp, Homo sapien
ctgaagaagcaaggcagagcagctt

SEQ ID NO: 4334904 - DNA, 25 bp, Homo sapien
cagttcggttcaactgcctgtgaaa

SEQ ID NO: 4334905 - DNA, 25 bp, Homo sapien
gcttctacgtctttgcaataatgtt

SEQ ID NO: 4334906 - DNA, 25 bp, Homo sapien
tacattcccattattgcttctacgt

SEQ ID NO: 4334907 - DNA, 25 bp, Homo sapien
tgacatgtttgaacggagcacaagc

SEQ ID NO: 4334908 - DNA, 25 bp, Homo sapien
gatttatggctaccacgctgctccc

SEQ ID NO: 4334909 - DNA, 25 bp, Homo sapien
ccaaagattccatactgcatgctgt

SEQ ID NO: 4334910 - DNA, 25 bp, Homo sapien
ttcacactgccagactgcaacgtct

SEQ ID NO: 4334911 - DNA, 25 bp, Homo sapien
ttccatactgcatgctgtcattcac

SEQ ID NO: 4334912 - DNA, 25 bp, Homo sapien
tggtagccacagggacactcttcat

SEQ ID NO: 4334913 - DNA, 25 bp, Homo sapien
tctgaccaagttcctgttggcagcc

SEQ ID NO: 4334914 - DNA, 25 bp, Homo sapien
ctttcttctgaccaagttcctgttg

SEQ ID NO: 4334915 - DNA, 25 bp, Homo sapien
ttggcagccagtttaggagcaaggc

SEQ ID NO: 4334916 - DNA, 25 bp, Homo sapien
ctgttggcagccagtttaggagcaa

SEQ ID NO: 4334917 - DNA, 25 bp, Homo sapien
acatttcctggcatttgctaaccac

SEQ ID NO: 4334918 - DNA, 25 bp, Homo sapien
tgtcactccaacatttcctggcatt

SEQ ID NO: 4334919 - DNA, 25 bp, Homo sapien
tccaacatttcctggcatttgctaa

SEQ ID NO: 4334920 - DNA, 25 bp, Homo sapien
ttgtcactccaacatttcctggcat

SEQ ID NO: 4334921 - DNA, 25 bp, Homo sapien
tccttgctcggtgtgcctgacccat

SEQ ID NO: 4334922 - DNA, 25 bp, Homo sapien
ctctgttaaaatccagcttaagcat

SEQ ID NO: 4334923 - DNA, 25 bp, Homo sapien
aaactaggcaatatgcgtaaagcat

SEQ ID NO: 4334924 - DNA, 25 bp, Homo sapien
caagcttgcatgctggatacttatt

SEQ ID NO: 4334925 - DNA, 25 bp, Homo sapien
gatgcaataggaacctcctaatcat

SEQ ID NO: 4334926 - DNA, 25 bp, Homo sapien
tgaatccttataacaagcttgcatg

SEQ ID NO: 4334927 - DNA, 25 bp, Homo sapien
aatgcccagggaagcagtcatcagg

SEQ ID NO: 4334928 - DNA, 25 bp, Homo sapien
tccctgctgtcaagagtgcatggct

SEQ ID NO: 4334929 - DNA, 25 bp, Homo sapien
taaggaacaccatgctgcacatagg

SEQ ID NO: 4334930 - DNA, 25 bp, Homo sapien
tctggtctcagctgataggagtccc

SEQ ID NO: 4334931 - DNA, 25 bp, Homo sapien
tgttcagtcttcctgctgagacaaa

SEQ ID NO: 4334932 - DNA, 25 bp, Homo sapien
tttcatagcttctctgttaaagggc

SEQ ID NO: 4334933 - DNA, 25 bp, Homo sapien
gatatgcagctcaatataggtgaaa

SEQ ID NO: 4334934 - DNA, 25 bp, Homo sapien
aaaactcgctttaaatgctgttcag

SEQ ID NO: 4334935 - DNA, 25 bp, Homo sapien
tgcccacggagcctcaattattgct

SEQ ID NO: 4334936 - DNA, 25 bp, Homo sapien
acggagcctcaattattgctagcac

SEQ ID NO: 4334937 - DNA, 25 bp, Homo sapien
atgcccacggagcctcaattattgc

SEQ ID NO: 4334938 - DNA, 25 bp, Homo sapien
gcccacggagcctcaattattgcta

SEQ ID NO: 4334939 - DNA, 25 bp, Homo sapien
attcttctgaataaaagtgccagct

SEQ ID NO: 4334940 - DNA, 25 bp, Homo sapien
gagacccctgtgtgggtctcactgg

SEQ ID NO: 4334941 - DNA, 25 bp, Homo sapien
gcctctgactgagatgcattcttct

SEQ ID NO: 4334942 - DNA, 25 bp, Homo sapien
tctgaataaaagtgccagcttgcct

SEQ ID NO: 4334943 - DNA, 25 bp, Homo sapien
ggcacttttatgctccagcgcttct

SEQ ID NO: 4334944 - DNA, 25 bp, Homo sapien
ccttggggttgccacctgtgtccta

SEQ ID NO: 4334945 - DNA, 25 bp, Homo sapien
ttttgcagagaggactcatcctccg

SEQ ID NO: 4334946 - DNA, 25 bp, Homo sapien
tctcttctctccggtagttctcctg

SEQ ID NO: 4334947 - DNA, 25 bp, Homo sapien
atagggcagcctagctagcaggtgc

SEQ ID NO: 4334948 - DNA, 25 bp, Homo sapien
tttctatagcctgggcggttcctgc

SEQ ID NO: 4334949 - DNA, 25 bp, Homo sapien
cggttcctgctgaatggtgctcccc

SEQ ID NO: 4334950 - DNA, 25 bp, Homo sapien
ccctggagccgtgcaatagggcagc

SEQ ID NO: 4334951 - DNA, 25 bp, Homo sapien
gtgacatgtgccctgtggatcattt

SEQ ID NO: 4334952 - DNA, 25 bp, Homo sapien
gctttcagtgacatgtgccctgtgg

SEQ ID NO: 4334953 - DNA, 25 bp, Homo sapien
tttggcatcagtgataaggtgtgat

SEQ ID NO: 4334954 - DNA, 25 bp, Homo sapien
gtgtgatagtgagtctatggcacca

SEQ ID NO: 4334955 - DNA, 25 bp, Homo sapien
ttctctggtatgtcaggatttccaa

SEQ ID NO: 4334956 - DNA, 25 bp, Homo sapien
tgtttctctggtatgtcaggatttc

SEQ ID NO: 4334957 - DNA, 25 bp, Homo sapien
ctctggtatgtcaggatttccaaac

SEQ ID NO: 4334958 - DNA, 25 bp, Homo sapien
ctggtatgtcaggatttccaaactg

SEQ ID NO: 4334959 - DNA, 25 bp, Homo sapien
tgaaagtgccttgagtttagcaact

SEQ ID NO: 4334960 - DNA, 25 bp, Homo sapien
gccttgagtttagcaactccatgtt

SEQ ID NO: 4334961 - DNA, 25 bp, Homo sapien
actccatgttatctctgtctccagt

SEQ ID NO: 4334962 - DNA, 25 bp, Homo sapien
cccttccccagtatgaaagtgcctt

SEQ ID NO: 4334963 - DNA, 25 bp, Homo sapien
tggattgactgataatttctcacca

SEQ ID NO: 4334964 - DNA, 25 bp, Homo sapien
ccagattgcttggattgactgataa

SEQ ID NO: 4334965 - DNA, 25 bp, Homo sapien
cacaactccagattgcttggattga

SEQ ID NO: 4334966 - DNA, 25 bp, Homo sapien
ttctcacaactccagattgcttgga

SEQ ID NO: 4334967 - DNA, 25 bp, Homo sapien
tgtcagaggctgattcaagactcca

SEQ ID NO: 4334968 - DNA, 25 bp, Homo sapien
ttgcaagttggctccacaggtacag

SEQ ID NO: 4334969 - DNA, 25 bp, Homo sapien
taacagctgcccgaaggagatgggc

SEQ ID NO: 4334970 - DNA, 25 bp, Homo sapien
aaagcactgagccagatctgtcaga

SEQ ID NO: 4334971 - DNA, 25 bp, Homo sapien
tatgagagtttctgacaaaggcaag

SEQ ID NO: 4334972 - DNA, 25 bp, Homo sapien
gaaaagtaggcagggttcatgcagt

SEQ ID NO: 4334973 - DNA, 25 bp, Homo sapien
aattctacccattttgacaggtggc

SEQ ID NO: 4334974 - DNA, 25 bp, Homo sapien
cacacctgattgaagtctggttcac

SEQ ID NO: 4334975 - DNA, 25 bp, Homo sapien
gaccactggaggacagcatagtgta

SEQ ID NO: 4334976 - DNA, 25 bp, Homo sapien
cactgccatcgagagttgaaacacg

SEQ ID NO: 4334977 - DNA, 25 bp, Homo sapien
gcatagtgtattctaccatattcat

SEQ ID NO: 4334978 - DNA, 25 bp, Homo sapien
gaaacacgatgaagcctggaagacc

SEQ ID NO: 4334979 - DNA, 25 bp, Homo sapien
cttgcctggctttgtaaaacattca

SEQ ID NO: 4334980 - DNA, 25 bp, Homo sapien
ttgcctggctttgtaaaacattcat

SEQ ID NO: 4334981 - DNA, 25 bp, Homo sapien
caaggtcaaagtttttgctaatctc

SEQ ID NO: 4334982 - DNA, 25 bp, Homo sapien
taaagctcctgaatagatcctctat

SEQ ID NO: 4334983 - DNA, 25 bp, Homo sapien
ttatcaagaactcttagttgctggc

SEQ ID NO: 4334984 - DNA, 25 bp, Homo sapien
ccttatctccaatcaaggtcaaagt

SEQ ID NO: 4334985 - DNA, 25 bp, Homo sapien
tatattgcctaaggatgcttgtttc

SEQ ID NO: 4334986 - DNA, 25 bp, Homo sapien
tcttcagatacaactatcagatcat

SEQ ID NO: 4334987 - DNA, 25 bp, Homo sapien
tctttaagatcttcagatacaacta

SEQ ID NO: 4334988 - DNA, 25 bp, Homo sapien
aaagtcagatcctgtaaagcttata

SEQ ID NO: 4334989 - DNA, 25 bp, Homo sapien
taatttgcctccaacattgactcat

SEQ ID NO: 4334990 - DNA, 25 bp, Homo sapien
caagggtggctctatgtgttcctat

SEQ ID NO: 4334991 - DNA, 25 bp, Homo sapien
agatcattgtcattcctcccaggct

SEQ ID NO: 4334992 - DNA, 25 bp, Homo sapien
gaacatatacttggttctgaacaaa

SEQ ID NO: 4334993 - DNA, 25 bp, Homo sapien
ttattcaatctggactggttcttct

SEQ ID NO: 4334994 - DNA, 25 bp, Homo sapien
tattcaatctggactggttcttcta

SEQ ID NO: 4334995 - DNA, 25 bp, Homo sapien
tcaatctggactggttcttctattt

SEQ ID NO: 4334996 - DNA, 25 bp, Homo sapien
attcaatctggactggttcttctat

SEQ ID NO: 4334997 - DNA, 25 bp, Homo sapien
cttggcattctctgtgcagcctccc

SEQ ID NO: 4334998 - DNA, 25 bp, Homo sapien
attctctgtgcagcctcccagctcc

SEQ ID NO: 4334999 - DNA, 25 bp, Homo sapien
tctctgtgcagcctcccagctccac

SEQ ID NO: 4335000 - DNA, 25 bp, Homo sapien
tctgtgcagcctcccagctccacac

SEQ ID NO: 4335001 - DNA, 25 bp, Homo sapien
gacctggaacatattcggcatctca

SEQ ID NO: 4335002 - DNA, 25 bp, Homo sapien
tcagtctctatgcacaactgcacca

SEQ ID NO: 4335003 - DNA, 25 bp, Homo sapien
cacaggcagaactgagcatgtccag

SEQ ID NO: 4335004 - DNA, 25 bp, Homo sapien
ctcagaaggcagctcagtctctatg

SEQ ID NO: 4335005 - DNA, 25 bp, Homo sapien
tgtccagggtactatgtcaagacct

SEQ ID NO: 4335006 - DNA, 25 bp, Homo sapien
tatgactcgtatgaaagacagctcc

SEQ ID NO: 4335007 - DNA, 25 bp, Homo sapien
catactgtcagtggtgatcaatgcc

SEQ ID NO: 4335008 - DNA, 25 bp, Homo sapien
aacaaggcagtggtgcagttctgac

SEQ ID NO: 4335009 - DNA, 25 bp, Homo sapien
caataggttgtgctcagctgagaga

SEQ ID NO: 4335010 - DNA, 25 bp, Homo sapien
taatgagtgttagacccatgagcag

SEQ ID NO: 4335011 - DNA, 25 bp, Homo sapien
cagaaagggatgactctctcagcat

SEQ ID NO: 4335012 - DNA, 25 bp, Homo sapien
ttcagatagtacaccagaggcctca

SEQ ID NO: 4335013 - DNA, 25 bp, Homo sapien
caaagtcaaatgtgtagatgttcaa

SEQ ID NO: 4335014 - DNA, 25 bp, Homo sapien
gttcaatggccactgggtgactgat

SEQ ID NO: 4335015 - DNA, 25 bp, Homo sapien
cacatgatatgatttacaaagtcaa

SEQ ID NO: 4335016 - DNA, 25 bp, Homo sapien
catagcctccagttgagtcccagga

SEQ ID NO: 4335017 - DNA, 25 bp, Homo sapien
gattccaacagttgctgttgtcact

SEQ ID NO: 4335018 - DNA, 25 bp, Homo sapien
ggcaggatgacagtactctcctgta

SEQ ID NO: 4335019 - DNA, 25 bp, Homo sapien
tgtaattccacagagcatgattcca

SEQ ID NO: 4335020 - DNA, 25 bp, Homo sapien
gcttgttgggaagcttgttctgtat

SEQ ID NO: 4335021 - DNA, 25 bp, Homo sapien
acattgatcagtgatgcaataagac

SEQ ID NO: 4335022 - DNA, 25 bp, Homo sapien
catcatgcttctgcttagaagccct

SEQ ID NO: 4335023 - DNA, 25 bp, Homo sapien
ttgatcagtgatgcaataagacagc

SEQ ID NO: 4335024 - DNA, 25 bp, Homo sapien
ttcatcatgcttctgcttagaagcc

SEQ ID NO: 4335025 - DNA, 25 bp, Homo sapien
aagcacagaatatctaagtctaaga

SEQ ID NO: 4335026 - DNA, 25 bp, Homo sapien
agaatcataaatgaggccacatgct

SEQ ID NO: 4335027 - DNA, 25 bp, Homo sapien
gccacatgctcatgcttagaagatt

SEQ ID NO: 4335028 - DNA, 25 bp, Homo sapien
ctcatgcttagaagattctccagcc

SEQ ID NO: 4335029 - DNA, 25 bp, Homo sapien
ctgcacatagtataaataaacatgg

SEQ ID NO: 4335030 - DNA, 25 bp, Homo sapien
aacatggtatgggaacatgagagca

SEQ ID NO: 4335031 - DNA, 25 bp, Homo sapien
tatgaaagctaactgcacatagtat

SEQ ID NO: 4335032 - DNA, 25 bp, Homo sapien
ttccaagctggaatcacaacagaaa

SEQ ID NO: 4335033 - DNA, 25 bp, Homo sapien
tgtgcttggaatgtcagcatcagag

SEQ ID NO: 4335034 - DNA, 25 bp, Homo sapien
catctatggcaaaaatcgattcttg

SEQ ID NO: 4335035 - DNA, 25 bp, Homo sapien
gattcttgcgtaactgcttgtgtgc

SEQ ID NO: 4335036 - DNA, 25 bp, Homo sapien
cagagcaatggagaaatgtggagtt

SEQ ID NO: 4335037 - DNA, 25 bp, Homo sapien
caggcatgtaggatgtgccagcttt

SEQ ID NO: 4335038 - DNA, 25 bp, Homo sapien
tctcaggagatatgtttgtgtgaaa

SEQ ID NO: 4335039 - DNA, 25 bp, Homo sapien
gtgtgaaagtgtgtagcaactcccc

SEQ ID NO: 4335040 - DNA, 25 bp, Homo sapien
cctcctgatccaggcatgtaggatg

SEQ ID NO: 4335041 - DNA, 25 bp, Homo sapien
caagactcacttgttccatgaagat

SEQ ID NO: 4335042 - DNA, 25 bp, Homo sapien
cagcaccttgttacttttagtccca

SEQ ID NO: 4335043 - DNA, 25 bp, Homo sapien
ttagtcccaaacaacagctgtcgtg

SEQ ID NO: 4335044 - DNA, 25 bp, Homo sapien
tatgcaaaggttatcacactaatcc

SEQ ID NO: 4335045 - DNA, 25 bp, Homo sapien
gacatcgtcaatgagttctggccct

SEQ ID NO: 4335046 - DNA, 25 bp, Homo sapien
tacaaattaggagtcccctgctaga

SEQ ID NO: 4335047 - DNA, 25 bp, Homo sapien
gaattactcaacactctacaatggg

SEQ ID NO: 4335048 - DNA, 25 bp, Homo sapien
gatgttctcacacttagcttaggcc

SEQ ID NO: 4335049 - DNA, 25 bp, Homo sapien
aaagcactgacatatcctgaggata

SEQ ID NO: 4335050 - DNA, 25 bp, Homo sapien
tgaaccaatctccacaaaccatgaa

SEQ ID NO: 4335051 - DNA, 25 bp, Homo sapien
cagtttgaatgttagatctgcgtct

SEQ ID NO: 4335052 - DNA, 25 bp, Homo sapien
gacatttcaccgtcttgtaacagaa

SEQ ID NO: 4335053 - DNA, 25 bp, Homo sapien
tgttgatagagggatggaaattact

SEQ ID NO: 4335054 - DNA, 25 bp, Homo sapien
cagatgtctgacatggactcagcaa

SEQ ID NO: 4335055 - DNA, 25 bp, Homo sapien
tttgtctgctgaggtaaggtctcat

SEQ ID NO: 4335056 - DNA, 25 bp, Homo sapien
aaatactgtagccatttttgtgaac

SEQ ID NO: 4335057 - DNA, 25 bp, Homo sapien
actttcagtctgaggtttagccgtc

SEQ ID NO: 4335058 - DNA, 25 bp, Homo sapien
agtctgaggtttagccgtccctgaa

SEQ ID NO: 4335059 - DNA, 25 bp, Homo sapien
tttagccgtccctgaacaatcacgg

SEQ ID NO: 4335060 - DNA, 25 bp, Homo sapien
tgaggtttagccgtccctgaacaat

SEQ ID NO: 4335061 - DNA, 25 bp, Homo sapien
aatccattgttactgtgtacagcca

SEQ ID NO: 4335062 - DNA, 25 bp, Homo sapien
ctatacaattcgcttccgaaaatta

SEQ ID NO: 4335063 - DNA, 25 bp, Homo sapien
cgcttccgaaaattaatatgataaa

SEQ ID NO: 4335064 - DNA, 25 bp, Homo sapien
atccactgaagcgccatctctttgg

SEQ ID NO: 4335065 - DNA, 25 bp, Homo sapien
cacttcacaaaatcgccagaaatag

SEQ ID NO: 4335066 - DNA, 25 bp, Homo sapien
cctgtgaactttacttgtgacttag

SEQ ID NO: 4335067 - DNA, 25 bp, Homo sapien
tctgatacctattcagctgccatct

SEQ ID NO: 4335068 - DNA, 25 bp, Homo sapien
caaaagacttacataggtgctacca

SEQ ID NO: 4335069 - DNA, 25 bp, Homo sapien
cattcgtttggtcaattaagggcct

SEQ ID NO: 4335070 - DNA, 25 bp, Homo sapien
cattgacggttaccagtggagttgc

SEQ ID NO: 4335071 - DNA, 25 bp, Homo sapien
catatactggtaacttgtgggagtc

SEQ ID NO: 4335072 - DNA, 25 bp, Homo sapien
taggtgtcagtgcttagatcccaga

SEQ ID NO: 4335073 - DNA, 25 bp, Homo sapien
gtggtactatctgtgtagcaataca

SEQ ID NO: 4335074 - DNA, 25 bp, Homo sapien
tcctctggaagtggtactatctgtg

SEQ ID NO: 4335075 - DNA, 25 bp, Homo sapien
cacactggccatctgtaacgagtta

SEQ ID NO: 4335076 - DNA, 25 bp, Homo sapien
catctgtaacgagttagcatcctct

SEQ ID NO: 4335077 - DNA, 25 bp, Homo sapien
ccaagatcatttacttcagatggca

SEQ ID NO: 4335078 - DNA, 25 bp, Homo sapien
catttacttcagatggcagcaactt

SEQ ID NO: 4335079 - DNA, 25 bp, Homo sapien
cttccaggtgtcaccaagatcattt

SEQ ID NO: 4335080 - DNA, 25 bp, Homo sapien
ggtgtcaccaagatcatttacttca

SEQ ID NO: 4335081 - DNA, 25 bp, Homo sapien
tgatttcaacacgactcagaaggag

SEQ ID NO: 4335082 - DNA, 25 bp, Homo sapien
tcaaatgagcacaggagtaactggt

SEQ ID NO: 4335083 - DNA, 25 bp, Homo sapien
tgacaggaacaaggcataggacaac

SEQ ID NO: 4335084 - DNA, 25 bp, Homo sapien
tggacagctatatacattgcagggt

SEQ ID NO: 4335085 - DNA, 25 bp, Homo sapien
ccaatcccttcattgcatatgatga

SEQ ID NO: 4335086 - DNA, 25 bp, Homo sapien
tatgatgaaattaaatccaggagat

SEQ ID NO: 4335087 - DNA, 25 bp, Homo sapien
tccaggagatgttaagtgactttcc

SEQ ID NO: 4335088 - DNA, 25 bp, Homo sapien
cccttcattgcatatgatgaaatta

SEQ ID NO: 4335089 - DNA, 25 bp, Homo sapien
gatactgacttacgtgttggtgaaa

SEQ ID NO: 4335090 - DNA, 25 bp, Homo sapien
gcttgagtcccaaaataaatgtgga

SEQ ID NO: 4335091 - DNA, 25 bp, Homo sapien
ttcaagccttgagtaaatgtgggtc

SEQ ID NO: 4335092 - DNA, 25 bp, Homo sapien
taagggtcactctgtctcgatgtag

SEQ ID NO: 4335093 - DNA, 25 bp, Homo sapien
taacacaaaggtgggaccttgagac

SEQ ID NO: 4335094 - DNA, 25 bp, Homo sapien
gggaaagtaagatcgaaggacgcta

SEQ ID NO: 4335095 - DNA, 25 bp, Homo sapien
tgcatactcagggtacaaaggtaaa

SEQ ID NO: 4335096 - DNA, 25 bp, Homo sapien
catccttgctgaataacatccatct

SEQ ID NO: 4335097 - DNA, 25 bp, Homo sapien
aacccacagaatgcccactgttcgt

SEQ ID NO: 4335098 - DNA, 25 bp, Homo sapien
ttaaacccacagaatgcccactgtt

SEQ ID NO: 4335099 - DNA, 25 bp, Homo sapien
ccacagaatgcccactgttcgttca

SEQ ID NO: 4335100 - DNA, 25 bp, Homo sapien
cacagaatgcccactgttcgttcac

SEQ ID NO: 4335101 - DNA, 25 bp, Homo sapien
ctcctcatcacaaaccacattattg

SEQ ID NO: 4335102 - DNA, 25 bp, Homo sapien
tcctcctcatcacaaaccacattat

SEQ ID NO: 4335103 - DNA, 25 bp, Homo sapien
cttcctcctcatcacaaaccacatt

SEQ ID NO: 4335104 - DNA, 25 bp, Homo sapien
tcctcatcacaaaccacattattgc

SEQ ID NO: 4335105 - DNA, 25 bp, Homo sapien
cactcttgggagtacacaagtgcct

SEQ ID NO: 4335106 - DNA, 25 bp, Homo sapien
acccactcttgggagtacacaagtg

SEQ ID NO: 4335107 - DNA, 25 bp, Homo sapien
actcttgggagtacacaagtgcctt

SEQ ID NO: 4335108 - DNA, 25 bp, Homo sapien
ccactcttgggagtacacaagtgcc

SEQ ID NO: 4335109 - DNA, 25 bp, Homo sapien
aatgttgctggaaacaaaggagata

SEQ ID NO: 4335110 - DNA, 25 bp, Homo sapien
agtgtagtcaatgctcatcattgac

SEQ ID NO: 4335111 - DNA, 25 bp, Homo sapien
catcattgactcagttctaggttac

SEQ ID NO: 4335112 - DNA, 25 bp, Homo sapien
cagagaggcttcatagtgtagtcaa

SEQ ID NO: 4335113 - DNA, 25 bp, Homo sapien
tttgtcggctaagctgcctctgctg

SEQ ID NO: 4335114 - DNA, 25 bp, Homo sapien
ggtttgtcggctaagctgcctctgc

SEQ ID NO: 4335115 - DNA, 25 bp, Homo sapien
gttgggggtttgtcggctaagctgc

SEQ ID NO: 4335116 - DNA, 25 bp, Homo sapien
ggggtttgtcggctaagctgcctct

SEQ ID NO: 4335117 - DNA, 25 bp, Homo sapien
tctgcagtaccaaaagggcacaggg

SEQ ID NO: 4335118 - DNA, 25 bp, Homo sapien
tactgccatcccatatgccaaaggg

SEQ ID NO: 4335119 - DNA, 25 bp, Homo sapien
gcaggacctcaaactaagctgggaa

SEQ ID NO: 4335120 - DNA, 25 bp, Homo sapien
tgcacaaaaggttagaagttctccc

SEQ ID NO: 4335121 - DNA, 25 bp, Homo sapien
gataatgtgtatggcagttgtttgc

SEQ ID NO: 4335122 - DNA, 25 bp, Homo sapien
tgtatggcagttgtttgcgagtgat

SEQ ID NO: 4335123 - DNA, 25 bp, Homo sapien
agcatgttgtcaggaaacagttcaa

SEQ ID NO: 4335124 - DNA, 25 bp, Homo sapien
cagttcaagccctgccatgatgatg

SEQ ID NO: 4335125 - DNA, 25 bp, Homo sapien
acgctgtgcagccagtaggtcctca

SEQ ID NO: 4335126 - DNA, 25 bp, Homo sapien
cgctgtgcagccagtaggtcctcat

SEQ ID NO: 4335127 - DNA, 25 bp, Homo sapien
gacgctgtgcagccagtaggtcctc

SEQ ID NO: 4335128 - DNA, 25 bp, Homo sapien
gctctctctagtaaaacgcgccgct

SEQ ID NO: 4335129 - DNA, 25 bp, Homo sapien
tagcccgtgcctggtgtaaacacac

SEQ ID NO: 4335130 - DNA, 25 bp, Homo sapien
tgctctcctcttcgggagcgcaagc

SEQ ID NO: 4335131 - DNA, 25 bp, Homo sapien
ggcaacccggacagacaagcctctt

SEQ ID NO: 4335132 - DNA, 25 bp, Homo sapien
taagactagatggaacagagtgatg

SEQ ID NO: 4335133 - DNA, 25 bp, Homo sapien
gctgatgggagaagaacattgaatg

SEQ ID NO: 4335134 - DNA, 25 bp, Homo sapien
gatcagtgggcctcagtaagactag

SEQ ID NO: 4335135 - DNA, 25 bp, Homo sapien
acattgaatgtcgaggaggtctact

SEQ ID NO: 4335136 - DNA, 25 bp, Homo sapien
aacgatatccttgagcttacatttc

SEQ ID NO: 4335137 - DNA, 25 bp, Homo sapien
tactatggaaacgatatccttgagc

SEQ ID NO: 4335138 - DNA, 25 bp, Homo sapien
ggaaacgatatccttgagcttacat

SEQ ID NO: 4335139 - DNA, 25 bp, Homo sapien
tcatgctactatggaaacgatatcc

SEQ ID NO: 4335140 - DNA, 25 bp, Homo sapien
gaactatattgcatcaggttgtttt

SEQ ID NO: 4335141 - DNA, 25 bp, Homo sapien
ctataagatagagattataatatgc

SEQ ID NO: 4335142 - DNA, 25 bp, Homo sapien
atatgaactatattgcatcaggttg

SEQ ID NO: 4335143 - DNA, 25 bp, Homo sapien
cctataagatagagattataatatg

SEQ ID NO: 4335144 - DNA, 25 bp, Homo sapien
gatcagcaaacgttgctcttcctca

SEQ ID NO: 4335145 - DNA, 25 bp, Homo sapien
gctgttgcatcttgatcagcaaacg

SEQ ID NO: 4335146 - DNA, 25 bp, Homo sapien
gaatttccaactgttctgctgttgc

SEQ ID NO: 4335147 - DNA, 25 bp, Homo sapien
caactgttctgctgttgcatcttga

SEQ ID NO: 4335148 - DNA, 25 bp, Homo sapien
ttcttcttgtagccctttgtttcat

SEQ ID NO: 4335149 - DNA, 25 bp, Homo sapien
cttcttcttgtagccctttgtttca

SEQ ID NO: 4335150 - DNA, 25 bp, Homo sapien
cgtcgctccatctcacaccatgcat

SEQ ID NO: 4335151 - DNA, 25 bp, Homo sapien
ttggtaactccccaaatgccctaca

SEQ ID NO: 4335152 - DNA, 25 bp, Homo sapien
ccaaatgccctacatattgccccat

SEQ ID NO: 4335153 - DNA, 25 bp, Homo sapien
aatagctgtctcctaatttcccttg

SEQ ID NO: 4335154 - DNA, 25 bp, Homo sapien
tgcagcaatttctttccaatagctg

SEQ ID NO: 4335155 - DNA, 25 bp, Homo sapien
atggaatatcgttctatcactttat

SEQ ID NO: 4335156 - DNA, 25 bp, Homo sapien
tggaatatcgttctatcactttatt

SEQ ID NO: 4335157 - DNA, 25 bp, Homo sapien
gtatggaatatcgttctatcacttt

SEQ ID NO: 4335158 - DNA, 25 bp, Homo sapien
tatggaatatcgttctatcacttta

SEQ ID NO: 4335159 - DNA, 25 bp, Homo sapien
tcccagatggtcctgatgcttttag

SEQ ID NO: 4335160 - DNA, 25 bp, Homo sapien
gaagtaagctctccatgaaacctct

SEQ ID NO: 4335161 - DNA, 25 bp, Homo sapien
caccaggctactttgtagttaaagc

SEQ ID NO: 4335162 - DNA, 25 bp, Homo sapien
tgttccacccatgagacttaaccgt

SEQ ID NO: 4335163 - DNA, 25 bp, Homo sapien
ccaaagtgaacttgaggaagtaagc

SEQ ID NO: 4335164 - DNA, 25 bp, Homo sapien
ctccagcttaatttcctctccatac

SEQ ID NO: 4335165 - DNA, 25 bp, Homo sapien
caaaatagtgttgtagtggagctgg

SEQ ID NO: 4335166 - DNA, 25 bp, Homo sapien
tctccataccttcttaactcttgac

SEQ ID NO: 4335167 - DNA, 25 bp, Homo sapien
tcttgacttattatcaggttttggg

SEQ ID NO: 4335168 - DNA, 25 bp, Homo sapien
cttcattttgagtctgctatagttt

SEQ ID NO: 4335169 - DNA, 25 bp, Homo sapien
tcccaaagtctattgctaataccaa

SEQ ID NO: 4335170 - DNA, 25 bp, Homo sapien
gctatagtttacaacccagtttctg

SEQ ID NO: 4335171 - DNA, 25 bp, Homo sapien
aaagtctattgctaataccaagaag

SEQ ID NO: 4335172 - DNA, 25 bp, Homo sapien
cttagaggacttcacattcaaggtg

SEQ ID NO: 4335173 - DNA, 25 bp, Homo sapien
tctgctgatgatccaaagtcatttt

SEQ ID NO: 4335174 - DNA, 25 bp, Homo sapien
cacactttctagattgctgcagtca

SEQ ID NO: 4335175 - DNA, 25 bp, Homo sapien
gctgcagtcatagtctgctgatgat

SEQ ID NO: 4335176 - DNA, 25 bp, Homo sapien
tcagggactctttggggtggacact

SEQ ID NO: 4335177 - DNA, 25 bp, Homo sapien
ctgccaggagcctatttacataagg

SEQ ID NO: 4335178 - DNA, 25 bp, Homo sapien
gcaggtttgctgatgagattggaac

SEQ ID NO: 4335179 - DNA, 25 bp, Homo sapien
catattcagtgcttacatgcaggca

SEQ ID NO: 4335180 - DNA, 25 bp, Homo sapien
gattgcaaacttccaggcgaccaga

SEQ ID NO: 4335181 - DNA, 25 bp, Homo sapien
gcagggtgaacaagccctttcagcc

SEQ ID NO: 4335182 - DNA, 25 bp, Homo sapien
agctttcattacaccgcagggtgaa

SEQ ID NO: 4335183 - DNA, 25 bp, Homo sapien
taacttctacctcagaaccaacagc

SEQ ID NO: 4335184 - DNA, 25 bp, Homo sapien
tgtgcttcccacgtgggatttagcc

SEQ ID NO: 4335185 - DNA, 25 bp, Homo sapien
cacgtgggatttagccgctgttgta

SEQ ID NO: 4335186 - DNA, 25 bp, Homo sapien
tttagccgctgttgtaacctttgtg

SEQ ID NO: 4335187 - DNA, 25 bp, Homo sapien
gatttagccgctgttgtaacctttg

SEQ ID NO: 4335188 - DNA, 25 bp, Homo sapien
tcaagtggtgattagcttggaagat

SEQ ID NO: 4335189 - DNA, 25 bp, Homo sapien
gcttggaagatattgagtgtgccaa

SEQ ID NO: 4335190 - DNA, 25 bp, Homo sapien
caagtggtgattagcttggaagata

SEQ ID NO: 4335191 - DNA, 25 bp, Homo sapien
tgattagcttggaagatattgagtg

SEQ ID NO: 4335192 - DNA, 25 bp, Homo sapien
catgatgggatctctgctagcagga

SEQ ID NO: 4335193 - DNA, 25 bp, Homo sapien
cttcttgcacaaaggtgggtccatg

SEQ ID NO: 4335194 - DNA, 25 bp, Homo sapien
tctgctagcaggactggaagagggc

SEQ ID NO: 4335195 - DNA, 25 bp, Homo sapien
aaaggtgggtccatgatgggatctc

SEQ ID NO: 4335196 - DNA, 25 bp, Homo sapien
tattttagcgggtacagaatccttg

SEQ ID NO: 4335197 - DNA, 25 bp, Homo sapien
ctcccaacgagggtcagtaggcagc

SEQ ID NO: 4335198 - DNA, 25 bp, Homo sapien
taggcagcatgaagaacagatgaca

SEQ ID NO: 4335199 - DNA, 25 bp, Homo sapien
gaatccttgggaattggtagctccc

SEQ ID NO: 4335200 - DNA, 25 bp, Homo sapien
ccccgcaaatctctgaagacttcat

SEQ ID NO: 4335201 - DNA, 25 bp, Homo sapien
tttccccgcaaatctctgaagactt

SEQ ID NO: 4335202 - DNA, 25 bp, Homo sapien
gcatgttgcctttccccgcaaatct

SEQ ID NO: 4335203 - DNA, 25 bp, Homo sapien
actgcatgttgcctttccccgcaaa

SEQ ID NO: 4335204 - DNA, 25 bp, Homo sapien
ttgcatcttcgcctgaatttgttca

SEQ ID NO: 4335205 - DNA, 25 bp, Homo sapien
tttgcatcttcgcctgaatttgttc

SEQ ID NO: 4335206 - DNA, 25 bp, Homo sapien
tgcatcttcgcctgaatttgttcat

SEQ ID NO: 4335207 - DNA, 25 bp, Homo sapien
agacatgacacacatctttgcttgc

SEQ ID NO: 4335208 - DNA, 25 bp, Homo sapien
ccaatgccaaatcatggagctccat

SEQ ID NO: 4335209 - DNA, 25 bp, Homo sapien
gacatgacacacatctttgcttgct

SEQ ID NO: 4335210 - DNA, 25 bp, Homo sapien
ttctactccaggtaagcaagctcag

SEQ ID NO: 4335211 - DNA, 25 bp, Homo sapien
tgagccaccatggaagcaaggagat

SEQ ID NO: 4335212 - DNA, 25 bp, Homo sapien
cagagtagattgaaggtgagccacc

SEQ ID NO: 4335213 - DNA, 25 bp, Homo sapien
aattaattaatggagcccttcggct

SEQ ID NO: 4335214 - DNA, 25 bp, Homo sapien
tgctaaagccataatgcctctgtct

SEQ ID NO: 4335215 - DNA, 25 bp, Homo sapien
gagacctgtggcctcaaagtaaggt

SEQ ID NO: 4335216 - DNA, 25 bp, Homo sapien
tgtggcctcaaagtaaggtcttact

SEQ ID NO: 4335217 - DNA, 25 bp, Homo sapien
taaagccataatgcctctgtctttc

SEQ ID NO: 4335218 - DNA, 25 bp, Homo sapien
atgcccagataatccgtatttcagc

SEQ ID NO: 4335219 - DNA, 25 bp, Homo sapien
gcccagataatccgtatttcagcat

SEQ ID NO: 4335220 - DNA, 25 bp, Homo sapien
tcagtgaaaacatgcccagataatc

SEQ ID NO: 4335221 - DNA, 25 bp, Homo sapien
tctcagtgaaaacatgcccagataa

SEQ ID NO: 4335222 - DNA, 25 bp, Homo sapien
tgctgtaggcttctggtaaattatc

SEQ ID NO: 4335223 - DNA, 25 bp, Homo sapien
atcctgactgtaattgaaatggctt

SEQ ID NO: 4335224 - DNA, 25 bp, Homo sapien
ggctaagaccttcaataaatcctga

SEQ ID NO: 4335225 - DNA, 25 bp, Homo sapien
tatactccacatttactatgaggtg

SEQ ID NO: 4335226 - DNA, 25 bp, Homo sapien
gtccacattagatgcaaactcttct

SEQ ID NO: 4335227 - DNA, 25 bp, Homo sapien
cattagatgcaaactcttctctgaa

SEQ ID NO: 4335228 - DNA, 25 bp, Homo sapien
tttcaagtccacattagatgcaaac

SEQ ID NO: 4335229 - DNA, 25 bp, Homo sapien
atgaaaacttattggctgattaata

SEQ ID NO: 4335230 - DNA, 25 bp, Homo sapien
ctccagatgatcctaagctcagaat

SEQ ID NO: 4335231 - DNA, 25 bp, Homo sapien
tggtctttgccgattttctcctggc

SEQ ID NO: 4335232 - DNA, 25 bp, Homo sapien
aggtggaagcgtgcggaagtcctcc

SEQ ID NO: 4335233 - DNA, 25 bp, Homo sapien
tgcatcattgggtgcttgggtttag

SEQ ID NO: 4335234 - DNA, 25 bp, Homo sapien
gatggaagatgctgtgaagtgtggg

SEQ ID NO: 4335235 - DNA, 25 bp, Homo sapien
agtgagtgattcctcggaccccttg

SEQ ID NO: 4335236 - DNA, 25 bp, Homo sapien
actattcgcctagaaggtgggaggg

SEQ ID NO: 4335237 - DNA, 25 bp, Homo sapien
cagctctggggactattcgcctaga

SEQ ID NO: 4335238 - DNA, 25 bp, Homo sapien
tccccacagactccctcgaccatgc

SEQ ID NO: 4335239 - DNA, 25 bp, Homo sapien
cagcatccgtgcaggttgcagccag

SEQ ID NO: 4335240 - DNA, 25 bp, Homo sapien
ccacagactccctcgaccatgcaat

SEQ ID NO: 4335241 - DNA, 25 bp, Homo sapien
atccagcatccgtgcaggttgcagc

SEQ ID NO: 4335242 - DNA, 25 bp, Homo sapien
tgtaactcctgtgtccccagggaac

SEQ ID NO: 4335243 - DNA, 25 bp, Homo sapien
ggtctgtaactcctgtgtccccagg

SEQ ID NO: 4335244 - DNA, 25 bp, Homo sapien
tctgtaactcctgtgtccccaggga

SEQ ID NO: 4335245 - DNA, 25 bp, Homo sapien
tggtctgtaactcctgtgtccccag

SEQ ID NO: 4335246 - DNA, 25 bp, Homo sapien
ctgtagtgaacctgaccatagggag

SEQ ID NO: 4335247 - DNA, 25 bp, Homo sapien
tgtgcgccagtctgtagtgaacctg

SEQ ID NO: 4335248 - DNA, 25 bp, Homo sapien
tagtgaacctgaccatagggagatg

SEQ ID NO: 4335249 - DNA, 25 bp, Homo sapien
ctaggtgtgcgccagtctgtagtga

SEQ ID NO: 4335250 - DNA, 25 bp, Homo sapien
aggacaagttgaacttggcaatggg

SEQ ID NO: 4335251 - DNA, 25 bp, Homo sapien
tcaggacaagttgaacttggcaatg

SEQ ID NO: 4335252 - DNA, 25 bp, Homo sapien
caggacaagttgaacttggcaatgg

SEQ ID NO: 4335253 - DNA, 25 bp, Homo sapien
aggagtgctgggactaggaccagca

SEQ ID NO: 4335254 - DNA, 25 bp, Homo sapien
tgctgggactaggaccagcatggag

SEQ ID NO: 4335255 - DNA, 25 bp, Homo sapien
catttccctccacaaggagtgctgg

SEQ ID NO: 4335256 - DNA, 25 bp, Homo sapien
gagtgctgggactaggaccagcatg

SEQ ID NO: 4335257 - DNA, 25 bp, Homo sapien
gtcctccccaggtgaaacctctgaa

SEQ ID NO: 4335258 - DNA, 25 bp, Homo sapien
gatgtagggccatttccccatcatt

SEQ ID NO: 4335259 - DNA, 25 bp, Homo sapien
cacaattaccccacaaataaggaga

SEQ ID NO: 4335260 - DNA, 25 bp, Homo sapien
aaccagagcctcgtattcccaggag

SEQ ID NO: 4335261 - DNA, 25 bp, Homo sapien
ctaagcgtctccaccctctccgaca

SEQ ID NO: 4335262 - DNA, 25 bp, Homo sapien
agcgtctccaccctctccgacaaaa

SEQ ID NO: 4335263 - DNA, 25 bp, Homo sapien
gtctccaccctctccgacaaaagcc

SEQ ID NO: 4335264 - DNA, 25 bp, Homo sapien
gcgtctccaccctctccgacaaaag

SEQ ID NO: 4335265 - DNA, 25 bp, Homo sapien
tagatggatggcaacaggcttgggt

SEQ ID NO: 4335266 - DNA, 25 bp, Homo sapien
ctgtgggattagatggatggcaaca

SEQ ID NO: 4335267 - DNA, 25 bp, Homo sapien
gatggatggcaacaggcttgggtga

SEQ ID NO: 4335268 - DNA, 25 bp, Homo sapien
tggatggcaacaggcttgggtgaca

SEQ ID NO: 4335269 - DNA, 25 bp, Homo sapien
tacatagtatgcttcctgatgttac

SEQ ID NO: 4335270 - DNA, 25 bp, Homo sapien
tcttacatagtatgcttcctgatgt

SEQ ID NO: 4335271 - DNA, 25 bp, Homo sapien
gtcttacatagtatgcttcctgatg

SEQ ID NO: 4335272 - DNA, 25 bp, Homo sapien
cttacatagtatgcttcctgatgtt

SEQ ID NO: 4335273 - DNA, 25 bp, Homo sapien
tgctgagtttccggttctgctagag

SEQ ID NO: 4335274 - DNA, 25 bp, Homo sapien
cttccaagaatggtgggctaaagtc

SEQ ID NO: 4335275 - DNA, 25 bp, Homo sapien
gagcttccaagaatggtgggctaaa

SEQ ID NO: 4335276 - DNA, 25 bp, Homo sapien
cactgctgagtttccggttctgcta

SEQ ID NO: 4335277 - DNA, 25 bp, Homo sapien
aaatgtgagcccaagagtcttcctg

SEQ ID NO: 4335278 - DNA, 25 bp, Homo sapien
catcagcaaagcgaggtctgctttc

SEQ ID NO: 4335279 - DNA, 25 bp, Homo sapien
ctgcatcagcaaagcgaggtctgct

SEQ ID NO: 4335280 - DNA, 25 bp, Homo sapien
cagcaaagcgaggtctgctttcagg

SEQ ID NO: 4335281 - DNA, 25 bp, Homo sapien
tttgctgaggtgctactttcaaggt

SEQ ID NO: 4335282 - DNA, 25 bp, Homo sapien
ctttttgctgaggtgctactttcaa

SEQ ID NO: 4335283 - DNA, 25 bp, Homo sapien
tgctgaggtgctactttcaaggttt

SEQ ID NO: 4335284 - DNA, 25 bp, Homo sapien
ttttgctgaggtgctactttcaagg

SEQ ID NO: 4335285 - DNA, 25 bp, Homo sapien
ggtcctgtctcttgaatcaggtttc

SEQ ID NO: 4335286 - DNA, 25 bp, Homo sapien
ggtcacgtccaaaaggtcctgtctc

SEQ ID NO: 4335287 - DNA, 25 bp, Homo sapien
caagcatcctagcatccatgttgcc

SEQ ID NO: 4335288 - DNA, 25 bp, Homo sapien
tgttgatatcagcatgcaagcatcc

SEQ ID NO: 4335289 - DNA, 25 bp, Homo sapien
cgttccctgccatgtcgatgaagca

SEQ ID NO: 4335290 - DNA, 25 bp, Homo sapien
tgagtacacttataactaatcacag

SEQ ID NO: 4335291 - DNA, 25 bp, Homo sapien
taatcacagttgatcaactcaagga

SEQ ID NO: 4335292 - DNA, 25 bp, Homo sapien
gaagtcttaccccacatcaaatcta

SEQ ID NO: 4335293 - DNA, 25 bp, Homo sapien
cactgtcctagatctaagtccgtca

SEQ ID NO: 4335294 - DNA, 25 bp, Homo sapien
tcaaagcatgcactgtcctagatct

SEQ ID NO: 4335295 - DNA, 25 bp, Homo sapien
cctagatctaagtccgtcataaatt

SEQ ID NO: 4335296 - DNA, 25 bp, Homo sapien
aagcatgcactgtcctagatctaag

SEQ ID NO: 4335297 - DNA, 25 bp, Homo sapien
aaattcttcctcacttatgctgttc

SEQ ID NO: 4335298 - DNA, 25 bp, Homo sapien
ttaaattcttcctcacttatgctgt

SEQ ID NO: 4335299 - DNA, 25 bp, Homo sapien
ttcctcacttatgctgttctttccc

SEQ ID NO: 4335300 - DNA, 25 bp, Homo sapien
ccttttaaattcttcctcacttatg

SEQ ID NO: 4335301 - DNA, 25 bp, Homo sapien
gatcccttttgaaccaaagaaatca

SEQ ID NO: 4335302 - DNA, 25 bp, Homo sapien
aatcttccctctatgggccgccaga

SEQ ID NO: 4335303 - DNA, 25 bp, Homo sapien
ctatactttgtgctcagtcaggctg

SEQ ID NO: 4335304 - DNA, 25 bp, Homo sapien
tttcatcattagctggtacgtccca

SEQ ID NO: 4335305 - DNA, 25 bp, Homo sapien
ttccctgttaataccgaagagtagc

SEQ ID NO: 4335306 - DNA, 25 bp, Homo sapien
gcttcctttaacacctggacaccta

SEQ ID NO: 4335307 - DNA, 25 bp, Homo sapien
gacacctacctttggacatgtccct

SEQ ID NO: 4335308 - DNA, 25 bp, Homo sapien
cagtgctcagcttcaacctcaggct

SEQ ID NO: 4335309 - DNA, 25 bp, Homo sapien
agactgtggttcttgcacatttctg

SEQ ID NO: 4335310 - DNA, 25 bp, Homo sapien
aatgctgttcactatgcaggtgggc

SEQ ID NO: 4335311 - DNA, 25 bp, Homo sapien
aaaacaatgaatgctgttcactatg

SEQ ID NO: 4335312 - DNA, 25 bp, Homo sapien
gggctgaggattttagcagatggca

SEQ ID NO: 4335313 - DNA, 25 bp, Homo sapien
tgtttggcctacactgaactgacaa

SEQ ID NO: 4335314 - DNA, 25 bp, Homo sapien
aactgctcagcaggtcattcaggcc

SEQ ID NO: 4335315 - DNA, 25 bp, Homo sapien
gctgtggtgacctgcatggcatgaa

SEQ ID NO: 4335316 - DNA, 25 bp, Homo sapien
cttacagtcttcctacgctcgggca

SEQ ID NO: 4335317 - DNA, 25 bp, Homo sapien
ttatctaagagagtaccttatggaa

SEQ ID NO: 4335318 - DNA, 25 bp, Homo sapien
tggcacttcctttatctaagagagt

SEQ ID NO: 4335319 - DNA, 25 bp, Homo sapien
cacttcctttatctaagagagtacc

SEQ ID NO: 4335320 - DNA, 25 bp, Homo sapien
gagagtaccttatggaattccattc

SEQ ID NO: 4335321 - DNA, 25 bp, Homo sapien
tgttagaaagccagtcagaatgacg

SEQ ID NO: 4335322 - DNA, 25 bp, Homo sapien
tcaagaaacaacagactctcgtgag

SEQ ID NO: 4335323 - DNA, 25 bp, Homo sapien
cacttttacatggttggtgtcaatg

SEQ ID NO: 4335324 - DNA, 25 bp, Homo sapien
tggctttatgttcctgtgttagaaa

SEQ ID NO: 4335325 - DNA, 25 bp, Homo sapien
caagcagggaagtcacgagttgcct

SEQ ID NO: 4335326 - DNA, 25 bp, Homo sapien
aagaaagaaacgttcagcagcagcc

SEQ ID NO: 4335327 - DNA, 25 bp, Homo sapien
agaaggtgtcgttttgcactcaaac

SEQ ID NO: 4335328 - DNA, 25 bp, Homo sapien
ccagaggcactaatgtgagaagctg

SEQ ID NO: 4335329 - DNA, 25 bp, Homo sapien
taaaggttgaatcagaagatctctg

SEQ ID NO: 4335330 - DNA, 25 bp, Homo sapien
caacacaccgcttaaagagaactgg

SEQ ID NO: 4335331 - DNA, 25 bp, Homo sapien
tactaatttcgttgagacactgggt

SEQ ID NO: 4335332 - DNA, 25 bp, Homo sapien
taaagctggtgtaaagtcaacacac

SEQ ID NO: 4335333 - DNA, 25 bp, Homo sapien
cgcgatgtgacttgggtaatgtaga

SEQ ID NO: 4335334 - DNA, 25 bp, Homo sapien
tcagaagtgacagccttggagctga

SEQ ID NO: 4335335 - DNA, 25 bp, Homo sapien
tgggctctaatgaaccgcgatgtga

SEQ ID NO: 4335336 - DNA, 25 bp, Homo sapien
attccatagaataggccctgccacg

SEQ ID NO: 4335337 - DNA, 25 bp, Homo sapien
ggataatgagttgggagggcagtcc

SEQ ID NO: 4335338 - DNA, 25 bp, Homo sapien
gctcctgggcaaagaggataatgag

SEQ ID NO: 4335339 - DNA, 25 bp, Homo sapien
agctcctgggcaaagaggataatga

SEQ ID NO: 4335340 - DNA, 25 bp, Homo sapien
cctgggcaaagaggataatgagttg

SEQ ID NO: 4335341 - DNA, 25 bp, Homo sapien
tacatagtgagcaatcaacattagc

SEQ ID NO: 4335342 - DNA, 25 bp, Homo sapien
cattagctattataatcgcttatta

SEQ ID NO: 4335343 - DNA, 25 bp, Homo sapien
tagtacatagtgagcaatcaacatt

SEQ ID NO: 4335344 - DNA, 25 bp, Homo sapien
tagtgagcaatcaacattagctatt

SEQ ID NO: 4335345 - DNA, 25 bp, Homo sapien
tctgcttcagctgatatatagtgta

SEQ ID NO: 4335346 - DNA, 25 bp, Homo sapien
gttggtattcaacgcatgtgtaaga

SEQ ID NO: 4335347 - DNA, 25 bp, Homo sapien
gaaaaatccaattggtgttacagag

SEQ ID NO: 4335348 - DNA, 25 bp, Homo sapien
tcctagtcttagaatctctttctgc

SEQ ID NO: 4335349 - DNA, 25 bp, Homo sapien
agcagtgagtaccagaagatttgca

SEQ ID NO: 4335350 - DNA, 25 bp, Homo sapien
tgcattatcaagttgtggagagagg

SEQ ID NO: 4335351 - DNA, 25 bp, Homo sapien
tatcaagttgtggagagaggattat

SEQ ID NO: 4335352 - DNA, 25 bp, Homo sapien
aagatttgcagtttgtgcattatca

SEQ ID NO: 4335353 - DNA, 25 bp, Homo sapien
cggcgcagattaatagttgtctttg

SEQ ID NO: 4335354 - DNA, 25 bp, Homo sapien
gcgcagattaatagttgtctttgca

SEQ ID NO: 4335355 - DNA, 25 bp, Homo sapien
ggcgcagattaatagttgtctttgc

SEQ ID NO: 4335356 - DNA, 25 bp, Homo sapien
ctcaaagtttcccttcagaactgta

SEQ ID NO: 4335357 - DNA, 25 bp, Homo sapien
gactcaaagtttcccttcagaactg

SEQ ID NO: 4335358 - DNA, 25 bp, Homo sapien
actcaaagtttcccttcagaactgt

SEQ ID NO: 4335359 - DNA, 25 bp, Homo sapien
aattctccttctagtttagtcacag

SEQ ID NO: 4335360 - DNA, 25 bp, Homo sapien
attctccttctagtttagtcacagt

SEQ ID NO: 4335361 - DNA, 25 bp, Homo sapien
tccttcattcaagcatctttgggtc

SEQ ID NO: 4335362 - DNA, 25 bp, Homo sapien
tactatttgtggaagcgctgttgag

SEQ ID NO: 4335363 - DNA, 25 bp, Homo sapien
aatgtactatttgtggaagcgctgt

SEQ ID NO: 4335364 - DNA, 25 bp, Homo sapien
ggaagcgctgttgagttcttcctcc

SEQ ID NO: 4335365 - DNA, 25 bp, Homo sapien
tcattatcctaagggaactaaatca

SEQ ID NO: 4335366 - DNA, 25 bp, Homo sapien
agttagagaatcaacctactgtcca

SEQ ID NO: 4335367 - DNA, 25 bp, Homo sapien
ctgtccatcaatggttgactaaaga

SEQ ID NO: 4335368 - DNA, 25 bp, Homo sapien
cacacacactgtgcattatgcaacc

SEQ ID NO: 4335369 - DNA, 25 bp, Homo sapien
aattttgctactctcaaacttgtca

SEQ ID NO: 4335370 - DNA, 25 bp, Homo sapien
attttgctactctcaaacttgtcat

SEQ ID NO: 4335371 - DNA, 25 bp, Homo sapien
atgtatcctcctaagacagtcagtt

SEQ ID NO: 4335372 - DNA, 25 bp, Homo sapien
caatatgtatcctcctaagacagtc

SEQ ID NO: 4335373 - DNA, 25 bp, Homo sapien
gcacgttgtggtttagggctgacta

SEQ ID NO: 4335374 - DNA, 25 bp, Homo sapien
gaatctcagggaatgtccatggtga

SEQ ID NO: 4335375 - DNA, 25 bp, Homo sapien
ctacatgagagaaggatggaccgga

SEQ ID NO: 4335376 - DNA, 25 bp, Homo sapien
gaaagacgtaagaccaatcaggatg

SEQ ID NO: 4335377 - DNA, 25 bp, Homo sapien
ggtattggcgaaagtctgcccctta

SEQ ID NO: 4335378 - DNA, 25 bp, Homo sapien
tggcgaaagtctgccccttaaagag

SEQ ID NO: 4335379 - DNA, 25 bp, Homo sapien
ccttaaagagctgagcactggaaac

SEQ ID NO: 4335380 - DNA, 25 bp, Homo sapien
actggtattggcgaaagtctgcccc

SEQ ID NO: 4335381 - DNA, 25 bp, Homo sapien
tcaggtccacttcacttagcaagtg

SEQ ID NO: 4335382 - DNA, 25 bp, Homo sapien
gtgtctctttcaggtccacttcact

SEQ ID NO: 4335383 - DNA, 25 bp, Homo sapien
gcccacctttggctgggcccatcca

SEQ ID NO: 4335384 - DNA, 25 bp, Homo sapien
ccacttcacttagcaagtgtgccca

SEQ ID NO: 4335385 - DNA, 25 bp, Homo sapien
aattgcagttaatgtccttagggaa

SEQ ID NO: 4335386 - DNA, 25 bp, Homo sapien
tcaataaattgcagttaatgtcctt

SEQ ID NO: 4335387 - DNA, 25 bp, Homo sapien
tcagtgttagcagccaatccaagcc

SEQ ID NO: 4335388 - DNA, 25 bp, Homo sapien
tgttctttgatgagtgtcagtgtta

SEQ ID NO: 4335389 - DNA, 25 bp, Homo sapien
gaaggtgagatcctacccaagagta

SEQ ID NO: 4335390 - DNA, 25 bp, Homo sapien
ccttggcctggtgtggaactttaag

SEQ ID NO: 4335391 - DNA, 25 bp, Homo sapien
caagagtagcgattagccaaacagc

SEQ ID NO: 4335392 - DNA, 25 bp, Homo sapien
ccagctcatgcttgggcttcataaa

SEQ ID NO: 4335393 - DNA, 25 bp, Homo sapien
tattagtggagtctccacacttccc

SEQ ID NO: 4335394 - DNA, 25 bp, Homo sapien
cccagctcaaattcatagcaagaag

SEQ ID NO: 4335395 - DNA, 25 bp, Homo sapien
gaaggtagatattagtggagtctcc

SEQ ID NO: 4335396 - DNA, 25 bp, Homo sapien
ttggttccagcctagtatttgtgtt

SEQ ID NO: 4335397 - DNA, 25 bp, Homo sapien
tctgcaggcggagaaggcctcagga

SEQ ID NO: 4335398 - DNA, 25 bp, Homo sapien
ctgcaggcggagaaggcctcaggaa

SEQ ID NO: 4335399 - DNA, 25 bp, Homo sapien
tgcaggcggagaaggcctcaggaaa

SEQ ID NO: 4335400 - DNA, 25 bp, Homo sapien
ctctgcaggcggagaaggcctcagg

SEQ ID NO: 4335401 - DNA, 25 bp, Homo sapien
ttcgaacctacatctctttcctcaa

SEQ ID NO: 4335402 - DNA, 25 bp, Homo sapien
acttccagagccaataaatttttcg

SEQ ID NO: 4335403 - DNA, 25 bp, Homo sapien
tccagcggggactgaacttccagag

SEQ ID NO: 4335404 - DNA, 25 bp, Homo sapien
ccaaccttgaagttttcaccactgc

SEQ ID NO: 4335405 - DNA, 25 bp, Homo sapien
tcatataccaataacctctatctgt

SEQ ID NO: 4335406 - DNA, 25 bp, Homo sapien
taccaataacctctatctgtagcac

SEQ ID NO: 4335407 - DNA, 25 bp, Homo sapien
ctatcatataccaataacctctatc

SEQ ID NO: 4335408 - DNA, 25 bp, Homo sapien
caataacctctatctgtagcactga

SEQ ID NO: 4335409 - DNA, 25 bp, Homo sapien
cagaggcagagttacgcagtgggga

SEQ ID NO: 4335410 - DNA, 25 bp, Homo sapien
aaatggtgccaagcagagaaagcac

SEQ ID NO: 4335411 - DNA, 25 bp, Homo sapien
aatggtgccaagcagagaaagcacc

SEQ ID NO: 4335412 - DNA, 25 bp, Homo sapien
gctgcagtgatgctgcctgtgagag

SEQ ID NO: 4335413 - DNA, 25 bp, Homo sapien
tatgaccacagcttgcacagaagcc

SEQ ID NO: 4335414 - DNA, 25 bp, Homo sapien
aatagtgatgcatagcccagggtga

SEQ ID NO: 4335415 - DNA, 25 bp, Homo sapien
gcaaatagtgatgcatatcccaggg

SEQ ID NO: 4335416 - DNA, 25 bp, Homo sapien
ggacaaaaggaactggcaaatagtg

SEQ ID NO: 4335417 - DNA, 25 bp, Homo sapien
ggaccagtgctcaggagtcccatac

SEQ ID NO: 4335418 - DNA, 25 bp, Homo sapien
aactcggagacctggaggagatctc

SEQ ID NO: 4335419 - DNA, 25 bp, Homo sapien
taggcttgaggcaaaactcggagac

SEQ ID NO: 4335420 - DNA, 25 bp, Homo sapien
catacctggagccatgcggacttgg

SEQ ID NO: 4335421 - DNA, 25 bp, Homo sapien
agtgactttgaagtttcatcctgtt

SEQ ID NO: 4335422 - DNA, 25 bp, Homo sapien
cttctggcctctatgagtagaagga

SEQ ID NO: 4335423 - DNA, 25 bp, Homo sapien
ttccttctggcctctatgagtagaa

SEQ ID NO: 4335424 - DNA, 25 bp, Homo sapien
tggcctctatgagtagaaggaagtt

SEQ ID NO: 4335425 - DNA, 25 bp, Homo sapien
aacaatccagttgtgtaggcaaggt

SEQ ID NO: 4335426 - DNA, 25 bp, Homo sapien
caaggtagggtttagttagagagct

SEQ ID NO: 4335427 - DNA, 25 bp, Homo sapien
agtgcaccacccagtcggcccactg

SEQ ID NO: 4335428 - DNA, 25 bp, Homo sapien
gttagagagctagagagtggcacac

SEQ ID NO: 4335429 - DNA, 25 bp, Homo sapien
ggttcagtcagacagaaatatctac

SEQ ID NO: 4335430 - DNA, 25 bp, Homo sapien
taaaatatgagtgatgatagcgtcc

SEQ ID NO: 4335431 - DNA, 25 bp, Homo sapien
gatagcgtccatgtagaagtgtgat

SEQ ID NO: 4335432 - DNA, 25 bp, Homo sapien
tttgaaggcaaaacgacgaggatcc

SEQ ID NO: 4335433 - DNA, 25 bp, Homo sapien
gttccagccaagatgggataggccc

SEQ ID NO: 4335434 - DNA, 25 bp, Homo sapien
gagcatgggaagaccctaaaccgta

SEQ ID NO: 4335435 - DNA, 25 bp, Homo sapien
taaaccgtagagaggcggcagactt

SEQ ID NO: 4335436 - DNA, 25 bp, Homo sapien
gattcaggacttccggttccagcca

SEQ ID NO: 4335437 - DNA, 25 bp, Homo sapien
ccttaccctatgacaacaagtggtg

SEQ ID NO: 4335438 - DNA, 25 bp, Homo sapien
tcctcttaggagcaacaatgtggtg

SEQ ID NO: 4335439 - DNA, 25 bp, Homo sapien
tcaccaagaaggtataagcagagcc

SEQ ID NO: 4335440 - DNA, 25 bp, Homo sapien
caatgtggtgcaacttggtgctcca

SEQ ID NO: 4335441 - DNA, 25 bp, Homo sapien
cagtcactaatgcaagtatggccag

SEQ ID NO: 4335442 - DNA, 25 bp, Homo sapien
gaagagtcagccctgttgggaccaa

SEQ ID NO: 4335443 - DNA, 25 bp, Homo sapien
cacaaatgtagggtagacacttcca

SEQ ID NO: 4335444 - DNA, 25 bp, Homo sapien
tgaagactacgcttgcaggagaaga

SEQ ID NO: 4335445 - DNA, 25 bp, Homo sapien
caagtcttcatgatggagcatttca

SEQ ID NO: 4335446 - DNA, 25 bp, Homo sapien
catctgggcggcagtttggatttta

SEQ ID NO: 4335447 - DNA, 25 bp, Homo sapien
cattttacacatcttagtggccaag

SEQ ID NO: 4335448 - DNA, 25 bp, Homo sapien
taagttaggcatgaagaacaagccc

SEQ ID NO: 4335449 - DNA, 25 bp, Homo sapien
tcgttccagtgttgcgtggctgatg

SEQ ID NO: 4335450 - DNA, 25 bp, Homo sapien
cggcccgactctgggctggtaccat

SEQ ID NO: 4335451 - DNA, 25 bp, Homo sapien
ggctggtaccatgacaggtactgca

SEQ ID NO: 4335452 - DNA, 25 bp, Homo sapien
gtactgcaccaattcgttccagtgt

SEQ ID NO: 4335453 - DNA, 25 bp, Homo sapien
gagtcttatgttgacccgggaccag

SEQ ID NO: 4335454 - DNA, 25 bp, Homo sapien
cactgaagtggctgactgactctgt

SEQ ID NO: 4335455 - DNA, 25 bp, Homo sapien
gaaagattggcccaagtcactgaag

SEQ ID NO: 4335456 - DNA, 25 bp, Homo sapien
cagaagaacacttgggtggaagatc

SEQ ID NO: 4335457 - DNA, 25 bp, Homo sapien
ttcatttgtatcctcctagttgggc

SEQ ID NO: 4335458 - DNA, 25 bp, Homo sapien
cctggagacacggaagataaggaga

SEQ ID NO: 4335459 - DNA, 25 bp, Homo sapien
tgggcacatgctggacctttccctc

SEQ ID NO: 4335460 - DNA, 25 bp, Homo sapien
ctcctagttgggcacatgctggacc

SEQ ID NO: 4335461 - DNA, 25 bp, Homo sapien
cttatttcattaggaatttcttctt

SEQ ID NO: 4335462 - DNA, 25 bp, Homo sapien
ttatttttgcttctccagtaaaaga

SEQ ID NO: 4335463 - DNA, 25 bp, Homo sapien
tcctcctctttatttttgcttctcc

SEQ ID NO: 4335464 - DNA, 25 bp, Homo sapien
ttgcttctccagtaaaagaatgccc

SEQ ID NO: 4335465 - DNA, 25 bp, Homo sapien
ccaatggctccagctattagtccaa

SEQ ID NO: 4335466 - DNA, 25 bp, Homo sapien
taactgcaccagtgccaatggctcc

SEQ ID NO: 4335467 - DNA, 25 bp, Homo sapien
aattagtgcaatgcaaaaaatgata

SEQ ID NO: 4335468 - DNA, 25 bp, Homo sapien
tattagtccaatgttcctgggctgg

SEQ ID NO: 4335469 - DNA, 25 bp, Homo sapien
ttagaagccacgcactggtacaaac

SEQ ID NO: 4335470 - DNA, 25 bp, Homo sapien
aatagcattagaagccacgcactgg

SEQ ID NO: 4335471 - DNA, 25 bp, Homo sapien
acaggtgctggttccaatagcatta

SEQ ID NO: 4335472 - DNA, 25 bp, Homo sapien
gctggttccaatagcattagaagcc

SEQ ID NO: 4335473 - DNA, 25 bp, Homo sapien
gatgttccggatggtgactgttccc

SEQ ID NO: 4335474 - DNA, 25 bp, Homo sapien
ggcactgatgttccggatggtgact

SEQ ID NO: 4335475 - DNA, 25 bp, Homo sapien
actgatgttccggatggtgactgtt

SEQ ID NO: 4335476 - DNA, 25 bp, Homo sapien
acagggcactgatgttccggatggt

SEQ ID NO: 4335477 - DNA, 25 bp, Homo sapien
aaaataataaccgagtgaggatttg

SEQ ID NO: 4335478 - DNA, 25 bp, Homo sapien
aaataataaccgagtgaggatttgg

SEQ ID NO: 4335479 - DNA, 25 bp, Homo sapien
aataataaccgagtgaggatttggc

SEQ ID NO: 4335480 - DNA, 25 bp, Homo sapien
tatggaagtgtccaccaggcagatg

SEQ ID NO: 4335481 - DNA, 25 bp, Homo sapien
gccactgcactggtattgccaagaa

SEQ ID NO: 4335482 - DNA, 25 bp, Homo sapien
aaagacctggaactttggagcgctg

SEQ ID NO: 4335483 - DNA, 25 bp, Homo sapien
tggagcgctgtcctaaatcagaaca

SEQ ID NO: 4335484 - DNA, 25 bp, Homo sapien
tcataagagaataatgatggtaatt

SEQ ID NO: 4335485 - DNA, 25 bp, Homo sapien
gaggaaaggcacatataaacagtat

SEQ ID NO: 4335486 - DNA, 25 bp, Homo sapien
aaaatagaggaaaggcacatataaa

SEQ ID NO: 4335487 - DNA, 25 bp, Homo sapien
acttcataagagaataatgatggta

SEQ ID NO: 4335488 - DNA, 25 bp, Homo sapien
aataaaatgggtaaagcagcactgt

SEQ ID NO: 4335489 - DNA, 25 bp, Homo sapien
agaattgtccatgataactaataaa

SEQ ID NO: 4335490 - DNA, 25 bp, Homo sapien
gaatattagaattgtccatgataac

SEQ ID NO: 4335491 - DNA, 25 bp, Homo sapien
tcagcagttatagggtgttattttt

SEQ ID NO: 4335492 - DNA, 25 bp, Homo sapien
gacatcgctgccaatatcctgggat

SEQ ID NO: 4335493 - DNA, 25 bp, Homo sapien
gagggtattgtctaacttctcccaa

SEQ ID NO: 4335494 - DNA, 25 bp, Homo sapien
gagcaggatgacatcgctgccaata

SEQ ID NO: 4335495 - DNA, 25 bp, Homo sapien
taagttggtcgaggaatgccttcct

SEQ ID NO: 4335496 - DNA, 25 bp, Homo sapien
gacattggtagctggcatggtgcct

SEQ ID NO: 4335497 - DNA, 25 bp, Homo sapien
cctatgtctggaaggttgttgacca

SEQ ID NO: 4335498 - DNA, 25 bp, Homo sapien
ctaacactgtgagaccggtgacccc

SEQ ID NO: 4335499 - DNA, 25 bp, Homo sapien
tgcctgtaaatcctaccctaccgtg

SEQ ID NO: 4335500 - DNA, 25 bp, Homo sapien
gagtgaccatccaaatgacattgag

SEQ ID NO: 4335501 - DNA, 25 bp, Homo sapien
cattgaggttaatgagggcagcgct

SEQ ID NO: 4335502 - DNA, 25 bp, Homo sapien
gcagcgctggtagtgaaagtgcagg

SEQ ID NO: 4335503 - DNA, 25 bp, Homo sapien
gggccacctggatactcccagggct

SEQ ID NO: 4335504 - DNA, 25 bp, Homo sapien
aacaagagggctcgctgatgggacc

SEQ ID NO: 4335505 - DNA, 25 bp, Homo sapien
agggtcttcttaggcctaacaagag

SEQ ID NO: 4335506 - DNA, 25 bp, Homo sapien
tagaggaaagttgaagccggatatc

SEQ ID NO: 4335507 - DNA, 25 bp, Homo sapien
tctagactcctagagggtatctcac

SEQ ID NO: 4335508 - DNA, 25 bp, Homo sapien
ctgtatataaattaagattttctta

SEQ ID NO: 4335509 - DNA, 25 bp, Homo sapien
ttctgtatataaattaagattttct

SEQ ID NO: 4335510 - DNA, 25 bp, Homo sapien
cagggagtcatacttataattctgt

SEQ ID NO: 4335511 - DNA, 25 bp, Homo sapien
ttaagattttcttattctgtttcat

SEQ ID NO: 4335512 - DNA, 25 bp, Homo sapien
cctaagaactagagagggagcctca

SEQ ID NO: 4335513 - DNA, 25 bp, Homo sapien
gaaagggtcaccactaacaagcatt

SEQ ID NO: 4335514 - DNA, 25 bp, Homo sapien
ttaacaaatgcacatggccgggcgc

SEQ ID NO: 4335515 - DNA, 25 bp, Homo sapien
tctgatatactgaacccaacgccta

SEQ ID NO: 4335516 - DNA, 25 bp, Homo sapien
tctattattggagcagaaaatcaca

SEQ ID NO: 4335517 - DNA, 25 bp, Homo sapien
cattgtctcactaggattgctttag

SEQ ID NO: 4335518 - DNA, 25 bp, Homo sapien
aaatcacaactgcttaactcctctg

SEQ ID NO: 4335519 - DNA, 25 bp, Homo sapien
tactattactcatgccattgtctca

SEQ ID NO: 4335520 - DNA, 25 bp, Homo sapien
tctgtaattctacccaaaagataag

SEQ ID NO: 4335521 - DNA, 25 bp, Homo sapien
ttctgtaattctacccaaaagataa

SEQ ID NO: 4335522 - DNA, 25 bp, Homo sapien
gtaggaatctaccactgctgccatg

SEQ ID NO: 4335523 - DNA, 25 bp, Homo sapien
tcccagtatctcaaagtaggaatct

SEQ ID NO: 4335524 - DNA, 25 bp, Homo sapien
tctcaaagtaggaatctaccactgc

SEQ ID NO: 4335525 - DNA, 25 bp, Homo sapien
tgctgccatgatctggggttccaag

SEQ ID NO: 4335526 - DNA, 25 bp, Homo sapien
gacccacatgtctatctctttctgt

SEQ ID NO: 4335527 - DNA, 25 bp, Homo sapien
cccagtaaagacttcgacccacatg

SEQ ID NO: 4335528 - DNA, 25 bp, Homo sapien
gtcttcttcccaaccgccagttgag

SEQ ID NO: 4335529 - DNA, 25 bp, Homo sapien
ttgagagtacatgtcctggatgact

SEQ ID NO: 4335530 - DNA, 25 bp, Homo sapien
ctaagtgtgtaagtgggctagctga

SEQ ID NO: 4335531 - DNA, 25 bp, Homo sapien
gaagtgtgctccagaatacattatg

SEQ ID NO: 4335532 - DNA, 25 bp, Homo sapien
cacagttaaggacactggccctcaa

SEQ ID NO: 4335533 - DNA, 25 bp, Homo sapien
gcatacggcttctcaaatatacaag

SEQ ID NO: 4335534 - DNA, 25 bp, Homo sapien
gaagctagtttaatagtccaggata

SEQ ID NO: 4335535 - DNA, 25 bp, Homo sapien
tttaatagtccaggataaaatgatc

SEQ ID NO: 4335536 - DNA, 25 bp, Homo sapien
taatagtccaggataaaatgatcag

SEQ ID NO: 4335537 - DNA, 25 bp, Homo sapien
gctagtttaatagtccaggataaaa

SEQ ID NO: 4335538 - DNA, 25 bp, Homo sapien
taggactctgtccttggacctctcc

SEQ ID NO: 4335539 - DNA, 25 bp, Homo sapien
caaacttatacctccaggccagatc

SEQ ID NO: 4335540 - DNA, 25 bp, Homo sapien
ggtgtagtgcaacccatttattgta

SEQ ID NO: 4335541 - DNA, 25 bp, Homo sapien
gatctccctttggaactccagtcat

SEQ ID NO: 4335542 - DNA, 25 bp, Homo sapien
ccacactgctgctaaagtcaaattg

SEQ ID NO: 4335543 - DNA, 25 bp, Homo sapien
atgatctttaacaaccacgacagcc

SEQ ID NO: 4335544 - DNA, 25 bp, Homo sapien
tcaactgatctcctccggtccactt

SEQ ID NO: 4335545 - DNA, 25 bp, Homo sapien
tgatctcctccggtccacttccaat

SEQ ID NO: 4335546 - DNA, 25 bp, Homo sapien
tcacatcttggaggataaacagaag

SEQ ID NO: 4335547 - DNA, 25 bp, Homo sapien
ctttggtgatggactcagactggtt

SEQ ID NO: 4335548 - DNA, 25 bp, Homo sapien
catcttgcaagacttcctttggtga

SEQ ID NO: 4335549 - DNA, 25 bp, Homo sapien
gagttctatgaagactaatcacatc

SEQ ID NO: 4335550 - DNA, 25 bp, Homo sapien
gatcattccttacaacatgaagcaa

SEQ ID NO: 4335551 - DNA, 25 bp, Homo sapien
ggttctacagaaattgccaaaagtc

SEQ ID NO: 4335552 - DNA, 25 bp, Homo sapien
tcaaggttctacagaaattgccaaa

SEQ ID NO: 4335553 - DNA, 25 bp, Homo sapien
tctacagaaattgccaaaagtccaa

SEQ ID NO: 4335554 - DNA, 25 bp, Homo sapien
agagcgcagcgaggtgagagtcagg

SEQ ID NO: 4335555 - DNA, 25 bp, Homo sapien
tccgcagagcgcagcgaggtgagag

SEQ ID NO: 4335556 - DNA, 25 bp, Homo sapien
ctaaaaaggatcctgcattccgcag

SEQ ID NO: 4335557 - DNA, 25 bp, Homo sapien
aaaaggatcctgcattccgcagagc

SEQ ID NO: 4335558 - DNA, 25 bp, Homo sapien
tcccgaccctcggcaaagcaaggag

SEQ ID NO: 4335559 - DNA, 25 bp, Homo sapien
ctgagaaagttggactcccgaccct

SEQ ID NO: 4335560 - DNA, 25 bp, Homo sapien
ggctctttgccgtccccaaacagct

SEQ ID NO: 4335561 - DNA, 25 bp, Homo sapien
cgaacgccgcccctgagaaagttgg

SEQ ID NO: 4335562 - DNA, 25 bp, Homo sapien
agagaggagcagcaaaggcgccaga

SEQ ID NO: 4335563 - DNA, 25 bp, Homo sapien
gccagaggggaacgctgagaagtca

SEQ ID NO: 4335564 - DNA, 25 bp, Homo sapien
gcaaaggcgccagaggggaacgctg

SEQ ID NO: 4335565 - DNA, 25 bp, Homo sapien
gagagaggagcagcaaaggcgccag

SEQ ID NO: 4335566 - DNA, 25 bp, Homo sapien
agcgggcgtgagtctccgcgctctt

SEQ ID NO: 4335567 - DNA, 25 bp, Homo sapien
cgggccgctgttccccgcgcagagc

SEQ ID NO: 4335568 - DNA, 25 bp, Homo sapien
tggtcctcccacacccagcgccggg

SEQ ID NO: 4335569 - DNA, 25 bp, Homo sapien
tcctacccggctcccggtcgcaaca

SEQ ID NO: 4335570 - DNA, 25 bp, Homo sapien
ctgcagcgccgcccggctccgcgga

SEQ ID NO: 4335571 - DNA, 25 bp, Homo sapien
gcagcgccgcccggctccgcggacg

SEQ ID NO: 4335572 - DNA, 25 bp, Homo sapien
agctgcagcgccgcccggctccgcg

SEQ ID NO: 4335573 - DNA, 25 bp, Homo sapien
agacgagccaagtgcagctgcagcg

SEQ ID NO: 4335574 - DNA, 25 bp, Homo sapien
gagctgtgaccagaggcgttccggg

SEQ ID NO: 4335575 - DNA, 25 bp, Homo sapien
accagaggcgttccgggctcgccag

SEQ ID NO: 4335576 - DNA, 25 bp, Homo sapien
ctgtgaccagaggcgttccgggctc

SEQ ID NO: 4335577 - DNA, 25 bp, Homo sapien
ggctcgccagccgtgccacccagcc

SEQ ID NO: 4335578 - DNA, 25 bp, Homo sapien
tcttcgaatgttcagacaattttcc

SEQ ID NO: 4335579 - DNA, 25 bp, Homo sapien
gaccttcttcgaatgttcagacaat

SEQ ID NO: 4335580 - DNA, 25 bp, Homo sapien
tcaagaccttcttcgaatgttcaga

SEQ ID NO: 4335581 - DNA, 25 bp, Homo sapien
cttcgaatgttcagacaattttcca

SEQ ID NO: 4335582 - DNA, 25 bp, Homo sapien
gggccactcttgaccaatgtaggat

SEQ ID NO: 4335583 - DNA, 25 bp, Homo sapien
gaatccggtgccatagacatgtgca

SEQ ID NO: 4335584 - DNA, 25 bp, Homo sapien
acatgtgcaacctggaagcataggg

SEQ ID NO: 4335585 - DNA, 25 bp, Homo sapien
tccaagtggcagtttgtagccacat

SEQ ID NO: 4335586 - DNA, 25 bp, Homo sapien
taaatgaatacagatatagaggcac

SEQ ID NO: 4335587 - DNA, 25 bp, Homo sapien
ctaaatgaatacagatatagaggca

SEQ ID NO: 4335588 - DNA, 25 bp, Homo sapien
cctccagggaatctaccccagcaag

SEQ ID NO: 4335589 - DNA, 25 bp, Homo sapien
tccagggaatctaccccagcaagca

SEQ ID NO: 4335590 - DNA, 25 bp, Homo sapien
aatctaccccagcaagcacaggttg

SEQ ID NO: 4335591 - DNA, 25 bp, Homo sapien
gggaatctaccccagcaagcacagg

SEQ ID NO: 4335592 - DNA, 25 bp, Homo sapien
gctatagggctgtatccaatgcaga

SEQ ID NO: 4335593 - DNA, 25 bp, Homo sapien
ttcttatgatcactactggcaggag

SEQ ID NO: 4335594 - DNA, 25 bp, Homo sapien
taagatcttcctttctgctaagcca

SEQ ID NO: 4335595 - DNA, 25 bp, Homo sapien
ggtccaccctgtaccactaatgaaa

SEQ ID NO: 4335596 - DNA, 25 bp, Homo sapien
tagtattgacttgagtgggttaagg

SEQ ID NO: 4335597 - DNA, 25 bp, Homo sapien
tctgccaatactcctcttcacccat

SEQ ID NO: 4335598 - DNA, 25 bp, Homo sapien
ctaccatcttcccataattccaaat

SEQ ID NO: 4335599 - DNA, 25 bp, Homo sapien
tacagatgcaagcagcacctaactg

SEQ ID NO: 4335600 - DNA, 25 bp, Homo sapien
tataataaggtcatcttagtcgccc

SEQ ID NO: 4335601 - DNA, 25 bp, Homo sapien
taattttgtcaataccctgcaagaa

SEQ ID NO: 4335602 - DNA, 25 bp, Homo sapien
caaccagcatgatctaaagtgcaag

SEQ ID NO: 4335603 - DNA, 25 bp, Homo sapien
ggacagtaccgtatttacttagcca

SEQ ID NO: 4335604 - DNA, 25 bp, Homo sapien
cagttccaccagagcaaaagttcca

SEQ ID NO: 4335605 - DNA, 25 bp, Homo sapien
aaagcagttccaccagagcaaaagt

SEQ ID NO: 4335606 - DNA, 25 bp, Homo sapien
agttccaccagagcaaaagttccac

SEQ ID NO: 4335607 - DNA, 25 bp, Homo sapien
agcagttccaccagagcaaaagttc

SEQ ID NO: 4335608 - DNA, 25 bp, Homo sapien
tcccaccatatgtcctgcattttct

SEQ ID NO: 4335609 - DNA, 25 bp, Homo sapien
tcctcccaccatatgtcctgcattt

SEQ ID NO: 4335610 - DNA, 25 bp, Homo sapien
ccaccatatgtcctgcattttcttt

SEQ ID NO: 4335611 - DNA, 25 bp, Homo sapien
cctcccaccatatgtcctgcatttt

SEQ ID NO: 4335612 - DNA, 25 bp, Homo sapien
tattctgaatatataggagtgtaaa

SEQ ID NO: 4335613 - DNA, 25 bp, Homo sapien
ctattctgaatatataggagtgtaa

SEQ ID NO: 4335614 - DNA, 25 bp, Homo sapien
attctgaatatataggagtgtaaat

SEQ ID NO: 4335615 - DNA, 25 bp, Homo sapien
gtgggggatgttaatcagaggagca

SEQ ID NO: 4335616 - DNA, 25 bp, Homo sapien
gcggtgggggatgttaatcagagga

SEQ ID NO: 4335617 - DNA, 25 bp, Homo sapien
cctcgtgcagctggttgtgtgttca

SEQ ID NO: 4335618 - DNA, 25 bp, Homo sapien
cgtgcagctggttgtgtgttcatct

SEQ ID NO: 4335619 - DNA, 25 bp, Homo sapien
gagaatcgccccttctcaggacatg

SEQ ID NO: 4335620 - DNA, 25 bp, Homo sapien
gaagctgtaactgccagagcctgag

SEQ ID NO: 4335621 - DNA, 25 bp, Homo sapien
taacactctaggtggcgatgcacgg

SEQ ID NO: 4335622 - DNA, 25 bp, Homo sapien
cactgcggagaacctctgtgaacaa

SEQ ID NO: 4335623 - DNA, 25 bp, Homo sapien
gccctccaaacaatgatgaccagtg

SEQ ID NO: 4335624 - DNA, 25 bp, Homo sapien
tagcgtgctatctctccctcttgtg

SEQ ID NO: 4335625 - DNA, 25 bp, Homo sapien
gtcaccaaaacctgggacaggctca

SEQ ID NO: 4335626 - DNA, 25 bp, Homo sapien
tcctctccttgaaaattagcgtgct

SEQ ID NO: 4335627 - DNA, 25 bp, Homo sapien
gctaatactccaggagttttacttc

SEQ ID NO: 4335628 - DNA, 25 bp, Homo sapien
gatcactaacaaagtttagtgactc

SEQ ID NO: 4335629 - DNA, 25 bp, Homo sapien
ctcattgttattcagatagccttac

SEQ ID NO: 4335630 - DNA, 25 bp, Homo sapien
tcagatagccttacataatggactt

SEQ ID NO: 4335631 - DNA, 25 bp, Homo sapien
tagccagtgtcctgtcttacaagga

SEQ ID NO: 4335632 - DNA, 25 bp, Homo sapien
tattgagggcctgctataaacaagg

SEQ ID NO: 4335633 - DNA, 25 bp, Homo sapien
gtatcttagaactccaaaccagttg

SEQ ID NO: 4335634 - DNA, 25 bp, Homo sapien
caacagtagctaagcaggtagccag

SEQ ID NO: 4335635 - DNA, 25 bp, Homo sapien
taatggtcttgaaagtcaaagggcc

SEQ ID NO: 4335636 - DNA, 25 bp, Homo sapien
caatggaggctttacctgtacaggt

SEQ ID NO: 4335637 - DNA, 25 bp, Homo sapien
caaagggcccgagttttgctcagaa

SEQ ID NO: 4335638 - DNA, 25 bp, Homo sapien
cctcaagagtcagaagcatcggcca

SEQ ID NO: 4335639 - DNA, 25 bp, Homo sapien
agctctttagaattatggatactga

SEQ ID NO: 4335640 - DNA, 25 bp, Homo sapien
tgaacatatctgtaggcctcaaaga

SEQ ID NO: 4335641 - DNA, 25 bp, Homo sapien
acacgaaggaacactcaaagctttt

SEQ ID NO: 4335642 - DNA, 25 bp, Homo sapien
ctctttagaattatggatactgaaa

SEQ ID NO: 4335643 - DNA, 25 bp, Homo sapien
aagttcactgtgtcctgattcgtcg

SEQ ID NO: 4335644 - DNA, 25 bp, Homo sapien
tgggcatcactggaaggcatacctg

SEQ ID NO: 4335645 - DNA, 25 bp, Homo sapien
gctgcaaccagctcagctactgctg

SEQ ID NO: 4335646 - DNA, 25 bp, Homo sapien
tttgtggacgccttctcacctgaca

SEQ ID NO: 4335647 - DNA, 25 bp, Homo sapien
tggacgagaacaactctggttctct

SEQ ID NO: 4335648 - DNA, 25 bp, Homo sapien
ttggacgagaacaactctggttctc

SEQ ID NO: 4335649 - DNA, 25 bp, Homo sapien
cttggacgagaacaactctggttct

SEQ ID NO: 4335650 - DNA, 25 bp, Homo sapien
aacaggttcttaatgtgtgctacta

SEQ ID NO: 4335651 - DNA, 25 bp, Homo sapien
tcaacaatgagctgtaacaggttct

SEQ ID NO: 4335652 - DNA, 25 bp, Homo sapien
tatactctacatcaccaggagctct

SEQ ID NO: 4335653 - DNA, 25 bp, Homo sapien
gctactatttgaagtctctaggcca

SEQ ID NO: 4335654 - DNA, 25 bp, Homo sapien
agaacaactactcaacccatctgtt

SEQ ID NO: 4335655 - DNA, 25 bp, Homo sapien
cagactcgtgacacttggtgtaaga

SEQ ID NO: 4335656 - DNA, 25 bp, Homo sapien
taaaggattgtgttccacagatact

SEQ ID NO: 4335657 - DNA, 25 bp, Homo sapien
cactgtgatgttgatatataaagga

SEQ ID NO: 4335658 - DNA, 25 bp, Homo sapien
tttgtaaattattgtacctgttgtg

SEQ ID NO: 4335659 - DNA, 25 bp, Homo sapien
ttgtaaattattgtacctgttgtgt

SEQ ID NO: 4335660 - DNA, 25 bp, Homo sapien
tatgtctccactgcattttgccttg

SEQ ID NO: 4335661 - DNA, 25 bp, Homo sapien
atgtctccactgcattttgccttgc

SEQ ID NO: 4335662 - DNA, 25 bp, Homo sapien
ggacccatgatgaaaagtgtcactg

SEQ ID NO: 4335663 - DNA, 25 bp, Homo sapien
gccatgtattcatgtgtcagactcc

SEQ ID NO: 4335664 - DNA, 25 bp, Homo sapien
caaagtttgtttgccccattgaagg

SEQ ID NO: 4335665 - DNA, 25 bp, Homo sapien
gtgtcagactccacgtgagaacccg

SEQ ID NO: 4335666 - DNA, 25 bp, Homo sapien
catctaatcaactgctagcgaggct

SEQ ID NO: 4335667 - DNA, 25 bp, Homo sapien
tgaaggatgctaggaaacaccaagt

SEQ ID NO: 4335668 - DNA, 25 bp, Homo sapien
tacagaattagggaggaccacacag

SEQ ID NO: 4335669 - DNA, 25 bp, Homo sapien
gctctcgaggactactgggattcag

SEQ ID NO: 4335670 - DNA, 25 bp, Homo sapien
tgtggaagaccattgtatatttacc

SEQ ID NO: 4335671 - DNA, 25 bp, Homo sapien
gtatatttacccacttcaggcaggg

SEQ ID NO: 4335672 - DNA, 25 bp, Homo sapien
tgcctttgtctctagtgtggaagac

SEQ ID NO: 4335673 - DNA, 25 bp, Homo sapien
tctctagtgtggaagaccattgtat

SEQ ID NO: 4335674 - DNA, 25 bp, Homo sapien
ggaggctcccctctactttgaagct

SEQ ID NO: 4335675 - DNA, 25 bp, Homo sapien
agtcaaaaaccattctgaaggccat

SEQ ID NO: 4335676 - DNA, 25 bp, Homo sapien
aatgaaagcaaaattggaggctccc

SEQ ID NO: 4335677 - DNA, 25 bp, Homo sapien
gacactgaagatatgtgatcagggc

SEQ ID NO: 4335678 - DNA, 25 bp, Homo sapien
catcactacggccatttctgtagag

SEQ ID NO: 4335679 - DNA, 25 bp, Homo sapien
catttctgtagagcccctggtcagg

SEQ ID NO: 4335680 - DNA, 25 bp, Homo sapien
cctctgtccagttcctaagccatga

SEQ ID NO: 4335681 - DNA, 25 bp, Homo sapien
ctaagccatgaccacataggctgct

SEQ ID NO: 4335682 - DNA, 25 bp, Homo sapien
tgcagtctccacagcgtgcagggct

SEQ ID NO: 4335683 - DNA, 25 bp, Homo sapien
tgcttcaacatgtgcagctccccag

SEQ ID NO: 4335684 - DNA, 25 bp, Homo sapien
ctaacgcttgaggagaggacctctt

SEQ ID NO: 4335685 - DNA, 25 bp, Homo sapien
ccagggctgcctaacgcttgaggag

SEQ ID NO: 4335686 - DNA, 25 bp, Homo sapien
tgaaaaactgctctctgcttagggc

SEQ ID NO: 4335687 - DNA, 25 bp, Homo sapien
gtagttgttagagaatccattcacc

SEQ ID NO: 4335688 - DNA, 25 bp, Homo sapien
cccatccccagtagttgttagagaa

SEQ ID NO: 4335689 - DNA, 25 bp, Homo sapien
tgaggtcatcgtcttcgcctcccca

SEQ ID NO: 4335690 - DNA, 25 bp, Homo sapien
gattctgaggctgcatccgggttca

SEQ ID NO: 4335691 - DNA, 25 bp, Homo sapien
ttcagggctggcgttctaggaacac

SEQ ID NO: 4335692 - DNA, 25 bp, Homo sapien
gagatacctgtcaatgtgaaccaca

SEQ ID NO: 4335693 - DNA, 25 bp, Homo sapien
tctcatgtgccaatccaaggaatgg

SEQ ID NO: 4335694 - DNA, 25 bp, Homo sapien
tgtgcaagacggctggctaaacacg

SEQ ID NO: 4335695 - DNA, 25 bp, Homo sapien
gacaccaacaagcaatcagcatgag

SEQ ID NO: 4335696 - DNA, 25 bp, Homo sapien
caaaaccaatatcgccatgtgcaag

SEQ ID NO: 4335697 - DNA, 25 bp, Homo sapien
ggagccccgccctcagagtttataa

SEQ ID NO: 4335698 - DNA, 25 bp, Homo sapien
acagtgatgaggcatgtactgactt

SEQ ID NO: 4335699 - DNA, 25 bp, Homo sapien
acttcttccctctgcatgtgtgtaa

SEQ ID NO: 4335700 - DNA, 25 bp, Homo sapien
ggtgaaaacctttcttgcgcttgta

SEQ ID NO: 4335701 - DNA, 25 bp, Homo sapien
aggcatgtactgacttaagctctgt

SEQ ID NO: 4335702 - DNA, 25 bp, Homo sapien
cagttgccagcacggggcagacact

SEQ ID NO: 4335703 - DNA, 25 bp, Homo sapien
ctggggcacacagttgccagcacgg

SEQ ID NO: 4335704 - DNA, 25 bp, Homo sapien
cacacagttgccagcacggggcaga

SEQ ID NO: 4335705 - DNA, 25 bp, Homo sapien
cacagttgccagcacggggcagaca

SEQ ID NO: 4335706 - DNA, 25 bp, Homo sapien
acactgacactcaacggggagccct

SEQ ID NO: 4335707 - DNA, 25 bp, Homo sapien
gccttattcaaactggtcttatggc

SEQ ID NO: 4335708 - DNA, 25 bp, Homo sapien
tatgagcacccatgaacagcagggc

SEQ ID NO: 4335709 - DNA, 25 bp, Homo sapien
ggtcttatggcctccagcacagtca

SEQ ID NO: 4335710 - DNA, 25 bp, Homo sapien
tcacacttgtaaaggttaaagtcat

SEQ ID NO: 4335711 - DNA, 25 bp, Homo sapien
tgagggcttctagatagcccacatt

SEQ ID NO: 4335712 - DNA, 25 bp, Homo sapien
ccacatcgtggaatataaagcagtc

SEQ ID NO: 4335713 - DNA, 25 bp, Homo sapien
taaagtcattctcgggtaccaggtc

SEQ ID NO: 4335714 - DNA, 25 bp, Homo sapien
tggctaacatggaagggctcacaaa

SEQ ID NO: 4335715 - DNA, 25 bp, Homo sapien
tagagcaccacagctactaatacag

SEQ ID NO: 4335716 - DNA, 25 bp, Homo sapien
catcatatagtgcatggcacgcaca

SEQ ID NO: 4335717 - DNA, 25 bp, Homo sapien
aataaatagtggcaaagttcagggc

SEQ ID NO: 4335718 - DNA, 25 bp, Homo sapien
gggcaggccctggtctgcccccacg

SEQ ID NO: 4335719 - DNA, 25 bp, Homo sapien
atggccaagtctggcagagaagagg

SEQ ID NO: 4335720 - DNA, 25 bp, Homo sapien
aggccctggtctgcccccacgctca

SEQ ID NO: 4335721 - DNA, 25 bp, Homo sapien
cagagaagaggagggtcgagggcag

SEQ ID NO: 4335722 - DNA, 25 bp, Homo sapien
ggatgcagatgttccagcaggtaca

SEQ ID NO: 4335723 - DNA, 25 bp, Homo sapien
gataccggcctctggacactttggg

SEQ ID NO: 4335724 - DNA, 25 bp, Homo sapien
gatggcgaccctctgtaaagcttta

SEQ ID NO: 4335725 - DNA, 25 bp, Homo sapien
ttacattcctgagggcgataccggc

SEQ ID NO: 4335726 - DNA, 25 bp, Homo sapien
ctggtttgaaaatgagcttgctctg

SEQ ID NO: 4335727 - DNA, 25 bp, Homo sapien
tggtttgaaaatgagcttgctctgg

SEQ ID NO: 4335728 - DNA, 25 bp, Homo sapien
gtttgaaaatgagcttgctctggcc

SEQ ID NO: 4335729 - DNA, 25 bp, Homo sapien
ttgaaaatgagcttgctctggcctc

SEQ ID NO: 4335730 - DNA, 25 bp, Homo sapien
caggcaagtacatattatacttaaa

SEQ ID NO: 4335731 - DNA, 25 bp, Homo sapien
ttttgatacaggcaagtacatatta

SEQ ID NO: 4335732 - DNA, 25 bp, Homo sapien
gcatactacttaatcaaaggaaaaa

SEQ ID NO: 4335733 - DNA, 25 bp, Homo sapien
aagtttgcatactacttaatcaaag

SEQ ID NO: 4335734 - DNA, 25 bp, Homo sapien
ggaaattagccatgaactcctttgc

SEQ ID NO: 4335735 - DNA, 25 bp, Homo sapien
gaagggcagttgtcaagttctacct

SEQ ID NO: 4335736 - DNA, 25 bp, Homo sapien
cgtggatgcttcattagtcagagtt

SEQ ID NO: 4335737 - DNA, 25 bp, Homo sapien
tttaggaatctcttgaatggcaccc

SEQ ID NO: 4335738 - DNA, 25 bp, Homo sapien
caacagtaatcggaatttgtaggaa

SEQ ID NO: 4335739 - DNA, 25 bp, Homo sapien
acagcaacagtaatcggaatttgta

SEQ ID NO: 4335740 - DNA, 25 bp, Homo sapien
cagtaatcggaatttgtaggaaagg

SEQ ID NO: 4335741 - DNA, 25 bp, Homo sapien
aggcacaaagtcaacagcaacagta

SEQ ID NO: 4335742 - DNA, 25 bp, Homo sapien
tgagcttttccaatctgattgcgaa

SEQ ID NO: 4335743 - DNA, 25 bp, Homo sapien
gattgcgaacttgatgacaactgaa

SEQ ID NO: 4335744 - DNA, 25 bp, Homo sapien
ctgaagatacaatgcctggtttttc

SEQ ID NO: 4335745 - DNA, 25 bp, Homo sapien
tgacaactgaagatacaatgcctgg

SEQ ID NO: 4335746 - DNA, 25 bp, Homo sapien
gtttgccgccagcaacatccaccat

SEQ ID NO: 4335747 - DNA, 25 bp, Homo sapien
ggtttgccgccagcaacatccacca

SEQ ID NO: 4335748 - DNA, 25 bp, Homo sapien
ctggtttgccgccagcaacatccac

SEQ ID NO: 4335749 - DNA, 25 bp, Homo sapien
tggtttgccgccagcaacatccacc

SEQ ID NO: 4335750 - DNA, 25 bp, Homo sapien
tttaaaatctggcaaggaagataag

SEQ ID NO: 4335751 - DNA, 25 bp, Homo sapien
acttttgtgaatgcttgagattttc

SEQ ID NO: 4335752 - DNA, 25 bp, Homo sapien
ctctctacttttgtgaatgcttgag

SEQ ID NO: 4335753 - DNA, 25 bp, Homo sapien
tgaatgcttgagattttccataata

SEQ ID NO: 4335754 - DNA, 25 bp, Homo sapien
caaagtgccactgcgtgagttccgt

SEQ ID NO: 4335755 - DNA, 25 bp, Homo sapien
aaatggcacttttggtcacacccac

SEQ ID NO: 4335756 - DNA, 25 bp, Homo sapien
ctctgggcaagagccgtggaaatcc

SEQ ID NO: 4335757 - DNA, 25 bp, Homo sapien
tggaaatccacacatgaagccaggt

SEQ ID NO: 4335758 - DNA, 25 bp, Homo sapien
ggtgtcagctgatcagtttccccgt

SEQ ID NO: 4335759 - DNA, 25 bp, Homo sapien
gctgatcagtttccccgttgaaacg

SEQ ID NO: 4335760 - DNA, 25 bp, Homo sapien
aaggtcgccggcccctcgcaggact

SEQ ID NO: 4335761 - DNA, 25 bp, Homo sapien
tcagctgatcagtttccccgttgaa

SEQ ID NO: 4335762 - DNA, 25 bp, Homo sapien
ccggaatcgtgacctggggtatgaa

SEQ ID NO: 4335763 - DNA, 25 bp, Homo sapien
tatgaatgagccctggattttttcc

SEQ ID NO: 4335764 - DNA, 25 bp, Homo sapien
tttcctacccggcagcacctcgtct

SEQ ID NO: 4335765 - DNA, 25 bp, Homo sapien
tttcaggttgatgcacccggcggag

SEQ ID NO: 4335766 - DNA, 25 bp, Homo sapien
cggctgaggcgggactgccccacgg

SEQ ID NO: 4335767 - DNA, 25 bp, Homo sapien
tgaggcgggactgccccacggacgc

SEQ ID NO: 4335768 - DNA, 25 bp, Homo sapien
ctgccccacggacgccgccacgtca

SEQ ID NO: 4335769 - DNA, 25 bp, Homo sapien
cgctccggctgaggcgggactgccc

SEQ ID NO: 4335770 - DNA, 25 bp, Homo sapien
atttcccgggcgccggcggagccag

SEQ ID NO: 4335771 - DNA, 25 bp, Homo sapien
gccgtcgcccggctaccctcgcacg

SEQ ID NO: 4335772 - DNA, 25 bp, Homo sapien
gctaccctcgcacggcgcccgtgtc

SEQ ID NO: 4335773 - DNA, 25 bp, Homo sapien
gtcgcccggctaccctcgcacggcg

SEQ ID NO: 4335774 - DNA, 25 bp, Homo sapien
cgccttggccggagaggctggtccg

SEQ ID NO: 4335775 - DNA, 25 bp, Homo sapien
gcggcgagctagcactgcccgcgga

SEQ ID NO: 4335776 - DNA, 25 bp, Homo sapien
gggagaacgcggaaagcagctcggg

SEQ ID NO: 4335777 - DNA, 25 bp, Homo sapien
ggctcttgagtacgagctccgcctc

SEQ ID NO: 4335778 - DNA, 25 bp, Homo sapien
gagggaccccagaatccaatgtgag

SEQ ID NO: 4335779 - DNA, 25 bp, Homo sapien
tgctgagagggaccccagaatccaa

SEQ ID NO: 4335780 - DNA, 25 bp, Homo sapien
ctgagagggaccccagaatccaatg

SEQ ID NO: 4335781 - DNA, 25 bp, Homo sapien
gagagggaccccagaatccaatgtg

SEQ ID NO: 4335782 - DNA, 25 bp, Homo sapien
taacccaaatggatccagattcaga

SEQ ID NO: 4335783 - DNA, 25 bp, Homo sapien
caggccttgtgaagtctctcgtcca

SEQ ID NO: 4335784 - DNA, 25 bp, Homo sapien
taaagcctaatgcaagacgctgtgc

SEQ ID NO: 4335785 - DNA, 25 bp, Homo sapien
tccacatgtgactctaggaaggaag

SEQ ID NO: 4335786 - DNA, 25 bp, Homo sapien
ggtgtgaaccacattcttggcaagg

SEQ ID NO: 4335787 - DNA, 25 bp, Homo sapien
gtaccacgcccatggcctgatgctg

SEQ ID NO: 4335788 - DNA, 25 bp, Homo sapien
gagtttctgggatcgagtctcaggc

SEQ ID NO: 4335789 - DNA, 25 bp, Homo sapien
gcttggttgatgcataccaggccct

SEQ ID NO: 4335790 - DNA, 25 bp, Homo sapien
cataagtagccccttccaccacttc

SEQ ID NO: 4335791 - DNA, 25 bp, Homo sapien
ataagtagccccttccaccacttct

SEQ ID NO: 4335792 - DNA, 25 bp, Homo sapien
taaacacctgacacaagtacaagcc

SEQ ID NO: 4335793 - DNA, 25 bp, Homo sapien
cccatttgtcagttatcagtctaga

SEQ ID NO: 4335794 - DNA, 25 bp, Homo sapien
agtcctgtggatgataactagaagg

SEQ ID NO: 4335795 - DNA, 25 bp, Homo sapien
taatggagctttccgcaaagatgga

SEQ ID NO: 4335796 - DNA, 25 bp, Homo sapien
aaggtttgccgccttcacatgcaga

SEQ ID NO: 4335797 - DNA, 25 bp, Homo sapien
taaatccgtcaatggctttccagtg

SEQ ID NO: 4335798 - DNA, 25 bp, Homo sapien
ttaggccctggagtaaagctgaggc

SEQ ID NO: 4335799 - DNA, 25 bp, Homo sapien
gcttccctttgctgaacgaacgagg

SEQ ID NO: 4335800 - DNA, 25 bp, Homo sapien
caaagtcatccgctctgaacttagc

SEQ ID NO: 4335801 - DNA, 25 bp, Homo sapien
gagcacgatgatcaccttctagtga

SEQ ID NO: 4335802 - DNA, 25 bp, Homo sapien
gatcaccttctagtgaacttgccaa

SEQ ID NO: 4335803 - DNA, 25 bp, Homo sapien
aaagtcatccgctctgaacttagca

SEQ ID NO: 4335804 - DNA, 25 bp, Homo sapien
cgggattttgttcgtggacttgcct

SEQ ID NO: 4335805 - DNA, 25 bp, Homo sapien
tgctgctctgtttttagagccggga

SEQ ID NO: 4335806 - DNA, 25 bp, Homo sapien
ttagagccgggattttgttcgtgga

SEQ ID NO: 4335807 - DNA, 25 bp, Homo sapien
acttgccttgcctggtggttgaact

SEQ ID NO: 4335808 - DNA, 25 bp, Homo sapien
gtttgtcctggatgtctcccttgtg

SEQ ID NO: 4335809 - DNA, 25 bp, Homo sapien
ggtttgtcctggatgtctcccttgt

SEQ ID NO: 4335810 - DNA, 25 bp, Homo sapien
ttgtcctggatgtctcccttgtgcc

SEQ ID NO: 4335811 - DNA, 25 bp, Homo sapien
gtcctggatgtctcccttgtgccat

SEQ ID NO: 4335812 - DNA, 25 bp, Homo sapien
tctcccggccctaagaaaccatgaa

SEQ ID NO: 4335813 - DNA, 25 bp, Homo sapien
caagggatatccacattaaagctta

SEQ ID NO: 4335814 - DNA, 25 bp, Homo sapien
catggtcttacagacgtcaggagtg

SEQ ID NO: 4335815 - DNA, 25 bp, Homo sapien
gatgttcggacatctccagacttgc

SEQ ID NO: 4335816 - DNA, 25 bp, Homo sapien
gaacgcttcgtgaaatttcatgtca

SEQ ID NO: 4335817 - DNA, 25 bp, Homo sapien
ggaacgcttcgtgaaatttcatgtc

SEQ ID NO: 4335818 - DNA, 25 bp, Homo sapien
ggttctgaagaacgcaggagagaag

SEQ ID NO: 4335819 - DNA, 25 bp, Homo sapien
tctgaagaacgcaggagagaagcat

SEQ ID NO: 4335820 - DNA, 25 bp, Homo sapien
tgaagaacgcaggagagaagcatct

SEQ ID NO: 4335821 - DNA, 25 bp, Homo sapien
gcatctcctggggacaatttacatc

SEQ ID NO: 4335822 - DNA, 25 bp, Homo sapien
tggacggagaatgcaaaggcagaag

SEQ ID NO: 4335823 - DNA, 25 bp, Homo sapien
cggagaatgcaaaggcagaaggggt

SEQ ID NO: 4335824 - DNA, 25 bp, Homo sapien
gacggagaatgcaaaggcagaaggg

SEQ ID NO: 4335825 - DNA, 25 bp, Homo sapien
ctggacggagaatgcaaaggcagaa

SEQ ID NO: 4335826 - DNA, 25 bp, Homo sapien
agtgcatctgctttggtagaaggag

SEQ ID NO: 4335827 - DNA, 25 bp, Homo sapien
gaaggagaatcgctgtcattgggaa

SEQ ID NO: 4335828 - DNA, 25 bp, Homo sapien
cattgggaaagagacagcattgaca

SEQ ID NO: 4335829 - DNA, 25 bp, Homo sapien
ccccggcagggataagtcacagagt

SEQ ID NO: 4335830 - DNA, 25 bp, Homo sapien
actgggaggtccctatctgagaacg

SEQ ID NO: 4335831 - DNA, 25 bp, Homo sapien
ttaagtccacttgtgccctgcacag

SEQ ID NO: 4335832 - DNA, 25 bp, Homo sapien
tgtgcttgagtcctccttgtgagtg

SEQ ID NO: 4335833 - DNA, 25 bp, Homo sapien
tatcaaggtccttagagtccaaggc

SEQ ID NO: 4335834 - DNA, 25 bp, Homo sapien
tatccaagtgggtgagcttagccac

SEQ ID NO: 4335835 - DNA, 25 bp, Homo sapien
taaatccagtagctacgcagggtgg

SEQ ID NO: 4335836 - DNA, 25 bp, Homo sapien
ggatgtcaccatagataaaagcctc

SEQ ID NO: 4335837 - DNA, 25 bp, Homo sapien
gagacctgtccaagatgatttccat

SEQ ID NO: 4335838 - DNA, 25 bp, Homo sapien
tctactgctcaagaacagatttgag

SEQ ID NO: 4335839 - DNA, 25 bp, Homo sapien
tgaggaagacattgaaccaacagcc

SEQ ID NO: 4335840 - DNA, 25 bp, Homo sapien
tctctaagggctgatagtacctctg

SEQ ID NO: 4335841 - DNA, 25 bp, Homo sapien
tggtgctgcccaaaaaaggacttca

SEQ ID NO: 4335842 - DNA, 25 bp, Homo sapien
ggtaggcgtcacaaccaaggctggt

SEQ ID NO: 4335843 - DNA, 25 bp, Homo sapien
gctgtattcctttgtggtagtatgc

SEQ ID NO: 4335844 - DNA, 25 bp, Homo sapien
tacgtctaaaagtgaggtgagtctc

SEQ ID NO: 4335845 - DNA, 25 bp, Homo sapien
cattaggcttacatggaacatctta

SEQ ID NO: 4335846 - DNA, 25 bp, Homo sapien
cattcaatcgttgctaggtaaggac

SEQ ID NO: 4335847 - DNA, 25 bp, Homo sapien
gtttcttgcctcttgatgctctcaa

SEQ ID NO: 4335848 - DNA, 25 bp, Homo sapien
aactctgctgatgattgtatggcac

SEQ ID NO: 4335849 - DNA, 25 bp, Homo sapien
ttgtacctggatgttggcatatacc

SEQ ID NO: 4335850 - DNA, 25 bp, Homo sapien
ggcatataccacagattaaggaagt

SEQ ID NO: 4335851 - DNA, 25 bp, Homo sapien
gatctgatatctattacgtatctca

SEQ ID NO: 4335852 - DNA, 25 bp, Homo sapien
tgaactcgaacatcactatctccgg

SEQ ID NO: 4335853 - DNA, 25 bp, Homo sapien
catagaaatgagatgcctggctagc

SEQ ID NO: 4335854 - DNA, 25 bp, Homo sapien
caccctagtgtgacaactggtttac

SEQ ID NO: 4335855 - DNA, 25 bp, Homo sapien
cacaaacaattttaacttgccaaca

SEQ ID NO: 4335856 - DNA, 25 bp, Homo sapien
cagtatcccagttcacccaactgaa

SEQ ID NO: 4335857 - DNA, 25 bp, Homo sapien
ccagactagtcaagtatcttctttc

SEQ ID NO: 4335858 - DNA, 25 bp, Homo sapien
caactgaacttttgctataccatgc

SEQ ID NO: 4335859 - DNA, 25 bp, Homo sapien
ttgttcagctgaggacttgcccact

SEQ ID NO: 4335860 - DNA, 25 bp, Homo sapien
taagtactggccagctgagggctaa

SEQ ID NO: 4335861 - DNA, 25 bp, Homo sapien
tatcagtgagcaaatatagtgtccc

SEQ ID NO: 4335862 - DNA, 25 bp, Homo sapien
ggaaaagtggcagcaaaaccctcag

SEQ ID NO: 4335863 - DNA, 25 bp, Homo sapien
gactttcaaaacataatagtataca

SEQ ID NO: 4335864 - DNA, 25 bp, Homo sapien
ctcttcccgactttcaaaacataat

SEQ ID NO: 4335865 - DNA, 25 bp, Homo sapien
gttctccctcattgttgagaggcag

SEQ ID NO: 4335866 - DNA, 25 bp, Homo sapien
ttctccctcattgttgagaggcagc

SEQ ID NO: 4335867 - DNA, 25 bp, Homo sapien
tgagttcataactgttgagtgggta

SEQ ID NO: 4335868 - DNA, 25 bp, Homo sapien
gccttgagttcataactgttgagtg

SEQ ID NO: 4335869 - DNA, 25 bp, Homo sapien
tgagtgggtaggagtatgccctgcc

SEQ ID NO: 4335870 - DNA, 25 bp, Homo sapien
gggtaggagtatgccctgcctaata

SEQ ID NO: 4335871 - DNA, 25 bp, Homo sapien
gaagacgacactgccctcaataagg

SEQ ID NO: 4335872 - DNA, 25 bp, Homo sapien
aagtgtgtggttccacttctccgac

SEQ ID NO: 4335873 - DNA, 25 bp, Homo sapien
cgaccgcagcaaggaatagagctga

SEQ ID NO: 4335874 - DNA, 25 bp, Homo sapien
taacagccttaatggtcgatgaaat

SEQ ID NO: 4335875 - DNA, 25 bp, Homo sapien
tatttaatatcaatcaggctatttc

SEQ ID NO: 4335876 - DNA, 25 bp, Homo sapien
tttatttaatatcaatcaggctatt

SEQ ID NO: 4335877 - DNA, 25 bp, Homo sapien
ttacaggttcccatatataataata

SEQ ID NO: 4335878 - DNA, 25 bp, Homo sapien
tagaaaagtaatggctacagttatt

SEQ ID NO: 4335879 - DNA, 25 bp, Homo sapien
tagatgaagacaagagtgcagtaac

SEQ ID NO: 4335880 - DNA, 25 bp, Homo sapien
gcagtaacagcagtgatcagatcta

SEQ ID NO: 4335881 - DNA, 25 bp, Homo sapien
gacagaggtggataaaggaccaaac

SEQ ID NO: 4335882 - DNA, 25 bp, Homo sapien
tgaaatcctctacaccatatacctg

SEQ ID NO: 4335883 - DNA, 25 bp, Homo sapien
cagaaagtccatataccctcacagg

SEQ ID NO: 4335884 - DNA, 25 bp, Homo sapien
tcacaggaactgagaaggacagagg

SEQ ID NO: 4335885 - DNA, 25 bp, Homo sapien
tagattccacccgatttttcagctg

SEQ ID NO: 4335886 - DNA, 25 bp, Homo sapien
tagtgggccaggtgatttatcagca

SEQ ID NO: 4335887 - DNA, 25 bp, Homo sapien
cctaagcttatgtttgaaaataaat

SEQ ID NO: 4335888 - DNA, 25 bp, Homo sapien
tatgtttgaaaataaataagcggta

SEQ ID NO: 4335889 - DNA, 25 bp, Homo sapien
ttgaaaataaataagcggtacttgc

SEQ ID NO: 4335890 - DNA, 25 bp, Homo sapien
agcttatgtttgaaaataaataagc

SEQ ID NO: 4335891 - DNA, 25 bp, Homo sapien
tataaacatctgctgtgccgcacca

SEQ ID NO: 4335892 - DNA, 25 bp, Homo sapien
taaaagcgggcatgagatacatctg

SEQ ID NO: 4335893 - DNA, 25 bp, Homo sapien
gaaggcactgccacgttgtaaggcc

SEQ ID NO: 4335894 - DNA, 25 bp, Homo sapien
gaggccatattgtattttctgacca

SEQ ID NO: 4335895 - DNA, 25 bp, Homo sapien
tctggcaaggccagctgtattttta

SEQ ID NO: 4335896 - DNA, 25 bp, Homo sapien
caatgttagcatattggcaattaca

SEQ ID NO: 4335897 - DNA, 25 bp, Homo sapien
tggcaattacagataagatagcatc

SEQ ID NO: 4335898 - DNA, 25 bp, Homo sapien
atctggcaaggccagctgtattttt

SEQ ID NO: 4335899 - DNA, 25 bp, Homo sapien
cttttcactgctttcatggtttatt

SEQ ID NO: 4335900 - DNA, 25 bp, Homo sapien
gctttcatggtttatttttatagag

SEQ ID NO: 4335901 - DNA, 25 bp, Homo sapien
gacttttcactgctttcatggttta

SEQ ID NO: 4335902 - DNA, 25 bp, Homo sapien
acagacttttcactgctttcatggt

SEQ ID NO: 4335903 - DNA, 25 bp, Homo sapien
ggacagggatcttcaggttaagctt

SEQ ID NO: 4335904 - DNA, 25 bp, Homo sapien
tagtttcctaggataagaactggga

SEQ ID NO: 4335905 - DNA, 25 bp, Homo sapien
ggccatgtgccatcagtagcctgaa

SEQ ID NO: 4335906 - DNA, 25 bp, Homo sapien
tgatgatacacctcatggccatgtg

SEQ ID NO: 4335907 - DNA, 25 bp, Homo sapien
cagtatttggatggcaacagttgcg

SEQ ID NO: 4335908 - DNA, 25 bp, Homo sapien
ggagcattgctgtaggacccatgtt

SEQ ID NO: 4335909 - DNA, 25 bp, Homo sapien
tgaccagcgcatgtcatagtactgg

SEQ ID NO: 4335910 - DNA, 25 bp, Homo sapien
cagttgcgtggtgagcatgacaaaa

SEQ ID NO: 4335911 - DNA, 25 bp, Homo sapien
gagaaatgatccatgcactggtaaa

SEQ ID NO: 4335912 - DNA, 25 bp, Homo sapien
cactgagtcacacatgcactggtgg

SEQ ID NO: 4335913 - DNA, 25 bp, Homo sapien
ggatgggttggtgtacatatgccct

SEQ ID NO: 4335914 - DNA, 25 bp, Homo sapien
gcagacaaatgccacactgagtcac

SEQ ID NO: 4335915 - DNA, 25 bp, Homo sapien
ggcccaagtgacatccagaccattt

SEQ ID NO: 4335916 - DNA, 25 bp, Homo sapien
gcagaagtacttctgaatgggtgaa

SEQ ID NO: 4335917 - DNA, 25 bp, Homo sapien
agggcactaaaatgtaccaaaagat

SEQ ID NO: 4335918 - DNA, 25 bp, Homo sapien
gctagattaaattcaaggaaactcc

SEQ ID NO: 4335919 - DNA, 25 bp, Homo sapien
actgaagagggagttgaagagaacc

SEQ ID NO: 4335920 - DNA, 25 bp, Homo sapien
tacttcattgcgaatgaggtctgga

SEQ ID NO: 4335921 - DNA, 25 bp, Homo sapien
gggagaaatgcaacatagtaggcac

SEQ ID NO: 4335922 - DNA, 25 bp, Homo sapien
tgcctcgtgctgaaccacatagttg

SEQ ID NO: 4335923 - DNA, 25 bp, Homo sapien
cccaatacgtgtgtacgtttggtca

SEQ ID NO: 4335924 - DNA, 25 bp, Homo sapien
tggtcattttagtacagcttgttct

SEQ ID NO: 4335925 - DNA, 25 bp, Homo sapien
tcttaccatgtttattcgattttta

SEQ ID NO: 4335926 - DNA, 25 bp, Homo sapien
tctttcttagtcaatcttcccttca

SEQ ID NO: 4335927 - DNA, 25 bp, Homo sapien
catatctgtgatggctagagcaggt

SEQ ID NO: 4335928 - DNA, 25 bp, Homo sapien
tcaatgctgccaaaacacaagctgc

SEQ ID NO: 4335929 - DNA, 25 bp, Homo sapien
gtagcgagattacggctcactgaag

SEQ ID NO: 4335930 - DNA, 25 bp, Homo sapien
tgtggtagattgtaatgatggcccc

SEQ ID NO: 4335931 - DNA, 25 bp, Homo sapien
tacatctgttatgcgaaatgtgatc

SEQ ID NO: 4335932 - DNA, 25 bp, Homo sapien
ataaccctaaatggcctccgagtgt

SEQ ID NO: 4335933 - DNA, 25 bp, Homo sapien
caaactgcaccatatgagacagcaa

SEQ ID NO: 4335934 - DNA, 25 bp, Homo sapien
gcctcttgtattagctagccgaatt

SEQ ID NO: 4335935 - DNA, 25 bp, Homo sapien
ttgatgctgcacctgccttagtagc

SEQ ID NO: 4335936 - DNA, 25 bp, Homo sapien
agtgagtagtaccaagcgagctgat

SEQ ID NO: 4335937 - DNA, 25 bp, Homo sapien
cttcgaaagagattgacgagggtcc

SEQ ID NO: 4335938 - DNA, 25 bp, Homo sapien
tacccatccacacaaagtgagtagt

SEQ ID NO: 4335939 - DNA, 25 bp, Homo sapien
caatgccattttctttctgaatgaa

SEQ ID NO: 4335940 - DNA, 25 bp, Homo sapien
gcaatgccattttctttctgaatga

SEQ ID NO: 4335941 - DNA, 25 bp, Homo sapien
tgcaatgccattttctttctgaatg

SEQ ID NO: 4335942 - DNA, 25 bp, Homo sapien
tctgcaatgccattttctttctgaa

SEQ ID NO: 4335943 - DNA, 25 bp, Homo sapien
gatcttgacttagtatttccagtta

SEQ ID NO: 4335944 - DNA, 25 bp, Homo sapien
tcagatcttgacttagtatttccag

SEQ ID NO: 4335945 - DNA, 25 bp, Homo sapien
tttcagatcttgacttagtatttcc

SEQ ID NO: 4335946 - DNA, 25 bp, Homo sapien
gttttcagatcttgacttagtattt

SEQ ID NO: 4335947 - DNA, 25 bp, Homo sapien
aagcctcctcgcaagcatcactgtg

SEQ ID NO: 4335948 - DNA, 25 bp, Homo sapien
gagagcccatacaagcctcctcgca

SEQ ID NO: 4335949 - DNA, 25 bp, Homo sapien
tcgcaagcatcactgtgatgaatgc

SEQ ID NO: 4335950 - DNA, 25 bp, Homo sapien
tcctcgcaagcatcactgtgatgaa

SEQ ID NO: 4335951 - DNA, 25 bp, Homo sapien
tttggcaatgacgaacaggacctgg

SEQ ID NO: 4335952 - DNA, 25 bp, Homo sapien
tgaatgaaaagagcaaccaacaggt

SEQ ID NO: 4335953 - DNA, 25 bp, Homo sapien
ggaattcaaagagtaggctcccatc

SEQ ID NO: 4335954 - DNA, 25 bp, Homo sapien
ggatgattgtaaggataccaccaca

SEQ ID NO: 4335955 - DNA, 25 bp, Homo sapien
tgcaaagaaggtaaagctgaacggc

SEQ ID NO: 4335956 - DNA, 25 bp, Homo sapien
acagcctccaccaaccaaagtctgc

SEQ ID NO: 4335957 - DNA, 25 bp, Homo sapien
ggcttagctgttgccgactagggcc

SEQ ID NO: 4335958 - DNA, 25 bp, Homo sapien
aaagctgaacggcttagctgttgcc

SEQ ID NO: 4335959 - DNA, 25 bp, Homo sapien
ggaaccagtctgcttccagtgccac

SEQ ID NO: 4335960 - DNA, 25 bp, Homo sapien
tccaggaaccagtctgcttccagtg

SEQ ID NO: 4335961 - DNA, 25 bp, Homo sapien
caggaaccagtctgcttccagtgcc

SEQ ID NO: 4335962 - DNA, 25 bp, Homo sapien
gtccaggaaccagtctgcttccagt

SEQ ID NO: 4335963 - DNA, 25 bp, Homo sapien
taatggttgtcaaccagtttcaact

SEQ ID NO: 4335964 - DNA, 25 bp, Homo sapien
ctgtagttgcaacccaggttaatgg

SEQ ID NO: 4335965 - DNA, 25 bp, Homo sapien
cccaggttaatggttgtcaaccagt

SEQ ID NO: 4335966 - DNA, 25 bp, Homo sapien
gcaacccaggttaatggttgtcaac

SEQ ID NO: 4335967 - DNA, 25 bp, Homo sapien
cagagctaaagctagagccagagcc

SEQ ID NO: 4335968 - DNA, 25 bp, Homo sapien
gacgcagttccagtgccagagctaa

SEQ ID NO: 4335969 - DNA, 25 bp, Homo sapien
caagaaaaggtgtccaggcttcggg

SEQ ID NO: 4335970 - DNA, 25 bp, Homo sapien
caaaccagctgcttggacgcaggca

SEQ ID NO: 4335971 - DNA, 25 bp, Homo sapien
agtgcgtccccggaatcagccggca

SEQ ID NO: 4335972 - DNA, 25 bp, Homo sapien
cagccggcacgacaacccctaccat

SEQ ID NO: 4335973 - DNA, 25 bp, Homo sapien
gtctgccccagccgcgagtgcgtcc

SEQ ID NO: 4335974 - DNA, 25 bp, Homo sapien
tcagctacgcgaccgcggtctgccc

SEQ ID NO: 4335975 - DNA, 25 bp, Homo sapien
gttttctggctgcagacctattttc

SEQ ID NO: 4335976 - DNA, 25 bp, Homo sapien
tctggctgcagacctattttcccag

SEQ ID NO: 4335977 - DNA, 25 bp, Homo sapien
tttctggctgcagacctattttccc

SEQ ID NO: 4335978 - DNA, 25 bp, Homo sapien
tggctgcagacctattttcccaggg

SEQ ID NO: 4335979 - DNA, 25 bp, Homo sapien
tttgtgcggggcgacccgccgccca

SEQ ID NO: 4335980 - DNA, 25 bp, Homo sapien
cttcccggcgcagccttctcaggga

SEQ ID NO: 4335981 - DNA, 25 bp, Homo sapien
ggccacggtggccatctttgtgcgg

SEQ ID NO: 4335982 - DNA, 25 bp, Homo sapien
ttctcagggaaactccgcctcaagg

SEQ ID NO: 4335983 - DNA, 25 bp, Homo sapien
taaggaccagaaatcgtgagatgtg

SEQ ID NO: 4335984 - DNA, 25 bp, Homo sapien
gaccatagtcctctttgtggcaaca

SEQ ID NO: 4335985 - DNA, 25 bp, Homo sapien
tagtagtcatcataggaccatagtc

SEQ ID NO: 4335986 - DNA, 25 bp, Homo sapien
tatcctacggtgagaagcttaccat

SEQ ID NO: 4335987 - DNA, 25 bp, Homo sapien
tagcaataggcagtccagatttctg

SEQ ID NO: 4335988 - DNA, 25 bp, Homo sapien
tctgagtcgtactatggttttgcct

SEQ ID NO: 4335989 - DNA, 25 bp, Homo sapien
gccctactaggtgtaagcattctct

SEQ ID NO: 4335990 - DNA, 25 bp, Homo sapien
tactagcaatgcacagggaccgtgt

SEQ ID NO: 4335991 - DNA, 25 bp, Homo sapien
gctaccatagtactttgtttatgcc

SEQ ID NO: 4335992 - DNA, 25 bp, Homo sapien
agtaaggggctaccatagtactttg

SEQ ID NO: 4335993 - DNA, 25 bp, Homo sapien
ccaggcagtaaggggctaccatagt

SEQ ID NO: 4335994 - DNA, 25 bp, Homo sapien
gggctaccatagtactttgtttatg

SEQ ID NO: 4335995 - DNA, 25 bp, Homo sapien
gagacagttggcttaaccagatcct

SEQ ID NO: 4335996 - DNA, 25 bp, Homo sapien
gattattactggctccaaaggatga

SEQ ID NO: 4335997 - DNA, 25 bp, Homo sapien
agtgcctcacacaaagaactattgg

SEQ ID NO: 4335998 - DNA, 25 bp, Homo sapien
cctttgaagagccaataagggcatc

SEQ ID NO: 4335999 - DNA, 25 bp, Homo sapien
ttaggaagacctgccaaaaagctga

SEQ ID NO: 4336000 - DNA, 25 bp, Homo sapien
gacaccgtttgcatgacccaggaac

SEQ ID NO: 4336001 - DNA, 25 bp, Homo sapien
agagtagtcttcatggcgctgtcac

SEQ ID NO: 4336002 - DNA, 25 bp, Homo sapien
tgaatataagtagccgcagacaccg

SEQ ID NO: 4336003 - DNA, 25 bp, Homo sapien
tttaggagtgtgtcttttgagcagg

SEQ ID NO: 4336004 - DNA, 25 bp, Homo sapien
gcagtgtttgtgactatattcaagt

SEQ ID NO: 4336005 - DNA, 25 bp, Homo sapien
catcgtgctgccacacgaggcttca

SEQ ID NO: 4336006 - DNA, 25 bp, Homo sapien
ttcattcgttatggctggcgctggg

SEQ ID NO: 4336007 - DNA, 25 bp, Homo sapien
gactggtgtagttatggttttacaa

SEQ ID NO: 4336008 - DNA, 25 bp, Homo sapien
tgtagttatggttttacaaccatgt

SEQ ID NO: 4336009 - DNA, 25 bp, Homo sapien
tggtgtagttatggttttacaacca

SEQ ID NO: 4336010 - DNA, 25 bp, Homo sapien
agactggtgtagttatggttttaca

SEQ ID NO: 4336011 - DNA, 25 bp, Homo sapien
tcaaaaatgctaagtatattcacat

SEQ ID NO: 4336012 - DNA, 25 bp, Homo sapien
tcacattgtgcatgagatctctaga

SEQ ID NO: 4336013 - DNA, 25 bp, Homo sapien
aacacatagcataacattcaccatc

SEQ ID NO: 4336014 - DNA, 25 bp, Homo sapien
taacctgttgaacggattgccctct

SEQ ID NO: 4336015 - DNA, 25 bp, Homo sapien
ggacaatggttgttcatgcactgaa

SEQ ID NO: 4336016 - DNA, 25 bp, Homo sapien
caatttgtgggatagggcaatcaga

SEQ ID NO: 4336017 - DNA, 25 bp, Homo sapien
tgtaagatgaatataacaggctgcc

SEQ ID NO: 4336018 - DNA, 25 bp, Homo sapien
tcaccttcctgggtacctaagacag

SEQ ID NO: 4336019 - DNA, 25 bp, Homo sapien
ccaaggtatggaatcaacgtcagtg

SEQ ID NO: 4336020 - DNA, 25 bp, Homo sapien
ctcatatacttttggtaggaatgca

SEQ ID NO: 4336021 - DNA, 25 bp, Homo sapien
tatcaaagagttatctgcgccccca

SEQ ID NO: 4336022 - DNA, 25 bp, Homo sapien
tactgtaagatccagcaatcttccc

SEQ ID NO: 4336023 - DNA, 25 bp, Homo sapien
gaaatctgggttctggcgctggcct

SEQ ID NO: 4336024 - DNA, 25 bp, Homo sapien
gtatataccagttaacaggccacag

SEQ ID NO: 4336025 - DNA, 25 bp, Homo sapien
tgtcaatacgggaaacactgctagt

SEQ ID NO: 4336026 - DNA, 25 bp, Homo sapien
gattatcccagcttaagttgcgtcc

SEQ ID NO: 4336027 - DNA, 25 bp, Homo sapien
gagagggatgccagccatcttgtaa

SEQ ID NO: 4336028 - DNA, 25 bp, Homo sapien
tccatgtatcccagaagagatgacg

SEQ ID NO: 4336029 - DNA, 25 bp, Homo sapien
tcatgatccccacgatccatgtatc

SEQ ID NO: 4336030 - DNA, 25 bp, Homo sapien
cagcttaatctgaaagaggttttta

SEQ ID NO: 4336031 - DNA, 25 bp, Homo sapien
tcagccccttgcttctgcggacact

SEQ ID NO: 4336032 - DNA, 25 bp, Homo sapien
cagccccttgcttctgcggacactg

SEQ ID NO: 4336033 - DNA, 25 bp, Homo sapien
tatacagggcgtacactttcccttc

SEQ ID NO: 4336034 - DNA, 25 bp, Homo sapien
atacagggcgtacactttcccttct

SEQ ID NO: 4336035 - DNA, 25 bp, Homo sapien
aacaactcacctgccaaatcgacta

SEQ ID NO: 4336036 - DNA, 25 bp, Homo sapien
taaggagtgtgtaacaactcacctg

SEQ ID NO: 4336037 - DNA, 25 bp, Homo sapien
tgtaacaactcacctgccaaatcga

SEQ ID NO: 4336038 - DNA, 25 bp, Homo sapien
gtgtaacaactcacctgccaaatcg

SEQ ID NO: 4336039 - DNA, 25 bp, Homo sapien
ttactgagattaaggtaatggccca

SEQ ID NO: 4336040 - DNA, 25 bp, Homo sapien
atgggagcaggttatcaggaaaatg

SEQ ID NO: 4336041 - DNA, 25 bp, Homo sapien
ctgagattaaggtaatggcccagga

SEQ ID NO: 4336042 - DNA, 25 bp, Homo sapien
agattaaggtaatggcccaggatgg

SEQ ID NO: 4336043 - DNA, 25 bp, Homo sapien
gctgcagtatttattcttcagctgc

SEQ ID NO: 4336044 - DNA, 25 bp, Homo sapien
attcttcagctgctttgaggaatca

SEQ ID NO: 4336045 - DNA, 25 bp, Homo sapien
cttcagctgctttgaggaatcatta

SEQ ID NO: 4336046 - DNA, 25 bp, Homo sapien
gcagcagctgcagtatttattcttc

SEQ ID NO: 4336047 - DNA, 25 bp, Homo sapien
gtgatgcttagttctgggtttacac

SEQ ID NO: 4336048 - DNA, 25 bp, Homo sapien
aggatacgacacagtgctctctcac

SEQ ID NO: 4336049 - DNA, 25 bp, Homo sapien
gctctctcactatgagttagccagc

SEQ ID NO: 4336050 - DNA, 25 bp, Homo sapien
catagcaccattacaatagatttca

SEQ ID NO: 4336051 - DNA, 25 bp, Homo sapien
aaccatagccttttgtcccatattt

SEQ ID NO: 4336052 - DNA, 25 bp, Homo sapien
cagcctctcgccatgttaagcgtgc

SEQ ID NO: 4336053 - DNA, 25 bp, Homo sapien
accatagccttttgtcccatatttc

SEQ ID NO: 4336054 - DNA, 25 bp, Homo sapien
cccagcctctcgccatgttaagcgt

SEQ ID NO: 4336055 - DNA, 25 bp, Homo sapien
tgcaccacaggcggagctagcaagg

SEQ ID NO: 4336056 - DNA, 25 bp, Homo sapien
agcatgcaccacaggcggagctagc

SEQ ID NO: 4336057 - DNA, 25 bp, Homo sapien
gcatgcaccacaggcggagctagca

SEQ ID NO: 4336058 - DNA, 25 bp, Homo sapien
gcaaaccattgagtcggaggcagga

SEQ ID NO: 4336059 - DNA, 25 bp, Homo sapien
ggagtttccttataacaagctctct

SEQ ID NO: 4336060 - DNA, 25 bp, Homo sapien
gtgcagtcagcccttgacctcctat

SEQ ID NO: 4336061 - DNA, 25 bp, Homo sapien
caccctgacctgtaacatttctatg

SEQ ID NO: 4336062 - DNA, 25 bp, Homo sapien
tcaaagctttactcaccctgacctg

SEQ ID NO: 4336063 - DNA, 25 bp, Homo sapien
ccagttgaaggtctgattcactctt

SEQ ID NO: 4336064 - DNA, 25 bp, Homo sapien
ctgattcactcttaaatgtccatac

SEQ ID NO: 4336065 - DNA, 25 bp, Homo sapien
gtattccagttgaaggtctgattca

SEQ ID NO: 4336066 - DNA, 25 bp, Homo sapien
tgaaggtctgattcactcttaaatg

SEQ ID NO: 4336067 - DNA, 25 bp, Homo sapien
tgaaatccagtttgctgctaacagc

SEQ ID NO: 4336068 - DNA, 25 bp, Homo sapien
ccagaggttgagcaaattatccttc

SEQ ID NO: 4336069 - DNA, 25 bp, Homo sapien
aggtgaggctctggaaaacctccag

SEQ ID NO: 4336070 - DNA, 25 bp, Homo sapien
cagatatactaggtgtagggaagtc

SEQ ID NO: 4336071 - DNA, 25 bp, Homo sapien
ggacatctttagaaaccagttagag

SEQ ID NO: 4336072 - DNA, 25 bp, Homo sapien
gcacattaacagatatttccaggac

SEQ ID NO: 4336073 - DNA, 25 bp, Homo sapien
tgagatacatccctctttggtaaaa

SEQ ID NO: 4336074 - DNA, 25 bp, Homo sapien
ttaagggcattaagaatctgccggc

SEQ ID NO: 4336075 - DNA, 25 bp, Homo sapien
gagtaaaatcagaaaatcccaccaa

SEQ ID NO: 4336076 - DNA, 25 bp, Homo sapien
tagagtaaaatcagaaaatcccacc

SEQ ID NO: 4336077 - DNA, 25 bp, Homo sapien
agagtaaaatcagaaaatcccacca

SEQ ID NO: 4336078 - DNA, 25 bp, Homo sapien
ctagagtaaaatcagaaaatcccac

SEQ ID NO: 4336079 - DNA, 25 bp, Homo sapien
tcaacagaaacattgtgaccacagg

SEQ ID NO: 4336080 - DNA, 25 bp, Homo sapien
ccagtagatgcgagtttgtgccagc

SEQ ID NO: 4336081 - DNA, 25 bp, Homo sapien
cacttccttggtcacgtggataaca

SEQ ID NO: 4336082 - DNA, 25 bp, Homo sapien
tgataacgtcacttcagccaggtgt

SEQ ID NO: 4336083 - DNA, 25 bp, Homo sapien
ctctgtcagactggatacggcccca

SEQ ID NO: 4336084 - DNA, 25 bp, Homo sapien
gcacctcttcagcaattgtgtggaa

SEQ ID NO: 4336085 - DNA, 25 bp, Homo sapien
agtgaggtaatgcagaaaggtccag

SEQ ID NO: 4336086 - DNA, 25 bp, Homo sapien
ggtatttgcatagcaaagtgaggta

SEQ ID NO: 4336087 - DNA, 25 bp, Homo sapien
tggcgaatgcatggaaactgcccac

SEQ ID NO: 4336088 - DNA, 25 bp, Homo sapien
ggtaactggctgattcttgaactga

SEQ ID NO: 4336089 - DNA, 25 bp, Homo sapien
gacggcaacgctgctcgccttctgg

SEQ ID NO: 4336090 - DNA, 25 bp, Homo sapien
tacccagcagcagtcagaaagggcc

SEQ ID NO: 4336091 - DNA, 25 bp, Homo sapien
ggttcttgctcactgggccagtccc

SEQ ID NO: 4336092 - DNA, 25 bp, Homo sapien
gtccggttcttgctcactgggccag

SEQ ID NO: 4336093 - DNA, 25 bp, Homo sapien
gtgctgcagggtccggttcttgctc

SEQ ID NO: 4336094 - DNA, 25 bp, Homo sapien
agggtccggttcttgctcactgggc

SEQ ID NO: 4336095 - DNA, 25 bp, Homo sapien
gttgccctgaccagaattctctctc

SEQ ID NO: 4336096 - DNA, 25 bp, Homo sapien
ctttgtgcctttgtccaggctgttg

SEQ ID NO: 4336097 - DNA, 25 bp, Homo sapien
tccaggctgttgccctgaccagaat

SEQ ID NO: 4336098 - DNA, 25 bp, Homo sapien
gctgttgccctgaccagaattctct

SEQ ID NO: 4336099 - DNA, 25 bp, Homo sapien
gaacagaagtgagaaagaccagcca

SEQ ID NO: 4336100 - DNA, 25 bp, Homo sapien
agaagtgagaaagaccagccagcac

SEQ ID NO: 4336101 - DNA, 25 bp, Homo sapien
gtgagaaagaccagccagcaccaag

SEQ ID NO: 4336102 - DNA, 25 bp, Homo sapien
ctgaacagaagtgagaaagaccagc

SEQ ID NO: 4336103 - DNA, 25 bp, Homo sapien
ggtatggacacttggatggtgatgt

SEQ ID NO: 4336104 - DNA, 25 bp, Homo sapien
attgaggtatggacacttggatggt

SEQ ID NO: 4336105 - DNA, 25 bp, Homo sapien
aaattgaggtatggacacttggatg

SEQ ID NO: 4336106 - DNA, 25 bp, Homo sapien
gaggtatggacacttggatggtgat

SEQ ID NO: 4336107 - DNA, 25 bp, Homo sapien
ggcagggctgatgacaatccaattg

SEQ ID NO: 4336108 - DNA, 25 bp, Homo sapien
caatttggacccaagtaagaccagg

SEQ ID NO: 4336109 - DNA, 25 bp, Homo sapien
gcttagggtcaaaagtgaaagccaa

SEQ ID NO: 4336110 - DNA, 25 bp, Homo sapien
ggcttcagatgcttagggtcaaaag

SEQ ID NO: 4336111 - DNA, 25 bp, Homo sapien
gaccctccagtgatgtttacaaaac

SEQ ID NO: 4336112 - DNA, 25 bp, Homo sapien
acacagagattggagggtgttcctg

SEQ ID NO: 4336113 - DNA, 25 bp, Homo sapien
gtagaagaccctccagtgatgttta

SEQ ID NO: 4336114 - DNA, 25 bp, Homo sapien
gaagaccctccagtgatgtttacaa

SEQ ID NO: 4336115 - DNA, 25 bp, Homo sapien
ttgagttgcaaaactctcgagttgc

SEQ ID NO: 4336116 - DNA, 25 bp, Homo sapien
tgtgcctactttgagttgcaaaact

SEQ ID NO: 4336117 - DNA, 25 bp, Homo sapien
aggaaggaaggtgtgcctactttga

SEQ ID NO: 4336118 - DNA, 25 bp, Homo sapien
gaaggtgtgcctactttgagttgca

SEQ ID NO: 4336119 - DNA, 25 bp, Homo sapien
gttctcttcttacagtctataaagc

SEQ ID NO: 4336120 - DNA, 25 bp, Homo sapien
tcttacagtctataaagcaatgaca

SEQ ID NO: 4336121 - DNA, 25 bp, Homo sapien
atcttcagagaggcgacatttcccc

SEQ ID NO: 4336122 - DNA, 25 bp, Homo sapien
tcagagaggcgacatttccccttct

SEQ ID NO: 4336123 - DNA, 25 bp, Homo sapien
ccacagttgagtgcgcctctggtgg

SEQ ID NO: 4336124 - DNA, 25 bp, Homo sapien
tgaattctggtcaccctagccacag

SEQ ID NO: 4336125 - DNA, 25 bp, Homo sapien
tcaccctagccacagttgagtgcgc

SEQ ID NO: 4336126 - DNA, 25 bp, Homo sapien
agccacgctggacagtgaattctgg

SEQ ID NO: 4336127 - DNA, 25 bp, Homo sapien
aacaaccattctaagaggcagatat

SEQ ID NO: 4336128 - DNA, 25 bp, Homo sapien
aagggcggcacactcagtacgctct

SEQ ID NO: 4336129 - DNA, 25 bp, Homo sapien
aggatacaagaattctacgctgctg

SEQ ID NO: 4336130 - DNA, 25 bp, Homo sapien
ccactttatgcgtgagggcccagaa

SEQ ID NO: 4336131 - DNA, 25 bp, Homo sapien
gccacacgggagtcactgaccacag

SEQ ID NO: 4336132 - DNA, 25 bp, Homo sapien
ctacaaagtcggacgtgagcacggg

SEQ ID NO: 4336133 - DNA, 25 bp, Homo sapien
ggcgagagccggctttccggtgccg

SEQ ID NO: 4336134 - DNA, 25 bp, Homo sapien
tgagcacgggcgaaggcgtcagccg

SEQ ID NO: 4336135 - DNA, 25 bp, Homo sapien
ggcgacggaggtcccgtccactctc

SEQ ID NO: 4336136 - DNA, 25 bp, Homo sapien
agagcatttggggcgggcgacggag

SEQ ID NO: 4336137 - DNA, 25 bp, Homo sapien
cagagcatttggggcgggcgacgga

SEQ ID NO: 4336138 - DNA, 25 bp, Homo sapien
gcatttggggcgggcgacggaggtc

SEQ ID NO: 4336139 - DNA, 25 bp, Homo sapien
cttgggtgcagaagggcgcggcggt

SEQ ID NO: 4336140 - DNA, 25 bp, Homo sapien
caaatcgtgggagcgtgtcaaccgc

SEQ ID NO: 4336141 - DNA, 25 bp, Homo sapien
gcccggaagcagctgatcagatctt

SEQ ID NO: 4336142 - DNA, 25 bp, Homo sapien
gaatgtgacccgtgaaagttcagag

SEQ ID NO: 4336143 - DNA, 25 bp, Homo sapien
cttagttctgaatgtatagttcggg

SEQ ID NO: 4336144 - DNA, 25 bp, Homo sapien
agtaactgggtagtggaacgcatcc

SEQ ID NO: 4336145 - DNA, 25 bp, Homo sapien
taactgggtagtggaacgcatccat

SEQ ID NO: 4336146 - DNA, 25 bp, Homo sapien
cagtaactgggtagtggaacgcatc

SEQ ID NO: 4336147 - DNA, 25 bp, Homo sapien
gtaactgggtagtggaacgcatcca

SEQ ID NO: 4336148 - DNA, 25 bp, Homo sapien
gagatttccagctcagcgatgcccc

SEQ ID NO: 4336149 - DNA, 25 bp, Homo sapien
gggaattactccataccagctctga

SEQ ID NO: 4336150 - DNA, 25 bp, Homo sapien
ccttttcaggtcatgaggctagtta

SEQ ID NO: 4336151 - DNA, 25 bp, Homo sapien
tgattagtgaaatccacgtgggtgt

SEQ ID NO: 4336152 - DNA, 25 bp, Homo sapien
cctttgccgatcttatgtacatacc

SEQ ID NO: 4336153 - DNA, 25 bp, Homo sapien
tatctccttgggcattcgtacttag

SEQ ID NO: 4336154 - DNA, 25 bp, Homo sapien
cctcataatcagctaccctggaggg

SEQ ID NO: 4336155 - DNA, 25 bp, Homo sapien
gaccattactactaaggagaaaagc

SEQ ID NO: 4336156 - DNA, 25 bp, Homo sapien
gctatgggagcttggttcccactgc

SEQ ID NO: 4336157 - DNA, 25 bp, Homo sapien
ctctacactagaggctatgggagct

SEQ ID NO: 4336158 - DNA, 25 bp, Homo sapien
tgttgttgaaggttcctctacacta

SEQ ID NO: 4336159 - DNA, 25 bp, Homo sapien
tgttgaaggttcctctacactagag

SEQ ID NO: 4336160 - DNA, 25 bp, Homo sapien
tattgttgggccttaggaggggcag

SEQ ID NO: 4336161 - DNA, 25 bp, Homo sapien
gttgggccttaggaggggcagcaca

SEQ ID NO: 4336162 - DNA, 25 bp, Homo sapien
ttattgttgggccttaggaggggca

SEQ ID NO: 4336163 - DNA, 25 bp, Homo sapien
ttgttgggccttaggaggggcagca

SEQ ID NO: 4336164 - DNA, 25 bp, Homo sapien
tcatctggaatgagccgtttctcag

SEQ ID NO: 4336165 - DNA, 25 bp, Homo sapien
gtcatctggaatgagccgtttctca

SEQ ID NO: 4336166 - DNA, 25 bp, Homo sapien
tcttcacattgaacttggtaatgcc

SEQ ID NO: 4336167 - DNA, 25 bp, Homo sapien
gtcttcacattgaacttggtaatgc

SEQ ID NO: 4336168 - DNA, 25 bp, Homo sapien
gtgccgatggacacgatgacgtgac

SEQ ID NO: 4336169 - DNA, 25 bp, Homo sapien
cgatggacacgatgacgtgaccaat

SEQ ID NO: 4336170 - DNA, 25 bp, Homo sapien
cgatgacgtgaccaatgtgaaccct

SEQ ID NO: 4336171 - DNA, 25 bp, Homo sapien
ggacacgatgacgtgaccaatgtga

SEQ ID NO: 4336172 - DNA, 25 bp, Homo sapien
tcctcgccgcaacttttcatcatgt

SEQ ID NO: 4336173 - DNA, 25 bp, Homo sapien
atatgaaagccatcctcgccgcaac

SEQ ID NO: 4336174 - DNA, 25 bp, Homo sapien
tcttgttgatgtgcataacgtggaa

SEQ ID NO: 4336175 - DNA, 25 bp, Homo sapien
acaggacgtcttgttgatgtgcata

SEQ ID NO: 4336176 - DNA, 25 bp, Homo sapien
cttattggcacaaattcaggcagcc

SEQ ID NO: 4336177 - DNA, 25 bp, Homo sapien
ttggcacaaattcaggcagcctcca

SEQ ID NO: 4336178 - DNA, 25 bp, Homo sapien
tattggcacaaattcaggcagcctc

SEQ ID NO: 4336179 - DNA, 25 bp, Homo sapien
ggcacaaattcaggcagcctccagg

SEQ ID NO: 4336180 - DNA, 25 bp, Homo sapien
atgtggccacagagtggaaactcat

SEQ ID NO: 4336181 - DNA, 25 bp, Homo sapien
tggccacagagtggaaactcatcca

SEQ ID NO: 4336182 - DNA, 25 bp, Homo sapien
gccacagagtggaaactcatccact

SEQ ID NO: 4336183 - DNA, 25 bp, Homo sapien
agagtggaaactcatccacttttac

SEQ ID NO: 4336184 - DNA, 25 bp, Homo sapien
gaagagaggctttgtgttgttctta

SEQ ID NO: 4336185 - DNA, 25 bp, Homo sapien
tcagcaacacctcgccagaagagag

SEQ ID NO: 4336186 - DNA, 25 bp, Homo sapien
ggtcaaagatgggaatctcggcatc

SEQ ID NO: 4336187 - DNA, 25 bp, Homo sapien
gagaggctttgtgttgttcttacaa

SEQ ID NO: 4336188 - DNA, 25 bp, Homo sapien
agactgctctgttggaaaacagaaa

SEQ ID NO: 4336189 - DNA, 25 bp, Homo sapien
gactgctctgttggaaaacagaaac

SEQ ID NO: 4336190 - DNA, 25 bp, Homo sapien
aaagctggatctttgactccattga

SEQ ID NO: 4336191 - DNA, 25 bp, Homo sapien
tgtcacagcctaagggaaaacgagg

SEQ ID NO: 4336192 - DNA, 25 bp, Homo sapien
gtttaatactaggttcatcaacaga

SEQ ID NO: 4336193 - DNA, 25 bp, Homo sapien
gatttgtaagttgaatgtcacagcc

SEQ ID NO: 4336194 - DNA, 25 bp, Homo sapien
tgagtgcttacttggtgccacggca

SEQ ID NO: 4336195 - DNA, 25 bp, Homo sapien
tgtagcgacagtgttggcaccttct

SEQ ID NO: 4336196 - DNA, 25 bp, Homo sapien
tctgcagctggtaaaggacggaatc

SEQ ID NO: 4336197 - DNA, 25 bp, Homo sapien
tgtttaccgatgaggctcacagagg

SEQ ID NO: 4336198 - DNA, 25 bp, Homo sapien
agagctgcgctggccacagagaaga

SEQ ID NO: 4336199 - DNA, 25 bp, Homo sapien
cacagagaagatagtccaatgatcc

SEQ ID NO: 4336200 - DNA, 25 bp, Homo sapien
tgtgagccttccagtgggtgggaaa

SEQ ID NO: 4336201 - DNA, 25 bp, Homo sapien
ggaaaagaggcatgcctatcagtgg

SEQ ID NO: 4336202 - DNA, 25 bp, Homo sapien
tcaggcgtgtgggttggagccaaag

SEQ ID NO: 4336203 - DNA, 25 bp, Homo sapien
tgagagtagctctggagaggaattc

SEQ ID NO: 4336204 - DNA, 25 bp, Homo sapien
ggatataacttgagagtagctctgg

SEQ ID NO: 4336205 - DNA, 25 bp, Homo sapien
gggcctgtcccctggatataacttg

SEQ ID NO: 4336206 - DNA, 25 bp, Homo sapien
gcaggtgtaccttcgaatcatttca

SEQ ID NO: 4336207 - DNA, 25 bp, Homo sapien
gtcagctttgaaggtatctagccca

SEQ ID NO: 4336208 - DNA, 25 bp, Homo sapien
tctggacagtttgtctaacttcaaa

SEQ ID NO: 4336209 - DNA, 25 bp, Homo sapien
ggaggattttagcactatgtctctg

SEQ ID NO: 4336210 - DNA, 25 bp, Homo sapien
agtttcataagactcctgactttca

SEQ ID NO: 4336211 - DNA, 25 bp, Homo sapien
ttacagaaagatgggtaggaaaatg

SEQ ID NO: 4336212 - DNA, 25 bp, Homo sapien
cctgtattgaataatggtaagtttc

SEQ ID NO: 4336213 - DNA, 25 bp, Homo sapien
ggaaaatgaggcctgtaagacagaa

SEQ ID NO: 4336214 - DNA, 25 bp, Homo sapien
gaggtggcacgaccctctagagacc

SEQ ID NO: 4336215 - DNA, 25 bp, Homo sapien
tctggccgtgccactttcaagagca

SEQ ID NO: 4336216 - DNA, 25 bp, Homo sapien
tcaagagcaagttttccgagccagg

SEQ ID NO: 4336217 - DNA, 25 bp, Homo sapien
aaagcactgtttgctagcactgaca

SEQ ID NO: 4336218 - DNA, 25 bp, Homo sapien
tgaaaagccaaactggtggaaataa

SEQ ID NO: 4336219 - DNA, 25 bp, Homo sapien
aaagccaaactggtggaaataagag

SEQ ID NO: 4336220 - DNA, 25 bp, Homo sapien
ctgaaaagccaaactggtggaaata

SEQ ID NO: 4336221 - DNA, 25 bp, Homo sapien
gccaaactggtggaaataagaggga

SEQ ID NO: 4336222 - DNA, 25 bp, Homo sapien
tggctgtgcccatgttagttctccc

SEQ ID NO: 4336223 - DNA, 25 bp, Homo sapien
ggctgtgcccatgttagttctccct

SEQ ID NO: 4336224 - DNA, 25 bp, Homo sapien
atccataaacgattctgatcctgac

SEQ ID NO: 4336225 - DNA, 25 bp, Homo sapien
ccagcaccagactggtggagtcctc

SEQ ID NO: 4336226 - DNA, 25 bp, Homo sapien
cactcctataatccataaacgattc

SEQ ID NO: 4336227 - DNA, 25 bp, Homo sapien
agcaccagactggtggagtcctcac

SEQ ID NO: 4336228 - DNA, 25 bp, Homo sapien
tgtcaaagcgcagcccaaacttagc

SEQ ID NO: 4336229 - DNA, 25 bp, Homo sapien
actgtctggcctggacaacctggcc

SEQ ID NO: 4336230 - DNA, 25 bp, Homo sapien
ggagatgtatcgctctttggtcaga

SEQ ID NO: 4336231 - DNA, 25 bp, Homo sapien
tgtagctacatgaggtctcagcagt

SEQ ID NO: 4336232 - DNA, 25 bp, Homo sapien
tgtagtgattcccactcaggagagt

SEQ ID NO: 4336233 - DNA, 25 bp, Homo sapien
tggaaagatgtagtgcagaaactgc

SEQ ID NO: 4336234 - DNA, 25 bp, Homo sapien
aagatgtagtgcagaaactgcccat

SEQ ID NO: 4336235 - DNA, 25 bp, Homo sapien
gaaagatgtagtgcagaaactgccc

SEQ ID NO: 4336236 - DNA, 25 bp, Homo sapien
gaactggtatggaaagatgtagtgc

SEQ ID NO: 4336237 - DNA, 25 bp, Homo sapien
gactagccagcctaattactgcatg

SEQ ID NO: 4336238 - DNA, 25 bp, Homo sapien
gttaggtgtcgctgattaacatgaa

SEQ ID NO: 4336239 - DNA, 25 bp, Homo sapien
tccaagccacctatgctgaagttag

SEQ ID NO: 4336240 - DNA, 25 bp, Homo sapien
taaaacccaaagctagactagccag

SEQ ID NO: 4336241 - DNA, 25 bp, Homo sapien
aatccagtgtggcagtctgttctcc

SEQ ID NO: 4336242 - DNA, 25 bp, Homo sapien
ggaaatccagtgtggcagtctgttc

SEQ ID NO: 4336243 - DNA, 25 bp, Homo sapien
ccagtgtggcagtctgttctccagt

SEQ ID NO: 4336244 - DNA, 25 bp, Homo sapien
agtgtggcagtctgttctccagtat

SEQ ID NO: 4336245 - DNA, 25 bp, Homo sapien
gggcatacactgatcctgactaaga

SEQ ID NO: 4336246 - DNA, 25 bp, Homo sapien
tgtgtagcacagagccccgtgatgt

SEQ ID NO: 4336247 - DNA, 25 bp, Homo sapien
gcggtgcttccacaaaagccttgat

SEQ ID NO: 4336248 - DNA, 25 bp, Homo sapien
gactgtcagccttctccaaaagagg

SEQ ID NO: 4336249 - DNA, 25 bp, Homo sapien
cacagcataggtctgttcagtggcc

SEQ ID NO: 4336250 - DNA, 25 bp, Homo sapien
cagtggccagagttaagacctgctc

SEQ ID NO: 4336251 - DNA, 25 bp, Homo sapien
cataggtctgttcagtggccagagt

SEQ ID NO: 4336252 - DNA, 25 bp, Homo sapien
ggacaggcggttgatgggtgtctca

SEQ ID NO: 4336253 - DNA, 25 bp, Homo sapien
cagttggctaggtggtagacagccc

SEQ ID NO: 4336254 - DNA, 25 bp, Homo sapien
cgcaggcggtataccaggtgtgcca

SEQ ID NO: 4336255 - DNA, 25 bp, Homo sapien
aagatagaagcatccatacacccca

SEQ ID NO: 4336256 - DNA, 25 bp, Homo sapien
gcacaggtaacctgcactcaggaag

SEQ ID NO: 4336257 - DNA, 25 bp, Homo sapien
gctctaatactgtcctcacatagga

SEQ ID NO: 4336258 - DNA, 25 bp, Homo sapien
tgggctctaatactgtcctcacata

SEQ ID NO: 4336259 - DNA, 25 bp, Homo sapien
tccatccgctcaggggtcttctcac

SEQ ID NO: 4336260 - DNA, 25 bp, Homo sapien
tgtcctcacataggaaattcagaaa

SEQ ID NO: 4336261 - DNA, 25 bp, Homo sapien
cagcgtgggatgatgcggccacatc

SEQ ID NO: 4336262 - DNA, 25 bp, Homo sapien
tcccaagggaaagtagcactacagg

SEQ ID NO: 4336263 - DNA, 25 bp, Homo sapien
cctagaaggaatgcttccggtggct

SEQ ID NO: 4336264 - DNA, 25 bp, Homo sapien
ggaacatagtacacttcatggagaa

SEQ ID NO: 4336265 - DNA, 25 bp, Homo sapien
tgagtaggttttccccagctagagg

SEQ ID NO: 4336266 - DNA, 25 bp, Homo sapien
tacgtggcatattctggtaacagag

SEQ ID NO: 4336267 - DNA, 25 bp, Homo sapien
aagtcaccagagtcaacaagtgtgg

SEQ ID NO: 4336268 - DNA, 25 bp, Homo sapien
gaaactttcagtctatcccggatac

SEQ ID NO: 4336269 - DNA, 25 bp, Homo sapien
tccaggcttgaatagttgcgtgacg

SEQ ID NO: 4336270 - DNA, 25 bp, Homo sapien
tgcttgaagttaccatagtcatgag

SEQ ID NO: 4336271 - DNA, 25 bp, Homo sapien
accatagtcatgagataggatatgc

SEQ ID NO: 4336272 - DNA, 25 bp, Homo sapien
gttgcgtgacgatgtaatgcttgaa

SEQ ID NO: 4336273 - DNA, 25 bp, Homo sapien
taccagctattggatcagggtgatt

SEQ ID NO: 4336274 - DNA, 25 bp, Homo sapien
caggttaccagctattggatcaggg

SEQ ID NO: 4336275 - DNA, 25 bp, Homo sapien
ggatcagggtgatttccttatcctc

SEQ ID NO: 4336276 - DNA, 25 bp, Homo sapien
ctcgcaggttaccagctattggatc

SEQ ID NO: 4336277 - DNA, 25 bp, Homo sapien
tacttctatgcacctaattctggag

SEQ ID NO: 4336278 - DNA, 25 bp, Homo sapien
gatatccagagttcccagaatgaca

SEQ ID NO: 4336279 - DNA, 25 bp, Homo sapien
gaaaaagccacgtgagcaaatgagg

SEQ ID NO: 4336280 - DNA, 25 bp, Homo sapien
cactgattctgaattggtaaagggt

SEQ ID NO: 4336281 - DNA, 25 bp, Homo sapien
gtaaaaactctctctgcgtgtatat

SEQ ID NO: 4336282 - DNA, 25 bp, Homo sapien
taagaccactagaaatgaatgcctc

SEQ ID NO: 4336283 - DNA, 25 bp, Homo sapien
tatggagtcagggaattaagaccac

SEQ ID NO: 4336284 - DNA, 25 bp, Homo sapien
gagtaattaactaattgccagaatt

SEQ ID NO: 4336285 - DNA, 25 bp, Homo sapien
gcaagttcagcacaagcctacagct

SEQ ID NO: 4336286 - DNA, 25 bp, Homo sapien
tgtacaaatgttaaggttgcatctt

SEQ ID NO: 4336287 - DNA, 25 bp, Homo sapien
gcttacacaactgacgagggagtta

SEQ ID NO: 4336288 - DNA, 25 bp, Homo sapien
gagttagatcatgaacaaggaaacc

SEQ ID NO: 4336289 - DNA, 25 bp, Homo sapien
cagaaagcaatacttccgtgggata

SEQ ID NO: 4336290 - DNA, 25 bp, Homo sapien
ggcctgaggctttagttttattcga

SEQ ID NO: 4336291 - DNA, 25 bp, Homo sapien
gcaatacttccgtgggatacccact

SEQ ID NO: 4336292 - DNA, 25 bp, Homo sapien
gcctgaggctttagttttattcgaa

SEQ ID NO: 4336293 - DNA, 25 bp, Homo sapien
aggatcacctgaacctcccaggttg

SEQ ID NO: 4336294 - DNA, 25 bp, Homo sapien
ggatcacctgaacctcccaggttga

SEQ ID NO: 4336295 - DNA, 25 bp, Homo sapien
atgagctgtgattgggccacttcac

SEQ ID NO: 4336296 - DNA, 25 bp, Homo sapien
tgtgattgggccacttcaccccagc

SEQ ID NO: 4336297 - DNA, 25 bp, Homo sapien
ggcctcaattagatgtccacagtgt

SEQ ID NO: 4336298 - DNA, 25 bp, Homo sapien
tattttaaatcctagggctctcatg

SEQ ID NO: 4336299 - DNA, 25 bp, Homo sapien
aaatcctagggctctcatgcattcc

SEQ ID NO: 4336300 - DNA, 25 bp, Homo sapien
caattagatgtccacagtgttcttc

SEQ ID NO: 4336301 - DNA, 25 bp, Homo sapien
caatatccaaggagtaacactgctc

SEQ ID NO: 4336302 - DNA, 25 bp, Homo sapien
tatgaagacattccacagataagtg

SEQ ID NO: 4336303 - DNA, 25 bp, Homo sapien
gatcttatgatatgcccatgcctat

SEQ ID NO: 4336304 - DNA, 25 bp, Homo sapien
cacgggtataatggaatgtagctgg

SEQ ID NO: 4336305 - DNA, 25 bp, Homo sapien
aaggaatgagtggttgaagcttgcc

SEQ ID NO: 4336306 - DNA, 25 bp, Homo sapien
tggttgaagcttgccgttctcctct

SEQ ID NO: 4336307 - DNA, 25 bp, Homo sapien
tctctccatcgtttcccggtactaa

SEQ ID NO: 4336308 - DNA, 25 bp, Homo sapien
tacgggataagtcaacagagacccg

SEQ ID NO: 4336309 - DNA, 25 bp, Homo sapien
cggggctcgtcggccgcgccctctc

SEQ ID NO: 4336310 - DNA, 25 bp, Homo sapien
ccggggctcgtcggccgcgccctct

SEQ ID NO: 4336311 - DNA, 25 bp, Homo sapien
gggctcgtcggccgcgccctctccg

SEQ ID NO: 4336312 - DNA, 25 bp, Homo sapien
ggggctcgtcggccgcgccctctcc

SEQ ID NO: 4336313 - DNA, 25 bp, Homo sapien
cttggtctccgggcaagcgcagcag

SEQ ID NO: 4336314 - DNA, 25 bp, Homo sapien
cttcttggtctccgggcaagcgcag

SEQ ID NO: 4336315 - DNA, 25 bp, Homo sapien
ggtctccgggcaagcgcagcagggc

SEQ ID NO: 4336316 - DNA, 25 bp, Homo sapien
cacgcatcgcgcgccttcttggtct

SEQ ID NO: 4336317 - DNA, 25 bp, Homo sapien
ggcagggtttgagtcaaccagaccc

SEQ ID NO: 4336318 - DNA, 25 bp, Homo sapien
gcagggtttgagtcaaccagacccg

SEQ ID NO: 4336319 - DNA, 25 bp, Homo sapien
gggtttgagtcaaccagacccggca

SEQ ID NO: 4336320 - DNA, 25 bp, Homo sapien
cagggtttgagtcaaccagacccgg

SEQ ID NO: 4336321 - DNA, 25 bp, Homo sapien
gtcgctctaaaaagtacaggaagtc

SEQ ID NO: 4336322 - DNA, 25 bp, Homo sapien
gcaaacgccgattcgtccgcagtca

SEQ ID NO: 4336323 - DNA, 25 bp, Homo sapien
agtcacttccggcagtcgctctaaa

SEQ ID NO: 4336324 - DNA, 25 bp, Homo sapien
gattcgtccgcagtcacttccggca

SEQ ID NO: 4336325 - DNA, 25 bp, Homo sapien
tccatggtcactaacagaaacgtct

SEQ ID NO: 4336326 - DNA, 25 bp, Homo sapien
gaagggcactagcagacatgtttga

SEQ ID NO: 4336327 - DNA, 25 bp, Homo sapien
gccaattgagaggtaatattcccag

SEQ ID NO: 4336328 - DNA, 25 bp, Homo sapien
tgaaaaccatttggccggactggaa

SEQ ID NO: 4336329 - DNA, 25 bp, Homo sapien
ggccagcctgcttcaaagccattac

SEQ ID NO: 4336330 - DNA, 25 bp, Homo sapien
attacatgtgaactgcttaaaacag

SEQ ID NO: 4336331 - DNA, 25 bp, Homo sapien
tactatcttctaggaggattaaatg

SEQ ID NO: 4336332 - DNA, 25 bp, Homo sapien
ctgagaatgcggatattaaaatact

SEQ ID NO: 4336333 - DNA, 25 bp, Homo sapien
cttcttctgagaatgcggatattaa

SEQ ID NO: 4336334 - DNA, 25 bp, Homo sapien
tagtagtggtgttcacaatagtccc

SEQ ID NO: 4336335 - DNA, 25 bp, Homo sapien
caaaaacatcaacatggagtccaag

SEQ ID NO: 4336336 - DNA, 25 bp, Homo sapien
tattgacaagcatcaggattccagg

SEQ ID NO: 4336337 - DNA, 25 bp, Homo sapien
tgcttctacagtggcacatcaaccc

SEQ ID NO: 4336338 - DNA, 25 bp, Homo sapien
gacaaagcggatatttgccactctc

SEQ ID NO: 4336339 - DNA, 25 bp, Homo sapien
caaagcggatatttgccactctctt

SEQ ID NO: 4336340 - DNA, 25 bp, Homo sapien
aaagcggatatttgccactctcttc

SEQ ID NO: 4336341 - DNA, 25 bp, Homo sapien
acaaagcggatatttgccactctct

SEQ ID NO: 4336342 - DNA, 25 bp, Homo sapien
gacttggactgaaatataggtgaga

SEQ ID NO: 4336343 - DNA, 25 bp, Homo sapien
cctatgactaggacgggaagaggaa

SEQ ID NO: 4336344 - DNA, 25 bp, Homo sapien
ctttacttcagtgggaatctcggcc

SEQ ID NO: 4336345 - DNA, 25 bp, Homo sapien
tataggtgagagacaagattgtctc

SEQ ID NO: 4336346 - DNA, 25 bp, Homo sapien
gtgaatcatgttggccttgctgctg

SEQ ID NO: 4336347 - DNA, 25 bp, Homo sapien
ataccttctgtttgaggtcagcatc

SEQ ID NO: 4336348 - DNA, 25 bp, Homo sapien
atataccttctgtttgaggtcagca

SEQ ID NO: 4336349 - DNA, 25 bp, Homo sapien
tcagcatcatagtgggtcgtgaatc

SEQ ID NO: 4336350 - DNA, 25 bp, Homo sapien
acggcctgatggagctgtgcaagct

SEQ ID NO: 4336351 - DNA, 25 bp, Homo sapien
caggggacggcctgatggagctgtg

SEQ ID NO: 4336352 - DNA, 25 bp, Homo sapien
gcaggggacggcctgatggagctgt

SEQ ID NO: 4336353 - DNA, 25 bp, Homo sapien
gggacggcctgatggagctgtgcaa

SEQ ID NO: 4336354 - DNA, 25 bp, Homo sapien
cagacagcgactctccggctgtgac

SEQ ID NO: 4336355 - DNA, 25 bp, Homo sapien
caacataggcagaccttaagggatg

SEQ ID NO: 4336356 - DNA, 25 bp, Homo sapien
gaccttaagggatgactcagtaaca

SEQ ID NO: 4336357 - DNA, 25 bp, Homo sapien
tggagagtcctttagcagggcaaag

SEQ ID NO: 4336358 - DNA, 25 bp, Homo sapien
ttcaaattctcctccattgctatct

SEQ ID NO: 4336359 - DNA, 25 bp, Homo sapien
cagttgcaccgctcttcttcatttc

SEQ ID NO: 4336360 - DNA, 25 bp, Homo sapien
tcctccattgctatctccagttgca

SEQ ID NO: 4336361 - DNA, 25 bp, Homo sapien
tctccagttgcaccgctcttcttca

SEQ ID NO: 4336362 - DNA, 25 bp, Homo sapien
tttgctacgcccctcatgcaggagt

SEQ ID NO: 4336363 - DNA, 25 bp, Homo sapien
ggctggcatgcaggttcttgttcct

SEQ ID NO: 4336364 - DNA, 25 bp, Homo sapien
gggcgggctgcacccacaatctttt

SEQ ID NO: 4336365 - DNA, 25 bp, Homo sapien
gaagatcatggctatgctcaccgag

SEQ ID NO: 4336366 - DNA, 25 bp, Homo sapien
ggaccaagcgaccaaggatgggcca

SEQ ID NO: 4336367 - DNA, 25 bp, Homo sapien
caagcgaccaaggatgggccatctg

SEQ ID NO: 4336368 - DNA, 25 bp, Homo sapien
catctggggtctatgcccacatacc

SEQ ID NO: 4336369 - DNA, 25 bp, Homo sapien
ggtgtggaagggaccaagcgaccaa

SEQ ID NO: 4336370 - DNA, 25 bp, Homo sapien
gcgcatgagtatctgtgggagtcct

SEQ ID NO: 4336371 - DNA, 25 bp, Homo sapien
tgctacctctaatagtcctgtctcc

SEQ ID NO: 4336372 - DNA, 25 bp, Homo sapien
aggcctgtactcatcggcaggcgca

SEQ ID NO: 4336373 - DNA, 25 bp, Homo sapien
gtttgttcgcttcctgagtcttttc

SEQ ID NO: 4336374 - DNA, 25 bp, Homo sapien
tggcatgacctcattccggccacat

SEQ ID NO: 4336375 - DNA, 25 bp, Homo sapien
taagcaccgataataggtagcctgc

SEQ ID NO: 4336376 - DNA, 25 bp, Homo sapien
gcattgactcagatatagatcctga

SEQ ID NO: 4336377 - DNA, 25 bp, Homo sapien
ggaggcctgcaccaaatgtcagaag

SEQ ID NO: 4336378 - DNA, 25 bp, Homo sapien
cccaagtgaaggttcccaaggacat

SEQ ID NO: 4336379 - DNA, 25 bp, Homo sapien
ccaagtgaaggttcccaaggacatg

SEQ ID NO: 4336380 - DNA, 25 bp, Homo sapien
tctgtaggagcaagggcacaaactg

SEQ ID NO: 4336381 - DNA, 25 bp, Homo sapien
catgagtctgtaggagcaagggcac

SEQ ID NO: 4336382 - DNA, 25 bp, Homo sapien
taaaagtttaacatatgtgcatacc

SEQ ID NO: 4336383 - DNA, 25 bp, Homo sapien
tccggcgtaagaacataaaaatgaa

SEQ ID NO: 4336384 - DNA, 25 bp, Homo sapien
gaagactccggcgtaagaacataaa

SEQ ID NO: 4336385 - DNA, 25 bp, Homo sapien
attaaaatgtagtccgggcgaggtg

SEQ ID NO: 4336386 - DNA, 25 bp, Homo sapien
gatgtgactacatattgcagcggca

SEQ ID NO: 4336387 - DNA, 25 bp, Homo sapien
cagtattggaaatgagcagactcaa

SEQ ID NO: 4336388 - DNA, 25 bp, Homo sapien
caacatgtgttggttacctgggagg

SEQ ID NO: 4336389 - DNA, 25 bp, Homo sapien
tagattaggcctgacagagtgagcc

SEQ ID NO: 4336390 - DNA, 25 bp, Homo sapien
gctaattggtatgtgtacaggccca

SEQ ID NO: 4336391 - DNA, 25 bp, Homo sapien
aacagtcctctattggcacggtggc

SEQ ID NO: 4336392 - DNA, 25 bp, Homo sapien
aaaaggccttcgtgttgggcacaca

SEQ ID NO: 4336393 - DNA, 25 bp, Homo sapien
tgttacaataatacaggccggtacc

SEQ ID NO: 4336394 - DNA, 25 bp, Homo sapien
ggagtataccacgtccagagcagtg

SEQ ID NO: 4336395 - DNA, 25 bp, Homo sapien
gctaaacagcgagtgaaaaccaaga

SEQ ID NO: 4336396 - DNA, 25 bp, Homo sapien
tatcaacgccactacctttaaggag

SEQ ID NO: 4336397 - DNA, 25 bp, Homo sapien
caaacgcttgctgggcagttggatc

SEQ ID NO: 4336398 - DNA, 25 bp, Homo sapien
tcagcaggcaggacaactctcttgg

SEQ ID NO: 4336399 - DNA, 25 bp, Homo sapien
caggcaggacaactctcttggagag

SEQ ID NO: 4336400 - DNA, 25 bp, Homo sapien
aactctcttggagagtcacacacac

SEQ ID NO: 4336401 - DNA, 25 bp, Homo sapien
gcaggcaggacaactctcttggaga

SEQ ID NO: 4336402 - DNA, 25 bp, Homo sapien
ggagggctgccaacagactccactt

SEQ ID NO: 4336403 - DNA, 25 bp, Homo sapien
cacttccgaaccctctggaggacga

SEQ ID NO: 4336404 - DNA, 25 bp, Homo sapien
tggaggacgagacccataaagtgac

SEQ ID NO: 4336405 - DNA, 25 bp, Homo sapien
gaaccctctggaggacgagacccat

SEQ ID NO: 4336406 - DNA, 25 bp, Homo sapien
ggcaagttacacacaaccatgggct

SEQ ID NO: 4336407 - DNA, 25 bp, Homo sapien
taagtccccgttgagttatacctgc

SEQ ID NO: 4336408 - DNA, 25 bp, Homo sapien
cattttagagtatataaggcccaca

SEQ ID NO: 4336409 - DNA, 25 bp, Homo sapien
catgtgtgcctgagtcttgcttgct

SEQ ID NO: 4336410 - DNA, 25 bp, Homo sapien
agtgttgctgagtgacactcaagta

SEQ ID NO: 4336411 - DNA, 25 bp, Homo sapien
ctcaagtaactggtggtttttcctg

SEQ ID NO: 4336412 - DNA, 25 bp, Homo sapien
tgctgagtgacactcaagtaactgg

SEQ ID NO: 4336413 - DNA, 25 bp, Homo sapien
tgacactcaagtaactggtggtttt

SEQ ID NO: 4336414 - DNA, 25 bp, Homo sapien
caggtggagttggaagctgatgcag

SEQ ID NO: 4336415 - DNA, 25 bp, Homo sapien
ttattggtctgtccacggtctccag

SEQ ID NO: 4336416 - DNA, 25 bp, Homo sapien
cagaagcagcattattggtctgtcc

SEQ ID NO: 4336417 - DNA, 25 bp, Homo sapien
tgtccacggtctccagtattagcat

SEQ ID NO: 4336418 - DNA, 25 bp, Homo sapien
gagtaaagttacatttcataatctc

SEQ ID NO: 4336419 - DNA, 25 bp, Homo sapien
tcccatcataaagatggactggccc

SEQ ID NO: 4336420 - DNA, 25 bp, Homo sapien
cctgggccaggtaaagtaggaggag

SEQ ID NO: 4336421 - DNA, 25 bp, Homo sapien
taaagtaggaggagctgacctcttg

SEQ ID NO: 4336422 - DNA, 25 bp, Homo sapien
aagtcataaacgcagaatttcttgc

SEQ ID NO: 4336423 - DNA, 25 bp, Homo sapien
gtcataaacgcagaatttcttgcct

SEQ ID NO: 4336424 - DNA, 25 bp, Homo sapien
ttcaagtcataaacgcagaatttct

SEQ ID NO: 4336425 - DNA, 25 bp, Homo sapien
atgttcaagtcataaacgcagaatt

SEQ ID NO: 4336426 - DNA, 25 bp, Homo sapien
tgcaccccgccaggtatatttttat

SEQ ID NO: 4336427 - DNA, 25 bp, Homo sapien
cctactcaagctgttccaagtggaa

SEQ ID NO: 4336428 - DNA, 25 bp, Homo sapien
tatgacaggtcaatctctctagaag

SEQ ID NO: 4336429 - DNA, 25 bp, Homo sapien
tactgtgtacctaactcaggatgtt

SEQ ID NO: 4336430 - DNA, 25 bp, Homo sapien
taaaattcggatgcctgtgagccaa

SEQ ID NO: 4336431 - DNA, 25 bp, Homo sapien
gaggaaatggatgcaacactgtacc

SEQ ID NO: 4336432 - DNA, 25 bp, Homo sapien
agtgaacctgaaaccctaacatggg

SEQ ID NO: 4336433 - DNA, 25 bp, Homo sapien
tatgaactgacagcgggacaaactt

SEQ ID NO: 4336434 - DNA, 25 bp, Homo sapien
gaggaatgaccagtcacgaagagga

SEQ ID NO: 4336435 - DNA, 25 bp, Homo sapien
ggaatgaccaatcactaagagacca

SEQ ID NO: 4336436 - DNA, 25 bp, Homo sapien
taaaacggattacagaaactcacag

SEQ ID NO: 4336437 - DNA, 25 bp, Homo sapien
gagtaatctctaggaaacccagccc

SEQ ID NO: 4336438 - DNA, 25 bp, Homo sapien
gatgaccacttctcggtagataatg

SEQ ID NO: 4336439 - DNA, 25 bp, Homo sapien
gaaagaaactttatgctgatgacca

SEQ ID NO: 4336440 - DNA, 25 bp, Homo sapien
tccagatgaatggtctcctaaatgg

SEQ ID NO: 4336441 - DNA, 25 bp, Homo sapien
tgagcagatgctctctaaaatggtt

SEQ ID NO: 4336442 - DNA, 25 bp, Homo sapien
ctgtaaaatggagtggcaatgctgt

SEQ ID NO: 4336443 - DNA, 25 bp, Homo sapien
tgtaaaatggagtggcaatgctgtc

SEQ ID NO: 4336444 - DNA, 25 bp, Homo sapien
gttgaagcagctgcttgaatccgag

SEQ ID NO: 4336445 - DNA, 25 bp, Homo sapien
gaataaggatggtagccagaggtgg

SEQ ID NO: 4336446 - DNA, 25 bp, Homo sapien
tccgagcatgaggaggaataaggat

SEQ ID NO: 4336447 - DNA, 25 bp, Homo sapien
gatggtagccagaggtggattactt

SEQ ID NO: 4336448 - DNA, 25 bp, Homo sapien
ctcaggtagggatagtgtgttgacc

SEQ ID NO: 4336449 - DNA, 25 bp, Homo sapien
cattttccccagtagagtacatcca

SEQ ID NO: 4336450 - DNA, 25 bp, Homo sapien
tgttgaccaaggtctacacctgtgt

SEQ ID NO: 4336451 - DNA, 25 bp, Homo sapien
ttaggtctgacttactctttgctcc

SEQ ID NO: 4336452 - DNA, 25 bp, Homo sapien
actctcaggaggacaatgtttacta

SEQ ID NO: 4336453 - DNA, 25 bp, Homo sapien
taatctagccaagtggtagaggaat

SEQ ID NO: 4336454 - DNA, 25 bp, Homo sapien
gagtctgcatattgctcactggctg

SEQ ID NO: 4336455 - DNA, 25 bp, Homo sapien
aatattcagtctgtctgagtctgca

SEQ ID NO: 4336456 - DNA, 25 bp, Homo sapien
taagcactctgataaccacagagac

SEQ ID NO: 4336457 - DNA, 25 bp, Homo sapien
catatttatatctaatgtgctgggc

SEQ ID NO: 4336458 - DNA, 25 bp, Homo sapien
gaccacacactgtatctatacacat

SEQ ID NO: 4336459 - DNA, 25 bp, Homo sapien
tacaaatgcattctccaaaccctca

SEQ ID NO: 4336460 - DNA, 25 bp, Homo sapien
tcctcctgtttggaagacaactgaa

SEQ ID NO: 4336461 - DNA, 25 bp, Homo sapien
tagtgactatcccaaggtctcccag

SEQ ID NO: 4336462 - DNA, 25 bp, Homo sapien
gcagcagcaatggtgccagtctcag

SEQ ID NO: 4336463 - DNA, 25 bp, Homo sapien
cacttaggtcttaatcaaggagaaa

SEQ ID NO: 4336464 - DNA, 25 bp, Homo sapien
tccagcagacggctacacagtgcaa

SEQ ID NO: 4336465 - DNA, 25 bp, Homo sapien
cagtgcaattgcctccggtggagtt

SEQ ID NO: 4336466 - DNA, 25 bp, Homo sapien
agcttccagtggtgttagtcgggca

SEQ ID NO: 4336467 - DNA, 25 bp, Homo sapien
catttgggtcccgtaattcatcaaa

SEQ ID NO: 4336468 - DNA, 25 bp, Homo sapien
taagaatctaagcaaataccctgtg

SEQ ID NO: 4336469 - DNA, 25 bp, Homo sapien
catacaaaatatgacaggcacatgg

SEQ ID NO: 4336470 - DNA, 25 bp, Homo sapien
tgagcagcactgttcgaaaacttgg

SEQ ID NO: 4336471 - DNA, 25 bp, Homo sapien
gttgcatttgggaaaggaccttcta

SEQ ID NO: 4336472 - DNA, 25 bp, Homo sapien
aattgcttaacactcagacctttgg

SEQ ID NO: 4336473 - DNA, 25 bp, Homo sapien
tgtcaatgaatcacccaagaggctg

SEQ ID NO: 4336474 - DNA, 25 bp, Homo sapien
taattaaagaagcttccgctgtcac

SEQ ID NO: 4336475 - DNA, 25 bp, Homo sapien
caagttttatagacctgccctgaaa

SEQ ID NO: 4336476 - DNA, 25 bp, Homo sapien
cactcctgaggtgaaatgtcctgtt

SEQ ID NO: 4336477 - DNA, 25 bp, Homo sapien
gcactcctgaggtgaaatgtcctgt

SEQ ID NO: 4336478 - DNA, 25 bp, Homo sapien
ccgcactcctgaggtgaaatgtcct

SEQ ID NO: 4336479 - DNA, 25 bp, Homo sapien
tcctgaggtgaaatgtcctgttcct

SEQ ID NO: 4336480 - DNA, 25 bp, Homo sapien
tttattatgttccaatgccagtgcg

SEQ ID NO: 4336481 - DNA, 25 bp, Homo sapien
tcaatccaaaagagaatagtccagc

SEQ ID NO: 4336482 - DNA, 25 bp, Homo sapien
catcagtcttcacagtagcaagtcc

SEQ ID NO: 4336483 - DNA, 25 bp, Homo sapien
caatggtgaggcacagtaaagaaac

SEQ ID NO: 4336484 - DNA, 25 bp, Homo sapien
tgcccgctcatacccttgcacccgg

SEQ ID NO: 4336485 - DNA, 25 bp, Homo sapien
cccgctcatacccttgcacccggta

SEQ ID NO: 4336486 - DNA, 25 bp, Homo sapien
attgtgggctttgcccgctcatacc

SEQ ID NO: 4336487 - DNA, 25 bp, Homo sapien
tctattgtgggctttgcccgctcat

SEQ ID NO: 4336488 - DNA, 25 bp, Homo sapien
caggaaaccagggttcacatgtcca

SEQ ID NO: 4336489 - DNA, 25 bp, Homo sapien
cagcttcaggagataggactaacag

SEQ ID NO: 4336490 - DNA, 25 bp, Homo sapien
cagcaacaaaggtaaagtggttcct

SEQ ID NO: 4336491 - DNA, 25 bp, Homo sapien
agtggttcctgtttccagactcctg

SEQ ID NO: 4336492 - DNA, 25 bp, Homo sapien
ctgagttccctctaggaattttaag

SEQ ID NO: 4336493 - DNA, 25 bp, Homo sapien
tctgagttccctctaggaattttaa

SEQ ID NO: 4336494 - DNA, 25 bp, Homo sapien
tgaggaaccaacataagtgcactta

SEQ ID NO: 4336495 - DNA, 25 bp, Homo sapien
ccagtaacacccactctagtatgca

SEQ ID NO: 4336496 - DNA, 25 bp, Homo sapien
ccaacacaagcatattctcaatcat

SEQ ID NO: 4336497 - DNA, 25 bp, Homo sapien
tctcaatcatctagatgacagagaa

SEQ ID NO: 4336498 - DNA, 25 bp, Homo sapien
tgagggaatttaaattctgtgtagt

SEQ ID NO: 4336499 - DNA, 25 bp, Homo sapien
ttctctgatttgctcccttgttgga

SEQ ID NO: 4336500 - DNA, 25 bp, Homo sapien
ctgatttgctcccttgttggagttc

SEQ ID NO: 4336501 - DNA, 25 bp, Homo sapien
tttgctcccttgttggagttcccag

SEQ ID NO: 4336502 - DNA, 25 bp, Homo sapien
gatttgctcccttgttggagttccc

SEQ ID NO: 4336503 - DNA, 25 bp, Homo sapien
gaaatgtaagtttggctccctctca

SEQ ID NO: 4336504 - DNA, 25 bp, Homo sapien
gatgtgggccctttgacattggact

SEQ ID NO: 4336505 - DNA, 25 bp, Homo sapien
tagtctccatgttttcaggcattgg

SEQ ID NO: 4336506 - DNA, 25 bp, Homo sapien
tggtaattaggtaatggctctgccc

SEQ ID NO: 4336507 - DNA, 25 bp, Homo sapien
ccattgcgcacagcctatcttttgt

SEQ ID NO: 4336508 - DNA, 25 bp, Homo sapien
cattgcgcacagcctatcttttgtt

SEQ ID NO: 4336509 - DNA, 25 bp, Homo sapien
gaaacagagatcctaacattacagt

SEQ ID NO: 4336510 - DNA, 25 bp, Homo sapien
gaatcacgaaggctattacatggga

SEQ ID NO: 4336511 - DNA, 25 bp, Homo sapien
tttaccatcacatgactgaatcacg

SEQ ID NO: 4336512 - DNA, 25 bp, Homo sapien
tggcaaagaaaatcctattcatcca

SEQ ID NO: 4336513 - DNA, 25 bp, Homo sapien
gagcaagccgaccataatcacctga

SEQ ID NO: 4336514 - DNA, 25 bp, Homo sapien
tcttatgacacaatgaacccaggca

SEQ ID NO: 4336515 - DNA, 25 bp, Homo sapien
gaaggcgaacacttaaacgacagag

SEQ ID NO: 4336516 - DNA, 25 bp, Homo sapien
tgttcactgcaggtggccactaagg

SEQ ID NO: 4336517 - DNA, 25 bp, Homo sapien
taagagcagtgtgctagacacatca

SEQ ID NO: 4336518 - DNA, 25 bp, Homo sapien
cacatagcatgtaagagcagtgtgc

SEQ ID NO: 4336519 - DNA, 25 bp, Homo sapien
tgtgctagacacatcaattttcttt

SEQ ID NO: 4336520 - DNA, 25 bp, Homo sapien
tattaagcacatagcatgtaagagc

SEQ ID NO: 4336521 - DNA, 25 bp, Homo sapien
gaaactgccctccaggtgtaaacaa

SEQ ID NO: 4336522 - DNA, 25 bp, Homo sapien
caactaagaaactggctgacaaaca

SEQ ID NO: 4336523 - DNA, 25 bp, Homo sapien
gaaataacgaacactgaaactgccc

SEQ ID NO: 4336524 - DNA, 25 bp, Homo sapien
gacagaattggcacataaggacttt

SEQ ID NO: 4336525 - DNA, 25 bp, Homo sapien
agtgtctatgccgattctttgtcca

SEQ ID NO: 4336526 - DNA, 25 bp, Homo sapien
tatacctacaagctgaattgctggg

SEQ ID NO: 4336527 - DNA, 25 bp, Homo sapien
gtattcattatggtactgacttgca

SEQ ID NO: 4336528 - DNA, 25 bp, Homo sapien
gatacaaatcccttaccagacataa

SEQ ID NO: 4336529 - DNA, 25 bp, Homo sapien
taatagcaggtagcataaaatagta

SEQ ID NO: 4336530 - DNA, 25 bp, Homo sapien
gatttataaggtattacggcaagca

SEQ ID NO: 4336531 - DNA, 25 bp, Homo sapien
aaaaagttgtacaaacaagctctag

SEQ ID NO: 4336532 - DNA, 25 bp, Homo sapien
tgagatagggaattatcacagatgc

SEQ ID NO: 4336533 - DNA, 25 bp, Homo sapien
cagaattgtagcatggtgatggtga

SEQ ID NO: 4336534 - DNA, 25 bp, Homo sapien
tgcccacagaattgtagcatggtga

SEQ ID NO: 4336535 - DNA, 25 bp, Homo sapien
aattgtagcatggtgatggtgagct

SEQ ID NO: 4336536 - DNA, 25 bp, Homo sapien
ctaatatgcccacagaattgtagca

SEQ ID NO: 4336537 - DNA, 25 bp, Homo sapien
aaagccccagagacagtaggtgttg

SEQ ID NO: 4336538 - DNA, 25 bp, Homo sapien
taccacagtggtctaagctgcaaat

SEQ ID NO: 4336539 - DNA, 25 bp, Homo sapien
gagaccaggaaactacagcccattg

SEQ ID NO: 4336540 - DNA, 25 bp, Homo sapien
aagttggccaagctccgtattcaag

SEQ ID NO: 4336541 - DNA, 25 bp, Homo sapien
tagtaacagctcagccaacacacag

SEQ ID NO: 4336542 - DNA, 25 bp, Homo sapien
tattggttgtcctagtaacagctca

SEQ ID NO: 4336543 - DNA, 25 bp, Homo sapien
taccaactgatccacaccactatcc

SEQ ID NO: 4336544 - DNA, 25 bp, Homo sapien
caccactatcccctggaaatattgg

SEQ ID NO: 4336545 - DNA, 25 bp, Homo sapien
aaggctatacgatgtggctggagta

SEQ ID NO: 4336546 - DNA, 25 bp, Homo sapien
gcagttgctgaaggctatacgatgt

SEQ ID NO: 4336547 - DNA, 25 bp, Homo sapien
gctatacgatgtggctggagtaatt

SEQ ID NO: 4336548 - DNA, 25 bp, Homo sapien
tgctgaaggctatacgatgtggctg

SEQ ID NO: 4336549 - DNA, 25 bp, Homo sapien
tccaaagatcaactctggtgcccta

SEQ ID NO: 4336550 - DNA, 25 bp, Homo sapien
tgccctatagtaccgagaacagata

SEQ ID NO: 4336551 - DNA, 25 bp, Homo sapien
gaaacattgggttctcctcggacca

SEQ ID NO: 4336552 - DNA, 25 bp, Homo sapien
tactagaggtataatcagtggctcc

SEQ ID NO: 4336553 - DNA, 25 bp, Homo sapien
ccaaaggaatggatataggctaaac

SEQ ID NO: 4336554 - DNA, 25 bp, Homo sapien
tcccgatggcagattccaaaggaat

SEQ ID NO: 4336555 - DNA, 25 bp, Homo sapien
cacagagttttaatacagcagtatc

SEQ ID NO: 4336556 - DNA, 25 bp, Homo sapien
tcaggatccaacaagaggttctgcg

SEQ ID NO: 4336557 - DNA, 25 bp, Homo sapien
tgacataaatcacagggagcgtctg

SEQ ID NO: 4336558 - DNA, 25 bp, Homo sapien
cagcaccagattaagatagacctca

SEQ ID NO: 4336559 - DNA, 25 bp, Homo sapien
tagtgtctggcaactctgtatactg

SEQ ID NO: 4336560 - DNA, 25 bp, Homo sapien
ggagcgtctgtttggctcgactata

SEQ ID NO: 4336561 - DNA, 25 bp, Homo sapien
gtggccagtatcaggtaaattgaag

SEQ ID NO: 4336562 - DNA, 25 bp, Homo sapien
ggtattagaaaggtcattaacacag

SEQ ID NO: 4336563 - DNA, 25 bp, Homo sapien
gaatgagttatgtgtgatgatccta

SEQ ID NO: 4336564 - DNA, 25 bp, Homo sapien
ggtaacaagagtaatgctgaaggct

SEQ ID NO: 4336565 - DNA, 25 bp, Homo sapien
taacagaatgctcaattggtgtgaa

SEQ ID NO: 4336566 - DNA, 25 bp, Homo sapien
cacgctcgtgcatgcataaaatttg

SEQ ID NO: 4336567 - DNA, 25 bp, Homo sapien
tgatcgaaatcatgccgttgcccac

SEQ ID NO: 4336568 - DNA, 25 bp, Homo sapien
caaactcatgcaatctattgggcag

SEQ ID NO: 4336569 - DNA, 25 bp, Homo sapien
tagtatgttaaagaagcacaggagc

SEQ ID NO: 4336570 - DNA, 25 bp, Homo sapien
tatttggaccacagaggtggatccc

SEQ ID NO: 4336571 - DNA, 25 bp, Homo sapien
gctatagtttggactgtttgtcccc

SEQ ID NO: 4336572 - DNA, 25 bp, Homo sapien
aaggtatttggaccacagaggtgga

SEQ ID NO: 4336573 - DNA, 25 bp, Homo sapien
gaagataacagacaacacacttgct

SEQ ID NO: 4336574 - DNA, 25 bp, Homo sapien
tacgtcctatgctaaacactatagc

SEQ ID NO: 4336575 - DNA, 25 bp, Homo sapien
tagcatactatacagactctggagt

SEQ ID NO: 4336576 - DNA, 25 bp, Homo sapien
tgcttctggaggaatgtacgtccta

SEQ ID NO: 4336577 - DNA, 25 bp, Homo sapien
ccttgactggcgtaatactactatt

SEQ ID NO: 4336578 - DNA, 25 bp, Homo sapien
caagctggtctcgattcaaccgcca

SEQ ID NO: 4336579 - DNA, 25 bp, Homo sapien
ttagcttcaactagggcaactctgc

SEQ ID NO: 4336580 - DNA, 25 bp, Homo sapien
ttctgtaagatacttgcaactcaca

SEQ ID NO: 4336581 - DNA, 25 bp, Homo sapien
tcttcagagtcctagagttctttgg

SEQ ID NO: 4336582 - DNA, 25 bp, Homo sapien
tagtcctgccagaacaattcagaag

SEQ ID NO: 4336583 - DNA, 25 bp, Homo sapien
gaagctatcccaaaattaggaggta

SEQ ID NO: 4336584 - DNA, 25 bp, Homo sapien
gcttctgctagaaaaatgcctacca

SEQ ID NO: 4336585 - DNA, 25 bp, Homo sapien
cctgagcactcaaccctagaaaaga

SEQ ID NO: 4336586 - DNA, 25 bp, Homo sapien
ttccattccattagcaaaactgtct

SEQ ID NO: 4336587 - DNA, 25 bp, Homo sapien
cattccattagcaaaactgtctatg

SEQ ID NO: 4336588 - DNA, 25 bp, Homo sapien
cattagcaaaactgtctatgagcgg

SEQ ID NO: 4336589 - DNA, 25 bp, Homo sapien
agcaaaactgtctatgagcggtggg

SEQ ID NO: 4336590 - DNA, 25 bp, Homo sapien
ctggagtagaagaaataacgcaatc

SEQ ID NO: 4336591 - DNA, 25 bp, Homo sapien
cgcaatcggactatgttacagtgat

SEQ ID NO: 4336592 - DNA, 25 bp, Homo sapien
tagctttctcatgatctggagctct

SEQ ID NO: 4336593 - DNA, 25 bp, Homo sapien
gttacagtgatctagctttctcatg

SEQ ID NO: 4336594 - DNA, 25 bp, Homo sapien
cctccctaagtgctattattagcaa

SEQ ID NO: 4336595 - DNA, 25 bp, Homo sapien
taagtgctattattagcaataacaa

SEQ ID NO: 4336596 - DNA, 25 bp, Homo sapien
cctaagtgctattattagcaataac

SEQ ID NO: 4336597 - DNA, 25 bp, Homo sapien
gtgctattattagcaataacaatta

SEQ ID NO: 4336598 - DNA, 25 bp, Homo sapien
ttctggtccaaattcatcgaaaaca

SEQ ID NO: 4336599 - DNA, 25 bp, Homo sapien
caattctggtccaaattcatcgaaa

SEQ ID NO: 4336600 - DNA, 25 bp, Homo sapien
tggtccaaattcatcgaaaacactt

SEQ ID NO: 4336601 - DNA, 25 bp, Homo sapien
caaattcatcgaaaacactttccat

SEQ ID NO: 4336602 - DNA, 25 bp, Homo sapien
taccttcaggtattataatcgccaa

SEQ ID NO: 4336603 - DNA, 25 bp, Homo sapien
taaaccctagagttcaggaatagct

SEQ ID NO: 4336604 - DNA, 25 bp, Homo sapien
gaggcacaggcaagtacaagtacct

SEQ ID NO: 4336605 - DNA, 25 bp, Homo sapien
ctagtactgatggaaaagaggcaca

SEQ ID NO: 4336606 - DNA, 25 bp, Homo sapien
tcctttctttcttgaaagagtctcg

SEQ ID NO: 4336607 - DNA, 25 bp, Homo sapien
acaatctccactcactagaacctct

SEQ ID NO: 4336608 - DNA, 25 bp, Homo sapien
ctccatctcttgaccctgtgatcct

SEQ ID NO: 4336609 - DNA, 25 bp, Homo sapien
catctcttgaccctgtgatcctccc

SEQ ID NO: 4336610 - DNA, 25 bp, Homo sapien
gcaagtatacagattggtacagaaa

SEQ ID NO: 4336611 - DNA, 25 bp, Homo sapien
tcgccaataacattactgcctgtga

SEQ ID NO: 4336612 - DNA, 25 bp, Homo sapien
taagggatgtgaatagcaagtatac

SEQ ID NO: 4336613 - DNA, 25 bp, Homo sapien
taaaactgtctttgctcgccaataa

SEQ ID NO: 4336614 - DNA, 25 bp, Homo sapien
aactggtaagatctgccgtcccctg

SEQ ID NO: 4336615 - DNA, 25 bp, Homo sapien
ctcagaggaccagcaggactaagct

SEQ ID NO: 4336616 - DNA, 25 bp, Homo sapien
agaggctctcttgcaacccaggaag

SEQ ID NO: 4336617 - DNA, 25 bp, Homo sapien
atttggtgcccaaacccgggatgag

SEQ ID NO: 4336618 - DNA, 25 bp, Homo sapien
taaaccctatatgaaaatcagtgtc

SEQ ID NO: 4336619 - DNA, 25 bp, Homo sapien
aagctatatagcaagtctgactgag

SEQ ID NO: 4336620 - DNA, 25 bp, Homo sapien
gcaaaaccgactgaatattatcatg

SEQ ID NO: 4336621 - DNA, 25 bp, Homo sapien
tcaaaaccaacggaggaggcagtgt

SEQ ID NO: 4336622 - DNA, 25 bp, Homo sapien
ctgaatttccaacgcacagaagcac

SEQ ID NO: 4336623 - DNA, 25 bp, Homo sapien
tttaggaagccaagagggagaacca

SEQ ID NO: 4336624 - DNA, 25 bp, Homo sapien
tgttgctctacaagattacatttta

SEQ ID NO: 4336625 - DNA, 25 bp, Homo sapien
caggcatgatgattcagaccataat

SEQ ID NO: 4336626 - DNA, 25 bp, Homo sapien
cacagtacaacggtgaggacaggtc

SEQ ID NO: 4336627 - DNA, 25 bp, Homo sapien
ttgccatgtgatgcacctactcgcc

SEQ ID NO: 4336628 - DNA, 25 bp, Homo sapien
gcagtgttcctctggtctacatcaa

SEQ ID NO: 4336629 - DNA, 25 bp, Homo sapien
cagactaacacaagttgcaacatgg

SEQ ID NO: 4336630 - DNA, 25 bp, Homo sapien
tctgtatagctgacttcttgtggcc

SEQ ID NO: 4336631 - DNA, 25 bp, Homo sapien
gcaatactttcttgatggcgaccag

SEQ ID NO: 4336632 - DNA, 25 bp, Homo sapien
tgttgtcaccttgctgccgtccttg

SEQ ID NO: 4336633 - DNA, 25 bp, Homo sapien
caaagtttggcttgatataccacac

SEQ ID NO: 4336634 - DNA, 25 bp, Homo sapien
gtgtgaaccactgtatccagtctag

SEQ ID NO: 4336635 - DNA, 25 bp, Homo sapien
agtagttaacactagaggcacaaac

SEQ ID NO: 4336636 - DNA, 25 bp, Homo sapien
gaaccactgtatccagtctagaata

SEQ ID NO: 4336637 - DNA, 25 bp, Homo sapien
cccaagtagttaacactagaggcac

SEQ ID NO: 4336638 - DNA, 25 bp, Homo sapien
tctgcactccttaatccaaactgct

SEQ ID NO: 4336639 - DNA, 25 bp, Homo sapien
tgcactccttaatccaaactgcttt

SEQ ID NO: 4336640 - DNA, 25 bp, Homo sapien
tatctgcactccttaatccaaactg

SEQ ID NO: 4336641 - DNA, 25 bp, Homo sapien
gatatctgcactccttaatccaaac

SEQ ID NO: 4336642 - DNA, 25 bp, Homo sapien
actttatcaacacctttgctctcct

SEQ ID NO: 4336643 - DNA, 25 bp, Homo sapien
cataaggattgctaacccaaaacac

SEQ ID NO: 4336644 - DNA, 25 bp, Homo sapien
agcataaggattgctaacccaaaac

SEQ ID NO: 4336645 - DNA, 25 bp, Homo sapien
ccaaaacactttatcaacacctttg

SEQ ID NO: 4336646 - DNA, 25 bp, Homo sapien
ggagcctcatcataccataactaga

SEQ ID NO: 4336647 - DNA, 25 bp, Homo sapien
gctgagacagatttacctcacgaga

SEQ ID NO: 4336648 - DNA, 25 bp, Homo sapien
ttgtttacgtaagtctccaccagaa

SEQ ID NO: 4336649 - DNA, 25 bp, Homo sapien
taacttggctagagcatgactgact

SEQ ID NO: 4336650 - DNA, 25 bp, Homo sapien
caaaaccaattgaccataaaggtag

SEQ ID NO: 4336651 - DNA, 25 bp, Homo sapien
cactgcctacccaaggtcagaaaaa

SEQ ID NO: 4336652 - DNA, 25 bp, Homo sapien
aagcgccacaccgtctggattgatg

SEQ ID NO: 4336653 - DNA, 25 bp, Homo sapien
catgaatctatatccaagcgccaca

SEQ ID NO: 4336654 - DNA, 25 bp, Homo sapien
tgttatcagatggagcaagtttcct

SEQ ID NO: 4336655 - DNA, 25 bp, Homo sapien
ccagagtatcgccaattaaagtatc

SEQ ID NO: 4336656 - DNA, 25 bp, Homo sapien
cattaactatgtattagctccgggt

SEQ ID NO: 4336657 - DNA, 25 bp, Homo sapien
cctaatattaggcagaaagcatcca

SEQ ID NO: 4336658 - DNA, 25 bp, Homo sapien
tgagagatatgttcccaatgggcag

SEQ ID NO: 4336659 - DNA, 25 bp, Homo sapien
caatgtaactaggtcagattcaccc

SEQ ID NO: 4336660 - DNA, 25 bp, Homo sapien
tctggactaccagagatccgggctg

SEQ ID NO: 4336661 - DNA, 25 bp, Homo sapien
caccttgtgaggacgaacaatgaca

SEQ ID NO: 4336662 - DNA, 25 bp, Homo sapien
tatagcacagccactcagtagactg

SEQ ID NO: 4336663 - DNA, 25 bp, Homo sapien
caggacgttgggacataaaactgaa

SEQ ID NO: 4336664 - DNA, 25 bp, Homo sapien
aatcagtgggcaagcaagagaacag

SEQ ID NO: 4336665 - DNA, 25 bp, Homo sapien
aaagcactatactgggtcaggcgcg

SEQ ID NO: 4336666 - DNA, 25 bp, Homo sapien
aaggtgcaaattttcaacagggctc

SEQ ID NO: 4336667 - DNA, 25 bp, Homo sapien
taggctttctcagaccaggcacaaa

SEQ ID NO: 4336668 - DNA, 25 bp, Homo sapien
cctgtgtgggtttagcagcattaaa

SEQ ID NO: 4336669 - DNA, 25 bp, Homo sapien
agttcaataaagagggctaccccag

SEQ ID NO: 4336670 - DNA, 25 bp, Homo sapien
caaggtcagagttcgtaagtgttag

SEQ ID NO: 4336671 - DNA, 25 bp, Homo sapien
ctcaatagccgtgtgagataggtac

SEQ ID NO: 4336672 - DNA, 25 bp, Homo sapien
gatgaagaaagctcttaggtaagtc

SEQ ID NO: 4336673 - DNA, 25 bp, Homo sapien
taagtacctagtttgtaccaagcta

SEQ ID NO: 4336674 - DNA, 25 bp, Homo sapien
gtgtattttattcgtacagccagtc

SEQ ID NO: 4336675 - DNA, 25 bp, Homo sapien
tgaaatccacaacttataaagctgt

SEQ ID NO: 4336676 - DNA, 25 bp, Homo sapien
cagccacatgtcactagcggtaatt

SEQ ID NO: 4336677 - DNA, 25 bp, Homo sapien
tacaggtaataatgcttctccctca

SEQ ID NO: 4336678 - DNA, 25 bp, Homo sapien
cacatatcaggtttacttactgaat

SEQ ID NO: 4336679 - DNA, 25 bp, Homo sapien
aaagggagagaaaagttcacatatc

SEQ ID NO: 4336680 - DNA, 25 bp, Homo sapien
gcagacaataggcatggcagaggat

SEQ ID NO: 4336681 - DNA, 25 bp, Homo sapien
gaggatgagagtcaattatactata

SEQ ID NO: 4336682 - DNA, 25 bp, Homo sapien
aagtagatacatattaaacattttt

SEQ ID NO: 4336683 - DNA, 25 bp, Homo sapien
gacagtcttgctctcttgcccaggc

SEQ ID NO: 4336684 - DNA, 25 bp, Homo sapien
agtcttgctctcttgcccaggctgg

SEQ ID NO: 4336685 - DNA, 25 bp, Homo sapien
ttctttttgagacagtcttgctctc

SEQ ID NO: 4336686 - DNA, 25 bp, Homo sapien
catcagcaatagcttggtgacctgt

SEQ ID NO: 4336687 - DNA, 25 bp, Homo sapien
ggtgacctgtaaactatcataccac

SEQ ID NO: 4336688 - DNA, 25 bp, Homo sapien
tgacccaatacaaaaaggactgtgc

SEQ ID NO: 4336689 - DNA, 25 bp, Homo sapien
tctcctacggagaaacaagacacat

SEQ ID NO: 4336690 - DNA, 25 bp, Homo sapien
ctaactttcatgctgccaaaagctg

SEQ ID NO: 4336691 - DNA, 25 bp, Homo sapien
ctctccgcaaaggaggtggttctgg

SEQ ID NO: 4336692 - DNA, 25 bp, Homo sapien
accggcttgcagctctccgcaaagg

SEQ ID NO: 4336693 - DNA, 25 bp, Homo sapien
tgcagctctccgcaaaggaggtggt

SEQ ID NO: 4336694 - DNA, 25 bp, Homo sapien
atcactctcttcgcgaatcaccttt

SEQ ID NO: 4336695 - DNA, 25 bp, Homo sapien
gatcactctcttcgcgaatcacctt

SEQ ID NO: 4336696 - DNA, 25 bp, Homo sapien
cactctcttcgcgaatcaccttttc

SEQ ID NO: 4336697 - DNA, 25 bp, Homo sapien
tcactctcttcgcgaatcacctttt

SEQ ID NO: 4336698 - DNA, 25 bp, Homo sapien
gatcacgagtctcacgcttgaagag

SEQ ID NO: 4336699 - DNA, 25 bp, Homo sapien
ccttcaagacagatcggcacggata

SEQ ID NO: 4336700 - DNA, 25 bp, Homo sapien
tccgagtcaatgaagaagggaagcg

SEQ ID NO: 4336701 - DNA, 25 bp, Homo sapien
aatgcagcattaagttctcccacag

SEQ ID NO: 4336702 - DNA, 25 bp, Homo sapien
aagcccgcattcgcccgggtcagga

SEQ ID NO: 4336703 - DNA, 25 bp, Homo sapien
attcgcccgggtcaggagctgctct

SEQ ID NO: 4336704 - DNA, 25 bp, Homo sapien
gcggcggcggcacaagcccgcattc

SEQ ID NO: 4336705 - DNA, 25 bp, Homo sapien
tctgtgtgaggagcgctgtctgcgc

SEQ ID NO: 4336706 - DNA, 25 bp, Homo sapien
cttgcacttccccactcctcctccc

SEQ ID NO: 4336707 - DNA, 25 bp, Homo sapien
ctcctactcgtcctccacctccttc

SEQ ID NO: 4336708 - DNA, 25 bp, Homo sapien
ccctcctactcgtcctccacctcct

SEQ ID NO: 4336709 - DNA, 25 bp, Homo sapien
cactcctcctcccccctcctactcg

SEQ ID NO: 4336710 - DNA, 25 bp, Homo sapien
caaatcggaaagtgctgcggtcggc

SEQ ID NO: 4336711 - DNA, 25 bp, Homo sapien
tagaaagtgacgctgggaagccacg

SEQ ID NO: 4336712 - DNA, 25 bp, Homo sapien
gattggctggaaaactccgctggga

SEQ ID NO: 4336713 - DNA, 25 bp, Homo sapien
cacggacgtcgtttgtttgcggctc

SEQ ID NO: 4336714 - DNA, 25 bp, Homo sapien
aacaaagcttccagaaaggcagcgc

SEQ ID NO: 4336715 - DNA, 25 bp, Homo sapien
ctaaaatgggaacaaagcttccaga

SEQ ID NO: 4336716 - DNA, 25 bp, Homo sapien
ggaacaaagcttccagaaaggcagc

SEQ ID NO: 4336717 - DNA, 25 bp, Homo sapien
tgggaacaaagcttccagaaaggca

SEQ ID NO: 4336718 - DNA, 25 bp, Homo sapien
tagaacagtgaggtatggctacgtc

SEQ ID NO: 4336719 - DNA, 25 bp, Homo sapien
gatttcatacataagaccagcgtcc

SEQ ID NO: 4336720 - DNA, 25 bp, Homo sapien
gaaatgccgtcaggccggatatcct

SEQ ID NO: 4336721 - DNA, 25 bp, Homo sapien
tatcctgaagcctccgaggaaatgg

SEQ ID NO: 4336722 - DNA, 25 bp, Homo sapien
ggctcttgctttgaaacactgatga

SEQ ID NO: 4336723 - DNA, 25 bp, Homo sapien
ctcttgctttgaaacactgatgaag

SEQ ID NO: 4336724 - DNA, 25 bp, Homo sapien
ctggctcttgctttgaaacactgat

SEQ ID NO: 4336725 - DNA, 25 bp, Homo sapien
cttgctttgaaacactgatgaagga

SEQ ID NO: 4336726 - DNA, 25 bp, Homo sapien
gagaaaaggttatgcaatggctgaa

SEQ ID NO: 4336727 - DNA, 25 bp, Homo sapien
tcacaggataatagaggagtaaagt

SEQ ID NO: 4336728 - DNA, 25 bp, Homo sapien
tacatttggatcaagattggaaagg

SEQ ID NO: 4336729 - DNA, 25 bp, Homo sapien
tattaactccatattaggcagccag

SEQ ID NO: 4336730 - DNA, 25 bp, Homo sapien
cgcaaggttcttatttgtgttacca

SEQ ID NO: 4336731 - DNA, 25 bp, Homo sapien
catttccgcaaggttcttatttgtg

SEQ ID NO: 4336732 - DNA, 25 bp, Homo sapien
ttccgcaaggttcttatttgtgtta

SEQ ID NO: 4336733 - DNA, 25 bp, Homo sapien
gcaaggttcttatttgtgttaccat

SEQ ID NO: 4336734 - DNA, 25 bp, Homo sapien
gacattccactatgttcttgggata

SEQ ID NO: 4336735 - DNA, 25 bp, Homo sapien
tagctcaactttaccacattgatga

SEQ ID NO: 4336736 - DNA, 25 bp, Homo sapien
ttttctagctcaactttaccacatt

SEQ ID NO: 4336737 - DNA, 25 bp, Homo sapien
gaaaaagtattgagcagccacaggt

SEQ ID NO: 4336738 - DNA, 25 bp, Homo sapien
caaccttcctagtagccagaattac

SEQ ID NO: 4336739 - DNA, 25 bp, Homo sapien
tcggttcgcctctacttaggcaacc

SEQ ID NO: 4336740 - DNA, 25 bp, Homo sapien
cctgggtcggttcgcctctacttag

SEQ ID NO: 4336741 - DNA, 25 bp, Homo sapien
tcaaccttcctagtagccagaatta

SEQ ID NO: 4336742 - DNA, 25 bp, Homo sapien
ctcctcagggagatgcttcacgtca

SEQ ID NO: 4336743 - DNA, 25 bp, Homo sapien
tcagggagatgcttcacgtcatcca

SEQ ID NO: 4336744 - DNA, 25 bp, Homo sapien
acgtcatccacagcttcactctcct

SEQ ID NO: 4336745 - DNA, 25 bp, Homo sapien
gactcctcagggagatgcttcacgt

SEQ ID NO: 4336746 - DNA, 25 bp, Homo sapien
agtgtgatcagtggagtgcaggacc

SEQ ID NO: 4336747 - DNA, 25 bp, Homo sapien
ccacattcagtcaggagacagtcag

SEQ ID NO: 4336748 - DNA, 25 bp, Homo sapien
tgtgatcagtggagtgcaggacctc

SEQ ID NO: 4336749 - DNA, 25 bp, Homo sapien
acattcagtcaggagacagtcagtg

SEQ ID NO: 4336750 - DNA, 25 bp, Homo sapien
ctttcttggtgctatgcctatgttc

SEQ ID NO: 4336751 - DNA, 25 bp, Homo sapien
tccctatgagcacttgcatttccag

SEQ ID NO: 4336752 - DNA, 25 bp, Homo sapien
ttcttggtgctatgcctatgttcat

SEQ ID NO: 4336753 - DNA, 25 bp, Homo sapien
ctcccactgtttccctatgagcact

SEQ ID NO: 4336754 - DNA, 25 bp, Homo sapien
atcctcataactctgccttccaagt

SEQ ID NO: 4336755 - DNA, 25 bp, Homo sapien
aggtgatcctcataactctgccttc

SEQ ID NO: 4336756 - DNA, 25 bp, Homo sapien
tatagatgtgagcctgcatgcctgg

SEQ ID NO: 4336757 - DNA, 25 bp, Homo sapien
tgcctggctaacttctcattgtttg

SEQ ID NO: 4336758 - DNA, 25 bp, Homo sapien
gaaatccacccatctagcatttgtt

SEQ ID NO: 4336759 - DNA, 25 bp, Homo sapien
cagtggaaccagatgcgtgtttttc

SEQ ID NO: 4336760 - DNA, 25 bp, Homo sapien
ggctactctagaggagaaaaacgat

SEQ ID NO: 4336761 - DNA, 25 bp, Homo sapien
tcatgctgttaactcaccggaaggc

SEQ ID NO: 4336762 - DNA, 25 bp, Homo sapien
aggagggcctcatggttcagtgcct

SEQ ID NO: 4336763 - DNA, 25 bp, Homo sapien
gaaattcctgtttaaaagtagatga

SEQ ID NO: 4336764 - DNA, 25 bp, Homo sapien
gattccatgataaattgatgataca

SEQ ID NO: 4336765 - DNA, 25 bp, Homo sapien
gtcagcagcccccaagattccatga

SEQ ID NO: 4336766 - DNA, 25 bp, Homo sapien
tgagaatatttaataaggcctgaat

SEQ ID NO: 4336767 - DNA, 25 bp, Homo sapien
aatatttaataaggcctgaattcct

SEQ ID NO: 4336768 - DNA, 25 bp, Homo sapien
gaatatttaataaggcctgaattcc

SEQ ID NO: 4336769 - DNA, 25 bp, Homo sapien
gagaatatttaataaggcctgaatt

SEQ ID NO: 4336770 - DNA, 25 bp, Homo sapien
caggggacagcctggacatgacagc

SEQ ID NO: 4336771 - DNA, 25 bp, Homo sapien
gatgtatacacaggactcggggcag

SEQ ID NO: 4336772 - DNA, 25 bp, Homo sapien
gctcagcaataagcacagtggaccc

SEQ ID NO: 4336773 - DNA, 25 bp, Homo sapien
gtggctgagttcctcgcactcatcc

SEQ ID NO: 4336774 - DNA, 25 bp, Homo sapien
ccaatggaaccaaaagcactcttga

SEQ ID NO: 4336775 - DNA, 25 bp, Homo sapien
tgatattgccaagtactatgctgga

SEQ ID NO: 4336776 - DNA, 25 bp, Homo sapien
gtctgttggtagtcatgtaacccca

SEQ ID NO: 4336777 - DNA, 25 bp, Homo sapien
cagtgtgatgttgcgggaaactacc

SEQ ID NO: 4336778 - DNA, 25 bp, Homo sapien
tgtgcctccccgcagtacaaaactg

SEQ ID NO: 4336779 - DNA, 25 bp, Homo sapien
caaaactgcatcagtgggtgaatcg

SEQ ID NO: 4336780 - DNA, 25 bp, Homo sapien
ctgcatcagtgggtgaatcgaggat

SEQ ID NO: 4336781 - DNA, 25 bp, Homo sapien
acctcaggtacatccgatcccaggg

SEQ ID NO: 4336782 - DNA, 25 bp, Homo sapien
taggtctgtccaccaaaaggccagt

SEQ ID NO: 4336783 - DNA, 25 bp, Homo sapien
ccagtttgatgggtcacagtccaca

SEQ ID NO: 4336784 - DNA, 25 bp, Homo sapien
tatgggctggtcaaatgcagggcac

SEQ ID NO: 4336785 - DNA, 25 bp, Homo sapien
ggtagtaacaggacaggcaatgcct

SEQ ID NO: 4336786 - DNA, 25 bp, Homo sapien
agatttcacagtagggccggtggca

SEQ ID NO: 4336787 - DNA, 25 bp, Homo sapien
tcacaataggcttggagcgggccca

SEQ ID NO: 4336788 - DNA, 25 bp, Homo sapien
gtctgatgtgccactgtcactagag

SEQ ID NO: 4336789 - DNA, 25 bp, Homo sapien
cactgtcactagagtcagaagagct

SEQ ID NO: 4336790 - DNA, 25 bp, Homo sapien
gaaggtcttcgtactctggaatcag

SEQ ID NO: 4336791 - DNA, 25 bp, Homo sapien
ggaacagtcctgtttgcccgatgcc

SEQ ID NO: 4336792 - DNA, 25 bp, Homo sapien
ggctaaagccgagctccttggagag

SEQ ID NO: 4336793 - DNA, 25 bp, Homo sapien
tgaaggcagcactgttcttccaggt

SEQ ID NO: 4336794 - DNA, 25 bp, Homo sapien
agtttctccctgattactgaactaa

SEQ ID NO: 4336795 - DNA, 25 bp, Homo sapien
gtttctccctgattactgaactaac

SEQ ID NO: 4336796 - DNA, 25 bp, Homo sapien
aggcccagatcttgtaagacctcct

SEQ ID NO: 4336797 - DNA, 25 bp, Homo sapien
cagatcttgtaagacctcctgaagt

SEQ ID NO: 4336798 - DNA, 25 bp, Homo sapien
tgagccgcctctttctggtaggaga

SEQ ID NO: 4336799 - DNA, 25 bp, Homo sapien
ctctgggaggtcataggtgcactca

SEQ ID NO: 4336800 - DNA, 25 bp, Homo sapien
aagtcagagaggtgacccgaaggcc

SEQ ID NO: 4336801 - DNA, 25 bp, Homo sapien
catggcttctggctacaacctgagt

SEQ ID NO: 4336802 - DNA, 25 bp, Homo sapien
tctctttggcgttgtttacttgttc

SEQ ID NO: 4336803 - DNA, 25 bp, Homo sapien
tcctgcaggctttcaatcacagcat

SEQ ID NO: 4336804 - DNA, 25 bp, Homo sapien
ctgcaggctttcaatcacagcattt

SEQ ID NO: 4336805 - DNA, 25 bp, Homo sapien
gcgttgtttacttgttcctgcaggc

SEQ ID NO: 4336806 - DNA, 25 bp, Homo sapien
tcaacaaaagatgccgccgagggtt

SEQ ID NO: 4336807 - DNA, 25 bp, Homo sapien
ccgagggttccatagtgcccaccat

SEQ ID NO: 4336808 - DNA, 25 bp, Homo sapien
aaaccatcaacaaaagatgccgccg

SEQ ID NO: 4336809 - DNA, 25 bp, Homo sapien
aagatgccgccgagggttccatagt

SEQ ID NO: 4336810 - DNA, 25 bp, Homo sapien
tcagtgatagatgtgatagatgctg

SEQ ID NO: 4336811 - DNA, 25 bp, Homo sapien
agatgctgtccgaaacagcttctgg

SEQ ID NO: 4336812 - DNA, 25 bp, Homo sapien
agtgatagatgtgatagatgctgtc

SEQ ID NO: 4336813 - DNA, 25 bp, Homo sapien
tgctgtccgaaacagcttctggggg

SEQ ID NO: 4336814 - DNA, 25 bp, Homo sapien
gagattccaggtgtagcgtgcactg

SEQ ID NO: 4336815 - DNA, 25 bp, Homo sapien
tgccaccgggccctaggactggccg

SEQ ID NO: 4336816 - DNA, 25 bp, Homo sapien
ggccctaggactggccgcttgttct

SEQ ID NO: 4336817 - DNA, 25 bp, Homo sapien
agagattccaggtgtagcgtgcact

SEQ ID NO: 4336818 - DNA, 25 bp, Homo sapien
cacttgtgcacctgtgcccattgaa

SEQ ID NO: 4336819 - DNA, 25 bp, Homo sapien
acttgtgcacctgtgcccattgaag

SEQ ID NO: 4336820 - DNA, 25 bp, Homo sapien
tttttggatatagcagattgagtcc

SEQ ID NO: 4336821 - DNA, 25 bp, Homo sapien
ggcagaagtacaaacagcacgttgc

SEQ ID NO: 4336822 - DNA, 25 bp, Homo sapien
gaagtacaaacagcacgttgcaaat

SEQ ID NO: 4336823 - DNA, 25 bp, Homo sapien
gtacaaacagcacgttgcaaattac

SEQ ID NO: 4336824 - DNA, 25 bp, Homo sapien
cagaagtacaaacagcacgttgcaa

SEQ ID NO: 4336825 - DNA, 25 bp, Homo sapien
agagtcagtccacttggctgttcca

SEQ ID NO: 4336826 - DNA, 25 bp, Homo sapien
agtcagtccacttggctgttccagc

SEQ ID NO: 4336827 - DNA, 25 bp, Homo sapien
aagagtcagtccacttggctgttcc

SEQ ID NO: 4336828 - DNA, 25 bp, Homo sapien
gagtcagtccacttggctgttccag

SEQ ID NO: 4336829 - DNA, 25 bp, Homo sapien
gggctgattgagatctgtagccagt

SEQ ID NO: 4336830 - DNA, 25 bp, Homo sapien
gctgattgagatctgtagccagtac

SEQ ID NO: 4336831 - DNA, 25 bp, Homo sapien
ggctgattgagatctgtagccagta

SEQ ID NO: 4336832 - DNA, 25 bp, Homo sapien
aaatatttggccatgcgtctgattg

SEQ ID NO: 4336833 - DNA, 25 bp, Homo sapien
tttctctcccctcgggtggcagttc

SEQ ID NO: 4336834 - DNA, 25 bp, Homo sapien
tcctcaccatactgggtatggaagc

SEQ ID NO: 4336835 - DNA, 25 bp, Homo sapien
gcttttgttgggagtgctgaaatat

SEQ ID NO: 4336836 - DNA, 25 bp, Homo sapien
tatctggtgactacaaaaagcagcc

SEQ ID NO: 4336837 - DNA, 25 bp, Homo sapien
tgaagcagttgattgtagttgtaca

SEQ ID NO: 4336838 - DNA, 25 bp, Homo sapien
acaaagatccctccagatgtgagtc

SEQ ID NO: 4336839 - DNA, 25 bp, Homo sapien
agtccaaagaccaggttgggccagg

SEQ ID NO: 4336840 - DNA, 25 bp, Homo sapien
caggtaggcaccatacagcaggagc

SEQ ID NO: 4336841 - DNA, 25 bp, Homo sapien
agctgacatggccagtcaggccagc

SEQ ID NO: 4336842 - DNA, 25 bp, Homo sapien
ggccagtcaggccagccaggtaggc

SEQ ID NO: 4336843 - DNA, 25 bp, Homo sapien
gatggttaaggactgattcacagga

SEQ ID NO: 4336844 - DNA, 25 bp, Homo sapien
tcctcctgaggagcttctcactgac

SEQ ID NO: 4336845 - DNA, 25 bp, Homo sapien
tggccttaactgctgagaagtgtgg

SEQ ID NO: 4336846 - DNA, 25 bp, Homo sapien
caagtgtctatacattcctggctgg

SEQ ID NO: 4336847 - DNA, 25 bp, Homo sapien
gatccttgcatatcactggccttaa

SEQ ID NO: 4336848 - DNA, 25 bp, Homo sapien
cagggagtctatggggtctggctca

SEQ ID NO: 4336849 - DNA, 25 bp, Homo sapien
gggtctggctcagtaagtttcctga

SEQ ID NO: 4336850 - DNA, 25 bp, Homo sapien
tggggtctggctcagtaagtttcct

SEQ ID NO: 4336851 - DNA, 25 bp, Homo sapien
ggggtctggctcagtaagtttcctg

SEQ ID NO: 4336852 - DNA, 25 bp, Homo sapien
agtgcaggacacgtctttccctgtc

SEQ ID NO: 4336853 - DNA, 25 bp, Homo sapien
cttgcatccccaaatgagagcaatc

SEQ ID NO: 4336854 - DNA, 25 bp, Homo sapien
gcaatccaaacatcggaataccggg

SEQ ID NO: 4336855 - DNA, 25 bp, Homo sapien
cagaagtgggtgctggtcgaagtgc

SEQ ID NO: 4336856 - DNA, 25 bp, Homo sapien
tgagcaggatcacatcagccatcaa

SEQ ID NO: 4336857 - DNA, 25 bp, Homo sapien
cacccacgtcatgagcaggatcaca

SEQ ID NO: 4336858 - DNA, 25 bp, Homo sapien
cacgtcatgagcaggatcacatcag

SEQ ID NO: 4336859 - DNA, 25 bp, Homo sapien
tcagcacccacgtcatgagcaggat

SEQ ID NO: 4336860 - DNA, 25 bp, Homo sapien
caaaagagtcaaggtcaaaacttct

SEQ ID NO: 4336861 - DNA, 25 bp, Homo sapien
tgcaaaagagtcaaggtcaaaactt

SEQ ID NO: 4336862 - DNA, 25 bp, Homo sapien
ctgcaaaagagtcaaggtcaaaact

SEQ ID NO: 4336863 - DNA, 25 bp, Homo sapien
gcaaaagagtcaaggtcaaaacttc

SEQ ID NO: 4336864 - DNA, 25 bp, Homo sapien
acaacagtctctgggtatcttgttc

SEQ ID NO: 4336865 - DNA, 25 bp, Homo sapien
gctatagtttctctgtaatcactct

SEQ ID NO: 4336866 - DNA, 25 bp, Homo sapien
ccaggtattggccagctcacatgtc

SEQ ID NO: 4336867 - DNA, 25 bp, Homo sapien
tcccttcacttccagctcgcacctg

SEQ ID NO: 4336868 - DNA, 25 bp, Homo sapien
taaacaccttgtagagtcgccagct

SEQ ID NO: 4336869 - DNA, 25 bp, Homo sapien
cactctcttgtccgggaccctttgg

SEQ ID NO: 4336870 - DNA, 25 bp, Homo sapien
caagggaggtcccaatgcacagcat

SEQ ID NO: 4336871 - DNA, 25 bp, Homo sapien
ttgggtaaacaccttgtagagtcgc

SEQ ID NO: 4336872 - DNA, 25 bp, Homo sapien
tgggattccctcgaaaagtgcccac

SEQ ID NO: 4336873 - DNA, 25 bp, Homo sapien
caagtgttctgggattccctcgaaa

SEQ ID NO: 4336874 - DNA, 25 bp, Homo sapien
cgaggtacagagtgaacctcaccaa

SEQ ID NO: 4336875 - DNA, 25 bp, Homo sapien
tgttctgggattccctcgaaaagtg

SEQ ID NO: 4336876 - DNA, 25 bp, Homo sapien
tgaatcccaaagaggtaagcgctac

SEQ ID NO: 4336877 - DNA, 25 bp, Homo sapien
acaactgcccagtaaggtcacaatg

SEQ ID NO: 4336878 - DNA, 25 bp, Homo sapien
gagctccccactaaaacatcctgaa

SEQ ID NO: 4336879 - DNA, 25 bp, Homo sapien
taagcgctactgtaagtgagacaac

SEQ ID NO: 4336880 - DNA, 25 bp, Homo sapien
ataatctccagtgcagccttggagt

SEQ ID NO: 4336881 - DNA, 25 bp, Homo sapien
agcataatctccagtgcagccttgg

SEQ ID NO: 4336882 - DNA, 25 bp, Homo sapien
agccttggagtgaaggaccactggg

SEQ ID NO: 4336883 - DNA, 25 bp, Homo sapien
cagccttggagtgaaggaccactgg

SEQ ID NO: 4336884 - DNA, 25 bp, Homo sapien
gtaagaacagtgctaaccagcagct

SEQ ID NO: 4336885 - DNA, 25 bp, Homo sapien
tacattagagagaccagtgctgaca

SEQ ID NO: 4336886 - DNA, 25 bp, Homo sapien
catgtataaacaacaagcttctgtg

SEQ ID NO: 4336887 - DNA, 25 bp, Homo sapien
cagattgtggacttatggagagtga

SEQ ID NO: 4336888 - DNA, 25 bp, Homo sapien
aggactcacagaaacaagagcatgt

SEQ ID NO: 4336889 - DNA, 25 bp, Homo sapien
ggtgccatcctctatgtccctaaaa

SEQ ID NO: 4336890 - DNA, 25 bp, Homo sapien
tggatgatgccctcagtctaggttt

SEQ ID NO: 4336891 - DNA, 25 bp, Homo sapien
tcacaggactcacagaaacaagagc

SEQ ID NO: 4336892 - DNA, 25 bp, Homo sapien
aggcccacagctgctgaagttgcac

SEQ ID NO: 4336893 - DNA, 25 bp, Homo sapien
tcaggcccacagctgctgaagttgc

SEQ ID NO: 4336894 - DNA, 25 bp, Homo sapien
caggcccacagctgctgaagttgca

SEQ ID NO: 4336895 - DNA, 25 bp, Homo sapien
gtagtgctggtaggccaagaatttt

SEQ ID NO: 4336896 - DNA, 25 bp, Homo sapien
tagtttctaacgtcctgtagtagtg

SEQ ID NO: 4336897 - DNA, 25 bp, Homo sapien
taacgtcctgtagtagtgctggtag

SEQ ID NO: 4336898 - DNA, 25 bp, Homo sapien
tcctgtagtagtgctggtaggccaa

SEQ ID NO: 4336899 - DNA, 25 bp, Homo sapien
gaactccagactgaattcttgctac

SEQ ID NO: 4336900 - DNA, 25 bp, Homo sapien
tatagccggcagtgtcaacaagagg

SEQ ID NO: 4336901 - DNA, 25 bp, Homo sapien
tcttgctacaatcagctttgggttc

SEQ ID NO: 4336902 - DNA, 25 bp, Homo sapien
gatgcctctcggatttatctactga

SEQ ID NO: 4336903 - DNA, 25 bp, Homo sapien
tggcagattcccaacattgaaaggg

SEQ ID NO: 4336904 - DNA, 25 bp, Homo sapien
tgaggctgcagggatatctacgtag

SEQ ID NO: 4336905 - DNA, 25 bp, Homo sapien
cggtatcaatatccccacgggttga

SEQ ID NO: 4336906 - DNA, 25 bp, Homo sapien
cacgggttgaatttgatgaggctgc

SEQ ID NO: 4336907 - DNA, 25 bp, Homo sapien
taggccagttaatttgttcattcgg

SEQ ID NO: 4336908 - DNA, 25 bp, Homo sapien
attctaggccagttaatttgttcat

SEQ ID NO: 4336909 - DNA, 25 bp, Homo sapien
cagtgcgcagtccaggcacaatgga

SEQ ID NO: 4336910 - DNA, 25 bp, Homo sapien
ttgttcattcgggaaacagtgcgca

SEQ ID NO: 4336911 - DNA, 25 bp, Homo sapien
ttctgctgacccactcgtactccat

SEQ ID NO: 4336912 - DNA, 25 bp, Homo sapien
cattaacttctgctgacccactcgt

SEQ ID NO: 4336913 - DNA, 25 bp, Homo sapien
taacttctgctgacccactcgtact

SEQ ID NO: 4336914 - DNA, 25 bp, Homo sapien
tcattaacttctgctgacccactcg

SEQ ID NO: 4336915 - DNA, 25 bp, Homo sapien
ctggcagccagtactcaagaaagac

SEQ ID NO: 4336916 - DNA, 25 bp, Homo sapien
ggcagccagtactcaagaaagacct

SEQ ID NO: 4336917 - DNA, 25 bp, Homo sapien
cagccagtactcaagaaagacctca

SEQ ID NO: 4336918 - DNA, 25 bp, Homo sapien
ccagtactcaagaaagacctcattc

SEQ ID NO: 4336919 - DNA, 25 bp, Homo sapien
ggcccagaatatgatatatcttggt

SEQ ID NO: 4336920 - DNA, 25 bp, Homo sapien
cttggtcaccacacagggtaaggct

SEQ ID NO: 4336921 - DNA, 25 bp, Homo sapien
tgagtgtcaaatccacaggcaatgg

SEQ ID NO: 4336922 - DNA, 25 bp, Homo sapien
cacaggcaatggagcacgacatgct

SEQ ID NO: 4336923 - DNA, 25 bp, Homo sapien
taatttctgattgtgggctccatct

SEQ ID NO: 4336924 - DNA, 25 bp, Homo sapien
cttctcatgaggcaccctgggacgg

SEQ ID NO: 4336925 - DNA, 25 bp, Homo sapien
tgagaaaagtccaaacaatacccaa

SEQ ID NO: 4336926 - DNA, 25 bp, Homo sapien
tgaagagatggtcttactgctgtgg

SEQ ID NO: 4336927 - DNA, 25 bp, Homo sapien
tcctgcagtgaattgtaaaggcaag

SEQ ID NO: 4336928 - DNA, 25 bp, Homo sapien
cacagctgagaaaagtccaaacaat

SEQ ID NO: 4336929 - DNA, 25 bp, Homo sapien
gagcagccctggcatcctgtggctg

SEQ ID NO: 4336930 - DNA, 25 bp, Homo sapien
agcagccctggcatcctgtggctgc

SEQ ID NO: 4336931 - DNA, 25 bp, Homo sapien
ctgagcagccctggcatcctgtggc

SEQ ID NO: 4336932 - DNA, 25 bp, Homo sapien
atctgagcagccctggcatcctgtg

SEQ ID NO: 4336933 - DNA, 25 bp, Homo sapien
gatcatgaaggggtctccgatccag

SEQ ID NO: 4336934 - DNA, 25 bp, Homo sapien
tgcagagatcatgaaggggtctccg

SEQ ID NO: 4336935 - DNA, 25 bp, Homo sapien
gaaggggtctccgatccagctcctg

SEQ ID NO: 4336936 - DNA, 25 bp, Homo sapien
tcatgaaggggtctccgatccagct

SEQ ID NO: 4336937 - DNA, 25 bp, Homo sapien
acatgcccctgttggtgtgtgctta

SEQ ID NO: 4336938 - DNA, 25 bp, Homo sapien
gcttattcacagtcttggttaccca

SEQ ID NO: 4336939 - DNA, 25 bp, Homo sapien
ggtgtgtgcttattcacagtcttgg

SEQ ID NO: 4336940 - DNA, 25 bp, Homo sapien
ccctgttggtgtgtgcttattcaca

SEQ ID NO: 4336941 - DNA, 25 bp, Homo sapien
atccagagtgaacaacccattcagg

SEQ ID NO: 4336942 - DNA, 25 bp, Homo sapien
agacatccttcaactggtgaccctc

SEQ ID NO: 4336943 - DNA, 25 bp, Homo sapien
gatctttgactaagacacaagagca

SEQ ID NO: 4336944 - DNA, 25 bp, Homo sapien
gcaaagggttatttcgctaggctcc

SEQ ID NO: 4336945 - DNA, 25 bp, Homo sapien
tcaggctacacaaggtgatgattct

SEQ ID NO: 4336946 - DNA, 25 bp, Homo sapien
ggacatcttagtaaccatcaggcta

SEQ ID NO: 4336947 - DNA, 25 bp, Homo sapien
cctgctgcgagtgcatgccatgtga

SEQ ID NO: 4336948 - DNA, 25 bp, Homo sapien
caccagatggcagtcactgttcgag

SEQ ID NO: 4336949 - DNA, 25 bp, Homo sapien
tcatcagcgtcggaccgccgagaag

SEQ ID NO: 4336950 - DNA, 25 bp, Homo sapien
gtcggaccgccgagaagcgccaagc

SEQ ID NO: 4336951 - DNA, 25 bp, Homo sapien
cgctgctatgtgcaggacgcccacg

SEQ ID NO: 4336952 - DNA, 25 bp, Homo sapien
gagaagcgccaagcccgctgctatg

SEQ ID NO: 4336953 - DNA, 25 bp, Homo sapien
gctcctcggatctttctccttgcgt

SEQ ID NO: 4336954 - DNA, 25 bp, Homo sapien
tcggatctttctccttgcgtcgccg

SEQ ID NO: 4336955 - DNA, 25 bp, Homo sapien
tttctccttgcgtcgccgccgagtc

SEQ ID NO: 4336956 - DNA, 25 bp, Homo sapien
tccagctcctcggatctttctcctt

SEQ ID NO: 4336957 - DNA, 25 bp, Homo sapien
ttacaactgcgcagaggaaatcttt

SEQ ID NO: 4336958 - DNA, 25 bp, Homo sapien
ttacacattgtgatacccaaagact

SEQ ID NO: 4336959 - DNA, 25 bp, Homo sapien
gccaggtccgcagaccccactgtga

SEQ ID NO: 4336960 - DNA, 25 bp, Homo sapien
tgtgacaagacagtggctacattct

SEQ ID NO: 4336961 - DNA, 25 bp, Homo sapien
gatctctcattctacacagaaggac

SEQ ID NO: 4336962 - DNA, 25 bp, Homo sapien
gaccctttcatttggaacgtgcaga

SEQ ID NO: 4336963 - DNA, 25 bp, Homo sapien
cattctacacagaaggaccctttca

SEQ ID NO: 4336964 - DNA, 25 bp, Homo sapien
aacgtgcagaaactgaggaggacca

SEQ ID NO: 4336965 - DNA, 25 bp, Homo sapien
gaaagaatgactgggagaccttcag

SEQ ID NO: 4336966 - DNA, 25 bp, Homo sapien
tgtgcttaatgccacctaactggac

SEQ ID NO: 4336967 - DNA, 25 bp, Homo sapien
gaaaaagtaaataggttgcacacca

SEQ ID NO: 4336968 - DNA, 25 bp, Homo sapien
aattgctagaaggatccacaagaaa

SEQ ID NO: 4336969 - DNA, 25 bp, Homo sapien
ctggccgtgagcgagcaccggctca

SEQ ID NO: 4336970 - DNA, 25 bp, Homo sapien
gagtgacaggagaagcgcagaccct

SEQ ID NO: 4336971 - DNA, 25 bp, Homo sapien
cctggagcggcgtcctcgagtgaca

SEQ ID NO: 4336972 - DNA, 25 bp, Homo sapien
gaccctactgtgactccactataaa

SEQ ID NO: 4336973 - DNA, 25 bp, Homo sapien
gcctacgtgaaccaaggcgagaacc

SEQ ID NO: 4336974 - DNA, 25 bp, Homo sapien
aagcctacgtgaaccaaggcgagaa

SEQ ID NO: 4336975 - DNA, 25 bp, Homo sapien
caagcctacgtgaaccaaggcgaga

SEQ ID NO: 4336976 - DNA, 25 bp, Homo sapien
gccaagcctacgtgaaccaaggcga

SEQ ID NO: 4336977 - DNA, 25 bp, Homo sapien
tctccccctgcgagatgtgcgtgcg

SEQ ID NO: 4336978 - DNA, 25 bp, Homo sapien
ggcttcgcgggctgcacgctgtttc

SEQ ID NO: 4336979 - DNA, 25 bp, Homo sapien
gtgcgtgcgcatgctcctgtactct

SEQ ID NO: 4336980 - DNA, 25 bp, Homo sapien
tccacttcactaaccgagactgctg

SEQ ID NO: 4336981 - DNA, 25 bp, Homo sapien
gatcaaggacaatggcttcgccggc

SEQ ID NO: 4336982 - DNA, 25 bp, Homo sapien
tacaaagtgttgtgcgagatccgcg

SEQ ID NO: 4336983 - DNA, 25 bp, Homo sapien
tcctcaacggcatacggcaagtcat

SEQ ID NO: 4336984 - DNA, 25 bp, Homo sapien
tgtgctgctgttgcggaactcgcgc

SEQ ID NO: 4336985 - DNA, 25 bp, Homo sapien
gtcctgaggcttccaaggacggtcc

SEQ ID NO: 4336986 - DNA, 25 bp, Homo sapien
gaggatggcgtcctgaggcttccaa

SEQ ID NO: 4336987 - DNA, 25 bp, Homo sapien
cttccaaggacggtcctcacccctg

SEQ ID NO: 4336988 - DNA, 25 bp, Homo sapien
aggatggcgtcctgaggcttccaag

SEQ ID NO: 4336989 - DNA, 25 bp, Homo sapien
ttagcttttgtctttatacattctt

SEQ ID NO: 4336990 - DNA, 25 bp, Homo sapien
tttagcttttgtctttatacattct

SEQ ID NO: 4336991 - DNA, 25 bp, Homo sapien
cactgtgtcatttggattttggtaa

SEQ ID NO: 4336992 - DNA, 25 bp, Homo sapien
cattttcttctgagtaatttccact

SEQ ID NO: 4336993 - DNA, 25 bp, Homo sapien
tgtgcccggctctctttctaatttt

SEQ ID NO: 4336994 - DNA, 25 bp, Homo sapien
gggtggactgaaactcttgacctcg

SEQ ID NO: 4336995 - DNA, 25 bp, Homo sapien
gagaaaagctcccttgtgcagaggg

SEQ ID NO: 4336996 - DNA, 25 bp, Homo sapien
caaggaaacggactaagaaggagtg

SEQ ID NO: 4336997 - DNA, 25 bp, Homo sapien
tgtatagcatctgaagaggctggcc

SEQ ID NO: 4336998 - DNA, 25 bp, Homo sapien
caagatgcggctggttttacggatg

SEQ ID NO: 4336999 - DNA, 25 bp, Homo sapien
tttatccattgcatctagaacagag

SEQ ID NO: 4337000 - DNA, 25 bp, Homo sapien
tattcaatgatgtaacaagtaatca

SEQ ID NO: 4337001 - DNA, 25 bp, Homo sapien
gcatctagaacagagtcaatgttag

SEQ ID NO: 4337002 - DNA, 25 bp, Homo sapien
gaacagagtcaatgttagtacatat

SEQ ID NO: 4337003 - DNA, 25 bp, Homo sapien
cattatagagactttaatatagaac

SEQ ID NO: 4337004 - DNA, 25 bp, Homo sapien
acattatagagactttaatatagaa

SEQ ID NO: 4337005 - DNA, 25 bp, Homo sapien
aacattatagagactttaatataga

SEQ ID NO: 4337006 - DNA, 25 bp, Homo sapien
tagcctgaggaccatagccagctgg

SEQ ID NO: 4337007 - DNA, 25 bp, Homo sapien
tactagaatactgaggaccgtagcc

SEQ ID NO: 4337008 - DNA, 25 bp, Homo sapien
gactatgggtgtgcgtcacaacgcc

SEQ ID NO: 4337009 - DNA, 25 bp, Homo sapien
tacttgctggcccttaattacggag

SEQ ID NO: 4337010 - DNA, 25 bp, Homo sapien
aaataatctaaacatgggactggac

SEQ ID NO: 4337011 - DNA, 25 bp, Homo sapien
tactcatgacttattgcagaactgc

SEQ ID NO: 4337012 - DNA, 25 bp, Homo sapien
taaacccaagggcaactctggcaat

SEQ ID NO: 4337013 - DNA, 25 bp, Homo sapien
ttaagagggccatgagatcggatat

SEQ ID NO: 4337014 - DNA, 25 bp, Homo sapien
ttctggtgaacacaagtagtgcatc

SEQ ID NO: 4337015 - DNA, 25 bp, Homo sapien
gaggcgatacttcccacagaagtcc

SEQ ID NO: 4337016 - DNA, 25 bp, Homo sapien
taatttgtctgacacagcagtcaaa

SEQ ID NO: 4337017 - DNA, 25 bp, Homo sapien
tgcattctgcgtgcagcaacactag

SEQ ID NO: 4337018 - DNA, 25 bp, Homo sapien
gatcacaactcatgggacccttgaa

SEQ ID NO: 4337019 - DNA, 25 bp, Homo sapien
cctcttgcctcgaatggcgtgaacc

SEQ ID NO: 4337020 - DNA, 25 bp, Homo sapien
gtgacatgatcacaactcatgggac

SEQ ID NO: 4337021 - DNA, 25 bp, Homo sapien
atcctcttgcctcgaatggcgtgaa

SEQ ID NO: 4337022 - DNA, 25 bp, Homo sapien
gatctctcgaggcagatatgtcagc

SEQ ID NO: 4337023 - DNA, 25 bp, Homo sapien
atggtccgtgcagctaattccagga

SEQ ID NO: 4337024 - DNA, 25 bp, Homo sapien
caatggatttcctcgtaaactcaac

SEQ ID NO: 4337025 - DNA, 25 bp, Homo sapien
ggctgaacccaagtatctaagaaga

SEQ ID NO: 4337026 - DNA, 25 bp, Homo sapien
taatgaaatttcctccaagatataa

SEQ ID NO: 4337027 - DNA, 25 bp, Homo sapien
gcagatttcctaattctggtgggat

SEQ ID NO: 4337028 - DNA, 25 bp, Homo sapien
tggattttgttgtcacataatacca

SEQ ID NO: 4337029 - DNA, 25 bp, Homo sapien
tgtgaaagttgaggaggtatgcttt

SEQ ID NO: 4337030 - DNA, 25 bp, Homo sapien
tgcctcacgagttaggtcaagcaat

SEQ ID NO: 4337031 - DNA, 25 bp, Homo sapien
tttgccctgaaatctatgtcctctg

SEQ ID NO: 4337032 - DNA, 25 bp, Homo sapien
gatacattcaagctcatgactgcta

SEQ ID NO: 4337033 - DNA, 25 bp, Homo sapien
tacagaagttatactacagatacat

SEQ ID NO: 4337034 - DNA, 25 bp, Homo sapien
cagtataaaaatttggatcagttac

SEQ ID NO: 4337035 - DNA, 25 bp, Homo sapien
ttcattcaatcccagctctacaact

SEQ ID NO: 4337036 - DNA, 25 bp, Homo sapien
cagctctacaacttaccagtataaa

SEQ ID NO: 4337037 - DNA, 25 bp, Homo sapien
atcagttacttaatcttgcagtttc

SEQ ID NO: 4337038 - DNA, 25 bp, Homo sapien
taagatatcagtttagagagctccc

SEQ ID NO: 4337039 - DNA, 25 bp, Homo sapien
ttggcactacgaagatgctgctccg

SEQ ID NO: 4337040 - DNA, 25 bp, Homo sapien
agagctccctttctttaactgtggg

SEQ ID NO: 4337041 - DNA, 25 bp, Homo sapien
caattttcgttgtactctctcagtc

SEQ ID NO: 4337042 - DNA, 25 bp, Homo sapien
agctctaagagcgaggcaggcacct

SEQ ID NO: 4337043 - DNA, 25 bp, Homo sapien
gacaccagacggttgtgaggcagca

SEQ ID NO: 4337044 - DNA, 25 bp, Homo sapien
tcagactccagcgtctcggtggaca

SEQ ID NO: 4337045 - DNA, 25 bp, Homo sapien
gcaagttctcgatctcagccgggat

SEQ ID NO: 4337046 - DNA, 25 bp, Homo sapien
cgtggcgccggattccccagagcgc

SEQ ID NO: 4337047 - DNA, 25 bp, Homo sapien
ccggaacctgaaccgagggctgagt

SEQ ID NO: 4337048 - DNA, 25 bp, Homo sapien
gcgcggtccagaggccgggagctct

SEQ ID NO: 4337049 - DNA, 25 bp, Homo sapien
accgcacggcgcgtggcgccggatt

SEQ ID NO: 4337050 - DNA, 25 bp, Homo sapien
tgaaactgcatagttgtttccttca

SEQ ID NO: 4337051 - DNA, 25 bp, Homo sapien
gaaactgcatagttgtttccttcac

SEQ ID NO: 4337052 - DNA, 25 bp, Homo sapien
gccttgggcagagttttgagtaagt

SEQ ID NO: 4337053 - DNA, 25 bp, Homo sapien
tatcctgagcttgttaatgccattc

SEQ ID NO: 4337054 - DNA, 25 bp, Homo sapien
taccgcttccaaagctatcctgagc

SEQ ID NO: 4337055 - DNA, 25 bp, Homo sapien
tttggacagcaccacaactttggga

SEQ ID NO: 4337056 - DNA, 25 bp, Homo sapien
caagattaggctgtgtgaacttgac

SEQ ID NO: 4337057 - DNA, 25 bp, Homo sapien
tcccacatggggtactgaggtgctg

SEQ ID NO: 4337058 - DNA, 25 bp, Homo sapien
gctgtgtgaacttgactcagtagac

SEQ ID NO: 4337059 - DNA, 25 bp, Homo sapien
gaggtgctggaagcctgtctactaa

SEQ ID NO: 4337060 - DNA, 25 bp, Homo sapien
taaatgtacacaccctcttaagagg

SEQ ID NO: 4337061 - DNA, 25 bp, Homo sapien
gctaggattattccagggctctgaa

SEQ ID NO: 4337062 - DNA, 25 bp, Homo sapien
tccacatgactgaaccgaagaaacc

SEQ ID NO: 4337063 - DNA, 25 bp, Homo sapien
tcagaggccaaaaagttcgaaggca

SEQ ID NO: 4337064 - DNA, 25 bp, Homo sapien
cacgactttatttggccttaattgg

SEQ ID NO: 4337065 - DNA, 25 bp, Homo sapien
tcacgactttatttggccttaattg

SEQ ID NO: 4337066 - DNA, 25 bp, Homo sapien
caaaactttatggaagactccccag

SEQ ID NO: 4337067 - DNA, 25 bp, Homo sapien
tccacgtgggcttgttagcaggcag

SEQ ID NO: 4337068 - DNA, 25 bp, Homo sapien
actgatatagtccagagtcacggca

SEQ ID NO: 4337069 - DNA, 25 bp, Homo sapien
gcttttagagggctgaaggaaccaa

SEQ ID NO: 4337070 - DNA, 25 bp, Homo sapien
caaattggtgtactcttgccctcct

SEQ ID NO: 4337071 - DNA, 25 bp, Homo sapien
ttcaatgttgcagggtagagtagtc

SEQ ID NO: 4337072 - DNA, 25 bp, Homo sapien
gattaaggcgtgctgctgtgagttc

SEQ ID NO: 4337073 - DNA, 25 bp, Homo sapien
tctccaaggcacttggacagggagc

SEQ ID NO: 4337074 - DNA, 25 bp, Homo sapien
tgtcaaggatttaatctttggtatt

SEQ ID NO: 4337075 - DNA, 25 bp, Homo sapien
ttatgtcaaggatttaatctttggt

SEQ ID NO: 4337076 - DNA, 25 bp, Homo sapien
tcaaggatttaatctttggtattcc

SEQ ID NO: 4337077 - DNA, 25 bp, Homo sapien
caaggatttaatctttggtattcca

SEQ ID NO: 4337078 - DNA, 25 bp, Homo sapien
taactgtaaatgactgacctcccca

SEQ ID NO: 4337079 - DNA, 25 bp, Homo sapien
tttccagccggaggttaaacatgaa

SEQ ID NO: 4337080 - DNA, 25 bp, Homo sapien
tagcacgacctgtagggtcatcagg

SEQ ID NO: 4337081 - DNA, 25 bp, Homo sapien
tgaggactccatatcatagcacgac

SEQ ID NO: 4337082 - DNA, 25 bp, Homo sapien
aaaatcacaggaacctatctcccct

SEQ ID NO: 4337083 - DNA, 25 bp, Homo sapien
ggaaaaatcacaggaacctatctcc

SEQ ID NO: 4337084 - DNA, 25 bp, Homo sapien
tcacaggaacctatctcccctctgg

SEQ ID NO: 4337085 - DNA, 25 bp, Homo sapien
aatcacaggaacctatctcccctct

SEQ ID NO: 4337086 - DNA, 25 bp, Homo sapien
ctgagggacactgggttaactagca

SEQ ID NO: 4337087 - DNA, 25 bp, Homo sapien
catgctgacggcaatggaaagaggc

SEQ ID NO: 4337088 - DNA, 25 bp, Homo sapien
cagtatggctatgtatctagaggca

SEQ ID NO: 4337089 - DNA, 25 bp, Homo sapien
cactcctagaaatgaaggctgtggc

SEQ ID NO: 4337090 - DNA, 25 bp, Homo sapien
ttgtcgggctcctccacggacaatg

SEQ ID NO: 4337091 - DNA, 25 bp, Homo sapien
ggctcctccacggacaatgaacaat

SEQ ID NO: 4337092 - DNA, 25 bp, Homo sapien
tgtttacttgtcgggctcctccacg

SEQ ID NO: 4337093 - DNA, 25 bp, Homo sapien
tcctccacggacaatgaacaatttg

SEQ ID NO: 4337094 - DNA, 25 bp, Homo sapien
gcctgattttgccttatgcagccac

SEQ ID NO: 4337095 - DNA, 25 bp, Homo sapien
ctgcctgattttgccttatgcagcc

SEQ ID NO: 4337096 - DNA, 25 bp, Homo sapien
cctgattttgccttatgcagccact

SEQ ID NO: 4337097 - DNA, 25 bp, Homo sapien
tgattttgccttatgcagccactca

SEQ ID NO: 4337098 - DNA, 25 bp, Homo sapien
tggtatagggcctgatggcaacagc

SEQ ID NO: 4337099 - DNA, 25 bp, Homo sapien
cactgggcagtgtttgaatggtata

SEQ ID NO: 4337100 - DNA, 25 bp, Homo sapien
gtaacctatatgtgttgagacctac

SEQ ID NO: 4337101 - DNA, 25 bp, Homo sapien
tactgggccctgtgaggactttatc

SEQ ID NO: 4337102 - DNA, 25 bp, Homo sapien
ctggacatatctggtcatctcctcc

SEQ ID NO: 4337103 - DNA, 25 bp, Homo sapien
gagctcctggacatatctggtcatc

SEQ ID NO: 4337104 - DNA, 25 bp, Homo sapien
tcctggacatatctggtcatctcct

SEQ ID NO: 4337105 - DNA, 25 bp, Homo sapien
gctcctggacatatctggtcatctc

SEQ ID NO: 4337106 - DNA, 25 bp, Homo sapien
ctagaggctctcaattcatctccca

SEQ ID NO: 4337107 - DNA, 25 bp, Homo sapien
gccaagatctacctagaggctctca

SEQ ID NO: 4337108 - DNA, 25 bp, Homo sapien
gccagtgaggaatccgccaagatct

SEQ ID NO: 4337109 - DNA, 25 bp, Homo sapien
cagtagcagctgtggtaagccagtg

SEQ ID NO: 4337110 - DNA, 25 bp, Homo sapien
tagctggtgaaacttttcggcctgg

SEQ ID NO: 4337111 - DNA, 25 bp, Homo sapien
agtggttccaacataccctgtagcc

SEQ ID NO: 4337112 - DNA, 25 bp, Homo sapien
gctagggctcggctttaagagtccc

SEQ ID NO: 4337113 - DNA, 25 bp, Homo sapien
tgtagcccaggacccagatgggact

SEQ ID NO: 4337114 - DNA, 25 bp, Homo sapien
gtgggtctgcctgggttccttgctc

SEQ ID NO: 4337115 - DNA, 25 bp, Homo sapien
atgctgatttcatgaagctctctcc

SEQ ID NO: 4337116 - DNA, 25 bp, Homo sapien
tctttctgcttgaagcacagctcac

SEQ ID NO: 4337117 - DNA, 25 bp, Homo sapien
cccaacttctctcatgctgatttca

SEQ ID NO: 4337118 - DNA, 25 bp, Homo sapien
acaggtcatggctgtacagacccaa

SEQ ID NO: 4337119 - DNA, 25 bp, Homo sapien
atctgcatacgtttcatcctccagg

SEQ ID NO: 4337120 - DNA, 25 bp, Homo sapien
cagctccatctgcatacgtttcatc

SEQ ID NO: 4337121 - DNA, 25 bp, Homo sapien
ggttacagtccacctcggtctcagc

SEQ ID NO: 4337122 - DNA, 25 bp, Homo sapien
gccagaaatacggggcaacagttta

SEQ ID NO: 4337123 - DNA, 25 bp, Homo sapien
ccagaaatacggggcaacagtttag

SEQ ID NO: 4337124 - DNA, 25 bp, Homo sapien
aatcctctctatcttggctcctaca

SEQ ID NO: 4337125 - DNA, 25 bp, Homo sapien
tatcttggctcctacaaaatgcctc

SEQ ID NO: 4337126 - DNA, 25 bp, Homo sapien
tctctatttcttaggttaggcatac

SEQ ID NO: 4337127 - DNA, 25 bp, Homo sapien
tccattcactacagctctctatttc

SEQ ID NO: 4337128 - DNA, 25 bp, Homo sapien
aatgagagcatcaacacagagtccc

SEQ ID NO: 4337129 - DNA, 25 bp, Homo sapien
tcaatgagagcatcaacacagagtc

SEQ ID NO: 4337130 - DNA, 25 bp, Homo sapien
tcttctcaggagggttgaaagatgg

SEQ ID NO: 4337131 - DNA, 25 bp, Homo sapien
ggaagctgagtttccaatcagcatt

SEQ ID NO: 4337132 - DNA, 25 bp, Homo sapien
aatattgatggcagtttcattctgt

SEQ ID NO: 4337133 - DNA, 25 bp, Homo sapien
ggcgagaatcaccattatcaaagtt

SEQ ID NO: 4337134 - DNA, 25 bp, Homo sapien
ctcctggtctggatacgttgtaata

SEQ ID NO: 4337135 - DNA, 25 bp, Homo sapien
taagcaacttgttgttctcctggtc

SEQ ID NO: 4337136 - DNA, 25 bp, Homo sapien
tgtctaggatttcactgtagttgct

SEQ ID NO: 4337137 - DNA, 25 bp, Homo sapien
ccagccactggatgatgcgacgtcg

SEQ ID NO: 4337138 - DNA, 25 bp, Homo sapien
tgcgacgtcggagctcatcacggtt

SEQ ID NO: 4337139 - DNA, 25 bp, Homo sapien
aaaatacttgtctaggatttcactg

SEQ ID NO: 4337140 - DNA, 25 bp, Homo sapien
caacagaatgtgaaggccagtgagg

SEQ ID NO: 4337141 - DNA, 25 bp, Homo sapien
ggctacgtcgaagccctgctctgga

SEQ ID NO: 4337142 - DNA, 25 bp, Homo sapien
tgagggctacgtcgaagccctgctc

SEQ ID NO: 4337143 - DNA, 25 bp, Homo sapien
gccagtgagggctacgtcgaagccc

SEQ ID NO: 4337144 - DNA, 25 bp, Homo sapien
agttctgggacacaattctgatgca

SEQ ID NO: 4337145 - DNA, 25 bp, Homo sapien
caaaggctaccgtgagaatctaagg

SEQ ID NO: 4337146 - DNA, 25 bp, Homo sapien
tggtcccatgacacgagcatgtctt

SEQ ID NO: 4337147 - DNA, 25 bp, Homo sapien
gaaaagaatgtcctccctgagatgc

SEQ ID NO: 4337148 - DNA, 25 bp, Homo sapien
gcagatggacttacggatttcttct

SEQ ID NO: 4337149 - DNA, 25 bp, Homo sapien
ctggcagatggacttacggatttct

SEQ ID NO: 4337150 - DNA, 25 bp, Homo sapien
ggcagatggacttacggatttcttc

SEQ ID NO: 4337151 - DNA, 25 bp, Homo sapien
tggcagatggacttacggatttctt

SEQ ID NO: 4337152 - DNA, 25 bp, Homo sapien
cagtgaggcaggcatctcgatgcag

SEQ ID NO: 4337153 - DNA, 25 bp, Homo sapien
tttgcagtgtccatcgtaatcaacc

SEQ ID NO: 4337154 - DNA, 25 bp, Homo sapien
cgtaatcaacctggattttggatcc

SEQ ID NO: 4337155 - DNA, 25 bp, Homo sapien
tgaggtaggtcttgccattactgcc

SEQ ID NO: 4337156 - DNA, 25 bp, Homo sapien
acagatcttggatttgctccttagc

SEQ ID NO: 4337157 - DNA, 25 bp, Homo sapien
tcaatgcagagacaggtgggttccc

SEQ ID NO: 4337158 - DNA, 25 bp, Homo sapien
cggccggctccacaaaacacattgg

SEQ ID NO: 4337159 - DNA, 25 bp, Homo sapien
tgtgactgcacattcccggccggct

SEQ ID NO: 4337160 - DNA, 25 bp, Homo sapien
aaccaacaaagactgcaggaggcac

SEQ ID NO: 4337161 - DNA, 25 bp, Homo sapien
accaacaaagactgcaggaggcacg

SEQ ID NO: 4337162 - DNA, 25 bp, Homo sapien
aaaaccaacaaagactgcaggaggc

SEQ ID NO: 4337163 - DNA, 25 bp, Homo sapien
gatgctgtgacaaaaccaacaaaga

SEQ ID NO: 4337164 - DNA, 25 bp, Homo sapien
ctttgttgacgtgagaaaggctctc

SEQ ID NO: 4337165 - DNA, 25 bp, Homo sapien
cactaacatgaagtgggccggctct

SEQ ID NO: 4337166 - DNA, 25 bp, Homo sapien
tcttctggaacccagtagcacaggc

SEQ ID NO: 4337167 - DNA, 25 bp, Homo sapien
tatacacagaataccatggagctgg

SEQ ID NO: 4337168 - DNA, 25 bp, Homo sapien
ctgtgcccggtcaatcaagaattat

SEQ ID NO: 4337169 - DNA, 25 bp, Homo sapien
gtttagcctctatcacagcttatgg

SEQ ID NO: 4337170 - DNA, 25 bp, Homo sapien
actcattgcgtattgtgtgcctgga

SEQ ID NO: 4337171 - DNA, 25 bp, Homo sapien
cagcttatgggatataacatgttcc

SEQ ID NO: 4337172 - DNA, 25 bp, Homo sapien
agtgactccactgctactgacaggg

SEQ ID NO: 4337173 - DNA, 25 bp, Homo sapien
aggtggctccaactccggtacttga

SEQ ID NO: 4337174 - DNA, 25 bp, Homo sapien
gagactgtgacttcaagagctgggc

SEQ ID NO: 4337175 - DNA, 25 bp, Homo sapien
cagtgacgagttggagagtctcccc

SEQ ID NO: 4337176 - DNA, 25 bp, Homo sapien
cactttgaaggccaatgtagagagt

SEQ ID NO: 4337177 - DNA, 25 bp, Homo sapien
tgtagagagtataaatcctccagtc

SEQ ID NO: 4337178 - DNA, 25 bp, Homo sapien
cagagtgattcttaggagttcccaa

SEQ ID NO: 4337179 - DNA, 25 bp, Homo sapien
tatctgccctgaattagcttgttag

SEQ ID NO: 4337180 - DNA, 25 bp, Homo sapien
gagaaagctctagggcagctgtggg

SEQ ID NO: 4337181 - DNA, 25 bp, Homo sapien
ccacatctgggccaacatccctaca

SEQ ID NO: 4337182 - DNA, 25 bp, Homo sapien
agaagggagaaagctctagggcagc

SEQ ID NO: 4337183 - DNA, 25 bp, Homo sapien
atctgggccaacatccctacacatt

SEQ ID NO: 4337184 - DNA, 25 bp, Homo sapien
gttgccgggacagcaaagccttagg

SEQ ID NO: 4337185 - DNA, 25 bp, Homo sapien
ccaaccaagaggtgagaccatctga

SEQ ID NO: 4337186 - DNA, 25 bp, Homo sapien
tacactgaaacacgagttgccggga

SEQ ID NO: 4337187 - DNA, 25 bp, Homo sapien
tctccccttggattgggcacattag

SEQ ID NO: 4337188 - DNA, 25 bp, Homo sapien
tccaactactcctctaaagagacaa

SEQ ID NO: 4337189 - DNA, 25 bp, Homo sapien
cttccaactactcctctaaagagac

SEQ ID NO: 4337190 - DNA, 25 bp, Homo sapien
aatccttccaactactcctctaaag

SEQ ID NO: 4337191 - DNA, 25 bp, Homo sapien
aactactcctctaaagagacaatca

SEQ ID NO: 4337192 - DNA, 25 bp, Homo sapien
gaattcaagccataacaacaaggag

SEQ ID NO: 4337193 - DNA, 25 bp, Homo sapien
tgagtacttaccttgtgggaggcac

SEQ ID NO: 4337194 - DNA, 25 bp, Homo sapien
taagttgatatccaaaagcccagcc

SEQ ID NO: 4337195 - DNA, 25 bp, Homo sapien
tacacactttgggtctaggctcttc

SEQ ID NO: 4337196 - DNA, 25 bp, Homo sapien
cacctccaatattgagctggctggc

SEQ ID NO: 4337197 - DNA, 25 bp, Homo sapien
tgtactgtacccttactagaaaagc

SEQ ID NO: 4337198 - DNA, 25 bp, Homo sapien
gggattttctagtgagattcgggaa

SEQ ID NO: 4337199 - DNA, 25 bp, Homo sapien
tagcacgatttagcacattgggatt

SEQ ID NO: 4337200 - DNA, 25 bp, Homo sapien
tcttccccagtgttgttgagcggtt

SEQ ID NO: 4337201 - DNA, 25 bp, Homo sapien
ggattcctgggcatgaagactgttc

SEQ ID NO: 4337202 - DNA, 25 bp, Homo sapien
aagactgttcaggtgccacatgccg

SEQ ID NO: 4337203 - DNA, 25 bp, Homo sapien
ttgatcgactacaaggagacccagg

SEQ ID NO: 4337204 - DNA, 25 bp, Homo sapien
tgagccagcctatctttcaaactgt

SEQ ID NO: 4337205 - DNA, 25 bp, Homo sapien
agaaagtaaaggacacaagatgcct

SEQ ID NO: 4337206 - DNA, 25 bp, Homo sapien
cattcttgagccagcctatctttca

SEQ ID NO: 4337207 - DNA, 25 bp, Homo sapien
gcctcctgtttttattcactctgtt

SEQ ID NO: 4337208 - DNA, 25 bp, Homo sapien
tggatgttacctagcagaagtgtct

SEQ ID NO: 4337209 - DNA, 25 bp, Homo sapien
gactgcaagctctttgggcacaagg

SEQ ID NO: 4337210 - DNA, 25 bp, Homo sapien
cagagctcagctggtgggtcacttc

SEQ ID NO: 4337211 - DNA, 25 bp, Homo sapien
taactcagtgcctaacagagaacag

SEQ ID NO: 4337212 - DNA, 25 bp, Homo sapien
tgctccatgagtacttcaatctctt

SEQ ID NO: 4337213 - DNA, 25 bp, Homo sapien
ctggcttcccatcctactgcctctg

SEQ ID NO: 4337214 - DNA, 25 bp, Homo sapien
tggcttcccatcctactgcctctgc

SEQ ID NO: 4337215 - DNA, 25 bp, Homo sapien
gctccatgagtacttcaatctcttc

SEQ ID NO: 4337216 - DNA, 25 bp, Homo sapien
acacacgcacccatggcttttggag

SEQ ID NO: 4337217 - DNA, 25 bp, Homo sapien
cacgtgcgtgaatgtgtgtgcaaac

SEQ ID NO: 4337218 - DNA, 25 bp, Homo sapien
ggtagatactctggattaagcccgt

SEQ ID NO: 4337219 - DNA, 25 bp, Homo sapien
tcccctagagatgccctgaagatga

SEQ ID NO: 4337220 - DNA, 25 bp, Homo sapien
ttttggtggcacatacagctgttcc

SEQ ID NO: 4337221 - DNA, 25 bp, Homo sapien
caatatagattacagtgagccctgg

SEQ ID NO: 4337222 - DNA, 25 bp, Homo sapien
tccacaaaacagtcaagaaagctcc

SEQ ID NO: 4337223 - DNA, 25 bp, Homo sapien
ccagggcaaagtggtctaacagaat

SEQ ID NO: 4337224 - DNA, 25 bp, Homo sapien
tcgcaggagtcagaatagagcatcc

SEQ ID NO: 4337225 - DNA, 25 bp, Homo sapien
tagctgccacgatttaaagcacctg

SEQ ID NO: 4337226 - DNA, 25 bp, Homo sapien
gccattcatggcatactctcagaga

SEQ ID NO: 4337227 - DNA, 25 bp, Homo sapien
tgagtaccaggtgcgctcagctgca

SEQ ID NO: 4337228 - DNA, 25 bp, Homo sapien
tgggcagagtcaagctgcgatgcta

SEQ ID NO: 4337229 - DNA, 25 bp, Homo sapien
taaaaattgtgaagaccttgtatgc

SEQ ID NO: 4337230 - DNA, 25 bp, Homo sapien
tgagtttccacctcaatcaacaacg

SEQ ID NO: 4337231 - DNA, 25 bp, Homo sapien
gcgatgctaagggtgtggttaaact

SEQ ID NO: 4337232 - DNA, 25 bp, Homo sapien
atttcttctccctcatgctttttaa

SEQ ID NO: 4337233 - DNA, 25 bp, Homo sapien
ttcttttgtaatgtgcattccattt

SEQ ID NO: 4337234 - DNA, 25 bp, Homo sapien
ttccatttcttctccctcatgcttt

SEQ ID NO: 4337235 - DNA, 25 bp, Homo sapien
tgctttttaattccttccatatttc

SEQ ID NO: 4337236 - DNA, 25 bp, Homo sapien
ggcgcctttttgaactcgctgctgc

SEQ ID NO: 4337237 - DNA, 25 bp, Homo sapien
gcctttttgaactcgctgctgctcc

SEQ ID NO: 4337238 - DNA, 25 bp, Homo sapien
ctctgaagtgaaggacggaactgag

SEQ ID NO: 4337239 - DNA, 25 bp, Homo sapien
ctgaggcgcctttttgaactcgctg

SEQ ID NO: 4337240 - DNA, 25 bp, Homo sapien
ccgcccagcgcgcagacccaagagg

SEQ ID NO: 4337241 - DNA, 25 bp, Homo sapien
cgagttcggactcctcggcccctcg

SEQ ID NO: 4337242 - DNA, 25 bp, Homo sapien
gcccagcgcgcagacccaagaggcc

SEQ ID NO: 4337243 - DNA, 25 bp, Homo sapien
cgcccagcgcgcagacccaagaggc

SEQ ID NO: 4337244 - DNA, 25 bp, Homo sapien
gcgagcgcgagccagcgtttccaca

SEQ ID NO: 4337245 - DNA, 25 bp, Homo sapien
gcgcgagcgcgagccagcgtttcca

SEQ ID NO: 4337246 - DNA, 25 bp, Homo sapien
ggcgcggacccaggcgaccgccacc

SEQ ID NO: 4337247 - DNA, 25 bp, Homo sapien
cgcgagcgcgagccagcgtttccac

SEQ ID NO: 4337248 - DNA, 25 bp, Homo sapien
aacttgctcgggtcccgcaggctcg

SEQ ID NO: 4337249 - DNA, 25 bp, Homo sapien
gaaacttgctcgggtcccgcaggct

SEQ ID NO: 4337250 - DNA, 25 bp, Homo sapien
aggctcgctccggccgcccaagcac

SEQ ID NO: 4337251 - DNA, 25 bp, Homo sapien
ctgggaaacttgctcgggtcccgca

SEQ ID NO: 4337252 - DNA, 25 bp, Homo sapien
ctgggggcgcggggcaggacggcgg

SEQ ID NO: 4337253 - DNA, 25 bp, Homo sapien
gggcgcggggcaggacggcggcagc

SEQ ID NO: 4337254 - DNA, 25 bp, Homo sapien
tgggggcgcggggcaggacggcggc

SEQ ID NO: 4337255 - DNA, 25 bp, Homo sapien
cgcggggcaggacggcggcagcgag

SEQ ID NO: 4337256 - DNA, 25 bp, Homo sapien
ccagcctcggaggaaatgcgacctc

SEQ ID NO: 4337257 - DNA, 25 bp, Homo sapien
ccgatcgccagcctcggaggaaatg

SEQ ID NO: 4337258 - DNA, 25 bp, Homo sapien
aggtgggagctccgccgatcgccag

SEQ ID NO: 4337259 - DNA, 25 bp, Homo sapien
gaggaaatgcgacctcccctcgccg

SEQ ID NO: 4337260 - DNA, 25 bp, Homo sapien
cctctccttccccgcctgcctgccc

SEQ ID NO: 4337261 - DNA, 25 bp, Homo sapien
gacctctccttccccgcctgcctgc

SEQ ID NO: 4337262 - DNA, 25 bp, Homo sapien
cttaagacctctccttccccgcctg

SEQ ID NO: 4337263 - DNA, 25 bp, Homo sapien
tctccttccccgcctgcctgccccc

SEQ ID NO: 4337264 - DNA, 25 bp, Homo sapien
ggcgccgccgaacccctctctccgc

SEQ ID NO: 4337265 - DNA, 25 bp, Homo sapien
gccccctggacgtggagcggaggca

SEQ ID NO: 4337266 - DNA, 25 bp, Homo sapien
ggccccctggacgtggagcggaggc

SEQ ID NO: 4337267 - DNA, 25 bp, Homo sapien
gccgaacccctctctccgcacggtc

SEQ ID NO: 4337268 - DNA, 25 bp, Homo sapien
ctgcggcggtggccaggtgggcggt

SEQ ID NO: 4337269 - DNA, 25 bp, Homo sapien
gctgctggctggcggcggcccgggc

SEQ ID NO: 4337270 - DNA, 25 bp, Homo sapien
ggcgggctgcggcggtggccaggtg

SEQ ID NO: 4337271 - DNA, 25 bp, Homo sapien
gggctgcggcggtggccaggtgggc

SEQ ID NO: 4337272 - DNA, 25 bp, Homo sapien
gtctctgctaaaggctggaatggca

SEQ ID NO: 4337273 - DNA, 25 bp, Homo sapien
catggtccccatgtaagttcagaat

SEQ ID NO: 4337274 - DNA, 25 bp, Homo sapien
gtcagacttatggagagcaaaatgt

SEQ ID NO: 4337275 - DNA, 25 bp, Homo sapien
ccactgagatagcaacaggagtcag

SEQ ID NO: 4337276 - DNA, 25 bp, Homo sapien
taagattagggaatagatgttccgc

SEQ ID NO: 4337277 - DNA, 25 bp, Homo sapien
taaagttctgccctcgaataacgca

SEQ ID NO: 4337278 - DNA, 25 bp, Homo sapien
gatgttccgcaccagatactctgtc

SEQ ID NO: 4337279 - DNA, 25 bp, Homo sapien
cactgtgcaaggattgaagggaact

SEQ ID NO: 4337280 - DNA, 25 bp, Homo sapien
cgttgtttagaaagccttgttcctg

SEQ ID NO: 4337281 - DNA, 25 bp, Homo sapien
ggaagctgacaagctgtgagttgct

SEQ ID NO: 4337282 - DNA, 25 bp, Homo sapien
gaagctgacaagctgtgagttgctt

SEQ ID NO: 4337283 - DNA, 25 bp, Homo sapien
tgtagcctagggatggtggcctata

SEQ ID NO: 4337284 - DNA, 25 bp, Homo sapien
gcagctggtggtactgtgagaataa

SEQ ID NO: 4337285 - DNA, 25 bp, Homo sapien
ggtggcctatagtcactcagcagct

SEQ ID NO: 4337286 - DNA, 25 bp, Homo sapien
tcagcagctggtggtactgtgagaa

SEQ ID NO: 4337287 - DNA, 25 bp, Homo sapien
aatacattcctgtgtaggaggagcc

SEQ ID NO: 4337288 - DNA, 25 bp, Homo sapien
gaaagagcaggccttaggtcaatac

SEQ ID NO: 4337289 - DNA, 25 bp, Homo sapien
gactcttggttagatgggaaattcc

SEQ ID NO: 4337290 - DNA, 25 bp, Homo sapien
tccatcagtaagactgtgtgctggg

SEQ ID NO: 4337291 - DNA, 25 bp, Homo sapien
cacacataaaccaacacccctgcat

SEQ ID NO: 4337292 - DNA, 25 bp, Homo sapien
tgctgcagcacacataaaccaacac

SEQ ID NO: 4337293 - DNA, 25 bp, Homo sapien
tatattcattatgcccactgctgca

SEQ ID NO: 4337294 - DNA, 25 bp, Homo sapien
tttgtccaccaggtaaattatattc

SEQ ID NO: 4337295 - DNA, 25 bp, Homo sapien
gtgtctcttcctccggcttctgctc

SEQ ID NO: 4337296 - DNA, 25 bp, Homo sapien
agtgtctcttcctccggcttctgct

SEQ ID NO: 4337297 - DNA, 25 bp, Homo sapien
gaattgtgactcatgtaggcctgaa

SEQ ID NO: 4337298 - DNA, 25 bp, Homo sapien
gaagggccttcctgcgaactggact

SEQ ID NO: 4337299 - DNA, 25 bp, Homo sapien
tgtaatatccaatgaagggccaagg

SEQ ID NO: 4337300 - DNA, 25 bp, Homo sapien
gctattcagattggacaggtacctc

SEQ ID NO: 4337301 - DNA, 25 bp, Homo sapien
tcattccatggcctggcatgatgga

SEQ ID NO: 4337302 - DNA, 25 bp, Homo sapien
tccatggcctggcatgatggaaaac

SEQ ID NO: 4337303 - DNA, 25 bp, Homo sapien
attccatggcctggcatgatggaaa

SEQ ID NO: 4337304 - DNA, 25 bp, Homo sapien
ccatggcctggcatgatggaaaacc

SEQ ID NO: 4337305 - DNA, 25 bp, Homo sapien
gaggggaaaccaggataacacttca

SEQ ID NO: 4337306 - DNA, 25 bp, Homo sapien
ctctgggactttggccagcgtatga

SEQ ID NO: 4337307 - DNA, 25 bp, Homo sapien
tggatacccaggtttgtcctcggtg

SEQ ID NO: 4337308 - DNA, 25 bp, Homo sapien
tggctctgggccacatggataccca

SEQ ID NO: 4337309 - DNA, 25 bp, Homo sapien
ccaacatagaaagaactgtggctct

SEQ ID NO: 4337310 - DNA, 25 bp, Homo sapien
ccacaatttacaagggtaagtagat

SEQ ID NO: 4337311 - DNA, 25 bp, Homo sapien
gaggcaatgcttatactgaatacca

SEQ ID NO: 4337312 - DNA, 25 bp, Homo sapien
gtagataattatgctgagagcccag

SEQ ID NO: 4337313 - DNA, 25 bp, Homo sapien
aagtagataattatgctgagagccc

SEQ ID NO: 4337314 - DNA, 25 bp, Homo sapien
catgctttgtaactcagaagccaaa

SEQ ID NO: 4337315 - DNA, 25 bp, Homo sapien
cacgatccatgctttgtaactcaga

SEQ ID NO: 4337316 - DNA, 25 bp, Homo sapien
cgatccatgctttgtaactcagaag

SEQ ID NO: 4337317 - DNA, 25 bp, Homo sapien
tccatgctttgtaactcagaagcca

SEQ ID NO: 4337318 - DNA, 25 bp, Homo sapien
cattgagcaggctcctttgtggata

SEQ ID NO: 4337319 - DNA, 25 bp, Homo sapien
ccaagacaaccgtctaatctctgct

SEQ ID NO: 4337320 - DNA, 25 bp, Homo sapien
agcatatccaagacaaccgtctaat

SEQ ID NO: 4337321 - DNA, 25 bp, Homo sapien
gagcaggctcctttgtggatacaga

SEQ ID NO: 4337322 - DNA, 25 bp, Homo sapien
gggatcggatcataccactgctaca

SEQ ID NO: 4337323 - DNA, 25 bp, Homo sapien
tcttaaacttggtccaatcaggttc

SEQ ID NO: 4337324 - DNA, 25 bp, Homo sapien
ggaactaggaaagaacagctatcaa

SEQ ID NO: 4337325 - DNA, 25 bp, Homo sapien
ctatcaagtattgggcaggacaggg

SEQ ID NO: 4337326 - DNA, 25 bp, Homo sapien
ccaaatcctaagagttccagtatgt

SEQ ID NO: 4337327 - DNA, 25 bp, Homo sapien
caaatcctaagagttccagtatgtt

SEQ ID NO: 4337328 - DNA, 25 bp, Homo sapien
tctcagggcaccagctggcgcgcct

SEQ ID NO: 4337329 - DNA, 25 bp, Homo sapien
ctctcagggcaccagctggcgcgcc

SEQ ID NO: 4337330 - DNA, 25 bp, Homo sapien
gtcagtgatgttccccagctctggg

SEQ ID NO: 4337331 - DNA, 25 bp, Homo sapien
tgggctctggcttcctcccctactc

SEQ ID NO: 4337332 - DNA, 25 bp, Homo sapien
cgtcagtgatgttccccagctctgg

SEQ ID NO: 4337333 - DNA, 25 bp, Homo sapien
ctctgggctctggcttcctccccta

SEQ ID NO: 4337334 - DNA, 25 bp, Homo sapien
cttttccggtcagagtgcttttgtg

SEQ ID NO: 4337335 - DNA, 25 bp, Homo sapien
ggatctgcttttccggtcagagtgc

SEQ ID NO: 4337336 - DNA, 25 bp, Homo sapien
tccggtcagagtgcttttgtggaag

SEQ ID NO: 4337337 - DNA, 25 bp, Homo sapien
tcctggatctgcttttccggtcaga

SEQ ID NO: 4337338 - DNA, 25 bp, Homo sapien
tccaaatgtctgatgccttgcagat

SEQ ID NO: 4337339 - DNA, 25 bp, Homo sapien
caaatgtctgatgccttgcagattt

SEQ ID NO: 4337340 - DNA, 25 bp, Homo sapien
ccaaatgtctgatgccttgcagatt

SEQ ID NO: 4337341 - DNA, 25 bp, Homo sapien
aagcaggtgctgtgtcatgcacttg

SEQ ID NO: 4337342 - DNA, 25 bp, Homo sapien
gccgcatatagtttggagtaggagt

SEQ ID NO: 4337343 - DNA, 25 bp, Homo sapien
gttcgagctttgtatctgacttgga

SEQ ID NO: 4337344 - DNA, 25 bp, Homo sapien
gtgaaaaagcccctactgttggtca

SEQ ID NO: 4337345 - DNA, 25 bp, Homo sapien
tgtgatcacatgttttccagtcctg

SEQ ID NO: 4337346 - DNA, 25 bp, Homo sapien
ggtcctctgggtgaacgttacgcat

SEQ ID NO: 4337347 - DNA, 25 bp, Homo sapien
ctagggtgtgatcacatgttttcca

SEQ ID NO: 4337348 - DNA, 25 bp, Homo sapien
tcttggtgatcagggagagcaatga

SEQ ID NO: 4337349 - DNA, 25 bp, Homo sapien
caccaaatccaaactgagcagctgc

SEQ ID NO: 4337350 - DNA, 25 bp, Homo sapien
ccaaactgagcagctgcatggtcat

SEQ ID NO: 4337351 - DNA, 25 bp, Homo sapien
cagcatccttgttaaaggttccacc

SEQ ID NO: 4337352 - DNA, 25 bp, Homo sapien
aaggttccaccaaatccaaactgag

SEQ ID NO: 4337353 - DNA, 25 bp, Homo sapien
aaacttacagttcagctagcctacc

SEQ ID NO: 4337354 - DNA, 25 bp, Homo sapien
catggttctgatggtcacacttgac

SEQ ID NO: 4337355 - DNA, 25 bp, Homo sapien
gactgtggaagaccttgtgaaatta

SEQ ID NO: 4337356 - DNA, 25 bp, Homo sapien
tgatagcattagaaagggtcctgga

SEQ ID NO: 4337357 - DNA, 25 bp, Homo sapien
actgtttcttcgcacactccctggg

SEQ ID NO: 4337358 - DNA, 25 bp, Homo sapien
cagttgtacggtgggttgtgccaaa

SEQ ID NO: 4337359 - DNA, 25 bp, Homo sapien
ccaggaaggaaaattggatcgaaca

SEQ ID NO: 4337360 - DNA, 25 bp, Homo sapien
tgggctttagacagtgggattgcaa

SEQ ID NO: 4337361 - DNA, 25 bp, Homo sapien
gaaagtgttcttatgccccagcatg

SEQ ID NO: 4337362 - DNA, 25 bp, Homo sapien
agcatgggaatcaggacttcttcca

SEQ ID NO: 4337363 - DNA, 25 bp, Homo sapien
ccccagcatgggaatcaggacttct

SEQ ID NO: 4337364 - DNA, 25 bp, Homo sapien
ttccctggtgaaagtgttcttatgc

SEQ ID NO: 4337365 - DNA, 25 bp, Homo sapien
tattgagtaattaaggtgacagcca

SEQ ID NO: 4337366 - DNA, 25 bp, Homo sapien
aatactaccagaaagcatgagattc

SEQ ID NO: 4337367 - DNA, 25 bp, Homo sapien
gaactttgcaaatgcgtttccataa

SEQ ID NO: 4337368 - DNA, 25 bp, Homo sapien
ccataaaagttctgagttacttgac

SEQ ID NO: 4337369 - DNA, 25 bp, Homo sapien
cagcacttgtggtagttctcatcca

SEQ ID NO: 4337370 - DNA, 25 bp, Homo sapien
agcacttgtggtagttctcatccaa

SEQ ID NO: 4337371 - DNA, 25 bp, Homo sapien
gcacttgtggtagttctcatccaaa

SEQ ID NO: 4337372 - DNA, 25 bp, Homo sapien
ttaaagatgattcaaacataaatgc

SEQ ID NO: 4337373 - DNA, 25 bp, Homo sapien
aacacatttgattagatgtcaacag

SEQ ID NO: 4337374 - DNA, 25 bp, Homo sapien
caaatcaaagatttgtgtgctagag

SEQ ID NO: 4337375 - DNA, 25 bp, Homo sapien
cagaaggtatgggtaggtgaaatct

SEQ ID NO: 4337376 - DNA, 25 bp, Homo sapien
caaagatttgtgtgctagagtggtg

SEQ ID NO: 4337377 - DNA, 25 bp, Homo sapien
gtgccatcggcaatcctctcaggtg

SEQ ID NO: 4337378 - DNA, 25 bp, Homo sapien
catcggcaatcctctcaggtgccag

SEQ ID NO: 4337379 - DNA, 25 bp, Homo sapien
tctcaggtgccagcttgaccttgct

SEQ ID NO: 4337380 - DNA, 25 bp, Homo sapien
catggtgccatcggcaatcctctca

SEQ ID NO: 4337381 - DNA, 25 bp, Homo sapien
gggtcattgtgctgtgtagactccc

SEQ ID NO: 4337382 - DNA, 25 bp, Homo sapien
cggatgagtcccatgaactcactca

SEQ ID NO: 4337383 - DNA, 25 bp, Homo sapien
accttgctttgcctcatagtgacct

SEQ ID NO: 4337384 - DNA, 25 bp, Homo sapien
tcattgtgctgtgtagactccctcc

SEQ ID NO: 4337385 - DNA, 25 bp, Homo sapien
tttttattatccaaggcaagaccag

SEQ ID NO: 4337386 - DNA, 25 bp, Homo sapien
cactctctgacaggaatcaggctag

SEQ ID NO: 4337387 - DNA, 25 bp, Homo sapien
ggcacagctctactccatggccatg

SEQ ID NO: 4337388 - DNA, 25 bp, Homo sapien
tatcagaggtctcgagttccactct

SEQ ID NO: 4337389 - DNA, 25 bp, Homo sapien
tactctatcatctaagcttacgagc

SEQ ID NO: 4337390 - DNA, 25 bp, Homo sapien
ttatctcccagatcataaccctttc

SEQ ID NO: 4337391 - DNA, 25 bp, Homo sapien
gcttacgagccctgtatcaaagtta

SEQ ID NO: 4337392 - DNA, 25 bp, Homo sapien
tcataatagagagcgaatgtactct

SEQ ID NO: 4337393 - DNA, 25 bp, Homo sapien
tgaatttagatagcagtgagcttgg

SEQ ID NO: 4337394 - DNA, 25 bp, Homo sapien
gctgaagaggtgagacccagatcat

SEQ ID NO: 4337395 - DNA, 25 bp, Homo sapien
tcagggtcaccttcatggcttaatt

SEQ ID NO: 4337396 - DNA, 25 bp, Homo sapien
ggtgtcaagctccttgctctagtat

SEQ ID NO: 4337397 - DNA, 25 bp, Homo sapien
atggccactccagggcggacagact

SEQ ID NO: 4337398 - DNA, 25 bp, Homo sapien
gcctgaaggtcttatcagcaacccc

SEQ ID NO: 4337399 - DNA, 25 bp, Homo sapien
agcaaccccccatcgaggtgggaag

SEQ ID NO: 4337400 - DNA, 25 bp, Homo sapien
aaggaggcctgaaggtcttatcagc

SEQ ID NO: 4337401 - DNA, 25 bp, Homo sapien
gtcaatactgtgaaaatggatgggt

SEQ ID NO: 4337402 - DNA, 25 bp, Homo sapien
tcaatactgtgaaaatggatgggtc

SEQ ID NO: 4337403 - DNA, 25 bp, Homo sapien
agtcaatactgtgaaaatggatggg

SEQ ID NO: 4337404 - DNA, 25 bp, Homo sapien
cagtcaatactgtgaaaatggatgg

SEQ ID NO: 4337405 - DNA, 25 bp, Homo sapien
tgctgcaaacggacagcctaatttc

SEQ ID NO: 4337406 - DNA, 25 bp, Homo sapien
tgcaaacggacagcctaatttctga

SEQ ID NO: 4337407 - DNA, 25 bp, Homo sapien
gctgcaaacggacagcctaatttct

SEQ ID NO: 4337408 - DNA, 25 bp, Homo sapien
gttgctgcaaacggacagcctaatt

SEQ ID NO: 4337409 - DNA, 25 bp, Homo sapien
cctctttgggagaatacggagattc

SEQ ID NO: 4337410 - DNA, 25 bp, Homo sapien
gtgggtctgagaaccaacggtgcct

SEQ ID NO: 4337411 - DNA, 25 bp, Homo sapien
aacggtgcctgcttctcaacctcag

SEQ ID NO: 4337412 - DNA, 25 bp, Homo sapien
gctaattctacctgaaagggtcaag

SEQ ID NO: 4337413 - DNA, 25 bp, Homo sapien
gccactgagttgataaccatgaaat

SEQ ID NO: 4337414 - DNA, 25 bp, Homo sapien
ccaggccacaacattgaacggggag

SEQ ID NO: 4337415 - DNA, 25 bp, Homo sapien
caggttgtacttgtagggtgtataa

SEQ ID NO: 4337416 - DNA, 25 bp, Homo sapien
tgtataattcccgtgccaggccaca

SEQ ID NO: 4337417 - DNA, 25 bp, Homo sapien
gctgtgatcccacaatatgtactga

SEQ ID NO: 4337418 - DNA, 25 bp, Homo sapien
taatgcttttgtagctgtgatccca

SEQ ID NO: 4337419 - DNA, 25 bp, Homo sapien
taccatctaatgcttttgtagctgt

SEQ ID NO: 4337420 - DNA, 25 bp, Homo sapien
tgtagctgtgatcccacaatatgta

SEQ ID NO: 4337421 - DNA, 25 bp, Homo sapien
ctgctgtgatgcttctccaggtaat

SEQ ID NO: 4337422 - DNA, 25 bp, Homo sapien
gagcaatcctaacataatacttcct

SEQ ID NO: 4337423 - DNA, 25 bp, Homo sapien
aatagacacagtgcctgggttggtg

SEQ ID NO: 4337424 - DNA, 25 bp, Homo sapien
ccaggtaatttcagcctagaggagc

SEQ ID NO: 4337425 - DNA, 25 bp, Homo sapien
tgtcctgctataggaaggtggtccc

SEQ ID NO: 4337426 - DNA, 25 bp, Homo sapien
tatgggtccgaaagtgctaaagatt

SEQ ID NO: 4337427 - DNA, 25 bp, Homo sapien
tatctgagcctagcaatagcgggaa

SEQ ID NO: 4337428 - DNA, 25 bp, Homo sapien
taatgaaggcgctactcatagaggc

SEQ ID NO: 4337429 - DNA, 25 bp, Homo sapien
gagtagaaagggcacaacctttgga

SEQ ID NO: 4337430 - DNA, 25 bp, Homo sapien
agaaagggcacaacctttggagtca

SEQ ID NO: 4337431 - DNA, 25 bp, Homo sapien
attatttatcattactggccttttc

SEQ ID NO: 4337432 - DNA, 25 bp, Homo sapien
ttggtgagtagaaagggcacaacct

SEQ ID NO: 4337433 - DNA, 25 bp, Homo sapien
aaagtttgtaacactcgccttggca

SEQ ID NO: 4337434 - DNA, 25 bp, Homo sapien
ccttggcaatcagtaagtgctcaat

SEQ ID NO: 4337435 - DNA, 25 bp, Homo sapien
tcgccttggcaatcagtaagtgctc

SEQ ID NO: 4337436 - DNA, 25 bp, Homo sapien
tgtaacactcgccttggcaatcagt

SEQ ID NO: 4337437 - DNA, 25 bp, Homo sapien
gaaatcacgaggattggccaagcca

SEQ ID NO: 4337438 - DNA, 25 bp, Homo sapien
tggcagcaaacagcttgccctggta

SEQ ID NO: 4337439 - DNA, 25 bp, Homo sapien
taatgaccgtgtaaccacctggtac

SEQ ID NO: 4337440 - DNA, 25 bp, Homo sapien
gtacttggcgatcctcataccaggc

SEQ ID NO: 4337441 - DNA, 25 bp, Homo sapien
tgtcaagagctactccacaaattgc

SEQ ID NO: 4337442 - DNA, 25 bp, Homo sapien
tttcattgctcaaagattcactgca

SEQ ID NO: 4337443 - DNA, 25 bp, Homo sapien
ctttctttcatgtcaagagctactc

SEQ ID NO: 4337444 - DNA, 25 bp, Homo sapien
ccatggttgcatgaagagaaaggct

SEQ ID NO: 4337445 - DNA, 25 bp, Homo sapien
gttacacgctgttgcctaaggcatg

SEQ ID NO: 4337446 - DNA, 25 bp, Homo sapien
tccccggctggttagcaaattatag

SEQ ID NO: 4337447 - DNA, 25 bp, Homo sapien
aggtgaacaggatgacagacggccc

SEQ ID NO: 4337448 - DNA, 25 bp, Homo sapien
gaacctggaggctatgctgactata

SEQ ID NO: 4337449 - DNA, 25 bp, Homo sapien
cttagaggcttgtaatgaagattta

SEQ ID NO: 4337450 - DNA, 25 bp, Homo sapien
aggcttagaggcttgtaatgaagat

SEQ ID NO: 4337451 - DNA, 25 bp, Homo sapien
ggcttagaggcttgtaatgaagatt

SEQ ID NO: 4337452 - DNA, 25 bp, Homo sapien
gcttagaggcttgtaatgaagattt

SEQ ID NO: 4337453 - DNA, 25 bp, Homo sapien
catagacctccaagatgtagcccct

SEQ ID NO: 4337454 - DNA, 25 bp, Homo sapien
gacatctatgctgaaccgcattcct

SEQ ID NO: 4337455 - DNA, 25 bp, Homo sapien
caattggtccaaggtcaggtaactc

SEQ ID NO: 4337456 - DNA, 25 bp, Homo sapien
tcaaagtggacaccatagacctcca

SEQ ID NO: 4337457 - DNA, 25 bp, Homo sapien
gaatgacgcagatctcattgggctg

SEQ ID NO: 4337458 - DNA, 25 bp, Homo sapien
ctgaatgacgcagatctcattgggc

SEQ ID NO: 4337459 - DNA, 25 bp, Homo sapien
catcttgccaaactcggtgtaaatg

SEQ ID NO: 4337460 - DNA, 25 bp, Homo sapien
ccaaactcggtgtaaatgagaaggt

SEQ ID NO: 4337461 - DNA, 25 bp, Homo sapien
agaagtccccatctgaattgtaaaa

SEQ ID NO: 4337462 - DNA, 25 bp, Homo sapien
tcaagaagtccccatctgaattgta

SEQ ID NO: 4337463 - DNA, 25 bp, Homo sapien
caatcaagaagtccccatctgaatt

SEQ ID NO: 4337464 - DNA, 25 bp, Homo sapien
agtccccatctgaattgtaaaagca

SEQ ID NO: 4337465 - DNA, 25 bp, Homo sapien
ctgttctccatggaggtattgcaga

SEQ ID NO: 4337466 - DNA, 25 bp, Homo sapien
aggaaaatgtggatagcaagcccat

SEQ ID NO: 4337467 - DNA, 25 bp, Homo sapien
ctccatggaggtattgcagaggaaa

SEQ ID NO: 4337468 - DNA, 25 bp, Homo sapien
agaggaaaatgtggatagcaagccc

SEQ ID NO: 4337469 - DNA, 25 bp, Homo sapien
ccagctccacacaaggtatgcaggc

SEQ ID NO: 4337470 - DNA, 25 bp, Homo sapien
tgttagactttatgtctccagctcc

SEQ ID NO: 4337471 - DNA, 25 bp, Homo sapien
agactttatgtctccagctccacac

SEQ ID NO: 4337472 - DNA, 25 bp, Homo sapien
cagctccacacaaggtatgcaggcc

SEQ ID NO: 4337473 - DNA, 25 bp, Homo sapien
cagcctctaaggagcctgaatttac

SEQ ID NO: 4337474 - DNA, 25 bp, Homo sapien
taatgtgaacggtgcccaagaggca

SEQ ID NO: 4337475 - DNA, 25 bp, Homo sapien
tgggacgtttggaatccaggcagcc

SEQ ID NO: 4337476 - DNA, 25 bp, Homo sapien
ggtttaccctagtctccagccatgg

SEQ ID NO: 4337477 - DNA, 25 bp, Homo sapien
tttgatgcttgacatcaactggaag

SEQ ID NO: 4337478 - DNA, 25 bp, Homo sapien
cagttcattacttggtattttatca

SEQ ID NO: 4337479 - DNA, 25 bp, Homo sapien
agagtatcagttcattacttggtat

SEQ ID NO: 4337480 - DNA, 25 bp, Homo sapien
gaagagattctgttggaggtaccat

SEQ ID NO: 4337481 - DNA, 25 bp, Homo sapien
aacaatttatcctatggctcggcac

SEQ ID NO: 4337482 - DNA, 25 bp, Homo sapien
tgaattgacgccattctagcccaag

SEQ ID NO: 4337483 - DNA, 25 bp, Homo sapien
tgtgtgaccagatgatccatagtgc

SEQ ID NO: 4337484 - DNA, 25 bp, Homo sapien
aaaccacagcagtattagaggtgcc

SEQ ID NO: 4337485 - DNA, 25 bp, Homo sapien
tagttcatgaataccctctggtgtc

SEQ ID NO: 4337486 - DNA, 25 bp, Homo sapien
ccccaaagcatacgcaggtggtttt

SEQ ID NO: 4337487 - DNA, 25 bp, Homo sapien
tctgtaagtaagacatccctccgcc

SEQ ID NO: 4337488 - DNA, 25 bp, Homo sapien
ttcaggctgcaaatggttggctcac

SEQ ID NO: 4337489 - DNA, 25 bp, Homo sapien
aagtctactttcttctgagatgctt

SEQ ID NO: 4337490 - DNA, 25 bp, Homo sapien
aaagtctactttcttctgagatgct

SEQ ID NO: 4337491 - DNA, 25 bp, Homo sapien
attacttcacaagggtaaaccatag

SEQ ID NO: 4337492 - DNA, 25 bp, Homo sapien
accatagaccttctaaataaatagc

SEQ ID NO: 4337493 - DNA, 25 bp, Homo sapien
cctctgtgaggctctacttgtgatt

SEQ ID NO: 4337494 - DNA, 25 bp, Homo sapien
aaaggacagctaccccctctgtgag

SEQ ID NO: 4337495 - DNA, 25 bp, Homo sapien
gcaacgaccttgacgaaccttctct

SEQ ID NO: 4337496 - DNA, 25 bp, Homo sapien
cacaatccggaagaagcaacgacct

SEQ ID NO: 4337497 - DNA, 25 bp, Homo sapien
caccaaatgacagagatagtatagg

SEQ ID NO: 4337498 - DNA, 25 bp, Homo sapien
ttctctaatgcaaaaaatgatcccc

SEQ ID NO: 4337499 - DNA, 25 bp, Homo sapien
gctactgtctctgttcccgttttct

SEQ ID NO: 4337500 - DNA, 25 bp, Homo sapien
actgtctctgttcccgttttctctg

SEQ ID NO: 4337501 - DNA, 25 bp, Homo sapien
aataggaagagtccatggagtgcat

SEQ ID NO: 4337502 - DNA, 25 bp, Homo sapien
ttttgctactgtctctgttcccgtt

SEQ ID NO: 4337503 - DNA, 25 bp, Homo sapien
cctcaggtcttcaaattcccagaga

SEQ ID NO: 4337504 - DNA, 25 bp, Homo sapien
tggtgaagctgatgaagtattggat

SEQ ID NO: 4337505 - DNA, 25 bp, Homo sapien
gactaatgtggatagttggtgaagc

SEQ ID NO: 4337506 - DNA, 25 bp, Homo sapien
cttcaaattcccagagatgactaat

SEQ ID NO: 4337507 - DNA, 25 bp, Homo sapien
ttttccaatgaccatggtattctat

SEQ ID NO: 4337508 - DNA, 25 bp, Homo sapien
tctattttttccaatgaccatggta

SEQ ID NO: 4337509 - DNA, 25 bp, Homo sapien
ttccaatgaccatggtattctattt

SEQ ID NO: 4337510 - DNA, 25 bp, Homo sapien
ttttttccaatgaccatggtattct

SEQ ID NO: 4337511 - DNA, 25 bp, Homo sapien
ggctttgggtatatgataagcttca

SEQ ID NO: 4337512 - DNA, 25 bp, Homo sapien
gcttcaattcacaggaccaggttac

SEQ ID NO: 4337513 - DNA, 25 bp, Homo sapien
ctttgggtatatgataagcttcaat

SEQ ID NO: 4337514 - DNA, 25 bp, Homo sapien
tcaaggctttgggtatatgataagc

SEQ ID NO: 4337515 - DNA, 25 bp, Homo sapien
agtgacttggccttcgtcaatggat

SEQ ID NO: 4337516 - DNA, 25 bp, Homo sapien
cttcatcccagttgtgagtgacttg

SEQ ID NO: 4337517 - DNA, 25 bp, Homo sapien
taggatcaggatcaacttcatccca

SEQ ID NO: 4337518 - DNA, 25 bp, Homo sapien
tcaaagggcttgtgagaaactgaag

SEQ ID NO: 4337519 - DNA, 25 bp, Homo sapien
ggacaacggaagaccagacctgaat

SEQ ID NO: 4337520 - DNA, 25 bp, Homo sapien
gggtactgccctgacaaaatacaga

SEQ ID NO: 4337521 - DNA, 25 bp, Homo sapien
tgatgacgtgacctcagaccttggt

SEQ ID NO: 4337522 - DNA, 25 bp, Homo sapien
gaagctcactaagagggacccaagt

SEQ ID NO: 4337523 - DNA, 25 bp, Homo sapien
ttcagcctgctggaacaaagctcag

SEQ ID NO: 4337524 - DNA, 25 bp, Homo sapien
aactccccaggcagtactacattgc

SEQ ID NO: 4337525 - DNA, 25 bp, Homo sapien
ttctgattcagggaacagtgccagc

SEQ ID NO: 4337526 - DNA, 25 bp, Homo sapien
cctgctggctgaagatattgctgaa

SEQ ID NO: 4337527 - DNA, 25 bp, Homo sapien
tccgtggacaagtgaaagccgatcc

SEQ ID NO: 4337528 - DNA, 25 bp, Homo sapien
gaaagccgatcctgagagctgctca

SEQ ID NO: 4337529 - DNA, 25 bp, Homo sapien
attggtgctccgtggacaagtgaaa

SEQ ID NO: 4337530 - DNA, 25 bp, Homo sapien
gctgctcagcatagagattgtaggg

SEQ ID NO: 4337531 - DNA, 25 bp, Homo sapien
gatggggatgctctgggcgactgca

SEQ ID NO: 4337532 - DNA, 25 bp, Homo sapien
ccaaccaactcagtagggggatggg

SEQ ID NO: 4337533 - DNA, 25 bp, Homo sapien
ggggatggggatgctctgggcgact

SEQ ID NO: 4337534 - DNA, 25 bp, Homo sapien
ggatggggatgctctgggcgactgc

SEQ ID NO: 4337535 - DNA, 25 bp, Homo sapien
cctgggcagcgaggatcctctgaag

SEQ ID NO: 4337536 - DNA, 25 bp, Homo sapien
gcagcgaggatcctctgaagaacac

SEQ ID NO: 4337537 - DNA, 25 bp, Homo sapien
agcgaggatcctctgaagaacactc

SEQ ID NO: 4337538 - DNA, 25 bp, Homo sapien
tgggcagcgaggatcctctgaagaa

SEQ ID NO: 4337539 - DNA, 25 bp, Homo sapien
gagtgatgatcaggccaacaacagt

SEQ ID NO: 4337540 - DNA, 25 bp, Homo sapien
tggatgtgtgagtgatgatcaggcc

SEQ ID NO: 4337541 - DNA, 25 bp, Homo sapien
ctgatactcagtggcgtggagatgt

SEQ ID NO: 4337542 - DNA, 25 bp, Homo sapien
ctcagtggcgtggagatgtaacaag

SEQ ID NO: 4337543 - DNA, 25 bp, Homo sapien
caccgcctgggtatctcagtttggc

SEQ ID NO: 4337544 - DNA, 25 bp, Homo sapien
cagttagagggcattagggcacttc

SEQ ID NO: 4337545 - DNA, 25 bp, Homo sapien
aagactcagtttaggtacaggctcc

SEQ ID NO: 4337546 - DNA, 25 bp, Homo sapien
caaagtcttttactccggtgtggag

SEQ ID NO: 4337547 - DNA, 25 bp, Homo sapien
tatgtgtggtgacttcaggaaaccc

SEQ ID NO: 4337548 - DNA, 25 bp, Homo sapien
cagtgcgtcactcaaactagctgaa

SEQ ID NO: 4337549 - DNA, 25 bp, Homo sapien
ggatattccggttcccactgcttca

SEQ ID NO: 4337550 - DNA, 25 bp, Homo sapien
cccaggcccagaggatataaagcca

SEQ ID NO: 4337551 - DNA, 25 bp, Homo sapien
aaaacggagttaggcatcagaggac

SEQ ID NO: 4337552 - DNA, 25 bp, Homo sapien
tatacttgatggtactgagcgaggt

SEQ ID NO: 4337553 - DNA, 25 bp, Homo sapien
gactccaggacagatgtctccgaga

SEQ ID NO: 4337554 - DNA, 25 bp, Homo sapien
tgagccaagtcccatagagtaagag

SEQ ID NO: 4337555 - DNA, 25 bp, Homo sapien
caacgttaagatggagagaccagcc

SEQ ID NO: 4337556 - DNA, 25 bp, Homo sapien
tatgcagaagtataatcagaggaca

SEQ ID NO: 4337557 - DNA, 25 bp, Homo sapien
tacttcagggaacagtcacttaggg

SEQ ID NO: 4337558 - DNA, 25 bp, Homo sapien
ggtatgagaaaccttgcttctgcag

SEQ ID NO: 4337559 - DNA, 25 bp, Homo sapien
caaggaatcaagcttggctgcagaa

SEQ ID NO: 4337560 - DNA, 25 bp, Homo sapien
caagaagtcctagcaaaaattgtgc

SEQ ID NO: 4337561 - DNA, 25 bp, Homo sapien
cctggagtcatcagcaatagtttac

SEQ ID NO: 4337562 - DNA, 25 bp, Homo sapien
catatgtaaagagatggagtcccac

SEQ ID NO: 4337563 - DNA, 25 bp, Homo sapien
ggagaacagtctagctgatgaaagc

SEQ ID NO: 4337564 - DNA, 25 bp, Homo sapien
ggtagcatttggtttctacttccca

SEQ ID NO: 4337565 - DNA, 25 bp, Homo sapien
taatatcctcttgcagcataccttg

SEQ ID NO: 4337566 - DNA, 25 bp, Homo sapien
tcccaactgtacagcctatgcaaca

SEQ ID NO: 4337567 - DNA, 25 bp, Homo sapien
gcagcaaccttaagagtgagggagc

SEQ ID NO: 4337568 - DNA, 25 bp, Homo sapien
tatacacagggacagaaaggtaagg

SEQ ID NO: 4337569 - DNA, 25 bp, Homo sapien
gctaagggacatttcaggagttgac

SEQ ID NO: 4337570 - DNA, 25 bp, Homo sapien
tcagggctggttaacaagaccgttc

SEQ ID NO: 4337571 - DNA, 25 bp, Homo sapien
tcctgccccaaatcttttccgatca

SEQ ID NO: 4337572 - DNA, 25 bp, Homo sapien
cctgccccaaatcttttccgatcag

SEQ ID NO: 4337573 - DNA, 25 bp, Homo sapien
tgccccaaatcttttccgatcagga

SEQ ID NO: 4337574 - DNA, 25 bp, Homo sapien
ctgccccaaatcttttccgatcagg

SEQ ID NO: 4337575 - DNA, 25 bp, Homo sapien
aaatctcataatacctactagactt

SEQ ID NO: 4337576 - DNA, 25 bp, Homo sapien
tttgtattgtgacagaccctgaacg

SEQ ID NO: 4337577 - DNA, 25 bp, Homo sapien
aattggtgatagtgtcatctaaatc

SEQ ID NO: 4337578 - DNA, 25 bp, Homo sapien
tctgaggttttactcagaaaaccac

SEQ ID NO: 4337579 - DNA, 25 bp, Homo sapien
cttattcctagattatatttgtttc

SEQ ID NO: 4337580 - DNA, 25 bp, Homo sapien
atcagttgcttgtgcctataaaggg

SEQ ID NO: 4337581 - DNA, 25 bp, Homo sapien
tgtatttaacaggatagaaggaaat

SEQ ID NO: 4337582 - DNA, 25 bp, Homo sapien
ttgcttgtgcctataaagggctttc

SEQ ID NO: 4337583 - DNA, 25 bp, Homo sapien
tgattaccttctcttaaaaagtatc

SEQ ID NO: 4337584 - DNA, 25 bp, Homo sapien
ttaaaaagtatctcttctctatgac

SEQ ID NO: 4337585 - DNA, 25 bp, Homo sapien
ctcttaaaaagtatctcttctctat

SEQ ID NO: 4337586 - DNA, 25 bp, Homo sapien
ctgattaccttctcttaaaaagtat

SEQ ID NO: 4337587 - DNA, 25 bp, Homo sapien
cacatccctatagtaagtggtgaca

SEQ ID NO: 4337588 - DNA, 25 bp, Homo sapien
tatgcaattcttagagtatgacagc

SEQ ID NO: 4337589 - DNA, 25 bp, Homo sapien
taagtttcctagcagtcagtcccaa

SEQ ID NO: 4337590 - DNA, 25 bp, Homo sapien
tgttcaagcagcagatgtatctgca

SEQ ID NO: 4337591 - DNA, 25 bp, Homo sapien
gcttgacagcattggaagaacctgc

SEQ ID NO: 4337592 - DNA, 25 bp, Homo sapien
cttatcaaaaaacctactgagcttg

SEQ ID NO: 4337593 - DNA, 25 bp, Homo sapien
tggaagaacctgcagctaagtaccg

SEQ ID NO: 4337594 - DNA, 25 bp, Homo sapien
ctaagtaccgtggatttgtgcagtc

SEQ ID NO: 4337595 - DNA, 25 bp, Homo sapien
tttcttagcttttttacgcgctcag

SEQ ID NO: 4337596 - DNA, 25 bp, Homo sapien
ttttttacgcgctcagttctcattg

SEQ ID NO: 4337597 - DNA, 25 bp, Homo sapien
tgagctagttatctcatcaagggac

SEQ ID NO: 4337598 - DNA, 25 bp, Homo sapien
agttctcattgagctagttatctca

SEQ ID NO: 4337599 - DNA, 25 bp, Homo sapien
taataatacaagcatgcattagtga

SEQ ID NO: 4337600 - DNA, 25 bp, Homo sapien
gataataatacaagcatgcattagt

SEQ ID NO: 4337601 - DNA, 25 bp, Homo sapien
aataatacaagcatgcattagtgaa

SEQ ID NO: 4337602 - DNA, 25 bp, Homo sapien
ccgataataatacaagcatgcatta

SEQ ID NO: 4337603 - DNA, 25 bp, Homo sapien
gaatctggtccagtttagtccctat

SEQ ID NO: 4337604 - DNA, 25 bp, Homo sapien
caggaaagcagtcctagttaaaact

SEQ ID NO: 4337605 - DNA, 25 bp, Homo sapien
ttcttctggattgaaatcctcagcc

SEQ ID NO: 4337606 - DNA, 25 bp, Homo sapien
aacttcatggcgctttgtttcatga

SEQ ID NO: 4337607 - DNA, 25 bp, Homo sapien
tacaacccagtcgagcatagctttt

SEQ ID NO: 4337608 - DNA, 25 bp, Homo sapien
tgttcagcctcggaacacaagtgtt

SEQ ID NO: 4337609 - DNA, 25 bp, Homo sapien
gatttctgacacgttataagctcaa

SEQ ID NO: 4337610 - DNA, 25 bp, Homo sapien
caataatcttacagcgcctcagcaa

SEQ ID NO: 4337611 - DNA, 25 bp, Homo sapien
tgttgagagcttccaatgaccaacg

SEQ ID NO: 4337612 - DNA, 25 bp, Homo sapien
tcttatttgttaagtcgtgtacgaa

SEQ ID NO: 4337613 - DNA, 25 bp, Homo sapien
cagttggcaccaaatccctgttgag

SEQ ID NO: 4337614 - DNA, 25 bp, Homo sapien
tgaccaacgacgcaagttttgggag

SEQ ID NO: 4337615 - DNA, 25 bp, Homo sapien
ctatgtagtaggtcttctcttctgg

SEQ ID NO: 4337616 - DNA, 25 bp, Homo sapien
gagcctccaacatcccataattcta

SEQ ID NO: 4337617 - DNA, 25 bp, Homo sapien
catttacggagttgtagaatactgc

SEQ ID NO: 4337618 - DNA, 25 bp, Homo sapien
ctgctcttgtgcttttcacgctgct

SEQ ID NO: 4337619 - DNA, 25 bp, Homo sapien
gcaacatttttcacctggcttctgg

SEQ ID NO: 4337620 - DNA, 25 bp, Homo sapien
tataatggtctctgactgatctccc

SEQ ID NO: 4337621 - DNA, 25 bp, Homo sapien
caaagtctctatctccttgcctgaa

SEQ ID NO: 4337622 - DNA, 25 bp, Homo sapien
ggcttctgggatatcacactcttct

SEQ ID NO: 4337623 - DNA, 25 bp, Homo sapien
gtcatgtagtgcctctgtgcttcaa

SEQ ID NO: 4337624 - DNA, 25 bp, Homo sapien
cattgttaggctgtccaaagaggaa

SEQ ID NO: 4337625 - DNA, 25 bp, Homo sapien
aaatggatgcctagccaaagtaagc

SEQ ID NO: 4337626 - DNA, 25 bp, Homo sapien
caggagcacaggttcttgaagcaga

SEQ ID NO: 4337627 - DNA, 25 bp, Homo sapien
caagccaacctcataacctctatga

SEQ ID NO: 4337628 - DNA, 25 bp, Homo sapien
agccaacctcataacctctatgact

SEQ ID NO: 4337629 - DNA, 25 bp, Homo sapien
tttcaagccaacctcataacctcta

SEQ ID NO: 4337630 - DNA, 25 bp, Homo sapien
tcaagccaacctcataacctctatg

SEQ ID NO: 4337631 - DNA, 25 bp, Homo sapien
gcagcccacagtccatgatggattt

SEQ ID NO: 4337632 - DNA, 25 bp, Homo sapien
cttgattttggcataggagatggac

SEQ ID NO: 4337633 - DNA, 25 bp, Homo sapien
taggagatggactaacgaagatttc

SEQ ID NO: 4337634 - DNA, 25 bp, Homo sapien
tggactaacgaagatttcccaacac

SEQ ID NO: 4337635 - DNA, 25 bp, Homo sapien
taagttccttgagggttcttacgca

SEQ ID NO: 4337636 - DNA, 25 bp, Homo sapien
tgagggttcttacgcagctttttta

SEQ ID NO: 4337637 - DNA, 25 bp, Homo sapien
cctaattggtcatcttggaaccact

SEQ ID NO: 4337638 - DNA, 25 bp, Homo sapien
ccttgagggttcttacgcagctttt

SEQ ID NO: 4337639 - DNA, 25 bp, Homo sapien
cacccacttaacgtatcatgaagaa

SEQ ID NO: 4337640 - DNA, 25 bp, Homo sapien
catgaagaagtctgttagttctgga

SEQ ID NO: 4337641 - DNA, 25 bp, Homo sapien
ggcaccacttcaagctacctgatag

SEQ ID NO: 4337642 - DNA, 25 bp, Homo sapien
caagtccctttaggccacaattact

SEQ ID NO: 4337643 - DNA, 25 bp, Homo sapien
gcgtcgtcacacggagcaaagtccc

SEQ ID NO: 4337644 - DNA, 25 bp, Homo sapien
cgcgtcgtcacacggagcaaagtcc

SEQ ID NO: 4337645 - DNA, 25 bp, Homo sapien
ccttcacccgatccagggacgccat

SEQ ID NO: 4337646 - DNA, 25 bp, Homo sapien
accagtaccttcacccgatccaggg

SEQ ID NO: 4337647 - DNA, 25 bp, Homo sapien
cccaacaccagtaccttcacccgat

SEQ ID NO: 4337648 - DNA, 25 bp, Homo sapien
gtctcccaacaccagtaccttcacc

SEQ ID NO: 4337649 - DNA, 25 bp, Homo sapien
cactgccttccctgggttaacgcct

SEQ ID NO: 4337650 - DNA, 25 bp, Homo sapien
tgccactgccttccctgggttaacg

SEQ ID NO: 4337651 - DNA, 25 bp, Homo sapien
actgccttccctgggttaacgcctg

SEQ ID NO: 4337652 - DNA, 25 bp, Homo sapien
cttgccactgccttccctgggttaa

SEQ ID NO: 4337653 - DNA, 25 bp, Homo sapien
agttgggcatggagggcagagcctt

SEQ ID NO: 4337654 - DNA, 25 bp, Homo sapien
tagtgggagtgttccaggattcgcc

SEQ ID NO: 4337655 - DNA, 25 bp, Homo sapien
tccccagctggtcgcaggaatagtg

SEQ ID NO: 4337656 - DNA, 25 bp, Homo sapien
tcatttaagccggtagttgaagcgc

SEQ ID NO: 4337657 - DNA, 25 bp, Homo sapien
gaactcattggctggtctggtaaaa

SEQ ID NO: 4337658 - DNA, 25 bp, Homo sapien
tccaaagaaccattgaccccggagc

SEQ ID NO: 4337659 - DNA, 25 bp, Homo sapien
cctggacccaactgggagagtccga

SEQ ID NO: 4337660 - DNA, 25 bp, Homo sapien
caccgaacgcgtctcgtggagggca

SEQ ID NO: 4337661 - DNA, 25 bp, Homo sapien
ggaggagtgcatatcaccgaacgcg

SEQ ID NO: 4337662 - DNA, 25 bp, Homo sapien
ggaagtgaagcagggggaagctggc

SEQ ID NO: 4337663 - DNA, 25 bp, Homo sapien
agcagggggaagctggcaagatgag

SEQ ID NO: 4337664 - DNA, 25 bp, Homo sapien
aggaagtgaagcagggggaagctgg

SEQ ID NO: 4337665 - DNA, 25 bp, Homo sapien
gtgaagcagggggaagctggcaaga

SEQ ID NO: 4337666 - DNA, 25 bp, Homo sapien
cactattctaagtgccaggcccatt

SEQ ID NO: 4337667 - DNA, 25 bp, Homo sapien
gacagtcatgttatcaaaagcctct

SEQ ID NO: 4337668 - DNA, 25 bp, Homo sapien
cagaaatctgttacgtgtgacttaa

SEQ ID NO: 4337669 - DNA, 25 bp, Homo sapien
taagctctaaggaggaggttcagcc

SEQ ID NO: 4337670 - DNA, 25 bp, Homo sapien
tgagggaagttcataaggtaaatcc

SEQ ID NO: 4337671 - DNA, 25 bp, Homo sapien
cccttctgaaatgagtgagggaagt

SEQ ID NO: 4337672 - DNA, 25 bp, Homo sapien
ttatctgttctagccaggcattcca

SEQ ID NO: 4337673 - DNA, 25 bp, Homo sapien
gcagcttgccaacagtcaaatcact

SEQ ID NO: 4337674 - DNA, 25 bp, Homo sapien
tgctgaagctatccatgctgcaaac

SEQ ID NO: 4337675 - DNA, 25 bp, Homo sapien
gatccagactatgaaccaaagaaag

SEQ ID NO: 4337676 - DNA, 25 bp, Homo sapien
tcaaaacgcagcagagtgcaagcag

SEQ ID NO: 4337677 - DNA, 25 bp, Homo sapien
tgagtgtataatcccaagatcagtg

SEQ ID NO: 4337678 - DNA, 25 bp, Homo sapien
ggaagaatttacattatccgacagg

SEQ ID NO: 4337679 - DNA, 25 bp, Homo sapien
gaatttacattatccgacaggccta

SEQ ID NO: 4337680 - DNA, 25 bp, Homo sapien
tacattatccgacaggcctattttc

SEQ ID NO: 4337681 - DNA, 25 bp, Homo sapien
tatccgacaggcctattttcaagtt

SEQ ID NO: 4337682 - DNA, 25 bp, Homo sapien
gaaatggactaattcccattagcta

SEQ ID NO: 4337683 - DNA, 25 bp, Homo sapien
taaatttaggaacatcccctgatca

SEQ ID NO: 4337684 - DNA, 25 bp, Homo sapien
tagctttccctaatgcctgttcctc

SEQ ID NO: 4337685 - DNA, 25 bp, Homo sapien
aattcttttaaccttgccatatagc

SEQ ID NO: 4337686 - DNA, 25 bp, Homo sapien
caatgagcagaatcttaaggaagag

SEQ ID NO: 4337687 - DNA, 25 bp, Homo sapien
ggaaatttagcccaaattcagtgga

SEQ ID NO: 4337688 - DNA, 25 bp, Homo sapien
aaataatgccccgaattcctcagaa

SEQ ID NO: 4337689 - DNA, 25 bp, Homo sapien
acatgcacatgcaagagactgctat

SEQ ID NO: 4337690 - DNA, 25 bp, Homo sapien
agttgggaatgaggtggcatcacaa

SEQ ID NO: 4337691 - DNA, 25 bp, Homo sapien
gcatcacaagggacaaattagctcc

SEQ ID NO: 4337692 - DNA, 25 bp, Homo sapien
gaatgaggtggcatcacaagggaca

SEQ ID NO: 4337693 - DNA, 25 bp, Homo sapien
ctaatgaactatggccaggagttgg

SEQ ID NO: 4337694 - DNA, 25 bp, Homo sapien
agtctgactagcaccactttagtgg

SEQ ID NO: 4337695 - DNA, 25 bp, Homo sapien
atgggagcacgtgggttgtttcctt

SEQ ID NO: 4337696 - DNA, 25 bp, Homo sapien
ggtgtgggatagcaaaagtctgact

SEQ ID NO: 4337697 - DNA, 25 bp, Homo sapien
atattgaagtacaggaaggcaccag

SEQ ID NO: 4337698 - DNA, 25 bp, Homo sapien
ggctgtacttatttaactctatcca

SEQ ID NO: 4337699 - DNA, 25 bp, Homo sapien
cattgaggcccattgagttgaatcc

SEQ ID NO: 4337700 - DNA, 25 bp, Homo sapien
cctttgaggtgttgccattgaggcc

SEQ ID NO: 4337701 - DNA, 25 bp, Homo sapien
ccattgagttgaatccacatcctta

SEQ ID NO: 4337702 - DNA, 25 bp, Homo sapien
gctcaagacaaagtaggtattccat

SEQ ID NO: 4337703 - DNA, 25 bp, Homo sapien
tcatgagtcaactgcttcctgaggg

SEQ ID NO: 4337704 - DNA, 25 bp, Homo sapien
ttccttgagagtagcgacggtgtct

SEQ ID NO: 4337705 - DNA, 25 bp, Homo sapien
cctgagggaccaatcatcttgggaa

SEQ ID NO: 4337706 - DNA, 25 bp, Homo sapien
tacacaactgcagctatcttcctct

SEQ ID NO: 4337707 - DNA, 25 bp, Homo sapien
cacaactgcagctatcttcctctga

SEQ ID NO: 4337708 - DNA, 25 bp, Homo sapien
ttacacaactgcagctatcttcctc

SEQ ID NO: 4337709 - DNA, 25 bp, Homo sapien
caactgcagctatcttcctctgaga

SEQ ID NO: 4337710 - DNA, 25 bp, Homo sapien
ttttcccttggcctacccatcacag

SEQ ID NO: 4337711 - DNA, 25 bp, Homo sapien
tacccatcacagaatagccaagttc

SEQ ID NO: 4337712 - DNA, 25 bp, Homo sapien
atagccaagttctacacagtctggg

SEQ ID NO: 4337713 - DNA, 25 bp, Homo sapien
gaccttctcttgagaatagccattt

SEQ ID NO: 4337714 - DNA, 25 bp, Homo sapien
tgggatcagtccttgcacgaagagg

SEQ ID NO: 4337715 - DNA, 25 bp, Homo sapien
cacgaagagggcatcgcagagattt

SEQ ID NO: 4337716 - DNA, 25 bp, Homo sapien
tcaggtgaagataccattgtctgca

SEQ ID NO: 4337717 - DNA, 25 bp, Homo sapien
gagatttagctccaaagaatactct

SEQ ID NO: 4337718 - DNA, 25 bp, Homo sapien
gtgcctttctcctccgtttagctta

SEQ ID NO: 4337719 - DNA, 25 bp, Homo sapien
ggcacagaggtaagccgtgttcctc

SEQ ID NO: 4337720 - DNA, 25 bp, Homo sapien
taagccgtgttcctctggctgggca

SEQ ID NO: 4337721 - DNA, 25 bp, Homo sapien
cagaggtaagccgtgttcctctggc

SEQ ID NO: 4337722 - DNA, 25 bp, Homo sapien
taaagaaggattatggctaaagaca

SEQ ID NO: 4337723 - DNA, 25 bp, Homo sapien
gctaaagacagtagagaactgggaa

SEQ ID NO: 4337724 - DNA, 25 bp, Homo sapien
actctggctgttactgaaaaaatgc

SEQ ID NO: 4337725 - DNA, 25 bp, Homo sapien
tctaaccacggagagctagagggag

SEQ ID NO: 4337726 - DNA, 25 bp, Homo sapien
gaaagtttatccttcatagccagag

SEQ ID NO: 4337727 - DNA, 25 bp, Homo sapien
gagctgattagaacagaaagtttat

SEQ ID NO: 4337728 - DNA, 25 bp, Homo sapien
cagccaaggagctgattagaacaga

SEQ ID NO: 4337729 - DNA, 25 bp, Homo sapien
tagccagagaggacccatttaaaag

SEQ ID NO: 4337730 - DNA, 25 bp, Homo sapien
tctgcttatggtaaagcaaagtcat

SEQ ID NO: 4337731 - DNA, 25 bp, Homo sapien
gaacttctgcttatggtaaagcaaa

SEQ ID NO: 4337732 - DNA, 25 bp, Homo sapien
tgtgtttgaacttctgcttatggta

SEQ ID NO: 4337733 - DNA, 25 bp, Homo sapien
cctcatgaccgtgtgtttgaacttc

SEQ ID NO: 4337734 - DNA, 25 bp, Homo sapien
gcgatggctgcagaacagcagatat

SEQ ID NO: 4337735 - DNA, 25 bp, Homo sapien
cagcgatggctgcagaacagcagat

SEQ ID NO: 4337736 - DNA, 25 bp, Homo sapien
agcgatggctgcagaacagcagata

SEQ ID NO: 4337737 - DNA, 25 bp, Homo sapien
cgatggctgcagaacagcagatatt

SEQ ID NO: 4337738 - DNA, 25 bp, Homo sapien
ggaattcaggtaacttcgagtgcta

SEQ ID NO: 4337739 - DNA, 25 bp, Homo sapien
gatacattcagctctggaattcagg

SEQ ID NO: 4337740 - DNA, 25 bp, Homo sapien
gctatgtaagctgtcaagtctaaac

SEQ ID NO: 4337741 - DNA, 25 bp, Homo sapien
caagtctaaacatctcttgggtttc

SEQ ID NO: 4337742 - DNA, 25 bp, Homo sapien
tgaaaatagacttccatacctctgc

SEQ ID NO: 4337743 - DNA, 25 bp, Homo sapien
gcatgaaaatagacttccatacctc

SEQ ID NO: 4337744 - DNA, 25 bp, Homo sapien
atgaaaatagacttccatacctctg

SEQ ID NO: 4337745 - DNA, 25 bp, Homo sapien
gaaaatagacttccatacctctgcc

SEQ ID NO: 4337746 - DNA, 25 bp, Homo sapien
ttgcatctgcaaggatgatgggtcc

SEQ ID NO: 4337747 - DNA, 25 bp, Homo sapien
cttgcatctgcaaggatgatgggtc

SEQ ID NO: 4337748 - DNA, 25 bp, Homo sapien
ctttgtagggttggcctggcctgct

SEQ ID NO: 4337749 - DNA, 25 bp, Homo sapien
tgcaaggatgatgggtcctcctgat

SEQ ID NO: 4337750 - DNA, 25 bp, Homo sapien
ttcaagataattggtgtgagctatt

SEQ ID NO: 4337751 - DNA, 25 bp, Homo sapien
tttcaagataattggtgtgagctat

SEQ ID NO: 4337752 - DNA, 25 bp, Homo sapien
ttttcaagataattggtgtgagcta

SEQ ID NO: 4337753 - DNA, 25 bp, Homo sapien
gttttcaagataattggtgtgagct

SEQ ID NO: 4337754 - DNA, 25 bp, Homo sapien
caggagatcctagaattaatttgtc

SEQ ID NO: 4337755 - DNA, 25 bp, Homo sapien
tcatcaatatccaatgaatctgtgt

SEQ ID NO: 4337756 - DNA, 25 bp, Homo sapien
tgtatagaatctttgatagttttca

SEQ ID NO: 4337757 - DNA, 25 bp, Homo sapien
ttattccccttggtaactctgagga

SEQ ID NO: 4337758 - DNA, 25 bp, Homo sapien
ttgtttttaatagctgtccttagat

SEQ ID NO: 4337759 - DNA, 25 bp, Homo sapien
gctgtccttagattctctggaatat

SEQ ID NO: 4337760 - DNA, 25 bp, Homo sapien
ttaatagctgtccttagattctctg

SEQ ID NO: 4337761 - DNA, 25 bp, Homo sapien
ccttagattctctggaatattctat

SEQ ID NO: 4337762 - DNA, 25 bp, Homo sapien
tctgacccagtgcttcacactgtct

SEQ ID NO: 4337763 - DNA, 25 bp, Homo sapien
tcacactgtcttttagtatttgtgt

SEQ ID NO: 4337764 - DNA, 25 bp, Homo sapien
cacactgtcttttagtatttgtgta

SEQ ID NO: 4337765 - DNA, 25 bp, Homo sapien
ggtaatattccctcactccaactgg

SEQ ID NO: 4337766 - DNA, 25 bp, Homo sapien
tacttttgtgagctaagacaggcag

SEQ ID NO: 4337767 - DNA, 25 bp, Homo sapien
gaatctaacaagtccgtgggcataa

SEQ ID NO: 4337768 - DNA, 25 bp, Homo sapien
catatggtactttttgccgtgttac

SEQ ID NO: 4337769 - DNA, 25 bp, Homo sapien
tacccagacagatgtggaaccaaag

SEQ ID NO: 4337770 - DNA, 25 bp, Homo sapien
tcaccatgccacaaacagaaagagg

SEQ ID NO: 4337771 - DNA, 25 bp, Homo sapien
cccagaagtttttgatgctatagac

SEQ ID NO: 4337772 - DNA, 25 bp, Homo sapien
caaatctttatctgcctatggctgc

SEQ ID NO: 4337773 - DNA, 25 bp, Homo sapien
aaagtcctttagctctccccagctg

SEQ ID NO: 4337774 - DNA, 25 bp, Homo sapien
gctggcgcctattttcactttcact

SEQ ID NO: 4337775 - DNA, 25 bp, Homo sapien
cagctggcgcctattttcactttca

SEQ ID NO: 4337776 - DNA, 25 bp, Homo sapien
cccagctggcgcctattttcacttt

SEQ ID NO: 4337777 - DNA, 25 bp, Homo sapien
ggatgaagaagcctcctctgattgg

SEQ ID NO: 4337778 - DNA, 25 bp, Homo sapien
aggatgaagaagcctcctctgattg

SEQ ID NO: 4337779 - DNA, 25 bp, Homo sapien
gatgaagaagcctcctctgattggg

SEQ ID NO: 4337780 - DNA, 25 bp, Homo sapien
tgaagaagcctcctctgattgggca

SEQ ID NO: 4337781 - DNA, 25 bp, Homo sapien
cccttgcagttttctctttcgtgac

SEQ ID NO: 4337782 - DNA, 25 bp, Homo sapien
tgcagttttctctttcgtgacaatc

SEQ ID NO: 4337783 - DNA, 25 bp, Homo sapien
cttgcagttttctctttcgtgacaa

SEQ ID NO: 4337784 - DNA, 25 bp, Homo sapien
ccttgcagttttctctttcgtgaca

SEQ ID NO: 4337785 - DNA, 25 bp, Homo sapien
tattttgacaatatcagctgctgat

SEQ ID NO: 4337786 - DNA, 25 bp, Homo sapien
gctgatccttggactattgtgttga

SEQ ID NO: 4337787 - DNA, 25 bp, Homo sapien
gaaggtctctaattgcttctgaatg

SEQ ID NO: 4337788 - DNA, 25 bp, Homo sapien
ttgtgttgatagcttgacgctcagc

SEQ ID NO: 4337789 - DNA, 25 bp, Homo sapien
cactgtctctgtcatgaattgatta

SEQ ID NO: 4337790 - DNA, 25 bp, Homo sapien
ggcaaatatctacgccttcccaaaa

SEQ ID NO: 4337791 - DNA, 25 bp, Homo sapien
tcccaaaatggtctgaacaaatccg

SEQ ID NO: 4337792 - DNA, 25 bp, Homo sapien
gagctttacgataagggttgttgtc

SEQ ID NO: 4337793 - DNA, 25 bp, Homo sapien
ctgttgattgacttggggagtatga

SEQ ID NO: 4337794 - DNA, 25 bp, Homo sapien
ggaatgcattaaatctgttgattga

SEQ ID NO: 4337795 - DNA, 25 bp, Homo sapien
tctttggctaattcctaagtgttta

SEQ ID NO: 4337796 - DNA, 25 bp, Homo sapien
tgacttggggagtatgaacatttta

SEQ ID NO: 4337797 - DNA, 25 bp, Homo sapien
ccaaagatttagctcccattccata

SEQ ID NO: 4337798 - DNA, 25 bp, Homo sapien
caaagatttagctcccattccataa

SEQ ID NO: 4337799 - DNA, 25 bp, Homo sapien
cccaaagatttagctcccattccat

SEQ ID NO: 4337800 - DNA, 25 bp, Homo sapien
agtcaatatagcatgcagcatcatt

SEQ ID NO: 4337801 - DNA, 25 bp, Homo sapien
gctcctgaaaacatcagctccagtg

SEQ ID NO: 4337802 - DNA, 25 bp, Homo sapien
ttaacacttgaatgagacgacgatc

SEQ ID NO: 4337803 - DNA, 25 bp, Homo sapien
cgacgatcatgggataaatgagcca

SEQ ID NO: 4337804 - DNA, 25 bp, Homo sapien
ctgagagtagtcagcagccagtatt

SEQ ID NO: 4337805 - DNA, 25 bp, Homo sapien
ttatgcctcacagatattgcaggtt

SEQ ID NO: 4337806 - DNA, 25 bp, Homo sapien
caacttgggcgtgtgatctactttt

SEQ ID NO: 4337807 - DNA, 25 bp, Homo sapien
acatagggtcttgctttttcgccta

SEQ ID NO: 4337808 - DNA, 25 bp, Homo sapien
tgagtggagcaagtgtttcagcacc

SEQ ID NO: 4337809 - DNA, 25 bp, Homo sapien
agtgaaagggaaagtcgcatctctc

SEQ ID NO: 4337810 - DNA, 25 bp, Homo sapien
gcatctctctcacgttaaaccaaaa

SEQ ID NO: 4337811 - DNA, 25 bp, Homo sapien
gttactacgctgaacacacaaatga

SEQ ID NO: 4337812 - DNA, 25 bp, Homo sapien
aaacgattaagcttatgaggaaggc

SEQ ID NO: 4337813 - DNA, 25 bp, Homo sapien
aaaggcatgtcgcatgctaattgaa

SEQ ID NO: 4337814 - DNA, 25 bp, Homo sapien
acaaaggcatgtcgcatgctaattg

SEQ ID NO: 4337815 - DNA, 25 bp, Homo sapien
aaggcatgtcgcatgctaattgaaa

SEQ ID NO: 4337816 - DNA, 25 bp, Homo sapien
cacaaaggcatgtcgcatgctaatt

SEQ ID NO: 4337817 - DNA, 25 bp, Homo sapien
gattcacgctgaaacccttcttata

SEQ ID NO: 4337818 - DNA, 25 bp, Homo sapien
catctaggattcacgctgaaaccct

SEQ ID NO: 4337819 - DNA, 25 bp, Homo sapien
ggcatctaggattcacgctgaaacc

SEQ ID NO: 4337820 - DNA, 25 bp, Homo sapien
taggattcacgctgaaacccttctt

SEQ ID NO: 4337821 - DNA, 25 bp, Homo sapien
gggaagtaggcctttgcctacagct

SEQ ID NO: 4337822 - DNA, 25 bp, Homo sapien
tgcccatgggaagtaggcctttgcc

SEQ ID NO: 4337823 - DNA, 25 bp, Homo sapien
cccatgggaagtaggcctttgccta

SEQ ID NO: 4337824 - DNA, 25 bp, Homo sapien
ctgcccatgggaagtaggcctttgc

SEQ ID NO: 4337825 - DNA, 25 bp, Homo sapien
ttcaaaatctcttggcacattctga

SEQ ID NO: 4337826 - DNA, 25 bp, Homo sapien
tttcaaaatctcttggcacattctg

SEQ ID NO: 4337827 - DNA, 25 bp, Homo sapien
tcaaaatctcttggcacattctgaa

SEQ ID NO: 4337828 - DNA, 25 bp, Homo sapien
ctgtagcagtgtgcgactgtgatac

SEQ ID NO: 4337829 - DNA, 25 bp, Homo sapien
aagcctggtaaaggatgtaatgcct

SEQ ID NO: 4337830 - DNA, 25 bp, Homo sapien
gattaagacacttttcccgctgaag

SEQ ID NO: 4337831 - DNA, 25 bp, Homo sapien
actgtgatacaggatagattctttc

SEQ ID NO: 4337832 - DNA, 25 bp, Homo sapien
cttagcttgcgtccattgtcaatcc

SEQ ID NO: 4337833 - DNA, 25 bp, Homo sapien
cccagccttagcttgcgtccattgt

SEQ ID NO: 4337834 - DNA, 25 bp, Homo sapien
cagccttagcttgcgtccattgtca

SEQ ID NO: 4337835 - DNA, 25 bp, Homo sapien
tagtgctgaactgtcttcccagcct

SEQ ID NO: 4337836 - DNA, 25 bp, Homo sapien
tatttgggggcaacttcaattccaa

SEQ ID NO: 4337837 - DNA, 25 bp, Homo sapien
tctatttgggggcaacttcaattcc

SEQ ID NO: 4337838 - DNA, 25 bp, Homo sapien
ctctctatttgggggcaacttcaat

SEQ ID NO: 4337839 - DNA, 25 bp, Homo sapien
ctctatttgggggcaacttcaattc

SEQ ID NO: 4337840 - DNA, 25 bp, Homo sapien
tctacagttcaacatggattgaaat

SEQ ID NO: 4337841 - DNA, 25 bp, Homo sapien
ctctttagtcaagaatgaaacttgc

SEQ ID NO: 4337842 - DNA, 25 bp, Homo sapien
atcaaaatttatatgtcaggtagtc

SEQ ID NO: 4337843 - DNA, 25 bp, Homo sapien
aatgaaacttgcaaggattatcatt

SEQ ID NO: 4337844 - DNA, 25 bp, Homo sapien
aatgaggctgctcaatcagttaagc

SEQ ID NO: 4337845 - DNA, 25 bp, Homo sapien
ggaacacaggcacgtatatacactg

SEQ ID NO: 4337846 - DNA, 25 bp, Homo sapien
gacattgagacttattgctctaaga

SEQ ID NO: 4337847 - DNA, 25 bp, Homo sapien
taagaattgtgagctctcctaaatg

SEQ ID NO: 4337848 - DNA, 25 bp, Homo sapien
tgatagtccctaggcacaaaaagtt

SEQ ID NO: 4337849 - DNA, 25 bp, Homo sapien
ggtggaagaccccatgtaacactca

SEQ ID NO: 4337850 - DNA, 25 bp, Homo sapien
ggtagcacccactgaagacaccaga

SEQ ID NO: 4337851 - DNA, 25 bp, Homo sapien
gaaactagggcaattcagaacatta

SEQ ID NO: 4337852 - DNA, 25 bp, Homo sapien
tactgaggcttactacagatgtcag

SEQ ID NO: 4337853 - DNA, 25 bp, Homo sapien
catatgcatgtatagggattagggt

SEQ ID NO: 4337854 - DNA, 25 bp, Homo sapien
tagcccaagaactatgttacacaga

SEQ ID NO: 4337855 - DNA, 25 bp, Homo sapien
gattagggttgccacatataccaaa

SEQ ID NO: 4337856 - DNA, 25 bp, Homo sapien
tctagcaaggccaagcagtactgag

SEQ ID NO: 4337857 - DNA, 25 bp, Homo sapien
agctagttgataggcctgggtctca

SEQ ID NO: 4337858 - DNA, 25 bp, Homo sapien
aagaaaaactgtggccagctagttg

SEQ ID NO: 4337859 - DNA, 25 bp, Homo sapien
gcattatatgtttctgactttcaca

SEQ ID NO: 4337860 - DNA, 25 bp, Homo sapien
gctttgaatcccttggctggtctcc

SEQ ID NO: 4337861 - DNA, 25 bp, Homo sapien
tgccagcatttagccccaggctttg

SEQ ID NO: 4337862 - DNA, 25 bp, Homo sapien
gatgctctgtatcgcccagaatgct

SEQ ID NO: 4337863 - DNA, 25 bp, Homo sapien
gttgagctgattcatagagttgaag

SEQ ID NO: 4337864 - DNA, 25 bp, Homo sapien
tatgctatgaagagtcggctcctga

SEQ ID NO: 4337865 - DNA, 25 bp, Homo sapien
gaagaagaattttatagctctggat

SEQ ID NO: 4337866 - DNA, 25 bp, Homo sapien
taactttgctccaaggagatgccac

SEQ ID NO: 4337867 - DNA, 25 bp, Homo sapien
cattctttatcagattcctttcgca

SEQ ID NO: 4337868 - DNA, 25 bp, Homo sapien
agctctggatgaagtcatagatgac

SEQ ID NO: 4337869 - DNA, 25 bp, Homo sapien
cttccaccccagcatactgccagtc

SEQ ID NO: 4337870 - DNA, 25 bp, Homo sapien
catcacaacctttaatgggaaatcc

SEQ ID NO: 4337871 - DNA, 25 bp, Homo sapien
aaccaccaaggtgtcatcacaacct

SEQ ID NO: 4337872 - DNA, 25 bp, Homo sapien
catcatctctaataggaatttcctg

SEQ ID NO: 4337873 - DNA, 25 bp, Homo sapien
ttgcaccgccactccttaatgaatg

SEQ ID NO: 4337874 - DNA, 25 bp, Homo sapien
agtgagatggaaaatcgctttttgc

SEQ ID NO: 4337875 - DNA, 25 bp, Homo sapien
tggtcacttgctacatcaattatgg

SEQ ID NO: 4337876 - DNA, 25 bp, Homo sapien
taaacctactgccaatagtagcagt

SEQ ID NO: 4337877 - DNA, 25 bp, Homo sapien
aaaatcgggctttctggagtcagga

SEQ ID NO: 4337878 - DNA, 25 bp, Homo sapien
aatgaatgattttgcctggtcccag

SEQ ID NO: 4337879 - DNA, 25 bp, Homo sapien
ggagtcaggatatcaaccccatgtg

SEQ ID NO: 4337880 - DNA, 25 bp, Homo sapien
tatcttagtcgctcctagagggtgc

SEQ ID NO: 4337881 - DNA, 25 bp, Homo sapien
cagctgatggaagtacttcactggg

SEQ ID NO: 4337882 - DNA, 25 bp, Homo sapien
atcacagttctgcttatatcatctc

SEQ ID NO: 4337883 - DNA, 25 bp, Homo sapien
tcttgtagtctagaaatatttagaa

SEQ ID NO: 4337884 - DNA, 25 bp, Homo sapien
tcactgggtatcacagttctgctta

SEQ ID NO: 4337885 - DNA, 25 bp, Homo sapien
gagatcctgtgacaatatgctccac

SEQ ID NO: 4337886 - DNA, 25 bp, Homo sapien
tcatgagattgctttcgcaggtact

SEQ ID NO: 4337887 - DNA, 25 bp, Homo sapien
cacactagtggcctgacaagtcaca

SEQ ID NO: 4337888 - DNA, 25 bp, Homo sapien
tatgtaactactgactgcttcacag

SEQ ID NO: 4337889 - DNA, 25 bp, Homo sapien
gaatgatgttttattatctttttcc

SEQ ID NO: 4337890 - DNA, 25 bp, Homo sapien
ggaatgatgttttattatctttttc

SEQ ID NO: 4337891 - DNA, 25 bp, Homo sapien
aatgatgttttattatctttttcct

SEQ ID NO: 4337892 - DNA, 25 bp, Homo sapien
tctcatctaaggtaaacgggtcttc

SEQ ID NO: 4337893 - DNA, 25 bp, Homo sapien
taaatggattctacacgctccagag

SEQ ID NO: 4337894 - DNA, 25 bp, Homo sapien
tcttgctctgaaaatggaacatgtc

SEQ ID NO: 4337895 - DNA, 25 bp, Homo sapien
catgtactagaatgtaacagggcac

SEQ ID NO: 4337896 - DNA, 25 bp, Homo sapien
gccagtcacccagatagttcgcata

SEQ ID NO: 4337897 - DNA, 25 bp, Homo sapien
tcccatttcaactaagtcctgctgc

SEQ ID NO: 4337898 - DNA, 25 bp, Homo sapien
tattgcgacgttcttcaactgcttc

SEQ ID NO: 4337899 - DNA, 25 bp, Homo sapien
ttcaactaagtcctgctgcagaatc

SEQ ID NO: 4337900 - DNA, 25 bp, Homo sapien
gagatgggaaaagacagaaatgaat

SEQ ID NO: 4337901 - DNA, 25 bp, Homo sapien
gatgggaaaagacagaaatgaattc

SEQ ID NO: 4337902 - DNA, 25 bp, Homo sapien
tgggaaaagacagaaatgaattcat

SEQ ID NO: 4337903 - DNA, 25 bp, Homo sapien
ctacacaaggagatgggaaaagaca

SEQ ID NO: 4337904 - DNA, 25 bp, Homo sapien
gttgtatacaaaaataaggcaccag

SEQ ID NO: 4337905 - DNA, 25 bp, Homo sapien
gagctgttaccaggaactgaaaaaa

SEQ ID NO: 4337906 - DNA, 25 bp, Homo sapien
ttcattgaaaaacatccggccgggc

SEQ ID NO: 4337907 - DNA, 25 bp, Homo sapien
agaaatgtatctgctctcatggcac

SEQ ID NO: 4337908 - DNA, 25 bp, Homo sapien
cactcagacgttctagcaggaatgt

SEQ ID NO: 4337909 - DNA, 25 bp, Homo sapien
cccactcagacgttctagcaggaat

SEQ ID NO: 4337910 - DNA, 25 bp, Homo sapien
gacgttctagcaggaatgtttttaa

SEQ ID NO: 4337911 - DNA, 25 bp, Homo sapien
ctcagacgttctagcaggaatgttt

SEQ ID NO: 4337912 - DNA, 25 bp, Homo sapien
taaggatacccgaaccaggtcacac

SEQ ID NO: 4337913 - DNA, 25 bp, Homo sapien
tctggatgccaaacgtaagacgctt

SEQ ID NO: 4337914 - DNA, 25 bp, Homo sapien
tagtagttccatgttgtgccagccc

SEQ ID NO: 4337915 - DNA, 25 bp, Homo sapien
tttgctctagcaaggtctgccacag

SEQ ID NO: 4337916 - DNA, 25 bp, Homo sapien
tttttacagacgaattctccatttc

SEQ ID NO: 4337917 - DNA, 25 bp, Homo sapien
ttttacagacgaattctccatttct

SEQ ID NO: 4337918 - DNA, 25 bp, Homo sapien
tttacagacgaattctccatttctt

SEQ ID NO: 4337919 - DNA, 25 bp, Homo sapien
cctaagaattttggcactggacagg

SEQ ID NO: 4337920 - DNA, 25 bp, Homo sapien
tgaatcccgtttgtgaaaaggccta

SEQ ID NO: 4337921 - DNA, 25 bp, Homo sapien
agacctcacccgctttgtgaaacgg

SEQ ID NO: 4337922 - DNA, 25 bp, Homo sapien
cggccccgctatatcaggttgcagc

SEQ ID NO: 4337923 - DNA, 25 bp, Homo sapien
tgcacacaacgcggatcccatcaag

SEQ ID NO: 4337924 - DNA, 25 bp, Homo sapien
acacaacgcggatcccatcaagctg

SEQ ID NO: 4337925 - DNA, 25 bp, Homo sapien
acaacgcggatcccatcaagctggc

SEQ ID NO: 4337926 - DNA, 25 bp, Homo sapien
cacacaacgcggatcccatcaagct

SEQ ID NO: 4337927 - DNA, 25 bp, Homo sapien
gggtcctaagtctgtggctcgtatc

SEQ ID NO: 4337928 - DNA, 25 bp, Homo sapien
tgggtcctaagtctgtggctcgtat

SEQ ID NO: 4337929 - DNA, 25 bp, Homo sapien
aaggttgctgagctcaatagctgca

SEQ ID NO: 4337930 - DNA, 25 bp, Homo sapien
tcttcaaagaaaggttgctgagctc

SEQ ID NO: 4337931 - DNA, 25 bp, Homo sapien
aagaaaggttgctgagctcaatagc

SEQ ID NO: 4337932 - DNA, 25 bp, Homo sapien
ttgctgagctcaatagctgcactgt

SEQ ID NO: 4337933 - DNA, 25 bp, Homo sapien
tactccctcataagcacatatcttc

SEQ ID NO: 4337934 - DNA, 25 bp, Homo sapien
cgcagtactccctcataagcacata

SEQ ID NO: 4337935 - DNA, 25 bp, Homo sapien
ttccccgcagtactccctcataagc

SEQ ID NO: 4337936 - DNA, 25 bp, Homo sapien
tcatcttccccgcagtactccctca

SEQ ID NO: 4337937 - DNA, 25 bp, Homo sapien
cactgattaaatctaatagcacaag

SEQ ID NO: 4337938 - DNA, 25 bp, Homo sapien
aagattgaatctgcccacgattgca

SEQ ID NO: 4337939 - DNA, 25 bp, Homo sapien
tcccttaagggaacttcactgatta

SEQ ID NO: 4337940 - DNA, 25 bp, Homo sapien
gcccacgattgcatccatatttctg

SEQ ID NO: 4337941 - DNA, 25 bp, Homo sapien
tagtagtccaatcctcaaacatagg

SEQ ID NO: 4337942 - DNA, 25 bp, Homo sapien
cacccttttcattgaagttggcaac

SEQ ID NO: 4337943 - DNA, 25 bp, Homo sapien
tatggatggccatttgtcgatgctg

SEQ ID NO: 4337944 - DNA, 25 bp, Homo sapien
gaaaaatcgataccaatcaatagta

SEQ ID NO: 4337945 - DNA, 25 bp, Homo sapien
tgaagggcatacaactcgaatggtg

SEQ ID NO: 4337946 - DNA, 25 bp, Homo sapien
catgatagatgaccggtgaaacctg

SEQ ID NO: 4337947 - DNA, 25 bp, Homo sapien
tcatcaaagactatcagccctgagg

SEQ ID NO: 4337948 - DNA, 25 bp, Homo sapien
cattcttgggcacagacctttgagc

SEQ ID NO: 4337949 - DNA, 25 bp, Homo sapien
tcttctctattcccaccagtactaa

SEQ ID NO: 4337950 - DNA, 25 bp, Homo sapien
ctcttctctattcccaccagtacta

SEQ ID NO: 4337951 - DNA, 25 bp, Homo sapien
cttctctattcccaccagtactaac

SEQ ID NO: 4337952 - DNA, 25 bp, Homo sapien
ctaggcatggaaaacagacgagatg

SEQ ID NO: 4337953 - DNA, 25 bp, Homo sapien
aaacagacgagatgttctgttaggg

SEQ ID NO: 4337954 - DNA, 25 bp, Homo sapien
gacgagatgttctgttagggtatct

SEQ ID NO: 4337955 - DNA, 25 bp, Homo sapien
gcatggaaaacagacgagatgttct

SEQ ID NO: 4337956 - DNA, 25 bp, Homo sapien
tctttgcaggtcagcaaaaatatct

SEQ ID NO: 4337957 - DNA, 25 bp, Homo sapien
cattgctctttgcaggtcagcaaaa

SEQ ID NO: 4337958 - DNA, 25 bp, Homo sapien
tcattctctaaaacaaagcccttca

SEQ ID NO: 4337959 - DNA, 25 bp, Homo sapien
cagatagagaatatgaagatcattc

SEQ ID NO: 4337960 - DNA, 25 bp, Homo sapien
gtgaagaagaaagagtggccgaacc

SEQ ID NO: 4337961 - DNA, 25 bp, Homo sapien
agaagaaagagtggccgaaccaaga

SEQ ID NO: 4337962 - DNA, 25 bp, Homo sapien
agagtggccgaaccaagatgtgttg

SEQ ID NO: 4337963 - DNA, 25 bp, Homo sapien
ccgaaccaagatgtgttggatgata

SEQ ID NO: 4337964 - DNA, 25 bp, Homo sapien
tgagcaggctctatcataatggtct

SEQ ID NO: 4337965 - DNA, 25 bp, Homo sapien
ttcactgagcagtcatacaacctca

SEQ ID NO: 4337966 - DNA, 25 bp, Homo sapien
caaatagtaccttatccagagcatg

SEQ ID NO: 4337967 - DNA, 25 bp, Homo sapien
catgctaaccctcccggctgataaa

SEQ ID NO: 4337968 - DNA, 25 bp, Homo sapien
tgagtaaattgcaactgagaagtca

SEQ ID NO: 4337969 - DNA, 25 bp, Homo sapien
gtaaattgcaactgagaagtcacac

SEQ ID NO: 4337970 - DNA, 25 bp, Homo sapien
attgcaactgagaagtcacacttac

SEQ ID NO: 4337971 - DNA, 25 bp, Homo sapien
taaattgcaactgagaagtcacact

SEQ ID NO: 4337972 - DNA, 25 bp, Homo sapien
ggcttctgtactctggatgaattca

SEQ ID NO: 4337973 - DNA, 25 bp, Homo sapien
aatgtgcaggcagcataagtatgca

SEQ ID NO: 4337974 - DNA, 25 bp, Homo sapien
acaggcctcaatcgctccaagctga

SEQ ID NO: 4337975 - DNA, 25 bp, Homo sapien
gcatatcttgtgatgtacttgccac

SEQ ID NO: 4337976 - DNA, 25 bp, Homo sapien
gaaaacatgcaagccaccgggcgcg

SEQ ID NO: 4337977 - DNA, 25 bp, Homo sapien
aacatgcaagccaccgggcgcggtg

SEQ ID NO: 4337978 - DNA, 25 bp, Homo sapien
aagaaaacatgcaagccaccgggcg

SEQ ID NO: 4337979 - DNA, 25 bp, Homo sapien
aagatatttggaaatttctgtagct

SEQ ID NO: 4337980 - DNA, 25 bp, Homo sapien
tgtagtcccagctacttgggaggct

SEQ ID NO: 4337981 - DNA, 25 bp, Homo sapien
attagccaggctggtggcaggcgcc

SEQ ID NO: 4337982 - DNA, 25 bp, Homo sapien
gaggcaggagaatggcatgaaccca

SEQ ID NO: 4337983 - DNA, 25 bp, Homo sapien
ggagaatggcatgaacccaagaggc

SEQ ID NO: 4337984 - DNA, 25 bp, Homo sapien
catgctgccagttacttcttctcct

SEQ ID NO: 4337985 - DNA, 25 bp, Homo sapien
gctgcgaacaggctttagagaaccc

SEQ ID NO: 4337986 - DNA, 25 bp, Homo sapien
tccagaatagctcgtatcatgctgc

SEQ ID NO: 4337987 - DNA, 25 bp, Homo sapien
cagagttcttacaaattaagatact

SEQ ID NO: 4337988 - DNA, 25 bp, Homo sapien
cttccaattgttctttcccataata

SEQ ID NO: 4337989 - DNA, 25 bp, Homo sapien
tgttctttcccataataaatataag

SEQ ID NO: 4337990 - DNA, 25 bp, Homo sapien
caattgttctttcccataataaata

SEQ ID NO: 4337991 - DNA, 25 bp, Homo sapien
tccaattgttctttcccataataaa

SEQ ID NO: 4337992 - DNA, 25 bp, Homo sapien
agagtagaagttgccgccaagaccc

SEQ ID NO: 4337993 - DNA, 25 bp, Homo sapien
ttcgaataatcacacgacgtgcagg

SEQ ID NO: 4337994 - DNA, 25 bp, Homo sapien
taagaatatctagaggtcgaccacc

SEQ ID NO: 4337995 - DNA, 25 bp, Homo sapien
gacccgaatgagaccttgacgaaag

SEQ ID NO: 4337996 - DNA, 25 bp, Homo sapien
cagcccacacaatttcttaaaaaga

SEQ ID NO: 4337997 - DNA, 25 bp, Homo sapien
cacgcccagcccacacaatttctta

SEQ ID NO: 4337998 - DNA, 25 bp, Homo sapien
gcccagcccacacaatttcttaaaa

SEQ ID NO: 4337999 - DNA, 25 bp, Homo sapien
ccagcccacacaatttcttaaaaag

SEQ ID NO: 4338000 - DNA, 25 bp, Homo sapien
tgatgaaatgctactccccatggta

SEQ ID NO: 4338001 - DNA, 25 bp, Homo sapien
gtcttaactgatccatcacttccag

SEQ ID NO: 4338002 - DNA, 25 bp, Homo sapien
cagtcctgaaggcaaacgtcttaac

SEQ ID NO: 4338003 - DNA, 25 bp, Homo sapien
gctactccccatggtacagttttct

SEQ ID NO: 4338004 - DNA, 25 bp, Homo sapien
ggtgggcattcagagggtttcacca

SEQ ID NO: 4338005 - DNA, 25 bp, Homo sapien
gggcattcagagggtttcaccaatc

SEQ ID NO: 4338006 - DNA, 25 bp, Homo sapien
ctggtgggcattcagagggtttcac

SEQ ID NO: 4338007 - DNA, 25 bp, Homo sapien
tgggcattcagagggtttcaccaat

SEQ ID NO: 4338008 - DNA, 25 bp, Homo sapien
tcgagcaatgatatctgccagcttc

SEQ ID NO: 4338009 - DNA, 25 bp, Homo sapien
cctcagcttgatgatgtagattata

SEQ ID NO: 4338010 - DNA, 25 bp, Homo sapien
gcaatgatatctgccagcttctcac

SEQ ID NO: 4338011 - DNA, 25 bp, Homo sapien
tagattataaaactctcgagcaatg

SEQ ID NO: 4338012 - DNA, 25 bp, Homo sapien
gaatggttatcacaaatcgtctcat

SEQ ID NO: 4338013 - DNA, 25 bp, Homo sapien
cacaaatcgtctcataacataaact

SEQ ID NO: 4338014 - DNA, 25 bp, Homo sapien
aagtaatactgaatggttatcacaa

SEQ ID NO: 4338015 - DNA, 25 bp, Homo sapien
taaactaacaacatggtcctcatct

SEQ ID NO: 4338016 - DNA, 25 bp, Homo sapien
tactgactccaaaagcggtacaggg

SEQ ID NO: 4338017 - DNA, 25 bp, Homo sapien
tccaaattaggaagggtagcactca

SEQ ID NO: 4338018 - DNA, 25 bp, Homo sapien
gagttcagcattcaaccaggaagcc

SEQ ID NO: 4338019 - DNA, 25 bp, Homo sapien
aaagtcggtatggtagagttcagca

SEQ ID NO: 4338020 - DNA, 25 bp, Homo sapien
gttctatcacaagagagatgtgttc

SEQ ID NO: 4338021 - DNA, 25 bp, Homo sapien
gatgtgttcaattctcccttaactg

SEQ ID NO: 4338022 - DNA, 25 bp, Homo sapien
tatatccattaggtcaaatttgctg

SEQ ID NO: 4338023 - DNA, 25 bp, Homo sapien
taactcaaatgcacaggtactctgc

SEQ ID NO: 4338024 - DNA, 25 bp, Homo sapien
gtgagagtctcccagcatatgtaat

SEQ ID NO: 4338025 - DNA, 25 bp, Homo sapien
gctgatttccgagtaatatagcaaa

SEQ ID NO: 4338026 - DNA, 25 bp, Homo sapien
cagcagataccctcggtgagagtct

SEQ ID NO: 4338027 - DNA, 25 bp, Homo sapien
tatagcaaatcttggtcagcaaaag

SEQ ID NO: 4338028 - DNA, 25 bp, Homo sapien
cattacagatgccaatccttgcctc

SEQ ID NO: 4338029 - DNA, 25 bp, Homo sapien
caaaacttataaacacagcgttcct

SEQ ID NO: 4338030 - DNA, 25 bp, Homo sapien
tacagatgccaatccttgcctccag

SEQ ID NO: 4338031 - DNA, 25 bp, Homo sapien
tccagaagtagataatagacaatag

SEQ ID NO: 4338032 - DNA, 25 bp, Homo sapien
agaaatgccttgatggagaggtgct

SEQ ID NO: 4338033 - DNA, 25 bp, Homo sapien
gaggtgctgcccatataaccgtcta

SEQ ID NO: 4338034 - DNA, 25 bp, Homo sapien
gtgcagactgcaatatccaatgaag

SEQ ID NO: 4338035 - DNA, 25 bp, Homo sapien
cctctatgaggcgattgatcagacc

SEQ ID NO: 4338036 - DNA, 25 bp, Homo sapien
aaggatcctttcatcatttcgttac

SEQ ID NO: 4338037 - DNA, 25 bp, Homo sapien
cgttactttgggtctaagttgagtg

SEQ ID NO: 4338038 - DNA, 25 bp, Homo sapien
tactttgggtctaagttgagtgatg

SEQ ID NO: 4338039 - DNA, 25 bp, Homo sapien
catcatttcgttactttgggtctaa

SEQ ID NO: 4338040 - DNA, 25 bp, Homo sapien
acccgcttcaaaataagtaattctg

SEQ ID NO: 4338041 - DNA, 25 bp, Homo sapien
cccgcttcaaaataagtaattctgc

SEQ ID NO: 4338042 - DNA, 25 bp, Homo sapien
cgcttcaaaataagtaattctgcca

SEQ ID NO: 4338043 - DNA, 25 bp, Homo sapien
ttctgccacaagagtcttcccagca

SEQ ID NO: 4338044 - DNA, 25 bp, Homo sapien
attgtcatttttcttgcttccctcc

SEQ ID NO: 4338045 - DNA, 25 bp, Homo sapien
tccctccaccccagtcaaacaataa

SEQ ID NO: 4338046 - DNA, 25 bp, Homo sapien
tgtcatttttcttgcttccctccac

SEQ ID NO: 4338047 - DNA, 25 bp, Homo sapien
cttccctccaccccagtcaaacaat

SEQ ID NO: 4338048 - DNA, 25 bp, Homo sapien
gaaccacaactacctcaatagagta

SEQ ID NO: 4338049 - DNA, 25 bp, Homo sapien
taaacgaaccacaactacctcaata

SEQ ID NO: 4338050 - DNA, 25 bp, Homo sapien
actacctcaatagagtattctttac

SEQ ID NO: 4338051 - DNA, 25 bp, Homo sapien
acgaaccacaactacctcaatagag

SEQ ID NO: 4338052 - DNA, 25 bp, Homo sapien
gacttgtccaagcaaaaggcactct

SEQ ID NO: 4338053 - DNA, 25 bp, Homo sapien
gaagtccccagtttgccaatagtag

SEQ ID NO: 4338054 - DNA, 25 bp, Homo sapien
cttccaggacttgtccaagcaaaag

SEQ ID NO: 4338055 - DNA, 25 bp, Homo sapien
catcttttttacaccaaaactgtgg

SEQ ID NO: 4338056 - DNA, 25 bp, Homo sapien
cttgtctctttcgtagtcaggaact

SEQ ID NO: 4338057 - DNA, 25 bp, Homo sapien
ttgtctctttcgtagtcaggaactg

SEQ ID NO: 4338058 - DNA, 25 bp, Homo sapien
tgtctctttcgtagtcaggaactgt

SEQ ID NO: 4338059 - DNA, 25 bp, Homo sapien
gtctctttcgtagtcaggaactgta

SEQ ID NO: 4338060 - DNA, 25 bp, Homo sapien
gggacacccaaccaatctcattacg

SEQ ID NO: 4338061 - DNA, 25 bp, Homo sapien
aaactgggtcgacatccacgggaca

SEQ ID NO: 4338062 - DNA, 25 bp, Homo sapien
tactgggtactaccaggaacgagcc

SEQ ID NO: 4338063 - DNA, 25 bp, Homo sapien
aacgagccgcccaacagatgatggg

SEQ ID NO: 4338064 - DNA, 25 bp, Homo sapien
gtttcccactccgacgcagaagatt

SEQ ID NO: 4338065 - DNA, 25 bp, Homo sapien
tcccgagaacgaatctgagcctgat

SEQ ID NO: 4338066 - DNA, 25 bp, Homo sapien
agctgcggccttcaggcagcgacca

SEQ ID NO: 4338067 - DNA, 25 bp, Homo sapien
agcctgattctgaacgccgccgttt

SEQ ID NO: 4338068 - DNA, 25 bp, Homo sapien
agggcaagccacagtcccagcgtcc

SEQ ID NO: 4338069 - DNA, 25 bp, Homo sapien
ccctggcctggcaacagctgcggac

SEQ ID NO: 4338070 - DNA, 25 bp, Homo sapien
tccctctcgggagaaccctggcctg

SEQ ID NO: 4338071 - DNA, 25 bp, Homo sapien
ggcaaactcttctcggccgatcagg

SEQ ID NO: 4338072 - DNA, 25 bp, Homo sapien
attgctggctgacagacccctgaga

SEQ ID NO: 4338073 - DNA, 25 bp, Homo sapien
ggctctgaatataccccagggatcg

SEQ ID NO: 4338074 - DNA, 25 bp, Homo sapien
ttttagccagcatgcattgtgagga

SEQ ID NO: 4338075 - DNA, 25 bp, Homo sapien
ccagggatcgttatgagccaagagc

SEQ ID NO: 4338076 - DNA, 25 bp, Homo sapien
gctgagccgcatatcacttttgtgt

SEQ ID NO: 4338077 - DNA, 25 bp, Homo sapien
gaggacattcagtggtgaatatgca

SEQ ID NO: 4338078 - DNA, 25 bp, Homo sapien
atatgcagatgaagctgagccgcat

SEQ ID NO: 4338079 - DNA, 25 bp, Homo sapien
tgcaccatgacgaggacattcagtg

SEQ ID NO: 4338080 - DNA, 25 bp, Homo sapien
ccctctgttgatattccggtcagac

SEQ ID NO: 4338081 - DNA, 25 bp, Homo sapien
gttgatattccggtcagacctcctt

SEQ ID NO: 4338082 - DNA, 25 bp, Homo sapien
gatattccggtcagacctccttcca

SEQ ID NO: 4338083 - DNA, 25 bp, Homo sapien
tctgttgatattccggtcagacctc

SEQ ID NO: 4338084 - DNA, 25 bp, Homo sapien
cacagccaatcacaagagagaaggc

SEQ ID NO: 4338085 - DNA, 25 bp, Homo sapien
tcgctggcgacaacacttgtgccca

SEQ ID NO: 4338086 - DNA, 25 bp, Homo sapien
catcattggaacctctctcaccatt

SEQ ID NO: 4338087 - DNA, 25 bp, Homo sapien
ctgccacagccaatcacaagagaga

SEQ ID NO: 4338088 - DNA, 25 bp, Homo sapien
ggctgtcagtgttatcgatgaccat

SEQ ID NO: 4338089 - DNA, 25 bp, Homo sapien
gaccatcaatcctttaacctcagct

SEQ ID NO: 4338090 - DNA, 25 bp, Homo sapien
ccatcaatcctttaacctcagcttg

SEQ ID NO: 4338091 - DNA, 25 bp, Homo sapien
cagtgttatcgatgaccatcaatcc

SEQ ID NO: 4338092 - DNA, 25 bp, Homo sapien
cttgcccccaagcttatccagagca

SEQ ID NO: 4338093 - DNA, 25 bp, Homo sapien
aggaggatcaggaagactaaccttg

SEQ ID NO: 4338094 - DNA, 25 bp, Homo sapien
ggatcaggaagactaaccttgcccc

SEQ ID NO: 4338095 - DNA, 25 bp, Homo sapien
tcataccagtaaaagtaaaagacga

SEQ ID NO: 4338096 - DNA, 25 bp, Homo sapien
ccttggcctatccattaaatgtcag

SEQ ID NO: 4338097 - DNA, 25 bp, Homo sapien
ggcctatccattaaatgtcagtagc

SEQ ID NO: 4338098 - DNA, 25 bp, Homo sapien
agcatccttggcctatccattaaat

SEQ ID NO: 4338099 - DNA, 25 bp, Homo sapien
gcatccttggcctatccattaaatg

SEQ ID NO: 4338100 - DNA, 25 bp, Homo sapien
cctcaagcaagtgggaaatcggaaa

SEQ ID NO: 4338101 - DNA, 25 bp, Homo sapien
tctctttggttatacctgaagccag

SEQ ID NO: 4338102 - DNA, 25 bp, Homo sapien
agcagtcctagcagtcctcaagcaa

SEQ ID NO: 4338103 - DNA, 25 bp, Homo sapien
agccaggagcgttgagttattagcc

SEQ ID NO: 4338104 - DNA, 25 bp, Homo sapien
tcgaattttaggactgaacagaaag

SEQ ID NO: 4338105 - DNA, 25 bp, Homo sapien
cacaatctagacgtactttcccggg

SEQ ID NO: 4338106 - DNA, 25 bp, Homo sapien
gcaaatagcacaatgaggcaaacca

SEQ ID NO: 4338107 - DNA, 25 bp, Homo sapien
tgagctcatccaggatagagaggac

SEQ ID NO: 4338108 - DNA, 25 bp, Homo sapien
tccttccccatgctgtctctgcccc

SEQ ID NO: 4338109 - DNA, 25 bp, Homo sapien
tgtctctgccccaagcccttaatga

SEQ ID NO: 4338110 - DNA, 25 bp, Homo sapien
aagcccttaatgaagcaggagaggg

SEQ ID NO: 4338111 - DNA, 25 bp, Homo sapien
caggagagggaagtctgtccagaac

SEQ ID NO: 4338112 - DNA, 25 bp, Homo sapien
gggaaatcacagttgcagtagacag

SEQ ID NO: 4338113 - DNA, 25 bp, Homo sapien
tagacatttgcagcaggaataggga

SEQ ID NO: 4338114 - DNA, 25 bp, Homo sapien
ttagacatttgcagcaggaataggg

SEQ ID NO: 4338115 - DNA, 25 bp, Homo sapien
gacatttgcagcaggaatagggagg

SEQ ID NO: 4338116 - DNA, 25 bp, Homo sapien
caatgtcagtgattacgtcgtccgg

SEQ ID NO: 4338117 - DNA, 25 bp, Homo sapien
ccatctcaatgtcagtgattacgtc

SEQ ID NO: 4338118 - DNA, 25 bp, Homo sapien
tgattacgtcgtccggatcaaagga

SEQ ID NO: 4338119 - DNA, 25 bp, Homo sapien
ggatcaaaggaaagctcatcacttc

SEQ ID NO: 4338120 - DNA, 25 bp, Homo sapien
tattagaatggtcagacatgaatct

SEQ ID NO: 4338121 - DNA, 25 bp, Homo sapien
aatggtcagacatgaatctcttttc

SEQ ID NO: 4338122 - DNA, 25 bp, Homo sapien
tgaggggatattagaatggtcagac

SEQ ID NO: 4338123 - DNA, 25 bp, Homo sapien
tgaatctcttttcacatgtccccct

SEQ ID NO: 4338124 - DNA, 25 bp, Homo sapien
ccttggtaatcatatacagccacag

SEQ ID NO: 4338125 - DNA, 25 bp, Homo sapien
ttggtaatcatatacagccacagct

SEQ ID NO: 4338126 - DNA, 25 bp, Homo sapien
tggtaatcatatacagccacagctg

SEQ ID NO: 4338127 - DNA, 25 bp, Homo sapien
ggtaatcatatacagccacagctga

SEQ ID NO: 4338128 - DNA, 25 bp, Homo sapien
ggctcgagcacctcctcatagtccc

SEQ ID NO: 4338129 - DNA, 25 bp, Homo sapien
agaagaatcttcaggctcgagcacc

SEQ ID NO: 4338130 - DNA, 25 bp, Homo sapien
caggctcgagcacctcctcatagtc

SEQ ID NO: 4338131 - DNA, 25 bp, Homo sapien
agaatcttcaggctcgagcacctcc

SEQ ID NO: 4338132 - DNA, 25 bp, Homo sapien
ctgctcatgcctgtccatctcctca

SEQ ID NO: 4338133 - DNA, 25 bp, Homo sapien
gctcatgcctgtccatctcctcaac

SEQ ID NO: 4338134 - DNA, 25 bp, Homo sapien
tcatgcctgtccatctcctcaacgt

SEQ ID NO: 4338135 - DNA, 25 bp, Homo sapien
tcctgctcatgcctgtccatctcct

SEQ ID NO: 4338136 - DNA, 25 bp, Homo sapien
ggctcaggctcaggctctgcttcgt

SEQ ID NO: 4338137 - DNA, 25 bp, Homo sapien
ctcatagtcattctcaggctcgggc

SEQ ID NO: 4338138 - DNA, 25 bp, Homo sapien
catagtcattctcaggctcgggctc

SEQ ID NO: 4338139 - DNA, 25 bp, Homo sapien
ctcaggctcaggctctgcttcgtac

SEQ ID NO: 4338140 - DNA, 25 bp, Homo sapien
ttccagagtcctagggggcagagct

SEQ ID NO: 4338141 - DNA, 25 bp, Homo sapien
atggaggagtcccaactggaggcca

SEQ ID NO: 4338142 - DNA, 25 bp, Homo sapien
ctaatgggcagcaagggcactgggt

SEQ ID NO: 4338143 - DNA, 25 bp, Homo sapien
caggctcagactctgatgatggagg

SEQ ID NO: 4338144 - DNA, 25 bp, Homo sapien
tccgggagagtctgcctaatgggca

SEQ ID NO: 4338145 - DNA, 25 bp, Homo sapien
ctggctcttccatagctatcactgg

SEQ ID NO: 4338146 - DNA, 25 bp, Homo sapien
ctctgaggagattttcttgggcagt

SEQ ID NO: 4338147 - DNA, 25 bp, Homo sapien
tgctggctcttccatagctatcact

SEQ ID NO: 4338148 - DNA, 25 bp, Homo sapien
gcagtggggccggtactgctggctc

SEQ ID NO: 4338149 - DNA, 25 bp, Homo sapien
ttcagcccacgggtaccactagaag

SEQ ID NO: 4338150 - DNA, 25 bp, Homo sapien
caaatttcgccttcagcccacgggt

SEQ ID NO: 4338151 - DNA, 25 bp, Homo sapien
catggactcaaatttcgccttcagc

SEQ ID NO: 4338152 - DNA, 25 bp, Homo sapien
tttgtcacagcctttcgctcctgtt

SEQ ID NO: 4338153 - DNA, 25 bp, Homo sapien
ggtaaagaggtatcgatagaggaac

SEQ ID NO: 4338154 - DNA, 25 bp, Homo sapien
gccaggctatacgacctaagactcg

SEQ ID NO: 4338155 - DNA, 25 bp, Homo sapien
ggaggatggcatagccctgaagcct

SEQ ID NO: 4338156 - DNA, 25 bp, Homo sapien
aatcagttaaatatccgggaggagg

SEQ ID NO: 4338157 - DNA, 25 bp, Homo sapien
gggcgtcgtcttcttataagctgtg

SEQ ID NO: 4338158 - DNA, 25 bp, Homo sapien
gcttctatgggcgtcgtcttcttat

SEQ ID NO: 4338159 - DNA, 25 bp, Homo sapien
tggtcggggcctccatttcattgaa

SEQ ID NO: 4338160 - DNA, 25 bp, Homo sapien
ccatttcattgaagccgacagcgct

SEQ ID NO: 4338161 - DNA, 25 bp, Homo sapien
ggattccatactggccaccaaagcc

SEQ ID NO: 4338162 - DNA, 25 bp, Homo sapien
ttctggattccatactggccaccaa

SEQ ID NO: 4338163 - DNA, 25 bp, Homo sapien
tctggattccatactggccaccaaa

SEQ ID NO: 4338164 - DNA, 25 bp, Homo sapien
tggattccatactggccaccaaagc

SEQ ID NO: 4338165 - DNA, 25 bp, Homo sapien
tggaaaacaaatgtaggaggaaatg

SEQ ID NO: 4338166 - DNA, 25 bp, Homo sapien
tgggtggtgagaagaatcagtggga

SEQ ID NO: 4338167 - DNA, 25 bp, Homo sapien
aatcagaggatagagggaggcatgg

SEQ ID NO: 4338168 - DNA, 25 bp, Homo sapien
gaaaaaatctgggagcgaatggaga

SEQ ID NO: 4338169 - DNA, 25 bp, Homo sapien
ttgtagtcatatcccagagctgctt

SEQ ID NO: 4338170 - DNA, 25 bp, Homo sapien
gctttgtcccatttatccttctcca

SEQ ID NO: 4338171 - DNA, 25 bp, Homo sapien
tgggactcgtgtttctccgtctctc

SEQ ID NO: 4338172 - DNA, 25 bp, Homo sapien
gtgtttctccgtctctcccttgtag

SEQ ID NO: 4338173 - DNA, 25 bp, Homo sapien
gccaagatgagaagaacattcccat

SEQ ID NO: 4338174 - DNA, 25 bp, Homo sapien
catgccaagatgagaagaacattcc

SEQ ID NO: 4338175 - DNA, 25 bp, Homo sapien
tcttctctcatttccatgccaagat

SEQ ID NO: 4338176 - DNA, 25 bp, Homo sapien
ctctcatttccatgccaagatgaga

SEQ ID NO: 4338177 - DNA, 25 bp, Homo sapien
gtgaagataattatgaactgacacc

SEQ ID NO: 4338178 - DNA, 25 bp, Homo sapien
tcaaagctgtatgtgtgaagataat

SEQ ID NO: 4338179 - DNA, 25 bp, Homo sapien
gataattatgaactgacaccacaga

SEQ ID NO: 4338180 - DNA, 25 bp, Homo sapien
gacaaagagatgaatcaaagctgta

SEQ ID NO: 4338181 - DNA, 25 bp, Homo sapien
aagtctctaagacagtaagtctcag

SEQ ID NO: 4338182 - DNA, 25 bp, Homo sapien
catgtgccagtccataagtctctaa

SEQ ID NO: 4338183 - DNA, 25 bp, Homo sapien
tacaacactataccccaaactacag

SEQ ID NO: 4338184 - DNA, 25 bp, Homo sapien
tgcatatagaacattgaccaaatag

SEQ ID NO: 4338185 - DNA, 25 bp, Homo sapien
ctgggaccacgggtttgtgatgaat

SEQ ID NO: 4338186 - DNA, 25 bp, Homo sapien
caaatgaaggtagtgttcagaggga

SEQ ID NO: 4338187 - DNA, 25 bp, Homo sapien
gaaatgtatagcttttcaagtgccc

SEQ ID NO: 4338188 - DNA, 25 bp, Homo sapien
caagtgcccatatagtaaaggaagg

SEQ ID NO: 4338189 - DNA, 25 bp, Homo sapien
aggctgagtgaagtacagtgtcctt

SEQ ID NO: 4338190 - DNA, 25 bp, Homo sapien
gctgagtgaagtacagtgtccttgc

SEQ ID NO: 4338191 - DNA, 25 bp, Homo sapien
ggctgagtgaagtacagtgtccttg

SEQ ID NO: 4338192 - DNA, 25 bp, Homo sapien
tctcctttataatcaaagccgactg

SEQ ID NO: 4338193 - DNA, 25 bp, Homo sapien
cctttataatcaaagccgactgctg

SEQ ID NO: 4338194 - DNA, 25 bp, Homo sapien
tcctttataatcaaagccgactgct

SEQ ID NO: 4338195 - DNA, 25 bp, Homo sapien
ctttataatcaaagccgactgctga

SEQ ID NO: 4338196 - DNA, 25 bp, Homo sapien
aatcggtgattaagcaaaggcaggc

SEQ ID NO: 4338197 - DNA, 25 bp, Homo sapien
tatggacacaggatactacagagca

SEQ ID NO: 4338198 - DNA, 25 bp, Homo sapien
caacattaccgcagagttttggagc

SEQ ID NO: 4338199 - DNA, 25 bp, Homo sapien
gatttacatgacacactgactgggt

SEQ ID NO: 4338200 - DNA, 25 bp, Homo sapien
taaggatgcatgtccacctaattaa

SEQ ID NO: 4338201 - DNA, 25 bp, Homo sapien
tttaaggatgcatgtccacctaatt

SEQ ID NO: 4338202 - DNA, 25 bp, Homo sapien
aggatgcatgtccacctaattaaca

SEQ ID NO: 4338203 - DNA, 25 bp, Homo sapien
ggatgcatgtccacctaattaacaa

SEQ ID NO: 4338204 - DNA, 25 bp, Homo sapien
agctaactgtgaaggagctgtcctc

SEQ ID NO: 4338205 - DNA, 25 bp, Homo sapien
tcagctaactgtgaaggagctgtcc

SEQ ID NO: 4338206 - DNA, 25 bp, Homo sapien
tctcagctaactgtgaaggagctgt

SEQ ID NO: 4338207 - DNA, 25 bp, Homo sapien
atctcagctaactgtgaaggagctg

SEQ ID NO: 4338208 - DNA, 25 bp, Homo sapien
tctgttttcctaaacggcatgagta

SEQ ID NO: 4338209 - DNA, 25 bp, Homo sapien
tctggacttcatagattgatgctaa

SEQ ID NO: 4338210 - DNA, 25 bp, Homo sapien
aaaaaccagtggcttgaggaattat

SEQ ID NO: 4338211 - DNA, 25 bp, Homo sapien
gccaaaagaagagcttagatgattc

SEQ ID NO: 4338212 - DNA, 25 bp, Homo sapien
tcaacaaagaagcatgtgcctccat

SEQ ID NO: 4338213 - DNA, 25 bp, Homo sapien
gtggcttccaacattggcaccaagg

SEQ ID NO: 4338214 - DNA, 25 bp, Homo sapien
tctttcagctcagcatgtggcttcc

SEQ ID NO: 4338215 - DNA, 25 bp, Homo sapien
tgtgacggtgtcaggtcctcacagc

SEQ ID NO: 4338216 - DNA, 25 bp, Homo sapien
tgggtggttgggagagagagtggtc

SEQ ID NO: 4338217 - DNA, 25 bp, Homo sapien
ggtggttgggagagagagtggtcac

SEQ ID NO: 4338218 - DNA, 25 bp, Homo sapien
gttgggagagagagtggtcacttac

SEQ ID NO: 4338219 - DNA, 25 bp, Homo sapien
tggttgggagagagagtggtcactt

SEQ ID NO: 4338220 - DNA, 25 bp, Homo sapien
tctccacctcggcaacatactcatg

SEQ ID NO: 4338221 - DNA, 25 bp, Homo sapien
tcaactccgtacttgcccccaaagc

SEQ ID NO: 4338222 - DNA, 25 bp, Homo sapien
ctgccctgtccctctcaactccgta

SEQ ID NO: 4338223 - DNA, 25 bp, Homo sapien
ggcagcatccgtctgagaagagtgc

SEQ ID NO: 4338224 - DNA, 25 bp, Homo sapien
ttctactccaaaccgacctccatag

SEQ ID NO: 4338225 - DNA, 25 bp, Homo sapien
catgggatgctttgggccctgactc

SEQ ID NO: 4338226 - DNA, 25 bp, Homo sapien
tgctcctctgatactttgttcctca

SEQ ID NO: 4338227 - DNA, 25 bp, Homo sapien
ttgtccattcggtctctttctactc

SEQ ID NO: 4338228 - DNA, 25 bp, Homo sapien
aagaaaccacatgaccaaggctcat

SEQ ID NO: 4338229 - DNA, 25 bp, Homo sapien
ggaagaaaccacatgaccaaggctc

SEQ ID NO: 4338230 - DNA, 25 bp, Homo sapien
ctggaagaaaccacatgaccaaggc

SEQ ID NO: 4338231 - DNA, 25 bp, Homo sapien
tggaagaaaccacatgaccaaggct

SEQ ID NO: 4338232 - DNA, 25 bp, Homo sapien
gccccacgtgacaatcagatctgtt

SEQ ID NO: 4338233 - DNA, 25 bp, Homo sapien
tatttggacacatataaggatccgg

SEQ ID NO: 4338234 - DNA, 25 bp, Homo sapien
aggtgactgcaacaattaagagggc

SEQ ID NO: 4338235 - DNA, 25 bp, Homo sapien
gatatgaagtgatagctcagcccca

SEQ ID NO: 4338236 - DNA, 25 bp, Homo sapien
cacatgtatgtggtcaaagatgcca

SEQ ID NO: 4338237 - DNA, 25 bp, Homo sapien
gaaaagtctacttgaaatgggtcat

SEQ ID NO: 4338238 - DNA, 25 bp, Homo sapien
tagacacataaagcattagccccat

SEQ ID NO: 4338239 - DNA, 25 bp, Homo sapien
gatgccaggtaagtcaatgggaaca

SEQ ID NO: 4338240 - DNA, 25 bp, Homo sapien
cactatattgattcagaattcagcg

SEQ ID NO: 4338241 - DNA, 25 bp, Homo sapien
tcagaattcagcgtggagacccaat

SEQ ID NO: 4338242 - DNA, 25 bp, Homo sapien
tataggcacagactagcatgcctga

SEQ ID NO: 4338243 - DNA, 25 bp, Homo sapien
gggtctataggcacagactagcatg

SEQ ID NO: 4338244 - DNA, 25 bp, Homo sapien
caggtagacaccacttaggagaaaa

SEQ ID NO: 4338245 - DNA, 25 bp, Homo sapien
gggtcaccatgttgtaccactccag

SEQ ID NO: 4338246 - DNA, 25 bp, Homo sapien
tgttaccagcagataccaggctttc

SEQ ID NO: 4338247 - DNA, 25 bp, Homo sapien
gacttagcccacactaacgagaggg

SEQ ID NO: 4338248 - DNA, 25 bp, Homo sapien
tggcggagtgttgggaagttttcaa

SEQ ID NO: 4338249 - DNA, 25 bp, Homo sapien
cgtcatggcggagtgttgggaagtt

SEQ ID NO: 4338250 - DNA, 25 bp, Homo sapien
gtcgtcatggcggagtgttgggaag

SEQ ID NO: 4338251 - DNA, 25 bp, Homo sapien
catggcggagtgttgggaagttttc

SEQ ID NO: 4338252 - DNA, 25 bp, Homo sapien
tgtgcatcctcatctggacaattcc

SEQ ID NO: 4338253 - DNA, 25 bp, Homo sapien
cattatagctacttaattgaaacca

SEQ ID NO: 4338254 - DNA, 25 bp, Homo sapien
ccagaatggcatggtttaagaataa

SEQ ID NO: 4338255 - DNA, 25 bp, Homo sapien
ccagcgttgagtggcctttattcag

SEQ ID NO: 4338256 - DNA, 25 bp, Homo sapien
tgccaggctttcacagtatgttgct

SEQ ID NO: 4338257 - DNA, 25 bp, Homo sapien
acaatgtggtattgtcatccagttg

SEQ ID NO: 4338258 - DNA, 25 bp, Homo sapien
ggtcatccactgacactttttaaaa

SEQ ID NO: 4338259 - DNA, 25 bp, Homo sapien
ttgcttgtgcaatgtggtcatccac

SEQ ID NO: 4338260 - DNA, 25 bp, Homo sapien
ggtacacacaggaacagactctaga

SEQ ID NO: 4338261 - DNA, 25 bp, Homo sapien
gaggcagttaatccaatagacccac

SEQ ID NO: 4338262 - DNA, 25 bp, Homo sapien
ggaaatatgcaatgacacacaggta

SEQ ID NO: 4338263 - DNA, 25 bp, Homo sapien
tgaatctctcatgccttactaaagg

SEQ ID NO: 4338264 - DNA, 25 bp, Homo sapien
caagtctccgagttttctttgggct

SEQ ID NO: 4338265 - DNA, 25 bp, Homo sapien
agtctccgagttttctttgggctct

SEQ ID NO: 4338266 - DNA, 25 bp, Homo sapien
gttctgtgcgtccagacccctcgat

SEQ ID NO: 4338267 - DNA, 25 bp, Homo sapien
tgtgcgtccagacccctcgatggtc

SEQ ID NO: 4338268 - DNA, 25 bp, Homo sapien
tccagacccctcgatggtcttggct

SEQ ID NO: 4338269 - DNA, 25 bp, Homo sapien
gcgtccagacccctcgatggtcttg

SEQ ID NO: 4338270 - DNA, 25 bp, Homo sapien
gttgctccttttcagagatgtcatt

SEQ ID NO: 4338271 - DNA, 25 bp, Homo sapien
cgttgctccttttcagagatgtcat

SEQ ID NO: 4338272 - DNA, 25 bp, Homo sapien
agtaatacatgacggcaagaaatgt

SEQ ID NO: 4338273 - DNA, 25 bp, Homo sapien
aatacatgacggcaagaaatgtgcc

SEQ ID NO: 4338274 - DNA, 25 bp, Homo sapien
ctgcaaacgacagcacgcagtaata

SEQ ID NO: 4338275 - DNA, 25 bp, Homo sapien
cgacagcacgcagtaatacatgacg

SEQ ID NO: 4338276 - DNA, 25 bp, Homo sapien
tgataccaggtatcgtgcatgcccc

SEQ ID NO: 4338277 - DNA, 25 bp, Homo sapien
caattagtcccagtatgagggctgt

SEQ ID NO: 4338278 - DNA, 25 bp, Homo sapien
tcagtgtagcctgccatggcctgtc

SEQ ID NO: 4338279 - DNA, 25 bp, Homo sapien
caaagatcacagagtggcccagatg

SEQ ID NO: 4338280 - DNA, 25 bp, Homo sapien
cacaaagtcaggatctgtgtcccaa

SEQ ID NO: 4338281 - DNA, 25 bp, Homo sapien
tctgtgtcccaatcatcaccctggg

SEQ ID NO: 4338282 - DNA, 25 bp, Homo sapien
ctccacggaaacagacacatcatgg

SEQ ID NO: 4338283 - DNA, 25 bp, Homo sapien
cagacacatcatggcccactacaga

SEQ ID NO: 4338284 - DNA, 25 bp, Homo sapien
gagtgaccggagatgggaataatta

SEQ ID NO: 4338285 - DNA, 25 bp, Homo sapien
gaagtcaaaatatagcagcccaata

SEQ ID NO: 4338286 - DNA, 25 bp, Homo sapien
aatatagcagcccaatatttcctgc

SEQ ID NO: 4338287 - DNA, 25 bp, Homo sapien
caagaggagggaaaataggaatgct

SEQ ID NO: 4338288 - DNA, 25 bp, Homo sapien
aagcctctgttctaagcgcccggct

SEQ ID NO: 4338289 - DNA, 25 bp, Homo sapien
tcggagtgagaaactgagctgctgc

SEQ ID NO: 4338290 - DNA, 25 bp, Homo sapien
acctgtgcaagcctctgttctaagc

SEQ ID NO: 4338291 - DNA, 25 bp, Homo sapien
gctgccacttcggagtgagaaactg

SEQ ID NO: 4338292 - DNA, 25 bp, Homo sapien
tatacatgtgatcaagggcaaaagc

SEQ ID NO: 4338293 - DNA, 25 bp, Homo sapien
tggtgttagaccagtcagactcctg

SEQ ID NO: 4338294 - DNA, 25 bp, Homo sapien
tagcttagtacttcaagaggtcagg

SEQ ID NO: 4338295 - DNA, 25 bp, Homo sapien
gagcagatcagtcagcccacttgtc

SEQ ID NO: 4338296 - DNA, 25 bp, Homo sapien
aacaaatattaggctcaacaaacca

SEQ ID NO: 4338297 - DNA, 25 bp, Homo sapien
tggcttggctgaaagacattcctca

SEQ ID NO: 4338298 - DNA, 25 bp, Homo sapien
tcagtatcttttacaggaccacaaa

SEQ ID NO: 4338299 - DNA, 25 bp, Homo sapien
ggctgaaagacattcctcagtatct

SEQ ID NO: 4338300 - DNA, 25 bp, Homo sapien
tcagattaagcagaagcgttcaggc

SEQ ID NO: 4338301 - DNA, 25 bp, Homo sapien
cgttcaggctcagggcagtagaaga

SEQ ID NO: 4338302 - DNA, 25 bp, Homo sapien
cagaagcgttcaggctcagggcagt

SEQ ID NO: 4338303 - DNA, 25 bp, Homo sapien
aagaaagcagactcgccagtccctg

SEQ ID NO: 4338304 - DNA, 25 bp, Homo sapien
taaatgggaagactgttccactgga

SEQ ID NO: 4338305 - DNA, 25 bp, Homo sapien
gaagacctgtaaatgggaagactgt

SEQ ID NO: 4338306 - DNA, 25 bp, Homo sapien
caggcactttccgtgaagagttgga

SEQ ID NO: 4338307 - DNA, 25 bp, Homo sapien
tttgcaggcactttccgtgaagagt

SEQ ID NO: 4338308 - DNA, 25 bp, Homo sapien
agtggtccaaagagtaacaactaag

SEQ ID NO: 4338309 - DNA, 25 bp, Homo sapien
gatgttagaggtgagagaattccaa

SEQ ID NO: 4338310 - DNA, 25 bp, Homo sapien
gttctgatgttagaggtgagagaat

SEQ ID NO: 4338311 - DNA, 25 bp, Homo sapien
tccaagttttgaggggagtggtcca

SEQ ID NO: 4338312 - DNA, 25 bp, Homo sapien
gcactcgggtccgtgaatgacagag

SEQ ID NO: 4338313 - DNA, 25 bp, Homo sapien
tagatggctgctagaagtggcactc

SEQ ID NO: 4338314 - DNA, 25 bp, Homo sapien
aatgacagagtgaacgcaggactcg

SEQ ID NO: 4338315 - DNA, 25 bp, Homo sapien
cacagaatgagcaggacatgaatca

SEQ ID NO: 4338316 - DNA, 25 bp, Homo sapien
agggctatgttgctttccctcctac

SEQ ID NO: 4338317 - DNA, 25 bp, Homo sapien
tagtcttgcacttaagcaaagctga

SEQ ID NO: 4338318 - DNA, 25 bp, Homo sapien
ccctcctactagtcttgcacttaag

SEQ ID NO: 4338319 - DNA, 25 bp, Homo sapien
tcagagagttttcaccctatagggc

SEQ ID NO: 4338320 - DNA, 25 bp, Homo sapien
ggcaaattccaccaggttctaatct

SEQ ID NO: 4338321 - DNA, 25 bp, Homo sapien
ctgagaggaaagttgcctcagagtc

SEQ ID NO: 4338322 - DNA, 25 bp, Homo sapien
cagagtcaacaacttggcaaattcc

SEQ ID NO: 4338323 - DNA, 25 bp, Homo sapien
cttagactcattcgctgctcagtgg

SEQ ID NO: 4338324 - DNA, 25 bp, Homo sapien
gataataaaacaccctctctttatc

SEQ ID NO: 4338325 - DNA, 25 bp, Homo sapien
ctgtcagataataaaacaccctctc

SEQ ID NO: 4338326 - DNA, 25 bp, Homo sapien
gtcagataataaaacaccctctctt

SEQ ID NO: 4338327 - DNA, 25 bp, Homo sapien
cagataataaaacaccctctcttta

SEQ ID NO: 4338328 - DNA, 25 bp, Homo sapien
cagtgcctgctcctgagtgccacag

SEQ ID NO: 4338329 - DNA, 25 bp, Homo sapien
gctcctgagtgccacaggagccaat

SEQ ID NO: 4338330 - DNA, 25 bp, Homo sapien
agccaatgataggagtccgggaaga

SEQ ID NO: 4338331 - DNA, 25 bp, Homo sapien
ctgagtgccacaggagccaatgata

SEQ ID NO: 4338332 - DNA, 25 bp, Homo sapien
gaagcagctttgatctggaacagca

SEQ ID NO: 4338333 - DNA, 25 bp, Homo sapien
tacaatggcagtacctggactaggc

SEQ ID NO: 4338334 - DNA, 25 bp, Homo sapien
gaattaatacggcttgcccacaggc

SEQ ID NO: 4338335 - DNA, 25 bp, Homo sapien
cagatacgtttccttcagcagcagc

SEQ ID NO: 4338336 - DNA, 25 bp, Homo sapien
tctttggtctcgttcttcttccagc

SEQ ID NO: 4338337 - DNA, 25 bp, Homo sapien
actctttggtctcgttcttcttcca

SEQ ID NO: 4338338 - DNA, 25 bp, Homo sapien
ccactctttggtctcgttcttcttc

SEQ ID NO: 4338339 - DNA, 25 bp, Homo sapien
ctttggtctcgttcttcttccagca

SEQ ID NO: 4338340 - DNA, 25 bp, Homo sapien
gagcaacatctatatttagtggccc

SEQ ID NO: 4338341 - DNA, 25 bp, Homo sapien
gctgcggttcccttagttcctcagg

SEQ ID NO: 4338342 - DNA, 25 bp, Homo sapien
tgtgaactccattcttttcctgggg

SEQ ID NO: 4338343 - DNA, 25 bp, Homo sapien
gagctcctggagcaacatctatatt

SEQ ID NO: 4338344 - DNA, 25 bp, Homo sapien
agttaagtctgggccgggcgccgtg

SEQ ID NO: 4338345 - DNA, 25 bp, Homo sapien
gatttttctcccagattctcattct

SEQ ID NO: 4338346 - DNA, 25 bp, Homo sapien
cattcttgaatttctcctcttaaaa

SEQ ID NO: 4338347 - DNA, 25 bp, Homo sapien
tacataaaactcttgtcttgattag

SEQ ID NO: 4338348 - DNA, 25 bp, Homo sapien
tgctgctggttctcacgaagactct

SEQ ID NO: 4338349 - DNA, 25 bp, Homo sapien
cttctccaagactgcacagtgattt

SEQ ID NO: 4338350 - DNA, 25 bp, Homo sapien
tctgactggtatcgcagagctgaat

SEQ ID NO: 4338351 - DNA, 25 bp, Homo sapien
aaggtcaccatagtgctgctggttc

SEQ ID NO: 4338352 - DNA, 25 bp, Homo sapien
tctttcttgtagatacgtgggttgc

SEQ ID NO: 4338353 - DNA, 25 bp, Homo sapien
ttcatctgttgacgggtacttacat

SEQ ID NO: 4338354 - DNA, 25 bp, Homo sapien
cttacattgctaacagtgtatggga

SEQ ID NO: 4338355 - DNA, 25 bp, Homo sapien
tagctttttgagatacctccatact

SEQ ID NO: 4338356 - DNA, 25 bp, Homo sapien
gacacaagggacttctggagttctg

SEQ ID NO: 4338357 - DNA, 25 bp, Homo sapien
tagttgacggaaaaaagagacaggc

SEQ ID NO: 4338358 - DNA, 25 bp, Homo sapien
tagagctgtaaagggtggaacttcc

SEQ ID NO: 4338359 - DNA, 25 bp, Homo sapien
tttggagagcaaatgtaacaggcct

SEQ ID NO: 4338360 - DNA, 25 bp, Homo sapien
tttcctttaagctgtcattgagctg

SEQ ID NO: 4338361 - DNA, 25 bp, Homo sapien
cattgagctgggtcctgagaagttc

SEQ ID NO: 4338362 - DNA, 25 bp, Homo sapien
ctgtcattgagctgggtcctgagaa

SEQ ID NO: 4338363 - DNA, 25 bp, Homo sapien
ccagattttgtgacccatctgggga

SEQ ID NO: 4338364 - DNA, 25 bp, Homo sapien
tctgagatagccataaggtactgtt

SEQ ID NO: 4338365 - DNA, 25 bp, Homo sapien
tctttggtattgcactttgagaggc

SEQ ID NO: 4338366 - DNA, 25 bp, Homo sapien
gaagacctcaattcccttataagat

SEQ ID NO: 4338367 - DNA, 25 bp, Homo sapien
tgggaggaagaagacctcaattccc

SEQ ID NO: 4338368 - DNA, 25 bp, Homo sapien
ctgagctgatgcagctcatgctgcc

SEQ ID NO: 4338369 - DNA, 25 bp, Homo sapien
gctgccaggagaggttttcctgcct

SEQ ID NO: 4338370 - DNA, 25 bp, Homo sapien
tgaaatgcttttgtcttatcttgat

SEQ ID NO: 4338371 - DNA, 25 bp, Homo sapien
gcctgagctcttcttgcataatctg

SEQ ID NO: 4338372 - DNA, 25 bp, Homo sapien
gccttcagtggatgtaactcagtga

SEQ ID NO: 4338373 - DNA, 25 bp, Homo sapien
gatgtaactcagtgatctcttgatt

SEQ ID NO: 4338374 - DNA, 25 bp, Homo sapien
actcctgaagttgagccttcagtgg

SEQ ID NO: 4338375 - DNA, 25 bp, Homo sapien
tgctgctgcagattcttcaattcct

SEQ ID NO: 4338376 - DNA, 25 bp, Homo sapien
gaaaaacaatagaggaatcagcagc

SEQ ID NO: 4338377 - DNA, 25 bp, Homo sapien
tgacttaacagatctgagaaagcag

SEQ ID NO: 4338378 - DNA, 25 bp, Homo sapien
taaagctggtagtaagaaaatccaa

SEQ ID NO: 4338379 - DNA, 25 bp, Homo sapien
tttcacccacttagagacatcgcta

SEQ ID NO: 4338380 - DNA, 25 bp, Homo sapien
gcagaatcttcaaaaggctcaggaa

SEQ ID NO: 4338381 - DNA, 25 bp, Homo sapien
tcaaaaggctcaggaattaacagca

SEQ ID NO: 4338382 - DNA, 25 bp, Homo sapien
tcaggaattaacagcatcaggcacc

SEQ ID NO: 4338383 - DNA, 25 bp, Homo sapien
aaggctcaggaattaacagcatcag

SEQ ID NO: 4338384 - DNA, 25 bp, Homo sapien
catttataggtaccctcttcagctc

SEQ ID NO: 4338385 - DNA, 25 bp, Homo sapien
tctggacaggtaaaagaagtctctg

SEQ ID NO: 4338386 - DNA, 25 bp, Homo sapien
gcacctgaggcacagttacaagtaa

SEQ ID NO: 4338387 - DNA, 25 bp, Homo sapien
gaagtctctgtggactatggcacct

SEQ ID NO: 4338388 - DNA, 25 bp, Homo sapien
cagcatatcataaattacagctttg

SEQ ID NO: 4338389 - DNA, 25 bp, Homo sapien
tgaatagaaccttttgcatttacgg

SEQ ID NO: 4338390 - DNA, 25 bp, Homo sapien
agctttgaggcacataccatcctga

SEQ ID NO: 4338391 - DNA, 25 bp, Homo sapien
cataccatcctgatgaatagaacct

SEQ ID NO: 4338392 - DNA, 25 bp, Homo sapien
caatggagagttttgtgccaaggaa

SEQ ID NO: 4338393 - DNA, 25 bp, Homo sapien
ggttgagttacccatgagatgaact

SEQ ID NO: 4338394 - DNA, 25 bp, Homo sapien
tcagttaagctatgacaaattctgg

SEQ ID NO: 4338395 - DNA, 25 bp, Homo sapien
tgtaagaaggcactaagtgatcctt

SEQ ID NO: 4338396 - DNA, 25 bp, Homo sapien
taaactctgtacttcagctgggctg

SEQ ID NO: 4338397 - DNA, 25 bp, Homo sapien
tttttaaactctgtacttcagctgg

SEQ ID NO: 4338398 - DNA, 25 bp, Homo sapien
aactctgtacttcagctgggctggt

SEQ ID NO: 4338399 - DNA, 25 bp, Homo sapien
tttaaactctgtacttcagctgggc

SEQ ID NO: 4338400 - DNA, 25 bp, Homo sapien
tgttgatagtcacccactatgcggt

SEQ ID NO: 4338401 - DNA, 25 bp, Homo sapien
tagggcattaaaggacctccgcaga

SEQ ID NO: 4338402 - DNA, 25 bp, Homo sapien
aactgtggtataggtggcgtgtctc

SEQ ID NO: 4338403 - DNA, 25 bp, Homo sapien
cctactggtcagttctctggaggcc

SEQ ID NO: 4338404 - DNA, 25 bp, Homo sapien
tcttagtaaaggctgcaagctgggt

SEQ ID NO: 4338405 - DNA, 25 bp, Homo sapien
gattgtctgctaggacccttgctgc

SEQ ID NO: 4338406 - DNA, 25 bp, Homo sapien
gtcacgatcatcctggagggaagac

SEQ ID NO: 4338407 - DNA, 25 bp, Homo sapien
tctctgcgcaaagcatccagtttct

SEQ ID NO: 4338408 - DNA, 25 bp, Homo sapien
taggtcttgtgctcatactcagaga

SEQ ID NO: 4338409 - DNA, 25 bp, Homo sapien
ctgaaatccttacttacagcagggt

SEQ ID NO: 4338410 - DNA, 25 bp, Homo sapien
accgattctgaacatgtaggtcttg

SEQ ID NO: 4338411 - DNA, 25 bp, Homo sapien
cagggttggcactcttcgctgatgg

SEQ ID NO: 4338412 - DNA, 25 bp, Homo sapien
gacgttcaatggtacctctggccaa

SEQ ID NO: 4338413 - DNA, 25 bp, Homo sapien
tactaacattctcataggactgcag

SEQ ID NO: 4338414 - DNA, 25 bp, Homo sapien
tatcatgtttctcggtggcctctag

SEQ ID NO: 4338415 - DNA, 25 bp, Homo sapien
tcagtaagaccctctagagctagtt

SEQ ID NO: 4338416 - DNA, 25 bp, Homo sapien
tcagctgggccttaatctgggcaac

SEQ ID NO: 4338417 - DNA, 25 bp, Homo sapien
gctgcaggctttcggcatggacttc

SEQ ID NO: 4338418 - DNA, 25 bp, Homo sapien
tctcttagatgttctaggccagcaa

SEQ ID NO: 4338419 - DNA, 25 bp, Homo sapien
tccagaaaggtagctaacgtcttct

SEQ ID NO: 4338420 - DNA, 25 bp, Homo sapien
gcagagcactcgcatcttcagaatg

SEQ ID NO: 4338421 - DNA, 25 bp, Homo sapien
caagttggactctaaaacaggttga

SEQ ID NO: 4338422 - DNA, 25 bp, Homo sapien
ggccagtctgggcacaagttggact

SEQ ID NO: 4338423 - DNA, 25 bp, Homo sapien
caggttgagtgtgatgctgttctgt

SEQ ID NO: 4338424 - DNA, 25 bp, Homo sapien
tggagtggaagaacacgattcctgc

SEQ ID NO: 4338425 - DNA, 25 bp, Homo sapien
taagaattgccttgcgggaggttaa

SEQ ID NO: 4338426 - DNA, 25 bp, Homo sapien
tttacaagtgctacggagtccccat

SEQ ID NO: 4338427 - DNA, 25 bp, Homo sapien
tctactgactctttgcagaagctcc

SEQ ID NO: 4338428 - DNA, 25 bp, Homo sapien
tccttacttatttgtcctgctgggc

SEQ ID NO: 4338429 - DNA, 25 bp, Homo sapien
tctcatcataattttgtttaaggcc

SEQ ID NO: 4338430 - DNA, 25 bp, Homo sapien
tatcagggtactctgctcagaaaac

SEQ ID NO: 4338431 - DNA, 25 bp, Homo sapien
gagatatgccttacacgttctgccc

SEQ ID NO: 4338432 - DNA, 25 bp, Homo sapien
gagtcttaatttcaaccccaagaga

SEQ ID NO: 4338433 - DNA, 25 bp, Homo sapien
ggacagttcttccactttacttgag

SEQ ID NO: 4338434 - DNA, 25 bp, Homo sapien
cctcaatcaactggtttaggttgct

SEQ ID NO: 4338435 - DNA, 25 bp, Homo sapien
caatatctggtacagcagaaaggga

SEQ ID NO: 4338436 - DNA, 25 bp, Homo sapien
tttatgaaagtttagctcgagctcc

SEQ ID NO: 4338437 - DNA, 25 bp, Homo sapien
cagtgaatgcactgctgttgttgtc

SEQ ID NO: 4338438 - DNA, 25 bp, Homo sapien
attttaattggagctattccctcac

SEQ ID NO: 4338439 - DNA, 25 bp, Homo sapien
aatcttgccctgtatcttcaagaaa

SEQ ID NO: 4338440 - DNA, 25 bp, Homo sapien
ggaagactgctctcttcatttggca

SEQ ID NO: 4338441 - DNA, 25 bp, Homo sapien
tactttgatgttcagtgctcgcctg

SEQ ID NO: 4338442 - DNA, 25 bp, Homo sapien
agccctttttccctggagctgtaat

SEQ ID NO: 4338443 - DNA, 25 bp, Homo sapien
tttctttctggtcaaggacctcatg

SEQ ID NO: 4338444 - DNA, 25 bp, Homo sapien
ctttctggtcaaggacctcatgatc

SEQ ID NO: 4338445 - DNA, 25 bp, Homo sapien
tctttctggtcaaggacctcatgat

SEQ ID NO: 4338446 - DNA, 25 bp, Homo sapien
ttgtccactttcctcagcagaagag

SEQ ID NO: 4338447 - DNA, 25 bp, Homo sapien
gagctcctcttgttggcaatatcaa

SEQ ID NO: 4338448 - DNA, 25 bp, Homo sapien
actttcctcagcagaagagctcctc

SEQ ID NO: 4338449 - DNA, 25 bp, Homo sapien
agcagaagagctcctcttgttggca

SEQ ID NO: 4338450 - DNA, 25 bp, Homo sapien
ggatcattctccaaagatccctttt

SEQ ID NO: 4338451 - DNA, 25 bp, Homo sapien
aaaaggatcattctccaaagatccc

SEQ ID NO: 4338452 - DNA, 25 bp, Homo sapien
atgccagtcttatctaatctcttca

SEQ ID NO: 4338453 - DNA, 25 bp, Homo sapien
aactatgccagtcttatctaatctc

SEQ ID NO: 4338454 - DNA, 25 bp, Homo sapien
tccccagttctattctgagcctcta

SEQ ID NO: 4338455 - DNA, 25 bp, Homo sapien
gagagtaatctgagaagacagtttt

SEQ ID NO: 4338456 - DNA, 25 bp, Homo sapien
ctgagcctctaggagagtaatctga

SEQ ID NO: 4338457 - DNA, 25 bp, Homo sapien
ttctgagcctctaggagagtaatct

SEQ ID NO: 4338458 - DNA, 25 bp, Homo sapien
cctccagctctatagaactaaggag

SEQ ID NO: 4338459 - DNA, 25 bp, Homo sapien
tcattctctagttctaccactctct

SEQ ID NO: 4338460 - DNA, 25 bp, Homo sapien
tccagctctatagaactaaggagca

SEQ ID NO: 4338461 - DNA, 25 bp, Homo sapien
gctctatagaactaaggagcaaggc

SEQ ID NO: 4338462 - DNA, 25 bp, Homo sapien
aaaaattgtcaatcgagaattataa

SEQ ID NO: 4338463 - DNA, 25 bp, Homo sapien
gaaaaattgtcaatcgagaattata

SEQ ID NO: 4338464 - DNA, 25 bp, Homo sapien
aattgtcaatcgagaattataatat

SEQ ID NO: 4338465 - DNA, 25 bp, Homo sapien
tgtcaatcgagaattataatatcca

SEQ ID NO: 4338466 - DNA, 25 bp, Homo sapien
caactgtggcatcaggaatagggtg

SEQ ID NO: 4338467 - DNA, 25 bp, Homo sapien
tattataggttgttgtagaggctga

SEQ ID NO: 4338468 - DNA, 25 bp, Homo sapien
gtatatgattatgaagattctacct

SEQ ID NO: 4338469 - DNA, 25 bp, Homo sapien
aatagggtgagggtatatgattatg

SEQ ID NO: 4338470 - DNA, 25 bp, Homo sapien
tcaatagactccacacaataccaat

SEQ ID NO: 4338471 - DNA, 25 bp, Homo sapien
taaagtctccttacgaaatggtgct

SEQ ID NO: 4338472 - DNA, 25 bp, Homo sapien
tggtgctgaaacaacgaaatatccg

SEQ ID NO: 4338473 - DNA, 25 bp, Homo sapien
gaagaccgtgatactggcataggga

SEQ ID NO: 4338474 - DNA, 25 bp, Homo sapien
gttgcaagggcagtctatttagaaa

SEQ ID NO: 4338475 - DNA, 25 bp, Homo sapien
gactcaaaatatgagaggtcttctc

SEQ ID NO: 4338476 - DNA, 25 bp, Homo sapien
tataccgagactctagttcagcctg

SEQ ID NO: 4338477 - DNA, 25 bp, Homo sapien
tttgatcctttagagcatcacaggc

SEQ ID NO: 4338478 - DNA, 25 bp, Homo sapien
cagttgctgaatggtctgggctgac

SEQ ID NO: 4338479 - DNA, 25 bp, Homo sapien
agcaagtcaacgacctgagcacggc

SEQ ID NO: 4338480 - DNA, 25 bp, Homo sapien
tcctgttgcagcaagtcaacgacct

SEQ ID NO: 4338481 - DNA, 25 bp, Homo sapien
ccaccaaggattcttcgtgttcctc

SEQ ID NO: 4338482 - DNA, 25 bp, Homo sapien
acggcccaccaaggattcttcgtgt

SEQ ID NO: 4338483 - DNA, 25 bp, Homo sapien
agcgggcatctttctctcggaccac

SEQ ID NO: 4338484 - DNA, 25 bp, Homo sapien
tctgcctgggttactaactgaagaa

SEQ ID NO: 4338485 - DNA, 25 bp, Homo sapien
gaacttgtgtttcaaagcgggcatc

SEQ ID NO: 4338486 - DNA, 25 bp, Homo sapien
atcttcatgaagacgaacttgtgtt

SEQ ID NO: 4338487 - DNA, 25 bp, Homo sapien
gcttgtaaagtgctaatgaattctt

SEQ ID NO: 4338488 - DNA, 25 bp, Homo sapien
ctgagtaagctgggcttgcaaagtg

SEQ ID NO: 4338489 - DNA, 25 bp, Homo sapien
tgcctgtgcctgagtaagctgggct

SEQ ID NO: 4338490 - DNA, 25 bp, Homo sapien
ctgcctgtgcctgagtaagctgggc

SEQ ID NO: 4338491 - DNA, 25 bp, Homo sapien
cctgtgcctgagtaagctgggcttg

SEQ ID NO: 4338492 - DNA, 25 bp, Homo sapien
aactagcgatcccaaaggttgtgcc

SEQ ID NO: 4338493 - DNA, 25 bp, Homo sapien
cattaggccctgagaggaaagacta

SEQ ID NO: 4338494 - DNA, 25 bp, Homo sapien
tcagtgccatgcaggactaaacctt

SEQ ID NO: 4338495 - DNA, 25 bp, Homo sapien
tctgagggcaaaaccagtcagtgcc

SEQ ID NO: 4338496 - DNA, 25 bp, Homo sapien
tggccttcgcatgaagttttagttt

SEQ ID NO: 4338497 - DNA, 25 bp, Homo sapien
agttgctcctctgactgaggttctg

SEQ ID NO: 4338498 - DNA, 25 bp, Homo sapien
agttaatttggccttcgcatgaagt

SEQ ID NO: 4338499 - DNA, 25 bp, Homo sapien
aaagttgctcctctgactgaggttc

SEQ ID NO: 4338500 - DNA, 25 bp, Homo sapien
ctcctgaacatcttcttgtgtagta

SEQ ID NO: 4338501 - DNA, 25 bp, Homo sapien
ttgctctgcataagccaggcgctcc

SEQ ID NO: 4338502 - DNA, 25 bp, Homo sapien
gtctaataatatcttttagctccac

SEQ ID NO: 4338503 - DNA, 25 bp, Homo sapien
tcttgtgtagtattattaaattcca

SEQ ID NO: 4338504 - DNA, 25 bp, Homo sapien
gtttaaatcagaacagaactactca

SEQ ID NO: 4338505 - DNA, 25 bp, Homo sapien
tttaaatcagaacagaactactcac

SEQ ID NO: 4338506 - DNA, 25 bp, Homo sapien
agtttaaatcagaacagaactactc

SEQ ID NO: 4338507 - DNA, 25 bp, Homo sapien
cagtttaaatcagaacagaactact

SEQ ID NO: 4338508 - DNA, 25 bp, Homo sapien
catattctgatcagtgtcatcatct

SEQ ID NO: 4338509 - DNA, 25 bp, Homo sapien
ctaatcctgataatcggctcagcat

SEQ ID NO: 4338510 - DNA, 25 bp, Homo sapien
tgctaatcctgataatcggctcagc

SEQ ID NO: 4338511 - DNA, 25 bp, Homo sapien
taggggagccctcatattctgatca

SEQ ID NO: 4338512 - DNA, 25 bp, Homo sapien
atgtgccccatgaaccccattcttt

SEQ ID NO: 4338513 - DNA, 25 bp, Homo sapien
actccatgatactgcaacatttttc

SEQ ID NO: 4338514 - DNA, 25 bp, Homo sapien
ttcaaataaactccatgatactgca

SEQ ID NO: 4338515 - DNA, 25 bp, Homo sapien
agtacagggacgcaatctcagccca

SEQ ID NO: 4338516 - DNA, 25 bp, Homo sapien
aaggagctcccaatgatcaaggcta

SEQ ID NO: 4338517 - DNA, 25 bp, Homo sapien
aggagctcccaatgatcaaggctag

SEQ ID NO: 4338518 - DNA, 25 bp, Homo sapien
gagctcccaatgatcaaggctagaa

SEQ ID NO: 4338519 - DNA, 25 bp, Homo sapien
ggagctcccaatgatcaaggctaga

SEQ ID NO: 4338520 - DNA, 25 bp, Homo sapien
gggcctacgagggctgaaagagctg

SEQ ID NO: 4338521 - DNA, 25 bp, Homo sapien
tctcttccaggatagggtcccacac

SEQ ID NO: 4338522 - DNA, 25 bp, Homo sapien
cagaactgaagagttggggctctct

SEQ ID NO: 4338523 - DNA, 25 bp, Homo sapien
gctgaggcagtctggacctttatta

SEQ ID NO: 4338524 - DNA, 25 bp, Homo sapien
gctgagaggagaattaaaattaagt

SEQ ID NO: 4338525 - DNA, 25 bp, Homo sapien
ctgctgagaggagaattaaaattaa

SEQ ID NO: 4338526 - DNA, 25 bp, Homo sapien
tgctgagaggagaattaaaattaag

SEQ ID NO: 4338527 - DNA, 25 bp, Homo sapien
tgagaggagaattaaaattaagtga

SEQ ID NO: 4338528 - DNA, 25 bp, Homo sapien
ccacagttgtaggcttttggtagct

SEQ ID NO: 4338529 - DNA, 25 bp, Homo sapien
tgtaggcttttggtagctcaaaggt

SEQ ID NO: 4338530 - DNA, 25 bp, Homo sapien
cagttgtaggcttttggtagctcaa

SEQ ID NO: 4338531 - DNA, 25 bp, Homo sapien
gttgtaggcttttggtagctcaaag

SEQ ID NO: 4338532 - DNA, 25 bp, Homo sapien
gatatttcctgagtttgccccttca

SEQ ID NO: 4338533 - DNA, 25 bp, Homo sapien
tctggcccttatgtaaagagccctc

SEQ ID NO: 4338534 - DNA, 25 bp, Homo sapien
tatcaattcacgcttttggaaaggc

SEQ ID NO: 4338535 - DNA, 25 bp, Homo sapien
gaccaactggagctctttaaataag

SEQ ID NO: 4338536 - DNA, 25 bp, Homo sapien
tttcctcgagaactctcttagaggt

SEQ ID NO: 4338537 - DNA, 25 bp, Homo sapien
agttatttttcctcgagaactctct

SEQ ID NO: 4338538 - DNA, 25 bp, Homo sapien
tatttttcctcgagaactctcttag

SEQ ID NO: 4338539 - DNA, 25 bp, Homo sapien
caagttatttttcctcgagaactct

SEQ ID NO: 4338540 - DNA, 25 bp, Homo sapien
tgatttcttttggtcgcgcctcccc

SEQ ID NO: 4338541 - DNA, 25 bp, Homo sapien
cagcaggttctttccgacgtcagcg

SEQ ID NO: 4338542 - DNA, 25 bp, Homo sapien
ggacaggcctccgtttgcattaata

SEQ ID NO: 4338543 - DNA, 25 bp, Homo sapien
cattagcaggattattggacaggcc

SEQ ID NO: 4338544 - DNA, 25 bp, Homo sapien
ccaagtctgcgcagggtgaccccga

SEQ ID NO: 4338545 - DNA, 25 bp, Homo sapien
gacagaccgtgagcaagtggtccaa

SEQ ID NO: 4338546 - DNA, 25 bp, Homo sapien
gccgaggcttgtgggctactagaac

SEQ ID NO: 4338547 - DNA, 25 bp, Homo sapien
tttccccgtcgctcccagaggagaa

SEQ ID NO: 4338548 - DNA, 25 bp, Homo sapien
gggactccggtgtagctgcttgggc

SEQ ID NO: 4338549 - DNA, 25 bp, Homo sapien
ggtgaagggccggatccaggactga

SEQ ID NO: 4338550 - DNA, 25 bp, Homo sapien
gctgcttgggcagctcccgcggccc

SEQ ID NO: 4338551 - DNA, 25 bp, Homo sapien
aagggccggatccaggactgaatcc

SEQ ID NO: 4338552 - DNA, 25 bp, Homo sapien
gggtgaccgttattggactcgcaga

SEQ ID NO: 4338553 - DNA, 25 bp, Homo sapien
tattggactcgcagagggaagagtt

SEQ ID NO: 4338554 - DNA, 25 bp, Homo sapien
gagttgggtagcgtcccctactcac

SEQ ID NO: 4338555 - DNA, 25 bp, Homo sapien
gaccgttattggactcgcagaggga

SEQ ID NO: 4338556 - DNA, 25 bp, Homo sapien
ctagaagcgctgccgcctgaggctc

SEQ ID NO: 4338557 - DNA, 25 bp, Homo sapien
gtacgcgacaccttccaccgccgcg

SEQ ID NO: 4338558 - DNA, 25 bp, Homo sapien
gtcagctcgggaagcccgtacgcga

SEQ ID NO: 4338559 - DNA, 25 bp, Homo sapien
ccaattcaagccacgtcagctcggg

SEQ ID NO: 4338560 - DNA, 25 bp, Homo sapien
atgggattaagacaccgaccaatca

SEQ ID NO: 4338561 - DNA, 25 bp, Homo sapien
cagttgggacggaagatgggattaa

SEQ ID NO: 4338562 - DNA, 25 bp, Homo sapien
taagacaccgaccaatcaggactat

SEQ ID NO: 4338563 - DNA, 25 bp, Homo sapien
caccgaccaatcaggactatcggca

SEQ ID NO: 4338564 - DNA, 25 bp, Homo sapien
tggttatgctggcttcctccaattc

SEQ ID NO: 4338565 - DNA, 25 bp, Homo sapien
tgttctcagtgtgaagtggttatgc

SEQ ID NO: 4338566 - DNA, 25 bp, Homo sapien
cctcctcttcgtcggttgtgactga

SEQ ID NO: 4338567 - DNA, 25 bp, Homo sapien
gtgattagacgcgagtaggtgcccc

SEQ ID NO: 4338568 - DNA, 25 bp, Homo sapien
cgggcacccgctgccattaggattg

SEQ ID NO: 4338569 - DNA, 25 bp, Homo sapien
agacttgagactgcgggcacccgct

SEQ ID NO: 4338570 - DNA, 25 bp, Homo sapien
cttgggcttcggcagagacttgaga

SEQ ID NO: 4338571 - DNA, 25 bp, Homo sapien
cgagacagcggcttgggcttcggca

SEQ ID NO: 4338572 - DNA, 25 bp, Homo sapien
ggaattactattgtccagggcagca

SEQ ID NO: 4338573 - DNA, 25 bp, Homo sapien
gcaatgggaactctccaaacaggaa

SEQ ID NO: 4338574 - DNA, 25 bp, Homo sapien
cttacctctccagacatttgagtct

SEQ ID NO: 4338575 - DNA, 25 bp, Homo sapien
tctccagacatttgagtctgctgtg

SEQ ID NO: 4338576 - DNA, 25 bp, Homo sapien
tgggaggtttactgaattcagacat

SEQ ID NO: 4338577 - DNA, 25 bp, Homo sapien
gttaacattagagattgcgcaatat

SEQ ID NO: 4338578 - DNA, 25 bp, Homo sapien
tagctttgagattcctaggagaaaa

SEQ ID NO: 4338579 - DNA, 25 bp, Homo sapien
tacaaacacaaattgaagtggcttc

SEQ ID NO: 4338580 - DNA, 25 bp, Homo sapien
cataaaggtacctaggattgtaaca

SEQ ID NO: 4338581 - DNA, 25 bp, Homo sapien
cacacacctcctatgttaacaggaa

SEQ ID NO: 4338582 - DNA, 25 bp, Homo sapien
ttttcctcacattaataaagtctgc

SEQ ID NO: 4338583 - DNA, 25 bp, Homo sapien
gagttcaaccattgctttatagaaa

SEQ ID NO: 4338584 - DNA, 25 bp, Homo sapien
tcaattgagcatttcttttcctcac

SEQ ID NO: 4338585 - DNA, 25 bp, Homo sapien
gttaggatggccctagtctaccagc

SEQ ID NO: 4338586 - DNA, 25 bp, Homo sapien
tgtgtgtggctaacgatgaggatac

SEQ ID NO: 4338587 - DNA, 25 bp, Homo sapien
cactatgctaagtttagttctacaa

SEQ ID NO: 4338588 - DNA, 25 bp, Homo sapien
aggcagaaccaatataatctcctaa

SEQ ID NO: 4338589 - DNA, 25 bp, Homo sapien
cttgtatgtgcttcagggttgtgag

SEQ ID NO: 4338590 - DNA, 25 bp, Homo sapien
gcttgtatgtgcttcagggttgtga

SEQ ID NO: 4338591 - DNA, 25 bp, Homo sapien
gaagagtcctatgccaagcaggtag

SEQ ID NO: 4338592 - DNA, 25 bp, Homo sapien
gagtcctatgccaagcaggtaggaa

SEQ ID NO: 4338593 - DNA, 25 bp, Homo sapien
gagcagaagagtcctatgccaagca

SEQ ID NO: 4338594 - DNA, 25 bp, Homo sapien
tatgccaagcaggtaggaacttgga

SEQ ID NO: 4338595 - DNA, 25 bp, Homo sapien
tggatgtcacaaacctcgcataggt

SEQ ID NO: 4338596 - DNA, 25 bp, Homo sapien
gaaggtggttataaaatccgcatca

SEQ ID NO: 4338597 - DNA, 25 bp, Homo sapien
cgcataggttgttccttttagagaa

SEQ ID NO: 4338598 - DNA, 25 bp, Homo sapien
taaaagatggctagtagggctcagc

SEQ ID NO: 4338599 - DNA, 25 bp, Homo sapien
tgggcatggagctccctactgacca

SEQ ID NO: 4338600 - DNA, 25 bp, Homo sapien
ttgggcatggagctccctactgacc

SEQ ID NO: 4338601 - DNA, 25 bp, Homo sapien
cttgggcatggagctccctactgac

SEQ ID NO: 4338602 - DNA, 25 bp, Homo sapien
ttaaacagctgcactagagtatggc

SEQ ID NO: 4338603 - DNA, 25 bp, Homo sapien
cagccacaggatcttaaacagctgc

SEQ ID NO: 4338604 - DNA, 25 bp, Homo sapien
gcactagagtatggctaaagaagca

SEQ ID NO: 4338605 - DNA, 25 bp, Homo sapien
ggatcttaaacagctgcactagagt

SEQ ID NO: 4338606 - DNA, 25 bp, Homo sapien
cagtatctactagtatggcttcacc

SEQ ID NO: 4338607 - DNA, 25 bp, Homo sapien
ttttcatttactgggccacttacag

SEQ ID NO: 4338608 - DNA, 25 bp, Homo sapien
gattagctgctagacattgtgactt

SEQ ID NO: 4338609 - DNA, 25 bp, Homo sapien
tatcctcctcattatgggtcctgtt

SEQ ID NO: 4338610 - DNA, 25 bp, Homo sapien
tgaagtctagttcccttggtgtcac

SEQ ID NO: 4338611 - DNA, 25 bp, Homo sapien
tccttgagctatggcctagaaactc

SEQ ID NO: 4338612 - DNA, 25 bp, Homo sapien
ggacctatgtgagttccagacacac

SEQ ID NO: 4338613 - DNA, 25 bp, Homo sapien
ggcttgcttcgttccctctcagaga

SEQ ID NO: 4338614 - DNA, 25 bp, Homo sapien
tcttcagttcaactcggcgtgcatc

SEQ ID NO: 4338615 - DNA, 25 bp, Homo sapien
agtcatccactcgtttcttcagttc

SEQ ID NO: 4338616 - DNA, 25 bp, Homo sapien
ctgacatagtcatccactcgtttct

SEQ ID NO: 4338617 - DNA, 25 bp, Homo sapien
catagtcatccactcgtttcttcag

SEQ ID NO: 4338618 - DNA, 25 bp, Homo sapien
attacagacgtgagccatcgcgtcc

SEQ ID NO: 4338619 - DNA, 25 bp, Homo sapien
tacagacgtgagccatcgcgtccca

SEQ ID NO: 4338620 - DNA, 25 bp, Homo sapien
tgttagccaggctgtgatctcttga

SEQ ID NO: 4338621 - DNA, 25 bp, Homo sapien
ggattacagacgtgagccatcgcgt

SEQ ID NO: 4338622 - DNA, 25 bp, Homo sapien
agctgctttatactctatgagagac

SEQ ID NO: 4338623 - DNA, 25 bp, Homo sapien
tctatgagagactgcctctgttggt

SEQ ID NO: 4338624 - DNA, 25 bp, Homo sapien
tatactctatgagagactgcctctg

SEQ ID NO: 4338625 - DNA, 25 bp, Homo sapien
gctttatactctatgagagactgcc

SEQ ID NO: 4338626 - DNA, 25 bp, Homo sapien
atgtttctggataatcagtgctgat

SEQ ID NO: 4338627 - DNA, 25 bp, Homo sapien
tgtttctggataatcagtgctgatt

SEQ ID NO: 4338628 - DNA, 25 bp, Homo sapien
tcagtaccaccagagggaaagggca

SEQ ID NO: 4338629 - DNA, 25 bp, Homo sapien
aatttctcttaagtcactcagtcag

SEQ ID NO: 4338630 - DNA, 25 bp, Homo sapien
tgtatgtgttctctactctacatgc

SEQ ID NO: 4338631 - DNA, 25 bp, Homo sapien
ctttcccagattatgcagcttcttc

SEQ ID NO: 4338632 - DNA, 25 bp, Homo sapien
tgaactatttcgagcatactcagct

SEQ ID NO: 4338633 - DNA, 25 bp, Homo sapien
aagttgcaattgtaatttgaggtcc

SEQ ID NO: 4338634 - DNA, 25 bp, Homo sapien
ctttgaagttgcaattgtaatttga

SEQ ID NO: 4338635 - DNA, 25 bp, Homo sapien
tttcgagcatactcagctgcaattc

SEQ ID NO: 4338636 - DNA, 25 bp, Homo sapien
gtggtaccttggctatagctttgta

SEQ ID NO: 4338637 - DNA, 25 bp, Homo sapien
actacttagtttaccgctatagact

SEQ ID NO: 4338638 - DNA, 25 bp, Homo sapien
gctttgtactcttaatagtcagact

SEQ ID NO: 4338639 - DNA, 25 bp, Homo sapien
tatgtaaggagactacaagtgtcag

SEQ ID NO: 4338640 - DNA, 25 bp, Homo sapien
tcaatgaagatatccatccatgcca

SEQ ID NO: 4338641 - DNA, 25 bp, Homo sapien
gctttgaaagtgcatctggttactg

SEQ ID NO: 4338642 - DNA, 25 bp, Homo sapien
cattggctccctttgtaggcttggc

SEQ ID NO: 4338643 - DNA, 25 bp, Homo sapien
ggttaagtcattgcagaaagtgggc

SEQ ID NO: 4338644 - DNA, 25 bp, Homo sapien
tgaaaacccttccaataggcttgaa

SEQ ID NO: 4338645 - DNA, 25 bp, Homo sapien
aaacccttccaataggcttgaatca

SEQ ID NO: 4338646 - DNA, 25 bp, Homo sapien
taatatagtcagcaaatatcatgca

SEQ ID NO: 4338647 - DNA, 25 bp, Homo sapien
cagcagattgaatggcggagagata

SEQ ID NO: 4338648 - DNA, 25 bp, Homo sapien
aaagaagataaacatcagagatggg

SEQ ID NO: 4338649 - DNA, 25 bp, Homo sapien
tactcatgggtgtgatcatagggca

SEQ ID NO: 4338650 - DNA, 25 bp, Homo sapien
tctacttcctgatagaccattgggc

SEQ ID NO: 4338651 - DNA, 25 bp, Homo sapien
tgtttacttagtagacgtctgagtc

SEQ ID NO: 4338652 - DNA, 25 bp, Homo sapien
taagttcttgactgaattcagtccc

SEQ ID NO: 4338653 - DNA, 25 bp, Homo sapien
gcttaaaaggccaacaagctgtcta

SEQ ID NO: 4338654 - DNA, 25 bp, Homo sapien
tctttttgagaatcccaagaaaaga

SEQ ID NO: 4338655 - DNA, 25 bp, Homo sapien
ccaagaaaagaaagaatgaatgtac

SEQ ID NO: 4338656 - DNA, 25 bp, Homo sapien
agaaaagaaagaatgaatgtactac

SEQ ID NO: 4338657 - DNA, 25 bp, Homo sapien
catcaataaaaattttctttttgag

SEQ ID NO: 4338658 - DNA, 25 bp, Homo sapien
ggactaggagttgaaaaaagcttga

SEQ ID NO: 4338659 - DNA, 25 bp, Homo sapien
actggactaggagttgaaaaaagct

SEQ ID NO: 4338660 - DNA, 25 bp, Homo sapien
ctggactaggagttgaaaaaagctt

SEQ ID NO: 4338661 - DNA, 25 bp, Homo sapien
taattgatgtacaggtatcacaaca

SEQ ID NO: 4338662 - DNA, 25 bp, Homo sapien
aacttgatgccggactgtgtcctga

SEQ ID NO: 4338663 - DNA, 25 bp, Homo sapien
tataagattcagtaacttgatgccg

SEQ ID NO: 4338664 - DNA, 25 bp, Homo sapien
tgtgtcctgatccaagaatataacc

SEQ ID NO: 4338665 - DNA, 25 bp, Homo sapien
tctgtccagtagaaaaggtaattct

SEQ ID NO: 4338666 - DNA, 25 bp, Homo sapien
aaaatatgctcatctcagaaagcct

SEQ ID NO: 4338667 - DNA, 25 bp, Homo sapien
tatgcctaggatgctcaccctgtcc

SEQ ID NO: 4338668 - DNA, 25 bp, Homo sapien
tgtctcttacatgctattccctatg

SEQ ID NO: 4338669 - DNA, 25 bp, Homo sapien
aagccgaggtcaatgatttgagatt

SEQ ID NO: 4338670 - DNA, 25 bp, Homo sapien
tcccaaagatccagtttatggttta

SEQ ID NO: 4338671 - DNA, 25 bp, Homo sapien
aatttcccctaagtatcattctgct

SEQ ID NO: 4338672 - DNA, 25 bp, Homo sapien
ggtttcttctcaaagagccagttta

SEQ ID NO: 4338673 - DNA, 25 bp, Homo sapien
ggatagtttctactgatacgcctta

SEQ ID NO: 4338674 - DNA, 25 bp, Homo sapien
tactgcctgctttacgtactctgat

SEQ ID NO: 4338675 - DNA, 25 bp, Homo sapien
tatgtaaggttgctcaagttgtccc

SEQ ID NO: 4338676 - DNA, 25 bp, Homo sapien
tacgccttaaagttcactaatctgc

SEQ ID NO: 4338677 - DNA, 25 bp, Homo sapien
tctagtgaacttcctacctttgtat

SEQ ID NO: 4338678 - DNA, 25 bp, Homo sapien
ggcacaagtgggatttttctcatcc

SEQ ID NO: 4338679 - DNA, 25 bp, Homo sapien
tagtgaacttcctacctttgtataa

SEQ ID NO: 4338680 - DNA, 25 bp, Homo sapien
aatacagccaggttcaataaccaca

SEQ ID NO: 4338681 - DNA, 25 bp, Homo sapien
ctgtagtatattctgtagcatcatc

SEQ ID NO: 4338682 - DNA, 25 bp, Homo sapien
tcatcatgactgcagatcctatttg

SEQ ID NO: 4338683 - DNA, 25 bp, Homo sapien
cttgcagtaaatgtaagaaatgatc

SEQ ID NO: 4338684 - DNA, 25 bp, Homo sapien
cctatttggacattgtcagcttgca

SEQ ID NO: 4338685 - DNA, 25 bp, Homo sapien
gagaatcagtcacaatttggaaaaa

SEQ ID NO: 4338686 - DNA, 25 bp, Homo sapien
taatgcccagttccactcttctcat

SEQ ID NO: 4338687 - DNA, 25 bp, Homo sapien
tacttatttttggattcccacttgc

SEQ ID NO: 4338688 - DNA, 25 bp, Homo sapien
ttaatgcccagttccactcttctca

SEQ ID NO: 4338689 - DNA, 25 bp, Homo sapien
ctcttctcattacttatttttggat

SEQ ID NO: 4338690 - DNA, 25 bp, Homo sapien
tctagaaactactgaactctgtggc

SEQ ID NO: 4338691 - DNA, 25 bp, Homo sapien
atttccgctgcctgtaatgccctca

SEQ ID NO: 4338692 - DNA, 25 bp, Homo sapien
taggaatctgcactgggactcaaag

SEQ ID NO: 4338693 - DNA, 25 bp, Homo sapien
gatagaccaggtaccattggctcca

SEQ ID NO: 4338694 - DNA, 25 bp, Homo sapien
tctggagagacctgactaatatgcc

SEQ ID NO: 4338695 - DNA, 25 bp, Homo sapien
tgggtctctagcttaccaactgcaa

SEQ ID NO: 4338696 - DNA, 25 bp, Homo sapien
ttcatggatctcgagtctgctggca

SEQ ID NO: 4338697 - DNA, 25 bp, Homo sapien
gcctgactgcctttgagttgggaca

SEQ ID NO: 4338698 - DNA, 25 bp, Homo sapien
cagttaagatggaactgtgcaaaac

SEQ ID NO: 4338699 - DNA, 25 bp, Homo sapien
catggttctgacatgcacgagtttc

SEQ ID NO: 4338700 - DNA, 25 bp, Homo sapien
tagtcctagcttttgcatggcacca

SEQ ID NO: 4338701 - DNA, 25 bp, Homo sapien
tgcagagttcacatttgggtataca

SEQ ID NO: 4338702 - DNA, 25 bp, Homo sapien
tagctgcattgataaaacatgtttg

SEQ ID NO: 4338703 - DNA, 25 bp, Homo sapien
tagaaaattttctgcagctgatgga

SEQ ID NO: 4338704 - DNA, 25 bp, Homo sapien
ctagaaaattttctgcagctgatgg

SEQ ID NO: 4338705 - DNA, 25 bp, Homo sapien
cttagctgcattgataaaacatgtt

SEQ ID NO: 4338706 - DNA, 25 bp, Homo sapien
gagaacaaacattgagtatgcaatt

SEQ ID NO: 4338707 - DNA, 25 bp, Homo sapien
gtgagaacaaacattgagtatgcaa

SEQ ID NO: 4338708 - DNA, 25 bp, Homo sapien
aacaaacattgagtatgcaatttac

SEQ ID NO: 4338709 - DNA, 25 bp, Homo sapien
aagtgagaacaaacattgagtatgc

SEQ ID NO: 4338710 - DNA, 25 bp, Homo sapien
caaccaccctggattcgagaataat

SEQ ID NO: 4338711 - DNA, 25 bp, Homo sapien
gaggaccaagaggcaatattgaatg

SEQ ID NO: 4338712 - DNA, 25 bp, Homo sapien
cgagaataatcttgactgaggacca

SEQ ID NO: 4338713 - DNA, 25 bp, Homo sapien
gtgtaagctgggaaattgtagtcca

SEQ ID NO: 4338714 - DNA, 25 bp, Homo sapien
gcagctatagataagatccttgggt

SEQ ID NO: 4338715 - DNA, 25 bp, Homo sapien
tataacagggacattctgctcaggg

SEQ ID NO: 4338716 - DNA, 25 bp, Homo sapien
ttcaacagtataacagggacattct

SEQ ID NO: 4338717 - DNA, 25 bp, Homo sapien
tgctcagggctttttgcaacttcag

SEQ ID NO: 4338718 - DNA, 25 bp, Homo sapien
caaacatgttgtcatagctggttgc

SEQ ID NO: 4338719 - DNA, 25 bp, Homo sapien
gagtacctatacagagggtgcctat

SEQ ID NO: 4338720 - DNA, 25 bp, Homo sapien
gggtgcctatgtggccatcctccaa

SEQ ID NO: 4338721 - DNA, 25 bp, Homo sapien
gcatatcctacgtaactccactggg

SEQ ID NO: 4338722 - DNA, 25 bp, Homo sapien
caacttagggcttggattggcatca

SEQ ID NO: 4338723 - DNA, 25 bp, Homo sapien
tctactggaggtcactcaagctgta

SEQ ID NO: 4338724 - DNA, 25 bp, Homo sapien
gcaactcccggcacatagtagtcac

SEQ ID NO: 4338725 - DNA, 25 bp, Homo sapien
cacttgcaagccatgacgctcggct

SEQ ID NO: 4338726 - DNA, 25 bp, Homo sapien
taaactttctcgagtgtttctccta

SEQ ID NO: 4338727 - DNA, 25 bp, Homo sapien
atctgtaaactttctcgagtgtttc

SEQ ID NO: 4338728 - DNA, 25 bp, Homo sapien
aaaccacctgttatggaaaccatct

SEQ ID NO: 4338729 - DNA, 25 bp, Homo sapien
accacctgttatggaaaccatctgt

SEQ ID NO: 4338730 - DNA, 25 bp, Homo sapien
ctgttgccaggccaccgggtccggc

SEQ ID NO: 4338731 - DNA, 25 bp, Homo sapien
ctcgccgcgcctgttactgcctcca

SEQ ID NO: 4338732 - DNA, 25 bp, Homo sapien
ccagccttgattcttcgggaatcac

SEQ ID NO: 4338733 - DNA, 25 bp, Homo sapien
atcacttctccctcgccgcgcctgt

SEQ ID NO: 4338734 - DNA, 25 bp, Homo sapien
cgccgcactacagcgccgcggcctt

SEQ ID NO: 4338735 - DNA, 25 bp, Homo sapien
ggcagcgtgcgtcgcgacgcgggaa

SEQ ID NO: 4338736 - DNA, 25 bp, Homo sapien
tcttccactaaagaacctggggctc

SEQ ID NO: 4338737 - DNA, 25 bp, Homo sapien
tcatcctcgcttcgcgttcttccac

SEQ ID NO: 4338738 - DNA, 25 bp, Homo sapien
ctccccacgatgagatggtgctgtg

SEQ ID NO: 4338739 - DNA, 25 bp, Homo sapien
tccccacgatgagatggtgctgtgc

SEQ ID NO: 4338740 - DNA, 25 bp, Homo sapien
taaccaagagttaccatcttccagg

SEQ ID NO: 4338741 - DNA, 25 bp, Homo sapien
tattctaggtagctgccactgggaa

SEQ ID NO: 4338742 - DNA, 25 bp, Homo sapien
gaagcacagttacaggaggcctatg

SEQ ID NO: 4338743 - DNA, 25 bp, Homo sapien
tccaggtgtttggttatggtctcaa

SEQ ID NO: 4338744 - DNA, 25 bp, Homo sapien
catctaaccgttttagagctagccc

SEQ ID NO: 4338745 - DNA, 25 bp, Homo sapien
accgttttagagctagcccagacat

SEQ ID NO: 4338746 - DNA, 25 bp, Homo sapien
agtgctccacatctaaccgttttag

SEQ ID NO: 4338747 - DNA, 25 bp, Homo sapien
taagtgctccacatctaaccgtttt

SEQ ID NO: 4338748 - DNA, 25 bp, Homo sapien
aaatggtgttcacaacagtacctag

SEQ ID NO: 4338749 - DNA, 25 bp, Homo sapien
gcttataggctatttctagctgaac

SEQ ID NO: 4338750 - DNA, 25 bp, Homo sapien
cagtacctagaaagtaactggttca

SEQ ID NO: 4338751 - DNA, 25 bp, Homo sapien
gggcaccatgctcttttcttatcct

SEQ ID NO: 4338752 - DNA, 25 bp, Homo sapien
tgtttttgaactcatccgtgttgca

SEQ ID NO: 4338753 - DNA, 25 bp, Homo sapien
aattcacttcttatgattgtacaag

SEQ ID NO: 4338754 - DNA, 25 bp, Homo sapien
tacaaggttgtttgatcataataac

SEQ ID NO: 4338755 - DNA, 25 bp, Homo sapien
tctattgctctcattctgtataagc

SEQ ID NO: 4338756 - DNA, 25 bp, Homo sapien
agttgagaagtatgtaaatcctcca

SEQ ID NO: 4338757 - DNA, 25 bp, Homo sapien
tcattgaattgccttagcagctttg

SEQ ID NO: 4338758 - DNA, 25 bp, Homo sapien
caagattgttaggtctattctggga

SEQ ID NO: 4338759 - DNA, 25 bp, Homo sapien
ttgcatatgactaaacaagtggtcc

SEQ ID NO: 4338760 - DNA, 25 bp, Homo sapien
tctctccgtcaagcacagatggatt

SEQ ID NO: 4338761 - DNA, 25 bp, Homo sapien
aatggatgtgtcaataaatgggatc

SEQ ID NO: 4338762 - DNA, 25 bp, Homo sapien
gatggattcatgaagcctccaaagg

SEQ ID NO: 4338763 - DNA, 25 bp, Homo sapien
aaatgggatctaaagtgagcacgta

SEQ ID NO: 4338764 - DNA, 25 bp, Homo sapien
gaaggtggcttaatccaatcaaatg

SEQ ID NO: 4338765 - DNA, 25 bp, Homo sapien
caagacctgcctggatgcttctgct

SEQ ID NO: 4338766 - DNA, 25 bp, Homo sapien
tgccaggagaatggtagctccagaa

SEQ ID NO: 4338767 - DNA, 25 bp, Homo sapien
aactctgaaaggctgagtagtgcca

SEQ ID NO: 4338768 - DNA, 25 bp, Homo sapien
ggaataaggctggtgcaaaactgct

SEQ ID NO: 4338769 - DNA, 25 bp, Homo sapien
gaccctcaagacatgccatggagga

SEQ ID NO: 4338770 - DNA, 25 bp, Homo sapien
gggctggcaggataaactcctaaca

SEQ ID NO: 4338771 - DNA, 25 bp, Homo sapien
aaatagtccatttatgggctggcag

SEQ ID NO: 4338772 - DNA, 25 bp, Homo sapien
agtgtagtctactgaaagactcagg

SEQ ID NO: 4338773 - DNA, 25 bp, Homo sapien
gggcagtgtagtctactgaaagact

SEQ ID NO: 4338774 - DNA, 25 bp, Homo sapien
ggcagtgtagtctactgaaagactc

SEQ ID NO: 4338775 - DNA, 25 bp, Homo sapien
gcagtgtagtctactgaaagactca

SEQ ID NO: 4338776 - DNA, 25 bp, Homo sapien
tgagggatcacattccagtcagggt

SEQ ID NO: 4338777 - DNA, 25 bp, Homo sapien
cagttggtaattcctcgaactctaa

SEQ ID NO: 4338778 - DNA, 25 bp, Homo sapien
caagagagcatgaaccaaggctaaa

SEQ ID NO: 4338779 - DNA, 25 bp, Homo sapien
gggtccattacaagtcagagattat

SEQ ID NO: 4338780 - DNA, 25 bp, Homo sapien
cagctggaaacctaggtgatgctga

SEQ ID NO: 4338781 - DNA, 25 bp, Homo sapien
tgacacacaggagccgagaagtagc

SEQ ID NO: 4338782 - DNA, 25 bp, Homo sapien
gagaagtagccacagaagttgtgct

SEQ ID NO: 4338783 - DNA, 25 bp, Homo sapien
gttagactcagacttgcagttccca

SEQ ID NO: 4338784 - DNA, 25 bp, Homo sapien
tccttccactatgagagctgtcttt

SEQ ID NO: 4338785 - DNA, 25 bp, Homo sapien
ccttccactatgagagctgtctttc

SEQ ID NO: 4338786 - DNA, 25 bp, Homo sapien
ccacttcctcggtgagggtgaagaa

SEQ ID NO: 4338787 - DNA, 25 bp, Homo sapien
ttttccacttcctcggtgagggtga

SEQ ID NO: 4338788 - DNA, 25 bp, Homo sapien
cactctacttggtctttgggctttt

SEQ ID NO: 4338789 - DNA, 25 bp, Homo sapien
agaactgtggtttacatttctcata

SEQ ID NO: 4338790 - DNA, 25 bp, Homo sapien
cctcagcaggatgccccaggctcac

SEQ ID NO: 4338791 - DNA, 25 bp, Homo sapien
aactgaggccggagggcaagggagg

SEQ ID NO: 4338792 - DNA, 25 bp, Homo sapien
gctattcttgcctggagtgatatca

SEQ ID NO: 4338793 - DNA, 25 bp, Homo sapien
gagtgatatcaagtgagcggtagct

SEQ ID NO: 4338794 - DNA, 25 bp, Homo sapien
aggcggcttctcctcgggccagtgt

SEQ ID NO: 4338795 - DNA, 25 bp, Homo sapien
cgtgcctctgagtgctctcccgggg

SEQ ID NO: 4338796 - DNA, 25 bp, Homo sapien
tgcctctgagtgctctcccgggggc

SEQ ID NO: 4338797 - DNA, 25 bp, Homo sapien
gtgcctctgagtgctctcccggggg

SEQ ID NO: 4338798 - DNA, 25 bp, Homo sapien
ccgtgcctctgagtgctctcccggg

SEQ ID NO: 4338799 - DNA, 25 bp, Homo sapien
gcaggtggatgattctgcgttccac

SEQ ID NO: 4338800 - DNA, 25 bp, Homo sapien
ccttgaggatgacaggtctctgatc

SEQ ID NO: 4338801 - DNA, 25 bp, Homo sapien
tcagcctagagctacggtgccttcc

SEQ ID NO: 4338802 - DNA, 25 bp, Homo sapien
tctgaccagtgtatgggtgacccat

SEQ ID NO: 4338803 - DNA, 25 bp, Homo sapien
tccaggacaccattggcgatgggag

SEQ ID NO: 4338804 - DNA, 25 bp, Homo sapien
ggccaggttgaggttccgcagttct

SEQ ID NO: 4338805 - DNA, 25 bp, Homo sapien
ggccaaatctgcctttgaggtcagg

SEQ ID NO: 4338806 - DNA, 25 bp, Homo sapien
caccattggcgatgggaggctgatt

SEQ ID NO: 4338807 - DNA, 25 bp, Homo sapien
cgggtgcattggataagatgaaacc

SEQ ID NO: 4338808 - DNA, 25 bp, Homo sapien
gcctgggcctgcttcatgtagcggt

SEQ ID NO: 4338809 - DNA, 25 bp, Homo sapien
cagcagcgggtgcattggataagat

SEQ ID NO: 4338810 - DNA, 25 bp, Homo sapien
ttcatgtagcggtggcgggccaggg

SEQ ID NO: 4338811 - DNA, 25 bp, Homo sapien
cagcagggacagcggatatagcagc

SEQ ID NO: 4338812 - DNA, 25 bp, Homo sapien
acagcggatatagcagcagcaatac

SEQ ID NO: 4338813 - DNA, 25 bp, Homo sapien
cagggacagcggatatagcagcagc

SEQ ID NO: 4338814 - DNA, 25 bp, Homo sapien
gggacagcggatatagcagcagcaa

SEQ ID NO: 4338815 - DNA, 25 bp, Homo sapien
ctgaatagaaagctccagtagcact

SEQ ID NO: 4338816 - DNA, 25 bp, Homo sapien
aagtgttacggcagtgagggtgact

SEQ ID NO: 4338817 - DNA, 25 bp, Homo sapien
aatagaaagctccagtagcacttac

SEQ ID NO: 4338818 - DNA, 25 bp, Homo sapien
gactgaatagaaagctccagtagca

SEQ ID NO: 4338819 - DNA, 25 bp, Homo sapien
gcagtaatacactccatggtcccac

SEQ ID NO: 4338820 - DNA, 25 bp, Homo sapien
cctggagcctcaatggtgcagtaat

SEQ ID NO: 4338821 - DNA, 25 bp, Homo sapien
tcacttcatttatcacgagatctgc

SEQ ID NO: 4338822 - DNA, 25 bp, Homo sapien
ttatcggggtctcctgatgtgtccc

SEQ ID NO: 4338823 - DNA, 25 bp, Homo sapien
actatgcgaacttcccgctggttgt

SEQ ID NO: 4338824 - DNA, 25 bp, Homo sapien
ttctggatggtgatcttgcgctgcc

SEQ ID NO: 4338825 - DNA, 25 bp, Homo sapien
tgatcttgcgctgccggtaatctac

SEQ ID NO: 4338826 - DNA, 25 bp, Homo sapien
cgccgctgggccactatgcgaactt

SEQ ID NO: 4338827 - DNA, 25 bp, Homo sapien
gtcattggatgggtcctggcccagg

SEQ ID NO: 4338828 - DNA, 25 bp, Homo sapien
agtcattggatgggtcctggcccag

SEQ ID NO: 4338829 - DNA, 25 bp, Homo sapien
cagtcattggatgggtcctggccca

SEQ ID NO: 4338830 - DNA, 25 bp, Homo sapien
gaaggacttgaagcgccatgtcacc

SEQ ID NO: 4338831 - DNA, 25 bp, Homo sapien
gtcacatttgaggatgatagaggca

SEQ ID NO: 4338832 - DNA, 25 bp, Homo sapien
cagggtgacatagcgttctgtgtgc

SEQ ID NO: 4338833 - DNA, 25 bp, Homo sapien
aagatagggtccttgcagaaggact

SEQ ID NO: 4338834 - DNA, 25 bp, Homo sapien
aaatgctgaaggtgacctactctgc

SEQ ID NO: 4338835 - DNA, 25 bp, Homo sapien
aatgctgaaggtgacctactctgct

SEQ ID NO: 4338836 - DNA, 25 bp, Homo sapien
tgcttgggtactcttttatcttctc

SEQ ID NO: 4338837 - DNA, 25 bp, Homo sapien
gtgcgggcagtttgggccatgccat

SEQ ID NO: 4338838 - DNA, 25 bp, Homo sapien
aaggtgcgggcagtttgggccatgc

SEQ ID NO: 4338839 - DNA, 25 bp, Homo sapien
ggtgcgggcagtttgggccatgcca

SEQ ID NO: 4338840 - DNA, 25 bp, Homo sapien
ccaaggtgcgggcagtttgggccat

SEQ ID NO: 4338841 - DNA, 25 bp, Homo sapien
gccccaggacgcaccaccttctcca

SEQ ID NO: 4338842 - DNA, 25 bp, Homo sapien
ggggcactgcgtctttcttcctcag

SEQ ID NO: 4338843 - DNA, 25 bp, Homo sapien
agggagcgtccgctctggtcccggg

SEQ ID NO: 4338844 - DNA, 25 bp, Homo sapien
cttttcagctcaggggcttcggggc

SEQ ID NO: 4338845 - DNA, 25 bp, Homo sapien
ttaggtctctttgcaccaggccacg

SEQ ID NO: 4338846 - DNA, 25 bp, Homo sapien
cacgtagcatgtaatctcagtctct

SEQ ID NO: 4338847 - DNA, 25 bp, Homo sapien
caggccacgtagcatgtaatctcag

SEQ ID NO: 4338848 - DNA, 25 bp, Homo sapien
tttgcaccaggccacgtagcatgta

SEQ ID NO: 4338849 - DNA, 25 bp, Homo sapien
tctgtagctgactgggaataaccaa

SEQ ID NO: 4338850 - DNA, 25 bp, Homo sapien
aaaatgctagctaaatgtgctagtg

SEQ ID NO: 4338851 - DNA, 25 bp, Homo sapien
gctgactgggaataaccaattgaga

SEQ ID NO: 4338852 - DNA, 25 bp, Homo sapien
agctaaatgtgctagtgagaatggg

SEQ ID NO: 4338853 - DNA, 25 bp, Homo sapien
gccagacccagagttcttccttcct

SEQ ID NO: 4338854 - DNA, 25 bp, Homo sapien
gtggaaataatctggagtcaggcca

SEQ ID NO: 4338855 - DNA, 25 bp, Homo sapien
taatctggagtcaggccagccagac

SEQ ID NO: 4338856 - DNA, 25 bp, Homo sapien
ctctgctgtcggtggaaataatctg

SEQ ID NO: 4338857 - DNA, 25 bp, Homo sapien
gacaatcctcctttattggcaattg

SEQ ID NO: 4338858 - DNA, 25 bp, Homo sapien
ccggtatcatctcttccatgggctt

SEQ ID NO: 4338859 - DNA, 25 bp, Homo sapien
tctgctttcccccttgcatcaagaa

SEQ ID NO: 4338860 - DNA, 25 bp, Homo sapien
tgaacctttgaacttgtatctcttc

SEQ ID NO: 4338861 - DNA, 25 bp, Homo sapien
ccatgggctttcacaaaagtctgga

SEQ ID NO: 4338862 - DNA, 25 bp, Homo sapien
tggttgcttctacttgcagccttgg

SEQ ID NO: 4338863 - DNA, 25 bp, Homo sapien
cagctactgtgtgtagcctgtcctc

SEQ ID NO: 4338864 - DNA, 25 bp, Homo sapien
tcagtcctgagagcgttggagaatg

SEQ ID NO: 4338865 - DNA, 25 bp, Homo sapien
tgaagtaacctcagcaacttcctcc

SEQ ID NO: 4338866 - DNA, 25 bp, Homo sapien
acccttggctctgatgacatatgtg

SEQ ID NO: 4338867 - DNA, 25 bp, Homo sapien
tgttgaccaccatcacggttggccc

SEQ ID NO: 4338868 - DNA, 25 bp, Homo sapien
ctgatgacatatgtgggagtcagag

SEQ ID NO: 4338869 - DNA, 25 bp, Homo sapien
aacactgttgaccaccatcacggtt

SEQ ID NO: 4338870 - DNA, 25 bp, Homo sapien
ctttgtgcaaaggtcaaagtaagaa

SEQ ID NO: 4338871 - DNA, 25 bp, Homo sapien
gaagggagatctttgtgcaaaggtc

SEQ ID NO: 4338872 - DNA, 25 bp, Homo sapien
gcaaaggtcaaagtaagaattggga

SEQ ID NO: 4338873 - DNA, 25 bp, Homo sapien
agatctttgtgcaaaggtcaaagta

SEQ ID NO: 4338874 - DNA, 25 bp, Homo sapien
gcagtccaaagatgtcagctcgcct

SEQ ID NO: 4338875 - DNA, 25 bp, Homo sapien
gctggggtctccgagcagcctctgc

SEQ ID NO: 4338876 - DNA, 25 bp, Homo sapien
gcctctgctctagaagaagcagtcc

SEQ ID NO: 4338877 - DNA, 25 bp, Homo sapien
caaataattggcagctgttcttggc

SEQ ID NO: 4338878 - DNA, 25 bp, Homo sapien
tctggtccagagacccttccccaat

SEQ ID NO: 4338879 - DNA, 25 bp, Homo sapien
cttctctggtccagagacccttccc

SEQ ID NO: 4338880 - DNA, 25 bp, Homo sapien
tggtccagagacccttccccaatat

SEQ ID NO: 4338881 - DNA, 25 bp, Homo sapien
tccagagacccttccccaatatttc

SEQ ID NO: 4338882 - DNA, 25 bp, Homo sapien
ttgctccataccctggctttgtcac

SEQ ID NO: 4338883 - DNA, 25 bp, Homo sapien
caactttacaactgggccaatctca

SEQ ID NO: 4338884 - DNA, 25 bp, Homo sapien
tactgacttcttcctattcagacac

SEQ ID NO: 4338885 - DNA, 25 bp, Homo sapien
ccttctccagcggtgatttcttggc

SEQ ID NO: 4338886 - DNA, 25 bp, Homo sapien
ttccagaatcacgggccaggctgac

SEQ ID NO: 4338887 - DNA, 25 bp, Homo sapien
attccagaatcacgggccaggctga

SEQ ID NO: 4338888 - DNA, 25 bp, Homo sapien
ccagaatcacgggccaggctgaccc

SEQ ID NO: 4338889 - DNA, 25 bp, Homo sapien
agattccagaatcacgggccaggct

SEQ ID NO: 4338890 - DNA, 25 bp, Homo sapien
caaaatgctgaatttgtaagcaaat

SEQ ID NO: 4338891 - DNA, 25 bp, Homo sapien
tagtgatatcatcacatttcccctt

SEQ ID NO: 4338892 - DNA, 25 bp, Homo sapien
agactgaaagttagtgatatcatca

SEQ ID NO: 4338893 - DNA, 25 bp, Homo sapien
gaaatattcacaggcttaaagactg

SEQ ID NO: 4338894 - DNA, 25 bp, Homo sapien
tgttgagtggattcttgtggtctat

SEQ ID NO: 4338895 - DNA, 25 bp, Homo sapien
caatagcatcatcacaacagtcagc

SEQ ID NO: 4338896 - DNA, 25 bp, Homo sapien
tagcaacctgttggagtttacgtgg

SEQ ID NO: 4338897 - DNA, 25 bp, Homo sapien
tcagaggtattgttgagtggattct

SEQ ID NO: 4338898 - DNA, 25 bp, Homo sapien
ctcagtttcagaaatggtctggaag

SEQ ID NO: 4338899 - DNA, 25 bp, Homo sapien
cagtttcagaaatggtctggaagag

SEQ ID NO: 4338900 - DNA, 25 bp, Homo sapien
cactcagtttcagaaatggtctgga

SEQ ID NO: 4338901 - DNA, 25 bp, Homo sapien
cctgtcacactcagtttcagaaatg

SEQ ID NO: 4338902 - DNA, 25 bp, Homo sapien
cccagcatagggctagcaaatttga

SEQ ID NO: 4338903 - DNA, 25 bp, Homo sapien
cctggctctaaggtgggatcactaa

SEQ ID NO: 4338904 - DNA, 25 bp, Homo sapien
cttgattagactcctagcacctggc

SEQ ID NO: 4338905 - DNA, 25 bp, Homo sapien
cctcaagggttatagactgccatgc

SEQ ID NO: 4338906 - DNA, 25 bp, Homo sapien
agctggataacagtaggaccaggtg

SEQ ID NO: 4338907 - DNA, 25 bp, Homo sapien
agtaggaccaggtgctgatactgcc

SEQ ID NO: 4338908 - DNA, 25 bp, Homo sapien
gtaggaccaggtgctgatactgcct

SEQ ID NO: 4338909 - DNA, 25 bp, Homo sapien
cagctggataacagtaggaccaggt

SEQ ID NO: 4338910 - DNA, 25 bp, Homo sapien
ctgtggtgggcatcttaaggtcatt

SEQ ID NO: 4338911 - DNA, 25 bp, Homo sapien
gtggtgggcatcttaaggtcatttc

SEQ ID NO: 4338912 - DNA, 25 bp, Homo sapien
ttaaatatcctgaagacactggcgg

SEQ ID NO: 4338913 - DNA, 25 bp, Homo sapien
gtgggcatcttaaggtcatttcctg

SEQ ID NO: 4338914 - DNA, 25 bp, Homo sapien
gcacagggccacaagactcatcttt

SEQ ID NO: 4338915 - DNA, 25 bp, Homo sapien
agggcacagggccacaagactcatc

SEQ ID NO: 4338916 - DNA, 25 bp, Homo sapien
tctttcttccagcacgtggatatga

SEQ ID NO: 4338917 - DNA, 25 bp, Homo sapien
cagcacgtggatatgagggcagcat

SEQ ID NO: 4338918 - DNA, 25 bp, Homo sapien
cagcgggaacaggatttgagagccg

SEQ ID NO: 4338919 - DNA, 25 bp, Homo sapien
tcggggaaccgaagacgcgccctca

SEQ ID NO: 4338920 - DNA, 25 bp, Homo sapien
gaacccctggctcggcacgggagag

SEQ ID NO: 4338921 - DNA, 25 bp, Homo sapien
cagcgaccctgaagagtcagctaag

SEQ ID NO: 4338922 - DNA, 25 bp, Homo sapien
gctgtggccggacccgaaggcgggc

SEQ ID NO: 4338923 - DNA, 25 bp, Homo sapien
ggagcgcagcgagccagacgcgcct

SEQ ID NO: 4338924 - DNA, 25 bp, Homo sapien
ctgctgtggccggacccgaaggcgg

SEQ ID NO: 4338925 - DNA, 25 bp, Homo sapien
agacgcgcctctccaagaccgtgac

SEQ ID NO: 4338926 - DNA, 25 bp, Homo sapien
cgcgcagtcctgagatcagaccaga

SEQ ID NO: 4338927 - DNA, 25 bp, Homo sapien
cgcagtcctgagatcagaccagagc

SEQ ID NO: 4338928 - DNA, 25 bp, Homo sapien
ggctgcgcgcagtcctgagatcaga

SEQ ID NO: 4338929 - DNA, 25 bp, Homo sapien
tgcgcgcagtcctgagatcagacca

SEQ ID NO: 4338930 - DNA, 25 bp, Homo sapien
cggagctgcctctgtgcgagggagc

SEQ ID NO: 4338931 - DNA, 25 bp, Homo sapien
agctgcctctgtgcgagggagccct

SEQ ID NO: 4338932 - DNA, 25 bp, Homo sapien
tggccgcggcgcaggtaggaccggg

SEQ ID NO: 4338933 - DNA, 25 bp, Homo sapien
tcctcgtggagacccacggccgagg

SEQ ID NO: 4338934 - DNA, 25 bp, Homo sapien
ccgaacgaggggcacacgccggagc

SEQ ID NO: 4338935 - DNA, 25 bp, Homo sapien
cgggccgaacgaggggcacacgccg

SEQ ID NO: 4338936 - DNA, 25 bp, Homo sapien
aacgaggggcacacgccggagcagc

SEQ ID NO: 4338937 - DNA, 25 bp, Homo sapien
ggctccgggccgaacgaggggcaca

SEQ ID NO: 4338938 - DNA, 25 bp, Homo sapien
tagggaccagattacaggatcaagg

SEQ ID NO: 4338939 - DNA, 25 bp, Homo sapien
ggattgttcagtgcccctagaaggg

SEQ ID NO: 4338940 - DNA, 25 bp, Homo sapien
gaaaggactcgcttgccacgtgtta

SEQ ID NO: 4338941 - DNA, 25 bp, Homo sapien
gcgcgcaccaaaacgcctgctgttg

SEQ ID NO: 4338942 - DNA, 25 bp, Homo sapien
tctccactccaggattccctaactg

SEQ ID NO: 4338943 - DNA, 25 bp, Homo sapien
tccactccaggattccctaactggc

SEQ ID NO: 4338944 - DNA, 25 bp, Homo sapien
atctccactccaggattccctaact

SEQ ID NO: 4338945 - DNA, 25 bp, Homo sapien
cactccaggattccctaactggcat

SEQ ID NO: 4338946 - DNA, 25 bp, Homo sapien
actcagagacgccagctgtggtgcc

SEQ ID NO: 4338947 - DNA, 25 bp, Homo sapien
cagttgggtcccaactgcatgtcag

SEQ ID NO: 4338948 - DNA, 25 bp, Homo sapien
ggcactgtgtactcagagacgccag

SEQ ID NO: 4338949 - DNA, 25 bp, Homo sapien
gcatgtcagatgttgagttggcact

SEQ ID NO: 4338950 - DNA, 25 bp, Homo sapien
ccattgttctggacccatatcagtg

SEQ ID NO: 4338951 - DNA, 25 bp, Homo sapien
cctccacctgagaataggtttctca

SEQ ID NO: 4338952 - DNA, 25 bp, Homo sapien
gttgctgagagggacagccctccac

SEQ ID NO: 4338953 - DNA, 25 bp, Homo sapien
tcctgactattgcagctgtggttgc

SEQ ID NO: 4338954 - DNA, 25 bp, Homo sapien
gacacagtttgaatcactaccacca

SEQ ID NO: 4338955 - DNA, 25 bp, Homo sapien
gatcatgggcaagggaaatcataga

SEQ ID NO: 4338956 - DNA, 25 bp, Homo sapien
ggacacagtttgaatcactaccacc

SEQ ID NO: 4338957 - DNA, 25 bp, Homo sapien
acttgatcatgggcaagggaaatca

SEQ ID NO: 4338958 - DNA, 25 bp, Homo sapien
tagcgccacgcattacaaaacaacc

SEQ ID NO: 4338959 - DNA, 25 bp, Homo sapien
aaagcaaaggcagcgatgacgcctc

SEQ ID NO: 4338960 - DNA, 25 bp, Homo sapien
cagggaaaacgctcctttagcgcca

SEQ ID NO: 4338961 - DNA, 25 bp, Homo sapien
gagtcactcgcatggaccagtaaag

SEQ ID NO: 4338962 - DNA, 25 bp, Homo sapien
aggggcttcccctctctgcgccacc

SEQ ID NO: 4338963 - DNA, 25 bp, Homo sapien
tggagaaagcaacctccttccctga

SEQ ID NO: 4338964 - DNA, 25 bp, Homo sapien
ggcttcccctctctgcgccaccatc

SEQ ID NO: 4338965 - DNA, 25 bp, Homo sapien
agaaagcaacctccttccctgaggg

SEQ ID NO: 4338966 - DNA, 25 bp, Homo sapien
ctgcaacagggcagcggctgaaccc

SEQ ID NO: 4338967 - DNA, 25 bp, Homo sapien
tgcaacagggcagcggctgaaccca

SEQ ID NO: 4338968 - DNA, 25 bp, Homo sapien
gcaacagggcagcggctgaacccat

SEQ ID NO: 4338969 - DNA, 25 bp, Homo sapien
atccagtctcttccactgaggttcc

SEQ ID NO: 4338970 - DNA, 25 bp, Homo sapien
aatccagtctcttccactgaggttc

SEQ ID NO: 4338971 - DNA, 25 bp, Homo sapien
gagagcccacttccaaatccagtct

SEQ ID NO: 4338972 - DNA, 25 bp, Homo sapien
ggaagagagcccacttccaaatcca

SEQ ID NO: 4338973 - DNA, 25 bp, Homo sapien
gaagtgagaagtgtgtcctgcagct

SEQ ID NO: 4338974 - DNA, 25 bp, Homo sapien
tcatgatccccttgtagaagtgaga

SEQ ID NO: 4338975 - DNA, 25 bp, Homo sapien
gaaactcatctgtcccctaaggatc

SEQ ID NO: 4338976 - DNA, 25 bp, Homo sapien
caggatgctaaccagtctcagagga

SEQ ID NO: 4338977 - DNA, 25 bp, Homo sapien
gcatcatacacttgctgtttgaagg

SEQ ID NO: 4338978 - DNA, 25 bp, Homo sapien
ggaggtggcaagtcatcatgctgat

SEQ ID NO: 4338979 - DNA, 25 bp, Homo sapien
cacgagtgggctaaactaggcattc

SEQ ID NO: 4338980 - DNA, 25 bp, Homo sapien
ctaggcattctaggactggtcagga

SEQ ID NO: 4338981 - DNA, 25 bp, Homo sapien
tatgttcagaaggtctgcgcctggg

SEQ ID NO: 4338982 - DNA, 25 bp, Homo sapien
gactccggaacttggattagccacg

SEQ ID NO: 4338983 - DNA, 25 bp, Homo sapien
cagctatgatcatggagaagcctct

SEQ ID NO: 4338984 - DNA, 25 bp, Homo sapien
ttagagcatccatttagtaccaggt

SEQ ID NO: 4338985 - DNA, 25 bp, Homo sapien
tcaggctaaaagagaacctgtctgg

SEQ ID NO: 4338986 - DNA, 25 bp, Homo sapien
tgcacccggggagcactggcaactg

SEQ ID NO: 4338987 - DNA, 25 bp, Homo sapien
cgtattgagggtaggcctgcacccg

SEQ ID NO: 4338988 - DNA, 25 bp, Homo sapien
tctgggccgtattgagggtaggcct

SEQ ID NO: 4338989 - DNA, 25 bp, Homo sapien
gatttgatttgagcagataacccac

SEQ ID NO: 4338990 - DNA, 25 bp, Homo sapien
gcagtaagtcttgacatcgtgtgag

SEQ ID NO: 4338991 - DNA, 25 bp, Homo sapien
tttggacattgatggatgatcctct

SEQ ID NO: 4338992 - DNA, 25 bp, Homo sapien
aaaaggtgtgtatgcctctcctaca

SEQ ID NO: 4338993 - DNA, 25 bp, Homo sapien
gaacagcgagttccaggtaagagct

SEQ ID NO: 4338994 - DNA, 25 bp, Homo sapien
tcatggaacagcgagttccaggtaa

SEQ ID NO: 4338995 - DNA, 25 bp, Homo sapien
cagcgagttccaggtaagagctcta

SEQ ID NO: 4338996 - DNA, 25 bp, Homo sapien
gttccaggtaagagctctacttgac

SEQ ID NO: 4338997 - DNA, 25 bp, Homo sapien
tcttccacacggtcagaatctgaag

SEQ ID NO: 4338998 - DNA, 25 bp, Homo sapien
agtcctttcttccacacggtcagaa

SEQ ID NO: 4338999 - DNA, 25 bp, Homo sapien
gaatctgaagtatgagccaaaacag

SEQ ID NO: 4339000 - DNA, 25 bp, Homo sapien
cctgttcacccgtgagaacactcat

SEQ ID NO: 4339001 - DNA, 25 bp, Homo sapien
tagacaatactcatgtgcatcggca

SEQ ID NO: 4339002 - DNA, 25 bp, Homo sapien
taatccatttattgttacacccatg

SEQ ID NO: 4339003 - DNA, 25 bp, Homo sapien
catgtgcatcggcaaaaaaaaacct

SEQ ID NO: 4339004 - DNA, 25 bp, Homo sapien
ttgctaagtataatagtccaatcat

SEQ ID NO: 4339005 - DNA, 25 bp, Homo sapien
catttcctccattctcaatctgctt

SEQ ID NO: 4339006 - DNA, 25 bp, Homo sapien
cctcagaaaacaatggcaccatttc

SEQ ID NO: 4339007 - DNA, 25 bp, Homo sapien
caccatttcctccattctcaatctg

SEQ ID NO: 4339008 - DNA, 25 bp, Homo sapien
tttcctccattctcaatctgctttc

SEQ ID NO: 4339009 - DNA, 25 bp, Homo sapien
aaaaacaaggatgacgagctgacgg

SEQ ID NO: 4339010 - DNA, 25 bp, Homo sapien
tgacgggcttttagcagcatgtacc

SEQ ID NO: 4339011 - DNA, 25 bp, Homo sapien
catgtacccaaagtgttctgattcc

SEQ ID NO: 4339012 - DNA, 25 bp, Homo sapien
tgattccttcaactggctactgagt

SEQ ID NO: 4339013 - DNA, 25 bp, Homo sapien
atgcacctgtagctacttgtgaggc

SEQ ID NO: 4339014 - DNA, 25 bp, Homo sapien
gagcacaggattttgaggttgcaat

SEQ ID NO: 4339015 - DNA, 25 bp, Homo sapien
ggtatgcacctgtagctacttgtga

SEQ ID NO: 4339016 - DNA, 25 bp, Homo sapien
agcacaggattttgaggttgcaatg

SEQ ID NO: 4339017 - DNA, 25 bp, Homo sapien
tgatttctccataattatcagaatt

SEQ ID NO: 4339018 - DNA, 25 bp, Homo sapien
ttgatttctccataattatcagaat

SEQ ID NO: 4339019 - DNA, 25 bp, Homo sapien
tcatcctagaaagcccgccctgttg

SEQ ID NO: 4339020 - DNA, 25 bp, Homo sapien
ttagctcttatgagatgacccagtc

SEQ ID NO: 4339021 - DNA, 25 bp, Homo sapien
tggctcagaaatcatcctagaaagc

SEQ ID NO: 4339022 - DNA, 25 bp, Homo sapien
tgatatctgtcatgcttagctctta

SEQ ID NO: 4339023 - DNA, 25 bp, Homo sapien
tcattctttggaggcttgaagtgaa

SEQ ID NO: 4339024 - DNA, 25 bp, Homo sapien
gaattcggcagcgttcattaaacac

SEQ ID NO: 4339025 - DNA, 25 bp, Homo sapien
agtgaattcggcagcgttcattaaa

SEQ ID NO: 4339026 - DNA, 25 bp, Homo sapien
ttggaggcttgaagtgaattcggca

SEQ ID NO: 4339027 - DNA, 25 bp, Homo sapien
gagttatcctgcgtaaatcaggcct

SEQ ID NO: 4339028 - DNA, 25 bp, Homo sapien
caaaagtcattgagttatcctgcgt

SEQ ID NO: 4339029 - DNA, 25 bp, Homo sapien
tatcctgcgtaaatcaggcctggaa

SEQ ID NO: 4339030 - DNA, 25 bp, Homo sapien
cattgagttatcctgcgtaaatcag

SEQ ID NO: 4339031 - DNA, 25 bp, Homo sapien
tcaacattcagttctgactgcatcc

SEQ ID NO: 4339032 - DNA, 25 bp, Homo sapien
cttcaacattcagttctgactgcat

SEQ ID NO: 4339033 - DNA, 25 bp, Homo sapien
ttcttcaacattcagttctgactgc

SEQ ID NO: 4339034 - DNA, 25 bp, Homo sapien
aacattcagttctgactgcatccat

SEQ ID NO: 4339035 - DNA, 25 bp, Homo sapien
tttgggggtgtcagttagtatctca

SEQ ID NO: 4339036 - DNA, 25 bp, Homo sapien
aatgaagaggtagagctgtaccatc

SEQ ID NO: 4339037 - DNA, 25 bp, Homo sapien
gaagaggtagagctgtaccatctcc

SEQ ID NO: 4339038 - DNA, 25 bp, Homo sapien
tcagttagtatctcaagtatctctg

SEQ ID NO: 4339039 - DNA, 25 bp, Homo sapien
catggttacccccaaccctatatgt

SEQ ID NO: 4339040 - DNA, 25 bp, Homo sapien
atttgcttatgtactaccccatggt

SEQ ID NO: 4339041 - DNA, 25 bp, Homo sapien
gcttatgtactaccccatggttacc

SEQ ID NO: 4339042 - DNA, 25 bp, Homo sapien
ctatatgttatcaagctagaaagca

SEQ ID NO: 4339043 - DNA, 25 bp, Homo sapien
taaaccctccttgcagtggtcatcc

SEQ ID NO: 4339044 - DNA, 25 bp, Homo sapien
tttctaaaccctccttgcagtggtc

SEQ ID NO: 4339045 - DNA, 25 bp, Homo sapien
ctcactgattggtttctaaaccctc

SEQ ID NO: 4339046 - DNA, 25 bp, Homo sapien
gattggtttctaaaccctccttgca

SEQ ID NO: 4339047 - DNA, 25 bp, Homo sapien
aagggcagatctcaaggctgagcaa

SEQ ID NO: 4339048 - DNA, 25 bp, Homo sapien
aagacacaagggcagatctcaaggc

SEQ ID NO: 4339049 - DNA, 25 bp, Homo sapien
gacacaagggcagatctcaaggctg

SEQ ID NO: 4339050 - DNA, 25 bp, Homo sapien
cacaagggcagatctcaaggctgag

SEQ ID NO: 4339051 - DNA, 25 bp, Homo sapien
cagccagctacaaggaaagaggttt

SEQ ID NO: 4339052 - DNA, 25 bp, Homo sapien
gggcaaacttcatgactgtgcagta

SEQ ID NO: 4339053 - DNA, 25 bp, Homo sapien
tcagctacatctactaaacaaaggg

SEQ ID NO: 4339054 - DNA, 25 bp, Homo sapien
gttttcaatagatgacgaggtcccc

SEQ ID NO: 4339055 - DNA, 25 bp, Homo sapien
ttttgataattgtacactggtcctg

SEQ ID NO: 4339056 - DNA, 25 bp, Homo sapien
actggtcctgtaggaaaagtccctg

SEQ ID NO: 4339057 - DNA, 25 bp, Homo sapien
ggtaaagtggtacaatgtgtataac

SEQ ID NO: 4339058 - DNA, 25 bp, Homo sapien
taagggtaaagtggtacaatgtgta

SEQ ID NO: 4339059 - DNA, 25 bp, Homo sapien
tacagttttttatgactctgtctct

SEQ ID NO: 4339060 - DNA, 25 bp, Homo sapien
ctctgtctctactggcatgagctgc

SEQ ID NO: 4339061 - DNA, 25 bp, Homo sapien
tctctctcttctcggaggtttttta

SEQ ID NO: 4339062 - DNA, 25 bp, Homo sapien
agtctgggctatacagttttttatg

SEQ ID NO: 4339063 - DNA, 25 bp, Homo sapien
ttctgtcatcaattgtcctcatcac

SEQ ID NO: 4339064 - DNA, 25 bp, Homo sapien
tctgtcatcaattgtcctcatcacc

SEQ ID NO: 4339065 - DNA, 25 bp, Homo sapien
catgactgaaaccaactcctttctt

SEQ ID NO: 4339066 - DNA, 25 bp, Homo sapien
tttgccaaacttaaatccatgactg

SEQ ID NO: 4339067 - DNA, 25 bp, Homo sapien
aaatccatgactgaaaccaactcct

SEQ ID NO: 4339068 - DNA, 25 bp, Homo sapien
ttgccaaacttaaatccatgactga

SEQ ID NO: 4339069 - DNA, 25 bp, Homo sapien
taatgcagcagtaagagacagtatc

SEQ ID NO: 4339070 - DNA, 25 bp, Homo sapien
tctaaactgaactgatcttctgagg

SEQ ID NO: 4339071 - DNA, 25 bp, Homo sapien
cttggttatgaaagccctcagcaat

SEQ ID NO: 4339072 - DNA, 25 bp, Homo sapien
tccaggtcctcctatggttaacaaa

SEQ ID NO: 4339073 - DNA, 25 bp, Homo sapien
ctcaagaattatatggggccaggtg

SEQ ID NO: 4339074 - DNA, 25 bp, Homo sapien
ttaacggagggattggtcatttgtg

SEQ ID NO: 4339075 - DNA, 25 bp, Homo sapien
tgtgatgtcacggaagtcagaagaa

SEQ ID NO: 4339076 - DNA, 25 bp, Homo sapien
gaatgttactaactcaagaattata

SEQ ID NO: 4339077 - DNA, 25 bp, Homo sapien
cctaatccgatagaactgatgtccc

SEQ ID NO: 4339078 - DNA, 25 bp, Homo sapien
tactccatccactgggtttcgcaag

SEQ ID NO: 4339079 - DNA, 25 bp, Homo sapien
tttcgcaagtgccaggagactagta

SEQ ID NO: 4339080 - DNA, 25 bp, Homo sapien
gagactagtaggtatctgttacggg

SEQ ID NO: 4339081 - DNA, 25 bp, Homo sapien
tttaccacagcagattacccagagc

SEQ ID NO: 4339082 - DNA, 25 bp, Homo sapien
gattgttacaatccttatccacgca

SEQ ID NO: 4339083 - DNA, 25 bp, Homo sapien
taatgggcaatgacactagagcagg

SEQ ID NO: 4339084 - DNA, 25 bp, Homo sapien
gccctaggtctctgatatttgaaca

SEQ ID NO: 4339085 - DNA, 25 bp, Homo sapien
gagaaaagagctttgaattgcccgc

SEQ ID NO: 4339086 - DNA, 25 bp, Homo sapien
aagctggttcatactccctcgcaaa

SEQ ID NO: 4339087 - DNA, 25 bp, Homo sapien
gacctccaatggctcgagaaaagag

SEQ ID NO: 4339088 - DNA, 25 bp, Homo sapien
attgcccgctttttccaaagctggt

SEQ ID NO: 4339089 - DNA, 25 bp, Homo sapien
actgggcgccgccatattggacaaa

SEQ ID NO: 4339090 - DNA, 25 bp, Homo sapien
atattggacaaacacgaggaccccg

SEQ ID NO: 4339091 - DNA, 25 bp, Homo sapien
gccgccatattggacaaacacgagg

SEQ ID NO: 4339092 - DNA, 25 bp, Homo sapien
tgggcgccgccatattggacaaaca

SEQ ID NO: 4339093 - DNA, 25 bp, Homo sapien
ggagcaaaggtgaccgcggagtcgc

SEQ ID NO: 4339094 - DNA, 25 bp, Homo sapien
ttaacatgtcctcctggaactgggc

SEQ ID NO: 4339095 - DNA, 25 bp, Homo sapien
cttgagttcaacgtggtccgcatcc

SEQ ID NO: 4339096 - DNA, 25 bp, Homo sapien
tgtggttcccctaccaggtcgttga

SEQ ID NO: 4339097 - DNA, 25 bp, Homo sapien
caaagattgtcagaccttgaaggga

SEQ ID NO: 4339098 - DNA, 25 bp, Homo sapien
ttctgcgctggtcggcggagtagca

SEQ ID NO: 4339099 - DNA, 25 bp, Homo sapien
ctggtcggcggagtagcaagtggcc

SEQ ID NO: 4339100 - DNA, 25 bp, Homo sapien
tccccggcgaagttctgcgctggtc

SEQ ID NO: 4339101 - DNA, 25 bp, Homo sapien
cagcgccaccgtccccggcgaagtt

SEQ ID NO: 4339102 - DNA, 25 bp, Homo sapien
caatatgagcacaacatgggaggcc

SEQ ID NO: 4339103 - DNA, 25 bp, Homo sapien
cataccctcccatgtagagagaaca

SEQ ID NO: 4339104 - DNA, 25 bp, Homo sapien
tcatgggcacatgcacagtggtttc

SEQ ID NO: 4339105 - DNA, 25 bp, Homo sapien
cctgtagggttggactggagctttc

SEQ ID NO: 4339106 - DNA, 25 bp, Homo sapien
tccaagtcaagtgtagcctctcagc

SEQ ID NO: 4339107 - DNA, 25 bp, Homo sapien
ccaagtcaagtgtagcctctcagcc

SEQ ID NO: 4339108 - DNA, 25 bp, Homo sapien
tagagcgagcgctgagaagcagcca

SEQ ID NO: 4339109 - DNA, 25 bp, Homo sapien
tatcaaagtaacctctccacaggcg

SEQ ID NO: 4339110 - DNA, 25 bp, Homo sapien
cagttgagtatatggcccaggtgca

SEQ ID NO: 4339111 - DNA, 25 bp, Homo sapien
ggacttagaaatcccagcgtcatgg

SEQ ID NO: 4339112 - DNA, 25 bp, Homo sapien
gccaatctgttccatccacctggga

SEQ ID NO: 4339113 - DNA, 25 bp, Homo sapien
gtgaatcatccctctctctggtgta

SEQ ID NO: 4339114 - DNA, 25 bp, Homo sapien
tagattacataccattcagtgtagc

SEQ ID NO: 4339115 - DNA, 25 bp, Homo sapien
gatgaaatctcttgccaatctgttc

SEQ ID NO: 4339116 - DNA, 25 bp, Homo sapien
tgcgtgtttatcatgtctccgtagg

SEQ ID NO: 4339117 - DNA, 25 bp, Homo sapien
caagcaaacgaaactgaatgagcac

SEQ ID NO: 4339118 - DNA, 25 bp, Homo sapien
tctccgtaggtaaagtgggcagaaa

SEQ ID NO: 4339119 - DNA, 25 bp, Homo sapien
gaatgagcactactataaggtacca

SEQ ID NO: 4339120 - DNA, 25 bp, Homo sapien
tactttttatttttaatcaacatga

SEQ ID NO: 4339121 - DNA, 25 bp, Homo sapien
gaactcataatctggaagcacagcc

SEQ ID NO: 4339122 - DNA, 25 bp, Homo sapien
taccaaaagtgtgcaggtagcatct

SEQ ID NO: 4339123 - DNA, 25 bp, Homo sapien
caggccggcagtggatggttccttc

SEQ ID NO: 4339124 - DNA, 25 bp, Homo sapien
caatgtgtacacctggacgtggaga

SEQ ID NO: 4339125 - DNA, 25 bp, Homo sapien
gcacttccttgctctgattggccga

SEQ ID NO: 4339126 - DNA, 25 bp, Homo sapien
cgtgtgtcccacaagagtacatttg

SEQ ID NO: 4339127 - DNA, 25 bp, Homo sapien
ttctgtaggatgacaagctgctgag

SEQ ID NO: 4339128 - DNA, 25 bp, Homo sapien
gacaggagggttatcgtcatcaacg

SEQ ID NO: 4339129 - DNA, 25 bp, Homo sapien
ctgtgctttggcgtctcttgactcc

SEQ ID NO: 4339130 - DNA, 25 bp, Homo sapien
tgtgctttggcgtctcttgactcct

SEQ ID NO: 4339131 - DNA, 25 bp, Homo sapien
gtgctttggcgtctcttgactcctt

SEQ ID NO: 4339132 - DNA, 25 bp, Homo sapien
tgctttggcgtctcttgactccttg

SEQ ID NO: 4339133 - DNA, 25 bp, Homo sapien
gaaccaggcagtccagtactttggc

SEQ ID NO: 4339134 - DNA, 25 bp, Homo sapien
tagcaggtgtactaggcgttcagcc

SEQ ID NO: 4339135 - DNA, 25 bp, Homo sapien
tgtactaggcgttcagccctgaacc

SEQ ID NO: 4339136 - DNA, 25 bp, Homo sapien
ctccaagttagcaggtgtactaggc

SEQ ID NO: 4339137 - DNA, 25 bp, Homo sapien
aaatgtttcggaatgctgagcagcc

SEQ ID NO: 4339138 - DNA, 25 bp, Homo sapien
gaagatgaatgaaccgccgctttta

SEQ ID NO: 4339139 - DNA, 25 bp, Homo sapien
aaactggaaactctggcctgtcggc

SEQ ID NO: 4339140 - DNA, 25 bp, Homo sapien
gaaggatcctgtgcgctgtcagcaa

SEQ ID NO: 4339141 - DNA, 25 bp, Homo sapien
atctccaacaaagccggaaaagcag

SEQ ID NO: 4339142 - DNA, 25 bp, Homo sapien
cgcgtcaatctccaacaaagccgga

SEQ ID NO: 4339143 - DNA, 25 bp, Homo sapien
actgccgcgtcaatctccaacaaag

SEQ ID NO: 4339144 - DNA, 25 bp, Homo sapien
aggtgtgcactgccgcgtcaatctc

SEQ ID NO: 4339145 - DNA, 25 bp, Homo sapien
gttccgctccctcctgtttgttgtg

SEQ ID NO: 4339146 - DNA, 25 bp, Homo sapien
tcctgctttgcatgggttccgctcc

SEQ ID NO: 4339147 - DNA, 25 bp, Homo sapien
cagctaacgtagatccacccagacg

SEQ ID NO: 4339148 - DNA, 25 bp, Homo sapien
tgacgcgtaagctgcctaaacggca

SEQ ID NO: 4339149 - DNA, 25 bp, Homo sapien
tatcttaataatgcccagcccaagt

SEQ ID NO: 4339150 - DNA, 25 bp, Homo sapien
tatgtgtgctggaccaaaccgtggc

SEQ ID NO: 4339151 - DNA, 25 bp, Homo sapien
ggagtggccacgtaacattatctaa

SEQ ID NO: 4339152 - DNA, 25 bp, Homo sapien
tgtgcccagcagacactacttttga

SEQ ID NO: 4339153 - DNA, 25 bp, Homo sapien
ggcgcaatctccacccactgcaagc

SEQ ID NO: 4339154 - DNA, 25 bp, Homo sapien
gcgcaatctccacccactgcaagct

SEQ ID NO: 4339155 - DNA, 25 bp, Homo sapien
ctgcctcctgggttcacaccattct

SEQ ID NO: 4339156 - DNA, 25 bp, Homo sapien
tcattagagccattccaaatctaag

SEQ ID NO: 4339157 - DNA, 25 bp, Homo sapien
aaagaatcattagagccattccaaa

SEQ ID NO: 4339158 - DNA, 25 bp, Homo sapien
attagagccattccaaatctaagtg

SEQ ID NO: 4339159 - DNA, 25 bp, Homo sapien
tcacccatggcctgacagaccacat

SEQ ID NO: 4339160 - DNA, 25 bp, Homo sapien
actttgaagcaggatgtagagtggt

SEQ ID NO: 4339161 - DNA, 25 bp, Homo sapien
tgaagcaggatgtagagtggtcaga

SEQ ID NO: 4339162 - DNA, 25 bp, Homo sapien
tttgaagcaggatgtagagtggtca

SEQ ID NO: 4339163 - DNA, 25 bp, Homo sapien
ctttgaagcaggatgtagagtggtc

SEQ ID NO: 4339164 - DNA, 25 bp, Homo sapien
gtaaagcagaaacactcaacaacca

SEQ ID NO: 4339165 - DNA, 25 bp, Homo sapien
taaagcagaaacactcaacaaccag

SEQ ID NO: 4339166 - DNA, 25 bp, Homo sapien
ggtaaagcagaaacactcaacaacc

SEQ ID NO: 4339167 - DNA, 25 bp, Homo sapien
cctgaggcagtaattcttcaaagcc

SEQ ID NO: 4339168 - DNA, 25 bp, Homo sapien
ctgtgttaaattcgcatccatggca

SEQ ID NO: 4339169 - DNA, 25 bp, Homo sapien
cacatttgtgcgtttgaatggatcc

SEQ ID NO: 4339170 - DNA, 25 bp, Homo sapien
aagcctttccttccgtgtcaatact

SEQ ID NO: 4339171 - DNA, 25 bp, Homo sapien
aaagttgcctgtgggtagacgtaca

SEQ ID NO: 4339172 - DNA, 25 bp, Homo sapien
tgtaatgagcaacgccttagtggta

SEQ ID NO: 4339173 - DNA, 25 bp, Homo sapien
ggaaagcccttagccaggtatctgg

SEQ ID NO: 4339174 - DNA, 25 bp, Homo sapien
tcttaggcaaaaatcggcagcaatc

SEQ ID NO: 4339175 - DNA, 25 bp, Homo sapien
tagatcacgtcagttaaatagactt

SEQ ID NO: 4339176 - DNA, 25 bp, Homo sapien
aacttagatcttatagttcatgaac

SEQ ID NO: 4339177 - DNA, 25 bp, Homo sapien
gttcatgaacttctaggacaagata

SEQ ID NO: 4339178 - DNA, 25 bp, Homo sapien
tttagacacaaaatagatcacgtca

SEQ ID NO: 4339179 - DNA, 25 bp, Homo sapien
aaattccgaatgtctgaatgcacac

SEQ ID NO: 4339180 - DNA, 25 bp, Homo sapien
gaatgcacactactcttcctaatgt

SEQ ID NO: 4339181 - DNA, 25 bp, Homo sapien
tgtatctttcccactcaaattggct

SEQ ID NO: 4339182 - DNA, 25 bp, Homo sapien
tccaactactagcaaaaattccgaa

SEQ ID NO: 4339183 - DNA, 25 bp, Homo sapien
tggccaactagcaccgagaagtcgt

SEQ ID NO: 4339184 - DNA, 25 bp, Homo sapien
acagtactggaagcgccatttgcag

SEQ ID NO: 4339185 - DNA, 25 bp, Homo sapien
tacagactagatgcgaagaatgcgt

SEQ ID NO: 4339186 - DNA, 25 bp, Homo sapien
gacatcagacggtatccatcccaga

SEQ ID NO: 4339187 - DNA, 25 bp, Homo sapien
gcggcacagtactagcaggagatga

SEQ ID NO: 4339188 - DNA, 25 bp, Homo sapien
tgtgcagcatgaaaagattagaatc

SEQ ID NO: 4339189 - DNA, 25 bp, Homo sapien
gattagaatcgagctgcacctaaga

SEQ ID NO: 4339190 - DNA, 25 bp, Homo sapien
aaagtatgtgttatctgccagtcac

SEQ ID NO: 4339191 - DNA, 25 bp, Homo sapien
gcccctagttacactgattgcattt

SEQ ID NO: 4339192 - DNA, 25 bp, Homo sapien
caggatatggttttcgattactaag

SEQ ID NO: 4339193 - DNA, 25 bp, Homo sapien
gaaacacagcccctagttacactga

SEQ ID NO: 4339194 - DNA, 25 bp, Homo sapien
gaggaccttgatcaggaccacaaag

SEQ ID NO: 4339195 - DNA, 25 bp, Homo sapien
ctcataccagcaacagaaatgaacc

SEQ ID NO: 4339196 - DNA, 25 bp, Homo sapien
tcctcataccagcaacagaaatgaa

SEQ ID NO: 4339197 - DNA, 25 bp, Homo sapien
gaaccacttccaaattctaagacac

SEQ ID NO: 4339198 - DNA, 25 bp, Homo sapien
aaatcctcataccagcaacagaaat

SEQ ID NO: 4339199 - DNA, 25 bp, Homo sapien
caaattaatatgtgcccctctcctt

SEQ ID NO: 4339200 - DNA, 25 bp, Homo sapien
tatctgaagaatggcgccaatagag

SEQ ID NO: 4339201 - DNA, 25 bp, Homo sapien
tactctgaagtatacacaacaggtc

SEQ ID NO: 4339202 - DNA, 25 bp, Homo sapien
gccaccaggtaatccaagggttcac

SEQ ID NO: 4339203 - DNA, 25 bp, Homo sapien
taaacatctcccttgtcgtaagtag

SEQ ID NO: 4339204 - DNA, 25 bp, Homo sapien
ttattagaagggtattccaccacag

SEQ ID NO: 4339205 - DNA, 25 bp, Homo sapien
agagcaggtgcgcaaggcaagcaaa

SEQ ID NO: 4339206 - DNA, 25 bp, Homo sapien
cacagagagccggaggttttccaga

SEQ ID NO: 4339207 - DNA, 25 bp, Homo sapien
ggcaagcaaatgagcgcaaacagta

SEQ ID NO: 4339208 - DNA, 25 bp, Homo sapien
ccacaagaggactcgactgggtagc

SEQ ID NO: 4339209 - DNA, 25 bp, Homo sapien
gggctccacaagaggactcgactgg

SEQ ID NO: 4339210 - DNA, 25 bp, Homo sapien
gctccacaagaggactcgactgggt

SEQ ID NO: 4339211 - DNA, 25 bp, Homo sapien
tccacaagaggactcgactgggtag

SEQ ID NO: 4339212 - DNA, 25 bp, Homo sapien
tggtctgacacaggtacgtgaaagc

SEQ ID NO: 4339213 - DNA, 25 bp, Homo sapien
ctggtctgacacaggtacgtgaaag

SEQ ID NO: 4339214 - DNA, 25 bp, Homo sapien
gtctgacacaggtacgtgaaagcag

SEQ ID NO: 4339215 - DNA, 25 bp, Homo sapien
tgacacaggtacgtgaaagcagagt

SEQ ID NO: 4339216 - DNA, 25 bp, Homo sapien
taatgctcaataagatcaaaggcct

SEQ ID NO: 4339217 - DNA, 25 bp, Homo sapien
tggttaaggtcaacctggggtgcaa

SEQ ID NO: 4339218 - DNA, 25 bp, Homo sapien
gctgtcttcatcttcggtcccgaag

SEQ ID NO: 4339219 - DNA, 25 bp, Homo sapien
ttttcatgactctgtaagaactcaa

SEQ ID NO: 4339220 - DNA, 25 bp, Homo sapien
cacagagcggcttgatacaacccag

SEQ ID NO: 4339221 - DNA, 25 bp, Homo sapien
acagtaagggttaatgccagtgcca

SEQ ID NO: 4339222 - DNA, 25 bp, Homo sapien
tccaagccatttagggcaacctgta

SEQ ID NO: 4339223 - DNA, 25 bp, Homo sapien
tacaatcttagagtccatgaccgtg

SEQ ID NO: 4339224 - DNA, 25 bp, Homo sapien
gtgagttattaaacttgggctcaag

SEQ ID NO: 4339225 - DNA, 25 bp, Homo sapien
tttggcacttcattctcagacatac

SEQ ID NO: 4339226 - DNA, 25 bp, Homo sapien
taagacatctaaactaaaaagggca

SEQ ID NO: 4339227 - DNA, 25 bp, Homo sapien
tactttagaagatacctgcctctac

SEQ ID NO: 4339228 - DNA, 25 bp, Homo sapien
aatatgctgcctgattggtacttac

SEQ ID NO: 4339229 - DNA, 25 bp, Homo sapien
ttgcatttgtgatggcccaagctgc

SEQ ID NO: 4339230 - DNA, 25 bp, Homo sapien
gttgcatttgtgatggcccaagctg

SEQ ID NO: 4339231 - DNA, 25 bp, Homo sapien
aagttgcatttgtgatggcccaagc

SEQ ID NO: 4339232 - DNA, 25 bp, Homo sapien
gaagttgcatttgtgatggcccaag

SEQ ID NO: 4339233 - DNA, 25 bp, Homo sapien
ggaaaatgttggcatctatcacagt

SEQ ID NO: 4339234 - DNA, 25 bp, Homo sapien
tgggaaaatgttggcatctatcaca

SEQ ID NO: 4339235 - DNA, 25 bp, Homo sapien
ctgggaaaatgttggcatctatcac

SEQ ID NO: 4339236 - DNA, 25 bp, Homo sapien
gggaaaatgttggcatctatcacag

SEQ ID NO: 4339237 - DNA, 25 bp, Homo sapien
ccaggctgaacactttggcccactg

SEQ ID NO: 4339238 - DNA, 25 bp, Homo sapien
gaaaatttgaggcaatctacatggg

SEQ ID NO: 4339239 - DNA, 25 bp, Homo sapien
tgttccatccttgaacattgcccag

SEQ ID NO: 4339240 - DNA, 25 bp, Homo sapien
ggatacaatgtaatggatgcttcaa

SEQ ID NO: 4339241 - DNA, 25 bp, Homo sapien
cacccagccaaaaacaaatgtgttt

SEQ ID NO: 4339242 - DNA, 25 bp, Homo sapien
cgcacccagccaaaaacaaatgtgt

SEQ ID NO: 4339243 - DNA, 25 bp, Homo sapien
ataatgaaaacgatatacgttttat

SEQ ID NO: 4339244 - DNA, 25 bp, Homo sapien
tctacctccacggttcaagtaattc

SEQ ID NO: 4339245 - DNA, 25 bp, Homo sapien
catgcttcctttttgatagattcct

SEQ ID NO: 4339246 - DNA, 25 bp, Homo sapien
ccagctgtaatattagatatcgtcc

SEQ ID NO: 4339247 - DNA, 25 bp, Homo sapien
tagatatcgtccaacatgcttcctt

SEQ ID NO: 4339248 - DNA, 25 bp, Homo sapien
gatctgtgccctatttccagctgta

SEQ ID NO: 4339249 - DNA, 25 bp, Homo sapien
gacttgtggctatgacagaactgga

SEQ ID NO: 4339250 - DNA, 25 bp, Homo sapien
gaagcagaagctactatatgcgtcc

SEQ ID NO: 4339251 - DNA, 25 bp, Homo sapien
gctcacgtcacataagacaagcctg

SEQ ID NO: 4339252 - DNA, 25 bp, Homo sapien
ccatccccatggttctgttctagta

SEQ ID NO: 4339253 - DNA, 25 bp, Homo sapien
tgatcatgaagttcaatatactgtt

SEQ ID NO: 4339254 - DNA, 25 bp, Homo sapien
agtgtaacagagtatcaagtttccc

SEQ ID NO: 4339255 - DNA, 25 bp, Homo sapien
tggagtaaaatacgataatagaaac

SEQ ID NO: 4339256 - DNA, 25 bp, Homo sapien
ccctaataatatggagtaaaatacg

SEQ ID NO: 4339257 - DNA, 25 bp, Homo sapien
cccacagctcgcaaagcaggagaaa

SEQ ID NO: 4339258 - DNA, 25 bp, Homo sapien
tcccacagctcgcaaagcaggagaa

SEQ ID NO: 4339259 - DNA, 25 bp, Homo sapien
tctatccttagtttcatttccttcc

SEQ ID NO: 4339260 - DNA, 25 bp, Homo sapien
tttagagcagaaatgtacccatggg

SEQ ID NO: 4339261 - DNA, 25 bp, Homo sapien
ggctaattaagggaacgcttatcat

SEQ ID NO: 4339262 - DNA, 25 bp, Homo sapien
aaagtaatgttatagcaaacagttc

SEQ ID NO: 4339263 - DNA, 25 bp, Homo sapien
tgaagcatgacagggcgtcgcctca

SEQ ID NO: 4339264 - DNA, 25 bp, Homo sapien
tacatggaaaatcagtacaccccgc

SEQ ID NO: 4339265 - DNA, 25 bp, Homo sapien
aaatggctgggttccgttccaagat

SEQ ID NO: 4339266 - DNA, 25 bp, Homo sapien
tccactttaatgagaccgatcactc

SEQ ID NO: 4339267 - DNA, 25 bp, Homo sapien
acttctacagatgtaaacgtccctg

SEQ ID NO: 4339268 - DNA, 25 bp, Homo sapien
caacttctacagatgtaaacgtccc

SEQ ID NO: 4339269 - DNA, 25 bp, Homo sapien
cagacaacttctacagatgtaaacg

SEQ ID NO: 4339270 - DNA, 25 bp, Homo sapien
cagcagacaacttctacagatgtaa

SEQ ID NO: 4339271 - DNA, 25 bp, Homo sapien
gccagggtgagattagaactgctga

SEQ ID NO: 4339272 - DNA, 25 bp, Homo sapien
gaccagggcgtattttatgccttat

SEQ ID NO: 4339273 - DNA, 25 bp, Homo sapien
cactgtacacccattgtcactgata

SEQ ID NO: 4339274 - DNA, 25 bp, Homo sapien
cctgaaccccgtgtagcctattggg

SEQ ID NO: 4339275 - DNA, 25 bp, Homo sapien
acacacctttcacaaacaatttgta

SEQ ID NO: 4339276 - DNA, 25 bp, Homo sapien
aacacacctttcacaaacaatttgt

SEQ ID NO: 4339277 - DNA, 25 bp, Homo sapien
acaatttgtacacataatgcaatca

SEQ ID NO: 4339278 - DNA, 25 bp, Homo sapien
aaacaatttgtacacataatgcaat

SEQ ID NO: 4339279 - DNA, 25 bp, Homo sapien
aatcaacacccaacatcaccattaa

SEQ ID NO: 4339280 - DNA, 25 bp, Homo sapien
aacacccaacatcaccattaaaaga

SEQ ID NO: 4339281 - DNA, 25 bp, Homo sapien
tcaacacccaacatcaccattaaaa

SEQ ID NO: 4339282 - DNA, 25 bp, Homo sapien
caacacccaacatcaccattaaaag

SEQ ID NO: 4339283 - DNA, 25 bp, Homo sapien
tctgatagatatgagagggcccagc

SEQ ID NO: 4339284 - DNA, 25 bp, Homo sapien
cagcagttccacaagtctcctacat

SEQ ID NO: 4339285 - DNA, 25 bp, Homo sapien
ggcatcagccagtacatcagtgtca

SEQ ID NO: 4339286 - DNA, 25 bp, Homo sapien
atactcccgcatcgatgaccgcttg

SEQ ID NO: 4339287 - DNA, 25 bp, Homo sapien
ccaggaaagcacattcagacatgga

SEQ ID NO: 4339288 - DNA, 25 bp, Homo sapien
ctgacaaacagcaaccaggaaagca

SEQ ID NO: 4339289 - DNA, 25 bp, Homo sapien
caaacagcaaccaggaaagcacatt

SEQ ID NO: 4339290 - DNA, 25 bp, Homo sapien
caggaaagcacattcagacatggag

SEQ ID NO: 4339291 - DNA, 25 bp, Homo sapien
agagattagacaaagcccatactgc

SEQ ID NO: 4339292 - DNA, 25 bp, Homo sapien
ggacttttccctctacagagattag

SEQ ID NO: 4339293 - DNA, 25 bp, Homo sapien
aaagcccatactgcattccgggtca

SEQ ID NO: 4339294 - DNA, 25 bp, Homo sapien
tagacaaagcccatactgcattccg

SEQ ID NO: 4339295 - DNA, 25 bp, Homo sapien
gtcaggcggttttgctttgaaaata

SEQ ID NO: 4339296 - DNA, 25 bp, Homo sapien
tcaggcggttttgctttgaaaataa

SEQ ID NO: 4339297 - DNA, 25 bp, Homo sapien
atggtactatctccagcaatgttgc

SEQ ID NO: 4339298 - DNA, 25 bp, Homo sapien
gtccctgcacatggtactatctcca

SEQ ID NO: 4339299 - DNA, 25 bp, Homo sapien
gaaggatattgcagtctaagacata

SEQ ID NO: 4339300 - DNA, 25 bp, Homo sapien
gatattgcagtctaagacatagtcc

SEQ ID NO: 4339301 - DNA, 25 bp, Homo sapien
ttaagactaaatttctagaacactc

SEQ ID NO: 4339302 - DNA, 25 bp, Homo sapien
tctgcctacagtcactaagaaattt

SEQ ID NO: 4339303 - DNA, 25 bp, Homo sapien
cctctatcagtaactgcttacatgg

SEQ ID NO: 4339304 - DNA, 25 bp, Homo sapien
tctacaagaaaaaacctctatcagt

SEQ ID NO: 4339305 - DNA, 25 bp, Homo sapien
tgaatcacaattcgggtctgaagag

SEQ ID NO: 4339306 - DNA, 25 bp, Homo sapien
tgcctgaatcacaattcgggtctga

SEQ ID NO: 4339307 - DNA, 25 bp, Homo sapien
acaattcgggtctgaagagaatttc

SEQ ID NO: 4339308 - DNA, 25 bp, Homo sapien
tcacaattcgggtctgaagagaatt

SEQ ID NO: 4339309 - DNA, 25 bp, Homo sapien
tgaagcaatatttgtcagtacccaa

SEQ ID NO: 4339310 - DNA, 25 bp, Homo sapien
gcaatatttgtcagtacccaagctg

SEQ ID NO: 4339311 - DNA, 25 bp, Homo sapien
aagcaatatttgtcagtacccaagc

SEQ ID NO: 4339312 - DNA, 25 bp, Homo sapien
caatatttgtcagtacccaagctga

SEQ ID NO: 4339313 - DNA, 25 bp, Homo sapien
catcatgtttgtcaggctggccttg

SEQ ID NO: 4339314 - DNA, 25 bp, Homo sapien
gctggccttgaactcctgatctcaa

SEQ ID NO: 4339315 - DNA, 25 bp, Homo sapien
tggccttgaactcctgatctcaagt

SEQ ID NO: 4339316 - DNA, 25 bp, Homo sapien
cgaggtttcatcatgtttgtcaggc

SEQ ID NO: 4339317 - DNA, 25 bp, Homo sapien
tttcatttgcttgtagtttggatat

SEQ ID NO: 4339318 - DNA, 25 bp, Homo sapien
catgcagctggaactacttataaac

SEQ ID NO: 4339319 - DNA, 25 bp, Homo sapien
cctgaagtaacaaatggtggccaaa

SEQ ID NO: 4339320 - DNA, 25 bp, Homo sapien
aaatctgcacactgaaggtttgatg

SEQ ID NO: 4339321 - DNA, 25 bp, Homo sapien
gaactcactaaataaggctacacct

SEQ ID NO: 4339322 - DNA, 25 bp, Homo sapien
ggcgctcagttccttaaataaggaa

SEQ ID NO: 4339323 - DNA, 25 bp, Homo sapien
gcgctcagttccttaaataaggaaa

SEQ ID NO: 4339324 - DNA, 25 bp, Homo sapien
tgaggtacgcctggttccctttctc

SEQ ID NO: 4339325 - DNA, 25 bp, Homo sapien
ggactctgttgctggccactttgcc

SEQ ID NO: 4339326 - DNA, 25 bp, Homo sapien
ggccactttgccggttccactctgg

SEQ ID NO: 4339327 - DNA, 25 bp, Homo sapien
tcaagtttcccactccaggttgagg

SEQ ID NO: 4339328 - DNA, 25 bp, Homo sapien
cagtgcctgagtcatctgagcaact

SEQ ID NO: 4339329 - DNA, 25 bp, Homo sapien
ggcttactgcagtttatcacattaa

SEQ ID NO: 4339330 - DNA, 25 bp, Homo sapien
gcagagagatcaatgaagatgggaa

SEQ ID NO: 4339331 - DNA, 25 bp, Homo sapien
aataaacccagatagcaaactctgc

SEQ ID NO: 4339332 - DNA, 25 bp, Homo sapien
cttctgaggtggtcaaaggtcccca

SEQ ID NO: 4339333 - DNA, 25 bp, Homo sapien
cactgagcttgagaatgcgcttagc

SEQ ID NO: 4339334 - DNA, 25 bp, Homo sapien
catgaggttatcacttccggaggaa

SEQ ID NO: 4339335 - DNA, 25 bp, Homo sapien
gaggtaccttactgacttgggaagc

SEQ ID NO: 4339336 - DNA, 25 bp, Homo sapien
tcttcccttgctctcagggtgaacg

SEQ ID NO: 4339337 - DNA, 25 bp, Homo sapien
ctgcagtaaggttcctcatttggtc

SEQ ID NO: 4339338 - DNA, 25 bp, Homo sapien
tctggttctcggcaggttgcttagg

SEQ ID NO: 4339339 - DNA, 25 bp, Homo sapien
gggaccagaattacaatccaggagg

SEQ ID NO: 4339340 - DNA, 25 bp, Homo sapien
atgggaactggtaagtgtcaaactg

SEQ ID NO: 4339341 - DNA, 25 bp, Homo sapien
aacagaaccttaattcaaatgagca

SEQ ID NO: 4339342 - DNA, 25 bp, Homo sapien
aactggtaagtgtcaaactggagaa

SEQ ID NO: 4339343 - DNA, 25 bp, Homo sapien
taagtgtcaaactggagaagaaaaa

SEQ ID NO: 4339344 - DNA, 25 bp, Homo sapien
gttacaccatcctgagaaagccacc

SEQ ID NO: 4339345 - DNA, 25 bp, Homo sapien
cagtgtctacatggctccagcctta

SEQ ID NO: 4339346 - DNA, 25 bp, Homo sapien
ccagccttagagtaaagaacagcac

SEQ ID NO: 4339347 - DNA, 25 bp, Homo sapien
gaaggaactcatcaccgcaacaaag

SEQ ID NO: 4339348 - DNA, 25 bp, Homo sapien
tcttttcgtttgaggaactccacaa

SEQ ID NO: 4339349 - DNA, 25 bp, Homo sapien
acttcatcaataggagggttaggtt

SEQ ID NO: 4339350 - DNA, 25 bp, Homo sapien
tgcagtgtacaattctcttttcgtt

SEQ ID NO: 4339351 - DNA, 25 bp, Homo sapien
tactcctggtgtgctgataacttca

SEQ ID NO: 4339352 - DNA, 25 bp, Homo sapien
aatcatgtcagaagtgatgacacca

SEQ ID NO: 4339353 - DNA, 25 bp, Homo sapien
tcatgtcagaagtgatgacaccacc

SEQ ID NO: 4339354 - DNA, 25 bp, Homo sapien
tgaaagctgttgctctgggcttttg

SEQ ID NO: 4339355 - DNA, 25 bp, Homo sapien
aaagctgttgctctgggcttttgga

SEQ ID NO: 4339356 - DNA, 25 bp, Homo sapien
gctgtagcaacatttctccgcttga

SEQ ID NO: 4339357 - DNA, 25 bp, Homo sapien
tagcaacatttctccgcttgaataa

SEQ ID NO: 4339358 - DNA, 25 bp, Homo sapien
ttactaatctgagcctcatgaaagc

SEQ ID NO: 4339359 - DNA, 25 bp, Homo sapien
gttactaatctgagcctcatgaaag

SEQ ID NO: 4339360 - DNA, 25 bp, Homo sapien
gaaaccatcatggagtacttctaca

SEQ ID NO: 4339361 - DNA, 25 bp, Homo sapien
gctgtccacgagtgttcctaacaat

SEQ ID NO: 4339362 - DNA, 25 bp, Homo sapien
tgctcatgggaaggtaaaatagtac

SEQ ID NO: 4339363 - DNA, 25 bp, Homo sapien
cagttgacagctcctaagtatacac

SEQ ID NO: 4339364 - DNA, 25 bp, Homo sapien
agtagagtcggggtttcaccaatgt

SEQ ID NO: 4339365 - DNA, 25 bp, Homo sapien
agagtcggggtttcaccaatgttag

SEQ ID NO: 4339366 - DNA, 25 bp, Homo sapien
tagagtcggggtttcaccaatgtta

SEQ ID NO: 4339367 - DNA, 25 bp, Homo sapien
gagtcggggtttcaccaatgttagc

SEQ ID NO: 4339368 - DNA, 25 bp, Homo sapien
tcctgtagaaagaacactaattcag

SEQ ID NO: 4339369 - DNA, 25 bp, Homo sapien
cggcccgaccatcacattttaacta

SEQ ID NO: 4339370 - DNA, 25 bp, Homo sapien
caagatttgtgtcacagcgtgccag

SEQ ID NO: 4339371 - DNA, 25 bp, Homo sapien
gtacaacttttatcaggtggaccta

SEQ ID NO: 4339372 - DNA, 25 bp, Homo sapien
gtctcagaaatactaccccacaatg

SEQ ID NO: 4339373 - DNA, 25 bp, Homo sapien
taaaaatagtagaatcaggccttcc

SEQ ID NO: 4339374 - DNA, 25 bp, Homo sapien
gaactgctgtaaccacttagctgag

SEQ ID NO: 4339375 - DNA, 25 bp, Homo sapien
ttagctgagcttcggataaaggacc

SEQ ID NO: 4339376 - DNA, 25 bp, Homo sapien
catctcatcgggattcagagatttg

SEQ ID NO: 4339377 - DNA, 25 bp, Homo sapien
tcctcctgcgcatctcatcgggatt

SEQ ID NO: 4339378 - DNA, 25 bp, Homo sapien
ttctgctttcgtaactgcagtcctt

SEQ ID NO: 4339379 - DNA, 25 bp, Homo sapien
tgtaacttttcaggcgaaagttctc

SEQ ID NO: 4339380 - DNA, 25 bp, Homo sapien
tttactgtgaagagctctgttattc

SEQ ID NO: 4339381 - DNA, 25 bp, Homo sapien
gtgaagagctctgttattctaagag

SEQ ID NO: 4339382 - DNA, 25 bp, Homo sapien
tacaatacaagtggggagagaacaa

SEQ ID NO: 4339383 - DNA, 25 bp, Homo sapien
atgagtttactgtgaagagctctgt

SEQ ID NO: 4339384 - DNA, 25 bp, Homo sapien
gaatagaaatagagcagacacccct

SEQ ID NO: 4339385 - DNA, 25 bp, Homo sapien
gctagaccttagaatgaaagcagtc

SEQ ID NO: 4339386 - DNA, 25 bp, Homo sapien
gacacccctgtcttatgctagacct

SEQ ID NO: 4339387 - DNA, 25 bp, Homo sapien
aaaggcacttttatcgggctgagaa

SEQ ID NO: 4339388 - DNA, 25 bp, Homo sapien
taggctgtttctttgcgggcagttc

SEQ ID NO: 4339389 - DNA, 25 bp, Homo sapien
gttctgtgactactatttcagtgtc

SEQ ID NO: 4339390 - DNA, 25 bp, Homo sapien
tcagtgtcttcacgtgttacaggtc

SEQ ID NO: 4339391 - DNA, 25 bp, Homo sapien
tccaaaaatttgtgcacttcatcta

SEQ ID NO: 4339392 - DNA, 25 bp, Homo sapien
tttaagatccccaagtgggccaggc

SEQ ID NO: 4339393 - DNA, 25 bp, Homo sapien
ttaagatccccaagtgggccaggca

SEQ ID NO: 4339394 - DNA, 25 bp, Homo sapien
tctaattaatgtgtctgaagcagac

SEQ ID NO: 4339395 - DNA, 25 bp, Homo sapien
cctctaaagagtctaattaatgtgt

SEQ ID NO: 4339396 - DNA, 25 bp, Homo sapien
gggaaatcacttcatctactaatag

SEQ ID NO: 4339397 - DNA, 25 bp, Homo sapien
caatcgtttgttctgagttgaaacc

SEQ ID NO: 4339398 - DNA, 25 bp, Homo sapien
caaacaaaaactcggcaatcgtttg

SEQ ID NO: 4339399 - DNA, 25 bp, Homo sapien
caaaaacaatgtcgagaatgagcct

SEQ ID NO: 4339400 - DNA, 25 bp, Homo sapien
tccttgactccagtcatccttgttt

SEQ ID NO: 4339401 - DNA, 25 bp, Homo sapien
ctcctcccgttttgagcttaatccg

SEQ ID NO: 4339402 - DNA, 25 bp, Homo sapien
ttccttgactccagtcatccttgtt

SEQ ID NO: 4339403 - DNA, 25 bp, Homo sapien
tcccgttttgagcttaatccgatac

SEQ ID NO: 4339404 - DNA, 25 bp, Homo sapien
cgcatcgcacacgcggcgtgcagac

SEQ ID NO: 4339405 - DNA, 25 bp, Homo sapien
ctcgcatcgcacacgcggcgtgcag

SEQ ID NO: 4339406 - DNA, 25 bp, Homo sapien
ccctcgcatcgcacacgcggcgtgc

SEQ ID NO: 4339407 - DNA, 25 bp, Homo sapien
tcgcatcgcacacgcggcgtgcaga

SEQ ID NO: 4339408 - DNA, 25 bp, Homo sapien
tatgacatcggtaaactgcagccgg

SEQ ID NO: 4339409 - DNA, 25 bp, Homo sapien
taacttgtgaattcccaagacggtc

SEQ ID NO: 4339410 - DNA, 25 bp, Homo sapien
agaatttttacacgccacccctgct

SEQ ID NO: 4339411 - DNA, 25 bp, Homo sapien
gctccaggcccatgttgttatgaca

SEQ ID NO: 4339412 - DNA, 25 bp, Homo sapien
gcctagcctcgaccggcgttcccga

SEQ ID NO: 4339413 - DNA, 25 bp, Homo sapien
cgcctagcctcgaccggcgttcccg

SEQ ID NO: 4339414 - DNA, 25 bp, Homo sapien
cctagcctcgaccggcgttcccgat

SEQ ID NO: 4339415 - DNA, 25 bp, Homo sapien
ctcctgagtccctccgggactgccc

SEQ ID NO: 4339416 - DNA, 25 bp, Homo sapien
caggaaccccggctctaggccctgc

SEQ ID NO: 4339417 - DNA, 25 bp, Homo sapien
ccgtgacgcacggacgcggcgcgag

SEQ ID NO: 4339418 - DNA, 25 bp, Homo sapien
gccttgtggccgttaggacagccgg

SEQ ID NO: 4339419 - DNA, 25 bp, Homo sapien
aggctcaaggcaaccgatcccggtg

SEQ ID NO: 4339420 - DNA, 25 bp, Homo sapien
cccgcgcacaacctcgaagagctgg

SEQ ID NO: 4339421 - DNA, 25 bp, Homo sapien
aacctcgaagagctggcccgcgcct

SEQ ID NO: 4339422 - DNA, 25 bp, Homo sapien
ggtgccaccgctgaagttagcccct

SEQ ID NO: 4339423 - DNA, 25 bp, Homo sapien
agctcagccggcgttcgcagtgcgc

SEQ ID NO: 4339424 - DNA, 25 bp, Homo sapien
tccgccgcctcgcaccgagcagcga

SEQ ID NO: 4339425 - DNA, 25 bp, Homo sapien
gagcagcgagactcagctcagccgg

SEQ ID NO: 4339426 - DNA, 25 bp, Homo sapien
tcagccggcgttcgcagtgcgcctg

SEQ ID NO: 4339427 - DNA, 25 bp, Homo sapien
gcccctccggcgcttgtcgcagagg

SEQ ID NO: 4339428 - DNA, 25 bp, Homo sapien
gcgcccctccggcgcttgtcgcaga

SEQ ID NO: 4339429 - DNA, 25 bp, Homo sapien
cgcccctccggcgcttgtcgcagag

SEQ ID NO: 4339430 - DNA, 25 bp, Homo sapien
gcgcgcccctccggcgcttgtcgca

SEQ ID NO: 4339431 - DNA, 25 bp, Homo sapien
agtcttgtaacgctctctcgccgga

SEQ ID NO: 4339432 - DNA, 25 bp, Homo sapien
gtagtcttgtaacgctctctcgccg

SEQ ID NO: 4339433 - DNA, 25 bp, Homo sapien
cttgtaacgctctctcgccggacat

SEQ ID NO: 4339434 - DNA, 25 bp, Homo sapien
acgtagtcttgtaacgctctctcgc

SEQ ID NO: 4339435 - DNA, 25 bp, Homo sapien
aaaaggcctgcgttatatactagaa

SEQ ID NO: 4339436 - DNA, 25 bp, Homo sapien
caagccactctttgagccatcgatg

SEQ ID NO: 4339437 - DNA, 25 bp, Homo sapien
caaggtaaggccataccagctgtta

SEQ ID NO: 4339438 - DNA, 25 bp, Homo sapien
tcaataacccagtcagtccatacag

SEQ ID NO: 4339439 - DNA, 25 bp, Homo sapien
gcaaagggtctcattggtcctgatg

SEQ ID NO: 4339440 - DNA, 25 bp, Homo sapien
atcttgtgactgtacatattcctgg

SEQ ID NO: 4339441 - DNA, 25 bp, Homo sapien
cctgatgagtaatcttgtgactgta

SEQ ID NO: 4339442 - DNA, 25 bp, Homo sapien
agggctgccacttgcgaatcccctc

SEQ ID NO: 4339443 - DNA, 25 bp, Homo sapien
ggtgaagtatatgccagctccgtat

SEQ ID NO: 4339444 - DNA, 25 bp, Homo sapien
tagatcagcttatctgcagcagaga

SEQ ID NO: 4339445 - DNA, 25 bp, Homo sapien
taacggatgtccctggcagaagaag

SEQ ID NO: 4339446 - DNA, 25 bp, Homo sapien
gaggtatagcctgcatgccactaaa

SEQ ID NO: 4339447 - DNA, 25 bp, Homo sapien
gtcacacatgtcgtttaaaacttcc

SEQ ID NO: 4339448 - DNA, 25 bp, Homo sapien
tgagtcacacatgtcgtttaaaact

SEQ ID NO: 4339449 - DNA, 25 bp, Homo sapien
gagtcacacatgtcgtttaaaactt

SEQ ID NO: 4339450 - DNA, 25 bp, Homo sapien
cacacatgtcgtttaaaacttccag

SEQ ID NO: 4339451 - DNA, 25 bp, Homo sapien
gaagtgatgtgactagagctcttgg

SEQ ID NO: 4339452 - DNA, 25 bp, Homo sapien
ggagcttgggaaagggctcccttca

SEQ ID NO: 4339453 - DNA, 25 bp, Homo sapien
tgtttaccataaatgacagagcaga

SEQ ID NO: 4339454 - DNA, 25 bp, Homo sapien
acagagcagagagtaatacaaaata

SEQ ID NO: 4339455 - DNA, 25 bp, Homo sapien
ggcctgtgcagacactacctgagtg

SEQ ID NO: 4339456 - DNA, 25 bp, Homo sapien
aataagaacaattggagggactcac

SEQ ID NO: 4339457 - DNA, 25 bp, Homo sapien
tcagcttggaggatgaacatgctca

SEQ ID NO: 4339458 - DNA, 25 bp, Homo sapien
agcaggtgaggaccactacccaaga

SEQ ID NO: 4339459 - DNA, 25 bp, Homo sapien
ctgaaataatgtgggagctagggcc

SEQ ID NO: 4339460 - DNA, 25 bp, Homo sapien
gaagatacttactaggcctgtaggc

SEQ ID NO: 4339461 - DNA, 25 bp, Homo sapien
cacagacaacgggatagaggcatga

SEQ ID NO: 4339462 - DNA, 25 bp, Homo sapien
tcaggtggtttatcaagcagaggac

SEQ ID NO: 4339463 - DNA, 25 bp, Homo sapien
tttcccgctcctttttatatcacta

SEQ ID NO: 4339464 - DNA, 25 bp, Homo sapien
catgtagataagtggtgtgagccag

SEQ ID NO: 4339465 - DNA, 25 bp, Homo sapien
cagtatcttgcctttaagctttaag

SEQ ID NO: 4339466 - DNA, 25 bp, Homo sapien
tcattgcagttttcccgctcctttt

SEQ ID NO: 4339467 - DNA, 25 bp, Homo sapien
tggacggatcacgagtagctggaga

SEQ ID NO: 4339468 - DNA, 25 bp, Homo sapien
ggatcacgagtagctggagatcagc

SEQ ID NO: 4339469 - DNA, 25 bp, Homo sapien
cacgagtagctggagatcagcctgg

SEQ ID NO: 4339470 - DNA, 25 bp, Homo sapien
gacggatcacgagtagctggagatc

SEQ ID NO: 4339471 - DNA, 25 bp, Homo sapien
cttgggaccatattccttgggagga

SEQ ID NO: 4339472 - DNA, 25 bp, Homo sapien
taggcaagtagcagagtctgtcaca

SEQ ID NO: 4339473 - DNA, 25 bp, Homo sapien
taaataaagagagaactgcctgaac

SEQ ID NO: 4339474 - DNA, 25 bp, Homo sapien
gctgatgatgagtctggctaagacc

SEQ ID NO: 4339475 - DNA, 25 bp, Homo sapien
ttccacagagtagccccaatgatga

SEQ ID NO: 4339476 - DNA, 25 bp, Homo sapien
gcatcagcaacaaaagatacgaagg

SEQ ID NO: 4339477 - DNA, 25 bp, Homo sapien
gaagaatctactgatgtcagctcac

SEQ ID NO: 4339478 - DNA, 25 bp, Homo sapien
ccaaaatactttgtgacctgggtca

SEQ ID NO: 4339479 - DNA, 25 bp, Homo sapien
gctgaaacagcctatggctcacagg

SEQ ID NO: 4339480 - DNA, 25 bp, Homo sapien
cacattgcagaactggtatgggact

SEQ ID NO: 4339481 - DNA, 25 bp, Homo sapien
ggcagccataaggacctcattgtct

SEQ ID NO: 4339482 - DNA, 25 bp, Homo sapien
cgcaaggtgtcgagtacattctttg

SEQ ID NO: 4339483 - DNA, 25 bp, Homo sapien
tgatgtcattcctacctcccgattc

SEQ ID NO: 4339484 - DNA, 25 bp, Homo sapien
gagaaccgctctttaaattgcctgc

SEQ ID NO: 4339485 - DNA, 25 bp, Homo sapien
gccctcttaagctcatagtttagtg

SEQ ID NO: 4339486 - DNA, 25 bp, Homo sapien
tattttgctcaaagacgggcttcct

SEQ ID NO: 4339487 - DNA, 25 bp, Homo sapien
ctttggctacagaaacaagttaatt

SEQ ID NO: 4339488 - DNA, 25 bp, Homo sapien
aacaaaatgagccaaatcttcccct

SEQ ID NO: 4339489 - DNA, 25 bp, Homo sapien
ctaggattccaagtccatgagcagc

SEQ ID NO: 4339490 - DNA, 25 bp, Homo sapien
ttagaatcatcagcaggtgagcttt

SEQ ID NO: 4339491 - DNA, 25 bp, Homo sapien
tgtttcttttgatctagaagctctt

SEQ ID NO: 4339492 - DNA, 25 bp, Homo sapien
cacgttgaatcccatcagattgatg

SEQ ID NO: 4339493 - DNA, 25 bp, Homo sapien
gattctttggatccatgcgtgggcc

SEQ ID NO: 4339494 - DNA, 25 bp, Homo sapien
tcaatgaggtcagcccgggctcctt

SEQ ID NO: 4339495 - DNA, 25 bp, Homo sapien
gcaggagatctagcttcaagcccat

SEQ ID NO: 4339496 - DNA, 25 bp, Homo sapien
gagatctcagttgtgtggtacagga

SEQ ID NO: 4339497 - DNA, 25 bp, Homo sapien
agacaacagtaagaagtaacccagg

SEQ ID NO: 4339498 - DNA, 25 bp, Homo sapien
gatactagtagttgtcccatctcac

SEQ ID NO: 4339499 - DNA, 25 bp, Homo sapien
catgaagctagtaggtatgggcatc

SEQ ID NO: 4339500 - DNA, 25 bp, Homo sapien
aactcctcttatgtacccaccatgg

SEQ ID NO: 4339501 - DNA, 25 bp, Homo sapien
tattcagattaatgacatacagacc

SEQ ID NO: 4339502 - DNA, 25 bp, Homo sapien
aaatcttgccatgctcaaagcccag

SEQ ID NO: 4339503 - DNA, 25 bp, Homo sapien
caaagcccagcttagaaccatctca

SEQ ID NO: 4339504 - DNA, 25 bp, Homo sapien
aaactcagcatcttggacctctttg

SEQ ID NO: 4339505 - DNA, 25 bp, Homo sapien
actgtaattgttcaaactcagcatc

SEQ ID NO: 4339506 - DNA, 25 bp, Homo sapien
tgttcaaactcagcatcttggacct

SEQ ID NO: 4339507 - DNA, 25 bp, Homo sapien
catcttggacctctttgccatttca

SEQ ID NO: 4339508 - DNA, 25 bp, Homo sapien
aatgccctgcttgtgctaaactaaa

SEQ ID NO: 4339509 - DNA, 25 bp, Homo sapien
cagagagtcataagcagggctgata

SEQ ID NO: 4339510 - DNA, 25 bp, Homo sapien
gaggacctcagtctattagaacacg

SEQ ID NO: 4339511 - DNA, 25 bp, Homo sapien
aaagcagcctttaggaaagtcccag

SEQ ID NO: 4339512 - DNA, 25 bp, Homo sapien
cagccacgtgatcacaagagtaaac

SEQ ID NO: 4339513 - DNA, 25 bp, Homo sapien
tctttcatgatgctgggcggcggca

SEQ ID NO: 4339514 - DNA, 25 bp, Homo sapien
aagccaagctctcagtcagccacgt

SEQ ID NO: 4339515 - DNA, 25 bp, Homo sapien
ccaggctgttgacatgtagtaagat

SEQ ID NO: 4339516 - DNA, 25 bp, Homo sapien
aggcacgtaccaccatgcccttcta

SEQ ID NO: 4339517 - DNA, 25 bp, Homo sapien
gcacgtaccaccatgcccttctaag

SEQ ID NO: 4339518 - DNA, 25 bp, Homo sapien
atgagccaccaagcccggcccccta

SEQ ID NO: 4339519 - DNA, 25 bp, Homo sapien
acgtaccaccatgcccttctaagtt

SEQ ID NO: 4339520 - DNA, 25 bp, Homo sapien
cagtatccctcttttaaggatgagg

SEQ ID NO: 4339521 - DNA, 25 bp, Homo sapien
caaggttatatagccagcgagaggc

SEQ ID NO: 4339522 - DNA, 25 bp, Homo sapien
tcttcacaacagctccataagatgg

SEQ ID NO: 4339523 - DNA, 25 bp, Homo sapien
gaagacaggccaggcatattggctc

SEQ ID NO: 4339524 - DNA, 25 bp, Homo sapien
agttatattttgctcaatgcatttt

SEQ ID NO: 4339525 - DNA, 25 bp, Homo sapien
ttccaaacactccttcattgcatgt

SEQ ID NO: 4339526 - DNA, 25 bp, Homo sapien
tccaaacactccttcattgcatgtt

SEQ ID NO: 4339527 - DNA, 25 bp, Homo sapien
aattctgaatgccacagtacatggt

SEQ ID NO: 4339528 - DNA, 25 bp, Homo sapien
acagaacaagttaaatccttttgtg

SEQ ID NO: 4339529 - DNA, 25 bp, Homo sapien
tatatttacagaacaagttaaatcc

SEQ ID NO: 4339530 - DNA, 25 bp, Homo sapien
gaatgccacagtacatggtatatat

SEQ ID NO: 4339531 - DNA, 25 bp, Homo sapien
tgtagaattgactttgccacaggtc

SEQ ID NO: 4339532 - DNA, 25 bp, Homo sapien
tatcatgtgggtttacagaattaac

SEQ ID NO: 4339533 - DNA, 25 bp, Homo sapien
caggtccaactgtaatatcatgtgg

SEQ ID NO: 4339534 - DNA, 25 bp, Homo sapien
gcctttgtggcaagaaattccgatt

SEQ ID NO: 4339535 - DNA, 25 bp, Homo sapien
ggttccttgggatcaaagattgttc

SEQ ID NO: 4339536 - DNA, 25 bp, Homo sapien
tcctccgggtgcctaagataatagc

SEQ ID NO: 4339537 - DNA, 25 bp, Homo sapien
tatgacttagagctccacctgtgtc

SEQ ID NO: 4339538 - DNA, 25 bp, Homo sapien
tatgtatattgatcccagctctaag

SEQ ID NO: 4339539 - DNA, 25 bp, Homo sapien
tagggtcctcattgctcaccaggtg

SEQ ID NO: 4339540 - DNA, 25 bp, Homo sapien
tttaaaggcagcaacagtagggtcc

SEQ ID NO: 4339541 - DNA, 25 bp, Homo sapien
gctcaaggctggaattgctactgtc

SEQ ID NO: 4339542 - DNA, 25 bp, Homo sapien
tcaatgtggccctggacaatctgga

SEQ ID NO: 4339543 - DNA, 25 bp, Homo sapien
tcaaatccaccagcttttaccaggg

SEQ ID NO: 4339544 - DNA, 25 bp, Homo sapien
ggtgaggtcatctttccagactgat

SEQ ID NO: 4339545 - DNA, 25 bp, Homo sapien
gataactctatcctaggagtcagca

SEQ ID NO: 4339546 - DNA, 25 bp, Homo sapien
gacactttaccatatctggcaacaa

SEQ ID NO: 4339547 - DNA, 25 bp, Homo sapien
gagaccagggtagagatacagccaa

SEQ ID NO: 4339548 - DNA, 25 bp, Homo sapien
tgttgccttcctgaactggagagac

SEQ ID NO: 4339549 - DNA, 25 bp, Homo sapien
tctggaggacttcacacagctgacg

SEQ ID NO: 4339550 - DNA, 25 bp, Homo sapien
cattgtggttaatgggaatttgcca

SEQ ID NO: 4339551 - DNA, 25 bp, Homo sapien
cacctgggccgattgaaataaggta

SEQ ID NO: 4339552 - DNA, 25 bp, Homo sapien
ccacctgggccgattgaaataaggt

SEQ ID NO: 4339553 - DNA, 25 bp, Homo sapien
gcccacctgggccgattgaaataag

SEQ ID NO: 4339554 - DNA, 25 bp, Homo sapien
cccacctgggccgattgaaataagg

SEQ ID NO: 4339555 - DNA, 25 bp, Homo sapien
tatttaccgtatgtggcagacaaga

SEQ ID NO: 4339556 - DNA, 25 bp, Homo sapien
cagccaaggtcatgctattctcagg

SEQ ID NO: 4339557 - DNA, 25 bp, Homo sapien
aaggccattcatgcccaacgtggga

SEQ ID NO: 4339558 - DNA, 25 bp, Homo sapien
gaaatacagttagctgacagcctcc

SEQ ID NO: 4339559 - DNA, 25 bp, Homo sapien
ttgttacaatgcctctgagaaaggg

SEQ ID NO: 4339560 - DNA, 25 bp, Homo sapien
tggaggacccagcttgggacactgt

SEQ ID NO: 4339561 - DNA, 25 bp, Homo sapien
actgtatttcatggtgtctaagata

SEQ ID NO: 4339562 - DNA, 25 bp, Homo sapien
tctaagatattgttgttacaatgcc

SEQ ID NO: 4339563 - DNA, 25 bp, Homo sapien
cataggctgtcgttaaaagagtctc

SEQ ID NO: 4339564 - DNA, 25 bp, Homo sapien
gccggaattgggtagtcaggcccta

SEQ ID NO: 4339565 - DNA, 25 bp, Homo sapien
caaggagacaatcagttggccaccc

SEQ ID NO: 4339566 - DNA, 25 bp, Homo sapien
tgtggcctcaattacccaaacgaag

SEQ ID NO: 4339567 - DNA, 25 bp, Homo sapien
gctggtcggtgccacaccaactctg

SEQ ID NO: 4339568 - DNA, 25 bp, Homo sapien
agagaatatgcctgctggtcggtgc

SEQ ID NO: 4339569 - DNA, 25 bp, Homo sapien
tggtgtaggccttgagagaatatgc

SEQ ID NO: 4339570 - DNA, 25 bp, Homo sapien
tctgaagcatgtgcgggggtcccca

SEQ ID NO: 4339571 - DNA, 25 bp, Homo sapien
ctccactgaggaaagatctgagcaa

SEQ ID NO: 4339572 - DNA, 25 bp, Homo sapien
ccctttctccactgaggaaagatct

SEQ ID NO: 4339573 - DNA, 25 bp, Homo sapien
tttctccactgaggaaagatctgag

SEQ ID NO: 4339574 - DNA, 25 bp, Homo sapien
tgaggaaagatctgagcaaagactt

SEQ ID NO: 4339575 - DNA, 25 bp, Homo sapien
ctgaaacaagagtgagagcgaggta

SEQ ID NO: 4339576 - DNA, 25 bp, Homo sapien
gaaacaagagtgagagcgaggtaat

SEQ ID NO: 4339577 - DNA, 25 bp, Homo sapien
aagagtgagagcgaggtaatcctac

SEQ ID NO: 4339578 - DNA, 25 bp, Homo sapien
aacaagagtgagagcgaggtaatcc

SEQ ID NO: 4339579 - DNA, 25 bp, Homo sapien
tcaaagcactgtgtttgggagggca

SEQ ID NO: 4339580 - DNA, 25 bp, Homo sapien
tgcatgcccgaaacacttaaaatac

SEQ ID NO: 4339581 - DNA, 25 bp, Homo sapien
tggaagtggaatgactacagcttac

SEQ ID NO: 4339582 - DNA, 25 bp, Homo sapien
caatggaaatcctgctcaaagcact

SEQ ID NO: 4339583 - DNA, 25 bp, Homo sapien
catagactgtagtttccagatatgg

SEQ ID NO: 4339584 - DNA, 25 bp, Homo sapien
gcgcttcaaagcatagactgtagtt

SEQ ID NO: 4339585 - DNA, 25 bp, Homo sapien
cccttttgcgcttcaaagcatagac

SEQ ID NO: 4339586 - DNA, 25 bp, Homo sapien
caaagcatagactgtagtttccaga

SEQ ID NO: 4339587 - DNA, 25 bp, Homo sapien
gatttaaatgtacctagtttgacat

SEQ ID NO: 4339588 - DNA, 25 bp, Homo sapien
gcgcccagccatcaatatactcttt

SEQ ID NO: 4339589 - DNA, 25 bp, Homo sapien
caaagatttaaatgtacctagtttg

SEQ ID NO: 4339590 - DNA, 25 bp, Homo sapien
attgtttgaataggtattacattta

SEQ ID NO: 4339591 - DNA, 25 bp, Homo sapien
gcccttgacatcagggccttgctct

SEQ ID NO: 4339592 - DNA, 25 bp, Homo sapien
gcaagaaacaattcagtgctgttgg

SEQ ID NO: 4339593 - DNA, 25 bp, Homo sapien
atggaggagaaaagcccgcagaagc

SEQ ID NO: 4339594 - DNA, 25 bp, Homo sapien
tggttaaatcaagcaatggaggaga

SEQ ID NO: 4339595 - DNA, 25 bp, Homo sapien
tactttttaggatcaaataatagtg

SEQ ID NO: 4339596 - DNA, 25 bp, Homo sapien
ctttttaggatcaaataatagtggt

SEQ ID NO: 4339597 - DNA, 25 bp, Homo sapien
ttaccagatgaacacattcaaattt

SEQ ID NO: 4339598 - DNA, 25 bp, Homo sapien
catggattcagaatgtgaattactt

SEQ ID NO: 4339599 - DNA, 25 bp, Homo sapien
tctttgcatagtctactcacaaggg

SEQ ID NO: 4339600 - DNA, 25 bp, Homo sapien
cgcccacctcgagcctgcaggagag

SEQ ID NO: 4339601 - DNA, 25 bp, Homo sapien
ggcccagaggcaccggacctactca

SEQ ID NO: 4339602 - DNA, 25 bp, Homo sapien
gtctactcacaagggaggcctggcc

SEQ ID NO: 4339603 - DNA, 25 bp, Homo sapien
gaagcggctctgccgggaacaggga

SEQ ID NO: 4339604 - DNA, 25 bp, Homo sapien
ctcggtgcagacagcacagggagga

SEQ ID NO: 4339605 - DNA, 25 bp, Homo sapien
cccccgcgccctcccgacgcgcaga

SEQ ID NO: 4339606 - DNA, 25 bp, Homo sapien
cccgcgccctcccgacgcgcagagc

SEQ ID NO: 4339607 - DNA, 25 bp, Homo sapien
cgcgccctcccgacgcgcagagcca

SEQ ID NO: 4339608 - DNA, 25 bp, Homo sapien
gcgccctcccgacgcgcagagccat

SEQ ID NO: 4339609 - DNA, 25 bp, Homo sapien
tccagagctctaagtcctcgggcgg

SEQ ID NO: 4339610 - DNA, 25 bp, Homo sapien
tcctcgtgcgggtgtacaagtccgg

SEQ ID NO: 4339611 - DNA, 25 bp, Homo sapien
caccttccgggtggagttcagtgaa

SEQ ID NO: 4339612 - DNA, 25 bp, Homo sapien
agtgcacggtcagcacccaggaaca

SEQ ID NO: 4339613 - DNA, 25 bp, Homo sapien
ttccattcatagcaaagggcagcca

SEQ ID NO: 4339614 - DNA, 25 bp, Homo sapien
ggaactaagagtgagtcactcccat

SEQ ID NO: 4339615 - DNA, 25 bp, Homo sapien
cgttaggcttcacctccaacactga

SEQ ID NO: 4339616 - DNA, 25 bp, Homo sapien
aagagtgagtcactcccatgagaac

SEQ ID NO: 4339617 - DNA, 25 bp, Homo sapien
taaccgtagcccacattgtagtagt

SEQ ID NO: 4339618 - DNA, 25 bp, Homo sapien
aacggttcttcaagtcagattaaag

SEQ ID NO: 4339619 - DNA, 25 bp, Homo sapien
caaattatgtgattatccatgtccc

SEQ ID NO: 4339620 - DNA, 25 bp, Homo sapien
ctctctctggacagaaaaaaggtga

SEQ ID NO: 4339621 - DNA, 25 bp, Homo sapien
ttctggatgggagattgcactgtgt

SEQ ID NO: 4339622 - DNA, 25 bp, Homo sapien
cagaggaaatcctattggaagaact

SEQ ID NO: 4339623 - DNA, 25 bp, Homo sapien
ggagattgcagagcatttgggttac

SEQ ID NO: 4339624 - DNA, 25 bp, Homo sapien
catgcaagtttcatggtgtgggaga

SEQ ID NO: 4339625 - DNA, 25 bp, Homo sapien
tcgtaggcttgactgcgactggaga

SEQ ID NO: 4339626 - DNA, 25 bp, Homo sapien
tggaaggagactacgcaaaggctca

SEQ ID NO: 4339627 - DNA, 25 bp, Homo sapien
ccatgagagcgcagaaagctgcagt

SEQ ID NO: 4339628 - DNA, 25 bp, Homo sapien
cagcctcagaagtgacatagcgtca

SEQ ID NO: 4339629 - DNA, 25 bp, Homo sapien
gagtcttcacaaagggacgtgcagg

SEQ ID NO: 4339630 - DNA, 25 bp, Homo sapien
ggatgccagttattctgccaaggac

SEQ ID NO: 4339631 - DNA, 25 bp, Homo sapien
gacgtgcaggattagtcacccctcc

SEQ ID NO: 4339632 - DNA, 25 bp, Homo sapien
tcagattgggcatggttctacacat

SEQ ID NO: 4339633 - DNA, 25 bp, Homo sapien
aatggcagagatattctgctttata

SEQ ID NO: 4339634 - DNA, 25 bp, Homo sapien
tttaatggcagagatattctgcttt

SEQ ID NO: 4339635 - DNA, 25 bp, Homo sapien
aattttaatggcagagatattctgc

SEQ ID NO: 4339636 - DNA, 25 bp, Homo sapien
attttaatggcagagatattctgct

SEQ ID NO: 4339637 - DNA, 25 bp, Homo sapien
gatgagcgccatctgcaggtagcaa

SEQ ID NO: 4339638 - DNA, 25 bp, Homo sapien
aagtctggctgagggcgcttgtcct

SEQ ID NO: 4339639 - DNA, 25 bp, Homo sapien
ggtaaaccatttggcccatctctgg

SEQ ID NO: 4339640 - DNA, 25 bp, Homo sapien
ttacagagccgaaataaaagccagg

SEQ ID NO: 4339641 - DNA, 25 bp, Homo sapien
gacacgatatgtccaagggagtcac

SEQ ID NO: 4339642 - DNA, 25 bp, Homo sapien
cacatgtggcttagttgatgagcac

SEQ ID NO: 4339643 - DNA, 25 bp, Homo sapien
gactggaagacaccttgcaatagag

SEQ ID NO: 4339644 - DNA, 25 bp, Homo sapien
taggaaacagccagcgaccaattag

SEQ ID NO: 4339645 - DNA, 25 bp, Homo sapien
ccaggataagcttagttgggctggg

SEQ ID NO: 4339646 - DNA, 25 bp, Homo sapien
aatgtcctgttccaggataagctta

SEQ ID NO: 4339647 - DNA, 25 bp, Homo sapien
taatgtcctgttccaggataagctt

SEQ ID NO: 4339648 - DNA, 25 bp, Homo sapien
ctaatgtcctgttccaggataagct

SEQ ID NO: 4339649 - DNA, 25 bp, Homo sapien
caagacctgctgaacttcctcctct

SEQ ID NO: 4339650 - DNA, 25 bp, Homo sapien
cacatacccttcaagacctgctgaa

SEQ ID NO: 4339651 - DNA, 25 bp, Homo sapien
ttcaagacctgctgaacttcctcct

SEQ ID NO: 4339652 - DNA, 25 bp, Homo sapien
ccacatacccttcaagacctgctga

SEQ ID NO: 4339653 - DNA, 25 bp, Homo sapien
tctgtgcctgatgtacaacggatac

SEQ ID NO: 4339654 - DNA, 25 bp, Homo sapien
tctgggactgcagtgtacttgcgct

SEQ ID NO: 4339655 - DNA, 25 bp, Homo sapien
ggagcacagtattacccagtgggta

SEQ ID NO: 4339656 - DNA, 25 bp, Homo sapien
tgacatgtgggacagctctggccag

SEQ ID NO: 4339657 - DNA, 25 bp, Homo sapien
tcccctgtgctgagattaaatgaac

SEQ ID NO: 4339658 - DNA, 25 bp, Homo sapien
tgtgccaggtagtaaaataggtgct

SEQ ID NO: 4339659 - DNA, 25 bp, Homo sapien
ccttgacagcctagcgtttgatgat

SEQ ID NO: 4339660 - DNA, 25 bp, Homo sapien
tgataacaatgggataacgcctgct

SEQ ID NO: 4339661 - DNA, 25 bp, Homo sapien
tcttcattggaagctctgtaggcca

SEQ ID NO: 4339662 - DNA, 25 bp, Homo sapien
gatttgattaactcagggcaaggct

SEQ ID NO: 4339663 - DNA, 25 bp, Homo sapien
gacacggagccaatgcagatagcac

SEQ ID NO: 4339664 - DNA, 25 bp, Homo sapien
gggacttaatctgctaggaacacct

SEQ ID NO: 4339665 - DNA, 25 bp, Homo sapien
tgggtactcattgcggctctacaaa

SEQ ID NO: 4339666 - DNA, 25 bp, Homo sapien
tcatgcatggttactcagagatcaa

SEQ ID NO: 4339667 - DNA, 25 bp, Homo sapien
tacctcgaggacagtaggatagcca

SEQ ID NO: 4339668 - DNA, 25 bp, Homo sapien
tggtccgatggagataaaagccaca

SEQ ID NO: 4339669 - DNA, 25 bp, Homo sapien
cagactgacatgtaattcggtaagg

SEQ ID NO: 4339670 - DNA, 25 bp, Homo sapien
gggacttacatttgacacaggctaa

SEQ ID NO: 4339671 - DNA, 25 bp, Homo sapien
taagcagccggttggtccctggttg

SEQ ID NO: 4339672 - DNA, 25 bp, Homo sapien
cagtttggccaaagaggaatgtgca

SEQ ID NO: 4339673 - DNA, 25 bp, Homo sapien
tttgctggttcatctttattttagt

SEQ ID NO: 4339674 - DNA, 25 bp, Homo sapien
ttttaaaagtcatcttccacttgaa

SEQ ID NO: 4339675 - DNA, 25 bp, Homo sapien
tattttaaaagtcatcttccacttg

SEQ ID NO: 4339676 - DNA, 25 bp, Homo sapien
tctttattttagtcatactacttaa

SEQ ID NO: 4339677 - DNA, 25 bp, Homo sapien
ggacttgctgcctccggtttgtctg

SEQ ID NO: 4339678 - DNA, 25 bp, Homo sapien
tctgttcctgtggtcaagttctggc

SEQ ID NO: 4339679 - DNA, 25 bp, Homo sapien
cagatgttctgcagcgatcaaaaaa

SEQ ID NO: 4339680 - DNA, 25 bp, Homo sapien
tcttcggacctctgtgctacaggga

SEQ ID NO: 4339681 - DNA, 25 bp, Homo sapien
cagtggggtttaaccaggctctggt

SEQ ID NO: 4339682 - DNA, 25 bp, Homo sapien
tcagtggggtttaaccaggctctgg

SEQ ID NO: 4339683 - DNA, 25 bp, Homo sapien
ctcagtggggtttaaccaggctctg

SEQ ID NO: 4339684 - DNA, 25 bp, Homo sapien
cttctacccgggctaggtgatcctc

SEQ ID NO: 4339685 - DNA, 25 bp, Homo sapien
tcttctacccgggctaggtgatcct

SEQ ID NO: 4339686 - DNA, 25 bp, Homo sapien
tgattgcctcttctacccgggctag

SEQ ID NO: 4339687 - DNA, 25 bp, Homo sapien
ttgcctcttctacccgggctaggtg

SEQ ID NO: 4339688 - DNA, 25 bp, Homo sapien
tatgtttagcctccagggaagtgca

SEQ ID NO: 4339689 - DNA, 25 bp, Homo sapien
gatggctatccatctaaacgtggct

SEQ ID NO: 4339690 - DNA, 25 bp, Homo sapien
taatccctatagagtctgacaagca

SEQ ID NO: 4339691 - DNA, 25 bp, Homo sapien
tggctacaagaatgagatggctatc

SEQ ID NO: 4339692 - DNA, 25 bp, Homo sapien
taggtaatgagtttactggtgctcg

SEQ ID NO: 4339693 - DNA, 25 bp, Homo sapien
tttaaacaagagaatgaggagagtg

SEQ ID NO: 4339694 - DNA, 25 bp, Homo sapien
gagagtgaacggaacagacaggaaa

SEQ ID NO: 4339695 - DNA, 25 bp, Homo sapien
ctggtgctcgttgtattatatatta

SEQ ID NO: 4339696 - DNA, 25 bp, Homo sapien
cgtgcccggccttatgttactgttt

SEQ ID NO: 4339697 - DNA, 25 bp, Homo sapien
gacccagattttcagtgttaagaga

SEQ ID NO: 4339698 - DNA, 25 bp, Homo sapien
tttcagtgttaagagaagagataaa

SEQ ID NO: 4339699 - DNA, 25 bp, Homo sapien
ttaaggacccagattttcagtgtta

SEQ ID NO: 4339700 - DNA, 25 bp, Homo sapien
agttcaatccatgagtttatactga

SEQ ID NO: 4339701 - DNA, 25 bp, Homo sapien
gtttatactgacagtgacaggatca

SEQ ID NO: 4339702 - DNA, 25 bp, Homo sapien
gattctacgtaatgccaccagtgtc

SEQ ID NO: 4339703 - DNA, 25 bp, Homo sapien
gatcaatggattctacgtaatgcca

SEQ ID NO: 4339704 - DNA, 25 bp, Homo sapien
tgttctacaaaggatactgccagca

SEQ ID NO: 4339705 - DNA, 25 bp, Homo sapien
taccaataggaggagctgtgttccc

SEQ ID NO: 4339706 - DNA, 25 bp, Homo sapien
gactaacaggtcgaggcaactcagt

SEQ ID NO: 4339707 - DNA, 25 bp, Homo sapien
gagatgctcgagtacccatgccttg

SEQ ID NO: 4339708 - DNA, 25 bp, Homo sapien
tcccctggcaggtcattaatgtttt

SEQ ID NO: 4339709 - DNA, 25 bp, Homo sapien
tctcatttgcactgcgcagggaggg

SEQ ID NO: 4339710 - DNA, 25 bp, Homo sapien
gacttgagagagttacagctgtggt

SEQ ID NO: 4339711 - DNA, 25 bp, Homo sapien
gggaagctaccttccaacagcagag

SEQ ID NO: 4339712 - DNA, 25 bp, Homo sapien
tgagctttccggaactgaggaaaac

SEQ ID NO: 4339713 - DNA, 25 bp, Homo sapien
tcctgggctcagtgtaaccgcatgt

SEQ ID NO: 4339714 - DNA, 25 bp, Homo sapien
gaaaacgctttaaatcaggattgac

SEQ ID NO: 4339715 - DNA, 25 bp, Homo sapien
cagtgtaaccgcatgtctttgagct

SEQ ID NO: 4339716 - DNA, 25 bp, Homo sapien
tagttggataaaggaaaggagtatc

SEQ ID NO: 4339717 - DNA, 25 bp, Homo sapien
ctagttggataaaggaaaggagtat

SEQ ID NO: 4339718 - DNA, 25 bp, Homo sapien
agttggataaaggaaaggagtatct

SEQ ID NO: 4339719 - DNA, 25 bp, Homo sapien
tcaggaggaaagagatgccatcgtt

SEQ ID NO: 4339720 - DNA, 25 bp, Homo sapien
aggaggaaagagatgccatcgtttc

SEQ ID NO: 4339721 - DNA, 25 bp, Homo sapien
caggaggaaagagatgccatcgttt

SEQ ID NO: 4339722 - DNA, 25 bp, Homo sapien
ctagatacttgagaggctgcggcag

SEQ ID NO: 4339723 - DNA, 25 bp, Homo sapien
gtcctagatacttgagaggctgcgg

SEQ ID NO: 4339724 - DNA, 25 bp, Homo sapien
gatggcttgaggtccaggagctatg

SEQ ID NO: 4339725 - DNA, 25 bp, Homo sapien
tggcttgaggtccaggagctatgat

SEQ ID NO: 4339726 - DNA, 25 bp, Homo sapien
cttccttgtacctggaataccaagt

SEQ ID NO: 4339727 - DNA, 25 bp, Homo sapien
caggaaacccgaagtcagaccattt

SEQ ID NO: 4339728 - DNA, 25 bp, Homo sapien
tcccaaggagccaatccacaatgta

SEQ ID NO: 4339729 - DNA, 25 bp, Homo sapien
acaaccataggagtccagatgacag

SEQ ID NO: 4339730 - DNA, 25 bp, Homo sapien
tctgcatgtagcctataagctccat

SEQ ID NO: 4339731 - DNA, 25 bp, Homo sapien
gttctctctgcatgtagcctataag

SEQ ID NO: 4339732 - DNA, 25 bp, Homo sapien
tctctgcatgtagcctataagctcc

SEQ ID NO: 4339733 - DNA, 25 bp, Homo sapien
atgtggcagttccagtgggtggcaa

SEQ ID NO: 4339734 - DNA, 25 bp, Homo sapien
gtcttgagtcttgctagaaacagga

SEQ ID NO: 4339735 - DNA, 25 bp, Homo sapien
aaatagacagcattgagagttggga

SEQ ID NO: 4339736 - DNA, 25 bp, Homo sapien
tcagccacttatgggtagtcaaatg

SEQ ID NO: 4339737 - DNA, 25 bp, Homo sapien
cgtgggcaatgtttggtgaggctct

SEQ ID NO: 4339738 - DNA, 25 bp, Homo sapien
gggtgatctgttctggagtctactc

SEQ ID NO: 4339739 - DNA, 25 bp, Homo sapien
ggagtctactcatacatacctcaag

SEQ ID NO: 4339740 - DNA, 25 bp, Homo sapien
catacctcaagagttggaaaaatct

SEQ ID NO: 4339741 - DNA, 25 bp, Homo sapien
ctgtaaaaccaaaaagggtgatcag

SEQ ID NO: 4339742 - DNA, 25 bp, Homo sapien
gaaccccagatacagtctacacaga

SEQ ID NO: 4339743 - DNA, 25 bp, Homo sapien
cacagaacctgtatccatggaattg

SEQ ID NO: 4339744 - DNA, 25 bp, Homo sapien
taccattaatgcactgtcagacggc

SEQ ID NO: 4339745 - DNA, 25 bp, Homo sapien
taccaaggctaatattgggcctccc

SEQ ID NO: 4339746 - DNA, 25 bp, Homo sapien
ctgatgttaactatgtctgtctcct

SEQ ID NO: 4339747 - DNA, 25 bp, Homo sapien
tcaccattgcatttgtattatcagt

SEQ ID NO: 4339748 - DNA, 25 bp, Homo sapien
ggtctatgggccactctggtttaca

SEQ ID NO: 4339749 - DNA, 25 bp, Homo sapien
cgacactagcagttttgttcaccat

SEQ ID NO: 4339750 - DNA, 25 bp, Homo sapien
ttgatctcaaagatcctctgaaagg

SEQ ID NO: 4339751 - DNA, 25 bp, Homo sapien
taagaatcaacatgtaacaaaaggg

SEQ ID NO: 4339752 - DNA, 25 bp, Homo sapien
tagaaaggtagggaatttgtgacag

SEQ ID NO: 4339753 - DNA, 25 bp, Homo sapien
tgctctcagactcattaggtaagaa

SEQ ID NO: 4339754 - DNA, 25 bp, Homo sapien
ttttgccccaaggatgcttctcagg

SEQ ID NO: 4339755 - DNA, 25 bp, Homo sapien
caggccatgaactgccagagaaaac

SEQ ID NO: 4339756 - DNA, 25 bp, Homo sapien
cttccactaccaaatactgggagcc

SEQ ID NO: 4339757 - DNA, 25 bp, Homo sapien
gcctcaggccatgaactgccagaga

SEQ ID NO: 4339758 - DNA, 25 bp, Homo sapien
caaatactgggagccaagtgttctc

SEQ ID NO: 4339759 - DNA, 25 bp, Homo sapien
aatactagactggtcacagttccag

SEQ ID NO: 4339760 - DNA, 25 bp, Homo sapien
aatatttatagtcagcataagccca

SEQ ID NO: 4339761 - DNA, 25 bp, Homo sapien
aactcttcgagtgtagcttctacgt

SEQ ID NO: 4339762 - DNA, 25 bp, Homo sapien
ggtcataatctctaaatggtccaga

SEQ ID NO: 4339763 - DNA, 25 bp, Homo sapien
catgttacagaagattgcaggttgt

SEQ ID NO: 4339764 - DNA, 25 bp, Homo sapien
cagtgtcgtgctggccaatcaaaca

SEQ ID NO: 4339765 - DNA, 25 bp, Homo sapien
gtatctgcttgccatgaaggacctg

SEQ ID NO: 4339766 - DNA, 25 bp, Homo sapien
aggtatttagcattccagtgtcgtg

SEQ ID NO: 4339767 - DNA, 25 bp, Homo sapien
ccagggatacccaatttgactccat

SEQ ID NO: 4339768 - DNA, 25 bp, Homo sapien
accagggatacccaatttgactcca

SEQ ID NO: 4339769 - DNA, 25 bp, Homo sapien
ttgggtagatataactgggtagcct

SEQ ID NO: 4339770 - DNA, 25 bp, Homo sapien
tgggtagatataactgggtagcctt

SEQ ID NO: 4339771 - DNA, 25 bp, Homo sapien
cttgggtagatataactgggtagcc

SEQ ID NO: 4339772 - DNA, 25 bp, Homo sapien
taccctacgacgatcaaaaatctgg

SEQ ID NO: 4339773 - DNA, 25 bp, Homo sapien
ggtttgtactcagggtcggacctca

SEQ ID NO: 4339774 - DNA, 25 bp, Homo sapien
catagtctaatgcaaggccagagag

SEQ ID NO: 4339775 - DNA, 25 bp, Homo sapien
cacgagagtcaactggcattgggtt

SEQ ID NO: 4339776 - DNA, 25 bp, Homo sapien
atcacaggagtggtcgcctcggagc

SEQ ID NO: 4339777 - DNA, 25 bp, Homo sapien
cccagccgcaacgatcacaggagtg

SEQ ID NO: 4339778 - DNA, 25 bp, Homo sapien
gcaacgatcacaggagtggtcgcct

SEQ ID NO: 4339779 - DNA, 25 bp, Homo sapien
tggtcgcctcggagcctgctgccat

SEQ ID NO: 4339780 - DNA, 25 bp, Homo sapien
ctgccggaacccaaggcggagcgga

SEQ ID NO: 4339781 - DNA, 25 bp, Homo sapien
cagagtaggggccaaactccgagac

SEQ ID NO: 4339782 - DNA, 25 bp, Homo sapien
tcagagtaggggccaaactccgaga

SEQ ID NO: 4339783 - DNA, 25 bp, Homo sapien
cacaggaaggagccccggcgactcc

SEQ ID NO: 4339784 - DNA, 25 bp, Homo sapien
tactggacatacctttattgctcgc

SEQ ID NO: 4339785 - DNA, 25 bp, Homo sapien
ggatctttggggcaaaaatcttcca

SEQ ID NO: 4339786 - DNA, 25 bp, Homo sapien
tcataatcactggagatggatcttt

SEQ ID NO: 4339787 - DNA, 25 bp, Homo sapien
aaatcttccaactttactggacata

SEQ ID NO: 4339788 - DNA, 25 bp, Homo sapien
ctattctgcgctgggctagtcggcg

SEQ ID NO: 4339789 - DNA, 25 bp, Homo sapien
gcgggcgacgcgtcgccatgggctc

SEQ ID NO: 4339790 - DNA, 25 bp, Homo sapien
gcccggcagtggcttcgcgggcgac

SEQ ID NO: 4339791 - DNA, 25 bp, Homo sapien
ctagtcggcggtgacccggactgcg

SEQ ID NO: 4339792 - DNA, 25 bp, Homo sapien
tggggtcccatccagaactcggcgc

SEQ ID NO: 4339793 - DNA, 25 bp, Homo sapien
cagctgggacatcgcgctgctcgtg

SEQ ID NO: 4339794 - DNA, 25 bp, Homo sapien
cgctgctggcgttcgttcagggcct

SEQ ID NO: 4339795 - DNA, 25 bp, Homo sapien
gcgcgccaggcctacggcttctcca

SEQ ID NO: 4339796 - DNA, 25 bp, Homo sapien
cttgacagtatagtcaacagccagt

SEQ ID NO: 4339797 - DNA, 25 bp, Homo sapien
agcacagtggtcacattgcacccac

SEQ ID NO: 4339798 - DNA, 25 bp, Homo sapien
acagtggtcacattgcacccacagg

SEQ ID NO: 4339799 - DNA, 25 bp, Homo sapien
gcacagtggtcacattgcacccaca

SEQ ID NO: 4339800 - DNA, 25 bp, Homo sapien
agtgactgcatgtccctgtactggg

SEQ ID NO: 4339801 - DNA, 25 bp, Homo sapien
gtgagttcccgagagcatccacact

SEQ ID NO: 4339802 - DNA, 25 bp, Homo sapien
caatagaactgatctgatgtatgca

SEQ ID NO: 4339803 - DNA, 25 bp, Homo sapien
cacactgccttagcgctatgggagt

SEQ ID NO: 4339804 - DNA, 25 bp, Homo sapien
attttttctcacattttatcataca

SEQ ID NO: 4339805 - DNA, 25 bp, Homo sapien
ttttttctcacattttatcatacag

SEQ ID NO: 4339806 - DNA, 25 bp, Homo sapien
tattttttctcacattttatcatac

SEQ ID NO: 4339807 - DNA, 25 bp, Homo sapien
gcagaataatggaatgtgatggtaa

SEQ ID NO: 4339808 - DNA, 25 bp, Homo sapien
tactgggtaattgatgtggaatgaa

SEQ ID NO: 4339809 - DNA, 25 bp, Homo sapien
aatggaatgtgatggtaagatctac

SEQ ID NO: 4339810 - DNA, 25 bp, Homo sapien
gatggtaagatctactgggtaattg

SEQ ID NO: 4339811 - DNA, 25 bp, Homo sapien
cactgagtaaagtcgagcacctgtc

SEQ ID NO: 4339812 - DNA, 25 bp, Homo sapien
taaactataagttggcagaatgagc

SEQ ID NO: 4339813 - DNA, 25 bp, Homo sapien
cagaatgagcactccgactgctgtg

SEQ ID NO: 4339814 - DNA, 25 bp, Homo sapien
tagtagacagtagagacacagcgga

SEQ ID NO: 4339815 - DNA, 25 bp, Homo sapien
cagtttctaggccttccagggtaca

SEQ ID NO: 4339816 - DNA, 25 bp, Homo sapien
tggtggtctgctggtgatacatgaa

SEQ ID NO: 4339817 - DNA, 25 bp, Homo sapien
agagcagattccttccggcatacag

SEQ ID NO: 4339818 - DNA, 25 bp, Homo sapien
tccttccggcatacaggtggtggtc

SEQ ID NO: 4339819 - DNA, 25 bp, Homo sapien
tcttggttcaactggtgccttcccg

SEQ ID NO: 4339820 - DNA, 25 bp, Homo sapien
ttcccgggtcgtgtttgctcagtct

SEQ ID NO: 4339821 - DNA, 25 bp, Homo sapien
ggttgtctccgtttaatagcacaga

SEQ ID NO: 4339822 - DNA, 25 bp, Homo sapien
gaggctggaaatcaatactgcacac

SEQ ID NO: 4339823 - DNA, 25 bp, Homo sapien
tatatcgatgatggaaattagccac

SEQ ID NO: 4339824 - DNA, 25 bp, Homo sapien
taaaactctacagatggcatacctg

SEQ ID NO: 4339825 - DNA, 25 bp, Homo sapien
gaagataacgccttccctaagtcac

SEQ ID NO: 4339826 - DNA, 25 bp, Homo sapien
cagaataggaagatatgccactaac

SEQ ID NO: 4339827 - DNA, 25 bp, Homo sapien
ggagtatcctagtactgcttggcaa

SEQ ID NO: 4339828 - DNA, 25 bp, Homo sapien
caaaagctagacttagttccagtta

SEQ ID NO: 4339829 - DNA, 25 bp, Homo sapien
taaggaacttgctaaagagaagaag

SEQ ID NO: 4339830 - DNA, 25 bp, Homo sapien
tgcttggcaacttctaagaccctaa

SEQ ID NO: 4339831 - DNA, 25 bp, Homo sapien
tttctgacaatgcttgggagcgagc

SEQ ID NO: 4339832 - DNA, 25 bp, Homo sapien
tcatggaccctactagagaggacag

SEQ ID NO: 4339833 - DNA, 25 bp, Homo sapien
gacttcagctatttgaccttgagca

SEQ ID NO: 4339834 - DNA, 25 bp, Homo sapien
cagattttacgagttgccagcggtg

SEQ ID NO: 4339835 - DNA, 25 bp, Homo sapien
ttgtaagttgctttgcaatgatgcc

SEQ ID NO: 4339836 - DNA, 25 bp, Homo sapien
gtaagttgctttgcaatgatgccat

SEQ ID NO: 4339837 - DNA, 25 bp, Homo sapien
ctttagttaaggcatcaaagaattg

SEQ ID NO: 4339838 - DNA, 25 bp, Homo sapien
aaggcatcaaagaattgtaagttgc

SEQ ID NO: 4339839 - DNA, 25 bp, Homo sapien
ccatgttggccaggccattctcgaa

SEQ ID NO: 4339840 - DNA, 25 bp, Homo sapien
gggattctcgtgcctcatcctcccg

SEQ ID NO: 4339841 - DNA, 25 bp, Homo sapien
gccatgttggccaggccattctcga

SEQ ID NO: 4339842 - DNA, 25 bp, Homo sapien
tacaaagagctagtgacaatttccc

SEQ ID NO: 4339843 - DNA, 25 bp, Homo sapien
taattatgcataacaggagcccata

SEQ ID NO: 4339844 - DNA, 25 bp, Homo sapien
gaattggttattactcctatgggaa

SEQ ID NO: 4339845 - DNA, 25 bp, Homo sapien
aatttttgcatgaggaatcccaacc

SEQ ID NO: 4339846 - DNA, 25 bp, Homo sapien
tcaggggcccttggatcagggcaag

SEQ ID NO: 4339847 - DNA, 25 bp, Homo sapien
gctggagttcggaagtccacggtca

SEQ ID NO: 4339848 - DNA, 25 bp, Homo sapien
ggcaaggggcacaagaggctcacaa

SEQ ID NO: 4339849 - DNA, 25 bp, Homo sapien
ttcggaagtccacggtcatccctca

SEQ ID NO: 4339850 - DNA, 25 bp, Homo sapien
tctgagatgtcgcacactctctctt

SEQ ID NO: 4339851 - DNA, 25 bp, Homo sapien
ccttctgagatgtcgcacactctct

SEQ ID NO: 4339852 - DNA, 25 bp, Homo sapien
gagatgtcgcacactctctcttgtg

SEQ ID NO: 4339853 - DNA, 25 bp, Homo sapien
ggccttctgagatgtcgcacactct

SEQ ID NO: 4339854 - DNA, 25 bp, Homo sapien
tggcttagctgatttccctctgggc

SEQ ID NO: 4339855 - DNA, 25 bp, Homo sapien
agactgcacaccgtggcaggcagcc

SEQ ID NO: 4339856 - DNA, 25 bp, Homo sapien
gtagccatccctgtgcaaagaccag

SEQ ID NO: 4339857 - DNA, 25 bp, Homo sapien
ggatagggtccttcaagactgcaca

SEQ ID NO: 4339858 - DNA, 25 bp, Homo sapien
ctccagttaaaagactccttcctag

SEQ ID NO: 4339859 - DNA, 25 bp, Homo sapien
gcctggtggacctccagttaaaaga

SEQ ID NO: 4339860 - DNA, 25 bp, Homo sapien
gactccttcctagggagctcctgaa

SEQ ID NO: 4339861 - DNA, 25 bp, Homo sapien
taaaagactccttcctagggagctc

SEQ ID NO: 4339862 - DNA, 25 bp, Homo sapien
gaatgctgcaagtctcagaggcaag

SEQ ID NO: 4339863 - DNA, 25 bp, Homo sapien
tagaaatggcgggatgtctctcctc

SEQ ID NO: 4339864 - DNA, 25 bp, Homo sapien
gaagatccccttttggaatgctgca

SEQ ID NO: 4339865 - DNA, 25 bp, Homo sapien
ggtgactgacacatcgtttggtaga

SEQ ID NO: 4339866 - DNA, 25 bp, Homo sapien
ttttatgaaacactctcaaatctgc

SEQ ID NO: 4339867 - DNA, 25 bp, Homo sapien
attttatgaaacactctcaaatctg

SEQ ID NO: 4339868 - DNA, 25 bp, Homo sapien
gggtgtttgccctacattcactaag

SEQ ID NO: 4339869 - DNA, 25 bp, Homo sapien
aaagctcaaaggctcgtccctctgg

SEQ ID NO: 4339870 - DNA, 25 bp, Homo sapien
ccctctggtgttgtatcccgcatga

SEQ ID NO: 4339871 - DNA, 25 bp, Homo sapien
cattcagttgggaccaaaaagctca

SEQ ID NO: 4339872 - DNA, 25 bp, Homo sapien
actaggatggcaggttttacagcct

SEQ ID NO: 4339873 - DNA, 25 bp, Homo sapien
cccaggtaagcaggaaagatttcag

SEQ ID NO: 4339874 - DNA, 25 bp, Homo sapien
gacctacaattagattctgctggga

SEQ ID NO: 4339875 - DNA, 25 bp, Homo sapien
tccaggaacctttaagcttcaagca

SEQ ID NO: 4339876 - DNA, 25 bp, Homo sapien
gtgaatctgcttatccccaacatct

SEQ ID NO: 4339877 - DNA, 25 bp, Homo sapien
tgtaggacaatgtatgtgtacactg

SEQ ID NO: 4339878 - DNA, 25 bp, Homo sapien
gacaatgtatgtgtacactgtatgt

SEQ ID NO: 4339879 - DNA, 25 bp, Homo sapien
gaatctgcttatccccaacatcttt

SEQ ID NO: 4339880 - DNA, 25 bp, Homo sapien
caacaactctgttgagcagcaactg

SEQ ID NO: 4339881 - DNA, 25 bp, Homo sapien
tgttcctgaacagatgaagggccag

SEQ ID NO: 4339882 - DNA, 25 bp, Homo sapien
gcagcaactggaagatagtctccat

SEQ ID NO: 4339883 - DNA, 25 bp, Homo sapien
gccacctttcgtgcattgagggcaa

SEQ ID NO: 4339884 - DNA, 25 bp, Homo sapien
gcctctgaccagagggatgccctgg

SEQ ID NO: 4339885 - DNA, 25 bp, Homo sapien
gaggtggataacctgcgctggcctt

SEQ ID NO: 4339886 - DNA, 25 bp, Homo sapien
tggccttggtcccatgtcatactgg

SEQ ID NO: 4339887 - DNA, 25 bp, Homo sapien
gatgccctgggtagagtatagactt

SEQ ID NO: 4339888 - DNA, 25 bp, Homo sapien
catagtgtcagcgtgacagtgggtt

SEQ ID NO: 4339889 - DNA, 25 bp, Homo sapien
gataatcaggatgtagcaaaggcct

SEQ ID NO: 4339890 - DNA, 25 bp, Homo sapien
tactggagccacttgattgattact

SEQ ID NO: 4339891 - DNA, 25 bp, Homo sapien
ctcaaatgcccagtaggtccacagc

SEQ ID NO: 4339892 - DNA, 25 bp, Homo sapien
accccccacaggcaaggcagcaagt

SEQ ID NO: 4339893 - DNA, 25 bp, Homo sapien
agccctttcccccatggtcaatgcc

SEQ ID NO: 4339894 - DNA, 25 bp, Homo sapien
gcagcaagttcttggcctagtgcag

SEQ ID NO: 4339895 - DNA, 25 bp, Homo sapien
agaaaaccaaactggctccactgtc

SEQ ID NO: 4339896 - DNA, 25 bp, Homo sapien
ttatgaaggcaagaagcccaagtcc

SEQ ID NO: 4339897 - DNA, 25 bp, Homo sapien
agaagcccaagtccccaggacggcg

SEQ ID NO: 4339898 - DNA, 25 bp, Homo sapien
cttatgaaggcaagaagcccaagtc

SEQ ID NO: 4339899 - DNA, 25 bp, Homo sapien
ggcaagaagcccaagtccccaggac

SEQ ID NO: 4339900 - DNA, 25 bp, Homo sapien
tcgtgtacacattggtctgctgcaa

SEQ ID NO: 4339901 - DNA, 25 bp, Homo sapien
gcttgggtagtaagtagtcgtgtac

SEQ ID NO: 4339902 - DNA, 25 bp, Homo sapien
tcgggccggaagctgtgtttgttca

SEQ ID NO: 4339903 - DNA, 25 bp, Homo sapien
cctcgggccggaagctgtgtttgtt

SEQ ID NO: 4339904 - DNA, 25 bp, Homo sapien
ggatcaagttattcttgttcagggt

SEQ ID NO: 4339905 - DNA, 25 bp, Homo sapien
agtgtggactcctgggactgacgct

SEQ ID NO: 4339906 - DNA, 25 bp, Homo sapien
cccttgtagtgcaaatggttggggg

SEQ ID NO: 4339907 - DNA, 25 bp, Homo sapien
tcattcttcggggtgcctccgccct

SEQ ID NO: 4339908 - DNA, 25 bp, Homo sapien
cttcggggtgcctccgcccttgtag

SEQ ID NO: 4339909 - DNA, 25 bp, Homo sapien
caagaagcaggagatgcccgtggcc

SEQ ID NO: 4339910 - DNA, 25 bp, Homo sapien
caggtagtaagatgagggccactgt

SEQ ID NO: 4339911 - DNA, 25 bp, Homo sapien
ggccactgtgaagaggacagactcc

SEQ ID NO: 4339912 - DNA, 25 bp, Homo sapien
aagagaggcaggtagtaagatgagg

SEQ ID NO: 4339913 - DNA, 25 bp, Homo sapien
tgtgaagaggacagactcctgcctg

SEQ ID NO: 4339914 - DNA, 25 bp, Homo sapien
gaaacagcaacaggaggctctgagg

SEQ ID NO: 4339915 - DNA, 25 bp, Homo sapien
tgaggcatcctggaaagggctctga

SEQ ID NO: 4339916 - DNA, 25 bp, Homo sapien
gctctgaggcatcctggaaagggct

SEQ ID NO: 4339917 - DNA, 25 bp, Homo sapien
gcaacaggaggctctgaggcatcct

SEQ ID NO: 4339918 - DNA, 25 bp, Homo sapien
accgcagcatgaggtaggtccggtt

SEQ ID NO: 4339919 - DNA, 25 bp, Homo sapien
caggatgtggaaagagtccagactt

SEQ ID NO: 4339920 - DNA, 25 bp, Homo sapien
cagcatgaggtaggtccggtttctt

SEQ ID NO: 4339921 - DNA, 25 bp, Homo sapien
cagtggggaccccaacaaagcttgg

SEQ ID NO: 4339922 - DNA, 25 bp, Homo sapien
tgcacagtcggtggcctcctccatg

SEQ ID NO: 4339923 - DNA, 25 bp, Homo sapien
tccatgctggaggctggcaggatga

SEQ ID NO: 4339924 - DNA, 25 bp, Homo sapien
ctgcacagtcggtggcctcctccat

SEQ ID NO: 4339925 - DNA, 25 bp, Homo sapien
ctcctccatgctggaggctggcagg

SEQ ID NO: 4339926 - DNA, 25 bp, Homo sapien
tgcaggaagaccagtggacagggtg

SEQ ID NO: 4339927 - DNA, 25 bp, Homo sapien
aagaccagtggacagggtgtcaggg

SEQ ID NO: 4339928 - DNA, 25 bp, Homo sapien
gacagggtgtcaggggcggagacga

SEQ ID NO: 4339929 - DNA, 25 bp, Homo sapien
caggaagaccagtggacagggtgtc

SEQ ID NO: 4339930 - DNA, 25 bp, Homo sapien
gggctccgtcgtcagtgcacttact

SEQ ID NO: 4339931 - DNA, 25 bp, Homo sapien
ggagctcctcacagtgccggcttcg

SEQ ID NO: 4339932 - DNA, 25 bp, Homo sapien
tgctgtttccagcacaggcgctgga

SEQ ID NO: 4339933 - DNA, 25 bp, Homo sapien
tgccggcttcggctctgggctccgt

SEQ ID NO: 4339934 - DNA, 25 bp, Homo sapien
tgggtaggatgaggttaactgccca

SEQ ID NO: 4339935 - DNA, 25 bp, Homo sapien
gatgaggttaactgcccagggaccc

SEQ ID NO: 4339936 - DNA, 25 bp, Homo sapien
taggatgaggttaactgcccaggga

SEQ ID NO: 4339937 - DNA, 25 bp, Homo sapien
ggattgtgggtaggatgaggttaac

SEQ ID NO: 4339938 - DNA, 25 bp, Homo sapien
cacatagtgcctcctccgtgtgcag

SEQ ID NO: 4339939 - DNA, 25 bp, Homo sapien
aggcctgtgtggcacatagtgcctc

SEQ ID NO: 4339940 - DNA, 25 bp, Homo sapien
cgtgtgcagcccgagacagatgtcc

SEQ ID NO: 4339941 - DNA, 25 bp, Homo sapien
tgtgcagcccgagacagatgtcctc

SEQ ID NO: 4339942 - DNA, 25 bp, Homo sapien
gaacgggtgcgttgatagtgacccc

SEQ ID NO: 4339943 - DNA, 25 bp, Homo sapien
gggctggtgcaggaacgggtgcgtt

SEQ ID NO: 4339944 - DNA, 25 bp, Homo sapien
acccccaccacaggaagctgagcat

SEQ ID NO: 4339945 - DNA, 25 bp, Homo sapien
agctgagcatggagaccatgaggtc

SEQ ID NO: 4339946 - DNA, 25 bp, Homo sapien
ctgcaaggggacggggtgtgtgagg

SEQ ID NO: 4339947 - DNA, 25 bp, Homo sapien
tgcaaggggacggggtgtgtgaggg

SEQ ID NO: 4339948 - DNA, 25 bp, Homo sapien
cagggcccaagacggtcttccatcc

SEQ ID NO: 4339949 - DNA, 25 bp, Homo sapien
gggcccaagacggtcttccatccca

SEQ ID NO: 4339950 - DNA, 25 bp, Homo sapien
aagacggtcttccatcccataccag

SEQ ID NO: 4339951 - DNA, 25 bp, Homo sapien
gcccaagacggtcttccatcccata

SEQ ID NO: 4339952 - DNA, 25 bp, Homo sapien
ctgggcattggggttcctgggtagg

SEQ ID NO: 4339953 - DNA, 25 bp, Homo sapien
tgggcattggggttcctgggtaggc

SEQ ID NO: 4339954 - DNA, 25 bp, Homo sapien
gtgcacgttctcttgcggacgcgga

SEQ ID NO: 4339955 - DNA, 25 bp, Homo sapien
gggctccgggttagtgcacgttctc

SEQ ID NO: 4339956 - DNA, 25 bp, Homo sapien
cctgggggttgcagtcctggtactc

SEQ ID NO: 4339957 - DNA, 25 bp, Homo sapien
ggcagcatcgcccacgcagggcagg

SEQ ID NO: 4339958 - DNA, 25 bp, Homo sapien
ctgcgcaggaggacctccaccaggg

SEQ ID NO: 4339959 - DNA, 25 bp, Homo sapien
tgggagagaggaaggagggggcgcc

SEQ ID NO: 4339960 - DNA, 25 bp, Homo sapien
tccggggctgggagagaggaaggag

SEQ ID NO: 4339961 - DNA, 25 bp, Homo sapien
ggctgggagagaggaaggagggggc

SEQ ID NO: 4339962 - DNA, 25 bp, Homo sapien
cggggctgggagagaggaaggaggg

SEQ ID NO: 4339963 - DNA, 25 bp, Homo sapien
gtccgcgggacaggtcctcgtctcg

SEQ ID NO: 4339964 - DNA, 25 bp, Homo sapien
ggtccttctcctgccgaactgcagg

SEQ ID NO: 4339965 - DNA, 25 bp, Homo sapien
agccggagccgtccgcgggacaggt

SEQ ID NO: 4339966 - DNA, 25 bp, Homo sapien
gacaggtcctcgtctcggtccttct

SEQ ID NO: 4339967 - DNA, 25 bp, Homo sapien
tccagggggtgttgcgccgcacttc

SEQ ID NO: 4339968 - DNA, 25 bp, Homo sapien
gcaggtgaagcggaaccgctgctcc

SEQ ID NO: 4339969 - DNA, 25 bp, Homo sapien
tgcgtcacgttcacgggcagccacg

SEQ ID NO: 4339970 - DNA, 25 bp, Homo sapien
ccctcggggttgcacgtcttgaact

SEQ ID NO: 4339971 - DNA, 25 bp, Homo sapien
gcagaggcagctttagaaccccacg

SEQ ID NO: 4339972 - DNA, 25 bp, Homo sapien
tcccctcggctccagtaccctacac

SEQ ID NO: 4339973 - DNA, 25 bp, Homo sapien
aggcagctttagaaccccacggcct

SEQ ID NO: 4339974 - DNA, 25 bp, Homo sapien
gcggcagaggcagctttagaacccc

SEQ ID NO: 4339975 - DNA, 25 bp, Homo sapien
caggcaggagttgccgttctcgcag

SEQ ID NO: 4339976 - DNA, 25 bp, Homo sapien
tctcgcaggcccgacgccgcgactg

SEQ ID NO: 4339977 - DNA, 25 bp, Homo sapien
cgggcaaggcgtgttctcattacag

SEQ ID NO: 4339978 - DNA, 25 bp, Homo sapien
aagcccagaagatgggcaccgggca

SEQ ID NO: 4339979 - DNA, 25 bp, Homo sapien
cctggaagccgatgccacaggacgt

SEQ ID NO: 4339980 - DNA, 25 bp, Homo sapien
ttcgctggcggacctggaagccgat

SEQ ID NO: 4339981 - DNA, 25 bp, Homo sapien
gagcagggttgctgcaacttcgctg

SEQ ID NO: 4339982 - DNA, 25 bp, Homo sapien
ggctcttgcccacgcagatgcggcc

SEQ ID NO: 4339983 - DNA, 25 bp, Homo sapien
gggacagagacagatgcccctctga

SEQ ID NO: 4339984 - DNA, 25 bp, Homo sapien
tgagccctagcttcttagatctagt

SEQ ID NO: 4339985 - DNA, 25 bp, Homo sapien
tctctgggccgatgtattttctact

SEQ ID NO: 4339986 - DNA, 25 bp, Homo sapien
tagcttcttagatctagtctgtctc

SEQ ID NO: 4339987 - DNA, 25 bp, Homo sapien
ccatggtgaccatgggccgaagccc

SEQ ID NO: 4339988 - DNA, 25 bp, Homo sapien
tccaagtgctcacatggttgccatg

SEQ ID NO: 4339989 - DNA, 25 bp, Homo sapien
gggaatcacaggatcgagctcgaca

SEQ ID NO: 4339990 - DNA, 25 bp, Homo sapien
agcctgagttgtccccatccaagtg

SEQ ID NO: 4339991 - DNA, 25 bp, Homo sapien
tcctcgagtgtgctgcaacgttgct

SEQ ID NO: 4339992 - DNA, 25 bp, Homo sapien
caggcggtgatgttctgggtccaga

SEQ ID NO: 4339993 - DNA, 25 bp, Homo sapien
cgtcccagccacagtacgggtcccg

SEQ ID NO: 4339994 - DNA, 25 bp, Homo sapien
ccagaggctcatgttggagctgtcc

SEQ ID NO: 4339995 - DNA, 25 bp, Homo sapien
ctgcatctcaggaacacacgtgaac

SEQ ID NO: 4339996 - DNA, 25 bp, Homo sapien
actcccctctgtgcaccactttcca

SEQ ID NO: 4339997 - DNA, 25 bp, Homo sapien
ctgtgcaccactttccatccatttg

SEQ ID NO: 4339998 - DNA, 25 bp, Homo sapien
aacacacgtgaacactcccctctgt

SEQ ID NO: 4339999 - DNA, 25 bp, Homo sapien
tggagagagcactaagcatgggctc

SEQ ID NO: 4340000 - DNA, 25 bp, Homo sapien
ctcgatccctctggttcctgtcccc

SEQ ID NO: 4340001 - DNA, 25 bp, Homo sapien
gaggctttggagaaggatgtactgg

SEQ ID NO: 4340002 - DNA, 25 bp, Homo sapien
agcatgggctcagaaattggaggtt

SEQ ID NO: 4340003 - DNA, 25 bp, Homo sapien
tgtccagggtggaaaaggtatctct

SEQ ID NO: 4340004 - DNA, 25 bp, Homo sapien
aacaggttcattccatgggctcgga

SEQ ID NO: 4340005 - DNA, 25 bp, Homo sapien
tggagataacccctggatcctgggc

SEQ ID NO: 4340006 - DNA, 25 bp, Homo sapien
ctcaaaggcagggtgaaaggcatgc

SEQ ID NO: 4340007 - DNA, 25 bp, Homo sapien
tcgccgtggacagcgccttcaggat

SEQ ID NO: 4340008 - DNA, 25 bp, Homo sapien
gtgggacccgcaggacgccgtctct

SEQ ID NO: 4340009 - DNA, 25 bp, Homo sapien
tgcggctcgccgtggacagcgcctt

SEQ ID NO: 4340010 - DNA, 25 bp, Homo sapien
gcgcgggcgctgtgcaggatgcgca

SEQ ID NO: 4340011 - DNA, 25 bp, Homo sapien
ccaccacgaggtgtgagaagcgcac

SEQ ID NO: 4340012 - DNA, 25 bp, Homo sapien
gagcgtgtctttagcctgcaccagg

SEQ ID NO: 4340013 - DNA, 25 bp, Homo sapien
cacggcctcgctcatcaggaagagg

SEQ ID NO: 4340014 - DNA, 25 bp, Homo sapien
caggttctcgttgggaccggtctca

SEQ ID NO: 4340015 - DNA, 25 bp, Homo sapien
cactgaggttgaaggcgcagacagc

SEQ ID NO: 4340016 - DNA, 25 bp, Homo sapien
aaagcctgggagatagcactgaggt

SEQ ID NO: 4340017 - DNA, 25 bp, Homo sapien
cagacagcagaagccgcgatgctgt

SEQ ID NO: 4340018 - DNA, 25 bp, Homo sapien
ctcctggtagcgaaatgggccattg

SEQ ID NO: 4340019 - DNA, 25 bp, Homo sapien
tcataggctgccacgaagtttggct

SEQ ID NO: 4340020 - DNA, 25 bp, Homo sapien
gagagtacacggtgcgtccacagtc

SEQ ID NO: 4340021 - DNA, 25 bp, Homo sapien
tgaggtcctgctccggcaagtggaa

SEQ ID NO: 4340022 - DNA, 25 bp, Homo sapien
gaaggcactctgcagctcgttatag

SEQ ID NO: 4340023 - DNA, 25 bp, Homo sapien
cgatgaccgtggctgcatagagctc

SEQ ID NO: 4340024 - DNA, 25 bp, Homo sapien
gcagcgggccacaccattgatcttc

SEQ ID NO: 4340025 - DNA, 25 bp, Homo sapien
gatcttctcaatagtccggctgagg

SEQ ID NO: 4340026 - DNA, 25 bp, Homo sapien
agatggcagggtcccgacctgagaa

SEQ ID NO: 4340027 - DNA, 25 bp, Homo sapien
gggaaaaggcattggttccacacat

SEQ ID NO: 4340028 - DNA, 25 bp, Homo sapien
gcattggttccacacatgaacacct

SEQ ID NO: 4340029 - DNA, 25 bp, Homo sapien
cttccggccggcgacgatcaggact

SEQ ID NO: 4340030 - DNA, 25 bp, Homo sapien
gactcgcacgtagttctgacactcc

SEQ ID NO: 4340031 - DNA, 25 bp, Homo sapien
gcggcgcgtgtcctcactggaggcc

SEQ ID NO: 4340032 - DNA, 25 bp, Homo sapien
aggagcggcgcgtgtcctcactgga

SEQ ID NO: 4340033 - DNA, 25 bp, Homo sapien
gctttggcaggagcggcgcgtgtcc

SEQ ID NO: 4340034 - DNA, 25 bp, Homo sapien
cctttgctttggcaggagcggcgcg

SEQ ID NO: 4340035 - DNA, 25 bp, Homo sapien
agcagccagtgtcgggagtggacat

SEQ ID NO: 4340036 - DNA, 25 bp, Homo sapien
cagccagtgtcgggagtggacatga

SEQ ID NO: 4340037 - DNA, 25 bp, Homo sapien
agccagtgtcgggagtggacatgaa

SEQ ID NO: 4340038 - DNA, 25 bp, Homo sapien
cagcagccagtgtcgggagtggaca

SEQ ID NO: 4340039 - DNA, 25 bp, Homo sapien
agggctggtctgcagggtgagggct

SEQ ID NO: 4340040 - DNA, 25 bp, Homo sapien
gtctgcagggtgagggctcctctca

SEQ ID NO: 4340041 - DNA, 25 bp, Homo sapien
gaaggagggctggtctgcagggtga

SEQ ID NO: 4340042 - DNA, 25 bp, Homo sapien
aggagggctggtctgcagggtgagg

SEQ ID NO: 4340043 - DNA, 25 bp, Homo sapien
tccacatggacgtgggagggctccc

SEQ ID NO: 4340044 - DNA, 25 bp, Homo sapien
tacatccacatggacgtgggagggc

SEQ ID NO: 4340045 - DNA, 25 bp, Homo sapien
catccacatggacgtgggagggctc

SEQ ID NO: 4340046 - DNA, 25 bp, Homo sapien
ctacatccacatggacgtgggaggg

SEQ ID NO: 4340047 - DNA, 25 bp, Homo sapien
agttgtgcaggccaaaagccccgga

SEQ ID NO: 4340048 - DNA, 25 bp, Homo sapien
gttgtgcaggccaaaagccccggac

SEQ ID NO: 4340049 - DNA, 25 bp, Homo sapien
cggctctgcgaggaccgcatgagca

SEQ ID NO: 4340050 - DNA, 25 bp, Homo sapien
cagccttgattccattgaagagggg

SEQ ID NO: 4340051 - DNA, 25 bp, Homo sapien
gagcaaagggtcctcgagtctctga

SEQ ID NO: 4340052 - DNA, 25 bp, Homo sapien
gagcacaccaaaggggtcagccttg

SEQ ID NO: 4340053 - DNA, 25 bp, Homo sapien
tcaacctcctgggtgttagtccaaa

SEQ ID NO: 4340054 - DNA, 25 bp, Homo sapien
tgcaacccttggtcaaagtgaaaca

SEQ ID NO: 4340055 - DNA, 25 bp, Homo sapien
catttcccaggcattcgggctgtga

SEQ ID NO: 4340056 - DNA, 25 bp, Homo sapien
tatctcgctgggcaaaggtccaagg

SEQ ID NO: 4340057 - DNA, 25 bp, Homo sapien
tctctcagaagatactaattggttg

SEQ ID NO: 4340058 - DNA, 25 bp, Homo sapien
ttttctaatccttcaattcaatgtt

SEQ ID NO: 4340059 - DNA, 25 bp, Homo sapien
tctcagaagatactaattggttgtt

SEQ ID NO: 4340060 - DNA, 25 bp, Homo sapien
gaagatactaattggttgtttatca

SEQ ID NO: 4340061 - DNA, 25 bp, Homo sapien
cgtggagataaactggaagagagct

SEQ ID NO: 4340062 - DNA, 25 bp, Homo sapien
cagggctgccagatttgagcttgga

SEQ ID NO: 4340063 - DNA, 25 bp, Homo sapien
ggctgaatgtcaacgcatctttgga

SEQ ID NO: 4340064 - DNA, 25 bp, Homo sapien
gaacaaagccccattatgcgtcctg

SEQ ID NO: 4340065 - DNA, 25 bp, Homo sapien
gacaacagacaggaggaccgggcac

SEQ ID NO: 4340066 - DNA, 25 bp, Homo sapien
acagacaggaggaccgggcactgaa

SEQ ID NO: 4340067 - DNA, 25 bp, Homo sapien
acaacagacaggaggaccgggcact

SEQ ID NO: 4340068 - DNA, 25 bp, Homo sapien
ctgaagaccagaggccaaggtctgc

SEQ ID NO: 4340069 - DNA, 25 bp, Homo sapien
catggccagtgaaaagaacaagtgg

SEQ ID NO: 4340070 - DNA, 25 bp, Homo sapien
gaacaagtggctcctgttttcaact

SEQ ID NO: 4340071 - DNA, 25 bp, Homo sapien
tgaattctgaatggcgccacttgcg

SEQ ID NO: 4340072 - DNA, 25 bp, Homo sapien
cattgcgggcagtgactctgatagc

SEQ ID NO: 4340073 - DNA, 25 bp, Homo sapien
tgaagaagagagacattggcaaggc

SEQ ID NO: 4340074 - DNA, 25 bp, Homo sapien
caaggctgagtctgaagaggtagtt

SEQ ID NO: 4340075 - DNA, 25 bp, Homo sapien
tggcaaggctgagtctgaagaggta

SEQ ID NO: 4340076 - DNA, 25 bp, Homo sapien
gagacattggcaaggctgagtctga

SEQ ID NO: 4340077 - DNA, 25 bp, Homo sapien
gagtcttcggatgctaccatttggg

SEQ ID NO: 4340078 - DNA, 25 bp, Homo sapien
aacaattactctctttgctgggaaa

SEQ ID NO: 4340079 - DNA, 25 bp, Homo sapien
cacaaggttcagagtagagtcttcg

SEQ ID NO: 4340080 - DNA, 25 bp, Homo sapien
tgaaggatcacatcaaggccagttt

SEQ ID NO: 4340081 - DNA, 25 bp, Homo sapien
gggtggccctgcttttcaccatata

SEQ ID NO: 4340082 - DNA, 25 bp, Homo sapien
tggccctgcttttcaccatatactc

SEQ ID NO: 4340083 - DNA, 25 bp, Homo sapien
agggggtggccctgcttttcaccat

SEQ ID NO: 4340084 - DNA, 25 bp, Homo sapien
ggtggccctgcttttcaccatatac

SEQ ID NO: 4340085 - DNA, 25 bp, Homo sapien
tgtaacccagactttacagatgagg

SEQ ID NO: 4340086 - DNA, 25 bp, Homo sapien
cacagagactgtaacccagacttta

SEQ ID NO: 4340087 - DNA, 25 bp, Homo sapien
tttcatacagcaaatgaaggggtgg

SEQ ID NO: 4340088 - DNA, 25 bp, Homo sapien
tgaggctccaaggtcaagatccccc

SEQ ID NO: 4340089 - DNA, 25 bp, Homo sapien
tcccacgatgagctggttcccggag

SEQ ID NO: 4340090 - DNA, 25 bp, Homo sapien
cgggctccagggtaggtgaagttag

SEQ ID NO: 4340091 - DNA, 25 bp, Homo sapien
aagttagagacccacggctgcaggt

SEQ ID NO: 4340092 - DNA, 25 bp, Homo sapien
tcccggaggggtccaaagccagctg

SEQ ID NO: 4340093 - DNA, 25 bp, Homo sapien
caaccctgtggttactgttgggcca

SEQ ID NO: 4340094 - DNA, 25 bp, Homo sapien
ccctgtggttactgttgggccagag

SEQ ID NO: 4340095 - DNA, 25 bp, Homo sapien
gaggcaaccctgtggttactgttgg

SEQ ID NO: 4340096 - DNA, 25 bp, Homo sapien
ggcaaccctgtggttactgttgggc

SEQ ID NO: 4340097 - DNA, 25 bp, Homo sapien
gcaggatggggctccgcatgtcctc

SEQ ID NO: 4340098 - DNA, 25 bp, Homo sapien
ctgggcagcaacagcgagacagcca

SEQ ID NO: 4340099 - DNA, 25 bp, Homo sapien
tgggctcactggagacatcctggga

SEQ ID NO: 4340100 - DNA, 25 bp, Homo sapien
ttgctaagggcgcacagctgctgct

SEQ ID NO: 4340101 - DNA, 25 bp, Homo sapien
tggggtgcttgctaagggcgcacag

SEQ ID NO: 4340102 - DNA, 25 bp, Homo sapien
agtcctagctccgggaggcagacag

SEQ ID NO: 4340103 - DNA, 25 bp, Homo sapien
atgataggcccctctgcagtcctag

SEQ ID NO: 4340104 - DNA, 25 bp, Homo sapien
caccatgataggcccctctgcagtc

SEQ ID NO: 4340105 - DNA, 25 bp, Homo sapien
cagtcctagctccgggaggcagaca

SEQ ID NO: 4340106 - DNA, 25 bp, Homo sapien
gggaaggtgattcaggccagtcctc

SEQ ID NO: 4340107 - DNA, 25 bp, Homo sapien
tggggaaggtgattcaggccagtcc

SEQ ID NO: 4340108 - DNA, 25 bp, Homo sapien
ttggggaaggtgattcaggccagtc

SEQ ID NO: 4340109 - DNA, 25 bp, Homo sapien
gaaggtgattcaggccagtcctctt

SEQ ID NO: 4340110 - DNA, 25 bp, Homo sapien
tccacaccttagctgttgggctggg

SEQ ID NO: 4340111 - DNA, 25 bp, Homo sapien
tgggctggggtatcaggcggcccag

SEQ ID NO: 4340112 - DNA, 25 bp, Homo sapien
catccacaccttagctgttgggctg

SEQ ID NO: 4340113 - DNA, 25 bp, Homo sapien
tgggcaacaggagacggactgaagc

SEQ ID NO: 4340114 - DNA, 25 bp, Homo sapien
gccaggcaccagctggaaccactca

SEQ ID NO: 4340115 - DNA, 25 bp, Homo sapien
acaggccaggcaccagctggaacca

SEQ ID NO: 4340116 - DNA, 25 bp, Homo sapien
acacaggccaggcaccagctggaac

SEQ ID NO: 4340117 - DNA, 25 bp, Homo sapien
aggccaggcaccagctggaaccact

SEQ ID NO: 4340118 - DNA, 25 bp, Homo sapien
gaggaggatgcctactatgccttcc

SEQ ID NO: 4340119 - DNA, 25 bp, Homo sapien
tgagatcacatttgagaaagccctt

SEQ ID NO: 4340120 - DNA, 25 bp, Homo sapien
ccaggtgggaaactgacagtctctt

SEQ ID NO: 4340121 - DNA, 25 bp, Homo sapien
taatccctgactccgtgctggagga

SEQ ID NO: 4340122 - DNA, 25 bp, Homo sapien
ttaggaaattcatcatacgcttcat

SEQ ID NO: 4340123 - DNA, 25 bp, Homo sapien
ccgagagtttggctcttaggaaatt

SEQ ID NO: 4340124 - DNA, 25 bp, Homo sapien
cattccgagagtttggctcttagga

SEQ ID NO: 4340125 - DNA, 25 bp, Homo sapien
ttggctcttaggaaattcatcatac

SEQ ID NO: 4340126 - DNA, 25 bp, Homo sapien
tccacgccatgattactgagttgta

SEQ ID NO: 4340127 - DNA, 25 bp, Homo sapien
ttcacttggctaggatgagaccgag

SEQ ID NO: 4340128 - DNA, 25 bp, Homo sapien
gaaaccttgacctaaacactgctgc

SEQ ID NO: 4340129 - DNA, 25 bp, Homo sapien
tttgggctgtcacaaatgaaggtgc

SEQ ID NO: 4340130 - DNA, 25 bp, Homo sapien
cagacggcttggtctggccgcagaa

SEQ ID NO: 4340131 - DNA, 25 bp, Homo sapien
cacaccggttccagatccctgaaag

SEQ ID NO: 4340132 - DNA, 25 bp, Homo sapien
cccagcgacagaagtcaggacttca

SEQ ID NO: 4340133 - DNA, 25 bp, Homo sapien
gtagcagctcagctgcgggcaccat

SEQ ID NO: 4340134 - DNA, 25 bp, Homo sapien
cctgcgtacgtggtcgtagttgatc

SEQ ID NO: 4340135 - DNA, 25 bp, Homo sapien
agacacctgcgtacgtggtcgtagt

SEQ ID NO: 4340136 - DNA, 25 bp, Homo sapien
gtggtcgtagttgatctgctccagg

SEQ ID NO: 4340137 - DNA, 25 bp, Homo sapien
aaaacagccccatactttcagacac

SEQ ID NO: 4340138 - DNA, 25 bp, Homo sapien
aagatgcagtgactggcagtcggtc

SEQ ID NO: 4340139 - DNA, 25 bp, Homo sapien
ggcagtcggtcagatgggttaacaa

SEQ ID NO: 4340140 - DNA, 25 bp, Homo sapien
gatgatatttggctcaggctgaggc

SEQ ID NO: 4340141 - DNA, 25 bp, Homo sapien
gatggtaactggaaactatcctgag

SEQ ID NO: 4340142 - DNA, 25 bp, Homo sapien
agcctcactcgtccgtctccttctc

SEQ ID NO: 4340143 - DNA, 25 bp, Homo sapien
gcagcccagatgcgccgaccacagc

SEQ ID NO: 4340144 - DNA, 25 bp, Homo sapien
cagggcccagtgcaacccggaccca

SEQ ID NO: 4340145 - DNA, 25 bp, Homo sapien
tccccatcgccgctgcagcccagat

SEQ ID NO: 4340146 - DNA, 25 bp, Homo sapien
agcagccgctggatgcgctgccgac

SEQ ID NO: 4340147 - DNA, 25 bp, Homo sapien
tgcaggtgcccggttccccgcggct

SEQ ID NO: 4340148 - DNA, 25 bp, Homo sapien
agctctcagcgctccggtgcagtcc

SEQ ID NO: 4340149 - DNA, 25 bp, Homo sapien
agctaaccagatgggctggcggccg

SEQ ID NO: 4340150 - DNA, 25 bp, Homo sapien
tctcgaatgtgacatccccgagggc

SEQ ID NO: 4340151 - DNA, 25 bp, Homo sapien
ctcgaatgtgacatccccgagggcc

SEQ ID NO: 4340152 - DNA, 25 bp, Homo sapien
ggtttagcgcaatcacaaggagcga

SEQ ID NO: 4340153 - DNA, 25 bp, Homo sapien
acagaattgtgaagaacgagtaggg

SEQ ID NO: 4340154 - DNA, 25 bp, Homo sapien
agggcagccaagagatgagcgatcc

SEQ ID NO: 4340155 - DNA, 25 bp, Homo sapien
tctcagctgaggacggaaggtttag

SEQ ID NO: 4340156 - DNA, 25 bp, Homo sapien
tccagttttgcctagcttagcaaaa

SEQ ID NO: 4340157 - DNA, 25 bp, Homo sapien
tttatagaccccataaagccctcga

SEQ ID NO: 4340158 - DNA, 25 bp, Homo sapien
tagaccccataaagccctcgaatac

SEQ ID NO: 4340159 - DNA, 25 bp, Homo sapien
ttttgcctagcttagcaaaagccat

SEQ ID NO: 4340160 - DNA, 25 bp, Homo sapien
tccaccactctccactatatctcca

SEQ ID NO: 4340161 - DNA, 25 bp, Homo sapien
cactctccactatatctccagtgct

SEQ ID NO: 4340162 - DNA, 25 bp, Homo sapien
ctccaccactctccactatatctcc

SEQ ID NO: 4340163 - DNA, 25 bp, Homo sapien
accactctccactatatctccagtg

SEQ ID NO: 4340164 - DNA, 25 bp, Homo sapien
tgtgacccaccaatgaagatttgtg

SEQ ID NO: 4340165 - DNA, 25 bp, Homo sapien
gccagcagtatatgacagttgggct

SEQ ID NO: 4340166 - DNA, 25 bp, Homo sapien
gagtcatacgtgtgtcagacctctg

SEQ ID NO: 4340167 - DNA, 25 bp, Homo sapien
gataaattgtgccagctacctttcc

SEQ ID NO: 4340168 - DNA, 25 bp, Homo sapien
gcctggcatttattagagcatctag

SEQ ID NO: 4340169 - DNA, 25 bp, Homo sapien
gggacccagtggacagcaagagact

SEQ ID NO: 4340170 - DNA, 25 bp, Homo sapien
caaaagctattgcaagaccctggag

SEQ ID NO: 4340171 - DNA, 25 bp, Homo sapien
gcatctaggctctcagtaaatatta

SEQ ID NO: 4340172 - DNA, 25 bp, Homo sapien
ttgaacccaggcccgcctcactcct

SEQ ID NO: 4340173 - DNA, 25 bp, Homo sapien
acttgaacccaggcccgcctcactc

SEQ ID NO: 4340174 - DNA, 25 bp, Homo sapien
cccttgaaatttcgtacagtaccat

SEQ ID NO: 4340175 - DNA, 25 bp, Homo sapien
tagattcacataactaccgctgcaa

SEQ ID NO: 4340176 - DNA, 25 bp, Homo sapien
tgtctgcctgtatgtcagtactaca

SEQ ID NO: 4340177 - DNA, 25 bp, Homo sapien
tatttaatcggtcagtatgtctgcc

SEQ ID NO: 4340178 - DNA, 25 bp, Homo sapien
ggactgtccaggatgtggccctcag

SEQ ID NO: 4340179 - DNA, 25 bp, Homo sapien
tcacttaagctcgtggccaggactg

SEQ ID NO: 4340180 - DNA, 25 bp, Homo sapien
tggtgaccagcactacagttgcatc

SEQ ID NO: 4340181 - DNA, 25 bp, Homo sapien
ttctagaggccgtgtgtcaccagca

SEQ ID NO: 4340182 - DNA, 25 bp, Homo sapien
aagatacagataagaaacttttctt

SEQ ID NO: 4340183 - DNA, 25 bp, Homo sapien
tccaagatacagataagaaactttt

SEQ ID NO: 4340184 - DNA, 25 bp, Homo sapien
ttagaaatattgctgtcaaagatgg

SEQ ID NO: 4340185 - DNA, 25 bp, Homo sapien
tagaaatattgctgtcaaagatggt

SEQ ID NO: 4340186 - DNA, 25 bp, Homo sapien
gaggatgctgtacttttctggcgca

SEQ ID NO: 4340187 - DNA, 25 bp, Homo sapien
caggtgcgagagaagctgccaatct

SEQ ID NO: 4340188 - DNA, 25 bp, Homo sapien
ctttataagtgtctgctgtagggcc

SEQ ID NO: 4340189 - DNA, 25 bp, Homo sapien
gcgagcggaagagattggccctatt

SEQ ID NO: 4340190 - DNA, 25 bp, Homo sapien
gcagaacccgattggcctgggtgag

SEQ ID NO: 4340191 - DNA, 25 bp, Homo sapien
ctgcagaacccgattggcctgggtg

SEQ ID NO: 4340192 - DNA, 25 bp, Homo sapien
tgcagaacccgattggcctgggtga

SEQ ID NO: 4340193 - DNA, 25 bp, Homo sapien
tggtatatgaaagaggcctaggtct

SEQ ID NO: 4340194 - DNA, 25 bp, Homo sapien
taatgtgtataaagtgcgtggtcca

SEQ ID NO: 4340195 - DNA, 25 bp, Homo sapien
gaccttccttgagtgtctcacagag

SEQ ID NO: 4340196 - DNA, 25 bp, Homo sapien
tgcgtgcaactggttaaaatcgaag

SEQ ID NO: 4340197 - DNA, 25 bp, Homo sapien
cacagcctcaccgcagctttgaact

SEQ ID NO: 4340198 - DNA, 25 bp, Homo sapien
agcctcaccgcagctttgaactggg

SEQ ID NO: 4340199 - DNA, 25 bp, Homo sapien
tgatgccatcacagcctcaccgcag

SEQ ID NO: 4340200 - DNA, 25 bp, Homo sapien
atcacagcctcaccgcagctttgaa

SEQ ID NO: 4340201 - DNA, 25 bp, Homo sapien
tcaagacaccttatctccctagatg

SEQ ID NO: 4340202 - DNA, 25 bp, Homo sapien
tataattggctcagatatttcctcc

SEQ ID NO: 4340203 - DNA, 25 bp, Homo sapien
tgctgtaggcatcacgtaatacata

SEQ ID NO: 4340204 - DNA, 25 bp, Homo sapien
ttttatggtagatctgctagcagca

SEQ ID NO: 4340205 - DNA, 25 bp, Homo sapien
taaggagggaacatatcataactgc

SEQ ID NO: 4340206 - DNA, 25 bp, Homo sapien
caaggctcccgattatgatgtctga

SEQ ID NO: 4340207 - DNA, 25 bp, Homo sapien
tcaaggccgtaacagtggaagaaca

SEQ ID NO: 4340208 - DNA, 25 bp, Homo sapien
tcctctcagaagaatgttggccatg

SEQ ID NO: 4340209 - DNA, 25 bp, Homo sapien
cttctaagagcaagcctgagtttac

SEQ ID NO: 4340210 - DNA, 25 bp, Homo sapien
tattgcacttctaagagcaagcctg

SEQ ID NO: 4340211 - DNA, 25 bp, Homo sapien
ctattgcacttctaagagcaagcct

SEQ ID NO: 4340212 - DNA, 25 bp, Homo sapien
tgcacttctaagagcaagcctgagt

SEQ ID NO: 4340213 - DNA, 25 bp, Homo sapien
cataggagcagtagtagctgccctc

SEQ ID NO: 4340214 - DNA, 25 bp, Homo sapien
tgtagcataggagcagtagtagctg

SEQ ID NO: 4340215 - DNA, 25 bp, Homo sapien
catagttttgtagcataggagcagt

SEQ ID NO: 4340216 - DNA, 25 bp, Homo sapien
tcatagttttgtagcataggagcag

SEQ ID NO: 4340217 - DNA, 25 bp, Homo sapien
cttgtaccagctttcaaaggcttcc

SEQ ID NO: 4340218 - DNA, 25 bp, Homo sapien
tctttgtgccagcacttttctttga

SEQ ID NO: 4340219 - DNA, 25 bp, Homo sapien
tgaggttgggttgcaaaggaccttg

SEQ ID NO: 4340220 - DNA, 25 bp, Homo sapien
ttgtgccagcacttttctttgaggt

SEQ ID NO: 4340221 - DNA, 25 bp, Homo sapien
gaggttgggttgcaaaggaccttgc

SEQ ID NO: 4340222 - DNA, 25 bp, Homo sapien
cattcttgcactttgaatctctcca

SEQ ID NO: 4340223 - DNA, 25 bp, Homo sapien
tcttgcactttgaatctctccagtg

SEQ ID NO: 4340224 - DNA, 25 bp, Homo sapien
tttcattcttgcactttgaatctct

SEQ ID NO: 4340225 - DNA, 25 bp, Homo sapien
agatgaacaaagtatttcattcttg

SEQ ID NO: 4340226 - DNA, 25 bp, Homo sapien
ccacactctgagggccctcgtgagt

SEQ ID NO: 4340227 - DNA, 25 bp, Homo sapien
tgcacacgcgttgatgggaagatga

SEQ ID NO: 4340228 - DNA, 25 bp, Homo sapien
tgacttggaacattcgaatctgatc

SEQ ID NO: 4340229 - DNA, 25 bp, Homo sapien
tacaatttgctcatggatggcagca

SEQ ID NO: 4340230 - DNA, 25 bp, Homo sapien
actgtgctgatgttgtgaacgctgc

SEQ ID NO: 4340231 - DNA, 25 bp, Homo sapien
ctgatgttgtgaacgctgctgggcc

SEQ ID NO: 4340232 - DNA, 25 bp, Homo sapien
ttgtgaacgctgctgggccagactg

SEQ ID NO: 4340233 - DNA, 25 bp, Homo sapien
acccctgactgtgctgatgttgtga

SEQ ID NO: 4340234 - DNA, 25 bp, Homo sapien
tcctttctcgaatggcttcccaggc

SEQ ID NO: 4340235 - DNA, 25 bp, Homo sapien
ggctctggtcctttctcgaatggct

SEQ ID NO: 4340236 - DNA, 25 bp, Homo sapien
ggtcctttctcgaatggcttcccag

SEQ ID NO: 4340237 - DNA, 25 bp, Homo sapien
tgggcaaggctctggtcctttctcg

SEQ ID NO: 4340238 - DNA, 25 bp, Homo sapien
ttgaagtccttaatgatgtctacct

SEQ ID NO: 4340239 - DNA, 25 bp, Homo sapien
cacattgaagtccttaatgatgtct

SEQ ID NO: 4340240 - DNA, 25 bp, Homo sapien
gaagtccttaatgatgtctaccttc

SEQ ID NO: 4340241 - DNA, 25 bp, Homo sapien
cttaatgatgtctaccttctttgga

SEQ ID NO: 4340242 - DNA, 25 bp, Homo sapien
tcacatagaaaagcagacccctggg

SEQ ID NO: 4340243 - DNA, 25 bp, Homo sapien
tccaagtggaaaatctcagcagcgc

SEQ ID NO: 4340244 - DNA, 25 bp, Homo sapien
cctttagagggaacgaagagctagc

SEQ ID NO: 4340245 - DNA, 25 bp, Homo sapien
cctgtggactctaaagctgggctct

SEQ ID NO: 4340246 - DNA, 25 bp, Homo sapien
ttgaccttgaccacgccccggcact

SEQ ID NO: 4340247 - DNA, 25 bp, Homo sapien
gaagtaggtcatcatctcgcctttg

SEQ ID NO: 4340248 - DNA, 25 bp, Homo sapien
cactccagctggtacgtgttggcag

SEQ ID NO: 4340249 - DNA, 25 bp, Homo sapien
gaggaagtaggtcatcatctcgcct

SEQ ID NO: 4340250 - DNA, 25 bp, Homo sapien
cagcacctggtacatgtctgtggtg

SEQ ID NO: 4340251 - DNA, 25 bp, Homo sapien
agcacctggtacatgtctgtggtga

SEQ ID NO: 4340252 - DNA, 25 bp, Homo sapien
gcacctggtacatgtctgtggtgac

SEQ ID NO: 4340253 - DNA, 25 bp, Homo sapien
tgtccccggtgcattgtacaaaagc

SEQ ID NO: 4340254 - DNA, 25 bp, Homo sapien
agttcaggagtggacagtaagtgcc

SEQ ID NO: 4340255 - DNA, 25 bp, Homo sapien
gtacaaaagcatccctccgtgacag

SEQ ID NO: 4340256 - DNA, 25 bp, Homo sapien
ttcaccacaggtcgtttgagagcct

SEQ ID NO: 4340257 - DNA, 25 bp, Homo sapien
cctcactaatttcactatcccattg

SEQ ID NO: 4340258 - DNA, 25 bp, Homo sapien
atggcctcactaatttcactatccc

SEQ ID NO: 4340259 - DNA, 25 bp, Homo sapien
ggcctcactaatttcactatcccat

SEQ ID NO: 4340260 - DNA, 25 bp, Homo sapien
cgatggcctcactaatttcactatc

SEQ ID NO: 4340261 - DNA, 25 bp, Homo sapien
aggactactgcccagggcggtgcct

SEQ ID NO: 4340262 - DNA, 25 bp, Homo sapien
ggccgtgcaggaggactactgccca

SEQ ID NO: 4340263 - DNA, 25 bp, Homo sapien
gggtgagggccgtgcaggaggacta

SEQ ID NO: 4340264 - DNA, 25 bp, Homo sapien
gactactgcccagggcggtgcctct

SEQ ID NO: 4340265 - DNA, 25 bp, Homo sapien
tggcctgccctgaagacctctcggt

SEQ ID NO: 4340266 - DNA, 25 bp, Homo sapien
tgccctgaagacctctcggtgtcag

SEQ ID NO: 4340267 - DNA, 25 bp, Homo sapien
cctgaagacctctcggtgtcagaca

SEQ ID NO: 4340268 - DNA, 25 bp, Homo sapien
gaagacctctcggtgtcagacacag

SEQ ID NO: 4340269 - DNA, 25 bp, Homo sapien
ccagatgtcgtactgaggctttcgt

SEQ ID NO: 4340270 - DNA, 25 bp, Homo sapien
gatgcggtcgggtacaccggtgctg

SEQ ID NO: 4340271 - DNA, 25 bp, Homo sapien
cacgttcacggtattgccccagatg

SEQ ID NO: 4340272 - DNA, 25 bp, Homo sapien
accggtgctgtccatgcggctggcc

SEQ ID NO: 4340273 - DNA, 25 bp, Homo sapien
taccctgctcctgtcaaatgcctgt

SEQ ID NO: 4340274 - DNA, 25 bp, Homo sapien
caggagtgccctcttcaaggtctct

SEQ ID NO: 4340275 - DNA, 25 bp, Homo sapien
atctgtctccccacatgctgcaggt

SEQ ID NO: 4340276 - DNA, 25 bp, Homo sapien
cacagtcatcacatctctggcttga

SEQ ID NO: 4340277 - DNA, 25 bp, Homo sapien
cagtgccttgatgtgggtcttgccc

SEQ ID NO: 4340278 - DNA, 25 bp, Homo sapien
ggtcttgcccaccttgtcgtaggta

SEQ ID NO: 4340279 - DNA, 25 bp, Homo sapien
cttcatggcaaagtcggccagtgcc

SEQ ID NO: 4340280 - DNA, 25 bp, Homo sapien
ttgatgtacttcatctggtccatca

SEQ ID NO: 4340281 - DNA, 25 bp, Homo sapien
ctggatgaaggaggccaaacctggg

SEQ ID NO: 4340282 - DNA, 25 bp, Homo sapien
tggatgaaggaggccaaacctgggt

SEQ ID NO: 4340283 - DNA, 25 bp, Homo sapien
tgaaggaggccaaacctgggtcacc

SEQ ID NO: 4340284 - DNA, 25 bp, Homo sapien
gatgaaggaggccaaacctgggtca

SEQ ID NO: 4340285 - DNA, 25 bp, Homo sapien
tggcctccagctcaacgtagaactc

SEQ ID NO: 4340286 - DNA, 25 bp, Homo sapien
cgtagaactcggagaagttggcgat

SEQ ID NO: 4340287 - DNA, 25 bp, Homo sapien
tagagctcatcattgcgccgctcgc

SEQ ID NO: 4340288 - DNA, 25 bp, Homo sapien
gatggaggcgaacatgaccgccaca

SEQ ID NO: 4340289 - DNA, 25 bp, Homo sapien
agaaaaagcaccagtcacgcaaatg

SEQ ID NO: 4340290 - DNA, 25 bp, Homo sapien
cagtcacgcaaatgccaacttgtgc

SEQ ID NO: 4340291 - DNA, 25 bp, Homo sapien
aaagcaccagtcacgcaaatgccaa

SEQ ID NO: 4340292 - DNA, 25 bp, Homo sapien
cacgcaaatgccaacttgtgcccag

SEQ ID NO: 4340293 - DNA, 25 bp, Homo sapien
tgaggctgcaaggatcctgtctgcc

SEQ ID NO: 4340294 - DNA, 25 bp, Homo sapien
agccccgagcaggaacaagcctgga

SEQ ID NO: 4340295 - DNA, 25 bp, Homo sapien
catttctgagcctcgaactctctct

SEQ ID NO: 4340296 - DNA, 25 bp, Homo sapien
gcaaggatcctgtctgccaaaggcc

SEQ ID NO: 4340297 - DNA, 25 bp, Homo sapien
cagatccctcgggtcaagaggccag

SEQ ID NO: 4340298 - DNA, 25 bp, Homo sapien
ggttaaaggacagggcagatccctc

SEQ ID NO: 4340299 - DNA, 25 bp, Homo sapien
agaggccagtagtgccctacaaggg

SEQ ID NO: 4340300 - DNA, 25 bp, Homo sapien
tccaggttaaaggacagggcagatc

SEQ ID NO: 4340301 - DNA, 25 bp, Homo sapien
atgatgatgggcgtcaccaccttca

SEQ ID NO: 4340302 - DNA, 25 bp, Homo sapien
ccttcaatgccaccttggttgcatg

SEQ ID NO: 4340303 - DNA, 25 bp, Homo sapien
gcagtggactccacctgctgggcgt

SEQ ID NO: 4340304 - DNA, 25 bp, Homo sapien
gtggactccacctgctgggcgtgca

SEQ ID NO: 4340305 - DNA, 25 bp, Homo sapien
tggctcctcacagcgggctctgagg

SEQ ID NO: 4340306 - DNA, 25 bp, Homo sapien
cgtggctcctcacagcgggctctga

SEQ ID NO: 4340307 - DNA, 25 bp, Homo sapien
ggacaggcctgagacggccgtggct

SEQ ID NO: 4340308 - DNA, 25 bp, Homo sapien
gtggacaggcctgagacggccgtgg

SEQ ID NO: 4340309 - DNA, 25 bp, Homo sapien
gtgtctgaggttctcacacaggctc

SEQ ID NO: 4340310 - DNA, 25 bp, Homo sapien
attctcctgtgtctgaggttctcac

SEQ ID NO: 4340311 - DNA, 25 bp, Homo sapien
aagtaggtaccagcttccattctcc

SEQ ID NO: 4340312 - DNA, 25 bp, Homo sapien
tgttccttgactccagagggaaagt

SEQ ID NO: 4340313 - DNA, 25 bp, Homo sapien
gggagcgaccctatccgaggagcat

SEQ ID NO: 4340314 - DNA, 25 bp, Homo sapien
accctatccgaggagcatcaactca

SEQ ID NO: 4340315 - DNA, 25 bp, Homo sapien
gcgaccctatccgaggagcatcaac

SEQ ID NO: 4340316 - DNA, 25 bp, Homo sapien
cagggagcgaccctatccgaggagc

SEQ ID NO: 4340317 - DNA, 25 bp, Homo sapien
ctgggaggtcccgttgttgaagaag

SEQ ID NO: 4340318 - DNA, 25 bp, Homo sapien
cactgggaggtcccgttgttgaaga

SEQ ID NO: 4340319 - DNA, 25 bp, Homo sapien
tcctgcccgagtgaagaatcttatc

SEQ ID NO: 4340320 - DNA, 25 bp, Homo sapien
catgaagttgtaccgattgctggca

SEQ ID NO: 4340321 - DNA, 25 bp, Homo sapien
tactatgggcgttgataatccacag

SEQ ID NO: 4340322 - DNA, 25 bp, Homo sapien
tctggaacatgcctaacttggtgcg

SEQ ID NO: 4340323 - DNA, 25 bp, Homo sapien
taggacgtgggacctaacctctgcc

SEQ ID NO: 4340324 - DNA, 25 bp, Homo sapien
gccaggagcctttgagtagtgcaca

SEQ ID NO: 4340325 - DNA, 25 bp, Homo sapien
tgaggccactccaactactgggaat

SEQ ID NO: 4340326 - DNA, 25 bp, Homo sapien
ggaacagcggatatccaggcacctg

SEQ ID NO: 4340327 - DNA, 25 bp, Homo sapien
tgaccagcaggtcggcgttgtcgaa

SEQ ID NO: 4340328 - DNA, 25 bp, Homo sapien
tgtcgaagagcgtgacacctggcac

SEQ ID NO: 4340329 - DNA, 25 bp, Homo sapien
tggcacctccacgatgagcacgtag

SEQ ID NO: 4340330 - DNA, 25 bp, Homo sapien
gcacgtagatgagctcgatggccag

SEQ ID NO: 4340331 - DNA, 25 bp, Homo sapien
cagcttcccgatgcagctgatctgc

SEQ ID NO: 4340332 - DNA, 25 bp, Homo sapien
catgtgtgcacccatagggagctgg

SEQ ID NO: 4340333 - DNA, 25 bp, Homo sapien
agtaccatgaacgaagcaacttgca

SEQ ID NO: 4340334 - DNA, 25 bp, Homo sapien
cagctgctgacagcgaactgcttcc

SEQ ID NO: 4340335 - DNA, 25 bp, Homo sapien
cgccacaggtgcttcatatatgctg

SEQ ID NO: 4340336 - DNA, 25 bp, Homo sapien
aggctgtagttgacggccgactccg

SEQ ID NO: 4340337 - DNA, 25 bp, Homo sapien
acctggctcgcgctgatgttgtgct

SEQ ID NO: 4340338 - DNA, 25 bp, Homo sapien
acgtgacacgcgttgacctggctcg

SEQ ID NO: 4340339 - DNA, 25 bp, Homo sapien
gatgttgtgctcctgtgccaagcag

SEQ ID NO: 4340340 - DNA, 25 bp, Homo sapien
atgttgacaaaagccgccaggaaca

SEQ ID NO: 4340341 - DNA, 25 bp, Homo sapien
ggtgatggtgaacaccccaaccagg

SEQ ID NO: 4340342 - DNA, 25 bp, Homo sapien
gacaaaagccgccaggaacaccagg

SEQ ID NO: 4340343 - DNA, 25 bp, Homo sapien
tgaacaccccaaccagggtgctgtt

SEQ ID NO: 4340344 - DNA, 25 bp, Homo sapien
gaccgcacgatcttcctggagaggg

SEQ ID NO: 4340345 - DNA, 25 bp, Homo sapien
ggaccgcacgatcttcctggagagg

SEQ ID NO: 4340346 - DNA, 25 bp, Homo sapien
tggaccgcacgatcttcctggagag

SEQ ID NO: 4340347 - DNA, 25 bp, Homo sapien
cttggaccgcacgatcttcctggag

SEQ ID NO: 4340348 - DNA, 25 bp, Homo sapien
aaggctccagccttgaaccgctgca

SEQ ID NO: 4340349 - DNA, 25 bp, Homo sapien
tggtggcccttccagcctgcaaggc

SEQ ID NO: 4340350 - DNA, 25 bp, Homo sapien
tctccccagcatgacccctgggcct

SEQ ID NO: 4340351 - DNA, 25 bp, Homo sapien
tgggccttcctggtggcccttccag

SEQ ID NO: 4340352 - DNA, 25 bp, Homo sapien
tgcttccaggtcaacggcagggcag

SEQ ID NO: 4340353 - DNA, 25 bp, Homo sapien
attctgcagctgaccaggagcggga

SEQ ID NO: 4340354 - DNA, 25 bp, Homo sapien
ccaggtcaacggcagggcagattct

SEQ ID NO: 4340355 - DNA, 25 bp, Homo sapien
ggcagattctgcagctgaccaggag

SEQ ID NO: 4340356 - DNA, 25 bp, Homo sapien
tctcctacgctgtattcttccacca

SEQ ID NO: 4340357 - DNA, 25 bp, Homo sapien
ttagcaccaagctccaaggacctgc

SEQ ID NO: 4340358 - DNA, 25 bp, Homo sapien
tgagtgagctctatccttagcacca

SEQ ID NO: 4340359 - DNA, 25 bp, Homo sapien
tcctacgctgtattcttccaccaga

SEQ ID NO: 4340360 - DNA, 25 bp, Homo sapien
gtagaagctgagcatgaatatggag

SEQ ID NO: 4340361 - DNA, 25 bp, Homo sapien
ggagtagatcacagacacaaacacc

SEQ ID NO: 4340362 - DNA, 25 bp, Homo sapien
caggtagaagctgagcatgaatatg

SEQ ID NO: 4340363 - DNA, 25 bp, Homo sapien
ctttacgcaggagtagatcacagac

SEQ ID NO: 4340364 - DNA, 25 bp, Homo sapien
gcacgatggtgatctggacaaagca

SEQ ID NO: 4340365 - DNA, 25 bp, Homo sapien
aaatcggtcgtctacctgcttggag

SEQ ID NO: 4340366 - DNA, 25 bp, Homo sapien
ggaagacgagcgaggcacacgccac

SEQ ID NO: 4340367 - DNA, 25 bp, Homo sapien
ggcacacgccacataggcaccaaat

SEQ ID NO: 4340368 - DNA, 25 bp, Homo sapien
gaccgaagcctatcaatgctcctgg

SEQ ID NO: 4340369 - DNA, 25 bp, Homo sapien
tcagggttcgcactctcctgggcgt

SEQ ID NO: 4340370 - DNA, 25 bp, Homo sapien
gcgtcaatggcacggcccagaaact

SEQ ID NO: 4340371 - DNA, 25 bp, Homo sapien
tcaggaggaacttgcggacgtgctc

SEQ ID NO: 4340372 - DNA, 25 bp, Homo sapien
gctgtcaaactcaaagccctcttga

SEQ ID NO: 4340373 - DNA, 25 bp, Homo sapien
tgtcaaactcaaagccctcttgaat

SEQ ID NO: 4340374 - DNA, 25 bp, Homo sapien
ggctgtcaaactcaaagccctcttg

SEQ ID NO: 4340375 - DNA, 25 bp, Homo sapien
cggctgtcaaactcaaagccctctt

SEQ ID NO: 4340376 - DNA, 25 bp, Homo sapien
tggttgccacccaggtggttgtaga

SEQ ID NO: 4340377 - DNA, 25 bp, Homo sapien
tcatcttggcgatcatggccttctc

SEQ ID NO: 4340378 - DNA, 25 bp, Homo sapien
ccagtgtggtgggttgtgcccgatg

SEQ ID NO: 4340379 - DNA, 25 bp, Homo sapien
gttgtgcccgatggagttggttctc

SEQ ID NO: 4340380 - DNA, 25 bp, Homo sapien
tcatcctttttggaccgcttgtcca

SEQ ID NO: 4340381 - DNA, 25 bp, Homo sapien
catcctttttggaccgcttgtccag

SEQ ID NO: 4340382 - DNA, 25 bp, Homo sapien
ggtctcgatactgtgctccttgagg

SEQ ID NO: 4340383 - DNA, 25 bp, Homo sapien
cgtagtccccattcaggtagttgag

SEQ ID NO: 4340384 - DNA, 25 bp, Homo sapien
tagtccccattcaggtagttgagtg

SEQ ID NO: 4340385 - DNA, 25 bp, Homo sapien
cgcaggatgaggaaggtctcgatac

SEQ ID NO: 4340386 - DNA, 25 bp, Homo sapien
tgtggttggctagcgtgacatcgtt

SEQ ID NO: 4340387 - DNA, 25 bp, Homo sapien
ctgagaccaaggacaccgcagtgta

SEQ ID NO: 4340388 - DNA, 25 bp, Homo sapien
ccgcagtgtactcgcccgctgtgaa

SEQ ID NO: 4340389 - DNA, 25 bp, Homo sapien
tagaccagacgtcgaactgccactt

SEQ ID NO: 4340390 - DNA, 25 bp, Homo sapien
agccccgagacgcagtaataacaat

SEQ ID NO: 4340391 - DNA, 25 bp, Homo sapien
cccaaggatcttaatacgtaaacag

SEQ ID NO: 4340392 - DNA, 25 bp, Homo sapien
gcagtaataacaatccccaaggatc

SEQ ID NO: 4340393 - DNA, 25 bp, Homo sapien
acagcagtgggcgtggtcagccctt

SEQ ID NO: 4340394 - DNA, 25 bp, Homo sapien
ccaacccccggctcagggtgactca

SEQ ID NO: 4340395 - DNA, 25 bp, Homo sapien
caacccccggctcagggtgactcac

SEQ ID NO: 4340396 - DNA, 25 bp, Homo sapien
ctcgttgagggtcatgaccagttcc

SEQ ID NO: 4340397 - DNA, 25 bp, Homo sapien
agctcgttgagggtcatgaccagtt

SEQ ID NO: 4340398 - DNA, 25 bp, Homo sapien
gcgggcgaagagctcgttgagggtc

SEQ ID NO: 4340399 - DNA, 25 bp, Homo sapien
cgaagagctcgttgagggtcatgac

SEQ ID NO: 4340400 - DNA, 25 bp, Homo sapien
gaaccagtggctgaacaggtaccag

SEQ ID NO: 4340401 - DNA, 25 bp, Homo sapien
cacggaaccagtggctgaacaggta

SEQ ID NO: 4340402 - DNA, 25 bp, Homo sapien
ccatatgcacggaaccagtggctga

SEQ ID NO: 4340403 - DNA, 25 bp, Homo sapien
gacgctcccagccatatgcacggaa

SEQ ID NO: 4340404 - DNA, 25 bp, Homo sapien
caaagcggctggtgttgcttcctcc

SEQ ID NO: 4340405 - DNA, 25 bp, Homo sapien
catgagccatctatcaaccgggtgt

SEQ ID NO: 4340406 - DNA, 25 bp, Homo sapien
gataaaggtagctggcttgcagtgc

SEQ ID NO: 4340407 - DNA, 25 bp, Homo sapien
cattcgggtcccagtctatgctttc

SEQ ID NO: 4340408 - DNA, 25 bp, Homo sapien
catggcaacatgacggggaaggaca

SEQ ID NO: 4340409 - DNA, 25 bp, Homo sapien
tccatggcaacatgacggggaagga

SEQ ID NO: 4340410 - DNA, 25 bp, Homo sapien
ggatgtaaatcttatggaacatcat

SEQ ID NO: 4340411 - DNA, 25 bp, Homo sapien
ctgcttggcgttgatgtctgctttc

SEQ ID NO: 4340412 - DNA, 25 bp, Homo sapien
ccactccagatagagcagaacacag

SEQ ID NO: 4340413 - DNA, 25 bp, Homo sapien
gggtctttcttgctgttgtgcacaa

SEQ ID NO: 4340414 - DNA, 25 bp, Homo sapien
actccactccagatagagcagaaca

SEQ ID NO: 4340415 - DNA, 25 bp, Homo sapien
acactccactccagatagagcagaa

SEQ ID NO: 4340416 - DNA, 25 bp, Homo sapien
tggttctcccgctgcgagtggagcc

SEQ ID NO: 4340417 - DNA, 25 bp, Homo sapien
cagccggatagtgggtgcagacacc

SEQ ID NO: 4340418 - DNA, 25 bp, Homo sapien
gaaagcctgtctctgggagacctca

SEQ ID NO: 4340419 - DNA, 25 bp, Homo sapien
gcctggatgcactctcgggtctcct

SEQ ID NO: 4340420 - DNA, 25 bp, Homo sapien
ggcttgtcatgggatatgtcctcta

SEQ ID NO: 4340421 - DNA, 25 bp, Homo sapien
gatcgggctctctgatgtcctcaaa

SEQ ID NO: 4340422 - DNA, 25 bp, Homo sapien
aaccactgtgagcagccgagcataa

SEQ ID NO: 4340423 - DNA, 25 bp, Homo sapien
aaatgctgagggcaccccacacgcg

SEQ ID NO: 4340424 - DNA, 25 bp, Homo sapien
aatgtggtaccatctttccctggag

SEQ ID NO: 4340425 - DNA, 25 bp, Homo sapien
gctttgcgatggtcctgctcttgct

SEQ ID NO: 4340426 - DNA, 25 bp, Homo sapien
ttgcgatggtcctgctcttgctcct

SEQ ID NO: 4340427 - DNA, 25 bp, Homo sapien
cacagctttgcgatggtcctgctct

SEQ ID NO: 4340428 - DNA, 25 bp, Homo sapien
gcccactcttccctactccctcttc

SEQ ID NO: 4340429 - DNA, 25 bp, Homo sapien
ctgccctcccccagtcgtgacaacc

SEQ ID NO: 4340430 - DNA, 25 bp, Homo sapien
ccagtcgtgacaaccctctccccaa

SEQ ID NO: 4340431 - DNA, 25 bp, Homo sapien
agctcctgcccactcttccctactc

SEQ ID NO: 4340432 - DNA, 25 bp, Homo sapien
ctcctctcccggaatatcaggcaaa

SEQ ID NO: 4340433 - DNA, 25 bp, Homo sapien
ctctcccggaatatcaggcaaacct

SEQ ID NO: 4340434 - DNA, 25 bp, Homo sapien
tctcccggaatatcaggcaaacctt

SEQ ID NO: 4340435 - DNA, 25 bp, Homo sapien
cccggaatatcaggcaaaccttcat

SEQ ID NO: 4340436 - DNA, 25 bp, Homo sapien
tgagtgcggaacctagatggggcca

SEQ ID NO: 4340437 - DNA, 25 bp, Homo sapien
caactgagtgcggaacctagatggg

SEQ ID NO: 4340438 - DNA, 25 bp, Homo sapien
gagtgcggaacctagatggggccat

SEQ ID NO: 4340439 - DNA, 25 bp, Homo sapien
ctccaactgagtgcggaacctagat

SEQ ID NO: 4340440 - DNA, 25 bp, Homo sapien
acccagcactacacaggctgccctg

SEQ ID NO: 4340441 - DNA, 25 bp, Homo sapien
tacccagcactacacaggctgccct

SEQ ID NO: 4340442 - DNA, 25 bp, Homo sapien
ccctacccagcactacacaggctgc

SEQ ID NO: 4340443 - DNA, 25 bp, Homo sapien
ggcacctcagcagggatccaggggc

SEQ ID NO: 4340444 - DNA, 25 bp, Homo sapien
ttaaatgaaagatgagtgtggtact

SEQ ID NO: 4340445 - DNA, 25 bp, Homo sapien
taaatgaaagatgagtgtggtacta

SEQ ID NO: 4340446 - DNA, 25 bp, Homo sapien
ctccatgctggcccaacacttctct

SEQ ID NO: 4340447 - DNA, 25 bp, Homo sapien
tccatgctggcccaacacttctctc

SEQ ID NO: 4340448 - DNA, 25 bp, Homo sapien
tctcctgaaaggtgagcctccatgc

SEQ ID NO: 4340449 - DNA, 25 bp, Homo sapien
ctcctgaaaggtgagcctccatgct

SEQ ID NO: 4340450 - DNA, 25 bp, Homo sapien
ccaactcaacccaaggagacgcaga

SEQ ID NO: 4340451 - DNA, 25 bp, Homo sapien
gctcagagacgggacttcagaagtt

SEQ ID NO: 4340452 - DNA, 25 bp, Homo sapien
tttttacagaagaaccggagactca

SEQ ID NO: 4340453 - DNA, 25 bp, Homo sapien
gatcagaccttctgtgaacagcaca

SEQ ID NO: 4340454 - DNA, 25 bp, Homo sapien
taatttaacggacagtgcacagatg

SEQ ID NO: 4340455 - DNA, 25 bp, Homo sapien
gcctgaagtgaataccaccaaaaac

SEQ ID NO: 4340456 - DNA, 25 bp, Homo sapien
cagtcaactctaccagaattaagtg

SEQ ID NO: 4340457 - DNA, 25 bp, Homo sapien
ggctctgaataggacaaactccagc

SEQ ID NO: 4340458 - DNA, 25 bp, Homo sapien
ctggatgctgtgctagtggccggat

SEQ ID NO: 4340459 - DNA, 25 bp, Homo sapien
gatgctgtgctagtggccggatgtc

SEQ ID NO: 4340460 - DNA, 25 bp, Homo sapien
atgctgtgctagtggccggatgtca

SEQ ID NO: 4340461 - DNA, 25 bp, Homo sapien
gctagtggccggatgtcaaagcagc

SEQ ID NO: 4340462 - DNA, 25 bp, Homo sapien
tagtgccctaatgctgaatctttca

SEQ ID NO: 4340463 - DNA, 25 bp, Homo sapien
cagttcatgtaacgaccctgtggaa

SEQ ID NO: 4340464 - DNA, 25 bp, Homo sapien
catgcaagtcgggaattaatatccc

SEQ ID NO: 4340465 - DNA, 25 bp, Homo sapien
taattgacttagacctttagtgccc

SEQ ID NO: 4340466 - DNA, 25 bp, Homo sapien
ttctcactgctccatccagacctcc

SEQ ID NO: 4340467 - DNA, 25 bp, Homo sapien
gctccatccagacctcccactccac

SEQ ID NO: 4340468 - DNA, 25 bp, Homo sapien
cttctcactgctccatccagacctc

SEQ ID NO: 4340469 - DNA, 25 bp, Homo sapien
atccagacctcccactccaccatgg

SEQ ID NO: 4340470 - DNA, 25 bp, Homo sapien
aggaggtgggcagtcggcccatgtc

SEQ ID NO: 4340471 - DNA, 25 bp, Homo sapien
cagtcggcccatgtcccctgcctgt

SEQ ID NO: 4340472 - DNA, 25 bp, Homo sapien
cccagcttctgccttgccccatctt

SEQ ID NO: 4340473 - DNA, 25 bp, Homo sapien
gtgggcagtcggcccatgtcccctg

SEQ ID NO: 4340474 - DNA, 25 bp, Homo sapien
gacttaggctgggacttacaacatt

SEQ ID NO: 4340475 - DNA, 25 bp, Homo sapien
attcaggtgggcgttatcaaatcca

SEQ ID NO: 4340476 - DNA, 25 bp, Homo sapien
ggtcttctcagtctccgtaacggca

SEQ ID NO: 4340477 - DNA, 25 bp, Homo sapien
gcttggactgaaaccacgtcactgg

SEQ ID NO: 4340478 - DNA, 25 bp, Homo sapien
gaaatatgtgagaaccatgcgccac

SEQ ID NO: 4340479 - DNA, 25 bp, Homo sapien
tgctgttcccaaagaccgctagatg

SEQ ID NO: 4340480 - DNA, 25 bp, Homo sapien
gtgatgtataagaggccagacccca

SEQ ID NO: 4340481 - DNA, 25 bp, Homo sapien
cattagggacaagctttagtgccac

SEQ ID NO: 4340482 - DNA, 25 bp, Homo sapien
tctgtccacggcaaacacatggaga

SEQ ID NO: 4340483 - DNA, 25 bp, Homo sapien
tccacggcaaacacatggagaccct

SEQ ID NO: 4340484 - DNA, 25 bp, Homo sapien
atctgtccacggcaaacacatggag

SEQ ID NO: 4340485 - DNA, 25 bp, Homo sapien
tgtccacggcaaacacatggagacc

SEQ ID NO: 4340486 - DNA, 25 bp, Homo sapien
ttgcctcttgtcaagtctttgaggt

SEQ ID NO: 4340487 - DNA, 25 bp, Homo sapien
acttgcctcttgtcaagtctttgag

SEQ ID NO: 4340488 - DNA, 25 bp, Homo sapien
gaacttgcctcttgtcaagtctttg

SEQ ID NO: 4340489 - DNA, 25 bp, Homo sapien
cttgcctcttgtcaagtctttgagg

SEQ ID NO: 4340490 - DNA, 25 bp, Homo sapien
tagcagagtgggatacagtcaaaca

SEQ ID NO: 4340491 - DNA, 25 bp, Homo sapien
ccaaaataatcgttaatagctaagc

SEQ ID NO: 4340492 - DNA, 25 bp, Homo sapien
agcatatgtaatagttgtgtgagca

SEQ ID NO: 4340493 - DNA, 25 bp, Homo sapien
cagtcaaacaaaaatgaggttgcca

SEQ ID NO: 4340494 - DNA, 25 bp, Homo sapien
gtgttatttatggtatgggtgtagc

SEQ ID NO: 4340495 - DNA, 25 bp, Homo sapien
tggcagatgctccagtgttatttat

SEQ ID NO: 4340496 - DNA, 25 bp, Homo sapien
aggaatgtgtttggcagatgctcca

SEQ ID NO: 4340497 - DNA, 25 bp, Homo sapien
aatgtgtttggcagatgctccagtg

SEQ ID NO: 4340498 - DNA, 25 bp, Homo sapien
ggtacagccgctccagtttgtccga

SEQ ID NO: 4340499 - DNA, 25 bp, Homo sapien
tagatgaagaacacggtccaccaga

SEQ ID NO: 4340500 - DNA, 25 bp, Homo sapien
accacggcgatgagcgcatagcagg

SEQ ID NO: 4340501 - DNA, 25 bp, Homo sapien
gacgggaacttcttggagcggaata

SEQ ID NO: 4340502 - DNA, 25 bp, Homo sapien
gggtcgtcaccgctcagcggaggat

SEQ ID NO: 4340503 - DNA, 25 bp, Homo sapien
tttcttggtggagccgcgggcagag

SEQ ID NO: 4340504 - DNA, 25 bp, Homo sapien
agtcttctgcgccgcgtagcccggg

SEQ ID NO: 4340505 - DNA, 25 bp, Homo sapien
tagccattcgcgcgggaatcggcct

SEQ ID NO: 4340506 - DNA, 25 bp, Homo sapien
tcggcctcgtcgtctccttcctcct

SEQ ID NO: 4340507 - DNA, 25 bp, Homo sapien
agggggaccaggctagggtcacacg

SEQ ID NO: 4340508 - DNA, 25 bp, Homo sapien
gctgcagcggggcatcttggcaccc

SEQ ID NO: 4340509 - DNA, 25 bp, Homo sapien
gaccaggctagggtcacacgtcggg

SEQ ID NO: 4340510 - DNA, 25 bp, Homo sapien
agttgcggacgagacgggacggagt

SEQ ID NO: 4340511 - DNA, 25 bp, Homo sapien
agacgtccgggatcctggctcgcgt

SEQ ID NO: 4340512 - DNA, 25 bp, Homo sapien
aggatccgcgtcagaagtcccaggt

SEQ ID NO: 4340513 - DNA, 25 bp, Homo sapien
cacagccccgaggtgagaagtagct

SEQ ID NO: 4340514 - DNA, 25 bp, Homo sapien
gcccggagagctgtcgcgcccgctt

SEQ ID NO: 4340515 - DNA, 25 bp, Homo sapien
gcgcccgcttcgcaagccccaagct

SEQ ID NO: 4340516 - DNA, 25 bp, Homo sapien
ggagagctgtcgcgcccgcttcgca

SEQ ID NO: 4340517 - DNA, 25 bp, Homo sapien
agagctgtcgcgcccgcttcgcaag

SEQ ID NO: 4340518 - DNA, 25 bp, Homo sapien
tccagagatccagcgccggggctca

SEQ ID NO: 4340519 - DNA, 25 bp, Homo sapien
ctaggcggaggacggaatccggcgc

SEQ ID NO: 4340520 - DNA, 25 bp, Homo sapien
tctcccggggagtaaggcatccaga

SEQ ID NO: 4340521 - DNA, 25 bp, Homo sapien
gttctgccccgacgcaggcaggctt

SEQ ID NO: 4340522 - DNA, 25 bp, Homo sapien
gtcctccgccttgtcctcatctgat

SEQ ID NO: 4340523 - DNA, 25 bp, Homo sapien
cacagccttcatcccgatcatcccc

SEQ ID NO: 4340524 - DNA, 25 bp, Homo sapien
ttcatcccgatcatccccttccttg

SEQ ID NO: 4340525 - DNA, 25 bp, Homo sapien
tcctccgccttgtcctcatctgatc

SEQ ID NO: 4340526 - DNA, 25 bp, Homo sapien
tgtcagcaagatccacccccaggaa

SEQ ID NO: 4340527 - DNA, 25 bp, Homo sapien
ctgcgaggtatgtcagcaagatcca

SEQ ID NO: 4340528 - DNA, 25 bp, Homo sapien
gaggtatgtcagcaagatccacccc

SEQ ID NO: 4340529 - DNA, 25 bp, Homo sapien
gcgaggtatgtcagcaagatccacc

SEQ ID NO: 4340530 - DNA, 25 bp, Homo sapien
tcctcgtctgcagcctgggtaagtg

SEQ ID NO: 4340531 - DNA, 25 bp, Homo sapien
agatccaggttggtaatgctgagca

SEQ ID NO: 4340532 - DNA, 25 bp, Homo sapien
tgtgctcggtctcttttcctcgtct

SEQ ID NO: 4340533 - DNA, 25 bp, Homo sapien
tgtccccgagatccaggttggtaat

SEQ ID NO: 4340534 - DNA, 25 bp, Homo sapien
gatttaggaaacagagatcagcagc

SEQ ID NO: 4340535 - DNA, 25 bp, Homo sapien
taaaaacaaaggtagctgatttgcc

SEQ ID NO: 4340536 - DNA, 25 bp, Homo sapien
tatgtagccgctttttgctgcatgg

SEQ ID NO: 4340537 - DNA, 25 bp, Homo sapien
gatgccagggagcattcaagcacac

SEQ ID NO: 4340538 - DNA, 25 bp, Homo sapien
ttggtgctctcatgggaggtgagag

SEQ ID NO: 4340539 - DNA, 25 bp, Homo sapien
tcaagtcttgcggtagcaggaagga

SEQ ID NO: 4340540 - DNA, 25 bp, Homo sapien
tggtgctctcatgggaggtgagagc

SEQ ID NO: 4340541 - DNA, 25 bp, Homo sapien
tcttgcggtagcaggaaggagactt

SEQ ID NO: 4340542 - DNA, 25 bp, Homo sapien
cccctggttgtgtcctccaagctta

SEQ ID NO: 4340543 - DNA, 25 bp, Homo sapien
gcggcagtattcacgacatccttct

SEQ ID NO: 4340544 - DNA, 25 bp, Homo sapien
tccccgggctgcctgaaacagcggc

SEQ ID NO: 4340545 - DNA, 25 bp, Homo sapien
tccctctttctgttgccctcggtcc

SEQ ID NO: 4340546 - DNA, 25 bp, Homo sapien
cccaggagggctttcagggaaagct

SEQ ID NO: 4340547 - DNA, 25 bp, Homo sapien
tttgggcatgaggtaaagcagcccc

SEQ ID NO: 4340548 - DNA, 25 bp, Homo sapien
ccagctgtgggcaggcaatgtcagt

SEQ ID NO: 4340549 - DNA, 25 bp, Homo sapien
ctttcagggaaagctggggcttgat

SEQ ID NO: 4340550 - DNA, 25 bp, Homo sapien
aggcagcaatgacccaaagaaacat

SEQ ID NO: 4340551 - DNA, 25 bp, Homo sapien
aaacataggcaatgtaggctttagg

SEQ ID NO: 4340552 - DNA, 25 bp, Homo sapien
tgacccaaagaaacataggcaatgt

SEQ ID NO: 4340553 - DNA, 25 bp, Homo sapien
agaaacataggcaatgtaggcttta

SEQ ID NO: 4340554 - DNA, 25 bp, Homo sapien
tatgaatttctgtcccggagctggg

SEQ ID NO: 4340555 - DNA, 25 bp, Homo sapien
catggcggcacatgcactcaatctt

SEQ ID NO: 4340556 - DNA, 25 bp, Homo sapien
tgaatttctgtcccggagctggggg

SEQ ID NO: 4340557 - DNA, 25 bp, Homo sapien
tttatgaatttctgtcccggagctg

SEQ ID NO: 4340558 - DNA, 25 bp, Homo sapien
tagaaaagttacactaacaggctgg

SEQ ID NO: 4340559 - DNA, 25 bp, Homo sapien
ggcaacaggatctcccgctgaactt

SEQ ID NO: 4340560 - DNA, 25 bp, Homo sapien
aaagttacactaacaggctgggcgt

SEQ ID NO: 4340561 - DNA, 25 bp, Homo sapien
gtgctgggcaacaggatctcccgct

SEQ ID NO: 4340562 - DNA, 25 bp, Homo sapien
caaagtttccagcatgcagtcaagc

SEQ ID NO: 4340563 - DNA, 25 bp, Homo sapien
caagcacgtttcttagtggcaggca

SEQ ID NO: 4340564 - DNA, 25 bp, Homo sapien
cagagaacagagtttgccgcttcaa

SEQ ID NO: 4340565 - DNA, 25 bp, Homo sapien
taggtcccagccataacttcagagc

SEQ ID NO: 4340566 - DNA, 25 bp, Homo sapien
cgtattgggaactcaaaaaatctgc

SEQ ID NO: 4340567 - DNA, 25 bp, Homo sapien
tattttctatgaaacgtattgggaa

SEQ ID NO: 4340568 - DNA, 25 bp, Homo sapien
tatgaaacgtattgggaactcaaaa

SEQ ID NO: 4340569 - DNA, 25 bp, Homo sapien
tattgggaactcaaaaaatctgcag

SEQ ID NO: 4340570 - DNA, 25 bp, Homo sapien
ttcttctctggtgtatcatgtggaa

SEQ ID NO: 4340571 - DNA, 25 bp, Homo sapien
agtatgagaaaggatctttcttctc

SEQ ID NO: 4340572 - DNA, 25 bp, Homo sapien
tatgagaaaggatctttcttctctg

SEQ ID NO: 4340573 - DNA, 25 bp, Homo sapien
gtgtatcatgtggaagtataactgg

SEQ ID NO: 4340574 - DNA, 25 bp, Homo sapien
ctaatttctcatccagcaaccaagg

SEQ ID NO: 4340575 - DNA, 25 bp, Homo sapien
taaagcatatgaagttgaggtcctc

SEQ ID NO: 4340576 - DNA, 25 bp, Homo sapien
gttaagaggatggtttaaaattgca

SEQ ID NO: 4340577 - DNA, 25 bp, Homo sapien
cagcaaccaaggaaggtaacaaagt

SEQ ID NO: 4340578 - DNA, 25 bp, Homo sapien
ctatatcgatgccacagaacagcca

SEQ ID NO: 4340579 - DNA, 25 bp, Homo sapien
agtggtgtggaatacaatgacagac

SEQ ID NO: 4340580 - DNA, 25 bp, Homo sapien
taatattctgtacgctcattcatgt

SEQ ID NO: 4340581 - DNA, 25 bp, Homo sapien
caacaaccaggtgaagaattctagt

SEQ ID NO: 4340582 - DNA, 25 bp, Homo sapien
taagaagtatcccacccaaaatgcc

SEQ ID NO: 4340583 - DNA, 25 bp, Homo sapien
tagtgtccctgctaggaaataccac

SEQ ID NO: 4340584 - DNA, 25 bp, Homo sapien
gaccagggatgctaaaacatgccat

SEQ ID NO: 4340585 - DNA, 25 bp, Homo sapien
caaatgaatgggatagtactgcctc

SEQ ID NO: 4340586 - DNA, 25 bp, Homo sapien
ggaggcagcacgtggaacagggctg

SEQ ID NO: 4340587 - DNA, 25 bp, Homo sapien
gaggaggcagcacgtggaacagggc

SEQ ID NO: 4340588 - DNA, 25 bp, Homo sapien
agcacgtggaacagggctgccatcc

SEQ ID NO: 4340589 - DNA, 25 bp, Homo sapien
gcagcacgtggaacagggctgccat

SEQ ID NO: 4340590 - DNA, 25 bp, Homo sapien
ggtcgctatgattccagcactagag

SEQ ID NO: 4340591 - DNA, 25 bp, Homo sapien
caagcatgtcgctttgttagggtga

SEQ ID NO: 4340592 - DNA, 25 bp, Homo sapien
tttccacagagggacacaagcatgt

SEQ ID NO: 4340593 - DNA, 25 bp, Homo sapien
gaatcatgaagcagaactgtatcca

SEQ ID NO: 4340594 - DNA, 25 bp, Homo sapien
ttttgatatagtaaccaatgcaaaa

SEQ ID NO: 4340595 - DNA, 25 bp, Homo sapien
tttgatatagtaaccaatgcaaaaa

SEQ ID NO: 4340596 - DNA, 25 bp, Homo sapien
attttgatatagtaaccaatgcaaa

SEQ ID NO: 4340597 - DNA, 25 bp, Homo sapien
ctgatggaatataggccagcttgtc

SEQ ID NO: 4340598 - DNA, 25 bp, Homo sapien
gcttgtctgacaaagggcagagctg

SEQ ID NO: 4340599 - DNA, 25 bp, Homo sapien
ggcagagctgcatatattgtgagca

SEQ ID NO: 4340600 - DNA, 25 bp, Homo sapien
gacactcccattgggtacagcacaa

SEQ ID NO: 4340601 - DNA, 25 bp, Homo sapien
ctggcccatttgatgaggtaaggca

SEQ ID NO: 4340602 - DNA, 25 bp, Homo sapien
atgcaataacaaacaggaggacact

SEQ ID NO: 4340603 - DNA, 25 bp, Homo sapien
taacggatgatttccgtgatcgtcc

SEQ ID NO: 4340604 - DNA, 25 bp, Homo sapien
taaggcagatggtttaatagactga

SEQ ID NO: 4340605 - DNA, 25 bp, Homo sapien
tgcaccccataaatacagataccta

SEQ ID NO: 4340606 - DNA, 25 bp, Homo sapien
gacaagcctccaaaacatcatgttg

SEQ ID NO: 4340607 - DNA, 25 bp, Homo sapien
tttaaaaaagggcatgagggatcat

SEQ ID NO: 4340608 - DNA, 25 bp, Homo sapien
cacatgctacaacacagacaagcct

SEQ ID NO: 4340609 - DNA, 25 bp, Homo sapien
tttgaacccaaggtatgtctcctaa

SEQ ID NO: 4340610 - DNA, 25 bp, Homo sapien
aggtatgtctcctaaacctgaacag

SEQ ID NO: 4340611 - DNA, 25 bp, Homo sapien
aacagctctgacttgtcttcttggg

SEQ ID NO: 4340612 - DNA, 25 bp, Homo sapien
gtgaggtttacagaatttgaaccca

SEQ ID NO: 4340613 - DNA, 25 bp, Homo sapien
tcacggatggcgcatgctgggaagt

SEQ ID NO: 4340614 - DNA, 25 bp, Homo sapien
gataccacgttcacggatggcgcat

SEQ ID NO: 4340615 - DNA, 25 bp, Homo sapien
accacgttcacggatggcgcatgct

SEQ ID NO: 4340616 - DNA, 25 bp, Homo sapien
cacgttcacggatggcgcatgctgg

SEQ ID NO: 4340617 - DNA, 25 bp, Homo sapien
tcagggataacacagaaggcgtgcg

SEQ ID NO: 4340618 - DNA, 25 bp, Homo sapien
gacacgccaaccagggaagtggcct

SEQ ID NO: 4340619 - DNA, 25 bp, Homo sapien
ctatcagggataacacagaaggcgt

SEQ ID NO: 4340620 - DNA, 25 bp, Homo sapien
gaagaacacgagcacactgtgaccc

SEQ ID NO: 4340621 - DNA, 25 bp, Homo sapien
acgctggattttggacagagcacca

SEQ ID NO: 4340622 - DNA, 25 bp, Homo sapien
gaagagatctccctaatggctctgg

SEQ ID NO: 4340623 - DNA, 25 bp, Homo sapien
gaaaagcacctatggatctcacaca

SEQ ID NO: 4340624 - DNA, 25 bp, Homo sapien
tgttgcagataagcacctagggccc

SEQ ID NO: 4340625 - DNA, 25 bp, Homo sapien
tgttagcagaaattgagtcactctg

SEQ ID NO: 4340626 - DNA, 25 bp, Homo sapien
caatgatctacacaggaaatcctgg

SEQ ID NO: 4340627 - DNA, 25 bp, Homo sapien
cagcatggttatggaggatgacacc

SEQ ID NO: 4340628 - DNA, 25 bp, Homo sapien
gagacatttaatagctttgcaagcc

SEQ ID NO: 4340629 - DNA, 25 bp, Homo sapien
ctttggcagatgtgctcatagctga

SEQ ID NO: 4340630 - DNA, 25 bp, Homo sapien
tcatagctgaggagtggtcactaag

SEQ ID NO: 4340631 - DNA, 25 bp, Homo sapien
tactttgacttcatgtacctagcac

SEQ ID NO: 4340632 - DNA, 25 bp, Homo sapien
caactggtggattagcacctggaca

SEQ ID NO: 4340633 - DNA, 25 bp, Homo sapien
tattgacatgacctggaactctgac

SEQ ID NO: 4340634 - DNA, 25 bp, Homo sapien
catgagaactcagattacaggactt

SEQ ID NO: 4340635 - DNA, 25 bp, Homo sapien
tgggcaacatgatacgaacaagata

SEQ ID NO: 4340636 - DNA, 25 bp, Homo sapien
tataactgagttgcagaccacatcc

SEQ ID NO: 4340637 - DNA, 25 bp, Homo sapien
ctctttgacgctatgtgttactgcc

SEQ ID NO: 4340638 - DNA, 25 bp, Homo sapien
tgtgttactgcccatattagaaaaa

SEQ ID NO: 4340639 - DNA, 25 bp, Homo sapien
atattagaaaaactcttgacatcac

SEQ ID NO: 4340640 - DNA, 25 bp, Homo sapien
tgacgctatgtgttactgcccatat

SEQ ID NO: 4340641 - DNA, 25 bp, Homo sapien
gatagtataagctatgtctgtctgc

SEQ ID NO: 4340642 - DNA, 25 bp, Homo sapien
caaacaccatgggactcagaaaaga

SEQ ID NO: 4340643 - DNA, 25 bp, Homo sapien
caagctaatctcagggtaacagaaa

SEQ ID NO: 4340644 - DNA, 25 bp, Homo sapien
gagccggagcagattcaaacaccat

SEQ ID NO: 4340645 - DNA, 25 bp, Homo sapien
cagaacatggaaagagcctgtcgac

SEQ ID NO: 4340646 - DNA, 25 bp, Homo sapien
tgaaaacactgctcgcaggaggagt

SEQ ID NO: 4340647 - DNA, 25 bp, Homo sapien
gggactcttgagtgctgttcacaca

SEQ ID NO: 4340648 - DNA, 25 bp, Homo sapien
gcttgtcaaagtactgcagaggctg

SEQ ID NO: 4340649 - DNA, 25 bp, Homo sapien
aaggaaatgcgtgtaagactgcaca

SEQ ID NO: 4340650 - DNA, 25 bp, Homo sapien
tgggaaagcagaccacgggacagat

SEQ ID NO: 4340651 - DNA, 25 bp, Homo sapien
gctgggccagatcactagttttctc

SEQ ID NO: 4340652 - DNA, 25 bp, Homo sapien
tttcaaatctaccattcaaaggtcc

SEQ ID NO: 4340653 - DNA, 25 bp, Homo sapien
ggaccagaccaaccgctataaccag

SEQ ID NO: 4340654 - DNA, 25 bp, Homo sapien
tccaataaggctccagtttgaaaga

SEQ ID NO: 4340655 - DNA, 25 bp, Homo sapien
tggtagctacccttagccaggtatg

SEQ ID NO: 4340656 - DNA, 25 bp, Homo sapien
ttcaattgaataataaaggctatgg

SEQ ID NO: 4340657 - DNA, 25 bp, Homo sapien
ccggctgtcatcaccacattgtaga

SEQ ID NO: 4340658 - DNA, 25 bp, Homo sapien
tgtagatgaccaggtacgccgtggc

SEQ ID NO: 4340659 - DNA, 25 bp, Homo sapien
catcaccacattgtagatgaccagg

SEQ ID NO: 4340660 - DNA, 25 bp, Homo sapien
ttcttcttccgcgtgccgctggcgt

SEQ ID NO: 4340661 - DNA, 25 bp, Homo sapien
gtcaagtgcccgaagcccgctctcc

SEQ ID NO: 4340662 - DNA, 25 bp, Homo sapien
gaagcccgctctcctagcgcgagcg

SEQ ID NO: 4340663 - DNA, 25 bp, Homo sapien
cgggccggactacgcgaggagaggg

SEQ ID NO: 4340664 - DNA, 25 bp, Homo sapien
gcgagcggctcgggccggactacgc

SEQ ID NO: 4340665 - DNA, 25 bp, Homo sapien
actgactcatggtggcttaatctcc

SEQ ID NO: 4340666 - DNA, 25 bp, Homo sapien
gatgctttccttcagaaggactttt

SEQ ID NO: 4340667 - DNA, 25 bp, Homo sapien
gacttttatatacctctgctaaaag

SEQ ID NO: 4340668 - DNA, 25 bp, Homo sapien
caatggaaattccaagggcctacat

SEQ ID NO: 4340669 - DNA, 25 bp, Homo sapien
tgtaacatttcctaaactcacagca

SEQ ID NO: 4340670 - DNA, 25 bp, Homo sapien
tgtacaattgcatggcactttcagt

SEQ ID NO: 4340671 - DNA, 25 bp, Homo sapien
caatgtagtactaggtgaacagcaa

SEQ ID NO: 4340672 - DNA, 25 bp, Homo sapien
ccttagaacgagatttagatttgta

SEQ ID NO: 4340673 - DNA, 25 bp, Homo sapien
tatggagaggcttgtaccagcacat

SEQ ID NO: 4340674 - DNA, 25 bp, Homo sapien
catgtgttgcccgtcattatggaga

SEQ ID NO: 4340675 - DNA, 25 bp, Homo sapien
tatgttgcagccactgagaacccca

SEQ ID NO: 4340676 - DNA, 25 bp, Homo sapien
ggaagccgagagtgaagccctaact

SEQ ID NO: 4340677 - DNA, 25 bp, Homo sapien
cacaatagagttcgttcctgagaga

SEQ ID NO: 4340678 - DNA, 25 bp, Homo sapien
tactctgtaacagtggtccctaacc

SEQ ID NO: 4340679 - DNA, 25 bp, Homo sapien
gcaatgcaaggaacaatcaatggat

SEQ ID NO: 4340680 - DNA, 25 bp, Homo sapien
agagaacctgatgctgccgctgatc

SEQ ID NO: 4340681 - DNA, 25 bp, Homo sapien
caagaaggcattaacctgtaacaca

SEQ ID NO: 4340682 - DNA, 25 bp, Homo sapien
aacatacacgcacacaaaggttata

SEQ ID NO: 4340683 - DNA, 25 bp, Homo sapien
gaacattaacacaattccaagaagg

SEQ ID NO: 4340684 - DNA, 25 bp, Homo sapien
tgatggcataataaaccaagagaac

SEQ ID NO: 4340685 - DNA, 25 bp, Homo sapien
taacgctgctaggtatcaactgctg

SEQ ID NO: 4340686 - DNA, 25 bp, Homo sapien
ttgctggagtactgggagaaaaccc

SEQ ID NO: 4340687 - DNA, 25 bp, Homo sapien
gaaatctgtttcatcgtggccaata

SEQ ID NO: 4340688 - DNA, 25 bp, Homo sapien
tgagagtcagcaaaactggcaggtg

SEQ ID NO: 4340689 - DNA, 25 bp, Homo sapien
tccttttaatatgacttagaaactg

SEQ ID NO: 4340690 - DNA, 25 bp, Homo sapien
cttcaccttcctccatcgtttccac

SEQ ID NO: 4340691 - DNA, 25 bp, Homo sapien
ccttcaccttcctccatcgtttcca

SEQ ID NO: 4340692 - DNA, 25 bp, Homo sapien
cttccccttcaccttcctccatcgt

SEQ ID NO: 4340693 - DNA, 25 bp, Homo sapien
ccttccccttcaccttcctccatcg

SEQ ID NO: 4340694 - DNA, 25 bp, Homo sapien
tggcgggactccctgattgactggt

SEQ ID NO: 4340695 - DNA, 25 bp, Homo sapien
ggtgtacttggcatcgtcatccccg

SEQ ID NO: 4340696 - DNA, 25 bp, Homo sapien
catcgtagtctatctggaagtggcg

SEQ ID NO: 4340697 - DNA, 25 bp, Homo sapien
taaagagcagttcccgtcctcatcg

SEQ ID NO: 4340698 - DNA, 25 bp, Homo sapien
tgagcgaccgtgctcagttaaacat

SEQ ID NO: 4340699 - DNA, 25 bp, Homo sapien
gcgaccgtgctcagttaaacatcac

SEQ ID NO: 4340700 - DNA, 25 bp, Homo sapien
aggcatgagcgaccgtgctcagtta

SEQ ID NO: 4340701 - DNA, 25 bp, Homo sapien
aacatcacacctttcactttttggg

SEQ ID NO: 4340702 - DNA, 25 bp, Homo sapien
taattaggaacacccagaccatgag

SEQ ID NO: 4340703 - DNA, 25 bp, Homo sapien
tgctatgcggcctcgggaaagttgc

SEQ ID NO: 4340704 - DNA, 25 bp, Homo sapien
cacacagcctgtggacgagtagcag

SEQ ID NO: 4340705 - DNA, 25 bp, Homo sapien
tacagcagagggaccgtaactcagg

SEQ ID NO: 4340706 - DNA, 25 bp, Homo sapien
gagaaatagggttttacatgaggct

SEQ ID NO: 4340707 - DNA, 25 bp, Homo sapien
catgaggcttttcctcagcaacagc

SEQ ID NO: 4340708 - DNA, 25 bp, Homo sapien
gcctcaaggaaagcttgggacacat

SEQ ID NO: 4340709 - DNA, 25 bp, Homo sapien
taaatcgcgaatggtcttagagaaa

SEQ ID NO: 4340710 - DNA, 25 bp, Homo sapien
caagggaatctaaactcagattctc

SEQ ID NO: 4340711 - DNA, 25 bp, Homo sapien
aagggaatctaaactcagattctca

SEQ ID NO: 4340712 - DNA, 25 bp, Homo sapien
gctggttggtgaccctgttgaggat

SEQ ID NO: 4340713 - DNA, 25 bp, Homo sapien
gagcgggctggttggtgaccctgtt

SEQ ID NO: 4340714 - DNA, 25 bp, Homo sapien
ggttggtgaccctgttgaggatttc

SEQ ID NO: 4340715 - DNA, 25 bp, Homo sapien
ttttctgcattgagcgggctggttg

SEQ ID NO: 4340716 - DNA, 25 bp, Homo sapien
gaggacagtcttccaatggctctca

SEQ ID NO: 4340717 - DNA, 25 bp, Homo sapien
tggctctcacagcattgcccgtttt

SEQ ID NO: 4340718 - DNA, 25 bp, Homo sapien
caatggctctcacagcattgcccgt

SEQ ID NO: 4340719 - DNA, 25 bp, Homo sapien
gtcttccaatggctctcacagcatt

SEQ ID NO: 4340720 - DNA, 25 bp, Homo sapien
ctggaaaatagacacgagggttgga

SEQ ID NO: 4340721 - DNA, 25 bp, Homo sapien
ttggactcaggcgttgtccctggtt

SEQ ID NO: 4340722 - DNA, 25 bp, Homo sapien
aaaatagacacgagggttggactca

SEQ ID NO: 4340723 - DNA, 25 bp, Homo sapien
ctcaggcgttgtccctggttccagc

SEQ ID NO: 4340724 - DNA, 25 bp, Homo sapien
aaggacctcctgagagccgaggttc

SEQ ID NO: 4340725 - DNA, 25 bp, Homo sapien
gaagcagctgttccctggaacaagg

SEQ ID NO: 4340726 - DNA, 25 bp, Homo sapien
agcagctgttccctggaacaaggac

SEQ ID NO: 4340727 - DNA, 25 bp, Homo sapien
gacctcctgagagccgaggttctgc

SEQ ID NO: 4340728 - DNA, 25 bp, Homo sapien
cctactgcagtgagcgggatgacct

SEQ ID NO: 4340729 - DNA, 25 bp, Homo sapien
taaatgtgtagcaaggaacacccgc

SEQ ID NO: 4340730 - DNA, 25 bp, Homo sapien
gacttattgctgactgggcctagcg

SEQ ID NO: 4340731 - DNA, 25 bp, Homo sapien
gagcagtgcataccatccaaatggg

SEQ ID NO: 4340732 - DNA, 25 bp, Homo sapien
tcttcatccggtccttggagagttt

SEQ ID NO: 4340733 - DNA, 25 bp, Homo sapien
gctgaaggcactgcgtgcagtccag

SEQ ID NO: 4340734 - DNA, 25 bp, Homo sapien
catggatgctgaaggcactgcgtgc

SEQ ID NO: 4340735 - DNA, 25 bp, Homo sapien
tccttcttgccatgtacttcttcat

SEQ ID NO: 4340736 - DNA, 25 bp, Homo sapien
gaattatgactactttagaactgcg

SEQ ID NO: 4340737 - DNA, 25 bp, Homo sapien
ggtcctgcctataacctatgaatta

SEQ ID NO: 4340738 - DNA, 25 bp, Homo sapien
gaactgcgctgaaactcacttcatc

SEQ ID NO: 4340739 - DNA, 25 bp, Homo sapien
tcttacggtgttgttgaatatcagg

SEQ ID NO: 4340740 - DNA, 25 bp, Homo sapien
cagtatctcagttctccttgggtca

SEQ ID NO: 4340741 - DNA, 25 bp, Homo sapien
ccattttatgagcacagagggatcc

SEQ ID NO: 4340742 - DNA, 25 bp, Homo sapien
cttcagtgaataaagcttggatgac

SEQ ID NO: 4340743 - DNA, 25 bp, Homo sapien
gggtccctcatattggaagagaatt

SEQ ID NO: 4340744 - DNA, 25 bp, Homo sapien
gatgaaatccttggcatcgtcggag

SEQ ID NO: 4340745 - DNA, 25 bp, Homo sapien
tcgtcgtcgaagtcccaggtggctg

SEQ ID NO: 4340746 - DNA, 25 bp, Homo sapien
ttcgttatcgttgtctcccatgaag

SEQ ID NO: 4340747 - DNA, 25 bp, Homo sapien
tcgtcggagatctcatcgaatgcct

SEQ ID NO: 4340748 - DNA, 25 bp, Homo sapien
gtgcccagccttgtctttttattta

SEQ ID NO: 4340749 - DNA, 25 bp, Homo sapien
ggaaccacaggtgcgcgccaacaca

SEQ ID NO: 4340750 - DNA, 25 bp, Homo sapien
ctggaaccacaggtgcgcgccaaca

SEQ ID NO: 4340751 - DNA, 25 bp, Homo sapien
ctcactgaacctctggctcaagcga

SEQ ID NO: 4340752 - DNA, 25 bp, Homo sapien
gggtgccaaagaggaccttcagaga

SEQ ID NO: 4340753 - DNA, 25 bp, Homo sapien
tggcgtagccgatgggctcatagtt

SEQ ID NO: 4340754 - DNA, 25 bp, Homo sapien
gggctcatagttgatcacttcagga

SEQ ID NO: 4340755 - DNA, 25 bp, Homo sapien
tgtagcagatgaccccgatgctcca

SEQ ID NO: 4340756 - DNA, 25 bp, Homo sapien
ctggccagaccaaagtcgatgagct

SEQ ID NO: 4340757 - DNA, 25 bp, Homo sapien
tgaggtccaggtgcacgatgccctg

SEQ ID NO: 4340758 - DNA, 25 bp, Homo sapien
gatctgccgcatgtacttgatgcac

SEQ ID NO: 4340759 - DNA, 25 bp, Homo sapien
tcgatgagcttgatcctggtgcccg

SEQ ID NO: 4340760 - DNA, 25 bp, Homo sapien
agtcctcgtcaatgatgcgctcaaa

SEQ ID NO: 4340761 - DNA, 25 bp, Homo sapien
cctcgtcaatgatgcgctcaaacag

SEQ ID NO: 4340762 - DNA, 25 bp, Homo sapien
agctcaaagtcctcgtcaatgatgc

SEQ ID NO: 4340763 - DNA, 25 bp, Homo sapien
tcaaagtcctcgtcaatgatgcgct

SEQ ID NO: 4340764 - DNA, 25 bp, Homo sapien
ccatggccttatgtccatagccttg

SEQ ID NO: 4340765 - DNA, 25 bp, Homo sapien
tatgtccatagccttgtctctgcac

SEQ ID NO: 4340766 - DNA, 25 bp, Homo sapien
ccttatgtccatagccttgtctctg

SEQ ID NO: 4340767 - DNA, 25 bp, Homo sapien
ggcatccatggccttatgtccatag

SEQ ID NO: 4340768 - DNA, 25 bp, Homo sapien
ctattgtgagggtgtaaagaatgag

SEQ ID NO: 4340769 - DNA, 25 bp, Homo sapien
gtgagggtgtaaagaatgaggtcac

SEQ ID NO: 4340770 - DNA, 25 bp, Homo sapien
gtcacagatgtgggctacgtatttc

SEQ ID NO: 4340771 - DNA, 25 bp, Homo sapien
gggctattgtgagggtgtaaagaat

SEQ ID NO: 4340772 - DNA, 25 bp, Homo sapien
tacggaaaggaaatacttgtgtgcc

SEQ ID NO: 4340773 - DNA, 25 bp, Homo sapien
tgactcaagcctacactcggaacta

SEQ ID NO: 4340774 - DNA, 25 bp, Homo sapien
tattgcattgaatcccacagcgttc

SEQ ID NO: 4340775 - DNA, 25 bp, Homo sapien
tcatgaggtgggtgtcgtatctaca

SEQ ID NO: 4340776 - DNA, 25 bp, Homo sapien
gcactgtgcacagaccttcggttct

SEQ ID NO: 4340777 - DNA, 25 bp, Homo sapien
tgcagtgctttccatcttggggcag

SEQ ID NO: 4340778 - DNA, 25 bp, Homo sapien
ctggctgtatggctggtgagcatct

SEQ ID NO: 4340779 - DNA, 25 bp, Homo sapien
tcttacatatcacactcctgtctgc

SEQ ID NO: 4340780 - DNA, 25 bp, Homo sapien
tttctacaagtcgaaagacctgtcc

SEQ ID NO: 4340781 - DNA, 25 bp, Homo sapien
cacactggaccagcttagggtggtg

SEQ ID NO: 4340782 - DNA, 25 bp, Homo sapien
ctccaggaccatgacgatgttggcc

SEQ ID NO: 4340783 - DNA, 25 bp, Homo sapien
tcatgatgctaatctcctgccggat

SEQ ID NO: 4340784 - DNA, 25 bp, Homo sapien
ctcctcaatgtcgtagaagtcagat

SEQ ID NO: 4340785 - DNA, 25 bp, Homo sapien
tgttcagtattgattgtcactgtcc

SEQ ID NO: 4340786 - DNA, 25 bp, Homo sapien
tgtcgtagaagtcagatactttttg

SEQ ID NO: 4340787 - DNA, 25 bp, Homo sapien
tgtccggtaatcaacctcgggctcc

SEQ ID NO: 4340788 - DNA, 25 bp, Homo sapien
catcatctgacacctccacttcatc

SEQ ID NO: 4340789 - DNA, 25 bp, Homo sapien
atcatctgacacctccacttcatcc

SEQ ID NO: 4340790 - DNA, 25 bp, Homo sapien
agtggaaactctacagacttggatc

SEQ ID NO: 4340791 - DNA, 25 bp, Homo sapien
taaccagggcaaccatcttttcact

SEQ ID NO: 4340792 - DNA, 25 bp, Homo sapien
ggaaactctacagacttggatcaca

SEQ ID NO: 4340793 - DNA, 25 bp, Homo sapien
ttccatttattccttaaccagggca

SEQ ID NO: 4340794 - DNA, 25 bp, Homo sapien
tatgaggagccataccaggacaggg

SEQ ID NO: 4340795 - DNA, 25 bp, Homo sapien
aacttatattcgtggtcaggcagca

SEQ ID NO: 4340796 - DNA, 25 bp, Homo sapien
tgaggagctccgaatgtcagaggca

SEQ ID NO: 4340797 - DNA, 25 bp, Homo sapien
tacacgttgattgcacgtacacgga

SEQ ID NO: 4340798 - DNA, 25 bp, Homo sapien
gtacggaaagccccatgtataatta

SEQ ID NO: 4340799 - DNA, 25 bp, Homo sapien
ctgtacggaaagccccatgtataat

SEQ ID NO: 4340800 - DNA, 25 bp, Homo sapien
tgtacggaaagccccatgtataatt

SEQ ID NO: 4340801 - DNA, 25 bp, Homo sapien
tctcgtgctgggtgagtgaccttaa

SEQ ID NO: 4340802 - DNA, 25 bp, Homo sapien
gaaaacccagtagtcagtggcagag

SEQ ID NO: 4340803 - DNA, 25 bp, Homo sapien
gctccagggctcaagactttccagg

SEQ ID NO: 4340804 - DNA, 25 bp, Homo sapien
gaatccatctgggtatgctgctcac

SEQ ID NO: 4340805 - DNA, 25 bp, Homo sapien
tggaagacttctaaccacggtagcc

SEQ ID NO: 4340806 - DNA, 25 bp, Homo sapien
tagaatgtcagagctacaagagacc

SEQ ID NO: 4340807 - DNA, 25 bp, Homo sapien
ctaagtcagggaatcacagaatgtc

SEQ ID NO: 4340808 - DNA, 25 bp, Homo sapien
ccagagaacagaggtgaggaaccat

SEQ ID NO: 4340809 - DNA, 25 bp, Homo sapien
cctgtcagagagagaaggtagggtg

SEQ ID NO: 4340810 - DNA, 25 bp, Homo sapien
ccctgtcagagagagaaggtagggt

SEQ ID NO: 4340811 - DNA, 25 bp, Homo sapien
ctgtcagagagagaaggtagggtgg

SEQ ID NO: 4340812 - DNA, 25 bp, Homo sapien
ttgctgccattctcgctgttctcca

SEQ ID NO: 4340813 - DNA, 25 bp, Homo sapien
cttgctgccattctcgctgttctcc

SEQ ID NO: 4340814 - DNA, 25 bp, Homo sapien
ctgctgcccagcttgttctccacca

SEQ ID NO: 4340815 - DNA, 25 bp, Homo sapien
gcttgctgccattctcgctgttctc

SEQ ID NO: 4340816 - DNA, 25 bp, Homo sapien
ctgctttcggaacttcatccaggta

SEQ ID NO: 4340817 - DNA, 25 bp, Homo sapien
gctttcggaacttcatccaggtaca

SEQ ID NO: 4340818 - DNA, 25 bp, Homo sapien
ggtgatgggctgagtgcctgtcact

SEQ ID NO: 4340819 - DNA, 25 bp, Homo sapien
tgatgggctgagtgcctgtcacttt

SEQ ID NO: 4340820 - DNA, 25 bp, Homo sapien
ctcctgcgcgtaccttctggtcctc

SEQ ID NO: 4340821 - DNA, 25 bp, Homo sapien
tcctgcgcgtaccttctggtcctca

SEQ ID NO: 4340822 - DNA, 25 bp, Homo sapien
ctgcgcgtaccttctggtcctcagg

SEQ ID NO: 4340823 - DNA, 25 bp, Homo sapien
tgcgcgtaccttctggtcctcaggg

SEQ ID NO: 4340824 - DNA, 25 bp, Homo sapien
ggtgtcagtctagcaaggtaaaggc

SEQ ID NO: 4340825 - DNA, 25 bp, Homo sapien
tgggatcacatacccaggtgtcagt

SEQ ID NO: 4340826 - DNA, 25 bp, Homo sapien
catggtagatgacttctttgacccc

SEQ ID NO: 4340827 - DNA, 25 bp, Homo sapien
tttgaccccagatagtgccgtggcc

SEQ ID NO: 4340828 - DNA, 25 bp, Homo sapien
ggtttctttttcacagtcgcatcac

SEQ ID NO: 4340829 - DNA, 25 bp, Homo sapien
caggtttctttttcacagtcgcatc

SEQ ID NO: 4340830 - DNA, 25 bp, Homo sapien
gggcaggtttctttttcacagtcgc

SEQ ID NO: 4340831 - DNA, 25 bp, Homo sapien
ctgccttcggaggtgtcttgggggc

SEQ ID NO: 4340832 - DNA, 25 bp, Homo sapien
tgtaaaagcactgtggaccctacgc

SEQ ID NO: 4340833 - DNA, 25 bp, Homo sapien
catcagacttccagggattcaggca

SEQ ID NO: 4340834 - DNA, 25 bp, Homo sapien
tattgggagttcactgggcacttca

SEQ ID NO: 4340835 - DNA, 25 bp, Homo sapien
tatgtcctcggcactaacatgtgga

SEQ ID NO: 4340836 - DNA, 25 bp, Homo sapien
ttgggcctccgggatttcatctctg

SEQ ID NO: 4340837 - DNA, 25 bp, Homo sapien
ctcagttcctagcacgggaggaaga

SEQ ID NO: 4340838 - DNA, 25 bp, Homo sapien
gggcctccgggatttcatctctggg

SEQ ID NO: 4340839 - DNA, 25 bp, Homo sapien
tcctagcacgggaggaagagagctc

SEQ ID NO: 4340840 - DNA, 25 bp, Homo sapien
gcaagatgagcgcacaggctgccca

SEQ ID NO: 4340841 - DNA, 25 bp, Homo sapien
ttgggatgctcccccggaatgccat

SEQ ID NO: 4340842 - DNA, 25 bp, Homo sapien
ggagcttgggatgctcccccggaat

SEQ ID NO: 4340843 - DNA, 25 bp, Homo sapien
cttggcaagatgagcgcacaggctg

SEQ ID NO: 4340844 - DNA, 25 bp, Homo sapien
ggtggccgcgctccacttgaagtgt

SEQ ID NO: 4340845 - DNA, 25 bp, Homo sapien
ggctgtgcatgcaccacggggccct

SEQ ID NO: 4340846 - DNA, 25 bp, Homo sapien
cccagactcggagccccagggggtg

SEQ ID NO: 4340847 - DNA, 25 bp, Homo sapien
gcgctccacttgaagtgtcagcacg

SEQ ID NO: 4340848 - DNA, 25 bp, Homo sapien
caagataacagtggatcacagtggt

SEQ ID NO: 4340849 - DNA, 25 bp, Homo sapien
tcacagtggttaggcaccaaggctt

SEQ ID NO: 4340850 - DNA, 25 bp, Homo sapien
tcagcaataatcagaagtgcccagg

SEQ ID NO: 4340851 - DNA, 25 bp, Homo sapien
actctgctagttagggtgaccttga

SEQ ID NO: 4340852 - DNA, 25 bp, Homo sapien
agaaggttctgggtgtggggatcag

SEQ ID NO: 4340853 - DNA, 25 bp, Homo sapien
tcagaaggttctgggtgtggggatc

SEQ ID NO: 4340854 - DNA, 25 bp, Homo sapien
aaggttctgggtgtggggatcagga

SEQ ID NO: 4340855 - DNA, 25 bp, Homo sapien
gaaggttctgggtgtggggatcagg

SEQ ID NO: 4340856 - DNA, 25 bp, Homo sapien
tacacacttgtataagcctctgtcc

SEQ ID NO: 4340857 - DNA, 25 bp, Homo sapien
atccacggtgacttggcaggagcac

SEQ ID NO: 4340858 - DNA, 25 bp, Homo sapien
gtgacttggcaggagcactccgcct

SEQ ID NO: 4340859 - DNA, 25 bp, Homo sapien
ggccagcgtcattcttggctacaca

SEQ ID NO: 4340860 - DNA, 25 bp, Homo sapien
tcgatggagacggagcagagtgagc

SEQ ID NO: 4340861 - DNA, 25 bp, Homo sapien
ctcgatggagacggagcagagtgag

SEQ ID NO: 4340862 - DNA, 25 bp, Homo sapien
tgcctcccttcggagttgggtcttc

SEQ ID NO: 4340863 - DNA, 25 bp, Homo sapien
tgggcagcgccaagcctgatgagaa

SEQ ID NO: 4340864 - DNA, 25 bp, Homo sapien
agcgccaagcctgatgagaacctga

SEQ ID NO: 4340865 - DNA, 25 bp, Homo sapien
acgccaaacctgctgagaccctgaa

SEQ ID NO: 4340866 - DNA, 25 bp, Homo sapien
gaccctgaagcccatgggcagcgcc

SEQ ID NO: 4340867 - DNA, 25 bp, Homo sapien
tctcttgcagttcacatcattctta

SEQ ID NO: 4340868 - DNA, 25 bp, Homo sapien
ctctcttgcagttcacatcattctt

SEQ ID NO: 4340869 - DNA, 25 bp, Homo sapien
gatgaacttggtggtcttgagggtc

SEQ ID NO: 4340870 - DNA, 25 bp, Homo sapien
gctagcggatttcaggttctcatca

SEQ ID NO: 4340871 - DNA, 25 bp, Homo sapien
ttgctagcggatttcaggttctcat

SEQ ID NO: 4340872 - DNA, 25 bp, Homo sapien
gttctcatcaggcttggcattgccc

SEQ ID NO: 4340873 - DNA, 25 bp, Homo sapien
aggttctcatcaggcttggcattgc

SEQ ID NO: 4340874 - DNA, 25 bp, Homo sapien
ggccaggacagagcgaaaatcgacc

SEQ ID NO: 4340875 - DNA, 25 bp, Homo sapien
gctgcaggttggcacggaaatccat

SEQ ID NO: 4340876 - DNA, 25 bp, Homo sapien
gtggcaggttttggcggtggcacct

SEQ ID NO: 4340877 - DNA, 25 bp, Homo sapien
cactgagcgaaaatccggggtggca

SEQ ID NO: 4340878 - DNA, 25 bp, Homo sapien
cgtcttccgatagggtctttgtact

SEQ ID NO: 4340879 - DNA, 25 bp, Homo sapien
aggtcgtcttccgatagggtctttg

SEQ ID NO: 4340880 - DNA, 25 bp, Homo sapien
ccacctcctgctggcggatcgcctc

SEQ ID NO: 4340881 - DNA, 25 bp, Homo sapien
tcctgctggcggatcgcctcctcag

SEQ ID NO: 4340882 - DNA, 25 bp, Homo sapien
ctgcaaccagtgtagggaaaaagga

SEQ ID NO: 4340883 - DNA, 25 bp, Homo sapien
tgcaaccagtgtagggaaaaaggaa

SEQ ID NO: 4340884 - DNA, 25 bp, Homo sapien
ctctggcagagctgttctgtagcat

SEQ ID NO: 4340885 - DNA, 25 bp, Homo sapien
cctggcaactgcattcgccaacccg

SEQ ID NO: 4340886 - DNA, 25 bp, Homo sapien
ggcaactgcattcgccaacccggtt

SEQ ID NO: 4340887 - DNA, 25 bp, Homo sapien
tgtagcatcagtgacacctggcaac

SEQ ID NO: 4340888 - DNA, 25 bp, Homo sapien
caaggagaagccaatcgttgctgtc

SEQ ID NO: 4340889 - DNA, 25 bp, Homo sapien
ctggcacccatttgaagcaaggaga

SEQ ID NO: 4340890 - DNA, 25 bp, Homo sapien
gtgctggtgcaggtgccttcctgac

SEQ ID NO: 4340891 - DNA, 25 bp, Homo sapien
gtgccctcgtgctgtcccaggctgt

SEQ ID NO: 4340892 - DNA, 25 bp, Homo sapien
ggttaggtgcaaacaaatgctcttc

SEQ ID NO: 4340893 - DNA, 25 bp, Homo sapien
tgctcttcttcgatgcttacaccaa

SEQ ID NO: 4340894 - DNA, 25 bp, Homo sapien
gatgtggcacgacctcctatttgta

SEQ ID NO: 4340895 - DNA, 25 bp, Homo sapien
caggacccacagaaggcattctgtc

SEQ ID NO: 4340896 - DNA, 25 bp, Homo sapien
taagagacagggcattttcaaggta

SEQ ID NO: 4340897 - DNA, 25 bp, Homo sapien
aatgtcgactatgggctctccactg

SEQ ID NO: 4340898 - DNA, 25 bp, Homo sapien
tctaataaatagctacccaatgtcg

SEQ ID NO: 4340899 - DNA, 25 bp, Homo sapien
ctggcataggattttaagagacagg

SEQ ID NO: 4340900 - DNA, 25 bp, Homo sapien
aatggggaaaggtagcctccctgtg

SEQ ID NO: 4340901 - DNA, 25 bp, Homo sapien
atggggaaaggtagcctccctgtgg

SEQ ID NO: 4340902 - DNA, 25 bp, Homo sapien
ctggaagtccaagccccacatcagt

SEQ ID NO: 4340903 - DNA, 25 bp, Homo sapien
gctgcccagacccaggttaggggag

SEQ ID NO: 4340904 - DNA, 25 bp, Homo sapien
gaagtccaagccccacatcagtttg

SEQ ID NO: 4340905 - DNA, 25 bp, Homo sapien
catcagtttgtgcttcttctggctg

SEQ ID NO: 4340906 - DNA, 25 bp, Homo sapien
ccagtgcacggtaggaaaggggtca

SEQ ID NO: 4340907 - DNA, 25 bp, Homo sapien
tctttagaaccagggtgaacacgtc

SEQ ID NO: 4340908 - DNA, 25 bp, Homo sapien
tgcacggtaggaaaggggtcaccag

SEQ ID NO: 4340909 - DNA, 25 bp, Homo sapien
aacacgtcctcattctgaagcacct

SEQ ID NO: 4340910 - DNA, 25 bp, Homo sapien
ggctgtcactgagcgaggcttactg

SEQ ID NO: 4340911 - DNA, 25 bp, Homo sapien
cactgagcgaggcttactgatgaac

SEQ ID NO: 4340912 - DNA, 25 bp, Homo sapien
aggcttactgatgaaccagggctgg

SEQ ID NO: 4340913 - DNA, 25 bp, Homo sapien
tgagcgaggcttactgatgaaccag

SEQ ID NO: 4340914 - DNA, 25 bp, Homo sapien
tctctgttcaaagtggaagtcctct

SEQ ID NO: 4340915 - DNA, 25 bp, Homo sapien
ggatctcattcccattgtgcagcca

SEQ ID NO: 4340916 - DNA, 25 bp, Homo sapien
ccgggaacacttcctggatacaaag

SEQ ID NO: 4340917 - DNA, 25 bp, Homo sapien
gtgtcctccgggaacacttcctgga

SEQ ID NO: 4340918 - DNA, 25 bp, Homo sapien
agtcttcaaaaccttccagctacac

SEQ ID NO: 4340919 - DNA, 25 bp, Homo sapien
gtctccatttctttgggtccatcac

SEQ ID NO: 4340920 - DNA, 25 bp, Homo sapien
tacactggccacactatattttcaa

SEQ ID NO: 4340921 - DNA, 25 bp, Homo sapien
gaccatttaatcatgaatccagaaa

SEQ ID NO: 4340922 - DNA, 25 bp, Homo sapien
tgagcgggtcctcggagagcaatac

SEQ ID NO: 4340923 - DNA, 25 bp, Homo sapien
tcaaggatctgagcgggtcctcgga

SEQ ID NO: 4340924 - DNA, 25 bp, Homo sapien
atctgagcgggtcctcggagagcaa

SEQ ID NO: 4340925 - DNA, 25 bp, Homo sapien
tctggtggatcaaggatctgagcgg

SEQ ID NO: 4340926 - DNA, 25 bp, Homo sapien
atccccaagagagagctgcagagac

SEQ ID NO: 4340927 - DNA, 25 bp, Homo sapien
gttaatccccaagagagagctgcag

SEQ ID NO: 4340928 - DNA, 25 bp, Homo sapien
ccccaagagagagctgcagagacag

SEQ ID NO: 4340929 - DNA, 25 bp, Homo sapien
ccaagagagagctgcagagacagac

SEQ ID NO: 4340930 - DNA, 25 bp, Homo sapien
cacttggacagtcatagtgacctgg

SEQ ID NO: 4340931 - DNA, 25 bp, Homo sapien
acttggacagtcatagtgacctggc

SEQ ID NO: 4340932 - DNA, 25 bp, Homo sapien
ctgacacttggacagtcatagtgac

SEQ ID NO: 4340933 - DNA, 25 bp, Homo sapien
tgacacttggacagtcatagtgacc

SEQ ID NO: 4340934 - DNA, 25 bp, Homo sapien
gggagccacaggcagaaggtactca

SEQ ID NO: 4340935 - DNA, 25 bp, Homo sapien
aaggtactcactcttcctgctactc

SEQ ID NO: 4340936 - DNA, 25 bp, Homo sapien
cagaaggtactcactcttcctgcta

SEQ ID NO: 4340937 - DNA, 25 bp, Homo sapien
gccacaggcagaaggtactcactct

SEQ ID NO: 4340938 - DNA, 25 bp, Homo sapien
agcaccgcagccttcgatggagggc

SEQ ID NO: 4340939 - DNA, 25 bp, Homo sapien
tatctcgtttctctcactaggctgc

SEQ ID NO: 4340940 - DNA, 25 bp, Homo sapien
cagcagtcaggagagctggctgcct

SEQ ID NO: 4340941 - DNA, 25 bp, Homo sapien
caaagcaggtgcagttgaagggcat

SEQ ID NO: 4340942 - DNA, 25 bp, Homo sapien
gagaccaggagagacttaactaacg

SEQ ID NO: 4340943 - DNA, 25 bp, Homo sapien
ccttctgatgacaaggccgggatgt

SEQ ID NO: 4340944 - DNA, 25 bp, Homo sapien
taaagcagaacagagacaagccagg

SEQ ID NO: 4340945 - DNA, 25 bp, Homo sapien
gaacgagcctgttctcagaccggca

SEQ ID NO: 4340946 - DNA, 25 bp, Homo sapien
cagttacactgtcatcacatgggtc

SEQ ID NO: 4340947 - DNA, 25 bp, Homo sapien
taggagctcaatcctgcgattctgg

SEQ ID NO: 4340948 - DNA, 25 bp, Homo sapien
tggcatgggcacaaacgtacatgta

SEQ ID NO: 4340949 - DNA, 25 bp, Homo sapien
ggcctggaagccacactctcagtta

SEQ ID NO: 4340950 - DNA, 25 bp, Homo sapien
tgtggagacggtgtgttgccgtgtt

SEQ ID NO: 4340951 - DNA, 25 bp, Homo sapien
cctagccctgttgagggactcttga

SEQ ID NO: 4340952 - DNA, 25 bp, Homo sapien
tgtgcctagccctgttgagggactc

SEQ ID NO: 4340953 - DNA, 25 bp, Homo sapien
tagccctgttgagggactcttgaag

SEQ ID NO: 4340954 - DNA, 25 bp, Homo sapien
tgtatcttgtttaaaggtgggctct

SEQ ID NO: 4340955 - DNA, 25 bp, Homo sapien
caatactgtagcaaagtggatcctt

SEQ ID NO: 4340956 - DNA, 25 bp, Homo sapien
gaagcaggcacgagtgttcatggct

SEQ ID NO: 4340957 - DNA, 25 bp, Homo sapien
cctcctcagtcttggcatttgtaag

SEQ ID NO: 4340958 - DNA, 25 bp, Homo sapien
ctcagtgctagcaccagaggaccca

SEQ ID NO: 4340959 - DNA, 25 bp, Homo sapien
agaggacccagtcatgcacaggagc

SEQ ID NO: 4340960 - DNA, 25 bp, Homo sapien
accagtcacgctgcactcagtgcta

SEQ ID NO: 4340961 - DNA, 25 bp, Homo sapien
tactcatacaacacggagatgttcc

SEQ ID NO: 4340962 - DNA, 25 bp, Homo sapien
taatcagattactggagaccaggct

SEQ ID NO: 4340963 - DNA, 25 bp, Homo sapien
ttcccggggactaagtgcttggctg

SEQ ID NO: 4340964 - DNA, 25 bp, Homo sapien
aagcacttccacgggaactgtcacc

SEQ ID NO: 4340965 - DNA, 25 bp, Homo sapien
tgaatggatgaccatgataatcaga

SEQ ID NO: 4340966 - DNA, 25 bp, Homo sapien
ggtgccatggtcctccggcagggca

SEQ ID NO: 4340967 - DNA, 25 bp, Homo sapien
tgccatggtcctccggcagggcatc

SEQ ID NO: 4340968 - DNA, 25 bp, Homo sapien
atggtcctccggcagggcatcctgg

SEQ ID NO: 4340969 - DNA, 25 bp, Homo sapien
ggtcctccggcagggcatcctggat

SEQ ID NO: 4340970 - DNA, 25 bp, Homo sapien
cgtacggagcactgcagcacaaaat

SEQ ID NO: 4340971 - DNA, 25 bp, Homo sapien
agcacaaaatcctggccctcaataa

SEQ ID NO: 4340972 - DNA, 25 bp, Homo sapien
aataacagcgcagtccttcaggaca

SEQ ID NO: 4340973 - DNA, 25 bp, Homo sapien
cattcagcagccaagtgatccgggg

SEQ ID NO: 4340974 - DNA, 25 bp, Homo sapien
agggggccacctccatcacggcaag

SEQ ID NO: 4340975 - DNA, 25 bp, Homo sapien
ggagggggccacctccatcacggca

SEQ ID NO: 4340976 - DNA, 25 bp, Homo sapien
ctggagaaggagggggccacctcca

SEQ ID NO: 4340977 - DNA, 25 bp, Homo sapien
gagaaggagggggccacctccatca

SEQ ID NO: 4340978 - DNA, 25 bp, Homo sapien
gacacctgggtaccctcggcagcct

SEQ ID NO: 4340979 - DNA, 25 bp, Homo sapien
cacctgggtaccctcggcagcctgc

SEQ ID NO: 4340980 - DNA, 25 bp, Homo sapien
tgtcctggacacctgggtaccctcg

SEQ ID NO: 4340981 - DNA, 25 bp, Homo sapien
ctggacacctgggtaccctcggcag

SEQ ID NO: 4340982 - DNA, 25 bp, Homo sapien
tacagacaaggttactaatttccca

SEQ ID NO: 4340983 - DNA, 25 bp, Homo sapien
gatgctgaagccaagttttacagcc

SEQ ID NO: 4340984 - DNA, 25 bp, Homo sapien
catagttgaactcgatgctgaagcc

SEQ ID NO: 4340985 - DNA, 25 bp, Homo sapien
tactaatttcccatagttgaactcg

SEQ ID NO: 4340986 - DNA, 25 bp, Homo sapien
ggaagcagtgcagctgtatgtccca

SEQ ID NO: 4340987 - DNA, 25 bp, Homo sapien
cactgtccctggtccgggctttcag

SEQ ID NO: 4340988 - DNA, 25 bp, Homo sapien
tccagctacaggacagctggccttg

SEQ ID NO: 4340989 - DNA, 25 bp, Homo sapien
cacttcaggctttggaatcccggaa

SEQ ID NO: 4340990 - DNA, 25 bp, Homo sapien
cttcacatctgaacttgacagtttg

SEQ ID NO: 4340991 - DNA, 25 bp, Homo sapien
ctggtgctcttggttccggctgaac

SEQ ID NO: 4340992 - DNA, 25 bp, Homo sapien
gggattctcctgttagcagccttgc

SEQ ID NO: 4340993 - DNA, 25 bp, Homo sapien
cggctgaactcttgcggcctgcagg

SEQ ID NO: 4340994 - DNA, 25 bp, Homo sapien
atgactccagcttggactcccttgg

SEQ ID NO: 4340995 - DNA, 25 bp, Homo sapien
gccgttctgggcgagtccttgcatg

SEQ ID NO: 4340996 - DNA, 25 bp, Homo sapien
cgttctgggcgagtccttgcatgac

SEQ ID NO: 4340997 - DNA, 25 bp, Homo sapien
tccttgcatgactccagcttggact

SEQ ID NO: 4340998 - DNA, 25 bp, Homo sapien
gattacattggtcacctctttcctg

SEQ ID NO: 4340999 - DNA, 25 bp, Homo sapien
cagcttcgactcctttgagattaca

SEQ ID NO: 4341000 - DNA, 25 bp, Homo sapien
ctggagcagttcttgcttttggctg

SEQ ID NO: 4341001 - DNA, 25 bp, Homo sapien
cagactgtccagcttcgactccttt

SEQ ID NO: 4341002 - DNA, 25 bp, Homo sapien
taagaatgaaactgagccccacaag

SEQ ID NO: 4341003 - DNA, 25 bp, Homo sapien
gatgagtgaacagattccgccctgg

SEQ ID NO: 4341004 - DNA, 25 bp, Homo sapien
ttctcggtaacatccttgcagggca

SEQ ID NO: 4341005 - DNA, 25 bp, Homo sapien
tcatcacaagcacggattccaggga

SEQ ID NO: 4341006 - DNA, 25 bp, Homo sapien
taatagtggctggtgctaccatacc

SEQ ID NO: 4341007 - DNA, 25 bp, Homo sapien
tccctggtgctgaacgtctttggcc

SEQ ID NO: 4341008 - DNA, 25 bp, Homo sapien
taccctgagggcatggaatctgttt

SEQ ID NO: 4341009 - DNA, 25 bp, Homo sapien
cccagccctagagtacattgtcaaa

SEQ ID NO: 4341010 - DNA, 25 bp, Homo sapien
cagggatcgttctgcactagccgtc

SEQ ID NO: 4341011 - DNA, 25 bp, Homo sapien
ggcagggatcgttctgcactagccg

SEQ ID NO: 4341012 - DNA, 25 bp, Homo sapien
ggatcgttctgcactagccgtccac

SEQ ID NO: 4341013 - DNA, 25 bp, Homo sapien
caggcagggatcgttctgcactagc

SEQ ID NO: 4341014 - DNA, 25 bp, Homo sapien
agttcagctgacatcgaggccttcc

SEQ ID NO: 4341015 - DNA, 25 bp, Homo sapien
gtgtacactcccacgtcatcttggt

SEQ ID NO: 4341016 - DNA, 25 bp, Homo sapien
gcatgccgttcttctcagacacaga

SEQ ID NO: 4341017 - DNA, 25 bp, Homo sapien
tggttgactccatggatttccagaa

SEQ ID NO: 4341018 - DNA, 25 bp, Homo sapien
aactcggcccagcttggtagcaaac

SEQ ID NO: 4341019 - DNA, 25 bp, Homo sapien
ccagatgctaggacgggtctccact

SEQ ID NO: 4341020 - DNA, 25 bp, Homo sapien
tagcaaactttggtgggcactcccc

SEQ ID NO: 4341021 - DNA, 25 bp, Homo sapien
gccggccagtgatcttgcaggagaa

SEQ ID NO: 4341022 - DNA, 25 bp, Homo sapien
ttttggaaacaacaggctgaccaag

SEQ ID NO: 4341023 - DNA, 25 bp, Homo sapien
ggttttggaaacaacaggctgacca

SEQ ID NO: 4341024 - DNA, 25 bp, Homo sapien
acaggctgaccaagctgcttcgcaa

SEQ ID NO: 4341025 - DNA, 25 bp, Homo sapien
tgaccaagctgcttcgcaaaacttc

SEQ ID NO: 4341026 - DNA, 25 bp, Homo sapien
tccattcttccacttaaggcctggc

SEQ ID NO: 4341027 - DNA, 25 bp, Homo sapien
ccacttaaggcctggcaagtagcag

SEQ ID NO: 4341028 - DNA, 25 bp, Homo sapien
tcttccacttaaggcctggcaagta

SEQ ID NO: 4341029 - DNA, 25 bp, Homo sapien
cattcttccacttaaggcctggcaa

SEQ ID NO: 4341030 - DNA, 25 bp, Homo sapien
ccggatgccgcaatccagcaggaag

SEQ ID NO: 4341031 - DNA, 25 bp, Homo sapien
aaggctgaaagtcccccggatgccg

SEQ ID NO: 4341032 - DNA, 25 bp, Homo sapien
gggttgcccgtttctgtgccatgtc

SEQ ID NO: 4341033 - DNA, 25 bp, Homo sapien
accactgccattggtggcttcacag

SEQ ID NO: 4341034 - DNA, 25 bp, Homo sapien
cagtgttgaaggagaccgcatccat

SEQ ID NO: 4341035 - DNA, 25 bp, Homo sapien
acaagtgttccagaacttaggctga

SEQ ID NO: 4341036 - DNA, 25 bp, Homo sapien
tgacagtgttgaaggagaccgcatc

SEQ ID NO: 4341037 - DNA, 25 bp, Homo sapien
ccagaacttaggctgacagtgttga

SEQ ID NO: 4341038 - DNA, 25 bp, Homo sapien
tgggatgcacagggtctcacagcca

SEQ ID NO: 4341039 - DNA, 25 bp, Homo sapien
cctgcggttgttctctgggtatttg

SEQ ID NO: 4341040 - DNA, 25 bp, Homo sapien
tctctgggtatttgttggtggcctg

SEQ ID NO: 4341041 - DNA, 25 bp, Homo sapien
caaaccttgcctgcggttgttctct

SEQ ID NO: 4341042 - DNA, 25 bp, Homo sapien
aacaaccctccaatcaggacccatt

SEQ ID NO: 4341043 - DNA, 25 bp, Homo sapien
ctccttgtcgcaaaaggggataatc

SEQ ID NO: 4341044 - DNA, 25 bp, Homo sapien
ccttgtcgcaaaaggggataatcat

SEQ ID NO: 4341045 - DNA, 25 bp, Homo sapien
tccttgtcgcaaaaggggataatca

SEQ ID NO: 4341046 - DNA, 25 bp, Homo sapien
ttctcttaactcataaactgcatac

SEQ ID NO: 4341047 - DNA, 25 bp, Homo sapien
aatattctcttaactcataaactgc

SEQ ID NO: 4341048 - DNA, 25 bp, Homo sapien
taagtaatattctcttaactcataa

SEQ ID NO: 4341049 - DNA, 25 bp, Homo sapien
agtaatattctcttaactcataaac

SEQ ID NO: 4341050 - DNA, 25 bp, Homo sapien
tccccgtgtggcagcaggacaagag

SEQ ID NO: 4341051 - DNA, 25 bp, Homo sapien
aagaggccaagctgcagggcagata

SEQ ID NO: 4341052 - DNA, 25 bp, Homo sapien
agggcagatacagactgaggtctac

SEQ ID NO: 4341053 - DNA, 25 bp, Homo sapien
gatacagactgaggtctactgaagg

SEQ ID NO: 4341054 - DNA, 25 bp, Homo sapien
ggttccgtgacgattgagcacctag

SEQ ID NO: 4341055 - DNA, 25 bp, Homo sapien
gcttctcagtgatgggacggtccct

SEQ ID NO: 4341056 - DNA, 25 bp, Homo sapien
gaggccatcctgagagtgataccag

SEQ ID NO: 4341057 - DNA, 25 bp, Homo sapien
tgggcgcaacttcacggaggaaagc

SEQ ID NO: 4341058 - DNA, 25 bp, Homo sapien
gttgtttcctacactaacaatacac

SEQ ID NO: 4341059 - DNA, 25 bp, Homo sapien
tctgtgttgtttcctacactaacaa

SEQ ID NO: 4341060 - DNA, 25 bp, Homo sapien
cttccctgatgcaaaagtctctgtg

SEQ ID NO: 4341061 - DNA, 25 bp, Homo sapien
tggcccttccctgatgcaaaagtct

SEQ ID NO: 4341062 - DNA, 25 bp, Homo sapien
gctttcgacgtctctctggaatagt

SEQ ID NO: 4341063 - DNA, 25 bp, Homo sapien
gcatttgtctctgcaagacagctgg

SEQ ID NO: 4341064 - DNA, 25 bp, Homo sapien
ctgcatttgtctctgcaagacagct

SEQ ID NO: 4341065 - DNA, 25 bp, Homo sapien
cagctggatgctttcgacgtctctc

SEQ ID NO: 4341066 - DNA, 25 bp, Homo sapien
cctggtagtgcccagagagaaacag

SEQ ID NO: 4341067 - DNA, 25 bp, Homo sapien
ggaacatcactaacatccccaacaa

SEQ ID NO: 4341068 - DNA, 25 bp, Homo sapien
tcaggaacatcactaacatccccaa

SEQ ID NO: 4341069 - DNA, 25 bp, Homo sapien
gagaaacagactcctcaggaacatc

SEQ ID NO: 4341070 - DNA, 25 bp, Homo sapien
ccttctttgatgcagaggttccgag

SEQ ID NO: 4341071 - DNA, 25 bp, Homo sapien
tcgaacttggcggtggctccttctt

SEQ ID NO: 4341072 - DNA, 25 bp, Homo sapien
gaaatgtgtgacgaggcaaccagct

SEQ ID NO: 4341073 - DNA, 25 bp, Homo sapien
caactcttgagggatccacactgag

SEQ ID NO: 4341074 - DNA, 25 bp, Homo sapien
acttcaccaccaccgtactgcagag

SEQ ID NO: 4341075 - DNA, 25 bp, Homo sapien
gtcaggatgcgaggcagccacactt

SEQ ID NO: 4341076 - DNA, 25 bp, Homo sapien
acatgagtcaggatgcgaggcagcc

SEQ ID NO: 4341077 - DNA, 25 bp, Homo sapien
atgagtcaggatgcgaggcagccac

SEQ ID NO: 4341078 - DNA, 25 bp, Homo sapien
tggacatccgaatcggcaatgacat

SEQ ID NO: 4341079 - DNA, 25 bp, Homo sapien
tgtggacatccgaatcggcaatgac

SEQ ID NO: 4341080 - DNA, 25 bp, Homo sapien
gactgtggacatccgaatcggcaat

SEQ ID NO: 4341081 - DNA, 25 bp, Homo sapien
ggcagactgtggacatccgaatcgg

SEQ ID NO: 4341082 - DNA, 25 bp, Homo sapien
accactgtctccttctcaaatacca

SEQ ID NO: 4341083 - DNA, 25 bp, Homo sapien
ccactgtctccttctcaaataccat

SEQ ID NO: 4341084 - DNA, 25 bp, Homo sapien
caccactgtctccttctcaaatacc

SEQ ID NO: 4341085 - DNA, 25 bp, Homo sapien
ttcaaagactgagttgagatctctg

SEQ ID NO: 4341086 - DNA, 25 bp, Homo sapien
atcttcaaagactgagttgagatct

SEQ ID NO: 4341087 - DNA, 25 bp, Homo sapien
gactgagttgagatctctgaagctg

SEQ ID NO: 4341088 - DNA, 25 bp, Homo sapien
actgagttgagatctctgaagctgg

SEQ ID NO: 4341089 - DNA, 25 bp, Homo sapien
ccataataatcctttagattatttc

SEQ ID NO: 4341090 - DNA, 25 bp, Homo sapien
ttcaattactgagtcagagtgcatg

SEQ ID NO: 4341091 - DNA, 25 bp, Homo sapien
gagtgcatgggattttatggctctt

SEQ ID NO: 4341092 - DNA, 25 bp, Homo sapien
caattactgagtcagagtgcatggg

SEQ ID NO: 4341093 - DNA, 25 bp, Homo sapien
aaagctggtagatacagaagcagtc

SEQ ID NO: 4341094 - DNA, 25 bp, Homo sapien
agctggtagatacagaagcagtcat

SEQ ID NO: 4341095 - DNA, 25 bp, Homo sapien
gaaagctggtagatacagaagcagt

SEQ ID NO: 4341096 - DNA, 25 bp, Homo sapien
gtggaaagctggtagatacagaagc

SEQ ID NO: 4341097 - DNA, 25 bp, Homo sapien
tctgggcacctagaaagacacacag

SEQ ID NO: 4341098 - DNA, 25 bp, Homo sapien
tctcttctgggcacctagaaagaca

SEQ ID NO: 4341099 - DNA, 25 bp, Homo sapien
gcagtctcttctgggcacctagaaa

SEQ ID NO: 4341100 - DNA, 25 bp, Homo sapien
gggcagcagtctcttctgggcacct

SEQ ID NO: 4341101 - DNA, 25 bp, Homo sapien
aaaggcgtcctgaagctctcggctg

SEQ ID NO: 4341102 - DNA, 25 bp, Homo sapien
gggaagctcctgaagttgctctgaa

SEQ ID NO: 4341103 - DNA, 25 bp, Homo sapien
gtcttctctgttgtttgttgtggca

SEQ ID NO: 4341104 - DNA, 25 bp, Homo sapien
gacaggaaaggcgtcctgaagctct

SEQ ID NO: 4341105 - DNA, 25 bp, Homo sapien
ctgcagcagaggcagccgggagcca

SEQ ID NO: 4341106 - DNA, 25 bp, Homo sapien
tgcagcagaggcagccgggagccac

SEQ ID NO: 4341107 - DNA, 25 bp, Homo sapien
ataagagccccattccagagagagt

SEQ ID NO: 4341108 - DNA, 25 bp, Homo sapien
agagagagtcttgccccatcagaag

SEQ ID NO: 4341109 - DNA, 25 bp, Homo sapien
ctgtaggtcataagagccccattcc

SEQ ID NO: 4341110 - DNA, 25 bp, Homo sapien
ccagagagagtcttgccccatcaga

SEQ ID NO: 4341111 - DNA, 25 bp, Homo sapien
ggtgtcctctttagtcacataagcc

SEQ ID NO: 4341112 - DNA, 25 bp, Homo sapien
ctgaggtgtcctctttagtcacata

SEQ ID NO: 4341113 - DNA, 25 bp, Homo sapien
tcctctttagtcacataagcctctc

SEQ ID NO: 4341114 - DNA, 25 bp, Homo sapien
gaggtgtcctctttagtcacataag

SEQ ID NO: 4341115 - DNA, 25 bp, Homo sapien
gccctagagatttgggaccttctgc

SEQ ID NO: 4341116 - DNA, 25 bp, Homo sapien
tgccctagagatttgggaccttctg

SEQ ID NO: 4341117 - DNA, 25 bp, Homo sapien
cttatgtttatcacttgcaatagtg

SEQ ID NO: 4341118 - DNA, 25 bp, Homo sapien
gcttgtcatgcttatgtttatcact

SEQ ID NO: 4341119 - DNA, 25 bp, Homo sapien
tgcccagatcctgtggtattgtcct

SEQ ID NO: 4341120 - DNA, 25 bp, Homo sapien
ctatctgcttgtcatgcttatgttt

SEQ ID NO: 4341121 - DNA, 25 bp, Homo sapien
cttctcccctacttgttcttccaag

SEQ ID NO: 4341122 - DNA, 25 bp, Homo sapien
ctggcccgaattggtttctgttaat

SEQ ID NO: 4341123 - DNA, 25 bp, Homo sapien
cttcagctggcccgaattggtttct

SEQ ID NO: 4341124 - DNA, 25 bp, Homo sapien
ctcttcagctggcccgaattggttt

SEQ ID NO: 4341125 - DNA, 25 bp, Homo sapien
agctggcccgaattggtttctgtta

SEQ ID NO: 4341126 - DNA, 25 bp, Homo sapien
gaacagcactcggtatccaggggcc

SEQ ID NO: 4341127 - DNA, 25 bp, Homo sapien
ggaaaggggaacagcactcggtatc

SEQ ID NO: 4341128 - DNA, 25 bp, Homo sapien
ccacagcctcagatgacattccatg

SEQ ID NO: 4341129 - DNA, 25 bp, Homo sapien
cctcagatgacattccatgtagtct

SEQ ID NO: 4341130 - DNA, 25 bp, Homo sapien
tggcccgcagtgcaaatacggaggt

SEQ ID NO: 4341131 - DNA, 25 bp, Homo sapien
agcccatgaggcagcaactgttgct

SEQ ID NO: 4341132 - DNA, 25 bp, Homo sapien
atacggaggtccacccaccttgagt

SEQ ID NO: 4341133 - DNA, 25 bp, Homo sapien
cacacaccaggtgcatgcaacaagg

SEQ ID NO: 4341134 - DNA, 25 bp, Homo sapien
caccggcgctcggcggggcgccccg

SEQ ID NO: 4341135 - DNA, 25 bp, Homo sapien
cggggcaccggcgctcggcggggcg

SEQ ID NO: 4341136 - DNA, 25 bp, Homo sapien
cccggccgcaggcgcacagcgcggg

SEQ ID NO: 4341137 - DNA, 25 bp, Homo sapien
ggcaccggcgctcggcggggcgccc

SEQ ID NO: 4341138 - DNA, 25 bp, Homo sapien
gagctcgctcagcgccctgctgccg

SEQ ID NO: 4341139 - DNA, 25 bp, Homo sapien
tccgagctcgctcagcgccctgctg

SEQ ID NO: 4341140 - DNA, 25 bp, Homo sapien
cgagctcgctcagcgccctgctgcc

SEQ ID NO: 4341141 - DNA, 25 bp, Homo sapien
ctccgagctcgctcagcgccctgct

SEQ ID NO: 4341142 - DNA, 25 bp, Homo sapien
tgaggcaattcagcatgtttctctg

SEQ ID NO: 4341143 - DNA, 25 bp, Homo sapien
taggaaaggcacgatgaatacctgc

SEQ ID NO: 4341144 - DNA, 25 bp, Homo sapien
tctgtattgacagcaagttggcagc

SEQ ID NO: 4341145 - DNA, 25 bp, Homo sapien
ttttgaggttaacagccgtcgatgc

SEQ ID NO: 4341146 - DNA, 25 bp, Homo sapien
ttgttggattcaaactacttggtgt

SEQ ID NO: 4341147 - DNA, 25 bp, Homo sapien
ggattcaaactacttggtgtcttgg

SEQ ID NO: 4341148 - DNA, 25 bp, Homo sapien
attcaaactacttggtgtcttggtc

SEQ ID NO: 4341149 - DNA, 25 bp, Homo sapien
gttggattcaaactacttggtgtct

SEQ ID NO: 4341150 - DNA, 25 bp, Homo sapien
taaagttcctaggattattattatg

SEQ ID NO: 4341151 - DNA, 25 bp, Homo sapien
aagttcctaggattattattatgtt

SEQ ID NO: 4341152 - DNA, 25 bp, Homo sapien
aaagttcctaggattattattatgt

SEQ ID NO: 4341153 - DNA, 25 bp, Homo sapien
cccagattccaaggaggtgactgaa

SEQ ID NO: 4341154 - DNA, 25 bp, Homo sapien
tcaagctgcagaaccccagattcca

SEQ ID NO: 4341155 - DNA, 25 bp, Homo sapien
aaccccagattccaaggaggtgact

SEQ ID NO: 4341156 - DNA, 25 bp, Homo sapien
tgactgaagttgaagtgggtgctgg

SEQ ID NO: 4341157 - DNA, 25 bp, Homo sapien
ttgtgtaagactttgcagaacattt

SEQ ID NO: 4341158 - DNA, 25 bp, Homo sapien
tactgagcggctgacaacatttctt

SEQ ID NO: 4341159 - DNA, 25 bp, Homo sapien
tctcttgctccaaaagggactgagt

SEQ ID NO: 4341160 - DNA, 25 bp, Homo sapien
tggccgtgtgctccctactgagcgg

SEQ ID NO: 4341161 - DNA, 25 bp, Homo sapien
ttgaacaaacgtgtaagtctcttgc

SEQ ID NO: 4341162 - DNA, 25 bp, Homo sapien
ttaaagagttgtggcctattacctc

SEQ ID NO: 4341163 - DNA, 25 bp, Homo sapien
gctggctccttcaaacgctgtagca

SEQ ID NO: 4341164 - DNA, 25 bp, Homo sapien
cgctgtagcactaacacctaaaaaa

SEQ ID NO: 4341165 - DNA, 25 bp, Homo sapien
gatgctaatggactcttgtgtgaaa

SEQ ID NO: 4341166 - DNA, 25 bp, Homo sapien
gcttcctaagagttaaaacgtgctg

SEQ ID NO: 4341167 - DNA, 25 bp, Homo sapien
gatgatactgagctaagaagtcctg

SEQ ID NO: 4341168 - DNA, 25 bp, Homo sapien
gacaattagagtaggcaggtgacct

SEQ ID NO: 4341169 - DNA, 25 bp, Homo sapien
gcagagagaccaacctacttcatat

SEQ ID NO: 4341170 - DNA, 25 bp, Homo sapien
gcaattgtgaacttaagatgacttg

SEQ ID NO: 4341171 - DNA, 25 bp, Homo sapien
gaactctaattgctaagtactgaaa

SEQ ID NO: 4341172 - DNA, 25 bp, Homo sapien
aacattacttacaataatttcctag

SEQ ID NO: 4341173 - DNA, 25 bp, Homo sapien
gtacccttaatccagcagatacatc

SEQ ID NO: 4341174 - DNA, 25 bp, Homo sapien
catttattacttgtacaatatatta

SEQ ID NO: 4341175 - DNA, 25 bp, Homo sapien
attcaatatagccaagttctagttt

SEQ ID NO: 4341176 - DNA, 25 bp, Homo sapien
acattcaatatagccaagttctagt

SEQ ID NO: 4341177 - DNA, 25 bp, Homo sapien
acacattcaatatagccaagttcta

SEQ ID NO: 4341178 - DNA, 25 bp, Homo sapien
gaagtcttgttcatcacgagaagtg

SEQ ID NO: 4341179 - DNA, 25 bp, Homo sapien
gtctagctatgttggcatctaatgc

SEQ ID NO: 4341180 - DNA, 25 bp, Homo sapien
gaagaccagtccttaaagacttctg

SEQ ID NO: 4341181 - DNA, 25 bp, Homo sapien
cgttgaaaacgaagagatgctccag

SEQ ID NO: 4341182 - DNA, 25 bp, Homo sapien
tgctaagacaacctgatgggccatg

SEQ ID NO: 4341183 - DNA, 25 bp, Homo sapien
caagtcagaagtgaaaacactacca

SEQ ID NO: 4341184 - DNA, 25 bp, Homo sapien
aaggctgttgctaagacaacctgat

SEQ ID NO: 4341185 - DNA, 25 bp, Homo sapien
ctaccatcacagacagtattgcctt

SEQ ID NO: 4341186 - DNA, 25 bp, Homo sapien
agtttttcaggtgcatcttctgctt

SEQ ID NO: 4341187 - DNA, 25 bp, Homo sapien
aagtttttcaggtgcatcttctgct

SEQ ID NO: 4341188 - DNA, 25 bp, Homo sapien
aaagtttttcaggtgcatcttctgc

SEQ ID NO: 4341189 - DNA, 25 bp, Homo sapien
ttcaggagtgcttctagcaaaagga

SEQ ID NO: 4341190 - DNA, 25 bp, Homo sapien
gaagaggaacagattacaggtgtac

SEQ ID NO: 4341191 - DNA, 25 bp, Homo sapien
gcaagtccgctgttgctgactagct

SEQ ID NO: 4341192 - DNA, 25 bp, Homo sapien
ttgtattatccaaattatgctcatc

SEQ ID NO: 4341193 - DNA, 25 bp, Homo sapien
cattatggaagtgtgagcaggagct

SEQ ID NO: 4341194 - DNA, 25 bp, Homo sapien
cctagtgttactattttgagggcct

SEQ ID NO: 4341195 - DNA, 25 bp, Homo sapien
gagcactgtccacactaagatcgga

SEQ ID NO: 4341196 - DNA, 25 bp, Homo sapien
ttattcccaggcttgcagcgagcac

SEQ ID NO: 4341197 - DNA, 25 bp, Homo sapien
aacaagcaactagaagcacaaaatc

SEQ ID NO: 4341198 - DNA, 25 bp, Homo sapien
atcacagaacgtgctttggcaagag

SEQ ID NO: 4341199 - DNA, 25 bp, Homo sapien
gaagaatccagaacactaattatta

SEQ ID NO: 4341200 - DNA, 25 bp, Homo sapien
gagaagtgtctggttcttaatatga

SEQ ID NO: 4341201 - DNA, 25 bp, Homo sapien
tgagcagcactacaaattgagcccc

SEQ ID NO: 4341202 - DNA, 25 bp, Homo sapien
tataagcaacagctaggtaccagaa

SEQ ID NO: 4341203 - DNA, 25 bp, Homo sapien
tgatggcagcctttattagtagtcc

SEQ ID NO: 4341204 - DNA, 25 bp, Homo sapien
cactaggttcattcttgagcagcac

SEQ ID NO: 4341205 - DNA, 25 bp, Homo sapien
tacacagaggttgtacccaaagata

SEQ ID NO: 4341206 - DNA, 25 bp, Homo sapien
aatatcctactggtctacacagagg

SEQ ID NO: 4341207 - DNA, 25 bp, Homo sapien
taatacccactgttagagaagcctg

SEQ ID NO: 4341208 - DNA, 25 bp, Homo sapien
cagtggtataactcttctggagagg

SEQ ID NO: 4341209 - DNA, 25 bp, Homo sapien
ccagagggctcaatggtgttgctat

SEQ ID NO: 4341210 - DNA, 25 bp, Homo sapien
tgaaagaggctgacttacccaagat

SEQ ID NO: 4341211 - DNA, 25 bp, Homo sapien
catgagggcttaccatgctaagtgc

SEQ ID NO: 4341212 - DNA, 25 bp, Homo sapien
cccaagatcatatggcatgagggct

SEQ ID NO: 4341213 - DNA, 25 bp, Homo sapien
taattctcttagtcgagtcacctca

SEQ ID NO: 4341214 - DNA, 25 bp, Homo sapien
tcacctcagcatcacgctgacgtaa

SEQ ID NO: 4341215 - DNA, 25 bp, Homo sapien
cacgctgacgtaatgttatccccaa

SEQ ID NO: 4341216 - DNA, 25 bp, Homo sapien
gacgtaatgttatccccaatatctg

SEQ ID NO: 4341217 - DNA, 25 bp, Homo sapien
agtaattcctggctctttagtgact

SEQ ID NO: 4341218 - DNA, 25 bp, Homo sapien
gcagtgacatattcaatgactgaag

SEQ ID NO: 4341219 - DNA, 25 bp, Homo sapien
gtgacatattcaatgactgaagaga

SEQ ID NO: 4341220 - DNA, 25 bp, Homo sapien
cctccaattgattttgcagtgacat

SEQ ID NO: 4341221 - DNA, 25 bp, Homo sapien
cagagatgaacaacacagacgtggc

SEQ ID NO: 4341222 - DNA, 25 bp, Homo sapien
tacatgctcagcgaatgcttcctat

SEQ ID NO: 4341223 - DNA, 25 bp, Homo sapien
tcatggcgataaaagtatatggcac

SEQ ID NO: 4341224 - DNA, 25 bp, Homo sapien
taacgattaattgcatgagcagttc

SEQ ID NO: 4341225 - DNA, 25 bp, Homo sapien
tctttatcaacatttccggagccac

SEQ ID NO: 4341226 - DNA, 25 bp, Homo sapien
ctttatcaacatttccggagccaca

SEQ ID NO: 4341227 - DNA, 25 bp, Homo sapien
tttatcaacatttccggagccacaa

SEQ ID NO: 4341228 - DNA, 25 bp, Homo sapien
ttctctgagttgctggttcaaaatt

SEQ ID NO: 4341229 - DNA, 25 bp, Homo sapien
ttgctggttcaaaattctcaactgc

SEQ ID NO: 4341230 - DNA, 25 bp, Homo sapien
accagatggtttttgagttttctgt

SEQ ID NO: 4341231 - DNA, 25 bp, Homo sapien
ggttgcaatccacagcaccagatgg

SEQ ID NO: 4341232 - DNA, 25 bp, Homo sapien
tacaagcactgactgctatcagaca

SEQ ID NO: 4341233 - DNA, 25 bp, Homo sapien
tatcaactagaatacctacaagcac

SEQ ID NO: 4341234 - DNA, 25 bp, Homo sapien
tcttcatcactgtagttaatcatct

SEQ ID NO: 4341235 - DNA, 25 bp, Homo sapien
tatctgcctgatgtttgtcatatgc

SEQ ID NO: 4341236 - DNA, 25 bp, Homo sapien
tactgacgtgaaaagatctctgaga

SEQ ID NO: 4341237 - DNA, 25 bp, Homo sapien
aaagcgagaggtccacttgtactga

SEQ ID NO: 4341238 - DNA, 25 bp, Homo sapien
catacaaggatgttcacaacagcaa

SEQ ID NO: 4341239 - DNA, 25 bp, Homo sapien
cctttacaacagaagctttcctcga

SEQ ID NO: 4341240 - DNA, 25 bp, Homo sapien
ggctagaataaagtggtacaaccag

SEQ ID NO: 4341241 - DNA, 25 bp, Homo sapien
tagaataaagtggtacaaccagaaa

SEQ ID NO: 4341242 - DNA, 25 bp, Homo sapien
gctagaataaagtggtacaaccaga

SEQ ID NO: 4341243 - DNA, 25 bp, Homo sapien
tttcccaggctagaataaagtggta

SEQ ID NO: 4341244 - DNA, 25 bp, Homo sapien
aatttgtgtagatccttgcaggtca

SEQ ID NO: 4341245 - DNA, 25 bp, Homo sapien
tgtactctaaaaccaaattgcctgg

SEQ ID NO: 4341246 - DNA, 25 bp, Homo sapien
cacatatcgaggacaatagtctggc

SEQ ID NO: 4341247 - DNA, 25 bp, Homo sapien
tctgtaaatgcgagtaaatagcacc

SEQ ID NO: 4341248 - DNA, 25 bp, Homo sapien
aacactctctcagggcacattcgca

SEQ ID NO: 4341249 - DNA, 25 bp, Homo sapien
cacattcgcattgcagtgctgcaga

SEQ ID NO: 4341250 - DNA, 25 bp, Homo sapien
tccaacaagttaagatgaccaaaag

SEQ ID NO: 4341251 - DNA, 25 bp, Homo sapien
gaagcacctgatatgtactccaata

SEQ ID NO: 4341252 - DNA, 25 bp, Homo sapien
tgtgtgtgtatgtttattactgcat

SEQ ID NO: 4341253 - DNA, 25 bp, Homo sapien
gtgtgtgtgtatgtttattactgca

SEQ ID NO: 4341254 - DNA, 25 bp, Homo sapien
ggtgtgtgtgtatgtttattactgc

SEQ ID NO: 4341255 - DNA, 25 bp, Homo sapien
acagcccttgttatttgttaagcag

SEQ ID NO: 4341256 - DNA, 25 bp, Homo sapien
cacagcccttgttatttgttaagca

SEQ ID NO: 4341257 - DNA, 25 bp, Homo sapien
ccagacctttctattaggcagggcc

SEQ ID NO: 4341258 - DNA, 25 bp, Homo sapien
tggtagcgaaacgatcacttctggg

SEQ ID NO: 4341259 - DNA, 25 bp, Homo sapien
gcagggccatgtgccttgtttcagc

SEQ ID NO: 4341260 - DNA, 25 bp, Homo sapien
cctataaaatataagtggtagcgaa

SEQ ID NO: 4341261 - DNA, 25 bp, Homo sapien
gaagtcctaggtatgtcatttgcac

SEQ ID NO: 4341262 - DNA, 25 bp, Homo sapien
gaaacttgctgtgctatgcaaatga

SEQ ID NO: 4341263 - DNA, 25 bp, Homo sapien
tttctgcctacacactaccaagtga

SEQ ID NO: 4341264 - DNA, 25 bp, Homo sapien
gccaggagacatctttgcatacaga

SEQ ID NO: 4341265 - DNA, 25 bp, Homo sapien
ttgcatggccagtgctatctcaact

SEQ ID NO: 4341266 - DNA, 25 bp, Homo sapien
tcaacttgaatatctgtgtttccac

SEQ ID NO: 4341267 - DNA, 25 bp, Homo sapien
cttcgtaactgagcattctcacttc

SEQ ID NO: 4341268 - DNA, 25 bp, Homo sapien
gtttccacttactgttggaagtaca

SEQ ID NO: 4341269 - DNA, 25 bp, Homo sapien
ctcagggagttaatcatttataggc

SEQ ID NO: 4341270 - DNA, 25 bp, Homo sapien
tacacacttgcaagcaaaagactga

SEQ ID NO: 4341271 - DNA, 25 bp, Homo sapien
gaagaataatcagtctactcaggga

SEQ ID NO: 4341272 - DNA, 25 bp, Homo sapien
ctacagaaagttataagtcccatct

SEQ ID NO: 4341273 - DNA, 25 bp, Homo sapien
ggctacatggaactccaggactggt

SEQ ID NO: 4341274 - DNA, 25 bp, Homo sapien
gggccttgagctctcccaacaaata

SEQ ID NO: 4341275 - DNA, 25 bp, Homo sapien
ccgtagaacatcagtacaggttgca

SEQ ID NO: 4341276 - DNA, 25 bp, Homo sapien
ttcattagtggccaagaaagctggt

SEQ ID NO: 4341277 - DNA, 25 bp, Homo sapien
aaactgactgttgccatcagtttga

SEQ ID NO: 4341278 - DNA, 25 bp, Homo sapien
tgatgcaaactgactgttgccatca

SEQ ID NO: 4341279 - DNA, 25 bp, Homo sapien
tgcaaactgactgttgccatcagtt

SEQ ID NO: 4341280 - DNA, 25 bp, Homo sapien
cttgtgatgcaaactgactgttgcc

SEQ ID NO: 4341281 - DNA, 25 bp, Homo sapien
catttgtaggtattaattacaacaa

SEQ ID NO: 4341282 - DNA, 25 bp, Homo sapien
taaaaacaagtcttcagaagtatga

SEQ ID NO: 4341283 - DNA, 25 bp, Homo sapien
cagaagtatgagcactcatttgtag

SEQ ID NO: 4341284 - DNA, 25 bp, Homo sapien
tcatttgtaggtattaattacaaca

SEQ ID NO: 4341285 - DNA, 25 bp, Homo sapien
taagtaacagccagtttttcactgc

SEQ ID NO: 4341286 - DNA, 25 bp, Homo sapien
cccaaagtggactaatttttgatgc

SEQ ID NO: 4341287 - DNA, 25 bp, Homo sapien
tactatagtctgtgtaactactccc

SEQ ID NO: 4341288 - DNA, 25 bp, Homo sapien
agtagttaccactatattttgagga

SEQ ID NO: 4341289 - DNA, 25 bp, Homo sapien
tatataagactgtattgttgactta

SEQ ID NO: 4341290 - DNA, 25 bp, Homo sapien
catatagtagttacacagactatgg

SEQ ID NO: 4341291 - DNA, 25 bp, Homo sapien
gttactactcctaaccatatagtag

SEQ ID NO: 4341292 - DNA, 25 bp, Homo sapien
aactcaaatatatggttactactcc

SEQ ID NO: 4341293 - DNA, 25 bp, Homo sapien
cttgggtggtcagtatggttgattt

SEQ ID NO: 4341294 - DNA, 25 bp, Homo sapien
gattaaacgattggaaagaactcta

SEQ ID NO: 4341295 - DNA, 25 bp, Homo sapien
acagaggattaaacgattggaaaga

SEQ ID NO: 4341296 - DNA, 25 bp, Homo sapien
gcagttgtacttgggtggtcagtat

SEQ ID NO: 4341297 - DNA, 25 bp, Homo sapien
tagttacttatgtagtataagaact

SEQ ID NO: 4341298 - DNA, 25 bp, Homo sapien
tatgtagtataagaactgtacgcac

SEQ ID NO: 4341299 - DNA, 25 bp, Homo sapien
tcctagtgcattaagttataagcaa

SEQ ID NO: 4341300 - DNA, 25 bp, Homo sapien
cctagtgcattaagttataagcaat

SEQ ID NO: 4341301 - DNA, 25 bp, Homo sapien
agggtggccgctgaagtgaccagac

SEQ ID NO: 4341302 - DNA, 25 bp, Homo sapien
gtggaggtacataagccataactag

SEQ ID NO: 4341303 - DNA, 25 bp, Homo sapien
cataagccataactagaatgaggag

SEQ ID NO: 4341304 - DNA, 25 bp, Homo sapien
ctagaatgaggagttgcctgagatt

SEQ ID NO: 4341305 - DNA, 25 bp, Homo sapien
cacgatttttaaacagcattcgtac

SEQ ID NO: 4341306 - DNA, 25 bp, Homo sapien
atttttaaacagcattcgtactcac

SEQ ID NO: 4341307 - DNA, 25 bp, Homo sapien
actcacgatttttaaacagcattcg

SEQ ID NO: 4341308 - DNA, 25 bp, Homo sapien
cgatttttaaacagcattcgtactc

SEQ ID NO: 4341309 - DNA, 25 bp, Homo sapien
ctgcacgtgctcacagagggcttgg

SEQ ID NO: 4341310 - DNA, 25 bp, Homo sapien
ggaattccattagggatgttctttg

SEQ ID NO: 4341311 - DNA, 25 bp, Homo sapien
gagggagcatggcatggtacagcag

SEQ ID NO: 4341312 - DNA, 25 bp, Homo sapien
gcttggtatattatgggtgaataca

SEQ ID NO: 4341313 - DNA, 25 bp, Homo sapien
ctagcagaagcttcattaggtatct

SEQ ID NO: 4341314 - DNA, 25 bp, Homo sapien
tctataatgatcttgcaatgaccag

SEQ ID NO: 4341315 - DNA, 25 bp, Homo sapien
tgcaatgaccagttttgctctaggt

SEQ ID NO: 4341316 - DNA, 25 bp, Homo sapien
tctaggtctgatgtgtctctttcac

SEQ ID NO: 4341317 - DNA, 25 bp, Homo sapien
tcacccctactaaagaaaatcatct

SEQ ID NO: 4341318 - DNA, 25 bp, Homo sapien
cagaagtagtccaatccatcacata

SEQ ID NO: 4341319 - DNA, 25 bp, Homo sapien
gaagaaagggctctcagaagtagtc

SEQ ID NO: 4341320 - DNA, 25 bp, Homo sapien
tagaagggctttaccactatcaccc

SEQ ID NO: 4341321 - DNA, 25 bp, Homo sapien
tatccctaaagtccagtcaaactcc

SEQ ID NO: 4341322 - DNA, 25 bp, Homo sapien
tcaggcaggccaatttagttaccca

SEQ ID NO: 4341323 - DNA, 25 bp, Homo sapien
caaaatcttggcctggcatttaaag

SEQ ID NO: 4341324 - DNA, 25 bp, Homo sapien
gttctcaagggaaaatgcaatagga

SEQ ID NO: 4341325 - DNA, 25 bp, Homo sapien
tcttcttccatgaagccttttccaa

SEQ ID NO: 4341326 - DNA, 25 bp, Homo sapien
catgaagccttttccaatccaatca

SEQ ID NO: 4341327 - DNA, 25 bp, Homo sapien
ttccatgaagccttttccaatccaa

SEQ ID NO: 4341328 - DNA, 25 bp, Homo sapien
caaggctcatctgagttttcttctt

SEQ ID NO: 4341329 - DNA, 25 bp, Homo sapien
taaggctgactgaaagtggtcaaac

SEQ ID NO: 4341330 - DNA, 25 bp, Homo sapien
caagggcgcacagtgttcaatcaca

SEQ ID NO: 4341331 - DNA, 25 bp, Homo sapien
taaactgtggtatactcgcaggctg

SEQ ID NO: 4341332 - DNA, 25 bp, Homo sapien
caccaaatagccatgaatagcagaa

SEQ ID NO: 4341333 - DNA, 25 bp, Homo sapien
tatgattacttcacttggagacggt

SEQ ID NO: 4341334 - DNA, 25 bp, Homo sapien
tattggttaacagctgccaaccaca

SEQ ID NO: 4341335 - DNA, 25 bp, Homo sapien
catgctgtaatagatcgcttaaagt

SEQ ID NO: 4341336 - DNA, 25 bp, Homo sapien
atagaaagtacataaggaggccact

SEQ ID NO: 4341337 - DNA, 25 bp, Homo sapien
tgccctggataagaaataacctgcc

SEQ ID NO: 4341338 - DNA, 25 bp, Homo sapien
tgacggattccccaagctcagtgtt

SEQ ID NO: 4341339 - DNA, 25 bp, Homo sapien
gaaaaggtaggttcacatgcccaag

SEQ ID NO: 4341340 - DNA, 25 bp, Homo sapien
tgttttctaggcctccaagggacaa

SEQ ID NO: 4341341 - DNA, 25 bp, Homo sapien
ttcttttttgatccgtatcttttgc

SEQ ID NO: 4341342 - DNA, 25 bp, Homo sapien
ttctggactaccaaaggaatagtat

SEQ ID NO: 4341343 - DNA, 25 bp, Homo sapien
tttgctttctaaaggtctagaatta

SEQ ID NO: 4341344 - DNA, 25 bp, Homo sapien
tttttgatccgtatcttttgctttc

SEQ ID NO: 4341345 - DNA, 25 bp, Homo sapien
tgagataaggtgatcagcaaagaat

SEQ ID NO: 4341346 - DNA, 25 bp, Homo sapien
aaaataatgacttgagataaggtga

SEQ ID NO: 4341347 - DNA, 25 bp, Homo sapien
caaaataatgacttgagataaggtg

SEQ ID NO: 4341348 - DNA, 25 bp, Homo sapien
gataaggtgatcagcaaagaattaa

SEQ ID NO: 4341349 - DNA, 25 bp, Homo sapien
aagaagcacaaccatcaagcccgtg

SEQ ID NO: 4341350 - DNA, 25 bp, Homo sapien
caaaatgtccctcagcaaagaagca

SEQ ID NO: 4341351 - DNA, 25 bp, Homo sapien
accatcaagcccgtgtacagtttca

SEQ ID NO: 4341352 - DNA, 25 bp, Homo sapien
aaatgtccctcagcaaagaagcaca

SEQ ID NO: 4341353 - DNA, 25 bp, Homo sapien
catttgtatatgactgttagtgtag

SEQ ID NO: 4341354 - DNA, 25 bp, Homo sapien
agcaacagacttcatacttccttag

SEQ ID NO: 4341355 - DNA, 25 bp, Homo sapien
gtgtattgtatctattcaatcttac

SEQ ID NO: 4341356 - DNA, 25 bp, Homo sapien
tccttagagcaattaatactttgca

SEQ ID NO: 4341357 - DNA, 25 bp, Homo sapien
atcagaatggatggaatagccagaa

SEQ ID NO: 4341358 - DNA, 25 bp, Homo sapien
gaatcagaatggatggaatagccag

SEQ ID NO: 4341359 - DNA, 25 bp, Homo sapien
aatcagaatggatggaatagccaga

SEQ ID NO: 4341360 - DNA, 25 bp, Homo sapien
cagagcttgtgatggtagaggccta

SEQ ID NO: 4341361 - DNA, 25 bp, Homo sapien
tccttgaaatctgaagttgtaaacg

SEQ ID NO: 4341362 - DNA, 25 bp, Homo sapien
cacattctgaagatcagaaagactg

SEQ ID NO: 4341363 - DNA, 25 bp, Homo sapien
caagaaagcttgtccaaccatgtac

SEQ ID NO: 4341364 - DNA, 25 bp, Homo sapien
tttgttaatttagcaggtccagtgt

SEQ ID NO: 4341365 - DNA, 25 bp, Homo sapien
ttccatttgttaatttagcaggtcc

SEQ ID NO: 4341366 - DNA, 25 bp, Homo sapien
ccatttgttaatttagcaggtccag

SEQ ID NO: 4341367 - DNA, 25 bp, Homo sapien
tgttaatttagcaggtccagtgtgc

SEQ ID NO: 4341368 - DNA, 25 bp, Homo sapien
gaccaggaagtgagaactctaccct

SEQ ID NO: 4341369 - DNA, 25 bp, Homo sapien
tagaatgcctgattagaccaggaag

SEQ ID NO: 4341370 - DNA, 25 bp, Homo sapien
cccaaaatatgttctatagtcccaa

SEQ ID NO: 4341371 - DNA, 25 bp, Homo sapien
gaagtaactactacactaagttcag

SEQ ID NO: 4341372 - DNA, 25 bp, Homo sapien
taatactataccctggatcgagtcc

SEQ ID NO: 4341373 - DNA, 25 bp, Homo sapien
gaatatgtgctccatccttctaaga

SEQ ID NO: 4341374 - DNA, 25 bp, Homo sapien
tgaaataatagtacaaagatgccct

SEQ ID NO: 4341375 - DNA, 25 bp, Homo sapien
cactgtctgaggtatatgtctggca

SEQ ID NO: 4341376 - DNA, 25 bp, Homo sapien
tgtcatcctaacaggggttaggtga

SEQ ID NO: 4341377 - DNA, 25 bp, Homo sapien
tttaatgtcatcctaacaggggtta

SEQ ID NO: 4341378 - DNA, 25 bp, Homo sapien
aatgtcatcctaacaggggttaggt

SEQ ID NO: 4341379 - DNA, 25 bp, Homo sapien
caggggttaggtgatagctcattgt

SEQ ID NO: 4341380 - DNA, 25 bp, Homo sapien
agaaacatctagagaccgagcggcc

SEQ ID NO: 4341381 - DNA, 25 bp, Homo sapien
gactagggctacgacgatttaaaca

SEQ ID NO: 4341382 - DNA, 25 bp, Homo sapien
gaggttaagtcactcgacgcagcgg

SEQ ID NO: 4341383 - DNA, 25 bp, Homo sapien
gactctcaatctgcaggtgactgaa

SEQ ID NO: 4341384 - DNA, 25 bp, Homo sapien
tggcccggtcgagctccagacctga

SEQ ID NO: 4341385 - DNA, 25 bp, Homo sapien
gctccagacctgaccatctctcgcc

SEQ ID NO: 4341386 - DNA, 25 bp, Homo sapien
cagacctgaccatctctcgccgcct

SEQ ID NO: 4341387 - DNA, 25 bp, Homo sapien
ctggcccggtcgagctccagacctg

SEQ ID NO: 4341388 - DNA, 25 bp, Homo sapien
tgggagaagccaataaacggcgaac

SEQ ID NO: 4341389 - DNA, 25 bp, Homo sapien
gtacgcaatagacccctccaagctt

SEQ ID NO: 4341390 - DNA, 25 bp, Homo sapien
aaggatcccgccgaatgccgcgctt

SEQ ID NO: 4341391 - DNA, 25 bp, Homo sapien
agcgccttgggcgtacgcaatagac

SEQ ID NO: 4341392 - DNA, 25 bp, Homo sapien
ttctttggccacagtgaaagagaaa

SEQ ID NO: 4341393 - DNA, 25 bp, Homo sapien
gtggtatatgggtttcagtcattct

SEQ ID NO: 4341394 - DNA, 25 bp, Homo sapien
tgtgattataccatcagggccaatt

SEQ ID NO: 4341395 - DNA, 25 bp, Homo sapien
cactgtgattataccatcagggcca

SEQ ID NO: 4341396 - DNA, 25 bp, Homo sapien
ctgtgattataccatcagggccaat

SEQ ID NO: 4341397 - DNA, 25 bp, Homo sapien
actgtgattataccatcagggccaa

SEQ ID NO: 4341398 - DNA, 25 bp, Homo sapien
gacctcacacactatcttgagagtt

SEQ ID NO: 4341399 - DNA, 25 bp, Homo sapien
acatgataagacctcacacactatc

SEQ ID NO: 4341400 - DNA, 25 bp, Homo sapien
cacactatcttgagagttttggtaa

SEQ ID NO: 4341401 - DNA, 25 bp, Homo sapien
tgataagacctcacacactatcttg

SEQ ID NO: 4341402 - DNA, 25 bp, Homo sapien
tgcaagcaagggctaaaaacttcag

SEQ ID NO: 4341403 - DNA, 25 bp, Homo sapien
ttcatcacactattaaacagatctg

SEQ ID NO: 4341404 - DNA, 25 bp, Homo sapien
aacagatctgttgggagattcacca

SEQ ID NO: 4341405 - DNA, 25 bp, Homo sapien
cacggatgatcagtctgccagcaac

SEQ ID NO: 4341406 - DNA, 25 bp, Homo sapien
tacacaaagcgactcgctcagaccg

SEQ ID NO: 4341407 - DNA, 25 bp, Homo sapien
gctcagaccgctctctcaccggagg

SEQ ID NO: 4341408 - DNA, 25 bp, Homo sapien
aggcgtctctccacgggacagggcc

SEQ ID NO: 4341409 - DNA, 25 bp, Homo sapien
taacagctcaggtgttagctctgcc

SEQ ID NO: 4341410 - DNA, 25 bp, Homo sapien
ggttccccagtttcaagcaggcaag

SEQ ID NO: 4341411 - DNA, 25 bp, Homo sapien
agaaggcacccgtgtttgaggcaca

SEQ ID NO: 4341412 - DNA, 25 bp, Homo sapien
tgatacaatacgagagcaagcagtc

SEQ ID NO: 4341413 - DNA, 25 bp, Homo sapien
aaagacgatgccagttagtccggac

SEQ ID NO: 4341414 - DNA, 25 bp, Homo sapien
cctctgtctccggccgtcctccaag

SEQ ID NO: 4341415 - DNA, 25 bp, Homo sapien
ctctgtctccggccgtcctccaagg

SEQ ID NO: 4341416 - DNA, 25 bp, Homo sapien
ctgtctccggccgtcctccaagggg

SEQ ID NO: 4341417 - DNA, 25 bp, Homo sapien
tctgtctccggccgtcctccaaggg

SEQ ID NO: 4341418 - DNA, 25 bp, Homo sapien
aatggcggctttggcaaactccttc

SEQ ID NO: 4341419 - DNA, 25 bp, Homo sapien
catgttggcttatctgtctgagcca

SEQ ID NO: 4341420 - DNA, 25 bp, Homo sapien
ctccggcgggatgcatgttggctta

SEQ ID NO: 4341421 - DNA, 25 bp, Homo sapien
tgcatgttggcttatctgtctgagc

SEQ ID NO: 4341422 - DNA, 25 bp, Homo sapien
cagctccggcgggatgcatgttggc

SEQ ID NO: 4341423 - DNA, 25 bp, Homo sapien
acgttaagatgaaaacttcgattca

SEQ ID NO: 4341424 - DNA, 25 bp, Homo sapien
caatcctggacaggaggtcacccag

SEQ ID NO: 4341425 - DNA, 25 bp, Homo sapien
ccagcctctgtttgacactcaattt

SEQ ID NO: 4341426 - DNA, 25 bp, Homo sapien
tcgattcatacgatgagagcaatcc

SEQ ID NO: 4341427 - DNA, 25 bp, Homo sapien
aggaacttgcagctttgagataaat

SEQ ID NO: 4341428 - DNA, 25 bp, Homo sapien
gcacatgtagatggcaggaacttgc

SEQ ID NO: 4341429 - DNA, 25 bp, Homo sapien
ctgggcacatgtagatggcaggaac

SEQ ID NO: 4341430 - DNA, 25 bp, Homo sapien
gcaggaacttgcagctttgagataa

SEQ ID NO: 4341431 - DNA, 25 bp, Homo sapien
gccagagacgcctttatagggcttt

SEQ ID NO: 4341432 - DNA, 25 bp, Homo sapien
ggcacagtcagtaaacttccagatt

SEQ ID NO: 4341433 - DNA, 25 bp, Homo sapien
tttatgtataacacctgctgccaga

SEQ ID NO: 4341434 - DNA, 25 bp, Homo sapien
gatttcattacctattgtttctgtg

SEQ ID NO: 4341435 - DNA, 25 bp, Homo sapien
tgtggcataacatctagagggcaga

SEQ ID NO: 4341436 - DNA, 25 bp, Homo sapien
cctgtgagtcagagatttaaaacct

SEQ ID NO: 4341437 - DNA, 25 bp, Homo sapien
caaaacatagggctgctatccttcg

SEQ ID NO: 4341438 - DNA, 25 bp, Homo sapien
ctatccttcgtagctagttgtggca

SEQ ID NO: 4341439 - DNA, 25 bp, Homo sapien
ctaaaggagggtcaggtcaaattat

SEQ ID NO: 4341440 - DNA, 25 bp, Homo sapien
cttgtagaaatagaaaacactaaag

SEQ ID NO: 4341441 - DNA, 25 bp, Homo sapien
acactaaaggagggtcaggtcaaat

SEQ ID NO: 4341442 - DNA, 25 bp, Homo sapien
atagaaaacactaaaggagggtcag

SEQ ID NO: 4341443 - DNA, 25 bp, Homo sapien
gaatgcgtgatagcagtctatgaag

SEQ ID NO: 4341444 - DNA, 25 bp, Homo sapien
gtaaaaatgaatgcgtgatagcagt

SEQ ID NO: 4341445 - DNA, 25 bp, Homo sapien
gttcaataggtactagtaaaaatga

SEQ ID NO: 4341446 - DNA, 25 bp, Homo sapien
cgtgatagcagtctatgaagtgcta

SEQ ID NO: 4341447 - DNA, 25 bp, Homo sapien
aggagagcagtagaacctcggcggg

SEQ ID NO: 4341448 - DNA, 25 bp, Homo sapien
tcccacccttcttaagaaggagagc

SEQ ID NO: 4341449 - DNA, 25 bp, Homo sapien
gctgtctggcttcaggcgacacctg

SEQ ID NO: 4341450 - DNA, 25 bp, Homo sapien
gctcgctcccaaaccggctgtctgg

SEQ ID NO: 4341451 - DNA, 25 bp, Homo sapien
tagcgttagacgttagcgctccgcc

SEQ ID NO: 4341452 - DNA, 25 bp, Homo sapien
ccgccgttagcgttagacgttagcg

SEQ ID NO: 4341453 - DNA, 25 bp, Homo sapien
cgttagcgttagacgttagcgctcc

SEQ ID NO: 4341454 - DNA, 25 bp, Homo sapien
cgttagacgttagcgctccgccttc

SEQ ID NO: 4341455 - DNA, 25 bp, Homo sapien
tgcacacctggagaatcctggatgg

SEQ ID NO: 4341456 - DNA, 25 bp, Homo sapien
cacctggagaatcctggatggtctg

SEQ ID NO: 4341457 - DNA, 25 bp, Homo sapien
cacacctggagaatcctggatggtc

SEQ ID NO: 4341458 - DNA, 25 bp, Homo sapien
ttgcacacctggagaatcctggatg

SEQ ID NO: 4341459 - DNA, 25 bp, Homo sapien
tgagcagtgatgatgggtacaccat

SEQ ID NO: 4341460 - DNA, 25 bp, Homo sapien
ggctgagcagtgatgatgggtacac

SEQ ID NO: 4341461 - DNA, 25 bp, Homo sapien
gctgagcagtgatgatgggtacacc

SEQ ID NO: 4341462 - DNA, 25 bp, Homo sapien
ggggctgagcagtgatgatgggtac

SEQ ID NO: 4341463 - DNA, 25 bp, Homo sapien
ccagtattttcatggtttctaacca

SEQ ID NO: 4341464 - DNA, 25 bp, Homo sapien
cagtattttcatggtttctaaccat

SEQ ID NO: 4341465 - DNA, 25 bp, Homo sapien
atccagtattttcatggtttctaac

SEQ ID NO: 4341466 - DNA, 25 bp, Homo sapien
tccagtattttcatggtttctaacc

SEQ ID NO: 4341467 - DNA, 25 bp, Homo sapien
caaagagggctgagaacctgaagat

SEQ ID NO: 4341468 - DNA, 25 bp, Homo sapien
tgtatgtctgggcaattagtcagca

SEQ ID NO: 4341469 - DNA, 25 bp, Homo sapien
agggccacacagtttcgaactgtca

SEQ ID NO: 4341470 - DNA, 25 bp, Homo sapien
tgggcaattagtcagcagcagggcc

SEQ ID NO: 4341471 - DNA, 25 bp, Homo sapien
cacagtttcgaactgtcaaaacatg

SEQ ID NO: 4341472 - DNA, 25 bp, Homo sapien
ttcggctcccggctgcccgcggacg

SEQ ID NO: 4341473 - DNA, 25 bp, Homo sapien
ggcttcttcggctcccggctgcccg

SEQ ID NO: 4341474 - DNA, 25 bp, Homo sapien
cccaggcttcttcggctcccggctg

SEQ ID NO: 4341475 - DNA, 25 bp, Homo sapien
tcggctcccggctgcccgcggacgc

SEQ ID NO: 4341476 - DNA, 25 bp, Homo sapien
gtatacgatgcattcagcatccagg

SEQ ID NO: 4341477 - DNA, 25 bp, Homo sapien
ggcagtatacgatgcattcagcatc

SEQ ID NO: 4341478 - DNA, 25 bp, Homo sapien
tcatggaaggcagtatacgatgcat

SEQ ID NO: 4341479 - DNA, 25 bp, Homo sapien
gaaggcagtatacgatgcattcagc

SEQ ID NO: 4341480 - DNA, 25 bp, Homo sapien
ggcagctatgctggccaggggagcc

SEQ ID NO: 4341481 - DNA, 25 bp, Homo sapien
gaggtgcctgttcacaacacacact

SEQ ID NO: 4341482 - DNA, 25 bp, Homo sapien
caggtaggaggtgcctgttcacaac

SEQ ID NO: 4341483 - DNA, 25 bp, Homo sapien
cacagcaggtaggaggtgcctgttc

SEQ ID NO: 4341484 - DNA, 25 bp, Homo sapien
cagttatcctgatgaactgctctgg

SEQ ID NO: 4341485 - DNA, 25 bp, Homo sapien
gttatcctgatgaactgctctgggt

SEQ ID NO: 4341486 - DNA, 25 bp, Homo sapien
agttatcctgatgaactgctctggg

SEQ ID NO: 4341487 - DNA, 25 bp, Homo sapien
ttatcctgatgaactgctctgggtt

SEQ ID NO: 4341488 - DNA, 25 bp, Homo sapien
ttaaggaggtcaaaccatgggtctg

SEQ ID NO: 4341489 - DNA, 25 bp, Homo sapien
tttcctgaggccctacgccatagct

SEQ ID NO: 4341490 - DNA, 25 bp, Homo sapien
catagctcagctggttggcagtggc

SEQ ID NO: 4341491 - DNA, 25 bp, Homo sapien
gaagacacagtttgagagactcctg

SEQ ID NO: 4341492 - DNA, 25 bp, Homo sapien
tgaaggtctcttctaggctagggag

SEQ ID NO: 4341493 - DNA, 25 bp, Homo sapien
ttgtgagggcctaatctcagtcatg

SEQ ID NO: 4341494 - DNA, 25 bp, Homo sapien
gagcagaatatgtccatgtcacaac

SEQ ID NO: 4341495 - DNA, 25 bp, Homo sapien
ggagaagccctcataatttagtcac

SEQ ID NO: 4341496 - DNA, 25 bp, Homo sapien
tgaggtggttgctgcaaattaactc

SEQ ID NO: 4341497 - DNA, 25 bp, Homo sapien
gatgaggtggttgctgcaaattaac

SEQ ID NO: 4341498 - DNA, 25 bp, Homo sapien
gaggtggttgctgcaaattaactcc

SEQ ID NO: 4341499 - DNA, 25 bp, Homo sapien
ttgatgaggtggttgctgcaaatta

SEQ ID NO: 4341500 - DNA, 25 bp, Homo sapien
gttaatacgaatcttcacccagtga

SEQ ID NO: 4341501 - DNA, 25 bp, Homo sapien
caacgttccgatgacggcttggcat

SEQ ID NO: 4341502 - DNA, 25 bp, Homo sapien
aaagattgtgtagaagttgctggcc

SEQ ID NO: 4341503 - DNA, 25 bp, Homo sapien
catcatggcctgctgatgttgaacc

SEQ ID NO: 4341504 - DNA, 25 bp, Homo sapien
tactaagagtatcatcaactggttc

SEQ ID NO: 4341505 - DNA, 25 bp, Homo sapien
caactggttccactgatttggcccc

SEQ ID NO: 4341506 - DNA, 25 bp, Homo sapien
tgaggacaccacttgtactaagagt

SEQ ID NO: 4341507 - DNA, 25 bp, Homo sapien
gaccttggcattggcatctctcagg

SEQ ID NO: 4341508 - DNA, 25 bp, Homo sapien
tgtgagttgctgagctcagatgccc

SEQ ID NO: 4341509 - DNA, 25 bp, Homo sapien
tcaggaagcttttgcaggtagcagc

SEQ ID NO: 4341510 - DNA, 25 bp, Homo sapien
tcatgtcgcattattatccctctgc

SEQ ID NO: 4341511 - DNA, 25 bp, Homo sapien
ttatccctctgcttttgtgagttgc

SEQ ID NO: 4341512 - DNA, 25 bp, Homo sapien
tagctccagtgacttgaactacttg

SEQ ID NO: 4341513 - DNA, 25 bp, Homo sapien
ggcttagctccagtgacttgaacta

SEQ ID NO: 4341514 - DNA, 25 bp, Homo sapien
gggcccagggtagacgagctttata

SEQ ID NO: 4341515 - DNA, 25 bp, Homo sapien
tgaggttgtcatggtacttttcaca

SEQ ID NO: 4341516 - DNA, 25 bp, Homo sapien
cagggtagacgagctttataaggtc

SEQ ID NO: 4341517 - DNA, 25 bp, Homo sapien
atgaggttgtcatggtacttttcac

SEQ ID NO: 4341518 - DNA, 25 bp, Homo sapien
gctcggtctgcacacggcgttgttc

SEQ ID NO: 4341519 - DNA, 25 bp, Homo sapien
tgtgcgagcccagcgtcaagtgatt

SEQ ID NO: 4341520 - DNA, 25 bp, Homo sapien
tttgttgctgtgaaaccggctcccg

SEQ ID NO: 4341521 - DNA, 25 bp, Homo sapien
tcccggcacagtcagcctctgtgtg

SEQ ID NO: 4341522 - DNA, 25 bp, Homo sapien
taagtgaatctgtgatttgacacac

SEQ ID NO: 4341523 - DNA, 25 bp, Homo sapien
aggcgaggtatgaaggtacaaagat

SEQ ID NO: 4341524 - DNA, 25 bp, Homo sapien
cacagaaggcgaggtatgaaggtac

SEQ ID NO: 4341525 - DNA, 25 bp, Homo sapien
agaaggcgaggtatgaaggtacaaa

SEQ ID NO: 4341526 - DNA, 25 bp, Homo sapien
cagaaggcgaggtatgaaggtacaa

SEQ ID NO: 4341527 - DNA, 25 bp, Homo sapien
cttctctgttttgggcgtccgtcag

SEQ ID NO: 4341528 - DNA, 25 bp, Homo sapien
gctgcaggccatgattgtttcgata

SEQ ID NO: 4341529 - DNA, 25 bp, Homo sapien
tcctggccttctcacgggagcagtc

SEQ ID NO: 4341530 - DNA, 25 bp, Homo sapien
cacgggagcagtcgtaattttattt

SEQ ID NO: 4341531 - DNA, 25 bp, Homo sapien
caaagtgctgtatgggtggagtctt

SEQ ID NO: 4341532 - DNA, 25 bp, Homo sapien
tttctgccactgtccgagccctgct

SEQ ID NO: 4341533 - DNA, 25 bp, Homo sapien
tgtatgggtggagtctttctgccac

SEQ ID NO: 4341534 - DNA, 25 bp, Homo sapien
ttctgttcaaagtgctgtatgggtg

SEQ ID NO: 4341535 - DNA, 25 bp, Homo sapien
tgtcccttgatttaaagctatttgt

SEQ ID NO: 4341536 - DNA, 25 bp, Homo sapien
tgtgtcccttgatttaaagctattt

SEQ ID NO: 4341537 - DNA, 25 bp, Homo sapien
gtgtcccttgatttaaagctatttg

SEQ ID NO: 4341538 - DNA, 25 bp, Homo sapien
aaactgcgtacagccgtattcagca

SEQ ID NO: 4341539 - DNA, 25 bp, Homo sapien
gtacagccgtattcagcatgctcat

SEQ ID NO: 4341540 - DNA, 25 bp, Homo sapien
gagtaaaactgcgtacagccgtatt

SEQ ID NO: 4341541 - DNA, 25 bp, Homo sapien
tgcgtacagccgtattcagcatgct

SEQ ID NO: 4341542 - DNA, 25 bp, Homo sapien
aggagaccatggtattcatctccat

SEQ ID NO: 4341543 - DNA, 25 bp, Homo sapien
gaggagaccatggtattcatctcca

SEQ ID NO: 4341544 - DNA, 25 bp, Homo sapien
ggagaccatggtattcatctccatg

SEQ ID NO: 4341545 - DNA, 25 bp, Homo sapien
ttctctagttctgaatgtgatacca

SEQ ID NO: 4341546 - DNA, 25 bp, Homo sapien
cattaccaccttctccgcaaatttt

SEQ ID NO: 4341547 - DNA, 25 bp, Homo sapien
tctctagttctgaatgtgataccat

SEQ ID NO: 4341548 - DNA, 25 bp, Homo sapien
caccttctccgcaaattttttgttg

SEQ ID NO: 4341549 - DNA, 25 bp, Homo sapien
ccaaattgactcagttgtagcttca

SEQ ID NO: 4341550 - DNA, 25 bp, Homo sapien
gactccctagctaccctatgttcat

SEQ ID NO: 4341551 - DNA, 25 bp, Homo sapien
tgtagcttcatggagtaggaagtcc

SEQ ID NO: 4341552 - DNA, 25 bp, Homo sapien
gggagaatgacaagtccagctgctc

SEQ ID NO: 4341553 - DNA, 25 bp, Homo sapien
ggttctacagtcctcagcatattaa

SEQ ID NO: 4341554 - DNA, 25 bp, Homo sapien
cagtcctcagcatattaattgaagt

SEQ ID NO: 4341555 - DNA, 25 bp, Homo sapien
catattaattgaagtcttgttaagc

SEQ ID NO: 4341556 - DNA, 25 bp, Homo sapien
ctatgcaatatatggttctacagtc

SEQ ID NO: 4341557 - DNA, 25 bp, Homo sapien
tgggctcacactattgatacctctg

SEQ ID NO: 4341558 - DNA, 25 bp, Homo sapien
ctcacactattgatacctctgatcc

SEQ ID NO: 4341559 - DNA, 25 bp, Homo sapien
ggctcacactattgatacctctgat

SEQ ID NO: 4341560 - DNA, 25 bp, Homo sapien
ctttgggctcacactattgatacct

SEQ ID NO: 4341561 - DNA, 25 bp, Homo sapien
tgccaatttgggttctgcaggtaca

SEQ ID NO: 4341562 - DNA, 25 bp, Homo sapien
aaatgccaatttgggttctgcaggt

SEQ ID NO: 4341563 - DNA, 25 bp, Homo sapien
ttctgcaggtacatagaagttgcca

SEQ ID NO: 4341564 - DNA, 25 bp, Homo sapien
ttgggttctgcaggtacatagaagt

SEQ ID NO: 4341565 - DNA, 25 bp, Homo sapien
cagttctgtacatctgcctatattc

SEQ ID NO: 4341566 - DNA, 25 bp, Homo sapien
tttcagttctgtacatctgcctata

SEQ ID NO: 4341567 - DNA, 25 bp, Homo sapien
ctggccattcgaatttcagttctgt

SEQ ID NO: 4341568 - DNA, 25 bp, Homo sapien
cctggccattcgaatttcagttctg

SEQ ID NO: 4341569 - DNA, 25 bp, Homo sapien
gcagagaacaatgttcaatgtagaa

SEQ ID NO: 4341570 - DNA, 25 bp, Homo sapien
caatgttcaatgtagaactgcccat

SEQ ID NO: 4341571 - DNA, 25 bp, Homo sapien
tactgggacttgtattgtacctcct

SEQ ID NO: 4341572 - DNA, 25 bp, Homo sapien
tgtacctcctctaaatcatcccaga

SEQ ID NO: 4341573 - DNA, 25 bp, Homo sapien
tgtgcgctgcgaagtgtccaggcct

SEQ ID NO: 4341574 - DNA, 25 bp, Homo sapien
gatgcggagatgtgcgctgcgaagt

SEQ ID NO: 4341575 - DNA, 25 bp, Homo sapien
gcgctgcgaagtgtccaggcctact

SEQ ID NO: 4341576 - DNA, 25 bp, Homo sapien
gagatgtgcgctgcgaagtgtccag

SEQ ID NO: 4341577 - DNA, 25 bp, Homo sapien
cagcacagacgtggttgccttgctc

SEQ ID NO: 4341578 - DNA, 25 bp, Homo sapien
ctctccaggatgtggaagtgtgtac

SEQ ID NO: 4341579 - DNA, 25 bp, Homo sapien
gaagccccgcagtagtagttgttga

SEQ ID NO: 4341580 - DNA, 25 bp, Homo sapien
taatatccacgcagattacccacat

SEQ ID NO: 4341581 - DNA, 25 bp, Homo sapien
ttcaggctcagtaatatccacgcag

SEQ ID NO: 4341582 - DNA, 25 bp, Homo sapien
cctgaggaagccccgcagtagtagt

SEQ ID NO: 4341583 - DNA, 25 bp, Homo sapien
gatggcaccagttgtcctctgcctt

SEQ ID NO: 4341584 - DNA, 25 bp, Homo sapien
catgagatgccttcagctcaggcga

SEQ ID NO: 4341585 - DNA, 25 bp, Homo sapien
tgcatagatggcaccagttgtcctc

SEQ ID NO: 4341586 - DNA, 25 bp, Homo sapien
caggcgaacctggtgcatagatggc

SEQ ID NO: 4341587 - DNA, 25 bp, Homo sapien
ttcatcagagaaaaaggatgttttc

SEQ ID NO: 4341588 - DNA, 25 bp, Homo sapien
tttaccatggtttcttcatcagaga

SEQ ID NO: 4341589 - DNA, 25 bp, Homo sapien
gatgttttcagtggagtatcttcat

SEQ ID NO: 4341590 - DNA, 25 bp, Homo sapien
tttcagtggagtatcttcataagac

SEQ ID NO: 4341591 - DNA, 25 bp, Homo sapien
tgcaggaagcaactcttgaacaggg

SEQ ID NO: 4341592 - DNA, 25 bp, Homo sapien
tggttcttgtcaaaagcgctctttt

SEQ ID NO: 4341593 - DNA, 25 bp, Homo sapien
ggttcttgtcaaaagcgctcttttg

SEQ ID NO: 4341594 - DNA, 25 bp, Homo sapien
cagctctcttatggtgcacacttag

SEQ ID NO: 4341595 - DNA, 25 bp, Homo sapien
ttcagctgctctccgatggtttcca

SEQ ID NO: 4341596 - DNA, 25 bp, Homo sapien
gattcaaatgacttccatggattca

SEQ ID NO: 4341597 - DNA, 25 bp, Homo sapien
gtttccaccagaatgctacccacag

SEQ ID NO: 4341598 - DNA, 25 bp, Homo sapien
tagaatgtctggctgagagtgaagg

SEQ ID NO: 4341599 - DNA, 25 bp, Homo sapien
gagagtgaagggactattgggctag

SEQ ID NO: 4341600 - DNA, 25 bp, Homo sapien
cattggcgttggcactttccaaggg

SEQ ID NO: 4341601 - DNA, 25 bp, Homo sapien
cccacctcagaacattggcgttggc

SEQ ID NO: 4341602 - DNA, 25 bp, Homo sapien
atttgcaaagcatgctctctggagg

SEQ ID NO: 4341603 - DNA, 25 bp, Homo sapien
aatttgcaaagcatgctctctggag

SEQ ID NO: 4341604 - DNA, 25 bp, Homo sapien
tttgcaaagcatgctctctggaggc

SEQ ID NO: 4341605 - DNA, 25 bp, Homo sapien
tctggggatagaaactgcatgactc

SEQ ID NO: 4341606 - DNA, 25 bp, Homo sapien
catgactcttgtgcctttttgggaa

SEQ ID NO: 4341607 - DNA, 25 bp, Homo sapien
gcatgactcttgtgcctttttggga

SEQ ID NO: 4341608 - DNA, 25 bp, Homo sapien
tgaaaagcatagggccatctctggg

SEQ ID NO: 4341609 - DNA, 25 bp, Homo sapien
tatggtcatggagatgcccctgacc

SEQ ID NO: 4341610 - DNA, 25 bp, Homo sapien
atgtagaacccagtctcataagggc

SEQ ID NO: 4341611 - DNA, 25 bp, Homo sapien
caaggcctgccaactgctggcagct

SEQ ID NO: 4341612 - DNA, 25 bp, Homo sapien
gcagctatggtcatggagatgcccc

SEQ ID NO: 4341613 - DNA, 25 bp, Homo sapien
ctgtgccagtgtattcctgtgacat

SEQ ID NO: 4341614 - DNA, 25 bp, Homo sapien
agtctgtgccagtgtattcctgtga

SEQ ID NO: 4341615 - DNA, 25 bp, Homo sapien
tgttactttggtcctggttgttcca

SEQ ID NO: 4341616 - DNA, 25 bp, Homo sapien
ttactttggtcctggttgttccatg

SEQ ID NO: 4341617 - DNA, 25 bp, Homo sapien
tgcagtggcatctttgccgatgcct

SEQ ID NO: 4341618 - DNA, 25 bp, Homo sapien
tttgccgatgcctccccaggtgtcc

SEQ ID NO: 4341619 - DNA, 25 bp, Homo sapien
ctctcggagtctccgaaggcacttg

SEQ ID NO: 4341620 - DNA, 25 bp, Homo sapien
ctggctctcggagtctccgaaggca

SEQ ID NO: 4341621 - DNA, 25 bp, Homo sapien
ttcatcaccccctaactctgctttt

SEQ ID NO: 4341622 - DNA, 25 bp, Homo sapien
catcaccccctaactctgcttttct

SEQ ID NO: 4341623 - DNA, 25 bp, Homo sapien
tcatcaccccctaactctgcttttc

SEQ ID NO: 4341624 - DNA, 25 bp, Homo sapien
tcttgttctacggatttcagcaaaa

SEQ ID NO: 4341625 - DNA, 25 bp, Homo sapien
taccagaaaataggtgtaagcagag

SEQ ID NO: 4341626 - DNA, 25 bp, Homo sapien
tttgtgcagcattaccagaaaatag

SEQ ID NO: 4341627 - DNA, 25 bp, Homo sapien
acataagttgggcttatggcctgca

SEQ ID NO: 4341628 - DNA, 25 bp, Homo sapien
cactagtgtctgagccatcacaagg

SEQ ID NO: 4341629 - DNA, 25 bp, Homo sapien
caggttcccactagtgtctgagcca

SEQ ID NO: 4341630 - DNA, 25 bp, Homo sapien
tccagctctttgacctcccttgtaa

SEQ ID NO: 4341631 - DNA, 25 bp, Homo sapien
tgagccatcacaaggtttttcctcc

SEQ ID NO: 4341632 - DNA, 25 bp, Homo sapien
tttagggtagacatgggtgcagcac

SEQ ID NO: 4341633 - DNA, 25 bp, Homo sapien
agagactctccacatgtctgaatgg

SEQ ID NO: 4341634 - DNA, 25 bp, Homo sapien
tgagaattctggcacaaatgggtca

SEQ ID NO: 4341635 - DNA, 25 bp, Homo sapien
gcagttagaatagccctgaggagca

SEQ ID NO: 4341636 - DNA, 25 bp, Homo sapien
ctgcttcctcccctggctgcagtgg

SEQ ID NO: 4341637 - DNA, 25 bp, Homo sapien
ttcctcccctggctgcagtggagga

SEQ ID NO: 4341638 - DNA, 25 bp, Homo sapien
caaagttcatgatttctgcttcctc

SEQ ID NO: 4341639 - DNA, 25 bp, Homo sapien
gcttcctcccctggctgcagtggag

SEQ ID NO: 4341640 - DNA, 25 bp, Homo sapien
aacatctttcaacaggagaagtggg

SEQ ID NO: 4341641 - DNA, 25 bp, Homo sapien
gaaaacatctttcaacaggagaagt

SEQ ID NO: 4341642 - DNA, 25 bp, Homo sapien
ggtggtgatgacagagaataaactt

SEQ ID NO: 4341643 - DNA, 25 bp, Homo sapien
tggccacggtcatggtggtggtagc

SEQ ID NO: 4341644 - DNA, 25 bp, Homo sapien
ttggtcagagttaaggaagagcccc

SEQ ID NO: 4341645 - DNA, 25 bp, Homo sapien
tccttggtcagagttaaggaagagc

SEQ ID NO: 4341646 - DNA, 25 bp, Homo sapien
ccttggtcagagttaaggaagagcc

SEQ ID NO: 4341647 - DNA, 25 bp, Homo sapien
cttggtcagagttaaggaagagccc

SEQ ID NO: 4341648 - DNA, 25 bp, Homo sapien
agcagttaatttgtccgaaattcag

SEQ ID NO: 4341649 - DNA, 25 bp, Homo sapien
cagccaaagctgacttatgcctttc

SEQ ID NO: 4341650 - DNA, 25 bp, Homo sapien
tacttgttctccgtcaggtctgcat

SEQ ID NO: 4341651 - DNA, 25 bp, Homo sapien
gtctgcatttgctaagcagttaatt

SEQ ID NO: 4341652 - DNA, 25 bp, Homo sapien
taatgattaaaaagctgtagcccca

SEQ ID NO: 4341653 - DNA, 25 bp, Homo sapien
tagaccacaaagtgaagagccccaa

SEQ ID NO: 4341654 - DNA, 25 bp, Homo sapien
tctctcgagctgaagacaagtcacg

SEQ ID NO: 4341655 - DNA, 25 bp, Homo sapien
gaattgagatccctgtgctcaggac

SEQ ID NO: 4341656 - DNA, 25 bp, Homo sapien
cccgaggttggacgacatggaatca

SEQ ID NO: 4341657 - DNA, 25 bp, Homo sapien
gaaagtcagattgtactcccgaggt

SEQ ID NO: 4341658 - DNA, 25 bp, Homo sapien
tgtggtctaaacacgtgtatcatgc

SEQ ID NO: 4341659 - DNA, 25 bp, Homo sapien
tcagggtccagacagtatgtggtct

SEQ ID NO: 4341660 - DNA, 25 bp, Homo sapien
gaaagacagctattacatctgtcac

SEQ ID NO: 4341661 - DNA, 25 bp, Homo sapien
agaaagacagctattacatctgtca

SEQ ID NO: 4341662 - DNA, 25 bp, Homo sapien
tgaggctgataatgagaaaggaatt

SEQ ID NO: 4341663 - DNA, 25 bp, Homo sapien
agtggtcagtctttgtagtaaagac

SEQ ID NO: 4341664 - DNA, 25 bp, Homo sapien
tagtaaagacatttagggcagctat

SEQ ID NO: 4341665 - DNA, 25 bp, Homo sapien
ggtcagtctttgtagtaaagacatt

SEQ ID NO: 4341666 - DNA, 25 bp, Homo sapien
agtaaagacatttagggcagctatt

SEQ ID NO: 4341667 - DNA, 25 bp, Homo sapien
tttgcagtcatgacagcctccctag

SEQ ID NO: 4341668 - DNA, 25 bp, Homo sapien
gctcaaatagaagtcccgggcactg

SEQ ID NO: 4341669 - DNA, 25 bp, Homo sapien
ccaggaagggatacaccagggaatc

SEQ ID NO: 4341670 - DNA, 25 bp, Homo sapien
gaatccaacattcagagtgaaggcc

SEQ ID NO: 4341671 - DNA, 25 bp, Homo sapien
tagatcagagcctcattatctcttg

SEQ ID NO: 4341672 - DNA, 25 bp, Homo sapien
catgatctccaatggttatggaacc

SEQ ID NO: 4341673 - DNA, 25 bp, Homo sapien
ttatggaacctatagatggctcccc

SEQ ID NO: 4341674 - DNA, 25 bp, Homo sapien
tatcctcacgctgccacaacagtgg

SEQ ID NO: 4341675 - DNA, 25 bp, Homo sapien
gattatggtatagtctgtggtcatg

SEQ ID NO: 4341676 - DNA, 25 bp, Homo sapien
gtctgtggtcatggaagatagctct

SEQ ID NO: 4341677 - DNA, 25 bp, Homo sapien
gactgtgaggattatggtatagtct

SEQ ID NO: 4341678 - DNA, 25 bp, Homo sapien
tctgtggtcatggaagatagctctt

SEQ ID NO: 4341679 - DNA, 25 bp, Homo sapien
gagataaaagtggacttggctttct

SEQ ID NO: 4341680 - DNA, 25 bp, Homo sapien
gatgattttaacagtgtacctgagg

SEQ ID NO: 4341681 - DNA, 25 bp, Homo sapien
gattttaacagtgtacctgaggaag

SEQ ID NO: 4341682 - DNA, 25 bp, Homo sapien
aggaaggtgagataaaagtggactt

SEQ ID NO: 4341683 - DNA, 25 bp, Homo sapien
tctcaaatcttgctaagcttggtcg

SEQ ID NO: 4341684 - DNA, 25 bp, Homo sapien
caaaccatgtgctaggctatctggc

SEQ ID NO: 4341685 - DNA, 25 bp, Homo sapien
cttaatgggtaggacagatcttggc

SEQ ID NO: 4341686 - DNA, 25 bp, Homo sapien
ttcattcaaacaggaggctatcagg

SEQ ID NO: 4341687 - DNA, 25 bp, Homo sapien
aacaccatggttaagagcattggac

SEQ ID NO: 4341688 - DNA, 25 bp, Homo sapien
ggagcagccctattgttgtaacacc

SEQ ID NO: 4341689 - DNA, 25 bp, Homo sapien
tggacttggtcattaaatgctcagc

SEQ ID NO: 4341690 - DNA, 25 bp, Homo sapien
ccagctctgagaccatgggagaaac

SEQ ID NO: 4341691 - DNA, 25 bp, Homo sapien
taagagtcaagaaattttaccctga

SEQ ID NO: 4341692 - DNA, 25 bp, Homo sapien
gcagggatcaagacagaatcgtatc

SEQ ID NO: 4341693 - DNA, 25 bp, Homo sapien
caaatgaggcttaattcctgtctaa

SEQ ID NO: 4341694 - DNA, 25 bp, Homo sapien
taccctgaagtgaccttgccgaagg

SEQ ID NO: 4341695 - DNA, 25 bp, Homo sapien
ctggagaagtcacctcaagtttggt

SEQ ID NO: 4341696 - DNA, 25 bp, Homo sapien
tggagaagtcacctcaagtttggtg

SEQ ID NO: 4341697 - DNA, 25 bp, Homo sapien
ctagggaagtcacctcaagtttggt

SEQ ID NO: 4341698 - DNA, 25 bp, Homo sapien
gatgggactagggaagtcacctcaa

SEQ ID NO: 4341699 - DNA, 25 bp, Homo sapien
atgctgctggttgttatatggctgc

SEQ ID NO: 4341700 - DNA, 25 bp, Homo sapien
gctgcataacaaccaagaaattcaa

SEQ ID NO: 4341701 - DNA, 25 bp, Homo sapien
gtcacaccatagagggagggagctt

SEQ ID NO: 4341702 - DNA, 25 bp, Homo sapien
caaaactctggctagggaacataaa

SEQ ID NO: 4341703 - DNA, 25 bp, Homo sapien
tggtttgactgatgtaggcccctcc

SEQ ID NO: 4341704 - DNA, 25 bp, Homo sapien
gataaactcacaaggttcagttgcc

SEQ ID NO: 4341705 - DNA, 25 bp, Homo sapien
agtcttgcaagtacacacctctggg

SEQ ID NO: 4341706 - DNA, 25 bp, Homo sapien
tcagagaggaaagagtgccaaaggt

SEQ ID NO: 4341707 - DNA, 25 bp, Homo sapien
ccaacattcttctggtttgggcaaa

SEQ ID NO: 4341708 - DNA, 25 bp, Homo sapien
ccaagtggtcttatgattctcaaga

SEQ ID NO: 4341709 - DNA, 25 bp, Homo sapien
tgtcaaagggagcaagatacagtga

SEQ ID NO: 4341710 - DNA, 25 bp, Homo sapien
ccctgataggaaaaatgaaaagcca

SEQ ID NO: 4341711 - DNA, 25 bp, Homo sapien
gaaccattacagagagcgaagctgg

SEQ ID NO: 4341712 - DNA, 25 bp, Homo sapien
gagatggccctaattatgtccggac

SEQ ID NO: 4341713 - DNA, 25 bp, Homo sapien
ctcactttctttatagctcagaggg

SEQ ID NO: 4341714 - DNA, 25 bp, Homo sapien
tataatttccttgctgggttaggtg

SEQ ID NO: 4341715 - DNA, 25 bp, Homo sapien
tagctgccgtcagtgtatcaactca

SEQ ID NO: 4341716 - DNA, 25 bp, Homo sapien
tggatctccttctttgtagctgccg

SEQ ID NO: 4341717 - DNA, 25 bp, Homo sapien
tcatgctcccaatgagaactgctct

SEQ ID NO: 4341718 - DNA, 25 bp, Homo sapien
gaagtgactgtactgctaatgccaa

SEQ ID NO: 4341719 - DNA, 25 bp, Homo sapien
cagtagaattgctggaaccacagag

SEQ ID NO: 4341720 - DNA, 25 bp, Homo sapien
ggcagtagaattgctggaaccacag

SEQ ID NO: 4341721 - DNA, 25 bp, Homo sapien
cgtggtgaaaccctgccactactga

SEQ ID NO: 4341722 - DNA, 25 bp, Homo sapien
gaggcagtagaattgctggaaccac

SEQ ID NO: 4341723 - DNA, 25 bp, Homo sapien
cagtaacctccttatagaatttggg

SEQ ID NO: 4341724 - DNA, 25 bp, Homo sapien
gccttcctgctcatcgctgaccgct

SEQ ID NO: 4341725 - DNA, 25 bp, Homo sapien
tggggtcaacatgagcagcaaacac

SEQ ID NO: 4341726 - DNA, 25 bp, Homo sapien
tgctcatcgctgaccgctcagccag

SEQ ID NO: 4341727 - DNA, 25 bp, Homo sapien
tgagaggcccaatggcccaatgtac

SEQ ID NO: 4341728 - DNA, 25 bp, Homo sapien
cagatcccactcagaacagcaggta

SEQ ID NO: 4341729 - DNA, 25 bp, Homo sapien
tctactgggtgcaattcgaggttgc

SEQ ID NO: 4341730 - DNA, 25 bp, Homo sapien
gaacagcaggtacgcccaggctcct

SEQ ID NO: 4341731 - DNA, 25 bp, Homo sapien
aacacgggcatttgcatgactgaga

SEQ ID NO: 4341732 - DNA, 25 bp, Homo sapien
ggaatcgtgctctcaatgcaaagtg

SEQ ID NO: 4341733 - DNA, 25 bp, Homo sapien
gaaaggactgtctttgtacttgaat

SEQ ID NO: 4341734 - DNA, 25 bp, Homo sapien
ccaatggagaactttaacacgggca

SEQ ID NO: 4341735 - DNA, 25 bp, Homo sapien
caccctgtttcagggatattaaaat

SEQ ID NO: 4341736 - DNA, 25 bp, Homo sapien
gagggagatagaccacaaagttcca

SEQ ID NO: 4341737 - DNA, 25 bp, Homo sapien
cttctggggactgatagatcttctc

SEQ ID NO: 4341738 - DNA, 25 bp, Homo sapien
gtttcagggatattaaaatgcagtg

SEQ ID NO: 4341739 - DNA, 25 bp, Homo sapien
cctagtttcagaggtcacgcatcaa

SEQ ID NO: 4341740 - DNA, 25 bp, Homo sapien
taaatgtcctcacgacacggtggct

SEQ ID NO: 4341741 - DNA, 25 bp, Homo sapien
ccccggagtgagtgatttagtagag

SEQ ID NO: 4341742 - DNA, 25 bp, Homo sapien
tccaccaatccctgaagggtgaggt

SEQ ID NO: 4341743 - DNA, 25 bp, Homo sapien
gtctgagggttgagcagagataact

SEQ ID NO: 4341744 - DNA, 25 bp, Homo sapien
atcctcagtgccgtctggtgcttcc

SEQ ID NO: 4341745 - DNA, 25 bp, Homo sapien
tgtctgagggttgagcagagataac

SEQ ID NO: 4341746 - DNA, 25 bp, Homo sapien
tcagtgccgtctggtgcttccactc

SEQ ID NO: 4341747 - DNA, 25 bp, Homo sapien
caaagagtggttacgaaatgtccct

SEQ ID NO: 4341748 - DNA, 25 bp, Homo sapien
gctcaaagggacaatctagctcaca

SEQ ID NO: 4341749 - DNA, 25 bp, Homo sapien
tgccctaaacgaggctatgctgcct

SEQ ID NO: 4341750 - DNA, 25 bp, Homo sapien
tgctcctggtcacacagttggtgag

SEQ ID NO: 4341751 - DNA, 25 bp, Homo sapien
tatgctctttggagccaatgaacca

SEQ ID NO: 4341752 - DNA, 25 bp, Homo sapien
gggcaaacttgaatatgctctttgg

SEQ ID NO: 4341753 - DNA, 25 bp, Homo sapien
ggagccaatgaaccagctgatggag

SEQ ID NO: 4341754 - DNA, 25 bp, Homo sapien
gaagaaaggctgccactgactgctt

SEQ ID NO: 4341755 - DNA, 25 bp, Homo sapien
gggcctctaggccacaggaagtctg

SEQ ID NO: 4341756 - DNA, 25 bp, Homo sapien
gaacagataattgccccgttgcttg

SEQ ID NO: 4341757 - DNA, 25 bp, Homo sapien
tcacctttgtacacaggagggcgaa

SEQ ID NO: 4341758 - DNA, 25 bp, Homo sapien
ggaagtctggctcctcacctttgta

SEQ ID NO: 4341759 - DNA, 25 bp, Homo sapien
tctcctgcggcttgagtagcttgac

SEQ ID NO: 4341760 - DNA, 25 bp, Homo sapien
aattgcaacacccaaaagggctgag

SEQ ID NO: 4341761 - DNA, 25 bp, Homo sapien
gggacttgaccatctgacttccagt

SEQ ID NO: 4341762 - DNA, 25 bp, Homo sapien
gcggccggttgtttggtctctatcc

SEQ ID NO: 4341763 - DNA, 25 bp, Homo sapien
agggattggtttctatgattctttc

SEQ ID NO: 4341764 - DNA, 25 bp, Homo sapien
gcagggattggtttctatgattctt

SEQ ID NO: 4341765 - DNA, 25 bp, Homo sapien
cagggattggtttctatgattcttt

SEQ ID NO: 4341766 - DNA, 25 bp, Homo sapien
tgcagggattggtttctatgattct

SEQ ID NO: 4341767 - DNA, 25 bp, Homo sapien
tagttgtgggcttgtatctcttctt

SEQ ID NO: 4341768 - DNA, 25 bp, Homo sapien
catcagctgtcaggatattctcagt

SEQ ID NO: 4341769 - DNA, 25 bp, Homo sapien
tgtgtcatcagctgtcaggatattc

SEQ ID NO: 4341770 - DNA, 25 bp, Homo sapien
cttttacagcatctggtgtgtcatc

SEQ ID NO: 4341771 - DNA, 25 bp, Homo sapien
gtttgattccacagaaatctgtccc

SEQ ID NO: 4341772 - DNA, 25 bp, Homo sapien
tctgggggaaatcagctgctcctct

SEQ ID NO: 4341773 - DNA, 25 bp, Homo sapien
tggaactgtattttagccacctgct

SEQ ID NO: 4341774 - DNA, 25 bp, Homo sapien
tgtttctggtatttacaaacgtcca

SEQ ID NO: 4341775 - DNA, 25 bp, Homo sapien
tgacatatttatgacccagggcagg

SEQ ID NO: 4341776 - DNA, 25 bp, Homo sapien
ttaacatgctcgatcacccagacag

SEQ ID NO: 4341777 - DNA, 25 bp, Homo sapien
ccagggcaggtttcaaggtgtcttc

SEQ ID NO: 4341778 - DNA, 25 bp, Homo sapien
tgatcccagatgtcgagcagctgtt

SEQ ID NO: 4341779 - DNA, 25 bp, Homo sapien
tcgtcatcgaagaccttagtcccgg

SEQ ID NO: 4341780 - DNA, 25 bp, Homo sapien
ttcagagtcagtgccagtaacccct

SEQ ID NO: 4341781 - DNA, 25 bp, Homo sapien
tagtcccgggtgtccttatcagttc

SEQ ID NO: 4341782 - DNA, 25 bp, Homo sapien
ttccagaatatggtgagtcccagcc

SEQ ID NO: 4341783 - DNA, 25 bp, Homo sapien
agtgcctgagctaacccctgtgctg

SEQ ID NO: 4341784 - DNA, 25 bp, Homo sapien
gaacttggtggctaagactctctca

SEQ ID NO: 4341785 - DNA, 25 bp, Homo sapien
gatgtgggcatctgccttatccaaa

SEQ ID NO: 4341786 - DNA, 25 bp, Homo sapien
tgccaattaggtgacggtggcctcc

SEQ ID NO: 4341787 - DNA, 25 bp, Homo sapien
ttaaagccatggaacaaaacctgat

SEQ ID NO: 4341788 - DNA, 25 bp, Homo sapien
taaaaggaggcagccatataggcct

SEQ ID NO: 4341789 - DNA, 25 bp, Homo sapien
tctgtatatgaaacgctccccgcaa

SEQ ID NO: 4341790 - DNA, 25 bp, Homo sapien
tgagattgcaatacctgtcaccatg

SEQ ID NO: 4341791 - DNA, 25 bp, Homo sapien
tctccagtatttcttatggcagatg

SEQ ID NO: 4341792 - DNA, 25 bp, Homo sapien
gctgatgaagtcttatgtccataag

SEQ ID NO: 4341793 - DNA, 25 bp, Homo sapien
tggcagatgcgaagagtaaaatgcc

SEQ ID NO: 4341794 - DNA, 25 bp, Homo sapien
ggagagctgatgaagtcttatgtcc

SEQ ID NO: 4341795 - DNA, 25 bp, Homo sapien
tctgtacgacgtgcaggctttcaag

SEQ ID NO: 4341796 - DNA, 25 bp, Homo sapien
cacaaactggcgctaggttcgctac

SEQ ID NO: 4341797 - DNA, 25 bp, Homo sapien
tgcaaactctcatgaaaggtgggac

SEQ ID NO: 4341798 - DNA, 25 bp, Homo sapien
tgcaaactgctatggaactgtcacg

SEQ ID NO: 4341799 - DNA, 25 bp, Homo sapien
gtatatatgaattacctgggaattt

SEQ ID NO: 4341800 - DNA, 25 bp, Homo sapien
tgtgcatttctaacaaagtgccagc

SEQ ID NO: 4341801 - DNA, 25 bp, Homo sapien
agacctgaggttgtgcatttctaac

SEQ ID NO: 4341802 - DNA, 25 bp, Homo sapien
taacaaagtgccagctgaaactgca

SEQ ID NO: 4341803 - DNA, 25 bp, Homo sapien
tgcatttctaacaaagtgccagctg

SEQ ID NO: 4341804 - DNA, 25 bp, Homo sapien
cgaaaatttgtccaggcaccatggc

SEQ ID NO: 4341805 - DNA, 25 bp, Homo sapien
tgtaacagcacatactttcccagta

SEQ ID NO: 4341806 - DNA, 25 bp, Homo sapien
tcatggcaatagattatcaggtgac

SEQ ID NO: 4341807 - DNA, 25 bp, Homo sapien
tctcataaagcagtgtaaacacctc

SEQ ID NO: 4341808 - DNA, 25 bp, Homo sapien
gcttcggtgcacgtgcagagctgcc

SEQ ID NO: 4341809 - DNA, 25 bp, Homo sapien
gatccacccagttgcatcgaagctt

SEQ ID NO: 4341810 - DNA, 25 bp, Homo sapien
gatatttgaagaccggaagtttgca

SEQ ID NO: 4341811 - DNA, 25 bp, Homo sapien
tcaggcttatgcaaaagaaggagac

SEQ ID NO: 4341812 - DNA, 25 bp, Homo sapien
agcttcctgggcagatctagtaaat

SEQ ID NO: 4341813 - DNA, 25 bp, Homo sapien
cttcctgggcagatctagtaaatgc

SEQ ID NO: 4341814 - DNA, 25 bp, Homo sapien
gatctagtaaatgctcacgtggtgc

SEQ ID NO: 4341815 - DNA, 25 bp, Homo sapien
aaatgctcacgtggtgccaggctca

SEQ ID NO: 4341816 - DNA, 25 bp, Homo sapien
tatgagttaccctgcaatccctttg

SEQ ID NO: 4341817 - DNA, 25 bp, Homo sapien
gtctggtttagaagcacatttgcct

SEQ ID NO: 4341818 - DNA, 25 bp, Homo sapien
aaaggaaggccgcaatagaaataca

SEQ ID NO: 4341819 - DNA, 25 bp, Homo sapien
tcatagggcctttcacatttgtaat

SEQ ID NO: 4341820 - DNA, 25 bp, Homo sapien
gacttcatggccctgcgggaaaaaa

SEQ ID NO: 4341821 - DNA, 25 bp, Homo sapien
ggcatagccatcacgcagaaaagtc

SEQ ID NO: 4341822 - DNA, 25 bp, Homo sapien
taaacaaacacggacaggagaggaa

SEQ ID NO: 4341823 - DNA, 25 bp, Homo sapien
gatgacttcgtgtgggaaccaccac

SEQ ID NO: 4341824 - DNA, 25 bp, Homo sapien
tatttcattgggacaacaagctgga

SEQ ID NO: 4341825 - DNA, 25 bp, Homo sapien
tgcctacctagggagctgtgatcaa

SEQ ID NO: 4341826 - DNA, 25 bp, Homo sapien
gctttatcccaagctcggagggacg

SEQ ID NO: 4341827 - DNA, 25 bp, Homo sapien
tggcccaggctcactagaaggtctt

SEQ ID NO: 4341828 - DNA, 25 bp, Homo sapien
taggctttctgtataatggatttga

SEQ ID NO: 4341829 - DNA, 25 bp, Homo sapien
cagtgtgcgtggagataggctttct

SEQ ID NO: 4341830 - DNA, 25 bp, Homo sapien
gccattgtaggatttgttgaacttg

SEQ ID NO: 4341831 - DNA, 25 bp, Homo sapien
gatttgttgaacttgttgaaggtga

SEQ ID NO: 4341832 - DNA, 25 bp, Homo sapien
cctgttggtctgtgctctctctgag

SEQ ID NO: 4341833 - DNA, 25 bp, Homo sapien
caagcccaggttcagcagaaactga

SEQ ID NO: 4341834 - DNA, 25 bp, Homo sapien
taacataccgctgaactcaaccacg

SEQ ID NO: 4341835 - DNA, 25 bp, Homo sapien
gaacagggatctgtgcagctcactc

SEQ ID NO: 4341836 - DNA, 25 bp, Homo sapien
ccaacaaggaggatgctaccgacca

SEQ ID NO: 4341837 - DNA, 25 bp, Homo sapien
catttcatagcgggccctggatcgc

SEQ ID NO: 4341838 - DNA, 25 bp, Homo sapien
ccctggatcgctcgctctgaaactt

SEQ ID NO: 4341839 - DNA, 25 bp, Homo sapien
aaactccctccggtcgtggatggtg

SEQ ID NO: 4341840 - DNA, 25 bp, Homo sapien
tctcccttagatcctcaggagggtt

SEQ ID NO: 4341841 - DNA, 25 bp, Homo sapien
agcatggtaagcaaagccactagca

SEQ ID NO: 4341842 - DNA, 25 bp, Homo sapien
ccctctcacgcaactgcaggcattt

SEQ ID NO: 4341843 - DNA, 25 bp, Homo sapien
gattcaaaagggacagtgactgttc

SEQ ID NO: 4341844 - DNA, 25 bp, Homo sapien
tagaaacatagcacagcctcctggt

SEQ ID NO: 4341845 - DNA, 25 bp, Homo sapien
ggttttgtagaaacatagcacagcc

SEQ ID NO: 4341846 - DNA, 25 bp, Homo sapien
gggagctccacataggtgaacatca

SEQ ID NO: 4341847 - DNA, 25 bp, Homo sapien
gacgcagtccttggcggttttgtag

SEQ ID NO: 4341848 - DNA, 25 bp, Homo sapien
gtgatcacctcatccctgcataggc

SEQ ID NO: 4341849 - DNA, 25 bp, Homo sapien
gagcagcaggcactcgacgcaatct

SEQ ID NO: 4341850 - DNA, 25 bp, Homo sapien
cctcatccctgcataggctgtggca

SEQ ID NO: 4341851 - DNA, 25 bp, Homo sapien
tcacctcatccctgcataggctgtg

SEQ ID NO: 4341852 - DNA, 25 bp, Homo sapien
gaatcagtctacactaggctctggc

SEQ ID NO: 4341853 - DNA, 25 bp, Homo sapien
tcttcggagacatctgggagaacag

SEQ ID NO: 4341854 - DNA, 25 bp, Homo sapien
gagcagccaaaaagtgacaccttga

SEQ ID NO: 4341855 - DNA, 25 bp, Homo sapien
tgcacgttcaactctccagggagct

SEQ ID NO: 4341856 - DNA, 25 bp, Homo sapien
ctcttggtgctgcatgcatccgggc

SEQ ID NO: 4341857 - DNA, 25 bp, Homo sapien
cttggtgctgcatgcatccgggcag

SEQ ID NO: 4341858 - DNA, 25 bp, Homo sapien
tcttggtgctgcatgcatccgggca

SEQ ID NO: 4341859 - DNA, 25 bp, Homo sapien
tgtcgagcagttacagttgtccccg

SEQ ID NO: 4341860 - DNA, 25 bp, Homo sapien
tctgccccggcatgtgctgatgtct

SEQ ID NO: 4341861 - DNA, 25 bp, Homo sapien
gctcgctgcagatctggccatctct

SEQ ID NO: 4341862 - DNA, 25 bp, Homo sapien
gttgtccccgatgtaacctgcatgg

SEQ ID NO: 4341863 - DNA, 25 bp, Homo sapien
gcagcggtccaggttcctcaccagt

SEQ ID NO: 4341864 - DNA, 25 bp, Homo sapien
aggagaggaatagtgccttgtctat

SEQ ID NO: 4341865 - DNA, 25 bp, Homo sapien
agagacggggccttgctatgttacc

SEQ ID NO: 4341866 - DNA, 25 bp, Homo sapien
cctccaccttctgggctccagtggt

SEQ ID NO: 4341867 - DNA, 25 bp, Homo sapien
tagagacggggccttgctatgttac

SEQ ID NO: 4341868 - DNA, 25 bp, Homo sapien
ccaccttctgggctccagtggtcct

SEQ ID NO: 4341869 - DNA, 25 bp, Homo sapien
gagacctctgtcatggaagtcacct

SEQ ID NO: 4341870 - DNA, 25 bp, Homo sapien
cagtactgtaacaagccatttgtga

SEQ ID NO: 4341871 - DNA, 25 bp, Homo sapien
tgaaatatgccaattgcaatgacag

SEQ ID NO: 4341872 - DNA, 25 bp, Homo sapien
aaggacggctgccaggctactgatt

SEQ ID NO: 4341873 - DNA, 25 bp, Homo sapien
tcttacagccacgagaccaaaaggg

SEQ ID NO: 4341874 - DNA, 25 bp, Homo sapien
gcatctgggttgaaactgacctcag

SEQ ID NO: 4341875 - DNA, 25 bp, Homo sapien
tacatgagaccttactcagaggtgc

SEQ ID NO: 4341876 - DNA, 25 bp, Homo sapien
taaaggtgagacgtatacatgagac

SEQ ID NO: 4341877 - DNA, 25 bp, Homo sapien
gagcatttcccgatcccgcaggatt

SEQ ID NO: 4341878 - DNA, 25 bp, Homo sapien
tcgttgatctaggagcctcaagggc

SEQ ID NO: 4341879 - DNA, 25 bp, Homo sapien
cacgcaggcttctagggtgaagaca

SEQ ID NO: 4341880 - DNA, 25 bp, Homo sapien
aatgaccagtattccccactgaggg

SEQ ID NO: 4341881 - DNA, 25 bp, Homo sapien
cacaggagaagttgtcgcactcaca

SEQ ID NO: 4341882 - DNA, 25 bp, Homo sapien
cagaaaggcccatagatcttgccaa

SEQ ID NO: 4341883 - DNA, 25 bp, Homo sapien
gcttcgggcctccaatgatacttca

SEQ ID NO: 4341884 - DNA, 25 bp, Homo sapien
ttgccaaactcgctctcgaagcagg

SEQ ID NO: 4341885 - DNA, 25 bp, Homo sapien
agaagggatatcatggctgcggcaa

SEQ ID NO: 4341886 - DNA, 25 bp, Homo sapien
gatgaagagcagctgcgaactccag

SEQ ID NO: 4341887 - DNA, 25 bp, Homo sapien
acgcactcaggtagaaccaccaaga

SEQ ID NO: 4341888 - DNA, 25 bp, Homo sapien
aaccaccaagatggccggagtagga

SEQ ID NO: 4341889 - DNA, 25 bp, Homo sapien
gggaccccttgatggtgatccccaa

SEQ ID NO: 4341890 - DNA, 25 bp, Homo sapien
gccgtgggctgggaacgatttgagc

SEQ ID NO: 4341891 - DNA, 25 bp, Homo sapien
tccacatctttctgccgtgggctgg

SEQ ID NO: 4341892 - DNA, 25 bp, Homo sapien
cccttgatggtgatccccaaagtgg

SEQ ID NO: 4341893 - DNA, 25 bp, Homo sapien
cgagtggatgtcagcacagtcactg

SEQ ID NO: 4341894 - DNA, 25 bp, Homo sapien
gtacgagtggatgtcagcacagtca

SEQ ID NO: 4341895 - DNA, 25 bp, Homo sapien
tacgagtggatgtcagcacagtcac

SEQ ID NO: 4341896 - DNA, 25 bp, Homo sapien
tgagtacgagtggatgtcagcacag

SEQ ID NO: 4341897 - DNA, 25 bp, Homo sapien
taaataatcatttgtgggcaggcat

SEQ ID NO: 4341898 - DNA, 25 bp, Homo sapien
cataaatacattgcaacttcctaca

SEQ ID NO: 4341899 - DNA, 25 bp, Homo sapien
aagttcacataaataggaagatggg

SEQ ID NO: 4341900 - DNA, 25 bp, Homo sapien
ctaaacaagacagggatccacatca

SEQ ID NO: 4341901 - DNA, 25 bp, Homo sapien
ggctgatcccagactgacaactcca

SEQ ID NO: 4341902 - DNA, 25 bp, Homo sapien
cccatcttggcaggtagcagtaaag

SEQ ID NO: 4341903 - DNA, 25 bp, Homo sapien
tcacacttcctctgaccaggatagg

SEQ ID NO: 4341904 - DNA, 25 bp, Homo sapien
gatcctcaggctgatcccagactga

SEQ ID NO: 4341905 - DNA, 25 bp, Homo sapien
tgatccctgtcacacattaggctgt

SEQ ID NO: 4341906 - DNA, 25 bp, Homo sapien
caaaactatgagtgctggagggcag

SEQ ID NO: 4341907 - DNA, 25 bp, Homo sapien
tttccaaggtgcagcatgatccctg

SEQ ID NO: 4341908 - DNA, 25 bp, Homo sapien
tatcgtggttgtaagggtctctgcc

SEQ ID NO: 4341909 - DNA, 25 bp, Homo sapien
tctatggagctgtgcgccatgatgc

SEQ ID NO: 4341910 - DNA, 25 bp, Homo sapien
cctctgatatcaaagccgccaggag

SEQ ID NO: 4341911 - DNA, 25 bp, Homo sapien
gagctgtgcgccatgatgccctctg

SEQ ID NO: 4341912 - DNA, 25 bp, Homo sapien
cccagccaggtctatggagctgtgc

SEQ ID NO: 4341913 - DNA, 25 bp, Homo sapien
gatgccataaccatcttgggaccca

SEQ ID NO: 4341914 - DNA, 25 bp, Homo sapien
gcgccttgagcaggtgggtaggcaa

SEQ ID NO: 4341915 - DNA, 25 bp, Homo sapien
ggacccacaagagaagggatagcag

SEQ ID NO: 4341916 - DNA, 25 bp, Homo sapien
gaaggtccacacttcccaacacaag

SEQ ID NO: 4341917 - DNA, 25 bp, Homo sapien
catctaaaatctccaccgttgttcc

SEQ ID NO: 4341918 - DNA, 25 bp, Homo sapien
gagtctccatctaaaatctccaccg

SEQ ID NO: 4341919 - DNA, 25 bp, Homo sapien
tctccatctaaaatctccaccgttg

SEQ ID NO: 4341920 - DNA, 25 bp, Homo sapien
tggagtctccatctaaaatctccac

SEQ ID NO: 4341921 - DNA, 25 bp, Homo sapien
cattgatttgaactaaaggaggata

SEQ ID NO: 4341922 - DNA, 25 bp, Homo sapien
cagtgataatctcaggcaggagcaa

SEQ ID NO: 4341923 - DNA, 25 bp, Homo sapien
tcaagagcaagaaggagagggaact

SEQ ID NO: 4341924 - DNA, 25 bp, Homo sapien
cctgaataggctttatcctgctatc

SEQ ID NO: 4341925 - DNA, 25 bp, Homo sapien
gattgtgagaaggagcacgttcatg

SEQ ID NO: 4341926 - DNA, 25 bp, Homo sapien
tgagcacaccgaggagatctgtaat

SEQ ID NO: 4341927 - DNA, 25 bp, Homo sapien
gtaattcaaacttggctcatctgtg

SEQ ID NO: 4341928 - DNA, 25 bp, Homo sapien
ttgtgagaaggagcacgttcatgtg

SEQ ID NO: 4341929 - DNA, 25 bp, Homo sapien
gacgtagcctgatgagatgccttac

SEQ ID NO: 4341930 - DNA, 25 bp, Homo sapien
ttgggaatttctgcgccagactagc

SEQ ID NO: 4341931 - DNA, 25 bp, Homo sapien
tctcctatagtctgcaggctcaggc

SEQ ID NO: 4341932 - DNA, 25 bp, Homo sapien
tcaagactgggctatattccacccc

SEQ ID NO: 4341933 - DNA, 25 bp, Homo sapien
agcatataatggttttttgtcactg

SEQ ID NO: 4341934 - DNA, 25 bp, Homo sapien
cagcatataatggttttttgtcact

SEQ ID NO: 4341935 - DNA, 25 bp, Homo sapien
ttggcctcgttcaggtggcactggc

SEQ ID NO: 4341936 - DNA, 25 bp, Homo sapien
catcatctgttgtgaacaccagcaa

SEQ ID NO: 4341937 - DNA, 25 bp, Homo sapien
gatgcagtgtactcgttggcctcgt

SEQ ID NO: 4341938 - DNA, 25 bp, Homo sapien
tggcactggccatcgtgtggctgca

SEQ ID NO: 4341939 - DNA, 25 bp, Homo sapien
gggcagctcccacagtagatctgag

SEQ ID NO: 4341940 - DNA, 25 bp, Homo sapien
cagggacaggaccagaaaggaaagt

SEQ ID NO: 4341941 - DNA, 25 bp, Homo sapien
cccatgcagggacaggaccagaaag

SEQ ID NO: 4341942 - DNA, 25 bp, Homo sapien
cttgacctccccatgcagggacagg

SEQ ID NO: 4341943 - DNA, 25 bp, Homo sapien
ctccccatgcagggacaggaccaga

SEQ ID NO: 4341944 - DNA, 25 bp, Homo sapien
cagcagatggcggaacccaaaggag

SEQ ID NO: 4341945 - DNA, 25 bp, Homo sapien
gtactgcatcaaagcccccctcagg

SEQ ID NO: 4341946 - DNA, 25 bp, Homo sapien
cctcattgaagctgtccactctgtc

SEQ ID NO: 4341947 - DNA, 25 bp, Homo sapien
ctctgtttccgaacttcctcattga

SEQ ID NO: 4341948 - DNA, 25 bp, Homo sapien
ccaatgcacggattggtctggtacc

SEQ ID NO: 4341949 - DNA, 25 bp, Homo sapien
tacctcggtgccgtgtaggagaaag

SEQ ID NO: 4341950 - DNA, 25 bp, Homo sapien
tctggtacctcggtgccgtgtagga

SEQ ID NO: 4341951 - DNA, 25 bp, Homo sapien
gattggtctggtacctcggtgccgt

SEQ ID NO: 4341952 - DNA, 25 bp, Homo sapien
tagtacaggtccacaggatagtcct

SEQ ID NO: 4341953 - DNA, 25 bp, Homo sapien
tctcctccgcgagtttggtgcccag

SEQ ID NO: 4341954 - DNA, 25 bp, Homo sapien
gcccaggctccggatattgtccaag

SEQ ID NO: 4341955 - DNA, 25 bp, Homo sapien
ccacctggcgaacctgtagctggaa

SEQ ID NO: 4341956 - DNA, 25 bp, Homo sapien
gtccctttgtatcctaagaggctat

SEQ ID NO: 4341957 - DNA, 25 bp, Homo sapien
aagaggctatctattctgaagcaag

SEQ ID NO: 4341958 - DNA, 25 bp, Homo sapien
tcctgtgaggataaaaagagagaca

SEQ ID NO: 4341959 - DNA, 25 bp, Homo sapien
cagccttgggcatacaaatttaacc

SEQ ID NO: 4341960 - DNA, 25 bp, Homo sapien
tacaggaactgctgtaaaagccagt

SEQ ID NO: 4341961 - DNA, 25 bp, Homo sapien
aaaagccagttgatagtcaaaccag

SEQ ID NO: 4341962 - DNA, 25 bp, Homo sapien
atttgtgtgatgcaactcttgtcta

SEQ ID NO: 4341963 - DNA, 25 bp, Homo sapien
tctaactctctaactcttctacagg

SEQ ID NO: 4341964 - DNA, 25 bp, Homo sapien
tcatctgaatgacgtcccagcctgc

SEQ ID NO: 4341965 - DNA, 25 bp, Homo sapien
agagcccgaacccttgctgctgagg

SEQ ID NO: 4341966 - DNA, 25 bp, Homo sapien
ggaggttcacggcaatctcctgtgg

SEQ ID NO: 4341967 - DNA, 25 bp, Homo sapien
tcacaccgagaggtgatggaccgtg

SEQ ID NO: 4341968 - DNA, 25 bp, Homo sapien
tggatgctggataatcattcaggag

SEQ ID NO: 4341969 - DNA, 25 bp, Homo sapien
ggagaacaatgtggcagtacaggtc

SEQ ID NO: 4341970 - DNA, 25 bp, Homo sapien
gaaactctatgtgatatatacggca

SEQ ID NO: 4341971 - DNA, 25 bp, Homo sapien
gtacaggtcatatccactgacccag

SEQ ID NO: 4341972 - DNA, 25 bp, Homo sapien
gtggcaacggaagcatggtcagttt

SEQ ID NO: 4341973 - DNA, 25 bp, Homo sapien
gacacctctctcactggtctggacc

SEQ ID NO: 4341974 - DNA, 25 bp, Homo sapien
caccagggtggcaacggaagcatgg

SEQ ID NO: 4341975 - DNA, 25 bp, Homo sapien
cggaagcatggtcagttttttcaga

SEQ ID NO: 4341976 - DNA, 25 bp, Homo sapien
gtatctgctgggaccatcaggagac

SEQ ID NO: 4341977 - DNA, 25 bp, Homo sapien
cttgtacagggccaaatgtatctgc

SEQ ID NO: 4341978 - DNA, 25 bp, Homo sapien
gggccaaatgtatctgctgggacca

SEQ ID NO: 4341979 - DNA, 25 bp, Homo sapien
aaatgtatctgctgggaccatcagg

SEQ ID NO: 4341980 - DNA, 25 bp, Homo sapien
ccctagtagtgtcgctggctttccc

SEQ ID NO: 4341981 - DNA, 25 bp, Homo sapien
tgaggcggacaggtcagtgcctatt

SEQ ID NO: 4341982 - DNA, 25 bp, Homo sapien
ggtcagtgcctattacaaccctagt

SEQ ID NO: 4341983 - DNA, 25 bp, Homo sapien
ctgaagaactgtgaggcggacaggt

SEQ ID NO: 4341984 - DNA, 25 bp, Homo sapien
ctggtccttctcccggatttcacag

SEQ ID NO: 4341985 - DNA, 25 bp, Homo sapien
ttctcccggatttcacagcagcctg

SEQ ID NO: 4341986 - DNA, 25 bp, Homo sapien
gtccttctcccggatttcacagcag

SEQ ID NO: 4341987 - DNA, 25 bp, Homo sapien
cttctcccggatttcacagcagcct

SEQ ID NO: 4341988 - DNA, 25 bp, Homo sapien
gagcaccaggcacattttgggtgga

SEQ ID NO: 4341989 - DNA, 25 bp, Homo sapien
cacattttgggtggattagcagaca

SEQ ID NO: 4341990 - DNA, 25 bp, Homo sapien
gacattcttcacatgaggtggcact

SEQ ID NO: 4341991 - DNA, 25 bp, Homo sapien
tggcacttccactagtgcatatgtt

SEQ ID NO: 4341992 - DNA, 25 bp, Homo sapien
aaatccccgtacctgtcagcaatca

SEQ ID NO: 4341993 - DNA, 25 bp, Homo sapien
tttggtcaaatccccgtacctgtca

SEQ ID NO: 4341994 - DNA, 25 bp, Homo sapien
ggtcaaatccccgtacctgtcagca

SEQ ID NO: 4341995 - DNA, 25 bp, Homo sapien
tcaaatccccgtacctgtcagcaat

SEQ ID NO: 4341996 - DNA, 25 bp, Homo sapien
cctctgccatcttggatgtagggct

SEQ ID NO: 4341997 - DNA, 25 bp, Homo sapien
ctgccatcttggatgtagggctggt

SEQ ID NO: 4341998 - DNA, 25 bp, Homo sapien
gtgtgacctgctgagctctagggtc

SEQ ID NO: 4341999 - DNA, 25 bp, Homo sapien
tggtgtgacctgctgagctctaggg

SEQ ID NO: 4342000 - DNA, 25 bp, Homo sapien
tatcccagcagttctcattcaagac

SEQ ID NO: 4342001 - DNA, 25 bp, Homo sapien
tagactccagcaactaaatagccat

SEQ ID NO: 4342002 - DNA, 25 bp, Homo sapien
gggtccaaggtcagacaactactac

SEQ ID NO: 4342003 - DNA, 25 bp, Homo sapien
tatgccctaggaaggttctatccca

SEQ ID NO: 4342004 - DNA, 25 bp, Homo sapien
ccttcctgagcccatatgagaaaat

SEQ ID NO: 4342005 - DNA, 25 bp, Homo sapien
ttccttcctgagcccatatgagaaa

SEQ ID NO: 4342006 - DNA, 25 bp, Homo sapien
tccttcctgagcccatatgagaaaa

SEQ ID NO: 4342007 - DNA, 25 bp, Homo sapien
ggaggcaggcgtacagcggcgccgg

SEQ ID NO: 4342008 - DNA, 25 bp, Homo sapien
caggcgtacagcggcgccggggccc

SEQ ID NO: 4342009 - DNA, 25 bp, Homo sapien
gaggcaggcgtacagcggcgccggg

SEQ ID NO: 4342010 - DNA, 25 bp, Homo sapien
gcaggcgtacagcggcgccggggcc

SEQ ID NO: 4342011 - DNA, 25 bp, Homo sapien
ggtcgctgcactccgcgggggccgg

SEQ ID NO: 4342012 - DNA, 25 bp, Homo sapien
tcagcggcggcgcggtcgctgcact

SEQ ID NO: 4342013 - DNA, 25 bp, Homo sapien
gcggtcgctgcactccgcgggggcc

SEQ ID NO: 4342014 - DNA, 25 bp, Homo sapien
cgctgcactccgcgggggccggcgg

SEQ ID NO: 4342015 - DNA, 25 bp, Homo sapien
ctggcccgcgccccgccgccaccat

SEQ ID NO: 4342016 - DNA, 25 bp, Homo sapien
cgcgctggcccgcgccccgccgcca

SEQ ID NO: 4342017 - DNA, 25 bp, Homo sapien
tcacggcgcccgcgctggcccgcgc

SEQ ID NO: 4342018 - DNA, 25 bp, Homo sapien
gcgctggcccgcgccccgccgccac

SEQ ID NO: 4342019 - DNA, 25 bp, Homo sapien
tggccggccgggactcctagtgtgt

SEQ ID NO: 4342020 - DNA, 25 bp, Homo sapien
actcctagtgtgtcgccgctcggga

SEQ ID NO: 4342021 - DNA, 25 bp, Homo sapien
ccgggactcctagtgtgtcgccgct

SEQ ID NO: 4342022 - DNA, 25 bp, Homo sapien
gcactcacggccgagtcccgggacc

SEQ ID NO: 4342023 - DNA, 25 bp, Homo sapien
cacacggtcagcttacggtgaggcg

SEQ ID NO: 4342024 - DNA, 25 bp, Homo sapien
gccgccacacggtcagcttacggtg

SEQ ID NO: 4342025 - DNA, 25 bp, Homo sapien
cgcggaggccctacgggcccaggtg

SEQ ID NO: 4342026 - DNA, 25 bp, Homo sapien
ggcccaggtggaagtcgcttgcgac

SEQ ID NO: 4342027 - DNA, 25 bp, Homo sapien
tacttgggccaaaggcggttgctag

SEQ ID NO: 4342028 - DNA, 25 bp, Homo sapien
tcgaaaccactgagtagagcccgct

SEQ ID NO: 4342029 - DNA, 25 bp, Homo sapien
gagtagagcccgctcccgttgctta

SEQ ID NO: 4342030 - DNA, 25 bp, Homo sapien
gcacgctgtattaggcgagccgaga

SEQ ID NO: 4342031 - DNA, 25 bp, Homo sapien
ggagagcaggtacgggggtcgtgcc

SEQ ID NO: 4342032 - DNA, 25 bp, Homo sapien
ggggtcgtgccggtaccgcctcatc

SEQ ID NO: 4342033 - DNA, 25 bp, Homo sapien
gtcgtgccggtaccgcctcatcctc

SEQ ID NO: 4342034 - DNA, 25 bp, Homo sapien
gggagagcaggtacgggggtcgtgc

SEQ ID NO: 4342035 - DNA, 25 bp, Homo sapien
gttgtccttactgataatctgtcag

SEQ ID NO: 4342036 - DNA, 25 bp, Homo sapien
ctgggctcaaaggttcctccacctt

SEQ ID NO: 4342037 - DNA, 25 bp, Homo sapien
tgcacctttcaaggatttgagactg

SEQ ID NO: 4342038 - DNA, 25 bp, Homo sapien
agactggccaatatgccgctatatt

SEQ ID NO: 4342039 - DNA, 25 bp, Homo sapien
tcagtagagcttagacatggaggaa

SEQ ID NO: 4342040 - DNA, 25 bp, Homo sapien
aatgccctctttccgctggagcaaa

SEQ ID NO: 4342041 - DNA, 25 bp, Homo sapien
tcacaatgcgttcctcttttcctgg

SEQ ID NO: 4342042 - DNA, 25 bp, Homo sapien
tttttcacatcggatattgcttatg

SEQ ID NO: 4342043 - DNA, 25 bp, Homo sapien
gactagagagctgttcacaaagtgc

SEQ ID NO: 4342044 - DNA, 25 bp, Homo sapien
tattcaggtgaggtccattgtccaa

SEQ ID NO: 4342045 - DNA, 25 bp, Homo sapien
caaagtgctatcttcctagacaagt

SEQ ID NO: 4342046 - DNA, 25 bp, Homo sapien
gattgatgcagagcagtaatgacct

SEQ ID NO: 4342047 - DNA, 25 bp, Homo sapien
gaggcctttgatggtttgccccagg

SEQ ID NO: 4342048 - DNA, 25 bp, Homo sapien
caattaatggcaaactggagttctc

SEQ ID NO: 4342049 - DNA, 25 bp, Homo sapien
gagttctcggagaaccctcagggaa

SEQ ID NO: 4342050 - DNA, 25 bp, Homo sapien
cagggaaaacccagacagatcttgc

SEQ ID NO: 4342051 - DNA, 25 bp, Homo sapien
aggttgtagtgagtcgagatctcgc

SEQ ID NO: 4342052 - DNA, 25 bp, Homo sapien
ggttgtagtgagtcgagatctcgcc

SEQ ID NO: 4342053 - DNA, 25 bp, Homo sapien
gaggttgtagtgagtcgagatctcg

SEQ ID NO: 4342054 - DNA, 25 bp, Homo sapien
gttgtagtgagtcgagatctcgcca

SEQ ID NO: 4342055 - DNA, 25 bp, Homo sapien
tggggcttcttgtccacaatgtgac

SEQ ID NO: 4342056 - DNA, 25 bp, Homo sapien
gggcttcttgtccacaatgtgactc

SEQ ID NO: 4342057 - DNA, 25 bp, Homo sapien
tcttgtccacaatgtgactcttggc

SEQ ID NO: 4342058 - DNA, 25 bp, Homo sapien
gcttcttgtccacaatgtgactctt

SEQ ID NO: 4342059 - DNA, 25 bp, Homo sapien
gagagtgagcttgtgacccttgaaa

SEQ ID NO: 4342060 - DNA, 25 bp, Homo sapien
gaaatggttcttgttgccctaccag

SEQ ID NO: 4342061 - DNA, 25 bp, Homo sapien
aactgtagagtgcaccccatagtgg

SEQ ID NO: 4342062 - DNA, 25 bp, Homo sapien
cagttgatgcgtatgtctcccaggg

SEQ ID NO: 4342063 - DNA, 25 bp, Homo sapien
gcatctactacatttaatgtcatag

SEQ ID NO: 4342064 - DNA, 25 bp, Homo sapien
gagctggattcgttgcaaacattca

SEQ ID NO: 4342065 - DNA, 25 bp, Homo sapien
tcacaacttccattcagagaggctg

SEQ ID NO: 4342066 - DNA, 25 bp, Homo sapien
aaccccggaggccagatctttactg

SEQ ID NO: 4342067 - DNA, 25 bp, Homo sapien
catcagtctttctaaacactctaaa

SEQ ID NO: 4342068 - DNA, 25 bp, Homo sapien
ctttctaaacactctaaataatagc

SEQ ID NO: 4342069 - DNA, 25 bp, Homo sapien
aataatagcttgtacattggttggg

SEQ ID NO: 4342070 - DNA, 25 bp, Homo sapien
gggccatggcgggttccacattctt

SEQ ID NO: 4342071 - DNA, 25 bp, Homo sapien
taatagtcagggcggggcatgctgc

SEQ ID NO: 4342072 - DNA, 25 bp, Homo sapien
gctgtgtcttgaatagggattttgc

SEQ ID NO: 4342073 - DNA, 25 bp, Homo sapien
ctaatagtcagggcggggcatgctg

SEQ ID NO: 4342074 - DNA, 25 bp, Homo sapien
taggaaagacgctcccttctgctcc

SEQ ID NO: 4342075 - DNA, 25 bp, Homo sapien
gaagcctgtcgaccgcagttttaga

SEQ ID NO: 4342076 - DNA, 25 bp, Homo sapien
ccaagattggtgaagcctgtcgacc

SEQ ID NO: 4342077 - DNA, 25 bp, Homo sapien
gaaagtcttcgtcaatcaagttctc

SEQ ID NO: 4342078 - DNA, 25 bp, Homo sapien
aatatgcttcgttttgttatttgat

SEQ ID NO: 4342079 - DNA, 25 bp, Homo sapien
cttcaatatgcttcgttttgttatt

SEQ ID NO: 4342080 - DNA, 25 bp, Homo sapien
tcaatatgcttcgttttgttatttg

SEQ ID NO: 4342081 - DNA, 25 bp, Homo sapien
caatatgcttcgttttgttatttga

SEQ ID NO: 4342082 - DNA, 25 bp, Homo sapien
gctgagaatgacaatgccagcgatg

SEQ ID NO: 4342083 - DNA, 25 bp, Homo sapien
cccacaatagtgaggatcagctgaa

SEQ ID NO: 4342084 - DNA, 25 bp, Homo sapien
aatgccagcgatggtgcccacaata

SEQ ID NO: 4342085 - DNA, 25 bp, Homo sapien
aatcaatgcaattatcatgctgaga

SEQ ID NO: 4342086 - DNA, 25 bp, Homo sapien
tccttacagtcgagtccactgtagc

SEQ ID NO: 4342087 - DNA, 25 bp, Homo sapien
cttacagtcgagtccactgtagcca

SEQ ID NO: 4342088 - DNA, 25 bp, Homo sapien
tacagtcgagtccactgtagccaaa

SEQ ID NO: 4342089 - DNA, 25 bp, Homo sapien
tgtccttacagtcgagtccactgta

SEQ ID NO: 4342090 - DNA, 25 bp, Homo sapien
ttgcttgtgctgtgcgttgcaggca

SEQ ID NO: 4342091 - DNA, 25 bp, Homo sapien
ttgtgctgtgcgttgcaggcatcag

SEQ ID NO: 4342092 - DNA, 25 bp, Homo sapien
ttcctggtagccgggcacgcacgca

SEQ ID NO: 4342093 - DNA, 25 bp, Homo sapien
gccccaccactcttctttattaagc

SEQ ID NO: 4342094 - DNA, 25 bp, Homo sapien
gctaaaccattgaggcagtcatccg

SEQ ID NO: 4342095 - DNA, 25 bp, Homo sapien
tgcaggtcagatttgcaatcgcatg

SEQ ID NO: 4342096 - DNA, 25 bp, Homo sapien
gccataataatcacaccgaagggtc

SEQ ID NO: 4342097 - DNA, 25 bp, Homo sapien
cgcagtctggttacagccataataa

SEQ ID NO: 4342098 - DNA, 25 bp, Homo sapien
cagttgtaactgtgatgtaagcaga

SEQ ID NO: 4342099 - DNA, 25 bp, Homo sapien
tccacactgtgcttggtaatgcgaa

SEQ ID NO: 4342100 - DNA, 25 bp, Homo sapien
tgctttagccaattggacagttgta

SEQ ID NO: 4342101 - DNA, 25 bp, Homo sapien
tgtgcattgaatcttaccctcttgc

SEQ ID NO: 4342102 - DNA, 25 bp, Homo sapien
tggtttctgccaaaattgttactat

SEQ ID NO: 4342103 - DNA, 25 bp, Homo sapien
aacttgtcatcagcacgcatttcag

SEQ ID NO: 4342104 - DNA, 25 bp, Homo sapien
aaagttgcttgagctacttctaatt

SEQ ID NO: 4342105 - DNA, 25 bp, Homo sapien
gcttgagctacttctaattgcttta

SEQ ID NO: 4342106 - DNA, 25 bp, Homo sapien
acagtaagaattacagtctgtccat

SEQ ID NO: 4342107 - DNA, 25 bp, Homo sapien
ttcactatgcaagtcttgataggcc

SEQ ID NO: 4342108 - DNA, 25 bp, Homo sapien
gtcttgataggccatggaatgtttc

SEQ ID NO: 4342109 - DNA, 25 bp, Homo sapien
caagctagtaatttcactatgcaag

SEQ ID NO: 4342110 - DNA, 25 bp, Homo sapien
agtaatttcactatgcaagtcttga

SEQ ID NO: 4342111 - DNA, 25 bp, Homo sapien
tgtagaagagttgtagtaataccct

SEQ ID NO: 4342112 - DNA, 25 bp, Homo sapien
acatgtagaagagttgtagtaatac

SEQ ID NO: 4342113 - DNA, 25 bp, Homo sapien
ctttcttacatgtagaagagttgta

SEQ ID NO: 4342114 - DNA, 25 bp, Homo sapien
tttcttacatgtagaagagttgtag

SEQ ID NO: 4342115 - DNA, 25 bp, Homo sapien
tcatcttggcaaggattgctgggac

SEQ ID NO: 4342116 - DNA, 25 bp, Homo sapien
tgcagcttaacacataacgaattat

SEQ ID NO: 4342117 - DNA, 25 bp, Homo sapien
ggcaaaaacttgtattatgcagctt

SEQ ID NO: 4342118 - DNA, 25 bp, Homo sapien
cataacgaattatctgcacagggat

SEQ ID NO: 4342119 - DNA, 25 bp, Homo sapien
gggaggccctgatgattgattgtct

SEQ ID NO: 4342120 - DNA, 25 bp, Homo sapien
gatgattgattgtcttctgtggtgg

SEQ ID NO: 4342121 - DNA, 25 bp, Homo sapien
tggtctccaataaagcggtgccagt

SEQ ID NO: 4342122 - DNA, 25 bp, Homo sapien
ctgtgctgtttagggtgctggtctc

SEQ ID NO: 4342123 - DNA, 25 bp, Homo sapien
tgttacagcatcagctgagttgcct

SEQ ID NO: 4342124 - DNA, 25 bp, Homo sapien
gctactgtaggaccactagtcgcag

SEQ ID NO: 4342125 - DNA, 25 bp, Homo sapien
ctgtggtgctagcagtttcagggaa

SEQ ID NO: 4342126 - DNA, 25 bp, Homo sapien
cgcagtttctgtggttgttacagca

SEQ ID NO: 4342127 - DNA, 25 bp, Homo sapien
gcaagaagagtaagatgaatgatgg

SEQ ID NO: 4342128 - DNA, 25 bp, Homo sapien
gaagagtaagatgaatgatggcttt

SEQ ID NO: 4342129 - DNA, 25 bp, Homo sapien
caagaagagtaagatgaatgatggc

SEQ ID NO: 4342130 - DNA, 25 bp, Homo sapien
gagtaagatgaatgatggctttcat

SEQ ID NO: 4342131 - DNA, 25 bp, Homo sapien
tctctatagccatcctcttcagaat

SEQ ID NO: 4342132 - DNA, 25 bp, Homo sapien
cttctctatagccatcctcttcaga

SEQ ID NO: 4342133 - DNA, 25 bp, Homo sapien
ttatcacaaaggatgctgttgggac

SEQ ID NO: 4342134 - DNA, 25 bp, Homo sapien
aaggatgctgttgggacacatctgc

SEQ ID NO: 4342135 - DNA, 25 bp, Homo sapien
ttaaaccaaaccactgatgccaggg

SEQ ID NO: 4342136 - DNA, 25 bp, Homo sapien
tctgtacctgagaaatgggcacttc

SEQ ID NO: 4342137 - DNA, 25 bp, Homo sapien
gagttaaatcggcttacaggacacc

SEQ ID NO: 4342138 - DNA, 25 bp, Homo sapien
caacacagtttcatgcaggcaccaa

SEQ ID NO: 4342139 - DNA, 25 bp, Homo sapien
ggacagaacacttcattttgtggag

SEQ ID NO: 4342140 - DNA, 25 bp, Homo sapien
gatgatttgtcagctgtgacgtcag

SEQ ID NO: 4342141 - DNA, 25 bp, Homo sapien
tctggctccgatagaggagatgatt

SEQ ID NO: 4342142 - DNA, 25 bp, Homo sapien
tttctcgatgttgggattcttccca

SEQ ID NO: 4342143 - DNA, 25 bp, Homo sapien
aagtgtatgcctgggaatagcctcc

SEQ ID NO: 4342144 - DNA, 25 bp, Homo sapien
ggaatagcctccctacatggctctt

SEQ ID NO: 4342145 - DNA, 25 bp, Homo sapien
cagtggaagtgtatgcctgggaata

SEQ ID NO: 4342146 - DNA, 25 bp, Homo sapien
tatgcctgggaatagcctccctaca

SEQ ID NO: 4342147 - DNA, 25 bp, Homo sapien
tctccagttaggtgcgaggccgtga

SEQ ID NO: 4342148 - DNA, 25 bp, Homo sapien
tggagaccatgggacacaggagttc

SEQ ID NO: 4342149 - DNA, 25 bp, Homo sapien
ccttgaagaaacaaccatgcccggg

SEQ ID NO: 4342150 - DNA, 25 bp, Homo sapien
tccagaaatgtgaagcgggactccc

SEQ ID NO: 4342151 - DNA, 25 bp, Homo sapien
cccaaagaaggccaataaacacagt

SEQ ID NO: 4342152 - DNA, 25 bp, Homo sapien
gcaattaaagacaccgagtactgga

SEQ ID NO: 4342153 - DNA, 25 bp, Homo sapien
cacagttccccaggtggcaattaaa

SEQ ID NO: 4342154 - DNA, 25 bp, Homo sapien
tccaaaaccaggatgccccaaagaa

SEQ ID NO: 4342155 - DNA, 25 bp, Homo sapien
cgtttctggagggtgcgacatagcc

SEQ ID NO: 4342156 - DNA, 25 bp, Homo sapien
cattgcagttgtgtgcggtgcctca

SEQ ID NO: 4342157 - DNA, 25 bp, Homo sapien
ccaggctgggccctcatggatgaaa

SEQ ID NO: 4342158 - DNA, 25 bp, Homo sapien
tccacaatggtgatcgagtcccagg

SEQ ID NO: 4342159 - DNA, 25 bp, Homo sapien
aacctagaaacatatgaaaacactg

SEQ ID NO: 4342160 - DNA, 25 bp, Homo sapien
gacttcagtggtacgctcatcctca

SEQ ID NO: 4342161 - DNA, 25 bp, Homo sapien
aactgtagcataagacaacctagaa

SEQ ID NO: 4342162 - DNA, 25 bp, Homo sapien
cgttcaatggcgacatcttcagact

SEQ ID NO: 4342163 - DNA, 25 bp, Homo sapien
gatactggcccacattcacgttcac

SEQ ID NO: 4342164 - DNA, 25 bp, Homo sapien
cgttcacagtaacaacaaaggtgct

SEQ ID NO: 4342165 - DNA, 25 bp, Homo sapien
actgaagtctagtggtctgccctgg

SEQ ID NO: 4342166 - DNA, 25 bp, Homo sapien
aattgctgcctatggaagtgtctcg

SEQ ID NO: 4342167 - DNA, 25 bp, Homo sapien
tagagtccgtttcgttcaagttctg

SEQ ID NO: 4342168 - DNA, 25 bp, Homo sapien
cagtccagtgtaggccgggtagagt

SEQ ID NO: 4342169 - DNA, 25 bp, Homo sapien
aaatgcaagaatgccgtgatcctgg

SEQ ID NO: 4342170 - DNA, 25 bp, Homo sapien
atgaaagacgggttatactgtccgg

SEQ ID NO: 4342171 - DNA, 25 bp, Homo sapien
ttgctagttattgaaccgtgctggg

SEQ ID NO: 4342172 - DNA, 25 bp, Homo sapien
ctgaggagtcccgagtaaaggatga

SEQ ID NO: 4342173 - DNA, 25 bp, Homo sapien
gaagttggttcctatgatgtcacag

SEQ ID NO: 4342174 - DNA, 25 bp, Homo sapien
gacacaccagggtaaaataccagct

SEQ ID NO: 4342175 - DNA, 25 bp, Homo sapien
ttttcagctcagatacgcctgttcg

SEQ ID NO: 4342176 - DNA, 25 bp, Homo sapien
aaggcagcaagggttcaaggttgtc

SEQ ID NO: 4342177 - DNA, 25 bp, Homo sapien
gcagtttacaggaatatgacacagg

SEQ ID NO: 4342178 - DNA, 25 bp, Homo sapien
gacagctccacatggcacgagaagt

SEQ ID NO: 4342179 - DNA, 25 bp, Homo sapien
cgagtagtacacatccgtcatctgg

SEQ ID NO: 4342180 - DNA, 25 bp, Homo sapien
cgtcatctggaggaggtttttggta

SEQ ID NO: 4342181 - DNA, 25 bp, Homo sapien
gcatttcaatagcttctcggcccca

SEQ ID NO: 4342182 - DNA, 25 bp, Homo sapien
tcggccccattcttgtgagcgagga

SEQ ID NO: 4342183 - DNA, 25 bp, Homo sapien
catgcgattcactcatttaatggtt

SEQ ID NO: 4342184 - DNA, 25 bp, Homo sapien
aaacagttcacatatcatgcgattc

SEQ ID NO: 4342185 - DNA, 25 bp, Homo sapien
caatagaaacccaatctcagtggct

SEQ ID NO: 4342186 - DNA, 25 bp, Homo sapien
ggtttctggcatattcagacttgtg

SEQ ID NO: 4342187 - DNA, 25 bp, Homo sapien
gcaaaggaacgggattggaacctga

SEQ ID NO: 4342188 - DNA, 25 bp, Homo sapien
gaaccatctcaagtatcctgtaaaa

SEQ ID NO: 4342189 - DNA, 25 bp, Homo sapien
caaactgacccttgtatagcacagg

SEQ ID NO: 4342190 - DNA, 25 bp, Homo sapien
ggcaccaactatcgtgaattccctt

SEQ ID NO: 4342191 - DNA, 25 bp, Homo sapien
aacaatcagtgcgatgcctaggatg

SEQ ID NO: 4342192 - DNA, 25 bp, Homo sapien
acaggtaacaatcagtgcgatgcct

SEQ ID NO: 4342193 - DNA, 25 bp, Homo sapien
tcagtgcgatgcctaggatgagcag

SEQ ID NO: 4342194 - DNA, 25 bp, Homo sapien
ggtaacaatcagtgcgatgcctagg

SEQ ID NO: 4342195 - DNA, 25 bp, Homo sapien
atcaccacagtgataagctgatagg

SEQ ID NO: 4342196 - DNA, 25 bp, Homo sapien
aaagcatattggctggaggtaatga

SEQ ID NO: 4342197 - DNA, 25 bp, Homo sapien
aaaagcatattggctggaggtaatg

SEQ ID NO: 4342198 - DNA, 25 bp, Homo sapien
gaggcaaccctaggttagactccgc

SEQ ID NO: 4342199 - DNA, 25 bp, Homo sapien
gagtagctcctcaatagatacacat

SEQ ID NO: 4342200 - DNA, 25 bp, Homo sapien
tagactccgcaattttataaggaac

SEQ ID NO: 4342201 - DNA, 25 bp, Homo sapien
tcactgcatcaaccatgctagggac

SEQ ID NO: 4342202 - DNA, 25 bp, Homo sapien
cttctgtgttatcttgccatggtcc

SEQ ID NO: 4342203 - DNA, 25 bp, Homo sapien
cactggcatagacgagggcttctca

SEQ ID NO: 4342204 - DNA, 25 bp, Homo sapien
cacacggcagaccacaagttgtgta

SEQ ID NO: 4342205 - DNA, 25 bp, Homo sapien
caactcgactgtggactgatatatt

SEQ ID NO: 4342206 - DNA, 25 bp, Homo sapien
gatgggatctactggactatctgct

SEQ ID NO: 4342207 - DNA, 25 bp, Homo sapien
ggtgggcacactcggacatgtaaca

SEQ ID NO: 4342208 - DNA, 25 bp, Homo sapien
cagtctttctcaagcaatggctcca

SEQ ID NO: 4342209 - DNA, 25 bp, Homo sapien
ggatcaattagttacttcccaggaa

SEQ ID NO: 4342210 - DNA, 25 bp, Homo sapien
tcgcttaggctagctgggctcactt

SEQ ID NO: 4342211 - DNA, 25 bp, Homo sapien
aataaactctctttgtcgcttaggc

SEQ ID NO: 4342212 - DNA, 25 bp, Homo sapien
tcatggcaacatgtgctctcacagg

SEQ ID NO: 4342213 - DNA, 25 bp, Homo sapien
acagaattttctaggtagccacatt

SEQ ID NO: 4342214 - DNA, 25 bp, Homo sapien
agggtgtgaacatacccggtgccca

SEQ ID NO: 4342215 - DNA, 25 bp, Homo sapien
aagggaggccagtcaagaccgagta

SEQ ID NO: 4342216 - DNA, 25 bp, Homo sapien
tttgcaagtctacaaccagggtgtg

SEQ ID NO: 4342217 - DNA, 25 bp, Homo sapien
tagtcctcgctagcagaagggttgg

SEQ ID NO: 4342218 - DNA, 25 bp, Homo sapien
tttccacagttgagaccaccaaggc

SEQ ID NO: 4342219 - DNA, 25 bp, Homo sapien
gcaggtttcattttcaagcctatat

SEQ ID NO: 4342220 - DNA, 25 bp, Homo sapien
tttcaagcctatatccatcttcaca

SEQ ID NO: 4342221 - DNA, 25 bp, Homo sapien
ttcaagcctatatccatcttcacat

SEQ ID NO: 4342222 - DNA, 25 bp, Homo sapien
tttcaccctgttgctcaggcttgtc

SEQ ID NO: 4342223 - DNA, 25 bp, Homo sapien
ggtttcaccctgttgctcaggcttg

SEQ ID NO: 4342224 - DNA, 25 bp, Homo sapien
tcaccctgttgctcaggcttgtctc

SEQ ID NO: 4342225 - DNA, 25 bp, Homo sapien
caccctgttgctcaggcttgtctcg

SEQ ID NO: 4342226 - DNA, 25 bp, Homo sapien
gtccgggaacctcagcacttaagtg

SEQ ID NO: 4342227 - DNA, 25 bp, Homo sapien
cagctgctctttattttagggaccc

SEQ ID NO: 4342228 - DNA, 25 bp, Homo sapien
cttttagcaagcgtgcaggaccctg

SEQ ID NO: 4342229 - DNA, 25 bp, Homo sapien
tctggcctcaacaaaacagtccgtt

SEQ ID NO: 4342230 - DNA, 25 bp, Homo sapien
gtatccaaacctaacaaagtcagag

SEQ ID NO: 4342231 - DNA, 25 bp, Homo sapien
cctggagagctgatgatgcgcactt

SEQ ID NO: 4342232 - DNA, 25 bp, Homo sapien
cacggcactgagacatgctgtgtcc

SEQ ID NO: 4342233 - DNA, 25 bp, Homo sapien
tagtcacacatcaggacctaggccc

SEQ ID NO: 4342234 - DNA, 25 bp, Homo sapien
taatgtattcaatcctgccacgagc

SEQ ID NO: 4342235 - DNA, 25 bp, Homo sapien
aatttaattggccagaccagcatgc

SEQ ID NO: 4342236 - DNA, 25 bp, Homo sapien
ggaccaaatacaagagcagatgctg

SEQ ID NO: 4342237 - DNA, 25 bp, Homo sapien
tacaaagggcctctatatccactgc

SEQ ID NO: 4342238 - DNA, 25 bp, Homo sapien
gggcaacgccgtccaggtcagtgca

SEQ ID NO: 4342239 - DNA, 25 bp, Homo sapien
gaaagtatcccgacttgcactggca

SEQ ID NO: 4342240 - DNA, 25 bp, Homo sapien
tctttgtcacattcgggactcttcc

SEQ ID NO: 4342241 - DNA, 25 bp, Homo sapien
gggactcttccgcttgcacaagctg

SEQ ID NO: 4342242 - DNA, 25 bp, Homo sapien
cagggactggttggtacacatggcc

SEQ ID NO: 4342243 - DNA, 25 bp, Homo sapien
cacaatgagggtgcataggcctcct

SEQ ID NO: 4342244 - DNA, 25 bp, Homo sapien
tcttaggaagccgagacttggacta

SEQ ID NO: 4342245 - DNA, 25 bp, Homo sapien
taatggccccgtgtcttccaaagga

SEQ ID NO: 4342246 - DNA, 25 bp, Homo sapien
ctcttatcccagaatgaagggctaa

SEQ ID NO: 4342247 - DNA, 25 bp, Homo sapien
tggaagttatggaacccaggcccac

SEQ ID NO: 4342248 - DNA, 25 bp, Homo sapien
ccaggcccactgggaatgtcaatgt

SEQ ID NO: 4342249 - DNA, 25 bp, Homo sapien
gctctgtaatatacaggcccactcc

SEQ ID NO: 4342250 - DNA, 25 bp, Homo sapien
aaagatccgcctctgagatcccaag

SEQ ID NO: 4342251 - DNA, 25 bp, Homo sapien
ctaaagatccgcctctgagatccca

SEQ ID NO: 4342252 - DNA, 25 bp, Homo sapien
ccgcctctgagatcccaagagctgg

SEQ ID NO: 4342253 - DNA, 25 bp, Homo sapien
gatccgcctctgagatcccaagagc

SEQ ID NO: 4342254 - DNA, 25 bp, Homo sapien
tatcagccaggtcaaatagcgtcac

SEQ ID NO: 4342255 - DNA, 25 bp, Homo sapien
cagtgagatcaccaccgcgttggac

SEQ ID NO: 4342256 - DNA, 25 bp, Homo sapien
cgtcacattggaggccagggaaaag

SEQ ID NO: 4342257 - DNA, 25 bp, Homo sapien
tcaaatagcgtcacattggaggcca

SEQ ID NO: 4342258 - DNA, 25 bp, Homo sapien
ctaggtaacgctgaaaaacacatat

SEQ ID NO: 4342259 - DNA, 25 bp, Homo sapien
gatgtaactaggtaacgctgaaaaa

SEQ ID NO: 4342260 - DNA, 25 bp, Homo sapien
ctagaggcgtgaactgtagatcgga

SEQ ID NO: 4342261 - DNA, 25 bp, Homo sapien
tagaggcgtgaactgtagatcggat

SEQ ID NO: 4342262 - DNA, 25 bp, Homo sapien
cagctgtggcgaagggacaagtata

SEQ ID NO: 4342263 - DNA, 25 bp, Homo sapien
gagctatcgagactcctttcccgga

SEQ ID NO: 4342264 - DNA, 25 bp, Homo sapien
ttcccggagtggagggtctcagtac

SEQ ID NO: 4342265 - DNA, 25 bp, Homo sapien
tgagcgccacgtaatgcaaaggact

SEQ ID NO: 4342266 - DNA, 25 bp, Homo sapien
ttaaactctgtcacgaaggttctaa

SEQ ID NO: 4342267 - DNA, 25 bp, Homo sapien
taaaggatccctgagtattgttgca

SEQ ID NO: 4342268 - DNA, 25 bp, Homo sapien
ccgggcatttgcagataaaggatcc

SEQ ID NO: 4342269 - DNA, 25 bp, Homo sapien
gggttcgacaggcactcattcacat

SEQ ID NO: 4342270 - DNA, 25 bp, Homo sapien
caactggtacccaaccgggcatttg

SEQ ID NO: 4342271 - DNA, 25 bp, Homo sapien
ctggtgttgtctgcgacgcattcgc

SEQ ID NO: 4342272 - DNA, 25 bp, Homo sapien
cgacgcattcgccattgtgaagaca

SEQ ID NO: 4342273 - DNA, 25 bp, Homo sapien
tgaagacaagggttcacagcacagc

SEQ ID NO: 4342274 - DNA, 25 bp, Homo sapien
ggcacctgcagtggtagccacggct

SEQ ID NO: 4342275 - DNA, 25 bp, Homo sapien
cattttaggtcgcaaaacagaagct

SEQ ID NO: 4342276 - DNA, 25 bp, Homo sapien
ggaagcattttaggtcgcaaaacag

SEQ ID NO: 4342277 - DNA, 25 bp, Homo sapien
gtgagaaaattaggcccacccatga

SEQ ID NO: 4342278 - DNA, 25 bp, Homo sapien
gaagcattatacaacacaggggtga

SEQ ID NO: 4342279 - DNA, 25 bp, Homo sapien
tgtagctctcagtgctggactgggc

SEQ ID NO: 4342280 - DNA, 25 bp, Homo sapien
gggccttgcagttaacatgtgcttg

SEQ ID NO: 4342281 - DNA, 25 bp, Homo sapien
cagtgctggactgggccttgcagtt

SEQ ID NO: 4342282 - DNA, 25 bp, Homo sapien
catgaaccccgagccccatgtagct

SEQ ID NO: 4342283 - DNA, 25 bp, Homo sapien
tgctgtaacgccaagctttgtggtc

SEQ ID NO: 4342284 - DNA, 25 bp, Homo sapien
tagtctgtacggctatagggccagt

SEQ ID NO: 4342285 - DNA, 25 bp, Homo sapien
ggagccaagtcttcagccgtggaaa

SEQ ID NO: 4342286 - DNA, 25 bp, Homo sapien
tgtgggtacactggtcaaagggatc

SEQ ID NO: 4342287 - DNA, 25 bp, Homo sapien
tttgttgttacagctttggtggact

SEQ ID NO: 4342288 - DNA, 25 bp, Homo sapien
ggagagtttgttgttacagctttgg

SEQ ID NO: 4342289 - DNA, 25 bp, Homo sapien
gagtttgttgttacagctttggtgg

SEQ ID NO: 4342290 - DNA, 25 bp, Homo sapien
gcaaaggagagtttgttgttacagc

SEQ ID NO: 4342291 - DNA, 25 bp, Homo sapien
gtctgcagtttgactactatggagc

SEQ ID NO: 4342292 - DNA, 25 bp, Homo sapien
ctatggagcattgtcatgaatgatg

SEQ ID NO: 4342293 - DNA, 25 bp, Homo sapien
gactactatggagcattgtcatgaa

SEQ ID NO: 4342294 - DNA, 25 bp, Homo sapien
caccaggcttggtgactttgattct

SEQ ID NO: 4342295 - DNA, 25 bp, Homo sapien
gaagtcacaggagtctcccttgccc

SEQ ID NO: 4342296 - DNA, 25 bp, Homo sapien
tgtggatgcatcagaggtagacttt

SEQ ID NO: 4342297 - DNA, 25 bp, Homo sapien
ctttagtagatgcacagaggccctg

SEQ ID NO: 4342298 - DNA, 25 bp, Homo sapien
cagatgtagatgtcgttaaggatac

SEQ ID NO: 4342299 - DNA, 25 bp, Homo sapien
acaaactcagcatcagtgtccagaa

SEQ ID NO: 4342300 - DNA, 25 bp, Homo sapien
taacaaactcagcatcagtgtccag

SEQ ID NO: 4342301 - DNA, 25 bp, Homo sapien
aaactcagcatcagtgtccagaaca

SEQ ID NO: 4342302 - DNA, 25 bp, Homo sapien
actcagcatcagtgtccagaacaac

SEQ ID NO: 4342303 - DNA, 25 bp, Homo sapien
gcagaactggcgactcagtagaagg

SEQ ID NO: 4342304 - DNA, 25 bp, Homo sapien
catattaatggtgggtgtgtaggac

SEQ ID NO: 4342305 - DNA, 25 bp, Homo sapien
acggaaggttggatgtatgcagaac

SEQ ID NO: 4342306 - DNA, 25 bp, Homo sapien
ttcggcatattaatggtgggtgtgt

SEQ ID NO: 4342307 - DNA, 25 bp, Homo sapien
gcatattccccgtcataggatgaga

SEQ ID NO: 4342308 - DNA, 25 bp, Homo sapien
atattccccgtcataggatgagatg

SEQ ID NO: 4342309 - DNA, 25 bp, Homo sapien
ctgagcatattccccgtcataggat

SEQ ID NO: 4342310 - DNA, 25 bp, Homo sapien
agcatattccccgtcataggatgag

SEQ ID NO: 4342311 - DNA, 25 bp, Homo sapien
agttgagctctccacaatgtctgag

SEQ ID NO: 4342312 - DNA, 25 bp, Homo sapien
ttgttcaatagctgtgccacgcact

SEQ ID NO: 4342313 - DNA, 25 bp, Homo sapien
tgtaatggacagtaacgcccgttct

SEQ ID NO: 4342314 - DNA, 25 bp, Homo sapien
acttgaccgtagctaatcccagcga

SEQ ID NO: 4342315 - DNA, 25 bp, Homo sapien
cacgtttacgtgcagagaggcaccc

SEQ ID NO: 4342316 - DNA, 25 bp, Homo sapien
tgcattggcggaactgtcacctagt

SEQ ID NO: 4342317 - DNA, 25 bp, Homo sapien
gcgttccccgtttccagtgacagta

SEQ ID NO: 4342318 - DNA, 25 bp, Homo sapien
tgacagaccgcagtgtgcgttcccc

SEQ ID NO: 4342319 - DNA, 25 bp, Homo sapien
gcacagttgcatgaaatggaaaaac

SEQ ID NO: 4342320 - DNA, 25 bp, Homo sapien
taatacgccacagatttcataagca

SEQ ID NO: 4342321 - DNA, 25 bp, Homo sapien
tcctctatggggcacagttgcatga

SEQ ID NO: 4342322 - DNA, 25 bp, Homo sapien
cacgctaggccctcatgcgtggttt

SEQ ID NO: 4342323 - DNA, 25 bp, Homo sapien
ttcaagctttccgaggaagatgtag

SEQ ID NO: 4342324 - DNA, 25 bp, Homo sapien
gaagatgtagatgaagactctgaat

SEQ ID NO: 4342325 - DNA, 25 bp, Homo sapien
gagtctgagaactgggtcaacactg

SEQ ID NO: 4342326 - DNA, 25 bp, Homo sapien
actcctatctcccaatgctgtgtga

SEQ ID NO: 4342327 - DNA, 25 bp, Homo sapien
tgttgtgctgttggtcaagagccag

SEQ ID NO: 4342328 - DNA, 25 bp, Homo sapien
gcgactgacctagacacagtctcag

SEQ ID NO: 4342329 - DNA, 25 bp, Homo sapien
gtgatctctccacctctcatgggtg

SEQ ID NO: 4342330 - DNA, 25 bp, Homo sapien
cttcaggatatgaagcagagcttcc

SEQ ID NO: 4342331 - DNA, 25 bp, Homo sapien
gcaaagacgtaagtccaaattcatt

SEQ ID NO: 4342332 - DNA, 25 bp, Homo sapien
ctgtggatggttcaatgaattcctc

SEQ ID NO: 4342333 - DNA, 25 bp, Homo sapien
cctggattcccagttactctactgt

SEQ ID NO: 4342334 - DNA, 25 bp, Homo sapien
tcattttgccaacgcaaagacgtaa

SEQ ID NO: 4342335 - DNA, 25 bp, Homo sapien
tcaaagatcgcagcgttctcgggcc

SEQ ID NO: 4342336 - DNA, 25 bp, Homo sapien
ggtcccagactgaccgtcaaagatc

SEQ ID NO: 4342337 - DNA, 25 bp, Homo sapien
tgaacacggtggcaacatgcattgt

SEQ ID NO: 4342338 - DNA, 25 bp, Homo sapien
tcgtggcaattctggagtccttggg

SEQ ID NO: 4342339 - DNA, 25 bp, Homo sapien
gaaaagcggcaattctttcatcgaa

SEQ ID NO: 4342340 - DNA, 25 bp, Homo sapien
ggctccaagccgaagtggtggcctc

SEQ ID NO: 4342341 - DNA, 25 bp, Homo sapien
tcgaactctgaactgctggatggca

SEQ ID NO: 4342342 - DNA, 25 bp, Homo sapien
ctttgtttgaaaagcggcaattctt

SEQ ID NO: 4342343 - DNA, 25 bp, Homo sapien
tctggagcatccgaagcagcatggc

SEQ ID NO: 4342344 - DNA, 25 bp, Homo sapien
tttcagcgagtagagtgaggttttc

SEQ ID NO: 4342345 - DNA, 25 bp, Homo sapien
ggtctgaaccatcacgccctctttg

SEQ ID NO: 4342346 - DNA, 25 bp, Homo sapien
gagctgttgctatctccagtgagta

SEQ ID NO: 4342347 - DNA, 25 bp, Homo sapien
agtgagaaagtccaacacacaactg

SEQ ID NO: 4342348 - DNA, 25 bp, Homo sapien
aaaagagtgagaaagtccaacacac

SEQ ID NO: 4342349 - DNA, 25 bp, Homo sapien
cacacaactgattggagtttaggag

SEQ ID NO: 4342350 - DNA, 25 bp, Homo sapien
ccaacacacaactgattggagttta

SEQ ID NO: 4342351 - DNA, 25 bp, Homo sapien
gagggggatttcaggccggtggcca

SEQ ID NO: 4342352 - DNA, 25 bp, Homo sapien
tcctccggatgagggggatttcagg

SEQ ID NO: 4342353 - DNA, 25 bp, Homo sapien
gtcctccggatgagggggatttcag

SEQ ID NO: 4342354 - DNA, 25 bp, Homo sapien
cggatgagggggatttcaggccggt

SEQ ID NO: 4342355 - DNA, 25 bp, Homo sapien
ctgggacatgcaagaaccttggggg

SEQ ID NO: 4342356 - DNA, 25 bp, Homo sapien
tgggacatgcaagaaccttgggggc

SEQ ID NO: 4342357 - DNA, 25 bp, Homo sapien
agccgcccactcagcgaggccactc

SEQ ID NO: 4342358 - DNA, 25 bp, Homo sapien
ctcagcgaggccactctgggctgtg

SEQ ID NO: 4342359 - DNA, 25 bp, Homo sapien
gcccactcagcgaggccactctggg

SEQ ID NO: 4342360 - DNA, 25 bp, Homo sapien
ctccccagaaaagcagccgcccact

SEQ ID NO: 4342361 - DNA, 25 bp, Homo sapien
taagactgagcgctccagagaaagg

SEQ ID NO: 4342362 - DNA, 25 bp, Homo sapien
tcacgacagccttatgaggtcctcc

SEQ ID NO: 4342363 - DNA, 25 bp, Homo sapien
gaaaggacagagctaggcttcctcc

SEQ ID NO: 4342364 - DNA, 25 bp, Homo sapien
gcagccaaaacgtaggtagcatcca

SEQ ID NO: 4342365 - DNA, 25 bp, Homo sapien
atggaccttcacagacctccacata

SEQ ID NO: 4342366 - DNA, 25 bp, Homo sapien
cagacctccacatatgatgcataaa

SEQ ID NO: 4342367 - DNA, 25 bp, Homo sapien
cctccacatatgatgcataaaccat

SEQ ID NO: 4342368 - DNA, 25 bp, Homo sapien
ttcacagacctccacatatgatgca

SEQ ID NO: 4342369 - DNA, 25 bp, Homo sapien
cggccggagggtccccgctgtgtcg

SEQ ID NO: 4342370 - DNA, 25 bp, Homo sapien
tccccgctgtgtcgcggcgcctggc

SEQ ID NO: 4342371 - DNA, 25 bp, Homo sapien
tcaggggccctgtagctggggccgg

SEQ ID NO: 4342372 - DNA, 25 bp, Homo sapien
cgcggcgaggccatggtgacggcgc

SEQ ID NO: 4342373 - DNA, 25 bp, Homo sapien
atgtcaccgcgaggacacccaaaca

SEQ ID NO: 4342374 - DNA, 25 bp, Homo sapien
gttctgcagagatgtcaccgcgagg

SEQ ID NO: 4342375 - DNA, 25 bp, Homo sapien
tctcaagcttggatgccgttcccat

SEQ ID NO: 4342376 - DNA, 25 bp, Homo sapien
tccggccaacgcgagaatccgagta

SEQ ID NO: 4342377 - DNA, 25 bp, Homo sapien
taaccagactcaagcctgcttagtt

SEQ ID NO: 4342378 - DNA, 25 bp, Homo sapien
ctgagatcagaaaatatcaggcact

SEQ ID NO: 4342379 - DNA, 25 bp, Homo sapien
aatatcaggcacttttagggtggta

SEQ ID NO: 4342380 - DNA, 25 bp, Homo sapien
caggcacttttagggtggtacagcc

SEQ ID NO: 4342381 - DNA, 25 bp, Homo sapien
catgatgcccttattgtagccagag

SEQ ID NO: 4342382 - DNA, 25 bp, Homo sapien
tgcccagttcctgaggatggtgcct

SEQ ID NO: 4342383 - DNA, 25 bp, Homo sapien
gaactcttctgactaaagtgctctg

SEQ ID NO: 4342384 - DNA, 25 bp, Homo sapien
gatttcacgtgggttggcattgcca

SEQ ID NO: 4342385 - DNA, 25 bp, Homo sapien
gaaggtactgcctactacgcaccaa

SEQ ID NO: 4342386 - DNA, 25 bp, Homo sapien
gcaccaaggctgtatgacataggct

SEQ ID NO: 4342387 - DNA, 25 bp, Homo sapien
catgatgggttatacaggctgacgg

SEQ ID NO: 4342388 - DNA, 25 bp, Homo sapien
cttagtgagtgacggaacaaatcca

SEQ ID NO: 4342389 - DNA, 25 bp, Homo sapien
gaaatgctggatgtacggatgagaa

SEQ ID NO: 4342390 - DNA, 25 bp, Homo sapien
catcattgtggaactggcgaaataa

SEQ ID NO: 4342391 - DNA, 25 bp, Homo sapien
cagaacatgtgtataacgtgctaac

SEQ ID NO: 4342392 - DNA, 25 bp, Homo sapien
ttacctctaggccagggtagacagg

SEQ ID NO: 4342393 - DNA, 25 bp, Homo sapien
caccctgggtgagacgtggtcctca

SEQ ID NO: 4342394 - DNA, 25 bp, Homo sapien
tgtcgtgttgcagaggctagcacca

SEQ ID NO: 4342395 - DNA, 25 bp, Homo sapien
gaaggtcctgagcttgggtccactg

SEQ ID NO: 4342396 - DNA, 25 bp, Homo sapien
tggtgtcccctgctagtcttagtac

SEQ ID NO: 4342397 - DNA, 25 bp, Homo sapien
gtagcgatcccgagtggcgaagtct

SEQ ID NO: 4342398 - DNA, 25 bp, Homo sapien
tcccgagtggcgaagtctgcattct

SEQ ID NO: 4342399 - DNA, 25 bp, Homo sapien
gctgctcccggttcacgagggagga

SEQ ID NO: 4342400 - DNA, 25 bp, Homo sapien
ggaggagtggtggtagcgatcccga

SEQ ID NO: 4342401 - DNA, 25 bp, Homo sapien
tcatctccatgtcaaccttagccag

SEQ ID NO: 4342402 - DNA, 25 bp, Homo sapien
atgtcaaccttagccagggacggcg

SEQ ID NO: 4342403 - DNA, 25 bp, Homo sapien
cagggacggcgccaagatgatctgc

SEQ ID NO: 4342404 - DNA, 25 bp, Homo sapien
tccatgtcaaccttagccagggacg

SEQ ID NO: 4342405 - DNA, 25 bp, Homo sapien
cctaatcagctaggtggcctccaga

SEQ ID NO: 4342406 - DNA, 25 bp, Homo sapien
gctgctacggaaggcagacccagtc

SEQ ID NO: 4342407 - DNA, 25 bp, Homo sapien
gcaaaggcttttgacaccaaggtgg

SEQ ID NO: 4342408 - DNA, 25 bp, Homo sapien
tatggatcccactgtcactggagtc

SEQ ID NO: 4342409 - DNA, 25 bp, Homo sapien
tacaacataaggactggtgacctcc

SEQ ID NO: 4342410 - DNA, 25 bp, Homo sapien
tgttgacttagctgaggcctctgct

SEQ ID NO: 4342411 - DNA, 25 bp, Homo sapien
gaatggtgtggactgattctactcc

SEQ ID NO: 4342412 - DNA, 25 bp, Homo sapien
cccagcagccatggtaaggccaata

SEQ ID NO: 4342413 - DNA, 25 bp, Homo sapien
accagctggcccaagtaagcagatg

SEQ ID NO: 4342414 - DNA, 25 bp, Homo sapien
ctgcagctccacatgagacattgag

SEQ ID NO: 4342415 - DNA, 25 bp, Homo sapien
tctgcagctccacatgagacattga

SEQ ID NO: 4342416 - DNA, 25 bp, Homo sapien
agctggcccaagtaagcagatgaca

SEQ ID NO: 4342417 - DNA, 25 bp, Homo sapien
tgcttcttgtcatcccaagctccag

SEQ ID NO: 4342418 - DNA, 25 bp, Homo sapien
ttgtcatcccaagctccagcacgaa

SEQ ID NO: 4342419 - DNA, 25 bp, Homo sapien
tggtgtctgtagcccttgctgctgc

SEQ ID NO: 4342420 - DNA, 25 bp, Homo sapien
gctccagcacgaaggctttatttct

SEQ ID NO: 4342421 - DNA, 25 bp, Homo sapien
ttaggttcccatgccacaatccagg

SEQ ID NO: 4342422 - DNA, 25 bp, Homo sapien
taggttcccatgccacaatccaggc

SEQ ID NO: 4342423 - DNA, 25 bp, Homo sapien
aggttcccatgccacaatccaggcc

SEQ ID NO: 4342424 - DNA, 25 bp, Homo sapien
ccaggactctggacactcatccatt

SEQ ID NO: 4342425 - DNA, 25 bp, Homo sapien
caggactctggacactcatccattc

SEQ ID NO: 4342426 - DNA, 25 bp, Homo sapien
ggactctggacactcatccattctg

SEQ ID NO: 4342427 - DNA, 25 bp, Homo sapien
aggactctggacactcatccattct

SEQ ID NO: 4342428 - DNA, 25 bp, Homo sapien
tccaccggaaaaagctgaagttgga

SEQ ID NO: 4342429 - DNA, 25 bp, Homo sapien
agacctcatccaccggaaaaagctg

SEQ ID NO: 4342430 - DNA, 25 bp, Homo sapien
tcatccaccggaaaaagctgaagtt

SEQ ID NO: 4342431 - DNA, 25 bp, Homo sapien
agagagacctcatccaccggaaaaa

SEQ ID NO: 4342432 - DNA, 25 bp, Homo sapien
tctctaactgtcaattaagccaggt

SEQ ID NO: 4342433 - DNA, 25 bp, Homo sapien
taagccaggtttgttgatagtgtta

SEQ ID NO: 4342434 - DNA, 25 bp, Homo sapien
tcagagagcatactctgttcttgaa

SEQ ID NO: 4342435 - DNA, 25 bp, Homo sapien
tctgtagacttactgattgtatact

SEQ ID NO: 4342436 - DNA, 25 bp, Homo sapien
gactggcccggccaatgtagaaata

SEQ ID NO: 4342437 - DNA, 25 bp, Homo sapien
tagaaatacacgatggcagcaacac

SEQ ID NO: 4342438 - DNA, 25 bp, Homo sapien
caatgtagaaatacacgatggcagc

SEQ ID NO: 4342439 - DNA, 25 bp, Homo sapien
gcccggccaatgtagaaatacacga

SEQ ID NO: 4342440 - DNA, 25 bp, Homo sapien
atcacaaacatgatgagaagggacc

SEQ ID NO: 4342441 - DNA, 25 bp, Homo sapien
ttaaccagggtatacacccactgta

SEQ ID NO: 4342442 - DNA, 25 bp, Homo sapien
gggtatacacccactgtatcacaaa

SEQ ID NO: 4342443 - DNA, 25 bp, Homo sapien
ctgtatcacaaacatgatgagaagg

SEQ ID NO: 4342444 - DNA, 25 bp, Homo sapien
ggttgcacatgtgggtatagaaaga

SEQ ID NO: 4342445 - DNA, 25 bp, Homo sapien
tgcacatgtgggtatagaaagaagt

SEQ ID NO: 4342446 - DNA, 25 bp, Homo sapien
cccaggggttgcacatgtgggtata

SEQ ID NO: 4342447 - DNA, 25 bp, Homo sapien
atgtgggtatagaaagaagtggatc

SEQ ID NO: 4342448 - DNA, 25 bp, Homo sapien
catcctttcaggcacaacagggctt

SEQ ID NO: 4342449 - DNA, 25 bp, Homo sapien
gctggctccagaagcgctcaattta

SEQ ID NO: 4342450 - DNA, 25 bp, Homo sapien
agtgtacactgtagccattaggcaa

SEQ ID NO: 4342451 - DNA, 25 bp, Homo sapien
tgaaagttagctcgtgttagacctg

SEQ ID NO: 4342452 - DNA, 25 bp, Homo sapien
cagagggacctttagatagtttgcc

SEQ ID NO: 4342453 - DNA, 25 bp, Homo sapien
tgcggtgtgtcattaccagtaacct

SEQ ID NO: 4342454 - DNA, 25 bp, Homo sapien
aactcccttagctgcacttgcggtg

SEQ ID NO: 4342455 - DNA, 25 bp, Homo sapien
tcagcatccattgtcatcattggtg

SEQ ID NO: 4342456 - DNA, 25 bp, Homo sapien
gcattgcgaagaaccttgcatcgta

SEQ ID NO: 4342457 - DNA, 25 bp, Homo sapien
gaagaaccttgcatcgtacacccta

SEQ ID NO: 4342458 - DNA, 25 bp, Homo sapien
gggctgcattgcgaagaaccttgca

SEQ ID NO: 4342459 - DNA, 25 bp, Homo sapien
ttagggctgcattgcgaagaacctt

SEQ ID NO: 4342460 - DNA, 25 bp, Homo sapien
aaataagaggccccagtgtgatacc

SEQ ID NO: 4342461 - DNA, 25 bp, Homo sapien
atccccaaataagaggccccagtgt

SEQ ID NO: 4342462 - DNA, 25 bp, Homo sapien
tcatccccaaataagaggccccagt

SEQ ID NO: 4342463 - DNA, 25 bp, Homo sapien
aggccccagtgtgataccagagcac

SEQ ID NO: 4342464 - DNA, 25 bp, Homo sapien
ggcagcgggcaacctgtcagagatc

SEQ ID NO: 4342465 - DNA, 25 bp, Homo sapien
ggctgagtcccttcgctcttggaag

SEQ ID NO: 4342466 - DNA, 25 bp, Homo sapien
gattggttgcacagctcaggaacaa

SEQ ID NO: 4342467 - DNA, 25 bp, Homo sapien
tcagagatctcgacagggaaagaag

SEQ ID NO: 4342468 - DNA, 25 bp, Homo sapien
tggtgaattccagtagcgtgccctc

SEQ ID NO: 4342469 - DNA, 25 bp, Homo sapien
tccaagactctttgggcaggtccct

SEQ ID NO: 4342470 - DNA, 25 bp, Homo sapien
caagcttcctggttagctggaggag

SEQ ID NO: 4342471 - DNA, 25 bp, Homo sapien
tcagagccgtaactgggagctttct

SEQ ID NO: 4342472 - DNA, 25 bp, Homo sapien
cactgcaacgtatgtcagcatgaag

SEQ ID NO: 4342473 - DNA, 25 bp, Homo sapien
ggccagaacgttcacttgacccaca

SEQ ID NO: 4342474 - DNA, 25 bp, Homo sapien
gacagggagaagtaagagtagtcca

SEQ ID NO: 4342475 - DNA, 25 bp, Homo sapien
catggtcaccaagctggtcaggcag

SEQ ID NO: 4342476 - DNA, 25 bp, Homo sapien
tataagcccaaaaggaacaggaagc

SEQ ID NO: 4342477 - DNA, 25 bp, Homo sapien
agtgcagggatcactttctcctggg

SEQ ID NO: 4342478 - DNA, 25 bp, Homo sapien
caggaagccagggacgagatgtata

SEQ ID NO: 4342479 - DNA, 25 bp, Homo sapien
cccttgtcccagacaggcaagtgca

SEQ ID NO: 4342480 - DNA, 25 bp, Homo sapien
gagtcgtctagatctgatccctggg

SEQ ID NO: 4342481 - DNA, 25 bp, Homo sapien
gcaccccatgcaatcatccactgag

SEQ ID NO: 4342482 - DNA, 25 bp, Homo sapien
gcaatcatccactgagtcgtctaga

SEQ ID NO: 4342483 - DNA, 25 bp, Homo sapien
gatctgatccctgggatacagtttc

SEQ ID NO: 4342484 - DNA, 25 bp, Homo sapien
tatcaggaagtcatagcgaagggcc

SEQ ID NO: 4342485 - DNA, 25 bp, Homo sapien
gacgaagatgatgtacagaaaccac

SEQ ID NO: 4342486 - DNA, 25 bp, Homo sapien
tctcgagtgcagatggcgcccagga

SEQ ID NO: 4342487 - DNA, 25 bp, Homo sapien
aagacgaagatgatgtacagaaacc

SEQ ID NO: 4342488 - DNA, 25 bp, Homo sapien
tctctgtattgttttaattttagtg

SEQ ID NO: 4342489 - DNA, 25 bp, Homo sapien
ttttaattttagtgtatgtactgct

SEQ ID NO: 4342490 - DNA, 25 bp, Homo sapien
tctgtattgttttaattttagtgta

SEQ ID NO: 4342491 - DNA, 25 bp, Homo sapien
tgttttaattttagtgtatgtactg

SEQ ID NO: 4342492 - DNA, 25 bp, Homo sapien
agcccgggggaatgctggcggcagg

SEQ ID NO: 4342493 - DNA, 25 bp, Homo sapien
gagcccgggggaatgctggcggcag

SEQ ID NO: 4342494 - DNA, 25 bp, Homo sapien
cgggggaatgctggcggcaggctcc

SEQ ID NO: 4342495 - DNA, 25 bp, Homo sapien
cccgggggaatgctggcggcaggct

SEQ ID NO: 4342496 - DNA, 25 bp, Homo sapien
ccagctgcagctctgcgcataggct

SEQ ID NO: 4342497 - DNA, 25 bp, Homo sapien
tggaagctgtcccaccgcaagccct

SEQ ID NO: 4342498 - DNA, 25 bp, Homo sapien
ctgaaagacacccagatggggaatg

SEQ ID NO: 4342499 - DNA, 25 bp, Homo sapien
gcgcataggctgcttttcaatctcc

SEQ ID NO: 4342500 - DNA, 25 bp, Homo sapien
tgaggaggcatcacaaatcatggca

SEQ ID NO: 4342501 - DNA, 25 bp, Homo sapien
gaggcatcacaaatcatggcagaag

SEQ ID NO: 4342502 - DNA, 25 bp, Homo sapien
tggctgaggaggcatcacaaatcat

SEQ ID NO: 4342503 - DNA, 25 bp, Homo sapien
gctgaggaggcatcacaaatcatgg

SEQ ID NO: 4342504 - DNA, 25 bp, Homo sapien
caacatttgcaagtgggtaggtcat

SEQ ID NO: 4342505 - DNA, 25 bp, Homo sapien
tattggcttctggatgaggggcggc

SEQ ID NO: 4342506 - DNA, 25 bp, Homo sapien
gtgtcaaataatgcaactttccaac

SEQ ID NO: 4342507 - DNA, 25 bp, Homo sapien
ggtttaccgcttactggctgggaga

SEQ ID NO: 4342508 - DNA, 25 bp, Homo sapien
gggcggcaccaacattatgtgttct

SEQ ID NO: 4342509 - DNA, 25 bp, Homo sapien
gtagcagttcgggtgaatatccaat

SEQ ID NO: 4342510 - DNA, 25 bp, Homo sapien
gattcccccgggctgtaatcgggca

SEQ ID NO: 4342511 - DNA, 25 bp, Homo sapien
tgtagccgctgggaagaaaacccca

SEQ ID NO: 4342512 - DNA, 25 bp, Homo sapien
tcgggcagcgtgttgttctgtagca

SEQ ID NO: 4342513 - DNA, 25 bp, Homo sapien
aactttagcttatccgctggctgac

SEQ ID NO: 4342514 - DNA, 25 bp, Homo sapien
aaagcacatctgagcggagggctgt

SEQ ID NO: 4342515 - DNA, 25 bp, Homo sapien
tcagccaagctggactaatgtgcag

SEQ ID NO: 4342516 - DNA, 25 bp, Homo sapien
taactttgcaaagaacgctatggac

SEQ ID NO: 4342517 - DNA, 25 bp, Homo sapien
gcagctgctgcgtgtgaatggatct

SEQ ID NO: 4342518 - DNA, 25 bp, Homo sapien
tctgacatctttcaactctcgaagg

SEQ ID NO: 4342519 - DNA, 25 bp, Homo sapien
actctcgaaggcctgggatgcatgg

SEQ ID NO: 4342520 - DNA, 25 bp, Homo sapien
cctgcagctgctgcgtgtgaatgga

SEQ ID NO: 4342521 - DNA, 25 bp, Homo sapien
gcagccaatccgaaactgcctgacc

SEQ ID NO: 4342522 - DNA, 25 bp, Homo sapien
agccaatccgaaactgcctgaccca

SEQ ID NO: 4342523 - DNA, 25 bp, Homo sapien
tgcagccaatccgaaactgcctgac

SEQ ID NO: 4342524 - DNA, 25 bp, Homo sapien
ccaatccgaaactgcctgacccagg

SEQ ID NO: 4342525 - DNA, 25 bp, Homo sapien
tcactgttctaaccctgaaaagtac

SEQ ID NO: 4342526 - DNA, 25 bp, Homo sapien
attcttcactgttctaaccctgaaa

SEQ ID NO: 4342527 - DNA, 25 bp, Homo sapien
cttcaggtcaagaatgcctttgaga

SEQ ID NO: 4342528 - DNA, 25 bp, Homo sapien
ctgaaaagtacctctgttctaatcc

SEQ ID NO: 4342529 - DNA, 25 bp, Homo sapien
ctccccctctttctttttcattgag

SEQ ID NO: 4342530 - DNA, 25 bp, Homo sapien
ttgccggcctgagcgctgaggtact

SEQ ID NO: 4342531 - DNA, 25 bp, Homo sapien
cttggcctggattgccttggtttcc

SEQ ID NO: 4342532 - DNA, 25 bp, Homo sapien
gaggtacttggcctggattgccttg

SEQ ID NO: 4342533 - DNA, 25 bp, Homo sapien
gcccagtgtaaaggggatgacagtc

SEQ ID NO: 4342534 - DNA, 25 bp, Homo sapien
tggcagccatgctaagacaggcagg

SEQ ID NO: 4342535 - DNA, 25 bp, Homo sapien
tatagacattagacacagcacccag

SEQ ID NO: 4342536 - DNA, 25 bp, Homo sapien
gaaccagagtcccaaatgccctcat

SEQ ID NO: 4342537 - DNA, 25 bp, Homo sapien
tgttatagcccctcacccaaaggat

SEQ ID NO: 4342538 - DNA, 25 bp, Homo sapien
ccgacaggagctggcgatatgagag

SEQ ID NO: 4342539 - DNA, 25 bp, Homo sapien
cagccaggtagagatccgacaggag

SEQ ID NO: 4342540 - DNA, 25 bp, Homo sapien
tagagatccgacaggagctggcgat

SEQ ID NO: 4342541 - DNA, 25 bp, Homo sapien
tggtgcccagacagccaggtagaga

SEQ ID NO: 4342542 - DNA, 25 bp, Homo sapien
tctatatttgcctgacttctatggc

SEQ ID NO: 4342543 - DNA, 25 bp, Homo sapien
gccaaacaaattcctgagagggtct

SEQ ID NO: 4342544 - DNA, 25 bp, Homo sapien
aaatcattttggcatgacactcatc

SEQ ID NO: 4342545 - DNA, 25 bp, Homo sapien
cataggattcaaatgtgccacatgt

SEQ ID NO: 4342546 - DNA, 25 bp, Homo sapien
tgccggatcgttggggcatctgaag

SEQ ID NO: 4342547 - DNA, 25 bp, Homo sapien
ttaggtgccggatcgttggggcatc

SEQ ID NO: 4342548 - DNA, 25 bp, Homo sapien
ctttaggtgccggatcgttggggca

SEQ ID NO: 4342549 - DNA, 25 bp, Homo sapien
gatcgttggggcatctgaaggttcc

SEQ ID NO: 4342550 - DNA, 25 bp, Homo sapien
ccaggaacagctcacaccaattgta

SEQ ID NO: 4342551 - DNA, 25 bp, Homo sapien
agctcacaccaattgtaggtaaagc

SEQ ID NO: 4342552 - DNA, 25 bp, Homo sapien
caggaacagctcacaccaattgtag

SEQ ID NO: 4342553 - DNA, 25 bp, Homo sapien
gaacagctcacaccaattgtaggta

SEQ ID NO: 4342554 - DNA, 25 bp, Homo sapien
ggcccagcaaatccgagatggattc

SEQ ID NO: 4342555 - DNA, 25 bp, Homo sapien
gaagcaccgcaactgaaattcctcg

SEQ ID NO: 4342556 - DNA, 25 bp, Homo sapien
gattatccatttgacacctgcgagg

SEQ ID NO: 4342557 - DNA, 25 bp, Homo sapien
tccaggtgggtgaaagaacccacca

SEQ ID NO: 4342558 - DNA, 25 bp, Homo sapien
ctgacatgcgattccaggtagaaga

SEQ ID NO: 4342559 - DNA, 25 bp, Homo sapien
gattccaggtagaagagtcagcagg

SEQ ID NO: 4342560 - DNA, 25 bp, Homo sapien
catgcgattccaggtagaagagtca

SEQ ID NO: 4342561 - DNA, 25 bp, Homo sapien
tgcgattccaggtagaagagtcagc

SEQ ID NO: 4342562 - DNA, 25 bp, Homo sapien
ggcagaaccgcccagcgctgagaac

SEQ ID NO: 4342563 - DNA, 25 bp, Homo sapien
gggcagaaccgcccagcgctgagaa

SEQ ID NO: 4342564 - DNA, 25 bp, Homo sapien
gcagaaccgcccagcgctgagaacc

SEQ ID NO: 4342565 - DNA, 25 bp, Homo sapien
tctgcctctagaggctcacttggtg

SEQ ID NO: 4342566 - DNA, 25 bp, Homo sapien
cagatgcctgtctttgtccaggggt

SEQ ID NO: 4342567 - DNA, 25 bp, Homo sapien
atccatggcatctgcctctagaggc

SEQ ID NO: 4342568 - DNA, 25 bp, Homo sapien
gggtgttcacaccagtgcccatcca

SEQ ID NO: 4342569 - DNA, 25 bp, Homo sapien
accaggatgacgaaggacaccagga

SEQ ID NO: 4342570 - DNA, 25 bp, Homo sapien
tccaaacacatagagcagcccgatg

SEQ ID NO: 4342571 - DNA, 25 bp, Homo sapien
tctgcccacccaggaccgaggagat

SEQ ID NO: 4342572 - DNA, 25 bp, Homo sapien
agatcatggagtagacgccaccgct

SEQ ID NO: 4342573 - DNA, 25 bp, Homo sapien
catgaacagctgggtcttccaccag

SEQ ID NO: 4342574 - DNA, 25 bp, Homo sapien
agcacaaccccaaagatgttgatca

SEQ ID NO: 4342575 - DNA, 25 bp, Homo sapien
gaagagcacaaccccaaagatgttg

SEQ ID NO: 4342576 - DNA, 25 bp, Homo sapien
atgaacagctgggtcttccaccagg

SEQ ID NO: 4342577 - DNA, 25 bp, Homo sapien
caaaaggatcactgttctcttgtaa

SEQ ID NO: 4342578 - DNA, 25 bp, Homo sapien
tgtaacaacagtgattccgtatcca

SEQ ID NO: 4342579 - DNA, 25 bp, Homo sapien
gtaacaacagtgattccgtatccat

SEQ ID NO: 4342580 - DNA, 25 bp, Homo sapien
tgtatcagacatccacagatcaaga

SEQ ID NO: 4342581 - DNA, 25 bp, Homo sapien
cagtctccaactccgtaagcttcat

SEQ ID NO: 4342582 - DNA, 25 bp, Homo sapien
tactcagggatctcaattcagccac

SEQ ID NO: 4342583 - DNA, 25 bp, Homo sapien
gccacatgggactgatgggccaggg

SEQ ID NO: 4342584 - DNA, 25 bp, Homo sapien
gttcaaggctgggattctcacaagg

SEQ ID NO: 4342585 - DNA, 25 bp, Homo sapien
acttgttcaaggctgggattctcac

SEQ ID NO: 4342586 - DNA, 25 bp, Homo sapien
caaggctgggattctcacaagggca

SEQ ID NO: 4342587 - DNA, 25 bp, Homo sapien
gctgggattctcacaagggcatgac

SEQ ID NO: 4342588 - DNA, 25 bp, Homo sapien
agcccgcagagtggcaagaccatca

SEQ ID NO: 4342589 - DNA, 25 bp, Homo sapien
tagcaaaagggcagagcttttcctg

SEQ ID NO: 4342590 - DNA, 25 bp, Homo sapien
tggaaatctgatgtcgtctggcaaa

SEQ ID NO: 4342591 - DNA, 25 bp, Homo sapien
tgtcaaggccacctaaacaagggct

SEQ ID NO: 4342592 - DNA, 25 bp, Homo sapien
caaaggcgaggcaggcatcttatgt

SEQ ID NO: 4342593 - DNA, 25 bp, Homo sapien
tttaagttcctgttgagaccctcca

SEQ ID NO: 4342594 - DNA, 25 bp, Homo sapien
tcaggccagcttcccttttaagttc

SEQ ID NO: 4342595 - DNA, 25 bp, Homo sapien
cagcttcccttttaagttcctgttg

SEQ ID NO: 4342596 - DNA, 25 bp, Homo sapien
taagttcctgttgagaccctccaac

SEQ ID NO: 4342597 - DNA, 25 bp, Homo sapien
caatagactgcccacccagcaggtt

SEQ ID NO: 4342598 - DNA, 25 bp, Homo sapien
gcaggttgtctggaacaatgtccca

SEQ ID NO: 4342599 - DNA, 25 bp, Homo sapien
gcctagaaagcacacatcatcctca

SEQ ID NO: 4342600 - DNA, 25 bp, Homo sapien
ccaggcctagaaagcacacatcatc

SEQ ID NO: 4342601 - DNA, 25 bp, Homo sapien
tgggccatgtccaatccttcgatgt

SEQ ID NO: 4342602 - DNA, 25 bp, Homo sapien
ggccatgtccaatccttcgatgttt

SEQ ID NO: 4342603 - DNA, 25 bp, Homo sapien
gcattgggccatgtccaatccttcg

SEQ ID NO: 4342604 - DNA, 25 bp, Homo sapien
aattgggcattgggccatgtccaat

SEQ ID NO: 4342605 - DNA, 25 bp, Homo sapien
tattatctgagtcctcactgtgact

SEQ ID NO: 4342606 - DNA, 25 bp, Homo sapien
attatctgagtcctcactgtgactg

SEQ ID NO: 4342607 - DNA, 25 bp, Homo sapien
gagtcctcactgtgactgtctgtgg

SEQ ID NO: 4342608 - DNA, 25 bp, Homo sapien
ctgagtcctcactgtgactgtctgt

SEQ ID NO: 4342609 - DNA, 25 bp, Homo sapien
gcctcatggaagagctcctgcacct

SEQ ID NO: 4342610 - DNA, 25 bp, Homo sapien
ctgctgggctgcctcatggaagagc

SEQ ID NO: 4342611 - DNA, 25 bp, Homo sapien
tgcctcatggaagagctcctgcacc

SEQ ID NO: 4342612 - DNA, 25 bp, Homo sapien
ctgggctgcctcatggaagagctcc

SEQ ID NO: 4342613 - DNA, 25 bp, Homo sapien
ggatcctggtgatctggacagggag

SEQ ID NO: 4342614 - DNA, 25 bp, Homo sapien
gggatcctggtgatctggacaggga

SEQ ID NO: 4342615 - DNA, 25 bp, Homo sapien
aaggtaacagcatccttggtcaggc

SEQ ID NO: 4342616 - DNA, 25 bp, Homo sapien
ctctcctctccccttgttgtccatc

SEQ ID NO: 4342617 - DNA, 25 bp, Homo sapien
ctggaaggtaacagcatccttggtc

SEQ ID NO: 4342618 - DNA, 25 bp, Homo sapien
ggtaacagcatccttggtcaggctg

SEQ ID NO: 4342619 - DNA, 25 bp, Homo sapien
cgcggacccgcaccccaagtactgg

SEQ ID NO: 4342620 - DNA, 25 bp, Homo sapien
cttggcaccccacgcagacgcggac

SEQ ID NO: 4342621 - DNA, 25 bp, Homo sapien
ggcgcgcgggtgaccggcggtagga

SEQ ID NO: 4342622 - DNA, 25 bp, Homo sapien
taccctcacgtttgggccacgctgg

SEQ ID NO: 4342623 - DNA, 25 bp, Homo sapien
ggacagccagctcccagcgcccggc

SEQ ID NO: 4342624 - DNA, 25 bp, Homo sapien
acagccagctcccagcgcccggccc

SEQ ID NO: 4342625 - DNA, 25 bp, Homo sapien
cctgggacagccagctcccagcgcc

SEQ ID NO: 4342626 - DNA, 25 bp, Homo sapien
tgggacagccagctcccagcgcccg

SEQ ID NO: 4342627 - DNA, 25 bp, Homo sapien
ggcgggggcacccctgccacgccag

SEQ ID NO: 4342628 - DNA, 25 bp, Homo sapien
gcgggggcacccctgccacgccagc

SEQ ID NO: 4342629 - DNA, 25 bp, Homo sapien
cgggggcacccctgccacgccagca

SEQ ID NO: 4342630 - DNA, 25 bp, Homo sapien
cctctaagtgtcaacatgaattttg

SEQ ID NO: 4342631 - DNA, 25 bp, Homo sapien
gtctccctctaagtgtcaacatgaa

SEQ ID NO: 4342632 - DNA, 25 bp, Homo sapien
cgatgagtctccctctaagtgtcaa

SEQ ID NO: 4342633 - DNA, 25 bp, Homo sapien
cttccgatgagtctccctctaagtg

SEQ ID NO: 4342634 - DNA, 25 bp, Homo sapien
aaagaaatcccacgtatgctgacag

SEQ ID NO: 4342635 - DNA, 25 bp, Homo sapien
ctaggactgatcattgcgagggcca

SEQ ID NO: 4342636 - DNA, 25 bp, Homo sapien
tcacaagctagggtactggcaaggt

SEQ ID NO: 4342637 - DNA, 25 bp, Homo sapien
tgctaataataaggccagggtccta

SEQ ID NO: 4342638 - DNA, 25 bp, Homo sapien
catggcataatatagggtcaagcaa

SEQ ID NO: 4342639 - DNA, 25 bp, Homo sapien
gactatgcatgaaacaagctgtcac

SEQ ID NO: 4342640 - DNA, 25 bp, Homo sapien
tgcaaccttcccaagacacacgatg

SEQ ID NO: 4342641 - DNA, 25 bp, Homo sapien
caggctgctgactactgatgtaaaa

SEQ ID NO: 4342642 - DNA, 25 bp, Homo sapien
ggcataggggatcccaggaaaataa

SEQ ID NO: 4342643 - DNA, 25 bp, Homo sapien
aatttacagtgattgagaaaaggtc

SEQ ID NO: 4342644 - DNA, 25 bp, Homo sapien
gaaaattcaacgtgctccaccatca

SEQ ID NO: 4342645 - DNA, 25 bp, Homo sapien
cagaaaatgggataggaatagtaat

SEQ ID NO: 4342646 - DNA, 25 bp, Homo sapien
tcagattaaattcagcactacacag

SEQ ID NO: 4342647 - DNA, 25 bp, Homo sapien
attaaattcagcactacacagtatg

SEQ ID NO: 4342648 - DNA, 25 bp, Homo sapien
tttcagattaaattcagcactacac

SEQ ID NO: 4342649 - DNA, 25 bp, Homo sapien
agattaaattcagcactacacagta

SEQ ID NO: 4342650 - DNA, 25 bp, Homo sapien
ttcaaacgtgagtaggtcccaagag

SEQ ID NO: 4342651 - DNA, 25 bp, Homo sapien
taaaaatgacctgaccgatggctgg

SEQ ID NO: 4342652 - DNA, 25 bp, Homo sapien
tcctctgtggaaacgaaatcctgcc

SEQ ID NO: 4342653 - DNA, 25 bp, Homo sapien
caaagactgcagagctatagggcca

SEQ ID NO: 4342654 - DNA, 25 bp, Homo sapien
ggatactgtttaattatccaatcta

SEQ ID NO: 4342655 - DNA, 25 bp, Homo sapien
aacaaaaattttccgatcactcatc

SEQ ID NO: 4342656 - DNA, 25 bp, Homo sapien
aagaaatggtagttactggaattag

SEQ ID NO: 4342657 - DNA, 25 bp, Homo sapien
agtttctctggatactgtttaatta

SEQ ID NO: 4342658 - DNA, 25 bp, Homo sapien
ccatagagaagtgactgcttcaaca

SEQ ID NO: 4342659 - DNA, 25 bp, Homo sapien
tacaaagaaactgacaccaatatgc

SEQ ID NO: 4342660 - DNA, 25 bp, Homo sapien
ttacgagatgattatgacacaacca

SEQ ID NO: 4342661 - DNA, 25 bp, Homo sapien
caaaaccttgatacctgcacatgaa

SEQ ID NO: 4342662 - DNA, 25 bp, Homo sapien
ttaacttggtgtgggtggaatagca

SEQ ID NO: 4342663 - DNA, 25 bp, Homo sapien
taaaggtgacaacatgtaaggcagt

SEQ ID NO: 4342664 - DNA, 25 bp, Homo sapien
gaatgctgactaaccaaacgaaatg

SEQ ID NO: 4342665 - DNA, 25 bp, Homo sapien
tatactcagattccctgctgaagtg

SEQ ID NO: 4342666 - DNA, 25 bp, Homo sapien
tctgtacagcactccatttacacag

SEQ ID NO: 4342667 - DNA, 25 bp, Homo sapien
agtaaccccactcttgattaatctg

SEQ ID NO: 4342668 - DNA, 25 bp, Homo sapien
gcttaacttgttattacgcattgct

SEQ ID NO: 4342669 - DNA, 25 bp, Homo sapien
acgcattgctcttaaatctgtacag

SEQ ID NO: 4342670 - DNA, 25 bp, Homo sapien
gaaaattcagcacttgtccctggtc

SEQ ID NO: 4342671 - DNA, 25 bp, Homo sapien
tgaagatgtcatcccagctctatta

SEQ ID NO: 4342672 - DNA, 25 bp, Homo sapien
tggcatcaggtgaagatgtcatccc

SEQ ID NO: 4342673 - DNA, 25 bp, Homo sapien
aaaagtctggccagttgtggcatca

SEQ ID NO: 4342674 - DNA, 25 bp, Homo sapien
tgtccattggcagtgctaaattgag

SEQ ID NO: 4342675 - DNA, 25 bp, Homo sapien
catttggtaagcttggtggacaggc

SEQ ID NO: 4342676 - DNA, 25 bp, Homo sapien
gtagctattccagctcttgatccat

SEQ ID NO: 4342677 - DNA, 25 bp, Homo sapien
agtcctgtgttgatgtggcagaagc

SEQ ID NO: 4342678 - DNA, 25 bp, Homo sapien
catgctgtccattagctttgtggga

SEQ ID NO: 4342679 - DNA, 25 bp, Homo sapien
taaggctcgggctattcaaataggc

SEQ ID NO: 4342680 - DNA, 25 bp, Homo sapien
tatcagtcacaaagttaaggctcgg

SEQ ID NO: 4342681 - DNA, 25 bp, Homo sapien
cctgatcgaaagctattgatgggca

SEQ ID NO: 4342682 - DNA, 25 bp, Homo sapien
gccacagctgcttgtgttacagaag

SEQ ID NO: 4342683 - DNA, 25 bp, Homo sapien
tgtgactctaatatggatgccgtgg

SEQ ID NO: 4342684 - DNA, 25 bp, Homo sapien
aggctgagaagctatggtacccaca

SEQ ID NO: 4342685 - DNA, 25 bp, Homo sapien
tgccgtggtactttcatcaatgaca

SEQ ID NO: 4342686 - DNA, 25 bp, Homo sapien
tgacgcatcttctaaatgcgagccc

SEQ ID NO: 4342687 - DNA, 25 bp, Homo sapien
cagcattgccttctgagtccagtaa

SEQ ID NO: 4342688 - DNA, 25 bp, Homo sapien
ccccaactgacgaatgtggcatttc

SEQ ID NO: 4342689 - DNA, 25 bp, Homo sapien
caggtcagatttgtccaaagcactc

SEQ ID NO: 4342690 - DNA, 25 bp, Homo sapien
ttatgtttcaatacacgatctgttc

SEQ ID NO: 4342691 - DNA, 25 bp, Homo sapien
ttcaatacacgatctgttctggaaa

SEQ ID NO: 4342692 - DNA, 25 bp, Homo sapien
tgtttcaatacacgatctgttctgg

SEQ ID NO: 4342693 - DNA, 25 bp, Homo sapien
acgtttatgtttcaatacacgatct

SEQ ID NO: 4342694 - DNA, 25 bp, Homo sapien
cagtattcacactggtaaggttttt

SEQ ID NO: 4342695 - DNA, 25 bp, Homo sapien
ctgtaaacagtattcacactggtaa

SEQ ID NO: 4342696 - DNA, 25 bp, Homo sapien
taaacagtattcacactggtaaggt

SEQ ID NO: 4342697 - DNA, 25 bp, Homo sapien
aacagtattcacactggtaaggttt

SEQ ID NO: 4342698 - DNA, 25 bp, Homo sapien
cacattcatcacagcgaaatggttt

SEQ ID NO: 4342699 - DNA, 25 bp, Homo sapien
attcatcacagcgaaatggtttttc

SEQ ID NO: 4342700 - DNA, 25 bp, Homo sapien
acattcatcacagcgaaatggtttt

SEQ ID NO: 4342701 - DNA, 25 bp, Homo sapien
tcatcacagcgaaatggtttttcac

SEQ ID NO: 4342702 - DNA, 25 bp, Homo sapien
gcaaacataaattcaccttccatgg

SEQ ID NO: 4342703 - DNA, 25 bp, Homo sapien
caatcctcctcccaactaaatagag

SEQ ID NO: 4342704 - DNA, 25 bp, Homo sapien
ggtgtgctgcctcaagccactgatc

SEQ ID NO: 4342705 - DNA, 25 bp, Homo sapien
gagcaattatgatggctaactcagt

SEQ ID NO: 4342706 - DNA, 25 bp, Homo sapien
tctgacagcggatgttatttatttt

SEQ ID NO: 4342707 - DNA, 25 bp, Homo sapien
ggtttcttgacacaacataagtaaa

SEQ ID NO: 4342708 - DNA, 25 bp, Homo sapien
caaagatagcatatttaattcactg

SEQ ID NO: 4342709 - DNA, 25 bp, Homo sapien
caacaatgtattttggagatcttag

SEQ ID NO: 4342710 - DNA, 25 bp, Homo sapien
ttctcagtggtctttccagctcacc

SEQ ID NO: 4342711 - DNA, 25 bp, Homo sapien
cacttctgtaacacttaaggatctc

SEQ ID NO: 4342712 - DNA, 25 bp, Homo sapien
gaagggaagcccatctatccatagc

SEQ ID NO: 4342713 - DNA, 25 bp, Homo sapien
aataaacttagggactgtgacatgg

SEQ ID NO: 4342714 - DNA, 25 bp, Homo sapien
catggcataataaacacacttgaca

SEQ ID NO: 4342715 - DNA, 25 bp, Homo sapien
ggtatccactgttgtattaatcaga

SEQ ID NO: 4342716 - DNA, 25 bp, Homo sapien
tgaaaaataatgatgagactatgac

SEQ ID NO: 4342717 - DNA, 25 bp, Homo sapien
cttcataaaatctgggtgaaaaata

SEQ ID NO: 4342718 - DNA, 25 bp, Homo sapien
tacaggttctacagccagatgagct

SEQ ID NO: 4342719 - DNA, 25 bp, Homo sapien
taaacttccactttatgagggagcc

SEQ ID NO: 4342720 - DNA, 25 bp, Homo sapien
caccaggtgatgaaagttttgccca

SEQ ID NO: 4342721 - DNA, 25 bp, Homo sapien
cactgctgccgagattgtaaactga

SEQ ID NO: 4342722 - DNA, 25 bp, Homo sapien
gtaagaaactcatgatcaatatttt

SEQ ID NO: 4342723 - DNA, 25 bp, Homo sapien
ctgtaagaaactcatgatcaatatt

SEQ ID NO: 4342724 - DNA, 25 bp, Homo sapien
tgtaagaaactcatgatcaatattt

SEQ ID NO: 4342725 - DNA, 25 bp, Homo sapien
taatatgccaaatggcaccccagtc

SEQ ID NO: 4342726 - DNA, 25 bp, Homo sapien
tgaagcctcacctgatcagcatgtc

SEQ ID NO: 4342727 - DNA, 25 bp, Homo sapien
tagagaacacataaagatccctcgc

SEQ ID NO: 4342728 - DNA, 25 bp, Homo sapien
ggaacaaattgtctgcgtctgcttt

SEQ ID NO: 4342729 - DNA, 25 bp, Homo sapien
cagggactggattataatttcttct

SEQ ID NO: 4342730 - DNA, 25 bp, Homo sapien
gtcacttagcatggactgtaacttt

SEQ ID NO: 4342731 - DNA, 25 bp, Homo sapien
taaaaactctactctgataactcta

SEQ ID NO: 4342732 - DNA, 25 bp, Homo sapien
ctctaatctctgaatcacccatgag

SEQ ID NO: 4342733 - DNA, 25 bp, Homo sapien
tgtataataggacagccggctggtg

SEQ ID NO: 4342734 - DNA, 25 bp, Homo sapien
gatggtggcacaccctaaatccaca

SEQ ID NO: 4342735 - DNA, 25 bp, Homo sapien
taaatccacaagacagaagctccgg

SEQ ID NO: 4342736 - DNA, 25 bp, Homo sapien
caagaggcctaaacttgtgattggc

SEQ ID NO: 4342737 - DNA, 25 bp, Homo sapien
caacccaaacgctgctgagtgaata

SEQ ID NO: 4342738 - DNA, 25 bp, Homo sapien
gagtatgatagtagtattcctgaga

SEQ ID NO: 4342739 - DNA, 25 bp, Homo sapien
tatatccaggctgttatagagtaag

SEQ ID NO: 4342740 - DNA, 25 bp, Homo sapien
ttaaacaatcatttcaatgaggcag

SEQ ID NO: 4342741 - DNA, 25 bp, Homo sapien
cagcctaagtgacatagcaacatca

SEQ ID NO: 4342742 - DNA, 25 bp, Homo sapien
tatctcacatccctaagaagggcta

SEQ ID NO: 4342743 - DNA, 25 bp, Homo sapien
gcaatcaacgtatgaaaaaggtcag

SEQ ID NO: 4342744 - DNA, 25 bp, Homo sapien
catgttggcgaagctacagagaaaa

SEQ ID NO: 4342745 - DNA, 25 bp, Homo sapien
taagggcacaaacttcgaagagcta

SEQ ID NO: 4342746 - DNA, 25 bp, Homo sapien
caacagcatattggttaagggcaca

SEQ ID NO: 4342747 - DNA, 25 bp, Homo sapien
tcgtttcagcgaagcgtagaaggct

SEQ ID NO: 4342748 - DNA, 25 bp, Homo sapien
gatatatgacacactgcttggcctc

SEQ ID NO: 4342749 - DNA, 25 bp, Homo sapien
gcaggtacttctgtatgaaacgcat

SEQ ID NO: 4342750 - DNA, 25 bp, Homo sapien
tcacattgactacattgaaatggtt

SEQ ID NO: 4342751 - DNA, 25 bp, Homo sapien
cattgactacattgaaatggttttt

SEQ ID NO: 4342752 - DNA, 25 bp, Homo sapien
gtcacattgactacattgaaatggt

SEQ ID NO: 4342753 - DNA, 25 bp, Homo sapien
acattgactacattgaaatggtttt

SEQ ID NO: 4342754 - DNA, 25 bp, Homo sapien
gaatgacagttacacgaagatgaaa

SEQ ID NO: 4342755 - DNA, 25 bp, Homo sapien
caaaatctctgatttggaatgccag

SEQ ID NO: 4342756 - DNA, 25 bp, Homo sapien
caggtgtccaattaagactatttaa

SEQ ID NO: 4342757 - DNA, 25 bp, Homo sapien
gcacattaagccaaacaggtgtcca

SEQ ID NO: 4342758 - DNA, 25 bp, Homo sapien
agttcgttctaaaggcagcattgca

SEQ ID NO: 4342759 - DNA, 25 bp, Homo sapien
gaagacatgtctctgtaagtgatag

SEQ ID NO: 4342760 - DNA, 25 bp, Homo sapien
gcattgcagtgctcacaaacgtgag

SEQ ID NO: 4342761 - DNA, 25 bp, Homo sapien
aagtgatccatcctcatttattgta

SEQ ID NO: 4342762 - DNA, 25 bp, Homo sapien
tattacatagaccaagcaatcaggt

SEQ ID NO: 4342763 - DNA, 25 bp, Homo sapien
gattagcagtcttacctgcaactgg

SEQ ID NO: 4342764 - DNA, 25 bp, Homo sapien
caatcaggttttagcaagtggagaa

SEQ ID NO: 4342765 - DNA, 25 bp, Homo sapien
cacaaatagcacactaacgcaggca

SEQ ID NO: 4342766 - DNA, 25 bp, Homo sapien
ttaaagttctaagactccagacaca

SEQ ID NO: 4342767 - DNA, 25 bp, Homo sapien
aagtaatttcctgctttacgcttat

SEQ ID NO: 4342768 - DNA, 25 bp, Homo sapien
tgcgggagaacgttgtttccgcttc

SEQ ID NO: 4342769 - DNA, 25 bp, Homo sapien
ttttgtctctcatcagttgctcaga

SEQ ID NO: 4342770 - DNA, 25 bp, Homo sapien
gttgctcagatacatcagtaaaagt

SEQ ID NO: 4342771 - DNA, 25 bp, Homo sapien
tggaaattctagtcttccaagttcc

SEQ ID NO: 4342772 - DNA, 25 bp, Homo sapien
atccctatcctacttggaaattcta

SEQ ID NO: 4342773 - DNA, 25 bp, Homo sapien
tgtattttgtaacagtttcagtaaa

SEQ ID NO: 4342774 - DNA, 25 bp, Homo sapien
aattctagtcttccaagttccataa

SEQ ID NO: 4342775 - DNA, 25 bp, Homo sapien
aaaacttccagaaaggtatcaatat

SEQ ID NO: 4342776 - DNA, 25 bp, Homo sapien
ctttggaattagagtagtagacaga

SEQ ID NO: 4342777 - DNA, 25 bp, Homo sapien
aattagagtagtagacagacattgg

SEQ ID NO: 4342778 - DNA, 25 bp, Homo sapien
tatatatccaaaatgtattagacat

SEQ ID NO: 4342779 - DNA, 25 bp, Homo sapien
gctaggctgactctacataccctgt

SEQ ID NO: 4342780 - DNA, 25 bp, Homo sapien
tccagttggtgtactactagtttaa

SEQ ID NO: 4342781 - DNA, 25 bp, Homo sapien
ccaaagtagacctctctgaaactga

SEQ ID NO: 4342782 - DNA, 25 bp, Homo sapien
cactgtctcacaattccagatgaag

SEQ ID NO: 4342783 - DNA, 25 bp, Homo sapien
gaaggcagcatgcagctccgttttg

SEQ ID NO: 4342784 - DNA, 25 bp, Homo sapien
gcatgcagctccgttttgccccatt

SEQ ID NO: 4342785 - DNA, 25 bp, Homo sapien
ggcagcatgcagctccgttttgccc

SEQ ID NO: 4342786 - DNA, 25 bp, Homo sapien
aggaaggcagcatgcagctccgttt

SEQ ID NO: 4342787 - DNA, 25 bp, Homo sapien
tacaaccattgtcctggaagactgc

SEQ ID NO: 4342788 - DNA, 25 bp, Homo sapien
ctggtgaggcatacttcgatcttga

SEQ ID NO: 4342789 - DNA, 25 bp, Homo sapien
gaagactgcatttcgtctatgccgc

SEQ ID NO: 4342790 - DNA, 25 bp, Homo sapien
tatgccgccacatttaagaaacaat

SEQ ID NO: 4342791 - DNA, 25 bp, Homo sapien
cactccacctaggtgacagaataag

SEQ ID NO: 4342792 - DNA, 25 bp, Homo sapien
ctgtgactgtactactgcactccac

SEQ ID NO: 4342793 - DNA, 25 bp, Homo sapien
tgactgtactactgcactccaccta

SEQ ID NO: 4342794 - DNA, 25 bp, Homo sapien
actccacctaggtgacagaataaga

SEQ ID NO: 4342795 - DNA, 25 bp, Homo sapien
tttgtaacatcagtcaaaaactcca

SEQ ID NO: 4342796 - DNA, 25 bp, Homo sapien
caggaacactatcagacaaatcact

SEQ ID NO: 4342797 - DNA, 25 bp, Homo sapien
tggaaatccttaagaatcaactggt

SEQ ID NO: 4342798 - DNA, 25 bp, Homo sapien
caactggtgaaaagtatttgtaaca

SEQ ID NO: 4342799 - DNA, 25 bp, Homo sapien
taaatgcacaatcaagttgttattg

SEQ ID NO: 4342800 - DNA, 25 bp, Homo sapien
aatgcacaatcaagttgttattgac

SEQ ID NO: 4342801 - DNA, 25 bp, Homo sapien
actatccccttttactctctatatc

SEQ ID NO: 4342802 - DNA, 25 bp, Homo sapien
taactatccccttttactctctata

SEQ ID NO: 4342803 - DNA, 25 bp, Homo sapien
taagtggtctcagtcaaagctctca

SEQ ID NO: 4342804 - DNA, 25 bp, Homo sapien
tcatatacctcaacctgtctctggc

SEQ ID NO: 4342805 - DNA, 25 bp, Homo sapien
gtaacagaattgactctaggtcttg

SEQ ID NO: 4342806 - DNA, 25 bp, Homo sapien
tacggcaagctaacagggtatgagt

SEQ ID NO: 4342807 - DNA, 25 bp, Homo sapien
tgatgaaaactacaacggagcagga

SEQ ID NO: 4342808 - DNA, 25 bp, Homo sapien
aaaggaaggagaccaactcaggcca

SEQ ID NO: 4342809 - DNA, 25 bp, Homo sapien
tctgcgagagaaactgtctacaggg

SEQ ID NO: 4342810 - DNA, 25 bp, Homo sapien
ggcaatccttcctctgcactgcaag

SEQ ID NO: 4342811 - DNA, 25 bp, Homo sapien
agcactctgttatttggaggatgcc

SEQ ID NO: 4342812 - DNA, 25 bp, Homo sapien
tcaaccggcctccagatcatttggt

SEQ ID NO: 4342813 - DNA, 25 bp, Homo sapien
tcaaagcaggttataataggcaagc

SEQ ID NO: 4342814 - DNA, 25 bp, Homo sapien
cacttgtaagccaagagaagcactc

SEQ ID NO: 4342815 - DNA, 25 bp, Homo sapien
aggaaaggaatgctgtagagttgaa

SEQ ID NO: 4342816 - DNA, 25 bp, Homo sapien
ctttcataggcttcagaaatcctca

SEQ ID NO: 4342817 - DNA, 25 bp, Homo sapien
atacgttaggcaaacgcccatcccg

SEQ ID NO: 4342818 - DNA, 25 bp, Homo sapien
gcccatcccgccagatcacgtgctt

SEQ ID NO: 4342819 - DNA, 25 bp, Homo sapien
catcccgccagatcacgtgcttgaa

SEQ ID NO: 4342820 - DNA, 25 bp, Homo sapien
ctccattaaatacgttaggcaaacg

SEQ ID NO: 4342821 - DNA, 25 bp, Homo sapien
cattgacgtgtcaaggctcaccttg

SEQ ID NO: 4342822 - DNA, 25 bp, Homo sapien
cacttctgctcaggagggtaagacc

SEQ ID NO: 4342823 - DNA, 25 bp, Homo sapien
ggataagcctaacgaaattcactct

SEQ ID NO: 4342824 - DNA, 25 bp, Homo sapien
taaaggttctagtaatctgcaagga

SEQ ID NO: 4342825 - DNA, 25 bp, Homo sapien
cattagccattttagtagaacctga

SEQ ID NO: 4342826 - DNA, 25 bp, Homo sapien
tccggacacaccaacaataaactga

SEQ ID NO: 4342827 - DNA, 25 bp, Homo sapien
tcaatttggaagtgcccatcccact

SEQ ID NO: 4342828 - DNA, 25 bp, Homo sapien
cactgaacgcaaaggtccatggctt

SEQ ID NO: 4342829 - DNA, 25 bp, Homo sapien
caaaagatggaaatccactgaatgt

SEQ ID NO: 4342830 - DNA, 25 bp, Homo sapien
tgtgcacagcccagaataaagttta

SEQ ID NO: 4342831 - DNA, 25 bp, Homo sapien
aattaacatgtgaggccaggttcag

SEQ ID NO: 4342832 - DNA, 25 bp, Homo sapien
gggtaaggtggaggtacagatgaca

SEQ ID NO: 4342833 - DNA, 25 bp, Homo sapien
gacataagcttagccattaattgct

SEQ ID NO: 4342834 - DNA, 25 bp, Homo sapien
tcaaggaggctaaaagtgctcaagt

SEQ ID NO: 4342835 - DNA, 25 bp, Homo sapien
taccactgggtaatatactcaagtc

SEQ ID NO: 4342836 - DNA, 25 bp, Homo sapien
cgttaaaaaccataagcatctgcct

SEQ ID NO: 4342837 - DNA, 25 bp, Homo sapien
caaatcccactagaagtaccactgg

SEQ ID NO: 4342838 - DNA, 25 bp, Homo sapien
cgctgtctggcggacacttgttagt

SEQ ID NO: 4342839 - DNA, 25 bp, Homo sapien
gaaaaacgggtgtccatcatcagcc

SEQ ID NO: 4342840 - DNA, 25 bp, Homo sapien
taaacacaatgcagttcaacagaag

SEQ ID NO: 4342841 - DNA, 25 bp, Homo sapien
acttgttagtggctgcggagaagcc

SEQ ID NO: 4342842 - DNA, 25 bp, Homo sapien
gaggcccaaagtgcgccagcttctc

SEQ ID NO: 4342843 - DNA, 25 bp, Homo sapien
ggcgcggtatctgggaggtccggcc

SEQ ID NO: 4342844 - DNA, 25 bp, Homo sapien
caggcccagaaggcgcggtatctgg

SEQ ID NO: 4342845 - DNA, 25 bp, Homo sapien
gccgaggcccaaagtgcgccagctt

SEQ ID NO: 4342846 - DNA, 25 bp, Homo sapien
gcccagccacgggccaagagcgcac

SEQ ID NO: 4342847 - DNA, 25 bp, Homo sapien
ccacgggccaagagcgcacggaccc

SEQ ID NO: 4342848 - DNA, 25 bp, Homo sapien
tcacttcagggagcgcccactcgcc

SEQ ID NO: 4342849 - DNA, 25 bp, Homo sapien
agagcgcacggacccaggcgggcgg

SEQ ID NO: 4342850 - DNA, 25 bp, Homo sapien
cgccaccacgcagctccacttcgct

SEQ ID NO: 4342851 - DNA, 25 bp, Homo sapien
agccggcacagtcccgcccgcgcag

SEQ ID NO: 4342852 - DNA, 25 bp, Homo sapien
gcgcagctggcccaatcgggcctgg

SEQ ID NO: 4342853 - DNA, 25 bp, Homo sapien
cacagccaccaaccgcacagccggc

SEQ ID NO: 4342854 - DNA, 25 bp, Homo sapien
ccagctgctaagtgcaccgccagca

SEQ ID NO: 4342855 - DNA, 25 bp, Homo sapien
agctgctaagtgcaccgccagcaca

SEQ ID NO: 4342856 - DNA, 25 bp, Homo sapien
gcaccgccagcacaggcccgcccat

SEQ ID NO: 4342857 - DNA, 25 bp, Homo sapien
ctgctaagtgcaccgccagcacagg

SEQ ID NO: 4342858 - DNA, 25 bp, Homo sapien
tccaatgtctcatttcttaacccac

SEQ ID NO: 4342859 - DNA, 25 bp, Homo sapien
tatctttaatacacctccacctcat

SEQ ID NO: 4342860 - DNA, 25 bp, Homo sapien
atcatactcagcttaccttatcttt

SEQ ID NO: 4342861 - DNA, 25 bp, Homo sapien
cagcttaccttatctttaatacacc

SEQ ID NO: 4342862 - DNA, 25 bp, Homo sapien
tacgctaatctctcaggcaggaatg

SEQ ID NO: 4342863 - DNA, 25 bp, Homo sapien
tatcaatcccttcaaagactagcta

SEQ ID NO: 4342864 - DNA, 25 bp, Homo sapien
caaaatagataacatccaactgcac

SEQ ID NO: 4342865 - DNA, 25 bp, Homo sapien
tatttgtgcacaagtccagctgccc

SEQ ID NO: 4342866 - DNA, 25 bp, Homo sapien
ggcagctccaacctttctaggggcc

SEQ ID NO: 4342867 - DNA, 25 bp, Homo sapien
ccaacctttctaggggccttgagag

SEQ ID NO: 4342868 - DNA, 25 bp, Homo sapien
gcgggcgccgagtcgcgcggtcacc

SEQ ID NO: 4342869 - DNA, 25 bp, Homo sapien
agtcgcgcggtcaccgactgcaggc

SEQ ID NO: 4342870 - DNA, 25 bp, Homo sapien
ctgtggcagcttcggcaacagctcc

SEQ ID NO: 4342871 - DNA, 25 bp, Homo sapien
ggcagcttcggcaacagctcccacc

SEQ ID NO: 4342872 - DNA, 25 bp, Homo sapien
tgctgtggcagcttcggcaacagct

SEQ ID NO: 4342873 - DNA, 25 bp, Homo sapien
ttttgctgtggcagcttcggcaaca

SEQ ID NO: 4342874 - DNA, 25 bp, Homo sapien
gcagtagagacgcagacatgccgca

SEQ ID NO: 4342875 - DNA, 25 bp, Homo sapien
tcttcctcctcccagagcagtagag

SEQ ID NO: 4342876 - DNA, 25 bp, Homo sapien
tcctcccagagcagtagagacgcag

SEQ ID NO: 4342877 - DNA, 25 bp, Homo sapien
cccagagcagtagagacgcagacat

SEQ ID NO: 4342878 - DNA, 25 bp, Homo sapien
gccactgccggcccggtgcattgtg

SEQ ID NO: 4342879 - DNA, 25 bp, Homo sapien
gccctcgtctggcgcagagacctgg

SEQ ID NO: 4342880 - DNA, 25 bp, Homo sapien
acacgggaagcgctccgcggcgccc

SEQ ID NO: 4342881 - DNA, 25 bp, Homo sapien
gcattgtgggaagccccgcacacgg

SEQ ID NO: 4342882 - DNA, 25 bp, Homo sapien
cagcgtggcttcgattccggcgcct

SEQ ID NO: 4342883 - DNA, 25 bp, Homo sapien
cacagcgtggcttcgattccggcgc

SEQ ID NO: 4342884 - DNA, 25 bp, Homo sapien
acagcgtggcttcgattccggcgcc

SEQ ID NO: 4342885 - DNA, 25 bp, Homo sapien
agcgtggcttcgattccggcgcctg

SEQ ID NO: 4342886 - DNA, 25 bp, Homo sapien
taaccaatgcccagcgcttggaaag

SEQ ID NO: 4342887 - DNA, 25 bp, Homo sapien
gactcggggattcgggagcgtttca

SEQ ID NO: 4342888 - DNA, 25 bp, Homo sapien
ttaaccaatgcccagcgcttggaaa

SEQ ID NO: 4342889 - DNA, 25 bp, Homo sapien
tcggggattcgggagcgtttcaggc

SEQ ID NO: 4342890 - DNA, 25 bp, Homo sapien
agtcgttggcctcttaccaccttca

SEQ ID NO: 4342891 - DNA, 25 bp, Homo sapien
gttggcctcttaccaccttcaaatg

SEQ ID NO: 4342892 - DNA, 25 bp, Homo sapien
gaagatgtagccctgcgcccttgaa

SEQ ID NO: 4342893 - DNA, 25 bp, Homo sapien
tgaaactggcaaaccctattagtgt

SEQ ID NO: 4342894 - DNA, 25 bp, Homo sapien
ctacttgatttttcacgaaggcaac

SEQ ID NO: 4342895 - DNA, 25 bp, Homo sapien
tacttgatttttcacgaaggcaacc

SEQ ID NO: 4342896 - DNA, 25 bp, Homo sapien
cttgatttttcacgaaggcaaccat

SEQ ID NO: 4342897 - DNA, 25 bp, Homo sapien
tcctacttgatttttcacgaaggca

SEQ ID NO: 4342898 - DNA, 25 bp, Homo sapien
gactagagatgggtaatcgtctcct

SEQ ID NO: 4342899 - DNA, 25 bp, Homo sapien
ggacagctctgacagtgatgcaaag

SEQ ID NO: 4342900 - DNA, 25 bp, Homo sapien
tgcgaatccaccaaccaagcagaac

SEQ ID NO: 4342901 - DNA, 25 bp, Homo sapien
ccatggccatggattgtttgaggca

SEQ ID NO: 4342902 - DNA, 25 bp, Homo sapien
caaagagggccatggataaaggagg

SEQ ID NO: 4342903 - DNA, 25 bp, Homo sapien
gagggccatggataaaggagggatg

SEQ ID NO: 4342904 - DNA, 25 bp, Homo sapien
aagagggccatggataaaggaggga

SEQ ID NO: 4342905 - DNA, 25 bp, Homo sapien
aaagagggccatggataaaggaggg

SEQ ID NO: 4342906 - DNA, 25 bp, Homo sapien
ctgaagggaatcggattatgcaata

SEQ ID NO: 4342907 - DNA, 25 bp, Homo sapien
aagaggaagggaatccacagtgtcc

SEQ ID NO: 4342908 - DNA, 25 bp, Homo sapien
gaagaggaagggaatccacagtgtc

SEQ ID NO: 4342909 - DNA, 25 bp, Homo sapien
agaggaagggaatccacagtgtcca

SEQ ID NO: 4342910 - DNA, 25 bp, Homo sapien
gcctctggtctgctacccttggaaa

SEQ ID NO: 4342911 - DNA, 25 bp, Homo sapien
caccttctgaagggcaaagctgcct

SEQ ID NO: 4342912 - DNA, 25 bp, Homo sapien
tctctttccagacacggtattctgc

SEQ ID NO: 4342913 - DNA, 25 bp, Homo sapien
cacggtattctgcagagcgttctct

SEQ ID NO: 4342914 - DNA, 25 bp, Homo sapien
ggtttccccagagcttcgaagaaga

SEQ ID NO: 4342915 - DNA, 25 bp, Homo sapien
tccccagagcttcgaagaagaactc

SEQ ID NO: 4342916 - DNA, 25 bp, Homo sapien
ataccagcggaaggccttgcagaca

SEQ ID NO: 4342917 - DNA, 25 bp, Homo sapien
aagaagaactcagataccagcggaa

SEQ ID NO: 4342918 - DNA, 25 bp, Homo sapien
tattgagggacgctaaagactctct

SEQ ID NO: 4342919 - DNA, 25 bp, Homo sapien
gaaattctaattcttctgcgggagt

SEQ ID NO: 4342920 - DNA, 25 bp, Homo sapien
tattctgtgtatcctcctggaaagg

SEQ ID NO: 4342921 - DNA, 25 bp, Homo sapien
taaacccattcgtgtggatggcctc

SEQ ID NO: 4342922 - DNA, 25 bp, Homo sapien
agcaaggcccttcacatcccgtgct

SEQ ID NO: 4342923 - DNA, 25 bp, Homo sapien
tcgggtgcggtcttctggttcatct

SEQ ID NO: 4342924 - DNA, 25 bp, Homo sapien
ctttgcacaaaagcaccctcacgtg

SEQ ID NO: 4342925 - DNA, 25 bp, Homo sapien
tatgcctcgcagctgaacgggggtt

SEQ ID NO: 4342926 - DNA, 25 bp, Homo sapien
aatttgatgttgagccagactctcc

SEQ ID NO: 4342927 - DNA, 25 bp, Homo sapien
caagtctagatgagtaaattgcttc

SEQ ID NO: 4342928 - DNA, 25 bp, Homo sapien
tccaagtctagatgagtaaattgct

SEQ ID NO: 4342929 - DNA, 25 bp, Homo sapien
ctccaagtctagatgagtaaattgc

SEQ ID NO: 4342930 - DNA, 25 bp, Homo sapien
gaatccagatcttggcctgtgggtg

SEQ ID NO: 4342931 - DNA, 25 bp, Homo sapien
atacagcagccaggaatccagatct

SEQ ID NO: 4342932 - DNA, 25 bp, Homo sapien
aatctgcttgaccccataaccacag

SEQ ID NO: 4342933 - DNA, 25 bp, Homo sapien
accacagctgtcaatacagcagcca

SEQ ID NO: 4342934 - DNA, 25 bp, Homo sapien
tacaaggcaaatgaaatgaattatg

SEQ ID NO: 4342935 - DNA, 25 bp, Homo sapien
gaaatgaattatggtctgccaaaaa

SEQ ID NO: 4342936 - DNA, 25 bp, Homo sapien
aagagactggggtatctgtactgac

SEQ ID NO: 4342937 - DNA, 25 bp, Homo sapien
tttccattactacaaggcaaatgaa

SEQ ID NO: 4342938 - DNA, 25 bp, Homo sapien
tgtgtactgtattcccccatttgtg

SEQ ID NO: 4342939 - DNA, 25 bp, Homo sapien
cttccagatatgtgaagtgtgtact

SEQ ID NO: 4342940 - DNA, 25 bp, Homo sapien
cgtgtcggtatatgataggtaattt

SEQ ID NO: 4342941 - DNA, 25 bp, Homo sapien
gaaggtgtacgtgtcggtatatgat

SEQ ID NO: 4342942 - DNA, 25 bp, Homo sapien
gtaggcctttagcaccatttgaatt

SEQ ID NO: 4342943 - DNA, 25 bp, Homo sapien
ttttcacttgtaggcctttagcacc

SEQ ID NO: 4342944 - DNA, 25 bp, Homo sapien
cttgtaggcctttagcaccatttga

SEQ ID NO: 4342945 - DNA, 25 bp, Homo sapien
tcacttgtaggcctttagcaccatt

SEQ ID NO: 4342946 - DNA, 25 bp, Homo sapien
catgtcttatttcagcatcttatat

SEQ ID NO: 4342947 - DNA, 25 bp, Homo sapien
gtcttatttcagcatcttatatttt

SEQ ID NO: 4342948 - DNA, 25 bp, Homo sapien
tatttcagcatcttatatttttaaa

SEQ ID NO: 4342949 - DNA, 25 bp, Homo sapien
aatcatgtcttatttcagcatctta

SEQ ID NO: 4342950 - DNA, 25 bp, Homo sapien
tttcttacagagcatcagatattaa

SEQ ID NO: 4342951 - DNA, 25 bp, Homo sapien
cattttcttacagagcatcagatat

SEQ ID NO: 4342952 - DNA, 25 bp, Homo sapien
acatagtatgacagatatcattttc

SEQ ID NO: 4342953 - DNA, 25 bp, Homo sapien
tcttacagagcatcagatattaata

SEQ ID NO: 4342954 - DNA, 25 bp, Homo sapien
catcattagaaataacgagtacaca

SEQ ID NO: 4342955 - DNA, 25 bp, Homo sapien
tcaaatgctaaacaggactagggat

SEQ ID NO: 4342956 - DNA, 25 bp, Homo sapien
agctagcaaaatgaagatgcttgcc

SEQ ID NO: 4342957 - DNA, 25 bp, Homo sapien
tgatgaagatagcaacacatatgtt

SEQ ID NO: 4342958 - DNA, 25 bp, Homo sapien
tgtatcccattatagatctgagaag

SEQ ID NO: 4342959 - DNA, 25 bp, Homo sapien
gaagttgagtcttctttgttggcag

SEQ ID NO: 4342960 - DNA, 25 bp, Homo sapien
ggcagtataaaatttctgaccagta

SEQ ID NO: 4342961 - DNA, 25 bp, Homo sapien
ttgctagaggatgacaatgtatccc

SEQ ID NO: 4342962 - DNA, 25 bp, Homo sapien
ggttcagaagcgtgacaaacaatct

SEQ ID NO: 4342963 - DNA, 25 bp, Homo sapien
ttggaatcagcaccagtccccaaaa

SEQ ID NO: 4342964 - DNA, 25 bp, Homo sapien
gaaacagctggtcttgaaacaaaca

SEQ ID NO: 4342965 - DNA, 25 bp, Homo sapien
taacagattagtggatcttaccaag

SEQ ID NO: 4342966 - DNA, 25 bp, Homo sapien
atatgtttatgtatactaggtagtg

SEQ ID NO: 4342967 - DNA, 25 bp, Homo sapien
tatactaggtagtgacttaaatttc

SEQ ID NO: 4342968 - DNA, 25 bp, Homo sapien
tatgtatactaggtagtgacttaaa

SEQ ID NO: 4342969 - DNA, 25 bp, Homo sapien
tgtttatgtatactaggtagtgact

SEQ ID NO: 4342970 - DNA, 25 bp, Homo sapien
ccttagcattggtccaaacttgaat

SEQ ID NO: 4342971 - DNA, 25 bp, Homo sapien
tccttagcattggtccaaacttgaa

SEQ ID NO: 4342972 - DNA, 25 bp, Homo sapien
cttagcattggtccaaacttgaatt

SEQ ID NO: 4342973 - DNA, 25 bp, Homo sapien
attccttagcattggtccaaacttg

SEQ ID NO: 4342974 - DNA, 25 bp, Homo sapien
tcccatctactcggctggatgaggt

SEQ ID NO: 4342975 - DNA, 25 bp, Homo sapien
cccatctactcggctggatgaggta

SEQ ID NO: 4342976 - DNA, 25 bp, Homo sapien
atcccatctactcggctggatgagg

SEQ ID NO: 4342977 - DNA, 25 bp, Homo sapien
gcacatactgatctgcatgactgca

SEQ ID NO: 4342978 - DNA, 25 bp, Homo sapien
tcttttgttctttgaagcgttcaat

SEQ ID NO: 4342979 - DNA, 25 bp, Homo sapien
catgactgcatagcttatgagggcc

SEQ ID NO: 4342980 - DNA, 25 bp, Homo sapien
tatgagggcctcctttaagtctcgg

SEQ ID NO: 4342981 - DNA, 25 bp, Homo sapien
gatggattatgaatcacgtttagca

SEQ ID NO: 4342982 - DNA, 25 bp, Homo sapien
gggtcactggaaaatatacactctt

SEQ ID NO: 4342983 - DNA, 25 bp, Homo sapien
actttgaggtggcagcgagcaacaa

SEQ ID NO: 4342984 - DNA, 25 bp, Homo sapien
aacctccacatccagggttcttgcc

SEQ ID NO: 4342985 - DNA, 25 bp, Homo sapien
tggcatgaattaaatgccgtgatag

SEQ ID NO: 4342986 - DNA, 25 bp, Homo sapien
taaatgccgtgatagcctgagaagg

SEQ ID NO: 4342987 - DNA, 25 bp, Homo sapien
ggcttcacaatgaagtaacacttca

SEQ ID NO: 4342988 - DNA, 25 bp, Homo sapien
caatgaagtaacacttcagctgggt

SEQ ID NO: 4342989 - DNA, 25 bp, Homo sapien
tctggagtttcttgaccaaagagct

SEQ ID NO: 4342990 - DNA, 25 bp, Homo sapien
tcttgaccaaagagcttggtagtca

SEQ ID NO: 4342991 - DNA, 25 bp, Homo sapien
ttttagactttagctgttgttctcc

SEQ ID NO: 4342992 - DNA, 25 bp, Homo sapien
ctctgctctggagtttcttgaccaa

SEQ ID NO: 4342993 - DNA, 25 bp, Homo sapien
ctgcttcttggatgctaagtcctga

SEQ ID NO: 4342994 - DNA, 25 bp, Homo sapien
cttcttggatgctaagtcctgagca

SEQ ID NO: 4342995 - DNA, 25 bp, Homo sapien
caagtcatactgcataagttcatgt

SEQ ID NO: 4342996 - DNA, 25 bp, Homo sapien
gagcagccatctccaagtcatactg

SEQ ID NO: 4342997 - DNA, 25 bp, Homo sapien
gatctgcataatgttcttcatcttc

SEQ ID NO: 4342998 - DNA, 25 bp, Homo sapien
cttttaactgatctgcataatgttc

SEQ ID NO: 4342999 - DNA, 25 bp, Homo sapien
aaagatactcttttaactgatctgc

SEQ ID NO: 4343000 - DNA, 25 bp, Homo sapien
aatatcatcaatagaagatgcatac

SEQ ID NO: 4343001 - DNA, 25 bp, Homo sapien
agaactgtatgtatttacagtgtac

SEQ ID NO: 4343002 - DNA, 25 bp, Homo sapien
gaactgtatgtatttacagtgtaca

SEQ ID NO: 4343003 - DNA, 25 bp, Homo sapien
aagaactgtatgtatttacagtgta

SEQ ID NO: 4343004 - DNA, 25 bp, Homo sapien
agtgacaggatcatgactcaactgc

SEQ ID NO: 4343005 - DNA, 25 bp, Homo sapien
gtgacaggatcatgactcaactgca

SEQ ID NO: 4343006 - DNA, 25 bp, Homo sapien
ttgttgaaatgagctatagaagtgt

SEQ ID NO: 4343007 - DNA, 25 bp, Homo sapien
tgagctatagaagtgtgagtctatt

SEQ ID NO: 4343008 - DNA, 25 bp, Homo sapien
caccaaatccccatgtcaggcaatt

SEQ ID NO: 4343009 - DNA, 25 bp, Homo sapien
atccccatgtcaggcaatttacaaa

SEQ ID NO: 4343010 - DNA, 25 bp, Homo sapien
caaatccccatgtcaggcaatttac

SEQ ID NO: 4343011 - DNA, 25 bp, Homo sapien
ctgtacaccaaatccccatgtcagg

SEQ ID NO: 4343012 - DNA, 25 bp, Homo sapien
attaattcagttgttggccaggtgt

SEQ ID NO: 4343013 - DNA, 25 bp, Homo sapien
ggtgtgctggctcccgccgctaatc

SEQ ID NO: 4343014 - DNA, 25 bp, Homo sapien
caggtgtgctggctcccgccgctaa

SEQ ID NO: 4343015 - DNA, 25 bp, Homo sapien
aaaattaattcagttgttggccagg

SEQ ID NO: 4343016 - DNA, 25 bp, Homo sapien
gcactctgcagtccatcacccattt

SEQ ID NO: 4343017 - DNA, 25 bp, Homo sapien
acatccatatgatgaccagcactct

SEQ ID NO: 4343018 - DNA, 25 bp, Homo sapien
ccatatgatgaccagcactctgcag

SEQ ID NO: 4343019 - DNA, 25 bp, Homo sapien
tccatatgatgaccagcactctgca

SEQ ID NO: 4343020 - DNA, 25 bp, Homo sapien
tttgtagctccatgaaattaaaaaa

SEQ ID NO: 4343021 - DNA, 25 bp, Homo sapien
ggtcgctctagtattttgtagctcc

SEQ ID NO: 4343022 - DNA, 25 bp, Homo sapien
ctgaaaaaccacaagggtcgctcta

SEQ ID NO: 4343023 - DNA, 25 bp, Homo sapien
ccacaagggtcgctctagtattttg

SEQ ID NO: 4343024 - DNA, 25 bp, Homo sapien
aattatagaattattaaacacaagt

SEQ ID NO: 4343025 - DNA, 25 bp, Homo sapien
ttatagaattattaaacacaagtac

SEQ ID NO: 4343026 - DNA, 25 bp, Homo sapien
aaattatagaattattaaacacaag

SEQ ID NO: 4343027 - DNA, 25 bp, Homo sapien
atagaattattaaacacaagtacat

SEQ ID NO: 4343028 - DNA, 25 bp, Homo sapien
tgtctacctgcctctcaaattaatt

SEQ ID NO: 4343029 - DNA, 25 bp, Homo sapien
gcttaattgggttccagtttgagta

SEQ ID NO: 4343030 - DNA, 25 bp, Homo sapien
taaatgtgctacctttgagaatgtt

SEQ ID NO: 4343031 - DNA, 25 bp, Homo sapien
aagcattgttcccaagcttaattgg

SEQ ID NO: 4343032 - DNA, 25 bp, Homo sapien
tacaccatagagtcgatctgctact

SEQ ID NO: 4343033 - DNA, 25 bp, Homo sapien
ctttatatacaccatagagtcgatc

SEQ ID NO: 4343034 - DNA, 25 bp, Homo sapien
ctgaaaactcgaccataattcccat

SEQ ID NO: 4343035 - DNA, 25 bp, Homo sapien
aattcccatgtactttatatacacc

SEQ ID NO: 4343036 - DNA, 25 bp, Homo sapien
tttgcagtagggaacatcttacagg

SEQ ID NO: 4343037 - DNA, 25 bp, Homo sapien
acatatgaatcatgactgctcaagg

SEQ ID NO: 4343038 - DNA, 25 bp, Homo sapien
tgctcaagggagatacggtttgcag

SEQ ID NO: 4343039 - DNA, 25 bp, Homo sapien
cttacagggttagcattccagagaa

SEQ ID NO: 4343040 - DNA, 25 bp, Homo sapien
gctctgactcgaagaagatgtgaga

SEQ ID NO: 4343041 - DNA, 25 bp, Homo sapien
atagtgcttaaggtcagtaaatctc

SEQ ID NO: 4343042 - DNA, 25 bp, Homo sapien
cagactgcagttcatcactatagtg

SEQ ID NO: 4343043 - DNA, 25 bp, Homo sapien
tcatcactatagtgcttaaggtcag

SEQ ID NO: 4343044 - DNA, 25 bp, Homo sapien
tgtgaatacatcaaggtcctcgtgg

SEQ ID NO: 4343045 - DNA, 25 bp, Homo sapien
tcctcgtgggactcaggaatctgaa

SEQ ID NO: 4343046 - DNA, 25 bp, Homo sapien
catgcctggtcgaaatgtttcttaa

SEQ ID NO: 4343047 - DNA, 25 bp, Homo sapien
acactactgatggtctctcagaggg

SEQ ID NO: 4343048 - DNA, 25 bp, Homo sapien
gctgacctcaggtagttatactttg

SEQ ID NO: 4343049 - DNA, 25 bp, Homo sapien
tcattcacaaagcttcacgattatg

SEQ ID NO: 4343050 - DNA, 25 bp, Homo sapien
ttcttcaaggttcagtcctgggtcc

SEQ ID NO: 4343051 - DNA, 25 bp, Homo sapien
gagactacatatgggcatcaccatg

SEQ ID NO: 4343052 - DNA, 25 bp, Homo sapien
ttgcattaagcgcttttaacctgga

SEQ ID NO: 4343053 - DNA, 25 bp, Homo sapien
ttaagcgcttttaacctggagtctg

SEQ ID NO: 4343054 - DNA, 25 bp, Homo sapien
aatgttgcattaagcgcttttaacc

SEQ ID NO: 4343055 - DNA, 25 bp, Homo sapien
tgaatgttgcattaagcgcttttaa

SEQ ID NO: 4343056 - DNA, 25 bp, Homo sapien
taactgcagtaaagacttaatgact

SEQ ID NO: 4343057 - DNA, 25 bp, Homo sapien
aaattctaccattctctctgagtgt

SEQ ID NO: 4343058 - DNA, 25 bp, Homo sapien
taagcagcacctacacataagattc

SEQ ID NO: 4343059 - DNA, 25 bp, Homo sapien
ccaagttatttcagatccatcccta

SEQ ID NO: 4343060 - DNA, 25 bp, Homo sapien
aaacccagtttcattcacagtctcc

SEQ ID NO: 4343061 - DNA, 25 bp, Homo sapien
ttcattcacagtctccttccagtta

SEQ ID NO: 4343062 - DNA, 25 bp, Homo sapien
cttcagctgaaacccagtttcattc

SEQ ID NO: 4343063 - DNA, 25 bp, Homo sapien
ctgaaacccagtttcattcacagtc

SEQ ID NO: 4343064 - DNA, 25 bp, Homo sapien
gatgtgaagcaatcctcaagagaaa

SEQ ID NO: 4343065 - DNA, 25 bp, Homo sapien
tttctaaaccaatccgtcgcctctc

SEQ ID NO: 4343066 - DNA, 25 bp, Homo sapien
tctggatccatgttgtcagcagaga

SEQ ID NO: 4343067 - DNA, 25 bp, Homo sapien
taaaaacagatagaagattttgtct

SEQ ID NO: 4343068 - DNA, 25 bp, Homo sapien
tctgttaggacactctgaccatcgg

SEQ ID NO: 4343069 - DNA, 25 bp, Homo sapien
cagaggtggcacaacaatatgtgga

SEQ ID NO: 4343070 - DNA, 25 bp, Homo sapien
aaaggtagcttctcaacaactcaaa

SEQ ID NO: 4343071 - DNA, 25 bp, Homo sapien
tatatcgccgccatagtgagtctgt

SEQ ID NO: 4343072 - DNA, 25 bp, Homo sapien
tgaaaagtcacagggttcagcacta

SEQ ID NO: 4343073 - DNA, 25 bp, Homo sapien
aaaagtattaacattggccggatgc

SEQ ID NO: 4343074 - DNA, 25 bp, Homo sapien
gtcacagggttcagcactaaggcaa

SEQ ID NO: 4343075 - DNA, 25 bp, Homo sapien
tgtctgtagacaatcttcaccaaga

SEQ ID NO: 4343076 - DNA, 25 bp, Homo sapien
taccggctatcaacaattctctcat

SEQ ID NO: 4343077 - DNA, 25 bp, Homo sapien
aagttctaaagcaccaatctcaatg

SEQ ID NO: 4343078 - DNA, 25 bp, Homo sapien
gattctaagaccaaggaatcctcca

SEQ ID NO: 4343079 - DNA, 25 bp, Homo sapien
caagttcacttctacatgccagaga

SEQ ID NO: 4343080 - DNA, 25 bp, Homo sapien
caatgaggtaagcagtatatgtttc

SEQ ID NO: 4343081 - DNA, 25 bp, Homo sapien
tttcaatgaggtaagcagtatatgt

SEQ ID NO: 4343082 - DNA, 25 bp, Homo sapien
tcttgcatgttcatggcatttcttc

SEQ ID NO: 4343083 - DNA, 25 bp, Homo sapien
gcatgttcatggcatttcttccagt

SEQ ID NO: 4343084 - DNA, 25 bp, Homo sapien
tatctcaggtctataccaaaaggtg

SEQ ID NO: 4343085 - DNA, 25 bp, Homo sapien
aaatacaccactggcagaccctagg

SEQ ID NO: 4343086 - DNA, 25 bp, Homo sapien
ttggcagtggttaataggctccacc

SEQ ID NO: 4343087 - DNA, 25 bp, Homo sapien
tgagaccacaggataactgctatgc

SEQ ID NO: 4343088 - DNA, 25 bp, Homo sapien
agctctcttctccggccccctccgc

SEQ ID NO: 4343089 - DNA, 25 bp, Homo sapien
tctccggccccctccgcttccttgc

SEQ ID NO: 4343090 - DNA, 25 bp, Homo sapien
cgtgtcgaccccagagctctcttct

SEQ ID NO: 4343091 - DNA, 25 bp, Homo sapien
tctcttctccggccccctccgcttc

SEQ ID NO: 4343092 - DNA, 25 bp, Homo sapien
agcggctccaagggcgccggctgga

SEQ ID NO: 4343093 - DNA, 25 bp, Homo sapien
gcggctccaagggcgccggctggag

SEQ ID NO: 4343094 - DNA, 25 bp, Homo sapien
agttcggcgcggcgaacccagtgcg

SEQ ID NO: 4343095 - DNA, 25 bp, Homo sapien
gcagttcggcgcggcgaacccagtg

SEQ ID NO: 4343096 - DNA, 25 bp, Homo sapien
cagttcggcgcggcgaacccagtgc

SEQ ID NO: 4343097 - DNA, 25 bp, Homo sapien
gttcggcgcggcgaacccagtgcgc

SEQ ID NO: 4343098 - DNA, 25 bp, Homo sapien
gctaatcaagttaagcagtgggaga

SEQ ID NO: 4343099 - DNA, 25 bp, Homo sapien
atcaagttaagcagtgggagagaga

SEQ ID NO: 4343100 - DNA, 25 bp, Homo sapien
aaggaacaaagaaatctgtaactgg

SEQ ID NO: 4343101 - DNA, 25 bp, Homo sapien
taaaggctaatcaagttaagcagtg

SEQ ID NO: 4343102 - DNA, 25 bp, Homo sapien
gagatccagtctatacaaacagtac

SEQ ID NO: 4343103 - DNA, 25 bp, Homo sapien
agatccagtctatacaaacagtaca

SEQ ID NO: 4343104 - DNA, 25 bp, Homo sapien
gttctctagttttattatttgtcaa

SEQ ID NO: 4343105 - DNA, 25 bp, Homo sapien
tctctagttttattatttgtcaatt

SEQ ID NO: 4343106 - DNA, 25 bp, Homo sapien
ttgttctctagttttattatttgtc

SEQ ID NO: 4343107 - DNA, 25 bp, Homo sapien
ctctagttttattatttgtcaattt

SEQ ID NO: 4343108 - DNA, 25 bp, Homo sapien
gagtaaggcaccactcttgggaaat

SEQ ID NO: 4343109 - DNA, 25 bp, Homo sapien
tacatgcgcgttcagttacacatat

SEQ ID NO: 4343110 - DNA, 25 bp, Homo sapien
aataaaaccataccttacatgcgcg

SEQ ID NO: 4343111 - DNA, 25 bp, Homo sapien
tgttacacacactgattggaagacc

SEQ ID NO: 4343112 - DNA, 25 bp, Homo sapien
tttaacagaggtaaaataaagcata

SEQ ID NO: 4343113 - DNA, 25 bp, Homo sapien
ttaacagaggtaaaataaagcatac

SEQ ID NO: 4343114 - DNA, 25 bp, Homo sapien
ttatccaaagggataacacataata

SEQ ID NO: 4343115 - DNA, 25 bp, Homo sapien
aaagggataacacataatactggat

SEQ ID NO: 4343116 - DNA, 25 bp, Homo sapien
tccaaagggataacacataatactg

SEQ ID NO: 4343117 - DNA, 25 bp, Homo sapien
caaagggataacacataatactgga

SEQ ID NO: 4343118 - DNA, 25 bp, Homo sapien
taggtaagttcctcagacacaggca

SEQ ID NO: 4343119 - DNA, 25 bp, Homo sapien
tctgctgcccctgtgcaaaaatagg

SEQ ID NO: 4343120 - DNA, 25 bp, Homo sapien
tagtttcagtctgcgcaatcaggaa

SEQ ID NO: 4343121 - DNA, 25 bp, Homo sapien
caatcaggaagcaggtcactcagtg

SEQ ID NO: 4343122 - DNA, 25 bp, Homo sapien
gaacctcatttggtcgagttttaga

SEQ ID NO: 4343123 - DNA, 25 bp, Homo sapien
ttggtcgagttttagatagtatgtg

SEQ ID NO: 4343124 - DNA, 25 bp, Homo sapien
cctcatttggtcgagttttagatag

SEQ ID NO: 4343125 - DNA, 25 bp, Homo sapien
cagagaagaacctcatttggtcgag

SEQ ID NO: 4343126 - DNA, 25 bp, Homo sapien
tcactctgctggttgtgttgttgga

SEQ ID NO: 4343127 - DNA, 25 bp, Homo sapien
cactctgctggttgtgttgttggaa

SEQ ID NO: 4343128 - DNA, 25 bp, Homo sapien
gtttatgataaacccagccatctcc

SEQ ID NO: 4343129 - DNA, 25 bp, Homo sapien
caaagtggtttatgataaacccagc

SEQ ID NO: 4343130 - DNA, 25 bp, Homo sapien
aatttcagattctctcagcgagtct

SEQ ID NO: 4343131 - DNA, 25 bp, Homo sapien
tcagtacgatgcctttcttcagtcc

SEQ ID NO: 4343132 - DNA, 25 bp, Homo sapien
tcttccagggtatgcttatgctctg

SEQ ID NO: 4343133 - DNA, 25 bp, Homo sapien
ccaaggtgtgcctgtttcagtacga

SEQ ID NO: 4343134 - DNA, 25 bp, Homo sapien
tgccaatttagtcaagtccacatac

SEQ ID NO: 4343135 - DNA, 25 bp, Homo sapien
actcttttcttcgtcactgccaatt

SEQ ID NO: 4343136 - DNA, 25 bp, Homo sapien
tctgcataccacagtgttggtgatg

SEQ ID NO: 4343137 - DNA, 25 bp, Homo sapien
tgtctctccattgctatatgtgaac

SEQ ID NO: 4343138 - DNA, 25 bp, Homo sapien
atgcagcagcatgtaacagaaacag

SEQ ID NO: 4343139 - DNA, 25 bp, Homo sapien
gcagcatgtaacagaaacagacttc

SEQ ID NO: 4343140 - DNA, 25 bp, Homo sapien
tgcagcagcatgtaacagaaacaga

SEQ ID NO: 4343141 - DNA, 25 bp, Homo sapien
cagcagcatgtaacagaaacagact

SEQ ID NO: 4343142 - DNA, 25 bp, Homo sapien
tagcctcactttgccgcccaggctg

SEQ ID NO: 4343143 - DNA, 25 bp, Homo sapien
gtagcctcactttgccgcccaggct

SEQ ID NO: 4343144 - DNA, 25 bp, Homo sapien
ctgtgcccagcgaaagtgattctta

SEQ ID NO: 4343145 - DNA, 25 bp, Homo sapien
ttctgttgagggtcttaaagagtct

SEQ ID NO: 4343146 - DNA, 25 bp, Homo sapien
tcagatagaccagttctgttgaggg

SEQ ID NO: 4343147 - DNA, 25 bp, Homo sapien
gaaaggaaatggttattgaatcaga

SEQ ID NO: 4343148 - DNA, 25 bp, Homo sapien
taagatttcaacaaagcacttgcct

SEQ ID NO: 4343149 - DNA, 25 bp, Homo sapien
gagcttcactcttgcaatggtgcca

SEQ ID NO: 4343150 - DNA, 25 bp, Homo sapien
tctggatcctttatgactgaggcaa

SEQ ID NO: 4343151 - DNA, 25 bp, Homo sapien
cacttgcctaggatttgagcagatc

SEQ ID NO: 4343152 - DNA, 25 bp, Homo sapien
tatgctgcccttaagatagttagca

SEQ ID NO: 4343153 - DNA, 25 bp, Homo sapien
tgtaaggacacatgcaacaaatccc

SEQ ID NO: 4343154 - DNA, 25 bp, Homo sapien
tatgcttccttcgtcagactttggg

SEQ ID NO: 4343155 - DNA, 25 bp, Homo sapien
ccctgagataccagaaaaccactgg

SEQ ID NO: 4343156 - DNA, 25 bp, Homo sapien
ccaaatctgtatcccttaaaggcag

SEQ ID NO: 4343157 - DNA, 25 bp, Homo sapien
taaaggcagaattgggccagagact

SEQ ID NO: 4343158 - DNA, 25 bp, Homo sapien
catacactggctttaatcattgtgc

SEQ ID NO: 4343159 - DNA, 25 bp, Homo sapien
gcatctaatgaagcacatacactgg

SEQ ID NO: 4343160 - DNA, 25 bp, Homo sapien
caaaattgaccgagcatatgcacag

SEQ ID NO: 4343161 - DNA, 25 bp, Homo sapien
tatccagtttttgcacagttgacac

SEQ ID NO: 4343162 - DNA, 25 bp, Homo sapien
tccatgctccaacagactaaggata

SEQ ID NO: 4343163 - DNA, 25 bp, Homo sapien
ccagttctacccaaggaacagtcaa

SEQ ID NO: 4343164 - DNA, 25 bp, Homo sapien
gtgaaaacatgagggtggttaacat

SEQ ID NO: 4343165 - DNA, 25 bp, Homo sapien
tatctgacattaccaggcaatagtg

SEQ ID NO: 4343166 - DNA, 25 bp, Homo sapien
ccatcaatttgaggttcatgaaacc

SEQ ID NO: 4343167 - DNA, 25 bp, Homo sapien
aggtttactttcactatgacatgac

SEQ ID NO: 4343168 - DNA, 25 bp, Homo sapien
tccgactcctgggtcgaatgattct

SEQ ID NO: 4343169 - DNA, 25 bp, Homo sapien
taaagtagcctacacaaagcaacat

SEQ ID NO: 4343170 - DNA, 25 bp, Homo sapien
taataaatgctcgttaagcactcag

SEQ ID NO: 4343171 - DNA, 25 bp, Homo sapien
tagtcttcacaaagggcaacaataa

SEQ ID NO: 4343172 - DNA, 25 bp, Homo sapien
taagggatactaaggatactcgagc

SEQ ID NO: 4343173 - DNA, 25 bp, Homo sapien
taaagtaaactttcattcctgcttg

SEQ ID NO: 4343174 - DNA, 25 bp, Homo sapien
ggaaaaaaaaatacatatatatatg

SEQ ID NO: 4343175 - DNA, 25 bp, Homo sapien
gtaaactttcattcctgcttggaaa

SEQ ID NO: 4343176 - DNA, 25 bp, Homo sapien
aagtaaactttcattcctgcttgga

SEQ ID NO: 4343177 - DNA, 25 bp, Homo sapien
aacttgctcttagtccagacatgcg

SEQ ID NO: 4343178 - DNA, 25 bp, Homo sapien
tattgacatgcctaagaacttgctc

SEQ ID NO: 4343179 - DNA, 25 bp, Homo sapien
tacattctgcataaaatcctgagac

SEQ ID NO: 4343180 - DNA, 25 bp, Homo sapien
gcaacaaatctgactgtgtaacagt

SEQ ID NO: 4343181 - DNA, 25 bp, Homo sapien
gaagaactgctaaaaacactggatg

SEQ ID NO: 4343182 - DNA, 25 bp, Homo sapien
agcatgatttgtgactccctgggtg

SEQ ID NO: 4343183 - DNA, 25 bp, Homo sapien
cactggatgctacctcgctttttgg

SEQ ID NO: 4343184 - DNA, 25 bp, Homo sapien
cagtgaaatgtttctccaatgatag

SEQ ID NO: 4343185 - DNA, 25 bp, Homo sapien
ggctataaataggtctggatgagac

SEQ ID NO: 4343186 - DNA, 25 bp, Homo sapien
aaggaacgcttctctaggataaatg

SEQ ID NO: 4343187 - DNA, 25 bp, Homo sapien
ggtagtactcaacaaagcgaatcat

SEQ ID NO: 4343188 - DNA, 25 bp, Homo sapien
catgaaatgaggtaaggtagtactc

SEQ ID NO: 4343189 - DNA, 25 bp, Homo sapien
taatcaacaaggtacaaatgtagag

SEQ ID NO: 4343190 - DNA, 25 bp, Homo sapien
ggattactatcacagcacacttttt

SEQ ID NO: 4343191 - DNA, 25 bp, Homo sapien
tatagtatatgcacttattcatgcc

SEQ ID NO: 4343192 - DNA, 25 bp, Homo sapien
ttcatgccatgagagaacttctacc

SEQ ID NO: 4343193 - DNA, 25 bp, Homo sapien
gatgacactacgttgttcttctaca

SEQ ID NO: 4343194 - DNA, 25 bp, Homo sapien
caggtcatcctctttgtggtcacat

SEQ ID NO: 4343195 - DNA, 25 bp, Homo sapien
catgtatcctctatctcatcatctg

SEQ ID NO: 4343196 - DNA, 25 bp, Homo sapien
ccagcttaagctgtgacaagagatg

SEQ ID NO: 4343197 - DNA, 25 bp, Homo sapien
tagtccagattctgcaacaggctgc

SEQ ID NO: 4343198 - DNA, 25 bp, Homo sapien
ggttctaaccactcgattgtcgttc

SEQ ID NO: 4343199 - DNA, 25 bp, Homo sapien
ttctgggactgccaccggcttactc

SEQ ID NO: 4343200 - DNA, 25 bp, Homo sapien
gatcagttgcaaagggctggtcagc

SEQ ID NO: 4343201 - DNA, 25 bp, Homo sapien
aaaactttcgctgaaacttgctcat

SEQ ID NO: 4343202 - DNA, 25 bp, Homo sapien
gaaaactttcgctgaaacttgctca

SEQ ID NO: 4343203 - DNA, 25 bp, Homo sapien
agagaaaactttcgctgaaacttgc

SEQ ID NO: 4343204 - DNA, 25 bp, Homo sapien
aagagaaaactttcgctgaaacttg

SEQ ID NO: 4343205 - DNA, 25 bp, Homo sapien
ggtttctggttggtaggacaatgca

SEQ ID NO: 4343206 - DNA, 25 bp, Homo sapien
cacttgtctcctcaaaggaatataa

SEQ ID NO: 4343207 - DNA, 25 bp, Homo sapien
gattaccaacactagaattaaccca

SEQ ID NO: 4343208 - DNA, 25 bp, Homo sapien
cacagggatatagttaagtaaacca

SEQ ID NO: 4343209 - DNA, 25 bp, Homo sapien
gaaagcagtcatttaagcagttcat

SEQ ID NO: 4343210 - DNA, 25 bp, Homo sapien
tgaaggcaatgagcccttctgatgt

SEQ ID NO: 4343211 - DNA, 25 bp, Homo sapien
gaatatgaaagcagtcatttaagca

SEQ ID NO: 4343212 - DNA, 25 bp, Homo sapien
tgatgtgatgcatgctgtaactgga

SEQ ID NO: 4343213 - DNA, 25 bp, Homo sapien
gttgtccttcagcatgagacatcat

SEQ ID NO: 4343214 - DNA, 25 bp, Homo sapien
tggaagtagctttgagcattaagag

SEQ ID NO: 4343215 - DNA, 25 bp, Homo sapien
ctggtccaaggaactaagatggcca

SEQ ID NO: 4343216 - DNA, 25 bp, Homo sapien
gaagtaggaaggcattcaattcgtc

SEQ ID NO: 4343217 - DNA, 25 bp, Homo sapien
gatatatattagattccacacggca

SEQ ID NO: 4343218 - DNA, 25 bp, Homo sapien
aaatgactaatgcatgcctgcacag

SEQ ID NO: 4343219 - DNA, 25 bp, Homo sapien
gaattttggacaaccatctggtata

SEQ ID NO: 4343220 - DNA, 25 bp, Homo sapien
ttcaaagtgcaggacagaccaatgg

SEQ ID NO: 4343221 - DNA, 25 bp, Homo sapien
tactagatgcaagtgagaagctccg

SEQ ID NO: 4343222 - DNA, 25 bp, Homo sapien
tctggaggtaaattagttcttttgc

SEQ ID NO: 4343223 - DNA, 25 bp, Homo sapien
cctctgcgatataggagaattacta

SEQ ID NO: 4343224 - DNA, 25 bp, Homo sapien
ctcagtgattgcagtttggaatgtc

SEQ ID NO: 4343225 - DNA, 25 bp, Homo sapien
aacccagtgctgtcgctcttttgca

SEQ ID NO: 4343226 - DNA, 25 bp, Homo sapien
acccagtgctgtcgctcttttgcat

SEQ ID NO: 4343227 - DNA, 25 bp, Homo sapien
aatagcttcagtatgatgctgtgta

SEQ ID NO: 4343228 - DNA, 25 bp, Homo sapien
tccaatagcttcagtatgatgctgt

SEQ ID NO: 4343229 - DNA, 25 bp, Homo sapien
gttccccactggcagcgtttacagt

SEQ ID NO: 4343230 - DNA, 25 bp, Homo sapien
catcactgggtgatattacagctcc

SEQ ID NO: 4343231 - DNA, 25 bp, Homo sapien
ttcacaaagtactccaacagcccag

SEQ ID NO: 4343232 - DNA, 25 bp, Homo sapien
ctgcaagctgcaaagttcctctagg

SEQ ID NO: 4343233 - DNA, 25 bp, Homo sapien
cacccagtgacaaggttggtatact

SEQ ID NO: 4343234 - DNA, 25 bp, Homo sapien
cagtgacaaggttggtatacttcat

SEQ ID NO: 4343235 - DNA, 25 bp, Homo sapien
cccagtgacaaggttggtatacttc

SEQ ID NO: 4343236 - DNA, 25 bp, Homo sapien
ccagtgacaaggttggtatacttca

SEQ ID NO: 4343237 - DNA, 25 bp, Homo sapien
ccagttgctccataatctgaatatt

SEQ ID NO: 4343238 - DNA, 25 bp, Homo sapien
tccataatctgaatatttgcttaca

SEQ ID NO: 4343239 - DNA, 25 bp, Homo sapien
gctccataatctgaatatttgctta

SEQ ID NO: 4343240 - DNA, 25 bp, Homo sapien
gttgctccataatctgaatatttgc

SEQ ID NO: 4343241 - DNA, 25 bp, Homo sapien
tgtgttcaagtgattctcctgcctc

SEQ ID NO: 4343242 - DNA, 25 bp, Homo sapien
ctacaacctccgcctgctgtgttca

SEQ ID NO: 4343243 - DNA, 25 bp, Homo sapien
gatattcctcgcaacagctagtgtg

SEQ ID NO: 4343244 - DNA, 25 bp, Homo sapien
gctatgggatttctcaggctccaca

SEQ ID NO: 4343245 - DNA, 25 bp, Homo sapien
gcttgtagacaactgagctatggga

SEQ ID NO: 4343246 - DNA, 25 bp, Homo sapien
ggtaccaggcaagtcacatgtcaaa

SEQ ID NO: 4343247 - DNA, 25 bp, Homo sapien
ttcgaaggcacctcacaaccaactt

SEQ ID NO: 4343248 - DNA, 25 bp, Homo sapien
ctgattccaaaagcgggcctagacc

SEQ ID NO: 4343249 - DNA, 25 bp, Homo sapien
cccatagcaggtcaggacgaagcgc

SEQ ID NO: 4343250 - DNA, 25 bp, Homo sapien
caacttaatagactcccggctctct

SEQ ID NO: 4343251 - DNA, 25 bp, Homo sapien
cagttaggcacataggagtcaatca

SEQ ID NO: 4343252 - DNA, 25 bp, Homo sapien
tggcctgagcaacgcaaactgaaca

SEQ ID NO: 4343253 - DNA, 25 bp, Homo sapien
tgctaccctctcgagaaagctgagt

SEQ ID NO: 4343254 - DNA, 25 bp, Homo sapien
tgccctcgcagtctatcagagaaag

SEQ ID NO: 4343255 - DNA, 25 bp, Homo sapien
ctccgagactttcattgtggacact

SEQ ID NO: 4343256 - DNA, 25 bp, Homo sapien
tgctgttcttgttcggggtcaccgc

SEQ ID NO: 4343257 - DNA, 25 bp, Homo sapien
tttccttcgctctccgagactttca

SEQ ID NO: 4343258 - DNA, 25 bp, Homo sapien
ttcattgtggacactggttcacccc

SEQ ID NO: 4343259 - DNA, 25 bp, Homo sapien
cttaacgccaaagtccacttgccct

SEQ ID NO: 4343260 - DNA, 25 bp, Homo sapien
tcgcagattctgtagccaagacggc

SEQ ID NO: 4343261 - DNA, 25 bp, Homo sapien
cttgagcgggagagaacaattctgt

SEQ ID NO: 4343262 - DNA, 25 bp, Homo sapien
catccggcgagaagacttaagtgac

SEQ ID NO: 4343263 - DNA, 25 bp, Homo sapien
gtcctcaggcagtgcgtccagtcaa

SEQ ID NO: 4343264 - DNA, 25 bp, Homo sapien
tcacagccgaagcgtctggcgccat

SEQ ID NO: 4343265 - DNA, 25 bp, Homo sapien
agcgtctggcgccatcttgggtcag

SEQ ID NO: 4343266 - DNA, 25 bp, Homo sapien
acagccgaagcgtctggcgccatct

SEQ ID NO: 4343267 - DNA, 25 bp, Homo sapien
gccgaagcgtctggcgccatcttgg

SEQ ID NO: 4343268 - DNA, 25 bp, Homo sapien
tgggtgtcagtgtgaaaatgtagat

SEQ ID NO: 4343269 - DNA, 25 bp, Homo sapien
catatctcttgctattgagaagaca

SEQ ID NO: 4343270 - DNA, 25 bp, Homo sapien
tatcaaatgtggtagttgaacaaaa

SEQ ID NO: 4343271 - DNA, 25 bp, Homo sapien
aaaatatcaaatgtggtagttgaac

SEQ ID NO: 4343272 - DNA, 25 bp, Homo sapien
aattcaaaggaaatatcacaatcat

SEQ ID NO: 4343273 - DNA, 25 bp, Homo sapien
gaatacaggagatcccttagggtgt

SEQ ID NO: 4343274 - DNA, 25 bp, Homo sapien
ggtccaccaggcgaaaaaacatgac

SEQ ID NO: 4343275 - DNA, 25 bp, Homo sapien
cctgtgattaaggtcaacgggaaag

SEQ ID NO: 4343276 - DNA, 25 bp, Homo sapien
gactacaaatggctgacccgtcagg

SEQ ID NO: 4343277 - DNA, 25 bp, Homo sapien
tgccaagttgacaagcggtgggctt

SEQ ID NO: 4343278 - DNA, 25 bp, Homo sapien
cgcttccggctgtacgaaggatagt

SEQ ID NO: 4343279 - DNA, 25 bp, Homo sapien
ccaagttgacaagcggtgggcttgt

SEQ ID NO: 4343280 - DNA, 25 bp, Homo sapien
ttaaggacgggtgcgcttccggctg

SEQ ID NO: 4343281 - DNA, 25 bp, Homo sapien
tattgatggcatactggaaagttgc

SEQ ID NO: 4343282 - DNA, 25 bp, Homo sapien
aaagggttcccatttgcctgcaggt

SEQ ID NO: 4343283 - DNA, 25 bp, Homo sapien
tctagatagaatgcattgaagccct

SEQ ID NO: 4343284 - DNA, 25 bp, Homo sapien
aggtaaagaaacctggtgtgaatat

SEQ ID NO: 4343285 - DNA, 25 bp, Homo sapien
tgttgctactcccagtaactgcacg

SEQ ID NO: 4343286 - DNA, 25 bp, Homo sapien
cacgaggtgtactgttgctactccc

SEQ ID NO: 4343287 - DNA, 25 bp, Homo sapien
tcccagtaactgcacgagcttgatt

SEQ ID NO: 4343288 - DNA, 25 bp, Homo sapien
gaatgttgccaatctgctgcacgag

SEQ ID NO: 4343289 - DNA, 25 bp, Homo sapien
atttgtgtagtctggatggtaggaa

SEQ ID NO: 4343290 - DNA, 25 bp, Homo sapien
gatttgtgtagtctggatggtagga

SEQ ID NO: 4343291 - DNA, 25 bp, Homo sapien
tttgtgtagtctggatggtaggaag

SEQ ID NO: 4343292 - DNA, 25 bp, Homo sapien
ctgatttgtgtagtctggatggtag

SEQ ID NO: 4343293 - DNA, 25 bp, Homo sapien
ttcactgttgtgcagaaccacacag

SEQ ID NO: 4343294 - DNA, 25 bp, Homo sapien
tcactgttgtgcagaaccacacagt

SEQ ID NO: 4343295 - DNA, 25 bp, Homo sapien
cagcttgtttcggttccttgacatt

SEQ ID NO: 4343296 - DNA, 25 bp, Homo sapien
ctgcctcagcttgtttcggttcctt

SEQ ID NO: 4343297 - DNA, 25 bp, Homo sapien
tcctccagctgagatactgtccacc

SEQ ID NO: 4343298 - DNA, 25 bp, Homo sapien
aatgtccataaggaaaccctttctg

SEQ ID NO: 4343299 - DNA, 25 bp, Homo sapien
gctggatcatgtggccacatgatgc

SEQ ID NO: 4343300 - DNA, 25 bp, Homo sapien
cacatgatgccaacgttgctggcaa

SEQ ID NO: 4343301 - DNA, 25 bp, Homo sapien
gcccctggcatgcaatagccagaat

SEQ ID NO: 4343302 - DNA, 25 bp, Homo sapien
gaagcacaccaacttcctgtggctc

SEQ ID NO: 4343303 - DNA, 25 bp, Homo sapien
cctgtgtgaagcacaccaacttcct

SEQ ID NO: 4343304 - DNA, 25 bp, Homo sapien
tggcatgcaatagccagaatgaaga

SEQ ID NO: 4343305 - DNA, 25 bp, Homo sapien
ctgacatgctgaaaaatgacatgtt

SEQ ID NO: 4343306 - DNA, 25 bp, Homo sapien
ctgaaaaatgacatgttggggattt

SEQ ID NO: 4343307 - DNA, 25 bp, Homo sapien
tgctgaaaaatgacatgttggggat

SEQ ID NO: 4343308 - DNA, 25 bp, Homo sapien
acatgctgaaaaatgacatgttggg

SEQ ID NO: 4343309 - DNA, 25 bp, Homo sapien
cttccacctgggggctcttcttgga

SEQ ID NO: 4343310 - DNA, 25 bp, Homo sapien
gggggctcttcttggaggccagcat

SEQ ID NO: 4343311 - DNA, 25 bp, Homo sapien
cacctgggggctcttcttggaggcc

SEQ ID NO: 4343312 - DNA, 25 bp, Homo sapien
tccacctgggggctcttcttggagg

SEQ ID NO: 4343313 - DNA, 25 bp, Homo sapien
gcagagcccacctttaaacaagata

SEQ ID NO: 4343314 - DNA, 25 bp, Homo sapien
gtttgttccctactgcactgatggc

SEQ ID NO: 4343315 - DNA, 25 bp, Homo sapien
cccttagtgtggcaccaggccatgg

SEQ ID NO: 4343316 - DNA, 25 bp, Homo sapien
ccagagcataggatagcacataccc

SEQ ID NO: 4343317 - DNA, 25 bp, Homo sapien
ccaggaatcgagcatgggtagcagt

SEQ ID NO: 4343318 - DNA, 25 bp, Homo sapien
gtgagaggtctgaatcctaaccgat

SEQ ID NO: 4343319 - DNA, 25 bp, Homo sapien
gaggtctgaatcctaaccgatagac

SEQ ID NO: 4343320 - DNA, 25 bp, Homo sapien
ctgaccaggaatcgagcatgggtag

SEQ ID NO: 4343321 - DNA, 25 bp, Homo sapien
actgcagaccatccttgctgggctg

SEQ ID NO: 4343322 - DNA, 25 bp, Homo sapien
atccagaactgcagaccatccttgc

SEQ ID NO: 4343323 - DNA, 25 bp, Homo sapien
agaactgcagaccatccttgctggg

SEQ ID NO: 4343324 - DNA, 25 bp, Homo sapien
gcagaccatccttgctgggctgtcc

SEQ ID NO: 4343325 - DNA, 25 bp, Homo sapien
agtccccgctccacacaaccatgta

SEQ ID NO: 4343326 - DNA, 25 bp, Homo sapien
cgctctgagtccccgctccacacaa

SEQ ID NO: 4343327 - DNA, 25 bp, Homo sapien
ccccgctccacacaaccatgtactt

SEQ ID NO: 4343328 - DNA, 25 bp, Homo sapien
tgagtccccgctccacacaaccatg

SEQ ID NO: 4343329 - DNA, 25 bp, Homo sapien
taagtgaggacatactgtacatcaa

SEQ ID NO: 4343330 - DNA, 25 bp, Homo sapien
ggaaacaatgtacaggaggtcctcc

SEQ ID NO: 4343331 - DNA, 25 bp, Homo sapien
caacaccgttggttgttcaaagttg

SEQ ID NO: 4343332 - DNA, 25 bp, Homo sapien
gttgatgaaaaataagcggtttcac

SEQ ID NO: 4343333 - DNA, 25 bp, Homo sapien
aactgcaaccggtcgtcgctgggct

SEQ ID NO: 4343334 - DNA, 25 bp, Homo sapien
gcaaccggtcgtcgctgggctgttc

SEQ ID NO: 4343335 - DNA, 25 bp, Homo sapien
ccagaactgcaaccggtcgtcgctg

SEQ ID NO: 4343336 - DNA, 25 bp, Homo sapien
ctgcaaccggtcgtcgctgggctgt

SEQ ID NO: 4343337 - DNA, 25 bp, Homo sapien
attgtggacatgcagtggtatagca

SEQ ID NO: 4343338 - DNA, 25 bp, Homo sapien
gactgctttgtaggcatctatcgcc

SEQ ID NO: 4343339 - DNA, 25 bp, Homo sapien
atgactgctttgtaggcatctatcg

SEQ ID NO: 4343340 - DNA, 25 bp, Homo sapien
ggacatgcagtggtatagcagagtc

SEQ ID NO: 4343341 - DNA, 25 bp, Homo sapien
aatgcattgtccatcaacaccatac

SEQ ID NO: 4343342 - DNA, 25 bp, Homo sapien
gttaccatttcgcattttctatttc

SEQ ID NO: 4343343 - DNA, 25 bp, Homo sapien
ccagaggtggttccaatgacgaagt

SEQ ID NO: 4343344 - DNA, 25 bp, Homo sapien
gtttttagaggcatgaagctccaat

SEQ ID NO: 4343345 - DNA, 25 bp, Homo sapien
ttttgctttttgccagcactgacat

SEQ ID NO: 4343346 - DNA, 25 bp, Homo sapien
tgctttttgccagcactgacattgg

SEQ ID NO: 4343347 - DNA, 25 bp, Homo sapien
ttgctttttgccagcactgacattg

SEQ ID NO: 4343348 - DNA, 25 bp, Homo sapien
ttggcctttgcagtctcttgacttc

SEQ ID NO: 4343349 - DNA, 25 bp, Homo sapien
tagcagtcgattggtcacgaacttc

SEQ ID NO: 4343350 - DNA, 25 bp, Homo sapien
tctgtagcagtcgattggtcacgaa

SEQ ID NO: 4343351 - DNA, 25 bp, Homo sapien
tcctctgtagcagtcgattggtcac

SEQ ID NO: 4343352 - DNA, 25 bp, Homo sapien
tgtagcagtcgattggtcacgaact

SEQ ID NO: 4343353 - DNA, 25 bp, Homo sapien
ggaccggcgcatagcataccaagga

SEQ ID NO: 4343354 - DNA, 25 bp, Homo sapien
ttactatcactggacgtgcacgtaa

SEQ ID NO: 4343355 - DNA, 25 bp, Homo sapien
aagttactatcactggacgtgcacg

SEQ ID NO: 4343356 - DNA, 25 bp, Homo sapien
caccttagggcggttcttctcccat

SEQ ID NO: 4343357 - DNA, 25 bp, Homo sapien
ggtagcggtctgatttctatgtatg

SEQ ID NO: 4343358 - DNA, 25 bp, Homo sapien
ctgtctctgcggaggcattttcatt

SEQ ID NO: 4343359 - DNA, 25 bp, Homo sapien
ttctgcagaggtagcggtctgattt

SEQ ID NO: 4343360 - DNA, 25 bp, Homo sapien
tctatgtatgtttagaaagtttaaa

SEQ ID NO: 4343361 - DNA, 25 bp, Homo sapien
aatgcaataccacgtgtaaaataaa

SEQ ID NO: 4343362 - DNA, 25 bp, Homo sapien
cacaatgcaataccacgtgtaaaat

SEQ ID NO: 4343363 - DNA, 25 bp, Homo sapien
gcaataccacgtgtaaaataaacaa

SEQ ID NO: 4343364 - DNA, 25 bp, Homo sapien
accacaatgcaataccacgtgtaaa

SEQ ID NO: 4343365 - DNA, 25 bp, Homo sapien
tagcctcactagtggtttttcaatt

SEQ ID NO: 4343366 - DNA, 25 bp, Homo sapien
tggttagcctcactagtggtttttc

SEQ ID NO: 4343367 - DNA, 25 bp, Homo sapien
gttagcctcactagtggtttttcaa

SEQ ID NO: 4343368 - DNA, 25 bp, Homo sapien
ggttagcctcactagtggtttttca

SEQ ID NO: 4343369 - DNA, 25 bp, Homo sapien
taaagtctaggccaaggttgtctca

SEQ ID NO: 4343370 - DNA, 25 bp, Homo sapien
tggacaataaagtctaggccaaggt

SEQ ID NO: 4343371 - DNA, 25 bp, Homo sapien
aagtctaggccaaggttgtctcaga

SEQ ID NO: 4343372 - DNA, 25 bp, Homo sapien
caataaagtctaggccaaggttgtc

SEQ ID NO: 4343373 - DNA, 25 bp, Homo sapien
agctagacatgtgactaaatgcaac

SEQ ID NO: 4343374 - DNA, 25 bp, Homo sapien
catgtgactaaatgcaacattaggg

SEQ ID NO: 4343375 - DNA, 25 bp, Homo sapien
gattggttaatctggcatgagcgtg

SEQ ID NO: 4343376 - DNA, 25 bp, Homo sapien
taatctggcatgagcgtgtctggga

SEQ ID NO: 4343377 - DNA, 25 bp, Homo sapien
atgtaccttaatcaacggcaacact

SEQ ID NO: 4343378 - DNA, 25 bp, Homo sapien
ccttaatcaacggcaacactctaac

SEQ ID NO: 4343379 - DNA, 25 bp, Homo sapien
taccttaatcaacggcaacactcta

SEQ ID NO: 4343380 - DNA, 25 bp, Homo sapien
gtaccttaatcaacggcaacactct

SEQ ID NO: 4343381 - DNA, 25 bp, Homo sapien
cgaaggaaaagttgaggcgtgcctc

SEQ ID NO: 4343382 - DNA, 25 bp, Homo sapien
tttaatgagaaatgcggaatgccac

SEQ ID NO: 4343383 - DNA, 25 bp, Homo sapien
tgaagataaaatcggtcacgctgtg

SEQ ID NO: 4343384 - DNA, 25 bp, Homo sapien
ccatgaggtgtatcagctgactgaa

SEQ ID NO: 4343385 - DNA, 25 bp, Homo sapien
tgcttaattgcacatgtttgactaa

SEQ ID NO: 4343386 - DNA, 25 bp, Homo sapien
acatgcttaattgcacatgtttgac

SEQ ID NO: 4343387 - DNA, 25 bp, Homo sapien
atgcttaattgcacatgtttgacta

SEQ ID NO: 4343388 - DNA, 25 bp, Homo sapien
catgcttaattgcacatgtttgact

SEQ ID NO: 4343389 - DNA, 25 bp, Homo sapien
agaagttgagtgtttaagactgctg

SEQ ID NO: 4343390 - DNA, 25 bp, Homo sapien
agttgagtgtttaagactgctgttt

SEQ ID NO: 4343391 - DNA, 25 bp, Homo sapien
aagaagttgagtgtttaagactgct

SEQ ID NO: 4343392 - DNA, 25 bp, Homo sapien
gttgagtgtttaagactgctgtttg

SEQ ID NO: 4343393 - DNA, 25 bp, Homo sapien
ggcaccttgctacactccgggttgt

SEQ ID NO: 4343394 - DNA, 25 bp, Homo sapien
atatgcggcaccttgctacactccg

SEQ ID NO: 4343395 - DNA, 25 bp, Homo sapien
ggagaagcccacgatctctgtgagg

SEQ ID NO: 4343396 - DNA, 25 bp, Homo sapien
tacactccgggttgtttgtcccaca

SEQ ID NO: 4343397 - DNA, 25 bp, Homo sapien
atcaaagccccagcgtccgtcattc

SEQ ID NO: 4343398 - DNA, 25 bp, Homo sapien
tccgctgggactaggatcaggatgt

SEQ ID NO: 4343399 - DNA, 25 bp, Homo sapien
catcaaagccccagcgtccgtcatt

SEQ ID NO: 4343400 - DNA, 25 bp, Homo sapien
gattagaggtatgcaccaccacact

SEQ ID NO: 4343401 - DNA, 25 bp, Homo sapien
tgatccacccacagcggcctcccaa

SEQ ID NO: 4343402 - DNA, 25 bp, Homo sapien
tcaggtgatccacccacagcggcct

SEQ ID NO: 4343403 - DNA, 25 bp, Homo sapien
ccacactcagctaattttgtatttt

SEQ ID NO: 4343404 - DNA, 25 bp, Homo sapien
gctgtacccatgacaaagccagagt

SEQ ID NO: 4343405 - DNA, 25 bp, Homo sapien
aaaggcctggagatcaacaaagcgc

SEQ ID NO: 4343406 - DNA, 25 bp, Homo sapien
ggagcaaaatcacaccctggttgag

SEQ ID NO: 4343407 - DNA, 25 bp, Homo sapien
taagctctaagatggaatcagggtc

SEQ ID NO: 4343408 - DNA, 25 bp, Homo sapien
acatccataacacaccagggtgcat

SEQ ID NO: 4343409 - DNA, 25 bp, Homo sapien
accagggtgcattcttgatgtaagg

SEQ ID NO: 4343410 - DNA, 25 bp, Homo sapien
ttttataacccccatgccattgcca

SEQ ID NO: 4343411 - DNA, 25 bp, Homo sapien
agatctaattaccaccttaaagcct

SEQ ID NO: 4343412 - DNA, 25 bp, Homo sapien
gaacgtgtatgcagatcacccaggc

SEQ ID NO: 4343413 - DNA, 25 bp, Homo sapien
gatctgaacgtgtatgcagatcacc

SEQ ID NO: 4343414 - DNA, 25 bp, Homo sapien
ttctcagatctgaacgtgtatgcag

SEQ ID NO: 4343415 - DNA, 25 bp, Homo sapien
tctcagatctgaacgtgtatgcaga

SEQ ID NO: 4343416 - DNA, 25 bp, Homo sapien
cactcccagagcccctggaactctg

SEQ ID NO: 4343417 - DNA, 25 bp, Homo sapien
cccagagcccctggaactctggccc

SEQ ID NO: 4343418 - DNA, 25 bp, Homo sapien
ctgacagccactcccagagcccctg

SEQ ID NO: 4343419 - DNA, 25 bp, Homo sapien
ctcccagagcccctggaactctggc

SEQ ID NO: 4343420 - DNA, 25 bp, Homo sapien
ctgccttcatggaatgctggtgctg

SEQ ID NO: 4343421 - DNA, 25 bp, Homo sapien
tccatctagaaaagggctgccttca

SEQ ID NO: 4343422 - DNA, 25 bp, Homo sapien
agggctgccttcatggaatgctggt

SEQ ID NO: 4343423 - DNA, 25 bp, Homo sapien
catgagtgagagcagtttagggaaa

SEQ ID NO: 4343424 - DNA, 25 bp, Homo sapien
atcccaagccaatagtccagccaaa

SEQ ID NO: 4343425 - DNA, 25 bp, Homo sapien
ccattcctcatggtatctgaagccc

SEQ ID NO: 4343426 - DNA, 25 bp, Homo sapien
atggtatctgaagccccatgaaggc

SEQ ID NO: 4343427 - DNA, 25 bp, Homo sapien
ccaagccaatagtccagccaaaaat

SEQ ID NO: 4343428 - DNA, 25 bp, Homo sapien
tatagggaggggaagtaccatggta

SEQ ID NO: 4343429 - DNA, 25 bp, Homo sapien
caaccaattgagtatagggagggga

SEQ ID NO: 4343430 - DNA, 25 bp, Homo sapien
ggaagtaccatggtacaaatatggc

SEQ ID NO: 4343431 - DNA, 25 bp, Homo sapien
gggcttctggccaaccaattgagta

SEQ ID NO: 4343432 - DNA, 25 bp, Homo sapien
tcctagattgtaaatatcacaagac

SEQ ID NO: 4343433 - DNA, 25 bp, Homo sapien
gcagacatctcagaacatgctctct

SEQ ID NO: 4343434 - DNA, 25 bp, Homo sapien
cacaagacaatctagaatagtacct

SEQ ID NO: 4343435 - DNA, 25 bp, Homo sapien
ctgccttctcctagattgtaaatat

SEQ ID NO: 4343436 - DNA, 25 bp, Homo sapien
aagttgaccatttcatgcaccttca

SEQ ID NO: 4343437 - DNA, 25 bp, Homo sapien
gttgaccatttcatgcaccttcaga

SEQ ID NO: 4343438 - DNA, 25 bp, Homo sapien
agttgaccatttcatgcaccttcag

SEQ ID NO: 4343439 - DNA, 25 bp, Homo sapien
aaagttgaccatttcatgcaccttc

SEQ ID NO: 4343440 - DNA, 25 bp, Homo sapien
tggctgctagggaggttttcatcat

SEQ ID NO: 4343441 - DNA, 25 bp, Homo sapien
ctggctgctagggaggttttcatca

SEQ ID NO: 4343442 - DNA, 25 bp, Homo sapien
catacaaactagacggcaggtctca

SEQ ID NO: 4343443 - DNA, 25 bp, Homo sapien
ggccatctgccaactctgcaaggag

SEQ ID NO: 4343444 - DNA, 25 bp, Homo sapien
gctgccagcagagtgaacccacggc

SEQ ID NO: 4343445 - DNA, 25 bp, Homo sapien
gcctatgtggagattgctgcattaa

SEQ ID NO: 4343446 - DNA, 25 bp, Homo sapien
cagtgcagagtaaagtgggccttcc

SEQ ID NO: 4343447 - DNA, 25 bp, Homo sapien
ccaaccagatagtttgagggaacag

SEQ ID NO: 4343448 - DNA, 25 bp, Homo sapien
ggaccaatgtgcttgaggccatcat

SEQ ID NO: 4343449 - DNA, 25 bp, Homo sapien
tcttctgctgaaccgaccattaggc

SEQ ID NO: 4343450 - DNA, 25 bp, Homo sapien
cgtgccagccgagggctttcattct

SEQ ID NO: 4343451 - DNA, 25 bp, Homo sapien
tgctggtgtcgaattcgtgacttca

SEQ ID NO: 4343452 - DNA, 25 bp, Homo sapien
catgctggtgtcgaattcgtgactt

SEQ ID NO: 4343453 - DNA, 25 bp, Homo sapien
gccaacgtgccagccgagggctttc

SEQ ID NO: 4343454 - DNA, 25 bp, Homo sapien
aatcattgtatcattagcctgagct

SEQ ID NO: 4343455 - DNA, 25 bp, Homo sapien
tgggcactgcaaacagcctaaggaa

SEQ ID NO: 4343456 - DNA, 25 bp, Homo sapien
ggcactgcaaacagcctaaggaaag

SEQ ID NO: 4343457 - DNA, 25 bp, Homo sapien
cattgtatcattagcctgagctgcc

SEQ ID NO: 4343458 - DNA, 25 bp, Homo sapien
tcatcccgggccacagtgtctcatg

SEQ ID NO: 4343459 - DNA, 25 bp, Homo sapien
actgaaaatcatcccgggccacagt

SEQ ID NO: 4343460 - DNA, 25 bp, Homo sapien
agaatcacctgggaggcattgcagt

SEQ ID NO: 4343461 - DNA, 25 bp, Homo sapien
actgtgactgaaaatcatcccgggc

SEQ ID NO: 4343462 - DNA, 25 bp, Homo sapien
gaaatcgccatcactcagacatgaa

SEQ ID NO: 4343463 - DNA, 25 bp, Homo sapien
tggttcttaaggaaatcgccatcac

SEQ ID NO: 4343464 - DNA, 25 bp, Homo sapien
ggaagaggtttcatatgggaaagct

SEQ ID NO: 4343465 - DNA, 25 bp, Homo sapien
aagtcactctcaagggaagaggttt

SEQ ID NO: 4343466 - DNA, 25 bp, Homo sapien
ggcggcaccactgccgtcatttcag

SEQ ID NO: 4343467 - DNA, 25 bp, Homo sapien
tctggcccaggagttgtatgtccat

SEQ ID NO: 4343468 - DNA, 25 bp, Homo sapien
aggcggcaccactgccgtcatttca

SEQ ID NO: 4343469 - DNA, 25 bp, Homo sapien
caggagttgtatgtccataaccaaa

SEQ ID NO: 4343470 - DNA, 25 bp, Homo sapien
tcatcccatcggagctgctgcgact

SEQ ID NO: 4343471 - DNA, 25 bp, Homo sapien
actcccgcaggttcttccaaaactg

SEQ ID NO: 4343472 - DNA, 25 bp, Homo sapien
cagctctcatcccatcggagctgct

SEQ ID NO: 4343473 - DNA, 25 bp, Homo sapien
ctcccgcaggttcttccaaaactgg

SEQ ID NO: 4343474 - DNA, 25 bp, Homo sapien
tctgagtcctcaaagaccaggccat

SEQ ID NO: 4343475 - DNA, 25 bp, Homo sapien
caaagaccaggccattttcttcatg

SEQ ID NO: 4343476 - DNA, 25 bp, Homo sapien
aagaccaggccattttcttcatgtt

SEQ ID NO: 4343477 - DNA, 25 bp, Homo sapien
cctcaaagaccaggccattttcttc

SEQ ID NO: 4343478 - DNA, 25 bp, Homo sapien
agagaaccaagggagcctgagagct

SEQ ID NO: 4343479 - DNA, 25 bp, Homo sapien
ctgcagagagaaccaagggagcctg

SEQ ID NO: 4343480 - DNA, 25 bp, Homo sapien
agaaccaagggagcctgagagctgc

SEQ ID NO: 4343481 - DNA, 25 bp, Homo sapien
cagagagaaccaagggagcctgaga

SEQ ID NO: 4343482 - DNA, 25 bp, Homo sapien
ctggaggacatgtgcagacagacac

SEQ ID NO: 4343483 - DNA, 25 bp, Homo sapien
aggccactggaggacatgtgcagac

SEQ ID NO: 4343484 - DNA, 25 bp, Homo sapien
caggccactggaggacatgtgcaga

SEQ ID NO: 4343485 - DNA, 25 bp, Homo sapien
gaggacatgtgcagacagacaccca

SEQ ID NO: 4343486 - DNA, 25 bp, Homo sapien
aggaaggttgtgtccatcaagagta

SEQ ID NO: 4343487 - DNA, 25 bp, Homo sapien
ctgttatcacacagacaagagaagg

SEQ ID NO: 4343488 - DNA, 25 bp, Homo sapien
tgttatcacacagacaagagaagga

SEQ ID NO: 4343489 - DNA, 25 bp, Homo sapien
ccatcaagagtaagttgttcaaact

SEQ ID NO: 4343490 - DNA, 25 bp, Homo sapien
tttctaaagctgccagcaggatgga

SEQ ID NO: 4343491 - DNA, 25 bp, Homo sapien
tgccagcaggatggagaagtcttca

SEQ ID NO: 4343492 - DNA, 25 bp, Homo sapien
agcaggatggagaagtcttcatcct

SEQ ID NO: 4343493 - DNA, 25 bp, Homo sapien
ttctaaagctgccagcaggatggag

SEQ ID NO: 4343494 - DNA, 25 bp, Homo sapien
ccccttctcattgagactgtggtgg

SEQ ID NO: 4343495 - DNA, 25 bp, Homo sapien
ggttggccaggtgcccgtcacacca

SEQ ID NO: 4343496 - DNA, 25 bp, Homo sapien
gagaacacaggttggccaggtgccc

SEQ ID NO: 4343497 - DNA, 25 bp, Homo sapien
gcaggactggtaggggtgaggagaa

SEQ ID NO: 4343498 - DNA, 25 bp, Homo sapien
ccaagtgttccaggggtcgtgcaga

SEQ ID NO: 4343499 - DNA, 25 bp, Homo sapien
caagtgttccaggggtcgtgcagac

SEQ ID NO: 4343500 - DNA, 25 bp, Homo sapien
cccaagtgttccaggggtcgtgcag

SEQ ID NO: 4343501 - DNA, 25 bp, Homo sapien
gctggccactcgcggagatgcatca

SEQ ID NO: 4343502 - DNA, 25 bp, Homo sapien
gccactcgcggagatgcatcaccag

SEQ ID NO: 4343503 - DNA, 25 bp, Homo sapien
tggccactcgcggagatgcatcacc

SEQ ID NO: 4343504 - DNA, 25 bp, Homo sapien
gggctggccactcgcggagatgcat

SEQ ID NO: 4343505 - DNA, 25 bp, Homo sapien
acagagagtgagtgccacccagctt

SEQ ID NO: 4343506 - DNA, 25 bp, Homo sapien
aacagagagtgagtgccacccagct

SEQ ID NO: 4343507 - DNA, 25 bp, Homo sapien
cctgaacagagagtgagtgccaccc

SEQ ID NO: 4343508 - DNA, 25 bp, Homo sapien
tgaacagagagtgagtgccacccag

SEQ ID NO: 4343509 - DNA, 25 bp, Homo sapien
cggcgcaccacaagattatatcccg

SEQ ID NO: 4343510 - DNA, 25 bp, Homo sapien
tattgcgcttttcggaccggcttaa

SEQ ID NO: 4343511 - DNA, 25 bp, Homo sapien
gcgcaccacaagattatatcccgca

SEQ ID NO: 4343512 - DNA, 25 bp, Homo sapien
cccgaatattgcgcttttcggaccg

SEQ ID NO: 4343513 - DNA, 25 bp, Homo sapien
gctgcttaatccctttaaacctcca

SEQ ID NO: 4343514 - DNA, 25 bp, Homo sapien
tttaaacctccagtaactccatcca

SEQ ID NO: 4343515 - DNA, 25 bp, Homo sapien
ttaaacctccagtaactccatccat

SEQ ID NO: 4343516 - DNA, 25 bp, Homo sapien
ctccaggtgctgcttaatcccttta

SEQ ID NO: 4343517 - DNA, 25 bp, Homo sapien
tgaacattgatgtgcttgggtgttc

SEQ ID NO: 4343518 - DNA, 25 bp, Homo sapien
cacttcatactacacttttgaacat

SEQ ID NO: 4343519 - DNA, 25 bp, Homo sapien
tgtgacttccccaaatccttgtttg

SEQ ID NO: 4343520 - DNA, 25 bp, Homo sapien
tcatactacacttttgaacattgat

SEQ ID NO: 4343521 - DNA, 25 bp, Homo sapien
taacatttcccctgagaattccttg

SEQ ID NO: 4343522 - DNA, 25 bp, Homo sapien
aaataaccaggtgcatctcatctcc

SEQ ID NO: 4343523 - DNA, 25 bp, Homo sapien
tcctcggcagagtgctgttgtaaca

SEQ ID NO: 4343524 - DNA, 25 bp, Homo sapien
tgagaattccttgaggaacctccat

SEQ ID NO: 4343525 - DNA, 25 bp, Homo sapien
aggaggtcatggacggcttcgccat

SEQ ID NO: 4343526 - DNA, 25 bp, Homo sapien
tggaggccctgagaaagatatggcc

SEQ ID NO: 4343527 - DNA, 25 bp, Homo sapien
gccggaagttcaactcgcaggagga

SEQ ID NO: 4343528 - DNA, 25 bp, Homo sapien
ctagcgccacgacggccggaagttc

SEQ ID NO: 4343529 - DNA, 25 bp, Homo sapien
atggaccccaacaaagcctgcaaac

SEQ ID NO: 4343530 - DNA, 25 bp, Homo sapien
tgggccagcccgtgtcactgtggcc

SEQ ID NO: 4343531 - DNA, 25 bp, Homo sapien
ccgctcatgggcgtggagcagcctt

SEQ ID NO: 4343532 - DNA, 25 bp, Homo sapien
cccagtggttagtggaagccccaga

SEQ ID NO: 4343533 - DNA, 25 bp, Homo sapien
tgagtcatgattaccccattgcatt

SEQ ID NO: 4343534 - DNA, 25 bp, Homo sapien
gaagacctggagacaagttgggccc

SEQ ID NO: 4343535 - DNA, 25 bp, Homo sapien
gcaaaattactcgaagccttgagcc

SEQ ID NO: 4343536 - DNA, 25 bp, Homo sapien
cagtgaccacattctaccctataaa

SEQ ID NO: 4343537 - DNA, 25 bp, Homo sapien
taaatactacatctagccgggcaag

SEQ ID NO: 4343538 - DNA, 25 bp, Homo sapien
tgcatttgtcttgcggagtccccaa

SEQ ID NO: 4343539 - DNA, 25 bp, Homo sapien
cctaagcgagccagattgagcagta

SEQ ID NO: 4343540 - DNA, 25 bp, Homo sapien
cagcaagttagatgaccgcgtcaca

SEQ ID NO: 4343541 - DNA, 25 bp, Homo sapien
tctggtaggcatgtgttacaactca

SEQ ID NO: 4343542 - DNA, 25 bp, Homo sapien
tgaagctcaataacccaaagaatga

SEQ ID NO: 4343543 - DNA, 25 bp, Homo sapien
ctcttaccaggtattggcaggacat

SEQ ID NO: 4343544 - DNA, 25 bp, Homo sapien
taaccatggacctgatcacttgcaa

SEQ ID NO: 4343545 - DNA, 25 bp, Homo sapien
tttgagtccgccagggtgtgctatc

SEQ ID NO: 4343546 - DNA, 25 bp, Homo sapien
tcagttctcaatggtgtcaagggcc

SEQ ID NO: 4343547 - DNA, 25 bp, Homo sapien
taatgcctatctgtctggtcgctag

SEQ ID NO: 4343548 - DNA, 25 bp, Homo sapien
tgaaagtctgaggatgcctcccgag

SEQ ID NO: 4343549 - DNA, 25 bp, Homo sapien
aattgtgagaaacgatgctactacg

SEQ ID NO: 4343550 - DNA, 25 bp, Homo sapien
taatttgagagcaagttcggaagcc

SEQ ID NO: 4343551 - DNA, 25 bp, Homo sapien
tttcttggatgacgccaaagtactc

SEQ ID NO: 4343552 - DNA, 25 bp, Homo sapien
gaaaggtgtatttgcagcccacaca

SEQ ID NO: 4343553 - DNA, 25 bp, Homo sapien
aatatcttaggcttggccggctagg

SEQ ID NO: 4343554 - DNA, 25 bp, Homo sapien
tctcaggctgtatccaagaatggca

SEQ ID NO: 4343555 - DNA, 25 bp, Homo sapien
gccggctaggtggtctctatcacaa

SEQ ID NO: 4343556 - DNA, 25 bp, Homo sapien
cccagggactagcaaaccgttatca

SEQ ID NO: 4343557 - DNA, 25 bp, Homo sapien
catccaaaaggcacacgatgccaaa

SEQ ID NO: 4343558 - DNA, 25 bp, Homo sapien
aatcatccaaaaggcacacgatgcc

SEQ ID NO: 4343559 - DNA, 25 bp, Homo sapien
caaaatcatccaaaaggcacacgat

SEQ ID NO: 4343560 - DNA, 25 bp, Homo sapien
tcatccaaaaggcacacgatgccaa

SEQ ID NO: 4343561 - DNA, 25 bp, Homo sapien
actgtgcacgtccaaggcgctgggc

SEQ ID NO: 4343562 - DNA, 25 bp, Homo sapien
tgacgagacgggaagccgggaagcc

SEQ ID NO: 4343563 - DNA, 25 bp, Homo sapien
gggtttggaggtgcgtcggagacta

SEQ ID NO: 4343564 - DNA, 25 bp, Homo sapien
aagccgggagggatctactgtgcac

SEQ ID NO: 4343565 - DNA, 25 bp, Homo sapien
actgggccgggtgagggctgaggac

SEQ ID NO: 4343566 - DNA, 25 bp, Homo sapien
cttctctgaggctgcgagagatggt

SEQ ID NO: 4343567 - DNA, 25 bp, Homo sapien
ggtcatgtccggatctcaactgggc

SEQ ID NO: 4343568 - DNA, 25 bp, Homo sapien
tgcgagagatggtcatgtccggatc

SEQ ID NO: 4343569 - DNA, 25 bp, Homo sapien
caggagtcatggtgtcttggagaaa

SEQ ID NO: 4343570 - DNA, 25 bp, Homo sapien
tgaaaaaagattggaagccccaata

SEQ ID NO: 4343571 - DNA, 25 bp, Homo sapien
ttccaagtaccactgtccactcagg

SEQ ID NO: 4343572 - DNA, 25 bp, Homo sapien
gatcttggtttccaagtaccactgt

SEQ ID NO: 4343573 - DNA, 25 bp, Homo sapien
gatgagtgatttgcccacaagtgtg

SEQ ID NO: 4343574 - DNA, 25 bp, Homo sapien
tttgcaagacttatcagagctggac

SEQ ID NO: 4343575 - DNA, 25 bp, Homo sapien
caagcggctccccagtcattgaact

SEQ ID NO: 4343576 - DNA, 25 bp, Homo sapien
gaaacctctgtggatcgtcaagcgg

SEQ ID NO: 4343577 - DNA, 25 bp, Homo sapien
acaatcccaactattctccaggaca

SEQ ID NO: 4343578 - DNA, 25 bp, Homo sapien
ggtccccatgcacctataaactgtg

SEQ ID NO: 4343579 - DNA, 25 bp, Homo sapien
tcttctggtccccatgcacctataa

SEQ ID NO: 4343580 - DNA, 25 bp, Homo sapien
gtgaatgtctggtagtgcctggccc

SEQ ID NO: 4343581 - DNA, 25 bp, Homo sapien
tgtggaacccatatagctggctcta

SEQ ID NO: 4343582 - DNA, 25 bp, Homo sapien
ccaagcctcagggttgcattaacta

SEQ ID NO: 4343583 - DNA, 25 bp, Homo sapien
caaacgtgggtgtgtatgagaaacc

SEQ ID NO: 4343584 - DNA, 25 bp, Homo sapien
cactgacgtttctaggctgaaggcc

SEQ ID NO: 4343585 - DNA, 25 bp, Homo sapien
ttattttacacttctctgattattg

SEQ ID NO: 4343586 - DNA, 25 bp, Homo sapien
caatataatctgttttattttacac

SEQ ID NO: 4343587 - DNA, 25 bp, Homo sapien
tattttacacttctctgattattga

SEQ ID NO: 4343588 - DNA, 25 bp, Homo sapien
tttacacttctctgattattgaaat

SEQ ID NO: 4343589 - DNA, 25 bp, Homo sapien
tgaagggttgtatgaggccccatcc

SEQ ID NO: 4343590 - DNA, 25 bp, Homo sapien
aagacagcaaggacacgattaaatg

SEQ ID NO: 4343591 - DNA, 25 bp, Homo sapien
taaatgttgagtgcagatgaagggt

SEQ ID NO: 4343592 - DNA, 25 bp, Homo sapien
agggttgtatgaggccccatcctgg

SEQ ID NO: 4343593 - DNA, 25 bp, Homo sapien
aagagttctgaggcttgggaacaga

SEQ ID NO: 4343594 - DNA, 25 bp, Homo sapien
acagctcaagagttctgaggcttgg

SEQ ID NO: 4343595 - DNA, 25 bp, Homo sapien
cagctcaagagttctgaggcttggg

SEQ ID NO: 4343596 - DNA, 25 bp, Homo sapien
accccaatctgggttgcatgggcat

SEQ ID NO: 4343597 - DNA, 25 bp, Homo sapien
ccaatctgggttgcatgggcatgga

SEQ ID NO: 4343598 - DNA, 25 bp, Homo sapien
catactggacatgcctcttctttac

SEQ ID NO: 4343599 - DNA, 25 bp, Homo sapien
aaaagagcaaacacaccctgcaaag

SEQ ID NO: 4343600 - DNA, 25 bp, Homo sapien
tattgcaggctcaggtatcaacccc

SEQ ID NO: 4343601 - DNA, 25 bp, Homo sapien
cacaaaaggctactgcagaggcagg

SEQ ID NO: 4343602 - DNA, 25 bp, Homo sapien
tgtgagagctaccttagcagactca

SEQ ID NO: 4343603 - DNA, 25 bp, Homo sapien
ttgatttcagggctctattgcaggc

SEQ ID NO: 4343604 - DNA, 25 bp, Homo sapien
gcccagttagggaggtccagatgcc

SEQ ID NO: 4343605 - DNA, 25 bp, Homo sapien
gatgccagttctgagatgccaccca

SEQ ID NO: 4343606 - DNA, 25 bp, Homo sapien
tccagatgccagttctgagatgcca

SEQ ID NO: 4343607 - DNA, 25 bp, Homo sapien
ttagggaggtccagatgccagttct

SEQ ID NO: 4343608 - DNA, 25 bp, Homo sapien
tcagccgaaccatcacttctgcgag

SEQ ID NO: 4343609 - DNA, 25 bp, Homo sapien
tctgcgaggtacagcaggattgtca

SEQ ID NO: 4343610 - DNA, 25 bp, Homo sapien
ccagccctgtaaggtaggggatgca

SEQ ID NO: 4343611 - DNA, 25 bp, Homo sapien
gggcctggtgccaagtcagccgaac

SEQ ID NO: 4343612 - DNA, 25 bp, Homo sapien
tgtttatgactgactgaccctccac

SEQ ID NO: 4343613 - DNA, 25 bp, Homo sapien
caggtagagcaccacaaaggtctgg

SEQ ID NO: 4343614 - DNA, 25 bp, Homo sapien
gactcgagctgacatggaattgatt

SEQ ID NO: 4343615 - DNA, 25 bp, Homo sapien
caccagcaagagcaggactcgagct

SEQ ID NO: 4343616 - DNA, 25 bp, Homo sapien
gggcaggacgccaggtgcactccac

SEQ ID NO: 4343617 - DNA, 25 bp, Homo sapien
gctggtctgaatggccaccagattg

SEQ ID NO: 4343618 - DNA, 25 bp, Homo sapien
cacatgtgcaggtaggttgagattc

SEQ ID NO: 4343619 - DNA, 25 bp, Homo sapien
agtagaacacgggttgggccagaat

SEQ ID NO: 4343620 - DNA, 25 bp, Homo sapien
cacatgggaacccttcaaatacgta

SEQ ID NO: 4343621 - DNA, 25 bp, Homo sapien
gaccacatgggaacccttcaaatac

SEQ ID NO: 4343622 - DNA, 25 bp, Homo sapien
ggaccacatgggaacccttcaaata

SEQ ID NO: 4343623 - DNA, 25 bp, Homo sapien
accacatgggaacccttcaaatacg

SEQ ID NO: 4343624 - DNA, 25 bp, Homo sapien
tactgctgtttagaaacggttttgc

SEQ ID NO: 4343625 - DNA, 25 bp, Homo sapien
gttttgctcaagatgagtcctccga

SEQ ID NO: 4343626 - DNA, 25 bp, Homo sapien
catatgacgggggtaaatatcgcca

SEQ ID NO: 4343627 - DNA, 25 bp, Homo sapien
ggtaaatatcgccatgcctttgtac

SEQ ID NO: 4343628 - DNA, 25 bp, Homo sapien
ttcaggatcttcacgatgggtgggc

SEQ ID NO: 4343629 - DNA, 25 bp, Homo sapien
gatgattgggaaccagccaaacttc

SEQ ID NO: 4343630 - DNA, 25 bp, Homo sapien
gattgggaaccagccaaacttcagg

SEQ ID NO: 4343631 - DNA, 25 bp, Homo sapien
aggatcttcacgatgggtgggctct

SEQ ID NO: 4343632 - DNA, 25 bp, Homo sapien
gtcagagccgcaaagctgaggcaga

SEQ ID NO: 4343633 - DNA, 25 bp, Homo sapien
accagcggcgtcagataccgactat

SEQ ID NO: 4343634 - DNA, 25 bp, Homo sapien
ctgaggcagaccagcggcgtcagat

SEQ ID NO: 4343635 - DNA, 25 bp, Homo sapien
caaagctgaggcagaccagcggcgt

SEQ ID NO: 4343636 - DNA, 25 bp, Homo sapien
tgggcgggcctttatctatcacatg

SEQ ID NO: 4343637 - DNA, 25 bp, Homo sapien
actggtccagcgctccagaggaagg

SEQ ID NO: 4343638 - DNA, 25 bp, Homo sapien
tattgaagtggtgcacatgctcagt

SEQ ID NO: 4343639 - DNA, 25 bp, Homo sapien
tgcacatgcttaaaaccctatcggg

SEQ ID NO: 4343640 - DNA, 25 bp, Homo sapien
gcctgcctgtccgttacttaatgag

SEQ ID NO: 4343641 - DNA, 25 bp, Homo sapien
cagatagctggactcaccgctggta

SEQ ID NO: 4343642 - DNA, 25 bp, Homo sapien
tgaccatggcttgacaactgcccaa

SEQ ID NO: 4343643 - DNA, 25 bp, Homo sapien
ttagagggacggttttatgcctgcc

SEQ ID NO: 4343644 - DNA, 25 bp, Homo sapien
aggctggctgcaatgggcgtggcaa

SEQ ID NO: 4343645 - DNA, 25 bp, Homo sapien
gctgcaatgggcgtggcaatgttgt

SEQ ID NO: 4343646 - DNA, 25 bp, Homo sapien
gtctgtagaagaagctgctaaccaa

SEQ ID NO: 4343647 - DNA, 25 bp, Homo sapien
agctgctaaccaaagccagaatgga

SEQ ID NO: 4343648 - DNA, 25 bp, Homo sapien
aatcactatacagaccatcagcacc

SEQ ID NO: 4343649 - DNA, 25 bp, Homo sapien
gagcaccaatcactatacagaccat

SEQ ID NO: 4343650 - DNA, 25 bp, Homo sapien
tgggttgaccccgagctttcgagca

SEQ ID NO: 4343651 - DNA, 25 bp, Homo sapien
gagctttcgagcaccaatcactata

SEQ ID NO: 4343652 - DNA, 25 bp, Homo sapien
gacactaacgtaaagcatggctgga

SEQ ID NO: 4343653 - DNA, 25 bp, Homo sapien
tgtcagatgcatactcggagggccc

SEQ ID NO: 4343654 - DNA, 25 bp, Homo sapien
tattgaaaaccactaccctgaggct

SEQ ID NO: 4343655 - DNA, 25 bp, Homo sapien
caaagtccttgacgtgaagccaggc

SEQ ID NO: 4343656 - DNA, 25 bp, Homo sapien
ctgcaaggaaggcagtgaggacact

SEQ ID NO: 4343657 - DNA, 25 bp, Homo sapien
ggcagtgaggacactgctggcacac

SEQ ID NO: 4343658 - DNA, 25 bp, Homo sapien
cagggcaaaggctgcaaggaaggca

SEQ ID NO: 4343659 - DNA, 25 bp, Homo sapien
agtgaggacactgctggcacacagc

SEQ ID NO: 4343660 - DNA, 25 bp, Homo sapien
gacaccacgcccaacagcagcgcag

SEQ ID NO: 4343661 - DNA, 25 bp, Homo sapien
atccacttcctctcgagacaccacg

SEQ ID NO: 4343662 - DNA, 25 bp, Homo sapien
agccaagagccccacgacagtggcc

SEQ ID NO: 4343663 - DNA, 25 bp, Homo sapien
gacatccacttcctctcgagacacc

SEQ ID NO: 4343664 - DNA, 25 bp, Homo sapien
ccaggagctgccctgatctggacat

SEQ ID NO: 4343665 - DNA, 25 bp, Homo sapien
cacagcctgcgccaggagctgccct

SEQ ID NO: 4343666 - DNA, 25 bp, Homo sapien
gcgccaggagctgccctgatctgga

SEQ ID NO: 4343667 - DNA, 25 bp, Homo sapien
tgcgccaggagctgccctgatctgg

SEQ ID NO: 4343668 - DNA, 25 bp, Homo sapien
cacattctgacatggtgacaacttc

SEQ ID NO: 4343669 - DNA, 25 bp, Homo sapien
tgtggttactgggaaggaccatcca

SEQ ID NO: 4343670 - DNA, 25 bp, Homo sapien
ccatccacaaggcacagctgacagg

SEQ ID NO: 4343671 - DNA, 25 bp, Homo sapien
tcaaagcgactgcatgctgagaagc

SEQ ID NO: 4343672 - DNA, 25 bp, Homo sapien
ctgctgatgactctgtgctgctcct

SEQ ID NO: 4343673 - DNA, 25 bp, Homo sapien
ctcctgggggtcatcaatttgtcca

SEQ ID NO: 4343674 - DNA, 25 bp, Homo sapien
ctgctcctgggggtcatcaatttgt

SEQ ID NO: 4343675 - DNA, 25 bp, Homo sapien
ggggtcatcaatttgtccagtgttg

SEQ ID NO: 4343676 - DNA, 25 bp, Homo sapien
ggaggcgagatgggacagacaggaa

SEQ ID NO: 4343677 - DNA, 25 bp, Homo sapien
atcaggtagggatatttttctgccc

SEQ ID NO: 4343678 - DNA, 25 bp, Homo sapien
catcaggtagggatatttttctgcc

SEQ ID NO: 4343679 - DNA, 25 bp, Homo sapien
cagtttggtagtggaaagccaaggc

SEQ ID NO: 4343680 - DNA, 25 bp, Homo sapien
ccagtttggtagtggaaagccaagg

SEQ ID NO: 4343681 - DNA, 25 bp, Homo sapien
catccagtttggtagtggaaagcca

SEQ ID NO: 4343682 - DNA, 25 bp, Homo sapien
gaccaggtggtagggacgcgcctgc

SEQ ID NO: 4343683 - DNA, 25 bp, Homo sapien
ccaggtggtagggacgcgcctgcct

SEQ ID NO: 4343684 - DNA, 25 bp, Homo sapien
gagaccaggtggtagggacgcgcct

SEQ ID NO: 4343685 - DNA, 25 bp, Homo sapien
gggagaccaggtggtagggacgcgc

SEQ ID NO: 4343686 - DNA, 25 bp, Homo sapien
ctcgaatgtccaggtgtccacttac

SEQ ID NO: 4343687 - DNA, 25 bp, Homo sapien
cgcctcgaatgtccaggtgtccact

SEQ ID NO: 4343688 - DNA, 25 bp, Homo sapien
gccgcctcgaatgtccaggtgtcca

SEQ ID NO: 4343689 - DNA, 25 bp, Homo sapien
gcctcgaatgtccaggtgtccactt

SEQ ID NO: 4343690 - DNA, 25 bp, Homo sapien
gagagtctggatgccagtgtcatct

SEQ ID NO: 4343691 - DNA, 25 bp, Homo sapien
cagtaaggagataagccaaacacac

SEQ ID NO: 4343692 - DNA, 25 bp, Homo sapien
ctggtagggaaacagtaaggagata

SEQ ID NO: 4343693 - DNA, 25 bp, Homo sapien
tagggaaacagtaaggagataagcc

SEQ ID NO: 4343694 - DNA, 25 bp, Homo sapien
accttcagcaagtcacttttcactc

SEQ ID NO: 4343695 - DNA, 25 bp, Homo sapien
aagccggacagcagaatgggcacca

SEQ ID NO: 4343696 - DNA, 25 bp, Homo sapien
gctgtcatcatgcacaagccggaca

SEQ ID NO: 4343697 - DNA, 25 bp, Homo sapien
gaaagattcaggcaagaccccatgt

SEQ ID NO: 4343698 - DNA, 25 bp, Homo sapien
gggaccgggtaagctcacagctgaa

SEQ ID NO: 4343699 - DNA, 25 bp, Homo sapien
cagatgagtgaggaacaaaggccag

SEQ ID NO: 4343700 - DNA, 25 bp, Homo sapien
atggccaggcaatgcaccacgatcc

SEQ ID NO: 4343701 - DNA, 25 bp, Homo sapien
cagtgtgactcacggcctcattaca

SEQ ID NO: 4343702 - DNA, 25 bp, Homo sapien
caccaggacgctgttcccaagaagt

SEQ ID NO: 4343703 - DNA, 25 bp, Homo sapien
gtccagaagcatgccggcccaggac

SEQ ID NO: 4343704 - DNA, 25 bp, Homo sapien
atagtccagaagcatgccggcccag

SEQ ID NO: 4343705 - DNA, 25 bp, Homo sapien
ctggaaatagtccagaagcatgccg

SEQ ID NO: 4343706 - DNA, 25 bp, Homo sapien
ggaaatagtccagaagcatgccggc

SEQ ID NO: 4343707 - DNA, 25 bp, Homo sapien
gtcacctgaaggcctatggaccagg

SEQ ID NO: 4343708 - DNA, 25 bp, Homo sapien
cacctgaaggcctatggaccaggtg

SEQ ID NO: 4343709 - DNA, 25 bp, Homo sapien
tcacctgaaggcctatggaccaggt

SEQ ID NO: 4343710 - DNA, 25 bp, Homo sapien
gcttgggggtcacgctttggctctc

SEQ ID NO: 4343711 - DNA, 25 bp, Homo sapien
ctccgctgccgggtctctgtcccat

SEQ ID NO: 4343712 - DNA, 25 bp, Homo sapien
ctccctgctaggctcagtctccagt

SEQ ID NO: 4343713 - DNA, 25 bp, Homo sapien
agtctccagtggcttgggggtcacg

SEQ ID NO: 4343714 - DNA, 25 bp, Homo sapien
tgggcacagctgggcgcctggcagc

SEQ ID NO: 4343715 - DNA, 25 bp, Homo sapien
ctgggcacagctgggcgcctggcag

SEQ ID NO: 4343716 - DNA, 25 bp, Homo sapien
gggcacagctgggcgcctggcagcc

SEQ ID NO: 4343717 - DNA, 25 bp, Homo sapien
acacagagctgagctatcggccggc

SEQ ID NO: 4343718 - DNA, 25 bp, Homo sapien
acagagctgagctatcggccggctc

SEQ ID NO: 4343719 - DNA, 25 bp, Homo sapien
cagagctgagctatcggccggctct

SEQ ID NO: 4343720 - DNA, 25 bp, Homo sapien
gagctgagctatcggccggctctcc

SEQ ID NO: 4343721 - DNA, 25 bp, Homo sapien
tgacagctcgtgcagatgaacaacc

SEQ ID NO: 4343722 - DNA, 25 bp, Homo sapien
tgcacatggtgccagaggaaggcct

SEQ ID NO: 4343723 - DNA, 25 bp, Homo sapien
ttaacccaagagtgcgcagccactg

SEQ ID NO: 4343724 - DNA, 25 bp, Homo sapien
cgcgtgcctgaggaggttaacccaa

SEQ ID NO: 4343725 - DNA, 25 bp, Homo sapien
ggctcactcgcctcccgcgcaccca

SEQ ID NO: 4343726 - DNA, 25 bp, Homo sapien
cggctcactcgcctcccgcgcaccc

SEQ ID NO: 4343727 - DNA, 25 bp, Homo sapien
agcagacgcccaagctccggcagcg

SEQ ID NO: 4343728 - DNA, 25 bp, Homo sapien
gccggacctcggacgacttggcgct

SEQ ID NO: 4343729 - DNA, 25 bp, Homo sapien
ttggcgctccgggacagcagcagac

SEQ ID NO: 4343730 - DNA, 25 bp, Homo sapien
ctcggacgacttggcgctccgggac

SEQ ID NO: 4343731 - DNA, 25 bp, Homo sapien
tgaagcctgctaccctatccgaata

SEQ ID NO: 4343732 - DNA, 25 bp, Homo sapien
tacttcatctgcgtgataaaacaca

SEQ ID NO: 4343733 - DNA, 25 bp, Homo sapien
ataaaacacattggtctccacaacc

SEQ ID NO: 4343734 - DNA, 25 bp, Homo sapien
tcattatccctctcctgcattaaca

SEQ ID NO: 4343735 - DNA, 25 bp, Homo sapien
tatctcatggctaaagttctgaagt

SEQ ID NO: 4343736 - DNA, 25 bp, Homo sapien
ggggaatttgtatttatctcatggc

SEQ ID NO: 4343737 - DNA, 25 bp, Homo sapien
agctggggaatttgtatttatctca

SEQ ID NO: 4343738 - DNA, 25 bp, Homo sapien
ttctgaagtaaaagctataggatct

SEQ ID NO: 4343739 - DNA, 25 bp, Homo sapien
cccagggtgatgaaacaggctatca

SEQ ID NO: 4343740 - DNA, 25 bp, Homo sapien
caaatgtaggactatttagctgaca

SEQ ID NO: 4343741 - DNA, 25 bp, Homo sapien
ttccctctagcaaaccagactgtct

SEQ ID NO: 4343742 - DNA, 25 bp, Homo sapien
cagactgtctcttggtactttgaga

SEQ ID NO: 4343743 - DNA, 25 bp, Homo sapien
taaaagcttatttcccacagaatag

SEQ ID NO: 4343744 - DNA, 25 bp, Homo sapien
tgagcctccatgatgttggactcgg

SEQ ID NO: 4343745 - DNA, 25 bp, Homo sapien
acagaatagcctggcagtgagtcgc

SEQ ID NO: 4343746 - DNA, 25 bp, Homo sapien
catgatgttggactcggcttcctcc

SEQ ID NO: 4343747 - DNA, 25 bp, Homo sapien
aagctgggtccagtctcgcccatct

SEQ ID NO: 4343748 - DNA, 25 bp, Homo sapien
tctccagcgtgactgcagtgggcgc

SEQ ID NO: 4343749 - DNA, 25 bp, Homo sapien
ccagcgtgactgcagtgggcgccct

SEQ ID NO: 4343750 - DNA, 25 bp, Homo sapien
agtctcgcccatctgcaccagaggt

SEQ ID NO: 4343751 - DNA, 25 bp, Homo sapien
tgactggacagagggcgtccaagat

SEQ ID NO: 4343752 - DNA, 25 bp, Homo sapien
tccaagatgcagacatggtgtgcag

SEQ ID NO: 4343753 - DNA, 25 bp, Homo sapien
ccagccaagggctgcttctgactgg

SEQ ID NO: 4343754 - DNA, 25 bp, Homo sapien
gaggtgctgtgcacccaggctcaag

SEQ ID NO: 4343755 - DNA, 25 bp, Homo sapien
aggtactcgttcagagccgcctctc

SEQ ID NO: 4343756 - DNA, 25 bp, Homo sapien
tgtcttgacccgcaggtactcgttc

SEQ ID NO: 4343757 - DNA, 25 bp, Homo sapien
aaggtcactgtcttgacccgcaggt

SEQ ID NO: 4343758 - DNA, 25 bp, Homo sapien
tgacccgcaggtactcgttcagagc

SEQ ID NO: 4343759 - DNA, 25 bp, Homo sapien
gaggcccagcgaggtcatgaatctt

SEQ ID NO: 4343760 - DNA, 25 bp, Homo sapien
tcagccccatgacaagtgtgaggcc

SEQ ID NO: 4343761 - DNA, 25 bp, Homo sapien
gagagacttggcgttactgcccaga

SEQ ID NO: 4343762 - DNA, 25 bp, Homo sapien
gagacagcatatggcttccccggac

SEQ ID NO: 4343763 - DNA, 25 bp, Homo sapien
tacactaaggatgcaacctgagccc

SEQ ID NO: 4343764 - DNA, 25 bp, Homo sapien
tgggagacttgcaacacccgtggtg

SEQ ID NO: 4343765 - DNA, 25 bp, Homo sapien
tgcatctgagataggacctggccct

SEQ ID NO: 4343766 - DNA, 25 bp, Homo sapien
tcatgttcaaggctacgtccctgca

SEQ ID NO: 4343767 - DNA, 25 bp, Homo sapien
caaattccgtggcattggcccgaga

SEQ ID NO: 4343768 - DNA, 25 bp, Homo sapien
ttgtcactgacatacagggccttgt

SEQ ID NO: 4343769 - DNA, 25 bp, Homo sapien
gagcggccacgtcggtcttgttgta

SEQ ID NO: 4343770 - DNA, 25 bp, Homo sapien
tttgaatcctccgaagggagcggcc

SEQ ID NO: 4343771 - DNA, 25 bp, Homo sapien
ctggagagaaagtccaggaagaact

SEQ ID NO: 4343772 - DNA, 25 bp, Homo sapien
ggagagaaagtccaggaagaactcc

SEQ ID NO: 4343773 - DNA, 25 bp, Homo sapien
tggagagaaagtccaggaagaactc

SEQ ID NO: 4343774 - DNA, 25 bp, Homo sapien
gaccttccgaggagaaaatgtgccg

SEQ ID NO: 4343775 - DNA, 25 bp, Homo sapien
ttccgaggagaaaatgtgccgggct

SEQ ID NO: 4343776 - DNA, 25 bp, Homo sapien
taagaccttccgaggagaaaatgtg

SEQ ID NO: 4343777 - DNA, 25 bp, Homo sapien
tgcataagaccttccgaggagaaaa

SEQ ID NO: 4343778 - DNA, 25 bp, Homo sapien
cccgaaggactcctccttggctatg

SEQ ID NO: 4343779 - DNA, 25 bp, Homo sapien
catcagcaaaccgagagatgatcat

SEQ ID NO: 4343780 - DNA, 25 bp, Homo sapien
cttggctatgaacatgtggtcttcc

SEQ ID NO: 4343781 - DNA, 25 bp, Homo sapien
ctccttggctatgaacatgtggtct

SEQ ID NO: 4343782 - DNA, 25 bp, Homo sapien
tgggtctcaccgtgcttttaacgga

SEQ ID NO: 4343783 - DNA, 25 bp, Homo sapien
gtctcaccgtgcttttaacggagtg

SEQ ID NO: 4343784 - DNA, 25 bp, Homo sapien
cttgttctttgatgtgggtctcacc

SEQ ID NO: 4343785 - DNA, 25 bp, Homo sapien
tgttctttgatgtgggtctcaccgt

SEQ ID NO: 4343786 - DNA, 25 bp, Homo sapien
caatggtcacgagagctctgttgag

SEQ ID NO: 4343787 - DNA, 25 bp, Homo sapien
tgtgcggtgcccgatgccctgtgac

SEQ ID NO: 4343788 - DNA, 25 bp, Homo sapien
ctgtgacacgggcatgcccgggctt

SEQ ID NO: 4343789 - DNA, 25 bp, Homo sapien
agagggtaagtggacagtgacagca

SEQ ID NO: 4343790 - DNA, 25 bp, Homo sapien
ctggccttcagatgtctccagttca

SEQ ID NO: 4343791 - DNA, 25 bp, Homo sapien
tggccttcagatgtctccagttcag

SEQ ID NO: 4343792 - DNA, 25 bp, Homo sapien
tcggtgtccctgtccagcgggttgc

SEQ ID NO: 4343793 - DNA, 25 bp, Homo sapien
tccttcacgccatgctggcagtact

SEQ ID NO: 4343794 - DNA, 25 bp, Homo sapien
tggccgagggacctgattcccgccg

SEQ ID NO: 4343795 - DNA, 25 bp, Homo sapien
catggtgattctgcggcccgtggtc

SEQ ID NO: 4343796 - DNA, 25 bp, Homo sapien
cctccaagtcaggtgtggcttgtgc

SEQ ID NO: 4343797 - DNA, 25 bp, Homo sapien
caagtcaggtgtggcttgtgctgcc

SEQ ID NO: 4343798 - DNA, 25 bp, Homo sapien
agtccacactctgttctagcctcag

SEQ ID NO: 4343799 - DNA, 25 bp, Homo sapien
tcctcacctgactcagctctcatgg

SEQ ID NO: 4343800 - DNA, 25 bp, Homo sapien
ctcatcatgaatggagtcctccaca

SEQ ID NO: 4343801 - DNA, 25 bp, Homo sapien
actctccgcacgaactcatcatgaa

SEQ ID NO: 4343802 - DNA, 25 bp, Homo sapien
ctccacaaagagtcggcctgctgca

SEQ ID NO: 4343803 - DNA, 25 bp, Homo sapien
aaagagtcggcctgctgcaatgcaa

SEQ ID NO: 4343804 - DNA, 25 bp, Homo sapien
atctgcacagccttgttgaggtcac

SEQ ID NO: 4343805 - DNA, 25 bp, Homo sapien
catctgcacagccttgttgaggtca

SEQ ID NO: 4343806 - DNA, 25 bp, Homo sapien
cttcttcacgttacttatggcacag

SEQ ID NO: 4343807 - DNA, 25 bp, Homo sapien
cagggacaccttcttcacgttactt

SEQ ID NO: 4343808 - DNA, 25 bp, Homo sapien
cagttccagggacaccttcttcacg

SEQ ID NO: 4343809 - DNA, 25 bp, Homo sapien
tgatgaggggtgacttcccgcccag

SEQ ID NO: 4343810 - DNA, 25 bp, Homo sapien
agctggacactcagtcaatagccgg

SEQ ID NO: 4343811 - DNA, 25 bp, Homo sapien
caatagccggcaggtaggaggctcc

SEQ ID NO: 4343812 - DNA, 25 bp, Homo sapien
gggcacctccttgtattagtggcag

SEQ ID NO: 4343813 - DNA, 25 bp, Homo sapien
tctgggtcctattacagccccggtg

SEQ ID NO: 4343814 - DNA, 25 bp, Homo sapien
catagcatgatttcgttttttagtt

SEQ ID NO: 4343815 - DNA, 25 bp, Homo sapien
atagcatgatttcgttttttagttt

SEQ ID NO: 4343816 - DNA, 25 bp, Homo sapien
tcatagcatgatttcgttttttagt

SEQ ID NO: 4343817 - DNA, 25 bp, Homo sapien
gttttatactctcagcacctctcga

SEQ ID NO: 4343818 - DNA, 25 bp, Homo sapien
tcttcagcgtttgcatagagcccag

SEQ ID NO: 4343819 - DNA, 25 bp, Homo sapien
agctcctgggacagcactgccatgt

SEQ ID NO: 4343820 - DNA, 25 bp, Homo sapien
cagttcttgaaatccatgcgtgttt

SEQ ID NO: 4343821 - DNA, 25 bp, Homo sapien
tgaacccgattttcctcacatcagg

SEQ ID NO: 4343822 - DNA, 25 bp, Homo sapien
gtggagcctgtgaacccgattttcc

SEQ ID NO: 4343823 - DNA, 25 bp, Homo sapien
gatgtgcttgcccacctctgtggag

SEQ ID NO: 4343824 - DNA, 25 bp, Homo sapien
tttcctcacatcaggatggtctgag

SEQ ID NO: 4343825 - DNA, 25 bp, Homo sapien
gaatcagagtggtccccctggtgct

SEQ ID NO: 4343826 - DNA, 25 bp, Homo sapien
aatcagagtggtccccctggtgctg

SEQ ID NO: 4343827 - DNA, 25 bp, Homo sapien
atcagagtggtccccctggtgctgg

SEQ ID NO: 4343828 - DNA, 25 bp, Homo sapien
gggaatcagagtggtccccctggtg

SEQ ID NO: 4343829 - DNA, 25 bp, Homo sapien
gggaatgccggcctttaatgtcagc

SEQ ID NO: 4343830 - DNA, 25 bp, Homo sapien
cagatcctgggaggacgttaaccac

SEQ ID NO: 4343831 - DNA, 25 bp, Homo sapien
gatcctgggaggacgttaaccacac

SEQ ID NO: 4343832 - DNA, 25 bp, Homo sapien
tcagctctgcaaacttcaaggctgt

SEQ ID NO: 4343833 - DNA, 25 bp, Homo sapien
gcaggcttgatcaccactgtgttcc

SEQ ID NO: 4343834 - DNA, 25 bp, Homo sapien
ctgagcaggcttgatcaccactgtg

SEQ ID NO: 4343835 - DNA, 25 bp, Homo sapien
ggcttgatcaccactgtgttcccgg

SEQ ID NO: 4343836 - DNA, 25 bp, Homo sapien
cttgatcaccactgtgttcccggca

SEQ ID NO: 4343837 - DNA, 25 bp, Homo sapien
aggggatagttccaggggatgatga

SEQ ID NO: 4343838 - DNA, 25 bp, Homo sapien
tcaggggatagttccaggggatgat

SEQ ID NO: 4343839 - DNA, 25 bp, Homo sapien
ggggatagttccaggggatgatgat

SEQ ID NO: 4343840 - DNA, 25 bp, Homo sapien
cccacagtggacctgccaattccct

SEQ ID NO: 4343841 - DNA, 25 bp, Homo sapien
cacaaaagaggttggcctttgtcct

SEQ ID NO: 4343842 - DNA, 25 bp, Homo sapien
cacagtggacctgccaattccctcc

SEQ ID NO: 4343843 - DNA, 25 bp, Homo sapien
ccacagtggacctgccaattccctc

SEQ ID NO: 4343844 - DNA, 25 bp, Homo sapien
caggtgaagccgtcggttacagtga

SEQ ID NO: 4343845 - DNA, 25 bp, Homo sapien
gtgaagccgtcggttacagtgaacg

SEQ ID NO: 4343846 - DNA, 25 bp, Homo sapien
tgaagccgtcggttacagtgaacgg

SEQ ID NO: 4343847 - DNA, 25 bp, Homo sapien
aggtgaagccgtcggttacagtgaa

SEQ ID NO: 4343848 - DNA, 25 bp, Homo sapien
cttgggttccggctccagaacattc

SEQ ID NO: 4343849 - DNA, 25 bp, Homo sapien
gccaggcagagaccattagttccag

SEQ ID NO: 4343850 - DNA, 25 bp, Homo sapien
aatcacggcccaccaggtgcatggt

SEQ ID NO: 4343851 - DNA, 25 bp, Homo sapien
aacattcccactgaggcgaggtccc

SEQ ID NO: 4343852 - DNA, 25 bp, Homo sapien
cctttgggcgagccctggtctgtgt

SEQ ID NO: 4343853 - DNA, 25 bp, Homo sapien
ctgcctttgggcgagccctggtctg

SEQ ID NO: 4343854 - DNA, 25 bp, Homo sapien
gcctttgggcgagccctggtctgtg

SEQ ID NO: 4343855 - DNA, 25 bp, Homo sapien
tgcctttgggcgagccctggtctgt

SEQ ID NO: 4343856 - DNA, 25 bp, Homo sapien
ggcagcctcaaagacccaagtgtgg

SEQ ID NO: 4343857 - DNA, 25 bp, Homo sapien
cacagggacattggagcacgttctc

SEQ ID NO: 4343858 - DNA, 25 bp, Homo sapien
tgtactgcatggaaagcaccgcgag

SEQ ID NO: 4343859 - DNA, 25 bp, Homo sapien
tcaggcacgcgtgtgagtaactcac

SEQ ID NO: 4343860 - DNA, 25 bp, Homo sapien
ccaacaggctccttcctggtcaagg

SEQ ID NO: 4343861 - DNA, 25 bp, Homo sapien
caggttgcggttgggtctggcctgg

SEQ ID NO: 4343862 - DNA, 25 bp, Homo sapien
tcaggttgcggttgggtctggcctg

SEQ ID NO: 4343863 - DNA, 25 bp, Homo sapien
gcggttgggtctggcctggttgatg

SEQ ID NO: 4343864 - DNA, 25 bp, Homo sapien
gttgcggttgggtctggcctggttg

SEQ ID NO: 4343865 - DNA, 25 bp, Homo sapien
tcttcagggccagcgtgtagacggc

SEQ ID NO: 4343866 - DNA, 25 bp, Homo sapien
tagcggaaggtctggatggacatgc

SEQ ID NO: 4343867 - DNA, 25 bp, Homo sapien
caccagccagcaaagtagcggaagg

SEQ ID NO: 4343868 - DNA, 25 bp, Homo sapien
cgtgtagacggcacccgcatccagg

SEQ ID NO: 4343869 - DNA, 25 bp, Homo sapien
cccggtcccgcgcactgatcttccc

SEQ ID NO: 4343870 - DNA, 25 bp, Homo sapien
cttcccccaccgtccattctcaaag

SEQ ID NO: 4343871 - DNA, 25 bp, Homo sapien
ccggtcccgcgcactgatcttcccc

SEQ ID NO: 4343872 - DNA, 25 bp, Homo sapien
ggccccggtcccgcgcactgatctt

SEQ ID NO: 4343873 - DNA, 25 bp, Homo sapien
gctgcggccactgccttgtcgacgt

SEQ ID NO: 4343874 - DNA, 25 bp, Homo sapien
ttgtcgacgtcggtgacttgggcca

SEQ ID NO: 4343875 - DNA, 25 bp, Homo sapien
ggccactgccttgtcgacgtcggtg

SEQ ID NO: 4343876 - DNA, 25 bp, Homo sapien
cactgccttgtcgacgtcggtgact

SEQ ID NO: 4343877 - DNA, 25 bp, Homo sapien
catccacgaactcccccccaatgaa

SEQ ID NO: 4343878 - DNA, 25 bp, Homo sapien
acttccatcggtgggattgatggtc

SEQ ID NO: 4343879 - DNA, 25 bp, Homo sapien
ttccatcggtgggattgatggtctc

SEQ ID NO: 4343880 - DNA, 25 bp, Homo sapien
gaggtcttggcgccctcggcatcca

SEQ ID NO: 4343881 - DNA, 25 bp, Homo sapien
cggacagtgcgcttgttcactgcca

SEQ ID NO: 4343882 - DNA, 25 bp, Homo sapien
gcggacagtgcgcttgttcactgcc

SEQ ID NO: 4343883 - DNA, 25 bp, Homo sapien
gtagtcaatgctgcactcgccctcc

SEQ ID NO: 4343884 - DNA, 25 bp, Homo sapien
cctcctcatcgtcccctcgcagctt

SEQ ID NO: 4343885 - DNA, 25 bp, Homo sapien
atcgtcccctcgcagcttcctcact

SEQ ID NO: 4343886 - DNA, 25 bp, Homo sapien
cctcactaacagctggatgaagtcc

SEQ ID NO: 4343887 - DNA, 25 bp, Homo sapien
cctgacttgaagaaatcagtggagt

SEQ ID NO: 4343888 - DNA, 25 bp, Homo sapien
agtcttcaacctccaggactttggg

SEQ ID NO: 4343889 - DNA, 25 bp, Homo sapien
gtggagtcttcaacctccaggactt

SEQ ID NO: 4343890 - DNA, 25 bp, Homo sapien
agacgcggcccctgacttgaagaaa

SEQ ID NO: 4343891 - DNA, 25 bp, Homo sapien
tgctagcgcccaggttctggtgtcc

SEQ ID NO: 4343892 - DNA, 25 bp, Homo sapien
ggtgctagcgcccaggttctggtgt

SEQ ID NO: 4343893 - DNA, 25 bp, Homo sapien
cttggtgctagcgcccaggttctgg

SEQ ID NO: 4343894 - DNA, 25 bp, Homo sapien
ttggtgctagcgcccaggttctggt

SEQ ID NO: 4343895 - DNA, 25 bp, Homo sapien
gctggctgcccccttaaagaagttc

SEQ ID NO: 4343896 - DNA, 25 bp, Homo sapien
tggctgcccccttaaagaagttcga

SEQ ID NO: 4343897 - DNA, 25 bp, Homo sapien
tccgcagtaaccagctctgcctctg

SEQ ID NO: 4343898 - DNA, 25 bp, Homo sapien
gaagttcgaggccaggatcattttg

SEQ ID NO: 4343899 - DNA, 25 bp, Homo sapien
acctgaggcagtgatgaaggtgtcc

SEQ ID NO: 4343900 - DNA, 25 bp, Homo sapien
tttcacagttcctgtggtcggacct

SEQ ID NO: 4343901 - DNA, 25 bp, Homo sapien
ttcctgtggtcggacctgaggcagt

SEQ ID NO: 4343902 - DNA, 25 bp, Homo sapien
ctgaggcagtgatgaaggtgtccca

SEQ ID NO: 4343903 - DNA, 25 bp, Homo sapien
tgagagatgcttcaacccagggtct

SEQ ID NO: 4343904 - DNA, 25 bp, Homo sapien
tatgaacaggaagctaccatggcca

SEQ ID NO: 4343905 - DNA, 25 bp, Homo sapien
ctaataacaagagcaggtggccggc

SEQ ID NO: 4343906 - DNA, 25 bp, Homo sapien
tcttgtgagagagctgataacccca

SEQ ID NO: 4343907 - DNA, 25 bp, Homo sapien
gctcctgggatgggcaaagcgtctc

SEQ ID NO: 4343908 - DNA, 25 bp, Homo sapien
ccaggcctgaagtgttcagcgttga

SEQ ID NO: 4343909 - DNA, 25 bp, Homo sapien
tcagcgttgagttgaaaaatgtcag

SEQ ID NO: 4343910 - DNA, 25 bp, Homo sapien
atgggcaaagcgtctccctcgggca

SEQ ID NO: 4343911 - DNA, 25 bp, Homo sapien
aatggccagtgggatacaccaatgc

SEQ ID NO: 4343912 - DNA, 25 bp, Homo sapien
agtgggatacaccaatgcacgtggc

SEQ ID NO: 4343913 - DNA, 25 bp, Homo sapien
ggatacaccaatgcacgtggctgga

SEQ ID NO: 4343914 - DNA, 25 bp, Homo sapien
gccagtgggatacaccaatgcacgt

SEQ ID NO: 4343915 - DNA, 25 bp, Homo sapien
caggctcccggcaccttgtcgttcc

SEQ ID NO: 4343916 - DNA, 25 bp, Homo sapien
gtcgttcccgcggatccagttgtga

SEQ ID NO: 4343917 - DNA, 25 bp, Homo sapien
cctctgccggctggtcccagttgat

SEQ ID NO: 4343918 - DNA, 25 bp, Homo sapien
ccgcggatccagttgtgaatggcct

SEQ ID NO: 4343919 - DNA, 25 bp, Homo sapien
ccactcttatctccctgtgggcttt

SEQ ID NO: 4343920 - DNA, 25 bp, Homo sapien
cttgccttgaagactgctcgcacta

SEQ ID NO: 4343921 - DNA, 25 bp, Homo sapien
tcgcactacggctgacgttttgccc

SEQ ID NO: 4343922 - DNA, 25 bp, Homo sapien
ttgaagactgctcgcactacggctg

SEQ ID NO: 4343923 - DNA, 25 bp, Homo sapien
gggctttgccctcagcgatcagcct

SEQ ID NO: 4343924 - DNA, 25 bp, Homo sapien
tctgaatcccctcataggtggctcc

SEQ ID NO: 4343925 - DNA, 25 bp, Homo sapien
gggggctttgccctcagcgatcagc

SEQ ID NO: 4343926 - DNA, 25 bp, Homo sapien
cttctgaatcccctcataggtggct

SEQ ID NO: 4343927 - DNA, 25 bp, Homo sapien
cctttaaagagagtgggtcctgagc

SEQ ID NO: 4343928 - DNA, 25 bp, Homo sapien
aagtctgcacggtccaacacggtgg

SEQ ID NO: 4343929 - DNA, 25 bp, Homo sapien
gagatccagtgggttgctatcccca

SEQ ID NO: 4343930 - DNA, 25 bp, Homo sapien
taaagccctgcaggtataacacaga

SEQ ID NO: 4343931 - DNA, 25 bp, Homo sapien
gaagaggaagcggttgtacagcgtg

SEQ ID NO: 4343932 - DNA, 25 bp, Homo sapien
ggaagcggttgtacagcgtgctcac

SEQ ID NO: 4343933 - DNA, 25 bp, Homo sapien
gaggaagcggttgtacagcgtgctc

SEQ ID NO: 4343934 - DNA, 25 bp, Homo sapien
cagggaagaggaagcggttgtacag

SEQ ID NO: 4343935 - DNA, 25 bp, Homo sapien
ggtctccggtgtccagaccatcatc

SEQ ID NO: 4343936 - DNA, 25 bp, Homo sapien
gtgtcgtccgggagcacctcacact

SEQ ID NO: 4343937 - DNA, 25 bp, Homo sapien
tcatccgcccagaagatggaaaacc

SEQ ID NO: 4343938 - DNA, 25 bp, Homo sapien
agcaggtctccggtgtccagaccat

SEQ ID NO: 4343939 - DNA, 25 bp, Homo sapien
cagttgatggccgaggcccctcggt

SEQ ID NO: 4343940 - DNA, 25 bp, Homo sapien
cgccaccgggagtacttgaataccg

SEQ ID NO: 4343941 - DNA, 25 bp, Homo sapien
caaagcctggtattttgccaccaca

SEQ ID NO: 4343942 - DNA, 25 bp, Homo sapien
ccctcggtgcctagggagcagtgac

SEQ ID NO: 4343943 - DNA, 25 bp, Homo sapien
ccagagtacaatggagaagactcgc

SEQ ID NO: 4343944 - DNA, 25 bp, Homo sapien
tccagagtacaatggagaagactcg

SEQ ID NO: 4343945 - DNA, 25 bp, Homo sapien
atccagagtacaatggagaagactc

SEQ ID NO: 4343946 - DNA, 25 bp, Homo sapien
gagcactatgtgttttgacggcagc

SEQ ID NO: 4343947 - DNA, 25 bp, Homo sapien
aggctgggcttctctatagcccttc

SEQ ID NO: 4343948 - DNA, 25 bp, Homo sapien
tggagaccttcccaatcatgggtgc

SEQ ID NO: 4343949 - DNA, 25 bp, Homo sapien
ggtgatgccgcgcatgcccaccttt

SEQ ID NO: 4343950 - DNA, 25 bp, Homo sapien
agtgaacacacccaccacttcgtgg

SEQ ID NO: 4343951 - DNA, 25 bp, Homo sapien
catccttgtctggaacagtgaacac

SEQ ID NO: 4343952 - DNA, 25 bp, Homo sapien
aacttcctggccaaacaggctctgt

SEQ ID NO: 4343953 - DNA, 25 bp, Homo sapien
ttcctcaggtggcagtaaacttcct

SEQ ID NO: 4343954 - DNA, 25 bp, Homo sapien
gcaaatcagtcctatcataaattct

SEQ ID NO: 4343955 - DNA, 25 bp, Homo sapien
ggacaacactacagttgtttgcatc

SEQ ID NO: 4343956 - DNA, 25 bp, Homo sapien
tgcctagttcctctagaatttaaaa

SEQ ID NO: 4343957 - DNA, 25 bp, Homo sapien
taagaagccaatgaaacccttggaa

SEQ ID NO: 4343958 - DNA, 25 bp, Homo sapien
aattaagagcactgacaacaaatgc

SEQ ID NO: 4343959 - DNA, 25 bp, Homo sapien
caaccaagatatcctgtagtatgtg

SEQ ID NO: 4343960 - DNA, 25 bp, Homo sapien
gaagacatatctggtaaagcactgt

SEQ ID NO: 4343961 - DNA, 25 bp, Homo sapien
ggccaagtaaattaaccgacattca

SEQ ID NO: 4343962 - DNA, 25 bp, Homo sapien
agagcccatgcctccaaactccaag

SEQ ID NO: 4343963 - DNA, 25 bp, Homo sapien
tgggactcctgattaaattccgtct

SEQ ID NO: 4343964 - DNA, 25 bp, Homo sapien
tccgtctctgtctgcactttgggaa

SEQ ID NO: 4343965 - DNA, 25 bp, Homo sapien
ggaaacaaagtcacctgacaccaga

SEQ ID NO: 4343966 - DNA, 25 bp, Homo sapien
ccgaaactgaggttggtgcagaccc

SEQ ID NO: 4343967 - DNA, 25 bp, Homo sapien
tctggttaaggccagagcccgtgag

SEQ ID NO: 4343968 - DNA, 25 bp, Homo sapien
aggttagacttctgtgagccgcagc

SEQ ID NO: 4343969 - DNA, 25 bp, Homo sapien
cgccagtccgcgagctctggttaag

SEQ ID NO: 4343970 - DNA, 25 bp, Homo sapien
cggtggtgggactatggcgggagcg

SEQ ID NO: 4343971 - DNA, 25 bp, Homo sapien
tggtgggactatggcgggagcgcag

SEQ ID NO: 4343972 - DNA, 25 bp, Homo sapien
ctccgggcgggtctataaatgccat

SEQ ID NO: 4343973 - DNA, 25 bp, Homo sapien
agcgcaccctctccgggcgggtcta

SEQ ID NO: 4343974 - DNA, 25 bp, Homo sapien
agaggagaccctcgccaagccggtg

SEQ ID NO: 4343975 - DNA, 25 bp, Homo sapien
ctttgaaaagtcccaagcacccagc

SEQ ID NO: 4343976 - DNA, 25 bp, Homo sapien
ttggagaattcccagggctttgaaa

SEQ ID NO: 4343977 - DNA, 25 bp, Homo sapien
ttgatgggccaagtacctgccatgt

SEQ ID NO: 4343978 - DNA, 25 bp, Homo sapien
cacagtgatggcttgtagcagttgc

SEQ ID NO: 4343979 - DNA, 25 bp, Homo sapien
tatctgatgcagagccttagagagg

SEQ ID NO: 4343980 - DNA, 25 bp, Homo sapien
ttagagaggctgttccaggtcacac

SEQ ID NO: 4343981 - DNA, 25 bp, Homo sapien
caggtcacacaaactaaggaagtcc

SEQ ID NO: 4343982 - DNA, 25 bp, Homo sapien
agccctgctcctgccaggtcctctc

SEQ ID NO: 4343983 - DNA, 25 bp, Homo sapien
ccctgctcctgccaggtcctctcca

SEQ ID NO: 4343984 - DNA, 25 bp, Homo sapien
ctgctcctgccaggtcctctccagc

SEQ ID NO: 4343985 - DNA, 25 bp, Homo sapien
cctctccagccccatgccaaatcta

SEQ ID NO: 4343986 - DNA, 25 bp, Homo sapien
ttgcgtgtttgcacccccatgcaaa

SEQ ID NO: 4343987 - DNA, 25 bp, Homo sapien
tgttgcgtgtttgcacccccatgca

SEQ ID NO: 4343988 - DNA, 25 bp, Homo sapien
tgtttgcacccccatgcaaactggc

SEQ ID NO: 4343989 - DNA, 25 bp, Homo sapien
gggtgttgcgtgtttgcacccccat

SEQ ID NO: 4343990 - DNA, 25 bp, Homo sapien
cacttggggagacggtacatctgtg

SEQ ID NO: 4343991 - DNA, 25 bp, Homo sapien
gggagacggtacatctgtggagagg

SEQ ID NO: 4343992 - DNA, 25 bp, Homo sapien
gagacggtacatctgtggagagggc

SEQ ID NO: 4343993 - DNA, 25 bp, Homo sapien
gtaggtgcacttggggagacggtac

SEQ ID NO: 4343994 - DNA, 25 bp, Homo sapien
cctggcaagtctccaggtagttgac

SEQ ID NO: 4343995 - DNA, 25 bp, Homo sapien
gacactggatacactgccatggtgg

SEQ ID NO: 4343996 - DNA, 25 bp, Homo sapien
cacaagacttatagccctggcaagt

SEQ ID NO: 4343997 - DNA, 25 bp, Homo sapien
cgggcggtaggtcaggatgtcaaaa

SEQ ID NO: 4343998 - DNA, 25 bp, Homo sapien
tgacgtgccccctgagctacagctt

SEQ ID NO: 4343999 - DNA, 25 bp, Homo sapien
ctgacgtgccccctgagctacagct

SEQ ID NO: 4344000 - DNA, 25 bp, Homo sapien
acgtgccccctgagctacagcttac

SEQ ID NO: 4344001 - DNA, 25 bp, Homo sapien
tcctgacgtgccccctgagctacag

SEQ ID NO: 4344002 - DNA, 25 bp, Homo sapien
aggtggagagacagcgcgtcgcgcg

SEQ ID NO: 4344003 - DNA, 25 bp, Homo sapien
ccggagcttagcgtcttccacgcgg

SEQ ID NO: 4344004 - DNA, 25 bp, Homo sapien
gagctttactggcttcgccggacag

SEQ ID NO: 4344005 - DNA, 25 bp, Homo sapien
tagcgtcttccacgcggcgctgtgt

SEQ ID NO: 4344006 - DNA, 25 bp, Homo sapien
gttcaggtcactgcgagggtgagcc

SEQ ID NO: 4344007 - DNA, 25 bp, Homo sapien
agtgtgctctcgctgccgtgttcag

SEQ ID NO: 4344008 - DNA, 25 bp, Homo sapien
cgctgccgtgttcaggtcactgcga

SEQ ID NO: 4344009 - DNA, 25 bp, Homo sapien
tgagccccgctttatctaccccttc

SEQ ID NO: 4344010 - DNA, 25 bp, Homo sapien
ttcttttcatctgctcttggagtcc

SEQ ID NO: 4344011 - DNA, 25 bp, Homo sapien
gggtttatatggataccagataggg

SEQ ID NO: 4344012 - DNA, 25 bp, Homo sapien
tagggcctcgggtttctaggcttga

SEQ ID NO: 4344013 - DNA, 25 bp, Homo sapien
ctgtcgcctgtccatatcacctccc

SEQ ID NO: 4344014 - DNA, 25 bp, Homo sapien
ttgctataattgaaaggcttggtcc

SEQ ID NO: 4344015 - DNA, 25 bp, Homo sapien
tccattgtaaaaaaccgaggtggca

SEQ ID NO: 4344016 - DNA, 25 bp, Homo sapien
catggtgtccattaaagcttctgtc

SEQ ID NO: 4344017 - DNA, 25 bp, Homo sapien
tatgtaagccctccattatgcacac

SEQ ID NO: 4344018 - DNA, 25 bp, Homo sapien
ctatctaatggccttcaggtcctgc

SEQ ID NO: 4344019 - DNA, 25 bp, Homo sapien
ggccttcaggtcctgcacgggcccc

SEQ ID NO: 4344020 - DNA, 25 bp, Homo sapien
ttcaggtcctgcacgggccccacag

SEQ ID NO: 4344021 - DNA, 25 bp, Homo sapien
gccttcaggtcctgcacgggcccca

SEQ ID NO: 4344022 - DNA, 25 bp, Homo sapien
tgctgatggccccaatcccggtctt

SEQ ID NO: 4344023 - DNA, 25 bp, Homo sapien
gatggccccaatcccggtcttctgg

SEQ ID NO: 4344024 - DNA, 25 bp, Homo sapien
gggatacggccgtgcccccatggct

SEQ ID NO: 4344025 - DNA, 25 bp, Homo sapien
tctggaaactcttgcagatggggtc

SEQ ID NO: 4344026 - DNA, 25 bp, Homo sapien
cttgagtaactgttctctggcgggc

SEQ ID NO: 4344027 - DNA, 25 bp, Homo sapien
tgagaccctcctgccaagagcaagg

SEQ ID NO: 4344028 - DNA, 25 bp, Homo sapien
caaggcccaagctgtcagagctttc

SEQ ID NO: 4344029 - DNA, 25 bp, Homo sapien
aagagcaaggcccaagctgtcagag

SEQ ID NO: 4344030 - DNA, 25 bp, Homo sapien
agtactgaagatgtggggacatgcc

SEQ ID NO: 4344031 - DNA, 25 bp, Homo sapien
cttataagtgggccctgtcacccca

SEQ ID NO: 4344032 - DNA, 25 bp, Homo sapien
ttcttataagtgggccctgtcaccc

SEQ ID NO: 4344033 - DNA, 25 bp, Homo sapien
gaagatgtggggacatgccacacct

SEQ ID NO: 4344034 - DNA, 25 bp, Homo sapien
cattcgcaagatgagatggcgtttg

SEQ ID NO: 4344035 - DNA, 25 bp, Homo sapien
ggagatggactttgtagactggagc

SEQ ID NO: 4344036 - DNA, 25 bp, Homo sapien
gtcctggatgacttcatccttgcaa

SEQ ID NO: 4344037 - DNA, 25 bp, Homo sapien
gaggtgatggcactgcattcgcaag

SEQ ID NO: 4344038 - DNA, 25 bp, Homo sapien
tgtaggcagtcagcaaacagttcct

SEQ ID NO: 4344039 - DNA, 25 bp, Homo sapien
caaaacgtatctgtgagctggaaat

SEQ ID NO: 4344040 - DNA, 25 bp, Homo sapien
cgtttgccccgtatcccaagagaga

SEQ ID NO: 4344041 - DNA, 25 bp, Homo sapien
caagctttaaaattgtcgcaaggcc

SEQ ID NO: 4344042 - DNA, 25 bp, Homo sapien
ctctcgcctcactttgaatgcttac

SEQ ID NO: 4344043 - DNA, 25 bp, Homo sapien
ggcggcgctgcttggctctctcgcc

SEQ ID NO: 4344044 - DNA, 25 bp, Homo sapien
gcgctgcttggctctctcgcctcac

SEQ ID NO: 4344045 - DNA, 25 bp, Homo sapien
tctctcgcctcactttgaatgctta

SEQ ID NO: 4344046 - DNA, 25 bp, Homo sapien
attcataacattcccgcaagcgagg

SEQ ID NO: 4344047 - DNA, 25 bp, Homo sapien
acgtgagcggtttgcagagcagccc

SEQ ID NO: 4344048 - DNA, 25 bp, Homo sapien
ggcggcacttaagcggcagcttcct

SEQ ID NO: 4344049 - DNA, 25 bp, Homo sapien
gctgtgttttttcctgcgcgccctg

SEQ ID NO: 4344050 - DNA, 25 bp, Homo sapien
cttcaccgtgtgtttctgctctcct

SEQ ID NO: 4344051 - DNA, 25 bp, Homo sapien
gcagtaccgattgcctttgcaagga

SEQ ID NO: 4344052 - DNA, 25 bp, Homo sapien
ctcctcccgttgatggcagtaccga

SEQ ID NO: 4344053 - DNA, 25 bp, Homo sapien
tcagtgacactctcctctgggaccg

SEQ ID NO: 4344054 - DNA, 25 bp, Homo sapien
gataggcggatgaagccctaacgct

SEQ ID NO: 4344055 - DNA, 25 bp, Homo sapien
agcgtgcggctacaatgactcgaca

SEQ ID NO: 4344056 - DNA, 25 bp, Homo sapien
caattggagcgctgagtcgaagtcc

SEQ ID NO: 4344057 - DNA, 25 bp, Homo sapien
gaagtcctgattccacgataggcgg

SEQ ID NO: 4344058 - DNA, 25 bp, Homo sapien
gaaatcatctactggagacgggcaa

SEQ ID NO: 4344059 - DNA, 25 bp, Homo sapien
gaatttacacatgcgcacataatgg

SEQ ID NO: 4344060 - DNA, 25 bp, Homo sapien
gagcaactgatgttcgagaaagccc

SEQ ID NO: 4344061 - DNA, 25 bp, Homo sapien
tacagcaggcctgtgaaacccacag

SEQ ID NO: 4344062 - DNA, 25 bp, Homo sapien
gtcttcgtctctcattcgttccaca

SEQ ID NO: 4344063 - DNA, 25 bp, Homo sapien
cctctggtgctcatcgtcttcgtct

SEQ ID NO: 4344064 - DNA, 25 bp, Homo sapien
cactgtttgtgcttagatctctgtc

SEQ ID NO: 4344065 - DNA, 25 bp, Homo sapien
tactatcctctggtgatgttgcctc

SEQ ID NO: 4344066 - DNA, 25 bp, Homo sapien
ccccggtctttgctagtttgtcgtg

SEQ ID NO: 4344067 - DNA, 25 bp, Homo sapien
ttccaggctccgtgactgagagacg

SEQ ID NO: 4344068 - DNA, 25 bp, Homo sapien
gtcaacccaggcaaactcatatggg

SEQ ID NO: 4344069 - DNA, 25 bp, Homo sapien
gatagaagtctgttgtttgagcccc

SEQ ID NO: 4344070 - DNA, 25 bp, Homo sapien
gggcctcagaagctggctgtcatga

SEQ ID NO: 4344071 - DNA, 25 bp, Homo sapien
ccacaggggggtgaatcatcctgct

SEQ ID NO: 4344072 - DNA, 25 bp, Homo sapien
gtagcatgggcctcagaagctggct

SEQ ID NO: 4344073 - DNA, 25 bp, Homo sapien
catcctgctgtgtatcagcaacggg

SEQ ID NO: 4344074 - DNA, 25 bp, Homo sapien
ccctggccaggggacattagagcag

SEQ ID NO: 4344075 - DNA, 25 bp, Homo sapien
gacccggggacttcaggctacaatg

SEQ ID NO: 4344076 - DNA, 25 bp, Homo sapien
acaatgagtcaggttgtccccaccc

SEQ ID NO: 4344077 - DNA, 25 bp, Homo sapien
acttcaggctacaatgagtcaggtt

SEQ ID NO: 4344078 - DNA, 25 bp, Homo sapien
acagaccctgagcagcggcagtgtg

SEQ ID NO: 4344079 - DNA, 25 bp, Homo sapien
tgtggaggctagacccagcctgctg

SEQ ID NO: 4344080 - DNA, 25 bp, Homo sapien
tccagaattccgagcagatacaagt

SEQ ID NO: 4344081 - DNA, 25 bp, Homo sapien
tggctgaatggctgcagcgacttcc

SEQ ID NO: 4344082 - DNA, 25 bp, Homo sapien
tcagatctgctcttctggctggcag

SEQ ID NO: 4344083 - DNA, 25 bp, Homo sapien
cagatctgctcttctggctggcaga

SEQ ID NO: 4344084 - DNA, 25 bp, Homo sapien
agatctgctcttctggctggcagac

SEQ ID NO: 4344085 - DNA, 25 bp, Homo sapien
cttggaggctaacccctgaggcaga

SEQ ID NO: 4344086 - DNA, 25 bp, Homo sapien
aggcagaggcagcactacaacttct

SEQ ID NO: 4344087 - DNA, 25 bp, Homo sapien
cagaggcagcactacaacttcttct

SEQ ID NO: 4344088 - DNA, 25 bp, Homo sapien
tgacttggaggctaacccctgaggc

SEQ ID NO: 4344089 - DNA, 25 bp, Homo sapien
gtattagggctcagcgcgaaggcct

SEQ ID NO: 4344090 - DNA, 25 bp, Homo sapien
tgcagcggtttaagggctctctccc

SEQ ID NO: 4344091 - DNA, 25 bp, Homo sapien
tcatggcttggtgtggctggtatta

SEQ ID NO: 4344092 - DNA, 25 bp, Homo sapien
gcgaaggcctcacaggggcattttc

SEQ ID NO: 4344093 - DNA, 25 bp, Homo sapien
gagagcaggcatcaaaggtgagaca

SEQ ID NO: 4344094 - DNA, 25 bp, Homo sapien
tgagacaacgccagtaatgggcgcc

SEQ ID NO: 4344095 - DNA, 25 bp, Homo sapien
gcgccactgactggtctaggcaagg

SEQ ID NO: 4344096 - DNA, 25 bp, Homo sapien
taatgggcgccactgactggtctag

SEQ ID NO: 4344097 - DNA, 25 bp, Homo sapien
ttcccacttgtccatcgccaccgcg

SEQ ID NO: 4344098 - DNA, 25 bp, Homo sapien
cgcggcccactctggaggctggttt

SEQ ID NO: 4344099 - DNA, 25 bp, Homo sapien
tgctcagcttcccacttgtccatcg

SEQ ID NO: 4344100 - DNA, 25 bp, Homo sapien
tttctgccaggcacatccatgtact

SEQ ID NO: 4344101 - DNA, 25 bp, Homo sapien
tcccacacttatcagtgatgccctt

SEQ ID NO: 4344102 - DNA, 25 bp, Homo sapien
cccacacttatcagtgatgcccttt

SEQ ID NO: 4344103 - DNA, 25 bp, Homo sapien
tgctgatcccacacttatcagtgat

SEQ ID NO: 4344104 - DNA, 25 bp, Homo sapien
catttctaaatcagggttgggaggc

SEQ ID NO: 4344105 - DNA, 25 bp, Homo sapien
caccctctggtgatcatgctgagca

SEQ ID NO: 4344106 - DNA, 25 bp, Homo sapien
ggttcgaggctctaagtactcccga

SEQ ID NO: 4344107 - DNA, 25 bp, Homo sapien
cagaaggtgggctggtaacattgcc

SEQ ID NO: 4344108 - DNA, 25 bp, Homo sapien
tcgcacacaggacactggtacggct

SEQ ID NO: 4344109 - DNA, 25 bp, Homo sapien
agaggtggtcgctccgcgcgaactt

SEQ ID NO: 4344110 - DNA, 25 bp, Homo sapien
tggtacggcttcacacctgagtgcg

SEQ ID NO: 4344111 - DNA, 25 bp, Homo sapien
gcgacagctcgtcagagcgcgagaa

SEQ ID NO: 4344112 - DNA, 25 bp, Homo sapien
agttgccgggatgcaaggcgtgcac

SEQ ID NO: 4344113 - DNA, 25 bp, Homo sapien
ccccacgaagttgccgggatgcaag

SEQ ID NO: 4344114 - DNA, 25 bp, Homo sapien
ccgaccccacgaagttgccgggatg

SEQ ID NO: 4344115 - DNA, 25 bp, Homo sapien
ggacatggcgcggtcagcgaggcct

SEQ ID NO: 4344116 - DNA, 25 bp, Homo sapien
gattgaccctgcaaagtgtatctgg

SEQ ID NO: 4344117 - DNA, 25 bp, Homo sapien
ggagcaggcactcatgtgacagtca

SEQ ID NO: 4344118 - DNA, 25 bp, Homo sapien
agttcaggtggctcccgacatttcg

SEQ ID NO: 4344119 - DNA, 25 bp, Homo sapien
gaaaggaccccaatgctaccaggga

SEQ ID NO: 4344120 - DNA, 25 bp, Homo sapien
cgtggggccacacagatctctggtc

SEQ ID NO: 4344121 - DNA, 25 bp, Homo sapien
gtggggccacacagatctctggtca

SEQ ID NO: 4344122 - DNA, 25 bp, Homo sapien
aatggcttggccattctggaacagg

SEQ ID NO: 4344123 - DNA, 25 bp, Homo sapien
gggattctttctggatggaatggct

SEQ ID NO: 4344124 - DNA, 25 bp, Homo sapien
ggccattctggaacaggacgttctg

SEQ ID NO: 4344125 - DNA, 25 bp, Homo sapien
tctttctggatggaatggcttggcc

SEQ ID NO: 4344126 - DNA, 25 bp, Homo sapien
aaactggacaccagttggcttccgg

SEQ ID NO: 4344127 - DNA, 25 bp, Homo sapien
gaaactggacaccagttggcttccg

SEQ ID NO: 4344128 - DNA, 25 bp, Homo sapien
cagccagggaaagtacatttgtgca

SEQ ID NO: 4344129 - DNA, 25 bp, Homo sapien
cattttgatgagttctgcggctggg

SEQ ID NO: 4344130 - DNA, 25 bp, Homo sapien
tccaacaggcttggcggcaatgggc

SEQ ID NO: 4344131 - DNA, 25 bp, Homo sapien
ggcaatgcgcacaaacttggagggc

SEQ ID NO: 4344132 - DNA, 25 bp, Homo sapien
caactgggcattttggcgacgagaa

SEQ ID NO: 4344133 - DNA, 25 bp, Homo sapien
gaaactcgggcaagcagaaatgctc

SEQ ID NO: 4344134 - DNA, 25 bp, Homo sapien
cgtggcctgggacaataggaagtcc

SEQ ID NO: 4344135 - DNA, 25 bp, Homo sapien
tcaggatcacccaaaggaaactcgg

SEQ ID NO: 4344136 - DNA, 25 bp, Homo sapien
gctggcctggccgtgccggtggcgg

SEQ ID NO: 4344137 - DNA, 25 bp, Homo sapien
cctgtttgcaaaagagacctctcca

SEQ ID NO: 4344138 - DNA, 25 bp, Homo sapien
tctccaagcccattgcataaccagg

SEQ ID NO: 4344139 - DNA, 25 bp, Homo sapien
gtgcctgcaagagtgttttctgaaa

SEQ ID NO: 4344140 - DNA, 25 bp, Homo sapien
gcctcctattgccaaacgcctggat

SEQ ID NO: 4344141 - DNA, 25 bp, Homo sapien
cttgagcatcctggtggccaaggcc

SEQ ID NO: 4344142 - DNA, 25 bp, Homo sapien
gcctaactgccttggacttcacacc

SEQ ID NO: 4344143 - DNA, 25 bp, Homo sapien
agtggaagcagaccactggggtccc

SEQ ID NO: 4344144 - DNA, 25 bp, Homo sapien
ctgcccctctggtgataatccgtgg

SEQ ID NO: 4344145 - DNA, 25 bp, Homo sapien
tgagaattccgtgagctgacgctca

SEQ ID NO: 4344146 - DNA, 25 bp, Homo sapien
aggatctggcacaccggcagcactc

SEQ ID NO: 4344147 - DNA, 25 bp, Homo sapien
tctgcaagttgtctgccaggtgacc

SEQ ID NO: 4344148 - DNA, 25 bp, Homo sapien
caggcacggcaaacgttcggcctct

SEQ ID NO: 4344149 - DNA, 25 bp, Homo sapien
gccattgggtcagcgtgcaaatcac

SEQ ID NO: 4344150 - DNA, 25 bp, Homo sapien
caaagtcgcagagtccgggcgtcct

SEQ ID NO: 4344151 - DNA, 25 bp, Homo sapien
tcaaaataagagtctccggtccctg

SEQ ID NO: 4344152 - DNA, 25 bp, Homo sapien
gggacacgctgttccgggcacagtc

SEQ ID NO: 4344153 - DNA, 25 bp, Homo sapien
tgaaccggaccaccatatgggatgg

SEQ ID NO: 4344154 - DNA, 25 bp, Homo sapien
tttgtcacctccgagggccgtggga

SEQ ID NO: 4344155 - DNA, 25 bp, Homo sapien
gttccatgagtaacaccaaggcggg

SEQ ID NO: 4344156 - DNA, 25 bp, Homo sapien
tttgaggctctcaaacaattgttga

SEQ ID NO: 4344157 - DNA, 25 bp, Homo sapien
cagcactcgcgcggtgcctccgaga

SEQ ID NO: 4344158 - DNA, 25 bp, Homo sapien
tccgcgggggcccatcccgctcctc

SEQ ID NO: 4344159 - DNA, 25 bp, Homo sapien
tcccgctcctccgacattcctccag

SEQ ID NO: 4344160 - DNA, 25 bp, Homo sapien
cctccagcactcgcgcggtgcctcc

SEQ ID NO: 4344161 - DNA, 25 bp, Homo sapien
ggcggagcactagcccgcccgcagc

SEQ ID NO: 4344162 - DNA, 25 bp, Homo sapien
cgctggctcgatcgcccgccggccc

SEQ ID NO: 4344163 - DNA, 25 bp, Homo sapien
gggtcgctgcggcggagcactagcc

SEQ ID NO: 4344164 - DNA, 25 bp, Homo sapien
tgggggcggcggctagactctcggt

SEQ ID NO: 4344165 - DNA, 25 bp, Homo sapien
gtgacgcagcgggcgccgcgaaggc

SEQ ID NO: 4344166 - DNA, 25 bp, Homo sapien
tgacgcagcgggcgccgcgaaggct

SEQ ID NO: 4344167 - DNA, 25 bp, Homo sapien
gctttgaggaacatcagcccaggga

SEQ ID NO: 4344168 - DNA, 25 bp, Homo sapien
ctagctttgaggaacatcagcccag

SEQ ID NO: 4344169 - DNA, 25 bp, Homo sapien
ctttgaggaacatcagcccagggac

SEQ ID NO: 4344170 - DNA, 25 bp, Homo sapien
tagctttgaggaacatcagcccagg

SEQ ID NO: 4344171 - DNA, 25 bp, Homo sapien
gctctgagcattggcaaagccccag

SEQ ID NO: 4344172 - DNA, 25 bp, Homo sapien
aagggctgagtcctgagagcctctg

SEQ ID NO: 4344173 - DNA, 25 bp, Homo sapien
agagaagggctgagtcctgagagcc

SEQ ID NO: 4344174 - DNA, 25 bp, Homo sapien
ggacctggtggtccaagaagacaca

SEQ ID NO: 4344175 - DNA, 25 bp, Homo sapien
ccgagcattgctgcggagatgagat

SEQ ID NO: 4344176 - DNA, 25 bp, Homo sapien
gatatgtattcactgctcctggaca

SEQ ID NO: 4344177 - DNA, 25 bp, Homo sapien
tggacagccgtcctgccagtgccga

SEQ ID NO: 4344178 - DNA, 25 bp, Homo sapien
cttctgatatgtattcactgctcct

SEQ ID NO: 4344179 - DNA, 25 bp, Homo sapien
tgcaggtgataaggacgagtgtgaa

SEQ ID NO: 4344180 - DNA, 25 bp, Homo sapien
tggtgcaggtgataaggacgagtgt

SEQ ID NO: 4344181 - DNA, 25 bp, Homo sapien
taaggacgagtgtgaagggggctat

SEQ ID NO: 4344182 - DNA, 25 bp, Homo sapien
acggtggtgcaggtgataaggacga

SEQ ID NO: 4344183 - DNA, 25 bp, Homo sapien
tgtacccgtgttggctgccacaggg

SEQ ID NO: 4344184 - DNA, 25 bp, Homo sapien
gcacctgcatgactgtaggagcctg

SEQ ID NO: 4344185 - DNA, 25 bp, Homo sapien
cctgcatgactgtaggagcctgctg

SEQ ID NO: 4344186 - DNA, 25 bp, Homo sapien
gcatgactgtaggagcctgctgccc

SEQ ID NO: 4344187 - DNA, 25 bp, Homo sapien
cttgggagtgaggaatgtagggtca

SEQ ID NO: 4344188 - DNA, 25 bp, Homo sapien
ggtcagggtcctggaggtcccaaca

SEQ ID NO: 4344189 - DNA, 25 bp, Homo sapien
tcagggtcctggaggtcccaacagt

SEQ ID NO: 4344190 - DNA, 25 bp, Homo sapien
gggtcctggaggtcccaacagtgac

SEQ ID NO: 4344191 - DNA, 25 bp, Homo sapien
cgaggagccaggacacagtccccat

SEQ ID NO: 4344192 - DNA, 25 bp, Homo sapien
gaggagccaggacacagtccccatg

SEQ ID NO: 4344193 - DNA, 25 bp, Homo sapien
ctgcgaggagccaggacacagtccc

SEQ ID NO: 4344194 - DNA, 25 bp, Homo sapien
tgcgaggagccaggacacagtcccc

SEQ ID NO: 4344195 - DNA, 25 bp, Homo sapien
aatgtgtgagacctttacactgtcc

SEQ ID NO: 4344196 - DNA, 25 bp, Homo sapien
tgtgtgagacctttacactgtcccc

SEQ ID NO: 4344197 - DNA, 25 bp, Homo sapien
tgtgagacctttacactgtccccac

SEQ ID NO: 4344198 - DNA, 25 bp, Homo sapien
gtgtgagacctttacactgtcccca

SEQ ID NO: 4344199 - DNA, 25 bp, Homo sapien
agaggtcctatggctgggattccag

SEQ ID NO: 4344200 - DNA, 25 bp, Homo sapien
cagaggtcctatggctgggattcca

SEQ ID NO: 4344201 - DNA, 25 bp, Homo sapien
gcagaggtcctatggctgggattcc

SEQ ID NO: 4344202 - DNA, 25 bp, Homo sapien
gtgcagaggtcctatggctgggatt

SEQ ID NO: 4344203 - DNA, 25 bp, Homo sapien
ccttcagtcctcacaggaggctttg

SEQ ID NO: 4344204 - DNA, 25 bp, Homo sapien
ctggagacaattcattattggtgat

SEQ ID NO: 4344205 - DNA, 25 bp, Homo sapien
gtcgattacaaagccactgcctcct

SEQ ID NO: 4344206 - DNA, 25 bp, Homo sapien
gatatcaaactgcacccagtcgatt

SEQ ID NO: 4344207 - DNA, 25 bp, Homo sapien
tgcattggacatggttgagaaacag

SEQ ID NO: 4344208 - DNA, 25 bp, Homo sapien
gactaggtgcattggacatggttga

SEQ ID NO: 4344209 - DNA, 25 bp, Homo sapien
cattggacatggttgagaaacaggt

SEQ ID NO: 4344210 - DNA, 25 bp, Homo sapien
ctcaggactaggtgcattggacatg

SEQ ID NO: 4344211 - DNA, 25 bp, Homo sapien
cgttcctcaaggccttgacctcttc

SEQ ID NO: 4344212 - DNA, 25 bp, Homo sapien
ttcctcaaggccttgacctcttcag

SEQ ID NO: 4344213 - DNA, 25 bp, Homo sapien
cctttatctggtcccggtcctggct

SEQ ID NO: 4344214 - DNA, 25 bp, Homo sapien
gcctttatctggtcccggtcctggc

SEQ ID NO: 4344215 - DNA, 25 bp, Homo sapien
cctggctgggacttgttccatgcct

SEQ ID NO: 4344216 - DNA, 25 bp, Homo sapien
tgggacttgttccatgcctctggcc

SEQ ID NO: 4344217 - DNA, 25 bp, Homo sapien
gtagagaagcacccggcaggtgaga

SEQ ID NO: 4344218 - DNA, 25 bp, Homo sapien
gggtagagaagcacccggcaggtga

SEQ ID NO: 4344219 - DNA, 25 bp, Homo sapien
tagagaagcacccggcaggtgagag

SEQ ID NO: 4344220 - DNA, 25 bp, Homo sapien
ggtagagaagcacccggcaggtgag

SEQ ID NO: 4344221 - DNA, 25 bp, Homo sapien
tattccaaactagaatcctgtgccc

SEQ ID NO: 4344222 - DNA, 25 bp, Homo sapien
gaacttctagacatgctgcctctct

SEQ ID NO: 4344223 - DNA, 25 bp, Homo sapien
taatccgccaagcaggagaacttct

SEQ ID NO: 4344224 - DNA, 25 bp, Homo sapien
tctaaagtttacctcctgcgattct

SEQ ID NO: 4344225 - DNA, 25 bp, Homo sapien
gaggaggacgtggtggctcgtaaag

SEQ ID NO: 4344226 - DNA, 25 bp, Homo sapien
aggaggacgtggtggctcgtaaagg

SEQ ID NO: 4344227 - DNA, 25 bp, Homo sapien
atggaggaggacgtggtggctcgta

SEQ ID NO: 4344228 - DNA, 25 bp, Homo sapien
ggaggaggacgtggtggctcgtaaa

SEQ ID NO: 4344229 - DNA, 25 bp, Homo sapien
ccaaagcttgtgcatcattgtctgg

SEQ ID NO: 4344230 - DNA, 25 bp, Homo sapien
cataaaatggaaggacgattcctgg

SEQ ID NO: 4344231 - DNA, 25 bp, Homo sapien
gtaagagcaaagctggaatccgctg

SEQ ID NO: 4344232 - DNA, 25 bp, Homo sapien
tccacaccggcaactcatgcaaagg

SEQ ID NO: 4344233 - DNA, 25 bp, Homo sapien
tgagtcaccagtttatgaagtgctt

SEQ ID NO: 4344234 - DNA, 25 bp, Homo sapien
agtgcttcttgtggtttgctaaaac

SEQ ID NO: 4344235 - DNA, 25 bp, Homo sapien
aagtgcttcttgtggtttgctaaaa

SEQ ID NO: 4344236 - DNA, 25 bp, Homo sapien
tacttgagtcaccagtttatgaagt

SEQ ID NO: 4344237 - DNA, 25 bp, Homo sapien
ttgttctgctttgatggtttgtagg

SEQ ID NO: 4344238 - DNA, 25 bp, Homo sapien
tttgaatgtcagtgtaaggagcctc

SEQ ID NO: 4344239 - DNA, 25 bp, Homo sapien
gggccgggtcattgaggactttgaa

SEQ ID NO: 4344240 - DNA, 25 bp, Homo sapien
tggtttgtagggagataaggctgca

SEQ ID NO: 4344241 - DNA, 25 bp, Homo sapien
agacatcctggtgcccctggcttca

SEQ ID NO: 4344242 - DNA, 25 bp, Homo sapien
tctcaatccccatagatactgggaa

SEQ ID NO: 4344243 - DNA, 25 bp, Homo sapien
ggtggatctgcgcgctcaaaacttg

SEQ ID NO: 4344244 - DNA, 25 bp, Homo sapien
gggaaaatctaggaacatgttcaga

SEQ ID NO: 4344245 - DNA, 25 bp, Homo sapien
tcgcgcgtggacttgtcaggacaca

SEQ ID NO: 4344246 - DNA, 25 bp, Homo sapien
tcctctcgcttgtcccactatgatg

SEQ ID NO: 4344247 - DNA, 25 bp, Homo sapien
tagagcagtggctttgcaaccctag

SEQ ID NO: 4344248 - DNA, 25 bp, Homo sapien
tgatggatctcgctcgctccgtaga

SEQ ID NO: 4344249 - DNA, 25 bp, Homo sapien
cagtgcttggcacgtggcgaataaa

SEQ ID NO: 4344250 - DNA, 25 bp, Homo sapien
cattttcgatgctgctagtcctgag

SEQ ID NO: 4344251 - DNA, 25 bp, Homo sapien
gctccaaaagtatccatcctgcacg

SEQ ID NO: 4344252 - DNA, 25 bp, Homo sapien
ggagccaacccaagtgcggagtgtt

SEQ ID NO: 4344253 - DNA, 25 bp, Homo sapien
caggaatttaccagtttcctctggg

SEQ ID NO: 4344254 - DNA, 25 bp, Homo sapien
gtgcacatacatgttcgtagtagtc

SEQ ID NO: 4344255 - DNA, 25 bp, Homo sapien
taaattatggattcaatctcgctac

SEQ ID NO: 4344256 - DNA, 25 bp, Homo sapien
tggtggtggatgaatatctccagtt

SEQ ID NO: 4344257 - DNA, 25 bp, Homo sapien
ctttcctcttgggaccgcttttctg

SEQ ID NO: 4344258 - DNA, 25 bp, Homo sapien
gtcctggaggttttgataacttatc

SEQ ID NO: 4344259 - DNA, 25 bp, Homo sapien
ttctcttcctgcactccttgttctg

SEQ ID NO: 4344260 - DNA, 25 bp, Homo sapien
tccttgttaacccagatgtcattca

SEQ ID NO: 4344261 - DNA, 25 bp, Homo sapien
tcacagctttgtggtcatacccagg

SEQ ID NO: 4344262 - DNA, 25 bp, Homo sapien
agcatggagctggacctaggtttcc

SEQ ID NO: 4344263 - DNA, 25 bp, Homo sapien
ggctgctgtattgcgtgattcggaa

SEQ ID NO: 4344264 - DNA, 25 bp, Homo sapien
cacagcgtagaagtgggcggttcct

SEQ ID NO: 4344265 - DNA, 25 bp, Homo sapien
gacttggcacccatgatccttcagc

SEQ ID NO: 4344266 - DNA, 25 bp, Homo sapien
tccacttcggcgagtacaagggcga

SEQ ID NO: 4344267 - DNA, 25 bp, Homo sapien
tgagtgactgatgccctgccggttt

SEQ ID NO: 4344268 - DNA, 25 bp, Homo sapien
caggctcagagaagcgatgtgccca

SEQ ID NO: 4344269 - DNA, 25 bp, Homo sapien
tgtctggcaaggtgatcctgaaggg

SEQ ID NO: 4344270 - DNA, 25 bp, Homo sapien
catgggatggcttcctactgtcaag

SEQ ID NO: 4344271 - DNA, 25 bp, Homo sapien
acagcgctcccgatacagccagaat

SEQ ID NO: 4344272 - DNA, 25 bp, Homo sapien
ggaagaggcgtgtcctcaagccagg

SEQ ID NO: 4344273 - DNA, 25 bp, Homo sapien
tgccccaggtcaagatcgagcaggc

SEQ ID NO: 4344274 - DNA, 25 bp, Homo sapien
gatgagctgctagagaacctggagc

SEQ ID NO: 4344275 - DNA, 25 bp, Homo sapien
caaggtgctggatgtgtaccggcac

SEQ ID NO: 4344276 - DNA, 25 bp, Homo sapien
tgggcaccgtgcagatgctgaccat

SEQ ID NO: 4344277 - DNA, 25 bp, Homo sapien
ggccagcactaccaactaaaggaga

SEQ ID NO: 4344278 - DNA, 25 bp, Homo sapien
gctgctctgcgagacaaaagctaat

SEQ ID NO: 4344279 - DNA, 25 bp, Homo sapien
tggttcccatctaaaacagctgctc

SEQ ID NO: 4344280 - DNA, 25 bp, Homo sapien
caagagcatgacaccttggttccca

SEQ ID NO: 4344281 - DNA, 25 bp, Homo sapien
aatagaggccgagagggcattcctg

SEQ ID NO: 4344282 - DNA, 25 bp, Homo sapien
aaagtctcaaaagggctacgctggt

SEQ ID NO: 4344283 - DNA, 25 bp, Homo sapien
tacgctggtcttctgaacggaaacc

SEQ ID NO: 4344284 - DNA, 25 bp, Homo sapien
gagaagacccatttgtcgacgaggt

SEQ ID NO: 4344285 - DNA, 25 bp, Homo sapien
tggccttgggcctgcccaggccgag

SEQ ID NO: 4344286 - DNA, 25 bp, Homo sapien
agaccgtggccttgggcctgcccag

SEQ ID NO: 4344287 - DNA, 25 bp, Homo sapien
ctagaccgtggccttgggcctgccc

SEQ ID NO: 4344288 - DNA, 25 bp, Homo sapien
ccttgggcctgcccaggccgaggct

SEQ ID NO: 4344289 - DNA, 25 bp, Homo sapien
gatcctgcaggttgatagtgcttcc

SEQ ID NO: 4344290 - DNA, 25 bp, Homo sapien
atcctgcaggttgatagtgcttcct

SEQ ID NO: 4344291 - DNA, 25 bp, Homo sapien
ctggaggacgtagacgggcaggtcc

SEQ ID NO: 4344292 - DNA, 25 bp, Homo sapien
tggaggacgtagacgggcaggtcca

SEQ ID NO: 4344293 - DNA, 25 bp, Homo sapien
gcaggacaccttcgccggaggggtc

SEQ ID NO: 4344294 - DNA, 25 bp, Homo sapien
ggacaccttcgccggaggggtcatc

SEQ ID NO: 4344295 - DNA, 25 bp, Homo sapien
caggacaccttcgccggaggggtca

SEQ ID NO: 4344296 - DNA, 25 bp, Homo sapien
aggacaccttcgccggaggggtcat

SEQ ID NO: 4344297 - DNA, 25 bp, Homo sapien
caagactacgctagctggtaaggga

SEQ ID NO: 4344298 - DNA, 25 bp, Homo sapien
tgtattccaagggaggcccgaggac

SEQ ID NO: 4344299 - DNA, 25 bp, Homo sapien
tcagagcttgagcagatgcaggaca

SEQ ID NO: 4344300 - DNA, 25 bp, Homo sapien
tacttgctcctgttctgccggtggc

SEQ ID NO: 4344301 - DNA, 25 bp, Homo sapien
acaaccaactgttctggcttgcatg

SEQ ID NO: 4344302 - DNA, 25 bp, Homo sapien
cagctggacctggacgccctgcgcc

SEQ ID NO: 4344303 - DNA, 25 bp, Homo sapien
ctggtcctggccgtcctccgctggg

SEQ ID NO: 4344304 - DNA, 25 bp, Homo sapien
tccgctgggcaccacgaggctccca

SEQ ID NO: 4344305 - DNA, 25 bp, Homo sapien
cttttatttttctctgagtagactg

SEQ ID NO: 4344306 - DNA, 25 bp, Homo sapien
ttatttttctctgagtagactgtga

SEQ ID NO: 4344307 - DNA, 25 bp, Homo sapien
tttttctctgagtagactgtgaggc

SEQ ID NO: 4344308 - DNA, 25 bp, Homo sapien
tttctctgagtagactgtgaggctc

SEQ ID NO: 4344309 - DNA, 25 bp, Homo sapien
gaatgctagtcccaacctcggaagg

SEQ ID NO: 4344310 - DNA, 25 bp, Homo sapien
tgtgggatccagctatgaacggctt

SEQ ID NO: 4344311 - DNA, 25 bp, Homo sapien
caactgggtgcacaaaccttgggtc

SEQ ID NO: 4344312 - DNA, 25 bp, Homo sapien
caggaatcccaagcgcaactgagga

SEQ ID NO: 4344313 - DNA, 25 bp, Homo sapien
gtacctcaagcagaacatctcagcg

SEQ ID NO: 4344314 - DNA, 25 bp, Homo sapien
tgtacgccacgctctaagttaccta

SEQ ID NO: 4344315 - DNA, 25 bp, Homo sapien
aaatgtgtgctagaatgtatgtgcc

SEQ ID NO: 4344316 - DNA, 25 bp, Homo sapien
gattcaatgccaaatgtgtacgcca

SEQ ID NO: 4344317 - DNA, 25 bp, Homo sapien
ccaagggtggaagatcagaggtcac

SEQ ID NO: 4344318 - DNA, 25 bp, Homo sapien
caggtgccccgagaaaggatctgca

SEQ ID NO: 4344319 - DNA, 25 bp, Homo sapien
taaagggcgccatggcatcaaatgc

SEQ ID NO: 4344320 - DNA, 25 bp, Homo sapien
tcacgataaccatgaagccctgggt

SEQ ID NO: 4344321 - DNA, 25 bp, Homo sapien
cctttgcttagggatgtgctgctca

SEQ ID NO: 4344322 - DNA, 25 bp, Homo sapien
gcataaggaacccacaatgatctct

SEQ ID NO: 4344323 - DNA, 25 bp, Homo sapien
tgctgctcacacgacaggtcctttg

SEQ ID NO: 4344324 - DNA, 25 bp, Homo sapien
tcttccagagtaaacccacatgacc

SEQ ID NO: 4344325 - DNA, 25 bp, Homo sapien
cagtgtctccaagaatgcgagtcag

SEQ ID NO: 4344326 - DNA, 25 bp, Homo sapien
tccaagaatgcgagtcagacagcaa

SEQ ID NO: 4344327 - DNA, 25 bp, Homo sapien
gcaacggccagcatccacacggcag

SEQ ID NO: 4344328 - DNA, 25 bp, Homo sapien
atgcgagtcagacagcaacggccag

SEQ ID NO: 4344329 - DNA, 25 bp, Homo sapien
gctaaagccagaggctaggcaacct

SEQ ID NO: 4344330 - DNA, 25 bp, Homo sapien
gaccctacgactgatgctttgaatg

SEQ ID NO: 4344331 - DNA, 25 bp, Homo sapien
ttggctctacaaatcatcgctctgg

SEQ ID NO: 4344332 - DNA, 25 bp, Homo sapien
cagccctgggctaagtattttgcaa

SEQ ID NO: 4344333 - DNA, 25 bp, Homo sapien
tgtggagaaggaccatggcgctcac

SEQ ID NO: 4344334 - DNA, 25 bp, Homo sapien
tgccatgcagactgaaagggagccg

SEQ ID NO: 4344335 - DNA, 25 bp, Homo sapien
caagaaaggcgtcaaagttaacaca

SEQ ID NO: 4344336 - DNA, 25 bp, Homo sapien
tcaatcacctgacggcaacataggg

SEQ ID NO: 4344337 - DNA, 25 bp, Homo sapien
cgagggactgctgggcaaaattctc

SEQ ID NO: 4344338 - DNA, 25 bp, Homo sapien
gctccaaccttggatgcgtaagggt

SEQ ID NO: 4344339 - DNA, 25 bp, Homo sapien
ccaaccttggatgcgtaagggtcag

SEQ ID NO: 4344340 - DNA, 25 bp, Homo sapien
tggagggagccacgagggactgctg

SEQ ID NO: 4344341 - DNA, 25 bp, Homo sapien
ccttgtgagcaccaaccggctgtgt

SEQ ID NO: 4344342 - DNA, 25 bp, Homo sapien
ttttccacacgcaaagatgaccagg

SEQ ID NO: 4344343 - DNA, 25 bp, Homo sapien
gcctctgctgatacactctgggaaa

SEQ ID NO: 4344344 - DNA, 25 bp, Homo sapien
tgaacgtgcagggaagtcactggct

SEQ ID NO: 4344345 - DNA, 25 bp, Homo sapien
ggtgccctcattacacttcactgtg

SEQ ID NO: 4344346 - DNA, 25 bp, Homo sapien
tatttccatacagggtgcacctctc

SEQ ID NO: 4344347 - DNA, 25 bp, Homo sapien
tcctagacaacacacagcggagagt

SEQ ID NO: 4344348 - DNA, 25 bp, Homo sapien
tagacagcagaaaggtatacatacc

SEQ ID NO: 4344349 - DNA, 25 bp, Homo sapien
taagaactgacgtgtgcactggctc

SEQ ID NO: 4344350 - DNA, 25 bp, Homo sapien
gcacagcgtgggttaacatacataa

SEQ ID NO: 4344351 - DNA, 25 bp, Homo sapien
tagcctgaatccaaagcacagcgtg

SEQ ID NO: 4344352 - DNA, 25 bp, Homo sapien
aactgaaggattggccacagctgga

SEQ ID NO: 4344353 - DNA, 25 bp, Homo sapien
acagtctgtgctaaccctgtggtgg

SEQ ID NO: 4344354 - DNA, 25 bp, Homo sapien
acagtgagtctcaggtgggcttccc

SEQ ID NO: 4344355 - DNA, 25 bp, Homo sapien
tgctgtcacatgctgggagaagttg

SEQ ID NO: 4344356 - DNA, 25 bp, Homo sapien
tgtctgtctaactgggtgccctggg

SEQ ID NO: 4344357 - DNA, 25 bp, Homo sapien
gacatgtcccagctataagtaagaa

SEQ ID NO: 4344358 - DNA, 25 bp, Homo sapien
gaatgacagatttagagtaccaccg

SEQ ID NO: 4344359 - DNA, 25 bp, Homo sapien
ccacctgcagcggagttttaccaac

SEQ ID NO: 4344360 - DNA, 25 bp, Homo sapien
cagtatctggtcacaatggttgcca

SEQ ID NO: 4344361 - DNA, 25 bp, Homo sapien
tgtgaactgttgaggtgtcccttcc

SEQ ID NO: 4344362 - DNA, 25 bp, Homo sapien
tatagatagtactccaaagcaatgt

SEQ ID NO: 4344363 - DNA, 25 bp, Homo sapien
tctaccaggttcaataaaggcatcc

SEQ ID NO: 4344364 - DNA, 25 bp, Homo sapien
catacactatagtgaaacactggct

SEQ ID NO: 4344365 - DNA, 25 bp, Homo sapien
tgacactggtgtttgaacgcttaac

SEQ ID NO: 4344366 - DNA, 25 bp, Homo sapien
gatcaggccccaaggccattcagca

SEQ ID NO: 4344367 - DNA, 25 bp, Homo sapien
gatgcttgaggccataggttaccag

SEQ ID NO: 4344368 - DNA, 25 bp, Homo sapien
agtttggctccatgtacacgtacct

SEQ ID NO: 4344369 - DNA, 25 bp, Homo sapien
ttttccttggctagttgaatggctc

SEQ ID NO: 4344370 - DNA, 25 bp, Homo sapien
ggctcggtaatcagttcttgctgag

SEQ ID NO: 4344371 - DNA, 25 bp, Homo sapien
gaatggctcggtaatcagttcttgc

SEQ ID NO: 4344372 - DNA, 25 bp, Homo sapien
ggctagttgaatggctcggtaatca

SEQ ID NO: 4344373 - DNA, 25 bp, Homo sapien
taagcctgcttctgggacatatccg

SEQ ID NO: 4344374 - DNA, 25 bp, Homo sapien
tgtactcagagaagcgaggtagccc

SEQ ID NO: 4344375 - DNA, 25 bp, Homo sapien
caaagctcgtagcatacctgggacc

SEQ ID NO: 4344376 - DNA, 25 bp, Homo sapien
tacatccacttgtggcgagggccga

SEQ ID NO: 4344377 - DNA, 25 bp, Homo sapien
tgtagtccagggctgcgtccttttg

SEQ ID NO: 4344378 - DNA, 25 bp, Homo sapien
cgtctgcatagaaaggattaatcca

SEQ ID NO: 4344379 - DNA, 25 bp, Homo sapien
ggactccaaaggacctcagaaagca

SEQ ID NO: 4344380 - DNA, 25 bp, Homo sapien
gaccgagtatgagagaagtgaccta

SEQ ID NO: 4344381 - DNA, 25 bp, Homo sapien
ggcgagaaggcgagtccggctccac

SEQ ID NO: 4344382 - DNA, 25 bp, Homo sapien
tgctggactgggcaacgtggactgg

SEQ ID NO: 4344383 - DNA, 25 bp, Homo sapien
tagaagttgccagtgcctgcactga

SEQ ID NO: 4344384 - DNA, 25 bp, Homo sapien
tgctcctgggcgagaaggcgagtcc

SEQ ID NO: 4344385 - DNA, 25 bp, Homo sapien
caggattccggagttcagagcctca

SEQ ID NO: 4344386 - DNA, 25 bp, Homo sapien
taagttactattggaggtcaaagcc

SEQ ID NO: 4344387 - DNA, 25 bp, Homo sapien
caaagccagtgggtcgtcactcaag

SEQ ID NO: 4344388 - DNA, 25 bp, Homo sapien
ttggagccagcagttccgggacact

SEQ ID NO: 4344389 - DNA, 25 bp, Homo sapien
tagcattggcaggtgtgtcagagaa

SEQ ID NO: 4344390 - DNA, 25 bp, Homo sapien
gcaggtgtgtcagagaagagtgcag

SEQ ID NO: 4344391 - DNA, 25 bp, Homo sapien
ccactagcattggcaggtgtgtcag

SEQ ID NO: 4344392 - DNA, 25 bp, Homo sapien
ctagcattggcaggtgtgtcagaga

SEQ ID NO: 4344393 - DNA, 25 bp, Homo sapien
agtaagagaactcggagcttctagc

SEQ ID NO: 4344394 - DNA, 25 bp, Homo sapien
tgggctgctgagttcactgctggga

SEQ ID NO: 4344395 - DNA, 25 bp, Homo sapien
cggagcttctagctgaggtaagaga

SEQ ID NO: 4344396 - DNA, 25 bp, Homo sapien
gagaactcggagcttctagctgagg

SEQ ID NO: 4344397 - DNA, 25 bp, Homo sapien
taaatatcccttagtaccaatgaag

SEQ ID NO: 4344398 - DNA, 25 bp, Homo sapien
taatctcagtgcaaatgatacccac

SEQ ID NO: 4344399 - DNA, 25 bp, Homo sapien
tagcagagcatctggcaaaacagtc

SEQ ID NO: 4344400 - DNA, 25 bp, Homo sapien
gggccagatattaacacaatcacta

SEQ ID NO: 4344401 - DNA, 25 bp, Homo sapien
caaactctgtgcgaggcatggaggc

SEQ ID NO: 4344402 - DNA, 25 bp, Homo sapien
ccaaagccggtgctctgctgtggtg

SEQ ID NO: 4344403 - DNA, 25 bp, Homo sapien
tgtcccttgccaacgcggcagctgt

SEQ ID NO: 4344404 - DNA, 25 bp, Homo sapien
agctgtgacacagctgcgccccaaa

SEQ ID NO: 4344405 - DNA, 25 bp, Homo sapien
ctccccatgggggccgtggaaagtg

SEQ ID NO: 4344406 - DNA, 25 bp, Homo sapien
agggaagcagctccccatgggggcc

SEQ ID NO: 4344407 - DNA, 25 bp, Homo sapien
catgggggccgtggaaagtgcagac

SEQ ID NO: 4344408 - DNA, 25 bp, Homo sapien
cccatgggggccgtggaaagtgcag

SEQ ID NO: 4344409 - DNA, 25 bp, Homo sapien
ccggctgtgctgtctgaccatgtgc

SEQ ID NO: 4344410 - DNA, 25 bp, Homo sapien
ggcgccggctgtgctgtctgaccat

SEQ ID NO: 4344411 - DNA, 25 bp, Homo sapien
ggctgtgctgtctgaccatgtgcgc

SEQ ID NO: 4344412 - DNA, 25 bp, Homo sapien
cgccggctgtgctgtctgaccatgt

SEQ ID NO: 4344413 - DNA, 25 bp, Homo sapien
acgagcggagaacctcgcgcaacat

SEQ ID NO: 4344414 - DNA, 25 bp, Homo sapien
gggcaacggcttttcggagcaccca

SEQ ID NO: 4344415 - DNA, 25 bp, Homo sapien
tcttagagtgaatgtacagactgct

SEQ ID NO: 4344416 - DNA, 25 bp, Homo sapien
tgaagagtctgttgcaggtagaaac

SEQ ID NO: 4344417 - DNA, 25 bp, Homo sapien
catggtacacagggtaccctggaac

SEQ ID NO: 4344418 - DNA, 25 bp, Homo sapien
cagctgggggtcctgagcacggatt

SEQ ID NO: 4344419 - DNA, 25 bp, Homo sapien
agctgggggtcctgagcacggattt

SEQ ID NO: 4344420 - DNA, 25 bp, Homo sapien
ctcgaacggctttgtgcctaggtgg

SEQ ID NO: 4344421 - DNA, 25 bp, Homo sapien
agggcaggtaaacctccggtcatcg

SEQ ID NO: 4344422 - DNA, 25 bp, Homo sapien
ccacagccctcgacagggcaggtaa

SEQ ID NO: 4344423 - DNA, 25 bp, Homo sapien
cttccacaggacactcgaacggctt

SEQ ID NO: 4344424 - DNA, 25 bp, Homo sapien
ttctgtgccttagaagtttggacat

SEQ ID NO: 4344425 - DNA, 25 bp, Homo sapien
agcaggaaaagagctcttgttccct

SEQ ID NO: 4344426 - DNA, 25 bp, Homo sapien
ggtgaattttcagccgacaggcttt

SEQ ID NO: 4344427 - DNA, 25 bp, Homo sapien
ggaaaagagctcttgttccctgaag

SEQ ID NO: 4344428 - DNA, 25 bp, Homo sapien
tttcagccgacaggctttatcatac

SEQ ID NO: 4344429 - DNA, 25 bp, Homo sapien
tctcctccgacagaaacattcaggg

SEQ ID NO: 4344430 - DNA, 25 bp, Homo sapien
acgctggccacctgttgcaacatga

SEQ ID NO: 4344431 - DNA, 25 bp, Homo sapien
agagaaagtcctccgttcacagcca

SEQ ID NO: 4344432 - DNA, 25 bp, Homo sapien
gacttggagatggagcaaccgataa

SEQ ID NO: 4344433 - DNA, 25 bp, Homo sapien
ggcttgctaaggtctggcaggcccc

SEQ ID NO: 4344434 - DNA, 25 bp, Homo sapien
aatacaaatcccgaagagcctgcgt

SEQ ID NO: 4344435 - DNA, 25 bp, Homo sapien
ccatcggaatccctgcggcagggca

SEQ ID NO: 4344436 - DNA, 25 bp, Homo sapien
agggcagggccaagatctcaaatcg

SEQ ID NO: 4344437 - DNA, 25 bp, Homo sapien
acagccctccagtgggcacttgaag

SEQ ID NO: 4344438 - DNA, 25 bp, Homo sapien
taggacgttgtgaaggcccaaccac

SEQ ID NO: 4344439 - DNA, 25 bp, Homo sapien
tagaccgtagtgaacttcttgccac

SEQ ID NO: 4344440 - DNA, 25 bp, Homo sapien
tgccgcttgagcttgtaggacgttg

SEQ ID NO: 4344441 - DNA, 25 bp, Homo sapien
ctcggggcagcggtagccgggcgtg

SEQ ID NO: 4344442 - DNA, 25 bp, Homo sapien
accaagaaagagtcgccgtcgctgt

SEQ ID NO: 4344443 - DNA, 25 bp, Homo sapien
ggtcgagacgcaccagcaggtcctg

SEQ ID NO: 4344444 - DNA, 25 bp, Homo sapien
gctcgccaggttgacacgggagcca

SEQ ID NO: 4344445 - DNA, 25 bp, Homo sapien
aggctcggcctcctgtgatccggca

SEQ ID NO: 4344446 - DNA, 25 bp, Homo sapien
gccccgggacgcgatccgcgccaag

SEQ ID NO: 4344447 - DNA, 25 bp, Homo sapien
aagccccggcgtagagtccggctcg

SEQ ID NO: 4344448 - DNA, 25 bp, Homo sapien
cttggtcccagcgacggcgtcggag

SEQ ID NO: 4344449 - DNA, 25 bp, Homo sapien
cgtcggagcagcttcggacgcagag

SEQ ID NO: 4344450 - DNA, 25 bp, Homo sapien
tattgttcctagaccattcagtaga

SEQ ID NO: 4344451 - DNA, 25 bp, Homo sapien
tatatcagtttatgccgaaaacata

SEQ ID NO: 4344452 - DNA, 25 bp, Homo sapien
gaatagtcatttcaataatggcggc

SEQ ID NO: 4344453 - DNA, 25 bp, Homo sapien
ataatggcggcactgggacaactgg

SEQ ID NO: 4344454 - DNA, 25 bp, Homo sapien
ggaagggacgcagatgacacacgca

SEQ ID NO: 4344455 - DNA, 25 bp, Homo sapien
acgcatgcacgctcagatttatttg

SEQ ID NO: 4344456 - DNA, 25 bp, Homo sapien
acacgcatgcacgctcagatttatt

SEQ ID NO: 4344457 - DNA, 25 bp, Homo sapien
caggggaagggacgcagatgacaca

SEQ ID NO: 4344458 - DNA, 25 bp, Homo sapien
caaggaaagcatacagttcccaggg

SEQ ID NO: 4344459 - DNA, 25 bp, Homo sapien
tgccagcaaggaaagcatacagttc

SEQ ID NO: 4344460 - DNA, 25 bp, Homo sapien
ggaaagcatacagttcccagggacc

SEQ ID NO: 4344461 - DNA, 25 bp, Homo sapien
cagcaaggaaagcatacagttccca

SEQ ID NO: 4344462 - DNA, 25 bp, Homo sapien
ccagggaagtagcttgctccctggc

SEQ ID NO: 4344463 - DNA, 25 bp, Homo sapien
gcagcagacagcaggttggcatgca

SEQ ID NO: 4344464 - DNA, 25 bp, Homo sapien
gggccagggaagtagcttgctccct

SEQ ID NO: 4344465 - DNA, 25 bp, Homo sapien
cagcaggttggcatgcaggggccag

SEQ ID NO: 4344466 - DNA, 25 bp, Homo sapien
ggacccagtcattaccgggctatgg

SEQ ID NO: 4344467 - DNA, 25 bp, Homo sapien
tggtctgttgcacgcccagctaaga

SEQ ID NO: 4344468 - DNA, 25 bp, Homo sapien
gaatgagattcatgagccctggccc

SEQ ID NO: 4344469 - DNA, 25 bp, Homo sapien
gaaaaacgacggctctcaagaagcc

SEQ ID NO: 4344470 - DNA, 25 bp, Homo sapien
aatggactttgacagccttcagggc

SEQ ID NO: 4344471 - DNA, 25 bp, Homo sapien
cagacagacagagttgcatggaggc

SEQ ID NO: 4344472 - DNA, 25 bp, Homo sapien
gagcttgaccagtgttcaccgcagg

SEQ ID NO: 4344473 - DNA, 25 bp, Homo sapien
tcatcccagccggagagagcttgac

SEQ ID NO: 4344474 - DNA, 25 bp, Homo sapien
cagagctgcagggcctgctggagca

SEQ ID NO: 4344475 - DNA, 25 bp, Homo sapien
agagctgcagggcctgctggagcac

SEQ ID NO: 4344476 - DNA, 25 bp, Homo sapien
tcagagctgcagggcctgctggagc

SEQ ID NO: 4344477 - DNA, 25 bp, Homo sapien
gtctggcagatgatctcataggcct

SEQ ID NO: 4344478 - DNA, 25 bp, Homo sapien
tggtctggcagatgatctcataggc

SEQ ID NO: 4344479 - DNA, 25 bp, Homo sapien
catggtctggcagatgatctcatag

SEQ ID NO: 4344480 - DNA, 25 bp, Homo sapien
tgcatggtctggcagatgatctcat

SEQ ID NO: 4344481 - DNA, 25 bp, Homo sapien
acgaggccgaatcccccgttgatca

SEQ ID NO: 4344482 - DNA, 25 bp, Homo sapien
accattggagacatcccagctgagc

SEQ ID NO: 4344483 - DNA, 25 bp, Homo sapien
gacatcccagctgagcatcagcctg

SEQ ID NO: 4344484 - DNA, 25 bp, Homo sapien
ctccggggtaccgtccagcacgagg

SEQ ID NO: 4344485 - DNA, 25 bp, Homo sapien
ggcgacccaggtggctccgcgacag

SEQ ID NO: 4344486 - DNA, 25 bp, Homo sapien
aggtggctccgcgacaggcatctcc

SEQ ID NO: 4344487 - DNA, 25 bp, Homo sapien
ccctccgttgtgaagggcgacccag

SEQ ID NO: 4344488 - DNA, 25 bp, Homo sapien
gcatctcccacgaagttctgcacag

SEQ ID NO: 4344489 - DNA, 25 bp, Homo sapien
ctgcggaaatagagacgcctctgct

SEQ ID NO: 4344490 - DNA, 25 bp, Homo sapien
aatagagacgcctctgctcatcacc

SEQ ID NO: 4344491 - DNA, 25 bp, Homo sapien
cggaaatagagacgcctctgctcat

SEQ ID NO: 4344492 - DNA, 25 bp, Homo sapien
aaatagagacgcctctgctcatcac

SEQ ID NO: 4344493 - DNA, 25 bp, Homo sapien
cgtcgtaaatgttggaggtctccct

SEQ ID NO: 4344494 - DNA, 25 bp, Homo sapien
gccgctcacgtcatggtgatctcgg

SEQ ID NO: 4344495 - DNA, 25 bp, Homo sapien
tgatctcggctcaggaccaccggcg

SEQ ID NO: 4344496 - DNA, 25 bp, Homo sapien
ctaaaggggctgtcggtgccgctca

SEQ ID NO: 4344497 - DNA, 25 bp, Homo sapien
ccacgcggcccttctggtctgagta

SEQ ID NO: 4344498 - DNA, 25 bp, Homo sapien
caggcgatggcctggttaatggcca

SEQ ID NO: 4344499 - DNA, 25 bp, Homo sapien
ggcctggttaatggccacagcgatg

SEQ ID NO: 4344500 - DNA, 25 bp, Homo sapien
tctggtctgagtacaggatccttgc

SEQ ID NO: 4344501 - DNA, 25 bp, Homo sapien
gcggcctcccggatccagcggatgt

SEQ ID NO: 4344502 - DNA, 25 bp, Homo sapien
gcctcccggatccagcggatgttgt

SEQ ID NO: 4344503 - DNA, 25 bp, Homo sapien
gtgcctggcggcctcccggatccag

SEQ ID NO: 4344504 - DNA, 25 bp, Homo sapien
ccggatccagcggatgttgtccatg

SEQ ID NO: 4344505 - DNA, 25 bp, Homo sapien
catggccagcagcagggtgtaaggg

SEQ ID NO: 4344506 - DNA, 25 bp, Homo sapien
cgaacatggccagcagcagggtgta

SEQ ID NO: 4344507 - DNA, 25 bp, Homo sapien
tggccagcagcagggtgtaagggcc

SEQ ID NO: 4344508 - DNA, 25 bp, Homo sapien
aacatggccagcagcagggtgtaag

SEQ ID NO: 4344509 - DNA, 25 bp, Homo sapien
aaagctgcagagagaccggggtaag

SEQ ID NO: 4344510 - DNA, 25 bp, Homo sapien
agctgcagagagaccggggtaagaa

SEQ ID NO: 4344511 - DNA, 25 bp, Homo sapien
tgcaggaaagctgcagagagaccgg

SEQ ID NO: 4344512 - DNA, 25 bp, Homo sapien
ggaaagctgcagagagaccggggta

SEQ ID NO: 4344513 - DNA, 25 bp, Homo sapien
ggctttctgtcactcgcagccagag

SEQ ID NO: 4344514 - DNA, 25 bp, Homo sapien
tctgtcactcgcagccagaggtcct

SEQ ID NO: 4344515 - DNA, 25 bp, Homo sapien
gccagaggtcctcactggcagagcc

SEQ ID NO: 4344516 - DNA, 25 bp, Homo sapien
tcagccgctttgaggggctttctgt

SEQ ID NO: 4344517 - DNA, 25 bp, Homo sapien
tccagcacagatgtggccagttcgt

SEQ ID NO: 4344518 - DNA, 25 bp, Homo sapien
cagcggaaaggcccaaatccctggg

SEQ ID NO: 4344519 - DNA, 25 bp, Homo sapien
gcacacccagcggaaaggcccaaat

SEQ ID NO: 4344520 - DNA, 25 bp, Homo sapien
tgtggccagttcgtctgtgaccgcc

SEQ ID NO: 4344521 - DNA, 25 bp, Homo sapien
agggtagcggaactctgtcctgcca

SEQ ID NO: 4344522 - DNA, 25 bp, Homo sapien
atgtgctgcacataggaagggtagc

SEQ ID NO: 4344523 - DNA, 25 bp, Homo sapien
cataggaagggtagcggaactctgt

SEQ ID NO: 4344524 - DNA, 25 bp, Homo sapien
ctgcacataggaagggtagcggaac

SEQ ID NO: 4344525 - DNA, 25 bp, Homo sapien
gaggaaggcattgccgtagtcccag

SEQ ID NO: 4344526 - DNA, 25 bp, Homo sapien
gcattgccgtagtcccagaagaaga

SEQ ID NO: 4344527 - DNA, 25 bp, Homo sapien
gccaacctgttgatggctgagactt

SEQ ID NO: 4344528 - DNA, 25 bp, Homo sapien
agaagaacttctcctcggccaacct

SEQ ID NO: 4344529 - DNA, 25 bp, Homo sapien
gttgtggcaggatgtctgatctgac

SEQ ID NO: 4344530 - DNA, 25 bp, Homo sapien
gctgcacagggtagtagccgccatt

SEQ ID NO: 4344531 - DNA, 25 bp, Homo sapien
tagccgccattgaacgggttgtggc

SEQ ID NO: 4344532 - DNA, 25 bp, Homo sapien
tgtccaattcgtggaccaggcgctc

SEQ ID NO: 4344533 - DNA, 25 bp, Homo sapien
ttgccatggtaaccaaggctgagca

SEQ ID NO: 4344534 - DNA, 25 bp, Homo sapien
tgcccctcagcaccgtgggcgaagc

SEQ ID NO: 4344535 - DNA, 25 bp, Homo sapien
cgactgcccctcagcaccgtgggcg

SEQ ID NO: 4344536 - DNA, 25 bp, Homo sapien
ccctcagcaccgtgggcgaagctct

SEQ ID NO: 4344537 - DNA, 25 bp, Homo sapien
cctcagcaccgtgggcgaagctctg

SEQ ID NO: 4344538 - DNA, 25 bp, Homo sapien
gtccggagttgagcttggagctgta

SEQ ID NO: 4344539 - DNA, 25 bp, Homo sapien
caagctgccccatgggggtcctctt

SEQ ID NO: 4344540 - DNA, 25 bp, Homo sapien
ggtcctcttgtggtctcctgctgcc

SEQ ID NO: 4344541 - DNA, 25 bp, Homo sapien
gtgtccggagttgagcttggagctg

SEQ ID NO: 4344542 - DNA, 25 bp, Homo sapien
agcggtccaagctgtcagtcacttc

SEQ ID NO: 4344543 - DNA, 25 bp, Homo sapien
tgtggcgtttctcaagggctgcttt

SEQ ID NO: 4344544 - DNA, 25 bp, Homo sapien
cctgtggcgtttctcaagggctgct

SEQ ID NO: 4344545 - DNA, 25 bp, Homo sapien
gcctctggatgcagcggtccaagct

SEQ ID NO: 4344546 - DNA, 25 bp, Homo sapien
ccgccgagcccagaggtgacaaaga

SEQ ID NO: 4344547 - DNA, 25 bp, Homo sapien
gtcctcgatgcccaggtaccgacgt

SEQ ID NO: 4344548 - DNA, 25 bp, Homo sapien
taccgacgtgcagcattcaacacgg

SEQ ID NO: 4344549 - DNA, 25 bp, Homo sapien
gtgacaaagaccttcccagccaagt

SEQ ID NO: 4344550 - DNA, 25 bp, Homo sapien
gggaccgatgtagcagtagctacct

SEQ ID NO: 4344551 - DNA, 25 bp, Homo sapien
acagtgccatgaacgattccctggg

SEQ ID NO: 4344552 - DNA, 25 bp, Homo sapien
tgtagcagtagctacctgctgtcat

SEQ ID NO: 4344553 - DNA, 25 bp, Homo sapien
cacagtgccatgaacgattccctgg

SEQ ID NO: 4344554 - DNA, 25 bp, Homo sapien
tctcatactccgtccgggaggagta

SEQ ID NO: 4344555 - DNA, 25 bp, Homo sapien
ggcaaagagcttctcatactccgtc

SEQ ID NO: 4344556 - DNA, 25 bp, Homo sapien
aaagagcttctcatactccgtccgg

SEQ ID NO: 4344557 - DNA, 25 bp, Homo sapien
tccgggaggagtagttgggaatgac

SEQ ID NO: 4344558 - DNA, 25 bp, Homo sapien
cctctgtcatcttcgacaagtagaa

SEQ ID NO: 4344559 - DNA, 25 bp, Homo sapien
tcccattggtgatgacgagccgtgg

SEQ ID NO: 4344560 - DNA, 25 bp, Homo sapien
catcccattggtgatgacgagccgt

SEQ ID NO: 4344561 - DNA, 25 bp, Homo sapien
tgggaaagaggccaagtgggtgccc

SEQ ID NO: 4344562 - DNA, 25 bp, Homo sapien
ctgagcccagttgctgaacacctgc

SEQ ID NO: 4344563 - DNA, 25 bp, Homo sapien
agttgctgaacacctgcccatttcc

SEQ ID NO: 4344564 - DNA, 25 bp, Homo sapien
ttcctccataggtcaccagctcctg

SEQ ID NO: 4344565 - DNA, 25 bp, Homo sapien
gcccatttcctccataggtcaccag

SEQ ID NO: 4344566 - DNA, 25 bp, Homo sapien
ggccacggcaggatccaggttgttc

SEQ ID NO: 4344567 - DNA, 25 bp, Homo sapien
tgttcataatcatgtgcatgatggc

SEQ ID NO: 4344568 - DNA, 25 bp, Homo sapien
cacggcaggatccaggttgttcata

SEQ ID NO: 4344569 - DNA, 25 bp, Homo sapien
cggcagccactttcgtctggcaggg

SEQ ID NO: 4344570 - DNA, 25 bp, Homo sapien
tcaatgtcggggcaaaaccggtaca

SEQ ID NO: 4344571 - DNA, 25 bp, Homo sapien
gcagctcctggacatccggggggaa

SEQ ID NO: 4344572 - DNA, 25 bp, Homo sapien
tgtgtccgtacagttgcagctcctg

SEQ ID NO: 4344573 - DNA, 25 bp, Homo sapien
aaccggtacatgtagatgtgtccgt

SEQ ID NO: 4344574 - DNA, 25 bp, Homo sapien
tactccaagggtgtcctgacattca

SEQ ID NO: 4344575 - DNA, 25 bp, Homo sapien
aaggacataacccagcaaagcccag

SEQ ID NO: 4344576 - DNA, 25 bp, Homo sapien
agggagccgcccgtagccctcagaa

SEQ ID NO: 4344577 - DNA, 25 bp, Homo sapien
tacatatgttaaagatcaacgaaac

SEQ ID NO: 4344578 - DNA, 25 bp, Homo sapien
ggctgggggtcctgacaggggcatg

SEQ ID NO: 4344579 - DNA, 25 bp, Homo sapien
tcctgacaggggcatggggcacccc

SEQ ID NO: 4344580 - DNA, 25 bp, Homo sapien
gtcctgacaggggcatggggcaccc

SEQ ID NO: 4344581 - DNA, 25 bp, Homo sapien
tctgcatcttgatgatgaggagatg

SEQ ID NO: 4344582 - DNA, 25 bp, Homo sapien
gggatctgcatcttgatgatgagga

SEQ ID NO: 4344583 - DNA, 25 bp, Homo sapien
ccatgtgacactgaaccggacacag

SEQ ID NO: 4344584 - DNA, 25 bp, Homo sapien
acagagtgtagagcccctcctcctg

SEQ ID NO: 4344585 - DNA, 25 bp, Homo sapien
tgtacccagtgcgagcctgaccagc

SEQ ID NO: 4344586 - DNA, 25 bp, Homo sapien
ccagtgcgagcctgaccagccctgt

SEQ ID NO: 4344587 - DNA, 25 bp, Homo sapien
tgggtgtacccagtgcgagcctgac

SEQ ID NO: 4344588 - DNA, 25 bp, Homo sapien
ggtgtacccagtgcgagcctgacca

SEQ ID NO: 4344589 - DNA, 25 bp, Homo sapien
gtgacacgatgaggcacaagctcca

SEQ ID NO: 4344590 - DNA, 25 bp, Homo sapien
ttgtgggtgacacgatgaggcacaa

SEQ ID NO: 4344591 - DNA, 25 bp, Homo sapien
tgggtgacacgatgaggcacaagct

SEQ ID NO: 4344592 - DNA, 25 bp, Homo sapien
cagagaagttgtgggtgacacgatg

SEQ ID NO: 4344593 - DNA, 25 bp, Homo sapien
ggacctccagaaagtaccgtgagaa

SEQ ID NO: 4344594 - DNA, 25 bp, Homo sapien
tatcggaatcacatgggctgaaggc

SEQ ID NO: 4344595 - DNA, 25 bp, Homo sapien
caggtactgctggagtgtcccgagt

SEQ ID NO: 4344596 - DNA, 25 bp, Homo sapien
tgtgattggacaggcctaggccaca

SEQ ID NO: 4344597 - DNA, 25 bp, Homo sapien
cagaggaggccttgcaacatgacgt

SEQ ID NO: 4344598 - DNA, 25 bp, Homo sapien
tgcagcaatcgcatggccttgagca

SEQ ID NO: 4344599 - DNA, 25 bp, Homo sapien
cacccggtatcttgattggcagagg

SEQ ID NO: 4344600 - DNA, 25 bp, Homo sapien
tctagtgtggtgtttcacccggtat

SEQ ID NO: 4344601 - DNA, 25 bp, Homo sapien
gacctctacaagatggacttcctgc

SEQ ID NO: 4344602 - DNA, 25 bp, Homo sapien
gggcaagtgcctttccgacaagacc

SEQ ID NO: 4344603 - DNA, 25 bp, Homo sapien
ggagcccttcaacgagcactgggag

SEQ ID NO: 4344604 - DNA, 25 bp, Homo sapien
gctacgacgtcgtgggcaagttcga

SEQ ID NO: 4344605 - DNA, 25 bp, Homo sapien
tgggacagatgctccaatgggccac

SEQ ID NO: 4344606 - DNA, 25 bp, Homo sapien
cagccagttttaggtcgggtgcctc

SEQ ID NO: 4344607 - DNA, 25 bp, Homo sapien
gaagtcgggcgataaatgctccagc

SEQ ID NO: 4344608 - DNA, 25 bp, Homo sapien
tattcccagtggcaagggagtctgg

SEQ ID NO: 4344609 - DNA, 25 bp, Homo sapien
agtcctagaagtgacattcatgctc

SEQ ID NO: 4344610 - DNA, 25 bp, Homo sapien
agtgtacatttgggataaagtccta

SEQ ID NO: 4344611 - DNA, 25 bp, Homo sapien
atttgggataaagtcctagaagtga

SEQ ID NO: 4344612 - DNA, 25 bp, Homo sapien
catttgggataaagtcctagaagtg

SEQ ID NO: 4344613 - DNA, 25 bp, Homo sapien
tatgatggccatgaaggctgatccc

SEQ ID NO: 4344614 - DNA, 25 bp, Homo sapien
ggtgggaactcgcagtttattagct

SEQ ID NO: 4344615 - DNA, 25 bp, Homo sapien
gaccacaaaccactcccggtctatg

SEQ ID NO: 4344616 - DNA, 25 bp, Homo sapien
tattagcttggtgtagctttttggg

SEQ ID NO: 4344617 - DNA, 25 bp, Homo sapien
agaaggtggccaataagaaggccac

SEQ ID NO: 4344618 - DNA, 25 bp, Homo sapien
ggtgatgtaaaatctggagccccga

SEQ ID NO: 4344619 - DNA, 25 bp, Homo sapien
gcagcctcagtgtgccgggtggaca

SEQ ID NO: 4344620 - DNA, 25 bp, Homo sapien
tcagcaacttgagttcccaaaggtt

SEQ ID NO: 4344621 - DNA, 25 bp, Homo sapien
ggaagcggcgactcagcaacttgag

SEQ ID NO: 4344622 - DNA, 25 bp, Homo sapien
actgggatggacctcgttggcacca

SEQ ID NO: 4344623 - DNA, 25 bp, Homo sapien
ggactgggatggacctcgttggcac

SEQ ID NO: 4344624 - DNA, 25 bp, Homo sapien
cctcggactgggatggacctcgttg

SEQ ID NO: 4344625 - DNA, 25 bp, Homo sapien
tgggatggacctcgttggcaccaac

SEQ ID NO: 4344626 - DNA, 25 bp, Homo sapien
agctgcaccgtgttcgagtcgtttg

SEQ ID NO: 4344627 - DNA, 25 bp, Homo sapien
caccgtgttcgagtcgtttgtgacc

SEQ ID NO: 4344628 - DNA, 25 bp, Homo sapien
tcgagtcgtttgtgacctcccaggg

SEQ ID NO: 4344629 - DNA, 25 bp, Homo sapien
cgtgttcgagtcgtttgtgacctcc

SEQ ID NO: 4344630 - DNA, 25 bp, Homo sapien
tgcgccccaggcattgctggcaaga

SEQ ID NO: 4344631 - DNA, 25 bp, Homo sapien
ttatcctggctagttgcgagtccca

SEQ ID NO: 4344632 - DNA, 25 bp, Homo sapien
tttggcccgtggctctgtccttatg

SEQ ID NO: 4344633 - DNA, 25 bp, Homo sapien
aagcttgaggttgcacggtgccaag

SEQ ID NO: 4344634 - DNA, 25 bp, Homo sapien
actctggtgagacttcttgcaggca

SEQ ID NO: 4344635 - DNA, 25 bp, Homo sapien
tactctggtgagacttcttgcaggc

SEQ ID NO: 4344636 - DNA, 25 bp, Homo sapien
tcttactctggtgagacttcttgca

SEQ ID NO: 4344637 - DNA, 25 bp, Homo sapien
cttactctggtgagacttcttgcag

SEQ ID NO: 4344638 - DNA, 25 bp, Homo sapien
gtgggttaagctgaggcacacctct

SEQ ID NO: 4344639 - DNA, 25 bp, Homo sapien
gggttaagctgaggcacacctctca

SEQ ID NO: 4344640 - DNA, 25 bp, Homo sapien
ttaagctgaggcacacctctcagcc

SEQ ID NO: 4344641 - DNA, 25 bp, Homo sapien
agtgggttaagctgaggcacacctc

SEQ ID NO: 4344642 - DNA, 25 bp, Homo sapien
ggaggtcccttgatggacagggcca

SEQ ID NO: 4344643 - DNA, 25 bp, Homo sapien
gaggtcccttgatggacagggccat

SEQ ID NO: 4344644 - DNA, 25 bp, Homo sapien
ttcctgctccataaccctgcccctc

SEQ ID NO: 4344645 - DNA, 25 bp, Homo sapien
gccagctttgtctccgcaggctccc

SEQ ID NO: 4344646 - DNA, 25 bp, Homo sapien
aattctggcagtgacgatgatcagg

SEQ ID NO: 4344647 - DNA, 25 bp, Homo sapien
gatcaggtgtgatcagagagtcctg

SEQ ID NO: 4344648 - DNA, 25 bp, Homo sapien
tggaactgctcctatccagcaagat

SEQ ID NO: 4344649 - DNA, 25 bp, Homo sapien
agtcccaggctatgcccagagcttc

SEQ ID NO: 4344650 - DNA, 25 bp, Homo sapien
ccagaaataggtacagacactgagg

SEQ ID NO: 4344651 - DNA, 25 bp, Homo sapien
cagaagagacgcccagaaataggta

SEQ ID NO: 4344652 - DNA, 25 bp, Homo sapien
agaaataggtacagacactgaggct

SEQ ID NO: 4344653 - DNA, 25 bp, Homo sapien
cagaaataggtacagacactgaggc

SEQ ID NO: 4344654 - DNA, 25 bp, Homo sapien
gtgtgttcagggtggtatggccata

SEQ ID NO: 4344655 - DNA, 25 bp, Homo sapien
atcagatgaggtcaggtgtgttcag

SEQ ID NO: 4344656 - DNA, 25 bp, Homo sapien
tctgagatcagatgaggtcaggtgt

SEQ ID NO: 4344657 - DNA, 25 bp, Homo sapien
gtgttcagggtggtatggccataga

SEQ ID NO: 4344658 - DNA, 25 bp, Homo sapien
gttcgcctctccctgaggtgcatgg

SEQ ID NO: 4344659 - DNA, 25 bp, Homo sapien
tctccctgaggtgcatggcggcagc

SEQ ID NO: 4344660 - DNA, 25 bp, Homo sapien
cagcccacgttggtgggactgtgcc

SEQ ID NO: 4344661 - DNA, 25 bp, Homo sapien
gcccacgttggtgggactgtgccca

SEQ ID NO: 4344662 - DNA, 25 bp, Homo sapien
tcttgacacatgaagcagaacagcc

SEQ ID NO: 4344663 - DNA, 25 bp, Homo sapien
tttggacagtcttgacacatgaagc

SEQ ID NO: 4344664 - DNA, 25 bp, Homo sapien
acatgaagcagaacagcccatcctg

SEQ ID NO: 4344665 - DNA, 25 bp, Homo sapien
ccaggcaggaatttggacagtcttg

SEQ ID NO: 4344666 - DNA, 25 bp, Homo sapien
ccaaggcctgggtcttgaaagcagt

SEQ ID NO: 4344667 - DNA, 25 bp, Homo sapien
gaagcggtcggggaaaccatccaca

SEQ ID NO: 4344668 - DNA, 25 bp, Homo sapien
ggcagaagcggtcggggaaaccatc

SEQ ID NO: 4344669 - DNA, 25 bp, Homo sapien
agcggtcggggaaaccatccacagc

SEQ ID NO: 4344670 - DNA, 25 bp, Homo sapien
ctgaaataaccctccacgagcaggg

SEQ ID NO: 4344671 - DNA, 25 bp, Homo sapien
tgaaataaccctccacgagcagggg

SEQ ID NO: 4344672 - DNA, 25 bp, Homo sapien
cctgaaataaccctccacgagcagg

SEQ ID NO: 4344673 - DNA, 25 bp, Homo sapien
tgctaagccattgggtgtagctgct

SEQ ID NO: 4344674 - DNA, 25 bp, Homo sapien
tcttccatgtgagagatcatccgct

SEQ ID NO: 4344675 - DNA, 25 bp, Homo sapien
gaagccctaaaaggctcacacgaaa

SEQ ID NO: 4344676 - DNA, 25 bp, Homo sapien
tgtggtctaaagagacaagaagccc

SEQ ID NO: 4344677 - DNA, 25 bp, Homo sapien
cccagggccaggataggtttcttga

SEQ ID NO: 4344678 - DNA, 25 bp, Homo sapien
tgcctgggcaaacatcatcctttct

SEQ ID NO: 4344679 - DNA, 25 bp, Homo sapien
ctgggcaaacatcatcctttctcat

SEQ ID NO: 4344680 - DNA, 25 bp, Homo sapien
catgcctgggcaaacatcatccttt

SEQ ID NO: 4344681 - DNA, 25 bp, Homo sapien
gcccaagtctcctctcgctcaggtc

SEQ ID NO: 4344682 - DNA, 25 bp, Homo sapien
ccaagtctcctctcgctcaggtccc

SEQ ID NO: 4344683 - DNA, 25 bp, Homo sapien
caagtctcctctcgctcaggtccct

SEQ ID NO: 4344684 - DNA, 25 bp, Homo sapien
cccaagtctcctctcgctcaggtcc

SEQ ID NO: 4344685 - DNA, 25 bp, Homo sapien
catttattaaataaggaatccattt

SEQ ID NO: 4344686 - DNA, 25 bp, Homo sapien
gtataagtgtaagtaagggatccag

SEQ ID NO: 4344687 - DNA, 25 bp, Homo sapien
ctctttttttcatttcatatgaact

SEQ ID NO: 4344688 - DNA, 25 bp, Homo sapien
tattaaataaggaatccatttcttg

SEQ ID NO: 4344689 - DNA, 25 bp, Homo sapien
gaagttctggtagttatttctggca

SEQ ID NO: 4344690 - DNA, 25 bp, Homo sapien
gggttgcacggaatccaaaaatcaa

SEQ ID NO: 4344691 - DNA, 25 bp, Homo sapien
gatgcaagagttgggaagttttcct

SEQ ID NO: 4344692 - DNA, 25 bp, Homo sapien
tgcaccacttaactgactaggacct

SEQ ID NO: 4344693 - DNA, 25 bp, Homo sapien
cagtttcccttattagtatggtaca

SEQ ID NO: 4344694 - DNA, 25 bp, Homo sapien
taactgaagtcaatagttcactcag

SEQ ID NO: 4344695 - DNA, 25 bp, Homo sapien
tatttcttctcgagtcagtttctcc

SEQ ID NO: 4344696 - DNA, 25 bp, Homo sapien
gattttaggacagtttatatgtaca

SEQ ID NO: 4344697 - DNA, 25 bp, Homo sapien
ccattccctactttccttccattct

SEQ ID NO: 4344698 - DNA, 25 bp, Homo sapien
cctccttccttcccacctctatcct

SEQ ID NO: 4344699 - DNA, 25 bp, Homo sapien
cttccttcccacctctatccttcct

SEQ ID NO: 4344700 - DNA, 25 bp, Homo sapien
tccttcccacctctatccttccttc

SEQ ID NO: 4344701 - DNA, 25 bp, Homo sapien
tgtccagccccaatcacctactaaa

SEQ ID NO: 4344702 - DNA, 25 bp, Homo sapien
taaccttcagataacactataccac

SEQ ID NO: 4344703 - DNA, 25 bp, Homo sapien
attgtcctagagtttccaatatgca

SEQ ID NO: 4344704 - DNA, 25 bp, Homo sapien
tgtttctagctgctttatgttgcac

SEQ ID NO: 4344705 - DNA, 25 bp, Homo sapien
agttatagcggatttgatttccagc

SEQ ID NO: 4344706 - DNA, 25 bp, Homo sapien
tagatctctagtttggtagctgtca

SEQ ID NO: 4344707 - DNA, 25 bp, Homo sapien
cctattcctccatagataaggtgat

SEQ ID NO: 4344708 - DNA, 25 bp, Homo sapien
gtttatattacacatcaggtcttga

SEQ ID NO: 4344709 - DNA, 25 bp, Homo sapien
tcagcaaagactcaagggcaccctt

SEQ ID NO: 4344710 - DNA, 25 bp, Homo sapien
ttctgtctgggatcaccgtcctgca

SEQ ID NO: 4344711 - DNA, 25 bp, Homo sapien
tccagcatggctcgaaacataagtc

SEQ ID NO: 4344712 - DNA, 25 bp, Homo sapien
tgatgtccaccataactcaggaagg

SEQ ID NO: 4344713 - DNA, 25 bp, Homo sapien
gaggttactatcaagctgctggccc

SEQ ID NO: 4344714 - DNA, 25 bp, Homo sapien
tgagggtgaccaaaacttaagctgc

SEQ ID NO: 4344715 - DNA, 25 bp, Homo sapien
tcatgacctaatcgtggcagggaca

SEQ ID NO: 4344716 - DNA, 25 bp, Homo sapien
aatttggcggccaacctggaggctc

SEQ ID NO: 4344717 - DNA, 25 bp, Homo sapien
aaatcctcttgccaatgcctatacg

SEQ ID NO: 4344718 - DNA, 25 bp, Homo sapien
gcctatacgacactagccttttgaa

SEQ ID NO: 4344719 - DNA, 25 bp, Homo sapien
ggtttctagttagtcccaccgctga

SEQ ID NO: 4344720 - DNA, 25 bp, Homo sapien
taagcctagcctttatggcctagca

SEQ ID NO: 4344721 - DNA, 25 bp, Homo sapien
taagtgtcgtaagacagccctgcac

SEQ ID NO: 4344722 - DNA, 25 bp, Homo sapien
gctaaggcgtcaaggaagcagtccc

SEQ ID NO: 4344723 - DNA, 25 bp, Homo sapien
tctttccgagggaagctcagtcctg

SEQ ID NO: 4344724 - DNA, 25 bp, Homo sapien
tcagtcctggcttgcgagagtcagc

SEQ ID NO: 4344725 - DNA, 25 bp, Homo sapien
tctgagtgatgtctagtcctgacga

SEQ ID NO: 4344726 - DNA, 25 bp, Homo sapien
ttgtgatttccaaagtcgtgaacac

SEQ ID NO: 4344727 - DNA, 25 bp, Homo sapien
gagtgatgtctagtcctgacgactt

SEQ ID NO: 4344728 - DNA, 25 bp, Homo sapien
actttgtgatttccaaagtcgtgaa

SEQ ID NO: 4344729 - DNA, 25 bp, Homo sapien
gcagctgcaaatccttgggtaacct

SEQ ID NO: 4344730 - DNA, 25 bp, Homo sapien
gaatatgaaatcctatcacccgatc

SEQ ID NO: 4344731 - DNA, 25 bp, Homo sapien
catcaagtagctgttttgtgagccc

SEQ ID NO: 4344732 - DNA, 25 bp, Homo sapien
cctcaccggcgtttggtccaagaat

SEQ ID NO: 4344733 - DNA, 25 bp, Homo sapien
taacggtgcattctaggctgtccat

SEQ ID NO: 4344734 - DNA, 25 bp, Homo sapien
taggctgtccatttgtcaatgttcc

SEQ ID NO: 4344735 - DNA, 25 bp, Homo sapien
tgtgcagtcgttttccacggtaacg

SEQ ID NO: 4344736 - DNA, 25 bp, Homo sapien
caagatgggaagcaagatgtgcagt

SEQ ID NO: 4344737 - DNA, 25 bp, Homo sapien
gaggccagaacaaagtatgatatat

SEQ ID NO: 4344738 - DNA, 25 bp, Homo sapien
tggtcgaatttattgcagattatct

SEQ ID NO: 4344739 - DNA, 25 bp, Homo sapien
tcaagaggccagaacaaagtatgat

SEQ ID NO: 4344740 - DNA, 25 bp, Homo sapien
atggtcgaatttattgcagattatc

SEQ ID NO: 4344741 - DNA, 25 bp, Homo sapien
gagatggtacaaactcttaccaggt

SEQ ID NO: 4344742 - DNA, 25 bp, Homo sapien
gcaccctttaatggatggcctgtgt

SEQ ID NO: 4344743 - DNA, 25 bp, Homo sapien
tacccttctggttcaaagtggatgt

SEQ ID NO: 4344744 - DNA, 25 bp, Homo sapien
ggaaggaggtaaacactcacactta

SEQ ID NO: 4344745 - DNA, 25 bp, Homo sapien
ataatccacagcaaccatactccag

SEQ ID NO: 4344746 - DNA, 25 bp, Homo sapien
atccacagcaaccatactccagagg

SEQ ID NO: 4344747 - DNA, 25 bp, Homo sapien
gaggagtaaacactgtagtcggaac

SEQ ID NO: 4344748 - DNA, 25 bp, Homo sapien
cactgtagtcggaacattaatataa

SEQ ID NO: 4344749 - DNA, 25 bp, Homo sapien
taaagaggccccaaaaagtctctga

SEQ ID NO: 4344750 - DNA, 25 bp, Homo sapien
gcagcttgcctgactgtatggcgac

SEQ ID NO: 4344751 - DNA, 25 bp, Homo sapien
tatcaccaacagcatagacatatgg

SEQ ID NO: 4344752 - DNA, 25 bp, Homo sapien
acagcatagacatatggcacattgg

SEQ ID NO: 4344753 - DNA, 25 bp, Homo sapien
tgtacaggagtcacgaccaatagct

SEQ ID NO: 4344754 - DNA, 25 bp, Homo sapien
gagtcacgaccaatagctaacaaaa

SEQ ID NO: 4344755 - DNA, 25 bp, Homo sapien
ctccaagcctattttccttgtacag

SEQ ID NO: 4344756 - DNA, 25 bp, Homo sapien
ttttccttgtacaggagtcacgacc

SEQ ID NO: 4344757 - DNA, 25 bp, Homo sapien
cgtgatcaagtgagtttgtccccaa

SEQ ID NO: 4344758 - DNA, 25 bp, Homo sapien
catcctggcaatgatacaagactca

SEQ ID NO: 4344759 - DNA, 25 bp, Homo sapien
aaggcaagtgtagcaaacttacagg

SEQ ID NO: 4344760 - DNA, 25 bp, Homo sapien
aatgcttcacccctaacaccaggaa

SEQ ID NO: 4344761 - DNA, 25 bp, Homo sapien
tactggatatccacacggaaagaaa

SEQ ID NO: 4344762 - DNA, 25 bp, Homo sapien
gctgggttaaatggtctttcattga

SEQ ID NO: 4344763 - DNA, 25 bp, Homo sapien
gaactacacagtgaagcacgtatgc

SEQ ID NO: 4344764 - DNA, 25 bp, Homo sapien
ttcattgaagattccaaagcaattc

SEQ ID NO: 4344765 - DNA, 25 bp, Homo sapien
gatacaaggaatacatactgtacaa

SEQ ID NO: 4344766 - DNA, 25 bp, Homo sapien
cttatatgagatttagaggcaaacc

SEQ ID NO: 4344767 - DNA, 25 bp, Homo sapien
cagaatcagaatagtggttgcttgg

SEQ ID NO: 4344768 - DNA, 25 bp, Homo sapien
caatagtccaaactgcaaagaggct

SEQ ID NO: 4344769 - DNA, 25 bp, Homo sapien
tccaggtgaacctttctccaactgt

SEQ ID NO: 4344770 - DNA, 25 bp, Homo sapien
tgtgttatagactccttcaattgtt

SEQ ID NO: 4344771 - DNA, 25 bp, Homo sapien
taactgtgacatctaggccaaagcc

SEQ ID NO: 4344772 - DNA, 25 bp, Homo sapien
tccgtaggaacttcacaccatgctg

SEQ ID NO: 4344773 - DNA, 25 bp, Homo sapien
catttcttggtcgaagccacggaga

SEQ ID NO: 4344774 - DNA, 25 bp, Homo sapien
ggattgagcgtaccataactgtgac

SEQ ID NO: 4344775 - DNA, 25 bp, Homo sapien
ctgtgcagcagtataataagtctcc

SEQ ID NO: 4344776 - DNA, 25 bp, Homo sapien
tccttggattcctaaataccgtggc

SEQ ID NO: 4344777 - DNA, 25 bp, Homo sapien
cgtggcctttcacccgttgctatga

SEQ ID NO: 4344778 - DNA, 25 bp, Homo sapien
taatacagtattctttatctccttg

SEQ ID NO: 4344779 - DNA, 25 bp, Homo sapien
aacaaattctccataggaattgaca

SEQ ID NO: 4344780 - DNA, 25 bp, Homo sapien
ctccataggaattgacataggccac

SEQ ID NO: 4344781 - DNA, 25 bp, Homo sapien
ggttctgaatcgcttttgtcattgt

SEQ ID NO: 4344782 - DNA, 25 bp, Homo sapien
agagctgatgtggttctgaatcgct

SEQ ID NO: 4344783 - DNA, 25 bp, Homo sapien
tcctggccatcatgctgattctgtg

SEQ ID NO: 4344784 - DNA, 25 bp, Homo sapien
gttccttcaagacactaccagagag

SEQ ID NO: 4344785 - DNA, 25 bp, Homo sapien
taccagagaggatttgccaatgctt

SEQ ID NO: 4344786 - DNA, 25 bp, Homo sapien
caatgcttgccctagagtttgggca

SEQ ID NO: 4344787 - DNA, 25 bp, Homo sapien
tacatttacacaagtgccaccaaga

SEQ ID NO: 4344788 - DNA, 25 bp, Homo sapien
tcttaggaatacaacctacatttac

SEQ ID NO: 4344789 - DNA, 25 bp, Homo sapien
cccaaaagggcagcctgatgcatca

SEQ ID NO: 4344790 - DNA, 25 bp, Homo sapien
ttccttgagtcacataatgcctgcc

SEQ ID NO: 4344791 - DNA, 25 bp, Homo sapien
ctgaggtgacgggacaacaaagtct

SEQ ID NO: 4344792 - DNA, 25 bp, Homo sapien
tctagcaccataactttctttccca

SEQ ID NO: 4344793 - DNA, 25 bp, Homo sapien
gacgggacaacaaagtctagcacca

SEQ ID NO: 4344794 - DNA, 25 bp, Homo sapien
gacaacaaagtctagcaccataact

SEQ ID NO: 4344795 - DNA, 25 bp, Homo sapien
cttcgcacatgaaaggcctccagaa

SEQ ID NO: 4344796 - DNA, 25 bp, Homo sapien
tgagatcataatcatatgccaaatc

SEQ ID NO: 4344797 - DNA, 25 bp, Homo sapien
tatgccaaatcttcctgaaggagct

SEQ ID NO: 4344798 - DNA, 25 bp, Homo sapien
caccaccgatgatgatgagatcata

SEQ ID NO: 4344799 - DNA, 25 bp, Homo sapien
ttattcacgaaaatattgggcacag

SEQ ID NO: 4344800 - DNA, 25 bp, Homo sapien
ctgattagtgatttctgacagcact

SEQ ID NO: 4344801 - DNA, 25 bp, Homo sapien
ttcacgaaaatattgggcacagttt

SEQ ID NO: 4344802 - DNA, 25 bp, Homo sapien
cacgaaaatattgggcacagttttc

SEQ ID NO: 4344803 - DNA, 25 bp, Homo sapien
gacattacattcgactcccaaagaa

SEQ ID NO: 4344804 - DNA, 25 bp, Homo sapien
tcaagttccaagacattacattcga

SEQ ID NO: 4344805 - DNA, 25 bp, Homo sapien
ttacattcgactcccaaagaagaaa

SEQ ID NO: 4344806 - DNA, 25 bp, Homo sapien
caacttgatcaagttccaagacatt

SEQ ID NO: 4344807 - DNA, 25 bp, Homo sapien
ttgctgaagatcaccacccggctgc

SEQ ID NO: 4344808 - DNA, 25 bp, Homo sapien
gagtactatggggacagtagctctt

SEQ ID NO: 4344809 - DNA, 25 bp, Homo sapien
ctgcgctcgatgaggcccacgaggt

SEQ ID NO: 4344810 - DNA, 25 bp, Homo sapien
tgcggcggcgaccgctccagagtct

SEQ ID NO: 4344811 - DNA, 25 bp, Homo sapien
tgctcacaaaccgaaacgcaggcgg

SEQ ID NO: 4344812 - DNA, 25 bp, Homo sapien
ctgctcacaaaccgaaacgcaggcg

SEQ ID NO: 4344813 - DNA, 25 bp, Homo sapien
cacaaaccgaaacgcaggcggctgc

SEQ ID NO: 4344814 - DNA, 25 bp, Homo sapien
ctcacaaaccgaaacgcaggcggct

SEQ ID NO: 4344815 - DNA, 25 bp, Homo sapien
ggcggcgaacgctgccctcgctggc

SEQ ID NO: 4344816 - DNA, 25 bp, Homo sapien
gggcggcgaacgctgccctcgctgg

SEQ ID NO: 4344817 - DNA, 25 bp, Homo sapien
ccgcgcgaatccgcgaggcagccgc

SEQ ID NO: 4344818 - DNA, 25 bp, Homo sapien
cgcgaatccgcgaggcagccgctcg

SEQ ID NO: 4344819 - DNA, 25 bp, Homo sapien
cacccgcgcgaatccgcgaggcagc

SEQ ID NO: 4344820 - DNA, 25 bp, Homo sapien
gcgcgaatccgcgaggcagccgctc

SEQ ID NO: 4344821 - DNA, 25 bp, Homo sapien
gggccgcaggggctgctgcctgctg

SEQ ID NO: 4344822 - DNA, 25 bp, Homo sapien
cgcaggggctgctgcctgctgatgc

SEQ ID NO: 4344823 - DNA, 25 bp, Homo sapien
caggggctgctgcctgctgatgccc

SEQ ID NO: 4344824 - DNA, 25 bp, Homo sapien
gggcaggggccgcaggggctgctgc

SEQ ID NO: 4344825 - DNA, 25 bp, Homo sapien
tgccagcgagtgactgcccctgagc

SEQ ID NO: 4344826 - DNA, 25 bp, Homo sapien
ctgccagcgagtgactgcccctgag

SEQ ID NO: 4344827 - DNA, 25 bp, Homo sapien
agcgagtgactgcccctgagccagg

SEQ ID NO: 4344828 - DNA, 25 bp, Homo sapien
ccagcgagtgactgcccctgagcca

SEQ ID NO: 4344829 - DNA, 25 bp, Homo sapien
tgaacccccactgataggggaggat

SEQ ID NO: 4344830 - DNA, 25 bp, Homo sapien
cactgataggggaggatggacccct

SEQ ID NO: 4344831 - DNA, 25 bp, Homo sapien
tggtgggtgaaccccatgagctggt

SEQ ID NO: 4344832 - DNA, 25 bp, Homo sapien
ccatgagctggtgggtggactccgg

SEQ ID NO: 4344833 - DNA, 25 bp, Homo sapien
gctggggggcggacccctggagctg

SEQ ID NO: 4344834 - DNA, 25 bp, Homo sapien
gggccctgagggtgcaggccctgtg

SEQ ID NO: 4344835 - DNA, 25 bp, Homo sapien
gggggcagctgaggtggtcccaggg

SEQ ID NO: 4344836 - DNA, 25 bp, Homo sapien
cctgtgggggacatgggtggcagag

SEQ ID NO: 4344837 - DNA, 25 bp, Homo sapien
aagactcagacagcggcggccaagg

SEQ ID NO: 4344838 - DNA, 25 bp, Homo sapien
aagggggcagatcgttcatcagcag

SEQ ID NO: 4344839 - DNA, 25 bp, Homo sapien
gcaaagactcagacagcggcggcca

SEQ ID NO: 4344840 - DNA, 25 bp, Homo sapien
caagggggcagatcgttcatcagca

SEQ ID NO: 4344841 - DNA, 25 bp, Homo sapien
gcttgatcctctgttcgtatgcaga

SEQ ID NO: 4344842 - DNA, 25 bp, Homo sapien
gccatcagcaagtcatgccagcact

SEQ ID NO: 4344843 - DNA, 25 bp, Homo sapien
gttgatctccctgctcggcaccttg

SEQ ID NO: 4344844 - DNA, 25 bp, Homo sapien
tcagcaagtcatgccagcactggtc

SEQ ID NO: 4344845 - DNA, 25 bp, Homo sapien
taagacaaggcacctcacagaactc

SEQ ID NO: 4344846 - DNA, 25 bp, Homo sapien
acaccctccgtattggttgccaaag

SEQ ID NO: 4344847 - DNA, 25 bp, Homo sapien
tgaagaacccactttaagacaaggc

SEQ ID NO: 4344848 - DNA, 25 bp, Homo sapien
ttaacatggacaaagcaaattactt

SEQ ID NO: 4344849 - DNA, 25 bp, Homo sapien
tactgattctcacaggtgtaaggtg

SEQ ID NO: 4344850 - DNA, 25 bp, Homo sapien
aagagacttcagtgctgccagtggg

SEQ ID NO: 4344851 - DNA, 25 bp, Homo sapien
tggccacctgtgagtagtatgtctt

SEQ ID NO: 4344852 - DNA, 25 bp, Homo sapien
tatgtatggatcaacctttaggctg

SEQ ID NO: 4344853 - DNA, 25 bp, Homo sapien
agaggcagcccgtgaccagcttctt

SEQ ID NO: 4344854 - DNA, 25 bp, Homo sapien
tgtcccggggactgttcagagttga

SEQ ID NO: 4344855 - DNA, 25 bp, Homo sapien
gcagcccgtgaccagcttcttgtgt

SEQ ID NO: 4344856 - DNA, 25 bp, Homo sapien
gctgattgtgtcacatcctttcatg

SEQ ID NO: 4344857 - DNA, 25 bp, Homo sapien
tggtgcagacgtggctccagatacc

SEQ ID NO: 4344858 - DNA, 25 bp, Homo sapien
taaaaaccatcaggataggcaggca

SEQ ID NO: 4344859 - DNA, 25 bp, Homo sapien
gatagcatttaacccatagtggagc

SEQ ID NO: 4344860 - DNA, 25 bp, Homo sapien
tagtggagctcctttcaagatcgga

SEQ ID NO: 4344861 - DNA, 25 bp, Homo sapien
caggataagctcttccaggtggcaa

SEQ ID NO: 4344862 - DNA, 25 bp, Homo sapien
ggagcatgctgctatccaggataag

SEQ ID NO: 4344863 - DNA, 25 bp, Homo sapien
tcaagctctcaagtggaggcaatcc

SEQ ID NO: 4344864 - DNA, 25 bp, Homo sapien
gattattttactaggcagaatgccc

SEQ ID NO: 4344865 - DNA, 25 bp, Homo sapien
tctcgttggcagaactgtgtcgcag

SEQ ID NO: 4344866 - DNA, 25 bp, Homo sapien
agcgtccggactctgttacacctgg

SEQ ID NO: 4344867 - DNA, 25 bp, Homo sapien
tgtggcttagcgaagcccagcgtcc

SEQ ID NO: 4344868 - DNA, 25 bp, Homo sapien
tgcagctctcctcgtggtggcagag

SEQ ID NO: 4344869 - DNA, 25 bp, Homo sapien
caaagggtttggcggttgtattctg

SEQ ID NO: 4344870 - DNA, 25 bp, Homo sapien
tgctctctcggtggccacaatgatg

SEQ ID NO: 4344871 - DNA, 25 bp, Homo sapien
ggtgctctctcggtggccacaatga

SEQ ID NO: 4344872 - DNA, 25 bp, Homo sapien
atggtgctctctcggtggccacaat

SEQ ID NO: 4344873 - DNA, 25 bp, Homo sapien
ctatggtgctctctcggtggccaca

SEQ ID NO: 4344874 - DNA, 25 bp, Homo sapien
cactgcttttgggtatgtggtagat

SEQ ID NO: 4344875 - DNA, 25 bp, Homo sapien
tatgtggtagattcacgggaggtgt

SEQ ID NO: 4344876 - DNA, 25 bp, Homo sapien
ttttgggtatgtggtagattcacgg

SEQ ID NO: 4344877 - DNA, 25 bp, Homo sapien
tgtggtagattcacgggaggtgttg

SEQ ID NO: 4344878 - DNA, 25 bp, Homo sapien
cacccgatgtccagggaagtcaaac

SEQ ID NO: 4344879 - DNA, 25 bp, Homo sapien
taaccagtatagatctgggacaccc

SEQ ID NO: 4344880 - DNA, 25 bp, Homo sapien
agatctgggacacccgatgtccagg

SEQ ID NO: 4344881 - DNA, 25 bp, Homo sapien
cagtatagatctgggacacccgatg

SEQ ID NO: 4344882 - DNA, 25 bp, Homo sapien
atggggaaccagtctgtagttgtac

SEQ ID NO: 4344883 - DNA, 25 bp, Homo sapien
tagtgtctgtcaggttgccaaggcc

SEQ ID NO: 4344884 - DNA, 25 bp, Homo sapien
ggccattgtatattatctgtgcggg

SEQ ID NO: 4344885 - DNA, 25 bp, Homo sapien
catcaaggccaaggtgtagttctgc

SEQ ID NO: 4344886 - DNA, 25 bp, Homo sapien
aaacacggagcccatttccatcaag

SEQ ID NO: 4344887 - DNA, 25 bp, Homo sapien
gggggctcctactctcttggtgtca

SEQ ID NO: 4344888 - DNA, 25 bp, Homo sapien
gggctcctactctcttggtgtcacc

SEQ ID NO: 4344889 - DNA, 25 bp, Homo sapien
gatcacttcgtggctgaggccctcg

SEQ ID NO: 4344890 - DNA, 25 bp, Homo sapien
ggctgaggccctcgatgagtctggg

SEQ ID NO: 4344891 - DNA, 25 bp, Homo sapien
gaggcctttttgatcagcagctgtg

SEQ ID NO: 4344892 - DNA, 25 bp, Homo sapien
ggcctttttgatcagcagctgtgat

SEQ ID NO: 4344893 - DNA, 25 bp, Homo sapien
cagaggcctttttgatcagcagctg

SEQ ID NO: 4344894 - DNA, 25 bp, Homo sapien
tcagaggcctttttgatcagcagct

SEQ ID NO: 4344895 - DNA, 25 bp, Homo sapien
gatcctcactggattttgagaggtt

SEQ ID NO: 4344896 - DNA, 25 bp, Homo sapien
ttcctttcatacttgtgatcctcac

SEQ ID NO: 4344897 - DNA, 25 bp, Homo sapien
tataccaattgtcattccttttgct

SEQ ID NO: 4344898 - DNA, 25 bp, Homo sapien
ttttatataccaattgtcattcctt

SEQ ID NO: 4344899 - DNA, 25 bp, Homo sapien
tatttaggcccactcgaagcctctg

SEQ ID NO: 4344900 - DNA, 25 bp, Homo sapien
tgtatctccgtagtcctcacagtgg

SEQ ID NO: 4344901 - DNA, 25 bp, Homo sapien
tgtggccaaactcgagcttccttgc

SEQ ID NO: 4344902 - DNA, 25 bp, Homo sapien
gcctctgtggccaaactcgagcttc

SEQ ID NO: 4344903 - DNA, 25 bp, Homo sapien
tcaaggtgggttatcgatatcagag

SEQ ID NO: 4344904 - DNA, 25 bp, Homo sapien
tgggttatcgatatcagaggtagtc

SEQ ID NO: 4344905 - DNA, 25 bp, Homo sapien
tatcgatatcagaggtagtcagaaa

SEQ ID NO: 4344906 - DNA, 25 bp, Homo sapien
cgatatcagaggtagtcagaaagga

SEQ ID NO: 4344907 - DNA, 25 bp, Homo sapien
ctccccgaggtccaagaggaggagt

SEQ ID NO: 4344908 - DNA, 25 bp, Homo sapien
aggaggagtgttgttgttaatgata

SEQ ID NO: 4344909 - DNA, 25 bp, Homo sapien
ttgttaatgatatctcccttagcat

SEQ ID NO: 4344910 - DNA, 25 bp, Homo sapien
caggacctccccgaggtccaagagg

SEQ ID NO: 4344911 - DNA, 25 bp, Homo sapien
ggattggacctacaagccctggagt

SEQ ID NO: 4344912 - DNA, 25 bp, Homo sapien
tttgcttttgatggtatgcacacag

SEQ ID NO: 4344913 - DNA, 25 bp, Homo sapien
cactgtggcgtagagaacatggaaa

SEQ ID NO: 4344914 - DNA, 25 bp, Homo sapien
taaatggacgtctggctgcatgtca

SEQ ID NO: 4344915 - DNA, 25 bp, Homo sapien
caagattacgggactttgctctgaa

SEQ ID NO: 4344916 - DNA, 25 bp, Homo sapien
ctttcaagattacgggactttgctc

SEQ ID NO: 4344917 - DNA, 25 bp, Homo sapien
tcaagattacgggactttgctctga

SEQ ID NO: 4344918 - DNA, 25 bp, Homo sapien
ctggctttcaagattacgggacttt

SEQ ID NO: 4344919 - DNA, 25 bp, Homo sapien
attcctcttcataaaggagcctctt

SEQ ID NO: 4344920 - DNA, 25 bp, Homo sapien
tctttacggctgctacttgggtttc

SEQ ID NO: 4344921 - DNA, 25 bp, Homo sapien
taaaggagcctctttacggctgcta

SEQ ID NO: 4344922 - DNA, 25 bp, Homo sapien
gctgctacttgggtttccggtctca

SEQ ID NO: 4344923 - DNA, 25 bp, Homo sapien
atgcagggctggtagtggagaaact

SEQ ID NO: 4344924 - DNA, 25 bp, Homo sapien
aacagtgacgcagcggggttccaga

SEQ ID NO: 4344925 - DNA, 25 bp, Homo sapien
tcaggaaacagtgacgcagcggggt

SEQ ID NO: 4344926 - DNA, 25 bp, Homo sapien
caggatgtcagtgggccgcatgcag

SEQ ID NO: 4344927 - DNA, 25 bp, Homo sapien
cattgaggacgaagtgaggcctcgc

SEQ ID NO: 4344928 - DNA, 25 bp, Homo sapien
gaggtctccagacacgtgctcagtg

SEQ ID NO: 4344929 - DNA, 25 bp, Homo sapien
tgtgtctcgttggaagagccgccac

SEQ ID NO: 4344930 - DNA, 25 bp, Homo sapien
cggtcactccaatgtggccagcagt

SEQ ID NO: 4344931 - DNA, 25 bp, Homo sapien
cagcctggaccgggctagcttctgg

SEQ ID NO: 4344932 - DNA, 25 bp, Homo sapien
gcctggaccgggctagcttctgggg

SEQ ID NO: 4344933 - DNA, 25 bp, Homo sapien
ctggaccgggctagcttctggggac

SEQ ID NO: 4344934 - DNA, 25 bp, Homo sapien
agcagcctggaccgggctagcttct

SEQ ID NO: 4344935 - DNA, 25 bp, Homo sapien
tcaccagtgtttttggcagagtaag

SEQ ID NO: 4344936 - DNA, 25 bp, Homo sapien
caatatcaccagtgtttttggcaga

SEQ ID NO: 4344937 - DNA, 25 bp, Homo sapien
tatcaccagtgtttttggcagagta

SEQ ID NO: 4344938 - DNA, 25 bp, Homo sapien
caccagtgtttttggcagagtaaga

SEQ ID NO: 4344939 - DNA, 25 bp, Homo sapien
tctcttccacctgcatggagggacc

SEQ ID NO: 4344940 - DNA, 25 bp, Homo sapien
gatggcttctcccagaggtctgtgg

SEQ ID NO: 4344941 - DNA, 25 bp, Homo sapien
cactgagcaggcaggatggcttctc

SEQ ID NO: 4344942 - DNA, 25 bp, Homo sapien
tctgtggccttgacattctcttcca

SEQ ID NO: 4344943 - DNA, 25 bp, Homo sapien
ggaaacaccgtgcattgggccacat

SEQ ID NO: 4344944 - DNA, 25 bp, Homo sapien
gcatagggactacccaggaaggcat

SEQ ID NO: 4344945 - DNA, 25 bp, Homo sapien
ccagatgctgaccaaaacataagtg

SEQ ID NO: 4344946 - DNA, 25 bp, Homo sapien
aacataagtgatgtccccgcttccc

SEQ ID NO: 4344947 - DNA, 25 bp, Homo sapien
tgaaaatgatcagaagagccatctg

SEQ ID NO: 4344948 - DNA, 25 bp, Homo sapien
accagggacgggagacagccctcgt

SEQ ID NO: 4344949 - DNA, 25 bp, Homo sapien
gttttcaccagggacgggagacagc

SEQ ID NO: 4344950 - DNA, 25 bp, Homo sapien
aaaatgatcagaagagccatctggg

SEQ ID NO: 4344951 - DNA, 25 bp, Homo sapien
ccacatttttgcatggggctgagct

SEQ ID NO: 4344952 - DNA, 25 bp, Homo sapien
agcagtgctcgttttcccgtggcca

SEQ ID NO: 4344953 - DNA, 25 bp, Homo sapien
ctgagctgggtagcccctgtgagag

SEQ ID NO: 4344954 - DNA, 25 bp, Homo sapien
catggagcagtgctcgttttcccgt

SEQ ID NO: 4344955 - DNA, 25 bp, Homo sapien
cgcagaaagcgttccagcagggaga

SEQ ID NO: 4344956 - DNA, 25 bp, Homo sapien
tgacagcgttgacgggctttgtcca

SEQ ID NO: 4344957 - DNA, 25 bp, Homo sapien
agctgacagcgttgacgggctttgt

SEQ ID NO: 4344958 - DNA, 25 bp, Homo sapien
caggtccgcagaaagcgttccagca

SEQ ID NO: 4344959 - DNA, 25 bp, Homo sapien
cagctggagcgcagaggagacatgg

SEQ ID NO: 4344960 - DNA, 25 bp, Homo sapien
tagcagaccctcgaaggggatatgg

SEQ ID NO: 4344961 - DNA, 25 bp, Homo sapien
gatatggactcgtgggtgctgctcc

SEQ ID NO: 4344962 - DNA, 25 bp, Homo sapien
ccagctggagcgcagaggagacatg

SEQ ID NO: 4344963 - DNA, 25 bp, Homo sapien
gctgtagtccaggttaccagtgagg

SEQ ID NO: 4344964 - DNA, 25 bp, Homo sapien
gactctccaacatggatgaggtgtg

SEQ ID NO: 4344965 - DNA, 25 bp, Homo sapien
ctcccagagtgcatcagcatagact

SEQ ID NO: 4344966 - DNA, 25 bp, Homo sapien
agtttgaatgaacacctcctactgc

SEQ ID NO: 4344967 - DNA, 25 bp, Homo sapien
ggttgtgaggacatccgtccctgta

SEQ ID NO: 4344968 - DNA, 25 bp, Homo sapien
accttcgagtgccaagggagctgcg

SEQ ID NO: 4344969 - DNA, 25 bp, Homo sapien
tattcccaagttgtgggccggagac

SEQ ID NO: 4344970 - DNA, 25 bp, Homo sapien
ggaagccagcttggtattcccaagt

SEQ ID NO: 4344971 - DNA, 25 bp, Homo sapien
tgggccaaggattcgctctctgaga

SEQ ID NO: 4344972 - DNA, 25 bp, Homo sapien
gcacaggctctgagtgtctactgaa

SEQ ID NO: 4344973 - DNA, 25 bp, Homo sapien
ctctgagtgtctactgaagcccaca

SEQ ID NO: 4344974 - DNA, 25 bp, Homo sapien
cagtatggcatcttgagcacaggct

SEQ ID NO: 4344975 - DNA, 25 bp, Homo sapien
tctcgtttgaatgtgagggctctag

SEQ ID NO: 4344976 - DNA, 25 bp, Homo sapien
gatactggactggtcgaggcaaaga

SEQ ID NO: 4344977 - DNA, 25 bp, Homo sapien
gcctcgcccaggacaggcagtgctg

SEQ ID NO: 4344978 - DNA, 25 bp, Homo sapien
tggtcgaggcaaagacgtaatctct

SEQ ID NO: 4344979 - DNA, 25 bp, Homo sapien
agcccctttgtgaatttggctttat

SEQ ID NO: 4344980 - DNA, 25 bp, Homo sapien
aatttggctttattgtcatagcctt

SEQ ID NO: 4344981 - DNA, 25 bp, Homo sapien
tggctttattgtcatagcctttctc

SEQ ID NO: 4344982 - DNA, 25 bp, Homo sapien
tttattgtcatagcctttctcatcc

SEQ ID NO: 4344983 - DNA, 25 bp, Homo sapien
agtgtggaaatcggaggcagcctca

SEQ ID NO: 4344984 - DNA, 25 bp, Homo sapien
ctgagtgtggaaatcggaggcagcc

SEQ ID NO: 4344985 - DNA, 25 bp, Homo sapien
gcagccctgattctgagtgtggaaa

SEQ ID NO: 4344986 - DNA, 25 bp, Homo sapien
gtgtggaaatcggaggcagcctcat

SEQ ID NO: 4344987 - DNA, 25 bp, Homo sapien
caggtcaccgtactcattctcttga

SEQ ID NO: 4344988 - DNA, 25 bp, Homo sapien
tgacagaatccatttccatcaggga

SEQ ID NO: 4344989 - DNA, 25 bp, Homo sapien
tttgtgaaagtccaggctatgacag

SEQ ID NO: 4344990 - DNA, 25 bp, Homo sapien
gggccattagcttgtgactgttggc

SEQ ID NO: 4344991 - DNA, 25 bp, Homo sapien
ccaagctccctgcatgttgggcttg

SEQ ID NO: 4344992 - DNA, 25 bp, Homo sapien
caagctccctgcatgttgggcttgt

SEQ ID NO: 4344993 - DNA, 25 bp, Homo sapien
cccaagctccctgcatgttgggctt

SEQ ID NO: 4344994 - DNA, 25 bp, Homo sapien
gtagaagttgaggcacattttctgg

SEQ ID NO: 4344995 - DNA, 25 bp, Homo sapien
aaagccaaggtgtggcagtagaagt

SEQ ID NO: 4344996 - DNA, 25 bp, Homo sapien
aagccaaggtgtggcagtagaagtt

SEQ ID NO: 4344997 - DNA, 25 bp, Homo sapien
agccaaggtgtggcagtagaagttg

SEQ ID NO: 4344998 - DNA, 25 bp, Homo sapien
atgaggtacggtgagaggtgagtcc

SEQ ID NO: 4344999 - DNA, 25 bp, Homo sapien
tgacatgaggtacggtgagaggtga

SEQ ID NO: 4345000 - DNA, 25 bp, Homo sapien
tccgtgatggggtagcgaggtaggg

SEQ ID NO: 4345001 - DNA, 25 bp, Homo sapien
cctctggtgtccgtgatggggtagc

SEQ ID NO: 4345002 - DNA, 25 bp, Homo sapien
gcgctgagctgtgttcaggaataga

SEQ ID NO: 4345003 - DNA, 25 bp, Homo sapien
gcaataggcgctgagctgtgttcag

SEQ ID NO: 4345004 - DNA, 25 bp, Homo sapien
gctgagctgtgttcaggaatagaag

SEQ ID NO: 4345005 - DNA, 25 bp, Homo sapien
ctggcaataggcgctgagctgtgtt

SEQ ID NO: 4345006 - DNA, 25 bp, Homo sapien
gggccggaatgcctcgctgtggagt

SEQ ID NO: 4345007 - DNA, 25 bp, Homo sapien
tcaggactgggtcctagaggggccg

SEQ ID NO: 4345008 - DNA, 25 bp, Homo sapien
cctcgctgtggagttggccttgcct

SEQ ID NO: 4345009 - DNA, 25 bp, Homo sapien
gaatgcctcgctgtggagttggcct

SEQ ID NO: 4345010 - DNA, 25 bp, Homo sapien
gattgctgaggccaaagcacagagc

SEQ ID NO: 4345011 - DNA, 25 bp, Homo sapien
tgaggccaaagcacagagctggaag

SEQ ID NO: 4345012 - DNA, 25 bp, Homo sapien
gaagggcaggcctgtggggggcgcc

SEQ ID NO: 4345013 - DNA, 25 bp, Homo sapien
cttcaggattgctgaggccaaagca

SEQ ID NO: 4345014 - DNA, 25 bp, Homo sapien
tcggacctggtcaaggcataccagc

SEQ ID NO: 4345015 - DNA, 25 bp, Homo sapien
tcaaggcataccagcgctgcgtgag

SEQ ID NO: 4345016 - DNA, 25 bp, Homo sapien
cctggtcaaggcataccagcgctgc

SEQ ID NO: 4345017 - DNA, 25 bp, Homo sapien
tgtgctcggacctggtcaaggcata

SEQ ID NO: 4345018 - DNA, 25 bp, Homo sapien
agaagggaccaatcatgggaccaca

SEQ ID NO: 4345019 - DNA, 25 bp, Homo sapien
gctgaggagcagacatcattccctg

SEQ ID NO: 4345020 - DNA, 25 bp, Homo sapien
gggctgccacgtgtttaggaaacaa

SEQ ID NO: 4345021 - DNA, 25 bp, Homo sapien
tgacttggagccctgaagaagggac

SEQ ID NO: 4345022 - DNA, 25 bp, Homo sapien
gggtgccagttggcctgtctcccct

SEQ ID NO: 4345023 - DNA, 25 bp, Homo sapien
agagacattttgtggggcgccccag

SEQ ID NO: 4345024 - DNA, 25 bp, Homo sapien
gcaccgtttgggtcagagctttgct

SEQ ID NO: 4345025 - DNA, 25 bp, Homo sapien
tgttacccagccagtgaccaggttc

SEQ ID NO: 4345026 - DNA, 25 bp, Homo sapien
ggagagcaagaaccaccccaagctg

SEQ ID NO: 4345027 - DNA, 25 bp, Homo sapien
agaacctggagagcaagaaccaccc

SEQ ID NO: 4345028 - DNA, 25 bp, Homo sapien
acctggagagcaagaaccaccccaa

SEQ ID NO: 4345029 - DNA, 25 bp, Homo sapien
aagaacctggagagcaagaaccacc

SEQ ID NO: 4345030 - DNA, 25 bp, Homo sapien
tggcttcaggttgaagtccctggtt

SEQ ID NO: 4345031 - DNA, 25 bp, Homo sapien
ccttctgatgtttcctggctatggt

SEQ ID NO: 4345032 - DNA, 25 bp, Homo sapien
cactctccttaggccttgtgctctg

SEQ ID NO: 4345033 - DNA, 25 bp, Homo sapien
tgcccttgtccatgtgagtagcatg

SEQ ID NO: 4345034 - DNA, 25 bp, Homo sapien
tcccgtttagggtgtgacgcagcct

SEQ ID NO: 4345035 - DNA, 25 bp, Homo sapien
gcttttttccggcacaatcagccca

SEQ ID NO: 4345036 - DNA, 25 bp, Homo sapien
tgagccgcaatcagcgctcgctgtg

SEQ ID NO: 4345037 - DNA, 25 bp, Homo sapien
gacgcagcctgttctcatggctcag

SEQ ID NO: 4345038 - DNA, 25 bp, Homo sapien
tgcgctggctcctgagggtattaaa

SEQ ID NO: 4345039 - DNA, 25 bp, Homo sapien
gagggtattaaaccatcagctatta

SEQ ID NO: 4345040 - DNA, 25 bp, Homo sapien
tgctgcttgagtgcgctggctcctg

SEQ ID NO: 4345041 - DNA, 25 bp, Homo sapien
tcctgagggtattaaaccatcagct

SEQ ID NO: 4345042 - DNA, 25 bp, Homo sapien
gagcggtggctatgcaaaggcgcac

SEQ ID NO: 4345043 - DNA, 25 bp, Homo sapien
agcctcctttgcagcagcacaccac

SEQ ID NO: 4345044 - DNA, 25 bp, Homo sapien
gcacaccacagcgtggaggatctgg

SEQ ID NO: 4345045 - DNA, 25 bp, Homo sapien
agtggcagcctgctcgaggtgagcg

SEQ ID NO: 4345046 - DNA, 25 bp, Homo sapien
aagagcctctgagctagccctatca

SEQ ID NO: 4345047 - DNA, 25 bp, Homo sapien
ccaaggtttgcaactaagacccctg

SEQ ID NO: 4345048 - DNA, 25 bp, Homo sapien
gagctagccctatcagtgcatagag

SEQ ID NO: 4345049 - DNA, 25 bp, Homo sapien
ttgcaactaagacccctgatggtgt

SEQ ID NO: 4345050 - DNA, 25 bp, Homo sapien
atgggtcggtccttccaagacaccg

SEQ ID NO: 4345051 - DNA, 25 bp, Homo sapien
agacaccgtctaagagcccaggggc

SEQ ID NO: 4345052 - DNA, 25 bp, Homo sapien
gacaccgtctaagagcccaggggcc

SEQ ID NO: 4345053 - DNA, 25 bp, Homo sapien
ataagcctgagtcccaggtgggtct

SEQ ID NO: 4345054 - DNA, 25 bp, Homo sapien
tcataagcctgagtcccaggtgggt

SEQ ID NO: 4345055 - DNA, 25 bp, Homo sapien
gcctgagtcccaggtgggtcttcat

SEQ ID NO: 4345056 - DNA, 25 bp, Homo sapien
tgtcataagcctgagtcccaggtgg

SEQ ID NO: 4345057 - DNA, 25 bp, Homo sapien
tgtccgtggaattggaagggcacat

SEQ ID NO: 4345058 - DNA, 25 bp, Homo sapien
tgggccattggaactgtccgtggaa

SEQ ID NO: 4345059 - DNA, 25 bp, Homo sapien
ggtggtaggagggatgaacacacag

SEQ ID NO: 4345060 - DNA, 25 bp, Homo sapien
cacatcagcagtgggttcggcagtg

SEQ ID NO: 4345061 - DNA, 25 bp, Homo sapien
gggtgcagccactccagataagggt

SEQ ID NO: 4345062 - DNA, 25 bp, Homo sapien
gccaccagcgctctttcgtatatga

SEQ ID NO: 4345063 - DNA, 25 bp, Homo sapien
tggtcaccaacgagtgtcgcacgca

SEQ ID NO: 4345064 - DNA, 25 bp, Homo sapien
gaaggcattccccatatcaagattt

SEQ ID NO: 4345065 - DNA, 25 bp, Homo sapien
ggcatatttgatggtcatgtaacag

SEQ ID NO: 4345066 - DNA, 25 bp, Homo sapien
aggcatatttgatggtcatgtaaca

SEQ ID NO: 4345067 - DNA, 25 bp, Homo sapien
cttcttcacgtaattggagaaactt

SEQ ID NO: 4345068 - DNA, 25 bp, Homo sapien
cattttctcccgaccaaactcggag

SEQ ID NO: 4345069 - DNA, 25 bp, Homo sapien
cgttatcgcgcggacggtcgctctt

SEQ ID NO: 4345070 - DNA, 25 bp, Homo sapien
cctctgccgtcacgcgggttctttt

SEQ ID NO: 4345071 - DNA, 25 bp, Homo sapien
ccagctcaaagtctgcgtcccagtg

SEQ ID NO: 4345072 - DNA, 25 bp, Homo sapien
tctgcgtcccagtgcactgagtgcg

SEQ ID NO: 4345073 - DNA, 25 bp, Homo sapien
agtgcactgagtgcgtgtgcagcac

SEQ ID NO: 4345074 - DNA, 25 bp, Homo sapien
tcaaagtctgcgtcccagtgcactg

SEQ ID NO: 4345075 - DNA, 25 bp, Homo sapien
acctgactctgtgcatccagaacca

SEQ ID NO: 4345076 - DNA, 25 bp, Homo sapien
ctctccatgaaccaccagggatggt

SEQ ID NO: 4345077 - DNA, 25 bp, Homo sapien
aaaccctgatacatgacaccagtca

SEQ ID NO: 4345078 - DNA, 25 bp, Homo sapien
gggctcatggcatagggctcacaga

SEQ ID NO: 4345079 - DNA, 25 bp, Homo sapien
caatatcagctgtcctgtgacctcg

SEQ ID NO: 4345080 - DNA, 25 bp, Homo sapien
ggtgatggggagttttatgcagatg

SEQ ID NO: 4345081 - DNA, 25 bp, Homo sapien
tgcagatgagacctgaattgggtgt

SEQ ID NO: 4345082 - DNA, 25 bp, Homo sapien
tttatgcagatgagacctgaattgg

SEQ ID NO: 4345083 - DNA, 25 bp, Homo sapien
gacctgaattgggtgtgggcttcct

SEQ ID NO: 4345084 - DNA, 25 bp, Homo sapien
aggatagcagcttcggctgccggca

SEQ ID NO: 4345085 - DNA, 25 bp, Homo sapien
gctgccggcagcagatggaagaccc

SEQ ID NO: 4345086 - DNA, 25 bp, Homo sapien
tcattatgaaaaccggctcccagca

SEQ ID NO: 4345087 - DNA, 25 bp, Homo sapien
cagcagatggaagacccgggtgatt

SEQ ID NO: 4345088 - DNA, 25 bp, Homo sapien
gagtcgcatgagctcttgctcccct

SEQ ID NO: 4345089 - DNA, 25 bp, Homo sapien
agcccctgattgaggaggtcctgat

SEQ ID NO: 4345090 - DNA, 25 bp, Homo sapien
ggcagagagtcgcatgagctcttgc

SEQ ID NO: 4345091 - DNA, 25 bp, Homo sapien
tcaaccaaaccatcgtccaaaatgc

SEQ ID NO: 4345092 - DNA, 25 bp, Homo sapien
tgcacgggggtgcttttccctctac

SEQ ID NO: 4345093 - DNA, 25 bp, Homo sapien
actgctgacaactcatccggcctcc

SEQ ID NO: 4345094 - DNA, 25 bp, Homo sapien
tgaggttgtggacacctgatggcct

SEQ ID NO: 4345095 - DNA, 25 bp, Homo sapien
tttggtgtccccaccactaggcagc

SEQ ID NO: 4345096 - DNA, 25 bp, Homo sapien
taagtcttggcggtgaaagactcct

SEQ ID NO: 4345097 - DNA, 25 bp, Homo sapien
caggaacagcctgcaccactgtctg

SEQ ID NO: 4345098 - DNA, 25 bp, Homo sapien
gaacagcctgcaccactgtctgctg

SEQ ID NO: 4345099 - DNA, 25 bp, Homo sapien
gtcttggcggtgaaagactccttca

SEQ ID NO: 4345100 - DNA, 25 bp, Homo sapien
cccagagtctccagaaagtaccgct

SEQ ID NO: 4345101 - DNA, 25 bp, Homo sapien
tccagaaagtaccgctgggacactt

SEQ ID NO: 4345102 - DNA, 25 bp, Homo sapien
ccagagtctccagaaagtaccgctg

SEQ ID NO: 4345103 - DNA, 25 bp, Homo sapien
cagaaagtaccgctgggacacttcc

SEQ ID NO: 4345104 - DNA, 25 bp, Homo sapien
ataaagagaggtggatggctatgac

SEQ ID NO: 4345105 - DNA, 25 bp, Homo sapien
cagctaataaagagaggtggatggc

SEQ ID NO: 4345106 - DNA, 25 bp, Homo sapien
gctgtctccatcaattcagctaata

SEQ ID NO: 4345107 - DNA, 25 bp, Homo sapien
ctgctgtctccatcaattcagctaa

SEQ ID NO: 4345108 - DNA, 25 bp, Homo sapien
agctaattaaccggcctgaacaatc

SEQ ID NO: 4345109 - DNA, 25 bp, Homo sapien
ccaagctaattaaccggcctgaaca

SEQ ID NO: 4345110 - DNA, 25 bp, Homo sapien
gctaattaaccggcctgaacaatcc

SEQ ID NO: 4345111 - DNA, 25 bp, Homo sapien
caagctaattaaccggcctgaacaa

SEQ ID NO: 4345112 - DNA, 25 bp, Homo sapien
gccatagcggctcacagctctgttt

SEQ ID NO: 4345113 - DNA, 25 bp, Homo sapien
gattggttgtcatccctcttggcaa

SEQ ID NO: 4345114 - DNA, 25 bp, Homo sapien
gatgttccgatgaggggtccctgcc

SEQ ID NO: 4345115 - DNA, 25 bp, Homo sapien
tcttcttcagggtgagattggttgt

SEQ ID NO: 4345116 - DNA, 25 bp, Homo sapien
ctgccaagaaggccctctggtgtgc

SEQ ID NO: 4345117 - DNA, 25 bp, Homo sapien
ctggtgtgcggcagttagtgtggct

SEQ ID NO: 4345118 - DNA, 25 bp, Homo sapien
gccctctggtgtgcggcagttagtg

SEQ ID NO: 4345119 - DNA, 25 bp, Homo sapien
tctgccaagaaggccctctggtgtg

SEQ ID NO: 4345120 - DNA, 25 bp, Homo sapien
aaaagctgccgtggaccttgaaggc

SEQ ID NO: 4345121 - DNA, 25 bp, Homo sapien
gggagtctcagatcaggactcaggg

SEQ ID NO: 4345122 - DNA, 25 bp, Homo sapien
agcaacctaccccttggagccatgt

SEQ ID NO: 4345123 - DNA, 25 bp, Homo sapien
caggctctctcctggaatgagcacc

SEQ ID NO: 4345124 - DNA, 25 bp, Homo sapien
gcacatgctgcggaacctctaactg

SEQ ID NO: 4345125 - DNA, 25 bp, Homo sapien
acatgctgcggaacctctaactgct

SEQ ID NO: 4345126 - DNA, 25 bp, Homo sapien
tccatgctgtcagcacatgctgcgg

SEQ ID NO: 4345127 - DNA, 25 bp, Homo sapien
tgtcagcacatgctgcggaacctct

SEQ ID NO: 4345128 - DNA, 25 bp, Homo sapien
gagaaagcggatggctggcccgtgc

SEQ ID NO: 4345129 - DNA, 25 bp, Homo sapien
ggtgagaaagcggatggctggcccg

SEQ ID NO: 4345130 - DNA, 25 bp, Homo sapien
ttttagggtgagaaagcggatggct

SEQ ID NO: 4345131 - DNA, 25 bp, Homo sapien
tagggtgagaaagcggatggctggc

SEQ ID NO: 4345132 - DNA, 25 bp, Homo sapien
caagtgccttttacacagcctgaag

SEQ ID NO: 4345133 - DNA, 25 bp, Homo sapien
tcatgttcttggatgagggcagcaa

SEQ ID NO: 4345134 - DNA, 25 bp, Homo sapien
tctgctctccgtagttttctcttgg

SEQ ID NO: 4345135 - DNA, 25 bp, Homo sapien
ggatgatgccttctctagagtggtg

SEQ ID NO: 4345136 - DNA, 25 bp, Homo sapien
cgatgacaggtacacacacggctgg

SEQ ID NO: 4345137 - DNA, 25 bp, Homo sapien
gtcgatgacaggtacacacacggct

SEQ ID NO: 4345138 - DNA, 25 bp, Homo sapien
atgacaggtacacacacggctggcc

SEQ ID NO: 4345139 - DNA, 25 bp, Homo sapien
ctgtcgatgacaggtacacacacgg

SEQ ID NO: 4345140 - DNA, 25 bp, Homo sapien
tgagggtggaaagtgaacaaagaaa

SEQ ID NO: 4345141 - DNA, 25 bp, Homo sapien
caaaatctcgatgcctctgcctgga

SEQ ID NO: 4345142 - DNA, 25 bp, Homo sapien
caaggaagacttacacactttggac

SEQ ID NO: 4345143 - DNA, 25 bp, Homo sapien
tcctcatgggattctaagtcacaag

SEQ ID NO: 4345144 - DNA, 25 bp, Homo sapien
ggaagagttctgatcaagttgctaa

SEQ ID NO: 4345145 - DNA, 25 bp, Homo sapien
ggccccatcgaagtcacagatgcca

SEQ ID NO: 4345146 - DNA, 25 bp, Homo sapien
catcgaagtcacagatgccaacacc

SEQ ID NO: 4345147 - DNA, 25 bp, Homo sapien
gccggccccatcgaagtcacagatg

SEQ ID NO: 4345148 - DNA, 25 bp, Homo sapien
cccatcgaagtcacagatgccaaca

SEQ ID NO: 4345149 - DNA, 25 bp, Homo sapien
ggactggggagccgcaagcaggcag

SEQ ID NO: 4345150 - DNA, 25 bp, Homo sapien
aggactggggagccgcaagcaggca

SEQ ID NO: 4345151 - DNA, 25 bp, Homo sapien
gactggggagccgcaagcaggcagg

SEQ ID NO: 4345152 - DNA, 25 bp, Homo sapien
tgccaggatggtcgtcaggtgtcca

SEQ ID NO: 4345153 - DNA, 25 bp, Homo sapien
agctggatggcaggtggagaatcca

SEQ ID NO: 4345154 - DNA, 25 bp, Homo sapien
aggatggtcgtcaggtgtccagcct

SEQ ID NO: 4345155 - DNA, 25 bp, Homo sapien
gctggatggcaggtggagaatccag

SEQ ID NO: 4345156 - DNA, 25 bp, Homo sapien
caggcgggcactcactacaaacctt

SEQ ID NO: 4345157 - DNA, 25 bp, Homo sapien
atgtcatctggacccgacatgtggc

SEQ ID NO: 4345158 - DNA, 25 bp, Homo sapien
ggcactcactacaaaccttttagca

SEQ ID NO: 4345159 - DNA, 25 bp, Homo sapien
gcagctaatgtcatctggacccgac

SEQ ID NO: 4345160 - DNA, 25 bp, Homo sapien
ctgtgaaacacagaggccatagggt

SEQ ID NO: 4345161 - DNA, 25 bp, Homo sapien
gaaacacagaggccatagggtgcac

SEQ ID NO: 4345162 - DNA, 25 bp, Homo sapien
cacagaggccatagggtgcacctgg

SEQ ID NO: 4345163 - DNA, 25 bp, Homo sapien
aacacagaggccatagggtgcacct

SEQ ID NO: 4345164 - DNA, 25 bp, Homo sapien
agacttgacaagctggtgttccctg

SEQ ID NO: 4345165 - DNA, 25 bp, Homo sapien
caagagcgggaattaactggagact

SEQ ID NO: 4345166 - DNA, 25 bp, Homo sapien
cgggcatgtgcacgctgcatggaga

SEQ ID NO: 4345167 - DNA, 25 bp, Homo sapien
gggcaccccgggctttatcaagagc

SEQ ID NO: 4345168 - DNA, 25 bp, Homo sapien
ctggcagctcaaccactgcagtggg

SEQ ID NO: 4345169 - DNA, 25 bp, Homo sapien
ccaggctccgtacaactgtcagcag

SEQ ID NO: 4345170 - DNA, 25 bp, Homo sapien
tccgtacaactgtcagcagcacagt

SEQ ID NO: 4345171 - DNA, 25 bp, Homo sapien
tgcagtgggaaggaagtcgtgtccc

SEQ ID NO: 4345172 - DNA, 25 bp, Homo sapien
tagtgatggcggctttctctctgtg

SEQ ID NO: 4345173 - DNA, 25 bp, Homo sapien
tcccaagggtataatctgactatgc

SEQ ID NO: 4345174 - DNA, 25 bp, Homo sapien
ggtataatctgactatgccgctgct

SEQ ID NO: 4345175 - DNA, 25 bp, Homo sapien
taatctgactatgccgctgctactc

SEQ ID NO: 4345176 - DNA, 25 bp, Homo sapien
cagcacagtgcatcgatctgaaata

SEQ ID NO: 4345177 - DNA, 25 bp, Homo sapien
gatgtccttgagagcagttggaacc

SEQ ID NO: 4345178 - DNA, 25 bp, Homo sapien
acatacagcacagtgcatcgatctg

SEQ ID NO: 4345179 - DNA, 25 bp, Homo sapien
cagtgcatcgatctgaaatatcgtg

SEQ ID NO: 4345180 - DNA, 25 bp, Homo sapien
cagtagatgactgatacactttcca

SEQ ID NO: 4345181 - DNA, 25 bp, Homo sapien
tatgtgggctgataggcgtttactg

SEQ ID NO: 4345182 - DNA, 25 bp, Homo sapien
cgtttactgtatgctctgagggtgt

SEQ ID NO: 4345183 - DNA, 25 bp, Homo sapien
tcctggtcagaagccgcaggtatgt

SEQ ID NO: 4345184 - DNA, 25 bp, Homo sapien
gaagacagatgtgggaggggtgcag

SEQ ID NO: 4345185 - DNA, 25 bp, Homo sapien
gatgtgggaggggtgcagacggcca

SEQ ID NO: 4345186 - DNA, 25 bp, Homo sapien
gacagatgtgggaggggtgcagacg

SEQ ID NO: 4345187 - DNA, 25 bp, Homo sapien
cagagcagtgactgtgaagacagat

SEQ ID NO: 4345188 - DNA, 25 bp, Homo sapien
caggatccaggtgtaaatgcaggta

SEQ ID NO: 4345189 - DNA, 25 bp, Homo sapien
tgcagtgactggcatgaggttagcg

SEQ ID NO: 4345190 - DNA, 25 bp, Homo sapien
gaggttagcgtgtggacaggatcca

SEQ ID NO: 4345191 - DNA, 25 bp, Homo sapien
aagcagtcagctgccctcccaagta

SEQ ID NO: 4345192 - DNA, 25 bp, Homo sapien
aaccagctgacccttgtcttccagt

SEQ ID NO: 4345193 - DNA, 25 bp, Homo sapien
tggaggaccagactgcaaaccagct

SEQ ID NO: 4345194 - DNA, 25 bp, Homo sapien
gggagtctcactgtggaagcctgaa

SEQ ID NO: 4345195 - DNA, 25 bp, Homo sapien
ggtgtcagcaggcaggatcgggatg

SEQ ID NO: 4345196 - DNA, 25 bp, Homo sapien
gatggacaggctctcctaggtccat

SEQ ID NO: 4345197 - DNA, 25 bp, Homo sapien
caaaggatggacaggctctcctagg

SEQ ID NO: 4345198 - DNA, 25 bp, Homo sapien
aaaggatggacaggctctcctaggt

SEQ ID NO: 4345199 - DNA, 25 bp, Homo sapien
aggatggacaggctctcctaggtcc

SEQ ID NO: 4345200 - DNA, 25 bp, Homo sapien
tgaaggtggaagaactgaggggaca

SEQ ID NO: 4345201 - DNA, 25 bp, Homo sapien
ctgacctccctgtgcggcagaaact

SEQ ID NO: 4345202 - DNA, 25 bp, Homo sapien
gtgcggcagaaactccctcctcaat

SEQ ID NO: 4345203 - DNA, 25 bp, Homo sapien
ctgctgacctccctgtgcggcagaa

SEQ ID NO: 4345204 - DNA, 25 bp, Homo sapien
tcatctttgcacagaagtcatgcta

SEQ ID NO: 4345205 - DNA, 25 bp, Homo sapien
ctttgcacagaagtcatgctaatct

SEQ ID NO: 4345206 - DNA, 25 bp, Homo sapien
atgtcatctttgcacagaagtcatg

SEQ ID NO: 4345207 - DNA, 25 bp, Homo sapien
tctctgtatcattccaattttagta

SEQ ID NO: 4345208 - DNA, 25 bp, Homo sapien
tcaggattttagcagcatcttattt

SEQ ID NO: 4345209 - DNA, 25 bp, Homo sapien
caggattttagcagcatcttatttc

SEQ ID NO: 4345210 - DNA, 25 bp, Homo sapien
tcaaggtgttgagggtggtaatatt

SEQ ID NO: 4345211 - DNA, 25 bp, Homo sapien
attggagaacatgacctgattggaa

SEQ ID NO: 4345212 - DNA, 25 bp, Homo sapien
catgacctgattggaagctctaaaa

SEQ ID NO: 4345213 - DNA, 25 bp, Homo sapien
tttcaaggtgttgagggtggtaata

SEQ ID NO: 4345214 - DNA, 25 bp, Homo sapien
tccccactccatctgcaccagtcac

SEQ ID NO: 4345215 - DNA, 25 bp, Homo sapien
ctccccactccatctgcaccagtca

SEQ ID NO: 4345216 - DNA, 25 bp, Homo sapien
ctctttggtgaactcagccctcccc

SEQ ID NO: 4345217 - DNA, 25 bp, Homo sapien
ttggtgaactcagccctccccactc

SEQ ID NO: 4345218 - DNA, 25 bp, Homo sapien
tgtgtcctgacgtacaaagtcctgg

SEQ ID NO: 4345219 - DNA, 25 bp, Homo sapien
gaagacccaatcaatgtgagtcccc

SEQ ID NO: 4345220 - DNA, 25 bp, Homo sapien
cactcaagaatggaggttctaatga

SEQ ID NO: 4345221 - DNA, 25 bp, Homo sapien
agccaaactcccactaacactcaag

SEQ ID NO: 4345222 - DNA, 25 bp, Homo sapien
tagatgttcaccacattcagagggc

SEQ ID NO: 4345223 - DNA, 25 bp, Homo sapien
ccttatgtgaaactggcttggtaga

SEQ ID NO: 4345224 - DNA, 25 bp, Homo sapien
tcctagaagacccattcaacagggc

SEQ ID NO: 4345225 - DNA, 25 bp, Homo sapien
tgagcttacccatgaccttatgtga

SEQ ID NO: 4345226 - DNA, 25 bp, Homo sapien
gcagccctggacaaggggagggcgc

SEQ ID NO: 4345227 - DNA, 25 bp, Homo sapien
ctccagtgaaggttcccaggggcca

SEQ ID NO: 4345228 - DNA, 25 bp, Homo sapien
cagggcagccctggacaaggggagg

SEQ ID NO: 4345229 - DNA, 25 bp, Homo sapien
ggtttctgctttgtggcagcagcag

SEQ ID NO: 4345230 - DNA, 25 bp, Homo sapien
gcagggggtcatccaagttctcctg

SEQ ID NO: 4345231 - DNA, 25 bp, Homo sapien
cagggggtcatccaagttctcctgg

SEQ ID NO: 4345232 - DNA, 25 bp, Homo sapien
tcatgacaacacaaagtaagggctc

SEQ ID NO: 4345233 - DNA, 25 bp, Homo sapien
gacagaacatacaaagcggaggcaa

SEQ ID NO: 4345234 - DNA, 25 bp, Homo sapien
acactgggacactctgcacgatggt

SEQ ID NO: 4345235 - DNA, 25 bp, Homo sapien
tagaggtctgcacgatgcacaaagt

SEQ ID NO: 4345236 - DNA, 25 bp, Homo sapien
gcctcagagatacaccaatgccaga

SEQ ID NO: 4345237 - DNA, 25 bp, Homo sapien
tgtcaaattagcacagggtcactgc

SEQ ID NO: 4345238 - DNA, 25 bp, Homo sapien
gaagagcagctttcaaccactagat

SEQ ID NO: 4345239 - DNA, 25 bp, Homo sapien
cagagggaggtcgatggatttctca

SEQ ID NO: 4345240 - DNA, 25 bp, Homo sapien
gctgtccagttatccaatttgaaag

SEQ ID NO: 4345241 - DNA, 25 bp, Homo sapien
tgagacaacagaaagtgccattgct

SEQ ID NO: 4345242 - DNA, 25 bp, Homo sapien
tcttctcaaagctagaggcagtggg

SEQ ID NO: 4345243 - DNA, 25 bp, Homo sapien
tggctattgttaaatcctgcaggga

SEQ ID NO: 4345244 - DNA, 25 bp, Homo sapien
gagcagaatctcattcaaggtggcc

SEQ ID NO: 4345245 - DNA, 25 bp, Homo sapien
atctcattcaaggtggcccagtccg

SEQ ID NO: 4345246 - DNA, 25 bp, Homo sapien
cagaatctcattcaaggtggcccag

SEQ ID NO: 4345247 - DNA, 25 bp, Homo sapien
tgcaggtgccttttttgagcagaat

SEQ ID NO: 4345248 - DNA, 25 bp, Homo sapien
tctctctcttaaaggcagctcaggg

SEQ ID NO: 4345249 - DNA, 25 bp, Homo sapien
ggtgcttgccaatctcagagttgtc

SEQ ID NO: 4345250 - DNA, 25 bp, Homo sapien
ccctgaagctcgggaagaggtgctt

SEQ ID NO: 4345251 - DNA, 25 bp, Homo sapien
gggagtcaggtcgttcaccacatgc

SEQ ID NO: 4345252 - DNA, 25 bp, Homo sapien
tatccatcatatcgtgcctggccaa

SEQ ID NO: 4345253 - DNA, 25 bp, Homo sapien
cctcgtgtgtacttctttggtctgc

SEQ ID NO: 4345254 - DNA, 25 bp, Homo sapien
tggtctgcttcagcgtatccatcat

SEQ ID NO: 4345255 - DNA, 25 bp, Homo sapien
tctctgttgtttcctcgtgtgtact

SEQ ID NO: 4345256 - DNA, 25 bp, Homo sapien
ctgttgccgacaagagggaaatgag

SEQ ID NO: 4345257 - DNA, 25 bp, Homo sapien
tgttgccgacaagagggaaatgagg

SEQ ID NO: 4345258 - DNA, 25 bp, Homo sapien
gatctcaccttgaatgcccttcatg

SEQ ID NO: 4345259 - DNA, 25 bp, Homo sapien
gcccttcctctagccttgatctcac

SEQ ID NO: 4345260 - DNA, 25 bp, Homo sapien
ggaggcaccagaacctacgggagct

SEQ ID NO: 4345261 - DNA, 25 bp, Homo sapien
tgcttctacaactgggatctgaata

SEQ ID NO: 4345262 - DNA, 25 bp, Homo sapien
ccactgattcgatgaggcctatgca

SEQ ID NO: 4345263 - DNA, 25 bp, Homo sapien
cttatgtggctatgaggactggctg

SEQ ID NO: 4345264 - DNA, 25 bp, Homo sapien
tcagtcaaggttccaccagagaagt

SEQ ID NO: 4345265 - DNA, 25 bp, Homo sapien
ggcctatgcagctcattcgggatca

SEQ ID NO: 4345266 - DNA, 25 bp, Homo sapien
tagagtcttcttctgacgcttggta

SEQ ID NO: 4345267 - DNA, 25 bp, Homo sapien
tcttctgacgcttggtaaggccaat

SEQ ID NO: 4345268 - DNA, 25 bp, Homo sapien
cttcttctgacgcttggtaaggcca

SEQ ID NO: 4345269 - DNA, 25 bp, Homo sapien
tgacgcttggtaaggccaatttcat

SEQ ID NO: 4345270 - DNA, 25 bp, Homo sapien
ttcactatgaccataacttgcacag

SEQ ID NO: 4345271 - DNA, 25 bp, Homo sapien
tgaccataacttgcacagtacccac

SEQ ID NO: 4345272 - DNA, 25 bp, Homo sapien
tatgaccataacttgcacagtaccc

SEQ ID NO: 4345273 - DNA, 25 bp, Homo sapien
ccaccttcactatgaccataacttg

SEQ ID NO: 4345274 - DNA, 25 bp, Homo sapien
agcaggttctgattagagacatgcc

SEQ ID NO: 4345275 - DNA, 25 bp, Homo sapien
ctgtcaatcaaaaagacaagcaggt

SEQ ID NO: 4345276 - DNA, 25 bp, Homo sapien
tcctgtgaactgtcctagcaggcct

SEQ ID NO: 4345277 - DNA, 25 bp, Homo sapien
gagaagtctgtcttggagggagtgc

SEQ ID NO: 4345278 - DNA, 25 bp, Homo sapien
gcatagctgcactggatgaaggtga

SEQ ID NO: 4345279 - DNA, 25 bp, Homo sapien
tggtcggatggagggacctcgggag

SEQ ID NO: 4345280 - DNA, 25 bp, Homo sapien
tgagtacagtgtggcggggctgagg

SEQ ID NO: 4345281 - DNA, 25 bp, Homo sapien
tagatgtggtcggatggagggacct

SEQ ID NO: 4345282 - DNA, 25 bp, Homo sapien
ccctccagtagaggtgtgtccacac

SEQ ID NO: 4345283 - DNA, 25 bp, Homo sapien
tcttgaccctccagtagaggtgtgt

SEQ ID NO: 4345284 - DNA, 25 bp, Homo sapien
gaaaccacagtcgtgtcttgaccct

SEQ ID NO: 4345285 - DNA, 25 bp, Homo sapien
ttatgggtgcagctcagcaattcca

SEQ ID NO: 4345286 - DNA, 25 bp, Homo sapien
atacgacgctcttgggtggagttgc

SEQ ID NO: 4345287 - DNA, 25 bp, Homo sapien
gtggagttgcgaggctgcggcacag

SEQ ID NO: 4345288 - DNA, 25 bp, Homo sapien
aggctgcggcacagctggcgcgcat

SEQ ID NO: 4345289 - DNA, 25 bp, Homo sapien
tcagtgcccgcggatacgacgctct

SEQ ID NO: 4345290 - DNA, 25 bp, Homo sapien
gatttgggagcgactccccggtctg

SEQ ID NO: 4345291 - DNA, 25 bp, Homo sapien
acggacacgcacgttccagaggagg

SEQ ID NO: 4345292 - DNA, 25 bp, Homo sapien
ggcagacgctccatgggcccgagtc

SEQ ID NO: 4345293 - DNA, 25 bp, Homo sapien
ggcacagaggcggagctccgatttg

SEQ ID NO: 4345294 - DNA, 25 bp, Homo sapien
ggacacatttttcaatgacttggac

SEQ ID NO: 4345295 - DNA, 25 bp, Homo sapien
acgtgacttaaagtgaccacaggac

SEQ ID NO: 4345296 - DNA, 25 bp, Homo sapien
caattactgaaacgtgacttaaagt

SEQ ID NO: 4345297 - DNA, 25 bp, Homo sapien
tggacttggacactctcaattactg

SEQ ID NO: 4345298 - DNA, 25 bp, Homo sapien
cccatcacggccagagtaccagtca

SEQ ID NO: 4345299 - DNA, 25 bp, Homo sapien
ccatcacggccagagtaccagtcag

SEQ ID NO: 4345300 - DNA, 25 bp, Homo sapien
gtggaaggcacctcttctcagggtg

SEQ ID NO: 4345301 - DNA, 25 bp, Homo sapien
tcatggtggaaggcacctcttctca

SEQ ID NO: 4345302 - DNA, 25 bp, Homo sapien
catggtggaaggcacctcttctcag

SEQ ID NO: 4345303 - DNA, 25 bp, Homo sapien
tggtggaaggcacctcttctcaggg

SEQ ID NO: 4345304 - DNA, 25 bp, Homo sapien
aaagtcctcccagcaagagtgtgga

SEQ ID NO: 4345305 - DNA, 25 bp, Homo sapien
aagtcctcccagcaagagtgtggag

SEQ ID NO: 4345306 - DNA, 25 bp, Homo sapien
gtcctcccagcaagagtgtggagca

SEQ ID NO: 4345307 - DNA, 25 bp, Homo sapien
tcctcccagcaagagtgtggagcac

SEQ ID NO: 4345308 - DNA, 25 bp, Homo sapien
tcatcagcctgacaagccagttcat

SEQ ID NO: 4345309 - DNA, 25 bp, Homo sapien
ttcatgtagcgagaagacacccgtc

SEQ ID NO: 4345310 - DNA, 25 bp, Homo sapien
gacacccgtcagctctttctctagg

SEQ ID NO: 4345311 - DNA, 25 bp, Homo sapien
gctctttctctaggccaggtcgtgc

SEQ ID NO: 4345312 - DNA, 25 bp, Homo sapien
ggagaacaagagagcagccaggcac

SEQ ID NO: 4345313 - DNA, 25 bp, Homo sapien
caggcaccatgagggccctcagggc

SEQ ID NO: 4345314 - DNA, 25 bp, Homo sapien
gaacaagagagcagccaggcaccat

SEQ ID NO: 4345315 - DNA, 25 bp, Homo sapien
ctcagggctatggtctcgaccacca

SEQ ID NO: 4345316 - DNA, 25 bp, Homo sapien
cagactggacacaattgaaaccaca

SEQ ID NO: 4345317 - DNA, 25 bp, Homo sapien
gtcccttccggaagttgggatcaga

SEQ ID NO: 4345318 - DNA, 25 bp, Homo sapien
actggacacaattgaaaccacaggc

SEQ ID NO: 4345319 - DNA, 25 bp, Homo sapien
cttccggaagttgggatcagactgg

SEQ ID NO: 4345320 - DNA, 25 bp, Homo sapien
cagggcaatcctgaggtgcatctca

SEQ ID NO: 4345321 - DNA, 25 bp, Homo sapien
caggtggtggtgatcggcacacatc

SEQ ID NO: 4345322 - DNA, 25 bp, Homo sapien
cattgggaaagtggattccagtacc

SEQ ID NO: 4345323 - DNA, 25 bp, Homo sapien
taatgggctgattctccttcgaggc

SEQ ID NO: 4345324 - DNA, 25 bp, Homo sapien
tggagtgggcgtgtctcctcgctgg

SEQ ID NO: 4345325 - DNA, 25 bp, Homo sapien
gagtgggcgtgtctcctcgctggtc

SEQ ID NO: 4345326 - DNA, 25 bp, Homo sapien
ttcccctggagtgggcgtgtctcct

SEQ ID NO: 4345327 - DNA, 25 bp, Homo sapien
ccctggagtgggcgtgtctcctcgc

SEQ ID NO: 4345328 - DNA, 25 bp, Homo sapien
gccctgtagcaatagttctgcaaga

SEQ ID NO: 4345329 - DNA, 25 bp, Homo sapien
acccagacccacataaggatgacat

SEQ ID NO: 4345330 - DNA, 25 bp, Homo sapien
cagacccacataaggatgacatggc

SEQ ID NO: 4345331 - DNA, 25 bp, Homo sapien
tgctgatggccctgtagcaatagtt

SEQ ID NO: 4345332 - DNA, 25 bp, Homo sapien
cctggttccaggtaccagagacacc

SEQ ID NO: 4345333 - DNA, 25 bp, Homo sapien
cacctggttccaggtaccagagaca

SEQ ID NO: 4345334 - DNA, 25 bp, Homo sapien
gttccaggtaccagagacaccccat

SEQ ID NO: 4345335 - DNA, 25 bp, Homo sapien
tggttccaggtaccagagacacccc

SEQ ID NO: 4345336 - DNA, 25 bp, Homo sapien
atgctcgaccctgcatgggtcacag

SEQ ID NO: 4345337 - DNA, 25 bp, Homo sapien
tgggatgctcgaccctgcatgggtc

SEQ ID NO: 4345338 - DNA, 25 bp, Homo sapien
ctgggatgctcgaccctgcatgggt

SEQ ID NO: 4345339 - DNA, 25 bp, Homo sapien
ggatgctcgaccctgcatgggtcac

SEQ ID NO: 4345340 - DNA, 25 bp, Homo sapien
gctgtgctgcattggcactgtgttc

SEQ ID NO: 4345341 - DNA, 25 bp, Homo sapien
tctgaggagccggtggcgagtctga

SEQ ID NO: 4345342 - DNA, 25 bp, Homo sapien
gcgagtctgaggtctcaagtgccca

SEQ ID NO: 4345343 - DNA, 25 bp, Homo sapien
ccggcaggccgggtgtcactatgct

SEQ ID NO: 4345344 - DNA, 25 bp, Homo sapien
ctgaagggtgcaggaactcagactg

SEQ ID NO: 4345345 - DNA, 25 bp, Homo sapien
tgcatccgcataccaggcgttggtg

SEQ ID NO: 4345346 - DNA, 25 bp, Homo sapien
gagctgcatccgcataccaggcgtt

SEQ ID NO: 4345347 - DNA, 25 bp, Homo sapien
cgcataccaggcgttggtgtcacca

SEQ ID NO: 4345348 - DNA, 25 bp, Homo sapien
ataccaggcgttggtgtcaccacag

SEQ ID NO: 4345349 - DNA, 25 bp, Homo sapien
tagggtcagcctaagttgcaggaaa

SEQ ID NO: 4345350 - DNA, 25 bp, Homo sapien
gggtcagcctaagttgcaggaaaaa

SEQ ID NO: 4345351 - DNA, 25 bp, Homo sapien
gaataagtagggtcagcctaagttg

SEQ ID NO: 4345352 - DNA, 25 bp, Homo sapien
taagtagggtcagcctaagttgcag

SEQ ID NO: 4345353 - DNA, 25 bp, Homo sapien
ggtaaaatagccagtttctctatat

SEQ ID NO: 4345354 - DNA, 25 bp, Homo sapien
tgccacaagttaagctattcacaga

SEQ ID NO: 4345355 - DNA, 25 bp, Homo sapien
tctctatattgccacaagttaagct

SEQ ID NO: 4345356 - DNA, 25 bp, Homo sapien
aatagccagtttctctatattgcca

SEQ ID NO: 4345357 - DNA, 25 bp, Homo sapien
agccaggttcgcagagggtctctga

SEQ ID NO: 4345358 - DNA, 25 bp, Homo sapien
gaccaaagccaggttcgcagagggt

SEQ ID NO: 4345359 - DNA, 25 bp, Homo sapien
ccaaagccaggttcgcagagggtct

SEQ ID NO: 4345360 - DNA, 25 bp, Homo sapien
gggaccaaagccaggttcgcagagg

SEQ ID NO: 4345361 - DNA, 25 bp, Homo sapien
accagctagcaatgtactcctcatg

SEQ ID NO: 4345362 - DNA, 25 bp, Homo sapien
tattatcaccaatagtgccgcctaa

SEQ ID NO: 4345363 - DNA, 25 bp, Homo sapien
caaactaccgcaaaacacagaggat

SEQ ID NO: 4345364 - DNA, 25 bp, Homo sapien
ttcttgggtccgctggcagctcagc

SEQ ID NO: 4345365 - DNA, 25 bp, Homo sapien
gaacaattctgtatcccctctgaga

SEQ ID NO: 4345366 - DNA, 25 bp, Homo sapien
tcaatgtcatgcagaaccaggcctg

SEQ ID NO: 4345367 - DNA, 25 bp, Homo sapien
caagacataatgaccccagggtgca

SEQ ID NO: 4345368 - DNA, 25 bp, Homo sapien
gaataatagtgtctcccaacagggt

SEQ ID NO: 4345369 - DNA, 25 bp, Homo sapien
tccagcacgtcaggcctgcggtgtg

SEQ ID NO: 4345370 - DNA, 25 bp, Homo sapien
aaagctctgtgggttttgcacgcca

SEQ ID NO: 4345371 - DNA, 25 bp, Homo sapien
tgggccttatctctccacacggaaa

SEQ ID NO: 4345372 - DNA, 25 bp, Homo sapien
ggctcggctttagcactccactggg

SEQ ID NO: 4345373 - DNA, 25 bp, Homo sapien
tggagttccttccttggcccagtga

SEQ ID NO: 4345374 - DNA, 25 bp, Homo sapien
aggtccttccctccaatgcccttgg

SEQ ID NO: 4345375 - DNA, 25 bp, Homo sapien
acttggccctctgtggtccttgaag

SEQ ID NO: 4345376 - DNA, 25 bp, Homo sapien
ctgtcagcacgccagcctcttactc

SEQ ID NO: 4345377 - DNA, 25 bp, Homo sapien
cagtggactgagggggagggaagcc

SEQ ID NO: 4345378 - DNA, 25 bp, Homo sapien
gtggactgagggggagggaagccat

SEQ ID NO: 4345379 - DNA, 25 bp, Homo sapien
aggccagtggactgagggggaggga

SEQ ID NO: 4345380 - DNA, 25 bp, Homo sapien
gccagtggactgagggggagggaag

SEQ ID NO: 4345381 - DNA, 25 bp, Homo sapien
tctgagggccaacaattctaggaag

SEQ ID NO: 4345382 - DNA, 25 bp, Homo sapien
ggctcagcgacctcagcacaagtgt

SEQ ID NO: 4345383 - DNA, 25 bp, Homo sapien
taggtggttcacatggcgtcttcca

SEQ ID NO: 4345384 - DNA, 25 bp, Homo sapien
gatatgcatgtagagtctgagggcc

SEQ ID NO: 4345385 - DNA, 25 bp, Homo sapien
ttctaacatgaaatggccattccca

SEQ ID NO: 4345386 - DNA, 25 bp, Homo sapien
ttagggcatccattctatctctcac

SEQ ID NO: 4345387 - DNA, 25 bp, Homo sapien
ccatagggcatttcttaaggaatgt

SEQ ID NO: 4345388 - DNA, 25 bp, Homo sapien
tcttctttagggcatccattctatc

SEQ ID NO: 4345389 - DNA, 25 bp, Homo sapien
ttcagctgcttctccctggtggcat

SEQ ID NO: 4345390 - DNA, 25 bp, Homo sapien
tgcttctccctggtggcattttcag

SEQ ID NO: 4345391 - DNA, 25 bp, Homo sapien
ccctggtggcattttcagtttcatc

SEQ ID NO: 4345392 - DNA, 25 bp, Homo sapien
tctccctggtggcattttcagtttc

SEQ ID NO: 4345393 - DNA, 25 bp, Homo sapien
ggcgcttctgtctggatgaatgcca

SEQ ID NO: 4345394 - DNA, 25 bp, Homo sapien
gaataaaccagtcactgaagggcaa

SEQ ID NO: 4345395 - DNA, 25 bp, Homo sapien
aatccaagtgtccattgtcagagga

SEQ ID NO: 4345396 - DNA, 25 bp, Homo sapien
cagctctctggtgagttggcgcttc

SEQ ID NO: 4345397 - DNA, 25 bp, Homo sapien
ggtccagaggcgctcatgatgctta

SEQ ID NO: 4345398 - DNA, 25 bp, Homo sapien
ggtgaaccaggagctgtgcagcctt

SEQ ID NO: 4345399 - DNA, 25 bp, Homo sapien
gatggtccagatctagcaggtccag

SEQ ID NO: 4345400 - DNA, 25 bp, Homo sapien
ctccacaaggcacgtcagaggtcca

SEQ ID NO: 4345401 - DNA, 25 bp, Homo sapien
cattgtgcagactaggaagttcgag

SEQ ID NO: 4345402 - DNA, 25 bp, Homo sapien
gactaggaagttcgaggacttggcc

SEQ ID NO: 4345403 - DNA, 25 bp, Homo sapien
tgcagactaggaagttcgaggactt

SEQ ID NO: 4345404 - DNA, 25 bp, Homo sapien
taggaagttcgaggacttggccttg

SEQ ID NO: 4345405 - DNA, 25 bp, Homo sapien
ggcagagaacatgcccagtgcacac

SEQ ID NO: 4345406 - DNA, 25 bp, Homo sapien
tggtgaggcagagaacatgcccagt

SEQ ID NO: 4345407 - DNA, 25 bp, Homo sapien
tgaggcagagaacatgcccagtgca

SEQ ID NO: 4345408 - DNA, 25 bp, Homo sapien
gggatggtgaggcagagaacatgcc

SEQ ID NO: 4345409 - DNA, 25 bp, Homo sapien
tatgcagctgctatcaggcatgtgc

SEQ ID NO: 4345410 - DNA, 25 bp, Homo sapien
tgcctggtctgtagacagcccgcag

SEQ ID NO: 4345411 - DNA, 25 bp, Homo sapien
ttgaggccactgtgcacgagctggc

SEQ ID NO: 4345412 - DNA, 25 bp, Homo sapien
gaggtagggccgtgcaccttctaag

SEQ ID NO: 4345413 - DNA, 25 bp, Homo sapien
gacaagatgaccacacgaaatggat

SEQ ID NO: 4345414 - DNA, 25 bp, Homo sapien
tggtgtgatgaggagcacctcctct

SEQ ID NO: 4345415 - DNA, 25 bp, Homo sapien
catcctgtggactaactggccagcg

SEQ ID NO: 4345416 - DNA, 25 bp, Homo sapien
gcagtggcactggtgcatggacccc

SEQ ID NO: 4345417 - DNA, 25 bp, Homo sapien
atgtggctgtccgaacaccagggct

SEQ ID NO: 4345418 - DNA, 25 bp, Homo sapien
tccggagggcggtgccgtctttaca

SEQ ID NO: 4345419 - DNA, 25 bp, Homo sapien
gcatgggcccctctatgcttcaggc

SEQ ID NO: 4345420 - DNA, 25 bp, Homo sapien
aaacagaatagacctgcatgggccc

SEQ ID NO: 4345421 - DNA, 25 bp, Homo sapien
tgaatcagatctgcctgtcgccgtg

SEQ ID NO: 4345422 - DNA, 25 bp, Homo sapien
caagtgctggcacgtgaccaagaga

SEQ ID NO: 4345423 - DNA, 25 bp, Homo sapien
tgatgctgaccataccactgggtac

SEQ ID NO: 4345424 - DNA, 25 bp, Homo sapien
tttggatctgctctgaacacgcggg

SEQ ID NO: 4345425 - DNA, 25 bp, Homo sapien
ctgcccagttccccactctttgctc

SEQ ID NO: 4345426 - DNA, 25 bp, Homo sapien
tgcccagttccccactctttgctcc

SEQ ID NO: 4345427 - DNA, 25 bp, Homo sapien
gcccagttccccactctttgctccc

SEQ ID NO: 4345428 - DNA, 25 bp, Homo sapien
gccatcgttcctgtggtcatgcggt

SEQ ID NO: 4345429 - DNA, 25 bp, Homo sapien
ttcctgtggtcatgcggttgccacc

SEQ ID NO: 4345430 - DNA, 25 bp, Homo sapien
gtcctggccactgtatggcggctcc

SEQ ID NO: 4345431 - DNA, 25 bp, Homo sapien
tggtcctggccactgtatggcggct

SEQ ID NO: 4345432 - DNA, 25 bp, Homo sapien
gggcaaagatgaggcacagggcgaa

SEQ ID NO: 4345433 - DNA, 25 bp, Homo sapien
gggatgctgggcaaagatgaggcac

SEQ ID NO: 4345434 - DNA, 25 bp, Homo sapien
aggcacagggcgaaggtcggaggca

SEQ ID NO: 4345435 - DNA, 25 bp, Homo sapien
tgctgggcaaagatgaggcacaggg

SEQ ID NO: 4345436 - DNA, 25 bp, Homo sapien
tataagttacttccaacctcatgct

SEQ ID NO: 4345437 - DNA, 25 bp, Homo sapien
taaccagagcttatctagacattcc

SEQ ID NO: 4345438 - DNA, 25 bp, Homo sapien
ttttataacccacatagcaatctca

SEQ ID NO: 4345439 - DNA, 25 bp, Homo sapien
ccctattgctagacatataagttac

SEQ ID NO: 4345440 - DNA, 25 bp, Homo sapien
tgtgtatctagcgaaaaatcaggga

SEQ ID NO: 4345441 - DNA, 25 bp, Homo sapien
ggacaactattgatctctgcagaag

SEQ ID NO: 4345442 - DNA, 25 bp, Homo sapien
gacattagcattacagaaagaggga

SEQ ID NO: 4345443 - DNA, 25 bp, Homo sapien
tacacatccgttggtgtgaacacag

SEQ ID NO: 4345444 - DNA, 25 bp, Homo sapien
agcagagagaaccggctgcccaaga

SEQ ID NO: 4345445 - DNA, 25 bp, Homo sapien
tgtctgtcccccctactcagatggg

SEQ ID NO: 4345446 - DNA, 25 bp, Homo sapien
ggggctggctcacaaaacatagttc

SEQ ID NO: 4345447 - DNA, 25 bp, Homo sapien
tgcgttttaatggagctgagcagag

SEQ ID NO: 4345448 - DNA, 25 bp, Homo sapien
tgcccacagaacgtcccttgacctg

SEQ ID NO: 4345449 - DNA, 25 bp, Homo sapien
ggtgccctcagccaaccttgccaag

SEQ ID NO: 4345450 - DNA, 25 bp, Homo sapien
atggtgggaacagggccacacaggg

SEQ ID NO: 4345451 - DNA, 25 bp, Homo sapien
atccaccatggtggatgctttgagg

SEQ ID NO: 4345452 - DNA, 25 bp, Homo sapien
cctcccctggggactctgggcctgc

SEQ ID NO: 4345453 - DNA, 25 bp, Homo sapien
ccctggggactctgggcctgctggc

SEQ ID NO: 4345454 - DNA, 25 bp, Homo sapien
tcccctggggactctgggcctgctg

SEQ ID NO: 4345455 - DNA, 25 bp, Homo sapien
ctcctcccctggggactctgggcct

SEQ ID NO: 4345456 - DNA, 25 bp, Homo sapien
ctcctctctggcctgtcctccacag

SEQ ID NO: 4345457 - DNA, 25 bp, Homo sapien
ctgtcctccacaggccctggcagct

SEQ ID NO: 4345458 - DNA, 25 bp, Homo sapien
cctccacaggccctggcagctgccc

SEQ ID NO: 4345459 - DNA, 25 bp, Homo sapien
gtcctccacaggccctggcagctgc

SEQ ID NO: 4345460 - DNA, 25 bp, Homo sapien
ggcattgatggccttccagcgctcg

SEQ ID NO: 4345461 - DNA, 25 bp, Homo sapien
gcagggcatggaagcgatgtcatcc

SEQ ID NO: 4345462 - DNA, 25 bp, Homo sapien
gaactgcgtgctcgagtagctggca

SEQ ID NO: 4345463 - DNA, 25 bp, Homo sapien
cccgccggcagagtcgaactgcgtg

SEQ ID NO: 4345464 - DNA, 25 bp, Homo sapien
tatgcccgtgtgtatccgtatgtgc

SEQ ID NO: 4345465 - DNA, 25 bp, Homo sapien
tcatgaggcttcaacagtgcctgcc

SEQ ID NO: 4345466 - DNA, 25 bp, Homo sapien
ggaattgaccaacagtcgcctgaca

SEQ ID NO: 4345467 - DNA, 25 bp, Homo sapien
taaaaaccagcaatgtagaacaccg

SEQ ID NO: 4345468 - DNA, 25 bp, Homo sapien
tgcgcatgcgcactgtatgcataca

SEQ ID NO: 4345469 - DNA, 25 bp, Homo sapien
catgctggaagaaggcgcagttccg

SEQ ID NO: 4345470 - DNA, 25 bp, Homo sapien
gcatgtatgtatgtgcgtgcgcatg

SEQ ID NO: 4345471 - DNA, 25 bp, Homo sapien
tacacagcctctcagcttcaatcct

SEQ ID NO: 4345472 - DNA, 25 bp, Homo sapien
agccccggaggaaagccacgtagat

SEQ ID NO: 4345473 - DNA, 25 bp, Homo sapien
gagcggagcgaagaagctgaagtac

SEQ ID NO: 4345474 - DNA, 25 bp, Homo sapien
ccacgtagatgagcggagcgaagaa

SEQ ID NO: 4345475 - DNA, 25 bp, Homo sapien
ccggaggaaagccacgtagatgagc

SEQ ID NO: 4345476 - DNA, 25 bp, Homo sapien
cgatgatgtcgaagcacagcagcac

SEQ ID NO: 4345477 - DNA, 25 bp, Homo sapien
cctgcagtaggttgagcagtgccag

SEQ ID NO: 4345478 - DNA, 25 bp, Homo sapien
ccctcgatgatgtcgaagcacagca

SEQ ID NO: 4345479 - DNA, 25 bp, Homo sapien
tgcccgcatacacgtagaagctcct

SEQ ID NO: 4345480 - DNA, 25 bp, Homo sapien
taccagctctacagtggcccggtag

SEQ ID NO: 4345481 - DNA, 25 bp, Homo sapien
cagctctacagtggcccggtagact

SEQ ID NO: 4345482 - DNA, 25 bp, Homo sapien
agctaccagctctacagtggcccgg

SEQ ID NO: 4345483 - DNA, 25 bp, Homo sapien
ctcccagctaccagctctacagtgg

SEQ ID NO: 4345484 - DNA, 25 bp, Homo sapien
tgggaaggatgaccaccagagagta

SEQ ID NO: 4345485 - DNA, 25 bp, Homo sapien
ccttcagcggggtcttgggaaggat

SEQ ID NO: 4345486 - DNA, 25 bp, Homo sapien
aaggcagggagatgcgctccttcag

SEQ ID NO: 4345487 - DNA, 25 bp, Homo sapien
aggcagggagatgcgctccttcagc

SEQ ID NO: 4345488 - DNA, 25 bp, Homo sapien
gccagaaacccaggaatccaatccc

SEQ ID NO: 4345489 - DNA, 25 bp, Homo sapien
tccaatccctacctggccctaaggc

SEQ ID NO: 4345490 - DNA, 25 bp, Homo sapien
ccagaaacccaggaatccaatccct

SEQ ID NO: 4345491 - DNA, 25 bp, Homo sapien
cagaaacccaggaatccaatcccta

SEQ ID NO: 4345492 - DNA, 25 bp, Homo sapien
ccccatggccatagatattaaagtc

SEQ ID NO: 4345493 - DNA, 25 bp, Homo sapien
catggccatagatattaaagtcctc

SEQ ID NO: 4345494 - DNA, 25 bp, Homo sapien
ggcccccatggccatagatattaaa

SEQ ID NO: 4345495 - DNA, 25 bp, Homo sapien
ccagccagaactggcggcccccatg

SEQ ID NO: 4345496 - DNA, 25 bp, Homo sapien
cagcacccgcttgatgctggactta

SEQ ID NO: 4345497 - DNA, 25 bp, Homo sapien
tggtgatggccagcacccgcttgat

SEQ ID NO: 4345498 - DNA, 25 bp, Homo sapien
tgatggccagcacccgcttgatgct

SEQ ID NO: 4345499 - DNA, 25 bp, Homo sapien
acccgcttgatgctggacttactct

SEQ ID NO: 4345500 - DNA, 25 bp, Homo sapien
gatcacactcagctcgatggccagc

SEQ ID NO: 4345501 - DNA, 25 bp, Homo sapien
tgatcacactcagctcgatggccag

SEQ ID NO: 4345502 - DNA, 25 bp, Homo sapien
ccagcaggaagaagcgggtgatctc

SEQ ID NO: 4345503 - DNA, 25 bp, Homo sapien
agaagcgggtgatctcccacaggat

SEQ ID NO: 4345504 - DNA, 25 bp, Homo sapien
gttgcagcgttcgaggtgctcaccg

SEQ ID NO: 4345505 - DNA, 25 bp, Homo sapien
gaggtgctcaccgtcatggatacca

SEQ ID NO: 4345506 - DNA, 25 bp, Homo sapien
cgtcatggataccacggcccgggca

SEQ ID NO: 4345507 - DNA, 25 bp, Homo sapien
agcaacagttgcagcgttcgaggtg

SEQ ID NO: 4345508 - DNA, 25 bp, Homo sapien
tcttcgcccgagcagatggaagctt

SEQ ID NO: 4345509 - DNA, 25 bp, Homo sapien
tgtagaaggtgataaaaatggggct

SEQ ID NO: 4345510 - DNA, 25 bp, Homo sapien
agcacattggggatgagcagcaaga

SEQ ID NO: 4345511 - DNA, 25 bp, Homo sapien
aggtgatgcggatcttcgcccgagc

SEQ ID NO: 4345512 - DNA, 25 bp, Homo sapien
cctctccaagacacaatctgcccca

SEQ ID NO: 4345513 - DNA, 25 bp, Homo sapien
gctcactggcgaggccacatatgca

SEQ ID NO: 4345514 - DNA, 25 bp, Homo sapien
agctggctcactggcgaggccacat

SEQ ID NO: 4345515 - DNA, 25 bp, Homo sapien
cccctctccaagacacaatctgccc

SEQ ID NO: 4345516 - DNA, 25 bp, Homo sapien
cagcaggcagcgatgaggcacactg

SEQ ID NO: 4345517 - DNA, 25 bp, Homo sapien
ctcccattggcccaagtcacctcct

SEQ ID NO: 4345518 - DNA, 25 bp, Homo sapien
gccaatgtcttcgtagagcagcagc

SEQ ID NO: 4345519 - DNA, 25 bp, Homo sapien
ggggtgggggtagcgctgtgctccc

SEQ ID NO: 4345520 - DNA, 25 bp, Homo sapien
tatctcacgacctgcaaatagtcta

SEQ ID NO: 4345521 - DNA, 25 bp, Homo sapien
tccacacaggtcacgacccaatccc

SEQ ID NO: 4345522 - DNA, 25 bp, Homo sapien
cctcagctaagcatctccatgtgca

SEQ ID NO: 4345523 - DNA, 25 bp, Homo sapien
agctaagcatctccatgtgcaaggc

SEQ ID NO: 4345524 - DNA, 25 bp, Homo sapien
ggagttcttggtagcggtcagccat

SEQ ID NO: 4345525 - DNA, 25 bp, Homo sapien
gaggagttcttggtagcggtcagcc

SEQ ID NO: 4345526 - DNA, 25 bp, Homo sapien
aggagttcttggtagcggtcagcca

SEQ ID NO: 4345527 - DNA, 25 bp, Homo sapien
gggtccataggccagaggtccacat

SEQ ID NO: 4345528 - DNA, 25 bp, Homo sapien
agtgtgtctgcaatggccacgctgc

SEQ ID NO: 4345529 - DNA, 25 bp, Homo sapien
acagaggggcaaggcaagtgtgtct

SEQ ID NO: 4345530 - DNA, 25 bp, Homo sapien
gtccataggccagaggtccacatga

SEQ ID NO: 4345531 - DNA, 25 bp, Homo sapien
tagctactcggtggggccgaggtgg

SEQ ID NO: 4345532 - DNA, 25 bp, Homo sapien
caggcagcagcaagctatgatcaca

SEQ ID NO: 4345533 - DNA, 25 bp, Homo sapien
cagcaggcagcagcaagctatgatc

SEQ ID NO: 4345534 - DNA, 25 bp, Homo sapien
gtcttagctactcggtggggccgag

SEQ ID NO: 4345535 - DNA, 25 bp, Homo sapien
tgatggaaccaatggagtttagctt

SEQ ID NO: 4345536 - DNA, 25 bp, Homo sapien
ccagcttccctgcaactgggtgtgg

SEQ ID NO: 4345537 - DNA, 25 bp, Homo sapien
tgtcccaagggcaaaaaacaggcca

SEQ ID NO: 4345538 - DNA, 25 bp, Homo sapien
ccggtggctggaatatagatacgac

SEQ ID NO: 4345539 - DNA, 25 bp, Homo sapien
tgaggcctccgtgcatgtactggac

SEQ ID NO: 4345540 - DNA, 25 bp, Homo sapien
tagatacgacagtgggagcaagagc

SEQ ID NO: 4345541 - DNA, 25 bp, Homo sapien
taacctctgtgcctaacctctgagc

SEQ ID NO: 4345542 - DNA, 25 bp, Homo sapien
gaattggttcccaggtccatggacc

SEQ ID NO: 4345543 - DNA, 25 bp, Homo sapien
ccgcattgtgcacgtggagctcaga

SEQ ID NO: 4345544 - DNA, 25 bp, Homo sapien
cctgccaacaacgtagtaacctctg

SEQ ID NO: 4345545 - DNA, 25 bp, Homo sapien
tcagtgctttacacgtggtgacaca

SEQ ID NO: 4345546 - DNA, 25 bp, Homo sapien
gcctggcccgcactgacttttagtt

SEQ ID NO: 4345547 - DNA, 25 bp, Homo sapien
taacaatggcatcgccttctaaggg

SEQ ID NO: 4345548 - DNA, 25 bp, Homo sapien
tatgtgcagacatggtgctcagtgc

SEQ ID NO: 4345549 - DNA, 25 bp, Homo sapien
ctcagggcctttgggctggctctcc

SEQ ID NO: 4345550 - DNA, 25 bp, Homo sapien
tcaggactcggtcccctagaacaag

SEQ ID NO: 4345551 - DNA, 25 bp, Homo sapien
ccgagccgcgtctgggtatttacta

SEQ ID NO: 4345552 - DNA, 25 bp, Homo sapien
tttactactctctatcccgggagtg

SEQ ID NO: 4345553 - DNA, 25 bp, Homo sapien
agggagcggaggcttcgacatggcc

SEQ ID NO: 4345554 - DNA, 25 bp, Homo sapien
attccccgagtccagagggagcgga

SEQ ID NO: 4345555 - DNA, 25 bp, Homo sapien
agcaaagccccgaaccggcggcagg

SEQ ID NO: 4345556 - DNA, 25 bp, Homo sapien
cacggggcagcaaagccccgaaccg

SEQ ID NO: 4345557 - DNA, 25 bp, Homo sapien
agcccgacgccgctacgtgcggctc

SEQ ID NO: 4345558 - DNA, 25 bp, Homo sapien
gacgccgctacgtgcggctccctcc

SEQ ID NO: 4345559 - DNA, 25 bp, Homo sapien
cgcgccccgagcgactcccgactgc

SEQ ID NO: 4345560 - DNA, 25 bp, Homo sapien
gccgaggtccggatctccacccgca

SEQ ID NO: 4345561 - DNA, 25 bp, Homo sapien
ccgacagcggcgaccgggaaagcaa

SEQ ID NO: 4345562 - DNA, 25 bp, Homo sapien
tgtgcgcggatccagcacaggccgc

SEQ ID NO: 4345563 - DNA, 25 bp, Homo sapien
caaattgcgaaaacggccacagtcc

SEQ ID NO: 4345564 - DNA, 25 bp, Homo sapien
ctttttcgtccagcccaaattgcga

SEQ ID NO: 4345565 - DNA, 25 bp, Homo sapien
gagacaagacgctgcttcacggaag

SEQ ID NO: 4345566 - DNA, 25 bp, Homo sapien
ttctcactcggaaagcgggcggaat

SEQ ID NO: 4345567 - DNA, 25 bp, Homo sapien
gagaggcctgcgtttctcactcgga

SEQ ID NO: 4345568 - DNA, 25 bp, Homo sapien
agactggaaagctgaggacgcgcca

SEQ ID NO: 4345569 - DNA, 25 bp, Homo sapien
ttgtcagtggaccagctggcggcag

SEQ ID NO: 4345570 - DNA, 25 bp, Homo sapien
agcagttgtcagtggaccagctggc

SEQ ID NO: 4345571 - DNA, 25 bp, Homo sapien
agttgtcagtggaccagctggcggc

SEQ ID NO: 4345572 - DNA, 25 bp, Homo sapien
gcagcagttgtcagtggaccagctg

SEQ ID NO: 4345573 - DNA, 25 bp, Homo sapien
ggaccgccccctcgcgtgcgggcgc

SEQ ID NO: 4345574 - DNA, 25 bp, Homo sapien
cagcgccctgctccacgcggcgccg

SEQ ID NO: 4345575 - DNA, 25 bp, Homo sapien
cccctcgcgtgcgggcgcttcgggc

SEQ ID NO: 4345576 - DNA, 25 bp, Homo sapien
tcagcttgggggaaggcgtgtcggg

SEQ ID NO: 4345577 - DNA, 25 bp, Homo sapien
ggaatgagattgggtcccattcttc

SEQ ID NO: 4345578 - DNA, 25 bp, Homo sapien
ggctggaatgagattgggtcccatt

SEQ ID NO: 4345579 - DNA, 25 bp, Homo sapien
gggctggaatgagattgggtcccat

SEQ ID NO: 4345580 - DNA, 25 bp, Homo sapien
ctggaatgagattgggtcccattct

SEQ ID NO: 4345581 - DNA, 25 bp, Homo sapien
cacaggctacagatggtggaaccag

SEQ ID NO: 4345582 - DNA, 25 bp, Homo sapien
catggagcccttgaggatgaaagcc

SEQ ID NO: 4345583 - DNA, 25 bp, Homo sapien
tgtcctcggcgatgtcctgaagcag

SEQ ID NO: 4345584 - DNA, 25 bp, Homo sapien
atgtgcagcggtcgcatggagccct

SEQ ID NO: 4345585 - DNA, 25 bp, Homo sapien
tgatccacagacaccgagacagtgg

SEQ ID NO: 4345586 - DNA, 25 bp, Homo sapien
tgggagggctcctgataatccccag

SEQ ID NO: 4345587 - DNA, 25 bp, Homo sapien
tagtccttatcagatgacctctggg

SEQ ID NO: 4345588 - DNA, 25 bp, Homo sapien
tcaggactcacttctcgctaagaga

SEQ ID NO: 4345589 - DNA, 25 bp, Homo sapien
agcaaaatggccctggtgtgaccga

SEQ ID NO: 4345590 - DNA, 25 bp, Homo sapien
cgcccggcctctgttgtcttgtcag

SEQ ID NO: 4345591 - DNA, 25 bp, Homo sapien
cctggtgtgaccgaggtcacgcagc

SEQ ID NO: 4345592 - DNA, 25 bp, Homo sapien
tgttgtcttgtcagcaaaatggccc

SEQ ID NO: 4345593 - DNA, 25 bp, Homo sapien
cgctccagctcccaccacagcgcag

SEQ ID NO: 4345594 - DNA, 25 bp, Homo sapien
acaaatacaacagcctctgagatgc

SEQ ID NO: 4345595 - DNA, 25 bp, Homo sapien
tagtgtgtgacaataaccaatacag

SEQ ID NO: 4345596 - DNA, 25 bp, Homo sapien
tgtgatggtgacaggccgtaagcat

SEQ ID NO: 4345597 - DNA, 25 bp, Homo sapien
gccgtaagcatgcagcatccactgg

SEQ ID NO: 4345598 - DNA, 25 bp, Homo sapien
cagcagagatttgaagccccttaat

SEQ ID NO: 4345599 - DNA, 25 bp, Homo sapien
tatggacacaaaaccagagcacttg

SEQ ID NO: 4345600 - DNA, 25 bp, Homo sapien
tgcagcagttctgaggccctatgcc

SEQ ID NO: 4345601 - DNA, 25 bp, Homo sapien
gatgaacaagttcagccacgacctg

SEQ ID NO: 4345602 - DNA, 25 bp, Homo sapien
tctcaggtgcttacagagtggaggt

SEQ ID NO: 4345603 - DNA, 25 bp, Homo sapien
ggtagcgtgactgtgctcagcagtt

SEQ ID NO: 4345604 - DNA, 25 bp, Homo sapien
ttcagggacctgtcagcattgtttc

SEQ ID NO: 4345605 - DNA, 25 bp, Homo sapien
tcagggacctgtcagcattgtttct

SEQ ID NO: 4345606 - DNA, 25 bp, Homo sapien
agcatgcagatacagatctccagtt

SEQ ID NO: 4345607 - DNA, 25 bp, Homo sapien
gctggaggttggagcatgcagatac

SEQ ID NO: 4345608 - DNA, 25 bp, Homo sapien
gaggttggagcatgcagatacagat

SEQ ID NO: 4345609 - DNA, 25 bp, Homo sapien
atgcagatacagatctccagttcat

SEQ ID NO: 4345610 - DNA, 25 bp, Homo sapien
tgtccttaggatgggccgatagctg

SEQ ID NO: 4345611 - DNA, 25 bp, Homo sapien
cctgtacagcgaagccttgttgtga

SEQ ID NO: 4345612 - DNA, 25 bp, Homo sapien
ttctgggtcattgcccacacatcag

SEQ ID NO: 4345613 - DNA, 25 bp, Homo sapien
caattttggagaaagcagaccgacc

SEQ ID NO: 4345614 - DNA, 25 bp, Homo sapien
gaatcacgtactgcatttagtccgc

SEQ ID NO: 4345615 - DNA, 25 bp, Homo sapien
catagtccactatccggtccagaat

SEQ ID NO: 4345616 - DNA, 25 bp, Homo sapien
tatccggtccagaatcacgtactgc

SEQ ID NO: 4345617 - DNA, 25 bp, Homo sapien
aaaaagagcagggtttcatagtcca

SEQ ID NO: 4345618 - DNA, 25 bp, Homo sapien
gctgagtcccagatcatgctgccga

SEQ ID NO: 4345619 - DNA, 25 bp, Homo sapien
catctctgaggaggctgtacacagt

SEQ ID NO: 4345620 - DNA, 25 bp, Homo sapien
gacagcgtgactgatgatgcatctc

SEQ ID NO: 4345621 - DNA, 25 bp, Homo sapien
ctgcgtgcgcagataagttagtggc

SEQ ID NO: 4345622 - DNA, 25 bp, Homo sapien
tggccagcgacagccagtcggagat

SEQ ID NO: 4345623 - DNA, 25 bp, Homo sapien
aggaggacacgcacctgtgagcgca

SEQ ID NO: 4345624 - DNA, 25 bp, Homo sapien
actcggacgtgttcgaggaggacac

SEQ ID NO: 4345625 - DNA, 25 bp, Homo sapien
gaaaagaaggatctggcacctgtgg

SEQ ID NO: 4345626 - DNA, 25 bp, Homo sapien
aaggcgggccactgttcgccctggt

SEQ ID NO: 4345627 - DNA, 25 bp, Homo sapien
agacgtggcccctttctctcgtgct

SEQ ID NO: 4345628 - DNA, 25 bp, Homo sapien
tgaggattcggaaactcctgacgca

SEQ ID NO: 4345629 - DNA, 25 bp, Homo sapien
gggaacacctagagcccataatcgg

SEQ ID NO: 4345630 - DNA, 25 bp, Homo sapien
tgaatctgagggcttcagtcttatc

SEQ ID NO: 4345631 - DNA, 25 bp, Homo sapien
gggcttcagtcttatccagcacagg

SEQ ID NO: 4345632 - DNA, 25 bp, Homo sapien
acaggatgtatctgtaggtgggctc

SEQ ID NO: 4345633 - DNA, 25 bp, Homo sapien
tatccagcacaggatgtatctgtag

SEQ ID NO: 4345634 - DNA, 25 bp, Homo sapien
gtataactcggagctcagaccctgg

SEQ ID NO: 4345635 - DNA, 25 bp, Homo sapien
cggtcctgcagatccctgtgggaat

SEQ ID NO: 4345636 - DNA, 25 bp, Homo sapien
cccatacatgcgcagggagctccta

SEQ ID NO: 4345637 - DNA, 25 bp, Homo sapien
cctatgatgtgctgagcgtcgccga

SEQ ID NO: 4345638 - DNA, 25 bp, Homo sapien
tggacaccactcagggaaacctggg

SEQ ID NO: 4345639 - DNA, 25 bp, Homo sapien
tgcactgagtacatggccaaggtca

SEQ ID NO: 4345640 - DNA, 25 bp, Homo sapien
atcggtctggactgttgagcccctg

SEQ ID NO: 4345641 - DNA, 25 bp, Homo sapien
taagctggtgttcccatgcacaggg

SEQ ID NO: 4345642 - DNA, 25 bp, Homo sapien
gaacagagagcatggatgcgcagag

SEQ ID NO: 4345643 - DNA, 25 bp, Homo sapien
taggaaggtgtccaatgcggtattg

SEQ ID NO: 4345644 - DNA, 25 bp, Homo sapien
aatcaacaggaagcattgccagcag

SEQ ID NO: 4345645 - DNA, 25 bp, Homo sapien
ccagcagccgcagcgagcagcaagt

SEQ ID NO: 4345646 - DNA, 25 bp, Homo sapien
ctttggcttctggagggctgtgctg

SEQ ID NO: 4345647 - DNA, 25 bp, Homo sapien
ctgtgctggcggacactgggtgccc

SEQ ID NO: 4345648 - DNA, 25 bp, Homo sapien
gccccaggctgtgctggcggacact

SEQ ID NO: 4345649 - DNA, 25 bp, Homo sapien
caggctgtgctggcggacactgggt

SEQ ID NO: 4345650 - DNA, 25 bp, Homo sapien
tgaagccatcgtgatcccaacaagg

SEQ ID NO: 4345651 - DNA, 25 bp, Homo sapien
cacggagccgtcagtatcgagaagg

SEQ ID NO: 4345652 - DNA, 25 bp, Homo sapien
cgcagacagtatacacgcagggatg

SEQ ID NO: 4345653 - DNA, 25 bp, Homo sapien
tcgagaaggaactcaacgcaaggct

SEQ ID NO: 4345654 - DNA, 25 bp, Homo sapien
ggtgattctttaaccaggaatgcaa

SEQ ID NO: 4345655 - DNA, 25 bp, Homo sapien
cagggtcatatttgcactaaggagc

SEQ ID NO: 4345656 - DNA, 25 bp, Homo sapien
tcctgaggtaacagcaagtcccatt

SEQ ID NO: 4345657 - DNA, 25 bp, Homo sapien
tctgcagggcttcaacggtggcaaa

SEQ ID NO: 4345658 - DNA, 25 bp, Homo sapien
ggaaccaaggttagcctccagaaca

SEQ ID NO: 4345659 - DNA, 25 bp, Homo sapien
cctttgtgagtacaggcggcactcg

SEQ ID NO: 4345660 - DNA, 25 bp, Homo sapien
ccattaaggtaggtccagtgtctga

SEQ ID NO: 4345661 - DNA, 25 bp, Homo sapien
tattgcagtctggtgtcctgggaac

SEQ ID NO: 4345662 - DNA, 25 bp, Homo sapien
ggaggcgcctccagttattgcagtc

SEQ ID NO: 4345663 - DNA, 25 bp, Homo sapien
tcagggtggggacgcagttcctgcc

SEQ ID NO: 4345664 - DNA, 25 bp, Homo sapien
cagttcctgccgtggctgtcctttg

SEQ ID NO: 4345665 - DNA, 25 bp, Homo sapien
ctgccgtggctgtcctttgagagac

SEQ ID NO: 4345666 - DNA, 25 bp, Homo sapien
tggggacgcagttcctgccgtggct

SEQ ID NO: 4345667 - DNA, 25 bp, Homo sapien
aagacggagttggtgacttcaggaa

SEQ ID NO: 4345668 - DNA, 25 bp, Homo sapien
tgacttcaggaagctccttgtggag

SEQ ID NO: 4345669 - DNA, 25 bp, Homo sapien
gtttatttcatggaagacggagttg

SEQ ID NO: 4345670 - DNA, 25 bp, Homo sapien
ttcaggaagctccttgtggagaaca

SEQ ID NO: 4345671 - DNA, 25 bp, Homo sapien
cacggaatcagagctgcaccatcag

SEQ ID NO: 4345672 - DNA, 25 bp, Homo sapien
ctgcaatgaggagagacacggaatc

SEQ ID NO: 4345673 - DNA, 25 bp, Homo sapien
gaggccaacacctttctatcagaag

SEQ ID NO: 4345674 - DNA, 25 bp, Homo sapien
tacaatgtcccagtgtgttctcgaa

SEQ ID NO: 4345675 - DNA, 25 bp, Homo sapien
cctgggctgatgactccggaattta

SEQ ID NO: 4345676 - DNA, 25 bp, Homo sapien
tcacattggtgtaagggcggtctca

SEQ ID NO: 4345677 - DNA, 25 bp, Homo sapien
tgacagaaacttagggccccataaa

SEQ ID NO: 4345678 - DNA, 25 bp, Homo sapien
gactcctttcgcagggacttggcaa

SEQ ID NO: 4345679 - DNA, 25 bp, Homo sapien
ctccatgagcaggtaggcccctttg

SEQ ID NO: 4345680 - DNA, 25 bp, Homo sapien
cccgtgagacggcattcagcagttg

SEQ ID NO: 4345681 - DNA, 25 bp, Homo sapien
gttggatgccgaagcacaccttcag

SEQ ID NO: 4345682 - DNA, 25 bp, Homo sapien
tgtcacataggcgatcggcagagcc

SEQ ID NO: 4345683 - DNA, 25 bp, Homo sapien
gcccggcagatcagggggtctgagt

SEQ ID NO: 4345684 - DNA, 25 bp, Homo sapien
gcagatcagggggtctgagttataa

SEQ ID NO: 4345685 - DNA, 25 bp, Homo sapien
gatcagggggtctgagttataaatg

SEQ ID NO: 4345686 - DNA, 25 bp, Homo sapien
gggggtctgagttataaatgtcgac

SEQ ID NO: 4345687 - DNA, 25 bp, Homo sapien
gctctgaaggccagccgtgttcatc

SEQ ID NO: 4345688 - DNA, 25 bp, Homo sapien
caggcctatttcctggtagcttttc

SEQ ID NO: 4345689 - DNA, 25 bp, Homo sapien
ttccataagccaggcctatttcctg

SEQ ID NO: 4345690 - DNA, 25 bp, Homo sapien
aaggccagccgtgttcatccacaaa

SEQ ID NO: 4345691 - DNA, 25 bp, Homo sapien
gcccctgttgctagcgatgtcttac

SEQ ID NO: 4345692 - DNA, 25 bp, Homo sapien
tcgcccctgttgctagcgatgtctt

SEQ ID NO: 4345693 - DNA, 25 bp, Homo sapien
cctcgcccctgttgctagcgatgtc

SEQ ID NO: 4345694 - DNA, 25 bp, Homo sapien
cgcccctgttgctagcgatgtctta

SEQ ID NO: 4345695 - DNA, 25 bp, Homo sapien
tttaattgcactgacggcccaagcg

SEQ ID NO: 4345696 - DNA, 25 bp, Homo sapien
caagcggcttcctgctcttggcttc

SEQ ID NO: 4345697 - DNA, 25 bp, Homo sapien
aggcctgctgctttgccccgctgac

SEQ ID NO: 4345698 - DNA, 25 bp, Homo sapien
gcttctgagtttaattgcactgacg

SEQ ID NO: 4345699 - DNA, 25 bp, Homo sapien
ctgtttacacaatggcctattctgg

SEQ ID NO: 4345700 - DNA, 25 bp, Homo sapien
tgtttacacaatggcctattctggg

SEQ ID NO: 4345701 - DNA, 25 bp, Homo sapien
gtttacacaatggcctattctgggc

SEQ ID NO: 4345702 - DNA, 25 bp, Homo sapien
cgcaggaactgaaaaccaaacacca

SEQ ID NO: 4345703 - DNA, 25 bp, Homo sapien
gcagggacgtgggtgaagctggaag

SEQ ID NO: 4345704 - DNA, 25 bp, Homo sapien
acgtatgtttattgtagcactactc

SEQ ID NO: 4345705 - DNA, 25 bp, Homo sapien
acgtgggtgaagctggaagccatta

SEQ ID NO: 4345706 - DNA, 25 bp, Homo sapien
tcagcacggccgagctttccaagac

SEQ ID NO: 4345707 - DNA, 25 bp, Homo sapien
aaggcctcagcacggccgagctttc

SEQ ID NO: 4345708 - DNA, 25 bp, Homo sapien
gagctttccaagacccggcaggagc

SEQ ID NO: 4345709 - DNA, 25 bp, Homo sapien
ggccgagctttccaagacccggcag

SEQ ID NO: 4345710 - DNA, 25 bp, Homo sapien
tccgagagagcacgctggagtcgat

SEQ ID NO: 4345711 - DNA, 25 bp, Homo sapien
ctctgtcttattccgagagagcacg

SEQ ID NO: 4345712 - DNA, 25 bp, Homo sapien
gcccgagggacaagtttggcagcac

SEQ ID NO: 4345713 - DNA, 25 bp, Homo sapien
ggttgagcactttcgcagcaaggac

SEQ ID NO: 4345714 - DNA, 25 bp, Homo sapien
tctgaggataccgaagcttactgcc

SEQ ID NO: 4345715 - DNA, 25 bp, Homo sapien
taatcggaagcctcgaagggtggcc

SEQ ID NO: 4345716 - DNA, 25 bp, Homo sapien
gaattctcagtgtacatcaagggca

SEQ ID NO: 4345717 - DNA, 25 bp, Homo sapien
gatcaactgagcacgaagcagggca

SEQ ID NO: 4345718 - DNA, 25 bp, Homo sapien
ccatttgtgttttggggacccatca

SEQ ID NO: 4345719 - DNA, 25 bp, Homo sapien
atcacctgattctgcagggacctgg

SEQ ID NO: 4345720 - DNA, 25 bp, Homo sapien
aagcccaccaccagatttctcattg

SEQ ID NO: 4345721 - DNA, 25 bp, Homo sapien
ttctcattgtgccaccatttgtgtt

SEQ ID NO: 4345722 - DNA, 25 bp, Homo sapien
cacgaatgtagatggaggaacacgc

SEQ ID NO: 4345723 - DNA, 25 bp, Homo sapien
tgtgtcctggcactaaatcccgagg

SEQ ID NO: 4345724 - DNA, 25 bp, Homo sapien
gaaggcctggtgtagattctgcaga

SEQ ID NO: 4345725 - DNA, 25 bp, Homo sapien
tgtcccggcgacaataactggttgt

SEQ ID NO: 4345726 - DNA, 25 bp, Homo sapien
gaaggagtcatggcaggtcccgcac

SEQ ID NO: 4345727 - DNA, 25 bp, Homo sapien
cattgtcgaggtcgaccagatgact

SEQ ID NO: 4345728 - DNA, 25 bp, Homo sapien
tgtcgaggtcgaccagatgactgct

SEQ ID NO: 4345729 - DNA, 25 bp, Homo sapien
cacattgtcgaggtcgaccagatga

SEQ ID NO: 4345730 - DNA, 25 bp, Homo sapien
gaggtcgaccagatgactgctgctc

SEQ ID NO: 4345731 - DNA, 25 bp, Homo sapien
gggaagcctcagaggggagttgctc

SEQ ID NO: 4345732 - DNA, 25 bp, Homo sapien
gaagcctcagaggggagttgctcac

SEQ ID NO: 4345733 - DNA, 25 bp, Homo sapien
cagggaagcctcagaggggagttgc

SEQ ID NO: 4345734 - DNA, 25 bp, Homo sapien
ggaagcctcagaggggagttgctca

SEQ ID NO: 4345735 - DNA, 25 bp, Homo sapien
atgccttttccatcaagtgtttcaa

SEQ ID NO: 4345736 - DNA, 25 bp, Homo sapien
gaatccaaaactttaacattcttga

SEQ ID NO: 4345737 - DNA, 25 bp, Homo sapien
agtgtttcaaaatcctcgaatagtc

SEQ ID NO: 4345738 - DNA, 25 bp, Homo sapien
caaaactttaacattcttgatgcct

SEQ ID NO: 4345739 - DNA, 25 bp, Homo sapien
tgtaaccacagagctcccaattatg

SEQ ID NO: 4345740 - DNA, 25 bp, Homo sapien
tttggagacgcgaagcaggcacatt

SEQ ID NO: 4345741 - DNA, 25 bp, Homo sapien
tacaggagcattgagagagccttgg

SEQ ID NO: 4345742 - DNA, 25 bp, Homo sapien
taaactaactccgaagggatgctgg

SEQ ID NO: 4345743 - DNA, 25 bp, Homo sapien
ggtccccctggtgcactttatctga

SEQ ID NO: 4345744 - DNA, 25 bp, Homo sapien
tctgaaaagtcctgtgggccctggc

SEQ ID NO: 4345745 - DNA, 25 bp, Homo sapien
tttatctgaaaagtcctgtgggccc

SEQ ID NO: 4345746 - DNA, 25 bp, Homo sapien
tatctgaaaagtcctgtgggccctg

SEQ ID NO: 4345747 - DNA, 25 bp, Homo sapien
ccggcctctctgcggccgtgaggat

SEQ ID NO: 4345748 - DNA, 25 bp, Homo sapien
ggcaagaaccagaggcgaaatgagt

SEQ ID NO: 4345749 - DNA, 25 bp, Homo sapien
atgccggcgaagtggcccggcctct

SEQ ID NO: 4345750 - DNA, 25 bp, Homo sapien
gaggcgaaatgagtaccatgccggc

SEQ ID NO: 4345751 - DNA, 25 bp, Homo sapien
tgcagtgcacaaagggagacatcat

SEQ ID NO: 4345752 - DNA, 25 bp, Homo sapien
caccaagtgggccaaagaacgttga

SEQ ID NO: 4345753 - DNA, 25 bp, Homo sapien
ttcaagctgctcactaaggaccggc

SEQ ID NO: 4345754 - DNA, 25 bp, Homo sapien
gagaaatgtaaggacagagccaggc

SEQ ID NO: 4345755 - DNA, 25 bp, Homo sapien
gaagcccagggtagtctttctgcat

SEQ ID NO: 4345756 - DNA, 25 bp, Homo sapien
catccctgacgaaaacgtggaagtc

SEQ ID NO: 4345757 - DNA, 25 bp, Homo sapien
gacgaaaacgtggaagtcagacact

SEQ ID NO: 4345758 - DNA, 25 bp, Homo sapien
atgctgcaacacatccctgacgaaa

SEQ ID NO: 4345759 - DNA, 25 bp, Homo sapien
tggaagtcagacactaccatcctct

SEQ ID NO: 4345760 - DNA, 25 bp, Homo sapien
cacaggtacacagagagcctcagca

SEQ ID NO: 4345761 - DNA, 25 bp, Homo sapien
aaaaagcacaggtacacagagagcc

SEQ ID NO: 4345762 - DNA, 25 bp, Homo sapien
cacagagagcctcagcatgcccagt

SEQ ID NO: 4345763 - DNA, 25 bp, Homo sapien
aagggaaaaagcacaggtacacaga

SEQ ID NO: 4345764 - DNA, 25 bp, Homo sapien
taagacgaagaaggctcagaatttt

SEQ ID NO: 4345765 - DNA, 25 bp, Homo sapien
ctgcaaagcagccgggagtaagacg

SEQ ID NO: 4345766 - DNA, 25 bp, Homo sapien
gtaagacgaagaaggctcagaattt

SEQ ID NO: 4345767 - DNA, 25 bp, Homo sapien
aagcagccgggagtaagacgaagaa

SEQ ID NO: 4345768 - DNA, 25 bp, Homo sapien
cttcacatagcggttaaaggccctg

SEQ ID NO: 4345769 - DNA, 25 bp, Homo sapien
ctttgcatgttatatcccggtaggg

SEQ ID NO: 4345770 - DNA, 25 bp, Homo sapien
ttattgagacattataggagcctgc

SEQ ID NO: 4345771 - DNA, 25 bp, Homo sapien
aaattattcaggctcaaaacagggc

SEQ ID NO: 4345772 - DNA, 25 bp, Homo sapien
ccggaagctgctctgatggtgtcgt

SEQ ID NO: 4345773 - DNA, 25 bp, Homo sapien
cggaagctgctctgatggtgtcgtg

SEQ ID NO: 4345774 - DNA, 25 bp, Homo sapien
tggtgtcgtggtccgacggccccca

SEQ ID NO: 4345775 - DNA, 25 bp, Homo sapien
gaagctgctctgatggtgtcgtggt

SEQ ID NO: 4345776 - DNA, 25 bp, Homo sapien
cagcccagtattcccagcctcccag

SEQ ID NO: 4345777 - DNA, 25 bp, Homo sapien
cacatcccagcccagtattcccagc

SEQ ID NO: 4345778 - DNA, 25 bp, Homo sapien
tacttgttcctctgccacaatctga

SEQ ID NO: 4345779 - DNA, 25 bp, Homo sapien
tctacttgttcctctgccacaatct

SEQ ID NO: 4345780 - DNA, 25 bp, Homo sapien
gagaaggatctggttccgtgtcagg

SEQ ID NO: 4345781 - DNA, 25 bp, Homo sapien
gaaggatctggttccgtgtcaggca

SEQ ID NO: 4345782 - DNA, 25 bp, Homo sapien
gcagggacaggtggttcacactcac

SEQ ID NO: 4345783 - DNA, 25 bp, Homo sapien
gcagatgtgcaaacagggaggccac

SEQ ID NO: 4345784 - DNA, 25 bp, Homo sapien
cactaaagagcccagtaaagagggc

SEQ ID NO: 4345785 - DNA, 25 bp, Homo sapien
tgcctcccaatcgtacagcgtagag

SEQ ID NO: 4345786 - DNA, 25 bp, Homo sapien
gtgtgctgacgtggagcaagtcact

SEQ ID NO: 4345787 - DNA, 25 bp, Homo sapien
tcgtacagcgtagagcgttgtggcc

SEQ ID NO: 4345788 - DNA, 25 bp, Homo sapien
ggtctggtccctcatcagctcaaag

SEQ ID NO: 4345789 - DNA, 25 bp, Homo sapien
gactggtctggtccctcatcagctc

SEQ ID NO: 4345790 - DNA, 25 bp, Homo sapien
tgggactggtctggtccctcatcag

SEQ ID NO: 4345791 - DNA, 25 bp, Homo sapien
ctggtccctcatcagctcaaagagg

SEQ ID NO: 4345792 - DNA, 25 bp, Homo sapien
tccatttcaccatggaagcatcgcc

SEQ ID NO: 4345793 - DNA, 25 bp, Homo sapien
gttgccatgaggcgccagggcacct

SEQ ID NO: 4345794 - DNA, 25 bp, Homo sapien
gggcacctggctcccagtattccat

SEQ ID NO: 4345795 - DNA, 25 bp, Homo sapien
ctagagtaaggaggcgttgccatga

SEQ ID NO: 4345796 - DNA, 25 bp, Homo sapien
ccactgggggttcggcacagacaga

SEQ ID NO: 4345797 - DNA, 25 bp, Homo sapien
ctctgagcccacacgctctccactg

SEQ ID NO: 4345798 - DNA, 25 bp, Homo sapien
tctccactgggggttcggcacagac

SEQ ID NO: 4345799 - DNA, 25 bp, Homo sapien
ctgggggttcggcacagacagacat

SEQ ID NO: 4345800 - DNA, 25 bp, Homo sapien
cttcgcaggtgccaaccacagagtg

SEQ ID NO: 4345801 - DNA, 25 bp, Homo sapien
tccttcgcaggtgccaaccacagag

SEQ ID NO: 4345802 - DNA, 25 bp, Homo sapien
tcgcaggtgccaaccacagagtgtc

SEQ ID NO: 4345803 - DNA, 25 bp, Homo sapien
ctgctccttcgcaggtgccaaccac

SEQ ID NO: 4345804 - DNA, 25 bp, Homo sapien
ctggcaaaaggtgggtttccagcac

SEQ ID NO: 4345805 - DNA, 25 bp, Homo sapien
gcaaaaggtgggtttccagcacgtg

SEQ ID NO: 4345806 - DNA, 25 bp, Homo sapien
tgggtttccagcacgtgctcgctcc

SEQ ID NO: 4345807 - DNA, 25 bp, Homo sapien
gtgctcgctccccgccttctcccat

SEQ ID NO: 4345808 - DNA, 25 bp, Homo sapien
attctcttggtgctcgcatccttcc

SEQ ID NO: 4345809 - DNA, 25 bp, Homo sapien
tctctcccacttacaaggattttct

SEQ ID NO: 4345810 - DNA, 25 bp, Homo sapien
ataaattctggcattctcttggtgc

SEQ ID NO: 4345811 - DNA, 25 bp, Homo sapien
ttctcttggtgctcgcatccttcca

SEQ ID NO: 4345812 - DNA, 25 bp, Homo sapien
tcctggctctcttagagtgcaagcg

SEQ ID NO: 4345813 - DNA, 25 bp, Homo sapien
ttcacgctaaaagctcccaggttta

SEQ ID NO: 4345814 - DNA, 25 bp, Homo sapien
taaaccatctttcggctcagttcct

SEQ ID NO: 4345815 - DNA, 25 bp, Homo sapien
cttagagtgcaagcgttaaaccatc

SEQ ID NO: 4345816 - DNA, 25 bp, Homo sapien
ggccctgagtgtggcgctggatgcc

SEQ ID NO: 4345817 - DNA, 25 bp, Homo sapien
gccctgagtgtggcgctggatgcca

SEQ ID NO: 4345818 - DNA, 25 bp, Homo sapien
ggtggccctgagtgtggcgctggat

SEQ ID NO: 4345819 - DNA, 25 bp, Homo sapien
tggccctgagtgtggcgctggatgc

SEQ ID NO: 4345820 - DNA, 25 bp, Homo sapien
catccttgtcagcacgggagttacc

SEQ ID NO: 4345821 - DNA, 25 bp, Homo sapien
tacagatgtctatggaattctcaag

SEQ ID NO: 4345822 - DNA, 25 bp, Homo sapien
cttggtttacagacaaaagctacag

SEQ ID NO: 4345823 - DNA, 25 bp, Homo sapien
caagataaacttaccaaaatgggat

SEQ ID NO: 4345824 - DNA, 25 bp, Homo sapien
gtttcagcagattcccctgaaattg

SEQ ID NO: 4345825 - DNA, 25 bp, Homo sapien
cagattcccctgaaattgctgtgta

SEQ ID NO: 4345826 - DNA, 25 bp, Homo sapien
ttcagattccagtctttaacctcaa

SEQ ID NO: 4345827 - DNA, 25 bp, Homo sapien
tctttaacctcaatgctttattgga

SEQ ID NO: 4345828 - DNA, 25 bp, Homo sapien
ttatttgaaaacatcctactctcca

SEQ ID NO: 4345829 - DNA, 25 bp, Homo sapien
gctaacggtgcagcatttttgaagt

SEQ ID NO: 4345830 - DNA, 25 bp, Homo sapien
aatgtaaccaactaaaaggctgcta

SEQ ID NO: 4345831 - DNA, 25 bp, Homo sapien
tttttgaagtaatgcattctcagga

SEQ ID NO: 4345832 - DNA, 25 bp, Homo sapien
atcacgctgcgggatgacgatctgg

SEQ ID NO: 4345833 - DNA, 25 bp, Homo sapien
gcttttgccactagaaacttccagg

SEQ ID NO: 4345834 - DNA, 25 bp, Homo sapien
cagaaagcggtaagtggctggttcc

SEQ ID NO: 4345835 - DNA, 25 bp, Homo sapien
gggttagcgatcacattgccacgtg

SEQ ID NO: 4345836 - DNA, 25 bp, Homo sapien
tcacacagtaggcatccaaaaaatg

SEQ ID NO: 4345837 - DNA, 25 bp, Homo sapien
aaatgaggaggcaagtgaaagcacc

SEQ ID NO: 4345838 - DNA, 25 bp, Homo sapien
catgcttagttcttgcagggatcga

SEQ ID NO: 4345839 - DNA, 25 bp, Homo sapien
tactgagtggattgctgaaagggtt

SEQ ID NO: 4345840 - DNA, 25 bp, Homo sapien
taggtgggagtgaaataatgtgcac

SEQ ID NO: 4345841 - DNA, 25 bp, Homo sapien
tttatacacggaatgctgctaggtc

SEQ ID NO: 4345842 - DNA, 25 bp, Homo sapien
gagatgacttatgggtacaatgtac

SEQ ID NO: 4345843 - DNA, 25 bp, Homo sapien
cagaaagtcaaacgccgaatgtcct

SEQ ID NO: 4345844 - DNA, 25 bp, Homo sapien
gcgtaggcttcacgctggatctcca

SEQ ID NO: 4345845 - DNA, 25 bp, Homo sapien
gatgggttttccttgtcggagggca

SEQ ID NO: 4345846 - DNA, 25 bp, Homo sapien
gagggcaagaaagcgtaggcttcac

SEQ ID NO: 4345847 - DNA, 25 bp, Homo sapien
ccacaccagagagcgagaacgtcat

SEQ ID NO: 4345848 - DNA, 25 bp, Homo sapien
gaccctcacaagcatgccacagtgt

SEQ ID NO: 4345849 - DNA, 25 bp, Homo sapien
ccgcgaagccaggttggatgcagaa

SEQ ID NO: 4345850 - DNA, 25 bp, Homo sapien
gatgccagtctgaggatgatagcaa

SEQ ID NO: 4345851 - DNA, 25 bp, Homo sapien
caactgccaaagaccgaaacggctt

SEQ ID NO: 4345852 - DNA, 25 bp, Homo sapien
cacagcaaccactttgtaaattttt

SEQ ID NO: 4345853 - DNA, 25 bp, Homo sapien
cagtgggtaaacgaacagaaacacg

SEQ ID NO: 4345854 - DNA, 25 bp, Homo sapien
caggaacggccgcatgtggccgcat

SEQ ID NO: 4345855 - DNA, 25 bp, Homo sapien
gaagaagagtgttcccgcaggaacg

SEQ ID NO: 4345856 - DNA, 25 bp, Homo sapien
taccgcatgcaaagcattcccacag

SEQ ID NO: 4345857 - DNA, 25 bp, Homo sapien
cccacagtgctcttgagggagtggt

SEQ ID NO: 4345858 - DNA, 25 bp, Homo sapien
atgcaaagcattcccacagtgctct

SEQ ID NO: 4345859 - DNA, 25 bp, Homo sapien
ttgagggagtggtctggctgctcct

SEQ ID NO: 4345860 - DNA, 25 bp, Homo sapien
gaaaatcccatcttctggtgtcccc

SEQ ID NO: 4345861 - DNA, 25 bp, Homo sapien
tttctccctgctatatttagaatgt

SEQ ID NO: 4345862 - DNA, 25 bp, Homo sapien
tatttagaatgttgcggaaaatccc

SEQ ID NO: 4345863 - DNA, 25 bp, Homo sapien
agggaccaagagaacgccagccccg

SEQ ID NO: 4345864 - DNA, 25 bp, Homo sapien
tgcttattaatgatgccaatactaa

SEQ ID NO: 4345865 - DNA, 25 bp, Homo sapien
aacttcaaccaatgcttattaatga

SEQ ID NO: 4345866 - DNA, 25 bp, Homo sapien
gccaatactaatagccttcacatca

SEQ ID NO: 4345867 - DNA, 25 bp, Homo sapien
cagaacaaacacccaattaggaact

SEQ ID NO: 4345868 - DNA, 25 bp, Homo sapien
taaaagcctcggagatgatcctcaa

SEQ ID NO: 4345869 - DNA, 25 bp, Homo sapien
ttactgggacagttcgcaaagcact

SEQ ID NO: 4345870 - DNA, 25 bp, Homo sapien
gattcttgggactctagctgcatag

SEQ ID NO: 4345871 - DNA, 25 bp, Homo sapien
tacttaatcccacagatttggccaa

SEQ ID NO: 4345872 - DNA, 25 bp, Homo sapien
tcaaatcagataaaatggaagcaac

SEQ ID NO: 4345873 - DNA, 25 bp, Homo sapien
gataaaatggaagcaacatttctgg

SEQ ID NO: 4345874 - DNA, 25 bp, Homo sapien
taaaatggaagcaacatttctggat

SEQ ID NO: 4345875 - DNA, 25 bp, Homo sapien
aaatcagataaaatggaagcaacat

SEQ ID NO: 4345876 - DNA, 25 bp, Homo sapien
ctcagacaatgaacattggattttg

SEQ ID NO: 4345877 - DNA, 25 bp, Homo sapien
gactcagacaatgaacattggattt

SEQ ID NO: 4345878 - DNA, 25 bp, Homo sapien
cgactcagacaatgaacattggatt

SEQ ID NO: 4345879 - DNA, 25 bp, Homo sapien
actcagacaatgaacattggatttt

SEQ ID NO: 4345880 - DNA, 25 bp, Homo sapien
gatctccaaattgtcagggcccagc

SEQ ID NO: 4345881 - DNA, 25 bp, Homo sapien
tagaagaattgagaaggatgctggc

SEQ ID NO: 4345882 - DNA, 25 bp, Homo sapien
gatggactagagagggagatctcca

SEQ ID NO: 4345883 - DNA, 25 bp, Homo sapien
tactttgaaacatccgtggggaata

SEQ ID NO: 4345884 - DNA, 25 bp, Homo sapien
tccatgggacacaaagatgagggcc

SEQ ID NO: 4345885 - DNA, 25 bp, Homo sapien
cagctcttcatagcggccactgtgc

SEQ ID NO: 4345886 - DNA, 25 bp, Homo sapien
gcatccgagccagctcttcatagcg

SEQ ID NO: 4345887 - DNA, 25 bp, Homo sapien
gagccagctcttcatagcggccact

SEQ ID NO: 4345888 - DNA, 25 bp, Homo sapien
tatcccagccgagcaacatgaacag

SEQ ID NO: 4345889 - DNA, 25 bp, Homo sapien
accttctgaggactggaccccagag

SEQ ID NO: 4345890 - DNA, 25 bp, Homo sapien
acaaccttctgaggactggacccca

SEQ ID NO: 4345891 - DNA, 25 bp, Homo sapien
ccagagctgtatcccagccgagcaa

SEQ ID NO: 4345892 - DNA, 25 bp, Homo sapien
tcaggctactgttaatgcagacaga

SEQ ID NO: 4345893 - DNA, 25 bp, Homo sapien
tctgggattggctgatgggatttct

SEQ ID NO: 4345894 - DNA, 25 bp, Homo sapien
gctactgaggagcacggctggaact

SEQ ID NO: 4345895 - DNA, 25 bp, Homo sapien
gctaattagtcagcatcttctgtct

SEQ ID NO: 4345896 - DNA, 25 bp, Homo sapien
tatgagctttcttcagatcattgaa

SEQ ID NO: 4345897 - DNA, 25 bp, Homo sapien
tttcagtatgagctttcttcagatc

SEQ ID NO: 4345898 - DNA, 25 bp, Homo sapien
cttcagatcattgaaagatcagagt

SEQ ID NO: 4345899 - DNA, 25 bp, Homo sapien
gctttcttcagatcattgaaagatc

SEQ ID NO: 4345900 - DNA, 25 bp, Homo sapien
aaggttcctatcagtaggaggctgg

SEQ ID NO: 4345901 - DNA, 25 bp, Homo sapien
caggaaggttcctatcagtaggagg

SEQ ID NO: 4345902 - DNA, 25 bp, Homo sapien
cacctgcaggaaggttcctatcagt

SEQ ID NO: 4345903 - DNA, 25 bp, Homo sapien
tgcaggaaggttcctatcagtagga

SEQ ID NO: 4345904 - DNA, 25 bp, Homo sapien
cagagcaggggagcagtctcaggag

SEQ ID NO: 4345905 - DNA, 25 bp, Homo sapien
gggcagagcaggggagcagtctcag

SEQ ID NO: 4345906 - DNA, 25 bp, Homo sapien
gagcaggggagcagtctcaggagca

SEQ ID NO: 4345907 - DNA, 25 bp, Homo sapien
agcaggggagcagtctcaggagcat

SEQ ID NO: 4345908 - DNA, 25 bp, Homo sapien
caagaatcttggatgaccctgcaat

SEQ ID NO: 4345909 - DNA, 25 bp, Homo sapien
cctgcaatatgggacaagggtcatc

SEQ ID NO: 4345910 - DNA, 25 bp, Homo sapien
aatggtcagcattagcccgggagag

SEQ ID NO: 4345911 - DNA, 25 bp, Homo sapien
gactttgcggaacatcaagcatggg

SEQ ID NO: 4345912 - DNA, 25 bp, Homo sapien
tagacgtcaataaggaagtatttgc

SEQ ID NO: 4345913 - DNA, 25 bp, Homo sapien
gatgcatgatctttgccaccctttc

SEQ ID NO: 4345914 - DNA, 25 bp, Homo sapien
cctggcgcccaaggaccatgtagac

SEQ ID NO: 4345915 - DNA, 25 bp, Homo sapien
gcccaaggaccatgtagacgtcaat

SEQ ID NO: 4345916 - DNA, 25 bp, Homo sapien
tgaggaggatattacgaggacgcaa

SEQ ID NO: 4345917 - DNA, 25 bp, Homo sapien
gaaagaaagcactcaacagccggct

SEQ ID NO: 4345918 - DNA, 25 bp, Homo sapien
gccggctgacaacctgattagaaaa

SEQ ID NO: 4345919 - DNA, 25 bp, Homo sapien
aggaaaagccagtcccacctttgag

SEQ ID NO: 4345920 - DNA, 25 bp, Homo sapien
gagattgtgaaaaccacccgcaggc

SEQ ID NO: 4345921 - DNA, 25 bp, Homo sapien
taaatgaatgcctgtacaaccggaa

SEQ ID NO: 4345922 - DNA, 25 bp, Homo sapien
gtgtttttaacgtgcagctccctgg

SEQ ID NO: 4345923 - DNA, 25 bp, Homo sapien
aatgatccctaggagacaagaggcc

SEQ ID NO: 4345924 - DNA, 25 bp, Homo sapien
ccgtctgcattgaccaggtgaggga

SEQ ID NO: 4345925 - DNA, 25 bp, Homo sapien
cagaagaggtactgtccgtctgcat

SEQ ID NO: 4345926 - DNA, 25 bp, Homo sapien
ctctggcatgctggaagggtcttca

SEQ ID NO: 4345927 - DNA, 25 bp, Homo sapien
cctgtgggtttccagtacctgcaga

SEQ ID NO: 4345928 - DNA, 25 bp, Homo sapien
tttcttgcaaacctctccaagactg

SEQ ID NO: 4345929 - DNA, 25 bp, Homo sapien
ttcttgcaaacctctccaagactga

SEQ ID NO: 4345930 - DNA, 25 bp, Homo sapien
atttcttgcaaacctctccaagact

SEQ ID NO: 4345931 - DNA, 25 bp, Homo sapien
tatgtgctggcgtttgcattccaca

SEQ ID NO: 4345932 - DNA, 25 bp, Homo sapien
ggcgtttgcattccacaaccacgac

SEQ ID NO: 4345933 - DNA, 25 bp, Homo sapien
cgacagcctggagaatcagaaccag

SEQ ID NO: 4345934 - DNA, 25 bp, Homo sapien
ccacgacagcctggagaatcagaac

SEQ ID NO: 4345935 - DNA, 25 bp, Homo sapien
gctgcgattctccactactagttca

SEQ ID NO: 4345936 - DNA, 25 bp, Homo sapien
cagacgcacaaatgcgggtgcccaa

SEQ ID NO: 4345937 - DNA, 25 bp, Homo sapien
cttttcctaaacaaatcgctagagg

SEQ ID NO: 4345938 - DNA, 25 bp, Homo sapien
gaaactgggaaactagctccgcgca

SEQ ID NO: 4345939 - DNA, 25 bp, Homo sapien
tttgcttcctgtgcgtctccgacag

SEQ ID NO: 4345940 - DNA, 25 bp, Homo sapien
ggcttcgccgggtgtctgcaccggg

SEQ ID NO: 4345941 - DNA, 25 bp, Homo sapien
cgaagctgtcatcggaaatgccgct

SEQ ID NO: 4345942 - DNA, 25 bp, Homo sapien
acaggacacgtagccccgaagctgt

SEQ ID NO: 4345943 - DNA, 25 bp, Homo sapien
cgcgcacactcggacacgcgcgcac

SEQ ID NO: 4345944 - DNA, 25 bp, Homo sapien
ttgggggctggtgcgaaggagcagg

SEQ ID NO: 4345945 - DNA, 25 bp, Homo sapien
cacacgcacacatgggtagcgggag

SEQ ID NO: 4345946 - DNA, 25 bp, Homo sapien
gagcccacgccgggcgtgtccggga

SEQ ID NO: 4345947 - DNA, 25 bp, Homo sapien
ctgacggcggcactggcgggctggg

SEQ ID NO: 4345948 - DNA, 25 bp, Homo sapien
gctggggcaggggccgggaggcagt

SEQ ID NO: 4345949 - DNA, 25 bp, Homo sapien
tggggcaggggccgggaggcagtta

SEQ ID NO: 4345950 - DNA, 25 bp, Homo sapien
ccctgacggcggcactggcgggctg

SEQ ID NO: 4345951 - DNA, 25 bp, Homo sapien
ttcgcggcgacagggtgcggcgtct

SEQ ID NO: 4345952 - DNA, 25 bp, Homo sapien
agcgcagcggatcctcgtttgcggc

SEQ ID NO: 4345953 - DNA, 25 bp, Homo sapien
gagctgcgcgcgaccggcttcgcgg

SEQ ID NO: 4345954 - DNA, 25 bp, Homo sapien
ggccagggccgggacgagctgcgcg

SEQ ID NO: 4345955 - DNA, 25 bp, Homo sapien
ccactgtctggcctccagcaggcca

SEQ ID NO: 4345956 - DNA, 25 bp, Homo sapien
tctggcctccagcaggccacgaggc

SEQ ID NO: 4345957 - DNA, 25 bp, Homo sapien
actgtctggcctccagcaggccacg

SEQ ID NO: 4345958 - DNA, 25 bp, Homo sapien
tgtctggcctccagcaggccacgag

SEQ ID NO: 4345959 - DNA, 25 bp, Homo sapien
gattctttgaacgattctagttcct

SEQ ID NO: 4345960 - DNA, 25 bp, Homo sapien
agctaccacactcagtctacaagat

SEQ ID NO: 4345961 - DNA, 25 bp, Homo sapien
taccacactcagtctacaagattct

SEQ ID NO: 4345962 - DNA, 25 bp, Homo sapien
gtctacaagattctttgaacgattc

SEQ ID NO: 4345963 - DNA, 25 bp, Homo sapien
cagtgaattgtgagtctccatccca

SEQ ID NO: 4345964 - DNA, 25 bp, Homo sapien
atgttaacagtgaattgtgagtctc

SEQ ID NO: 4345965 - DNA, 25 bp, Homo sapien
taacagtgaattgtgagtctccatc

SEQ ID NO: 4345966 - DNA, 25 bp, Homo sapien
gtgaattgtgagtctccatcccatc

SEQ ID NO: 4345967 - DNA, 25 bp, Homo sapien
ccatggctggggtctccctttccag

SEQ ID NO: 4345968 - DNA, 25 bp, Homo sapien
gctggggtctccctttccagctcac

SEQ ID NO: 4345969 - DNA, 25 bp, Homo sapien
atggctggggtctccctttccagct

SEQ ID NO: 4345970 - DNA, 25 bp, Homo sapien
cccatggctggggtctccctttcca

SEQ ID NO: 4345971 - DNA, 25 bp, Homo sapien
ccagagggtcagcacattctttgtg

SEQ ID NO: 4345972 - DNA, 25 bp, Homo sapien
agagggtcagcacattctttgtggt

SEQ ID NO: 4345973 - DNA, 25 bp, Homo sapien
gtggagacagcagattgagcagtct

SEQ ID NO: 4345974 - DNA, 25 bp, Homo sapien
aaaaccaattcttgaccaggggcag

SEQ ID NO: 4345975 - DNA, 25 bp, Homo sapien
taagtgaatcacatggtaggtccgc

SEQ ID NO: 4345976 - DNA, 25 bp, Homo sapien
caggcggtcctgaagtcggtagttt

SEQ ID NO: 4345977 - DNA, 25 bp, Homo sapien
ggcactcgatgtctctggcagtaga

SEQ ID NO: 4345978 - DNA, 25 bp, Homo sapien
ctctggcagtagaggtgacaaggat

SEQ ID NO: 4345979 - DNA, 25 bp, Homo sapien
aggacttcaaggcactcgatgtctc

SEQ ID NO: 4345980 - DNA, 25 bp, Homo sapien
gatgtctctggcagtagaggtgaca

SEQ ID NO: 4345981 - DNA, 25 bp, Homo sapien
ttgtttaaggagaggtccaacactc

SEQ ID NO: 4345982 - DNA, 25 bp, Homo sapien
gcacactggtctgcatcaagcatac

SEQ ID NO: 4345983 - DNA, 25 bp, Homo sapien
tgcacactggtctgcatcaagcata

SEQ ID NO: 4345984 - DNA, 25 bp, Homo sapien
ctgcacactggtctgcatcaagcat

SEQ ID NO: 4345985 - DNA, 25 bp, Homo sapien
cagcaaattgagtctccttgatgaa

SEQ ID NO: 4345986 - DNA, 25 bp, Homo sapien
caaattgagtctccttgatgaatgc

SEQ ID NO: 4345987 - DNA, 25 bp, Homo sapien
gaatgctttgagttgagtctccccg

SEQ ID NO: 4345988 - DNA, 25 bp, Homo sapien
aaacagcaaattgagtctccttgat

SEQ ID NO: 4345989 - DNA, 25 bp, Homo sapien
gcttcattacgtggattttcgactg

SEQ ID NO: 4345990 - DNA, 25 bp, Homo sapien
tttcagcttcattacgtggattttc

SEQ ID NO: 4345991 - DNA, 25 bp, Homo sapien
cagcttcattacgtggattttcgac

SEQ ID NO: 4345992 - DNA, 25 bp, Homo sapien
tcagcttcattacgtggattttcga

SEQ ID NO: 4345993 - DNA, 25 bp, Homo sapien
gaggataagagacacgaggagcgga

SEQ ID NO: 4345994 - DNA, 25 bp, Homo sapien
acacgaggagcggagacaccccagc

SEQ ID NO: 4345995 - DNA, 25 bp, Homo sapien
ataagagacacgaggagcggagaca

SEQ ID NO: 4345996 - DNA, 25 bp, Homo sapien
ctggctaggtccaaggaggataaga

SEQ ID NO: 4345997 - DNA, 25 bp, Homo sapien
cttaacttcctcataaagcaacctt

SEQ ID NO: 4345998 - DNA, 25 bp, Homo sapien
ttcctcataaagcaacctttttcaa

SEQ ID NO: 4345999 - DNA, 25 bp, Homo sapien
cttcctcataaagcaacctttttca

SEQ ID NO: 4346000 - DNA, 25 bp, Homo sapien
tgatccactgtgactcattccgatt

SEQ ID NO: 4346001 - DNA, 25 bp, Homo sapien
cattctgattctgatttcctgctct

SEQ ID NO: 4346002 - DNA, 25 bp, Homo sapien
cctgtgcggtctaaccctagccaat

SEQ ID NO: 4346003 - DNA, 25 bp, Homo sapien
caggggccacatgtgtcaggaataa

SEQ ID NO: 4346004 - DNA, 25 bp, Homo sapien
cagcgcgggaacactctgcgcaggc

SEQ ID NO: 4346005 - DNA, 25 bp, Homo sapien
ggacgctcagtagggtacgggacgc

SEQ ID NO: 4346006 - DNA, 25 bp, Homo sapien
tcagtcgctctggcacgcgggccag

SEQ ID NO: 4346007 - DNA, 25 bp, Homo sapien
ccgtctggaaccagcgcgggaatag

SEQ ID NO: 4346008 - DNA, 25 bp, Homo sapien
agggcagcacctgtcccctcggagg

SEQ ID NO: 4346009 - DNA, 25 bp, Homo sapien
tcaggcccgctggccgccctgccac

SEQ ID NO: 4346010 - DNA, 25 bp, Homo sapien
aggcccgctggccgccctgccacac

SEQ ID NO: 4346011 - DNA, 25 bp, Homo sapien
caggcccgctggccgccctgccaca

SEQ ID NO: 4346012 - DNA, 25 bp, Homo sapien
ccaggcagcaccttcgtaagtaggg

SEQ ID NO: 4346013 - DNA, 25 bp, Homo sapien
ggcacttgcagcctcggctctaagt

SEQ ID NO: 4346014 - DNA, 25 bp, Homo sapien
gccaggttgaacctgggcgccgacc

SEQ ID NO: 4346015 - DNA, 25 bp, Homo sapien
cttccttcgagtcgcagtgggccgg

SEQ ID NO: 4346016 - DNA, 25 bp, Homo sapien
attttcaagaatacagaagtgacga

SEQ ID NO: 4346017 - DNA, 25 bp, Homo sapien
ttttcaagaatacagaagtgacgaa

SEQ ID NO: 4346018 - DNA, 25 bp, Homo sapien
ataaataaattaggcatagtggtgc

SEQ ID NO: 4346019 - DNA, 25 bp, Homo sapien
tggtgcatgtagtggtgcagctaca

SEQ ID NO: 4346020 - DNA, 25 bp, Homo sapien
gcagtccagcaagacgcatgttggg

SEQ ID NO: 4346021 - DNA, 25 bp, Homo sapien
tgcagccgaggatagagaatgtctg

SEQ ID NO: 4346022 - DNA, 25 bp, Homo sapien
ccactaagcagggtggagcagcctg

SEQ ID NO: 4346023 - DNA, 25 bp, Homo sapien
gcaaggaagtcctctaagaacatca

SEQ ID NO: 4346024 - DNA, 25 bp, Homo sapien
tgctcagtggcttcaagccacttgg

SEQ ID NO: 4346025 - DNA, 25 bp, Homo sapien
tgggaggctcccgttgtgctcagtg

SEQ ID NO: 4346026 - DNA, 25 bp, Homo sapien
caccagagacaatcctgggaggctc

SEQ ID NO: 4346027 - DNA, 25 bp, Homo sapien
caagccacttggaggcacttgggct

SEQ ID NO: 4346028 - DNA, 25 bp, Homo sapien
gatgatacacgaggccctgctctga

SEQ ID NO: 4346029 - DNA, 25 bp, Homo sapien
tttttggcaccagcaccgcactggg

SEQ ID NO: 4346030 - DNA, 25 bp, Homo sapien
gcattttccgagtcctttttggcac

SEQ ID NO: 4346031 - DNA, 25 bp, Homo sapien
ggtgaaagatgatacacgaggccct

SEQ ID NO: 4346032 - DNA, 25 bp, Homo sapien
acgtaggatgttataggcaggatgt

SEQ ID NO: 4346033 - DNA, 25 bp, Homo sapien
tgctgtcgtgggctgagctgtgtca

SEQ ID NO: 4346034 - DNA, 25 bp, Homo sapien
gaagctggcgttcaggctctgcaac

SEQ ID NO: 4346035 - DNA, 25 bp, Homo sapien
aggatggtgcaaaacgtaggatgtt

SEQ ID NO: 4346036 - DNA, 25 bp, Homo sapien
gtctcacaggacctgcaataaggcc

SEQ ID NO: 4346037 - DNA, 25 bp, Homo sapien
gcctgctgagaaagactcctgatgt

SEQ ID NO: 4346038 - DNA, 25 bp, Homo sapien
gtctgtctcacaggacctgcaataa

SEQ ID NO: 4346039 - DNA, 25 bp, Homo sapien
atgttggagcgtgaggctgcctcat

SEQ ID NO: 4346040 - DNA, 25 bp, Homo sapien
gcttgctgtgtttgcactcaactga

SEQ ID NO: 4346041 - DNA, 25 bp, Homo sapien
caaccgacacatccgtgcatgtcag

SEQ ID NO: 4346042 - DNA, 25 bp, Homo sapien
gctgtgtttgcactcaactgagtca

SEQ ID NO: 4346043 - DNA, 25 bp, Homo sapien
ctgagtcaatactcgtaatagaggc

SEQ ID NO: 4346044 - DNA, 25 bp, Homo sapien
gacggtgcatgctgacatgctacca

SEQ ID NO: 4346045 - DNA, 25 bp, Homo sapien
tgctgacatgctaccatcgtcacca

SEQ ID NO: 4346046 - DNA, 25 bp, Homo sapien
cttcatgcttgttgttccgctggtt

SEQ ID NO: 4346047 - DNA, 25 bp, Homo sapien
cttgttgttccgctggtttctgatt

SEQ ID NO: 4346048 - DNA, 25 bp, Homo sapien
cctttgtttgttgcctggaccatgg

SEQ ID NO: 4346049 - DNA, 25 bp, Homo sapien
aggacgccaggtggagcatccgcaa

SEQ ID NO: 4346050 - DNA, 25 bp, Homo sapien
gagcatccgcaaagcccgttcagag

SEQ ID NO: 4346051 - DNA, 25 bp, Homo sapien
cccggccacctttgtttgttgcctg

SEQ ID NO: 4346052 - DNA, 25 bp, Homo sapien
cagagggaatcttggacggtgcagc

SEQ ID NO: 4346053 - DNA, 25 bp, Homo sapien
gaatcttggacggtgcagcaggtcc

SEQ ID NO: 4346054 - DNA, 25 bp, Homo sapien
atcttggacggtgcagcaggtccca

SEQ ID NO: 4346055 - DNA, 25 bp, Homo sapien
gggaatcttggacggtgcagcaggt

SEQ ID NO: 4346056 - DNA, 25 bp, Homo sapien
cctctggttggtcctccgccgccat

SEQ ID NO: 4346057 - DNA, 25 bp, Homo sapien
cactctccggattcctctggttggt

SEQ ID NO: 4346058 - DNA, 25 bp, Homo sapien
cccactctccggattcctctggttg

SEQ ID NO: 4346059 - DNA, 25 bp, Homo sapien
ctctccggattcctctggttggtcc

SEQ ID NO: 4346060 - DNA, 25 bp, Homo sapien
taattcacagactattgtagacctg

SEQ ID NO: 4346061 - DNA, 25 bp, Homo sapien
tgtccagcctaaatgagcatcaata

SEQ ID NO: 4346062 - DNA, 25 bp, Homo sapien
taggatagctgtaaaatgacacctc

SEQ ID NO: 4346063 - DNA, 25 bp, Homo sapien
taagtcacgttgtcctaattcacag

SEQ ID NO: 4346064 - DNA, 25 bp, Homo sapien
tggaggtggaaggtaatgatatcac

SEQ ID NO: 4346065 - DNA, 25 bp, Homo sapien
gctccattagtgttactgtccttga

SEQ ID NO: 4346066 - DNA, 25 bp, Homo sapien
cactgatcgggaccctgtgtagcag

SEQ ID NO: 4346067 - DNA, 25 bp, Homo sapien
cattgtcatcacaggaggtgacggc

SEQ ID NO: 4346068 - DNA, 25 bp, Homo sapien
gcttcactaaagattccagagagga

SEQ ID NO: 4346069 - DNA, 25 bp, Homo sapien
caaagaactggcgatcagaatgtct

SEQ ID NO: 4346070 - DNA, 25 bp, Homo sapien
gtaggcaaccctacatctggagaaa

SEQ ID NO: 4346071 - DNA, 25 bp, Homo sapien
aatgaaccaggagatgctgtacggg

SEQ ID NO: 4346072 - DNA, 25 bp, Homo sapien
tcgtatatctttcctcttgcgctga

SEQ ID NO: 4346073 - DNA, 25 bp, Homo sapien
cttgaaggtcattagttttcgtata

SEQ ID NO: 4346074 - DNA, 25 bp, Homo sapien
ggttcactgattgttccactgttca

SEQ ID NO: 4346075 - DNA, 25 bp, Homo sapien
taattgctagcttatttaacccttg

SEQ ID NO: 4346076 - DNA, 25 bp, Homo sapien
ttagttatctggttttgcccacctg

SEQ ID NO: 4346077 - DNA, 25 bp, Homo sapien
aacagcccaggctgctgtttctgca

SEQ ID NO: 4346078 - DNA, 25 bp, Homo sapien
tggaacagcccaggctgctgtttct

SEQ ID NO: 4346079 - DNA, 25 bp, Homo sapien
ccctgcatggaacagcccaggctgc

SEQ ID NO: 4346080 - DNA, 25 bp, Homo sapien
cctgcatggaacagcccaggctgct

SEQ ID NO: 4346081 - DNA, 25 bp, Homo sapien
tgttgaacttgacactatgaagcct

SEQ ID NO: 4346082 - DNA, 25 bp, Homo sapien
actctttctgttgaacttgacacta

SEQ ID NO: 4346083 - DNA, 25 bp, Homo sapien
ctttctgttgaacttgacactatga

SEQ ID NO: 4346084 - DNA, 25 bp, Homo sapien
ttctgttgaacttgacactatgaag

SEQ ID NO: 4346085 - DNA, 25 bp, Homo sapien
gctaggctagagtaaccagttattc

SEQ ID NO: 4346086 - DNA, 25 bp, Homo sapien
taaccaccaagcattgtctacagat

SEQ ID NO: 4346087 - DNA, 25 bp, Homo sapien
aaacagatcagtttccagcacagaa

SEQ ID NO: 4346088 - DNA, 25 bp, Homo sapien
ttttgtatcgaattggctaggctag

SEQ ID NO: 4346089 - DNA, 25 bp, Homo sapien
ggaaggcctctatctctgaagggca

SEQ ID NO: 4346090 - DNA, 25 bp, Homo sapien
caaaatatagacacaatgatgggcc

SEQ ID NO: 4346091 - DNA, 25 bp, Homo sapien
tagccatagggagctatctctgtcc

SEQ ID NO: 4346092 - DNA, 25 bp, Homo sapien
tgtgcattaacagaagggcagtccc

SEQ ID NO: 4346093 - DNA, 25 bp, Homo sapien
tgttacgtgtatgggagccaccagg

SEQ ID NO: 4346094 - DNA, 25 bp, Homo sapien
tattcactaacgtcaaagagcagtg

SEQ ID NO: 4346095 - DNA, 25 bp, Homo sapien
tagacgctgggataaggtccctgct

SEQ ID NO: 4346096 - DNA, 25 bp, Homo sapien
ctccagggagcttacggtctattca

SEQ ID NO: 4346097 - DNA, 25 bp, Homo sapien
agacaaggtccgagcccttcgggag

SEQ ID NO: 4346098 - DNA, 25 bp, Homo sapien
gtcatctatttccaggtgtgtccag

SEQ ID NO: 4346099 - DNA, 25 bp, Homo sapien
tcgggaggcgttctaccgccagaat

SEQ ID NO: 4346100 - DNA, 25 bp, Homo sapien
gaatttgaaggtgctatcatcgcac

SEQ ID NO: 4346101 - DNA, 25 bp, Homo sapien
tactgggagctcataaaaataaacc

SEQ ID NO: 4346102 - DNA, 25 bp, Homo sapien
gaactattataaggtgtgaggccac

SEQ ID NO: 4346103 - DNA, 25 bp, Homo sapien
taaatcctctgtattccgagccctg

SEQ ID NO: 4346104 - DNA, 25 bp, Homo sapien
tcaccagctagagagaagcgccctt

SEQ ID NO: 4346105 - DNA, 25 bp, Homo sapien
gatacagctgtacccttggagatgg

SEQ ID NO: 4346106 - DNA, 25 bp, Homo sapien
ggtgaccttagatgctgccacagca

SEQ ID NO: 4346107 - DNA, 25 bp, Homo sapien
catggccgtgttcctacaaagctgg

SEQ ID NO: 4346108 - DNA, 25 bp, Homo sapien
tgtcctatgggccttacctaaagga

SEQ ID NO: 4346109 - DNA, 25 bp, Homo sapien
cagtttggtctagtcacagtcccct

SEQ ID NO: 4346110 - DNA, 25 bp, Homo sapien
tgacatctcagtttggtctagtcac

SEQ ID NO: 4346111 - DNA, 25 bp, Homo sapien
tctcagtttggtctagtcacagtcc

SEQ ID NO: 4346112 - DNA, 25 bp, Homo sapien
acatctcagtttggtctagtcacag

SEQ ID NO: 4346113 - DNA, 25 bp, Homo sapien
gagcagatcatgtatttcccggaga

SEQ ID NO: 4346114 - DNA, 25 bp, Homo sapien
ccaaaagagagggatggctttccca

SEQ ID NO: 4346115 - DNA, 25 bp, Homo sapien
tcaccagtgtcgtcagcagagagag

SEQ ID NO: 4346116 - DNA, 25 bp, Homo sapien
tattcagccgactgccagagaagtg

SEQ ID NO: 4346117 - DNA, 25 bp, Homo sapien
gtctggaataagttctgtttgtgct

SEQ ID NO: 4346118 - DNA, 25 bp, Homo sapien
ctggaataagttctgtttgtgctga

SEQ ID NO: 4346119 - DNA, 25 bp, Homo sapien
tctggaataagttctgtttgtgctg

SEQ ID NO: 4346120 - DNA, 25 bp, Homo sapien
caggatgccctgatcctaagaaggg

SEQ ID NO: 4346121 - DNA, 25 bp, Homo sapien
ggagaccccactctgacagtgggca

SEQ ID NO: 4346122 - DNA, 25 bp, Homo sapien
gtgggcacacggcagcctgcaaagc

SEQ ID NO: 4346123 - DNA, 25 bp, Homo sapien
gggcctgggggtgcgtgcagcctgt

SEQ ID NO: 4346124 - DNA, 25 bp, Homo sapien
gggcttaccaccctatcacacgtgg

SEQ ID NO: 4346125 - DNA, 25 bp, Homo sapien
gcttaggaatgcttggcctctggca

SEQ ID NO: 4346126 - DNA, 25 bp, Homo sapien
gagaggctcttgagacctgatgccc

SEQ ID NO: 4346127 - DNA, 25 bp, Homo sapien
tgtctagacccagtcctgagcaggg

SEQ ID NO: 4346128 - DNA, 25 bp, Homo sapien
gagtgcactggctgtcccgtgagaa

SEQ ID NO: 4346129 - DNA, 25 bp, Homo sapien
cagtgaggcgcaaagcttggttgca

SEQ ID NO: 4346130 - DNA, 25 bp, Homo sapien
tgccaccccgtggaagagtgggaac

SEQ ID NO: 4346131 - DNA, 25 bp, Homo sapien
gtgagaatgcagaggcctccgctga

SEQ ID NO: 4346132 - DNA, 25 bp, Homo sapien
gaagcagtaggccatctctcgtgcc

SEQ ID NO: 4346133 - DNA, 25 bp, Homo sapien
taggccatctctcgtgcctcaggta

SEQ ID NO: 4346134 - DNA, 25 bp, Homo sapien
ctcgtgcctcaggtattcgtttgca

SEQ ID NO: 4346135 - DNA, 25 bp, Homo sapien
ttcgtttgcacctgtggccgtggcc

SEQ ID NO: 4346136 - DNA, 25 bp, Homo sapien
cctcagatagcagatattaaagtga

SEQ ID NO: 4346137 - DNA, 25 bp, Homo sapien
ctcagatagcagatattaaagtgat

SEQ ID NO: 4346138 - DNA, 25 bp, Homo sapien
tcagatagcagatattaaagtgata

SEQ ID NO: 4346139 - DNA, 25 bp, Homo sapien
tcttagccaaaggctgagaggcgat

SEQ ID NO: 4346140 - DNA, 25 bp, Homo sapien
gacgggaccacttgcgatgacagct

SEQ ID NO: 4346141 - DNA, 25 bp, Homo sapien
cgatgacagctaaaggagcacaggg

SEQ ID NO: 4346142 - DNA, 25 bp, Homo sapien
ccaacggtgcgctgagagcgctcag

SEQ ID NO: 4346143 - DNA, 25 bp, Homo sapien
acccgacccagggacgaagctctgg

SEQ ID NO: 4346144 - DNA, 25 bp, Homo sapien
cttgcaaagaccgaagaggctggtg

SEQ ID NO: 4346145 - DNA, 25 bp, Homo sapien
ggtcctgaccgtctagtctgggttc

SEQ ID NO: 4346146 - DNA, 25 bp, Homo sapien
agccccgtgaaaacctgcgccgtgt

SEQ ID NO: 4346147 - DNA, 25 bp, Homo sapien
tcaggcccttgtgtcacggtggcac

SEQ ID NO: 4346148 - DNA, 25 bp, Homo sapien
gtccccattaatcacgcggcgctga

SEQ ID NO: 4346149 - DNA, 25 bp, Homo sapien
ccagtgtaagtgcagcgtgccgtgt

SEQ ID NO: 4346150 - DNA, 25 bp, Homo sapien
cgctgacggcgctgatctgcgtgct

SEQ ID NO: 4346151 - DNA, 25 bp, Homo sapien
cgttccctgcatgcggctccagtgt

SEQ ID NO: 4346152 - DNA, 25 bp, Homo sapien
gagggatcagtcgtaaaaacttcgc

SEQ ID NO: 4346153 - DNA, 25 bp, Homo sapien
ttggtgagggatcagtcgtaaaaac

SEQ ID NO: 4346154 - DNA, 25 bp, Homo sapien
gtgagggatcagtcgtaaaaacttc

SEQ ID NO: 4346155 - DNA, 25 bp, Homo sapien
tagttggtgagggatcagtcgtaaa

SEQ ID NO: 4346156 - DNA, 25 bp, Homo sapien
ttgggcagccgaagaagactctgtc

SEQ ID NO: 4346157 - DNA, 25 bp, Homo sapien
tctggatattggtaccttgggcagc

SEQ ID NO: 4346158 - DNA, 25 bp, Homo sapien
tgctgtcagcgccacttccatcttg

SEQ ID NO: 4346159 - DNA, 25 bp, Homo sapien
ctggctgatctggatattggtacct

SEQ ID NO: 4346160 - DNA, 25 bp, Homo sapien
gttcacaatgactctgtacatctaa

SEQ ID NO: 4346161 - DNA, 25 bp, Homo sapien
tgctatctgatgtaacacgttaaca

SEQ ID NO: 4346162 - DNA, 25 bp, Homo sapien
cattcacggtgacaaatgtgctatc

SEQ ID NO: 4346163 - DNA, 25 bp, Homo sapien
ggtacaagatacatgggaactccct

SEQ ID NO: 4346164 - DNA, 25 bp, Homo sapien
acacctggggagtctcttactgctg

SEQ ID NO: 4346165 - DNA, 25 bp, Homo sapien
acagcgctgcagaccacgcctgagt

SEQ ID NO: 4346166 - DNA, 25 bp, Homo sapien
tttcaaagcaaccacaggaacagtt

SEQ ID NO: 4346167 - DNA, 25 bp, Homo sapien
tgctttccacactgaactgacagcg

SEQ ID NO: 4346168 - DNA, 25 bp, Homo sapien
atgtacttatcctgctggtcagcca

SEQ ID NO: 4346169 - DNA, 25 bp, Homo sapien
tcatgtacttatcctgctggtcagc

SEQ ID NO: 4346170 - DNA, 25 bp, Homo sapien
tcactgatctcttcgacatgctctt

SEQ ID NO: 4346171 - DNA, 25 bp, Homo sapien
tgattttagcaagcaagttggccgg

SEQ ID NO: 4346172 - DNA, 25 bp, Homo sapien
gattttggcggaggacttggcatca

SEQ ID NO: 4346173 - DNA, 25 bp, Homo sapien
cttggcatcatagaaaagttcactg

SEQ ID NO: 4346174 - DNA, 25 bp, Homo sapien
tagccagctggaagtacatgcccat

SEQ ID NO: 4346175 - DNA, 25 bp, Homo sapien
tgcagtcattatcccatcagagagg

SEQ ID NO: 4346176 - DNA, 25 bp, Homo sapien
gatagagtcccatgccctaggaagg

SEQ ID NO: 4346177 - DNA, 25 bp, Homo sapien
catttgaaactcaagtgccctggca

SEQ ID NO: 4346178 - DNA, 25 bp, Homo sapien
gatgttgattccttccgtctgggca

SEQ ID NO: 4346179 - DNA, 25 bp, Homo sapien
tgattccttccgtctgggcacggat

SEQ ID NO: 4346180 - DNA, 25 bp, Homo sapien
tgttgattccttccgtctgggcacg

SEQ ID NO: 4346181 - DNA, 25 bp, Homo sapien
tgatgttgattccttccgtctgggc

SEQ ID NO: 4346182 - DNA, 25 bp, Homo sapien
agataactgcaggacttcgagccgc

SEQ ID NO: 4346183 - DNA, 25 bp, Homo sapien
ccagaggtttactgaggtggccaca

SEQ ID NO: 4346184 - DNA, 25 bp, Homo sapien
tcacagctgggactgaggaaaccac

SEQ ID NO: 4346185 - DNA, 25 bp, Homo sapien
gaacaaagccacgagtcctgagaga

SEQ ID NO: 4346186 - DNA, 25 bp, Homo sapien
ttggagcctccaacactggctattg

SEQ ID NO: 4346187 - DNA, 25 bp, Homo sapien
atagccacaggaccctcgttcttgg

SEQ ID NO: 4346188 - DNA, 25 bp, Homo sapien
ctggctattgcgaagctgttgtatg

SEQ ID NO: 4346189 - DNA, 25 bp, Homo sapien
tgttgtatgttgtacgtagaggacc

SEQ ID NO: 4346190 - DNA, 25 bp, Homo sapien
cagcatggtccggattatcatcact

SEQ ID NO: 4346191 - DNA, 25 bp, Homo sapien
tcatcactcggtccagaaggtcaag

SEQ ID NO: 4346192 - DNA, 25 bp, Homo sapien
ttcctgtggagtatacagcatggtc

SEQ ID NO: 4346193 - DNA, 25 bp, Homo sapien
gattatcatcactcggtccagaagg

SEQ ID NO: 4346194 - DNA, 25 bp, Homo sapien
aaaattaatcccatcacctaagcct

SEQ ID NO: 4346195 - DNA, 25 bp, Homo sapien
gcaaaattaatcccatcacctaagc

SEQ ID NO: 4346196 - DNA, 25 bp, Homo sapien
caaaattaatcccatcacctaagcc

SEQ ID NO: 4346197 - DNA, 25 bp, Homo sapien
gacgatgggagcgatagaagactcc

SEQ ID NO: 4346198 - DNA, 25 bp, Homo sapien
aatgccctggtcgatgtacttgttc

SEQ ID NO: 4346199 - DNA, 25 bp, Homo sapien
tgcctcggttggatgcaaagatgac

SEQ ID NO: 4346200 - DNA, 25 bp, Homo sapien
caggtaggtgaagcactcaatgtcc

SEQ ID NO: 4346201 - DNA, 25 bp, Homo sapien
tggcttcattagctggcccatcatg

SEQ ID NO: 4346202 - DNA, 25 bp, Homo sapien
tcatggacaggatatcttgtccccc

SEQ ID NO: 4346203 - DNA, 25 bp, Homo sapien
ggcttcattagctggcccatcatgg

SEQ ID NO: 4346204 - DNA, 25 bp, Homo sapien
ccatcatggacaggatatcttgtcc

SEQ ID NO: 4346205 - DNA, 25 bp, Homo sapien
cgcgcattagccacatccaagtcat

SEQ ID NO: 4346206 - DNA, 25 bp, Homo sapien
caaggtcgaattctgtggcataggt

SEQ ID NO: 4346207 - DNA, 25 bp, Homo sapien
gggacatactcttcagcttcaaggt

SEQ ID NO: 4346208 - DNA, 25 bp, Homo sapien
aagtcatgcaaggtcacatcttgga

SEQ ID NO: 4346209 - DNA, 25 bp, Homo sapien
actgttggcttcaatgtaaatcaca

SEQ ID NO: 4346210 - DNA, 25 bp, Homo sapien
tctactcgctctttctgcaaacttt

SEQ ID NO: 4346211 - DNA, 25 bp, Homo sapien
ttcaatgtaaatcacatctccagct

SEQ ID NO: 4346212 - DNA, 25 bp, Homo sapien
agcttctactcgctctttctgcaaa

SEQ ID NO: 4346213 - DNA, 25 bp, Homo sapien
ttggataaggttctcagttctaagt

SEQ ID NO: 4346214 - DNA, 25 bp, Homo sapien
catggctaatggttttgccatatcc

SEQ ID NO: 4346215 - DNA, 25 bp, Homo sapien
tcaactgtttggttcctttggctgt

SEQ ID NO: 4346216 - DNA, 25 bp, Homo sapien
tgttttgagtcctatgatcacatgg

SEQ ID NO: 4346217 - DNA, 25 bp, Homo sapien
gggattctctgtctcacacggagtt

SEQ ID NO: 4346218 - DNA, 25 bp, Homo sapien
caatggccctgcggaagttctccat

SEQ ID NO: 4346219 - DNA, 25 bp, Homo sapien
gccctgcggaagttctccatcagca

SEQ ID NO: 4346220 - DNA, 25 bp, Homo sapien
tggccctgcggaagttctccatcag

SEQ ID NO: 4346221 - DNA, 25 bp, Homo sapien
aatggccctgcggaagttctccatc

SEQ ID NO: 4346222 - DNA, 25 bp, Homo sapien
tacccagctcctgagcaatagccag

SEQ ID NO: 4346223 - DNA, 25 bp, Homo sapien
ctccccaccattgggcagaagggga

SEQ ID NO: 4346224 - DNA, 25 bp, Homo sapien
tgatctcagttgagtaaacttcact

SEQ ID NO: 4346225 - DNA, 25 bp, Homo sapien
cagaaggggaccttactacccagct

SEQ ID NO: 4346226 - DNA, 25 bp, Homo sapien
tgtggacagtcaatttaaatcataa

SEQ ID NO: 4346227 - DNA, 25 bp, Homo sapien
gttcacagtcctgaaaacatgacag

SEQ ID NO: 4346228 - DNA, 25 bp, Homo sapien
gaaacacatgctacagaaccaccag

SEQ ID NO: 4346229 - DNA, 25 bp, Homo sapien
ctaggaacagctgaacatctagtcc

SEQ ID NO: 4346230 - DNA, 25 bp, Homo sapien
ggctcaaggcagacacgccacagtg

SEQ ID NO: 4346231 - DNA, 25 bp, Homo sapien
tgaccttcagcaaggccgagcacct

SEQ ID NO: 4346232 - DNA, 25 bp, Homo sapien
gcatctgcacttgtgagctcaaggc

SEQ ID NO: 4346233 - DNA, 25 bp, Homo sapien
aggctgacaccttgaaaactggtat

SEQ ID NO: 4346234 - DNA, 25 bp, Homo sapien
ttaattctactatgacgccacatgc

SEQ ID NO: 4346235 - DNA, 25 bp, Homo sapien
tgattaattctactatgacgccaca

SEQ ID NO: 4346236 - DNA, 25 bp, Homo sapien
tttgattaattctactatgacgcca

SEQ ID NO: 4346237 - DNA, 25 bp, Homo sapien
gattaattctactatgacgccacat

SEQ ID NO: 4346238 - DNA, 25 bp, Homo sapien
aataatggcgggagacccctggcgc

SEQ ID NO: 4346239 - DNA, 25 bp, Homo sapien
gaaataatggcgggagacccctggc

SEQ ID NO: 4346240 - DNA, 25 bp, Homo sapien
ggcgcgcgcatcccgccccgagcca

SEQ ID NO: 4346241 - DNA, 25 bp, Homo sapien
ctggcgcgcgcatcccgccccgagc

SEQ ID NO: 4346242 - DNA, 25 bp, Homo sapien
cagccctttcacgtggctgtgggag

SEQ ID NO: 4346243 - DNA, 25 bp, Homo sapien
gtagtgctcttcacctcctcaatct

SEQ ID NO: 4346244 - DNA, 25 bp, Homo sapien
aggcgatgcgctgcgtcttcgtagt

SEQ ID NO: 4346245 - DNA, 25 bp, Homo sapien
gcctgcttggccaagccgctctcgt

SEQ ID NO: 4346246 - DNA, 25 bp, Homo sapien
catgcggccgttactagggcaattt

SEQ ID NO: 4346247 - DNA, 25 bp, Homo sapien
taaaaccagcgtggaaaaccagcag

SEQ ID NO: 4346248 - DNA, 25 bp, Homo sapien
gcccggcgcctgagttaccatgcgg

SEQ ID NO: 4346249 - DNA, 25 bp, Homo sapien
gcaatttgcaaaggcccgcctagac

SEQ ID NO: 4346250 - DNA, 25 bp, Homo sapien
ccacttccgtctgtgtctccgggtt

SEQ ID NO: 4346251 - DNA, 25 bp, Homo sapien
tccgtctgtgtctccgggttggctt

SEQ ID NO: 4346252 - DNA, 25 bp, Homo sapien
tcacccacttccgtctgtgtctccg

SEQ ID NO: 4346253 - DNA, 25 bp, Homo sapien
gctagagctccggtcacccacttcc

SEQ ID NO: 4346254 - DNA, 25 bp, Homo sapien
acagtgggaccacgccccggatttg

SEQ ID NO: 4346255 - DNA, 25 bp, Homo sapien
accacgccccggatttgatctaggg

SEQ ID NO: 4346256 - DNA, 25 bp, Homo sapien
gaccacgccccggatttgatctagg

SEQ ID NO: 4346257 - DNA, 25 bp, Homo sapien
gagcacagtgggaccacgccccgga

SEQ ID NO: 4346258 - DNA, 25 bp, Homo sapien
aggggccatgctgtctctgtctcat

SEQ ID NO: 4346259 - DNA, 25 bp, Homo sapien
gccatgctgtctctgtctcattcta

SEQ ID NO: 4346260 - DNA, 25 bp, Homo sapien
tgctgtctctgtctcattctaattt

SEQ ID NO: 4346261 - DNA, 25 bp, Homo sapien
gctgtctctgtctcattctaatttt

SEQ ID NO: 4346262 - DNA, 25 bp, Homo sapien
gggagcagtgtttccgtttcagcag

SEQ ID NO: 4346263 - DNA, 25 bp, Homo sapien
caggcacgtcccaacgcaatgggta

SEQ ID NO: 4346264 - DNA, 25 bp, Homo sapien
ctcccagagtctgcctgggaacgtg

SEQ ID NO: 4346265 - DNA, 25 bp, Homo sapien
gtaaacctggccacatccgctgact

SEQ ID NO: 4346266 - DNA, 25 bp, Homo sapien
gtgccacatggcttaggttgctgct

SEQ ID NO: 4346267 - DNA, 25 bp, Homo sapien
tcgccacgtgccacatggcttaggt

SEQ ID NO: 4346268 - DNA, 25 bp, Homo sapien
atttccctcggttctgtgcagcctg

SEQ ID NO: 4346269 - DNA, 25 bp, Homo sapien
atcaatttccctcggttctgtgcag

SEQ ID NO: 4346270 - DNA, 25 bp, Homo sapien
tcaaatgcctctcccttaataagca

SEQ ID NO: 4346271 - DNA, 25 bp, Homo sapien
caaatgcctctcccttaataagcat

SEQ ID NO: 4346272 - DNA, 25 bp, Homo sapien
ggagccacgtgagagagaaaccctg

SEQ ID NO: 4346273 - DNA, 25 bp, Homo sapien
cactgcttcaggtcacgctggtcga

SEQ ID NO: 4346274 - DNA, 25 bp, Homo sapien
gcggcatcacgctcgatctgggctt

SEQ ID NO: 4346275 - DNA, 25 bp, Homo sapien
catctcgggctcctagaggcttcag

SEQ ID NO: 4346276 - DNA, 25 bp, Homo sapien
tcagacaaaactgggcttgaagcct

SEQ ID NO: 4346277 - DNA, 25 bp, Homo sapien
cagggtcacactatctaaagtcttc

SEQ ID NO: 4346278 - DNA, 25 bp, Homo sapien
tctgggtcccagctataatggtgag

SEQ ID NO: 4346279 - DNA, 25 bp, Homo sapien
tccttagctgtatgacgtttgaacc

SEQ ID NO: 4346280 - DNA, 25 bp, Homo sapien
tagtttaactcatagcagatttctg

SEQ ID NO: 4346281 - DNA, 25 bp, Homo sapien
gatggttaatttcgtggcccacaga

SEQ ID NO: 4346282 - DNA, 25 bp, Homo sapien
ttcaggccactttgcgtagcaaagt

SEQ ID NO: 4346283 - DNA, 25 bp, Homo sapien
tctgccatgctgatggttaatttcg

SEQ ID NO: 4346284 - DNA, 25 bp, Homo sapien
tcttcagcttgaccctggttgttta

SEQ ID NO: 4346285 - DNA, 25 bp, Homo sapien
taaaagctataacatagatccctcc

SEQ ID NO: 4346286 - DNA, 25 bp, Homo sapien
ggtttttgccggcaatcttcagctt

SEQ ID NO: 4346287 - DNA, 25 bp, Homo sapien
tccctcccagatcgtatattttcct

SEQ ID NO: 4346288 - DNA, 25 bp, Homo sapien
gactctgagacaggacgagcacttt

SEQ ID NO: 4346289 - DNA, 25 bp, Homo sapien
acttttaaacttgccccagagcttg

SEQ ID NO: 4346290 - DNA, 25 bp, Homo sapien
gagcgtaatgcaagcctgtggctga

SEQ ID NO: 4346291 - DNA, 25 bp, Homo sapien
gggaaatgagcgtaatgcaagcctg

SEQ ID NO: 4346292 - DNA, 25 bp, Homo sapien
tatcagggccttaagcatcctcaga

SEQ ID NO: 4346293 - DNA, 25 bp, Homo sapien
gacagtggcattggtttacaactcc

SEQ ID NO: 4346294 - DNA, 25 bp, Homo sapien
gaaaacagcagtggtagcaaggccc

SEQ ID NO: 4346295 - DNA, 25 bp, Homo sapien
gattccagcctatgcaagaattggg

SEQ ID NO: 4346296 - DNA, 25 bp, Homo sapien
ccaggccctgcatcgatgggaccag

SEQ ID NO: 4346297 - DNA, 25 bp, Homo sapien
tccaggccctgcatcgatgggacca

SEQ ID NO: 4346298 - DNA, 25 bp, Homo sapien
aggccctgcatcgatgggaccaggc

SEQ ID NO: 4346299 - DNA, 25 bp, Homo sapien
taactttcattgttcccattcccaa

SEQ ID NO: 4346300 - DNA, 25 bp, Homo sapien
ctttcattgttcccattcccaaatc

SEQ ID NO: 4346301 - DNA, 25 bp, Homo sapien
ataactttcattgttcccattccca

SEQ ID NO: 4346302 - DNA, 25 bp, Homo sapien
actttcattgttcccattcccaaat

SEQ ID NO: 4346303 - DNA, 25 bp, Homo sapien
ggtcctcatcacactgaggctgggt

SEQ ID NO: 4346304 - DNA, 25 bp, Homo sapien
tcatcacactgaggctgggtttctt

SEQ ID NO: 4346305 - DNA, 25 bp, Homo sapien
tcctcatcacactgaggctgggttt

SEQ ID NO: 4346306 - DNA, 25 bp, Homo sapien
tggggggcggtcctcatcacactga

SEQ ID NO: 4346307 - DNA, 25 bp, Homo sapien
tcgaacagtagtgtctggaaggcct

SEQ ID NO: 4346308 - DNA, 25 bp, Homo sapien
ttctgtcttttatggttgtgtgtac

SEQ ID NO: 4346309 - DNA, 25 bp, Homo sapien
tgttccactctcaggatgacttgtg

SEQ ID NO: 4346310 - DNA, 25 bp, Homo sapien
cagggtcagttcctagagacagtgc

SEQ ID NO: 4346311 - DNA, 25 bp, Homo sapien
aggatggttcagcatggactgcctt

SEQ ID NO: 4346312 - DNA, 25 bp, Homo sapien
caagacaggcactgctattaggggc

SEQ ID NO: 4346313 - DNA, 25 bp, Homo sapien
caaagttggatacttccagcacagc

SEQ ID NO: 4346314 - DNA, 25 bp, Homo sapien
gctgcccagatcaagtgacactgaa

SEQ ID NO: 4346315 - DNA, 25 bp, Homo sapien
ttcctttctcagtccgtgggcagcc

SEQ ID NO: 4346316 - DNA, 25 bp, Homo sapien
ggaggcctgtgagcactggttctct

SEQ ID NO: 4346317 - DNA, 25 bp, Homo sapien
aggcctgtgagcactggttctctgg

SEQ ID NO: 4346318 - DNA, 25 bp, Homo sapien
gaggcctgtgagcactggttctctg

SEQ ID NO: 4346319 - DNA, 25 bp, Homo sapien
ctgccaaggcattgcaaagtgctag

SEQ ID NO: 4346320 - DNA, 25 bp, Homo sapien
cctgccaaggcattgcaaagtgcta

SEQ ID NO: 4346321 - DNA, 25 bp, Homo sapien
tgccaaggcattgcaaagtgctagg

SEQ ID NO: 4346322 - DNA, 25 bp, Homo sapien
aagcagaatcatacaggcttggtgg

SEQ ID NO: 4346323 - DNA, 25 bp, Homo sapien
cctccatctattaatgggcacttgg

SEQ ID NO: 4346324 - DNA, 25 bp, Homo sapien
ccacgttgtatcatggatcagaatt

SEQ ID NO: 4346325 - DNA, 25 bp, Homo sapien
tattccagcatatcgatagaccaca

SEQ ID NO: 4346326 - DNA, 25 bp, Homo sapien
ttttctctgcgtgcttagagaccat

SEQ ID NO: 4346327 - DNA, 25 bp, Homo sapien
ccctttcccgatttttctctgcgtg

SEQ ID NO: 4346328 - DNA, 25 bp, Homo sapien
cccgatttttctctgcgtgcttaga

SEQ ID NO: 4346329 - DNA, 25 bp, Homo sapien
cacggttgggtgtgagaagcctgct

SEQ ID NO: 4346330 - DNA, 25 bp, Homo sapien
tctttaagagtgttgctggcacctt

SEQ ID NO: 4346331 - DNA, 25 bp, Homo sapien
cactcttccggcagcacatgtggtt

SEQ ID NO: 4346332 - DNA, 25 bp, Homo sapien
ccatttcagaaagggcactcttccg

SEQ ID NO: 4346333 - DNA, 25 bp, Homo sapien
cagggagcattaggaaaccatcctc

SEQ ID NO: 4346334 - DNA, 25 bp, Homo sapien
aattatcttgctctgtgccacctga

SEQ ID NO: 4346335 - DNA, 25 bp, Homo sapien
gatctcttcatttcccggagggaaa

SEQ ID NO: 4346336 - DNA, 25 bp, Homo sapien
gaaagctataaggaaggctctttga

SEQ ID NO: 4346337 - DNA, 25 bp, Homo sapien
tctgtgccacctgaaagctataagg

SEQ ID NO: 4346338 - DNA, 25 bp, Homo sapien
ggtgcactgataccagtgaatgatt

SEQ ID NO: 4346339 - DNA, 25 bp, Homo sapien
tgggtgcactgataccagtgaatga

SEQ ID NO: 4346340 - DNA, 25 bp, Homo sapien
ctgggtgcactgataccagtgaatg

SEQ ID NO: 4346341 - DNA, 25 bp, Homo sapien
gcactgataccagtgaatgattttc

SEQ ID NO: 4346342 - DNA, 25 bp, Homo sapien
actgtcctctgatggctggccgtac

SEQ ID NO: 4346343 - DNA, 25 bp, Homo sapien
tactgtcctctgatggctggccgta

SEQ ID NO: 4346344 - DNA, 25 bp, Homo sapien
gcctgtactgtcctctgatggctgg

SEQ ID NO: 4346345 - DNA, 25 bp, Homo sapien
tgtactgtcctctgatggctggccg

SEQ ID NO: 4346346 - DNA, 25 bp, Homo sapien
gattccaagccatcctgtcgtatct

SEQ ID NO: 4346347 - DNA, 25 bp, Homo sapien
attccaagccatcctgtcgtatctc

SEQ ID NO: 4346348 - DNA, 25 bp, Homo sapien
ctgagattccaagccatcctgtcgt

SEQ ID NO: 4346349 - DNA, 25 bp, Homo sapien
gagattccaagccatcctgtcgtat

SEQ ID NO: 4346350 - DNA, 25 bp, Homo sapien
taacttcctcttccctcagcctcat

SEQ ID NO: 4346351 - DNA, 25 bp, Homo sapien
tgagcatctccttaacttcctcttc

SEQ ID NO: 4346352 - DNA, 25 bp, Homo sapien
cttgagcatctccttaacttcctct

SEQ ID NO: 4346353 - DNA, 25 bp, Homo sapien
cttaacttcctcttccctcagcctc

SEQ ID NO: 4346354 - DNA, 25 bp, Homo sapien
gagttcttaaacttcttctggtcca

SEQ ID NO: 4346355 - DNA, 25 bp, Homo sapien
tggagttcttaaacttcttctggtc

SEQ ID NO: 4346356 - DNA, 25 bp, Homo sapien
tctggtccacgtggtatggcatatc

SEQ ID NO: 4346357 - DNA, 25 bp, Homo sapien
tccacgtggtatggcatatccttta

SEQ ID NO: 4346358 - DNA, 25 bp, Homo sapien
gaggcactgtttgtattcgctccat

SEQ ID NO: 4346359 - DNA, 25 bp, Homo sapien
caagaaaccccgtgaggggccagct

SEQ ID NO: 4346360 - DNA, 25 bp, Homo sapien
ggaggcactgtttgtattcgctcca

SEQ ID NO: 4346361 - DNA, 25 bp, Homo sapien
agcttacgggattctgctctctgtg

SEQ ID NO: 4346362 - DNA, 25 bp, Homo sapien
accagatgcacagggttggagctcc

SEQ ID NO: 4346363 - DNA, 25 bp, Homo sapien
tgcaccagatgcacagggttggagc

SEQ ID NO: 4346364 - DNA, 25 bp, Homo sapien
atggttgtctggcttttggcagtgg

SEQ ID NO: 4346365 - DNA, 25 bp, Homo sapien
ctgcagccaagttgtaatatcctgt

SEQ ID NO: 4346366 - DNA, 25 bp, Homo sapien
gcagccaagttgtaatatcctgttg

SEQ ID NO: 4346367 - DNA, 25 bp, Homo sapien
tgcagccaagttgtaatatcctgtt

SEQ ID NO: 4346368 - DNA, 25 bp, Homo sapien
tggacctgtgacagtgggtctgtct

SEQ ID NO: 4346369 - DNA, 25 bp, Homo sapien
ccaggttcttgtgctgagagcggcc

SEQ ID NO: 4346370 - DNA, 25 bp, Homo sapien
ggtctgtctgcgctcctgataggcc

SEQ ID NO: 4346371 - DNA, 25 bp, Homo sapien
gataggcctaagcatttcacacagt

SEQ ID NO: 4346372 - DNA, 25 bp, Homo sapien
tgccaaatgtggcgcgggtagggag

SEQ ID NO: 4346373 - DNA, 25 bp, Homo sapien
aggtgccaaatgtggcgcgggtagg

SEQ ID NO: 4346374 - DNA, 25 bp, Homo sapien
ggtgccaaatgtggcgcgggtaggg

SEQ ID NO: 4346375 - DNA, 25 bp, Homo sapien
gtgccaaatgtggcgcgggtaggga

SEQ ID NO: 4346376 - DNA, 25 bp, Homo sapien
atgccagggctggttcccatccact

SEQ ID NO: 4346377 - DNA, 25 bp, Homo sapien
agggctggttcccatccactgtgcc

SEQ ID NO: 4346378 - DNA, 25 bp, Homo sapien
ccagggctggttcccatccactgtg

SEQ ID NO: 4346379 - DNA, 25 bp, Homo sapien
tatggaatgccagggctggttccca

SEQ ID NO: 4346380 - DNA, 25 bp, Homo sapien
tctagcagtgacctgaggactggca

SEQ ID NO: 4346381 - DNA, 25 bp, Homo sapien
aataggatgcgcatgtcatcgaggg

SEQ ID NO: 4346382 - DNA, 25 bp, Homo sapien
ggactggcaggacctcgatactggg

SEQ ID NO: 4346383 - DNA, 25 bp, Homo sapien
tctagctgtgggctgcggtgccttt

SEQ ID NO: 4346384 - DNA, 25 bp, Homo sapien
gatatgaatatcttgagcaatgaag

SEQ ID NO: 4346385 - DNA, 25 bp, Homo sapien
cttacagtgaggcgattgagaatgg

SEQ ID NO: 4346386 - DNA, 25 bp, Homo sapien
gaggggttctgtaggccaagagagc

SEQ ID NO: 4346387 - DNA, 25 bp, Homo sapien
taggccaagagagctctcttggagg

SEQ ID NO: 4346388 - DNA, 25 bp, Homo sapien
aagagtgtgggaatgctgggcacat

SEQ ID NO: 4346389 - DNA, 25 bp, Homo sapien
agagtgtgggaatgctgggcacatt

SEQ ID NO: 4346390 - DNA, 25 bp, Homo sapien
gaagagtgtgggaatgctgggcaca

SEQ ID NO: 4346391 - DNA, 25 bp, Homo sapien
agaagagtgtgggaatgctgggcac

SEQ ID NO: 4346392 - DNA, 25 bp, Homo sapien
tgccaccaggagggaaggggagacg

SEQ ID NO: 4346393 - DNA, 25 bp, Homo sapien
ctgccaccaggagggaaggggagac

SEQ ID NO: 4346394 - DNA, 25 bp, Homo sapien
ccttgcagcctccaatgctgctgct

SEQ ID NO: 4346395 - DNA, 25 bp, Homo sapien
aatgctgctgctgtggcagctgctg

SEQ ID NO: 4346396 - DNA, 25 bp, Homo sapien
ttgcagcctccaatgctgctgctgt

SEQ ID NO: 4346397 - DNA, 25 bp, Homo sapien
ccccttgcagcctccaatgctgctg

SEQ ID NO: 4346398 - DNA, 25 bp, Homo sapien
agttgtatgccagtaggagccaggg

SEQ ID NO: 4346399 - DNA, 25 bp, Homo sapien
ccaggattggtgttgctccacacat

SEQ ID NO: 4346400 - DNA, 25 bp, Homo sapien
gtccaggattggtgttgctccacac

SEQ ID NO: 4346401 - DNA, 25 bp, Homo sapien
tccaggattggtgttgctccacaca

SEQ ID NO: 4346402 - DNA, 25 bp, Homo sapien
ctgtagcacataatggctgggcagc

SEQ ID NO: 4346403 - DNA, 25 bp, Homo sapien
tgtagcacataatggctgggcagca

SEQ ID NO: 4346404 - DNA, 25 bp, Homo sapien
gtagcacataatggctgggcagcag

SEQ ID NO: 4346405 - DNA, 25 bp, Homo sapien
tagcacataatggctgggcagcagg

SEQ ID NO: 4346406 - DNA, 25 bp, Homo sapien
aatgagatcaagaatggaatctggg

SEQ ID NO: 4346407 - DNA, 25 bp, Homo sapien
gaatgagatcaagaatggaatctgg

SEQ ID NO: 4346408 - DNA, 25 bp, Homo sapien
ggaatgagatcaagaatggaatctg

SEQ ID NO: 4346409 - DNA, 25 bp, Homo sapien
tttgctggcaaatatacagacctag

SEQ ID NO: 4346410 - DNA, 25 bp, Homo sapien
ctgccagagtcccaagcaggtgacc

SEQ ID NO: 4346411 - DNA, 25 bp, Homo sapien
gaagtcacgtggttccatgcctgct

SEQ ID NO: 4346412 - DNA, 25 bp, Homo sapien
gggccttccaacaattgaggctcct

SEQ ID NO: 4346413 - DNA, 25 bp, Homo sapien
acagcatgtaagaatcaggggtgcc

SEQ ID NO: 4346414 - DNA, 25 bp, Homo sapien
catcaagtgtgatgataactttcgg

SEQ ID NO: 4346415 - DNA, 25 bp, Homo sapien
ccttctcttgattaccatcaagtgt

SEQ ID NO: 4346416 - DNA, 25 bp, Homo sapien
gagaactggctctaccagtgcccct

SEQ ID NO: 4346417 - DNA, 25 bp, Homo sapien
ctttatttgtggattgagcccctga

SEQ ID NO: 4346418 - DNA, 25 bp, Homo sapien
tggaccccacggtcatgctgagttc

SEQ ID NO: 4346419 - DNA, 25 bp, Homo sapien
cttctgtggaccccacggtcatgct

SEQ ID NO: 4346420 - DNA, 25 bp, Homo sapien
gtggaccccacggtcatgctgagtt

SEQ ID NO: 4346421 - DNA, 25 bp, Homo sapien
tctgtggaccccacggtcatgctga

SEQ ID NO: 4346422 - DNA, 25 bp, Homo sapien
caattttcaactgtggacccatgtg

SEQ ID NO: 4346423 - DNA, 25 bp, Homo sapien
caccttcctcttcggtaatgctgag

SEQ ID NO: 4346424 - DNA, 25 bp, Homo sapien
tggacccatgtgaagtgtaactaat

SEQ ID NO: 4346425 - DNA, 25 bp, Homo sapien
tcttcggtaatgctgagccccattc

SEQ ID NO: 4346426 - DNA, 25 bp, Homo sapien
cttgtcaaggtacagatgacaggca

SEQ ID NO: 4346427 - DNA, 25 bp, Homo sapien
tcaaggtacagatgacaggcagggc

SEQ ID NO: 4346428 - DNA, 25 bp, Homo sapien
ctgcttgtcaaggtacagatgacag

SEQ ID NO: 4346429 - DNA, 25 bp, Homo sapien
tgtcaaggtacagatgacaggcagg

SEQ ID NO: 4346430 - DNA, 25 bp, Homo sapien
gccctggttgcaagcagctcccttt

SEQ ID NO: 4346431 - DNA, 25 bp, Homo sapien
tctccacagccatttgtaagtccag

SEQ ID NO: 4346432 - DNA, 25 bp, Homo sapien
gcgagactgcggactgctgtccctg

SEQ ID NO: 4346433 - DNA, 25 bp, Homo sapien
tgtcacctatttgccagcatggctg

SEQ ID NO: 4346434 - DNA, 25 bp, Homo sapien
catatgggaaatgggaactgctggc

SEQ ID NO: 4346435 - DNA, 25 bp, Homo sapien
tggcagaagccgagcctccttttga

SEQ ID NO: 4346436 - DNA, 25 bp, Homo sapien
tccttttgagtccatctggttaccc

SEQ ID NO: 4346437 - DNA, 25 bp, Homo sapien
tggagggatctcttgcatatgggaa

SEQ ID NO: 4346438 - DNA, 25 bp, Homo sapien
atcagttgagtgtgacggacgttcc

SEQ ID NO: 4346439 - DNA, 25 bp, Homo sapien
gatgttgcccctgcacagctgcact

SEQ ID NO: 4346440 - DNA, 25 bp, Homo sapien
gctcctgcaggatgtgagtccaagt

SEQ ID NO: 4346441 - DNA, 25 bp, Homo sapien
gagtgtgacggacgttcctgagcat

SEQ ID NO: 4346442 - DNA, 25 bp, Homo sapien
gaaggagtatcgagctcatcgggcc

SEQ ID NO: 4346443 - DNA, 25 bp, Homo sapien
caaaacaccagaaagctaagttgaa

SEQ ID NO: 4346444 - DNA, 25 bp, Homo sapien
tcgggcctgggagcagtcagaaggg

SEQ ID NO: 4346445 - DNA, 25 bp, Homo sapien
gaaagacagtcgaaaagccagaagg

SEQ ID NO: 4346446 - DNA, 25 bp, Homo sapien
gctttgccaggtatgattttgccac

SEQ ID NO: 4346447 - DNA, 25 bp, Homo sapien
ggctgggcgtttatctggacctgtc

SEQ ID NO: 4346448 - DNA, 25 bp, Homo sapien
tctggaatctcagctcggtgctttg

SEQ ID NO: 4346449 - DNA, 25 bp, Homo sapien
aggaaggctcataaacacaaggatc

SEQ ID NO: 4346450 - DNA, 25 bp, Homo sapien
tgggtctcaccatagccctctttgc

SEQ ID NO: 4346451 - DNA, 25 bp, Homo sapien
ctttgcccctggcagcatgcatagc

SEQ ID NO: 4346452 - DNA, 25 bp, Homo sapien
tcatgggtctcaccatagccctctt

SEQ ID NO: 4346453 - DNA, 25 bp, Homo sapien
cagcagacttctcactgttaccacg

SEQ ID NO: 4346454 - DNA, 25 bp, Homo sapien
ttggcccaaccaagtgtaaacatgc

SEQ ID NO: 4346455 - DNA, 25 bp, Homo sapien
ggagcactcgccagctttgaagtct

SEQ ID NO: 4346456 - DNA, 25 bp, Homo sapien
cactccactgctgacggcttgttaa

SEQ ID NO: 4346457 - DNA, 25 bp, Homo sapien
aggctggctcatgacctgcctctgg

SEQ ID NO: 4346458 - DNA, 25 bp, Homo sapien
gaatcggcacagggctccatttcat

SEQ ID NO: 4346459 - DNA, 25 bp, Homo sapien
tcacagcttgggcaattcccaagcc

SEQ ID NO: 4346460 - DNA, 25 bp, Homo sapien
gccttccttcgtatcacttctacaa

SEQ ID NO: 4346461 - DNA, 25 bp, Homo sapien
tccatttcatggcacgtttgcctgc

SEQ ID NO: 4346462 - DNA, 25 bp, Homo sapien
gcgatgggcctgctgtgtttagcat

SEQ ID NO: 4346463 - DNA, 25 bp, Homo sapien
ctgagcgatgggcctgctgtgttta

SEQ ID NO: 4346464 - DNA, 25 bp, Homo sapien
ggaggctgagcgatgggcctgctgt

SEQ ID NO: 4346465 - DNA, 25 bp, Homo sapien
cactgggaggctgagcgatgggcct

SEQ ID NO: 4346466 - DNA, 25 bp, Homo sapien
actggtgggcacttcttatcatggg

SEQ ID NO: 4346467 - DNA, 25 bp, Homo sapien
cccaagtttgctactggaggcagga

SEQ ID NO: 4346468 - DNA, 25 bp, Homo sapien
cataacagctgccagactggtgggc

SEQ ID NO: 4346469 - DNA, 25 bp, Homo sapien
tcagaagggagggagtgacacttcc

SEQ ID NO: 4346470 - DNA, 25 bp, Homo sapien
tgtgccccatgcaggatgcctctgt

SEQ ID NO: 4346471 - DNA, 25 bp, Homo sapien
gctgtgccccatgcaggatgcctct

SEQ ID NO: 4346472 - DNA, 25 bp, Homo sapien
ctgtgccccatgcaggatgcctctg

SEQ ID NO: 4346473 - DNA, 25 bp, Homo sapien
gtgccccatgcaggatgcctctgtg

SEQ ID NO: 4346474 - DNA, 25 bp, Homo sapien
tgacagaccacactgcctttagtga

SEQ ID NO: 4346475 - DNA, 25 bp, Homo sapien
cactgcctttagtgaccacagcaca

SEQ ID NO: 4346476 - DNA, 25 bp, Homo sapien
agaccacactgcctttagtgaccac

SEQ ID NO: 4346477 - DNA, 25 bp, Homo sapien
ccaatgtctgacagaccacactgcc

SEQ ID NO: 4346478 - DNA, 25 bp, Homo sapien
ccactgctgctgtagatgtcacttc

SEQ ID NO: 4346479 - DNA, 25 bp, Homo sapien
ctctgagttgttcctggcttccttc

SEQ ID NO: 4346480 - DNA, 25 bp, Homo sapien
actgctgctgtagatgtcacttcca

SEQ ID NO: 4346481 - DNA, 25 bp, Homo sapien
aacctctgagttgttcctggcttcc

SEQ ID NO: 4346482 - DNA, 25 bp, Homo sapien
aggcagccctctctcctgtgcctga

SEQ ID NO: 4346483 - DNA, 25 bp, Homo sapien
cagccctctctcctgtgcctgacac

SEQ ID NO: 4346484 - DNA, 25 bp, Homo sapien
ggcagccctctctcctgtgcctgac

SEQ ID NO: 4346485 - DNA, 25 bp, Homo sapien
tcaggcagccctctctcctgtgcct

SEQ ID NO: 4346486 - DNA, 25 bp, Homo sapien
gggaggcccgaagccagctttgtca

SEQ ID NO: 4346487 - DNA, 25 bp, Homo sapien
tcccagacagctcatcccactcccg

SEQ ID NO: 4346488 - DNA, 25 bp, Homo sapien
gacagctcatcccactcccgtccca

SEQ ID NO: 4346489 - DNA, 25 bp, Homo sapien
ggcagtctggatgtacttgtgaccc

SEQ ID NO: 4346490 - DNA, 25 bp, Homo sapien
gttcccgccaggtgatggatgcagc

SEQ ID NO: 4346491 - DNA, 25 bp, Homo sapien
agccatctgataatcagagctgctt

SEQ ID NO: 4346492 - DNA, 25 bp, Homo sapien
cgttcccgccaggtgatggatgcag

SEQ ID NO: 4346493 - DNA, 25 bp, Homo sapien
gcgtcgaagagttttgatgcgtgaa

SEQ ID NO: 4346494 - DNA, 25 bp, Homo sapien
tcgcaaaagtcgtgatgccaagaaa

SEQ ID NO: 4346495 - DNA, 25 bp, Homo sapien
tcgaagagttttgatgcgtgaagtg

SEQ ID NO: 4346496 - DNA, 25 bp, Homo sapien
tgagtccaggctcgcaaaagtcgtg

SEQ ID NO: 4346497 - DNA, 25 bp, Homo sapien
tgcagaggaggaagacaagccaggc

SEQ ID NO: 4346498 - DNA, 25 bp, Homo sapien
aagccaggccgcccaccactctggc

SEQ ID NO: 4346499 - DNA, 25 bp, Homo sapien
ggccgcccaccactctggcaggcat

SEQ ID NO: 4346500 - DNA, 25 bp, Homo sapien
ggaggaagacaagccaggccgccca

SEQ ID NO: 4346501 - DNA, 25 bp, Homo sapien
cttctttccatgttggtagcagaag

SEQ ID NO: 4346502 - DNA, 25 bp, Homo sapien
ggctgagttggcagcgcccgtaaga

SEQ ID NO: 4346503 - DNA, 25 bp, Homo sapien
ttggcagcgcccgtaagatgctgtg

SEQ ID NO: 4346504 - DNA, 25 bp, Homo sapien
cagcgcccgtaagatgctgtggatt

SEQ ID NO: 4346505 - DNA, 25 bp, Homo sapien
cagtcttgcacagacggggcctgcc

SEQ ID NO: 4346506 - DNA, 25 bp, Homo sapien
gggttccacatgtgggccctgccca

SEQ ID NO: 4346507 - DNA, 25 bp, Homo sapien
gagcagggttccacatgtgggccct

SEQ ID NO: 4346508 - DNA, 25 bp, Homo sapien
atgcagtcttgcacagacggggcct

SEQ ID NO: 4346509 - DNA, 25 bp, Homo sapien
tacacacgctggtgtgtcccagatg

SEQ ID NO: 4346510 - DNA, 25 bp, Homo sapien
gggaaagaggccatgatgacagctg

SEQ ID NO: 4346511 - DNA, 25 bp, Homo sapien
gatgacagctgtccttttggtacac

SEQ ID NO: 4346512 - DNA, 25 bp, Homo sapien
tggcgttcacgctgctgcagaaaca

SEQ ID NO: 4346513 - DNA, 25 bp, Homo sapien
ccacagtcctggttgccaatggtcc

SEQ ID NO: 4346514 - DNA, 25 bp, Homo sapien
tcttggccatctgggctgctttcag

SEQ ID NO: 4346515 - DNA, 25 bp, Homo sapien
gtcctggttgccaatggtcccccga

SEQ ID NO: 4346516 - DNA, 25 bp, Homo sapien
tgccagtctccacagtggcaaggcc

SEQ ID NO: 4346517 - DNA, 25 bp, Homo sapien
acaacacagaggcaccctgggcctc

SEQ ID NO: 4346518 - DNA, 25 bp, Homo sapien
cacaacacagaggcaccctgggcct

SEQ ID NO: 4346519 - DNA, 25 bp, Homo sapien
ccacaacacagaggcaccctgggcc

SEQ ID NO: 4346520 - DNA, 25 bp, Homo sapien
attgcatctttgtttacatacggga

SEQ ID NO: 4346521 - DNA, 25 bp, Homo sapien
ctttgtttacatacgggatccatag

SEQ ID NO: 4346522 - DNA, 25 bp, Homo sapien
tgcatctttgtttacatacgggatc

SEQ ID NO: 4346523 - DNA, 25 bp, Homo sapien
catctttgtttacatacgggatcca

SEQ ID NO: 4346524 - DNA, 25 bp, Homo sapien
gaaacagttgtgcttcccgcattct

SEQ ID NO: 4346525 - DNA, 25 bp, Homo sapien
catggctagggcttgggaaacagtt

SEQ ID NO: 4346526 - DNA, 25 bp, Homo sapien
tccacgggaagccatgaggagcagt

SEQ ID NO: 4346527 - DNA, 25 bp, Homo sapien
tgaaagcaacgccagcaattggagg

SEQ ID NO: 4346528 - DNA, 25 bp, Homo sapien
ccactgcatcctggggtttgggttc

SEQ ID NO: 4346529 - DNA, 25 bp, Homo sapien
ccccactgcatcctggggtttgggt

SEQ ID NO: 4346530 - DNA, 25 bp, Homo sapien
gcccccactgcatcctggggtttgg

SEQ ID NO: 4346531 - DNA, 25 bp, Homo sapien
actgcatcctggggtttgggttcat

SEQ ID NO: 4346532 - DNA, 25 bp, Homo sapien
tctgaagaccgtgctcctcaaagtc

SEQ ID NO: 4346533 - DNA, 25 bp, Homo sapien
tctcacctccctactggtctgaaga

SEQ ID NO: 4346534 - DNA, 25 bp, Homo sapien
cacacatctcccactgagaggcaaa

SEQ ID NO: 4346535 - DNA, 25 bp, Homo sapien
tccaggaactctgtgcaggcgtcca

SEQ ID NO: 4346536 - DNA, 25 bp, Homo sapien
atgtggcagcagcatgccggtttcc

SEQ ID NO: 4346537 - DNA, 25 bp, Homo sapien
tgtggcagcagcatgccggtttccc

SEQ ID NO: 4346538 - DNA, 25 bp, Homo sapien
tcaggcgtgtccttggaaaagaggt

SEQ ID NO: 4346539 - DNA, 25 bp, Homo sapien
ccagtgcttcaggcgtgtccttgga

SEQ ID NO: 4346540 - DNA, 25 bp, Homo sapien
ggtcatggaccgacatcctgccatg

SEQ ID NO: 4346541 - DNA, 25 bp, Homo sapien
ggaccgacatcctgccatgggctgg

SEQ ID NO: 4346542 - DNA, 25 bp, Homo sapien
gtgaggtcatggaccgacatcctgc

SEQ ID NO: 4346543 - DNA, 25 bp, Homo sapien
tcatggaccgacatcctgccatggg

SEQ ID NO: 4346544 - DNA, 25 bp, Homo sapien
ggacctgggaccagtggttggtgat

SEQ ID NO: 4346545 - DNA, 25 bp, Homo sapien
ggtgattggatgtggcagccgaggg

SEQ ID NO: 4346546 - DNA, 25 bp, Homo sapien
gggaggggacagtccgagctgaggc

SEQ ID NO: 4346547 - DNA, 25 bp, Homo sapien
gaggccatatgggttggagaggacc

SEQ ID NO: 4346548 - DNA, 25 bp, Homo sapien
ggtcattccatagactcggccccga

SEQ ID NO: 4346549 - DNA, 25 bp, Homo sapien
attccatagactcggccccgagcct

SEQ ID NO: 4346550 - DNA, 25 bp, Homo sapien
aggtcattccatagactcggccccg

SEQ ID NO: 4346551 - DNA, 25 bp, Homo sapien
ttccatagactcggccccgagcctc

SEQ ID NO: 4346552 - DNA, 25 bp, Homo sapien
ctggcgggccccagcatccgtctcc

SEQ ID NO: 4346553 - DNA, 25 bp, Homo sapien
cagcatccgtctcccctgcaaggct

SEQ ID NO: 4346554 - DNA, 25 bp, Homo sapien
ccctgcaaggcttgcacagcccaac

SEQ ID NO: 4346555 - DNA, 25 bp, Homo sapien
cccctgcaaggcttgcacagcccaa

SEQ ID NO: 4346556 - DNA, 25 bp, Homo sapien
aggacgcagggacccagaggacctt

SEQ ID NO: 4346557 - DNA, 25 bp, Homo sapien
ctgaggacgcagggacccagaggac

SEQ ID NO: 4346558 - DNA, 25 bp, Homo sapien
acgcagggacccagaggaccttgag

SEQ ID NO: 4346559 - DNA, 25 bp, Homo sapien
gacgcagggacccagaggaccttga

SEQ ID NO: 4346560 - DNA, 25 bp, Homo sapien
tggggggatccactcccgcactggc

SEQ ID NO: 4346561 - DNA, 25 bp, Homo sapien
cgtggggggatccactcccgcactg

SEQ ID NO: 4346562 - DNA, 25 bp, Homo sapien
gtggggggatccactcccgcactgg

SEQ ID NO: 4346563 - DNA, 25 bp, Homo sapien
ccgtaactgttactggccacactgt

SEQ ID NO: 4346564 - DNA, 25 bp, Homo sapien
aattaagtgagttgttccatgcagg

SEQ ID NO: 4346565 - DNA, 25 bp, Homo sapien
gctggtctcattattgccgtaactg

SEQ ID NO: 4346566 - DNA, 25 bp, Homo sapien
actcgggccagtgggaattaagtga

SEQ ID NO: 4346567 - DNA, 25 bp, Homo sapien
ttcccgaaggtgacctctggacgac

SEQ ID NO: 4346568 - DNA, 25 bp, Homo sapien
tgtgccgacttttcccgaaggtgac

SEQ ID NO: 4346569 - DNA, 25 bp, Homo sapien
ctggagctgcccattcagcctcttg

SEQ ID NO: 4346570 - DNA, 25 bp, Homo sapien
cattcagcctcttgtgccgactttt

SEQ ID NO: 4346571 - DNA, 25 bp, Homo sapien
ggagcccgaatgtggtctcaggact

SEQ ID NO: 4346572 - DNA, 25 bp, Homo sapien
cagcggccgagagcgcacggcaggg

SEQ ID NO: 4346573 - DNA, 25 bp, Homo sapien
caggactgcggcaaacacctgtcgg

SEQ ID NO: 4346574 - DNA, 25 bp, Homo sapien
caggcgccgacagagggcaggagcg

SEQ ID NO: 4346575 - DNA, 25 bp, Homo sapien
gctgggtgtgtttccccactaagtc

SEQ ID NO: 4346576 - DNA, 25 bp, Homo sapien
ctgggtgtgtttccccactaagtct

SEQ ID NO: 4346577 - DNA, 25 bp, Homo sapien
aagtctgctttcactcgcaggtttc

SEQ ID NO: 4346578 - DNA, 25 bp, Homo sapien
tgctttcactcgcaggtttcctcct

SEQ ID NO: 4346579 - DNA, 25 bp, Homo sapien
cacagagccaatgcccgggcagcag

SEQ ID NO: 4346580 - DNA, 25 bp, Homo sapien
cgggacacagagttacggacaagcc

SEQ ID NO: 4346581 - DNA, 25 bp, Homo sapien
gagttacggacaagccgtgacacag

SEQ ID NO: 4346582 - DNA, 25 bp, Homo sapien
ggacaagccgtgacacagagccaat

SEQ ID NO: 4346583 - DNA, 25 bp, Homo sapien
ccggggcgcgcctttgtcatgcaga

SEQ ID NO: 4346584 - DNA, 25 bp, Homo sapien
gcgcctttgtcatgcagatggcccg

SEQ ID NO: 4346585 - DNA, 25 bp, Homo sapien
cgcctttgtcatgcagatggcccgc

SEQ ID NO: 4346586 - DNA, 25 bp, Homo sapien
ggcgcgcctttgtcatgcagatggc

SEQ ID NO: 4346587 - DNA, 25 bp, Homo sapien
ctcagggccctcgtgggcaatgaca

SEQ ID NO: 4346588 - DNA, 25 bp, Homo sapien
ggccctcgtgggcaatgacactcat

SEQ ID NO: 4346589 - DNA, 25 bp, Homo sapien
cagggccctcgtgggcaatgacact

SEQ ID NO: 4346590 - DNA, 25 bp, Homo sapien
cagctcagggccctcgtgggcaatg

SEQ ID NO: 4346591 - DNA, 25 bp, Homo sapien
tttcctcctccacgaccacagccat

SEQ ID NO: 4346592 - DNA, 25 bp, Homo sapien
tatactgaacattctgtttcctcct

SEQ ID NO: 4346593 - DNA, 25 bp, Homo sapien
tctgtttcctcctccacgaccacag

SEQ ID NO: 4346594 - DNA, 25 bp, Homo sapien
gaacattctgtttcctcctccacga

SEQ ID NO: 4346595 - DNA, 25 bp, Homo sapien
accgagctagggagtgccaggccca

SEQ ID NO: 4346596 - DNA, 25 bp, Homo sapien
gggcttgagtgactggcggtgccag

SEQ ID NO: 4346597 - DNA, 25 bp, Homo sapien
tcgggtgaccgcaggcataaccacg

SEQ ID NO: 4346598 - DNA, 25 bp, Homo sapien
ggtgtgacagcgcagtgtggttggc

SEQ ID NO: 4346599 - DNA, 25 bp, Homo sapien
ccagtagaggtgtagccctgattca

SEQ ID NO: 4346600 - DNA, 25 bp, Homo sapien
cccagtcttatgctgaggttgccag

SEQ ID NO: 4346601 - DNA, 25 bp, Homo sapien
tcagcaagaagcagagcaccttggt

SEQ ID NO: 4346602 - DNA, 25 bp, Homo sapien
tgaatgatccatgccctcagcaaga

SEQ ID NO: 4346603 - DNA, 25 bp, Homo sapien
cccagggcctcgagctagctcctgg

SEQ ID NO: 4346604 - DNA, 25 bp, Homo sapien
cagggcctcgagctagctcctggtg

SEQ ID NO: 4346605 - DNA, 25 bp, Homo sapien
cctcgagctagctcctggtgggtgc

SEQ ID NO: 4346606 - DNA, 25 bp, Homo sapien
tcgagctagctcctggtgggtgcaa

SEQ ID NO: 4346607 - DNA, 25 bp, Homo sapien
tgagctgagcttggttccctgtccg

SEQ ID NO: 4346608 - DNA, 25 bp, Homo sapien
gggaggcctgaacttcctaccaaga

SEQ ID NO: 4346609 - DNA, 25 bp, Homo sapien
gatgacagtgagtggacaaagccca

SEQ ID NO: 4346610 - DNA, 25 bp, Homo sapien
tgtggaagcagtggacatcccagct

SEQ ID NO: 4346611 - DNA, 25 bp, Homo sapien
cacgtgtttgctgccccatgcacgg

SEQ ID NO: 4346612 - DNA, 25 bp, Homo sapien
ttaaccatcaggctatgtctgcggc

SEQ ID NO: 4346613 - DNA, 25 bp, Homo sapien
gtttgctgccccatgcacggtggtg

SEQ ID NO: 4346614 - DNA, 25 bp, Homo sapien
catttattaaccatcaggctatgtc

SEQ ID NO: 4346615 - DNA, 25 bp, Homo sapien
tttgagctgctccttgccgttcaca

SEQ ID NO: 4346616 - DNA, 25 bp, Homo sapien
gagctgctccttgccgttcacagtc

SEQ ID NO: 4346617 - DNA, 25 bp, Homo sapien
catccatttgagctgctccttgccg

SEQ ID NO: 4346618 - DNA, 25 bp, Homo sapien
tccatttgagctgctccttgccgtt

SEQ ID NO: 4346619 - DNA, 25 bp, Homo sapien
cacgatgcgcttggtggtgaccttg

SEQ ID NO: 4346620 - DNA, 25 bp, Homo sapien
ccattgatcatctcggtggacgaca

SEQ ID NO: 4346621 - DNA, 25 bp, Homo sapien
ccatgaaggccggaaattctccaaa

SEQ ID NO: 4346622 - DNA, 25 bp, Homo sapien
catacagggagcgtttcttggagtc

SEQ ID NO: 4346623 - DNA, 25 bp, Homo sapien
gagagggaacgtggaggccaggtgg

SEQ ID NO: 4346624 - DNA, 25 bp, Homo sapien
ggagagggaacgtggaggccaggtg

SEQ ID NO: 4346625 - DNA, 25 bp, Homo sapien
agaggagagggaacgtggaggccag

SEQ ID NO: 4346626 - DNA, 25 bp, Homo sapien
gtgagaggagagggaacgtggaggc

SEQ ID NO: 4346627 - DNA, 25 bp, Homo sapien
tggactccgcaagctctaggcaaga

SEQ ID NO: 4346628 - DNA, 25 bp, Homo sapien
ggccgtcggtaaactcttggatgaa

SEQ ID NO: 4346629 - DNA, 25 bp, Homo sapien
tccttttatgacgtcagctcccggg

SEQ ID NO: 4346630 - DNA, 25 bp, Homo sapien
tgaaccaggctcagagacacacagt

SEQ ID NO: 4346631 - DNA, 25 bp, Homo sapien
tgtagctacagatgaacctgattct

SEQ ID NO: 4346632 - DNA, 25 bp, Homo sapien
tgacacatgtggcttagcagaggag

SEQ ID NO: 4346633 - DNA, 25 bp, Homo sapien
tatgtctcggttagcagttagcacc

SEQ ID NO: 4346634 - DNA, 25 bp, Homo sapien
ggagttgaagagcagaacttctcca

SEQ ID NO: 4346635 - DNA, 25 bp, Homo sapien
ttgttcggctataccacagtgacag

SEQ ID NO: 4346636 - DNA, 25 bp, Homo sapien
tcagtggctcacgacaaacatctag

SEQ ID NO: 4346637 - DNA, 25 bp, Homo sapien
tcatgccagaggagatggtaacagc

SEQ ID NO: 4346638 - DNA, 25 bp, Homo sapien
gatgctcaagatgggactgacagcg

SEQ ID NO: 4346639 - DNA, 25 bp, Homo sapien
gctgcaggtgagcatctcgattcct

SEQ ID NO: 4346640 - DNA, 25 bp, Homo sapien
tataattccagactagagcctgcca

SEQ ID NO: 4346641 - DNA, 25 bp, Homo sapien
gagcctgccaatacaagggatttgg

SEQ ID NO: 4346642 - DNA, 25 bp, Homo sapien
tcccagactgttcagggtgcagcgt

SEQ ID NO: 4346643 - DNA, 25 bp, Homo sapien
tcaccaagtgagatgctaaccagct

SEQ ID NO: 4346644 - DNA, 25 bp, Homo sapien
caaaaacagagtccgctttacaggt

SEQ ID NO: 4346645 - DNA, 25 bp, Homo sapien
gactcagcgcccatcgggatgtctg

SEQ ID NO: 4346646 - DNA, 25 bp, Homo sapien
gacagagcagtcagtgttcaccaag

SEQ ID NO: 4346647 - DNA, 25 bp, Homo sapien
tacagaatctaagctcgggacacgt

SEQ ID NO: 4346648 - DNA, 25 bp, Homo sapien
tatacagctgtaccttgggaaggat

SEQ ID NO: 4346649 - DNA, 25 bp, Homo sapien
aataagttacttctggccgtggtgc

SEQ ID NO: 4346650 - DNA, 25 bp, Homo sapien
gactgcccgcccatattgcacttgg

SEQ ID NO: 4346651 - DNA, 25 bp, Homo sapien
ctttcatactagggctgtgggatcc

SEQ ID NO: 4346652 - DNA, 25 bp, Homo sapien
tccctgggtcctggtcctgacctgc

SEQ ID NO: 4346653 - DNA, 25 bp, Homo sapien
tcctggtcctgacctgcccccaact

SEQ ID NO: 4346654 - DNA, 25 bp, Homo sapien
acccccagctttcatactagggctg

SEQ ID NO: 4346655 - DNA, 25 bp, Homo sapien
tcctttcatagcagggctcctgtgg

SEQ ID NO: 4346656 - DNA, 25 bp, Homo sapien
tgtggctacgtacaatcaactggac

SEQ ID NO: 4346657 - DNA, 25 bp, Homo sapien
ccaaaaagaattgcaaagctccaac

SEQ ID NO: 4346658 - DNA, 25 bp, Homo sapien
ctccaaccttgtgtgtaggttttat

SEQ ID NO: 4346659 - DNA, 25 bp, Homo sapien
ttttcttttgtctcagagtaggagg

SEQ ID NO: 4346660 - DNA, 25 bp, Homo sapien
agcttcggcctcaaagccaagggag

SEQ ID NO: 4346661 - DNA, 25 bp, Homo sapien
gctgctaagggtttggtccacccat

SEQ ID NO: 4346662 - DNA, 25 bp, Homo sapien
aaaatggttgccttcgtctgtcccg

SEQ ID NO: 4346663 - DNA, 25 bp, Homo sapien
gggtccacctgacaagacaggctgt

SEQ ID NO: 4346664 - DNA, 25 bp, Homo sapien
tccggttccgagtctggatcccttc

SEQ ID NO: 4346665 - DNA, 25 bp, Homo sapien
tttgacagctcctcgaagcactccg

SEQ ID NO: 4346666 - DNA, 25 bp, Homo sapien
gctcttcttggacttgttggacatc

SEQ ID NO: 4346667 - DNA, 25 bp, Homo sapien
cgtcggagtgggcaggatgtgtccg

SEQ ID NO: 4346668 - DNA, 25 bp, Homo sapien
tccccgttggcgtttcggcgccata

SEQ ID NO: 4346669 - DNA, 25 bp, Homo sapien
cccgttggcgtttcggcgccataag

SEQ ID NO: 4346670 - DNA, 25 bp, Homo sapien
ccgttggcgtttcggcgccataagg

SEQ ID NO: 4346671 - DNA, 25 bp, Homo sapien
tgcacaacaggtgccggctcttctg

SEQ ID NO: 4346672 - DNA, 25 bp, Homo sapien
tgacaatttgcacaacaggtgccgg

SEQ ID NO: 4346673 - DNA, 25 bp, Homo sapien
caatttgcacaacaggtgccggctc

SEQ ID NO: 4346674 - DNA, 25 bp, Homo sapien
aacaggtgccggctcttctggcggc

SEQ ID NO: 4346675 - DNA, 25 bp, Homo sapien
ctgggagggcaaggcagcgtcagca

SEQ ID NO: 4346676 - DNA, 25 bp, Homo sapien
tgggagggcaaggcagcgtcagcag

SEQ ID NO: 4346677 - DNA, 25 bp, Homo sapien
gggagggcaaggcagcgtcagcagg

SEQ ID NO: 4346678 - DNA, 25 bp, Homo sapien
gatttcaagcggcaaagcgtctgca

SEQ ID NO: 4346679 - DNA, 25 bp, Homo sapien
aatctggccagaaagagagacgacc

SEQ ID NO: 4346680 - DNA, 25 bp, Homo sapien
tatacccgaggaggaaatctggccc

SEQ ID NO: 4346681 - DNA, 25 bp, Homo sapien
tcaacgggattgcaagagctacaga

SEQ ID NO: 4346682 - DNA, 25 bp, Homo sapien
ccgtcccgccgccagagaggggtgg

SEQ ID NO: 4346683 - DNA, 25 bp, Homo sapien
gggcttgatgagtggtcggttctgc

SEQ ID NO: 4346684 - DNA, 25 bp, Homo sapien
tgagtggtcggttctgcccattcat

SEQ ID NO: 4346685 - DNA, 25 bp, Homo sapien
cttgatgagtggtcggttctgccca

SEQ ID NO: 4346686 - DNA, 25 bp, Homo sapien
gctctaagtccagaagcatttccct

SEQ ID NO: 4346687 - DNA, 25 bp, Homo sapien
gagtcacccagctcaacctggctgg

SEQ ID NO: 4346688 - DNA, 25 bp, Homo sapien
actgcaaactttgccgagggtaggg

SEQ ID NO: 4346689 - DNA, 25 bp, Homo sapien
tggagcaaccaggagggtatttact

SEQ ID NO: 4346690 - DNA, 25 bp, Homo sapien
ttttcacttaagattcagggaggga

SEQ ID NO: 4346691 - DNA, 25 bp, Homo sapien
tggcaaaagttttagagtctcctct

SEQ ID NO: 4346692 - DNA, 25 bp, Homo sapien
ggctattagagcgagacatcaccca

SEQ ID NO: 4346693 - DNA, 25 bp, Homo sapien
tggtcaggcagtgaccaaccctggg

SEQ ID NO: 4346694 - DNA, 25 bp, Homo sapien
cagtgacacctggtacttgacgccg

SEQ ID NO: 4346695 - DNA, 25 bp, Homo sapien
tccgctgctgtagtcgtgggcagcc

SEQ ID NO: 4346696 - DNA, 25 bp, Homo sapien
tgaacaggaacgagccttgctgcgc

SEQ ID NO: 4346697 - DNA, 25 bp, Homo sapien
gctgggtgcccatagtagctaggcc

SEQ ID NO: 4346698 - DNA, 25 bp, Homo sapien
ccccgtggtgctagggtcaggagac

SEQ ID NO: 4346699 - DNA, 25 bp, Homo sapien
ggtgctagggtcaggagacacttct

SEQ ID NO: 4346700 - DNA, 25 bp, Homo sapien
agacacttctttgggtggcgtgggt

SEQ ID NO: 4346701 - DNA, 25 bp, Homo sapien
cagcccccgtggtgctagggtcagg

SEQ ID NO: 4346702 - DNA, 25 bp, Homo sapien
ggtgcagtggcgtcttggagaaggg

SEQ ID NO: 4346703 - DNA, 25 bp, Homo sapien
gtccagccagggcaaacccgggctg

SEQ ID NO: 4346704 - DNA, 25 bp, Homo sapien
ccctgggtacacagagagtgggcct

SEQ ID NO: 4346705 - DNA, 25 bp, Homo sapien
gcacatctggcctccggtcaggcgg

SEQ ID NO: 4346706 - DNA, 25 bp, Homo sapien
gcagctgcgcgggttccatgtagtt

SEQ ID NO: 4346707 - DNA, 25 bp, Homo sapien
tgctgcgcattcagcacggccgggt

SEQ ID NO: 4346708 - DNA, 25 bp, Homo sapien
tgattgaagaagacgtccacctcgt

SEQ ID NO: 4346709 - DNA, 25 bp, Homo sapien
tccacctcgtctggaggcagcagct

SEQ ID NO: 4346710 - DNA, 25 bp, Homo sapien
ggcggcggctcagggtctgggtgca

SEQ ID NO: 4346711 - DNA, 25 bp, Homo sapien
tgccgactcctgcacagacatgaag

SEQ ID NO: 4346712 - DNA, 25 bp, Homo sapien
tggcggggcttacagggtaggagct

SEQ ID NO: 4346713 - DNA, 25 bp, Homo sapien
ctgggggtagagtgcgcctcggcct

SEQ ID NO: 4346714 - DNA, 25 bp, Homo sapien
gagtgaaggagttccggcgggagcc

SEQ ID NO: 4346715 - DNA, 25 bp, Homo sapien
cgggatccctcgatgctctgggcct

SEQ ID NO: 4346716 - DNA, 25 bp, Homo sapien
cattggctgcgtccgcaattcccga

SEQ ID NO: 4346717 - DNA, 25 bp, Homo sapien
cgaaccgctggactccgggactgac

SEQ ID NO: 4346718 - DNA, 25 bp, Homo sapien
gcccctcttgcgaacactccgggat

SEQ ID NO: 4346719 - DNA, 25 bp, Homo sapien
gtccgagcgcagttacctacccaga

SEQ ID NO: 4346720 - DNA, 25 bp, Homo sapien
tgggatggttcggacgacagcggcg

SEQ ID NO: 4346721 - DNA, 25 bp, Homo sapien
gctccttcaccgctgaacgtggtca

SEQ ID NO: 4346722 - DNA, 25 bp, Homo sapien
cccctagctcgggcgctgtctgggt

SEQ ID NO: 4346723 - DNA, 25 bp, Homo sapien
tctatggttcgtgtgggccgggcgc

SEQ ID NO: 4346724 - DNA, 25 bp, Homo sapien
cggagatcggctctatggttcgtgt

SEQ ID NO: 4346725 - DNA, 25 bp, Homo sapien
tgggccgggcgcacaagtcttcctc

SEQ ID NO: 4346726 - DNA, 25 bp, Homo sapien
cccggagatcggctctatggttcgt

SEQ ID NO: 4346727 - DNA, 25 bp, Homo sapien
ggagggaggtccaggacaaaggcat

SEQ ID NO: 4346728 - DNA, 25 bp, Homo sapien
ccgaggagggaggtccaggacaaag

SEQ ID NO: 4346729 - DNA, 25 bp, Homo sapien
ctggggagacggaggctcgaaggga

SEQ ID NO: 4346730 - DNA, 25 bp, Homo sapien
agacggaggctcgaagggagccccg

SEQ ID NO: 4346731 - DNA, 25 bp, Homo sapien
gacgtcacccgattcgccaggaaat

SEQ ID NO: 4346732 - DNA, 25 bp, Homo sapien
tgctcggaactccactctgcgggag

SEQ ID NO: 4346733 - DNA, 25 bp, Homo sapien
gtccgaggcctcagcgcaggtaaag

SEQ ID NO: 4346734 - DNA, 25 bp, Homo sapien
tggcgtccgtttgtctgtccgaggc

SEQ ID NO: 4346735 - DNA, 25 bp, Homo sapien
cgtaggatgcgggactgctgcattc

SEQ ID NO: 4346736 - DNA, 25 bp, Homo sapien
tgctgcattctctggcggaaacgaa

SEQ ID NO: 4346737 - DNA, 25 bp, Homo sapien
tccacctcggttgcaggtcctgcgt

SEQ ID NO: 4346738 - DNA, 25 bp, Homo sapien
gggttgccttcctcgacaacgcagg

SEQ ID NO: 4346739 - DNA, 25 bp, Homo sapien
gctggggtcttgaggcgctgttcca

SEQ ID NO: 4346740 - DNA, 25 bp, Homo sapien
ccccagaatctgctggggtcttgag

SEQ ID NO: 4346741 - DNA, 25 bp, Homo sapien
ggggtcttgaggcgctgttccaggc

SEQ ID NO: 4346742 - DNA, 25 bp, Homo sapien
cccccagaatctgctggggtcttga

SEQ ID NO: 4346743 - DNA, 25 bp, Homo sapien
cgagaactcacagcggcgatcgcca

SEQ ID NO: 4346744 - DNA, 25 bp, Homo sapien
tcgccaccatttgacctgggtgctt

SEQ ID NO: 4346745 - DNA, 25 bp, Homo sapien
tgggaacaagatttctctgaggact

SEQ ID NO: 4346746 - DNA, 25 bp, Homo sapien
gacccttttggcccgagaactcaca

SEQ ID NO: 4346747 - DNA, 25 bp, Homo sapien
acccggagacaatcgggccgtgctt

SEQ ID NO: 4346748 - DNA, 25 bp, Homo sapien
tcctccacgaacagccacggtttat

SEQ ID NO: 4346749 - DNA, 25 bp, Homo sapien
cgcggaaccctgctgagacccggag

SEQ ID NO: 4346750 - DNA, 25 bp, Homo sapien
cagccacggtttatttggagcggcc

SEQ ID NO: 4346751 - DNA, 25 bp, Homo sapien
atccgtttcgttaggcacaatttgt

SEQ ID NO: 4346752 - DNA, 25 bp, Homo sapien
aatccgtttcgttaggcacaatttg

SEQ ID NO: 4346753 - DNA, 25 bp, Homo sapien
ctgacaactggtaaatccgtttcgt

SEQ ID NO: 4346754 - DNA, 25 bp, Homo sapien
tggtaaatccgtttcgttaggcaca

SEQ ID NO: 4346755 - DNA, 25 bp, Homo sapien
cccagacgcctcggctgccgcacgg

SEQ ID NO: 4346756 - DNA, 25 bp, Homo sapien
ccagacgcctcggctgccgcacggg

SEQ ID NO: 4346757 - DNA, 25 bp, Homo sapien
ttccggtaaaggagcgttcgccaca

SEQ ID NO: 4346758 - DNA, 25 bp, Homo sapien
gcctttcccctcgtggttggagcaa

SEQ ID NO: 4346759 - DNA, 25 bp, Homo sapien
gctcataaacgaatcctagcacggg

SEQ ID NO: 4346760 - DNA, 25 bp, Homo sapien
cagatgttcccgacctcgggagagg

SEQ ID NO: 4346761 - DNA, 25 bp, Homo sapien
agcgagctgggttaagccgcgaaaa

SEQ ID NO: 4346762 - DNA, 25 bp, Homo sapien
gttaagccgcgaaaagccggcgcac

SEQ ID NO: 4346763 - DNA, 25 bp, Homo sapien
ggctcggacgcatccgccgcggtgg

SEQ ID NO: 4346764 - DNA, 25 bp, Homo sapien
aaaagccggcgcacgggaccagccg

SEQ ID NO: 4346765 - DNA, 25 bp, Homo sapien
gcgggctcgcgggacctgggcgcgg

SEQ ID NO: 4346766 - DNA, 25 bp, Homo sapien
aggtgcgcggcaggcgggctcgcgg

SEQ ID NO: 4346767 - DNA, 25 bp, Homo sapien
agcagggcgaggtgcgcggcaggcg

SEQ ID NO: 4346768 - DNA, 25 bp, Homo sapien
gcggcaggcgggctcgcgggacctg

SEQ ID NO: 4346769 - DNA, 25 bp, Homo sapien
gagcctgggcggcacgccgagcggc

SEQ ID NO: 4346770 - DNA, 25 bp, Homo sapien
ctgggcggcacgccgagcggccgca

SEQ ID NO: 4346771 - DNA, 25 bp, Homo sapien
gcagagcctgggcggcacgccgagc

SEQ ID NO: 4346772 - DNA, 25 bp, Homo sapien
tgggcggcacgccgagcggccgcat

SEQ ID NO: 4346773 - DNA, 25 bp, Homo sapien
ggtgttcagcggaccgcttttgtcc

SEQ ID NO: 4346774 - DNA, 25 bp, Homo sapien
gaccgcttttgtccgcctggtgggc

SEQ ID NO: 4346775 - DNA, 25 bp, Homo sapien
gggccctgctaggatggatgtggcg

SEQ ID NO: 4346776 - DNA, 25 bp, Homo sapien
tggcggcaggcaatagacagacttg

SEQ ID NO: 4346777 - DNA, 25 bp, Homo sapien
tgctcagaaagcttgggacacgtct

SEQ ID NO: 4346778 - DNA, 25 bp, Homo sapien
tgacctcagggatgcttgctcagaa

SEQ ID NO: 4346779 - DNA, 25 bp, Homo sapien
gcaacgcggctttttatttcgacat

SEQ ID NO: 4346780 - DNA, 25 bp, Homo sapien
ccaagggccgctaggcactcagggc

SEQ ID NO: 4346781 - DNA, 25 bp, Homo sapien
ggagatgtatccgagtgtgtctgca

SEQ ID NO: 4346782 - DNA, 25 bp, Homo sapien
tctgtggactgtagaaaagtgtgtc

SEQ ID NO: 4346783 - DNA, 25 bp, Homo sapien
tgtctgcatgtctacgtacagctcc

SEQ ID NO: 4346784 - DNA, 25 bp, Homo sapien
ctgcgtatctgggttgtgggcaact

SEQ ID NO: 4346785 - DNA, 25 bp, Homo sapien
ggtgtcctcattgggaccacccgat

SEQ ID NO: 4346786 - DNA, 25 bp, Homo sapien
gaataactgctctaatgaggtgtcc

SEQ ID NO: 4346787 - DNA, 25 bp, Homo sapien
taaggcttatctgctgtcgccagcg

SEQ ID NO: 4346788 - DNA, 25 bp, Homo sapien
tcgccagcgccatgctgaataactg

SEQ ID NO: 4346789 - DNA, 25 bp, Homo sapien
ccgcagatccgagcgctgatgggca

SEQ ID NO: 4346790 - DNA, 25 bp, Homo sapien
tccccgtgcccgtaccactcgcctg

SEQ ID NO: 4346791 - DNA, 25 bp, Homo sapien
tgggcaggcagatagccctctgctg

SEQ ID NO: 4346792 - DNA, 25 bp, Homo sapien
ctgatgggcaggcagatagccctct

SEQ ID NO: 4346793 - DNA, 25 bp, Homo sapien
gacagcgaggtatagagagtggaga

SEQ ID NO: 4346794 - DNA, 25 bp, Homo sapien
gtggggcacggacggacagcgaggt

SEQ ID NO: 4346795 - DNA, 25 bp, Homo sapien
catgaggcggtggtgattaattgct

SEQ ID NO: 4346796 - DNA, 25 bp, Homo sapien
cagagttgtcatgaggcggtggtga

SEQ ID NO: 4346797 - DNA, 25 bp, Homo sapien
catttaccataactatttgtttctt

SEQ ID NO: 4346798 - DNA, 25 bp, Homo sapien
gctgctctcctcaatggtgtttctc

SEQ ID NO: 4346799 - DNA, 25 bp, Homo sapien
ctctcctcaatggtgtttctctgcc

SEQ ID NO: 4346800 - DNA, 25 bp, Homo sapien
tccccaagaggataccctgtttcat

SEQ ID NO: 4346801 - DNA, 25 bp, Homo sapien
tttgcaacaataggaccagtattag

SEQ ID NO: 4346802 - DNA, 25 bp, Homo sapien
tggacttgttttgcaacaataggac

SEQ ID NO: 4346803 - DNA, 25 bp, Homo sapien
tgttttgcaacaataggaccagtat

SEQ ID NO: 4346804 - DNA, 25 bp, Homo sapien
acaataggaccagtattagagtcac

SEQ ID NO: 4346805 - DNA, 25 bp, Homo sapien
tcaggatgctttccgcgcagagcca

SEQ ID NO: 4346806 - DNA, 25 bp, Homo sapien
gagccagccgcagaaggggcatggg

SEQ ID NO: 4346807 - DNA, 25 bp, Homo sapien
gattcaggatgctttccgcgcagag

SEQ ID NO: 4346808 - DNA, 25 bp, Homo sapien
caggggccggattcaggatgctttc

SEQ ID NO: 4346809 - DNA, 25 bp, Homo sapien
tggcagcgctgctagagccatcgga

SEQ ID NO: 4346810 - DNA, 25 bp, Homo sapien
ccggccggaattcctgcaggacgct

SEQ ID NO: 4346811 - DNA, 25 bp, Homo sapien
ctcagatggcagcgctgctagagcc

SEQ ID NO: 4346812 - DNA, 25 bp, Homo sapien
cagatggcagcgctgctagagccat

SEQ ID NO: 4346813 - DNA, 25 bp, Homo sapien
tggacaggctgtgtcaactccagct

SEQ ID NO: 4346814 - DNA, 25 bp, Homo sapien
agctggacaggctgtgtcaactcca

SEQ ID NO: 4346815 - DNA, 25 bp, Homo sapien
tggggggcttcgcggaagccaccca

SEQ ID NO: 4346816 - DNA, 25 bp, Homo sapien
gctggacaggctgtgtcaactccag

SEQ ID NO: 4346817 - DNA, 25 bp, Homo sapien
agccgccttgccctctctaacaagg

SEQ ID NO: 4346818 - DNA, 25 bp, Homo sapien
gagccaggtcactgacaactggatg

SEQ ID NO: 4346819 - DNA, 25 bp, Homo sapien
tgccctctctaacaagggggcgaag

SEQ ID NO: 4346820 - DNA, 25 bp, Homo sapien
tcactgacaactggatgagaccctg

SEQ ID NO: 4346821 - DNA, 25 bp, Homo sapien
tcacagacgctgaaccacacgcatt

SEQ ID NO: 4346822 - DNA, 25 bp, Homo sapien
ggtcacagacgctgaaccacacgca

SEQ ID NO: 4346823 - DNA, 25 bp, Homo sapien
ccacggtcacagacgctgaaccaca

SEQ ID NO: 4346824 - DNA, 25 bp, Homo sapien
ggcccacggtcacagacgctgaacc

SEQ ID NO: 4346825 - DNA, 25 bp, Homo sapien
ggcgttgactcttctgcctcgccat

SEQ ID NO: 4346826 - DNA, 25 bp, Homo sapien
gctggcgttgactcttctgcctcgc

SEQ ID NO: 4346827 - DNA, 25 bp, Homo sapien
tgggctggcgttgactcttctgcct

SEQ ID NO: 4346828 - DNA, 25 bp, Homo sapien
ggctggcgttgactcttctgcctcg

SEQ ID NO: 4346829 - DNA, 25 bp, Homo sapien
tccagactgctagttcaccaagagt

SEQ ID NO: 4346830 - DNA, 25 bp, Homo sapien
ccagggcgaccagagagtaacttca

SEQ ID NO: 4346831 - DNA, 25 bp, Homo sapien
gacagcagagaactacacaggcagg

SEQ ID NO: 4346832 - DNA, 25 bp, Homo sapien
tgaagcctcctgataaccagggcga

SEQ ID NO: 4346833 - DNA, 25 bp, Homo sapien
tcagtttggtcatggcctgagagcc

SEQ ID NO: 4346834 - DNA, 25 bp, Homo sapien
gcctgagagccattcggtgcgactt

SEQ ID NO: 4346835 - DNA, 25 bp, Homo sapien
gcaaaattccagtcccaatgttcag

SEQ ID NO: 4346836 - DNA, 25 bp, Homo sapien
ttcggtgcgactttaatggccacag

SEQ ID NO: 4346837 - DNA, 25 bp, Homo sapien
cctgtcaaaatgaagatgcctgggc

SEQ ID NO: 4346838 - DNA, 25 bp, Homo sapien
gagcacctttaaccagggacgtgga

SEQ ID NO: 4346839 - DNA, 25 bp, Homo sapien
aacctgctagggtatcaggccgggc

SEQ ID NO: 4346840 - DNA, 25 bp, Homo sapien
tgatgttcctaaaacctgcctgcgc

SEQ ID NO: 4346841 - DNA, 25 bp, Homo sapien
agagcccgacggcttcaaggaacac

SEQ ID NO: 4346842 - DNA, 25 bp, Homo sapien
tggctgtcaccagagagcccgacgg

SEQ ID NO: 4346843 - DNA, 25 bp, Homo sapien
tgtcaccagagagcccgacggcttc

SEQ ID NO: 4346844 - DNA, 25 bp, Homo sapien
accagagagcccgacggcttcaagg

SEQ ID NO: 4346845 - DNA, 25 bp, Homo sapien
gagaagccatccctgcctgagctcg

SEQ ID NO: 4346846 - DNA, 25 bp, Homo sapien
ctggagaagccatccctgcctgagc

SEQ ID NO: 4346847 - DNA, 25 bp, Homo sapien
tggcacattgtgggcactggagaag

SEQ ID NO: 4346848 - DNA, 25 bp, Homo sapien
ctggcacattgtgggcactggagaa

SEQ ID NO: 4346849 - DNA, 25 bp, Homo sapien
caaatggtagtgggtgggtacaggg

SEQ ID NO: 4346850 - DNA, 25 bp, Homo sapien
tggtgccagagaccccacaatgcct

SEQ ID NO: 4346851 - DNA, 25 bp, Homo sapien
ccagggtgcctaggggctgagagtc

SEQ ID NO: 4346852 - DNA, 25 bp, Homo sapien
agacccccgagtgtctctggtgcca

SEQ ID NO: 4346853 - DNA, 25 bp, Homo sapien
ctcactgcagcggaccactatctga

SEQ ID NO: 4346854 - DNA, 25 bp, Homo sapien
cactatctgatggagcgcttccttc

SEQ ID NO: 4346855 - DNA, 25 bp, Homo sapien
agacgctgagtctaggcaggctcgt

SEQ ID NO: 4346856 - DNA, 25 bp, Homo sapien
aggcaggctcgtgctggaaaccagc

SEQ ID NO: 4346857 - DNA, 25 bp, Homo sapien
tccaaataggacgtgaaaaactctc

SEQ ID NO: 4346858 - DNA, 25 bp, Homo sapien
catgtagcgaaacaatgaaagggtt

SEQ ID NO: 4346859 - DNA, 25 bp, Homo sapien
tagggcaatgggaaacgcctgagtc

SEQ ID NO: 4346860 - DNA, 25 bp, Homo sapien
agggtttcctatcagttccaaatag

SEQ ID NO: 4346861 - DNA, 25 bp, Homo sapien
gcctctttgattccgacagcccaat

SEQ ID NO: 4346862 - DNA, 25 bp, Homo sapien
ggcctctttgattccgacagcccaa

SEQ ID NO: 4346863 - DNA, 25 bp, Homo sapien
ctctttgattccgacagcccaatca

SEQ ID NO: 4346864 - DNA, 25 bp, Homo sapien
agggcctctttgattccgacagccc

SEQ ID NO: 4346865 - DNA, 25 bp, Homo sapien
tggttcattaatgatccgagggagg

SEQ ID NO: 4346866 - DNA, 25 bp, Homo sapien
cacgagccacgcgccaagggcagtt

SEQ ID NO: 4346867 - DNA, 25 bp, Homo sapien
gacaggaaagacaggcccttcacag

SEQ ID NO: 4346868 - DNA, 25 bp, Homo sapien
gcagtggggacactacccagagaaa

SEQ ID NO: 4346869 - DNA, 25 bp, Homo sapien
ttgcccactgccgtgctctggggct

SEQ ID NO: 4346870 - DNA, 25 bp, Homo sapien
tgcttgcccactgccgtgctctggg

SEQ ID NO: 4346871 - DNA, 25 bp, Homo sapien
cagggatgcccaggacagggacgac

SEQ ID NO: 4346872 - DNA, 25 bp, Homo sapien
ggacagggacgactgcttgcccact

SEQ ID NO: 4346873 - DNA, 25 bp, Homo sapien
agggcctttcactccaaggagccgc

SEQ ID NO: 4346874 - DNA, 25 bp, Homo sapien
caggatgtatatggccctgtctgtg

SEQ ID NO: 4346875 - DNA, 25 bp, Homo sapien
cagggcctttcactccaaggagccg

SEQ ID NO: 4346876 - DNA, 25 bp, Homo sapien
ttccccagcaggatgtatatggccc

SEQ ID NO: 4346877 - DNA, 25 bp, Homo sapien
gggtctccttccacaggaagcacat

SEQ ID NO: 4346878 - DNA, 25 bp, Homo sapien
tgggggtctccttccacaggaagca

SEQ ID NO: 4346879 - DNA, 25 bp, Homo sapien
ctgtgtcatctgggggtctccttcc

SEQ ID NO: 4346880 - DNA, 25 bp, Homo sapien
ctgggggtctccttccacaggaagc

SEQ ID NO: 4346881 - DNA, 25 bp, Homo sapien
tgcgagcttcacacaccgcaggtgt

SEQ ID NO: 4346882 - DNA, 25 bp, Homo sapien
tccattgtctcaggccgggacagga

SEQ ID NO: 4346883 - DNA, 25 bp, Homo sapien
gggtttattgtccattgtctcaggc

SEQ ID NO: 4346884 - DNA, 25 bp, Homo sapien
tactcggccatgagcccagaacaat

SEQ ID NO: 4346885 - DNA, 25 bp, Homo sapien
caacggggacccatcctgtgtcttc

SEQ ID NO: 4346886 - DNA, 25 bp, Homo sapien
ctgctatatgcaggtgctgcccggg

SEQ ID NO: 4346887 - DNA, 25 bp, Homo sapien
tatatgcaggtgctgcccgggcacc

SEQ ID NO: 4346888 - DNA, 25 bp, Homo sapien
tccacaacggggacccatcctgtgt

SEQ ID NO: 4346889 - DNA, 25 bp, Homo sapien
cctagctgcaccttgccatcacttg

SEQ ID NO: 4346890 - DNA, 25 bp, Homo sapien
gaaagtggttctgatctcctccatc

SEQ ID NO: 4346891 - DNA, 25 bp, Homo sapien
gggcatttggaaactctctgagatt

SEQ ID NO: 4346892 - DNA, 25 bp, Homo sapien
gggaaactagaaagtggttctgatc

SEQ ID NO: 4346893 - DNA, 25 bp, Homo sapien
cagtgtaaacacttgcaagctccca

SEQ ID NO: 4346894 - DNA, 25 bp, Homo sapien
taaaggtgttgatctacgcagtgta

SEQ ID NO: 4346895 - DNA, 25 bp, Homo sapien
aaggctgtttgtcttgtagtcattg

SEQ ID NO: 4346896 - DNA, 25 bp, Homo sapien
tcccatcattggtcacaaggctgtt

SEQ ID NO: 4346897 - DNA, 25 bp, Homo sapien
gactggctcacagcagtacccactg

SEQ ID NO: 4346898 - DNA, 25 bp, Homo sapien
tgagggcaaagactgcactggctct

SEQ ID NO: 4346899 - DNA, 25 bp, Homo sapien
gccgaagacgaggatgtagcagact

SEQ ID NO: 4346900 - DNA, 25 bp, Homo sapien
gtggctgcccccatgagggcaaaga

SEQ ID NO: 4346901 - DNA, 25 bp, Homo sapien
ccagatcattagaagatctataaac

SEQ ID NO: 4346902 - DNA, 25 bp, Homo sapien
ctgccaaaccgtcttctgaagtagc

SEQ ID NO: 4346903 - DNA, 25 bp, Homo sapien
gttgctttcaagttttggcattatg

SEQ ID NO: 4346904 - DNA, 25 bp, Homo sapien
aaaactgctctaaacatttgcatgc

SEQ ID NO: 4346905 - DNA, 25 bp, Homo sapien
tgtgattgccggattgtatggtaag

SEQ ID NO: 4346906 - DNA, 25 bp, Homo sapien
tgagctagagcacctacctgttttc

SEQ ID NO: 4346907 - DNA, 25 bp, Homo sapien
aatatttcccctcattgtgtggccc

SEQ ID NO: 4346908 - DNA, 25 bp, Homo sapien
cctcccactgtggagaagttgcaga

SEQ ID NO: 4346909 - DNA, 25 bp, Homo sapien
catgcaatagggatcaggcctccac

SEQ ID NO: 4346910 - DNA, 25 bp, Homo sapien
acgtgaagccgttgtcccggaggca

SEQ ID NO: 4346911 - DNA, 25 bp, Homo sapien
gcaagggtgacactgctggcaagtc

SEQ ID NO: 4346912 - DNA, 25 bp, Homo sapien
gagccccgttaggaagaggagacca

SEQ ID NO: 4346913 - DNA, 25 bp, Homo sapien
ctagggtgcggaggcgacaccgctc

SEQ ID NO: 4346914 - DNA, 25 bp, Homo sapien
caagtgcgtcacactatgcagtggg

SEQ ID NO: 4346915 - DNA, 25 bp, Homo sapien
cctgccgggagggttagcaacactg

SEQ ID NO: 4346916 - DNA, 25 bp, Homo sapien
gaaacagcagtgactcggcctttgc

SEQ ID NO: 4346917 - DNA, 25 bp, Homo sapien
ggagtgcagcagaaataccagggtc

SEQ ID NO: 4346918 - DNA, 25 bp, Homo sapien
aaacacattatcatcgctgacaaaa

SEQ ID NO: 4346919 - DNA, 25 bp, Homo sapien
tcacaggcaaatttagaggcaacat

SEQ ID NO: 4346920 - DNA, 25 bp, Homo sapien
caattctgtccaatagttggttcac

SEQ ID NO: 4346921 - DNA, 25 bp, Homo sapien
catacacctttatatactccagggc

SEQ ID NO: 4346922 - DNA, 25 bp, Homo sapien
gaccccaggaaagcttgcaaaatgg

SEQ ID NO: 4346923 - DNA, 25 bp, Homo sapien
tcagcccacaggtgcgcaggacccc

SEQ ID NO: 4346924 - DNA, 25 bp, Homo sapien
cagcccacaggtgcgcaggacccca

SEQ ID NO: 4346925 - DNA, 25 bp, Homo sapien
caggaccccaggaaagcttgcaaaa

SEQ ID NO: 4346926 - DNA, 25 bp, Homo sapien
ctaatcactcatggtcagcaggagg

SEQ ID NO: 4346927 - DNA, 25 bp, Homo sapien
taatcactcatggtcagcaggaggc

SEQ ID NO: 4346928 - DNA, 25 bp, Homo sapien
tggccgctgcagagaccgagatacg

SEQ ID NO: 4346929 - DNA, 25 bp, Homo sapien
gagtttcctgaacgggaagctgccg

SEQ ID NO: 4346930 - DNA, 25 bp, Homo sapien
taacagcccgttccggagccggtca

SEQ ID NO: 4346931 - DNA, 25 bp, Homo sapien
tgctccaggtcagcgggcgactttg

SEQ ID NO: 4346932 - DNA, 25 bp, Homo sapien
cttggttccggtactcaagctgagt

SEQ ID NO: 4346933 - DNA, 25 bp, Homo sapien
taaagtgatccagttctgaccagag

SEQ ID NO: 4346934 - DNA, 25 bp, Homo sapien
gttgcctcgactagtcttggttccg

SEQ ID NO: 4346935 - DNA, 25 bp, Homo sapien
caaatacaatttatggccagtgctg

SEQ ID NO: 4346936 - DNA, 25 bp, Homo sapien
gtgacagtggcagccagagccgcac

SEQ ID NO: 4346937 - DNA, 25 bp, Homo sapien
ggtgacagtggcagccagagccgca

SEQ ID NO: 4346938 - DNA, 25 bp, Homo sapien
tggtgacagtggcagccagagccgc

SEQ ID NO: 4346939 - DNA, 25 bp, Homo sapien
agcgtgaacgggctccttatcattt

SEQ ID NO: 4346940 - DNA, 25 bp, Homo sapien
ctggcagagcgtgaacgggctcctt

SEQ ID NO: 4346941 - DNA, 25 bp, Homo sapien
actctgcccactcccgactgtatcc

SEQ ID NO: 4346942 - DNA, 25 bp, Homo sapien
tgaacgggctccttatcatttccac

SEQ ID NO: 4346943 - DNA, 25 bp, Homo sapien
atttccatttgttcacacacgcttt

SEQ ID NO: 4346944 - DNA, 25 bp, Homo sapien
catttgttcacacacgctttaaaaa

SEQ ID NO: 4346945 - DNA, 25 bp, Homo sapien
tccatttgttcacacacgctttaaa

SEQ ID NO: 4346946 - DNA, 25 bp, Homo sapien
ttccatttgttcacacacgctttaa

SEQ ID NO: 4346947 - DNA, 25 bp, Homo sapien
gaacagaataccaatcaaatattga

SEQ ID NO: 4346948 - DNA, 25 bp, Homo sapien
ggctttataggctgaaaaatatctt

SEQ ID NO: 4346949 - DNA, 25 bp, Homo sapien
aaatatcttagacttcagaacagaa

SEQ ID NO: 4346950 - DNA, 25 bp, Homo sapien
cagggggctttataggctgaaaaat

SEQ ID NO: 4346951 - DNA, 25 bp, Homo sapien
ggcctccatgcacaacctcccacta

SEQ ID NO: 4346952 - DNA, 25 bp, Homo sapien
gccttttacagatgtcagctttcac

SEQ ID NO: 4346953 - DNA, 25 bp, Homo sapien
ggccttttacagatgtcagctttca

SEQ ID NO: 4346954 - DNA, 25 bp, Homo sapien
cgctttcctgagatgagcttctcat

SEQ ID NO: 4346955 - DNA, 25 bp, Homo sapien
tcctggcgctttcctgagatgagct

SEQ ID NO: 4346956 - DNA, 25 bp, Homo sapien
caggatgtggtcgatcttggtgacc

SEQ ID NO: 4346957 - DNA, 25 bp, Homo sapien
cattctcaatgtacgtgtctttctt

SEQ ID NO: 4346958 - DNA, 25 bp, Homo sapien
gctccacaggtatcagccacaaatg

SEQ ID NO: 4346959 - DNA, 25 bp, Homo sapien
tacgcccttgtgaacaagccctgca

SEQ ID NO: 4346960 - DNA, 25 bp, Homo sapien
tatggaggaagataggcctggcttc

SEQ ID NO: 4346961 - DNA, 25 bp, Homo sapien
gcaggacttgtgagctgtcctccca

SEQ ID NO: 4346962 - DNA, 25 bp, Homo sapien
tgaccagggtcaagacctgctctgt

SEQ ID NO: 4346963 - DNA, 25 bp, Homo sapien
aaaggcctattctcttgttgaccag

SEQ ID NO: 4346964 - DNA, 25 bp, Homo sapien
tctgtcgcacagatcagagccctct

SEQ ID NO: 4346965 - DNA, 25 bp, Homo sapien
gatgtcccgggattgcttgtaccta

SEQ ID NO: 4346966 - DNA, 25 bp, Homo sapien
aacaggatgtagaaggccgccacca

SEQ ID NO: 4346967 - DNA, 25 bp, Homo sapien
agaagtccagccgaacatagatgat

SEQ ID NO: 4346968 - DNA, 25 bp, Homo sapien
cgaacatagatgataacggtgaaga

SEQ ID NO: 4346969 - DNA, 25 bp, Homo sapien
tgataacggtgaagaacaggatgta

SEQ ID NO: 4346970 - DNA, 25 bp, Homo sapien
tgtccagataggtgtagtgcagctc

SEQ ID NO: 4346971 - DNA, 25 bp, Homo sapien
tgtaggcaacaatcacagggcggcc

SEQ ID NO: 4346972 - DNA, 25 bp, Homo sapien
aatgtcctgaatgtgctgttctacc

SEQ ID NO: 4346973 - DNA, 25 bp, Homo sapien
cacggctgatttcatagggactatc

SEQ ID NO: 4346974 - DNA, 25 bp, Homo sapien
tacatcctacccagtgaatccctgg

SEQ ID NO: 4346975 - DNA, 25 bp, Homo sapien
ggcaacaactgtccctctgaatcct

SEQ ID NO: 4346976 - DNA, 25 bp, Homo sapien
gcttgaacagatgcctcacgagctg

SEQ ID NO: 4346977 - DNA, 25 bp, Homo sapien
tgaggaactactcttccactatgga

SEQ ID NO: 4346978 - DNA, 25 bp, Homo sapien
tcttcacagtcagagaatctatcac

SEQ ID NO: 4346979 - DNA, 25 bp, Homo sapien
tgatcttcacagtcagagaatctat

SEQ ID NO: 4346980 - DNA, 25 bp, Homo sapien
tcacagtcagagaatctatcacttg

SEQ ID NO: 4346981 - DNA, 25 bp, Homo sapien
gtcagagaatctatcacttgttcat

SEQ ID NO: 4346982 - DNA, 25 bp, Homo sapien
tgaaactcggagcagttgtgccctg

SEQ ID NO: 4346983 - DNA, 25 bp, Homo sapien
taatggtgagtgaaacgggcctgca

SEQ ID NO: 4346984 - DNA, 25 bp, Homo sapien
gggattccctagagagcacagcagg

SEQ ID NO: 4346985 - DNA, 25 bp, Homo sapien
gaaacagggcaactgatgggcttga

SEQ ID NO: 4346986 - DNA, 25 bp, Homo sapien
tagccaacgatgtaatgggtcttcc

SEQ ID NO: 4346987 - DNA, 25 bp, Homo sapien
gaagcgaggccggatttccatctct

SEQ ID NO: 4346988 - DNA, 25 bp, Homo sapien
catagcttgggaggttgtagccaac

SEQ ID NO: 4346989 - DNA, 25 bp, Homo sapien
tcatccaaaataaggaggtggctgg

SEQ ID NO: 4346990 - DNA, 25 bp, Homo sapien
aaaatatatggtttaggctgggcat

SEQ ID NO: 4346991 - DNA, 25 bp, Homo sapien
gcaatattaccccagtgagagactt

SEQ ID NO: 4346992 - DNA, 25 bp, Homo sapien
taatcatagcgtgagaaaggcccct

SEQ ID NO: 4346993 - DNA, 25 bp, Homo sapien
gagacttcaatgactcgggtcatgc

SEQ ID NO: 4346994 - DNA, 25 bp, Homo sapien
gatggaggatattccactatctggc

SEQ ID NO: 4346995 - DNA, 25 bp, Homo sapien
gaggcaagcttcacacgcatggttt

SEQ ID NO: 4346996 - DNA, 25 bp, Homo sapien
taatccagtaggtcctcagagcgcg

SEQ ID NO: 4346997 - DNA, 25 bp, Homo sapien
caatgactgaaatcttggccccagg

SEQ ID NO: 4346998 - DNA, 25 bp, Homo sapien
tctgggttggatacggatgaagcac

SEQ ID NO: 4346999 - DNA, 25 bp, Homo sapien
gtatctttacagatatctctgcctg

SEQ ID NO: 4347000 - DNA, 25 bp, Homo sapien
tctgaaagcccagttaactaaacac

SEQ ID NO: 4347001 - DNA, 25 bp, Homo sapien
tgatttactgagaaccccatatagg

SEQ ID NO: 4347002 - DNA, 25 bp, Homo sapien
taataatggttcagagcagtcctta

SEQ ID NO: 4347003 - DNA, 25 bp, Homo sapien
tgatcccatatgatcccaaccctga

SEQ ID NO: 4347004 - DNA, 25 bp, Homo sapien
cagtgagtcaacatggcaccacagt

SEQ ID NO: 4347005 - DNA, 25 bp, Homo sapien
caccacagtaatggagcctgggcaa

SEQ ID NO: 4347006 - DNA, 25 bp, Homo sapien
taaagcaggcacttcctaagcaact

SEQ ID NO: 4347007 - DNA, 25 bp, Homo sapien
tttcacgtacttccaaattgttctc

SEQ ID NO: 4347008 - DNA, 25 bp, Homo sapien
tctcttcctcatcttctccctttac

SEQ ID NO: 4347009 - DNA, 25 bp, Homo sapien
tgttctcttcctcatcttctccctt

SEQ ID NO: 4347010 - DNA, 25 bp, Homo sapien
aattgttctcttcctcatcttctcc

SEQ ID NO: 4347011 - DNA, 25 bp, Homo sapien
gaggcaatcccacggaccccctgtg

SEQ ID NO: 4347012 - DNA, 25 bp, Homo sapien
cacccaggactcctcgcgggccccg

SEQ ID NO: 4347013 - DNA, 25 bp, Homo sapien
cccgggtctccgcatttcctgaggc

SEQ ID NO: 4347014 - DNA, 25 bp, Homo sapien
ccgcccgggtctccgcatttcctga

SEQ ID NO: 4347015 - DNA, 25 bp, Homo sapien
gcggcggcgaggggtcgcccacact

SEQ ID NO: 4347016 - DNA, 25 bp, Homo sapien
ctagaggggcgcgggcggagtcggg

SEQ ID NO: 4347017 - DNA, 25 bp, Homo sapien
ggagcggcggcgaggggtcgcccac

SEQ ID NO: 4347018 - DNA, 25 bp, Homo sapien
gcggcgaggggtcgcccacactcac

SEQ ID NO: 4347019 - DNA, 25 bp, Homo sapien
ttagccaggtggctgcttaggtcca

SEQ ID NO: 4347020 - DNA, 25 bp, Homo sapien
gcaggaaagaggtagctcgggacgt

SEQ ID NO: 4347021 - DNA, 25 bp, Homo sapien
tcctcattgatcagcggcggtgcct

SEQ ID NO: 4347022 - DNA, 25 bp, Homo sapien
taggtccactgtgcgcttcacgtcc

SEQ ID NO: 4347023 - DNA, 25 bp, Homo sapien
acaggagcagaaacaagccggcggc

SEQ ID NO: 4347024 - DNA, 25 bp, Homo sapien
caggagcagaaacaagccggcggct

SEQ ID NO: 4347025 - DNA, 25 bp, Homo sapien
ggcgccggggcccaagtcccaagca

SEQ ID NO: 4347026 - DNA, 25 bp, Homo sapien
ggcccaagtcccaagcaacaggagc

SEQ ID NO: 4347027 - DNA, 25 bp, Homo sapien
agagcagtgcgccagggcgggtagg

SEQ ID NO: 4347028 - DNA, 25 bp, Homo sapien
agtgcgccagggcgggtagggcccg

SEQ ID NO: 4347029 - DNA, 25 bp, Homo sapien
gaccgggaagagcagtgcgccaggg

SEQ ID NO: 4347030 - DNA, 25 bp, Homo sapien
ggaagagcagtgcgccagggcgggt

SEQ ID NO: 4347031 - DNA, 25 bp, Homo sapien
cttcctgtccaataattctgctcgt

SEQ ID NO: 4347032 - DNA, 25 bp, Homo sapien
ctaatttttacaggagcggcccttg

SEQ ID NO: 4347033 - DNA, 25 bp, Homo sapien
aattctgctcgttttgctccttaaa

SEQ ID NO: 4347034 - DNA, 25 bp, Homo sapien
ggagcggcccttgcctaggtctcta

SEQ ID NO: 4347035 - DNA, 25 bp, Homo sapien
agctatgttcatgccgcttcagcct

SEQ ID NO: 4347036 - DNA, 25 bp, Homo sapien
gatggagttgttgtcgttcacatgc

SEQ ID NO: 4347037 - DNA, 25 bp, Homo sapien
cagctcacaggtttcaacctcgttt

SEQ ID NO: 4347038 - DNA, 25 bp, Homo sapien
caacacgctgtgacttaaaatgcct

SEQ ID NO: 4347039 - DNA, 25 bp, Homo sapien
ccccattgatgacttccagagtgac

SEQ ID NO: 4347040 - DNA, 25 bp, Homo sapien
cccattgatgacttccagagtgact

SEQ ID NO: 4347041 - DNA, 25 bp, Homo sapien
tgggcctattcaccccacctaaggc

SEQ ID NO: 4347042 - DNA, 25 bp, Homo sapien
ttctgacgtgggcctattcacccca

SEQ ID NO: 4347043 - DNA, 25 bp, Homo sapien
cccacctaaggcagcatagtggtct

SEQ ID NO: 4347044 - DNA, 25 bp, Homo sapien
tattcaccccacctaaggcagcata

SEQ ID NO: 4347045 - DNA, 25 bp, Homo sapien
ctgggcaatgtggctaatctgctgt

SEQ ID NO: 4347046 - DNA, 25 bp, Homo sapien
gcaatgtggctaatctgctgtagtg

SEQ ID NO: 4347047 - DNA, 25 bp, Homo sapien
tgggcaatgtggctaatctgctgta

SEQ ID NO: 4347048 - DNA, 25 bp, Homo sapien
gggcaatgtggctaatctgctgtag

SEQ ID NO: 4347049 - DNA, 25 bp, Homo sapien
gaggcagcttacacatgttcttgaa

SEQ ID NO: 4347050 - DNA, 25 bp, Homo sapien
gcagagcctcaaagcagctgatggt

SEQ ID NO: 4347051 - DNA, 25 bp, Homo sapien
gagcctcaaagcagctgatggtcat

SEQ ID NO: 4347052 - DNA, 25 bp, Homo sapien
caagggaggcagcttacacatgttc

SEQ ID NO: 4347053 - DNA, 25 bp, Homo sapien
gggactcgttgaggttttgctccag

SEQ ID NO: 4347054 - DNA, 25 bp, Homo sapien
ggactcgttgaggttttgctccagc

SEQ ID NO: 4347055 - DNA, 25 bp, Homo sapien
cacctggaaggggcaagaaggtgaa

SEQ ID NO: 4347056 - DNA, 25 bp, Homo sapien
gtgaaatccaaagccaggtgtccca

SEQ ID NO: 4347057 - DNA, 25 bp, Homo sapien
aagaaggtgaaatccaaagccaggt

SEQ ID NO: 4347058 - DNA, 25 bp, Homo sapien
accacctggaaggggcaagaaggtg

SEQ ID NO: 4347059 - DNA, 25 bp, Homo sapien
cgaagtcccactgtagatcataagg

SEQ ID NO: 4347060 - DNA, 25 bp, Homo sapien
tccttgcaacctctagaagccggaa

SEQ ID NO: 4347061 - DNA, 25 bp, Homo sapien
ctaggcctgcctttgcgaagtccca

SEQ ID NO: 4347062 - DNA, 25 bp, Homo sapien
cggaatatacttcaggcagggcctt

SEQ ID NO: 4347063 - DNA, 25 bp, Homo sapien
caagtgagaggctcaaccatgagct

SEQ ID NO: 4347064 - DNA, 25 bp, Homo sapien
taaagactacgtgactgttgctact

SEQ ID NO: 4347065 - DNA, 25 bp, Homo sapien
tgtcacaaagaggaccaagtgagac

SEQ ID NO: 4347066 - DNA, 25 bp, Homo sapien
aaaaactgcaggctggtgtagtggc

SEQ ID NO: 4347067 - DNA, 25 bp, Homo sapien
aatggcctgccaccgttaaaaagag

SEQ ID NO: 4347068 - DNA, 25 bp, Homo sapien
ggcaattcctagtaacctcaacgcg

SEQ ID NO: 4347069 - DNA, 25 bp, Homo sapien
atagcgatcgcccagcctaaggaag

SEQ ID NO: 4347070 - DNA, 25 bp, Homo sapien
gatgagacgatgagatgttacctcc

SEQ ID NO: 4347071 - DNA, 25 bp, Homo sapien
ttctgtactgtcttcctggaatgca

SEQ ID NO: 4347072 - DNA, 25 bp, Homo sapien
tcctggaatgcagactgcaggccag

SEQ ID NO: 4347073 - DNA, 25 bp, Homo sapien
tcactgctgctctttctgtactgtc

SEQ ID NO: 4347074 - DNA, 25 bp, Homo sapien
catcactgctgctctttctgtactg

SEQ ID NO: 4347075 - DNA, 25 bp, Homo sapien
caggttggagactcaggcggagggc

SEQ ID NO: 4347076 - DNA, 25 bp, Homo sapien
ttctccaaagatattgttcctggta

SEQ ID NO: 4347077 - DNA, 25 bp, Homo sapien
gatattgttcctggtagctccaggg

SEQ ID NO: 4347078 - DNA, 25 bp, Homo sapien
ctgggatctggcaaatgaccacagc

SEQ ID NO: 4347079 - DNA, 25 bp, Homo sapien
ccacattgccttgtggacgtaacag

SEQ ID NO: 4347080 - DNA, 25 bp, Homo sapien
gagccagagcctgaattcgagccat

SEQ ID NO: 4347081 - DNA, 25 bp, Homo sapien
aaatgtgagccagagcctgaattcg

SEQ ID NO: 4347082 - DNA, 25 bp, Homo sapien
tgtggacgtaacaggctctccaaaa

SEQ ID NO: 4347083 - DNA, 25 bp, Homo sapien
tggtgacagctttgccaataaacaa

SEQ ID NO: 4347084 - DNA, 25 bp, Homo sapien
tcaaagtagaccagagcaggtcctg

SEQ ID NO: 4347085 - DNA, 25 bp, Homo sapien
acatttgtcaatgcccagtagggtg

SEQ ID NO: 4347086 - DNA, 25 bp, Homo sapien
gggacatcaaagtagaccagagcag

SEQ ID NO: 4347087 - DNA, 25 bp, Homo sapien
tgataaataaacagccagagagtca

SEQ ID NO: 4347088 - DNA, 25 bp, Homo sapien
cttggagagctcgggagagttccct

SEQ ID NO: 4347089 - DNA, 25 bp, Homo sapien
cagcggcggagttggcggcttggag

SEQ ID NO: 4347090 - DNA, 25 bp, Homo sapien
ctcgtgacaggtacttccgctcggg

SEQ ID NO: 4347091 - DNA, 25 bp, Homo sapien
tggagtcttggccataaagcctgag

SEQ ID NO: 4347092 - DNA, 25 bp, Homo sapien
ttctcgcttctgtcctccgtttagt

SEQ ID NO: 4347093 - DNA, 25 bp, Homo sapien
tgtcctccgtttagtctcctcctcg

SEQ ID NO: 4347094 - DNA, 25 bp, Homo sapien
ggccgcggtaagcagcgggcccagc

SEQ ID NO: 4347095 - DNA, 25 bp, Homo sapien
agcggccgcggtaagcagcgggccc

SEQ ID NO: 4347096 - DNA, 25 bp, Homo sapien
gccaagaccccacccggcttggaga

SEQ ID NO: 4347097 - DNA, 25 bp, Homo sapien
gggcacacccggcatcgctcaggcc

SEQ ID NO: 4347098 - DNA, 25 bp, Homo sapien
tggccacgcgggcacacccggcatc

SEQ ID NO: 4347099 - DNA, 25 bp, Homo sapien
gaggtcggaggtcgtcgggcgtgac

SEQ ID NO: 4347100 - DNA, 25 bp, Homo sapien
cagagacccgagagggttccttgac

SEQ ID NO: 4347101 - DNA, 25 bp, Homo sapien
ggttcttcagttgaacagcctgacc

SEQ ID NO: 4347102 - DNA, 25 bp, Homo sapien
gacgctctgtttactgttggcctgg

SEQ ID NO: 4347103 - DNA, 25 bp, Homo sapien
ccagtggagttccttagcgcggcga

SEQ ID NO: 4347104 - DNA, 25 bp, Homo sapien
tccctgacggcaactgagtcaaggc

SEQ ID NO: 4347105 - DNA, 25 bp, Homo sapien
tgagtcaaggcagtgagtcaggtca

SEQ ID NO: 4347106 - DNA, 25 bp, Homo sapien
ctgttagtgggagttccctgacggc

SEQ ID NO: 4347107 - DNA, 25 bp, Homo sapien
caaggcagtgagtcaggtcacgtgc

SEQ ID NO: 4347108 - DNA, 25 bp, Homo sapien
taatcaccttccgatcctaagaaat

SEQ ID NO: 4347109 - DNA, 25 bp, Homo sapien
tttactcactaatcaccttccgatc

SEQ ID NO: 4347110 - DNA, 25 bp, Homo sapien
aatgctaaaaagagcttagttatag

SEQ ID NO: 4347111 - DNA, 25 bp, Homo sapien
gttatagatactgtgttgcccgtct

SEQ ID NO: 4347112 - DNA, 25 bp, Homo sapien
agctctgccctgtctttagaaaccc

SEQ ID NO: 4347113 - DNA, 25 bp, Homo sapien
agtgacagggtcttggccatattgc

SEQ ID NO: 4347114 - DNA, 25 bp, Homo sapien
ccagctctgccctgtctttagaaac

SEQ ID NO: 4347115 - DNA, 25 bp, Homo sapien
agtatagtggcctgaacacagctca

SEQ ID NO: 4347116 - DNA, 25 bp, Homo sapien
actttaaggaccctgttagccattg

SEQ ID NO: 4347117 - DNA, 25 bp, Homo sapien
gaccctgttagccattgagtatatg

SEQ ID NO: 4347118 - DNA, 25 bp, Homo sapien
tagttgacaccatcagaaactttaa

SEQ ID NO: 4347119 - DNA, 25 bp, Homo sapien
tatatggagctttgcccattcgttt

SEQ ID NO: 4347120 - DNA, 25 bp, Homo sapien
ctgttgcctaaactagggtatgcac

SEQ ID NO: 4347121 - DNA, 25 bp, Homo sapien
aactagggtatgcactgccccaatt

SEQ ID NO: 4347122 - DNA, 25 bp, Homo sapien
ttgcctaaactagggtatgcactgc

SEQ ID NO: 4347123 - DNA, 25 bp, Homo sapien
ctaaactagggtatgcactgcccca

SEQ ID NO: 4347124 - DNA, 25 bp, Homo sapien
tttgttggcagtttgcacacatcca

SEQ ID NO: 4347125 - DNA, 25 bp, Homo sapien
gctgagtgtgctggtcacacagcaa

SEQ ID NO: 4347126 - DNA, 25 bp, Homo sapien
gcgccccctggcacctatttaagtc

SEQ ID NO: 4347127 - DNA, 25 bp, Homo sapien
ctctgctggttgagtcctctgagct

SEQ ID NO: 4347128 - DNA, 25 bp, Homo sapien
gctaacagtgaacctgctgccaaag

SEQ ID NO: 4347129 - DNA, 25 bp, Homo sapien
tatgttgtaattggtatccagaagg

SEQ ID NO: 4347130 - DNA, 25 bp, Homo sapien
gagaagggtggtcataattttgtcc

SEQ ID NO: 4347131 - DNA, 25 bp, Homo sapien
cataagggggactcccacaaaatgt

SEQ ID NO: 4347132 - DNA, 25 bp, Homo sapien
ttagcgaagctaccccggccgatgg

SEQ ID NO: 4347133 - DNA, 25 bp, Homo sapien
tctgggtctcagtcagaatatgcca

SEQ ID NO: 4347134 - DNA, 25 bp, Homo sapien
ggctatctgggtctcagtcagaata

SEQ ID NO: 4347135 - DNA, 25 bp, Homo sapien
ttcatggctatctgggtctcagtca

SEQ ID NO: 4347136 - DNA, 25 bp, Homo sapien
tgggactgtactctttccaccttgg

SEQ ID NO: 4347137 - DNA, 25 bp, Homo sapien
ctgggactgtactctttccaccttg

SEQ ID NO: 4347138 - DNA, 25 bp, Homo sapien
cactctaacttcaaagttctgggct

SEQ ID NO: 4347139 - DNA, 25 bp, Homo sapien
tcactctaacttcaaagttctgggc

SEQ ID NO: 4347140 - DNA, 25 bp, Homo sapien
tttggaaagatcaagccagttgtcc

SEQ ID NO: 4347141 - DNA, 25 bp, Homo sapien
tacttcacctgtaaatgctctcaag

SEQ ID NO: 4347142 - DNA, 25 bp, Homo sapien
cagttgtcctaacagagtgtcccac

SEQ ID NO: 4347143 - DNA, 25 bp, Homo sapien
ctttaatctagaatgtggtccctcc

SEQ ID NO: 4347144 - DNA, 25 bp, Homo sapien
tagtgaccagggaattcgccccatg

SEQ ID NO: 4347145 - DNA, 25 bp, Homo sapien
ctgccttagtgaccagggaattcgc

SEQ ID NO: 4347146 - DNA, 25 bp, Homo sapien
gccttagtgaccagggaattcgccc

SEQ ID NO: 4347147 - DNA, 25 bp, Homo sapien
cttagtgaccagggaattcgcccca

SEQ ID NO: 4347148 - DNA, 25 bp, Homo sapien
ctcccagggtgttcttgttaaagat

SEQ ID NO: 4347149 - DNA, 25 bp, Homo sapien
ccagggtgttcttgttaaagatata

SEQ ID NO: 4347150 - DNA, 25 bp, Homo sapien
ttcttgttaaagatatattctgcca

SEQ ID NO: 4347151 - DNA, 25 bp, Homo sapien
gttcttgttaaagatatattctgcc

SEQ ID NO: 4347152 - DNA, 25 bp, Homo sapien
cggtcaaagttgtaagacacggaca

SEQ ID NO: 4347153 - DNA, 25 bp, Homo sapien
catcgcggtcaaagttgtaagacac

SEQ ID NO: 4347154 - DNA, 25 bp, Homo sapien
cacgatagttttgcagcttcatcag

SEQ ID NO: 4347155 - DNA, 25 bp, Homo sapien
cacctgcgaggtggacgcagttgtc

SEQ ID NO: 4347156 - DNA, 25 bp, Homo sapien
agaggtggcggcggtggctgcgcgg

SEQ ID NO: 4347157 - DNA, 25 bp, Homo sapien
aggtggcggcggtggctgcgcggcg

SEQ ID NO: 4347158 - DNA, 25 bp, Homo sapien
ggagaggtggcggcggtggctgcgc

SEQ ID NO: 4347159 - DNA, 25 bp, Homo sapien
ctaaggagaggtggcggcggtggct

SEQ ID NO: 4347160 - DNA, 25 bp, Homo sapien
gggatggtccgagggtgcagtgaag

SEQ ID NO: 4347161 - DNA, 25 bp, Homo sapien
ggacagagggctggctacgggcggc

SEQ ID NO: 4347162 - DNA, 25 bp, Homo sapien
agggtgcagtgaagaggggacagag

SEQ ID NO: 4347163 - DNA, 25 bp, Homo sapien
cttgggatggtccgagggtgcagtg

SEQ ID NO: 4347164 - DNA, 25 bp, Homo sapien
gctagcgatactgtgtttaagtcga

SEQ ID NO: 4347165 - DNA, 25 bp, Homo sapien
tctcctctgctagcgatactgtgtt

SEQ ID NO: 4347166 - DNA, 25 bp, Homo sapien
gtttaagtcgagtgaccttcctctc

SEQ ID NO: 4347167 - DNA, 25 bp, Homo sapien
gatactgtgtttaagtcgagtgacc

SEQ ID NO: 4347168 - DNA, 25 bp, Homo sapien
cctcggccccccgaggtgccaggat

SEQ ID NO: 4347169 - DNA, 25 bp, Homo sapien
tcggccccccgaggtgccaggattg

SEQ ID NO: 4347170 - DNA, 25 bp, Homo sapien
cccccgaggtgccaggattgcagac

SEQ ID NO: 4347171 - DNA, 25 bp, Homo sapien
agcctcggccccccgaggtgccagg

SEQ ID NO: 4347172 - DNA, 25 bp, Homo sapien
tcagtctgtcttccgttagtctcca

SEQ ID NO: 4347173 - DNA, 25 bp, Homo sapien
gccccattgtcttggtcaactgtag

SEQ ID NO: 4347174 - DNA, 25 bp, Homo sapien
tcttagtagcagtgccgtaccacat

SEQ ID NO: 4347175 - DNA, 25 bp, Homo sapien
gaggacacatttgcctttcacctgg

SEQ ID NO: 4347176 - DNA, 25 bp, Homo sapien
tcacaatgcaggtaagcacatgtct

SEQ ID NO: 4347177 - DNA, 25 bp, Homo sapien
aattcagcaatcagtacaaagccac

SEQ ID NO: 4347178 - DNA, 25 bp, Homo sapien
gatggtggatgacaggctagtcaca

SEQ ID NO: 4347179 - DNA, 25 bp, Homo sapien
tcagatacgacttgctaagacacac

SEQ ID NO: 4347180 - DNA, 25 bp, Homo sapien
cattggcaactatagggaacataca

SEQ ID NO: 4347181 - DNA, 25 bp, Homo sapien
taaaatgaccatagtccatgtgctc

SEQ ID NO: 4347182 - DNA, 25 bp, Homo sapien
tgttacaggctgagagggcagctca

SEQ ID NO: 4347183 - DNA, 25 bp, Homo sapien
gaggccattggtcccgaaaagtgga

SEQ ID NO: 4347184 - DNA, 25 bp, Homo sapien
aacacagttacaccccacatatctc

SEQ ID NO: 4347185 - DNA, 25 bp, Homo sapien
acacagttacaccccacatatctct

SEQ ID NO: 4347186 - DNA, 25 bp, Homo sapien
aaacacagttacaccccacatatct

SEQ ID NO: 4347187 - DNA, 25 bp, Homo sapien
tctgtaaagagatgaacgcaatgcc

SEQ ID NO: 4347188 - DNA, 25 bp, Homo sapien
tcacacccagtctgatcaggctgag

SEQ ID NO: 4347189 - DNA, 25 bp, Homo sapien
cattgtagcttgcttaacggagcac

SEQ ID NO: 4347190 - DNA, 25 bp, Homo sapien
aagccagcggtggaagtcattctga

SEQ ID NO: 4347191 - DNA, 25 bp, Homo sapien
ggcatatctggtgctgtagctctcc

SEQ ID NO: 4347192 - DNA, 25 bp, Homo sapien
atatctggtgctgtagctctcctcc

SEQ ID NO: 4347193 - DNA, 25 bp, Homo sapien
caccttgtcagtcacctggtggaac

SEQ ID NO: 4347194 - DNA, 25 bp, Homo sapien
tggtttccaccttgtcagtcacctg

SEQ ID NO: 4347195 - DNA, 25 bp, Homo sapien
ccaggaggtgtcatgctgtccttca

SEQ ID NO: 4347196 - DNA, 25 bp, Homo sapien
catccgtagctttggataggaggcc

SEQ ID NO: 4347197 - DNA, 25 bp, Homo sapien
cagatgccgtcttgactagaatcat

SEQ ID NO: 4347198 - DNA, 25 bp, Homo sapien
aggaagagatggtgccctggaccag

SEQ ID NO: 4347199 - DNA, 25 bp, Homo sapien
ccggcagcaacttggacacctccat

SEQ ID NO: 4347200 - DNA, 25 bp, Homo sapien
tgaccccggcagcaacttggacacc

SEQ ID NO: 4347201 - DNA, 25 bp, Homo sapien
cccggcagcaacttggacacctcca

SEQ ID NO: 4347202 - DNA, 25 bp, Homo sapien
accccggcagcaacttggacacctc

SEQ ID NO: 4347203 - DNA, 25 bp, Homo sapien
cctctgctgaatgccactgggctgg

SEQ ID NO: 4347204 - DNA, 25 bp, Homo sapien
tgctgggcacatggaagcattggcc

SEQ ID NO: 4347205 - DNA, 25 bp, Homo sapien
catggaagcattggcctcttgcctg

SEQ ID NO: 4347206 - DNA, 25 bp, Homo sapien
tctgctgaatgccactgggctgggt

SEQ ID NO: 4347207 - DNA, 25 bp, Homo sapien
ccatggagtcatgctgggggacttc

SEQ ID NO: 4347208 - DNA, 25 bp, Homo sapien
ggccctcctcgggcagctgaatttt

SEQ ID NO: 4347209 - DNA, 25 bp, Homo sapien
ctggccctcctcgggcagctgaatt

SEQ ID NO: 4347210 - DNA, 25 bp, Homo sapien
tggagtcatgctgggggacttcact

SEQ ID NO: 4347211 - DNA, 25 bp, Homo sapien
gagccagccttcttcgggatgattt

SEQ ID NO: 4347212 - DNA, 25 bp, Homo sapien
cagtgttgacggaatctgcctgaac

SEQ ID NO: 4347213 - DNA, 25 bp, Homo sapien
atatctggtggtgcagctgtcctcg

SEQ ID NO: 4347214 - DNA, 25 bp, Homo sapien
aatgttcagacgcttgagggtctcc

SEQ ID NO: 4347215 - DNA, 25 bp, Homo sapien
tgtgccctcaccgaacgtgccctgg

SEQ ID NO: 4347216 - DNA, 25 bp, Homo sapien
caccgaacgtgccctggccgatggt

SEQ ID NO: 4347217 - DNA, 25 bp, Homo sapien
ccctgtcagcatatgctggaccagt

SEQ ID NO: 4347218 - DNA, 25 bp, Homo sapien
catatgctggaccagtgtgccctca

SEQ ID NO: 4347219 - DNA, 25 bp, Homo sapien
ttgaggatcctacacttttggatct

SEQ ID NO: 4347220 - DNA, 25 bp, Homo sapien
cttgaggatcctacacttttggatc

SEQ ID NO: 4347221 - DNA, 25 bp, Homo sapien
tcaagtgcgttggaggctgatccct

SEQ ID NO: 4347222 - DNA, 25 bp, Homo sapien
aagtgcgttggaggctgatccctcc

SEQ ID NO: 4347223 - DNA, 25 bp, Homo sapien
ttcatcaagtgcgttggaggctgat

SEQ ID NO: 4347224 - DNA, 25 bp, Homo sapien
gcgttggaggctgatccctcctccg

SEQ ID NO: 4347225 - DNA, 25 bp, Homo sapien
cccgtgagggcacgccctggattag

SEQ ID NO: 4347226 - DNA, 25 bp, Homo sapien
tgctcccgtgggcaggtcgagtgcc

SEQ ID NO: 4347227 - DNA, 25 bp, Homo sapien
tgcctctggcactccgttggctgct

SEQ ID NO: 4347228 - DNA, 25 bp, Homo sapien
ccctggattagtgtgaacaaatgga

SEQ ID NO: 4347229 - DNA, 25 bp, Homo sapien
ctcctgggtctcccacatggacaga

SEQ ID NO: 4347230 - DNA, 25 bp, Homo sapien
tcctgggtctcccacatggacagaa

SEQ ID NO: 4347231 - DNA, 25 bp, Homo sapien
ctgggtctcccacatggacagaact

SEQ ID NO: 4347232 - DNA, 25 bp, Homo sapien
cctgggtctcccacatggacagaac

SEQ ID NO: 4347233 - DNA, 25 bp, Homo sapien
gggacaagcaggcaaggtggcttct

SEQ ID NO: 4347234 - DNA, 25 bp, Homo sapien
gagatgtgctggtattgggtcacat

SEQ ID NO: 4347235 - DNA, 25 bp, Homo sapien
cagggccacactcggagatgtgctg

SEQ ID NO: 4347236 - DNA, 25 bp, Homo sapien
cctggtcctccttgggttgctggat

SEQ ID NO: 4347237 - DNA, 25 bp, Homo sapien
tgggttaatattcagaggctgataa

SEQ ID NO: 4347238 - DNA, 25 bp, Homo sapien
gctagccagtggcacaaaacttgca

SEQ ID NO: 4347239 - DNA, 25 bp, Homo sapien
taatggcattgggagagaattccag

SEQ ID NO: 4347240 - DNA, 25 bp, Homo sapien
tggccaccggcctagtgggttaata

SEQ ID NO: 4347241 - DNA, 25 bp, Homo sapien
tccagaggctgagcaacgaacaaag

SEQ ID NO: 4347242 - DNA, 25 bp, Homo sapien
gaaataggaggattttattcaggtg

SEQ ID NO: 4347243 - DNA, 25 bp, Homo sapien
attcaggtggccactggcccagcgg

SEQ ID NO: 4347244 - DNA, 25 bp, Homo sapien
ctggcccagcggattaatatccaga

SEQ ID NO: 4347245 - DNA, 25 bp, Homo sapien
tgtgactgtgctgaccaagagccag

SEQ ID NO: 4347246 - DNA, 25 bp, Homo sapien
catgggtggcaaaatcgtcctggag

SEQ ID NO: 4347247 - DNA, 25 bp, Homo sapien
tagccagtggtgcaaaacttgcggg

SEQ ID NO: 4347248 - DNA, 25 bp, Homo sapien
taaaagggtagcacaacactaggca

SEQ ID NO: 4347249 - DNA, 25 bp, Homo sapien
aaagtttctcgctggtgcgtgtctc

SEQ ID NO: 4347250 - DNA, 25 bp, Homo sapien
taaagtttctcgctggtgcgtgtct

SEQ ID NO: 4347251 - DNA, 25 bp, Homo sapien
ctaaagtttctcgctggtgcgtgtc

SEQ ID NO: 4347252 - DNA, 25 bp, Homo sapien
agtttctcgctggtgcgtgtctctg

SEQ ID NO: 4347253 - DNA, 25 bp, Homo sapien
cacacaggttgcaaggagtggagat

SEQ ID NO: 4347254 - DNA, 25 bp, Homo sapien
tccctggtcttactggccttgccag

SEQ ID NO: 4347255 - DNA, 25 bp, Homo sapien
gagatagggctgcaggttccaagcc

SEQ ID NO: 4347256 - DNA, 25 bp, Homo sapien
cactgtatacccctctgaatcctta

SEQ ID NO: 4347257 - DNA, 25 bp, Homo sapien
ggcagaaatgaagacgtggaggcag

SEQ ID NO: 4347258 - DNA, 25 bp, Homo sapien
tccacggcagaaatgaagacgtgga

SEQ ID NO: 4347259 - DNA, 25 bp, Homo sapien
ccacggcagaaatgaagacgtggag

SEQ ID NO: 4347260 - DNA, 25 bp, Homo sapien
acggcagaaatgaagacgtggaggc

SEQ ID NO: 4347261 - DNA, 25 bp, Homo sapien
tagcaaagagattgtccacgaagat

SEQ ID NO: 4347262 - DNA, 25 bp, Homo sapien
gcttcagcaggacgatagcaaagag

SEQ ID NO: 4347263 - DNA, 25 bp, Homo sapien
tgtcatacaccaggcaagtgtcatt

SEQ ID NO: 4347264 - DNA, 25 bp, Homo sapien
gccagcttcttacgggaggcactca

SEQ ID NO: 4347265 - DNA, 25 bp, Homo sapien
ctggcaaaatttcagcgaaaacagt

SEQ ID NO: 4347266 - DNA, 25 bp, Homo sapien
caaaatttcagcgaaaacagtgtca

SEQ ID NO: 4347267 - DNA, 25 bp, Homo sapien
aatttcagcgaaaacagtgtcagtc

SEQ ID NO: 4347268 - DNA, 25 bp, Homo sapien
tttcagcgaaaacagtgtcagtcac

SEQ ID NO: 4347269 - DNA, 25 bp, Homo sapien
caggccgttggactcccatgtgctc

SEQ ID NO: 4347270 - DNA, 25 bp, Homo sapien
tgtgctctgcaagaacaactcccac

SEQ ID NO: 4347271 - DNA, 25 bp, Homo sapien
actgccaggccgttggactcccatg

SEQ ID NO: 4347272 - DNA, 25 bp, Homo sapien
ttggactcccatgtgctctgcaaga

SEQ ID NO: 4347273 - DNA, 25 bp, Homo sapien
gaggccagaagcgaggttcatcaga

SEQ ID NO: 4347274 - DNA, 25 bp, Homo sapien
ggcgttggcttatccttaggaggcc

SEQ ID NO: 4347275 - DNA, 25 bp, Homo sapien
gcagggaaaaggactcatcaaaaga

SEQ ID NO: 4347276 - DNA, 25 bp, Homo sapien
ccagaagctccgtgcagggaaaagg

SEQ ID NO: 4347277 - DNA, 25 bp, Homo sapien
tggagctccagagtcaaggctacag

SEQ ID NO: 4347278 - DNA, 25 bp, Homo sapien
ggagctccagagtcaaggctacagt

SEQ ID NO: 4347279 - DNA, 25 bp, Homo sapien
ctggcagacaagcccttcttcctgg

SEQ ID NO: 4347280 - DNA, 25 bp, Homo sapien
ggcagacaagcccttcttcctggtg

SEQ ID NO: 4347281 - DNA, 25 bp, Homo sapien
ccccatcagaacaggtgaggtccca

SEQ ID NO: 4347282 - DNA, 25 bp, Homo sapien
cccatcagaacaggtgaggtcccac

SEQ ID NO: 4347283 - DNA, 25 bp, Homo sapien
tcaggagatcgacactagccgagac

SEQ ID NO: 4347284 - DNA, 25 bp, Homo sapien
ctagccgagaccaccctaggtaaca

SEQ ID NO: 4347285 - DNA, 25 bp, Homo sapien
gtggcaaatataagatacagttgtt

SEQ ID NO: 4347286 - DNA, 25 bp, Homo sapien
gtgtggcaaatataagatacagttg

SEQ ID NO: 4347287 - DNA, 25 bp, Homo sapien
tcaaggagttgacacaatggaagct

SEQ ID NO: 4347288 - DNA, 25 bp, Homo sapien
tctacgccttgcagagttttgagct

SEQ ID NO: 4347289 - DNA, 25 bp, Homo sapien
tattttgcagtttagactctacgcc

SEQ ID NO: 4347290 - DNA, 25 bp, Homo sapien
gaaaccaggtgagagaccttagaca

SEQ ID NO: 4347291 - DNA, 25 bp, Homo sapien
tttacagaggacctggagacttgga

SEQ ID NO: 4347292 - DNA, 25 bp, Homo sapien
gaaaggcttgacacacgtgaggctg

SEQ ID NO: 4347293 - DNA, 25 bp, Homo sapien
ttttgtggcaatgggcaagcaggca

SEQ ID NO: 4347294 - DNA, 25 bp, Homo sapien
cactgaggaggttctagctgccact

SEQ ID NO: 4347295 - DNA, 25 bp, Homo sapien
ggaacacaggagactaagacaggca

SEQ ID NO: 4347296 - DNA, 25 bp, Homo sapien
tgtgatcccagaccatcatggagga

SEQ ID NO: 4347297 - DNA, 25 bp, Homo sapien
catcaacctgtatggcatgacggcc

SEQ ID NO: 4347298 - DNA, 25 bp, Homo sapien
actggtctaggtagtgagtccccac

SEQ ID NO: 4347299 - DNA, 25 bp, Homo sapien
tgcaggttcaccatgcggtggccgt

SEQ ID NO: 4347300 - DNA, 25 bp, Homo sapien
tgttgaggagggtgtggtcgggtgt

SEQ ID NO: 4347301 - DNA, 25 bp, Homo sapien
aggctgtgcaggttcaccatgcggt

SEQ ID NO: 4347302 - DNA, 25 bp, Homo sapien
ctttaatgaagttgattgttgagga

SEQ ID NO: 4347303 - DNA, 25 bp, Homo sapien
gccatttctgctcaaccacacattc

SEQ ID NO: 4347304 - DNA, 25 bp, Homo sapien
cagcttctgaactgagccggagaga

SEQ ID NO: 4347305 - DNA, 25 bp, Homo sapien
actggcgggtattctggtcattgag

SEQ ID NO: 4347306 - DNA, 25 bp, Homo sapien
tgctgacccctggaactggcgggta

SEQ ID NO: 4347307 - DNA, 25 bp, Homo sapien
gagaaccaccctttggtgatggcct

SEQ ID NO: 4347308 - DNA, 25 bp, Homo sapien
agaaccaccctttggtgatggcctc

SEQ ID NO: 4347309 - DNA, 25 bp, Homo sapien
gaaccaccctttggtgatggcctcg

SEQ ID NO: 4347310 - DNA, 25 bp, Homo sapien
tgagaaccaccctttggtgatggcc

SEQ ID NO: 4347311 - DNA, 25 bp, Homo sapien
gcctcccttctgctggcacttgaaa

SEQ ID NO: 4347312 - DNA, 25 bp, Homo sapien
ctactcttgaggagaggatgaatgg

SEQ ID NO: 4347313 - DNA, 25 bp, Homo sapien
tgaggagaggatgaatggtatctcc

SEQ ID NO: 4347314 - DNA, 25 bp, Homo sapien
attacaccaggtcccagcgtgctca

SEQ ID NO: 4347315 - DNA, 25 bp, Homo sapien
tattgtggacactcccttgagcaca

SEQ ID NO: 4347316 - DNA, 25 bp, Homo sapien
gagctctaaaatgcctattgtggac

SEQ ID NO: 4347317 - DNA, 25 bp, Homo sapien
tcccaatttactgtgatgctggaaa

SEQ ID NO: 4347318 - DNA, 25 bp, Homo sapien
gcagccgactctttttcctccaagt

SEQ ID NO: 4347319 - DNA, 25 bp, Homo sapien
gacccagggcatgaagggatttgcc

SEQ ID NO: 4347320 - DNA, 25 bp, Homo sapien
gaactgtcagtatctttgccgctgg

SEQ ID NO: 4347321 - DNA, 25 bp, Homo sapien
gggactggtacagcaagacctacgt

SEQ ID NO: 4347322 - DNA, 25 bp, Homo sapien
ttggctggacacctagagatcagtc

SEQ ID NO: 4347323 - DNA, 25 bp, Homo sapien
ggtggtggtttcttgtacagatcaa

SEQ ID NO: 4347324 - DNA, 25 bp, Homo sapien
tgttacaggctttggtgcgggcgaa

SEQ ID NO: 4347325 - DNA, 25 bp, Homo sapien
aaagtccacgtggtgcctgtcccag

SEQ ID NO: 4347326 - DNA, 25 bp, Homo sapien
cagctcgaggaaaggtggtggtttc

SEQ ID NO: 4347327 - DNA, 25 bp, Homo sapien
cacctgtctcgatccaacacaggct

SEQ ID NO: 4347328 - DNA, 25 bp, Homo sapien
tagcaaacagggagttttccttcca

SEQ ID NO: 4347329 - DNA, 25 bp, Homo sapien
cacaggctccagtacattagcaaac

SEQ ID NO: 4347330 - DNA, 25 bp, Homo sapien
ggctccagtacattagcaaacaggg

SEQ ID NO: 4347331 - DNA, 25 bp, Homo sapien
gggagtaagtaaatcaggaggagaa

SEQ ID NO: 4347332 - DNA, 25 bp, Homo sapien
attgggggagtaagtaaatcaggag

SEQ ID NO: 4347333 - DNA, 25 bp, Homo sapien
tcaggaggagaaaggtccctatgga

SEQ ID NO: 4347334 - DNA, 25 bp, Homo sapien
gaggagaaaggtccctatggacacc

SEQ ID NO: 4347335 - DNA, 25 bp, Homo sapien
ctgagaccctgctcttccctgtgga

SEQ ID NO: 4347336 - DNA, 25 bp, Homo sapien
tgagaccctgctcttccctgtggac

SEQ ID NO: 4347337 - DNA, 25 bp, Homo sapien
attcagctctttgatgggtggcagc

SEQ ID NO: 4347338 - DNA, 25 bp, Homo sapien
agctctttgatgggtggcagcttga

SEQ ID NO: 4347339 - DNA, 25 bp, Homo sapien
ctcattcagctctttgatgggtggc

SEQ ID NO: 4347340 - DNA, 25 bp, Homo sapien
tctttgatgggtggcagcttgagat

SEQ ID NO: 4347341 - DNA, 25 bp, Homo sapien
gctgctttcggtgtcgctctgaaga

SEQ ID NO: 4347342 - DNA, 25 bp, Homo sapien
tcggtgtcgctctgaagacctgtca

SEQ ID NO: 4347343 - DNA, 25 bp, Homo sapien
ctgaaagctgctttcggtgtcgctc

SEQ ID NO: 4347344 - DNA, 25 bp, Homo sapien
cggtgtcgctctgaagacctgtcac

SEQ ID NO: 4347345 - DNA, 25 bp, Homo sapien
tccaccatggctgagaggtaatcct

SEQ ID NO: 4347346 - DNA, 25 bp, Homo sapien
agccaggcctggcgggatttcttct

SEQ ID NO: 4347347 - DNA, 25 bp, Homo sapien
taatcctgtgagtacgtgaatctct

SEQ ID NO: 4347348 - DNA, 25 bp, Homo sapien
gagaggtaatcctgtgagtacgtga

SEQ ID NO: 4347349 - DNA, 25 bp, Homo sapien
cttgggcttaccctcaggtgtggag

SEQ ID NO: 4347350 - DNA, 25 bp, Homo sapien
tctcaacatctgagccttgtctact

SEQ ID NO: 4347351 - DNA, 25 bp, Homo sapien
tacttcccctagctgattggctttc

SEQ ID NO: 4347352 - DNA, 25 bp, Homo sapien
cacatttagtgtggaacagaacacc

SEQ ID NO: 4347353 - DNA, 25 bp, Homo sapien
ttggcaagctctgtagaattcatgg

SEQ ID NO: 4347354 - DNA, 25 bp, Homo sapien
tcgccacggacttcggaggcttctt

SEQ ID NO: 4347355 - DNA, 25 bp, Homo sapien
gaggcttcttgctgacctggtaggc

SEQ ID NO: 4347356 - DNA, 25 bp, Homo sapien
tatagttgtagacggccttgttggc

SEQ ID NO: 4347357 - DNA, 25 bp, Homo sapien
tataaacctacctatatgacccagc

SEQ ID NO: 4347358 - DNA, 25 bp, Homo sapien
taaaagatatctagcatcgtcagtc

SEQ ID NO: 4347359 - DNA, 25 bp, Homo sapien
tcatgagatacacactagaatggct

SEQ ID NO: 4347360 - DNA, 25 bp, Homo sapien
tgtgcaactacactgtaaaaaccgc

SEQ ID NO: 4347361 - DNA, 25 bp, Homo sapien
ataagcatggcactccgccactgca

SEQ ID NO: 4347362 - DNA, 25 bp, Homo sapien
taagcatggcactccgccactgcag

SEQ ID NO: 4347363 - DNA, 25 bp, Homo sapien
aagcatggcactccgccactgcagg

SEQ ID NO: 4347364 - DNA, 25 bp, Homo sapien
tcataagcatggcactccgccactg

SEQ ID NO: 4347365 - DNA, 25 bp, Homo sapien
gtggagttccgactgtggtagtcct

SEQ ID NO: 4347366 - DNA, 25 bp, Homo sapien
gaggtggtagggcaaacagtttctc

SEQ ID NO: 4347367 - DNA, 25 bp, Homo sapien
cgactgtggtagtcctcaagattgg

SEQ ID NO: 4347368 - DNA, 25 bp, Homo sapien
tcttcttgcgaaaggggcatcccaa

SEQ ID NO: 4347369 - DNA, 25 bp, Homo sapien
tcaccgtcacgtcccagagggtggt

SEQ ID NO: 4347370 - DNA, 25 bp, Homo sapien
tcaagtcttttatcatagcagagga

SEQ ID NO: 4347371 - DNA, 25 bp, Homo sapien
ttttatcatagcagaggagggcagc

SEQ ID NO: 4347372 - DNA, 25 bp, Homo sapien
gctgttatagcagatgtcgtggatc

SEQ ID NO: 4347373 - DNA, 25 bp, Homo sapien
ggaggacatcatacaccgagcctca

SEQ ID NO: 4347374 - DNA, 25 bp, Homo sapien
caggaggacatcatacaccgagcct

SEQ ID NO: 4347375 - DNA, 25 bp, Homo sapien
ggacatcatacaccgagcctcaggg

SEQ ID NO: 4347376 - DNA, 25 bp, Homo sapien
aggacatcatacaccgagcctcagg

SEQ ID NO: 4347377 - DNA, 25 bp, Homo sapien
gcaggaagaacaccgcctgctgcag

SEQ ID NO: 4347378 - DNA, 25 bp, Homo sapien
ccatagagccggctgcggaacagca

SEQ ID NO: 4347379 - DNA, 25 bp, Homo sapien
gcctccgctcagtgtctcgcaggaa

SEQ ID NO: 4347380 - DNA, 25 bp, Homo sapien
tgcacgtggtacaggatggcctcca

SEQ ID NO: 4347381 - DNA, 25 bp, Homo sapien
tatttcctgtgttctgacctgggaa

SEQ ID NO: 4347382 - DNA, 25 bp, Homo sapien
tgtatttcctgtgttctgacctggg

SEQ ID NO: 4347383 - DNA, 25 bp, Homo sapien
tttcctgtgttctgacctgggaatc

SEQ ID NO: 4347384 - DNA, 25 bp, Homo sapien
cttgtatttcctgtgttctgacctg

SEQ ID NO: 4347385 - DNA, 25 bp, Homo sapien
tgaaaaggtgtgtcttcccgtccag

SEQ ID NO: 4347386 - DNA, 25 bp, Homo sapien
gagtcagcctctaggtagttgcccc

SEQ ID NO: 4347387 - DNA, 25 bp, Homo sapien
caaagacgaagatgatgcggccaaa

SEQ ID NO: 4347388 - DNA, 25 bp, Homo sapien
gccgagggccttagcgttgatcatg

SEQ ID NO: 4347389 - DNA, 25 bp, Homo sapien
tcctggccgcagtgtgtgggctgaa

SEQ ID NO: 4347390 - DNA, 25 bp, Homo sapien
aagccccacaaccttccttctcctg

SEQ ID NO: 4347391 - DNA, 25 bp, Homo sapien
ttctcctgctgtcctggccgcagtg

SEQ ID NO: 4347392 - DNA, 25 bp, Homo sapien
ccgcagtgtgtgggctgaacctcac

SEQ ID NO: 4347393 - DNA, 25 bp, Homo sapien
ggacggccagattcaagtacttgtg

SEQ ID NO: 4347394 - DNA, 25 bp, Homo sapien
tgatgtcctggaaataaacgtgggt

SEQ ID NO: 4347395 - DNA, 25 bp, Homo sapien
cctgggcgatgccataagggtacca

SEQ ID NO: 4347396 - DNA, 25 bp, Homo sapien
tgccccaaggaagatgacgttgatg

SEQ ID NO: 4347397 - DNA, 25 bp, Homo sapien
ctggtacttgcagtacacaggcatg

SEQ ID NO: 4347398 - DNA, 25 bp, Homo sapien
tgcagtacacaggcatgcacagcct

SEQ ID NO: 4347399 - DNA, 25 bp, Homo sapien
ggtacttgcagtacacaggcatgca

SEQ ID NO: 4347400 - DNA, 25 bp, Homo sapien
cttgcagtacacaggcatgcacagc

SEQ ID NO: 4347401 - DNA, 25 bp, Homo sapien
ggcaggaagcacacttgatctttat

SEQ ID NO: 4347402 - DNA, 25 bp, Homo sapien
tcaaaaggcaatctaaaatgttggc

SEQ ID NO: 4347403 - DNA, 25 bp, Homo sapien
gccacgactcacgacagtttgccat

SEQ ID NO: 4347404 - DNA, 25 bp, Homo sapien
cctcggtcatgatcggaacttctgt

SEQ ID NO: 4347405 - DNA, 25 bp, Homo sapien
catgggtataatggagcggcccaca

SEQ ID NO: 4347406 - DNA, 25 bp, Homo sapien
taaaagctgtcacccattacgcctg

SEQ ID NO: 4347407 - DNA, 25 bp, Homo sapien
gagctgacccgttctctgtcgatga

SEQ ID NO: 4347408 - DNA, 25 bp, Homo sapien
gagttctgacgcaatcatccaaggt

SEQ ID NO: 4347409 - DNA, 25 bp, Homo sapien
tcacacggacatgtaagacaatcac

SEQ ID NO: 4347410 - DNA, 25 bp, Homo sapien
ctcttcacacggacatgtaagacaa

SEQ ID NO: 4347411 - DNA, 25 bp, Homo sapien
acacggacatgtaagacaatcacga

SEQ ID NO: 4347412 - DNA, 25 bp, Homo sapien
cttcacacggacatgtaagacaatc

SEQ ID NO: 4347413 - DNA, 25 bp, Homo sapien
caacgcacgcgcttctgcagagtag

SEQ ID NO: 4347414 - DNA, 25 bp, Homo sapien
tgtgtcacacgggaagtgcctgcac

SEQ ID NO: 4347415 - DNA, 25 bp, Homo sapien
gacgactggcacctgtggaactgaa

SEQ ID NO: 4347416 - DNA, 25 bp, Homo sapien
gaagcagctagcaaaggcgttcgct

SEQ ID NO: 4347417 - DNA, 25 bp, Homo sapien
gtaggaaagcatttattaaaagcag

SEQ ID NO: 4347418 - DNA, 25 bp, Homo sapien
agcatttattaaaagcagcatcttc

SEQ ID NO: 4347419 - DNA, 25 bp, Homo sapien
aaagcatttattaaaagcagcatct

SEQ ID NO: 4347420 - DNA, 25 bp, Homo sapien
ggaaagcatttattaaaagcagcat

SEQ ID NO: 4347421 - DNA, 25 bp, Homo sapien
gcacgcagcagggttgtcattagga

SEQ ID NO: 4347422 - DNA, 25 bp, Homo sapien
agccaattcccctgagtttcctgag

SEQ ID NO: 4347423 - DNA, 25 bp, Homo sapien
atttaatattcccataggcttcctt

SEQ ID NO: 4347424 - DNA, 25 bp, Homo sapien
tgatctcaggcaaggtagctaccct

SEQ ID NO: 4347425 - DNA, 25 bp, Homo sapien
ctgctgggaacagggcaagcagtgg

SEQ ID NO: 4347426 - DNA, 25 bp, Homo sapien
ttatggccgttctggccacaagaca

SEQ ID NO: 4347427 - DNA, 25 bp, Homo sapien
gccgttctggccacaagacaagcag

SEQ ID NO: 4347428 - DNA, 25 bp, Homo sapien
tctggccacaagacaagcaggagct

SEQ ID NO: 4347429 - DNA, 25 bp, Homo sapien
cggcaaggagcggcatgacggccag

SEQ ID NO: 4347430 - DNA, 25 bp, Homo sapien
tgccaggggcttcttatgtctcctc

SEQ ID NO: 4347431 - DNA, 25 bp, Homo sapien
gccaggggcttcttatgtctcctct

SEQ ID NO: 4347432 - DNA, 25 bp, Homo sapien
caggggcttcttatgtctcctctgg

SEQ ID NO: 4347433 - DNA, 25 bp, Homo sapien
tcagcgtggggtctgcctcttcttc

SEQ ID NO: 4347434 - DNA, 25 bp, Homo sapien
aattccttgatctccatcatgcttg

SEQ ID NO: 4347435 - DNA, 25 bp, Homo sapien
gctaagtgattcactctcaattaat

SEQ ID NO: 4347436 - DNA, 25 bp, Homo sapien
catcatgcttgctcctgccaaagaa

SEQ ID NO: 4347437 - DNA, 25 bp, Homo sapien
tgagacctttgtctgtctaatatgt

SEQ ID NO: 4347438 - DNA, 25 bp, Homo sapien
tcgtggaagaatcgtccattttgag

SEQ ID NO: 4347439 - DNA, 25 bp, Homo sapien
tgaatcgtggaagaatcgtccattt

SEQ ID NO: 4347440 - DNA, 25 bp, Homo sapien
tggaagaatcgtccattttgaggga

SEQ ID NO: 4347441 - DNA, 25 bp, Homo sapien
agaatcgtccattttgagggacttc

SEQ ID NO: 4347442 - DNA, 25 bp, Homo sapien
gaagaagtttcgggctctgcttggt

SEQ ID NO: 4347443 - DNA, 25 bp, Homo sapien
tggaagaagtttcgggctctgcttg

SEQ ID NO: 4347444 - DNA, 25 bp, Homo sapien
cttggaagaagtttcgggctctgct

SEQ ID NO: 4347445 - DNA, 25 bp, Homo sapien
ttcttggaagaagtttcgggctctg

SEQ ID NO: 4347446 - DNA, 25 bp, Homo sapien
ctcaatgccctgttcagataatttt

SEQ ID NO: 4347447 - DNA, 25 bp, Homo sapien
ttttcctggcggatgttcctggttc

SEQ ID NO: 4347448 - DNA, 25 bp, Homo sapien
tcctggttcgactcttctctgacaa

SEQ ID NO: 4347449 - DNA, 25 bp, Homo sapien
gcggatgttcctggttcgactcttc

SEQ ID NO: 4347450 - DNA, 25 bp, Homo sapien
tagaggcctcgcatgcacatggcag

SEQ ID NO: 4347451 - DNA, 25 bp, Homo sapien
aaatgcgagcattgagcctgtgaca

SEQ ID NO: 4347452 - DNA, 25 bp, Homo sapien
agagctctcaagaacaacaggcggg

SEQ ID NO: 4347453 - DNA, 25 bp, Homo sapien
aaaacgcatgatctctgtgaagccc

SEQ ID NO: 4347454 - DNA, 25 bp, Homo sapien
cggcagtctttaatcggtaatatct

SEQ ID NO: 4347455 - DNA, 25 bp, Homo sapien
aggctttgtcaccttcgtgccacgg

SEQ ID NO: 4347456 - DNA, 25 bp, Homo sapien
tagtgttccagagcctcaaggtgat

SEQ ID NO: 4347457 - DNA, 25 bp, Homo sapien
tgacttatgaaaagctcccacgtcg

SEQ ID NO: 4347458 - DNA, 25 bp, Homo sapien
tactcaatgtggtaaaaacgacgca

SEQ ID NO: 4347459 - DNA, 25 bp, Homo sapien
tccaggaatactttggccaccattg

SEQ ID NO: 4347460 - DNA, 25 bp, Homo sapien
ttttaggttcttcatcgtccggcag

SEQ ID NO: 4347461 - DNA, 25 bp, Homo sapien
gcaatatgtcaacttttttaggttc

SEQ ID NO: 4347462 - DNA, 25 bp, Homo sapien
tttttcaatcaaacttgcatatttt

SEQ ID NO: 4347463 - DNA, 25 bp, Homo sapien
tttcaatcaaacttgcatattttcc

SEQ ID NO: 4347464 - DNA, 25 bp, Homo sapien
tatttttcaatcaaacttgcatatt

SEQ ID NO: 4347465 - DNA, 25 bp, Homo sapien
ttttcaatcaaacttgcatattttc

SEQ ID NO: 4347466 - DNA, 25 bp, Homo sapien
tagcagttacgccagactaggacac

SEQ ID NO: 4347467 - DNA, 25 bp, Homo sapien
taccctggccggaagacatgaagat

SEQ ID NO: 4347468 - DNA, 25 bp, Homo sapien
tgcaccaaggcgttcattgaaacag

SEQ ID NO: 4347469 - DNA, 25 bp, Homo sapien
tacaccatcgacagaataccaggag

SEQ ID NO: 4347470 - DNA, 25 bp, Homo sapien
tagcgacatgctgcagagcgcactg

SEQ ID NO: 4347471 - DNA, 25 bp, Homo sapien
ctgcacgggcggtcagagtcagact

SEQ ID NO: 4347472 - DNA, 25 bp, Homo sapien
cacactcgctcgtggactggtaaaa

SEQ ID NO: 4347473 - DNA, 25 bp, Homo sapien
agatgaggactcgatgctgctgcac

SEQ ID NO: 4347474 - DNA, 25 bp, Homo sapien
caacagataagggtggctggcagta

SEQ ID NO: 4347475 - DNA, 25 bp, Homo sapien
cagaacatgaatgtgcactgggtgc

SEQ ID NO: 4347476 - DNA, 25 bp, Homo sapien
aaagtgaaggctgtccccgcctgta

SEQ ID NO: 4347477 - DNA, 25 bp, Homo sapien
tgctgcgcctaagcacaagatgcgt

SEQ ID NO: 4347478 - DNA, 25 bp, Homo sapien
cggcagcggggagttggaccgcggc

SEQ ID NO: 4347479 - DNA, 25 bp, Homo sapien
cgcggcggcaactcccgtaccggat

SEQ ID NO: 4347480 - DNA, 25 bp, Homo sapien
agcggggagttggaccgcggcggca

SEQ ID NO: 4347481 - DNA, 25 bp, Homo sapien
actcccgtaccggatccacagccac

SEQ ID NO: 4347482 - DNA, 25 bp, Homo sapien
tgagaggagcgtccgccggtgcagg

SEQ ID NO: 4347483 - DNA, 25 bp, Homo sapien
agcgtccgccggtgcagggagggcc

SEQ ID NO: 4347484 - DNA, 25 bp, Homo sapien
actgagaggagcgtccgccggtgca

SEQ ID NO: 4347485 - DNA, 25 bp, Homo sapien
cgtccgccggtgcagggagggccgc

SEQ ID NO: 4347486 - DNA, 25 bp, Homo sapien
cctggtccttgcccgtacgatggga

SEQ ID NO: 4347487 - DNA, 25 bp, Homo sapien
tggtccttgcccgtacgatgggagg

SEQ ID NO: 4347488 - DNA, 25 bp, Homo sapien
tccttgcccgtacgatgggaggtag

SEQ ID NO: 4347489 - DNA, 25 bp, Homo sapien
cttgcccgtacgatgggaggtaggg

SEQ ID NO: 4347490 - DNA, 25 bp, Homo sapien
tctgggctctggatagaacaacaca

SEQ ID NO: 4347491 - DNA, 25 bp, Homo sapien
tcacagtatggtttttgcggagaaa

SEQ ID NO: 4347492 - DNA, 25 bp, Homo sapien
gaaatctttgactaacaacaggcct

SEQ ID NO: 4347493 - DNA, 25 bp, Homo sapien
gaaaagctgaaaaccacctcagtgg

SEQ ID NO: 4347494 - DNA, 25 bp, Homo sapien
aagggaaatactgcagtgtctccca

SEQ ID NO: 4347495 - DNA, 25 bp, Homo sapien
cacatgtcctagtagaaaatactta

SEQ ID NO: 4347496 - DNA, 25 bp, Homo sapien
aacaaaagggaaatactgcagtgtc

SEQ ID NO: 4347497 - DNA, 25 bp, Homo sapien
aagaaccactgaatccacttatgaa

SEQ ID NO: 4347498 - DNA, 25 bp, Homo sapien
acatcgagacgcagatccgcctgcg

SEQ ID NO: 4347499 - DNA, 25 bp, Homo sapien
ctctgtggctacttcggcacccgtg

SEQ ID NO: 4347500 - DNA, 25 bp, Homo sapien
gggactcagataccgatgaagaggc

SEQ ID NO: 4347501 - DNA, 25 bp, Homo sapien
ggcgctctcagcgagcacatcgaga

SEQ ID NO: 4347502 - DNA, 25 bp, Homo sapien
ttagccagcccccgtgatcacacag

SEQ ID NO: 4347503 - DNA, 25 bp, Homo sapien
cagcccccgtgatcacacaggccac

SEQ ID NO: 4347504 - DNA, 25 bp, Homo sapien
agccagcccccgtgatcacacaggc

SEQ ID NO: 4347505 - DNA, 25 bp, Homo sapien
ccagcccccgtgatcacacaggcca

SEQ ID NO: 4347506 - DNA, 25 bp, Homo sapien
ggtcaaaccctgactcgtacagggc

SEQ ID NO: 4347507 - DNA, 25 bp, Homo sapien
tctggtcaaaccctgactcgtacag

SEQ ID NO: 4347508 - DNA, 25 bp, Homo sapien
tggccccacttctctggtcaaaccc

SEQ ID NO: 4347509 - DNA, 25 bp, Homo sapien
acttctctggtcaaaccctgactcg

SEQ ID NO: 4347510 - DNA, 25 bp, Homo sapien
ttttggcctgtcagcaaggacccct

SEQ ID NO: 4347511 - DNA, 25 bp, Homo sapien
ccagtcaagtctctctgggagcaca

SEQ ID NO: 4347512 - DNA, 25 bp, Homo sapien
tggttgcaagagagctgccatggcc

SEQ ID NO: 4347513 - DNA, 25 bp, Homo sapien
tcatgattgaggcttcgtgaaggcg

SEQ ID NO: 4347514 - DNA, 25 bp, Homo sapien
gtccctccccggtgatttctctgta

SEQ ID NO: 4347515 - DNA, 25 bp, Homo sapien
tgtttgcaccccattggcggcgttg

SEQ ID NO: 4347516 - DNA, 25 bp, Homo sapien
tcttgttgggatgtgttcttgcgaa

SEQ ID NO: 4347517 - DNA, 25 bp, Homo sapien
tgagtctttcgggtctgtttgcacc

SEQ ID NO: 4347518 - DNA, 25 bp, Homo sapien
tgggatttagaagcccagtcagtcc

SEQ ID NO: 4347519 - DNA, 25 bp, Homo sapien
gcccagtcagtccactcatcagtgt

SEQ ID NO: 4347520 - DNA, 25 bp, Homo sapien
cagtgtttgtcttagtggtttgctc

SEQ ID NO: 4347521 - DNA, 25 bp, Homo sapien
ggtttgctcatcagtccaataattc

SEQ ID NO: 4347522 - DNA, 25 bp, Homo sapien
ggaacagggcatctccttgggagca

SEQ ID NO: 4347523 - DNA, 25 bp, Homo sapien
caaaactcatggtgcttaagctgct

SEQ ID NO: 4347524 - DNA, 25 bp, Homo sapien
tgggcagatcctgtatgaccaagca

SEQ ID NO: 4347525 - DNA, 25 bp, Homo sapien
tcagaggcacatcaaagacagtgac

SEQ ID NO: 4347526 - DNA, 25 bp, Homo sapien
cggcggcggtgctcgcagccgaggt

SEQ ID NO: 4347527 - DNA, 25 bp, Homo sapien
tgctcgcagccgaggtgccggcggg

SEQ ID NO: 4347528 - DNA, 25 bp, Homo sapien
ggtggggttatgctgatgagcacgg

SEQ ID NO: 4347529 - DNA, 25 bp, Homo sapien
gcggtgctcgcagccgaggtgccgg

SEQ ID NO: 4347530 - DNA, 25 bp, Homo sapien
tcctgctcggtccagcaagaacctg

SEQ ID NO: 4347531 - DNA, 25 bp, Homo sapien
gtgccttcttgaggccgtgtgtacc

SEQ ID NO: 4347532 - DNA, 25 bp, Homo sapien
gaacctgcaggctgcaacaagtccc

SEQ ID NO: 4347533 - DNA, 25 bp, Homo sapien
tgtgtacccgccagcaattccaggc

SEQ ID NO: 4347534 - DNA, 25 bp, Homo sapien
gcttcgatgatgaaagtgccctggg

SEQ ID NO: 4347535 - DNA, 25 bp, Homo sapien
tttccaggcagagtagcgcttcgat

SEQ ID NO: 4347536 - DNA, 25 bp, Homo sapien
caaaaacatgattagggatgacaag

SEQ ID NO: 4347537 - DNA, 25 bp, Homo sapien
gacaagcttgcatgtttccaggcag

SEQ ID NO: 4347538 - DNA, 25 bp, Homo sapien
tcccccggatttatgccattctctt

SEQ ID NO: 4347539 - DNA, 25 bp, Homo sapien
cgtcccccggatttatgccattctc

SEQ ID NO: 4347540 - DNA, 25 bp, Homo sapien
tgcaagctccgtcccccggatttat

SEQ ID NO: 4347541 - DNA, 25 bp, Homo sapien
ctccgtcccccggatttatgccatt

SEQ ID NO: 4347542 - DNA, 25 bp, Homo sapien
gaggcctgagatggtcggtctgcgg

SEQ ID NO: 4347543 - DNA, 25 bp, Homo sapien
ttggagaagcccattacaccacagg

SEQ ID NO: 4347544 - DNA, 25 bp, Homo sapien
aagcccattacaccacaggaggcct

SEQ ID NO: 4347545 - DNA, 25 bp, Homo sapien
aacaggaactcttggcttggagaag

SEQ ID NO: 4347546 - DNA, 25 bp, Homo sapien
caaggatgcaagcttctacttggac

SEQ ID NO: 4347547 - DNA, 25 bp, Homo sapien
tgcaacctgagtggcaaaacactgg

SEQ ID NO: 4347548 - DNA, 25 bp, Homo sapien
ggagactcgattccatagactggga

SEQ ID NO: 4347549 - DNA, 25 bp, Homo sapien
acgctcggctggcaggattcctgct

SEQ ID NO: 4347550 - DNA, 25 bp, Homo sapien
ggtggcccgccagggtatcctgctt

SEQ ID NO: 4347551 - DNA, 25 bp, Homo sapien
tgctgtagttgccggtacccaggag

SEQ ID NO: 4347552 - DNA, 25 bp, Homo sapien
tccagagcttcacccggctgctgta

SEQ ID NO: 4347553 - DNA, 25 bp, Homo sapien
ttcctcaaggagagcctccatcccg

SEQ ID NO: 4347554 - DNA, 25 bp, Homo sapien
cccagtctgccggcccggcccctgg

SEQ ID NO: 4347555 - DNA, 25 bp, Homo sapien
tggggagagcaaggaggtggggaac

SEQ ID NO: 4347556 - DNA, 25 bp, Homo sapien
ccccagtctgccggcccggcccctg

SEQ ID NO: 4347557 - DNA, 25 bp, Homo sapien
ggctgggcttggcaggctggggaga

SEQ ID NO: 4347558 - DNA, 25 bp, Homo sapien
acaggatgtcatagtgctcagccag

SEQ ID NO: 4347559 - DNA, 25 bp, Homo sapien
cagacgtctcaatggcacacaggat

SEQ ID NO: 4347560 - DNA, 25 bp, Homo sapien
tgccgcatgatgagctccgtggcca

SEQ ID NO: 4347561 - DNA, 25 bp, Homo sapien
ccacgttgctcgagtccttggcaga

SEQ ID NO: 4347562 - DNA, 25 bp, Homo sapien
agttcaagatcagcctgggcaacat

SEQ ID NO: 4347563 - DNA, 25 bp, Homo sapien
ctgggcaacatagcaggactgcatc

SEQ ID NO: 4347564 - DNA, 25 bp, Homo sapien
gtaattccaactacttggaggttga

SEQ ID NO: 4347565 - DNA, 25 bp, Homo sapien
ggcaggaggattgcttgaggccagg

SEQ ID NO: 4347566 - DNA, 25 bp, Homo sapien
cacaatgttggagcccgcatacttc

SEQ ID NO: 4347567 - DNA, 25 bp, Homo sapien
tgcacaatgttggagcccgcatact

SEQ ID NO: 4347568 - DNA, 25 bp, Homo sapien
cagcagctgcacaatgttggagccc

SEQ ID NO: 4347569 - DNA, 25 bp, Homo sapien
gctgcacaatgttggagcccgcata

SEQ ID NO: 4347570 - DNA, 25 bp, Homo sapien
gatggccccattggcactgcggtag

SEQ ID NO: 4347571 - DNA, 25 bp, Homo sapien
gatgtcgtaggcaaggatggcccca

SEQ ID NO: 4347572 - DNA, 25 bp, Homo sapien
gaggcaccgacaggaaggagctcct

SEQ ID NO: 4347573 - DNA, 25 bp, Homo sapien
catcctcaatccagtgaggcaccga

SEQ ID NO: 4347574 - DNA, 25 bp, Homo sapien
gctaaatgaaagatgcagctctatc

SEQ ID NO: 4347575 - DNA, 25 bp, Homo sapien
tcagggtcaagaccactgcccatgg

SEQ ID NO: 4347576 - DNA, 25 bp, Homo sapien
aaacaaaagctaagcatgtgagccc

SEQ ID NO: 4347577 - DNA, 25 bp, Homo sapien
aagatgcagctctatctaagccttg

SEQ ID NO: 4347578 - DNA, 25 bp, Homo sapien
tgtagcgtcagagtttacactgaag

SEQ ID NO: 4347579 - DNA, 25 bp, Homo sapien
aacccaaagaaaactgtagcgtcag

SEQ ID NO: 4347580 - DNA, 25 bp, Homo sapien
aacatgagagtcctattcttattgg

SEQ ID NO: 4347581 - DNA, 25 bp, Homo sapien
tcctaactagcaaactgaagtttac

SEQ ID NO: 4347582 - DNA, 25 bp, Homo sapien
ggattctaagaaacctcgagaggca

SEQ ID NO: 4347583 - DNA, 25 bp, Homo sapien
tcttcagaaaatcagcacgacctag

SEQ ID NO: 4347584 - DNA, 25 bp, Homo sapien
tattttgcaattaggatggctgtcc

SEQ ID NO: 4347585 - DNA, 25 bp, Homo sapien
acttctttcttatctaacagtcctt

SEQ ID NO: 4347586 - DNA, 25 bp, Homo sapien
atctggcagcatccctagcgagcag

SEQ ID NO: 4347587 - DNA, 25 bp, Homo sapien
gagctgaatagaggggtacagttcc

SEQ ID NO: 4347588 - DNA, 25 bp, Homo sapien
gcagcatccctagcgagcagacagt

SEQ ID NO: 4347589 - DNA, 25 bp, Homo sapien
gaggggtacagttccataaggctga

SEQ ID NO: 4347590 - DNA, 25 bp, Homo sapien
gacttgaggccggtgtgcctagtga

SEQ ID NO: 4347591 - DNA, 25 bp, Homo sapien
acttgaggccggtgtgcctagtgat

SEQ ID NO: 4347592 - DNA, 25 bp, Homo sapien
ctctgcgctggacttgaggccggtg

SEQ ID NO: 4347593 - DNA, 25 bp, Homo sapien
cgctggacttgaggccggtgtgcct

SEQ ID NO: 4347594 - DNA, 25 bp, Homo sapien
ttttaaggatttagagccagctgag

SEQ ID NO: 4347595 - DNA, 25 bp, Homo sapien
tgttgtcccagataagagtgagtag

SEQ ID NO: 4347596 - DNA, 25 bp, Homo sapien
gaggagcttcagaatgttttaagga

SEQ ID NO: 4347597 - DNA, 25 bp, Homo sapien
gcaaaaacgagtttacataacaggc

SEQ ID NO: 4347598 - DNA, 25 bp, Homo sapien
agcttgaacaggaaatcgtactgct

SEQ ID NO: 4347599 - DNA, 25 bp, Homo sapien
tgaacaggaaatcgtactgctcgtc

SEQ ID NO: 4347600 - DNA, 25 bp, Homo sapien
ggaaatcgtactgctcgtccgggtc

SEQ ID NO: 4347601 - DNA, 25 bp, Homo sapien
caggaaatcgtactgctcgtccggg

SEQ ID NO: 4347602 - DNA, 25 bp, Homo sapien
ggcctgagctcacgcaagccgcggg

SEQ ID NO: 4347603 - DNA, 25 bp, Homo sapien
tggctacgtggagccgccgcaacac

SEQ ID NO: 4347604 - DNA, 25 bp, Homo sapien
tctggacgctgggaccggcctgagc

SEQ ID NO: 4347605 - DNA, 25 bp, Homo sapien
gaagaagccgaagggccggcgctct

SEQ ID NO: 4347606 - DNA, 25 bp, Homo sapien
gaaagtttgaactccactcccatgg

SEQ ID NO: 4347607 - DNA, 25 bp, Homo sapien
taatgcacctgtggacaaagcagac

SEQ ID NO: 4347608 - DNA, 25 bp, Homo sapien
tagacagcttccttgtggcactcca

SEQ ID NO: 4347609 - DNA, 25 bp, Homo sapien
taatgaatggctactacaggcgggc

SEQ ID NO: 4347610 - DNA, 25 bp, Homo sapien
tgtggaattctaatccctggccagt

SEQ ID NO: 4347611 - DNA, 25 bp, Homo sapien
gcacagacaagtagcaagggcctct

SEQ ID NO: 4347612 - DNA, 25 bp, Homo sapien
ccaagaggctcagacctgggtcagt

SEQ ID NO: 4347613 - DNA, 25 bp, Homo sapien
tctgccaggaacacctagaggatgt

SEQ ID NO: 4347614 - DNA, 25 bp, Homo sapien
aagagttcctcctattcccaaacag

SEQ ID NO: 4347615 - DNA, 25 bp, Homo sapien
gacactcccatgaccctgcagaggg

SEQ ID NO: 4347616 - DNA, 25 bp, Homo sapien
caggcctcccgctgtgtgatgggct

SEQ ID NO: 4347617 - DNA, 25 bp, Homo sapien
ggccctgaccctgagttcccagaca

SEQ ID NO: 4347618 - DNA, 25 bp, Homo sapien
gactcagctcgtgtccactgtgtgc

SEQ ID NO: 4347619 - DNA, 25 bp, Homo sapien
ctggagagctaagccccagttcaga

SEQ ID NO: 4347620 - DNA, 25 bp, Homo sapien
catggttccccactggagagctaag

SEQ ID NO: 4347621 - DNA, 25 bp, Homo sapien
tgtgtgctttcagcaggccacggtg

SEQ ID NO: 4347622 - DNA, 25 bp, Homo sapien
tagactcctgggatctggtcctgtc

SEQ ID NO: 4347623 - DNA, 25 bp, Homo sapien
tgactggtcacatcctaatgccact

SEQ ID NO: 4347624 - DNA, 25 bp, Homo sapien
cctgcaggaaggcagtgccccttag

SEQ ID NO: 4347625 - DNA, 25 bp, Homo sapien
tgccactgtcacctcagagccgttg

SEQ ID NO: 4347626 - DNA, 25 bp, Homo sapien
tgcagaacaggttataaaacaggaa

SEQ ID NO: 4347627 - DNA, 25 bp, Homo sapien
cacagagggacctggtcattgactt

SEQ ID NO: 4347628 - DNA, 25 bp, Homo sapien
ccaggcaggagcgagtggagcaggt

SEQ ID NO: 4347629 - DNA, 25 bp, Homo sapien
gacttgtgggttgcgtgcatctttt

SEQ ID NO: 4347630 - DNA, 25 bp, Homo sapien
tcaagagatgtgtcttttagaaaat

SEQ ID NO: 4347631 - DNA, 25 bp, Homo sapien
taaaattatactttggtctgcaaaa

SEQ ID NO: 4347632 - DNA, 25 bp, Homo sapien
atgtttgccactaattgattcttct

SEQ ID NO: 4347633 - DNA, 25 bp, Homo sapien
ttttcaagagatgtgtcttttagaa

SEQ ID NO: 4347634 - DNA, 25 bp, Homo sapien
cctaccctccggtcaacatgagaca

SEQ ID NO: 4347635 - DNA, 25 bp, Homo sapien
gccagttcgcaacctgttgtataca

SEQ ID NO: 4347636 - DNA, 25 bp, Homo sapien
cctgttgtatacactccacaataaa

SEQ ID NO: 4347637 - DNA, 25 bp, Homo sapien
caggaagaccagggacagaccccta

SEQ ID NO: 4347638 - DNA, 25 bp, Homo sapien
tcctgaggtaccactgggggatgga

SEQ ID NO: 4347639 - DNA, 25 bp, Homo sapien
ctgaggtaccactgggggatggaag

SEQ ID NO: 4347640 - DNA, 25 bp, Homo sapien
ggtcctgaggtaccactgggggatg

SEQ ID NO: 4347641 - DNA, 25 bp, Homo sapien
gtcctgaggtaccactgggggatgg

SEQ ID NO: 4347642 - DNA, 25 bp, Homo sapien
tgcagggtctcgcttgcatacttct

SEQ ID NO: 4347643 - DNA, 25 bp, Homo sapien
gcttgcatacttctggaggagttcc

SEQ ID NO: 4347644 - DNA, 25 bp, Homo sapien
gggtctcgcttgcatacttctggag

SEQ ID NO: 4347645 - DNA, 25 bp, Homo sapien
tttcttccttcgcaccagtgcctcc

SEQ ID NO: 4347646 - DNA, 25 bp, Homo sapien
ccggcgcccaggcagctcttagctg

SEQ ID NO: 4347647 - DNA, 25 bp, Homo sapien
aggacaacgaaaacccactacagtg

SEQ ID NO: 4347648 - DNA, 25 bp, Homo sapien
tgatgggtaggaaggacaacgaaaa

SEQ ID NO: 4347649 - DNA, 25 bp, Homo sapien
gacaggtgtcatgtggtcaggaccc

SEQ ID NO: 4347650 - DNA, 25 bp, Homo sapien
ctgcgagggaacagggacgtgagca

SEQ ID NO: 4347651 - DNA, 25 bp, Homo sapien
acagggacgtgagcaatgaacttct

SEQ ID NO: 4347652 - DNA, 25 bp, Homo sapien
cgtgagcaatgaacttctgctggct

SEQ ID NO: 4347653 - DNA, 25 bp, Homo sapien
aatgaacttctgctggctgtcgtcc

SEQ ID NO: 4347654 - DNA, 25 bp, Homo sapien
agatccacctagacctgtgcaggca

SEQ ID NO: 4347655 - DNA, 25 bp, Homo sapien
gtgcaggcagcaaggactccaaata

SEQ ID NO: 4347656 - DNA, 25 bp, Homo sapien
actccaaatatagggccccgcagaa

SEQ ID NO: 4347657 - DNA, 25 bp, Homo sapien
agtccagcaaatcagatccacctag

SEQ ID NO: 4347658 - DNA, 25 bp, Homo sapien
atggtggctataataaaaagtaata

SEQ ID NO: 4347659 - DNA, 25 bp, Homo sapien
tggtggctataataaaaagtaataa

SEQ ID NO: 4347660 - DNA, 25 bp, Homo sapien
tgcatagatgttgatctcttcctcc

SEQ ID NO: 4347661 - DNA, 25 bp, Homo sapien
ctcctcttgccagccgagcctctct

SEQ ID NO: 4347662 - DNA, 25 bp, Homo sapien
ccttttctcctcttgccagccgagc

SEQ ID NO: 4347663 - DNA, 25 bp, Homo sapien
tgctttccacttttccactaactcg

SEQ ID NO: 4347664 - DNA, 25 bp, Homo sapien
gttccaaaggcacaataacaccatc

SEQ ID NO: 4347665 - DNA, 25 bp, Homo sapien
tcaaaatcgattgccttcatgagct

SEQ ID NO: 4347666 - DNA, 25 bp, Homo sapien
taggtaaccatagtactcaaaatcg

SEQ ID NO: 4347667 - DNA, 25 bp, Homo sapien
atcatcttcatctaggtaaccatag

SEQ ID NO: 4347668 - DNA, 25 bp, Homo sapien
agctctctaacaccaggcaaatctt

SEQ ID NO: 4347669 - DNA, 25 bp, Homo sapien
tgctccaaagtacttgtaacctcgg

SEQ ID NO: 4347670 - DNA, 25 bp, Homo sapien
tctttttcaaacagctctctaacac

SEQ ID NO: 4347671 - DNA, 25 bp, Homo sapien
ctgctccaaagtacttgtaacctcg

SEQ ID NO: 4347672 - DNA, 25 bp, Homo sapien
agggctcactctggcaggacatata

SEQ ID NO: 4347673 - DNA, 25 bp, Homo sapien
ttttctaggtggattaatgagctgc

SEQ ID NO: 4347674 - DNA, 25 bp, Homo sapien
tctccaccacacaactgctgaagag

SEQ ID NO: 4347675 - DNA, 25 bp, Homo sapien
gaagagatcaggcaagggctcactc

SEQ ID NO: 4347676 - DNA, 25 bp, Homo sapien
cgaattcgaaattcacctaaaccag

SEQ ID NO: 4347677 - DNA, 25 bp, Homo sapien
ggtcacgaattcgaaattcacctaa

SEQ ID NO: 4347678 - DNA, 25 bp, Homo sapien
cagctcctttatccggacctcccag

SEQ ID NO: 4347679 - DNA, 25 bp, Homo sapien
catcattcaggtcacgaattcgaaa

SEQ ID NO: 4347680 - DNA, 25 bp, Homo sapien
ctgaatctgagccacttttttagag

SEQ ID NO: 4347681 - DNA, 25 bp, Homo sapien
gccacttttttagagatctctccaa

SEQ ID NO: 4347682 - DNA, 25 bp, Homo sapien
tgagccacttttttagagatctctc

SEQ ID NO: 4347683 - DNA, 25 bp, Homo sapien
cacttttttagagatctctccaatg

SEQ ID NO: 4347684 - DNA, 25 bp, Homo sapien
tcagctttaggcagttcagtacatt

SEQ ID NO: 4347685 - DNA, 25 bp, Homo sapien
tccacttctcagctttaggcagttc

SEQ ID NO: 4347686 - DNA, 25 bp, Homo sapien
ttcagtacattctgaggccagaaag

SEQ ID NO: 4347687 - DNA, 25 bp, Homo sapien
cagttcagtacattctgaggccaga

SEQ ID NO: 4347688 - DNA, 25 bp, Homo sapien
ctggcgaaatcttgctaaggccgtc

SEQ ID NO: 4347689 - DNA, 25 bp, Homo sapien
gctgagcctggcgaaatcttgctaa

SEQ ID NO: 4347690 - DNA, 25 bp, Homo sapien
tgagcctggcgaaatcttgctaagg

SEQ ID NO: 4347691 - DNA, 25 bp, Homo sapien
ccagctgagcctggcgaaatcttgc

SEQ ID NO: 4347692 - DNA, 25 bp, Homo sapien
gtatctggctaacttgcattattct

SEQ ID NO: 4347693 - DNA, 25 bp, Homo sapien
ccttgtatctggctaacttgcatta

SEQ ID NO: 4347694 - DNA, 25 bp, Homo sapien
caccttgtatctggctaacttgcat

SEQ ID NO: 4347695 - DNA, 25 bp, Homo sapien
aacaccttgtatctggctaacttgc

SEQ ID NO: 4347696 - DNA, 25 bp, Homo sapien
gaagcggacgctcacagaaactgaa

SEQ ID NO: 4347697 - DNA, 25 bp, Homo sapien
tgaatgagagtactggaagtgcccg

SEQ ID NO: 4347698 - DNA, 25 bp, Homo sapien
gacactgatgttttgccggaaacgt

SEQ ID NO: 4347699 - DNA, 25 bp, Homo sapien
ctgaatgggagtaccggaagtgccc

SEQ ID NO: 4347700 - DNA, 25 bp, Homo sapien
cactggagagcaggtattgcaggca

SEQ ID NO: 4347701 - DNA, 25 bp, Homo sapien
caaaagggatttagcaggtgcagtt

SEQ ID NO: 4347702 - DNA, 25 bp, Homo sapien
catgtaagtgcctcaaatgttgtcc

SEQ ID NO: 4347703 - DNA, 25 bp, Homo sapien
cctaatctctgaaaccgttggtacg

SEQ ID NO: 4347704 - DNA, 25 bp, Homo sapien
gctgagaatcaaggcgtgtgacacc

SEQ ID NO: 4347705 - DNA, 25 bp, Homo sapien
ccttttagttagccggatttctctg

SEQ ID NO: 4347706 - DNA, 25 bp, Homo sapien
agtagctgagaatcaaggcgtgtga

SEQ ID NO: 4347707 - DNA, 25 bp, Homo sapien
ttagttagccggatttctctgtaaa

SEQ ID NO: 4347708 - DNA, 25 bp, Homo sapien
tataccatgaactgacagaaccctg

SEQ ID NO: 4347709 - DNA, 25 bp, Homo sapien
tgagacaccaccattttaacactga

SEQ ID NO: 4347710 - DNA, 25 bp, Homo sapien
gaataatggttgaagttccaggctc

SEQ ID NO: 4347711 - DNA, 25 bp, Homo sapien
ttgacaaggttggaatgtgcacagc

SEQ ID NO: 4347712 - DNA, 25 bp, Homo sapien
aaaactgttcagaatcggccagaca

SEQ ID NO: 4347713 - DNA, 25 bp, Homo sapien
aactgttcagaatcggccagacacg

SEQ ID NO: 4347714 - DNA, 25 bp, Homo sapien
aaactgttcagaatcggccagacac

SEQ ID NO: 4347715 - DNA, 25 bp, Homo sapien
tttgcaaaagtatctaaatcccata

SEQ ID NO: 4347716 - DNA, 25 bp, Homo sapien
aaagtatctaaatcccatacatcct

SEQ ID NO: 4347717 - DNA, 25 bp, Homo sapien
aaaaaacctgttcagactgaacaca

SEQ ID NO: 4347718 - DNA, 25 bp, Homo sapien
aacctgttcagactgaacacagaac

SEQ ID NO: 4347719 - DNA, 25 bp, Homo sapien
cattaatgaaaatttgaaacaaaca

SEQ ID NO: 4347720 - DNA, 25 bp, Homo sapien
tccacattcccctctttaatatggt

SEQ ID NO: 4347721 - DNA, 25 bp, Homo sapien
cattcccctctttaatatggtattt

SEQ ID NO: 4347722 - DNA, 25 bp, Homo sapien
ctctttaatatggtattttgcacta

SEQ ID NO: 4347723 - DNA, 25 bp, Homo sapien
tctgagcattgatgtttactctggg

SEQ ID NO: 4347724 - DNA, 25 bp, Homo sapien
agctccaaattatgctaactctgag

SEQ ID NO: 4347725 - DNA, 25 bp, Homo sapien
ttctaggacttcagttgctctttcc

SEQ ID NO: 4347726 - DNA, 25 bp, Homo sapien
tatgtgtccaacatcaacactgtga

SEQ ID NO: 4347727 - DNA, 25 bp, Homo sapien
tccctattcaccagtggcacggaaa

SEQ ID NO: 4347728 - DNA, 25 bp, Homo sapien
tacacggcaagtaaagctcactggc

SEQ ID NO: 4347729 - DNA, 25 bp, Homo sapien
caaggaacccaggacgggcttactg

SEQ ID NO: 4347730 - DNA, 25 bp, Homo sapien
tcaactgtatgttctatgtagggcc

SEQ ID NO: 4347731 - DNA, 25 bp, Homo sapien
taggctgtagcctcaattgtgcatt

SEQ ID NO: 4347732 - DNA, 25 bp, Homo sapien
tgcattcccgtgcaaggtgccctga

SEQ ID NO: 4347733 - DNA, 25 bp, Homo sapien
taacagttgacttcacttgtcttgc

SEQ ID NO: 4347734 - DNA, 25 bp, Homo sapien
tgactcgccacagcggtaacagttg

SEQ ID NO: 4347735 - DNA, 25 bp, Homo sapien
gaaaattggtcttatctggtcacag

SEQ ID NO: 4347736 - DNA, 25 bp, Homo sapien
taccataagccacaggatatcaggg

SEQ ID NO: 4347737 - DNA, 25 bp, Homo sapien
gatatcagggcagaatacagaatta

SEQ ID NO: 4347738 - DNA, 25 bp, Homo sapien
cccctaaggtttcacagatatgtac

SEQ ID NO: 4347739 - DNA, 25 bp, Homo sapien
gaatgtgtccgaattctccacaaga

SEQ ID NO: 4347740 - DNA, 25 bp, Homo sapien
tgccacagttgtagcagcattgctc

SEQ ID NO: 4347741 - DNA, 25 bp, Homo sapien
tctgcatggtcgcagtcacgagcca

SEQ ID NO: 4347742 - DNA, 25 bp, Homo sapien
ccacctctaccgcagttatagcagg

SEQ ID NO: 4347743 - DNA, 25 bp, Homo sapien
caataaggaaaagaaacaggccaag

SEQ ID NO: 4347744 - DNA, 25 bp, Homo sapien
cttcaacaataaggaaaagaaacag

SEQ ID NO: 4347745 - DNA, 25 bp, Homo sapien
tcaacaataaggaaaagaaacaggc

SEQ ID NO: 4347746 - DNA, 25 bp, Homo sapien
ctctagaggggtatgaaaaggaagt

SEQ ID NO: 4347747 - DNA, 25 bp, Homo sapien
tctccaagctctagaggggtatgaa

SEQ ID NO: 4347748 - DNA, 25 bp, Homo sapien
tatacacagttgcatgtgctcacct

SEQ ID NO: 4347749 - DNA, 25 bp, Homo sapien
aatgctatacacagttgcatgtgct

SEQ ID NO: 4347750 - DNA, 25 bp, Homo sapien
gaagatcacaatccttggcaagatg

SEQ ID NO: 4347751 - DNA, 25 bp, Homo sapien
gatgaccagactcaccacagcgata

SEQ ID NO: 4347752 - DNA, 25 bp, Homo sapien
catcctcctgaagatcacaatcctt

SEQ ID NO: 4347753 - DNA, 25 bp, Homo sapien
agactcaccacagcgataacaaatg

SEQ ID NO: 4347754 - DNA, 25 bp, Homo sapien
caaagaattcggctagtcagaccag

SEQ ID NO: 4347755 - DNA, 25 bp, Homo sapien
cagtcttgatactaacaaatactga

SEQ ID NO: 4347756 - DNA, 25 bp, Homo sapien
gcaaaaacaaagaattcggctagtc

SEQ ID NO: 4347757 - DNA, 25 bp, Homo sapien
tcggctagtcagaccagtcttgata

SEQ ID NO: 4347758 - DNA, 25 bp, Homo sapien
gatcgtccacacttgaagcactcat

SEQ ID NO: 4347759 - DNA, 25 bp, Homo sapien
ccagtggccagatcgtccacacttg

SEQ ID NO: 4347760 - DNA, 25 bp, Homo sapien
tctgccacggcttctcattccacga

SEQ ID NO: 4347761 - DNA, 25 bp, Homo sapien
ctccaccagtaggacattcccgggc

SEQ ID NO: 4347762 - DNA, 25 bp, Homo sapien
cgcagtccgaaaaatggcaaggttc

SEQ ID NO: 4347763 - DNA, 25 bp, Homo sapien
tagctaacctaaccacagtgccaaa

SEQ ID NO: 4347764 - DNA, 25 bp, Homo sapien
tgccaaagacccaaaacgcagtccg

SEQ ID NO: 4347765 - DNA, 25 bp, Homo sapien
taactcttgccacttgcctatgaac

SEQ ID NO: 4347766 - DNA, 25 bp, Homo sapien
gtggcgccgaaagacccgcatgctc

SEQ ID NO: 4347767 - DNA, 25 bp, Homo sapien
gaaaggacagaagtgtcgtccgaca

SEQ ID NO: 4347768 - DNA, 25 bp, Homo sapien
gcgacccagctttccaggacgaaga

SEQ ID NO: 4347769 - DNA, 25 bp, Homo sapien
acagcggtgcgccagaaacccgggt

SEQ ID NO: 4347770 - DNA, 25 bp, Homo sapien
tattttgagggtccttgcctgcgcc

SEQ ID NO: 4347771 - DNA, 25 bp, Homo sapien
gcggcggagactcggacgcaggcct

SEQ ID NO: 4347772 - DNA, 25 bp, Homo sapien
tgcctgcgccacacgcgggtctgca

SEQ ID NO: 4347773 - DNA, 25 bp, Homo sapien
gaagacggctcgcaaggtagaggct

SEQ ID NO: 4347774 - DNA, 25 bp, Homo sapien
cagaggccgtagtggctttccagca

SEQ ID NO: 4347775 - DNA, 25 bp, Homo sapien
tgggactctgcgctaaggacttctt

SEQ ID NO: 4347776 - DNA, 25 bp, Homo sapien
cagcatcctggcgtttcacatctat

SEQ ID NO: 4347777 - DNA, 25 bp, Homo sapien
tctatgagggaggaattgggactct

SEQ ID NO: 4347778 - DNA, 25 bp, Homo sapien
tgcagaaggatgagggagctcctct

SEQ ID NO: 4347779 - DNA, 25 bp, Homo sapien
ttttctgcagaaggatgagggagct

SEQ ID NO: 4347780 - DNA, 25 bp, Homo sapien
tctgcagaaggatgagggagctcct

SEQ ID NO: 4347781 - DNA, 25 bp, Homo sapien
tttctgcagaaggatgagggagctc

SEQ ID NO: 4347782 - DNA, 25 bp, Homo sapien
ggtgtcctgcataggtccccaggaa

SEQ ID NO: 4347783 - DNA, 25 bp, Homo sapien
cttagcctcagggtgtcctgcatag

SEQ ID NO: 4347784 - DNA, 25 bp, Homo sapien
tcagggtgtcctgcataggtcccca

SEQ ID NO: 4347785 - DNA, 25 bp, Homo sapien
gcataggtccccaggaagataaacc

SEQ ID NO: 4347786 - DNA, 25 bp, Homo sapien
tcagttcagcgaatcagcataggcg

SEQ ID NO: 4347787 - DNA, 25 bp, Homo sapien
ccaccaatgtttgagggcgaagtgc

SEQ ID NO: 4347788 - DNA, 25 bp, Homo sapien
gatcgatatgtctcccaaggcagtc

SEQ ID NO: 4347789 - DNA, 25 bp, Homo sapien
gatagtcgataaatggaggctccaa

SEQ ID NO: 4347790 - DNA, 25 bp, Homo sapien
ggccaagcgtccttacagccagtga

SEQ ID NO: 4347791 - DNA, 25 bp, Homo sapien
tcaaagcatgccttacccagctggg

SEQ ID NO: 4347792 - DNA, 25 bp, Homo sapien
aagagtcagatgttccccagtggtc

SEQ ID NO: 4347793 - DNA, 25 bp, Homo sapien
ttttgccatgagtaggagcccctag

SEQ ID NO: 4347794 - DNA, 25 bp, Homo sapien
accagtttctagcagtgtcgggcca

SEQ ID NO: 4347795 - DNA, 25 bp, Homo sapien
gaaactatccttaccacaggtggga

SEQ ID NO: 4347796 - DNA, 25 bp, Homo sapien
cctgagtttgagtgcttgccgtagc

SEQ ID NO: 4347797 - DNA, 25 bp, Homo sapien
gatacttggaagtcgtctgaatcct

SEQ ID NO: 4347798 - DNA, 25 bp, Homo sapien
ggttggcccgtagttgtacactcag

SEQ ID NO: 4347799 - DNA, 25 bp, Homo sapien
ctaagggaggcattcacaaaagctg

SEQ ID NO: 4347800 - DNA, 25 bp, Homo sapien
ctgctaatgggagacagcagcgcca

SEQ ID NO: 4347801 - DNA, 25 bp, Homo sapien
gaagcctcggccctgtaactgctaa

SEQ ID NO: 4347802 - DNA, 25 bp, Homo sapien
ccagtctatggccaggaggtcctgc

SEQ ID NO: 4347803 - DNA, 25 bp, Homo sapien
gattcagatttggacaactgggaca

SEQ ID NO: 4347804 - DNA, 25 bp, Homo sapien
cagagggaatggagtggcaactcac

SEQ ID NO: 4347805 - DNA, 25 bp, Homo sapien
tgtgtcctgatgatagtacctctgc

SEQ ID NO: 4347806 - DNA, 25 bp, Homo sapien
tctctggaggccaagtttaggtccc

SEQ ID NO: 4347807 - DNA, 25 bp, Homo sapien
tctaaccctcgctggagtcagaatg

SEQ ID NO: 4347808 - DNA, 25 bp, Homo sapien
gcttaaccaataggctcagagacag

SEQ ID NO: 4347809 - DNA, 25 bp, Homo sapien
actaagtttacaggccagtctggtg

SEQ ID NO: 4347810 - DNA, 25 bp, Homo sapien
aaaaggcccatggaatgaagggaag

SEQ ID NO: 4347811 - DNA, 25 bp, Homo sapien
gagctgggaaaggatgcgcggcctc

SEQ ID NO: 4347812 - DNA, 25 bp, Homo sapien
ctgggaaaggatgcgcggcctccgc

SEQ ID NO: 4347813 - DNA, 25 bp, Homo sapien
cgattgtttgtcgcgcacccaaagg

SEQ ID NO: 4347814 - DNA, 25 bp, Homo sapien
gtttgtcgcgcacccaaaggcaagg

SEQ ID NO: 4347815 - DNA, 25 bp, Homo sapien
ccgcccggtgggcaggcgcggcctc

SEQ ID NO: 4347816 - DNA, 25 bp, Homo sapien
cccgcccggtgggcaggcgcggcct

SEQ ID NO: 4347817 - DNA, 25 bp, Homo sapien
cgcccggtgggcaggcgcggcctcg

SEQ ID NO: 4347818 - DNA, 25 bp, Homo sapien
gggccagtaaccatgacgacggccg

SEQ ID NO: 4347819 - DNA, 25 bp, Homo sapien
gccgagagccaatagaggcgtcgcc

SEQ ID NO: 4347820 - DNA, 25 bp, Homo sapien
tgacgacggccgttgccaaggccga

SEQ ID NO: 4347821 - DNA, 25 bp, Homo sapien
cggccgttgccaaggccgagagcca

SEQ ID NO: 4347822 - DNA, 25 bp, Homo sapien
ccggccggcgtgagccgtacaaaat

SEQ ID NO: 4347823 - DNA, 25 bp, Homo sapien
gagccgtacaaaatctacgtcactt

SEQ ID NO: 4347824 - DNA, 25 bp, Homo sapien
gcaaacaacgaaaaacgctacatcg

SEQ ID NO: 4347825 - DNA, 25 bp, Homo sapien
caacgaaaaacgctacatcgttggg

SEQ ID NO: 4347826 - DNA, 25 bp, Homo sapien
ttggggacgctgggcttggccgcct

SEQ ID NO: 4347827 - DNA, 25 bp, Homo sapien
ttgcggcccttgggcactttgggga

SEQ ID NO: 4347828 - DNA, 25 bp, Homo sapien
ccttgggcactttggggacgctggg

SEQ ID NO: 4347829 - DNA, 25 bp, Homo sapien
gggacgctgggcttggccgccttct

SEQ ID NO: 4347830 - DNA, 25 bp, Homo sapien
tttgtccttcttggcgccagcgccc

SEQ ID NO: 4347831 - DNA, 25 bp, Homo sapien
ggcgccagcgcccttcttgtgcgag

SEQ ID NO: 4347832 - DNA, 25 bp, Homo sapien
tgtgcgagcgctgctccggcttctg

SEQ ID NO: 4347833 - DNA, 25 bp, Homo sapien
gcgcccttcttgtgcgagcgctgct

SEQ ID NO: 4347834 - DNA, 25 bp, Homo sapien
gaaccgttggcgccggtgcccttca

SEQ ID NO: 4347835 - DNA, 25 bp, Homo sapien
gagcttgaaggaaccgttggcgccg

SEQ ID NO: 4347836 - DNA, 25 bp, Homo sapien
ccttcttcgctttgtgcgcggtggg

SEQ ID NO: 4347837 - DNA, 25 bp, Homo sapien
cccggggctgccttcttcgctttgt

SEQ ID NO: 4347838 - DNA, 25 bp, Homo sapien
tcgagtacttgaggtaggtgcgccc

SEQ ID NO: 4347839 - DNA, 25 bp, Homo sapien
tgcaccagcgccttgatcgagtact

SEQ ID NO: 4347840 - DNA, 25 bp, Homo sapien
tgctggtcgaaccacggaaccttct

SEQ ID NO: 4347841 - DNA, 25 bp, Homo sapien
cggtgtagatcttggccagcgacga

SEQ ID NO: 4347842 - DNA, 25 bp, Homo sapien
gtagcaagaggattggtggcgggcg

SEQ ID NO: 4347843 - DNA, 25 bp, Homo sapien
tagcaagaggattggtggcgggcgg

SEQ ID NO: 4347844 - DNA, 25 bp, Homo sapien
agcaagaggattggtggcgggcggc

SEQ ID NO: 4347845 - DNA, 25 bp, Homo sapien
ggtagcaagaggattggtggcgggc

SEQ ID NO: 4347846 - DNA, 25 bp, Homo sapien
tgagaacaacaacagcctggtccgg

SEQ ID NO: 4347847 - DNA, 25 bp, Homo sapien
agcgaagagaaatcccgccgaacgc

SEQ ID NO: 4347848 - DNA, 25 bp, Homo sapien
ttttatagcttcatggcggaccacg

SEQ ID NO: 4347849 - DNA, 25 bp, Homo sapien
caacttgtgcttcttggagcccctt

SEQ ID NO: 4347850 - DNA, 25 bp, Homo sapien
gaggaaggcgggacccaggtgtggc

SEQ ID NO: 4347851 - DNA, 25 bp, Homo sapien
cacggaggaaggcgggacccaggtg

SEQ ID NO: 4347852 - DNA, 25 bp, Homo sapien
cggaggaaggcgggacccaggtgtg

SEQ ID NO: 4347853 - DNA, 25 bp, Homo sapien
cagccacggtgccccgggggacctg

SEQ ID NO: 4347854 - DNA, 25 bp, Homo sapien
ctcgcagccacggtgccccggggga

SEQ ID NO: 4347855 - DNA, 25 bp, Homo sapien
aggctcgcagccacggtgccccggg

SEQ ID NO: 4347856 - DNA, 25 bp, Homo sapien
tcgcagccacggtgccccgggggac

SEQ ID NO: 4347857 - DNA, 25 bp, Homo sapien
ctcatgtagctttattgtgtactga

SEQ ID NO: 4347858 - DNA, 25 bp, Homo sapien
gaatgcacccagaagtgggggtctc

SEQ ID NO: 4347859 - DNA, 25 bp, Homo sapien
ggaaacaccagaggaatgcacccag

SEQ ID NO: 4347860 - DNA, 25 bp, Homo sapien
gggtctcatgtagctttattgtgta

SEQ ID NO: 4347861 - DNA, 25 bp, Homo sapien
ccatggaaacgtcaagatgttggga

SEQ ID NO: 4347862 - DNA, 25 bp, Homo sapien
cacccatagtgtgtggacccctcta

SEQ ID NO: 4347863 - DNA, 25 bp, Homo sapien
acacaggcacccatagtgtgtggac

SEQ ID NO: 4347864 - DNA, 25 bp, Homo sapien
tggaaacgtcaagatgttgggatac

SEQ ID NO: 4347865 - DNA, 25 bp, Homo sapien
gatggtatgacccattctgggaggc

SEQ ID NO: 4347866 - DNA, 25 bp, Homo sapien
gggaggccgagagcacctcaaagaa

SEQ ID NO: 4347867 - DNA, 25 bp, Homo sapien
tctttagtgccctgacgtgatggta

SEQ ID NO: 4347868 - DNA, 25 bp, Homo sapien
tgagggccgcgtcaatggccatctg

SEQ ID NO: 4347869 - DNA, 25 bp, Homo sapien
ccccagccaggacctgaacaggcac

SEQ ID NO: 4347870 - DNA, 25 bp, Homo sapien
ctcatccccccagccaggacctgaa

SEQ ID NO: 4347871 - DNA, 25 bp, Homo sapien
tccccccagccaggacctgaacagg

SEQ ID NO: 4347872 - DNA, 25 bp, Homo sapien
agccaggacctgaacaggcactgac

SEQ ID NO: 4347873 - DNA, 25 bp, Homo sapien
cccacctatcaccagggtgaatggt

SEQ ID NO: 4347874 - DNA, 25 bp, Homo sapien
catgcaagaccagccgctgagtcca

SEQ ID NO: 4347875 - DNA, 25 bp, Homo sapien
caagaccagccgctgagtccacaca

SEQ ID NO: 4347876 - DNA, 25 bp, Homo sapien
aagaccagccgctgagtccacacag

SEQ ID NO: 4347877 - DNA, 25 bp, Homo sapien
tgacatgcaagaccagccgctgagt

SEQ ID NO: 4347878 - DNA, 25 bp, Homo sapien
gttatcattcggctcaggtgcagag

SEQ ID NO: 4347879 - DNA, 25 bp, Homo sapien
gatttctgttatcattcggctcagg

SEQ ID NO: 4347880 - DNA, 25 bp, Homo sapien
tctgggatttctgttatcattcggc

SEQ ID NO: 4347881 - DNA, 25 bp, Homo sapien
tcattcggctcaggtgcagagctgc

SEQ ID NO: 4347882 - DNA, 25 bp, Homo sapien
cgaggacagaacatgaaggttctgc

SEQ ID NO: 4347883 - DNA, 25 bp, Homo sapien
agaaacctggctgccctttaactgg

SEQ ID NO: 4347884 - DNA, 25 bp, Homo sapien
actggtcccccagttacgaggacag

SEQ ID NO: 4347885 - DNA, 25 bp, Homo sapien
ccccagttacgaggacagaacatga

SEQ ID NO: 4347886 - DNA, 25 bp, Homo sapien
ctcactgctgcgtgcaccacatggt

SEQ ID NO: 4347887 - DNA, 25 bp, Homo sapien
cacaaacatcagcaagaagggtatt

SEQ ID NO: 4347888 - DNA, 25 bp, Homo sapien
cactgctgcgtgcaccacatggtgt

SEQ ID NO: 4347889 - DNA, 25 bp, Homo sapien
gaagggtattccagagagtgactca

SEQ ID NO: 4347890 - DNA, 25 bp, Homo sapien
ggctggggacctgccattttatgag

SEQ ID NO: 4347891 - DNA, 25 bp, Homo sapien
catcaatgtttggagccttggcatc

SEQ ID NO: 4347892 - DNA, 25 bp, Homo sapien
catggatgggtaccaatgacctgcc

SEQ ID NO: 4347893 - DNA, 25 bp, Homo sapien
catcatcgtatgcaaaatggtggct

SEQ ID NO: 4347894 - DNA, 25 bp, Homo sapien
accctgtctgcccctcgggggccat

SEQ ID NO: 4347895 - DNA, 25 bp, Homo sapien
ttgcaccctgtctgcccctcggggg

SEQ ID NO: 4347896 - DNA, 25 bp, Homo sapien
gcaccctgtctgcccctcgggggcc

SEQ ID NO: 4347897 - DNA, 25 bp, Homo sapien
ccttgcaccctgtctgcccctcggg

SEQ ID NO: 4347898 - DNA, 25 bp, Homo sapien
agcgagccaatttgtcccatattca

SEQ ID NO: 4347899 - DNA, 25 bp, Homo sapien
gctgtcggagaacggccagaagtca

SEQ ID NO: 4347900 - DNA, 25 bp, Homo sapien
tcagctgtcggagaacggccagaag

SEQ ID NO: 4347901 - DNA, 25 bp, Homo sapien
cactggagcaggctcacagcgagcc

SEQ ID NO: 4347902 - DNA, 25 bp, Homo sapien
gtttccccttttgataacagcggca

SEQ ID NO: 4347903 - DNA, 25 bp, Homo sapien
cttttgataacagcggcacaaagcg

SEQ ID NO: 4347904 - DNA, 25 bp, Homo sapien
tccccttttgataacagcggcacaa

SEQ ID NO: 4347905 - DNA, 25 bp, Homo sapien
ataacagcggcacaaagcggtcccc

SEQ ID NO: 4347906 - DNA, 25 bp, Homo sapien
ggagggttgacggcaaaacacagcc

SEQ ID NO: 4347907 - DNA, 25 bp, Homo sapien
tttgaccagccagataagattctcc

SEQ ID NO: 4347908 - DNA, 25 bp, Homo sapien
aacatgcgatgaccctgcccattac

SEQ ID NO: 4347909 - DNA, 25 bp, Homo sapien
gccttgaacatgcgatgaccctgcc

SEQ ID NO: 4347910 - DNA, 25 bp, Homo sapien
ggagtttgaccagccagataagatt

SEQ ID NO: 4347911 - DNA, 25 bp, Homo sapien
ctgcctgatgtgtctctggtctctt

SEQ ID NO: 4347912 - DNA, 25 bp, Homo sapien
gtctctggtctctttgcacctgtgt

SEQ ID NO: 4347913 - DNA, 25 bp, Homo sapien
ggtgattgacaatggagatggttcc

SEQ ID NO: 4347914 - DNA, 25 bp, Homo sapien
gattgacaatggagatggttcccat

SEQ ID NO: 4347915 - DNA, 25 bp, Homo sapien
tctctcgagtgatagtacgtgatga

SEQ ID NO: 4347916 - DNA, 25 bp, Homo sapien
ctgactcttgtctctctcgagtgat

SEQ ID NO: 4347917 - DNA, 25 bp, Homo sapien
tgatagtacgtgatgatcttgccag

SEQ ID NO: 4347918 - DNA, 25 bp, Homo sapien
cttgtctctctcgagtgatagtacg

SEQ ID NO: 4347919 - DNA, 25 bp, Homo sapien
catggcctacaaaaccacagtttcc

SEQ ID NO: 4347920 - DNA, 25 bp, Homo sapien
atggcctacaaaaccacagtttcct

SEQ ID NO: 4347921 - DNA, 25 bp, Homo sapien
agcccgactatacattggccccttt

SEQ ID NO: 4347922 - DNA, 25 bp, Homo sapien
gaagccacagcccgactatacattg

SEQ ID NO: 4347923 - DNA, 25 bp, Homo sapien
tccatgagtttgaccgctccaggga

SEQ ID NO: 4347924 - DNA, 25 bp, Homo sapien
cagggacctcatctaaggacaatca

SEQ ID NO: 4347925 - DNA, 25 bp, Homo sapien
ctgactataaggatgggtgcaccac

SEQ ID NO: 4347926 - DNA, 25 bp, Homo sapien
cctccatcgatggtcacttgggttg

SEQ ID NO: 4347927 - DNA, 25 bp, Homo sapien
gctatccgacaagccacagggttta

SEQ ID NO: 4347928 - DNA, 25 bp, Homo sapien
gataatggatatcacagccgtgcct

SEQ ID NO: 4347929 - DNA, 25 bp, Homo sapien
gaaaatgctattcccctgtggacaa

SEQ ID NO: 4347930 - DNA, 25 bp, Homo sapien
tcaagactaatctagctgggcctgg

SEQ ID NO: 4347931 - DNA, 25 bp, Homo sapien
tgttgttggttacagacgcgatgtt

SEQ ID NO: 4347932 - DNA, 25 bp, Homo sapien
tagccccggatttttatgaaagtca

SEQ ID NO: 4347933 - DNA, 25 bp, Homo sapien
gttggttacagacgcgatgttgttt

SEQ ID NO: 4347934 - DNA, 25 bp, Homo sapien
ggttacagacgcgatgttgtttctg

SEQ ID NO: 4347935 - DNA, 25 bp, Homo sapien
ggcagcttcggttgactcagatggg

SEQ ID NO: 4347936 - DNA, 25 bp, Homo sapien
ccatggggcaggaaacctatatggg

SEQ ID NO: 4347937 - DNA, 25 bp, Homo sapien
caggccatggggcaggaaacctata

SEQ ID NO: 4347938 - DNA, 25 bp, Homo sapien
ggccatggggcaggaaacctatatg

SEQ ID NO: 4347939 - DNA, 25 bp, Homo sapien
cacagccaagtggtggaggatttat

SEQ ID NO: 4347940 - DNA, 25 bp, Homo sapien
caacactattcgtatcaaagtacca

SEQ ID NO: 4347941 - DNA, 25 bp, Homo sapien
gccagtagactctgagattccggca

SEQ ID NO: 4347942 - DNA, 25 bp, Homo sapien
aaagagccccaataggccgggcacg

SEQ ID NO: 4347943 - DNA, 25 bp, Homo sapien
gcctctgtggaatactcccgcttag

SEQ ID NO: 4347944 - DNA, 25 bp, Homo sapien
aaccccagaggcgaatcttgaaaca

SEQ ID NO: 4347945 - DNA, 25 bp, Homo sapien
tagtccaccaccattgggccaaagt

SEQ ID NO: 4347946 - DNA, 25 bp, Homo sapien
gatgctcctttagaacgctcgtttg

SEQ ID NO: 4347947 - DNA, 25 bp, Homo sapien
atagatggcaaatgtctcttgtctg

SEQ ID NO: 4347948 - DNA, 25 bp, Homo sapien
ccccagcctgtatcaccaaaacact

SEQ ID NO: 4347949 - DNA, 25 bp, Homo sapien
cctgagaattgaaagggtgtattaa

SEQ ID NO: 4347950 - DNA, 25 bp, Homo sapien
gaattgaaagggtgtattaaagcca

SEQ ID NO: 4347951 - DNA, 25 bp, Homo sapien
agcctgtatcaccaaaacactccct

SEQ ID NO: 4347952 - DNA, 25 bp, Homo sapien
tatctattaagtacaacatgggaca

SEQ ID NO: 4347953 - DNA, 25 bp, Homo sapien
tattaagtacaacatgggacaggca

SEQ ID NO: 4347954 - DNA, 25 bp, Homo sapien
gtacaacatgggacaggcacggtgc

SEQ ID NO: 4347955 - DNA, 25 bp, Homo sapien
aaatatctattaagtacaacatggg

SEQ ID NO: 4347956 - DNA, 25 bp, Homo sapien
ccttgagagggtgtcactagcagcc

SEQ ID NO: 4347957 - DNA, 25 bp, Homo sapien
ccatgagtagagctgcaggtgcctc

SEQ ID NO: 4347958 - DNA, 25 bp, Homo sapien
tcagcctcccctgttagaatgtggc

SEQ ID NO: 4347959 - DNA, 25 bp, Homo sapien
catctggttcatagtcggagagctc

SEQ ID NO: 4347960 - DNA, 25 bp, Homo sapien
gaaaagatgtacgtgagactgggca

SEQ ID NO: 4347961 - DNA, 25 bp, Homo sapien
ggtataacctcctgcacgcacgatg

SEQ ID NO: 4347962 - DNA, 25 bp, Homo sapien
cactgtctaggtgagcttgacttcc

SEQ ID NO: 4347963 - DNA, 25 bp, Homo sapien
gccagtcacccacttttgaagccaa

SEQ ID NO: 4347964 - DNA, 25 bp, Homo sapien
gaaaagggattggacctacgtcaca

SEQ ID NO: 4347965 - DNA, 25 bp, Homo sapien
tcctggtggcggatagctggtcacc

SEQ ID NO: 4347966 - DNA, 25 bp, Homo sapien
cagtgggctaatgaaactgggcgct

SEQ ID NO: 4347967 - DNA, 25 bp, Homo sapien
gatagcgctggaggagtttcccaaa

SEQ ID NO: 4347968 - DNA, 25 bp, Homo sapien
cccagcctgaaagttcttactttct

SEQ ID NO: 4347969 - DNA, 25 bp, Homo sapien
cagcctgaaagttcttactttctgt

SEQ ID NO: 4347970 - DNA, 25 bp, Homo sapien
gcctgaaagttcttactttctgtat

SEQ ID NO: 4347971 - DNA, 25 bp, Homo sapien
gcgcccagcctgaaagttcttactt

SEQ ID NO: 4347972 - DNA, 25 bp, Homo sapien
tgggtccacagccaaaagctcagtg

SEQ ID NO: 4347973 - DNA, 25 bp, Homo sapien
taaggctcagcgagacatatgccac

SEQ ID NO: 4347974 - DNA, 25 bp, Homo sapien
taagcttatgctctctcggccacat

SEQ ID NO: 4347975 - DNA, 25 bp, Homo sapien
cagggcttagttgcacacatctggg

SEQ ID NO: 4347976 - DNA, 25 bp, Homo sapien
gaagcatgttgcctccagcagtcgt

SEQ ID NO: 4347977 - DNA, 25 bp, Homo sapien
caaatactcgagctgtagacaagca

SEQ ID NO: 4347978 - DNA, 25 bp, Homo sapien
caaaaggaaactgctagggctcagg

SEQ ID NO: 4347979 - DNA, 25 bp, Homo sapien
tgattcaatgtctcatcgtcctccg

SEQ ID NO: 4347980 - DNA, 25 bp, Homo sapien
tcacttgcttcagaagacagtattg

SEQ ID NO: 4347981 - DNA, 25 bp, Homo sapien
agcgtccttcactctaacacttggg

SEQ ID NO: 4347982 - DNA, 25 bp, Homo sapien
gtagtgagacctaccctgagggtca

SEQ ID NO: 4347983 - DNA, 25 bp, Homo sapien
ttgtgtgatacaaggaatatctgga

SEQ ID NO: 4347984 - DNA, 25 bp, Homo sapien
tcttgggcagaaaccctaaacattc

SEQ ID NO: 4347985 - DNA, 25 bp, Homo sapien
cagaacctagtggatgttcagcacg

SEQ ID NO: 4347986 - DNA, 25 bp, Homo sapien
ggacatcgtaagacttgtcatccta

SEQ ID NO: 4347987 - DNA, 25 bp, Homo sapien
tctctttagaagtagggacatcgta

SEQ ID NO: 4347988 - DNA, 25 bp, Homo sapien
gggtcatggatgagtcagagcacac

SEQ ID NO: 4347989 - DNA, 25 bp, Homo sapien
agatcttgggagcttaggggtcatg

SEQ ID NO: 4347990 - DNA, 25 bp, Homo sapien
tctgtcatccccatgagccacaact

SEQ ID NO: 4347991 - DNA, 25 bp, Homo sapien
caaacggggcctgcggatttgggag

SEQ ID NO: 4347992 - DNA, 25 bp, Homo sapien
tgtgcagtgccccaaatagtctaga

SEQ ID NO: 4347993 - DNA, 25 bp, Homo sapien
tagagaatccgtgccatagcagctg

SEQ ID NO: 4347994 - DNA, 25 bp, Homo sapien
catagacctgggctgtaagtgctcc

SEQ ID NO: 4347995 - DNA, 25 bp, Homo sapien
tgttcatcaggacttggacgagctc

SEQ ID NO: 4347996 - DNA, 25 bp, Homo sapien
agccatgtggagcccgcccttgctg

SEQ ID NO: 4347997 - DNA, 25 bp, Homo sapien
cctgatgtaacgctggcacaggaag

SEQ ID NO: 4347998 - DNA, 25 bp, Homo sapien
gcccttgctgctagaaaaccctgat

SEQ ID NO: 4347999 - DNA, 25 bp, Homo sapien
tagaaaaccctgatgtaacgctggc

SEQ ID NO: 4348000 - DNA, 25 bp, Homo sapien
ttagagggcagtcattgaggaattc

SEQ ID NO: 4348001 - DNA, 25 bp, Homo sapien
tataaagagcgctgggccacttcct

SEQ ID NO: 4348002 - DNA, 25 bp, Homo sapien
gtgaattcctgcacccgtggtataa

SEQ ID NO: 4348003 - DNA, 25 bp, Homo sapien
ttcaccccagacattattcttctca

SEQ ID NO: 4348004 - DNA, 25 bp, Homo sapien
cactacctagcactaatgtcctgtg

SEQ ID NO: 4348005 - DNA, 25 bp, Homo sapien
taaacctgctgttcttgtgcaggca

SEQ ID NO: 4348006 - DNA, 25 bp, Homo sapien
gcgtgagcttgcctagttttttaaa

SEQ ID NO: 4348007 - DNA, 25 bp, Homo sapien
gctgttaatggccactgcattctag

SEQ ID NO: 4348008 - DNA, 25 bp, Homo sapien
actctcagctccttgacattgtgga

SEQ ID NO: 4348009 - DNA, 25 bp, Homo sapien
ttgcatatcagcagcactctcagct

SEQ ID NO: 4348010 - DNA, 25 bp, Homo sapien
gcactctcagctccttgacattgtg

SEQ ID NO: 4348011 - DNA, 25 bp, Homo sapien
tgttgcatatcagcagcactctcag

SEQ ID NO: 4348012 - DNA, 25 bp, Homo sapien
ttttttgctcctataaccaatgctg

SEQ ID NO: 4348013 - DNA, 25 bp, Homo sapien
ttttttttgctcctataaccaatgc

SEQ ID NO: 4348014 - DNA, 25 bp, Homo sapien
tttttttgctcctataaccaatgct

SEQ ID NO: 4348015 - DNA, 25 bp, Homo sapien
tcatatcaagacctggcccttgaac

SEQ ID NO: 4348016 - DNA, 25 bp, Homo sapien
aggaaataatacacaggtgggttag

SEQ ID NO: 4348017 - DNA, 25 bp, Homo sapien
ggaaataatacacaggtgggttagc

SEQ ID NO: 4348018 - DNA, 25 bp, Homo sapien
tatgccacacagtagttgcctttgg

SEQ ID NO: 4348019 - DNA, 25 bp, Homo sapien
ttttgccactaggaaggcaggcacc

SEQ ID NO: 4348020 - DNA, 25 bp, Homo sapien
tattgagatggcgagcacaggtgca

SEQ ID NO: 4348021 - DNA, 25 bp, Homo sapien
caaatgaaaaggaagtatgccacac

SEQ ID NO: 4348022 - DNA, 25 bp, Homo sapien
tcacaagggatctgagggcagccat

SEQ ID NO: 4348023 - DNA, 25 bp, Homo sapien
ttcacaagggatctgagggcagcca

SEQ ID NO: 4348024 - DNA, 25 bp, Homo sapien
cttgattttgacatatcggtctgac

SEQ ID NO: 4348025 - DNA, 25 bp, Homo sapien
cggtctgactggtgccggatgaatt

SEQ ID NO: 4348026 - DNA, 25 bp, Homo sapien
ggaggctttcccgcccagggactga

SEQ ID NO: 4348027 - DNA, 25 bp, Homo sapien
aagaagtagccccaggtgaggaaga

SEQ ID NO: 4348028 - DNA, 25 bp, Homo sapien
gaatcctggaaggaggctttcccgc

SEQ ID NO: 4348029 - DNA, 25 bp, Homo sapien
gaggaagaatcctggaaggaggctt

SEQ ID NO: 4348030 - DNA, 25 bp, Homo sapien
gaatggaatgggtgcctctgccagg

SEQ ID NO: 4348031 - DNA, 25 bp, Homo sapien
aatggaatgggtgcctctgccaggc

SEQ ID NO: 4348032 - DNA, 25 bp, Homo sapien
cagagcccaaagaatgccaacagct

SEQ ID NO: 4348033 - DNA, 25 bp, Homo sapien
aagaatgccaacagctgagcaaatc

SEQ ID NO: 4348034 - DNA, 25 bp, Homo sapien
agcccaaagaatgccaacagctgag

SEQ ID NO: 4348035 - DNA, 25 bp, Homo sapien
gccaacagctgagcaaatcaaaact

SEQ ID NO: 4348036 - DNA, 25 bp, Homo sapien
catctacttgaactggagtctcagt

SEQ ID NO: 4348037 - DNA, 25 bp, Homo sapien
accatctacttgaactggagtctca

SEQ ID NO: 4348038 - DNA, 25 bp, Homo sapien
atctacttgaactggagtctcagtt

SEQ ID NO: 4348039 - DNA, 25 bp, Homo sapien
ccatctacttgaactggagtctcag

SEQ ID NO: 4348040 - DNA, 25 bp, Homo sapien
gacatattctgacatggccctgtaa

SEQ ID NO: 4348041 - DNA, 25 bp, Homo sapien
tcacaggctagaaggaaaggaacgt

SEQ ID NO: 4348042 - DNA, 25 bp, Homo sapien
gggccaacatcagtaagcacggtat

SEQ ID NO: 4348043 - DNA, 25 bp, Homo sapien
tgaatgaatgcacgtgggccaacat

SEQ ID NO: 4348044 - DNA, 25 bp, Homo sapien
ggaccatagggccagatgaagcctg

SEQ ID NO: 4348045 - DNA, 25 bp, Homo sapien
aagcctgcaggaacgcagatggcca

SEQ ID NO: 4348046 - DNA, 25 bp, Homo sapien
gaccatagggccagatgaagcctgc

SEQ ID NO: 4348047 - DNA, 25 bp, Homo sapien
acggattaagactcactcaggccgg

SEQ ID NO: 4348048 - DNA, 25 bp, Homo sapien
gagagagcgccggggctgatgggag

SEQ ID NO: 4348049 - DNA, 25 bp, Homo sapien
agcgccggggctgatgggaggtaac

SEQ ID NO: 4348050 - DNA, 25 bp, Homo sapien
gggctgatgggaggtaacctctggg

SEQ ID NO: 4348051 - DNA, 25 bp, Homo sapien
cgccggggctgatgggaggtaacct

SEQ ID NO: 4348052 - DNA, 25 bp, Homo sapien
gagaaaaactccaacctgctttatg

SEQ ID NO: 4348053 - DNA, 25 bp, Homo sapien
ttggacacatctaccctctgagaca

SEQ ID NO: 4348054 - DNA, 25 bp, Homo sapien
tgggtccggcaacacctggctagct

SEQ ID NO: 4348055 - DNA, 25 bp, Homo sapien
tctgagacactggacactttgagtc

SEQ ID NO: 4348056 - DNA, 25 bp, Homo sapien
tagttgatgtagtacaccttggcgg

SEQ ID NO: 4348057 - DNA, 25 bp, Homo sapien
cataatgggcgtgggtcatgtagtt

SEQ ID NO: 4348058 - DNA, 25 bp, Homo sapien
tgttgaacacaactgaagagcgcca

SEQ ID NO: 4348059 - DNA, 25 bp, Homo sapien
aggtagagctgcagcttatccagaa

SEQ ID NO: 4348060 - DNA, 25 bp, Homo sapien
actccttaaagcgcattttcttgct

SEQ ID NO: 4348061 - DNA, 25 bp, Homo sapien
ttcctcaaactccttaaagcgcatt

SEQ ID NO: 4348062 - DNA, 25 bp, Homo sapien
tcaaactccttaaagcgcattttct

SEQ ID NO: 4348063 - DNA, 25 bp, Homo sapien
cctcaaactccttaaagcgcatttt

SEQ ID NO: 4348064 - DNA, 25 bp, Homo sapien
tgtctgatctctacagggccctgct

SEQ ID NO: 4348065 - DNA, 25 bp, Homo sapien
gtccatttaaccgaaggcctgtctg

SEQ ID NO: 4348066 - DNA, 25 bp, Homo sapien
tggaaggaagtcacagcccgtgtca

SEQ ID NO: 4348067 - DNA, 25 bp, Homo sapien
gatgccccaaccagagcaaggtaaa

SEQ ID NO: 4348068 - DNA, 25 bp, Homo sapien
caggttggcctctcgaaagggctgg

SEQ ID NO: 4348069 - DNA, 25 bp, Homo sapien
tagctcaggctttggagtaccaaag

SEQ ID NO: 4348070 - DNA, 25 bp, Homo sapien
acccacggatgctgcccacgggttg

SEQ ID NO: 4348071 - DNA, 25 bp, Homo sapien
gctgcttgactcaaatctgggtagc

SEQ ID NO: 4348072 - DNA, 25 bp, Homo sapien
tcttgccagagaaggggtgtggccg

SEQ ID NO: 4348073 - DNA, 25 bp, Homo sapien
ctcttgccagagaaggggtgtggcc

SEQ ID NO: 4348074 - DNA, 25 bp, Homo sapien
gagaaagggctgccccctgttctct

SEQ ID NO: 4348075 - DNA, 25 bp, Homo sapien
aaagggctgccccctgttctctgca

SEQ ID NO: 4348076 - DNA, 25 bp, Homo sapien
gaaagggctgccccctgttctctgc

SEQ ID NO: 4348077 - DNA, 25 bp, Homo sapien
agagaaagggctgccccctgttctc

SEQ ID NO: 4348078 - DNA, 25 bp, Homo sapien
ttttccagaaaccttatgattgtgc

SEQ ID NO: 4348079 - DNA, 25 bp, Homo sapien
ctggggatttgtgaaggccctcgct

SEQ ID NO: 4348080 - DNA, 25 bp, Homo sapien
ccagaaaccttatgattgtgcagga

SEQ ID NO: 4348081 - DNA, 25 bp, Homo sapien
gggatttgtgaaggccctcgctcca

SEQ ID NO: 4348082 - DNA, 25 bp, Homo sapien
gatcctgagacatgcgccaagggtg

SEQ ID NO: 4348083 - DNA, 25 bp, Homo sapien
ccctaggatgcagacgcaagcacag

SEQ ID NO: 4348084 - DNA, 25 bp, Homo sapien
gactggccagtctgcagtgagcagt

SEQ ID NO: 4348085 - DNA, 25 bp, Homo sapien
cccacactgaagggatagcaatgga

SEQ ID NO: 4348086 - DNA, 25 bp, Homo sapien
ttgtcagtcctcttagacttgccag

SEQ ID NO: 4348087 - DNA, 25 bp, Homo sapien
gcagagccagattcggagaaaagac

SEQ ID NO: 4348088 - DNA, 25 bp, Homo sapien
cagtcctcttagacttgccagggcc

SEQ ID NO: 4348089 - DNA, 25 bp, Homo sapien
agcagagccagattcggagaaaaga

SEQ ID NO: 4348090 - DNA, 25 bp, Homo sapien
tgccggatggggcacactttgtcca

SEQ ID NO: 4348091 - DNA, 25 bp, Homo sapien
gagtagtagcctcccggctgccgga

SEQ ID NO: 4348092 - DNA, 25 bp, Homo sapien
gtcagagtagtagcctcccggctgc

SEQ ID NO: 4348093 - DNA, 25 bp, Homo sapien
ttccagtcagagtagtagcctcccg

SEQ ID NO: 4348094 - DNA, 25 bp, Homo sapien
tgcgggccgagtcaatgagctccct

SEQ ID NO: 4348095 - DNA, 25 bp, Homo sapien
catcaaagtgccgattcccacagcg

SEQ ID NO: 4348096 - DNA, 25 bp, Homo sapien
accagaaagttgtgcctgcgggccg

SEQ ID NO: 4348097 - DNA, 25 bp, Homo sapien
ctctgtcagcgggaggccataggac

SEQ ID NO: 4348098 - DNA, 25 bp, Homo sapien
aggaagatgcagtgcctcatcgacc

SEQ ID NO: 4348099 - DNA, 25 bp, Homo sapien
gctgcagttccggttctgaagtcag

SEQ ID NO: 4348100 - DNA, 25 bp, Homo sapien
tggcaaccaacgtccagtggggctg

SEQ ID NO: 4348101 - DNA, 25 bp, Homo sapien
gaagtcacagccctgtagacgggtg

SEQ ID NO: 4348102 - DNA, 25 bp, Homo sapien
gtcatgggccgcgtctccatctgcg

SEQ ID NO: 4348103 - DNA, 25 bp, Homo sapien
ccgtcagtaggtccactttgggaag

SEQ ID NO: 4348104 - DNA, 25 bp, Homo sapien
gtgtcgactgcaggcaccgtcagta

SEQ ID NO: 4348105 - DNA, 25 bp, Homo sapien
tccatctgcgtgtcgactgcaggca

SEQ ID NO: 4348106 - DNA, 25 bp, Homo sapien
cctgcttcttgagcggacccttcag

SEQ ID NO: 4348107 - DNA, 25 bp, Homo sapien
ttgagcggacccttcagggaatctc

SEQ ID NO: 4348108 - DNA, 25 bp, Homo sapien
acccttcagggaatctctgtgcttg

SEQ ID NO: 4348109 - DNA, 25 bp, Homo sapien
gcttcttgagcggacccttcaggga

SEQ ID NO: 4348110 - DNA, 25 bp, Homo sapien
tagctgggcactcaagggaatatct

SEQ ID NO: 4348111 - DNA, 25 bp, Homo sapien
tgtgactgtaaactccaacggcctc

SEQ ID NO: 4348112 - DNA, 25 bp, Homo sapien
agaactactggaagaaggcacccct

SEQ ID NO: 4348113 - DNA, 25 bp, Homo sapien
gccctttaggtgcaagctcatcgaa

SEQ ID NO: 4348114 - DNA, 25 bp, Homo sapien
tgatggtgttgtgcttcccaagaga

SEQ ID NO: 4348115 - DNA, 25 bp, Homo sapien
tttgctgagccatagaccactgctt

SEQ ID NO: 4348116 - DNA, 25 bp, Homo sapien
accactgcttgtaggtattggccag

SEQ ID NO: 4348117 - DNA, 25 bp, Homo sapien
tcccaagagagctgaggtagatcac

SEQ ID NO: 4348118 - DNA, 25 bp, Homo sapien
ggcccaccttgtgaaatatctccag

SEQ ID NO: 4348119 - DNA, 25 bp, Homo sapien
cgcgatgaactcctccctggtgatt

SEQ ID NO: 4348120 - DNA, 25 bp, Homo sapien
gtaggagtacatgaccgacagggca

SEQ ID NO: 4348121 - DNA, 25 bp, Homo sapien
aggatcttgatcttgcggctatgca

SEQ ID NO: 4348122 - DNA, 25 bp, Homo sapien
gggcaccatctggcgggacagccgg

SEQ ID NO: 4348123 - DNA, 25 bp, Homo sapien
gcaccatctggcgggacagccggga

SEQ ID NO: 4348124 - DNA, 25 bp, Homo sapien
ggcaccatctggcgggacagccggg

SEQ ID NO: 4348125 - DNA, 25 bp, Homo sapien
tggggcaccatctggcgggacagcc

SEQ ID NO: 4348126 - DNA, 25 bp, Homo sapien
agagagttcaaaggagacaggccag

SEQ ID NO: 4348127 - DNA, 25 bp, Homo sapien
cagaggagagagttcaaaggagaca

SEQ ID NO: 4348128 - DNA, 25 bp, Homo sapien
tggaagaggtgagagggtagggcag

SEQ ID NO: 4348129 - DNA, 25 bp, Homo sapien
aaggagacaggccaggcggatgcag

SEQ ID NO: 4348130 - DNA, 25 bp, Homo sapien
ctggtggtcctggtagttgcctggg

SEQ ID NO: 4348131 - DNA, 25 bp, Homo sapien
gctcctcgtggatcatgtgtaagac

SEQ ID NO: 4348132 - DNA, 25 bp, Homo sapien
tgctcctcgtggatcatgtgtaaga

SEQ ID NO: 4348133 - DNA, 25 bp, Homo sapien
tcctggtagttgcctgggaggcatt

SEQ ID NO: 4348134 - DNA, 25 bp, Homo sapien
cctctgaaggcgtgatgctgggctt

SEQ ID NO: 4348135 - DNA, 25 bp, Homo sapien
accaaaggactctagctcctgccgc

SEQ ID NO: 4348136 - DNA, 25 bp, Homo sapien
ggcctctgaaggcgtgatgctgggc

SEQ ID NO: 4348137 - DNA, 25 bp, Homo sapien
caaaggactctagctcctgccgcag

SEQ ID NO: 4348138 - DNA, 25 bp, Homo sapien
aactttgaagctggggatgggcttt

SEQ ID NO: 4348139 - DNA, 25 bp, Homo sapien
tggctgctcttggatatctctagct

SEQ ID NO: 4348140 - DNA, 25 bp, Homo sapien
gctcttggatatctctagcttccag

SEQ ID NO: 4348141 - DNA, 25 bp, Homo sapien
atgcaggattaaggggtgtctgatc

SEQ ID NO: 4348142 - DNA, 25 bp, Homo sapien
tcgccggcgggtctgaggcaggcgg

SEQ ID NO: 4348143 - DNA, 25 bp, Homo sapien
tgattcgccggcgggtctgaggcag

SEQ ID NO: 4348144 - DNA, 25 bp, Homo sapien
catgatgattcgccggcgggtctga

SEQ ID NO: 4348145 - DNA, 25 bp, Homo sapien
attcgccggcgggtctgaggcaggc

SEQ ID NO: 4348146 - DNA, 25 bp, Homo sapien
agacgggagcattttcattgatggg

SEQ ID NO: 4348147 - DNA, 25 bp, Homo sapien
ctgcttgaagcagtgggcaatgacc

SEQ ID NO: 4348148 - DNA, 25 bp, Homo sapien
gggcaatgaccggttcaggatcaaa

SEQ ID NO: 4348149 - DNA, 25 bp, Homo sapien
cggttcaggatcaaagacgggagca

SEQ ID NO: 4348150 - DNA, 25 bp, Homo sapien
taagagagttaaaagatgagtttct

SEQ ID NO: 4348151 - DNA, 25 bp, Homo sapien
gagttaaaagatgagtttctctctg

SEQ ID NO: 4348152 - DNA, 25 bp, Homo sapien
ttggggtaagagagttaaaagatga

SEQ ID NO: 4348153 - DNA, 25 bp, Homo sapien
aaagatgagtttctctctggaagag

SEQ ID NO: 4348154 - DNA, 25 bp, Homo sapien
accttgaagactgacgtcttctcca

SEQ ID NO: 4348155 - DNA, 25 bp, Homo sapien
caaaaccttgaagactgacgtcttc

SEQ ID NO: 4348156 - DNA, 25 bp, Homo sapien
gctgcattgctttgccaagaacttg

SEQ ID NO: 4348157 - DNA, 25 bp, Homo sapien
cattgctttgccaagaacttggtcc

SEQ ID NO: 4348158 - DNA, 25 bp, Homo sapien
cgtcacatgggtcgggcctctggtt

SEQ ID NO: 4348159 - DNA, 25 bp, Homo sapien
cccgtcacatgggtcgggcctctgg

SEQ ID NO: 4348160 - DNA, 25 bp, Homo sapien
ggctcccgtcacatgggtcgggcct

SEQ ID NO: 4348161 - DNA, 25 bp, Homo sapien
tggagggctcccgtcacatgggtcg

SEQ ID NO: 4348162 - DNA, 25 bp, Homo sapien
cagactgtggtacgcttcatagtcg

SEQ ID NO: 4348163 - DNA, 25 bp, Homo sapien
agaacagactgtggtacgcttcata

SEQ ID NO: 4348164 - DNA, 25 bp, Homo sapien
tgtggtacgcttcatagtcgtcgtc

SEQ ID NO: 4348165 - DNA, 25 bp, Homo sapien
actgtggtacgcttcatagtcgtcg

SEQ ID NO: 4348166 - DNA, 25 bp, Homo sapien
gtgctgaagggcgtgtgtgaatgtg

SEQ ID NO: 4348167 - DNA, 25 bp, Homo sapien
tgaatgtgtgtcgatgtgggcttgc

SEQ ID NO: 4348168 - DNA, 25 bp, Homo sapien
taaaccgtaactccaagtcgtgcga

SEQ ID NO: 4348169 - DNA, 25 bp, Homo sapien
caagtcgtgcgaaaggcgctcagct

SEQ ID NO: 4348170 - DNA, 25 bp, Homo sapien
tgggcccctagctttagcaaggctg

SEQ ID NO: 4348171 - DNA, 25 bp, Homo sapien
tgggccctcatgagctcaaatgatc

SEQ ID NO: 4348172 - DNA, 25 bp, Homo sapien
tttagtgggcccctagctttagcaa

SEQ ID NO: 4348173 - DNA, 25 bp, Homo sapien
cctagctttagcaaggctgatagaa

SEQ ID NO: 4348174 - DNA, 25 bp, Homo sapien
cacactaggcttctagttgggctaa

SEQ ID NO: 4348175 - DNA, 25 bp, Homo sapien
gcaaagctatgcataacagatgagc

SEQ ID NO: 4348176 - DNA, 25 bp, Homo sapien
caaagatccaccattggcacacaca

SEQ ID NO: 4348177 - DNA, 25 bp, Homo sapien
caaacacattcagtagcaaagatcc

SEQ ID NO: 4348178 - DNA, 25 bp, Homo sapien
ttaagatagacttaatttttcatga

SEQ ID NO: 4348179 - DNA, 25 bp, Homo sapien
aaagccagtcatgatatttatttaa

SEQ ID NO: 4348180 - DNA, 25 bp, Homo sapien
gaagaaacataagatacagaggcag

SEQ ID NO: 4348181 - DNA, 25 bp, Homo sapien
ctagaccgagaggttaaatggattc

SEQ ID NO: 4348182 - DNA, 25 bp, Homo sapien
gggtggcgataacatgagtcaagta

SEQ ID NO: 4348183 - DNA, 25 bp, Homo sapien
tactcaaccatgacttagaatgtgg

SEQ ID NO: 4348184 - DNA, 25 bp, Homo sapien
gaagctgggataggaccatggtcct

SEQ ID NO: 4348185 - DNA, 25 bp, Homo sapien
cttcagttcaggcttggccagacct

SEQ ID NO: 4348186 - DNA, 25 bp, Homo sapien
tcaggtcacaatggattgctctgat

SEQ ID NO: 4348187 - DNA, 25 bp, Homo sapien
cagttcaggcttggccagacctact

SEQ ID NO: 4348188 - DNA, 25 bp, Homo sapien
aacagggctgaagcaggacccagtc

SEQ ID NO: 4348189 - DNA, 25 bp, Homo sapien
tgggagcgcctactgatcaaaaacc

SEQ ID NO: 4348190 - DNA, 25 bp, Homo sapien
taatggtggacttattttgcctcag

SEQ ID NO: 4348191 - DNA, 25 bp, Homo sapien
ggaaaaccacgtcaggcttagagat

SEQ ID NO: 4348192 - DNA, 25 bp, Homo sapien
cggtaagagtcgttgccatatttac

SEQ ID NO: 4348193 - DNA, 25 bp, Homo sapien
aaaattcggtaagagtcgttgccat

SEQ ID NO: 4348194 - DNA, 25 bp, Homo sapien
aattcggtaagagtcgttgccatat

SEQ ID NO: 4348195 - DNA, 25 bp, Homo sapien
tgacacaaaaaattcggtaagagtc

SEQ ID NO: 4348196 - DNA, 25 bp, Homo sapien
caatcccatgaagctcaattggata

SEQ ID NO: 4348197 - DNA, 25 bp, Homo sapien
gaagctcaattggatacttccactg

SEQ ID NO: 4348198 - DNA, 25 bp, Homo sapien
tcccatgaagctcaattggatactt

SEQ ID NO: 4348199 - DNA, 25 bp, Homo sapien
caattggatacttccactgctttgt

SEQ ID NO: 4348200 - DNA, 25 bp, Homo sapien
cactcttttgtgctgtgctaacaag

SEQ ID NO: 4348201 - DNA, 25 bp, Homo sapien
agaatacaacatcccacattatcag

SEQ ID NO: 4348202 - DNA, 25 bp, Homo sapien
catttgccaattcctaaccactctt

SEQ ID NO: 4348203 - DNA, 25 bp, Homo sapien
ccccagttgtgattactcttccttc

SEQ ID NO: 4348204 - DNA, 25 bp, Homo sapien
cagctgaaggatacttctccagaaa

SEQ ID NO: 4348205 - DNA, 25 bp, Homo sapien
ccgaagatcgtagagaccaagaggt

SEQ ID NO: 4348206 - DNA, 25 bp, Homo sapien
tctctccagtctgcggttcttgcta

SEQ ID NO: 4348207 - DNA, 25 bp, Homo sapien
gacaatggtttttgcccgaagatcg

SEQ ID NO: 4348208 - DNA, 25 bp, Homo sapien
catagaaatctcatccagagggttt

SEQ ID NO: 4348209 - DNA, 25 bp, Homo sapien
actggccttgcatgattagctttta

SEQ ID NO: 4348210 - DNA, 25 bp, Homo sapien
gattacaagactccaggtgggctga

SEQ ID NO: 4348211 - DNA, 25 bp, Homo sapien
tcagcagataatgagagtagaagca

SEQ ID NO: 4348212 - DNA, 25 bp, Homo sapien
agtgtttcttgaacgagattaaaag

SEQ ID NO: 4348213 - DNA, 25 bp, Homo sapien
ggtccgattgagaaatatagtagcg

SEQ ID NO: 4348214 - DNA, 25 bp, Homo sapien
gaccgaggaggtgtccatttcttaa

SEQ ID NO: 4348215 - DNA, 25 bp, Homo sapien
aatatagtagcgatgagaagcttcc

SEQ ID NO: 4348216 - DNA, 25 bp, Homo sapien
acaaacatagtgcatcagaattgaa

SEQ ID NO: 4348217 - DNA, 25 bp, Homo sapien
aacaaacatagtgcatcagaattga

SEQ ID NO: 4348218 - DNA, 25 bp, Homo sapien
caaacatagtgcatcagaattgaaa

SEQ ID NO: 4348219 - DNA, 25 bp, Homo sapien
ttccttctttctatctgtgttcgtg

SEQ ID NO: 4348220 - DNA, 25 bp, Homo sapien
tatctgtgttcgtgggatggtatct

SEQ ID NO: 4348221 - DNA, 25 bp, Homo sapien
ctttctatctgtgttcgtgggatgg

SEQ ID NO: 4348222 - DNA, 25 bp, Homo sapien
cttctttctatctgtgttcgtggga

SEQ ID NO: 4348223 - DNA, 25 bp, Homo sapien
ccatttcagagccacgttttaaaat

SEQ ID NO: 4348224 - DNA, 25 bp, Homo sapien
ggtatcctcatacttctcgttgtgt

SEQ ID NO: 4348225 - DNA, 25 bp, Homo sapien
cttcagattctaaaaaggtatcctc

SEQ ID NO: 4348226 - DNA, 25 bp, Homo sapien
taaaatgtcagtatgcaaatgttct

SEQ ID NO: 4348227 - DNA, 25 bp, Homo sapien
gaagtaaagttagagagtcctctgc

SEQ ID NO: 4348228 - DNA, 25 bp, Homo sapien
tacttggcggcataaacacatcctt

SEQ ID NO: 4348229 - DNA, 25 bp, Homo sapien
gcaactctgaactactacttggcgg

SEQ ID NO: 4348230 - DNA, 25 bp, Homo sapien
tttgcacttgcttcgggtcctgagg

SEQ ID NO: 4348231 - DNA, 25 bp, Homo sapien
taattagcaagtgaacttttggatc

SEQ ID NO: 4348232 - DNA, 25 bp, Homo sapien
tctggcttaagagaagtctctccat

SEQ ID NO: 4348233 - DNA, 25 bp, Homo sapien
tgtgaagataattagcaagtgaact

SEQ ID NO: 4348234 - DNA, 25 bp, Homo sapien
cttttggatctgaacttcagtcctt

SEQ ID NO: 4348235 - DNA, 25 bp, Homo sapien
tcccatccacatgggacagacttac

SEQ ID NO: 4348236 - DNA, 25 bp, Homo sapien
tccacatgggacagacttacggcat

SEQ ID NO: 4348237 - DNA, 25 bp, Homo sapien
agtacacatcaaatcttcctgctgt

SEQ ID NO: 4348238 - DNA, 25 bp, Homo sapien
gggacagacttacggcattctgttc

SEQ ID NO: 4348239 - DNA, 25 bp, Homo sapien
gggttcttgtagcaagggattacat

SEQ ID NO: 4348240 - DNA, 25 bp, Homo sapien
tagcaagggattacattcactgctt

SEQ ID NO: 4348241 - DNA, 25 bp, Homo sapien
aaactgagcagaagcgatgggttct

SEQ ID NO: 4348242 - DNA, 25 bp, Homo sapien
agcagaagcgatgggttcttgtagc

SEQ ID NO: 4348243 - DNA, 25 bp, Homo sapien
gtcattcggcgggtctgggactagg

SEQ ID NO: 4348244 - DNA, 25 bp, Homo sapien
ttcggcgggtctgggactaggcgct

SEQ ID NO: 4348245 - DNA, 25 bp, Homo sapien
ggcgggtctgggactaggcgctcac

SEQ ID NO: 4348246 - DNA, 25 bp, Homo sapien
cggaggtcattcggcgggtctggga

SEQ ID NO: 4348247 - DNA, 25 bp, Homo sapien
agaggtgacggtgggggcagctccg

SEQ ID NO: 4348248 - DNA, 25 bp, Homo sapien
aggtgacggtgggggcagctccgcg

SEQ ID NO: 4348249 - DNA, 25 bp, Homo sapien
gaggtgacggtgggggcagctccgc

SEQ ID NO: 4348250 - DNA, 25 bp, Homo sapien
tagaggtgacggtgggggcagctcc

SEQ ID NO: 4348251 - DNA, 25 bp, Homo sapien
gagtaagatgtgaaacctcttcagc

SEQ ID NO: 4348252 - DNA, 25 bp, Homo sapien
ccagcgccgcaacgcccagggtgtg

SEQ ID NO: 4348253 - DNA, 25 bp, Homo sapien
ggtccggctgcagcaacgagcccag

SEQ ID NO: 4348254 - DNA, 25 bp, Homo sapien
agcagggtccggctgcagcaacgag

SEQ ID NO: 4348255 - DNA, 25 bp, Homo sapien
ctgaatgttgcgaaagcgccccaga

SEQ ID NO: 4348256 - DNA, 25 bp, Homo sapien
tccacgctccaccaatcaaatccat

SEQ ID NO: 4348257 - DNA, 25 bp, Homo sapien
gcaccgggctgcaaccgaggtctga

SEQ ID NO: 4348258 - DNA, 25 bp, Homo sapien
caaccgaggtctgaatgttgcgaaa

SEQ ID NO: 4348259 - DNA, 25 bp, Homo sapien
cgcgctctggttgcgctggcgcctt

SEQ ID NO: 4348260 - DNA, 25 bp, Homo sapien
aatcgctcgcgctctggttgcgctg

SEQ ID NO: 4348261 - DNA, 25 bp, Homo sapien
cgaccaatcgctcgcgctctggttg

SEQ ID NO: 4348262 - DNA, 25 bp, Homo sapien
ttgcgctggcgccttaggggctcca

SEQ ID NO: 4348263 - DNA, 25 bp, Homo sapien
cccgagccgtaagggaagccgtgat

SEQ ID NO: 4348264 - DNA, 25 bp, Homo sapien
caaagtggcttgtggagtggcgacc

SEQ ID NO: 4348265 - DNA, 25 bp, Homo sapien
cggttgctgagacagacgctgaggc

SEQ ID NO: 4348266 - DNA, 25 bp, Homo sapien
ggtaacgcaggtagccaaagtggct

SEQ ID NO: 4348267 - DNA, 25 bp, Homo sapien
tataagcatagcagggctctttgac

SEQ ID NO: 4348268 - DNA, 25 bp, Homo sapien
tccagggcccagtataaggcccagt

SEQ ID NO: 4348269 - DNA, 25 bp, Homo sapien
ccattagggcacttgaggatgtcag

SEQ ID NO: 4348270 - DNA, 25 bp, Homo sapien
tacagaagagctattgggcctctgg

SEQ ID NO: 4348271 - DNA, 25 bp, Homo sapien
cctcgtctctcaccagagtaggtga

SEQ ID NO: 4348272 - DNA, 25 bp, Homo sapien
cagagtaggtgaagaccccgttatt

SEQ ID NO: 4348273 - DNA, 25 bp, Homo sapien
tgaagaccccgttatttgctgccat

SEQ ID NO: 4348274 - DNA, 25 bp, Homo sapien
taggtgaagaccccgttatttgctg

SEQ ID NO: 4348275 - DNA, 25 bp, Homo sapien
ccacatgcgtgatttatgtgaatgc

SEQ ID NO: 4348276 - DNA, 25 bp, Homo sapien
gaattcccagttggaaacagtgagg

SEQ ID NO: 4348277 - DNA, 25 bp, Homo sapien
gaatgctgttctagatcctcacatt

SEQ ID NO: 4348278 - DNA, 25 bp, Homo sapien
ctcataacgtaatctgctctgtgcc

SEQ ID NO: 4348279 - DNA, 25 bp, Homo sapien
cgagagatggctttacagtaacaca

SEQ ID NO: 4348280 - DNA, 25 bp, Homo sapien
tgaatacagttggtgtctgcctgcc

SEQ ID NO: 4348281 - DNA, 25 bp, Homo sapien
agattcttactcatcccagccagga

SEQ ID NO: 4348282 - DNA, 25 bp, Homo sapien
tgtcaagcctaggtgtaaggtcgca

SEQ ID NO: 4348283 - DNA, 25 bp, Homo sapien
caccaagacctactgatctggagtc

SEQ ID NO: 4348284 - DNA, 25 bp, Homo sapien
tactgagaagaccaaaagaggtgtg

SEQ ID NO: 4348285 - DNA, 25 bp, Homo sapien
gaacacgaggattcttgctttctgg

SEQ ID NO: 4348286 - DNA, 25 bp, Homo sapien
gaaaagtgtcccagcttagggataa

SEQ ID NO: 4348287 - DNA, 25 bp, Homo sapien
tctcagttcttggaagtgtcccata

SEQ ID NO: 4348288 - DNA, 25 bp, Homo sapien
cgaaacttgatcctggcacagccgg

SEQ ID NO: 4348289 - DNA, 25 bp, Homo sapien
tttcggaagaagctcgtgggaatgt

SEQ ID NO: 4348290 - DNA, 25 bp, Homo sapien
cacagccgggagcatggtttcggaa

SEQ ID NO: 4348291 - DNA, 25 bp, Homo sapien
ttggctatctcaggacaaaggctgg

SEQ ID NO: 4348292 - DNA, 25 bp, Homo sapien
cttggctatctcaggacaaaggctg

SEQ ID NO: 4348293 - DNA, 25 bp, Homo sapien
gggctctgagccagtcccaacactg

SEQ ID NO: 4348294 - DNA, 25 bp, Homo sapien
cgcatggcccatcggccacagaggg

SEQ ID NO: 4348295 - DNA, 25 bp, Homo sapien
gcaagcggcagctattcacagttgg

SEQ ID NO: 4348296 - DNA, 25 bp, Homo sapien
acagagggtcgtttctggcaggaac

SEQ ID NO: 4348297 - DNA, 25 bp, Homo sapien
catgatacgttttttaatatataaa

SEQ ID NO: 4348298 - DNA, 25 bp, Homo sapien
gcatgatacgttttttaatatataa

SEQ ID NO: 4348299 - DNA, 25 bp, Homo sapien
tgcatgatacgttttttaatatata

SEQ ID NO: 4348300 - DNA, 25 bp, Homo sapien
cagctacagcctcggtgcatcttaa

SEQ ID NO: 4348301 - DNA, 25 bp, Homo sapien
tcagcaagatcaagtagcccagcta

SEQ ID NO: 4348302 - DNA, 25 bp, Homo sapien
gttgaagcagaaaccaatcaaaggt

SEQ ID NO: 4348303 - DNA, 25 bp, Homo sapien
gcaacaaaaatctgacactacttga

SEQ ID NO: 4348304 - DNA, 25 bp, Homo sapien
ctgcaccagtgtggatgaggtagag

SEQ ID NO: 4348305 - DNA, 25 bp, Homo sapien
tttgtgcttggccgcctggatgcac

SEQ ID NO: 4348306 - DNA, 25 bp, Homo sapien
gtgcttggccgcctggatgcacggg

SEQ ID NO: 4348307 - DNA, 25 bp, Homo sapien
gcaccagtgtggatgaggtagagtt

SEQ ID NO: 4348308 - DNA, 25 bp, Homo sapien
tgggggagcctgaccagctctctgg

SEQ ID NO: 4348309 - DNA, 25 bp, Homo sapien
gggagcctgaccagctctctggcct

SEQ ID NO: 4348310 - DNA, 25 bp, Homo sapien
tggacgttgtggagcaagtgggtgg

SEQ ID NO: 4348311 - DNA, 25 bp, Homo sapien
agatgggggagcctgaccagctctc

SEQ ID NO: 4348312 - DNA, 25 bp, Homo sapien
gggcgcccctgtctcagagagcagc

SEQ ID NO: 4348313 - DNA, 25 bp, Homo sapien
cagtctgagtcacaggcacggggta

SEQ ID NO: 4348314 - DNA, 25 bp, Homo sapien
ctctgctcagtatttcccagtctga

SEQ ID NO: 4348315 - DNA, 25 bp, Homo sapien
gaggcccagtgggcgtccatttctc

SEQ ID NO: 4348316 - DNA, 25 bp, Homo sapien
tagcactcgtagatgttgtcctcca

SEQ ID NO: 4348317 - DNA, 25 bp, Homo sapien
tgtagcactcgtagatgttgtcctc

SEQ ID NO: 4348318 - DNA, 25 bp, Homo sapien
gtagcactcgtagatgttgtcctcc

SEQ ID NO: 4348319 - DNA, 25 bp, Homo sapien
tgcagttgtgtcctccgggccgtgg

SEQ ID NO: 4348320 - DNA, 25 bp, Homo sapien
ctgcagttgtgtcctccgggccgtg

SEQ ID NO: 4348321 - DNA, 25 bp, Homo sapien
tgctgcagttgtgtcctccgggccg

SEQ ID NO: 4348322 - DNA, 25 bp, Homo sapien
cagttgtgtcctccgggccgtgggg

SEQ ID NO: 4348323 - DNA, 25 bp, Homo sapien
cctcttggcgtacttataaatctct

SEQ ID NO: 4348324 - DNA, 25 bp, Homo sapien
ccgatacctcttggcgtacttataa

SEQ ID NO: 4348325 - DNA, 25 bp, Homo sapien
ctgcggccgatacctcttggcgtac

SEQ ID NO: 4348326 - DNA, 25 bp, Homo sapien
tcttggcgtacttataaatctctgc

SEQ ID NO: 4348327 - DNA, 25 bp, Homo sapien
ttggtgttgaactcattctggtatt

SEQ ID NO: 4348328 - DNA, 25 bp, Homo sapien
cacattggtgttgaactcattctgg

SEQ ID NO: 4348329 - DNA, 25 bp, Homo sapien
tggtgttgaactcattctggtattt

SEQ ID NO: 4348330 - DNA, 25 bp, Homo sapien
cattggtgttgaactcattctggta

SEQ ID NO: 4348331 - DNA, 25 bp, Homo sapien
ggaggttagcccagcggtcaaagct

SEQ ID NO: 4348332 - DNA, 25 bp, Homo sapien
catgacgaatttgcaggccagcaag

SEQ ID NO: 4348333 - DNA, 25 bp, Homo sapien
tcaagtcccatggacgaagacggct

SEQ ID NO: 4348334 - DNA, 25 bp, Homo sapien
acagaacagttcagcgatgaggccc

SEQ ID NO: 4348335 - DNA, 25 bp, Homo sapien
cttccggtactcaggaatctccttg

SEQ ID NO: 4348336 - DNA, 25 bp, Homo sapien
aatctccttggcgtagaggagcttg

SEQ ID NO: 4348337 - DNA, 25 bp, Homo sapien
tgagcggcgtcatgtcctggatctg

SEQ ID NO: 4348338 - DNA, 25 bp, Homo sapien
tagtagcgctgcacgatcttccggt

SEQ ID NO: 4348339 - DNA, 25 bp, Homo sapien
caaagagtctcacccggtcactgaa

SEQ ID NO: 4348340 - DNA, 25 bp, Homo sapien
cacataagtgaccttagcaggcccc

SEQ ID NO: 4348341 - DNA, 25 bp, Homo sapien
tggtcgttttctggatgagccctca

SEQ ID NO: 4348342 - DNA, 25 bp, Homo sapien
cattccacgtaacaaggatgtgtcc

SEQ ID NO: 4348343 - DNA, 25 bp, Homo sapien
actgaatgctcgcttgaatggcttt

SEQ ID NO: 4348344 - DNA, 25 bp, Homo sapien
tcagatgatgttgtgcctgaccaag

SEQ ID NO: 4348345 - DNA, 25 bp, Homo sapien
gagcctggcccggttttcagatgat

SEQ ID NO: 4348346 - DNA, 25 bp, Homo sapien
gtccaagctcatactggctttccca

SEQ ID NO: 4348347 - DNA, 25 bp, Homo sapien
tggcctggtcctgggaacagctgac

SEQ ID NO: 4348348 - DNA, 25 bp, Homo sapien
ctgtgcatgggcctggcctggtcct

SEQ ID NO: 4348349 - DNA, 25 bp, Homo sapien
tctggccctgtgcatgggcctggcc

SEQ ID NO: 4348350 - DNA, 25 bp, Homo sapien
gcctggcctggtcctgggaacagct

SEQ ID NO: 4348351 - DNA, 25 bp, Homo sapien
cctgcgcgatgactgaaaggcaggc

SEQ ID NO: 4348352 - DNA, 25 bp, Homo sapien
aaggcctgcgcgatgactgaaaggc

SEQ ID NO: 4348353 - DNA, 25 bp, Homo sapien
atgactgaaaggcaggcgtcgatgt

SEQ ID NO: 4348354 - DNA, 25 bp, Homo sapien
gcaggcgtcgatgtggtctgtcttg

SEQ ID NO: 4348355 - DNA, 25 bp, Homo sapien
aggatgttcacccagaaccggagag

SEQ ID NO: 4348356 - DNA, 25 bp, Homo sapien
acaaagacagtgagggtagggtggg

SEQ ID NO: 4348357 - DNA, 25 bp, Homo sapien
tgacaaagacagtgagggtagggtg

SEQ ID NO: 4348358 - DNA, 25 bp, Homo sapien
tgtggggtagggtgacaaagacagt

SEQ ID NO: 4348359 - DNA, 25 bp, Homo sapien
agggtgacaaagacagtgagggtag

SEQ ID NO: 4348360 - DNA, 25 bp, Homo sapien
aaagtacttgacagccagtgggggc

SEQ ID NO: 4348361 - DNA, 25 bp, Homo sapien
ctccaggaagtcgaaaaagtacttg

SEQ ID NO: 4348362 - DNA, 25 bp, Homo sapien
gggcttgtcttcacggatactcaga

SEQ ID NO: 4348363 - DNA, 25 bp, Homo sapien
tcttccagatgtgtagggtgtcggg

SEQ ID NO: 4348364 - DNA, 25 bp, Homo sapien
ggtcaggtagatttccgggagcacc

SEQ ID NO: 4348365 - DNA, 25 bp, Homo sapien
tgagacttcttgggctccgccagct

SEQ ID NO: 4348366 - DNA, 25 bp, Homo sapien
ggagcaccttcttgcgatggctctg

SEQ ID NO: 4348367 - DNA, 25 bp, Homo sapien
tccgccagctcgtccgtaggcagca

SEQ ID NO: 4348368 - DNA, 25 bp, Homo sapien
gaaatacttctctgtgtccaagtct

SEQ ID NO: 4348369 - DNA, 25 bp, Homo sapien
aatacttctctgtgtccaagtcttt

SEQ ID NO: 4348370 - DNA, 25 bp, Homo sapien
tacttctctgtgtccaagtctttca

SEQ ID NO: 4348371 - DNA, 25 bp, Homo sapien
ggaaatacttctctgtgtccaagtc

SEQ ID NO: 4348372 - DNA, 25 bp, Homo sapien
ataaataaacacgggagaggagagg

SEQ ID NO: 4348373 - DNA, 25 bp, Homo sapien
gagatccaaagagacagtcagagag

SEQ ID NO: 4348374 - DNA, 25 bp, Homo sapien
acggagacagagatccaaagagaca

SEQ ID NO: 4348375 - DNA, 25 bp, Homo sapien
acagaaacggagacagagatccaaa

SEQ ID NO: 4348376 - DNA, 25 bp, Homo sapien
cactggggcatgggatggaagcccc

SEQ ID NO: 4348377 - DNA, 25 bp, Homo sapien
gatggaagcccctgtccacacgcag

SEQ ID NO: 4348378 - DNA, 25 bp, Homo sapien
ctggggcatgggatggaagcccctg

SEQ ID NO: 4348379 - DNA, 25 bp, Homo sapien
actggggcatgggatggaagcccct

SEQ ID NO: 4348380 - DNA, 25 bp, Homo sapien
tctatgagactcatggccagggagg

SEQ ID NO: 4348381 - DNA, 25 bp, Homo sapien
tcttgtctatgagactcatggccag

SEQ ID NO: 4348382 - DNA, 25 bp, Homo sapien
tgtctatgagactcatggccaggga

SEQ ID NO: 4348383 - DNA, 25 bp, Homo sapien
ccttcttgtctatgagactcatggc

SEQ ID NO: 4348384 - DNA, 25 bp, Homo sapien
tgggccagcgtgttaagcttcttgc

SEQ ID NO: 4348385 - DNA, 25 bp, Homo sapien
tgtcgtccaggtcccgaaggatgta

SEQ ID NO: 4348386 - DNA, 25 bp, Homo sapien
tcccgaaggatgtagctctgtgtgc

SEQ ID NO: 4348387 - DNA, 25 bp, Homo sapien
gttaagcttcttgcggccgtcttcc

SEQ ID NO: 4348388 - DNA, 25 bp, Homo sapien
gggcctcattggatcctctcagtgt

SEQ ID NO: 4348389 - DNA, 25 bp, Homo sapien
gcaggacttgtctcctacagagtaa

SEQ ID NO: 4348390 - DNA, 25 bp, Homo sapien
gttgtccgtagttcactcacactgc

SEQ ID NO: 4348391 - DNA, 25 bp, Homo sapien
gaaaggagtgtttcccgtcaaggca

SEQ ID NO: 4348392 - DNA, 25 bp, Homo sapien
tcttgcagaaggcctccaggatctt

SEQ ID NO: 4348393 - DNA, 25 bp, Homo sapien
cctgtgtcagcgtgtcggtgtccat

SEQ ID NO: 4348394 - DNA, 25 bp, Homo sapien
caaggtcgacgtcctctgcacgcgg

SEQ ID NO: 4348395 - DNA, 25 bp, Homo sapien
agccctggaaggacacgttcaggtt

SEQ ID NO: 4348396 - DNA, 25 bp, Homo sapien
gcagcaggaagaatggctcccccac

SEQ ID NO: 4348397 - DNA, 25 bp, Homo sapien
cgatggagcccttgttgatttgctg

SEQ ID NO: 4348398 - DNA, 25 bp, Homo sapien
cctgtgatggcgtcgatggagccct

SEQ ID NO: 4348399 - DNA, 25 bp, Homo sapien
ccttgcctgtgatggcgtcgatgga

SEQ ID NO: 4348400 - DNA, 25 bp, Homo sapien
tctgcataacaggtcctacgggcct

SEQ ID NO: 4348401 - DNA, 25 bp, Homo sapien
tcttaggtctcagcacagggttgcc

SEQ ID NO: 4348402 - DNA, 25 bp, Homo sapien
tgttatgccccaagcatccgttgag

SEQ ID NO: 4348403 - DNA, 25 bp, Homo sapien
ccttgaagccttcagacagagggag

SEQ ID NO: 4348404 - DNA, 25 bp, Homo sapien
cggccgaggcgtcaatgaggtccac

SEQ ID NO: 4348405 - DNA, 25 bp, Homo sapien
cacagactctgtgcgccgcagcatg

SEQ ID NO: 4348406 - DNA, 25 bp, Homo sapien
aggcgtcaatgaggtccaccagcag

SEQ ID NO: 4348407 - DNA, 25 bp, Homo sapien
ttcttggcggccgaggcgtcaatga

SEQ ID NO: 4348408 - DNA, 25 bp, Homo sapien
gtgcagcgcgatggtcagcagcgag

SEQ ID NO: 4348409 - DNA, 25 bp, Homo sapien
cgtgcagcgcgatggtcagcagcga

SEQ ID NO: 4348410 - DNA, 25 bp, Homo sapien
atgctggtgtagtactccagcttgc

SEQ ID NO: 4348411 - DNA, 25 bp, Homo sapien
gcagcgcgatggtcagcagcgaggc

SEQ ID NO: 4348412 - DNA, 25 bp, Homo sapien
actgcaccttgaggccctaggagct

SEQ ID NO: 4348413 - DNA, 25 bp, Homo sapien
gggaggcaggtgtcaactgcacctt

SEQ ID NO: 4348414 - DNA, 25 bp, Homo sapien
atcgtgccccgtgagccaaggtctt

SEQ ID NO: 4348415 - DNA, 25 bp, Homo sapien
gcccatcgatcccaggagtgcctgt

SEQ ID NO: 4348416 - DNA, 25 bp, Homo sapien
cctcttccatgttgggccggcagct

SEQ ID NO: 4348417 - DNA, 25 bp, Homo sapien
tccagcgcgtggacaaagacgatga

SEQ ID NO: 4348418 - DNA, 25 bp, Homo sapien
tgtcgcgcaccgcaaagtccttctg

SEQ ID NO: 4348419 - DNA, 25 bp, Homo sapien
gagaacaagctaattccctcttcca

SEQ ID NO: 4348420 - DNA, 25 bp, Homo sapien
ggatgcctcctaacctttgtgacag

SEQ ID NO: 4348421 - DNA, 25 bp, Homo sapien
ggagctcattaccttccacggtgga

SEQ ID NO: 4348422 - DNA, 25 bp, Homo sapien
tggaggtaacctggcatcccagtgt

SEQ ID NO: 4348423 - DNA, 25 bp, Homo sapien
ccagtgcttacgacggctgcttgta

SEQ ID NO: 4348424 - DNA, 25 bp, Homo sapien
gggcagcacgtaacgctcttcataa

SEQ ID NO: 4348425 - DNA, 25 bp, Homo sapien
gagctgccctgggagttgagggtct

SEQ ID NO: 4348426 - DNA, 25 bp, Homo sapien
tgggagggcagcacgtaacgctctt

SEQ ID NO: 4348427 - DNA, 25 bp, Homo sapien
gcacgtaacgctcttcataaaggga

SEQ ID NO: 4348428 - DNA, 25 bp, Homo sapien
tgatgtagtcaaacatgggcttgct

SEQ ID NO: 4348429 - DNA, 25 bp, Homo sapien
catcaagtgagcagagaatgacagt

SEQ ID NO: 4348430 - DNA, 25 bp, Homo sapien
gagtctgagctttagcctgaggctg

SEQ ID NO: 4348431 - DNA, 25 bp, Homo sapien
gcacggaattagctccccataaagg

SEQ ID NO: 4348432 - DNA, 25 bp, Homo sapien
tgctcaagggaccctataggctggc

SEQ ID NO: 4348433 - DNA, 25 bp, Homo sapien
tcaagggaccctataggctggcagg

SEQ ID NO: 4348434 - DNA, 25 bp, Homo sapien
agaggtcgagttgccttgaggtggc

SEQ ID NO: 4348435 - DNA, 25 bp, Homo sapien
tcagagaggtcgagttgccttgagg

SEQ ID NO: 4348436 - DNA, 25 bp, Homo sapien
tccttggtgagatctgtcatgtctg

SEQ ID NO: 4348437 - DNA, 25 bp, Homo sapien
tcacgaagtgcttatactccaggaa

SEQ ID NO: 4348438 - DNA, 25 bp, Homo sapien
ggtgagatctgtcatgtctgtctgc

SEQ ID NO: 4348439 - DNA, 25 bp, Homo sapien
aaggtgcgggtcacgaagtgcttat

SEQ ID NO: 4348440 - DNA, 25 bp, Homo sapien
gacacacggacagccgtgagcggcc

SEQ ID NO: 4348441 - DNA, 25 bp, Homo sapien
cggacagccgtgagcggcccgagaa

SEQ ID NO: 4348442 - DNA, 25 bp, Homo sapien
agccgtgagcggcccgagaacccat

SEQ ID NO: 4348443 - DNA, 25 bp, Homo sapien
acacggacagccgtgagcggcccga

SEQ ID NO: 4348444 - DNA, 25 bp, Homo sapien
agccctgcagggtccccgcccacta

SEQ ID NO: 4348445 - DNA, 25 bp, Homo sapien
gccctgcagggtccccgcccactac

SEQ ID NO: 4348446 - DNA, 25 bp, Homo sapien
agggaaagttgaggcccagccctgc

SEQ ID NO: 4348447 - DNA, 25 bp, Homo sapien
ctaggagggaaagttgaggcccagc

SEQ ID NO: 4348448 - DNA, 25 bp, Homo sapien
ctgccagtaacgctcagcacgtcgg

SEQ ID NO: 4348449 - DNA, 25 bp, Homo sapien
ctttgcggatttcctctcggatctg

SEQ ID NO: 4348450 - DNA, 25 bp, Homo sapien
gcacgtcggctcttggtacagaaga

SEQ ID NO: 4348451 - DNA, 25 bp, Homo sapien
gatttcctctcggatctgagattcc

SEQ ID NO: 4348452 - DNA, 25 bp, Homo sapien
aagaagacccatacccatgcagcag

SEQ ID NO: 4348453 - DNA, 25 bp, Homo sapien
tggtatagcccaccagacatgtagg

SEQ ID NO: 4348454 - DNA, 25 bp, Homo sapien
tgtaatattgtcaaggtgcctgccc

SEQ ID NO: 4348455 - DNA, 25 bp, Homo sapien
cctctagtagcgtatgatggctcca

SEQ ID NO: 4348456 - DNA, 25 bp, Homo sapien
gatgacgatggacacgatgatggcc

SEQ ID NO: 4348457 - DNA, 25 bp, Homo sapien
caggacgctgcagatgacgatggac

SEQ ID NO: 4348458 - DNA, 25 bp, Homo sapien
ggacacgatgatggccgtctcgctg

SEQ ID NO: 4348459 - DNA, 25 bp, Homo sapien
gctgcagatgacgatggacacgatg

SEQ ID NO: 4348460 - DNA, 25 bp, Homo sapien
aggtctgccctgctccggcgcccca

SEQ ID NO: 4348461 - DNA, 25 bp, Homo sapien
tgaggggcagatgcttggcagatgg

SEQ ID NO: 4348462 - DNA, 25 bp, Homo sapien
gggcagatgcttggcagatgggcca

SEQ ID NO: 4348463 - DNA, 25 bp, Homo sapien
aggggtggggccaggtctgccctgc

SEQ ID NO: 4348464 - DNA, 25 bp, Homo sapien
cgttgaccgagcagtggatgattct

SEQ ID NO: 4348465 - DNA, 25 bp, Homo sapien
cagggactcgttgaccgagcagtgg

SEQ ID NO: 4348466 - DNA, 25 bp, Homo sapien
tcagagacaatctggatgtcgcagc

SEQ ID NO: 4348467 - DNA, 25 bp, Homo sapien
gagacaatctggatgtcgcagctta

SEQ ID NO: 4348468 - DNA, 25 bp, Homo sapien
ttgacccggtactcgtgactctgga

SEQ ID NO: 4348469 - DNA, 25 bp, Homo sapien
gacccggtactcgtgactctggagc

SEQ ID NO: 4348470 - DNA, 25 bp, Homo sapien
tatcttgacccggtactcgtgactc

SEQ ID NO: 4348471 - DNA, 25 bp, Homo sapien
ttggcctatcttgacccggtactcg

SEQ ID NO: 4348472 - DNA, 25 bp, Homo sapien
tcttggccgtagagaactgtgggtt

SEQ ID NO: 4348473 - DNA, 25 bp, Homo sapien
aagaagtccactggcgctgatgcgt

SEQ ID NO: 4348474 - DNA, 25 bp, Homo sapien
tggataacgagggtgagaggctccc

SEQ ID NO: 4348475 - DNA, 25 bp, Homo sapien
ggtggtgcttgatccacttctccct

SEQ ID NO: 4348476 - DNA, 25 bp, Homo sapien
cggccatggacacattctgcaccat

SEQ ID NO: 4348477 - DNA, 25 bp, Homo sapien
tggacacattctgcaccatgtggaa

SEQ ID NO: 4348478 - DNA, 25 bp, Homo sapien
ccaatgtggtggacggccatggaca

SEQ ID NO: 4348479 - DNA, 25 bp, Homo sapien
tgcaccatgtggaaacgctcaccag

SEQ ID NO: 4348480 - DNA, 25 bp, Homo sapien
aaaacctatcagtgcacctgcagcc

SEQ ID NO: 4348481 - DNA, 25 bp, Homo sapien
agcaaaacctatcagtgcacctgca

SEQ ID NO: 4348482 - DNA, 25 bp, Homo sapien
tgcgggggacagcaaaacctatcag

SEQ ID NO: 4348483 - DNA, 25 bp, Homo sapien
gggacagcaaaacctatcagtgcac

SEQ ID NO: 4348484 - DNA, 25 bp, Homo sapien
gacgctcgaagcgcacacacacagg

SEQ ID NO: 4348485 - DNA, 25 bp, Homo sapien
atggccgtgatgaccgggttctgca

SEQ ID NO: 4348486 - DNA, 25 bp, Homo sapien
gtgaggttgccgtgcacgcagcccc

SEQ ID NO: 4348487 - DNA, 25 bp, Homo sapien
gggttctgcatgtaccagaaggtga

SEQ ID NO: 4348488 - DNA, 25 bp, Homo sapien
tgcaggggtctgtgtcgttcaccag

SEQ ID NO: 4348489 - DNA, 25 bp, Homo sapien
ctggagctcggagcctacatggagg

SEQ ID NO: 4348490 - DNA, 25 bp, Homo sapien
gagctcggagcctacatggaggtca

SEQ ID NO: 4348491 - DNA, 25 bp, Homo sapien
gagcctacatggaggtcattcccat

SEQ ID NO: 4348492 - DNA, 25 bp, Homo sapien
tccttagaggcgttcacggtcacca

SEQ ID NO: 4348493 - DNA, 25 bp, Homo sapien
cttagaggcgttcacggtcaccaca

SEQ ID NO: 4348494 - DNA, 25 bp, Homo sapien
ttagaggcgttcacggtcaccacac

SEQ ID NO: 4348495 - DNA, 25 bp, Homo sapien
taggagaagcggtcccgggacttgc

SEQ ID NO: 4348496 - DNA, 25 bp, Homo sapien
tcagccagcggtccttggcccccac

SEQ ID NO: 4348497 - DNA, 25 bp, Homo sapien
tggtcagccagcggtccttggcccc

SEQ ID NO: 4348498 - DNA, 25 bp, Homo sapien
ggtcagccagcggtccttggccccc

SEQ ID NO: 4348499 - DNA, 25 bp, Homo sapien
agccagcggtccttggcccccacgg

SEQ ID NO: 4348500 - DNA, 25 bp, Homo sapien
gacaccgtgtatctgtcaggcagtg

SEQ ID NO: 4348501 - DNA, 25 bp, Homo sapien
accaccaatccacacgccgtgggcc

SEQ ID NO: 4348502 - DNA, 25 bp, Homo sapien
cccaccgtccaacgggccactcagg

SEQ ID NO: 4348503 - DNA, 25 bp, Homo sapien
gtgggccacgtcactgagccgccgg

SEQ ID NO: 4348504 - DNA, 25 bp, Homo sapien
aggtgacccgagagaggggcgaatg

SEQ ID NO: 4348505 - DNA, 25 bp, Homo sapien
ggtgacccgagagaggggcgaatgg

SEQ ID NO: 4348506 - DNA, 25 bp, Homo sapien
agccatcactccacatgcacaggtg

SEQ ID NO: 4348507 - DNA, 25 bp, Homo sapien
ggctgcccatggcacagttatagac

SEQ ID NO: 4348508 - DNA, 25 bp, Homo sapien
actgggaacagtcggggctgcccat

SEQ ID NO: 4348509 - DNA, 25 bp, Homo sapien
gtgacccaggtcttcgcggcccagg

SEQ ID NO: 4348510 - DNA, 25 bp, Homo sapien
gcagctcggtcagccccgctctgcg

SEQ ID NO: 4348511 - DNA, 25 bp, Homo sapien
acacggggcagctcggtcagccccg

SEQ ID NO: 4348512 - DNA, 25 bp, Homo sapien
ggggcagctcggtcagccccgctct

SEQ ID NO: 4348513 - DNA, 25 bp, Homo sapien
gacacggggcagctcggtcagcccc

SEQ ID NO: 4348514 - DNA, 25 bp, Homo sapien
ccacacacaacaactgtcaagaggt

SEQ ID NO: 4348515 - DNA, 25 bp, Homo sapien
acacacaacaactgtcaagaggtct

SEQ ID NO: 4348516 - DNA, 25 bp, Homo sapien
tgtcaagaggtctgcgccccatcat

SEQ ID NO: 4348517 - DNA, 25 bp, Homo sapien
cacacacaacaactgtcaagaggtc

SEQ ID NO: 4348518 - DNA, 25 bp, Homo sapien
ctgccacgcgaggggagctgaccac

SEQ ID NO: 4348519 - DNA, 25 bp, Homo sapien
cacagctgccacgcgaggggagctg

SEQ ID NO: 4348520 - DNA, 25 bp, Homo sapien
gctgccacgcgaggggagctgacca

SEQ ID NO: 4348521 - DNA, 25 bp, Homo sapien
cctggctcatcaggtccttacaagc

SEQ ID NO: 4348522 - DNA, 25 bp, Homo sapien
ggtccttacaagctctgcagaggga

SEQ ID NO: 4348523 - DNA, 25 bp, Homo sapien
cacgctcaaggttgggcgagccctg

SEQ ID NO: 4348524 - DNA, 25 bp, Homo sapien
ccagatgccacgctcaaggttgggc

SEQ ID NO: 4348525 - DNA, 25 bp, Homo sapien
cgcccctttagttggaggctgagcg

SEQ ID NO: 4348526 - DNA, 25 bp, Homo sapien
tgtccaggaatcgggctggccgccc

SEQ ID NO: 4348527 - DNA, 25 bp, Homo sapien
cacctggctcttccgggtcgtgtgc

SEQ ID NO: 4348528 - DNA, 25 bp, Homo sapien
gaacacctggctcttccgggtcgtg

SEQ ID NO: 4348529 - DNA, 25 bp, Homo sapien
acccacacagcctcgaagatctcct

SEQ ID NO: 4348530 - DNA, 25 bp, Homo sapien
cacctggtcacagcgtacaacagac

SEQ ID NO: 4348531 - DNA, 25 bp, Homo sapien
cctggtcacagcgtacaacagactc

SEQ ID NO: 4348532 - DNA, 25 bp, Homo sapien
ggtcacagcgtacaacagactcatt

SEQ ID NO: 4348533 - DNA, 25 bp, Homo sapien
gagctaagcacaagtccagccctgt

SEQ ID NO: 4348534 - DNA, 25 bp, Homo sapien
tccagggtcacagctcaggctaagg

SEQ ID NO: 4348535 - DNA, 25 bp, Homo sapien
tagttgcaaagacgagcactggttg

SEQ ID NO: 4348536 - DNA, 25 bp, Homo sapien
ttgcagccccgtgcagtcagagtgg

SEQ ID NO: 4348537 - DNA, 25 bp, Homo sapien
gagccacccgtaggcacgggtgcca

SEQ ID NO: 4348538 - DNA, 25 bp, Homo sapien
accaggatgttctgggagccacccg

SEQ ID NO: 4348539 - DNA, 25 bp, Homo sapien
aaaaaggcagtgttggccagaggca

SEQ ID NO: 4348540 - DNA, 25 bp, Homo sapien
aaaaggcagtgttggccagaggcac

SEQ ID NO: 4348541 - DNA, 25 bp, Homo sapien
gaaggagagggtgacacaggggcat

SEQ ID NO: 4348542 - DNA, 25 bp, Homo sapien
cccagcctgcctggttcagtcctgc

SEQ ID NO: 4348543 - DNA, 25 bp, Homo sapien
acaggggcatttcagagaagaggca

SEQ ID NO: 4348544 - DNA, 25 bp, Homo sapien
gaagaggcaggaggactcactgcac

SEQ ID NO: 4348545 - DNA, 25 bp, Homo sapien
ctgctgggaccatgagcagggcagg

SEQ ID NO: 4348546 - DNA, 25 bp, Homo sapien
gactggggaccttggagcagccaca

SEQ ID NO: 4348547 - DNA, 25 bp, Homo sapien
aggactggggaccttggagcagcca

SEQ ID NO: 4348548 - DNA, 25 bp, Homo sapien
gggaccttggagcagccacacccat

SEQ ID NO: 4348549 - DNA, 25 bp, Homo sapien
gggctcccgtatggtttcactgcac

SEQ ID NO: 4348550 - DNA, 25 bp, Homo sapien
cttcgaatagaattaagcatggccc

SEQ ID NO: 4348551 - DNA, 25 bp, Homo sapien
tgccaagcccctcttcgaatagaat

SEQ ID NO: 4348552 - DNA, 25 bp, Homo sapien
ggtttcactgcaccgactccactgg

SEQ ID NO: 4348553 - DNA, 25 bp, Homo sapien
cgtggggtttggtgaggcctcgcac

SEQ ID NO: 4348554 - DNA, 25 bp, Homo sapien
tggttggaaacacaggagtgctgct

SEQ ID NO: 4348555 - DNA, 25 bp, Homo sapien
gttggaaacacaggagtgctgctgg

SEQ ID NO: 4348556 - DNA, 25 bp, Homo sapien
cgagactggttggaaacacaggagt

SEQ ID NO: 4348557 - DNA, 25 bp, Homo sapien
actggttggaaacacaggagtgctg

SEQ ID NO: 4348558 - DNA, 25 bp, Homo sapien
aacagggccactgtgccgacaggca

SEQ ID NO: 4348559 - DNA, 25 bp, Homo sapien
agggccactgtgccgacaggcagct

SEQ ID NO: 4348560 - DNA, 25 bp, Homo sapien
actgtgccgacaggcagctggtaca

SEQ ID NO: 4348561 - DNA, 25 bp, Homo sapien
gccactgtgccgacaggcagctggt

SEQ ID NO: 4348562 - DNA, 25 bp, Homo sapien
tcaactcctggttccccacccctca

SEQ ID NO: 4348563 - DNA, 25 bp, Homo sapien
acccctcaactcatccctgtcccag

SEQ ID NO: 4348564 - DNA, 25 bp, Homo sapien
ccctcaactcatccctgtcccagga

SEQ ID NO: 4348565 - DNA, 25 bp, Homo sapien
aagacaaggaggcccctcaactcct

SEQ ID NO: 4348566 - DNA, 25 bp, Homo sapien
gccttgacgatgttccgcccattga

SEQ ID NO: 4348567 - DNA, 25 bp, Homo sapien
cggctgcagtcgtagatggtgaaat

SEQ ID NO: 4348568 - DNA, 25 bp, Homo sapien
tagatggtgaaattggccttgacga

SEQ ID NO: 4348569 - DNA, 25 bp, Homo sapien
gcccattgaccctcacagacatctc

SEQ ID NO: 4348570 - DNA, 25 bp, Homo sapien
cacagtgcggatgttgttcccatag

SEQ ID NO: 4348571 - DNA, 25 bp, Homo sapien
aaactggtccctcggcaggaggttg

SEQ ID NO: 4348572 - DNA, 25 bp, Homo sapien
aatctggtgaccaaaggcagggcct

SEQ ID NO: 4348573 - DNA, 25 bp, Homo sapien
gcaggctgcccgagatctgcaggat

SEQ ID NO: 4348574 - DNA, 25 bp, Homo sapien
atcgatctcggaaggcaggacggtc

SEQ ID NO: 4348575 - DNA, 25 bp, Homo sapien
tgctggctggaattggtgcagtcct

SEQ ID NO: 4348576 - DNA, 25 bp, Homo sapien
gtactcctggcgcacatcgatctcg

SEQ ID NO: 4348577 - DNA, 25 bp, Homo sapien
tggcactggtccagaaatgctgctg

SEQ ID NO: 4348578 - DNA, 25 bp, Homo sapien
gcacgttgcaggcggcgaccttcac

SEQ ID NO: 4348579 - DNA, 25 bp, Homo sapien
aggcgtccgccgcacccacgcagtc

SEQ ID NO: 4348580 - DNA, 25 bp, Homo sapien
tccccacaggtggagtgcacgttgc

SEQ ID NO: 4348581 - DNA, 25 bp, Homo sapien
cagggcacaccagccgcagtaggcg

SEQ ID NO: 4348582 - DNA, 25 bp, Homo sapien
tcaggtaaaggtaaccggagtctgc

SEQ ID NO: 4348583 - DNA, 25 bp, Homo sapien
cctgcatgctctcgttcaggttgat

SEQ ID NO: 4348584 - DNA, 25 bp, Homo sapien
atgacatggtgcacgggctccccat

SEQ ID NO: 4348585 - DNA, 25 bp, Homo sapien
tgggtcaaactgcatgacatggtgc

SEQ ID NO: 4348586 - DNA, 25 bp, Homo sapien
tccttctgggctcgtctccaaggca

SEQ ID NO: 4348587 - DNA, 25 bp, Homo sapien
ccttctgggctcgtctccaaggcat

SEQ ID NO: 4348588 - DNA, 25 bp, Homo sapien
ctccttctgggctcgtctccaaggc

SEQ ID NO: 4348589 - DNA, 25 bp, Homo sapien
gggtacagttaactctagacaccag

SEQ ID NO: 4348590 - DNA, 25 bp, Homo sapien
agctccaggaatctcggggccacgg

SEQ ID NO: 4348591 - DNA, 25 bp, Homo sapien
cagttaactctagacaccagtcacc

SEQ ID NO: 4348592 - DNA, 25 bp, Homo sapien
cacgggctggggtacagttaactct

SEQ ID NO: 4348593 - DNA, 25 bp, Homo sapien
agggctggggaggagaaatgaatga

SEQ ID NO: 4348594 - DNA, 25 bp, Homo sapien
ctgggacggggtggctggcagggct

SEQ ID NO: 4348595 - DNA, 25 bp, Homo sapien
ggctggggaggagaaatgaatgagc

SEQ ID NO: 4348596 - DNA, 25 bp, Homo sapien
ctggggaggagaaatgaatgagcat

SEQ ID NO: 4348597 - DNA, 25 bp, Homo sapien
tggccacggccacggaggtgaggcc

SEQ ID NO: 4348598 - DNA, 25 bp, Homo sapien
ccgctgtgtagttgttgacgctggc

SEQ ID NO: 4348599 - DNA, 25 bp, Homo sapien
cttgagaagcctcccgttgaccgtg

SEQ ID NO: 4348600 - DNA, 25 bp, Homo sapien
cggaacacgggcgtggccttcaggg

SEQ ID NO: 4348601 - DNA, 25 bp, Homo sapien
tgggaaaaggcggaccaggcgccca

SEQ ID NO: 4348602 - DNA, 25 bp, Homo sapien
taaatgtcccttcagcagccaatgc

SEQ ID NO: 4348603 - DNA, 25 bp, Homo sapien
cccagacggcaagttttcaagatgt

SEQ ID NO: 4348604 - DNA, 25 bp, Homo sapien
tgaggcattcgtactccccttggca

SEQ ID NO: 4348605 - DNA, 25 bp, Homo sapien
ttcccatggcagcacatgcatgacg

SEQ ID NO: 4348606 - DNA, 25 bp, Homo sapien
gctgcttggagccttgcgcaaacat

SEQ ID NO: 4348607 - DNA, 25 bp, Homo sapien
ccagagtcatcgcacgaccgctgtg

SEQ ID NO: 4348608 - DNA, 25 bp, Homo sapien
agtcatcgcacgaccgctgtggaca

SEQ ID NO: 4348609 - DNA, 25 bp, Homo sapien
aacatctccgggctggattccatga

SEQ ID NO: 4348610 - DNA, 25 bp, Homo sapien
ccagtgccaaacacagttgcctgcg

SEQ ID NO: 4348611 - DNA, 25 bp, Homo sapien
tccattcagcgactccccactgaga

SEQ ID NO: 4348612 - DNA, 25 bp, Homo sapien
tgccaaacacagttgcctgcgagat

SEQ ID NO: 4348613 - DNA, 25 bp, Homo sapien
gagacccccagtgccaaacacagtt

SEQ ID NO: 4348614 - DNA, 25 bp, Homo sapien
cggtgcgcgcagctcggatggcggc

SEQ ID NO: 4348615 - DNA, 25 bp, Homo sapien
gatggcggctcgcacgtcggcgaag

SEQ ID NO: 4348616 - DNA, 25 bp, Homo sapien
gggcgccggttccacgaagcaggcg

SEQ ID NO: 4348617 - DNA, 25 bp, Homo sapien
ctggatgttgagcttgcgctcacag

SEQ ID NO: 4348618 - DNA, 25 bp, Homo sapien
ccgggctgggaagaccgacaccagg

SEQ ID NO: 4348619 - DNA, 25 bp, Homo sapien
ctcgaagacagcaaagagccgctcc

SEQ ID NO: 4348620 - DNA, 25 bp, Homo sapien
cgctcccgggctgggaagaccgaca

SEQ ID NO: 4348621 - DNA, 25 bp, Homo sapien
gggctgggaagaccgacaccaggcg

SEQ ID NO: 4348622 - DNA, 25 bp, Homo sapien
tcgccgcggcccgcgccgcccgcgc

SEQ ID NO: 4348623 - DNA, 25 bp, Homo sapien
ggtcgccgcggcccgcgccgcccgc

SEQ ID NO: 4348624 - DNA, 25 bp, Homo sapien
ctgtagaggtcgccgcggcccgcgc

SEQ ID NO: 4348625 - DNA, 25 bp, Homo sapien
gccgcggcccgcgccgcccgcgcac

SEQ ID NO: 4348626 - DNA, 25 bp, Homo sapien
aggactcggtgagcttcttggcgtc

SEQ ID NO: 4348627 - DNA, 25 bp, Homo sapien
tgcaagcccaactggatgtaggact

SEQ ID NO: 4348628 - DNA, 25 bp, Homo sapien
cctcgctgttgagcgccaggtacgc

SEQ ID NO: 4348629 - DNA, 25 bp, Homo sapien
aggtacgcgtaggactgtgcacccg

SEQ ID NO: 4348630 - DNA, 25 bp, Homo sapien
gctccttggcgccctgcttgatctt

SEQ ID NO: 4348631 - DNA, 25 bp, Homo sapien
cgtgttctcgaagcggtggtcctcc

SEQ ID NO: 4348632 - DNA, 25 bp, Homo sapien
agcttggccaggtcgccgcgcgtgt

SEQ ID NO: 4348633 - DNA, 25 bp, Homo sapien
ccagggagcggatggcgatctcggg

SEQ ID NO: 4348634 - DNA, 25 bp, Homo sapien
tgccgtaaccggtgtacgtggcgcc

SEQ ID NO: 4348635 - DNA, 25 bp, Homo sapien
gaaggagctgccgtaaccggtgtac

SEQ ID NO: 4348636 - DNA, 25 bp, Homo sapien
gcggttgcgcgggaagaaggagctg

SEQ ID NO: 4348637 - DNA, 25 bp, Homo sapien
accggtgtacgtggcgcccacgagc

SEQ ID NO: 4348638 - DNA, 25 bp, Homo sapien
aagcgcacggccacggccgagatgt

SEQ ID NO: 4348639 - DNA, 25 bp, Homo sapien
ccgccacgttcagcatgctggggaa

SEQ ID NO: 4348640 - DNA, 25 bp, Homo sapien
gaggcagaactagccccacggtgga

SEQ ID NO: 4348641 - DNA, 25 bp, Homo sapien
gacgcgttcgggtggttggccgcca

SEQ ID NO: 4348642 - DNA, 25 bp, Homo sapien
gtagttgtccgtgaggcgccgcggg

SEQ ID NO: 4348643 - DNA, 25 bp, Homo sapien
tcttgttgtagttgtccgtgaggcg

SEQ ID NO: 4348644 - DNA, 25 bp, Homo sapien
ttgtagttgtccgtgaggcgccgcg

SEQ ID NO: 4348645 - DNA, 25 bp, Homo sapien
ttgttgtagttgtccgtgaggcgcc

SEQ ID NO: 4348646 - DNA, 25 bp, Homo sapien
ggcagctgcggagcgtgacacagcg

SEQ ID NO: 4348647 - DNA, 25 bp, Homo sapien
gagcgtgacacagcgggctgtcggg

SEQ ID NO: 4348648 - DNA, 25 bp, Homo sapien
tgcggagcgtgacacagcgggctgt

SEQ ID NO: 4348649 - DNA, 25 bp, Homo sapien
ccaggctcaggttggcgcccgacag

SEQ ID NO: 4348650 - DNA, 25 bp, Homo sapien
ctgatagaggcggttgacggccgcc

SEQ ID NO: 4348651 - DNA, 25 bp, Homo sapien
tagaggcggttgacggccgccaggt

SEQ ID NO: 4348652 - DNA, 25 bp, Homo sapien
gaagttgttggtgggcgtgggcgag

SEQ ID NO: 4348653 - DNA, 25 bp, Homo sapien
ccgcgccgtccagggcgaagttgtt

SEQ ID NO: 4348654 - DNA, 25 bp, Homo sapien
ccgcggcggcgtctggaacggcggg

SEQ ID NO: 4348655 - DNA, 25 bp, Homo sapien
gggcgctaaggggtgcgccgcccgc

SEQ ID NO: 4348656 - DNA, 25 bp, Homo sapien
caccgcggcggcgtctggaacggcg

SEQ ID NO: 4348657 - DNA, 25 bp, Homo sapien
ggcaccgcggcggcgtctggaacgg

SEQ ID NO: 4348658 - DNA, 25 bp, Homo sapien
cggcgcggcgagtgcatggggcgag

SEQ ID NO: 4348659 - DNA, 25 bp, Homo sapien
ccgggtcagcctcgccgcgcagccc

SEQ ID NO: 4348660 - DNA, 25 bp, Homo sapien
cggcgagtgcatggggcgaggcgcg

SEQ ID NO: 4348661 - DNA, 25 bp, Homo sapien
gcccgggtcagcctcgccgcgcagc

SEQ ID NO: 4348662 - DNA, 25 bp, Homo sapien
caccccagtccatccgctggtctct

SEQ ID NO: 4348663 - DNA, 25 bp, Homo sapien
tcctcactcacatcctcagtgcccc

SEQ ID NO: 4348664 - DNA, 25 bp, Homo sapien
aggcgcacatcgtgccacccgtggg

SEQ ID NO: 4348665 - DNA, 25 bp, Homo sapien
ggactgcccgtgggactgtgtccct

SEQ ID NO: 4348666 - DNA, 25 bp, Homo sapien
tggcccctgaagtgttccctctctg

SEQ ID NO: 4348667 - DNA, 25 bp, Homo sapien
tcattcctgcatgtgaacgacgccc

SEQ ID NO: 4348668 - DNA, 25 bp, Homo sapien
taatgggcggcattctcagacgtcc

SEQ ID NO: 4348669 - DNA, 25 bp, Homo sapien
tcttgaccgtgtttccagacagcag

SEQ ID NO: 4348670 - DNA, 25 bp, Homo sapien
tctccaggcgacaaccgcctgagtg

SEQ ID NO: 4348671 - DNA, 25 bp, Homo sapien
ccatctccaggcgacaaccgcctga

SEQ ID NO: 4348672 - DNA, 25 bp, Homo sapien
tccaggcgacaaccgcctgagtggg

SEQ ID NO: 4348673 - DNA, 25 bp, Homo sapien
tggctgccatctccaggcgacaacc

SEQ ID NO: 4348674 - DNA, 25 bp, Homo sapien
gtaggtgcttaatgaccacatcccc

SEQ ID NO: 4348675 - DNA, 25 bp, Homo sapien
aggcgctccctgcacagacagtagg

SEQ ID NO: 4348676 - DNA, 25 bp, Homo sapien
atgaccacatccccaatgacaggag

SEQ ID NO: 4348677 - DNA, 25 bp, Homo sapien
ggaggcaggcgctccctgcacagac

SEQ ID NO: 4348678 - DNA, 25 bp, Homo sapien
ccaactcagtggggactgacaaggc

SEQ ID NO: 4348679 - DNA, 25 bp, Homo sapien
actcagtggggactgacaaggcccc

SEQ ID NO: 4348680 - DNA, 25 bp, Homo sapien
caactcagtggggactgacaaggcc

SEQ ID NO: 4348681 - DNA, 25 bp, Homo sapien
aactcagtggggactgacaaggccc

SEQ ID NO: 4348682 - DNA, 25 bp, Homo sapien
ggcacaatcccaaccgctctaggat

SEQ ID NO: 4348683 - DNA, 25 bp, Homo sapien
tcggaccagctgcacgattctgaga

SEQ ID NO: 4348684 - DNA, 25 bp, Homo sapien
agcagggtcccggaatactgtggtc

SEQ ID NO: 4348685 - DNA, 25 bp, Homo sapien
acacacagggcgtacaggagaggct

SEQ ID NO: 4348686 - DNA, 25 bp, Homo sapien
ctaataaatgttgggctgggcagat

SEQ ID NO: 4348687 - DNA, 25 bp, Homo sapien
tactaataaatgttgggctgggcag

SEQ ID NO: 4348688 - DNA, 25 bp, Homo sapien
cactactaataaatgttgggctggg

SEQ ID NO: 4348689 - DNA, 25 bp, Homo sapien
gatcactactaataaatgttgggct

SEQ ID NO: 4348690 - DNA, 25 bp, Homo sapien
tataatgtgtgttcgtgtgcatggg

SEQ ID NO: 4348691 - DNA, 25 bp, Homo sapien
cagggataccccattgtgtgtgtgc

SEQ ID NO: 4348692 - DNA, 25 bp, Homo sapien
cctgtctcagggataccccattgtg

SEQ ID NO: 4348693 - DNA, 25 bp, Homo sapien
cagcctgtgaaagcccctgtctcag

SEQ ID NO: 4348694 - DNA, 25 bp, Homo sapien
tcaagggtcctccggctgagggctg

SEQ ID NO: 4348695 - DNA, 25 bp, Homo sapien
tgagggctgcaccccgcctgccccg

SEQ ID NO: 4348696 - DNA, 25 bp, Homo sapien
gctgcaccccgcctgccccggtggc

SEQ ID NO: 4348697 - DNA, 25 bp, Homo sapien
gggctgcaccccgcctgccccggtg

SEQ ID NO: 4348698 - DNA, 25 bp, Homo sapien
ctgtcccgtccaccgctgggacctg

SEQ ID NO: 4348699 - DNA, 25 bp, Homo sapien
cagctgtgtcgtttgattaacgtct

SEQ ID NO: 4348700 - DNA, 25 bp, Homo sapien
ttgattaacgtctgcagatggcaca

SEQ ID NO: 4348701 - DNA, 25 bp, Homo sapien
gtcgtttgattaacgtctgcagatg

SEQ ID NO: 4348702 - DNA, 25 bp, Homo sapien
attggccgggcagcaggggagcagc

SEQ ID NO: 4348703 - DNA, 25 bp, Homo sapien
caaggatagaattggccgggcagca

SEQ ID NO: 4348704 - DNA, 25 bp, Homo sapien
cccaaggatagaattggccgggcag

SEQ ID NO: 4348705 - DNA, 25 bp, Homo sapien
tggccgggcagcaggggagcagcac

SEQ ID NO: 4348706 - DNA, 25 bp, Homo sapien
gggagcctccatcccagaaaagagg

SEQ ID NO: 4348707 - DNA, 25 bp, Homo sapien
gggcaccttcacatcctcagctgga

SEQ ID NO: 4348708 - DNA, 25 bp, Homo sapien
aggggcaccttcacatcctcagctg

SEQ ID NO: 4348709 - DNA, 25 bp, Homo sapien
agaggcggtgcaggccagccacggg

SEQ ID NO: 4348710 - DNA, 25 bp, Homo sapien
cagtgcaaggtgcttatccccatcc

SEQ ID NO: 4348711 - DNA, 25 bp, Homo sapien
ctccacagtgcaaggtgcttatccc

SEQ ID NO: 4348712 - DNA, 25 bp, Homo sapien
atccccatccagacagaagcgtgca

SEQ ID NO: 4348713 - DNA, 25 bp, Homo sapien
cagtctcctcaccagacctcaaggc

SEQ ID NO: 4348714 - DNA, 25 bp, Homo sapien
gtaagtttgactctcccctctgctt

SEQ ID NO: 4348715 - DNA, 25 bp, Homo sapien
gggtcatcacactagcgtccctttc

SEQ ID NO: 4348716 - DNA, 25 bp, Homo sapien
ggagactcctgagcaggcagtgagg

SEQ ID NO: 4348717 - DNA, 25 bp, Homo sapien
tggccctcctgtgtaagtttgactc

SEQ ID NO: 4348718 - DNA, 25 bp, Homo sapien
tgtagcatagccgacactggcgtgg

SEQ ID NO: 4348719 - DNA, 25 bp, Homo sapien
ggagagcgaagacgtcctagagggc

SEQ ID NO: 4348720 - DNA, 25 bp, Homo sapien
atagccgacactggcgtggatatgc

SEQ ID NO: 4348721 - DNA, 25 bp, Homo sapien
ggtgcgaagtgtagcatagccgaca

SEQ ID NO: 4348722 - DNA, 25 bp, Homo sapien
tgctcatcataaagccaccatcttt

SEQ ID NO: 4348723 - DNA, 25 bp, Homo sapien
tgatagatagaaaccgtcccagggc

SEQ ID NO: 4348724 - DNA, 25 bp, Homo sapien
tctcaaaacaaaggcggcagagggc

SEQ ID NO: 4348725 - DNA, 25 bp, Homo sapien
tatgtcgggacaccaaaaagcagca

SEQ ID NO: 4348726 - DNA, 25 bp, Homo sapien
taaatgcgtacaacttctgggtctg

SEQ ID NO: 4348727 - DNA, 25 bp, Homo sapien
aatcctattagaaaccataaggaag

SEQ ID NO: 4348728 - DNA, 25 bp, Homo sapien
atcctattagaaaccataaggaagc

SEQ ID NO: 4348729 - DNA, 25 bp, Homo sapien
tccaggattagcgtaagtggccaac

SEQ ID NO: 4348730 - DNA, 25 bp, Homo sapien
tgcccttcggtgtgctccagattgt

SEQ ID NO: 4348731 - DNA, 25 bp, Homo sapien
gctgcatgcactcgccagagggtag

SEQ ID NO: 4348732 - DNA, 25 bp, Homo sapien
catgtgttcttccacggacaacgaa

SEQ ID NO: 4348733 - DNA, 25 bp, Homo sapien
taaagtgctgaacgtcctgttgcga

SEQ ID NO: 4348734 - DNA, 25 bp, Homo sapien
ttccacatagctgaagagggcgtcc

SEQ ID NO: 4348735 - DNA, 25 bp, Homo sapien
aaggttccgggcagtggcattctcc

SEQ ID NO: 4348736 - DNA, 25 bp, Homo sapien
gatgagtttgcccagaaggttccgg

SEQ ID NO: 4348737 - DNA, 25 bp, Homo sapien
aaagcccactatgacttgttagccc

SEQ ID NO: 4348738 - DNA, 25 bp, Homo sapien
caacagactccgttaacttaggcat

SEQ ID NO: 4348739 - DNA, 25 bp, Homo sapien
tgttagcccctacttagagatggcc

SEQ ID NO: 4348740 - DNA, 25 bp, Homo sapien
ttaactctttcaaccgactgccagc

SEQ ID NO: 4348741 - DNA, 25 bp, Homo sapien
tcttacacagttggtataagctttt

SEQ ID NO: 4348742 - DNA, 25 bp, Homo sapien
ttctaaccctactgtattttgcatt

SEQ ID NO: 4348743 - DNA, 25 bp, Homo sapien
tctttctaaccctactgtattttgc

SEQ ID NO: 4348744 - DNA, 25 bp, Homo sapien
agtaggtatactcttacacagttgg

SEQ ID NO: 4348745 - DNA, 25 bp, Homo sapien
ctggtggagctctgttaggtcattt

SEQ ID NO: 4348746 - DNA, 25 bp, Homo sapien
tgtcccgggcccgttcataggactg

SEQ ID NO: 4348747 - DNA, 25 bp, Homo sapien
ttagctgttcttccaatcgttcaca

SEQ ID NO: 4348748 - DNA, 25 bp, Homo sapien
cataggactgatacgcgattttttc

SEQ ID NO: 4348749 - DNA, 25 bp, Homo sapien
ttacgatgttactaaactctattta

SEQ ID NO: 4348750 - DNA, 25 bp, Homo sapien
cgatgttactaaactctatttagtt

SEQ ID NO: 4348751 - DNA, 25 bp, Homo sapien
atgttactaaactctatttagttct

SEQ ID NO: 4348752 - DNA, 25 bp, Homo sapien
tacgatgttactaaactctatttag

SEQ ID NO: 4348753 - DNA, 25 bp, Homo sapien
atctttcaaactatagatactttaa

SEQ ID NO: 4348754 - DNA, 25 bp, Homo sapien
ggaaatctacctactccaaagggca

SEQ ID NO: 4348755 - DNA, 25 bp, Homo sapien
gctaatgcatgtgctcagtccaggt

SEQ ID NO: 4348756 - DNA, 25 bp, Homo sapien
tgcaactcgctagcttgggtgatcc

SEQ ID NO: 4348757 - DNA, 25 bp, Homo sapien
ccatattatgtctagaggtgctcca

SEQ ID NO: 4348758 - DNA, 25 bp, Homo sapien
tatgtctccgacttacactaaatgg

SEQ ID NO: 4348759 - DNA, 25 bp, Homo sapien
ttaatgagcagctaacgttctgtcc

SEQ ID NO: 4348760 - DNA, 25 bp, Homo sapien
caaaggtggctcctgagagacctgt

SEQ ID NO: 4348761 - DNA, 25 bp, Homo sapien
tatacagggaattattggaacaaca

SEQ ID NO: 4348762 - DNA, 25 bp, Homo sapien
caaatttgttccgaatgagtgaggc

SEQ ID NO: 4348763 - DNA, 25 bp, Homo sapien
tgggctttgagactacagcgcctgc

SEQ ID NO: 4348764 - DNA, 25 bp, Homo sapien
gagaagctggaaaacccacctttga

SEQ ID NO: 4348765 - DNA, 25 bp, Homo sapien
tgtagtagtgcatcaaatcctgagc

SEQ ID NO: 4348766 - DNA, 25 bp, Homo sapien
tcccgggctgtttgtgcaatcttga

SEQ ID NO: 4348767 - DNA, 25 bp, Homo sapien
tgccatcggtactggaggccactgc

SEQ ID NO: 4348768 - DNA, 25 bp, Homo sapien
tgagggtctggtgttccatccacag

SEQ ID NO: 4348769 - DNA, 25 bp, Homo sapien
ctgcactggatgtttgggcaaggct

SEQ ID NO: 4348770 - DNA, 25 bp, Homo sapien
tgaagcttctagtggatccctgggc

SEQ ID NO: 4348771 - DNA, 25 bp, Homo sapien
tctgccaaacaagcatccgtgtgtg

SEQ ID NO: 4348772 - DNA, 25 bp, Homo sapien
caaatgaggacagctaccactggga

SEQ ID NO: 4348773 - DNA, 25 bp, Homo sapien
tgtgcactgccagagaaagcttgga

SEQ ID NO: 4348774 - DNA, 25 bp, Homo sapien
gactgttttagcctgggtacatctc

SEQ ID NO: 4348775 - DNA, 25 bp, Homo sapien
tagctcccaaaggaaatcctaagtg

SEQ ID NO: 4348776 - DNA, 25 bp, Homo sapien
tcctcattgactgttttagcctggg

SEQ ID NO: 4348777 - DNA, 25 bp, Homo sapien
ggtacatctcttcttagctcccaaa

SEQ ID NO: 4348778 - DNA, 25 bp, Homo sapien
ggcatccatgggttccagcatcctc

SEQ ID NO: 4348779 - DNA, 25 bp, Homo sapien
tcttgacattttggccactatggca

SEQ ID NO: 4348780 - DNA, 25 bp, Homo sapien
ttaaccagttactcttgacattttg

SEQ ID NO: 4348781 - DNA, 25 bp, Homo sapien
tctttgtgacaaataatgttctctt

SEQ ID NO: 4348782 - DNA, 25 bp, Homo sapien
atataacaataaagtgactcactcc

SEQ ID NO: 4348783 - DNA, 25 bp, Homo sapien
cccaaattggagtgcagtgcgcgat

SEQ ID NO: 4348784 - DNA, 25 bp, Homo sapien
aaatataacaataaagtgactcact

SEQ ID NO: 4348785 - DNA, 25 bp, Homo sapien
cactgcacttggcttgaaacatttt

SEQ ID NO: 4348786 - DNA, 25 bp, Homo sapien
gttggtgatgagaaaatacccctca

SEQ ID NO: 4348787 - DNA, 25 bp, Homo sapien
taataggtggacagtatgggctcaa

SEQ ID NO: 4348788 - DNA, 25 bp, Homo sapien
gcaataaatgtggaagacctctgtt

SEQ ID NO: 4348789 - DNA, 25 bp, Homo sapien
tccttcagggagctcatggccctat

SEQ ID NO: 4348790 - DNA, 25 bp, Homo sapien
acccaactgataattgtaaaatagg

SEQ ID NO: 4348791 - DNA, 25 bp, Homo sapien
aggacaatatgggatacagttcttc

SEQ ID NO: 4348792 - DNA, 25 bp, Homo sapien
ggacaatatgggatacagttcttca

SEQ ID NO: 4348793 - DNA, 25 bp, Homo sapien
caactgataattgtaaaataggaca

SEQ ID NO: 4348794 - DNA, 25 bp, Homo sapien
ggcttttatctcatcggtctactaa

SEQ ID NO: 4348795 - DNA, 25 bp, Homo sapien
tagtgctggcacataacaaatgcta

SEQ ID NO: 4348796 - DNA, 25 bp, Homo sapien
cacttagatggctgatggacacctg

SEQ ID NO: 4348797 - DNA, 25 bp, Homo sapien
taaaaagtttctgttgaggtgacca

SEQ ID NO: 4348798 - DNA, 25 bp, Homo sapien
tctttatggtagattaatagccaca

SEQ ID NO: 4348799 - DNA, 25 bp, Homo sapien
gcacatctgatttggccttctttat

SEQ ID NO: 4348800 - DNA, 25 bp, Homo sapien
catcagaattgtgttgttgagagga

SEQ ID NO: 4348801 - DNA, 25 bp, Homo sapien
tggatttcccactcctgtcaagagg

SEQ ID NO: 4348802 - DNA, 25 bp, Homo sapien
gctctaatcataccaactaacctct

SEQ ID NO: 4348803 - DNA, 25 bp, Homo sapien
tcttccctctcttaattattgctct

SEQ ID NO: 4348804 - DNA, 25 bp, Homo sapien
gataactgatacactgtattaaatc

SEQ ID NO: 4348805 - DNA, 25 bp, Homo sapien
ctgtattaaatctctcacactccca

SEQ ID NO: 4348806 - DNA, 25 bp, Homo sapien
cattacacacaagagacgggacact

SEQ ID NO: 4348807 - DNA, 25 bp, Homo sapien
catgcctggcatcttcgaatttaac

SEQ ID NO: 4348808 - DNA, 25 bp, Homo sapien
gagcatgtccatacagctacagagc

SEQ ID NO: 4348809 - DNA, 25 bp, Homo sapien
cctggctgagatctactgctgaaaa

SEQ ID NO: 4348810 - DNA, 25 bp, Homo sapien
tatgccgaataaccctcaggtttct

SEQ ID NO: 4348811 - DNA, 25 bp, Homo sapien
atatacaacatacggtttccgagga

SEQ ID NO: 4348812 - DNA, 25 bp, Homo sapien
gaggaggaggaatatgccgaataac

SEQ ID NO: 4348813 - DNA, 25 bp, Homo sapien
aacatacggtttccgaggagagtga

SEQ ID NO: 4348814 - DNA, 25 bp, Homo sapien
gaggtcagcagagacttactccagc

SEQ ID NO: 4348815 - DNA, 25 bp, Homo sapien
gccctgtgaggctgaattctaccct

SEQ ID NO: 4348816 - DNA, 25 bp, Homo sapien
gagataatcttcagcccagttaagc

SEQ ID NO: 4348817 - DNA, 25 bp, Homo sapien
caagaggattcagggcatgttggca

SEQ ID NO: 4348818 - DNA, 25 bp, Homo sapien
tgactttactatggaacagggagaa

SEQ ID NO: 4348819 - DNA, 25 bp, Homo sapien
tgtactacagcactaatgggaaggt

SEQ ID NO: 4348820 - DNA, 25 bp, Homo sapien
gaagttcttcaatagttcagtggga

SEQ ID NO: 4348821 - DNA, 25 bp, Homo sapien
tgggcactacgacctagctgaagaa

SEQ ID NO: 4348822 - DNA, 25 bp, Homo sapien
ggtattcctgccttatagcttcact

SEQ ID NO: 4348823 - DNA, 25 bp, Homo sapien
caatgtactcactttgcagagatgt

SEQ ID NO: 4348824 - DNA, 25 bp, Homo sapien
taaaccatggtgtaccctcctacaa

SEQ ID NO: 4348825 - DNA, 25 bp, Homo sapien
tgaaggttcctttctagccccagaa

SEQ ID NO: 4348826 - DNA, 25 bp, Homo sapien
gaaaagtcaacagccactcattatt

SEQ ID NO: 4348827 - DNA, 25 bp, Homo sapien
gtatcaggaatgcaatgctggttca

SEQ ID NO: 4348828 - DNA, 25 bp, Homo sapien
tataccataaccaagcagggtttgt

SEQ ID NO: 4348829 - DNA, 25 bp, Homo sapien
ggtaagcaacattagcccagagaag

SEQ ID NO: 4348830 - DNA, 25 bp, Homo sapien
aatttcatacttactggctcaagcc

SEQ ID NO: 4348831 - DNA, 25 bp, Homo sapien
tttcatacttactggctcaagccat

SEQ ID NO: 4348832 - DNA, 25 bp, Homo sapien
atttcatacttactggctcaagcca

SEQ ID NO: 4348833 - DNA, 25 bp, Homo sapien
cagtgctttttggatctgtcccaca

SEQ ID NO: 4348834 - DNA, 25 bp, Homo sapien
ggacttggcaatggtctaaccccta

SEQ ID NO: 4348835 - DNA, 25 bp, Homo sapien
tactttctaggtcaatgggattccc

SEQ ID NO: 4348836 - DNA, 25 bp, Homo sapien
cagccagaactccaatgtcagttaa

SEQ ID NO: 4348837 - DNA, 25 bp, Homo sapien
ccagcaagcagcatttcattcagaa

SEQ ID NO: 4348838 - DNA, 25 bp, Homo sapien
gaaaacagagtatttcaccagcaag

SEQ ID NO: 4348839 - DNA, 25 bp, Homo sapien
tcagaatagcctaccaacctgtttg

SEQ ID NO: 4348840 - DNA, 25 bp, Homo sapien
cagtaagggtttggacatttcattc

SEQ ID NO: 4348841 - DNA, 25 bp, Homo sapien
tcatgactcaagacagtaaggagag

SEQ ID NO: 4348842 - DNA, 25 bp, Homo sapien
agcagcctctatgagctctcttgct

SEQ ID NO: 4348843 - DNA, 25 bp, Homo sapien
gcctctatgagctctcttgctttcc

SEQ ID NO: 4348844 - DNA, 25 bp, Homo sapien
gactcaagacagtaaggagaggagc

SEQ ID NO: 4348845 - DNA, 25 bp, Homo sapien
catcatctgctacaatacagtacag

SEQ ID NO: 4348846 - DNA, 25 bp, Homo sapien
tcaaagctgcgaacatggtagaagc

SEQ ID NO: 4348847 - DNA, 25 bp, Homo sapien
tacagtacagcaggttatttggcac

SEQ ID NO: 4348848 - DNA, 25 bp, Homo sapien
gcctggcagtgatttcgttcaaagc

SEQ ID NO: 4348849 - DNA, 25 bp, Homo sapien
ctcttgggcttgtatgatgagatta

SEQ ID NO: 4348850 - DNA, 25 bp, Homo sapien
gcttgtatgatgagattataaaaca

SEQ ID NO: 4348851 - DNA, 25 bp, Homo sapien
cttgggcttgtatgatgagattata

SEQ ID NO: 4348852 - DNA, 25 bp, Homo sapien
tcttctcttgggcttgtatgatgag

SEQ ID NO: 4348853 - DNA, 25 bp, Homo sapien
tgggctctgaaactccacactaagg

SEQ ID NO: 4348854 - DNA, 25 bp, Homo sapien
tctattaacgtaagctgcaggagga

SEQ ID NO: 4348855 - DNA, 25 bp, Homo sapien
caaagtctggcaacacttcaggagt

SEQ ID NO: 4348856 - DNA, 25 bp, Homo sapien
tataatccgaggaaatccatggacc

SEQ ID NO: 4348857 - DNA, 25 bp, Homo sapien
gatgtgtcacctgtccgtactcact

SEQ ID NO: 4348858 - DNA, 25 bp, Homo sapien
ttatcatcacgctgtacagctgcac

SEQ ID NO: 4348859 - DNA, 25 bp, Homo sapien
caacatgaatccgaccccttatcat

SEQ ID NO: 4348860 - DNA, 25 bp, Homo sapien
gtacagctgcacagacccattcctt

SEQ ID NO: 4348861 - DNA, 25 bp, Homo sapien
agtattctgtggcaaacccaaagcc

SEQ ID NO: 4348862 - DNA, 25 bp, Homo sapien
tagctgagcaagtaggtcatgttac

SEQ ID NO: 4348863 - DNA, 25 bp, Homo sapien
cctgctacatatgggtaaatggatg

SEQ ID NO: 4348864 - DNA, 25 bp, Homo sapien
catggacttaatcagcactcttagc

SEQ ID NO: 4348865 - DNA, 25 bp, Homo sapien
tagtagctactacatacccaagatc

SEQ ID NO: 4348866 - DNA, 25 bp, Homo sapien
tactaggtgctacttaatttcaatt

SEQ ID NO: 4348867 - DNA, 25 bp, Homo sapien
taatttcaatttcgggccagctggg

SEQ ID NO: 4348868 - DNA, 25 bp, Homo sapien
ctacatacccaagatctgtactagg

SEQ ID NO: 4348869 - DNA, 25 bp, Homo sapien
tgtacacgagtaaaagacctatgga

SEQ ID NO: 4348870 - DNA, 25 bp, Homo sapien
aaatatccccaatctgacaacactg

SEQ ID NO: 4348871 - DNA, 25 bp, Homo sapien
gaaccagtccactacttatagctag

SEQ ID NO: 4348872 - DNA, 25 bp, Homo sapien
gatatcatataaaaaactcccacag

SEQ ID NO: 4348873 - DNA, 25 bp, Homo sapien
ggttttagatatagcaccaaaaaca

SEQ ID NO: 4348874 - DNA, 25 bp, Homo sapien
gacactggggactagtagaagatag

SEQ ID NO: 4348875 - DNA, 25 bp, Homo sapien
ttggcaataaggttttagatatagc

SEQ ID NO: 4348876 - DNA, 25 bp, Homo sapien
tagcaccaaaaacatatgataaaga

SEQ ID NO: 4348877 - DNA, 25 bp, Homo sapien
taagctaaaagaagcaatgacactc

SEQ ID NO: 4348878 - DNA, 25 bp, Homo sapien
tacagatgtgcgcatatgtgagttg

SEQ ID NO: 4348879 - DNA, 25 bp, Homo sapien
aatgacactcccgtagcaatcttgg

SEQ ID NO: 4348880 - DNA, 25 bp, Homo sapien
cagttggagacatctaacagatatc

SEQ ID NO: 4348881 - DNA, 25 bp, Homo sapien
gggaggaagatagatcacctacata

SEQ ID NO: 4348882 - DNA, 25 bp, Homo sapien
caatttgtttgggactgtgttctcc

SEQ ID NO: 4348883 - DNA, 25 bp, Homo sapien
cagactctgatttggatatactcga

SEQ ID NO: 4348884 - DNA, 25 bp, Homo sapien
cacctacatacaatattttgggaga

SEQ ID NO: 4348885 - DNA, 25 bp, Homo sapien
taccaaaggattatttcagccacca

SEQ ID NO: 4348886 - DNA, 25 bp, Homo sapien
cttggaccaaaagcaacggagaaga

SEQ ID NO: 4348887 - DNA, 25 bp, Homo sapien
ctgatttaaagagcgaaacggcaaa

SEQ ID NO: 4348888 - DNA, 25 bp, Homo sapien
taatcagaagccctacttggaccaa

SEQ ID NO: 4348889 - DNA, 25 bp, Homo sapien
gaaccactaaaaagtgtatggcagg

SEQ ID NO: 4348890 - DNA, 25 bp, Homo sapien
cactaaaaagtgtatggcaggagaa

SEQ ID NO: 4348891 - DNA, 25 bp, Homo sapien
taaaaagtgtatggcaggagaaaag

SEQ ID NO: 4348892 - DNA, 25 bp, Homo sapien
aaagagaaccactaaaaagtgtatg

SEQ ID NO: 4348893 - DNA, 25 bp, Homo sapien
ggttgttgcctaaactctagtgatc

SEQ ID NO: 4348894 - DNA, 25 bp, Homo sapien
caagcacacactactttctattgat

SEQ ID NO: 4348895 - DNA, 25 bp, Homo sapien
aatgcctccttcctacaagcacaca

SEQ ID NO: 4348896 - DNA, 25 bp, Homo sapien
tattgatttccctctgcttcggttg

SEQ ID NO: 4348897 - DNA, 25 bp, Homo sapien
tttctacacaggctaaagccaaggt

SEQ ID NO: 4348898 - DNA, 25 bp, Homo sapien
caaacaaccgtatcttgatttggca

SEQ ID NO: 4348899 - DNA, 25 bp, Homo sapien
ctccaggtggcattctcatcatctg

SEQ ID NO: 4348900 - DNA, 25 bp, Homo sapien
tagcagcagcaaatcagctaagaat

SEQ ID NO: 4348901 - DNA, 25 bp, Homo sapien
gatttgcatacgaaggaattcctcc

SEQ ID NO: 4348902 - DNA, 25 bp, Homo sapien
gaacagatactaaacatggcatgcc

SEQ ID NO: 4348903 - DNA, 25 bp, Homo sapien
tctaagaaaaggtactcgagttcca

SEQ ID NO: 4348904 - DNA, 25 bp, Homo sapien
tctacctcaggttcaaaggaagagc

SEQ ID NO: 4348905 - DNA, 25 bp, Homo sapien
tagacctacgtttgactcggcttcc

SEQ ID NO: 4348906 - DNA, 25 bp, Homo sapien
aatgggtttgcttgttagacctacg

SEQ ID NO: 4348907 - DNA, 25 bp, Homo sapien
gactattttggatggctcacgcagg

SEQ ID NO: 4348908 - DNA, 25 bp, Homo sapien
ccggccagacacaccagaaatttag

SEQ ID NO: 4348909 - DNA, 25 bp, Homo sapien
gaaaaaggaaccatgctgaagcaag

SEQ ID NO: 4348910 - DNA, 25 bp, Homo sapien
gacggcaggcttgacagaacagttc

SEQ ID NO: 4348911 - DNA, 25 bp, Homo sapien
gcaagtgagagtttcccctccacaa

SEQ ID NO: 4348912 - DNA, 25 bp, Homo sapien
gtttctgcactaaatgactgggtca

SEQ ID NO: 4348913 - DNA, 25 bp, Homo sapien
cagaggacagacctgatgttccggt

SEQ ID NO: 4348914 - DNA, 25 bp, Homo sapien
gatgccgctgtggtgctacctgaaa

SEQ ID NO: 4348915 - DNA, 25 bp, Homo sapien
tttccaccagaccagtaggcgagga

SEQ ID NO: 4348916 - DNA, 25 bp, Homo sapien
gcagtaatcctgaagccgctgtgcc

SEQ ID NO: 4348917 - DNA, 25 bp, Homo sapien
gtttagatacactaatacataccac

SEQ ID NO: 4348918 - DNA, 25 bp, Homo sapien
tacataccactgtattaaaactgcc

SEQ ID NO: 4348919 - DNA, 25 bp, Homo sapien
cataccactgtattaaaactgccta

SEQ ID NO: 4348920 - DNA, 25 bp, Homo sapien
gatacactaatacataccactgtat

SEQ ID NO: 4348921 - DNA, 25 bp, Homo sapien
gagcacccgagttgtgtgccttttt

SEQ ID NO: 4348922 - DNA, 25 bp, Homo sapien
gactccttcataccaaggttcagag

SEQ ID NO: 4348923 - DNA, 25 bp, Homo sapien
ctttaagcagaaagaaggttgaaca

SEQ ID NO: 4348924 - DNA, 25 bp, Homo sapien
agtggaaagtaggttgacagagcac

SEQ ID NO: 4348925 - DNA, 25 bp, Homo sapien
gacacggctctttgaaacatgctaa

SEQ ID NO: 4348926 - DNA, 25 bp, Homo sapien
taaaaaaacttgtatcatgcgttac

SEQ ID NO: 4348927 - DNA, 25 bp, Homo sapien
tatttggatgacttggacacggctc

SEQ ID NO: 4348928 - DNA, 25 bp, Homo sapien
catgctaaattaagcctgattcctt

SEQ ID NO: 4348929 - DNA, 25 bp, Homo sapien
cttacaataatgtatggaagttcca

SEQ ID NO: 4348930 - DNA, 25 bp, Homo sapien
cagattgttttggagctcatatagc

SEQ ID NO: 4348931 - DNA, 25 bp, Homo sapien
ctttatagtatatgccagtgtatga

SEQ ID NO: 4348932 - DNA, 25 bp, Homo sapien
tgttttggagctcatatagcatatt

SEQ ID NO: 4348933 - DNA, 25 bp, Homo sapien
tctctagggtagatgctaacatatg

SEQ ID NO: 4348934 - DNA, 25 bp, Homo sapien
tatatggctcctgtaccaaatagtg

SEQ ID NO: 4348935 - DNA, 25 bp, Homo sapien
tacactcaagattcggcctaaattc

SEQ ID NO: 4348936 - DNA, 25 bp, Homo sapien
tatttagtgtttccggcatcagagc

SEQ ID NO: 4348937 - DNA, 25 bp, Homo sapien
tatagggaactactgttttgaagta

SEQ ID NO: 4348938 - DNA, 25 bp, Homo sapien
tccaggattactcattttgtctagc

SEQ ID NO: 4348939 - DNA, 25 bp, Homo sapien
tatgacactgtaggccaatgaaaag

SEQ ID NO: 4348940 - DNA, 25 bp, Homo sapien
cacagtctgttgaaatatagggaac

SEQ ID NO: 4348941 - DNA, 25 bp, Homo sapien
taacaatgagaaatggctgggcgtg

SEQ ID NO: 4348942 - DNA, 25 bp, Homo sapien
cctgagatcaggaaatcaagatcag

SEQ ID NO: 4348943 - DNA, 25 bp, Homo sapien
gtgttaacaatgagaaatggctggg

SEQ ID NO: 4348944 - DNA, 25 bp, Homo sapien
gttaacaatgagaaatggctgggcg

SEQ ID NO: 4348945 - DNA, 25 bp, Homo sapien
tggaaatggcttgacaatcagaaac

SEQ ID NO: 4348946 - DNA, 25 bp, Homo sapien
ttcccagtgtactcctgaaccagat

SEQ ID NO: 4348947 - DNA, 25 bp, Homo sapien
taagatgccagacaatttcccagtg

SEQ ID NO: 4348948 - DNA, 25 bp, Homo sapien
ttctaaagacattaggagaagacct

SEQ ID NO: 4348949 - DNA, 25 bp, Homo sapien
gaaaggggatgtatactgttggtag

SEQ ID NO: 4348950 - DNA, 25 bp, Homo sapien
tgtggagaaaggggatgtatactgt

SEQ ID NO: 4348951 - DNA, 25 bp, Homo sapien
aaaagacagggaataacatgctggg

SEQ ID NO: 4348952 - DNA, 25 bp, Homo sapien
caaaaagacagggaataacatgctg

SEQ ID NO: 4348953 - DNA, 25 bp, Homo sapien
cactactgtaatcagatctgggcat

SEQ ID NO: 4348954 - DNA, 25 bp, Homo sapien
caaactggagttgtgctgaccataa

SEQ ID NO: 4348955 - DNA, 25 bp, Homo sapien
tacaggtgtgaagggttctcattct

SEQ ID NO: 4348956 - DNA, 25 bp, Homo sapien
ttaagcggaatactgaagaacggga

SEQ ID NO: 4348957 - DNA, 25 bp, Homo sapien
aagaggttaaagagtgaactctact

SEQ ID NO: 4348958 - DNA, 25 bp, Homo sapien
tacgttgagccttcatcataaaagg

SEQ ID NO: 4348959 - DNA, 25 bp, Homo sapien
tgattaccctaaagcctggaccatt

SEQ ID NO: 4348960 - DNA, 25 bp, Homo sapien
gagtgaactctactttccattacgt

SEQ ID NO: 4348961 - DNA, 25 bp, Homo sapien
cagaaagaaagtaactcagacttaa

SEQ ID NO: 4348962 - DNA, 25 bp, Homo sapien
tatagcactatgttaggaaggaaat

SEQ ID NO: 4348963 - DNA, 25 bp, Homo sapien
acaaagcatctttattgctctacca

SEQ ID NO: 4348964 - DNA, 25 bp, Homo sapien
tgctctaccataaaactgaccctca

SEQ ID NO: 4348965 - DNA, 25 bp, Homo sapien
taggaatataattctaagcattcat

SEQ ID NO: 4348966 - DNA, 25 bp, Homo sapien
catagcagagctggtaggtgcatca

SEQ ID NO: 4348967 - DNA, 25 bp, Homo sapien
gcagcagcacaagctatttccatca

SEQ ID NO: 4348968 - DNA, 25 bp, Homo sapien
tcctctcctggtagacatgcagcag

SEQ ID NO: 4348969 - DNA, 25 bp, Homo sapien
gtaggtgcatcagttgtggatgaag

SEQ ID NO: 4348970 - DNA, 25 bp, Homo sapien
ggtcggcctgactgcataacagctg

SEQ ID NO: 4348971 - DNA, 25 bp, Homo sapien
tcggcctgactgcataacagctgtc

SEQ ID NO: 4348972 - DNA, 25 bp, Homo sapien
ctgggtcggcctgactgcataacag

SEQ ID NO: 4348973 - DNA, 25 bp, Homo sapien
ggcctgactgcataacagctgtcat

SEQ ID NO: 4348974 - DNA, 25 bp, Homo sapien
ggggcctctggcttgccccgcctac

SEQ ID NO: 4348975 - DNA, 25 bp, Homo sapien
gacttcctgttgatttggggacttc

SEQ ID NO: 4348976 - DNA, 25 bp, Homo sapien
cagacttcctgttgatttggggact

SEQ ID NO: 4348977 - DNA, 25 bp, Homo sapien
acttccctttggggcctctggcttg

SEQ ID NO: 4348978 - DNA, 25 bp, Homo sapien
cttgggtggcactcgaatctgctgc

SEQ ID NO: 4348979 - DNA, 25 bp, Homo sapien
ttcatcttgggtggcactcgaatct

SEQ ID NO: 4348980 - DNA, 25 bp, Homo sapien
tggcactcgaatctgctgcaggaca

SEQ ID NO: 4348981 - DNA, 25 bp, Homo sapien
cctctcttcatcttgggtggcactc

SEQ ID NO: 4348982 - DNA, 25 bp, Homo sapien
aatgttctccaaagcattgtgggtc

SEQ ID NO: 4348983 - DNA, 25 bp, Homo sapien
gctgcacatcatgtggagacactga

SEQ ID NO: 4348984 - DNA, 25 bp, Homo sapien
ccttggccaatcacgttaatgttct

SEQ ID NO: 4348985 - DNA, 25 bp, Homo sapien
tgcctccaggatcagggtcctcaaa

SEQ ID NO: 4348986 - DNA, 25 bp, Homo sapien
cagtagacttaatatgcttatttgc

SEQ ID NO: 4348987 - DNA, 25 bp, Homo sapien
caagagtgtcaaattaggtaggcat

SEQ ID NO: 4348988 - DNA, 25 bp, Homo sapien
gctgtgagacgaaggcttcatgcct

SEQ ID NO: 4348989 - DNA, 25 bp, Homo sapien
gcttcaacagtgactacgcatgcag

SEQ ID NO: 4348990 - DNA, 25 bp, Homo sapien
gaaccaagttaaatttcactgacta

SEQ ID NO: 4348991 - DNA, 25 bp, Homo sapien
tgactacaaagagttggatacttgc

SEQ ID NO: 4348992 - DNA, 25 bp, Homo sapien
ggacatgaaccaagttaaatttcac

SEQ ID NO: 4348993 - DNA, 25 bp, Homo sapien
ccaagttaaatttcactgactacaa

SEQ ID NO: 4348994 - DNA, 25 bp, Homo sapien
taagcacttctaaggtgtacaatcc

SEQ ID NO: 4348995 - DNA, 25 bp, Homo sapien
gcacttctaaggtgtacaatccttt

SEQ ID NO: 4348996 - DNA, 25 bp, Homo sapien
tccttaagcacttctaaggtgtaca

SEQ ID NO: 4348997 - DNA, 25 bp, Homo sapien
actcttccttaagcacttctaaggt

SEQ ID NO: 4348998 - DNA, 25 bp, Homo sapien
aaggagcaatttctggtggaatccc

SEQ ID NO: 4348999 - DNA, 25 bp, Homo sapien
gagcaatttctggtggaatcccact

SEQ ID NO: 4349000 - DNA, 25 bp, Homo sapien
aatttctggtggaatcccactacag

SEQ ID NO: 4349001 - DNA, 25 bp, Homo sapien
aatcagcaaggagcaatttctggtg

SEQ ID NO: 4349002 - DNA, 25 bp, Homo sapien
gaaacttcgtaagacagtggagtga

SEQ ID NO: 4349003 - DNA, 25 bp, Homo sapien
cagaaacttcgtaagacagtggagt

SEQ ID NO: 4349004 - DNA, 25 bp, Homo sapien
ctgcccatccagtattctacatcca

SEQ ID NO: 4349005 - DNA, 25 bp, Homo sapien
catcagaaacttcgtaagacagtgg

SEQ ID NO: 4349006 - DNA, 25 bp, Homo sapien
cagagtttgcattggtagtttttgc

SEQ ID NO: 4349007 - DNA, 25 bp, Homo sapien
caggaacgtacaaattaaatccaga

SEQ ID NO: 4349008 - DNA, 25 bp, Homo sapien
agtttgcattggtagtttttgcctt

SEQ ID NO: 4349009 - DNA, 25 bp, Homo sapien
aggaacgtacaaattaaatccagag

SEQ ID NO: 4349010 - DNA, 25 bp, Homo sapien
gagtgtccagtgaagtgataataat

SEQ ID NO: 4349011 - DNA, 25 bp, Homo sapien
gcaaacatgtgactacggaataaga

SEQ ID NO: 4349012 - DNA, 25 bp, Homo sapien
tactgtaatcagatgtagccaaaga

SEQ ID NO: 4349013 - DNA, 25 bp, Homo sapien
catgtagttacagtgccttggctca

SEQ ID NO: 4349014 - DNA, 25 bp, Homo sapien
ccgaattattttgaggtccatctag

SEQ ID NO: 4349015 - DNA, 25 bp, Homo sapien
ctaatgacttacgactttgggcatc

SEQ ID NO: 4349016 - DNA, 25 bp, Homo sapien
tacagccattctagggagtatgcag

SEQ ID NO: 4349017 - DNA, 25 bp, Homo sapien
ttctttgtgtgcgtatgaatctcca

SEQ ID NO: 4349018 - DNA, 25 bp, Homo sapien
cattatactatttcagctgggtcaa

SEQ ID NO: 4349019 - DNA, 25 bp, Homo sapien
aatgtggaaggatactaccacctcc

SEQ ID NO: 4349020 - DNA, 25 bp, Homo sapien
tctgccagacctaagacatagatgt

SEQ ID NO: 4349021 - DNA, 25 bp, Homo sapien
tccaaacaatagttgccgagaccag

SEQ ID NO: 4349022 - DNA, 25 bp, Homo sapien
taccatggaatgttattcagccttc

SEQ ID NO: 4349023 - DNA, 25 bp, Homo sapien
aaaatgcagcatatacataccatgg

SEQ ID NO: 4349024 - DNA, 25 bp, Homo sapien
cataccatggaatgttattcagcct

SEQ ID NO: 4349025 - DNA, 25 bp, Homo sapien
catggaatgttattcagccttcaaa

SEQ ID NO: 4349026 - DNA, 25 bp, Homo sapien
aaatctaagcaatccattatctcct

SEQ ID NO: 4349027 - DNA, 25 bp, Homo sapien
cagcctacggaacagtgaggccctg

SEQ ID NO: 4349028 - DNA, 25 bp, Homo sapien
taaaacctaaatcatgatcttcccc

SEQ ID NO: 4349029 - DNA, 25 bp, Homo sapien
aaacatacctgaagattgatacatc

SEQ ID NO: 4349030 - DNA, 25 bp, Homo sapien
cagtggcagcagactggacaagaca

SEQ ID NO: 4349031 - DNA, 25 bp, Homo sapien
gggtggacagaagaacctccttaca

SEQ ID NO: 4349032 - DNA, 25 bp, Homo sapien
gacaacatatctatactgcccagtg

SEQ ID NO: 4349033 - DNA, 25 bp, Homo sapien
ctccttacatacagcccagtggcag

SEQ ID NO: 4349034 - DNA, 25 bp, Homo sapien
accacttctgaccatattttatatt

SEQ ID NO: 4349035 - DNA, 25 bp, Homo sapien
tattttcactatttgctacagacag

SEQ ID NO: 4349036 - DNA, 25 bp, Homo sapien
catttggcattatttaccataaaga

SEQ ID NO: 4349037 - DNA, 25 bp, Homo sapien
cagaaatcttggctcatagatccag

SEQ ID NO: 4349038 - DNA, 25 bp, Homo sapien
tgtttcacctaactccaagattacg

SEQ ID NO: 4349039 - DNA, 25 bp, Homo sapien
tcacctacacgagtctcatccttgt

SEQ ID NO: 4349040 - DNA, 25 bp, Homo sapien
acatcatgatccttccaactgtcct

SEQ ID NO: 4349041 - DNA, 25 bp, Homo sapien
caactgtcctcacctacacgagtct

SEQ ID NO: 4349042 - DNA, 25 bp, Homo sapien
gagaacacagatcaaatcctcctgt

SEQ ID NO: 4349043 - DNA, 25 bp, Homo sapien
gtagggcgggctagtctcacaaaca

SEQ ID NO: 4349044 - DNA, 25 bp, Homo sapien
tgtacgattcaagtatctccatgct

SEQ ID NO: 4349045 - DNA, 25 bp, Homo sapien
actaagcttgtctccaaaaggtcag

SEQ ID NO: 4349046 - DNA, 25 bp, Homo sapien
tagcaacagaatttacaatcccgtg

SEQ ID NO: 4349047 - DNA, 25 bp, Homo sapien
gcaaatgaatctacgaagtgatacc

SEQ ID NO: 4349048 - DNA, 25 bp, Homo sapien
gagatctcaatccacacaacttagc

SEQ ID NO: 4349049 - DNA, 25 bp, Homo sapien
tcaaagtctaacatggacagccagc

SEQ ID NO: 4349050 - DNA, 25 bp, Homo sapien
gatcatgttaccacagtcactgcta

SEQ ID NO: 4349051 - DNA, 25 bp, Homo sapien
taaaactgagcttctgttacttctc

SEQ ID NO: 4349052 - DNA, 25 bp, Homo sapien
tcacagcacatatccaatctatcag

SEQ ID NO: 4349053 - DNA, 25 bp, Homo sapien
aaaacctgctgactctacttgaaaa

SEQ ID NO: 4349054 - DNA, 25 bp, Homo sapien
aataaccccatgagctgtgtaaagc

SEQ ID NO: 4349055 - DNA, 25 bp, Homo sapien
cttgccaatgaaactgaaccagact

SEQ ID NO: 4349056 - DNA, 25 bp, Homo sapien
taaaccatccagtgtctatgcagaa

SEQ ID NO: 4349057 - DNA, 25 bp, Homo sapien
gaagtaataatgtcaaacctgggac

SEQ ID NO: 4349058 - DNA, 25 bp, Homo sapien
ccaatctgggaggatggacactgtg

SEQ ID NO: 4349059 - DNA, 25 bp, Homo sapien
taaatcttgtgaccaaaggcaactg

SEQ ID NO: 4349060 - DNA, 25 bp, Homo sapien
tgctaactgtggatgtgtcttctcc

SEQ ID NO: 4349061 - DNA, 25 bp, Homo sapien
aggcaactgttcaccgagcgtcagc

SEQ ID NO: 4349062 - DNA, 25 bp, Homo sapien
cacacctttcgtagagatgcttatg

SEQ ID NO: 4349063 - DNA, 25 bp, Homo sapien
tagagatgcttatggtacaggtacc

SEQ ID NO: 4349064 - DNA, 25 bp, Homo sapien
cctttcgtagagatgcttatggtac

SEQ ID NO: 4349065 - DNA, 25 bp, Homo sapien
ttcgtagagatgcttatggtacagg

SEQ ID NO: 4349066 - DNA, 25 bp, Homo sapien
cgtgtcacaaaagccaacgggcgtt

SEQ ID NO: 4349067 - DNA, 25 bp, Homo sapien
tcactccgtggcagattcacctggg

SEQ ID NO: 4349068 - DNA, 25 bp, Homo sapien
tagccaacagctcaagtgggctgct

SEQ ID NO: 4349069 - DNA, 25 bp, Homo sapien
gggattcctcaccaagaatgttgtt

SEQ ID NO: 4349070 - DNA, 25 bp, Homo sapien
gtcaaaatgacagcggaatgagccg

SEQ ID NO: 4349071 - DNA, 25 bp, Homo sapien
caagctataaacgaatctctggccc

SEQ ID NO: 4349072 - DNA, 25 bp, Homo sapien
gccatggcgatcgagggctcctaaa

SEQ ID NO: 4349073 - DNA, 25 bp, Homo sapien
tcaaaacaataggtgcaaaactggt

SEQ ID NO: 4349074 - DNA, 25 bp, Homo sapien
gccgtgagggggccgcgaccgccgc

SEQ ID NO: 4349075 - DNA, 25 bp, Homo sapien
cgcggagggccgtgagggggccgcg

SEQ ID NO: 4349076 - DNA, 25 bp, Homo sapien
gcggagggccgtgagggggccgcga

SEQ ID NO: 4349077 - DNA, 25 bp, Homo sapien
tgagggggccgcgaccgccgccagc

SEQ ID NO: 4349078 - DNA, 25 bp, Homo sapien
ggagcagccggcgtctccgccagcg

SEQ ID NO: 4349079 - DNA, 25 bp, Homo sapien
gaggagcagccggcgtctccgccag

SEQ ID NO: 4349080 - DNA, 25 bp, Homo sapien
gggaggagcagccggcgtctccgcc

SEQ ID NO: 4349081 - DNA, 25 bp, Homo sapien
aggggaggagcagccggcgtctccg

SEQ ID NO: 4349082 - DNA, 25 bp, Homo sapien
ctcgagctcaagcgcctgctccttc

SEQ ID NO: 4349083 - DNA, 25 bp, Homo sapien
gagctcaagcgcctgctccttccac

SEQ ID NO: 4349084 - DNA, 25 bp, Homo sapien
tgctccttccactgcggccgccgca

SEQ ID NO: 4349085 - DNA, 25 bp, Homo sapien
agctcaagcgcctgctccttccact

SEQ ID NO: 4349086 - DNA, 25 bp, Homo sapien
cacctggtagtctggcctgtgacaa

SEQ ID NO: 4349087 - DNA, 25 bp, Homo sapien
gagagagagtattccctgacagact

SEQ ID NO: 4349088 - DNA, 25 bp, Homo sapien
tagcaggtcagcatatccagttgtg

SEQ ID NO: 4349089 - DNA, 25 bp, Homo sapien
aatcgagttgagactgccatgcccg

SEQ ID NO: 4349090 - DNA, 25 bp, Homo sapien
ggtccgtagcccaccgtcgcagggc

SEQ ID NO: 4349091 - DNA, 25 bp, Homo sapien
ccaccgtcgcagggccctggttatt

SEQ ID NO: 4349092 - DNA, 25 bp, Homo sapien
cgcagggccctggttatttctggct

SEQ ID NO: 4349093 - DNA, 25 bp, Homo sapien
cgtcgcagggccctggttatttctg

SEQ ID NO: 4349094 - DNA, 25 bp, Homo sapien
gaccaggccatgagtattcagtacc

SEQ ID NO: 4349095 - DNA, 25 bp, Homo sapien
taagggcagaccatcctctcgagat

SEQ ID NO: 4349096 - DNA, 25 bp, Homo sapien
ggtgcaaaccagctaggaccaggat

SEQ ID NO: 4349097 - DNA, 25 bp, Homo sapien
gggtcctaccttaagtgcatgtctg

SEQ ID NO: 4349098 - DNA, 25 bp, Homo sapien
gccgcacagttcagtgcaattccga

SEQ ID NO: 4349099 - DNA, 25 bp, Homo sapien
cagttcagtgcaattccgaattgta

SEQ ID NO: 4349100 - DNA, 25 bp, Homo sapien
cacagttcagtgcaattccgaattg

SEQ ID NO: 4349101 - DNA, 25 bp, Homo sapien
agggccgcacagttcagtgcaattc

SEQ ID NO: 4349102 - DNA, 25 bp, Homo sapien
gggaagcagagccacaaagttgacc

SEQ ID NO: 4349103 - DNA, 25 bp, Homo sapien
gagtggtccggttgggttcctctgc

SEQ ID NO: 4349104 - DNA, 25 bp, Homo sapien
caaagttgacctgagtggtccggtt

SEQ ID NO: 4349105 - DNA, 25 bp, Homo sapien
gcagagccacaaagttgacctgagt

SEQ ID NO: 4349106 - DNA, 25 bp, Homo sapien
ttttgtttccctataatcaactcca

SEQ ID NO: 4349107 - DNA, 25 bp, Homo sapien
aggtgcctttgccccgggagtctca

SEQ ID NO: 4349108 - DNA, 25 bp, Homo sapien
ctcacggatcccttcatcacctttt

SEQ ID NO: 4349109 - DNA, 25 bp, Homo sapien
ggtgactgtcgcatcctcacggatc

SEQ ID NO: 4349110 - DNA, 25 bp, Homo sapien
tggctctagtcctgctgtgctgtct

SEQ ID NO: 4349111 - DNA, 25 bp, Homo sapien
tctagtcctgctgtgctgtctccca

SEQ ID NO: 4349112 - DNA, 25 bp, Homo sapien
cctggctctagtcctgctgtgctgt

SEQ ID NO: 4349113 - DNA, 25 bp, Homo sapien
ggctctagtcctgctgtgctgtctc

SEQ ID NO: 4349114 - DNA, 25 bp, Homo sapien
caaatcctctaattgaggcagctgc

SEQ ID NO: 4349115 - DNA, 25 bp, Homo sapien
gaacacccggtgtggtccaccttca

SEQ ID NO: 4349116 - DNA, 25 bp, Homo sapien
tattgcacactctgctacgtactag

SEQ ID NO: 4349117 - DNA, 25 bp, Homo sapien
tactagcaaatcctctaattgaggc

SEQ ID NO: 4349118 - DNA, 25 bp, Homo sapien
aggaaaggggctatgaagctggaag

SEQ ID NO: 4349119 - DNA, 25 bp, Homo sapien
gaaggaaaggggctatgaagctgga

SEQ ID NO: 4349120 - DNA, 25 bp, Homo sapien
agaaggaaaggggctatgaagctgg

SEQ ID NO: 4349121 - DNA, 25 bp, Homo sapien
gaaaggggctatgaagctggaagga

SEQ ID NO: 4349122 - DNA, 25 bp, Homo sapien
acagagagccccttcggtagccttg

SEQ ID NO: 4349123 - DNA, 25 bp, Homo sapien
gcatgcataccccacaatggtttgg

SEQ ID NO: 4349124 - DNA, 25 bp, Homo sapien
actgtggcttttagagtggacctcc

SEQ ID NO: 4349125 - DNA, 25 bp, Homo sapien
taaagctgggcatactgccctggga

SEQ ID NO: 4349126 - DNA, 25 bp, Homo sapien
aagtcaggagccaggcgatcaatgg

SEQ ID NO: 4349127 - DNA, 25 bp, Homo sapien
ctacttcagggtcacgctgatgcct

SEQ ID NO: 4349128 - DNA, 25 bp, Homo sapien
gctctctgctcattacaagtgcctg

SEQ ID NO: 4349129 - DNA, 25 bp, Homo sapien
ctggcacactcatgtgtgctgagca

SEQ ID NO: 4349130 - DNA, 25 bp, Homo sapien
cttttgaaagtccaggtgagatatt

SEQ ID NO: 4349131 - DNA, 25 bp, Homo sapien
tcttgatttatctcccagagacaca

SEQ ID NO: 4349132 - DNA, 25 bp, Homo sapien
gacacatgagactttgggtcacttc

SEQ ID NO: 4349133 - DNA, 25 bp, Homo sapien
cagggctaggctgagtcccaaggcc

SEQ ID NO: 4349134 - DNA, 25 bp, Homo sapien
gcttgttatctctggcgggcctgat

SEQ ID NO: 4349135 - DNA, 25 bp, Homo sapien
cttgagagcaaaaggaggcccctgc

SEQ ID NO: 4349136 - DNA, 25 bp, Homo sapien
gcaatattcagggtgcaggctccag

SEQ ID NO: 4349137 - DNA, 25 bp, Homo sapien
tgttgggccatatcgaaggtctccg

SEQ ID NO: 4349138 - DNA, 25 bp, Homo sapien
gctctgtgggagatgaacacagacc

SEQ ID NO: 4349139 - DNA, 25 bp, Homo sapien
tctgtgggagatgaacacagaccct

SEQ ID NO: 4349140 - DNA, 25 bp, Homo sapien
ccctgccttccaggaaattccctct

SEQ ID NO: 4349141 - DNA, 25 bp, Homo sapien
ctgccttccaggaaattccctctgt

SEQ ID NO: 4349142 - DNA, 25 bp, Homo sapien
tgaggtcaccagtaaccaactggac

SEQ ID NO: 4349143 - DNA, 25 bp, Homo sapien
tgtgtgctccttatagacatggacc

SEQ ID NO: 4349144 - DNA, 25 bp, Homo sapien
tatgcaatgacctgtatacttaggc

SEQ ID NO: 4349145 - DNA, 25 bp, Homo sapien
taagcaatggatacatctgcccaca

SEQ ID NO: 4349146 - DNA, 25 bp, Homo sapien
tttgggaagtcgaggcagaaggatc

SEQ ID NO: 4349147 - DNA, 25 bp, Homo sapien
caggagtttgagactggcctgagca

SEQ ID NO: 4349148 - DNA, 25 bp, Homo sapien
acttaagctcaggagtttgagactg

SEQ ID NO: 4349149 - DNA, 25 bp, Homo sapien
gagtttgagactggcctgagcaaca

SEQ ID NO: 4349150 - DNA, 25 bp, Homo sapien
tttgtagctcccgtgcagctagatt

SEQ ID NO: 4349151 - DNA, 25 bp, Homo sapien
ttttttggatgcacagtaagttctc

SEQ ID NO: 4349152 - DNA, 25 bp, Homo sapien
ttagaaggctctttgacgattcgtg

SEQ ID NO: 4349153 - DNA, 25 bp, Homo sapien
tgcacagtaagttctccacgtggat

SEQ ID NO: 4349154 - DNA, 25 bp, Homo sapien
cactgtgtcactaagaagccaccat

SEQ ID NO: 4349155 - DNA, 25 bp, Homo sapien
catcaaatggccctccactggctgt

SEQ ID NO: 4349156 - DNA, 25 bp, Homo sapien
ttttaaaacaccttggaagacatca

SEQ ID NO: 4349157 - DNA, 25 bp, Homo sapien
ctaagaagccaccatgtgctaggcc

SEQ ID NO: 4349158 - DNA, 25 bp, Homo sapien
aaggatgtcggcaattagagcccat

SEQ ID NO: 4349159 - DNA, 25 bp, Homo sapien
ctgaaggatgtcggcaattagagcc

SEQ ID NO: 4349160 - DNA, 25 bp, Homo sapien
tgaaggatgtcggcaattagagccc

SEQ ID NO: 4349161 - DNA, 25 bp, Homo sapien
gaaggatgtcggcaattagagccca

SEQ ID NO: 4349162 - DNA, 25 bp, Homo sapien
gatttaagtggctcttgtcttcggg

SEQ ID NO: 4349163 - DNA, 25 bp, Homo sapien
atgccaggatttaagtggctcttgt

SEQ ID NO: 4349164 - DNA, 25 bp, Homo sapien
ccaggatttaagtggctcttgtctt

SEQ ID NO: 4349165 - DNA, 25 bp, Homo sapien
caggatttaagtggctcttgtcttc

SEQ ID NO: 4349166 - DNA, 25 bp, Homo sapien
tgatcttgcccgtgatgaattcccc

SEQ ID NO: 4349167 - DNA, 25 bp, Homo sapien
acatagcggctttgtggcgtccact

SEQ ID NO: 4349168 - DNA, 25 bp, Homo sapien
gagaacatccctcattacagcagag

SEQ ID NO: 4349169 - DNA, 25 bp, Homo sapien
taccgcgtaagtgttcctctgtggg

SEQ ID NO: 4349170 - DNA, 25 bp, Homo sapien
gttgtattaattttccaagaccgca

SEQ ID NO: 4349171 - DNA, 25 bp, Homo sapien
gctcataaagggtacagcagggacc

SEQ ID NO: 4349172 - DNA, 25 bp, Homo sapien
gttttgctcacgtaccactcccttg

SEQ ID NO: 4349173 - DNA, 25 bp, Homo sapien
tccacaagtgtagaccaatggctct

SEQ ID NO: 4349174 - DNA, 25 bp, Homo sapien
tcctcctcaaagaaatcactgctgg

SEQ ID NO: 4349175 - DNA, 25 bp, Homo sapien
aagaaatcactgctggtcctcacac

SEQ ID NO: 4349176 - DNA, 25 bp, Homo sapien
tcctcaaagaaatcactgctggtcc

SEQ ID NO: 4349177 - DNA, 25 bp, Homo sapien
cctcaaagaaatcactgctggtcct

SEQ ID NO: 4349178 - DNA, 25 bp, Homo sapien
gagaaaattcacctgagttcagtgt

SEQ ID NO: 4349179 - DNA, 25 bp, Homo sapien
tgatcggccctggaaaaccttccag

SEQ ID NO: 4349180 - DNA, 25 bp, Homo sapien
aaccttccagagaactgtcctcctt

SEQ ID NO: 4349181 - DNA, 25 bp, Homo sapien
tcatcctttccgtgatcggccctgg

SEQ ID NO: 4349182 - DNA, 25 bp, Homo sapien
ggggatgcaaggaactttccctctc

SEQ ID NO: 4349183 - DNA, 25 bp, Homo sapien
tgcaaggaactttccctctctgtcc

SEQ ID NO: 4349184 - DNA, 25 bp, Homo sapien
agcgccccgggggatgcaaggaact

SEQ ID NO: 4349185 - DNA, 25 bp, Homo sapien
gacagcgccccgggggatgcaagga

SEQ ID NO: 4349186 - DNA, 25 bp, Homo sapien
tgtctgggtgccggtctcctccctg

SEQ ID NO: 4349187 - DNA, 25 bp, Homo sapien
tctgggtgccggtctcctccctgcc

SEQ ID NO: 4349188 - DNA, 25 bp, Homo sapien
cctccctgcccggccgcggcgcgtc

SEQ ID NO: 4349189 - DNA, 25 bp, Homo sapien
tgggtgccggtctcctccctgcccg

SEQ ID NO: 4349190 - DNA, 25 bp, Homo sapien
cctgcccgtagccaggcccgctccg

SEQ ID NO: 4349191 - DNA, 25 bp, Homo sapien
ccctgcccgtagccaggcccgctcc

SEQ ID NO: 4349192 - DNA, 25 bp, Homo sapien
ccgccctcacctgccctggcctagg

SEQ ID NO: 4349193 - DNA, 25 bp, Homo sapien
tgccctggcctaggcggtcgctgtc

SEQ ID NO: 4349194 - DNA, 25 bp, Homo sapien
cctgcaggatgacatgaatgcacct

SEQ ID NO: 4349195 - DNA, 25 bp, Homo sapien
ctgcaggatgacatgaatgcacctt

SEQ ID NO: 4349196 - DNA, 25 bp, Homo sapien
tgcaggatgacatgaatgcaccttc

SEQ ID NO: 4349197 - DNA, 25 bp, Homo sapien
tgtcaaggatttcctcctacgccct

SEQ ID NO: 4349198 - DNA, 25 bp, Homo sapien
caaacagtcacgtaaattggttctg

SEQ ID NO: 4349199 - DNA, 25 bp, Homo sapien
aaattggttctgtcaaggatttcct

SEQ ID NO: 4349200 - DNA, 25 bp, Homo sapien
tggggctagccagagtcctccaaac

SEQ ID NO: 4349201 - DNA, 25 bp, Homo sapien
ttccgggtcgaagtgtgccccattc

SEQ ID NO: 4349202 - DNA, 25 bp, Homo sapien
cgggtcgaagtgtgccccattcaga

SEQ ID NO: 4349203 - DNA, 25 bp, Homo sapien
tccgggtcgaagtgtgccccattca

SEQ ID NO: 4349204 - DNA, 25 bp, Homo sapien
acttccgggtcgaagtgtgccccat

SEQ ID NO: 4349205 - DNA, 25 bp, Homo sapien
cgacgctccgtgaacctccccaccg

SEQ ID NO: 4349206 - DNA, 25 bp, Homo sapien
gccgacgctccgtgaacctccccac

SEQ ID NO: 4349207 - DNA, 25 bp, Homo sapien
ctccccaccggggccttctgcggag

SEQ ID NO: 4349208 - DNA, 25 bp, Homo sapien
taggcccagtgacagctgccgccgc

SEQ ID NO: 4349209 - DNA, 25 bp, Homo sapien
gcccagtgacagctgccgccgccat

SEQ ID NO: 4349210 - DNA, 25 bp, Homo sapien
aggcccagtgacagctgccgccgcc

SEQ ID NO: 4349211 - DNA, 25 bp, Homo sapien
ctaggcccagtgacagctgccgccg

SEQ ID NO: 4349212 - DNA, 25 bp, Homo sapien
tcagctgccccttctaaacatgaca

SEQ ID NO: 4349213 - DNA, 25 bp, Homo sapien
ccttctggaatcctcgatgtgatct

SEQ ID NO: 4349214 - DNA, 25 bp, Homo sapien
ctggaatcctcgatgtgatctcagc

SEQ ID NO: 4349215 - DNA, 25 bp, Homo sapien
ttctggaatcctcgatgtgatctca

SEQ ID NO: 4349216 - DNA, 25 bp, Homo sapien
tgtgcagcccccacagggcactttg

SEQ ID NO: 4349217 - DNA, 25 bp, Homo sapien
gctgtgcagcccccacagggcactt

SEQ ID NO: 4349218 - DNA, 25 bp, Homo sapien
tgcagcccccacagggcactttgta

SEQ ID NO: 4349219 - DNA, 25 bp, Homo sapien
tctgctgtgcagcccccacagggca

SEQ ID NO: 4349220 - DNA, 25 bp, Homo sapien
aacaactgctaggtgagagccacag

SEQ ID NO: 4349221 - DNA, 25 bp, Homo sapien
caaacaactgctaggtgagagccac

SEQ ID NO: 4349222 - DNA, 25 bp, Homo sapien
caactgctaggtgagagccacaggt

SEQ ID NO: 4349223 - DNA, 25 bp, Homo sapien
cagcaaacaactgctaggtgagagc

SEQ ID NO: 4349224 - DNA, 25 bp, Homo sapien
caaatttgagaagttgagaggggtc

SEQ ID NO: 4349225 - DNA, 25 bp, Homo sapien
aggggtcacagactaaattagagat

SEQ ID NO: 4349226 - DNA, 25 bp, Homo sapien
gagaggggtcacagactaaattaga

SEQ ID NO: 4349227 - DNA, 25 bp, Homo sapien
caggcaaatttgagaagttgagagg

SEQ ID NO: 4349228 - DNA, 25 bp, Homo sapien
gaggggggagtcagagcggacagcc

SEQ ID NO: 4349229 - DNA, 25 bp, Homo sapien
ggaggggggagtcagagcggacagc

SEQ ID NO: 4349230 - DNA, 25 bp, Homo sapien
aaaggaccaagaaagacatctgcgt

SEQ ID NO: 4349231 - DNA, 25 bp, Homo sapien
gaccaagaaagacatctgcgtcagg

SEQ ID NO: 4349232 - DNA, 25 bp, Homo sapien
tgtgagattccgtggctctctgtgt

SEQ ID NO: 4349233 - DNA, 25 bp, Homo sapien
gagattccgtggctctctgtgtctt

SEQ ID NO: 4349234 - DNA, 25 bp, Homo sapien
ttccgtggctctctgtgtcttggac

SEQ ID NO: 4349235 - DNA, 25 bp, Homo sapien
ccgtggctctctgtgtcttggacac

SEQ ID NO: 4349236 - DNA, 25 bp, Homo sapien
accagcccttaatgctggatgcaag

SEQ ID NO: 4349237 - DNA, 25 bp, Homo sapien
aaaaaccagcccttaatgctggatg

SEQ ID NO: 4349238 - DNA, 25 bp, Homo sapien
gcccttaatgctggatgcaagcaat

SEQ ID NO: 4349239 - DNA, 25 bp, Homo sapien
agcccttaatgctggatgcaagcaa

SEQ ID NO: 4349240 - DNA, 25 bp, Homo sapien
actgtgctgccatgcggccgccgta

SEQ ID NO: 4349241 - DNA, 25 bp, Homo sapien
atgcggccgccgtaggacactttta

SEQ ID NO: 4349242 - DNA, 25 bp, Homo sapien
catgcggccgccgtaggacactttt

SEQ ID NO: 4349243 - DNA, 25 bp, Homo sapien
ttagactgtgctgccatgcggccgc

SEQ ID NO: 4349244 - DNA, 25 bp, Homo sapien
gagaaggtttgtacttcccacctga

SEQ ID NO: 4349245 - DNA, 25 bp, Homo sapien
cacaggtggagaaggtttgtacttc

SEQ ID NO: 4349246 - DNA, 25 bp, Homo sapien
accaaggtaccctccaacgcctgct

SEQ ID NO: 4349247 - DNA, 25 bp, Homo sapien
tccaacgcctgctccataaaatcag

SEQ ID NO: 4349248 - DNA, 25 bp, Homo sapien
tcaagttgtgcagctgggagtctaa

SEQ ID NO: 4349249 - DNA, 25 bp, Homo sapien
tgggggagttgagaaggttcccaga

SEQ ID NO: 4349250 - DNA, 25 bp, Homo sapien
tgttgttgttcctggtgaaggtgtc

SEQ ID NO: 4349251 - DNA, 25 bp, Homo sapien
aagtaggtcatttgtaaggcaatca

SEQ ID NO: 4349252 - DNA, 25 bp, Homo sapien
gggttcaagatggctgaacgatata

SEQ ID NO: 4349253 - DNA, 25 bp, Homo sapien
tcaagatggctgaacgatatagaag

SEQ ID NO: 4349254 - DNA, 25 bp, Homo sapien
catcacctcaggagcatgtctctct

SEQ ID NO: 4349255 - DNA, 25 bp, Homo sapien
agatggctgaacgatatagaaggtg

SEQ ID NO: 4349256 - DNA, 25 bp, Homo sapien
tgtgagactggatgtccacgctcat

SEQ ID NO: 4349257 - DNA, 25 bp, Homo sapien
gctgtgagactggatgtccacgctc

SEQ ID NO: 4349258 - DNA, 25 bp, Homo sapien
tgctgtgagactggatgtccacgct

SEQ ID NO: 4349259 - DNA, 25 bp, Homo sapien
tctgctgtgagactggatgtccacg

SEQ ID NO: 4349260 - DNA, 25 bp, Homo sapien
tggggaggtgggagtcagggctgac

SEQ ID NO: 4349261 - DNA, 25 bp, Homo sapien
ttggagaggaagaagtacatggggg

SEQ ID NO: 4349262 - DNA, 25 bp, Homo sapien
gaccgtggtggaggtgaaaccgatg

SEQ ID NO: 4349263 - DNA, 25 bp, Homo sapien
gaaaccgatgtcaggcaaggacagg

SEQ ID NO: 4349264 - DNA, 25 bp, Homo sapien
aggaacagcccagcgacgaccggct

SEQ ID NO: 4349265 - DNA, 25 bp, Homo sapien
ggaacagcccagcgacgaccggctg

SEQ ID NO: 4349266 - DNA, 25 bp, Homo sapien
aacagcccagcgacgaccggctgca

SEQ ID NO: 4349267 - DNA, 25 bp, Homo sapien
acaggaacagcccagcgacgaccgg

SEQ ID NO: 4349268 - DNA, 25 bp, Homo sapien
ttggatataagcaatacacaagtca

SEQ ID NO: 4349269 - DNA, 25 bp, Homo sapien
tggatataagcaatacacaagtcat

SEQ ID NO: 4349270 - DNA, 25 bp, Homo sapien
actgtcctccctgcgtgttgcacga

SEQ ID NO: 4349271 - DNA, 25 bp, Homo sapien
cgtgttgcacgatggatgctcagac

SEQ ID NO: 4349272 - DNA, 25 bp, Homo sapien
tcctccctgcgtgttgcacgatgga

SEQ ID NO: 4349273 - DNA, 25 bp, Homo sapien
tccctgcgtgttgcacgatggatgc

SEQ ID NO: 4349274 - DNA, 25 bp, Homo sapien
gcacttattggtgtgacaggaacct

SEQ ID NO: 4349275 - DNA, 25 bp, Homo sapien
aatttaggcttggttcatccccagc

SEQ ID NO: 4349276 - DNA, 25 bp, Homo sapien
ttaaaggctcctttccagtcttaga

SEQ ID NO: 4349277 - DNA, 25 bp, Homo sapien
cttctgaagggggtcctatggcctt

SEQ ID NO: 4349278 - DNA, 25 bp, Homo sapien
aggggcagcaacggaaatattaggc

SEQ ID NO: 4349279 - DNA, 25 bp, Homo sapien
ggggcagcaacggaaatattaggcc

SEQ ID NO: 4349280 - DNA, 25 bp, Homo sapien
caggggcagcaacggaaatattagg

SEQ ID NO: 4349281 - DNA, 25 bp, Homo sapien
gggcagcaacggaaatattaggcca

SEQ ID NO: 4349282 - DNA, 25 bp, Homo sapien
gcattctaggaagctttgattcatt

SEQ ID NO: 4349283 - DNA, 25 bp, Homo sapien
tcagcattctaggaagctttgattc

SEQ ID NO: 4349284 - DNA, 25 bp, Homo sapien
cagcattctaggaagctttgattca

SEQ ID NO: 4349285 - DNA, 25 bp, Homo sapien
ttctaggaagctttgattcattaac

SEQ ID NO: 4349286 - DNA, 25 bp, Homo sapien
ggctgccagagagtcgctaacaaga

SEQ ID NO: 4349287 - DNA, 25 bp, Homo sapien
atctttctcagaaccttcgattcgc

SEQ ID NO: 4349288 - DNA, 25 bp, Homo sapien
gattcgcttgggtcgaagttcatgc

SEQ ID NO: 4349289 - DNA, 25 bp, Homo sapien
gagagtcgctaacaagaattccatc

SEQ ID NO: 4349290 - DNA, 25 bp, Homo sapien
tgccaggggtgggacttctttgtca

SEQ ID NO: 4349291 - DNA, 25 bp, Homo sapien
gcagtagcccgggaagtgtcagctc

SEQ ID NO: 4349292 - DNA, 25 bp, Homo sapien
tctcattcatttctgagccctgaga

SEQ ID NO: 4349293 - DNA, 25 bp, Homo sapien
gagccctgagaaggatgcagtagcc

SEQ ID NO: 4349294 - DNA, 25 bp, Homo sapien
tcatcttaacgtgtctataaaaggc

SEQ ID NO: 4349295 - DNA, 25 bp, Homo sapien
catcttaacgtgtctataaaaggca

SEQ ID NO: 4349296 - DNA, 25 bp, Homo sapien
aacacttattgtagaatgccgaggg

SEQ ID NO: 4349297 - DNA, 25 bp, Homo sapien
cccatcacaggcatagatggtgtgt

SEQ ID NO: 4349298 - DNA, 25 bp, Homo sapien
caggcatagatggtgtgtttttgca

SEQ ID NO: 4349299 - DNA, 25 bp, Homo sapien
taaaatgccaattgaacacttattg

SEQ ID NO: 4349300 - DNA, 25 bp, Homo sapien
aatctgttgtggatgggctgagcct

SEQ ID NO: 4349301 - DNA, 25 bp, Homo sapien
gctactgaggtaggaactgtgggca

SEQ ID NO: 4349302 - DNA, 25 bp, Homo sapien
tttaagctggtggtactgttggctg

SEQ ID NO: 4349303 - DNA, 25 bp, Homo sapien
gaaatccagcattgaaggaccggct

SEQ ID NO: 4349304 - DNA, 25 bp, Homo sapien
agtgaccatgagcaaattactgaac

SEQ ID NO: 4349305 - DNA, 25 bp, Homo sapien
gcctcataaaggagatggagaggaa

SEQ ID NO: 4349306 - DNA, 25 bp, Homo sapien
ggcatgagaggttccctagagtggg

SEQ ID NO: 4349307 - DNA, 25 bp, Homo sapien
tatctcaagtgaccatgagcaaatt

SEQ ID NO: 4349308 - DNA, 25 bp, Homo sapien
gatgccttccagctgacaggcgcta

SEQ ID NO: 4349309 - DNA, 25 bp, Homo sapien
taagcaatagataaacaacgggagt

SEQ ID NO: 4349310 - DNA, 25 bp, Homo sapien
caggcgctagcgcactttgaagtag

SEQ ID NO: 4349311 - DNA, 25 bp, Homo sapien
taccacaagtgtcaagccaggcatc

SEQ ID NO: 4349312 - DNA, 25 bp, Homo sapien
ctttgtgaggcacgcttgacctggg

SEQ ID NO: 4349313 - DNA, 25 bp, Homo sapien
caaagggtgctaaacaaggccccag

SEQ ID NO: 4349314 - DNA, 25 bp, Homo sapien
tggcccttcataggacgaaattctg

SEQ ID NO: 4349315 - DNA, 25 bp, Homo sapien
caaaatggagttgtcacaggatggc

SEQ ID NO: 4349316 - DNA, 25 bp, Homo sapien
gtaaaatatacactagatttccaag

SEQ ID NO: 4349317 - DNA, 25 bp, Homo sapien
taaaatatacactagatttccaagc

SEQ ID NO: 4349318 - DNA, 25 bp, Homo sapien
ccctttcattcggtgattcctcagg

SEQ ID NO: 4349319 - DNA, 25 bp, Homo sapien
aagcccctttcattcggtgattcct

SEQ ID NO: 4349320 - DNA, 25 bp, Homo sapien
gcccctttcattcggtgattcctca

SEQ ID NO: 4349321 - DNA, 25 bp, Homo sapien
agcccctttcattcggtgattcctc

SEQ ID NO: 4349322 - DNA, 25 bp, Homo sapien
ggagggcgtcctagcaccctcatct

SEQ ID NO: 4349323 - DNA, 25 bp, Homo sapien
cgtcctagcaccctcatcttgggtc

SEQ ID NO: 4349324 - DNA, 25 bp, Homo sapien
ggcgtcctagcaccctcatcttggg

SEQ ID NO: 4349325 - DNA, 25 bp, Homo sapien
agggcgtcctagcaccctcatcttg

SEQ ID NO: 4349326 - DNA, 25 bp, Homo sapien
tctggaaaggcccagatagggcctg

SEQ ID NO: 4349327 - DNA, 25 bp, Homo sapien
cgccttgtttgcagcccgaggccag

SEQ ID NO: 4349328 - DNA, 25 bp, Homo sapien
aaaggcccagatagggcctgactgc

SEQ ID NO: 4349329 - DNA, 25 bp, Homo sapien
tgcacatacccctgcaggtcttggg

SEQ ID NO: 4349330 - DNA, 25 bp, Homo sapien
ccagaaagcatgtcaagatggaggc

SEQ ID NO: 4349331 - DNA, 25 bp, Homo sapien
ttccagaaagcatgtcaagatggag

SEQ ID NO: 4349332 - DNA, 25 bp, Homo sapien
aaagcatgtcaagatggaggcggag

SEQ ID NO: 4349333 - DNA, 25 bp, Homo sapien
cagaaagcatgtcaagatggaggcg

SEQ ID NO: 4349334 - DNA, 25 bp, Homo sapien
tcatcctgcatttggtctccaggtg

SEQ ID NO: 4349335 - DNA, 25 bp, Homo sapien
tgaggaaccgaatgtgtccagggat

SEQ ID NO: 4349336 - DNA, 25 bp, Homo sapien
acctgctgcaccacaagcccaggga

SEQ ID NO: 4349337 - DNA, 25 bp, Homo sapien
gattcctgtcttgagaaaagcacct

SEQ ID NO: 4349338 - DNA, 25 bp, Homo sapien
tctgccatgttcctaacactttgat

SEQ ID NO: 4349339 - DNA, 25 bp, Homo sapien
tgtgtccacgttgggggaacgtcat

SEQ ID NO: 4349340 - DNA, 25 bp, Homo sapien
ttgtgaggaaccgagtgtgtccacg

SEQ ID NO: 4349341 - DNA, 25 bp, Homo sapien
cgagtgtgtccacgttgggggaacg

SEQ ID NO: 4349342 - DNA, 25 bp, Homo sapien
tgaggaaccgagtgtgtccacgttg

SEQ ID NO: 4349343 - DNA, 25 bp, Homo sapien
cacacgtttttatttgcacaaagaa

SEQ ID NO: 4349344 - DNA, 25 bp, Homo sapien
gatacacacgtttttatttgcacaa

SEQ ID NO: 4349345 - DNA, 25 bp, Homo sapien
tacacacgtttttatttgcacaaag

SEQ ID NO: 4349346 - DNA, 25 bp, Homo sapien
tgatacacacgtttttatttgcaca

SEQ ID NO: 4349347 - DNA, 25 bp, Homo sapien
cccacgagagtgatttgattctaac

SEQ ID NO: 4349348 - DNA, 25 bp, Homo sapien
cgagagtgatttgattctaacaatc

SEQ ID NO: 4349349 - DNA, 25 bp, Homo sapien
ttcccacgagagtgatttgattcta

SEQ ID NO: 4349350 - DNA, 25 bp, Homo sapien
cacgagagtgatttgattctaacaa

SEQ ID NO: 4349351 - DNA, 25 bp, Homo sapien
agtttctggtcatgatgagcttccg

SEQ ID NO: 4349352 - DNA, 25 bp, Homo sapien
catgatgagcttccgcttcccatct

SEQ ID NO: 4349353 - DNA, 25 bp, Homo sapien
atgagcttccgcttcccatctgatc

SEQ ID NO: 4349354 - DNA, 25 bp, Homo sapien
gtcatgatgagcttccgcttcccat

SEQ ID NO: 4349355 - DNA, 25 bp, Homo sapien
gacaggcactgggtcgtccatgtct

SEQ ID NO: 4349356 - DNA, 25 bp, Homo sapien
cactgggtcgtccatgtctctgtgt

SEQ ID NO: 4349357 - DNA, 25 bp, Homo sapien
caggcactgggtcgtccatgtctct

SEQ ID NO: 4349358 - DNA, 25 bp, Homo sapien
ggcactgggtcgtccatgtctctgt

SEQ ID NO: 4349359 - DNA, 25 bp, Homo sapien
gcggacggtaaaggccatgtagacc

SEQ ID NO: 4349360 - DNA, 25 bp, Homo sapien
ttgcggacggtaaaggccatgtaga

SEQ ID NO: 4349361 - DNA, 25 bp, Homo sapien
ctgggttgcggacggtaaaggccat

SEQ ID NO: 4349362 - DNA, 25 bp, Homo sapien
gacggtaaaggccatgtagacctca

SEQ ID NO: 4349363 - DNA, 25 bp, Homo sapien
ctatctagagggctttgaatggcag

SEQ ID NO: 4349364 - DNA, 25 bp, Homo sapien
tgaatggcagaaagcctgaccctac

SEQ ID NO: 4349365 - DNA, 25 bp, Homo sapien
tttgaatggcagaaagcctgaccct

SEQ ID NO: 4349366 - DNA, 25 bp, Homo sapien
gctttgaatggcagaaagcctgacc

SEQ ID NO: 4349367 - DNA, 25 bp, Homo sapien
catcccagaagtggttgttttcctc

SEQ ID NO: 4349368 - DNA, 25 bp, Homo sapien
ttttggtggcccagccaaacaccac

SEQ ID NO: 4349369 - DNA, 25 bp, Homo sapien
tctctgaaggacacagggcatggct

SEQ ID NO: 4349370 - DNA, 25 bp, Homo sapien
cagagctctgttccaccagagaggg

SEQ ID NO: 4349371 - DNA, 25 bp, Homo sapien
gatggacaggcctgtaaggccggcg

SEQ ID NO: 4349372 - DNA, 25 bp, Homo sapien
tggacaggcctgtaaggccggcgcc

SEQ ID NO: 4349373 - DNA, 25 bp, Homo sapien
acaggcctgtaaggccggcgccact

SEQ ID NO: 4349374 - DNA, 25 bp, Homo sapien
gacaggcctgtaaggccggcgccac

SEQ ID NO: 4349375 - DNA, 25 bp, Homo sapien
gcaaggtagatggcggctgccctgt

SEQ ID NO: 4349376 - DNA, 25 bp, Homo sapien
ttctgcaaggtagatggcggctgcc

SEQ ID NO: 4349377 - DNA, 25 bp, Homo sapien
attctgcaaggtagatggcggctgc

SEQ ID NO: 4349378 - DNA, 25 bp, Homo sapien
ctgcaaggtagatggcggctgccct

SEQ ID NO: 4349379 - DNA, 25 bp, Homo sapien
cattctgcaaggtagcgggcagcgt

SEQ ID NO: 4349380 - DNA, 25 bp, Homo sapien
gtagcgggcagcgtcccatgtgacc

SEQ ID NO: 4349381 - DNA, 25 bp, Homo sapien
gttagtgaaggctgccaggttcttg

SEQ ID NO: 4349382 - DNA, 25 bp, Homo sapien
ttagtgaaggctgccaggttcttga

SEQ ID NO: 4349383 - DNA, 25 bp, Homo sapien
gacaaagattcgctctcattgccaa

SEQ ID NO: 4349384 - DNA, 25 bp, Homo sapien
tgaagcaggtagtgtgtgtcaccta

SEQ ID NO: 4349385 - DNA, 25 bp, Homo sapien
taacggacctcatgtctaagactgc

SEQ ID NO: 4349386 - DNA, 25 bp, Homo sapien
caaggccgtggtgcaatagcgtgat

SEQ ID NO: 4349387 - DNA, 25 bp, Homo sapien
gcctcgtacagctcgtccaaaagct

SEQ ID NO: 4349388 - DNA, 25 bp, Homo sapien
atcagggtctctgccagcgcctcgt

SEQ ID NO: 4349389 - DNA, 25 bp, Homo sapien
agcgcctcgtacagctcgtccaaaa

SEQ ID NO: 4349390 - DNA, 25 bp, Homo sapien
gggtctctgccagcgcctcgtacag

SEQ ID NO: 4349391 - DNA, 25 bp, Homo sapien
agtgagagcttgtttgctttcgttc

SEQ ID NO: 4349392 - DNA, 25 bp, Homo sapien
agagtgagagcttgtttgctttcgt

SEQ ID NO: 4349393 - DNA, 25 bp, Homo sapien
agagcttgtttgctttcgttctaat

SEQ ID NO: 4349394 - DNA, 25 bp, Homo sapien
tgagagcttgtttgctttcgttcta

SEQ ID NO: 4349395 - DNA, 25 bp, Homo sapien
aatttcacttggtagggcaacctgg

SEQ ID NO: 4349396 - DNA, 25 bp, Homo sapien
aagtgtggccctttcactcagcagg

SEQ ID NO: 4349397 - DNA, 25 bp, Homo sapien
aacaaggattccgtgagagctgcca

SEQ ID NO: 4349398 - DNA, 25 bp, Homo sapien
tgccacgtgaccatgacagagagct

SEQ ID NO: 4349399 - DNA, 25 bp, Homo sapien
atttttgatgagttctgagagaaag

SEQ ID NO: 4349400 - DNA, 25 bp, Homo sapien
gttctgagagaaagcactgggcaca

SEQ ID NO: 4349401 - DNA, 25 bp, Homo sapien
ttgatgagttctgagagaaagcact

SEQ ID NO: 4349402 - DNA, 25 bp, Homo sapien
ttctgagagaaagcactgggcacac

SEQ ID NO: 4349403 - DNA, 25 bp, Homo sapien
gactgatggcgggtgcttcacacac

SEQ ID NO: 4349404 - DNA, 25 bp, Homo sapien
cttcacacacacaggatgcttcaca

SEQ ID NO: 4349405 - DNA, 25 bp, Homo sapien
tcacacacacaggatgcttcacagt

SEQ ID NO: 4349406 - DNA, 25 bp, Homo sapien
ttgactgatggcgggtgcttcacac

SEQ ID NO: 4349407 - DNA, 25 bp, Homo sapien
tgtagatggacacggcgttctggcc

SEQ ID NO: 4349408 - DNA, 25 bp, Homo sapien
gcagtggcacaggatattgcagcat

SEQ ID NO: 4349409 - DNA, 25 bp, Homo sapien
gatataagccgtttcctaaagatgc

SEQ ID NO: 4349410 - DNA, 25 bp, Homo sapien
tctggccccacgcatctgaagtttg

SEQ ID NO: 4349411 - DNA, 25 bp, Homo sapien
actcggcaactgctctcttggagtg

SEQ ID NO: 4349412 - DNA, 25 bp, Homo sapien
gggcttgcagtaaggacagtcgcca

SEQ ID NO: 4349413 - DNA, 25 bp, Homo sapien
tgtgaaccagggcttgcagtaagga

SEQ ID NO: 4349414 - DNA, 25 bp, Homo sapien
ggcaactgctctcttggagtgtgtg

SEQ ID NO: 4349415 - DNA, 25 bp, Homo sapien
catgcaatacacaggctcttcatgc

SEQ ID NO: 4349416 - DNA, 25 bp, Homo sapien
aagggcagcaaagtaccccatgcaa

SEQ ID NO: 4349417 - DNA, 25 bp, Homo sapien
ctgggagggatgcagattctgccca

SEQ ID NO: 4349418 - DNA, 25 bp, Homo sapien
gagacagtccgcagtgcctgctggc

SEQ ID NO: 4349419 - DNA, 25 bp, Homo sapien
tctgcaaaatatcccgcagcagctc

SEQ ID NO: 4349420 - DNA, 25 bp, Homo sapien
cgcagcagctcagaatctgatgagt

SEQ ID NO: 4349421 - DNA, 25 bp, Homo sapien
tcagaatctgatgagtctcttaatt

SEQ ID NO: 4349422 - DNA, 25 bp, Homo sapien
ttctgcaaaatatcccgcagcagct

SEQ ID NO: 4349423 - DNA, 25 bp, Homo sapien
aatagaatgtgttggcaaagcgcta

SEQ ID NO: 4349424 - DNA, 25 bp, Homo sapien
tggcaaagcgctatgtgatccctcc

SEQ ID NO: 4349425 - DNA, 25 bp, Homo sapien
ctccgtgtggacgggagagagagaa

SEQ ID NO: 4349426 - DNA, 25 bp, Homo sapien
gctccgtgtggacgggagagagaga

SEQ ID NO: 4349427 - DNA, 25 bp, Homo sapien
gtggaagccacagcggctgaaagcc

SEQ ID NO: 4349428 - DNA, 25 bp, Homo sapien
tggggacgcggagccagttggaagt

SEQ ID NO: 4349429 - DNA, 25 bp, Homo sapien
ccagttggaagtggaagccacagcg

SEQ ID NO: 4349430 - DNA, 25 bp, Homo sapien
aaagcctgaccttcagatgtcgcag

SEQ ID NO: 4349431 - DNA, 25 bp, Homo sapien
gagacctatgatgcttttatgaagg

SEQ ID NO: 4349432 - DNA, 25 bp, Homo sapien
gacctatgatgcttttatgaaggtt

SEQ ID NO: 4349433 - DNA, 25 bp, Homo sapien
agacctatgatgcttttatgaaggt

SEQ ID NO: 4349434 - DNA, 25 bp, Homo sapien
tgtgcagtgctcgacatacagatga

SEQ ID NO: 4349435 - DNA, 25 bp, Homo sapien
attctgtgcagtgctcgacatacag

SEQ ID NO: 4349436 - DNA, 25 bp, Homo sapien
tgcagtgctcgacatacagatgaga

SEQ ID NO: 4349437 - DNA, 25 bp, Homo sapien
tctgtgcagtgctcgacatacagat

SEQ ID NO: 4349438 - DNA, 25 bp, Homo sapien
ctgaggcccgagggacagcctttga

SEQ ID NO: 4349439 - DNA, 25 bp, Homo sapien
ggcccgagggacagcctttgacctg

SEQ ID NO: 4349440 - DNA, 25 bp, Homo sapien
gaggcccgagggacagcctttgacc

SEQ ID NO: 4349441 - DNA, 25 bp, Homo sapien
cctttgacctggtcaccgtgctcag

SEQ ID NO: 4349442 - DNA, 25 bp, Homo sapien
gcgtctgccccccaagactgtggag

SEQ ID NO: 4349443 - DNA, 25 bp, Homo sapien
tgccccccaagactgtggagacgcc

SEQ ID NO: 4349444 - DNA, 25 bp, Homo sapien
gtctcgtggccctgaccggggagag

SEQ ID NO: 4349445 - DNA, 25 bp, Homo sapien
agactgtggagacgcccccagcttc

SEQ ID NO: 4349446 - DNA, 25 bp, Homo sapien
gacttccgcaagccccgcaggcctc

SEQ ID NO: 4349447 - DNA, 25 bp, Homo sapien
acttccgcaagccccgcaggcctct

SEQ ID NO: 4349448 - DNA, 25 bp, Homo sapien
cttccgcaagccccgcaggcctctc

SEQ ID NO: 4349449 - DNA, 25 bp, Homo sapien
gagtttggtacccgcgttctcctca

SEQ ID NO: 4349450 - DNA, 25 bp, Homo sapien
tctgcagcaagagtttggtacccgc

SEQ ID NO: 4349451 - DNA, 25 bp, Homo sapien
cgctaggaagcggcgctcgaaactc

SEQ ID NO: 4349452 - DNA, 25 bp, Homo sapien
ttggtacccgcgttctcctcaggcg

SEQ ID NO: 4349453 - DNA, 25 bp, Homo sapien
ggccagaattaacgtcgttggggca

SEQ ID NO: 4349454 - DNA, 25 bp, Homo sapien
ccagaattaacgtcgttggggcagg

SEQ ID NO: 4349455 - DNA, 25 bp, Homo sapien
gccagaattaacgtcgttggggcag

SEQ ID NO: 4349456 - DNA, 25 bp, Homo sapien
gcaggtccaggagcgagcccacggt

SEQ ID NO: 4349457 - DNA, 25 bp, Homo sapien
cggagggtttgaggcaggtccagga

SEQ ID NO: 4349458 - DNA, 25 bp, Homo sapien
ctgcggagggtttgaggcaggtcca

SEQ ID NO: 4349459 - DNA, 25 bp, Homo sapien
ggcaggtccaggagcgagcccacgg

SEQ ID NO: 4349460 - DNA, 25 bp, Homo sapien
agtcacgtgagaatccacagcaagt

SEQ ID NO: 4349461 - DNA, 25 bp, Homo sapien
ggtctgagatgttgcatacaccctc

SEQ ID NO: 4349462 - DNA, 25 bp, Homo sapien
tgtagcctgagatggagtcacgtga

SEQ ID NO: 4349463 - DNA, 25 bp, Homo sapien
tttaggcagaatcaacggtttctgg

SEQ ID NO: 4349464 - DNA, 25 bp, Homo sapien
ttgtctttcctccaaggagcaaaag

SEQ ID NO: 4349465 - DNA, 25 bp, Homo sapien
gcaaaagggcatatacggtcaatgc

SEQ ID NO: 4349466 - DNA, 25 bp, Homo sapien
tcctccaaggagcaaaagggcatat

SEQ ID NO: 4349467 - DNA, 25 bp, Homo sapien
tccaaggagcaaaagggcatatacg

SEQ ID NO: 4349468 - DNA, 25 bp, Homo sapien
tgagcaacagatgcaagggctgccg

SEQ ID NO: 4349469 - DNA, 25 bp, Homo sapien
tgtgagcaacagatgcaagggctgc

SEQ ID NO: 4349470 - DNA, 25 bp, Homo sapien
gatgcttgtgggctgtgagcaacag

SEQ ID NO: 4349471 - DNA, 25 bp, Homo sapien
gctgtgagcaacagatgcaagggct

SEQ ID NO: 4349472 - DNA, 25 bp, Homo sapien
gagtcgttttgaaggagcaattgca

SEQ ID NO: 4349473 - DNA, 25 bp, Homo sapien
ctgagtcgttttgaaggagcaattg

SEQ ID NO: 4349474 - DNA, 25 bp, Homo sapien
cgttttgaaggagcaattgcagagc

SEQ ID NO: 4349475 - DNA, 25 bp, Homo sapien
tttgaaggagcaattgcagagcgtc

SEQ ID NO: 4349476 - DNA, 25 bp, Homo sapien
tggtttctttgctcagtgcacctgt

SEQ ID NO: 4349477 - DNA, 25 bp, Homo sapien
gggctttgttgatctccaggccttt

SEQ ID NO: 4349478 - DNA, 25 bp, Homo sapien
ccaggcctttttcagcagcgttgtc

SEQ ID NO: 4349479 - DNA, 25 bp, Homo sapien
gtgcacctgtgtttggggctttgtt

SEQ ID NO: 4349480 - DNA, 25 bp, Homo sapien
actgtcattaccagtgacggagcag

SEQ ID NO: 4349481 - DNA, 25 bp, Homo sapien
gatgttcactgtcattaccagtgac

SEQ ID NO: 4349482 - DNA, 25 bp, Homo sapien
aacctgagattgtgaagatgttcac

SEQ ID NO: 4349483 - DNA, 25 bp, Homo sapien
cctgagattgtgaagatgttcactg

SEQ ID NO: 4349484 - DNA, 25 bp, Homo sapien
cctcagcattgcttttaatcttggt

SEQ ID NO: 4349485 - DNA, 25 bp, Homo sapien
ctcagcattgcttttaatcttggtg

SEQ ID NO: 4349486 - DNA, 25 bp, Homo sapien
gcattgcttttaatcttggtgagaa

SEQ ID NO: 4349487 - DNA, 25 bp, Homo sapien
cagcattgcttttaatcttggtgag

SEQ ID NO: 4349488 - DNA, 25 bp, Homo sapien
ggctggcgagcaaatacttagagga

SEQ ID NO: 4349489 - DNA, 25 bp, Homo sapien
accttcttgccggtggggctggcga

SEQ ID NO: 4349490 - DNA, 25 bp, Homo sapien
cgaacaccctttgtaagcatgtgaa

SEQ ID NO: 4349491 - DNA, 25 bp, Homo sapien
ctggcgagcaaatacttagaggaga

SEQ ID NO: 4349492 - DNA, 25 bp, Homo sapien
tggcagtgaagtgggaaggggaggt

SEQ ID NO: 4349493 - DNA, 25 bp, Homo sapien
tgggatggcagtgaagtgggaaggg

SEQ ID NO: 4349494 - DNA, 25 bp, Homo sapien
ctgggatggcagtgaagtgggaagg

SEQ ID NO: 4349495 - DNA, 25 bp, Homo sapien
cagtgaagtgggaaggggaggtcat

SEQ ID NO: 4349496 - DNA, 25 bp, Homo sapien
aggttgggggtgtccacatcctgat

SEQ ID NO: 4349497 - DNA, 25 bp, Homo sapien
ccaggttgggggtgtccacatcctg

SEQ ID NO: 4349498 - DNA, 25 bp, Homo sapien
ctccccggccagacggtccaggttg

SEQ ID NO: 4349499 - DNA, 25 bp, Homo sapien
gaggtacttggccttgacgccctcc

SEQ ID NO: 4349500 - DNA, 25 bp, Homo sapien
cccgtgatgccaatgatgggccctc

SEQ ID NO: 4349501 - DNA, 25 bp, Homo sapien
catatggggggccctcccgtgatgc

SEQ ID NO: 4349502 - DNA, 25 bp, Homo sapien
ggacctgctcctggaatgaggccac

SEQ ID NO: 4349503 - DNA, 25 bp, Homo sapien
tgaggccacccatgggaggccacat

SEQ ID NO: 4349504 - DNA, 25 bp, Homo sapien
acaggagtcacttttgtgccagttc

SEQ ID NO: 4349505 - DNA, 25 bp, Homo sapien
gagtcacttttgtgccagttcccgg

SEQ ID NO: 4349506 - DNA, 25 bp, Homo sapien
taacaggagtcacttttgtgccagt

SEQ ID NO: 4349507 - DNA, 25 bp, Homo sapien
cataacaggagtcacttttgtgcca

SEQ ID NO: 4349508 - DNA, 25 bp, Homo sapien
gccagctttcttcacgtggcaagga

SEQ ID NO: 4349509 - DNA, 25 bp, Homo sapien
ggcagcgctgcactcacttttcatg

SEQ ID NO: 4349510 - DNA, 25 bp, Homo sapien
gcaaggagttccacagatgtgcgcc

SEQ ID NO: 4349511 - DNA, 25 bp, Homo sapien
catgtgcagtagatctgagtgttga

SEQ ID NO: 4349512 - DNA, 25 bp, Homo sapien
ttctgcaaattgtctgtataagtca

SEQ ID NO: 4349513 - DNA, 25 bp, Homo sapien
tctgcaaattgtctgtataagtcat

SEQ ID NO: 4349514 - DNA, 25 bp, Homo sapien
gctgagtattcaagaaagtggtcct

SEQ ID NO: 4349515 - DNA, 25 bp, Homo sapien
acctagcccctatgtcaaaagatct

SEQ ID NO: 4349516 - DNA, 25 bp, Homo sapien
aaagctgtttctggtcggtggaaca

SEQ ID NO: 4349517 - DNA, 25 bp, Homo sapien
cagcctgcaaggtggttgtcccaca

SEQ ID NO: 4349518 - DNA, 25 bp, Homo sapien
gcttggctcagacccgtaacagaaa

SEQ ID NO: 4349519 - DNA, 25 bp, Homo sapien
cagacccgtaacagaaactggcctt

SEQ ID NO: 4349520 - DNA, 25 bp, Homo sapien
tggctcagacccgtaacagaaactg

SEQ ID NO: 4349521 - DNA, 25 bp, Homo sapien
tgaactcctttttatcccgagacca

SEQ ID NO: 4349522 - DNA, 25 bp, Homo sapien
gaagcaacagctcctctatcccatt

SEQ ID NO: 4349523 - DNA, 25 bp, Homo sapien
tgtgtttgggagcatcatcattggt

SEQ ID NO: 4349524 - DNA, 25 bp, Homo sapien
gctcctctatcccattctgggcttt

SEQ ID NO: 4349525 - DNA, 25 bp, Homo sapien
ttttgcctgatgatagcctctctca

SEQ ID NO: 4349526 - DNA, 25 bp, Homo sapien
gctgctagtaaagattgcccttggt

SEQ ID NO: 4349527 - DNA, 25 bp, Homo sapien
tctaagtagtagaagtgaccgcagc

SEQ ID NO: 4349528 - DNA, 25 bp, Homo sapien
aatggcgattcctctgtctaagtag

SEQ ID NO: 4349529 - DNA, 25 bp, Homo sapien
tccttgggcattttcgttgggaggc

SEQ ID NO: 4349530 - DNA, 25 bp, Homo sapien
accaggtttgattttactgatctga

SEQ ID NO: 4349531 - DNA, 25 bp, Homo sapien
tcccacttactagggagagcctgga

SEQ ID NO: 4349532 - DNA, 25 bp, Homo sapien
tcttcttgtcccacttactagggag

SEQ ID NO: 4349533 - DNA, 25 bp, Homo sapien
gtttgattttactgatctgaagctc

SEQ ID NO: 4349534 - DNA, 25 bp, Homo sapien
tccccagatagagcagtcaatgttt

SEQ ID NO: 4349535 - DNA, 25 bp, Homo sapien
ggcccgtgctgcacaaagcacatga

SEQ ID NO: 4349536 - DNA, 25 bp, Homo sapien
caactaaactcgtcagcagctagtg

SEQ ID NO: 4349537 - DNA, 25 bp, Homo sapien
tgaacgacacaagggactttttcca

SEQ ID NO: 4349538 - DNA, 25 bp, Homo sapien
caaaggactggcagggacaagggaa

SEQ ID NO: 4349539 - DNA, 25 bp, Homo sapien
gccccaaaggactggcagggacaag

SEQ ID NO: 4349540 - DNA, 25 bp, Homo sapien
gagccccaaaggactggcagggaca

SEQ ID NO: 4349541 - DNA, 25 bp, Homo sapien
ccccaaaggactggcagggacaagg

SEQ ID NO: 4349542 - DNA, 25 bp, Homo sapien
cagagaaggcgcgtaccatgaaagc

SEQ ID NO: 4349543 - DNA, 25 bp, Homo sapien
ttcagtgcgcctcggatctgcacgc

SEQ ID NO: 4349544 - DNA, 25 bp, Homo sapien
caacagttccaacggtaggagcaga

SEQ ID NO: 4349545 - DNA, 25 bp, Homo sapien
gagcagagctactgccttcagtgcg

SEQ ID NO: 4349546 - DNA, 25 bp, Homo sapien
tactcttggaagcaacacctggtgt

SEQ ID NO: 4349547 - DNA, 25 bp, Homo sapien
caaacccttatgaggtttccaggag

SEQ ID NO: 4349548 - DNA, 25 bp, Homo sapien
gacattgaagagataaacactcaga

SEQ ID NO: 4349549 - DNA, 25 bp, Homo sapien
tctcagagggaacctaagttaataa

SEQ ID NO: 4349550 - DNA, 25 bp, Homo sapien
tcacaagatatgaacactccttttt

SEQ ID NO: 4349551 - DNA, 25 bp, Homo sapien
ctccaaccctctaccagattggttt

SEQ ID NO: 4349552 - DNA, 25 bp, Homo sapien
tatgaacactccttttttgaaagac

SEQ ID NO: 4349553 - DNA, 25 bp, Homo sapien
accctctaccagattggttttcaca

SEQ ID NO: 4349554 - DNA, 25 bp, Homo sapien
cttttttcaaatacacagaaaagca

SEQ ID NO: 4349555 - DNA, 25 bp, Homo sapien
tttcttatgacttttttcaaataca

SEQ ID NO: 4349556 - DNA, 25 bp, Homo sapien
tatgacttttttcaaatacacagaa

SEQ ID NO: 4349557 - DNA, 25 bp, Homo sapien
ttttttcaaatacacagaaaagcat

SEQ ID NO: 4349558 - DNA, 25 bp, Homo sapien
agtccttctgtccttacacaagaga

SEQ ID NO: 4349559 - DNA, 25 bp, Homo sapien
ccaggccagtgagccaaattttcta

SEQ ID NO: 4349560 - DNA, 25 bp, Homo sapien
gagtttgatatccttattctagcca

SEQ ID NO: 4349561 - DNA, 25 bp, Homo sapien
cctttaaagtcacactcaagtctca

SEQ ID NO: 4349562 - DNA, 25 bp, Homo sapien
tggcttttacaacttcctcgaggac

SEQ ID NO: 4349563 - DNA, 25 bp, Homo sapien
aagacataaaccagactttgccctg

SEQ ID NO: 4349564 - DNA, 25 bp, Homo sapien
cgaggacactgaccttgtaagcaag

SEQ ID NO: 4349565 - DNA, 25 bp, Homo sapien
ccttgtaagcaagttttgtgaagac

SEQ ID NO: 4349566 - DNA, 25 bp, Homo sapien
cactgcagctaaccattctgtttgc

SEQ ID NO: 4349567 - DNA, 25 bp, Homo sapien
gactctcagccaagtccttgaacat

SEQ ID NO: 4349568 - DNA, 25 bp, Homo sapien
tgttgccagtggagtaaggtttaca

SEQ ID NO: 4349569 - DNA, 25 bp, Homo sapien
gcctctcttggaacttgaacctctc

SEQ ID NO: 4349570 - DNA, 25 bp, Homo sapien
acatctgtctgttcctttgacaggg

SEQ ID NO: 4349571 - DNA, 25 bp, Homo sapien
ctgtctgttcctttgacagggcaga

SEQ ID NO: 4349572 - DNA, 25 bp, Homo sapien
catctgtctgttcctttgacagggc

SEQ ID NO: 4349573 - DNA, 25 bp, Homo sapien
caccaggctccagaagaaagacagt

SEQ ID NO: 4349574 - DNA, 25 bp, Homo sapien
agttgttccaatgaaacatgccttc

SEQ ID NO: 4349575 - DNA, 25 bp, Homo sapien
cagttgtaccaaaagagatttctct

SEQ ID NO: 4349576 - DNA, 25 bp, Homo sapien
cagaggaaggtagttgtgtcatctc

SEQ ID NO: 4349577 - DNA, 25 bp, Homo sapien
caaccatgacgaaaaaattgtgcaa

SEQ ID NO: 4349578 - DNA, 25 bp, Homo sapien
gctgctgttcagtggctcagtcaaa

SEQ ID NO: 4349579 - DNA, 25 bp, Homo sapien
tgcttgttagccagagatggacccg

SEQ ID NO: 4349580 - DNA, 25 bp, Homo sapien
tagtcctgaggcgtaggcgtgctcc

SEQ ID NO: 4349581 - DNA, 25 bp, Homo sapien
gaggaaagcggcctctcaaggcttg

SEQ ID NO: 4349582 - DNA, 25 bp, Homo sapien
aaggatcatatctctgtcagcccac

SEQ ID NO: 4349583 - DNA, 25 bp, Homo sapien
gacttagtagctagaaaccctgtaa

SEQ ID NO: 4349584 - DNA, 25 bp, Homo sapien
tatctatctaatggctccaggctga

SEQ ID NO: 4349585 - DNA, 25 bp, Homo sapien
taatcgactgtaaaggaactgcctc

SEQ ID NO: 4349586 - DNA, 25 bp, Homo sapien
ttcaccttagaacaaatgctgctgg

SEQ ID NO: 4349587 - DNA, 25 bp, Homo sapien
gtgtcagaatttatggtacagccca

SEQ ID NO: 4349588 - DNA, 25 bp, Homo sapien
aataatgatggccaagaggaggcac

SEQ ID NO: 4349589 - DNA, 25 bp, Homo sapien
taaaagcaacctgttgggccaagtg

SEQ ID NO: 4349590 - DNA, 25 bp, Homo sapien
aaagagatgcataagtaaactagtc

SEQ ID NO: 4349591 - DNA, 25 bp, Homo sapien
ttagtcagtcagtcatgaaacagta

SEQ ID NO: 4349592 - DNA, 25 bp, Homo sapien
ccattttgggtgtcatttagtcagt

SEQ ID NO: 4349593 - DNA, 25 bp, Homo sapien
gaaatgccttttctcgagttatagt

SEQ ID NO: 4349594 - DNA, 25 bp, Homo sapien
ctagaagcagttacgatgaagccct

SEQ ID NO: 4349595 - DNA, 25 bp, Homo sapien
tggaatgtggcgacatcagtgatga

SEQ ID NO: 4349596 - DNA, 25 bp, Homo sapien
gtgatgatgtcatgatgtcccacgg

SEQ ID NO: 4349597 - DNA, 25 bp, Homo sapien
gtcatcacttggtcctactttctgc

SEQ ID NO: 4349598 - DNA, 25 bp, Homo sapien
gcttctgagatactgttgttgtatt

SEQ ID NO: 4349599 - DNA, 25 bp, Homo sapien
tcctctcgtcagtagtcctgcttct

SEQ ID NO: 4349600 - DNA, 25 bp, Homo sapien
catttttcctctcgtcagtagtcct

SEQ ID NO: 4349601 - DNA, 25 bp, Homo sapien
tctcgtcagtagtcctgcttctgag

SEQ ID NO: 4349602 - DNA, 25 bp, Homo sapien
ggcccaggtgctaaaggtatattct

SEQ ID NO: 4349603 - DNA, 25 bp, Homo sapien
tcaaagtactcctcgcttggtcaag

SEQ ID NO: 4349604 - DNA, 25 bp, Homo sapien
aagcacactttcatttacagagcac

SEQ ID NO: 4349605 - DNA, 25 bp, Homo sapien
tacagagcacctactttggcccagg

SEQ ID NO: 4349606 - DNA, 25 bp, Homo sapien
cagatggggaactagtacttcctgc

SEQ ID NO: 4349607 - DNA, 25 bp, Homo sapien
cataggacctttctgggtaagccaa

SEQ ID NO: 4349608 - DNA, 25 bp, Homo sapien
ttattttcctgtagtaggacacaga

SEQ ID NO: 4349609 - DNA, 25 bp, Homo sapien
cctgcaacaacataggacctttctg

SEQ ID NO: 4349610 - DNA, 25 bp, Homo sapien
atcattggcttatcttcatcaatgc

SEQ ID NO: 4349611 - DNA, 25 bp, Homo sapien
gggaggaactaataatcattggctt

SEQ ID NO: 4349612 - DNA, 25 bp, Homo sapien
tggcttatcttcatcaatgcatttt

SEQ ID NO: 4349613 - DNA, 25 bp, Homo sapien
ggaactaataatcattggcttatct

SEQ ID NO: 4349614 - DNA, 25 bp, Homo sapien
tccatctgcaggactacagtagata

SEQ ID NO: 4349615 - DNA, 25 bp, Homo sapien
catctgcaggactacagtagatacc

SEQ ID NO: 4349616 - DNA, 25 bp, Homo sapien
tctgagccagctgttagtaggatag

SEQ ID NO: 4349617 - DNA, 25 bp, Homo sapien
gccagctgttagtaggataggattt

SEQ ID NO: 4349618 - DNA, 25 bp, Homo sapien
tgctggcccagagagtaaatcttct

SEQ ID NO: 4349619 - DNA, 25 bp, Homo sapien
aaagtggtggtgcactgctggccca

SEQ ID NO: 4349620 - DNA, 25 bp, Homo sapien
gtaaatcttctgtcaccagtctcca

SEQ ID NO: 4349621 - DNA, 25 bp, Homo sapien
gacacttcgttgttgccctgaacag

SEQ ID NO: 4349622 - DNA, 25 bp, Homo sapien
tacagagggtgcattgagaggcgtc

SEQ ID NO: 4349623 - DNA, 25 bp, Homo sapien
ctgatacagagggtgcattgagagg

SEQ ID NO: 4349624 - DNA, 25 bp, Homo sapien
gatacagagggtgcattgagaggcg

SEQ ID NO: 4349625 - DNA, 25 bp, Homo sapien
gactgatacagagggtgcattgaga

SEQ ID NO: 4349626 - DNA, 25 bp, Homo sapien
gtcccaacaagccatggtaccactg

SEQ ID NO: 4349627 - DNA, 25 bp, Homo sapien
tgaaattggcaactggaacctcatg

SEQ ID NO: 4349628 - DNA, 25 bp, Homo sapien
caagccatggtaccactgcttgtac

SEQ ID NO: 4349629 - DNA, 25 bp, Homo sapien
ggaacctcatgtcccaacaagccat

SEQ ID NO: 4349630 - DNA, 25 bp, Homo sapien
aacaataaagtaagaaaccattgct

SEQ ID NO: 4349631 - DNA, 25 bp, Homo sapien
caaacaataaagtaagaaaccattg

SEQ ID NO: 4349632 - DNA, 25 bp, Homo sapien
acaataaagtaagaaaccattgctt

SEQ ID NO: 4349633 - DNA, 25 bp, Homo sapien
tatgccttaggatactgattccacc

SEQ ID NO: 4349634 - DNA, 25 bp, Homo sapien
cactgccagagtaagagaatgccag

SEQ ID NO: 4349635 - DNA, 25 bp, Homo sapien
tgcccttgaaaggattagccccatt

SEQ ID NO: 4349636 - DNA, 25 bp, Homo sapien
gaagatgaagatagctgaacctcag

SEQ ID NO: 4349637 - DNA, 25 bp, Homo sapien
tttcacaagacagcaattgcaggca

SEQ ID NO: 4349638 - DNA, 25 bp, Homo sapien
cattagtggcattcaaaacccagcc

SEQ ID NO: 4349639 - DNA, 25 bp, Homo sapien
ccagccaatgacttgaaagttagct

SEQ ID NO: 4349640 - DNA, 25 bp, Homo sapien
gccaatgacttgaaagttagcttac

SEQ ID NO: 4349641 - DNA, 25 bp, Homo sapien
tggcataggcaagaacagactgtgc

SEQ ID NO: 4349642 - DNA, 25 bp, Homo sapien
gcattgcttgaagacctaaggtccc

SEQ ID NO: 4349643 - DNA, 25 bp, Homo sapien
gagccagcattggtggatgtccaca

SEQ ID NO: 4349644 - DNA, 25 bp, Homo sapien
cacagcaaaggaagtgatgaggccc

SEQ ID NO: 4349645 - DNA, 25 bp, Homo sapien
tgctatggctaaatagtgggagcct

SEQ ID NO: 4349646 - DNA, 25 bp, Homo sapien
cctccaattcggctgtatgtaagaa

SEQ ID NO: 4349647 - DNA, 25 bp, Homo sapien
ttttaggagacttgggcagcttaga

SEQ ID NO: 4349648 - DNA, 25 bp, Homo sapien
ccttggcagaatgtgagcgtcttga

SEQ ID NO: 4349649 - DNA, 25 bp, Homo sapien
tgctcttatcagtggaaatctgcta

SEQ ID NO: 4349650 - DNA, 25 bp, Homo sapien
ctgaagtctctgttcagttaggtaa

SEQ ID NO: 4349651 - DNA, 25 bp, Homo sapien
ttttcctaggtataagccatcctta

SEQ ID NO: 4349652 - DNA, 25 bp, Homo sapien
tgtttaatgactttcctccactaat

SEQ ID NO: 4349653 - DNA, 25 bp, Homo sapien
gctcatgaagatgggcaactaacag

SEQ ID NO: 4349654 - DNA, 25 bp, Homo sapien
caaaaagtgagtgttcatcagagac

SEQ ID NO: 4349655 - DNA, 25 bp, Homo sapien
gagactctaattcgattcacagcag

SEQ ID NO: 4349656 - DNA, 25 bp, Homo sapien
aactaacagccctttaggacgccat

SEQ ID NO: 4349657 - DNA, 25 bp, Homo sapien
tagctattctctcagcattgcactg

SEQ ID NO: 4349658 - DNA, 25 bp, Homo sapien
taattcgaatctgataggtggatgg

SEQ ID NO: 4349659 - DNA, 25 bp, Homo sapien
cgcttttgctggatgagttgctgaa

SEQ ID NO: 4349660 - DNA, 25 bp, Homo sapien
caggtggtggtggtttactctccca

SEQ ID NO: 4349661 - DNA, 25 bp, Homo sapien
ggtccagtgacccaaacatgctttt

SEQ ID NO: 4349662 - DNA, 25 bp, Homo sapien
gatcactccctttaggtagggcctg

SEQ ID NO: 4349663 - DNA, 25 bp, Homo sapien
cagaggactcggaacgaggaggttt

SEQ ID NO: 4349664 - DNA, 25 bp, Homo sapien
gtttcccagtctgaatcacctcctg

SEQ ID NO: 4349665 - DNA, 25 bp, Homo sapien
acttgtctcccagttatgcctaaag

SEQ ID NO: 4349666 - DNA, 25 bp, Homo sapien
tggctctggtccactatattggcct

SEQ ID NO: 4349667 - DNA, 25 bp, Homo sapien
tcatgaagtctttcagtgccagaag

SEQ ID NO: 4349668 - DNA, 25 bp, Homo sapien
tctgactactatcatgaagatggct

SEQ ID NO: 4349669 - DNA, 25 bp, Homo sapien
tgaaattcgcatttaaatgtaagac

SEQ ID NO: 4349670 - DNA, 25 bp, Homo sapien
tatgaaattcgcatttaaatgtaag

SEQ ID NO: 4349671 - DNA, 25 bp, Homo sapien
taagactttggaagggtgatacaac

SEQ ID NO: 4349672 - DNA, 25 bp, Homo sapien
aaatgtaagactttggaagggtgat

SEQ ID NO: 4349673 - DNA, 25 bp, Homo sapien
aatcaaatatagaacgacttactgg

SEQ ID NO: 4349674 - DNA, 25 bp, Homo sapien
tcttctgacgcatgtgaagatgtct

SEQ ID NO: 4349675 - DNA, 25 bp, Homo sapien
tagacctcaaagcataatcaaatat

SEQ ID NO: 4349676 - DNA, 25 bp, Homo sapien
ggcagtcgggaagagaaccatttcg

SEQ ID NO: 4349677 - DNA, 25 bp, Homo sapien
catcagtttacagtagacatcagct

SEQ ID NO: 4349678 - DNA, 25 bp, Homo sapien
tgggtcaagataaggcatcagttta

SEQ ID NO: 4349679 - DNA, 25 bp, Homo sapien
cttatttgacgagctaccactgtga

SEQ ID NO: 4349680 - DNA, 25 bp, Homo sapien
tgataaatcccacggcaccataacg

SEQ ID NO: 4349681 - DNA, 25 bp, Homo sapien
ctaactggcacatacaagtaagggc

SEQ ID NO: 4349682 - DNA, 25 bp, Homo sapien
gacaaattcctcagcatcactaaga

SEQ ID NO: 4349683 - DNA, 25 bp, Homo sapien
tcactggcaaattcgtaaacatggg

SEQ ID NO: 4349684 - DNA, 25 bp, Homo sapien
gctttgccagccaacataggcagca

SEQ ID NO: 4349685 - DNA, 25 bp, Homo sapien
gaccacacggtattccttcatacgg

SEQ ID NO: 4349686 - DNA, 25 bp, Homo sapien
cacagccaagctttctattgtgcag

SEQ ID NO: 4349687 - DNA, 25 bp, Homo sapien
agatcagtacattcagggaaaaggg

SEQ ID NO: 4349688 - DNA, 25 bp, Homo sapien
cttcatacggatgtaacacaggttg

SEQ ID NO: 4349689 - DNA, 25 bp, Homo sapien
aaaatgctccacgtagatgccaatc

SEQ ID NO: 4349690 - DNA, 25 bp, Homo sapien
gaaagtaatcatgtgggacaacaaa

SEQ ID NO: 4349691 - DNA, 25 bp, Homo sapien
agaatacacacagccgtgttattcc

SEQ ID NO: 4349692 - DNA, 25 bp, Homo sapien
catcgttggctttctgacgtccaaa

SEQ ID NO: 4349693 - DNA, 25 bp, Homo sapien
tgattacagaatccaccgaagactt

SEQ ID NO: 4349694 - DNA, 25 bp, Homo sapien
tattcaaagctctgaaggatgggaa

SEQ ID NO: 4349695 - DNA, 25 bp, Homo sapien
tttttccccatacagatagtcccag

SEQ ID NO: 4349696 - DNA, 25 bp, Homo sapien
cattgccccagtaagatcccagtta

SEQ ID NO: 4349697 - DNA, 25 bp, Homo sapien
taaataacaggaaatctggaagaga

SEQ ID NO: 4349698 - DNA, 25 bp, Homo sapien
ctaaataacaggaaatctggaagag

SEQ ID NO: 4349699 - DNA, 25 bp, Homo sapien
aatctggaagagaaaattatacaac

SEQ ID NO: 4349700 - DNA, 25 bp, Homo sapien
ggaaatctggaagagaaaattatac

SEQ ID NO: 4349701 - DNA, 25 bp, Homo sapien
tgtcataatttccatttggatgtgt

SEQ ID NO: 4349702 - DNA, 25 bp, Homo sapien
ctgtgtcataatttccatttggatg

SEQ ID NO: 4349703 - DNA, 25 bp, Homo sapien
gtgtcataatttccatttggatgtg

SEQ ID NO: 4349704 - DNA, 25 bp, Homo sapien
cataatttccatttggatgtgtaac

SEQ ID NO: 4349705 - DNA, 25 bp, Homo sapien
catattaagattttttaactgtact

SEQ ID NO: 4349706 - DNA, 25 bp, Homo sapien
aatctcagagctgtttctgccagca

SEQ ID NO: 4349707 - DNA, 25 bp, Homo sapien
tttaactgtactaattccaggaatc

SEQ ID NO: 4349708 - DNA, 25 bp, Homo sapien
tcattattggggtcattttccatat

SEQ ID NO: 4349709 - DNA, 25 bp, Homo sapien
tctaagtggctaatatttggacaat

SEQ ID NO: 4349710 - DNA, 25 bp, Homo sapien
aaatgtacacaaatagttcaaagag

SEQ ID NO: 4349711 - DNA, 25 bp, Homo sapien
gcaaagttcatacttgcaattctca

SEQ ID NO: 4349712 - DNA, 25 bp, Homo sapien
gaacacacaaacgttgattcccagg

SEQ ID NO: 4349713 - DNA, 25 bp, Homo sapien
catcttgggctaagtgggctatgcc

SEQ ID NO: 4349714 - DNA, 25 bp, Homo sapien
tacgaggaacctctttgacgagagc

SEQ ID NO: 4349715 - DNA, 25 bp, Homo sapien
gaactttggtcaacgtcctcaaggc

SEQ ID NO: 4349716 - DNA, 25 bp, Homo sapien
caaactgggccatgtagggctgaag

SEQ ID NO: 4349717 - DNA, 25 bp, Homo sapien
gtgatcccccacacgactcctcacg

SEQ ID NO: 4349718 - DNA, 25 bp, Homo sapien
tgatcccccacacgactcctcacgc

SEQ ID NO: 4349719 - DNA, 25 bp, Homo sapien
atcccccacacgactcctcacgccc

SEQ ID NO: 4349720 - DNA, 25 bp, Homo sapien
cccccacacgactcctcacgcccat

SEQ ID NO: 4349721 - DNA, 25 bp, Homo sapien
tttatattagtctatggtgttttac

SEQ ID NO: 4349722 - DNA, 25 bp, Homo sapien
gtttatattagtctatggtgtttta

SEQ ID NO: 4349723 - DNA, 25 bp, Homo sapien
tattagtctatggtgttttactgct

SEQ ID NO: 4349724 - DNA, 25 bp, Homo sapien
ctgtttatattagtctatggtgttt

SEQ ID NO: 4349725 - DNA, 25 bp, Homo sapien
tggcgaatatttgtagcatagttac

SEQ ID NO: 4349726 - DNA, 25 bp, Homo sapien
aatgtccatttctataagccaaaag

SEQ ID NO: 4349727 - DNA, 25 bp, Homo sapien
tctctgatactgtgatcttcaattt

SEQ ID NO: 4349728 - DNA, 25 bp, Homo sapien
atttctataagccaaaagttgagag

SEQ ID NO: 4349729 - DNA, 25 bp, Homo sapien
tctgatactgtgatcttcaatttta

SEQ ID NO: 4349730 - DNA, 25 bp, Homo sapien
gacaatttgggaagactttgaccag

SEQ ID NO: 4349731 - DNA, 25 bp, Homo sapien
gatgtgaccctgtgaaaatccatca

SEQ ID NO: 4349732 - DNA, 25 bp, Homo sapien
catgtaaaagctggtgaaaactgag

SEQ ID NO: 4349733 - DNA, 25 bp, Homo sapien
ttcccacaggttattagttgcaagg

SEQ ID NO: 4349734 - DNA, 25 bp, Homo sapien
caaaacaatgtaaggctctttggtc

SEQ ID NO: 4349735 - DNA, 25 bp, Homo sapien
agccaaaacaatgtaaggctctttg

SEQ ID NO: 4349736 - DNA, 25 bp, Homo sapien
gccaaaacaatgtaaggctctttgg

SEQ ID NO: 4349737 - DNA, 25 bp, Homo sapien
aaacaatgtaaggctctttggtctg

SEQ ID NO: 4349738 - DNA, 25 bp, Homo sapien
ttatcaccaccacagcaatcaacac

SEQ ID NO: 4349739 - DNA, 25 bp, Homo sapien
accacagcaatcaacaccgcattga

SEQ ID NO: 4349740 - DNA, 25 bp, Homo sapien
cattgaaatgtccttttgcaatatc

SEQ ID NO: 4349741 - DNA, 25 bp, Homo sapien
cagcaatcaacaccgcattgaaatg

SEQ ID NO: 4349742 - DNA, 25 bp, Homo sapien
tgatgtccccatgacgaactccaga

SEQ ID NO: 4349743 - DNA, 25 bp, Homo sapien
gaatggacgggtactgatgcgatca

SEQ ID NO: 4349744 - DNA, 25 bp, Homo sapien
gcaagttctcctccgtgatgtgtca

SEQ ID NO: 4349745 - DNA, 25 bp, Homo sapien
tacaagcggagttgaaggatctctc

SEQ ID NO: 4349746 - DNA, 25 bp, Homo sapien
tggtctttagtaaggttaggatata

SEQ ID NO: 4349747 - DNA, 25 bp, Homo sapien
tctttagtaaggttaggatataata

SEQ ID NO: 4349748 - DNA, 25 bp, Homo sapien
aatggcaagcacctctgtggtcttt

SEQ ID NO: 4349749 - DNA, 25 bp, Homo sapien
ctctgtggtctttagtaaggttagg

SEQ ID NO: 4349750 - DNA, 25 bp, Homo sapien
tatacactagctaaacgtaccccag

SEQ ID NO: 4349751 - DNA, 25 bp, Homo sapien
cttcgctggtctgcaacaagaaacc

SEQ ID NO: 4349752 - DNA, 25 bp, Homo sapien
cacacacgaccttgagcacacataa

SEQ ID NO: 4349753 - DNA, 25 bp, Homo sapien
ctgaaaaggtcaaactaagatctaa

SEQ ID NO: 4349754 - DNA, 25 bp, Homo sapien
gaggctcacaacgaggtcatagtag

SEQ ID NO: 4349755 - DNA, 25 bp, Homo sapien
gaaagtgtcaaaatcgttcagaggc

SEQ ID NO: 4349756 - DNA, 25 bp, Homo sapien
ctaggcctcgggaaagtgtcaaaat

SEQ ID NO: 4349757 - DNA, 25 bp, Homo sapien
gttcagaggctcacaacgaggtcat

SEQ ID NO: 4349758 - DNA, 25 bp, Homo sapien
gcagcggggaagttgtttctacgaa

SEQ ID NO: 4349759 - DNA, 25 bp, Homo sapien
cagaaaagtcccgatcttcaggaac

SEQ ID NO: 4349760 - DNA, 25 bp, Homo sapien
gaggggcgcagaaaagtcccgatct

SEQ ID NO: 4349761 - DNA, 25 bp, Homo sapien
gacgggacgggaaaacgcgtcagca

SEQ ID NO: 4349762 - DNA, 25 bp, Homo sapien
gaagaagccacgctaaagagtctcc

SEQ ID NO: 4349763 - DNA, 25 bp, Homo sapien
aaacactacacttcagctgctgcag

SEQ ID NO: 4349764 - DNA, 25 bp, Homo sapien
ggcctcgtcttcctctagcgcggat

SEQ ID NO: 4349765 - DNA, 25 bp, Homo sapien
agagtctccacaagtaccccgggat

SEQ ID NO: 4349766 - DNA, 25 bp, Homo sapien
gatgtccacgtgagctctgctatcc

SEQ ID NO: 4349767 - DNA, 25 bp, Homo sapien
cctgtgagatgtccacgtgagctct

SEQ ID NO: 4349768 - DNA, 25 bp, Homo sapien
gcacttgcagtcctgtgagatgtcc

SEQ ID NO: 4349769 - DNA, 25 bp, Homo sapien
tccaccagtgcacttgcagtcctgt

SEQ ID NO: 4349770 - DNA, 25 bp, Homo sapien
tagctgtgaccacaggcctgagcca

SEQ ID NO: 4349771 - DNA, 25 bp, Homo sapien
ctcctggaatcaagcagtcctcttt

SEQ ID NO: 4349772 - DNA, 25 bp, Homo sapien
ctggaatcaagcagtcctctttcct

SEQ ID NO: 4349773 - DNA, 25 bp, Homo sapien
agctgtgaccacaggcctgagccac

SEQ ID NO: 4349774 - DNA, 25 bp, Homo sapien
cttgtttgtagcaggtgggtatgcc

SEQ ID NO: 4349775 - DNA, 25 bp, Homo sapien
ctcttgtttgtagcaggtgggtatg

SEQ ID NO: 4349776 - DNA, 25 bp, Homo sapien
ttgtttgtagcaggtgggtatgccc

SEQ ID NO: 4349777 - DNA, 25 bp, Homo sapien
tccattatagaaaccctggcgctgc

SEQ ID NO: 4349778 - DNA, 25 bp, Homo sapien
acagcctcatgatagccttccactt

SEQ ID NO: 4349779 - DNA, 25 bp, Homo sapien
taagtaagcacagcctcatgatagc

SEQ ID NO: 4349780 - DNA, 25 bp, Homo sapien
cagccacagtgtcatgccaatccct

SEQ ID NO: 4349781 - DNA, 25 bp, Homo sapien
caccagctgcgtgcccttcccccac

SEQ ID NO: 4349782 - DNA, 25 bp, Homo sapien
tgcgtgcccttcccccacttcttac

SEQ ID NO: 4349783 - DNA, 25 bp, Homo sapien
cagctgcgtgcccttcccccacttc

SEQ ID NO: 4349784 - DNA, 25 bp, Homo sapien
tcaccagctgcgtgcccttccccca

SEQ ID NO: 4349785 - DNA, 25 bp, Homo sapien
aacttggtgattatgctgtctcctc

SEQ ID NO: 4349786 - DNA, 25 bp, Homo sapien
aatacttcacccgtgtggccttcag

SEQ ID NO: 4349787 - DNA, 25 bp, Homo sapien
tcttgggccctaaagttaatcactg

SEQ ID NO: 4349788 - DNA, 25 bp, Homo sapien
cactgataaggacgagggaagaact

SEQ ID NO: 4349789 - DNA, 25 bp, Homo sapien
cactgattttggaagtccatggcat

SEQ ID NO: 4349790 - DNA, 25 bp, Homo sapien
aacactgattttggaagtccatggc

SEQ ID NO: 4349791 - DNA, 25 bp, Homo sapien
taacactgattttggaagtccatgg

SEQ ID NO: 4349792 - DNA, 25 bp, Homo sapien
ctaacactgattttggaagtccatg

SEQ ID NO: 4349793 - DNA, 25 bp, Homo sapien
ctatgctaatcacatttatatcata

SEQ ID NO: 4349794 - DNA, 25 bp, Homo sapien
gataaactatgctaatcacatttat

SEQ ID NO: 4349795 - DNA, 25 bp, Homo sapien
actatgctaatcacatttatatcat

SEQ ID NO: 4349796 - DNA, 25 bp, Homo sapien
aactatgctaatcacatttatatca

SEQ ID NO: 4349797 - DNA, 25 bp, Homo sapien
aatggtcctctactctcaagaaagg

SEQ ID NO: 4349798 - DNA, 25 bp, Homo sapien
tgatcaaataatggtcctctactct

SEQ ID NO: 4349799 - DNA, 25 bp, Homo sapien
tggtcctctactctcaagaaaggta

SEQ ID NO: 4349800 - DNA, 25 bp, Homo sapien
caaataatggtcctctactctcaag

SEQ ID NO: 4349801 - DNA, 25 bp, Homo sapien
ttgaggtcacaacatagtccaccac

SEQ ID NO: 4349802 - DNA, 25 bp, Homo sapien
aggtcacaacatagtccaccaccat

SEQ ID NO: 4349803 - DNA, 25 bp, Homo sapien
gtttgtagaaaactttgaggtcaca

SEQ ID NO: 4349804 - DNA, 25 bp, Homo sapien
ctgggccacctgtttgtagaaaact

SEQ ID NO: 4349805 - DNA, 25 bp, Homo sapien
cagggtatctggctttctatacttc

SEQ ID NO: 4349806 - DNA, 25 bp, Homo sapien
tcaagggttcgtatgaacgacacat

SEQ ID NO: 4349807 - DNA, 25 bp, Homo sapien
ggcccagggtatctggctttctata

SEQ ID NO: 4349808 - DNA, 25 bp, Homo sapien
tcgtatgaacgacacatttccctgc

SEQ ID NO: 4349809 - DNA, 25 bp, Homo sapien
ccagctccagtagcaatatgtaaat

SEQ ID NO: 4349810 - DNA, 25 bp, Homo sapien
gagccagctccagtagcaatatgta

SEQ ID NO: 4349811 - DNA, 25 bp, Homo sapien
agccagctccagtagcaatatgtaa

SEQ ID NO: 4349812 - DNA, 25 bp, Homo sapien
gccagctccagtagcaatatgtaaa

SEQ ID NO: 4349813 - DNA, 25 bp, Homo sapien
tgggcccaatgccaacctgacagat

SEQ ID NO: 4349814 - DNA, 25 bp, Homo sapien
tgctagtgggcccaatgccaacctg

SEQ ID NO: 4349815 - DNA, 25 bp, Homo sapien
cctgggctgcttgcagcacaaccag

SEQ ID NO: 4349816 - DNA, 25 bp, Homo sapien
caggtttaggccatcaagtgtgttc

SEQ ID NO: 4349817 - DNA, 25 bp, Homo sapien
atgtcgatattcgtgcacccatgca

SEQ ID NO: 4349818 - DNA, 25 bp, Homo sapien
tactaggcctagaagttccccatac

SEQ ID NO: 4349819 - DNA, 25 bp, Homo sapien
cagagggtacacactggattgactg

SEQ ID NO: 4349820 - DNA, 25 bp, Homo sapien
cagatactggtgtaaaggtgaccca

SEQ ID NO: 4349821 - DNA, 25 bp, Homo sapien
gcagcctcgccagtctgaatcccca

SEQ ID NO: 4349822 - DNA, 25 bp, Homo sapien
agcagcctcgccagtctgaatcccc

SEQ ID NO: 4349823 - DNA, 25 bp, Homo sapien
agcctcgccagtctgaatccccact

SEQ ID NO: 4349824 - DNA, 25 bp, Homo sapien
gcctcgccagtctgaatccccactt

SEQ ID NO: 4349825 - DNA, 25 bp, Homo sapien
ttattatggtcccttctgaaggtgt

SEQ ID NO: 4349826 - DNA, 25 bp, Homo sapien
atgcagtcagtgctggcaacttgcc

SEQ ID NO: 4349827 - DNA, 25 bp, Homo sapien
tatggtcccttctgaaggtgttcca

SEQ ID NO: 4349828 - DNA, 25 bp, Homo sapien
tgctggcaacttgccgtttattatg

SEQ ID NO: 4349829 - DNA, 25 bp, Homo sapien
tctccgcccggcagccaccccgtcc

SEQ ID NO: 4349830 - DNA, 25 bp, Homo sapien
tgaggagcccctccgtccggcaacc

SEQ ID NO: 4349831 - DNA, 25 bp, Homo sapien
aggagcgtctccgcccggcagccac

SEQ ID NO: 4349832 - DNA, 25 bp, Homo sapien
gaggagcccctccgtccggcaacca

SEQ ID NO: 4349833 - DNA, 25 bp, Homo sapien
aaatcgcatggttgccgggtctgta

SEQ ID NO: 4349834 - DNA, 25 bp, Homo sapien
ccagcggctcattggggatgggcca

SEQ ID NO: 4349835 - DNA, 25 bp, Homo sapien
tgtgcccagcggctcattggggatg

SEQ ID NO: 4349836 - DNA, 25 bp, Homo sapien
catggttgccgggtctgtatggata

SEQ ID NO: 4349837 - DNA, 25 bp, Homo sapien
ctaggaggagtgcaaaggtgttcat

SEQ ID NO: 4349838 - DNA, 25 bp, Homo sapien
ctgttcccactcataggaagtttta

SEQ ID NO: 4349839 - DNA, 25 bp, Homo sapien
tgttcccactcataggaagttttac

SEQ ID NO: 4349840 - DNA, 25 bp, Homo sapien
cgtgtctattgtacgtttttcaaga

SEQ ID NO: 4349841 - DNA, 25 bp, Homo sapien
ggtgatagatcactgggtcttgttt

SEQ ID NO: 4349842 - DNA, 25 bp, Homo sapien
cgtttttcaagatgaggcttgcaaa

SEQ ID NO: 4349843 - DNA, 25 bp, Homo sapien
tggttggacagtttagtccatttgc

SEQ ID NO: 4349844 - DNA, 25 bp, Homo sapien
catagataaacacgtcatgagggtt

SEQ ID NO: 4349845 - DNA, 25 bp, Homo sapien
taccagcgagtttgtacatatatat

SEQ ID NO: 4349846 - DNA, 25 bp, Homo sapien
caggttgaagaactctgtttaacat

SEQ ID NO: 4349847 - DNA, 25 bp, Homo sapien
caaatctagcattgatgaaatccct

SEQ ID NO: 4349848 - DNA, 25 bp, Homo sapien
tgggagcagccgtgggacgcgtggc

SEQ ID NO: 4349849 - DNA, 25 bp, Homo sapien
gcagtttcgatggaaaatgaaggta

SEQ ID NO: 4349850 - DNA, 25 bp, Homo sapien
tcaacccgagtgcagtttcgatgga

SEQ ID NO: 4349851 - DNA, 25 bp, Homo sapien
agactttgtagccatcaacccgagt

SEQ ID NO: 4349852 - DNA, 25 bp, Homo sapien
ctggccgaccggttgcaacgcggag

SEQ ID NO: 4349853 - DNA, 25 bp, Homo sapien
tgcaacgcggagttgagggtgtggt

SEQ ID NO: 4349854 - DNA, 25 bp, Homo sapien
ttgcaacgcggagttgagggtgtgg

SEQ ID NO: 4349855 - DNA, 25 bp, Homo sapien
ccgaccggttgcaacgcggagttga

SEQ ID NO: 4349856 - DNA, 25 bp, Homo sapien
ttataattcattaagcagaagtgga

SEQ ID NO: 4349857 - DNA, 25 bp, Homo sapien
gacctttacagttgaaactcatgtt

SEQ ID NO: 4349858 - DNA, 25 bp, Homo sapien
gcaaatctgagtataagtagacctt

SEQ ID NO: 4349859 - DNA, 25 bp, Homo sapien
tcgctttgagtaggctgaagaaaag

SEQ ID NO: 4349860 - DNA, 25 bp, Homo sapien
gaatggtatcctctacatcagaaac

SEQ ID NO: 4349861 - DNA, 25 bp, Homo sapien
tatgatgtgacataagggcccacct

SEQ ID NO: 4349862 - DNA, 25 bp, Homo sapien
tatagtttaactctcacgcttgatc

SEQ ID NO: 4349863 - DNA, 25 bp, Homo sapien
gattacctgttcactttctgaatgg

SEQ ID NO: 4349864 - DNA, 25 bp, Homo sapien
aaagagtagaaaggtgttggatctg

SEQ ID NO: 4349865 - DNA, 25 bp, Homo sapien
aactagtcaagtgcatttcagtgag

SEQ ID NO: 4349866 - DNA, 25 bp, Homo sapien
agtgcatttcagtgagaagggagaa

SEQ ID NO: 4349867 - DNA, 25 bp, Homo sapien
gtagaaaggtgttggatctgtaact

SEQ ID NO: 4349868 - DNA, 25 bp, Homo sapien
aaagcaaaaggataagatatagtgc

SEQ ID NO: 4349869 - DNA, 25 bp, Homo sapien
agatatagtgctcccttcctacgag

SEQ ID NO: 4349870 - DNA, 25 bp, Homo sapien
cccaaaaaatgctggcgaataaagc

SEQ ID NO: 4349871 - DNA, 25 bp, Homo sapien
caaaaggataagatatagtgctccc

SEQ ID NO: 4349872 - DNA, 25 bp, Homo sapien
agcagcatgtacggaatccccacat

SEQ ID NO: 4349873 - DNA, 25 bp, Homo sapien
tcagcagcatgtacggaatccccac

SEQ ID NO: 4349874 - DNA, 25 bp, Homo sapien
ttctcagcagcatgtacggaatccc

SEQ ID NO: 4349875 - DNA, 25 bp, Homo sapien
tctcagcagcatgtacggaatcccc

SEQ ID NO: 4349876 - DNA, 25 bp, Homo sapien
cttgtaggcatgtgaggctgaacac

SEQ ID NO: 4349877 - DNA, 25 bp, Homo sapien
gtaggcatgtgaggctgaacactct

SEQ ID NO: 4349878 - DNA, 25 bp, Homo sapien
ctctggcttgatgcccaggctctca

SEQ ID NO: 4349879 - DNA, 25 bp, Homo sapien
gcatgtgaggctgaacactctggct

SEQ ID NO: 4349880 - DNA, 25 bp, Homo sapien
ggatttgcagtaaatctcttaatca

SEQ ID NO: 4349881 - DNA, 25 bp, Homo sapien
tctgcgtggtgcacggccctcccgc

SEQ ID NO: 4349882 - DNA, 25 bp, Homo sapien
ttctgcgtggtgcacggccctcccg

SEQ ID NO: 4349883 - DNA, 25 bp, Homo sapien
caaaaagcctttatgtgtgcaggcc

SEQ ID NO: 4349884 - DNA, 25 bp, Homo sapien
tgaagctgcatcaagtacgtacctt

SEQ ID NO: 4349885 - DNA, 25 bp, Homo sapien
ctcttaagtttcagtagtgggcagc

SEQ ID NO: 4349886 - DNA, 25 bp, Homo sapien
taaagaatctcagcttaggactcaa

SEQ ID NO: 4349887 - DNA, 25 bp, Homo sapien
ctagtttgtgaatagctcttaaagt

SEQ ID NO: 4349888 - DNA, 25 bp, Homo sapien
cctagtttgtgaatagctcttaaag

SEQ ID NO: 4349889 - DNA, 25 bp, Homo sapien
tcctagtttgtgaatagctcttaaa

SEQ ID NO: 4349890 - DNA, 25 bp, Homo sapien
tctcctagtttgtgaatagctctta

SEQ ID NO: 4349891 - DNA, 25 bp, Homo sapien
tcacatggcggagacagcaatttct

SEQ ID NO: 4349892 - DNA, 25 bp, Homo sapien
ggactagcctcatgaccgcatctaa

SEQ ID NO: 4349893 - DNA, 25 bp, Homo sapien
aaacttgcctgggtccttagcagct

SEQ ID NO: 4349894 - DNA, 25 bp, Homo sapien
gactaggcctaaagccacagttgca

SEQ ID NO: 4349895 - DNA, 25 bp, Homo sapien
tttcttgtaatgtaagcagctcaga

SEQ ID NO: 4349896 - DNA, 25 bp, Homo sapien
tcccaggagtgccatatttcagcta

SEQ ID NO: 4349897 - DNA, 25 bp, Homo sapien
gctcagataccatgtgctatcattt

SEQ ID NO: 4349898 - DNA, 25 bp, Homo sapien
tgcacaggatgtgaccactgtcaga

SEQ ID NO: 4349899 - DNA, 25 bp, Homo sapien
aatttcctagaactaatgacagctg

SEQ ID NO: 4349900 - DNA, 25 bp, Homo sapien
tcatagaaatttcctagaactaatg

SEQ ID NO: 4349901 - DNA, 25 bp, Homo sapien
gaactaatgacagctgaatcaaatt

SEQ ID NO: 4349902 - DNA, 25 bp, Homo sapien
tcctagaactaatgacagctgaatc

SEQ ID NO: 4349903 - DNA, 25 bp, Homo sapien
ctgagaagcagtaggacagtgcagc

SEQ ID NO: 4349904 - DNA, 25 bp, Homo sapien
tgagaagcagtaggacagtgcagcc

SEQ ID NO: 4349905 - DNA, 25 bp, Homo sapien
gaggtggtggtaggggctataagga

SEQ ID NO: 4349906 - DNA, 25 bp, Homo sapien
cagaggtggtggtaggggctataag

SEQ ID NO: 4349907 - DNA, 25 bp, Homo sapien
gcagaggtggtggtaggggctataa

SEQ ID NO: 4349908 - DNA, 25 bp, Homo sapien
ctgcagaggtggtggtaggggctat

SEQ ID NO: 4349909 - DNA, 25 bp, Homo sapien
tattttctaagtttgagcttggctg

SEQ ID NO: 4349910 - DNA, 25 bp, Homo sapien
cttggctgcccattgaaattgtctt

SEQ ID NO: 4349911 - DNA, 25 bp, Homo sapien
tttccagtgtggctacggctggagt

SEQ ID NO: 4349912 - DNA, 25 bp, Homo sapien
gctggagttgctataatattctcac

SEQ ID NO: 4349913 - DNA, 25 bp, Homo sapien
tattgtgatgtttatcccctaacag

SEQ ID NO: 4349914 - DNA, 25 bp, Homo sapien
tgtgatgtttatcccctaacaggtc

SEQ ID NO: 4349915 - DNA, 25 bp, Homo sapien
tgtttatcccctaacaggtcagtcc

SEQ ID NO: 4349916 - DNA, 25 bp, Homo sapien
tcccctaacaggtcagtcctaaaga

SEQ ID NO: 4349917 - DNA, 25 bp, Homo sapien
ttattcaatgttggaggcctcacta

SEQ ID NO: 4349918 - DNA, 25 bp, Homo sapien
gcctcactatgttcctctaagtttt

SEQ ID NO: 4349919 - DNA, 25 bp, Homo sapien
gtttccctcataccaacacttggtg

SEQ ID NO: 4349920 - DNA, 25 bp, Homo sapien
tgttcttagaacagctggtattctg

SEQ ID NO: 4349921 - DNA, 25 bp, Homo sapien
actttctacagaggtcgatgctagc

SEQ ID NO: 4349922 - DNA, 25 bp, Homo sapien
gggcatatgaccttgtggcattgaa

SEQ ID NO: 4349923 - DNA, 25 bp, Homo sapien
cttttggtaggaatatttcagcggg

SEQ ID NO: 4349924 - DNA, 25 bp, Homo sapien
tcgatgctagcagttgctggcatag

SEQ ID NO: 4349925 - DNA, 25 bp, Homo sapien
tagtggttttgcagctagccccaga

SEQ ID NO: 4349926 - DNA, 25 bp, Homo sapien
caaattacgtgatgcatgcttagtg

SEQ ID NO: 4349927 - DNA, 25 bp, Homo sapien
gaactgagctggtatgacaaagatt

SEQ ID NO: 4349928 - DNA, 25 bp, Homo sapien
cagtgcaacaggataactaccattg

SEQ ID NO: 4349929 - DNA, 25 bp, Homo sapien
cacagagtttacatctgagtggaga

SEQ ID NO: 4349930 - DNA, 25 bp, Homo sapien
cccaccatattttgtatgcgtccat

SEQ ID NO: 4349931 - DNA, 25 bp, Homo sapien
tgaaacatgtaaagtcccaccatat

SEQ ID NO: 4349932 - DNA, 25 bp, Homo sapien
gacaaacaaaacacaatctatctcc

SEQ ID NO: 4349933 - DNA, 25 bp, Homo sapien
aatgaatgagtaagccatatgccaa

SEQ ID NO: 4349934 - DNA, 25 bp, Homo sapien
gctccattagagctgagattctgtt

SEQ ID NO: 4349935 - DNA, 25 bp, Homo sapien
gttaagttcacttgggcatctactc

SEQ ID NO: 4349936 - DNA, 25 bp, Homo sapien
tgtccctacaccctagcacagggta

SEQ ID NO: 4349937 - DNA, 25 bp, Homo sapien
agtcttgtgcccagccgtgtctgcg

SEQ ID NO: 4349938 - DNA, 25 bp, Homo sapien
ctctgggagaggagtggacagcagc

SEQ ID NO: 4349939 - DNA, 25 bp, Homo sapien
ggttgagatacatccccatctggag

SEQ ID NO: 4349940 - DNA, 25 bp, Homo sapien
tgtgagctgtgtctaagtccagtct

SEQ ID NO: 4349941 - DNA, 25 bp, Homo sapien
tggaactctgcatacaacatcttag

SEQ ID NO: 4349942 - DNA, 25 bp, Homo sapien
tttggaactctgcatacaacatctt

SEQ ID NO: 4349943 - DNA, 25 bp, Homo sapien
gaactctgcatacaacatcttagca

SEQ ID NO: 4349944 - DNA, 25 bp, Homo sapien
tctgcatacaacatcttagcaccat

SEQ ID NO: 4349945 - DNA, 25 bp, Homo sapien
tttcttttcatagtagaggataagg

SEQ ID NO: 4349946 - DNA, 25 bp, Homo sapien
taaagtatgacttggagaatttggc

SEQ ID NO: 4349947 - DNA, 25 bp, Homo sapien
ggcaagaagcaacaatcctaggaaa

SEQ ID NO: 4349948 - DNA, 25 bp, Homo sapien
tgttttataggaggaagctaaagta

SEQ ID NO: 4349949 - DNA, 25 bp, Homo sapien
actagcgaggagcaagacactgagc

SEQ ID NO: 4349950 - DNA, 25 bp, Homo sapien
caactagcgaggagcaagacactga

SEQ ID NO: 4349951 - DNA, 25 bp, Homo sapien
tagcgaggagcaagacactgagcct

SEQ ID NO: 4349952 - DNA, 25 bp, Homo sapien
gaggagcaagacactgagcctgcct

SEQ ID NO: 4349953 - DNA, 25 bp, Homo sapien
gcctatagccatatgtaactacctg

SEQ ID NO: 4349954 - DNA, 25 bp, Homo sapien
cagctgtcaagcttgagccttaata

SEQ ID NO: 4349955 - DNA, 25 bp, Homo sapien
ttaataggcttgtgctctgagagct

SEQ ID NO: 4349956 - DNA, 25 bp, Homo sapien
tgtccaatacagtaggctagcctat

SEQ ID NO: 4349957 - DNA, 25 bp, Homo sapien
cagggctgttgattatggcaatcaa

SEQ ID NO: 4349958 - DNA, 25 bp, Homo sapien
tgtagctttgctttggtctcggtgt

SEQ ID NO: 4349959 - DNA, 25 bp, Homo sapien
aagggccccactagcattgtgagca

SEQ ID NO: 4349960 - DNA, 25 bp, Homo sapien
cattgtgagcagtaaggattgtaga

SEQ ID NO: 4349961 - DNA, 25 bp, Homo sapien
cttcagtgaagtagggattggctcc

SEQ ID NO: 4349962 - DNA, 25 bp, Homo sapien
ctgcaaccagtagcaactgacagca

SEQ ID NO: 4349963 - DNA, 25 bp, Homo sapien
gacagcaatgggcaacttcagtgaa

SEQ ID NO: 4349964 - DNA, 25 bp, Homo sapien
caccttcagggtttctaacagaagc

SEQ ID NO: 4349965 - DNA, 25 bp, Homo sapien
tcttcagtgcacgtcacctgggaag

SEQ ID NO: 4349966 - DNA, 25 bp, Homo sapien
tcctctttgtatacgctggtgagca

SEQ ID NO: 4349967 - DNA, 25 bp, Homo sapien
gagagcccaggaggaatatacattt

SEQ ID NO: 4349968 - DNA, 25 bp, Homo sapien
gattgactaatctgagagagagccc

SEQ ID NO: 4349969 - DNA, 25 bp, Homo sapien
cagaatgatccttggccagttctac

SEQ ID NO: 4349970 - DNA, 25 bp, Homo sapien
tgcctgatgggctgagatattctgt

SEQ ID NO: 4349971 - DNA, 25 bp, Homo sapien
tccaggatgtcttgtccagatgtgg

SEQ ID NO: 4349972 - DNA, 25 bp, Homo sapien
gaagcccatagatgatttgcctgat

SEQ ID NO: 4349973 - DNA, 25 bp, Homo sapien
tcaaggcatctggacagacataagt

SEQ ID NO: 4349974 - DNA, 25 bp, Homo sapien
tgggaagaatggtccgtcttaggac

SEQ ID NO: 4349975 - DNA, 25 bp, Homo sapien
tcttaggaccaaagcatcactgatg

SEQ ID NO: 4349976 - DNA, 25 bp, Homo sapien
gatagctggcctttagctaaagcca

SEQ ID NO: 4349977 - DNA, 25 bp, Homo sapien
caaagacggtggaaaagagcataac

SEQ ID NO: 4349978 - DNA, 25 bp, Homo sapien
tagaactggtagctccaagaggaag

SEQ ID NO: 4349979 - DNA, 25 bp, Homo sapien
gatgagtaagggacatacgtaccca

SEQ ID NO: 4349980 - DNA, 25 bp, Homo sapien
tatctagtgcttcggtagggttggc

SEQ ID NO: 4349981 - DNA, 25 bp, Homo sapien
catgggttgtaatctttggatggtg

SEQ ID NO: 4349982 - DNA, 25 bp, Homo sapien
cctcaagcaatgttagctgtgcttt

SEQ ID NO: 4349983 - DNA, 25 bp, Homo sapien
ctagatcctcaagcaatgttagctg

SEQ ID NO: 4349984 - DNA, 25 bp, Homo sapien
tcctttgctttctgatacaaggcac

SEQ ID NO: 4349985 - DNA, 25 bp, Homo sapien
cacaacccgccgcccggacctgcag

SEQ ID NO: 4349986 - DNA, 25 bp, Homo sapien
ctcggccctcacaacccgccgcccg

SEQ ID NO: 4349987 - DNA, 25 bp, Homo sapien
tcacaacccgccgcccggacctgca

SEQ ID NO: 4349988 - DNA, 25 bp, Homo sapien
cctcacaacccgccgcccggacctg

SEQ ID NO: 4349989 - DNA, 25 bp, Homo sapien
tcctcccagaggagtagctcctcca

SEQ ID NO: 4349990 - DNA, 25 bp, Homo sapien
ctgtcctcccagaggagtagctcct

SEQ ID NO: 4349991 - DNA, 25 bp, Homo sapien
tctgtcctcccagaggagtagctcc

SEQ ID NO: 4349992 - DNA, 25 bp, Homo sapien
tgtcctcccagaggagtagctcctc

SEQ ID NO: 4349993 - DNA, 25 bp, Homo sapien
gaagtctcccggtgtgacgtctctg

SEQ ID NO: 4349994 - DNA, 25 bp, Homo sapien
tacagttccgtgatgccggtggcgc

SEQ ID NO: 4349995 - DNA, 25 bp, Homo sapien
tcaagagcgggaatcggaagtctcc

SEQ ID NO: 4349996 - DNA, 25 bp, Homo sapien
actggctcctgcacgtgagagtcca

SEQ ID NO: 4349997 - DNA, 25 bp, Homo sapien
agtttgaggcctgcccgattacccg

SEQ ID NO: 4349998 - DNA, 25 bp, Homo sapien
gcctacttgggtcggcgaacacttc

SEQ ID NO: 4349999 - DNA, 25 bp, Homo sapien
gattacccgcaagacttgggcagcc

SEQ ID NO: 4350000 - DNA, 25 bp, Homo sapien
tgctgtcaggctaggaaagcttggc

SEQ ID NO: 4350001 - DNA, 25 bp, Homo sapien
ttcctggacatcttacctccggatg

SEQ ID NO: 4350002 - DNA, 25 bp, Homo sapien
gatgtactccagtctcagtgcccct

SEQ ID NO: 4350003 - DNA, 25 bp, Homo sapien
taatggtttcaagctgcccgggctg

SEQ ID NO: 4350004 - DNA, 25 bp, Homo sapien
tccgaatctctaggacgccatggct

SEQ ID NO: 4350005 - DNA, 25 bp, Homo sapien
cttgtgataaatactccttccgttg

SEQ ID NO: 4350006 - DNA, 25 bp, Homo sapien
gataactactggttttcaacttgtg

SEQ ID NO: 4350007 - DNA, 25 bp, Homo sapien
cccagccagatctgtttcaccgaga

SEQ ID NO: 4350008 - DNA, 25 bp, Homo sapien
caccgagaacgggtagtttgcacaa

SEQ ID NO: 4350009 - DNA, 25 bp, Homo sapien
caacaacttttggtgcatccggcag

SEQ ID NO: 4350010 - DNA, 25 bp, Homo sapien
tcctccaacaacttttggtgcatcc

SEQ ID NO: 4350011 - DNA, 25 bp, Homo sapien
tccaacaacttttggtgcatccggc

SEQ ID NO: 4350012 - DNA, 25 bp, Homo sapien
aacttttggtgcatccggcagccca

SEQ ID NO: 4350013 - DNA, 25 bp, Homo sapien
tgctgacttgctccgcctacggaag

SEQ ID NO: 4350014 - DNA, 25 bp, Homo sapien
gcacctgtgtacagaagcactgtaa

SEQ ID NO: 4350015 - DNA, 25 bp, Homo sapien
gctccgcctacggaagacttggtgt

SEQ ID NO: 4350016 - DNA, 25 bp, Homo sapien
cactgtaaggaggatagctgcctgc

SEQ ID NO: 4350017 - DNA, 25 bp, Homo sapien
ccatgagaatggcaaagagcagttt

SEQ ID NO: 4350018 - DNA, 25 bp, Homo sapien
cagaccattgtaactggcatgagcc

SEQ ID NO: 4350019 - DNA, 25 bp, Homo sapien
agccaccgcctttgtactccaggaa

SEQ ID NO: 4350020 - DNA, 25 bp, Homo sapien
gctctattagaagggccaatgggat

SEQ ID NO: 4350021 - DNA, 25 bp, Homo sapien
gaggggaactatggctcatatctgc

SEQ ID NO: 4350022 - DNA, 25 bp, Homo sapien
aggggaactatggctcatatctgca

SEQ ID NO: 4350023 - DNA, 25 bp, Homo sapien
atggaggggaactatggctcatatc

SEQ ID NO: 4350024 - DNA, 25 bp, Homo sapien
tggaggggaactatggctcatatct

SEQ ID NO: 4350025 - DNA, 25 bp, Homo sapien
tttttctgatccaagggcgagcttg

SEQ ID NO: 4350026 - DNA, 25 bp, Homo sapien
tctgatccaagggcgagcttgcttc

SEQ ID NO: 4350027 - DNA, 25 bp, Homo sapien
tgatccaagggcgagcttgcttcac

SEQ ID NO: 4350028 - DNA, 25 bp, Homo sapien
tttctgatccaagggcgagcttgct

SEQ ID NO: 4350029 - DNA, 25 bp, Homo sapien
tcaggcaagcaaggctgatgtctta

SEQ ID NO: 4350030 - DNA, 25 bp, Homo sapien
gaaggactagcctcaggcaagcaag

SEQ ID NO: 4350031 - DNA, 25 bp, Homo sapien
tgatttgaagacctatctatctctt

SEQ ID NO: 4350032 - DNA, 25 bp, Homo sapien
ggaagggtgtcactttgatttgaag

SEQ ID NO: 4350033 - DNA, 25 bp, Homo sapien
gctgcctaggaactccatcgtgctg

SEQ ID NO: 4350034 - DNA, 25 bp, Homo sapien
gcctaggaactccatcgtgctgcct

SEQ ID NO: 4350035 - DNA, 25 bp, Homo sapien
ctggagggccagactaaggacaacc

SEQ ID NO: 4350036 - DNA, 25 bp, Homo sapien
ggccagactaaggacaacctccctg

SEQ ID NO: 4350037 - DNA, 25 bp, Homo sapien
ttcttctaatctttttatacagcat

SEQ ID NO: 4350038 - DNA, 25 bp, Homo sapien
tttcttctaatctttttatacagca

SEQ ID NO: 4350039 - DNA, 25 bp, Homo sapien
ctttcttctaatctttttatacagc

SEQ ID NO: 4350040 - DNA, 25 bp, Homo sapien
atgttagggtggcttacttcatggc

SEQ ID NO: 4350041 - DNA, 25 bp, Homo sapien
tagggtggcttacttcatggctcca

SEQ ID NO: 4350042 - DNA, 25 bp, Homo sapien
ctgccatagttcaaggagtcaaatg

SEQ ID NO: 4350043 - DNA, 25 bp, Homo sapien
tggctgccatagttcaaggagtcaa

SEQ ID NO: 4350044 - DNA, 25 bp, Homo sapien
gcacagaggccattctaacctcctc

SEQ ID NO: 4350045 - DNA, 25 bp, Homo sapien
acagaggccattctaacctcctctg

SEQ ID NO: 4350046 - DNA, 25 bp, Homo sapien
ttgcacagaggccattctaacctcc

SEQ ID NO: 4350047 - DNA, 25 bp, Homo sapien
tccttgcacagaggccattctaacc

SEQ ID NO: 4350048 - DNA, 25 bp, Homo sapien
cagtatggctattttaacagtattg

SEQ ID NO: 4350049 - DNA, 25 bp, Homo sapien
gtagattgcttagggcagtatggct

SEQ ID NO: 4350050 - DNA, 25 bp, Homo sapien
agaatgatgctggtagtttgatagg

SEQ ID NO: 4350051 - DNA, 25 bp, Homo sapien
tgttttttccatttattagtgtcat

SEQ ID NO: 4350052 - DNA, 25 bp, Homo sapien
gctgaacaacgttgtcttccacaag

SEQ ID NO: 4350053 - DNA, 25 bp, Homo sapien
ggtgatcacagggtttgagactttc

SEQ ID NO: 4350054 - DNA, 25 bp, Homo sapien
tgtcttccacaaggagtgttaacaa

SEQ ID NO: 4350055 - DNA, 25 bp, Homo sapien
tagcatcagctgaacaacgttgtct

SEQ ID NO: 4350056 - DNA, 25 bp, Homo sapien
cttgtctctgatcttgcaggatggg

SEQ ID NO: 4350057 - DNA, 25 bp, Homo sapien
tctctgatcttgcaggatgggtttc

SEQ ID NO: 4350058 - DNA, 25 bp, Homo sapien
ttgtctctgatcttgcaggatgggt

SEQ ID NO: 4350059 - DNA, 25 bp, Homo sapien
tgtctctgatcttgcaggatgggtt

SEQ ID NO: 4350060 - DNA, 25 bp, Homo sapien
tatccttgtactttgtaagtaccat

SEQ ID NO: 4350061 - DNA, 25 bp, Homo sapien
tcacgtttcagcaattcggaattca

SEQ ID NO: 4350062 - DNA, 25 bp, Homo sapien
cttttagtcttatgggagctgtggg

SEQ ID NO: 4350063 - DNA, 25 bp, Homo sapien
tgaaagaggcttttagtcttatggg

SEQ ID NO: 4350064 - DNA, 25 bp, Homo sapien
tcagcaattcggaattcagtgaaag

SEQ ID NO: 4350065 - DNA, 25 bp, Homo sapien
ctgcagcttggacagtacgccacaa

SEQ ID NO: 4350066 - DNA, 25 bp, Homo sapien
gataagtgactgtcagcaacagctt

SEQ ID NO: 4350067 - DNA, 25 bp, Homo sapien
ggacagtacgccacaaccagagtct

SEQ ID NO: 4350068 - DNA, 25 bp, Homo sapien
aaccagagtctcttggataagtgac

SEQ ID NO: 4350069 - DNA, 25 bp, Homo sapien
aaattgctttgacctttatttgcat

SEQ ID NO: 4350070 - DNA, 25 bp, Homo sapien
gattgcccttgaacatcgccttgaa

SEQ ID NO: 4350071 - DNA, 25 bp, Homo sapien
tcaccaccatggctgaagacatgtc

SEQ ID NO: 4350072 - DNA, 25 bp, Homo sapien
tcaacagtgtgatggccaggaccaa

SEQ ID NO: 4350073 - DNA, 25 bp, Homo sapien
tgatgaagtcaataagggctgtgca

SEQ ID NO: 4350074 - DNA, 25 bp, Homo sapien
agggagtaagtagcatgttgcctgc

SEQ ID NO: 4350075 - DNA, 25 bp, Homo sapien
gagggagtaagtagcatgttgcctg

SEQ ID NO: 4350076 - DNA, 25 bp, Homo sapien
agtccttcaaccctccagatgccaa

SEQ ID NO: 4350077 - DNA, 25 bp, Homo sapien
ccagatgccaagctgagccagccca

SEQ ID NO: 4350078 - DNA, 25 bp, Homo sapien
ttgccacaagtccttcaaccctcca

SEQ ID NO: 4350079 - DNA, 25 bp, Homo sapien
tcaaccctccagatgccaagctgag

SEQ ID NO: 4350080 - DNA, 25 bp, Homo sapien
ggtctaactccagagcattctgatt

SEQ ID NO: 4350081 - DNA, 25 bp, Homo sapien
ctccagagcattctgatttgtgctt

SEQ ID NO: 4350082 - DNA, 25 bp, Homo sapien
cttggtctaactccagagcattctg

SEQ ID NO: 4350083 - DNA, 25 bp, Homo sapien
taactccagagcattctgatttgtg

SEQ ID NO: 4350084 - DNA, 25 bp, Homo sapien
ggtgtatcagtcttatttactcttt

SEQ ID NO: 4350085 - DNA, 25 bp, Homo sapien
ttctagctagtggtgtatcagtctt

SEQ ID NO: 4350086 - DNA, 25 bp, Homo sapien
gctagtggtgtatcagtcttattta

SEQ ID NO: 4350087 - DNA, 25 bp, Homo sapien
tattctagctagtggtgtatcagtc

SEQ ID NO: 4350088 - DNA, 25 bp, Homo sapien
ttcacaccttttgagtgtcagctgc

SEQ ID NO: 4350089 - DNA, 25 bp, Homo sapien
tgatattcacaccttttgagtgtca

SEQ ID NO: 4350090 - DNA, 25 bp, Homo sapien
acaccttttgagtgtcagctgcagg

SEQ ID NO: 4350091 - DNA, 25 bp, Homo sapien
tattcacaccttttgagtgtcagct

SEQ ID NO: 4350092 - DNA, 25 bp, Homo sapien
taagtcagggagacttggactccga

SEQ ID NO: 4350093 - DNA, 25 bp, Homo sapien
tagaaaagctcggaaggcaaccagg

SEQ ID NO: 4350094 - DNA, 25 bp, Homo sapien
taggagcacggttctttaagtcagg

SEQ ID NO: 4350095 - DNA, 25 bp, Homo sapien
cattgccctgagatgttaggagcac

SEQ ID NO: 4350096 - DNA, 25 bp, Homo sapien
acaaactcaagttgatccctactaa

SEQ ID NO: 4350097 - DNA, 25 bp, Homo sapien
tctacatctgtaacaaacagcacaa

SEQ ID NO: 4350098 - DNA, 25 bp, Homo sapien
caaactcaagttgatccctactaat

SEQ ID NO: 4350099 - DNA, 25 bp, Homo sapien
cacaaactcaagttgatccctacta

SEQ ID NO: 4350100 - DNA, 25 bp, Homo sapien
acctatttctcgaatgcaagtgcca

SEQ ID NO: 4350101 - DNA, 25 bp, Homo sapien
attgaacctatttctcgaatgcaag

SEQ ID NO: 4350102 - DNA, 25 bp, Homo sapien
tatttctcgaatgcaagtgccatca

SEQ ID NO: 4350103 - DNA, 25 bp, Homo sapien
gaacctatttctcgaatgcaagtgc

SEQ ID NO: 4350104 - DNA, 25 bp, Homo sapien
caccaggctcagaatagaggttccc

SEQ ID NO: 4350105 - DNA, 25 bp, Homo sapien
gatcagcagaggaatagcaacaacc

SEQ ID NO: 4350106 - DNA, 25 bp, Homo sapien
gaaagaaccactagtcagataccag

SEQ ID NO: 4350107 - DNA, 25 bp, Homo sapien
gaaagtcagctatagaatcaaaggg

SEQ ID NO: 4350108 - DNA, 25 bp, Homo sapien
cacatcccagtgcagaactctgagg

SEQ ID NO: 4350109 - DNA, 25 bp, Homo sapien
ccaagggtggtcacacagtggctgt

SEQ ID NO: 4350110 - DNA, 25 bp, Homo sapien
tctcagaaacgttagcagcaggcct

SEQ ID NO: 4350111 - DNA, 25 bp, Homo sapien
tcactccagaagatggtggttcaaa

SEQ ID NO: 4350112 - DNA, 25 bp, Homo sapien
tttagaacaggaggctaaaatctcc

SEQ ID NO: 4350113 - DNA, 25 bp, Homo sapien
taaacgttttctgctgttaagctaa

SEQ ID NO: 4350114 - DNA, 25 bp, Homo sapien
cccatcagaatggtggaaagtgctt

SEQ ID NO: 4350115 - DNA, 25 bp, Homo sapien
tccctctccctgaagataaattgct

SEQ ID NO: 4350116 - DNA, 25 bp, Homo sapien
gggactctggagtcgtcctcagagg

SEQ ID NO: 4350117 - DNA, 25 bp, Homo sapien
gagggactctggagtcgtcctcaga

SEQ ID NO: 4350118 - DNA, 25 bp, Homo sapien
agggactctggagtcgtcctcagag

SEQ ID NO: 4350119 - DNA, 25 bp, Homo sapien
tgagggactctggagtcgtcctcag

SEQ ID NO: 4350120 - DNA, 25 bp, Homo sapien
ttccagcagctctgggcagacttca

SEQ ID NO: 4350121 - DNA, 25 bp, Homo sapien
ggcttccagcagctctgggcagact

SEQ ID NO: 4350122 - DNA, 25 bp, Homo sapien
cagcagggcagctggggcttccagc

SEQ ID NO: 4350123 - DNA, 25 bp, Homo sapien
tccagcagctctgggcagacttcat

SEQ ID NO: 4350124 - DNA, 25 bp, Homo sapien
ctaaagatgattgtgcaggccccat

SEQ ID NO: 4350125 - DNA, 25 bp, Homo sapien
tgtcccttctgcatagaatcccttt

SEQ ID NO: 4350126 - DNA, 25 bp, Homo sapien
tgtctagtcacccagaaatataaga

SEQ ID NO: 4350127 - DNA, 25 bp, Homo sapien
gccccataaagccaatgcatttgaa

SEQ ID NO: 4350128 - DNA, 25 bp, Homo sapien
tgaaagtaggcttaccgtggctgct

SEQ ID NO: 4350129 - DNA, 25 bp, Homo sapien
ggaaacgaatcgagtggctcctgaa

SEQ ID NO: 4350130 - DNA, 25 bp, Homo sapien
tgaaactagatgacccaccttggga

SEQ ID NO: 4350131 - DNA, 25 bp, Homo sapien
tcaagtgcaaatgtcctggagcagg

SEQ ID NO: 4350132 - DNA, 25 bp, Homo sapien
tctcaggtcactgcagtggcacgat

SEQ ID NO: 4350133 - DNA, 25 bp, Homo sapien
gcacacgccgccatgcccggcttat

SEQ ID NO: 4350134 - DNA, 25 bp, Homo sapien
agccacggcgcccagctggtttttt

SEQ ID NO: 4350135 - DNA, 25 bp, Homo sapien
tctcctgccctcgtgatccactggc

SEQ ID NO: 4350136 - DNA, 25 bp, Homo sapien
gggaattggccatatgaaagtcatt

SEQ ID NO: 4350137 - DNA, 25 bp, Homo sapien
ggccaagactcaagaggagtggatt

SEQ ID NO: 4350138 - DNA, 25 bp, Homo sapien
gaaagtcattgataccatagtgaga

SEQ ID NO: 4350139 - DNA, 25 bp, Homo sapien
ttcaggctggccaatttatacacaa

SEQ ID NO: 4350140 - DNA, 25 bp, Homo sapien
cctcattgtctggatatttacactt

SEQ ID NO: 4350141 - DNA, 25 bp, Homo sapien
ttcctcattgtctggatatttacac

SEQ ID NO: 4350142 - DNA, 25 bp, Homo sapien
tagcaggtggttgctccatagcctg

SEQ ID NO: 4350143 - DNA, 25 bp, Homo sapien
ggtatgcaaatatctctagcaggtg

SEQ ID NO: 4350144 - DNA, 25 bp, Homo sapien
aatgctagcgaagcagagatccgcg

SEQ ID NO: 4350145 - DNA, 25 bp, Homo sapien
ccagcgactgttttgaagtggacca

SEQ ID NO: 4350146 - DNA, 25 bp, Homo sapien
gagcagttgctgatcacgatgggaa

SEQ ID NO: 4350147 - DNA, 25 bp, Homo sapien
aaaaagtggtgcctcaagccagcga

SEQ ID NO: 4350148 - DNA, 25 bp, Homo sapien
aggctaaagcggagtggtgcgatct

SEQ ID NO: 4350149 - DNA, 25 bp, Homo sapien
ttgcccaggctaaagcggagtggtg

SEQ ID NO: 4350150 - DNA, 25 bp, Homo sapien
tacttttagtatagccagggtttca

SEQ ID NO: 4350151 - DNA, 25 bp, Homo sapien
cacctggctattattttttgtactt

SEQ ID NO: 4350152 - DNA, 25 bp, Homo sapien
gaaatcttttggtgctggtggaaca

SEQ ID NO: 4350153 - DNA, 25 bp, Homo sapien
tcacgtcctgtgtagatccttccca

SEQ ID NO: 4350154 - DNA, 25 bp, Homo sapien
cagcctccaacatgacttccagtga

SEQ ID NO: 4350155 - DNA, 25 bp, Homo sapien
aagatggaagacacagccctatagg

SEQ ID NO: 4350156 - DNA, 25 bp, Homo sapien
tctgacgctcgagcagctgttggct

SEQ ID NO: 4350157 - DNA, 25 bp, Homo sapien
tattgaatggtactgccaacctagg

SEQ ID NO: 4350158 - DNA, 25 bp, Homo sapien
ttgaggtccccgtctgtcagaactt

SEQ ID NO: 4350159 - DNA, 25 bp, Homo sapien
cctaatacttaaggccagggagaca

SEQ ID NO: 4350160 - DNA, 25 bp, Homo sapien
gcagaggaccctccaattcatggga

SEQ ID NO: 4350161 - DNA, 25 bp, Homo sapien
ctttggttcgctgtagactctggga

SEQ ID NO: 4350162 - DNA, 25 bp, Homo sapien
ccccttggacggagcatggacatga

SEQ ID NO: 4350163 - DNA, 25 bp, Homo sapien
tgcagagagcttctacagcaaggct

SEQ ID NO: 4350164 - DNA, 25 bp, Homo sapien
ttcgatcaatatcttctcaattact

SEQ ID NO: 4350165 - DNA, 25 bp, Homo sapien
tatattcttcgatcaatatcttctc

SEQ ID NO: 4350166 - DNA, 25 bp, Homo sapien
catttaacatgtcatctaggttaat

SEQ ID NO: 4350167 - DNA, 25 bp, Homo sapien
aacatgtcatctaggttaatccatg

SEQ ID NO: 4350168 - DNA, 25 bp, Homo sapien
cagtagcctctggtggtcttttgca

SEQ ID NO: 4350169 - DNA, 25 bp, Homo sapien
ggtcttggaagacctaccaagtctg

SEQ ID NO: 4350170 - DNA, 25 bp, Homo sapien
aatcccatttgatcagggtgactga

SEQ ID NO: 4350171 - DNA, 25 bp, Homo sapien
gacaaggtctatccttgcatcccag

SEQ ID NO: 4350172 - DNA, 25 bp, Homo sapien
caggcagtgggcgatagaagctcac

SEQ ID NO: 4350173 - DNA, 25 bp, Homo sapien
catatgaaagtacaggatgccgtgt

SEQ ID NO: 4350174 - DNA, 25 bp, Homo sapien
gcagcacttgggataagcttgaaga

SEQ ID NO: 4350175 - DNA, 25 bp, Homo sapien
gctacttctcggctggaacatttga

SEQ ID NO: 4350176 - DNA, 25 bp, Homo sapien
ggcagttcatgctccccttagggct

SEQ ID NO: 4350177 - DNA, 25 bp, Homo sapien
tggaccttggcccttagacagagaa

SEQ ID NO: 4350178 - DNA, 25 bp, Homo sapien
gacttaaggccccagcagagagaaa

SEQ ID NO: 4350179 - DNA, 25 bp, Homo sapien
cagagccggccagtgaaacatacaa

SEQ ID NO: 4350180 - DNA, 25 bp, Homo sapien
tcattcaggataacaacccctgggt

SEQ ID NO: 4350181 - DNA, 25 bp, Homo sapien
attcaggataacaacccctgggtgg

SEQ ID NO: 4350182 - DNA, 25 bp, Homo sapien
cctttcattcaggataacaacccct

SEQ ID NO: 4350183 - DNA, 25 bp, Homo sapien
taccctcctttcattcaggataaca

SEQ ID NO: 4350184 - DNA, 25 bp, Homo sapien
gtctctcaataggtgaatttccctg

SEQ ID NO: 4350185 - DNA, 25 bp, Homo sapien
catctcgctagggatagtgggctta

SEQ ID NO: 4350186 - DNA, 25 bp, Homo sapien
ggccagagagggaatatctgcccac

SEQ ID NO: 4350187 - DNA, 25 bp, Homo sapien
gtgctactggaaccaacaccactgg

SEQ ID NO: 4350188 - DNA, 25 bp, Homo sapien
ctggcagatggtagatggtggtttg

SEQ ID NO: 4350189 - DNA, 25 bp, Homo sapien
agtaagaccagacccttacctctct

SEQ ID NO: 4350190 - DNA, 25 bp, Homo sapien
ggtggtttgtagtcttcttcctgct

SEQ ID NO: 4350191 - DNA, 25 bp, Homo sapien
tggtagatggtggtttgtagtcttc

SEQ ID NO: 4350192 - DNA, 25 bp, Homo sapien
cctttctccaggttcagggcgctgc

SEQ ID NO: 4350193 - DNA, 25 bp, Homo sapien
cgacccgccgcaagtctcatttcct

SEQ ID NO: 4350194 - DNA, 25 bp, Homo sapien
tttctccaggttcagggcgctgcca

SEQ ID NO: 4350195 - DNA, 25 bp, Homo sapien
gttcagggcgctgccacatcttcag

SEQ ID NO: 4350196 - DNA, 25 bp, Homo sapien
tcttattggatctgagagatgatac

SEQ ID NO: 4350197 - DNA, 25 bp, Homo sapien
tttatatgcgtacagcctggtaacc

SEQ ID NO: 4350198 - DNA, 25 bp, Homo sapien
gagatgatacatgataccagatgaa

SEQ ID NO: 4350199 - DNA, 25 bp, Homo sapien
tcaggccttaagattccagctcatc

SEQ ID NO: 4350200 - DNA, 25 bp, Homo sapien
ctatggagtcaaggcatgtttaaga

SEQ ID NO: 4350201 - DNA, 25 bp, Homo sapien
catgtttaagatgggaggtagagca

SEQ ID NO: 4350202 - DNA, 25 bp, Homo sapien
tattgatggcaacagtcaagatggt

SEQ ID NO: 4350203 - DNA, 25 bp, Homo sapien
ggtagagcatgccaatattgatggc

SEQ ID NO: 4350204 - DNA, 25 bp, Homo sapien
tcagtagattacctctcaggcagcc

SEQ ID NO: 4350205 - DNA, 25 bp, Homo sapien
ggaaagccagggatgatgacccact

SEQ ID NO: 4350206 - DNA, 25 bp, Homo sapien
taataccacttggaaggttccgctc

SEQ ID NO: 4350207 - DNA, 25 bp, Homo sapien
gcaggcatgacaggatagcatctcc

SEQ ID NO: 4350208 - DNA, 25 bp, Homo sapien
gtggtcacttggcatatggcaaagc

SEQ ID NO: 4350209 - DNA, 25 bp, Homo sapien
caaacgggtgtcagagagtcaaaac

SEQ ID NO: 4350210 - DNA, 25 bp, Homo sapien
ctagttaccggaacccttagagctg

SEQ ID NO: 4350211 - DNA, 25 bp, Homo sapien
tcagcataatcagcaagatgttccc

SEQ ID NO: 4350212 - DNA, 25 bp, Homo sapien
gaattaggtcacttactacagcaca

SEQ ID NO: 4350213 - DNA, 25 bp, Homo sapien
tacagcacaaattgcatgtctatct

SEQ ID NO: 4350214 - DNA, 25 bp, Homo sapien
taactgatcgacaggaaaactgtag

SEQ ID NO: 4350215 - DNA, 25 bp, Homo sapien
ctatctaaattgacgtttaagtgca

SEQ ID NO: 4350216 - DNA, 25 bp, Homo sapien
ggtagtcgcaggtccagtttccagg

SEQ ID NO: 4350217 - DNA, 25 bp, Homo sapien
gatatatgggcattaaggcatccag

SEQ ID NO: 4350218 - DNA, 25 bp, Homo sapien
gaaggtggccaatctctgcattgac

SEQ ID NO: 4350219 - DNA, 25 bp, Homo sapien
tgcattgactgcttgcccagtgaca

SEQ ID NO: 4350220 - DNA, 25 bp, Homo sapien
atctgcttctggagctatctgcagt

SEQ ID NO: 4350221 - DNA, 25 bp, Homo sapien
ggagctatctgcagtaaatttaggg

SEQ ID NO: 4350222 - DNA, 25 bp, Homo sapien
tctggagctatctgcagtaaattta

SEQ ID NO: 4350223 - DNA, 25 bp, Homo sapien
gaaccagcagcccattctcgtatac

SEQ ID NO: 4350224 - DNA, 25 bp, Homo sapien
acaaacatgtgcaaacaagcagtac

SEQ ID NO: 4350225 - DNA, 25 bp, Homo sapien
cccacttatctctgagtatggctga

SEQ ID NO: 4350226 - DNA, 25 bp, Homo sapien
gatgaaatagggataatcctaaata

SEQ ID NO: 4350227 - DNA, 25 bp, Homo sapien
ggagtttttcccacttatctctgag

SEQ ID NO: 4350228 - DNA, 25 bp, Homo sapien
acagtttcactgcactagccatgtg

SEQ ID NO: 4350229 - DNA, 25 bp, Homo sapien
tgaccaaaggatccataaatgattg

SEQ ID NO: 4350230 - DNA, 25 bp, Homo sapien
gccatgtgcacttagacatgcatag

SEQ ID NO: 4350231 - DNA, 25 bp, Homo sapien
tcagctctagaactaccacggacag

SEQ ID NO: 4350232 - DNA, 25 bp, Homo sapien
tctgaagagacaggccaacaaagcc

SEQ ID NO: 4350233 - DNA, 25 bp, Homo sapien
tccctgcggacttcattttggcctc

SEQ ID NO: 4350234 - DNA, 25 bp, Homo sapien
tggctccttacttggtccctgcgga

SEQ ID NO: 4350235 - DNA, 25 bp, Homo sapien
ctatgaggagtgtggctccttactt

SEQ ID NO: 4350236 - DNA, 25 bp, Homo sapien
cactgccagttgtgtctgcagcttt

SEQ ID NO: 4350237 - DNA, 25 bp, Homo sapien
actgccagttgtgtctgcagctttg

SEQ ID NO: 4350238 - DNA, 25 bp, Homo sapien
gatagctgttaatgtcccccttgtt

SEQ ID NO: 4350239 - DNA, 25 bp, Homo sapien
ctagttgatagctgttaatgtcccc

SEQ ID NO: 4350240 - DNA, 25 bp, Homo sapien
ttaacttgcagaacttaaccttgta

SEQ ID NO: 4350241 - DNA, 25 bp, Homo sapien
gaacttaaccttgtaagtattgata

SEQ ID NO: 4350242 - DNA, 25 bp, Homo sapien
ccatctcatgtgcatgactccctgc

SEQ ID NO: 4350243 - DNA, 25 bp, Homo sapien
cccatctcatgtgcatgactccctg

SEQ ID NO: 4350244 - DNA, 25 bp, Homo sapien
caatcacagtgctggggttgggagg

SEQ ID NO: 4350245 - DNA, 25 bp, Homo sapien
atcacagtgctggggttgggaggcc

SEQ ID NO: 4350246 - DNA, 25 bp, Homo sapien
ctgtgggggcaatcacagtgctggg

SEQ ID NO: 4350247 - DNA, 25 bp, Homo sapien
ggcaatcacagtgctggggttggga

SEQ ID NO: 4350248 - DNA, 25 bp, Homo sapien
ttagctctgataaagactccctcct

SEQ ID NO: 4350249 - DNA, 25 bp, Homo sapien
tttctgcaaaggtttcagcccctgg

SEQ ID NO: 4350250 - DNA, 25 bp, Homo sapien
gaacactggaattgcgtgaactgag

SEQ ID NO: 4350251 - DNA, 25 bp, Homo sapien
cccaagtgggttgccctcttagctc

SEQ ID NO: 4350252 - DNA, 25 bp, Homo sapien
tggccttcctctgccgccagcccca

SEQ ID NO: 4350253 - DNA, 25 bp, Homo sapien
tcctctgccgccagccccaggcggt

SEQ ID NO: 4350254 - DNA, 25 bp, Homo sapien
tctgccgccagccccaggcggtcat

SEQ ID NO: 4350255 - DNA, 25 bp, Homo sapien
ctggccttcctctgccgccagcccc

SEQ ID NO: 4350256 - DNA, 25 bp, Homo sapien
ccgaatactggaagttctgctttct

SEQ ID NO: 4350257 - DNA, 25 bp, Homo sapien
taaccgaatactggaagttctgctt

SEQ ID NO: 4350258 - DNA, 25 bp, Homo sapien
acacctttagttccatctcaaactt

SEQ ID NO: 4350259 - DNA, 25 bp, Homo sapien
ttgcctaaccgaatactggaagttc

SEQ ID NO: 4350260 - DNA, 25 bp, Homo sapien
gatgctgcctgtcccaatattatag

SEQ ID NO: 4350261 - DNA, 25 bp, Homo sapien
gaatataggaaagtgtccagtgccc

SEQ ID NO: 4350262 - DNA, 25 bp, Homo sapien
gcatcctcgttggttactggctaaa

SEQ ID NO: 4350263 - DNA, 25 bp, Homo sapien
cctgagagcaccctgacatgaacat

SEQ ID NO: 4350264 - DNA, 25 bp, Homo sapien
gctaaggaccgcattcgctgaaatt

SEQ ID NO: 4350265 - DNA, 25 bp, Homo sapien
ttgaagatgtttgcccaaggtggcc

SEQ ID NO: 4350266 - DNA, 25 bp, Homo sapien
taaaggtattcatcccagaggtcca

SEQ ID NO: 4350267 - DNA, 25 bp, Homo sapien
tctctttgggcaacgatttagggcg

SEQ ID NO: 4350268 - DNA, 25 bp, Homo sapien
tgtctcgcaagataacagctcactg

SEQ ID NO: 4350269 - DNA, 25 bp, Homo sapien
gcacctaagttagtcaagagctctg

SEQ ID NO: 4350270 - DNA, 25 bp, Homo sapien
gaaggacacagttcgtctgggccac

SEQ ID NO: 4350271 - DNA, 25 bp, Homo sapien
aaaatcttatgtctgggcaactggc

SEQ ID NO: 4350272 - DNA, 25 bp, Homo sapien
ttacaacttgctaagggctcagaag

SEQ ID NO: 4350273 - DNA, 25 bp, Homo sapien
agtggcaaagtccattgccttatgc

SEQ ID NO: 4350274 - DNA, 25 bp, Homo sapien
tattgaaacacactatagactacag

SEQ ID NO: 4350275 - DNA, 25 bp, Homo sapien
tgccttatgctaagaaactgccaca

SEQ ID NO: 4350276 - DNA, 25 bp, Homo sapien
taggacacccaagaatactgttgaa

SEQ ID NO: 4350277 - DNA, 25 bp, Homo sapien
ggtatccttgtttgatccctgaaaa

SEQ ID NO: 4350278 - DNA, 25 bp, Homo sapien
tctaaggtatgtccgtataagttcc

SEQ ID NO: 4350279 - DNA, 25 bp, Homo sapien
aacgtggctacctttggatttgaag

SEQ ID NO: 4350280 - DNA, 25 bp, Homo sapien
ctttttgaaaggtagactgggtgca

SEQ ID NO: 4350281 - DNA, 25 bp, Homo sapien
aacacactgatcttataattgagtg

SEQ ID NO: 4350282 - DNA, 25 bp, Homo sapien
taaaaagtaatcacctctcccaaca

SEQ ID NO: 4350283 - DNA, 25 bp, Homo sapien
tacaatcttagatcattataaattc

SEQ ID NO: 4350284 - DNA, 25 bp, Homo sapien
caaataggttgcactatagtcccca

SEQ ID NO: 4350285 - DNA, 25 bp, Homo sapien
tctttacccaaataggttgcactat

SEQ ID NO: 4350286 - DNA, 25 bp, Homo sapien
tacccaaataggttgcactatagtc

SEQ ID NO: 4350287 - DNA, 25 bp, Homo sapien
cccaaataggttgcactatagtccc

SEQ ID NO: 4350288 - DNA, 25 bp, Homo sapien
acagacatcttaagataacttggga

SEQ ID NO: 4350289 - DNA, 25 bp, Homo sapien
agataacttgggaaatatgtagtaa

SEQ ID NO: 4350290 - DNA, 25 bp, Homo sapien
taatatgcccaacaccaatttcagc

SEQ ID NO: 4350291 - DNA, 25 bp, Homo sapien
tattttgctaatatgcccaacacca

SEQ ID NO: 4350292 - DNA, 25 bp, Homo sapien
tacttaactcatatatttaatgtgg

SEQ ID NO: 4350293 - DNA, 25 bp, Homo sapien
tatgatttctggtggttatgatatc

SEQ ID NO: 4350294 - DNA, 25 bp, Homo sapien
ggtggttatgatatcactctggctc

SEQ ID NO: 4350295 - DNA, 25 bp, Homo sapien
tctggtggttatgatatcactctgg

SEQ ID NO: 4350296 - DNA, 25 bp, Homo sapien
gatttctggtggttatgatatcact

SEQ ID NO: 4350297 - DNA, 25 bp, Homo sapien
tccttatatgcaggcagtttagaat

SEQ ID NO: 4350298 - DNA, 25 bp, Homo sapien
ccgagatccttatatgcaggcagtt

SEQ ID NO: 4350299 - DNA, 25 bp, Homo sapien
tttaccgagatccttatatgcaggc

SEQ ID NO: 4350300 - DNA, 25 bp, Homo sapien
gaatggtagatttttaccgagatcc

SEQ ID NO: 4350301 - DNA, 25 bp, Homo sapien
gactagacattgttctgatgccagt

SEQ ID NO: 4350302 - DNA, 25 bp, Homo sapien
gagtatcttcagtgatggcaaacta

SEQ ID NO: 4350303 - DNA, 25 bp, Homo sapien
tgtatttagactcccgtttcagaac

SEQ ID NO: 4350304 - DNA, 25 bp, Homo sapien
ggttcagctagaaaaccagcctaga

SEQ ID NO: 4350305 - DNA, 25 bp, Homo sapien
tttgctgctatcattggaaaatcaa

SEQ ID NO: 4350306 - DNA, 25 bp, Homo sapien
tccagtcagtaagtgaagtgtctca

SEQ ID NO: 4350307 - DNA, 25 bp, Homo sapien
tcctgaggccacgtgatcctatcct

SEQ ID NO: 4350308 - DNA, 25 bp, Homo sapien
ccctatgctagtaatggaacctaga

SEQ ID NO: 4350309 - DNA, 25 bp, Homo sapien
aagcaatttttatgtccaggtacag

SEQ ID NO: 4350310 - DNA, 25 bp, Homo sapien
agcaatttttatgtccaggtacaga

SEQ ID NO: 4350311 - DNA, 25 bp, Homo sapien
gcaatttttatgtccaggtacagag

SEQ ID NO: 4350312 - DNA, 25 bp, Homo sapien
ccatattctgtcctgtatatgtttc

SEQ ID NO: 4350313 - DNA, 25 bp, Homo sapien
attctgtcctgtatatgtttcccat

SEQ ID NO: 4350314 - DNA, 25 bp, Homo sapien
atattctgtcctgtatatgtttccc

SEQ ID NO: 4350315 - DNA, 25 bp, Homo sapien
tttcagtccatattctgtcctgtat

SEQ ID NO: 4350316 - DNA, 25 bp, Homo sapien
tttagttccaggccagactctgcca

SEQ ID NO: 4350317 - DNA, 25 bp, Homo sapien
gttccaggccagactctgccaatat

SEQ ID NO: 4350318 - DNA, 25 bp, Homo sapien
tagttccaggccagactctgccaat

SEQ ID NO: 4350319 - DNA, 25 bp, Homo sapien
ttccaggccagactctgccaatatc

SEQ ID NO: 4350320 - DNA, 25 bp, Homo sapien
cccatcttttcatgacaccttgaaa

SEQ ID NO: 4350321 - DNA, 25 bp, Homo sapien
tggcctttaaatccccatcttttca

SEQ ID NO: 4350322 - DNA, 25 bp, Homo sapien
tctcctgtgggttttcgtttgacca

SEQ ID NO: 4350323 - DNA, 25 bp, Homo sapien
tcctgtgggttttcgtttgaccatg

SEQ ID NO: 4350324 - DNA, 25 bp, Homo sapien
aacaaacgttagaatttacataatg

SEQ ID NO: 4350325 - DNA, 25 bp, Homo sapien
acaaacgttagaatttacataatga

SEQ ID NO: 4350326 - DNA, 25 bp, Homo sapien
caaacgttagaatttacataatgaa

SEQ ID NO: 4350327 - DNA, 25 bp, Homo sapien
ccaagtcagaggcatccaggtaagt

SEQ ID NO: 4350328 - DNA, 25 bp, Homo sapien
gaaccttgacatgactacagccctg

SEQ ID NO: 4350329 - DNA, 25 bp, Homo sapien
ccaggtaagttacaatgggatttct

SEQ ID NO: 4350330 - DNA, 25 bp, Homo sapien
taggcagcaataggtactagtacaa

SEQ ID NO: 4350331 - DNA, 25 bp, Homo sapien
taaccccatgatccaggtagaaagc

SEQ ID NO: 4350332 - DNA, 25 bp, Homo sapien
gaagaactgctaaaacggccatact

SEQ ID NO: 4350333 - DNA, 25 bp, Homo sapien
cggccatactatacaaagtggtcta

SEQ ID NO: 4350334 - DNA, 25 bp, Homo sapien
ggaagaagttgtcccatttgcagat

SEQ ID NO: 4350335 - DNA, 25 bp, Homo sapien
agggtcttactctgccaaccacgct

SEQ ID NO: 4350336 - DNA, 25 bp, Homo sapien
gtgcagtggtacagtgataactcac

SEQ ID NO: 4350337 - DNA, 25 bp, Homo sapien
gctaggactacagactacaggtgca

SEQ ID NO: 4350338 - DNA, 25 bp, Homo sapien
cgaacttctagccttgagtgatcct

SEQ ID NO: 4350339 - DNA, 25 bp, Homo sapien
catgccaggcatgtgacatattttt

SEQ ID NO: 4350340 - DNA, 25 bp, Homo sapien
aaaataaggataaggctgggtctgg

SEQ ID NO: 4350341 - DNA, 25 bp, Homo sapien
tagtgtactgttcaggccatttaca

SEQ ID NO: 4350342 - DNA, 25 bp, Homo sapien
acaaggactttgctatgcattcagc

SEQ ID NO: 4350343 - DNA, 25 bp, Homo sapien
tagaacctaattggaaagtacagtg

SEQ ID NO: 4350344 - DNA, 25 bp, Homo sapien
aatgtgtatacctgatcaaagagct

SEQ ID NO: 4350345 - DNA, 25 bp, Homo sapien
cattacatgtatgacttaacagctg

SEQ ID NO: 4350346 - DNA, 25 bp, Homo sapien
aattttttggatgtgaaaactcaag

SEQ ID NO: 4350347 - DNA, 25 bp, Homo sapien
gagagactggcaacactaatctaaa

SEQ ID NO: 4350348 - DNA, 25 bp, Homo sapien
cagagagactggcaacactaatcta

SEQ ID NO: 4350349 - DNA, 25 bp, Homo sapien
agagagactggcaacactaatctaa

SEQ ID NO: 4350350 - DNA, 25 bp, Homo sapien
gagactggcaacactaatctaaatg

SEQ ID NO: 4350351 - DNA, 25 bp, Homo sapien
tatttagctgtagtgcccagtctag

SEQ ID NO: 4350352 - DNA, 25 bp, Homo sapien
tacctgttgatccatgggaggtaca

SEQ ID NO: 4350353 - DNA, 25 bp, Homo sapien
cagattagggagaacagagtgtacc

SEQ ID NO: 4350354 - DNA, 25 bp, Homo sapien
cactttcagtgcacgaagggtagaa

SEQ ID NO: 4350355 - DNA, 25 bp, Homo sapien
cttcatatccctcctcgtctttcac

SEQ ID NO: 4350356 - DNA, 25 bp, Homo sapien
tcctcgtctttcactggaacacaaa

SEQ ID NO: 4350357 - DNA, 25 bp, Homo sapien
ctcctcgtctttcactggaacacaa

SEQ ID NO: 4350358 - DNA, 25 bp, Homo sapien
tatccctcctcgtctttcactggaa

SEQ ID NO: 4350359 - DNA, 25 bp, Homo sapien
tttagagtcctgcaatttatccagc

SEQ ID NO: 4350360 - DNA, 25 bp, Homo sapien
tgaagctggttagagctggcaggaa

SEQ ID NO: 4350361 - DNA, 25 bp, Homo sapien
gaaatgtttagagtcctgcaattta

SEQ ID NO: 4350362 - DNA, 25 bp, Homo sapien
tgatgaagctggttagagctggcag

SEQ ID NO: 4350363 - DNA, 25 bp, Homo sapien
accagtaactgtgtaccaaatggag

SEQ ID NO: 4350364 - DNA, 25 bp, Homo sapien
gtacatatatcactcaaaaaaccag

SEQ ID NO: 4350365 - DNA, 25 bp, Homo sapien
gagaaaggacacttgacttctttaa

SEQ ID NO: 4350366 - DNA, 25 bp, Homo sapien
tatgctctaagaagtttaagtgact

SEQ ID NO: 4350367 - DNA, 25 bp, Homo sapien
tagctagctgacaatctccctcaag

SEQ ID NO: 4350368 - DNA, 25 bp, Homo sapien
tggtaggatataataatcactttac

SEQ ID NO: 4350369 - DNA, 25 bp, Homo sapien
tatgctttagattcaaactatccaa

SEQ ID NO: 4350370 - DNA, 25 bp, Homo sapien
aactcatgatgaactaatatggcac

SEQ ID NO: 4350371 - DNA, 25 bp, Homo sapien
caaaatcgagactgaaagaatggga

SEQ ID NO: 4350372 - DNA, 25 bp, Homo sapien
aatgggctaaacatcctatgctgag

SEQ ID NO: 4350373 - DNA, 25 bp, Homo sapien
cacaccctaacgtgacactggtaaa

SEQ ID NO: 4350374 - DNA, 25 bp, Homo sapien
gaattaacagtcatacctcagctta

SEQ ID NO: 4350375 - DNA, 25 bp, Homo sapien
gatgtgaaccctttacatacaatta

SEQ ID NO: 4350376 - DNA, 25 bp, Homo sapien
aaataaaagctataacctgatgtga

SEQ ID NO: 4350377 - DNA, 25 bp, Homo sapien
ccagtgtaggtaacatgaaagattt

SEQ ID NO: 4350378 - DNA, 25 bp, Homo sapien
acaccaggccctgtcagcggtgagg

SEQ ID NO: 4350379 - DNA, 25 bp, Homo sapien
ttggctgtgacatccacatactgtc

SEQ ID NO: 4350380 - DNA, 25 bp, Homo sapien
tttggctgtgacatccacatactgt

SEQ ID NO: 4350381 - DNA, 25 bp, Homo sapien
ttttggctgtgacatccacatactg

SEQ ID NO: 4350382 - DNA, 25 bp, Homo sapien
gttttggctgtgacatccacatact

SEQ ID NO: 4350383 - DNA, 25 bp, Homo sapien
aagtgagcagcataaagaggagtgc

SEQ ID NO: 4350384 - DNA, 25 bp, Homo sapien
gtttatttaatacaagcagcaaagt

SEQ ID NO: 4350385 - DNA, 25 bp, Homo sapien
tatttaatacaagcagcaaagtgct

SEQ ID NO: 4350386 - DNA, 25 bp, Homo sapien
tataacccaacctggatttatatag

SEQ ID NO: 4350387 - DNA, 25 bp, Homo sapien
aacccaacctggatttatataggca

SEQ ID NO: 4350388 - DNA, 25 bp, Homo sapien
gaaagcaaagagttatctacaggtt

SEQ ID NO: 4350389 - DNA, 25 bp, Homo sapien
agaaagcaaagagttatctacaggt

SEQ ID NO: 4350390 - DNA, 25 bp, Homo sapien
gcaaagagttatctacaggtttttc

SEQ ID NO: 4350391 - DNA, 25 bp, Homo sapien
aagcaaagagttatctacaggtttt

SEQ ID NO: 4350392 - DNA, 25 bp, Homo sapien
aagattttaactgtctgtttcggcg

SEQ ID NO: 4350393 - DNA, 25 bp, Homo sapien
tttaactgtctgtttcggcggcaat

SEQ ID NO: 4350394 - DNA, 25 bp, Homo sapien
ctgtttcggcggcaatccaagttcc

SEQ ID NO: 4350395 - DNA, 25 bp, Homo sapien
tcggcggcaatccaagttcccggta

SEQ ID NO: 4350396 - DNA, 25 bp, Homo sapien
tttttgcatgactggctcccttact

SEQ ID NO: 4350397 - DNA, 25 bp, Homo sapien
aagacctttgcgcatcctattgcct

SEQ ID NO: 4350398 - DNA, 25 bp, Homo sapien
tcaagtcctaagtccttaccatggt

SEQ ID NO: 4350399 - DNA, 25 bp, Homo sapien
gaaaaaatgcactcccttattggcc

SEQ ID NO: 4350400 - DNA, 25 bp, Homo sapien
caagagtctccaagactcctgggca

SEQ ID NO: 4350401 - DNA, 25 bp, Homo sapien
tgttccagatacagggagaggtatt

SEQ ID NO: 4350402 - DNA, 25 bp, Homo sapien
tacaagcactacagcttagagaggt

SEQ ID NO: 4350403 - DNA, 25 bp, Homo sapien
gagtgtctgttatattccaagcaca

SEQ ID NO: 4350404 - DNA, 25 bp, Homo sapien
tacagacagggttgccatttttcca

SEQ ID NO: 4350405 - DNA, 25 bp, Homo sapien
tccattacagttttcctttgacgta

SEQ ID NO: 4350406 - DNA, 25 bp, Homo sapien
cgtgatacagtttttcctcctacag

SEQ ID NO: 4350407 - DNA, 25 bp, Homo sapien
tttgacgtatattttaagacatgac

SEQ ID NO: 4350408 - DNA, 25 bp, Homo sapien
ccacatgcttttgaccatccttggt

SEQ ID NO: 4350409 - DNA, 25 bp, Homo sapien
taatgtgaccacatgcttttgacca

SEQ ID NO: 4350410 - DNA, 25 bp, Homo sapien
tgaccatccttggtccataaaggca

SEQ ID NO: 4350411 - DNA, 25 bp, Homo sapien
gaagtaatgtgaccacatgcttttg

SEQ ID NO: 4350412 - DNA, 25 bp, Homo sapien
cagcttcaaggcaataagaccaact

SEQ ID NO: 4350413 - DNA, 25 bp, Homo sapien
tatcttcatcagagaccaactgctt

SEQ ID NO: 4350414 - DNA, 25 bp, Homo sapien
tcttcatcagagaccaactgcttaa

SEQ ID NO: 4350415 - DNA, 25 bp, Homo sapien
ataggccatggttcatctttcagag

SEQ ID NO: 4350416 - DNA, 25 bp, Homo sapien
ggacacagtttacttgctaattggg

SEQ ID NO: 4350417 - DNA, 25 bp, Homo sapien
tcacatttaaactgttagtcgttac

SEQ ID NO: 4350418 - DNA, 25 bp, Homo sapien
ccacattccttcggataaggctcac

SEQ ID NO: 4350419 - DNA, 25 bp, Homo sapien
cacattccttcggataaggctcaca

SEQ ID NO: 4350420 - DNA, 25 bp, Homo sapien
taaggctcacatttaaactgttagt

SEQ ID NO: 4350421 - DNA, 25 bp, Homo sapien
ccaggccgtccccgagtcgacccag

SEQ ID NO: 4350422 - DNA, 25 bp, Homo sapien
agcacccaggccgtccccgagtcga

SEQ ID NO: 4350423 - DNA, 25 bp, Homo sapien
ggccgtccccgagtcgacccagcac

SEQ ID NO: 4350424 - DNA, 25 bp, Homo sapien
gcacccaggccgtccccgagtcgac

SEQ ID NO: 4350425 - DNA, 25 bp, Homo sapien
gggcgccgacctgcgtcagcagcct

SEQ ID NO: 4350426 - DNA, 25 bp, Homo sapien
ctgggcgccgacctgcgtcagcagc

SEQ ID NO: 4350427 - DNA, 25 bp, Homo sapien
cgacctgcgtcagcagcctccaacc

SEQ ID NO: 4350428 - DNA, 25 bp, Homo sapien
gccgacctgcgtcagcagcctccaa

SEQ ID NO: 4350429 - DNA, 25 bp, Homo sapien
ggattagcccgggaagactcgactc

SEQ ID NO: 4350430 - DNA, 25 bp, Homo sapien
gattagcccgggaagactcgactca

SEQ ID NO: 4350431 - DNA, 25 bp, Homo sapien
attagcccgggaagactcgactcac

SEQ ID NO: 4350432 - DNA, 25 bp, Homo sapien
ccgccacgtggacgcagtagccgtg

SEQ ID NO: 4350433 - DNA, 25 bp, Homo sapien
ggaagttttcgcaatggccgccgga

SEQ ID NO: 4350434 - DNA, 25 bp, Homo sapien
ggtcgccggccgatgctctctgcga

SEQ ID NO: 4350435 - DNA, 25 bp, Homo sapien
tctctgcgacggaaagaaagccgcc

SEQ ID NO: 4350436 - DNA, 25 bp, Homo sapien
cacctgggacctagttaaagatgca

SEQ ID NO: 4350437 - DNA, 25 bp, Homo sapien
gaaattcccacactaagctcaaagg

SEQ ID NO: 4350438 - DNA, 25 bp, Homo sapien
tcaagcagactagaagccacgctgt

SEQ ID NO: 4350439 - DNA, 25 bp, Homo sapien
gaagaggtgccattctcaagcagac

SEQ ID NO: 4350440 - DNA, 25 bp, Homo sapien
tacaagggcttaacagatccaggcc

SEQ ID NO: 4350441 - DNA, 25 bp, Homo sapien
aattgtcagatagttaaaaatcacc

SEQ ID NO: 4350442 - DNA, 25 bp, Homo sapien
tatttcgtctatcaacattcagtaa

SEQ ID NO: 4350443 - DNA, 25 bp, Homo sapien
tatttcaaggcgacatgctgtaatg

SEQ ID NO: 4350444 - DNA, 25 bp, Homo sapien
taatagtccacaacttggtttggga

SEQ ID NO: 4350445 - DNA, 25 bp, Homo sapien
cattgtaatagtccacaacttggtt

SEQ ID NO: 4350446 - DNA, 25 bp, Homo sapien
tggtgctagtgttctggaagattca

SEQ ID NO: 4350447 - DNA, 25 bp, Homo sapien
tgccattgtaatagtccacaacttg

SEQ ID NO: 4350448 - DNA, 25 bp, Homo sapien
ccagggcataaaaaacatagagact

SEQ ID NO: 4350449 - DNA, 25 bp, Homo sapien
tattagcaatgtagactcagaccca

SEQ ID NO: 4350450 - DNA, 25 bp, Homo sapien
tatgacacatgctatagagcagcag

SEQ ID NO: 4350451 - DNA, 25 bp, Homo sapien
gccacactagggtttgagggtctat

SEQ ID NO: 4350452 - DNA, 25 bp, Homo sapien
ccatgagatgacccttgtaggtgct

SEQ ID NO: 4350453 - DNA, 25 bp, Homo sapien
catgagatgacccttgtaggtgctg

SEQ ID NO: 4350454 - DNA, 25 bp, Homo sapien
gccatgagatgacccttgtaggtgc

SEQ ID NO: 4350455 - DNA, 25 bp, Homo sapien
atgagatgacccttgtaggtgctgg

SEQ ID NO: 4350456 - DNA, 25 bp, Homo sapien
agcgttccctactcccacgatgatg

SEQ ID NO: 4350457 - DNA, 25 bp, Homo sapien
aggctctcccttgggtgacctcaga

SEQ ID NO: 4350458 - DNA, 25 bp, Homo sapien
gatgtctcgaagaacaggctctccc

SEQ ID NO: 4350459 - DNA, 25 bp, Homo sapien
tgcatgtcactgaagtcagcgttcc

SEQ ID NO: 4350460 - DNA, 25 bp, Homo sapien
ctgtgataacaccatctgtcaggat

SEQ ID NO: 4350461 - DNA, 25 bp, Homo sapien
gataacaccatctgtcaggatcagc

SEQ ID NO: 4350462 - DNA, 25 bp, Homo sapien
aacaccatctgtcaggatcagcagg

SEQ ID NO: 4350463 - DNA, 25 bp, Homo sapien
tgtgataacaccatctgtcaggatc

SEQ ID NO: 4350464 - DNA, 25 bp, Homo sapien
cacattgaccaaagcaacagtgatg

SEQ ID NO: 4350465 - DNA, 25 bp, Homo sapien
caggtggcctcactgcacattgacc

SEQ ID NO: 4350466 - DNA, 25 bp, Homo sapien
agttaggaggacaggcttcaaagcc

SEQ ID NO: 4350467 - DNA, 25 bp, Homo sapien
aataccagttagacacccaggtggc

SEQ ID NO: 4350468 - DNA, 25 bp, Homo sapien
tatacataacttgtgttatatttcc

SEQ ID NO: 4350469 - DNA, 25 bp, Homo sapien
ttaaaactgtatacataacttgtgt

SEQ ID NO: 4350470 - DNA, 25 bp, Homo sapien
tatatttccactggatggcactagt

SEQ ID NO: 4350471 - DNA, 25 bp, Homo sapien
cataacttgtgttatatttccactg

SEQ ID NO: 4350472 - DNA, 25 bp, Homo sapien
caggcacacttgcagaaggttgcag

SEQ ID NO: 4350473 - DNA, 25 bp, Homo sapien
cctgctataagagggtcagggttgc

SEQ ID NO: 4350474 - DNA, 25 bp, Homo sapien
taaagtcctgctataagagggtcag

SEQ ID NO: 4350475 - DNA, 25 bp, Homo sapien
ggccatgtgccacaaaggtggcagc

SEQ ID NO: 4350476 - DNA, 25 bp, Homo sapien
gatgacccattggaggtcatcatta

SEQ ID NO: 4350477 - DNA, 25 bp, Homo sapien
aaagagaagcagattagtcagatgc

SEQ ID NO: 4350478 - DNA, 25 bp, Homo sapien
tcagatgcagctcaggctaaacaga

SEQ ID NO: 4350479 - DNA, 25 bp, Homo sapien
tttttagtcaacatgagaggcatca

SEQ ID NO: 4350480 - DNA, 25 bp, Homo sapien
ttagagtcgtaatgttctacagcag

SEQ ID NO: 4350481 - DNA, 25 bp, Homo sapien
cacattgagaaactttagagtcgta

SEQ ID NO: 4350482 - DNA, 25 bp, Homo sapien
tagtcatactaccacattgagaaac

SEQ ID NO: 4350483 - DNA, 25 bp, Homo sapien
gagaaactttagagtcgtaatgttc

SEQ ID NO: 4350484 - DNA, 25 bp, Homo sapien
ggacaggaggtggatatgacatact

SEQ ID NO: 4350485 - DNA, 25 bp, Homo sapien
cctgtgttcagacaatgtggtagac

SEQ ID NO: 4350486 - DNA, 25 bp, Homo sapien
tgctgcgctttaccaccaggaggca

SEQ ID NO: 4350487 - DNA, 25 bp, Homo sapien
gacatgtgtcatctcttagcctcac

SEQ ID NO: 4350488 - DNA, 25 bp, Homo sapien
tgataggcttccacaactccttgaa

SEQ ID NO: 4350489 - DNA, 25 bp, Homo sapien
ttggtgggaccgtagagttggagct

SEQ ID NO: 4350490 - DNA, 25 bp, Homo sapien
tccttggtgttagtttcctctgacg

SEQ ID NO: 4350491 - DNA, 25 bp, Homo sapien
ctgacttggcaaccttctggatgat

SEQ ID NO: 4350492 - DNA, 25 bp, Homo sapien
aatatcccaaatagtccttatcaac

SEQ ID NO: 4350493 - DNA, 25 bp, Homo sapien
tcccaaatagtccttatcaacatca

SEQ ID NO: 4350494 - DNA, 25 bp, Homo sapien
caaatagtccttatcaacatcatgt

SEQ ID NO: 4350495 - DNA, 25 bp, Homo sapien
cattaaatatcccaaatagtcctta

SEQ ID NO: 4350496 - DNA, 25 bp, Homo sapien
tgatgctgcttgttcaaactcgctg

SEQ ID NO: 4350497 - DNA, 25 bp, Homo sapien
tgtccttggccgatatgccgaaagt

SEQ ID NO: 4350498 - DNA, 25 bp, Homo sapien
tgccgaaagtgggaaatgatttcca

SEQ ID NO: 4350499 - DNA, 25 bp, Homo sapien
tctctggcacaaagccatgatgctg

SEQ ID NO: 4350500 - DNA, 25 bp, Homo sapien
ctgcacattctgggttgtcttcatt

SEQ ID NO: 4350501 - DNA, 25 bp, Homo sapien
gcacattctgggttgtcttcattaa

SEQ ID NO: 4350502 - DNA, 25 bp, Homo sapien
cacattctgggttgtcttcattaaa

SEQ ID NO: 4350503 - DNA, 25 bp, Homo sapien
cattctgggttgtcttcattaaagt

SEQ ID NO: 4350504 - DNA, 25 bp, Homo sapien
cacggactttcccagttggcattgc

SEQ ID NO: 4350505 - DNA, 25 bp, Homo sapien
catacaagacttggactcggagact

SEQ ID NO: 4350506 - DNA, 25 bp, Homo sapien
agtctgtagactccattgtcacgga

SEQ ID NO: 4350507 - DNA, 25 bp, Homo sapien
ttggcattgccaatagaattctatt

SEQ ID NO: 4350508 - DNA, 25 bp, Homo sapien
ctctggaggtatcctggcgccaaac

SEQ ID NO: 4350509 - DNA, 25 bp, Homo sapien
tggaggtatcctggcgccaaaccca

SEQ ID NO: 4350510 - DNA, 25 bp, Homo sapien
gtatcctggcgccaaacccaaaggc

SEQ ID NO: 4350511 - DNA, 25 bp, Homo sapien
tatcctggcgccaaacccaaaggca

SEQ ID NO: 4350512 - DNA, 25 bp, Homo sapien
gaaatttcctgactctgcctgtcta

SEQ ID NO: 4350513 - DNA, 25 bp, Homo sapien
aaattaattccagagccccgacttg

SEQ ID NO: 4350514 - DNA, 25 bp, Homo sapien
gagaaacagcggaaccttgtcagtt

SEQ ID NO: 4350515 - DNA, 25 bp, Homo sapien
caaccacactgactttgatgtgaga

SEQ ID NO: 4350516 - DNA, 25 bp, Homo sapien
agggctctgaggcttactatcttca

SEQ ID NO: 4350517 - DNA, 25 bp, Homo sapien
gcgatcaggaaatggagacgttcag

SEQ ID NO: 4350518 - DNA, 25 bp, Homo sapien
gatcatccactaaatctgctgcaga

SEQ ID NO: 4350519 - DNA, 25 bp, Homo sapien
tgctgcagaactataatgagggctc

SEQ ID NO: 4350520 - DNA, 25 bp, Homo sapien
cagatactcattgggttggtaaggg

SEQ ID NO: 4350521 - DNA, 25 bp, Homo sapien
ccacagctaccaaagctttcagata

SEQ ID NO: 4350522 - DNA, 25 bp, Homo sapien
ggtccccgtttgaggcagtgaaatc

SEQ ID NO: 4350523 - DNA, 25 bp, Homo sapien
tgtcatagtcttggcaaatctcccc

SEQ ID NO: 4350524 - DNA, 25 bp, Homo sapien
cgcggcataggtaagatcccttaaa

SEQ ID NO: 4350525 - DNA, 25 bp, Homo sapien
gaacaattccatctacgcggcatag

SEQ ID NO: 4350526 - DNA, 25 bp, Homo sapien
aaagacttctacactccctgggcag

SEQ ID NO: 4350527 - DNA, 25 bp, Homo sapien
gcagcaagagtaaggatagaatatc

SEQ ID NO: 4350528 - DNA, 25 bp, Homo sapien
cttgatactaaagctaacaatctgt

SEQ ID NO: 4350529 - DNA, 25 bp, Homo sapien
gtgctggttgtctgactgaaactcc

SEQ ID NO: 4350530 - DNA, 25 bp, Homo sapien
tgctggttgtctgactgaaactcct

SEQ ID NO: 4350531 - DNA, 25 bp, Homo sapien
gctaacaatctgtcccatgtgctgg

SEQ ID NO: 4350532 - DNA, 25 bp, Homo sapien
gatgacaaaaacatgctggtgtctt

SEQ ID NO: 4350533 - DNA, 25 bp, Homo sapien
caaaaacatgctggtgtcttgatat

SEQ ID NO: 4350534 - DNA, 25 bp, Homo sapien
tgacaaaaacatgctggtgtcttga

SEQ ID NO: 4350535 - DNA, 25 bp, Homo sapien
gacaaaaacatgctggtgtcttgat

SEQ ID NO: 4350536 - DNA, 25 bp, Homo sapien
gaagctgctgtgtaacaacctctgg

SEQ ID NO: 4350537 - DNA, 25 bp, Homo sapien
caacctctggttagttgtacctgca

SEQ ID NO: 4350538 - DNA, 25 bp, Homo sapien
aacaggtcatttgtgaaccttctcg

SEQ ID NO: 4350539 - DNA, 25 bp, Homo sapien
tcgacgttttctaagggaagctgct

SEQ ID NO: 4350540 - DNA, 25 bp, Homo sapien
tgaaccttgtaggtgaacatactgt

SEQ ID NO: 4350541 - DNA, 25 bp, Homo sapien
tatacaatgaaccttgtaggtgaac

SEQ ID NO: 4350542 - DNA, 25 bp, Homo sapien
actgtttggtctggaccatttctta

SEQ ID NO: 4350543 - DNA, 25 bp, Homo sapien
caatttggacctatacaatgaacct

SEQ ID NO: 4350544 - DNA, 25 bp, Homo sapien
cctgactctcccctgaaacctaggt

SEQ ID NO: 4350545 - DNA, 25 bp, Homo sapien
ctgaaacctaggtccatatttataa

SEQ ID NO: 4350546 - DNA, 25 bp, Homo sapien
atgtagctcctgactctcccctgaa

SEQ ID NO: 4350547 - DNA, 25 bp, Homo sapien
ataagtaccatctccactgggatac

SEQ ID NO: 4350548 - DNA, 25 bp, Homo sapien
gcctcgcgtatttccctgaccaggt

SEQ ID NO: 4350549 - DNA, 25 bp, Homo sapien
ctgttgcctcgcgtatttccctgac

SEQ ID NO: 4350550 - DNA, 25 bp, Homo sapien
agctgctgttgcctcgcgtatttcc

SEQ ID NO: 4350551 - DNA, 25 bp, Homo sapien
ttgcctcgcgtatttccctgaccag

SEQ ID NO: 4350552 - DNA, 25 bp, Homo sapien
cagtgggcttccatctctgcttgct

SEQ ID NO: 4350553 - DNA, 25 bp, Homo sapien
taccaggcctgtggcagtgggcttc

SEQ ID NO: 4350554 - DNA, 25 bp, Homo sapien
tctctgcttgcttcatctctcgttc

SEQ ID NO: 4350555 - DNA, 25 bp, Homo sapien
tgtggcagtgggcttccatctctgc

SEQ ID NO: 4350556 - DNA, 25 bp, Homo sapien
tgaagtggtactctcagtgggggaa

SEQ ID NO: 4350557 - DNA, 25 bp, Homo sapien
gaagtggtactctcagtgggggaag

SEQ ID NO: 4350558 - DNA, 25 bp, Homo sapien
catgatgtagtccaagaaagaatgc

SEQ ID NO: 4350559 - DNA, 25 bp, Homo sapien
acccatgatgtagtccaagaaagaa

SEQ ID NO: 4350560 - DNA, 25 bp, Homo sapien
cacccatgatgtagtccaagaaaga

SEQ ID NO: 4350561 - DNA, 25 bp, Homo sapien
cccatgatgtagtccaagaaagaat

SEQ ID NO: 4350562 - DNA, 25 bp, Homo sapien
acttgggattgatgcactcccactg

SEQ ID NO: 4350563 - DNA, 25 bp, Homo sapien
tacttgggattgatgcactcccact

SEQ ID NO: 4350564 - DNA, 25 bp, Homo sapien
catgcttgccattggagtcccagtc

SEQ ID NO: 4350565 - DNA, 25 bp, Homo sapien
tctccttgaatgtcgaggtgaattc

SEQ ID NO: 4350566 - DNA, 25 bp, Homo sapien
ccttgaatgtcgaggtgaattctcc

SEQ ID NO: 4350567 - DNA, 25 bp, Homo sapien
caatgaagtcatgcttgccattgga

SEQ ID NO: 4350568 - DNA, 25 bp, Homo sapien
taccagctaattctacgatgtccaa

SEQ ID NO: 4350569 - DNA, 25 bp, Homo sapien
gctaattctacgatgtccaaccaca

SEQ ID NO: 4350570 - DNA, 25 bp, Homo sapien
tctacgatgtccaaccacatggtat

SEQ ID NO: 4350571 - DNA, 25 bp, Homo sapien
tccaaccacatggtataaatataca

SEQ ID NO: 4350572 - DNA, 25 bp, Homo sapien
cccgcatagagaaacatgaatccac

SEQ ID NO: 4350573 - DNA, 25 bp, Homo sapien
agccccgcatagagaaacatgaatc

SEQ ID NO: 4350574 - DNA, 25 bp, Homo sapien
gccccgcatagagaaacatgaatcc

SEQ ID NO: 4350575 - DNA, 25 bp, Homo sapien
cagccccgcatagagaaacatgaat

SEQ ID NO: 4350576 - DNA, 25 bp, Homo sapien
ctgtagggagtcgtttttgaagtag

SEQ ID NO: 4350577 - DNA, 25 bp, Homo sapien
tttaatactcttgttcttagccaag

SEQ ID NO: 4350578 - DNA, 25 bp, Homo sapien
taataccttgttcaagatgtcttaa

SEQ ID NO: 4350579 - DNA, 25 bp, Homo sapien
cttgttcttagccaagttatgggta

SEQ ID NO: 4350580 - DNA, 25 bp, Homo sapien
cttagccaagttatgggtatactgc

SEQ ID NO: 4350581 - DNA, 25 bp, Homo sapien
tgcaaggcccatactgaaatcaaag

SEQ ID NO: 4350582 - DNA, 25 bp, Homo sapien
ggtcaaaaatggttgtcctctgcac

SEQ ID NO: 4350583 - DNA, 25 bp, Homo sapien
caagagggagatagctgcaaggccc

SEQ ID NO: 4350584 - DNA, 25 bp, Homo sapien
atctgcctccacaggagtttgccgc

SEQ ID NO: 4350585 - DNA, 25 bp, Homo sapien
agttttgtctgcgaatttggatttt

SEQ ID NO: 4350586 - DNA, 25 bp, Homo sapien
tgagttttgtctgcgaatttggatt

SEQ ID NO: 4350587 - DNA, 25 bp, Homo sapien
gagttttgtctgcgaatttggattt

SEQ ID NO: 4350588 - DNA, 25 bp, Homo sapien
gttttgtctgcgaatttggattttg

SEQ ID NO: 4350589 - DNA, 25 bp, Homo sapien
ggttttctgagtctgacttggccat

SEQ ID NO: 4350590 - DNA, 25 bp, Homo sapien
gggttttctgagtctgacttggcca

SEQ ID NO: 4350591 - DNA, 25 bp, Homo sapien
caaactcatttatcaacacaatcca

SEQ ID NO: 4350592 - DNA, 25 bp, Homo sapien
tgaataatttcttcaggtgtagctg

SEQ ID NO: 4350593 - DNA, 25 bp, Homo sapien
tgaagaaagtaagtaatcaaactca

SEQ ID NO: 4350594 - DNA, 25 bp, Homo sapien
caggtgtagctgtcagaatcaatga

SEQ ID NO: 4350595 - DNA, 25 bp, Homo sapien
ttatggctcaatcataaggatgaaa

SEQ ID NO: 4350596 - DNA, 25 bp, Homo sapien
tagatttctaagagctgcagttgta

SEQ ID NO: 4350597 - DNA, 25 bp, Homo sapien
aaaatagatttctaagagctgcagt

SEQ ID NO: 4350598 - DNA, 25 bp, Homo sapien
ggctcaatcataaggatgaaaaata

SEQ ID NO: 4350599 - DNA, 25 bp, Homo sapien
tcctccttaactctatgtccctggg

SEQ ID NO: 4350600 - DNA, 25 bp, Homo sapien
tgtccctgggtttggttagtaatga

SEQ ID NO: 4350601 - DNA, 25 bp, Homo sapien
gtctttcttattagaggaaaatggc

SEQ ID NO: 4350602 - DNA, 25 bp, Homo sapien
gtaatgagtttgcaagacctgagac

SEQ ID NO: 4350603 - DNA, 25 bp, Homo sapien
tctcccatgctctcttcgttactca

SEQ ID NO: 4350604 - DNA, 25 bp, Homo sapien
ctcttcgttactcagattgaggatt

SEQ ID NO: 4350605 - DNA, 25 bp, Homo sapien
ctcagattgaggattgctgttatca

SEQ ID NO: 4350606 - DNA, 25 bp, Homo sapien
tcgttactcagattgaggattgctg

SEQ ID NO: 4350607 - DNA, 25 bp, Homo sapien
atagcccttgtttcttccatcgaga

SEQ ID NO: 4350608 - DNA, 25 bp, Homo sapien
ctagaagaagaaatagcccttgttt

SEQ ID NO: 4350609 - DNA, 25 bp, Homo sapien
agaagaagaaatagcccttgtttct

SEQ ID NO: 4350610 - DNA, 25 bp, Homo sapien
agcccttgtttcttccatcgagatg

SEQ ID NO: 4350611 - DNA, 25 bp, Homo sapien
gatactttgaatgatttccaggctg

SEQ ID NO: 4350612 - DNA, 25 bp, Homo sapien
ctgggtctccgctgcatagagaatt

SEQ ID NO: 4350613 - DNA, 25 bp, Homo sapien
ctttagccggcggtctgggtctccg

SEQ ID NO: 4350614 - DNA, 25 bp, Homo sapien
gcatagagaatttacagatactttg

SEQ ID NO: 4350615 - DNA, 25 bp, Homo sapien
tagttgctcatagtaacctcaatga

SEQ ID NO: 4350616 - DNA, 25 bp, Homo sapien
aatgatccactaattttctgcagta

SEQ ID NO: 4350617 - DNA, 25 bp, Homo sapien
tagattgtatgggtgtaagagttta

SEQ ID NO: 4350618 - DNA, 25 bp, Homo sapien
attgtatgggtgtaagagtttatcc

SEQ ID NO: 4350619 - DNA, 25 bp, Homo sapien
ccagctgctgagttgcatcatcatt

SEQ ID NO: 4350620 - DNA, 25 bp, Homo sapien
catcattcatacgaaaaatttccag

SEQ ID NO: 4350621 - DNA, 25 bp, Homo sapien
aaatttccagaaatgggtcagattt

SEQ ID NO: 4350622 - DNA, 25 bp, Homo sapien
tccagaaatgggtcagatttactga

SEQ ID NO: 4350623 - DNA, 25 bp, Homo sapien
tgcaagctcaacatagtcgtcattg

SEQ ID NO: 4350624 - DNA, 25 bp, Homo sapien
attgaatgcaagctcaacatagtcg

SEQ ID NO: 4350625 - DNA, 25 bp, Homo sapien
catagtcgtcattgccagataattc

SEQ ID NO: 4350626 - DNA, 25 bp, Homo sapien
gctcaacatagtcgtcattgccaga

SEQ ID NO: 4350627 - DNA, 25 bp, Homo sapien
gcaaggatttggacagctttctctg

SEQ ID NO: 4350628 - DNA, 25 bp, Homo sapien
aaggatttggacagctttctctggg

SEQ ID NO: 4350629 - DNA, 25 bp, Homo sapien
cttcagcaaggatttggacagcttt

SEQ ID NO: 4350630 - DNA, 25 bp, Homo sapien
cagcaaggatttggacagctttctc

SEQ ID NO: 4350631 - DNA, 25 bp, Homo sapien
gctattcctagcagaacttgtccca

SEQ ID NO: 4350632 - DNA, 25 bp, Homo sapien
catactgaaagctattcctagcaga

SEQ ID NO: 4350633 - DNA, 25 bp, Homo sapien
ctgcgcaatgacaactaaaatcatc

SEQ ID NO: 4350634 - DNA, 25 bp, Homo sapien
tcatcatcatactgaaagctattcc

SEQ ID NO: 4350635 - DNA, 25 bp, Homo sapien
caaagtggacaatggcttctaacag

SEQ ID NO: 4350636 - DNA, 25 bp, Homo sapien
aagtggacaatggcttctaacagca

SEQ ID NO: 4350637 - DNA, 25 bp, Homo sapien
aaagtggacaatggcttctaacagc

SEQ ID NO: 4350638 - DNA, 25 bp, Homo sapien
agtggacaatggcttctaacagcat

SEQ ID NO: 4350639 - DNA, 25 bp, Homo sapien
caagagatcccagcagttgctagag

SEQ ID NO: 4350640 - DNA, 25 bp, Homo sapien
cgtggggacccaatcatttaaatgc

SEQ ID NO: 4350641 - DNA, 25 bp, Homo sapien
tagagtgccgtatctggtgaacgtg

SEQ ID NO: 4350642 - DNA, 25 bp, Homo sapien
agagtcatagcagcaagagatccca

SEQ ID NO: 4350643 - DNA, 25 bp, Homo sapien
gcttttctgattcggtcttgctgac

SEQ ID NO: 4350644 - DNA, 25 bp, Homo sapien
cctgtcagcacattcactgtaatac

SEQ ID NO: 4350645 - DNA, 25 bp, Homo sapien
agcttttctgattcggtcttgctga

SEQ ID NO: 4350646 - DNA, 25 bp, Homo sapien
taactggcttgaaaacgtgtgctgg

SEQ ID NO: 4350647 - DNA, 25 bp, Homo sapien
ctttgtttctgataactggcttgaa

SEQ ID NO: 4350648 - DNA, 25 bp, Homo sapien
gcctgagcatcctgatgagcagatg

SEQ ID NO: 4350649 - DNA, 25 bp, Homo sapien
cttgaaaacgtgtgctggcctgagc

SEQ ID NO: 4350650 - DNA, 25 bp, Homo sapien
ggagattaggcccaagagcatgcac

SEQ ID NO: 4350651 - DNA, 25 bp, Homo sapien
agagcatgcacctttgctgacctgt

SEQ ID NO: 4350652 - DNA, 25 bp, Homo sapien
tgacctgtgctcacatgggaagggc

SEQ ID NO: 4350653 - DNA, 25 bp, Homo sapien
atgggaagggcccttgacggctcat

SEQ ID NO: 4350654 - DNA, 25 bp, Homo sapien
gaagaacagccacacaacaatgaag

SEQ ID NO: 4350655 - DNA, 25 bp, Homo sapien
tggctttgacaggtgtcctctgaac

SEQ ID NO: 4350656 - DNA, 25 bp, Homo sapien
tgacagaaagcaggaagttcttggc

SEQ ID NO: 4350657 - DNA, 25 bp, Homo sapien
cagccccacttatgatgacagaaag

SEQ ID NO: 4350658 - DNA, 25 bp, Homo sapien
gcaaccactgaattttgataaggga

SEQ ID NO: 4350659 - DNA, 25 bp, Homo sapien
gataagggatttttcatcatggttg

SEQ ID NO: 4350660 - DNA, 25 bp, Homo sapien
ccttctgggtgctgagtttgtaaga

SEQ ID NO: 4350661 - DNA, 25 bp, Homo sapien
gatgaaacccaggtgcaaccactga

SEQ ID NO: 4350662 - DNA, 25 bp, Homo sapien
tccccctcatccatctgtcaagaat

SEQ ID NO: 4350663 - DNA, 25 bp, Homo sapien
ctgtcaagaatggtcaattctcctt

SEQ ID NO: 4350664 - DNA, 25 bp, Homo sapien
cctgaggacctcagccttctttgct

SEQ ID NO: 4350665 - DNA, 25 bp, Homo sapien
gaatggtcaattctccttgagtttc

SEQ ID NO: 4350666 - DNA, 25 bp, Homo sapien
agctgccgattgtcaccctcctctg

SEQ ID NO: 4350667 - DNA, 25 bp, Homo sapien
ctttgtgatatttggagtttgctac

SEQ ID NO: 4350668 - DNA, 25 bp, Homo sapien
tctttgtgatatttggagtttgcta

SEQ ID NO: 4350669 - DNA, 25 bp, Homo sapien
tgtcatggacttcaaaccgcaggcg

SEQ ID NO: 4350670 - DNA, 25 bp, Homo sapien
gcgctgcacctcctcaaagtaaaag

SEQ ID NO: 4350671 - DNA, 25 bp, Homo sapien
tacactgggtttatgcaggtgcgaa

SEQ ID NO: 4350672 - DNA, 25 bp, Homo sapien
tgccaccaaggaagtcggcctcctt

SEQ ID NO: 4350673 - DNA, 25 bp, Homo sapien
gttcttaaccatattatgcatgtcc

SEQ ID NO: 4350674 - DNA, 25 bp, Homo sapien
gaaagcagttcttaaccatattatg

SEQ ID NO: 4350675 - DNA, 25 bp, Homo sapien
gcagttcttaaccatattatgcatg

SEQ ID NO: 4350676 - DNA, 25 bp, Homo sapien
aagcagttcttaaccatattatgca

SEQ ID NO: 4350677 - DNA, 25 bp, Homo sapien
catccgttttataggatcagctcca

SEQ ID NO: 4350678 - DNA, 25 bp, Homo sapien
gaaatagtacttcctccactataaa

SEQ ID NO: 4350679 - DNA, 25 bp, Homo sapien
tacaaagttatctggcatccgtttt

SEQ ID NO: 4350680 - DNA, 25 bp, Homo sapien
agttatctggcatccgttttatagg

SEQ ID NO: 4350681 - DNA, 25 bp, Homo sapien
cacaaaaagtatggttctgggagct

SEQ ID NO: 4350682 - DNA, 25 bp, Homo sapien
tgtcccctgagcttgagtatagtgg

SEQ ID NO: 4350683 - DNA, 25 bp, Homo sapien
gaagttgcagaggtagaaacccaca

SEQ ID NO: 4350684 - DNA, 25 bp, Homo sapien
ggtcaagcttaaccagatgcccaag

SEQ ID NO: 4350685 - DNA, 25 bp, Homo sapien
tggactgtctgggtcttaggctttt

SEQ ID NO: 4350686 - DNA, 25 bp, Homo sapien
cacacagagcctacaccctggtatt

SEQ ID NO: 4350687 - DNA, 25 bp, Homo sapien
ctgggtcttaggcttttctgatgtt

SEQ ID NO: 4350688 - DNA, 25 bp, Homo sapien
tggaaaccaagtatccaatttctgg

SEQ ID NO: 4350689 - DNA, 25 bp, Homo sapien
tcacatatcagaagtgtcaatgctc

SEQ ID NO: 4350690 - DNA, 25 bp, Homo sapien
tcagaagtgtcaatgctctcttgtt

SEQ ID NO: 4350691 - DNA, 25 bp, Homo sapien
gaccactcgacaagctaaactgcat

SEQ ID NO: 4350692 - DNA, 25 bp, Homo sapien
tataggtcactaaggcagcccagaa

SEQ ID NO: 4350693 - DNA, 25 bp, Homo sapien
agcccagaaagctgtcagagcccag

SEQ ID NO: 4350694 - DNA, 25 bp, Homo sapien
tagagctggtcgtgacttctgacag

SEQ ID NO: 4350695 - DNA, 25 bp, Homo sapien
ggtggcagcatcacaaggcttggct

SEQ ID NO: 4350696 - DNA, 25 bp, Homo sapien
caatgaacggagtgaggctacagtg

SEQ ID NO: 4350697 - DNA, 25 bp, Homo sapien
gttttatcattcctcaaagcaggag

SEQ ID NO: 4350698 - DNA, 25 bp, Homo sapien
gcactcagtatccattcgcaaatga

SEQ ID NO: 4350699 - DNA, 25 bp, Homo sapien
cctggagtatcttctgacttggtca

SEQ ID NO: 4350700 - DNA, 25 bp, Homo sapien
ctggagtatcttctgacttggtcat

SEQ ID NO: 4350701 - DNA, 25 bp, Homo sapien
taagcctctcaaaccaatgaagcat

SEQ ID NO: 4350702 - DNA, 25 bp, Homo sapien
gtaagcctctcaaaccaatgaagca

SEQ ID NO: 4350703 - DNA, 25 bp, Homo sapien
atcccaacttctcacgagttttcca

SEQ ID NO: 4350704 - DNA, 25 bp, Homo sapien
acttctcacgagttttccagtaagc

SEQ ID NO: 4350705 - DNA, 25 bp, Homo sapien
gtatgattctgacccagttgtcaaa

SEQ ID NO: 4350706 - DNA, 25 bp, Homo sapien
ctggtgactgtattctccattttta

SEQ ID NO: 4350707 - DNA, 25 bp, Homo sapien
tgtcaaaacatagtctcccagcagg

SEQ ID NO: 4350708 - DNA, 25 bp, Homo sapien
gattagcattcgactctgaactcca

SEQ ID NO: 4350709 - DNA, 25 bp, Homo sapien
tcaggaatgagaatacagcccaggg

SEQ ID NO: 4350710 - DNA, 25 bp, Homo sapien
cttttctctcaggaatgagaataca

SEQ ID NO: 4350711 - DNA, 25 bp, Homo sapien
gggggataggctcgcagttacagaa

SEQ ID NO: 4350712 - DNA, 25 bp, Homo sapien
ccagggggataggctcgcagttaca

SEQ ID NO: 4350713 - DNA, 25 bp, Homo sapien
tggcagacagccataagcctttgca

SEQ ID NO: 4350714 - DNA, 25 bp, Homo sapien
ggcagacagccataagcctttgcat

SEQ ID NO: 4350715 - DNA, 25 bp, Homo sapien
tgtggcagacagccataagcctttg

SEQ ID NO: 4350716 - DNA, 25 bp, Homo sapien
tttctctgacactatgagaattcat

SEQ ID NO: 4350717 - DNA, 25 bp, Homo sapien
gaagtcgggtgtctcatcccctgga

SEQ ID NO: 4350718 - DNA, 25 bp, Homo sapien
tcagcctcgttaacgacgtagcagg

SEQ ID NO: 4350719 - DNA, 25 bp, Homo sapien
aggtcaagagcacacaaccacctca

SEQ ID NO: 4350720 - DNA, 25 bp, Homo sapien
tgagaagacttctgccacattaagc

SEQ ID NO: 4350721 - DNA, 25 bp, Homo sapien
tctggtggataacggaagactggaa

SEQ ID NO: 4350722 - DNA, 25 bp, Homo sapien
ggccacagggcatcaacaatcaaga

SEQ ID NO: 4350723 - DNA, 25 bp, Homo sapien
caagaagagttctaaaggaggccaa

SEQ ID NO: 4350724 - DNA, 25 bp, Homo sapien
gcccggcctgaaatgcaattttaag

SEQ ID NO: 4350725 - DNA, 25 bp, Homo sapien
gctcaaccaggtatactcctagact

SEQ ID NO: 4350726 - DNA, 25 bp, Homo sapien
tagaatccactgaaaaatccaatac

SEQ ID NO: 4350727 - DNA, 25 bp, Homo sapien
tcatttctcctaacaacatagcaat

SEQ ID NO: 4350728 - DNA, 25 bp, Homo sapien
acatagcaatttccagcaggtgtta

SEQ ID NO: 4350729 - DNA, 25 bp, Homo sapien
tcacagtgtgataagagatgcattg

SEQ ID NO: 4350730 - DNA, 25 bp, Homo sapien
gacagcgggaaagtggtagtacatc

SEQ ID NO: 4350731 - DNA, 25 bp, Homo sapien
tgtgataagagatgcattgagcccc

SEQ ID NO: 4350732 - DNA, 25 bp, Homo sapien
taagagatgcattgagccccaggac

SEQ ID NO: 4350733 - DNA, 25 bp, Homo sapien
tcctttctcaggccattcctgagag

SEQ ID NO: 4350734 - DNA, 25 bp, Homo sapien
ctctgctttaggagtttcaaagcta

SEQ ID NO: 4350735 - DNA, 25 bp, Homo sapien
aaaccggcatccttctcccttgcct

SEQ ID NO: 4350736 - DNA, 25 bp, Homo sapien
tttttcttgacaccaaaccggcatc

SEQ ID NO: 4350737 - DNA, 25 bp, Homo sapien
aagctaatgattagttttccatcct

SEQ ID NO: 4350738 - DNA, 25 bp, Homo sapien
tggaacattccattgaaagtacaac

SEQ ID NO: 4350739 - DNA, 25 bp, Homo sapien
gcattgatatcgtgcgtctgtttca

SEQ ID NO: 4350740 - DNA, 25 bp, Homo sapien
gacgctgtctcctattgcattgata

SEQ ID NO: 4350741 - DNA, 25 bp, Homo sapien
gaaagtacaactgacgctgtctcct

SEQ ID NO: 4350742 - DNA, 25 bp, Homo sapien
tcatccagccatggttctgtccatt

SEQ ID NO: 4350743 - DNA, 25 bp, Homo sapien
tgtccatttcattggacatgcctac

SEQ ID NO: 4350744 - DNA, 25 bp, Homo sapien
gccatggttctgtccatttcattgg

SEQ ID NO: 4350745 - DNA, 25 bp, Homo sapien
tctgtccatttcattggacatgcct

SEQ ID NO: 4350746 - DNA, 25 bp, Homo sapien
gcagcggactcataaatgttgctca

SEQ ID NO: 4350747 - DNA, 25 bp, Homo sapien
gcagctcaactttggtcaggcaggg

SEQ ID NO: 4350748 - DNA, 25 bp, Homo sapien
acgccacacgcagctcaactttggt

SEQ ID NO: 4350749 - DNA, 25 bp, Homo sapien
ttcccagtgtgttggcagcggactc

SEQ ID NO: 4350750 - DNA, 25 bp, Homo sapien
gttgggtttcactaaagggatgcag

SEQ ID NO: 4350751 - DNA, 25 bp, Homo sapien
ccagcacactgttggcaagtgttat

SEQ ID NO: 4350752 - DNA, 25 bp, Homo sapien
tgggtttcactaaagggatgcagtt

SEQ ID NO: 4350753 - DNA, 25 bp, Homo sapien
tggcaagtgttatgttgggtttcac

SEQ ID NO: 4350754 - DNA, 25 bp, Homo sapien
caaagccttactgctattgaatgaa

SEQ ID NO: 4350755 - DNA, 25 bp, Homo sapien
gagatgcaaagccttactgctattg

SEQ ID NO: 4350756 - DNA, 25 bp, Homo sapien
gatgcaaagccttactgctattgaa

SEQ ID NO: 4350757 - DNA, 25 bp, Homo sapien
agccttactgctattgaatgaatct

SEQ ID NO: 4350758 - DNA, 25 bp, Homo sapien
tggcaccccatgacattgggcagct

SEQ ID NO: 4350759 - DNA, 25 bp, Homo sapien
catgacattgggcagctcttatctt

SEQ ID NO: 4350760 - DNA, 25 bp, Homo sapien
tgcctttgatctggcaccccatgac

SEQ ID NO: 4350761 - DNA, 25 bp, Homo sapien
ttattccagtgcctttgatctggca

SEQ ID NO: 4350762 - DNA, 25 bp, Homo sapien
acagctggccaccaatctccacccc

SEQ ID NO: 4350763 - DNA, 25 bp, Homo sapien
tctccacccctagaaatttcctcca

SEQ ID NO: 4350764 - DNA, 25 bp, Homo sapien
ctgatgaatctgccacagctggcca

SEQ ID NO: 4350765 - DNA, 25 bp, Homo sapien
agaaatttcctccattgccctggaa

SEQ ID NO: 4350766 - DNA, 25 bp, Homo sapien
ccctctaaagcaaggcattgccata

SEQ ID NO: 4350767 - DNA, 25 bp, Homo sapien
gaaattcttcctctcttcgaatccc

SEQ ID NO: 4350768 - DNA, 25 bp, Homo sapien
aagcaaggcattgccatatccagaa

SEQ ID NO: 4350769 - DNA, 25 bp, Homo sapien
ctttgggacaaaggacttatttgag

SEQ ID NO: 4350770 - DNA, 25 bp, Homo sapien
aaaagtgttaagttgcacgcaatgc

SEQ ID NO: 4350771 - DNA, 25 bp, Homo sapien
tgagtagctaccaagttgccaaatg

SEQ ID NO: 4350772 - DNA, 25 bp, Homo sapien
gtagtctgacctgctgaatctcccc

SEQ ID NO: 4350773 - DNA, 25 bp, Homo sapien
cacaaaacagggcttgggaaatggc

SEQ ID NO: 4350774 - DNA, 25 bp, Homo sapien
gctacaatcacaaacgtgagccacg

SEQ ID NO: 4350775 - DNA, 25 bp, Homo sapien
caatcacaaacgtgagccacggctc

SEQ ID NO: 4350776 - DNA, 25 bp, Homo sapien
ctccacctgtcaggcgatcttggct

SEQ ID NO: 4350777 - DNA, 25 bp, Homo sapien
agtgctacaatcacaaacgtgagcc

SEQ ID NO: 4350778 - DNA, 25 bp, Homo sapien
ttctaagtttcaattatcctatata

SEQ ID NO: 4350779 - DNA, 25 bp, Homo sapien
ctttctaagtttcaattatcctata

SEQ ID NO: 4350780 - DNA, 25 bp, Homo sapien
tttctaagtttcaattatcctatat

SEQ ID NO: 4350781 - DNA, 25 bp, Homo sapien
cgtgcctccttactaggagatatct

SEQ ID NO: 4350782 - DNA, 25 bp, Homo sapien
ttactaggagatatctcctagcagg

SEQ ID NO: 4350783 - DNA, 25 bp, Homo sapien
tgacacccgtgcctccttactagga

SEQ ID NO: 4350784 - DNA, 25 bp, Homo sapien
aagagagcagagaatctcacagcaa

SEQ ID NO: 4350785 - DNA, 25 bp, Homo sapien
ccattcctacagctcacaacaggac

SEQ ID NO: 4350786 - DNA, 25 bp, Homo sapien
taaaaaacccattcctacagctcac

SEQ ID NO: 4350787 - DNA, 25 bp, Homo sapien
gctaaaaaacccattcctacagctc

SEQ ID NO: 4350788 - DNA, 25 bp, Homo sapien
aaaaacccattcctacagctcacaa

SEQ ID NO: 4350789 - DNA, 25 bp, Homo sapien
cttcagcatagttcacctcatatcc

SEQ ID NO: 4350790 - DNA, 25 bp, Homo sapien
gccctgagtgcagctggctctaact

SEQ ID NO: 4350791 - DNA, 25 bp, Homo sapien
tcatatccagggaaatctacccaca

SEQ ID NO: 4350792 - DNA, 25 bp, Homo sapien
cctgagtgcagctggctctaacttc

SEQ ID NO: 4350793 - DNA, 25 bp, Homo sapien
ttcagtactcctgccaaaagcaacc

SEQ ID NO: 4350794 - DNA, 25 bp, Homo sapien
agtgaattcagtactcctgccaaaa

SEQ ID NO: 4350795 - DNA, 25 bp, Homo sapien
tgaattcagtactcctgccaaaagc

SEQ ID NO: 4350796 - DNA, 25 bp, Homo sapien
aattcagtactcctgccaaaagcaa

SEQ ID NO: 4350797 - DNA, 25 bp, Homo sapien
actcacacacctgttcatttaagga

SEQ ID NO: 4350798 - DNA, 25 bp, Homo sapien
gaagttccaacacatagctatttca

SEQ ID NO: 4350799 - DNA, 25 bp, Homo sapien
gactcctacctctaggaggtaacat

SEQ ID NO: 4350800 - DNA, 25 bp, Homo sapien
gctatttcatgggttgagccaggac

SEQ ID NO: 4350801 - DNA, 25 bp, Homo sapien
agctgagatgctgaaacttgccggc

SEQ ID NO: 4350802 - DNA, 25 bp, Homo sapien
gatcctgattaaaaagacaaggctg

SEQ ID NO: 4350803 - DNA, 25 bp, Homo sapien
ctgctgacagctaggggccatggaa

SEQ ID NO: 4350804 - DNA, 25 bp, Homo sapien
gaaacttgccggcatcagcatttta

SEQ ID NO: 4350805 - DNA, 25 bp, Homo sapien
gttggatgtaattcccctgctgaga

SEQ ID NO: 4350806 - DNA, 25 bp, Homo sapien
tgggctgagctgttgtgttaaaaag

SEQ ID NO: 4350807 - DNA, 25 bp, Homo sapien
taactagatgtgagaagacaccaac

SEQ ID NO: 4350808 - DNA, 25 bp, Homo sapien
taaattgccttgagaagcaatgagc

SEQ ID NO: 4350809 - DNA, 25 bp, Homo sapien
aggtggtactagatttggctccttg

SEQ ID NO: 4350810 - DNA, 25 bp, Homo sapien
aaaggtggtactagatttggctcct

SEQ ID NO: 4350811 - DNA, 25 bp, Homo sapien
ggtggtactagatttggctccttgg

SEQ ID NO: 4350812 - DNA, 25 bp, Homo sapien
gtggtactagatttggctccttggt

SEQ ID NO: 4350813 - DNA, 25 bp, Homo sapien
gaagacatgtctgcagctctgtaaa

SEQ ID NO: 4350814 - DNA, 25 bp, Homo sapien
ctgccagtgaagagtcttggaagac

SEQ ID NO: 4350815 - DNA, 25 bp, Homo sapien
gaatatacctacagccaggaatgga

SEQ ID NO: 4350816 - DNA, 25 bp, Homo sapien
caggaatggagcaccctctcagagc

SEQ ID NO: 4350817 - DNA, 25 bp, Homo sapien
tgactttcctagtgaccgaggtaag

SEQ ID NO: 4350818 - DNA, 25 bp, Homo sapien
acaagcaccctgactttcctagtga

SEQ ID NO: 4350819 - DNA, 25 bp, Homo sapien
tcctagtgaccgaggtaagggctag

SEQ ID NO: 4350820 - DNA, 25 bp, Homo sapien
gcaccctgactttcctagtgaccga

SEQ ID NO: 4350821 - DNA, 25 bp, Homo sapien
cctagttccaggctcgttgatgcac

SEQ ID NO: 4350822 - DNA, 25 bp, Homo sapien
ttgtgcttcactggccagcaaacac

SEQ ID NO: 4350823 - DNA, 25 bp, Homo sapien
cataaagctgtatgtgaaccacatt

SEQ ID NO: 4350824 - DNA, 25 bp, Homo sapien
tggtgtcttagagggcacccggcac

SEQ ID NO: 4350825 - DNA, 25 bp, Homo sapien
gggaccacaagcacccgccactacg

SEQ ID NO: 4350826 - DNA, 25 bp, Homo sapien
agctgggaccacaagcacccgccac

SEQ ID NO: 4350827 - DNA, 25 bp, Homo sapien
ctgggaccacaagcacccgccacta

SEQ ID NO: 4350828 - DNA, 25 bp, Homo sapien
accacaagcacccgccactacgccc

SEQ ID NO: 4350829 - DNA, 25 bp, Homo sapien
ggagcaacctaaccaggcactggaa

SEQ ID NO: 4350830 - DNA, 25 bp, Homo sapien
gcgatcagaccccagaaaggcctgt

SEQ ID NO: 4350831 - DNA, 25 bp, Homo sapien
agagtagtcagactgtccagccgcg

SEQ ID NO: 4350832 - DNA, 25 bp, Homo sapien
aatccaggccggagagtcagatgca

SEQ ID NO: 4350833 - DNA, 25 bp, Homo sapien
tttgcgccccttggatcatctctgc

SEQ ID NO: 4350834 - DNA, 25 bp, Homo sapien
gggcgccgtcagatttggaacatag

SEQ ID NO: 4350835 - DNA, 25 bp, Homo sapien
aagcccttcatagatttgcgcccct

SEQ ID NO: 4350836 - DNA, 25 bp, Homo sapien
gggctgaaaggcaatccgccaaggc

SEQ ID NO: 4350837 - DNA, 25 bp, Homo sapien
cagtgcatctcaaaagttggtcttg

SEQ ID NO: 4350838 - DNA, 25 bp, Homo sapien
agactttgcaatcacagcgccccag

SEQ ID NO: 4350839 - DNA, 25 bp, Homo sapien
ttggtcttgctacgcagcagctcca

SEQ ID NO: 4350840 - DNA, 25 bp, Homo sapien
ggtgagcgagaaccagtgcatctca

SEQ ID NO: 4350841 - DNA, 25 bp, Homo sapien
aattcagcccgggacgaggtctgtc

SEQ ID NO: 4350842 - DNA, 25 bp, Homo sapien
caaaatccggctttgaagtggaggt

SEQ ID NO: 4350843 - DNA, 25 bp, Homo sapien
gaggtcagtttagcaacagcggctg

SEQ ID NO: 4350844 - DNA, 25 bp, Homo sapien
ctgggtgtgccaatctcgaagagtg

SEQ ID NO: 4350845 - DNA, 25 bp, Homo sapien
gagagatttccaccttctgacgaat

SEQ ID NO: 4350846 - DNA, 25 bp, Homo sapien
caggtcggctctcagttaactcgga

SEQ ID NO: 4350847 - DNA, 25 bp, Homo sapien
cactctagggtggagcggtcgtatc

SEQ ID NO: 4350848 - DNA, 25 bp, Homo sapien
ttgctgacggagacgagcattgccc

SEQ ID NO: 4350849 - DNA, 25 bp, Homo sapien
aaactgtctggcgtatggcaggagc

SEQ ID NO: 4350850 - DNA, 25 bp, Homo sapien
ggtgcttaactgtcaccaaaaatgg

SEQ ID NO: 4350851 - DNA, 25 bp, Homo sapien
aatctctggatccttcgtgtctaca

SEQ ID NO: 4350852 - DNA, 25 bp, Homo sapien
ggtaaaggtgttgctaatctctgga

SEQ ID NO: 4350853 - DNA, 25 bp, Homo sapien
tcttttcactaaccatgaagttctc

SEQ ID NO: 4350854 - DNA, 25 bp, Homo sapien
tgaaggttggaggagatattagcca

SEQ ID NO: 4350855 - DNA, 25 bp, Homo sapien
gggctatctaacaaagcctctccaa

SEQ ID NO: 4350856 - DNA, 25 bp, Homo sapien
cctattaaggggctatctaacaaag

SEQ ID NO: 4350857 - DNA, 25 bp, Homo sapien
tctccttttaatggattctgagctg

SEQ ID NO: 4350858 - DNA, 25 bp, Homo sapien
agctctccttttaatggattctgag

SEQ ID NO: 4350859 - DNA, 25 bp, Homo sapien
cccagctctccttttaatggattct

SEQ ID NO: 4350860 - DNA, 25 bp, Homo sapien
tccttttaatggattctgagctgct

SEQ ID NO: 4350861 - DNA, 25 bp, Homo sapien
cttcagctctgggtagattcactcg

SEQ ID NO: 4350862 - DNA, 25 bp, Homo sapien
tctgggtagattcactcgccgggtt

SEQ ID NO: 4350863 - DNA, 25 bp, Homo sapien
tggtgttcccaagttgcaaaggaag

SEQ ID NO: 4350864 - DNA, 25 bp, Homo sapien
cacaaagtcactgtggccctggtgt

SEQ ID NO: 4350865 - DNA, 25 bp, Homo sapien
tacatgttgcaagctgatgcaggaa

SEQ ID NO: 4350866 - DNA, 25 bp, Homo sapien
tatgagaaccctataccacctgtgg

SEQ ID NO: 4350867 - DNA, 25 bp, Homo sapien
tatgcctgaggtgtgatgtattact

SEQ ID NO: 4350868 - DNA, 25 bp, Homo sapien
cctgtggtgcctctaacattgggta

SEQ ID NO: 4350869 - DNA, 25 bp, Homo sapien
tgaaaaagcgtgtgtctttccagtt

SEQ ID NO: 4350870 - DNA, 25 bp, Homo sapien
ttaatgactgaaaaagcgtgtgtct

SEQ ID NO: 4350871 - DNA, 25 bp, Homo sapien
ctttggttagagttgaggactagac

SEQ ID NO: 4350872 - DNA, 25 bp, Homo sapien
ttactttggttagagttgaggacta

SEQ ID NO: 4350873 - DNA, 25 bp, Homo sapien
caggctttactcttttctaccatgg

SEQ ID NO: 4350874 - DNA, 25 bp, Homo sapien
gacaatccaataacgtaaccactca

SEQ ID NO: 4350875 - DNA, 25 bp, Homo sapien
tactatatgctagaaacttggctga

SEQ ID NO: 4350876 - DNA, 25 bp, Homo sapien
ggcccttgccacgacttcataatga

SEQ ID NO: 4350877 - DNA, 25 bp, Homo sapien
tggtaactttggagaccctcagagc

SEQ ID NO: 4350878 - DNA, 25 bp, Homo sapien
tcttatttccagagacaggcggttt

SEQ ID NO: 4350879 - DNA, 25 bp, Homo sapien
caggcggtttggatgagaattattc

SEQ ID NO: 4350880 - DNA, 25 bp, Homo sapien
tttcacacaaattggccagatgaca

SEQ ID NO: 4350881 - DNA, 25 bp, Homo sapien
gccgagatcacaccatttcacttca

SEQ ID NO: 4350882 - DNA, 25 bp, Homo sapien
agcacttcacactctccacttgggc

SEQ ID NO: 4350883 - DNA, 25 bp, Homo sapien
tagcacttcacactctccacttggg

SEQ ID NO: 4350884 - DNA, 25 bp, Homo sapien
aatacggacaatgtgaccaccactg

SEQ ID NO: 4350885 - DNA, 25 bp, Homo sapien
tagagtctgataactgggttggaac

SEQ ID NO: 4350886 - DNA, 25 bp, Homo sapien
cgaatccggtgggtagaagcttgca

SEQ ID NO: 4350887 - DNA, 25 bp, Homo sapien
caagtcactgtaccccgaatccggt

SEQ ID NO: 4350888 - DNA, 25 bp, Homo sapien
ctttgttctttgcatgtacctctag

SEQ ID NO: 4350889 - DNA, 25 bp, Homo sapien
gctctgagcaagaagagttgacttt

SEQ ID NO: 4350890 - DNA, 25 bp, Homo sapien
tgttctttgcatgtacctctagcat

SEQ ID NO: 4350891 - DNA, 25 bp, Homo sapien
tttgttctttgcatgtacctctagc

SEQ ID NO: 4350892 - DNA, 25 bp, Homo sapien
caagatagagtcctaattctccacc

SEQ ID NO: 4350893 - DNA, 25 bp, Homo sapien
cctcaaagagagcatcaagatagag

SEQ ID NO: 4350894 - DNA, 25 bp, Homo sapien
tctccacctcctttgatgtaaaata

SEQ ID NO: 4350895 - DNA, 25 bp, Homo sapien
taaaatcctccttagcctgcaaaag

SEQ ID NO: 4350896 - DNA, 25 bp, Homo sapien
gacaaaagatggatgggctctcccc

SEQ ID NO: 4350897 - DNA, 25 bp, Homo sapien
ttcttcctcctcaataggaggttga

SEQ ID NO: 4350898 - DNA, 25 bp, Homo sapien
ccttcctgacaggtatgatgttagt

SEQ ID NO: 4350899 - DNA, 25 bp, Homo sapien
cctcaataggaggttgatgattggc

SEQ ID NO: 4350900 - DNA, 25 bp, Homo sapien
ttcctgcatcaagagtgtccacatc

SEQ ID NO: 4350901 - DNA, 25 bp, Homo sapien
agagtgtccacatccttgtaactct

SEQ ID NO: 4350902 - DNA, 25 bp, Homo sapien
cattgtaagtgaagtatgtttcttg

SEQ ID NO: 4350903 - DNA, 25 bp, Homo sapien
cttgtaggctacaggacattgggtc

SEQ ID NO: 4350904 - DNA, 25 bp, Homo sapien
gataagtgcggacttacttctgcca

SEQ ID NO: 4350905 - DNA, 25 bp, Homo sapien
tcactctatgtgtgtcattgtaagt

SEQ ID NO: 4350906 - DNA, 25 bp, Homo sapien
cttccaaagatgtgataggtagctg

SEQ ID NO: 4350907 - DNA, 25 bp, Homo sapien
tccaacctgattagcatagagcaca

SEQ ID NO: 4350908 - DNA, 25 bp, Homo sapien
tggaaatgattctgagcccgattct

SEQ ID NO: 4350909 - DNA, 25 bp, Homo sapien
ccaatagaattcctagcagagctta

SEQ ID NO: 4350910 - DNA, 25 bp, Homo sapien
ctctgagacatccttaccaaggatg

SEQ ID NO: 4350911 - DNA, 25 bp, Homo sapien
gagacatccttaccaaggatggtca

SEQ ID NO: 4350912 - DNA, 25 bp, Homo sapien
gaattccttttgatcctctgagaca

SEQ ID NO: 4350913 - DNA, 25 bp, Homo sapien
tgatagaattccttttgatcctctg

SEQ ID NO: 4350914 - DNA, 25 bp, Homo sapien
gatgaggccaggcagattagacaga

SEQ ID NO: 4350915 - DNA, 25 bp, Homo sapien
gataatttggatccagcactgatga

SEQ ID NO: 4350916 - DNA, 25 bp, Homo sapien
atttggatccagcactgatgaggcc

SEQ ID NO: 4350917 - DNA, 25 bp, Homo sapien
atgaggccaggcagattagacagaa

SEQ ID NO: 4350918 - DNA, 25 bp, Homo sapien
ctagagggtcggacccacatcttta

SEQ ID NO: 4350919 - DNA, 25 bp, Homo sapien
agagggtcggacccacatctttaag

SEQ ID NO: 4350920 - DNA, 25 bp, Homo sapien
ctgctgagattagaagtgtctgcac

SEQ ID NO: 4350921 - DNA, 25 bp, Homo sapien
gctgctgagattagaagtgtctgca

SEQ ID NO: 4350922 - DNA, 25 bp, Homo sapien
tccacaatgcgtgtaataaagagga

SEQ ID NO: 4350923 - DNA, 25 bp, Homo sapien
ctaggcaaattgttccacaatgcgt

SEQ ID NO: 4350924 - DNA, 25 bp, Homo sapien
ttgttccacaatgcgtgtaataaag

SEQ ID NO: 4350925 - DNA, 25 bp, Homo sapien
gcaaattgttccacaatgcgtgtaa

SEQ ID NO: 4350926 - DNA, 25 bp, Homo sapien
tctgtggcacccatcccttgacctg

SEQ ID NO: 4350927 - DNA, 25 bp, Homo sapien
catcccttgacctggtactgccaga

SEQ ID NO: 4350928 - DNA, 25 bp, Homo sapien
ctctgtggcacccatcccttgacct

SEQ ID NO: 4350929 - DNA, 25 bp, Homo sapien
cccttgacctggtactgccagacag

SEQ ID NO: 4350930 - DNA, 25 bp, Homo sapien
caatttgctatgctacatatctcat

SEQ ID NO: 4350931 - DNA, 25 bp, Homo sapien
aatttgctatgctacatatctcata

SEQ ID NO: 4350932 - DNA, 25 bp, Homo sapien
atttgctatgctacatatctcatat

SEQ ID NO: 4350933 - DNA, 25 bp, Homo sapien
acagaggaaaatggccgctggcctt

SEQ ID NO: 4350934 - DNA, 25 bp, Homo sapien
gatcattcatactgagtgtctcgca

SEQ ID NO: 4350935 - DNA, 25 bp, Homo sapien
cctactgaaggctcatggatgatca

SEQ ID NO: 4350936 - DNA, 25 bp, Homo sapien
gggttctgccccagaatactaagag

SEQ ID NO: 4350937 - DNA, 25 bp, Homo sapien
cacatgtgtggagatactgggataa

SEQ ID NO: 4350938 - DNA, 25 bp, Homo sapien
agattgcatgtatgtcagtggtccc

SEQ ID NO: 4350939 - DNA, 25 bp, Homo sapien
tcatagccgtcatatcattgtaggg

SEQ ID NO: 4350940 - DNA, 25 bp, Homo sapien
tattgcctagcgaagtcatagccgt

SEQ ID NO: 4350941 - DNA, 25 bp, Homo sapien
gaaccagggacctcttgatctgcag

SEQ ID NO: 4350942 - DNA, 25 bp, Homo sapien
tgatctgcagtcaaatgctctacca

SEQ ID NO: 4350943 - DNA, 25 bp, Homo sapien
tttgaaccagggacctcttgatctg

SEQ ID NO: 4350944 - DNA, 25 bp, Homo sapien
tagggggcacctggatttgaaccag

SEQ ID NO: 4350945 - DNA, 25 bp, Homo sapien
cagggggcacctggatttgaaccag

SEQ ID NO: 4350946 - DNA, 25 bp, Homo sapien
gaaccagggacctcttgatctgcag

SEQ ID NO: 4350947 - DNA, 25 bp, Homo sapien
gatctgcagtcaaatgctctacccc

SEQ ID NO: 4350948 - DNA, 25 bp, Homo sapien
tcaaatgctctacccctgagctata

SEQ ID NO: 4350949 - DNA, 25 bp, Homo sapien
tactataagaaccaggtccgtatgt

SEQ ID NO: 4350950 - DNA, 25 bp, Homo sapien
ggtccgtatgtttcattatcaccag

SEQ ID NO: 4350951 - DNA, 25 bp, Homo sapien
tatcaccagtctctatgcccaggga

SEQ ID NO: 4350952 - DNA, 25 bp, Homo sapien
ctactccctactataagaaccaggt

SEQ ID NO: 4350953 - DNA, 25 bp, Homo sapien
agacccctctgtaggcaatccagga

SEQ ID NO: 4350954 - DNA, 25 bp, Homo sapien
tccacattggtatagtacaaggacc

SEQ ID NO: 4350955 - DNA, 25 bp, Homo sapien
cagcttcacttggtagaaccccaaa

SEQ ID NO: 4350956 - DNA, 25 bp, Homo sapien
tacaaggaccaacgatcaatagatg

SEQ ID NO: 4350957 - DNA, 25 bp, Homo sapien
ctttggacctgagatctcaagcctt

SEQ ID NO: 4350958 - DNA, 25 bp, Homo sapien
gatctcaagccttcaaagaagtgag

SEQ ID NO: 4350959 - DNA, 25 bp, Homo sapien
gaagtgcagccagcaacaacttcct

SEQ ID NO: 4350960 - DNA, 25 bp, Homo sapien
tcctggtcagtagctaccactcctc

SEQ ID NO: 4350961 - DNA, 25 bp, Homo sapien
ttgtggtaggcatgtttattcttct

SEQ ID NO: 4350962 - DNA, 25 bp, Homo sapien
caaaaaataattgtggtaggcatgt

SEQ ID NO: 4350963 - DNA, 25 bp, Homo sapien
taactggctagattacaaaaaataa

SEQ ID NO: 4350964 - DNA, 25 bp, Homo sapien
tcattctaacttgtcgagaggataa

SEQ ID NO: 4350965 - DNA, 25 bp, Homo sapien
tacaaacctcagcacattattgaag

SEQ ID NO: 4350966 - DNA, 25 bp, Homo sapien
aacctcagcacattattgaagccct

SEQ ID NO: 4350967 - DNA, 25 bp, Homo sapien
ggttctacaaacctcagcacattat

SEQ ID NO: 4350968 - DNA, 25 bp, Homo sapien
agcacattattgaagccctgctgag

SEQ ID NO: 4350969 - DNA, 25 bp, Homo sapien
ctattgaagatttgatgaaggcaaa

SEQ ID NO: 4350970 - DNA, 25 bp, Homo sapien
tttgatgaaggcaaagaagttgcaa

SEQ ID NO: 4350971 - DNA, 25 bp, Homo sapien
tattgaagatttgatgaaggcaaag

SEQ ID NO: 4350972 - DNA, 25 bp, Homo sapien
gatgaaggcaaagaagttgcaacac

SEQ ID NO: 4350973 - DNA, 25 bp, Homo sapien
ccaattgataacctccgatcctgat

SEQ ID NO: 4350974 - DNA, 25 bp, Homo sapien
tttcttgccatcctcgatatttgaa

SEQ ID NO: 4350975 - DNA, 25 bp, Homo sapien
tcttgccatcctcgatatttgaatt

SEQ ID NO: 4350976 - DNA, 25 bp, Homo sapien
ccatcctcgatatttgaatttcagt

SEQ ID NO: 4350977 - DNA, 25 bp, Homo sapien
ttgccatcctcgatatttgaatttc

SEQ ID NO: 4350978 - DNA, 25 bp, Homo sapien
ggcaaacttatttctcaggcgcttg

SEQ ID NO: 4350979 - DNA, 25 bp, Homo sapien
tttgggcaaacttatttctcaggcg

SEQ ID NO: 4350980 - DNA, 25 bp, Homo sapien
ttcagctctgtgaaattccttcact

SEQ ID NO: 4350981 - DNA, 25 bp, Homo sapien
tcagctctgtgaaattccttcactt

SEQ ID NO: 4350982 - DNA, 25 bp, Homo sapien
tttcttaaggtggagaattacacta

SEQ ID NO: 4350983 - DNA, 25 bp, Homo sapien
gagatcatggcataagtttcttaag

SEQ ID NO: 4350984 - DNA, 25 bp, Homo sapien
tacataaaatggtgtctaagactgg

SEQ ID NO: 4350985 - DNA, 25 bp, Homo sapien
catttttgcttccatgttaacaagc

SEQ ID NO: 4350986 - DNA, 25 bp, Homo sapien
gtcttgaacccttgacctcgtgatc

SEQ ID NO: 4350987 - DNA, 25 bp, Homo sapien
ggtcttgaacccttgacctcgtgat

SEQ ID NO: 4350988 - DNA, 25 bp, Homo sapien
tcccgagttcaagcatttctctgcc

SEQ ID NO: 4350989 - DNA, 25 bp, Homo sapien
ctcccgagttcaagcatttctctgc

SEQ ID NO: 4350990 - DNA, 25 bp, Homo sapien
catgggtatgacgtcctttaggctc

SEQ ID NO: 4350991 - DNA, 25 bp, Homo sapien
ctgattcgcaattggttaaggaagg

SEQ ID NO: 4350992 - DNA, 25 bp, Homo sapien
aaggaatgttaggtctggcccatgg

SEQ ID NO: 4350993 - DNA, 25 bp, Homo sapien
gattcgcaattggttaaggaaggga

SEQ ID NO: 4350994 - DNA, 25 bp, Homo sapien
gtccttccgcgggttgatggcctgc

SEQ ID NO: 4350995 - DNA, 25 bp, Homo sapien
tctcaacggctaggtgcttgtgtct

SEQ ID NO: 4350996 - DNA, 25 bp, Homo sapien
taggccagtgcgttcctctcaacgg

SEQ ID NO: 4350997 - DNA, 25 bp, Homo sapien
tggcctaccggcgtctgtcagtatg

SEQ ID NO: 4350998 - DNA, 25 bp, Homo sapien
tgatgctgaaggtacgttcacatag

SEQ ID NO: 4350999 - DNA, 25 bp, Homo sapien
gaaggtacgttcacatagctcttcg

SEQ ID NO: 4351000 - DNA, 25 bp, Homo sapien
ggtacgttcacatagctcttcgcat

SEQ ID NO: 4351001 - DNA, 25 bp, Homo sapien
tgctgaaggtacgttcacatagctc

SEQ ID NO: 4351002 - DNA, 25 bp, Homo sapien
ccaggtccaatacattgtgatcttg

SEQ ID NO: 4351003 - DNA, 25 bp, Homo sapien
cttcccaggtccaatacattgtgat

SEQ ID NO: 4351004 - DNA, 25 bp, Homo sapien
ccaatacattgtgatcttgtgctgt

SEQ ID NO: 4351005 - DNA, 25 bp, Homo sapien
tacattgtgatcttgtgctgttggt

SEQ ID NO: 4351006 - DNA, 25 bp, Homo sapien
gctgaagctcttgcacaacttcctc

SEQ ID NO: 4351007 - DNA, 25 bp, Homo sapien
tttgctgaagctcttgcacaacttc

SEQ ID NO: 4351008 - DNA, 25 bp, Homo sapien
ccttttgctgaagctcttgcacaac

SEQ ID NO: 4351009 - DNA, 25 bp, Homo sapien
gaagctcttgcacaacttcctctgc

SEQ ID NO: 4351010 - DNA, 25 bp, Homo sapien
tggcagatctacatgtctagagaac

SEQ ID NO: 4351011 - DNA, 25 bp, Homo sapien
tagagatggtttctactggctgcca

SEQ ID NO: 4351012 - DNA, 25 bp, Homo sapien
cactgtgctctattaccattatgga

SEQ ID NO: 4351013 - DNA, 25 bp, Homo sapien
tgacaaagacatcgattgatatgct

SEQ ID NO: 4351014 - DNA, 25 bp, Homo sapien
gataagccaggccaacctcctgtga

SEQ ID NO: 4351015 - DNA, 25 bp, Homo sapien
gaatcctatgggaacatctgaacag

SEQ ID NO: 4351016 - DNA, 25 bp, Homo sapien
acattcgccgtggactctgctggca

SEQ ID NO: 4351017 - DNA, 25 bp, Homo sapien
tcagtggtgccgcatctaaaggaca

SEQ ID NO: 4351018 - DNA, 25 bp, Homo sapien
tggagaagagtcctctagacctctg

SEQ ID NO: 4351019 - DNA, 25 bp, Homo sapien
agaagagtcctctagacctctgtcc

SEQ ID NO: 4351020 - DNA, 25 bp, Homo sapien
aggagttggagaagagtcctctaga

SEQ ID NO: 4351021 - DNA, 25 bp, Homo sapien
gttggagaagagtcctctagacctc

SEQ ID NO: 4351022 - DNA, 25 bp, Homo sapien
tgcccacatggtcttctgacggtag

SEQ ID NO: 4351023 - DNA, 25 bp, Homo sapien
cccacatggtcttctgacggtaggc

SEQ ID NO: 4351024 - DNA, 25 bp, Homo sapien
ggtaggcaggggatatctgtgccat

SEQ ID NO: 4351025 - DNA, 25 bp, Homo sapien
acatggtcttctgacggtaggcagg

SEQ ID NO: 4351026 - DNA, 25 bp, Homo sapien
tagcttactgagaatgatgctttct

SEQ ID NO: 4351027 - DNA, 25 bp, Homo sapien
aatccaatctaccattgttgggcat

SEQ ID NO: 4351028 - DNA, 25 bp, Homo sapien
gctttctaatttcatccctgtccct

SEQ ID NO: 4351029 - DNA, 25 bp, Homo sapien
cttaatccaatctaccattgttggg

SEQ ID NO: 4351030 - DNA, 25 bp, Homo sapien
caagactgcagaaaagtagacccca

SEQ ID NO: 4351031 - DNA, 25 bp, Homo sapien
gaattaccttgcaccttatgccgag

SEQ ID NO: 4351032 - DNA, 25 bp, Homo sapien
aatatagtctgggtcgaatcaccga

SEQ ID NO: 4351033 - DNA, 25 bp, Homo sapien
caagtttcggttcacgtcacagccc

SEQ ID NO: 4351034 - DNA, 25 bp, Homo sapien
tctgctgtcgttcaggacgtctcaa

SEQ ID NO: 4351035 - DNA, 25 bp, Homo sapien
tagtaaatgaacctgctggctccca

SEQ ID NO: 4351036 - DNA, 25 bp, Homo sapien
gagaccttccagagcatccataact

SEQ ID NO: 4351037 - DNA, 25 bp, Homo sapien
cagatgctccatggcacttgacggc

SEQ ID NO: 4351038 - DNA, 25 bp, Homo sapien
tgacgcgctgcgtggaatccaaatc

SEQ ID NO: 4351039 - DNA, 25 bp, Homo sapien
agtgacattagctcagggcgctgcc

SEQ ID NO: 4351040 - DNA, 25 bp, Homo sapien
caaagcctgagcgaagatggcggcc

SEQ ID NO: 4351041 - DNA, 25 bp, Homo sapien
ggccggtgtcgttactctgcgcatg

SEQ ID NO: 4351042 - DNA, 25 bp, Homo sapien
tccgaacaagtcctgcagactgact

SEQ ID NO: 4351043 - DNA, 25 bp, Homo sapien
ttgtttccttgggtcagcgaccctc

SEQ ID NO: 4351044 - DNA, 25 bp, Homo sapien
ttaggaaatgagcatccgcgtcgtc

SEQ ID NO: 4351045 - DNA, 25 bp, Homo sapien
ggatgccggcaactcttgtttcctt

SEQ ID NO: 4351046 - DNA, 25 bp, Homo sapien
gttggtttgtaacatcggtaggcca

SEQ ID NO: 4351047 - DNA, 25 bp, Homo sapien
gtaacatcggtaggccaatgacttg

SEQ ID NO: 4351048 - DNA, 25 bp, Homo sapien
acatcggtaggccaatgacttgtaa

SEQ ID NO: 4351049 - DNA, 25 bp, Homo sapien
tttgtaacatcggtaggccaatgac

SEQ ID NO: 4351050 - DNA, 25 bp, Homo sapien
taaagcaacttctttgtgacttggg

SEQ ID NO: 4351051 - DNA, 25 bp, Homo sapien
gtaaagcaacttctttgtgacttgg

SEQ ID NO: 4351052 - DNA, 25 bp, Homo sapien
gatttcccagatgtaataccaaaaa

SEQ ID NO: 4351053 - DNA, 25 bp, Homo sapien
aagtaaagcaacttctttgtgactt

SEQ ID NO: 4351054 - DNA, 25 bp, Homo sapien
aatggcaaataatgaacgattcacc

SEQ ID NO: 4351055 - DNA, 25 bp, Homo sapien
gggatgtcgttgcttcaaatgcgga

SEQ ID NO: 4351056 - DNA, 25 bp, Homo sapien
ttgagagtcagttccaggctgtgag

SEQ ID NO: 4351057 - DNA, 25 bp, Homo sapien
ttgtggcatccaaagctggtttcct

SEQ ID NO: 4351058 - DNA, 25 bp, Homo sapien
gctcagctgagttgaaacaaaccga

SEQ ID NO: 4351059 - DNA, 25 bp, Homo sapien
ggtagatgagcttactgactcccat

SEQ ID NO: 4351060 - DNA, 25 bp, Homo sapien
gacctttgaccctatccttgttgag

SEQ ID NO: 4351061 - DNA, 25 bp, Homo sapien
gggagcatttgaccccgaattgagg

SEQ ID NO: 4351062 - DNA, 25 bp, Homo sapien
taagtaaatgctacagtgtggctgc

SEQ ID NO: 4351063 - DNA, 25 bp, Homo sapien
catcaaggatctctgtcgggtacta

SEQ ID NO: 4351064 - DNA, 25 bp, Homo sapien
ggtttgccaactaccccagcattta

SEQ ID NO: 4351065 - DNA, 25 bp, Homo sapien
gagaagatcacggaaatgcctagca

SEQ ID NO: 4351066 - DNA, 25 bp, Homo sapien
tgactcgaagtttgcagtatggaga

SEQ ID NO: 4351067 - DNA, 25 bp, Homo sapien
ccactaaggctcagattgttaaagc

SEQ ID NO: 4351068 - DNA, 25 bp, Homo sapien
aagctctcaaggcaatgactcgaag

SEQ ID NO: 4351069 - DNA, 25 bp, Homo sapien
ggacagcccagcagccactaaggct

SEQ ID NO: 4351070 - DNA, 25 bp, Homo sapien
aatcctgtgccgttcttcagtctgg

SEQ ID NO: 4351071 - DNA, 25 bp, Homo sapien
tctggagtgccttcaaagatcagaa

SEQ ID NO: 4351072 - DNA, 25 bp, Homo sapien
tgatttgttcatttctgagtcacaa

SEQ ID NO: 4351073 - DNA, 25 bp, Homo sapien
gagtcacaaacagcaggatacctca

SEQ ID NO: 4351074 - DNA, 25 bp, Homo sapien
gagttgctggctaccttaccgcagg

SEQ ID NO: 4351075 - DNA, 25 bp, Homo sapien
taaacgctgaaaggccagtgccaag

SEQ ID NO: 4351076 - DNA, 25 bp, Homo sapien
tcctgcatcaagtctgcgtggccat

SEQ ID NO: 4351077 - DNA, 25 bp, Homo sapien
tgtagaccatgaggcaggcgacctt

SEQ ID NO: 4351078 - DNA, 25 bp, Homo sapien
ataatatattagcatcgcaaatcat

SEQ ID NO: 4351079 - DNA, 25 bp, Homo sapien
ggatgtagtaaagaagccgccaaaa

SEQ ID NO: 4351080 - DNA, 25 bp, Homo sapien
tgctaataaacaggatgtagtaaag

SEQ ID NO: 4351081 - DNA, 25 bp, Homo sapien
aatatattagcatcgcaaatcattc

SEQ ID NO: 4351082 - DNA, 25 bp, Homo sapien
cccatccagacttgaacaggttaga

SEQ ID NO: 4351083 - DNA, 25 bp, Homo sapien
cattatgttatgcagactaggctca

SEQ ID NO: 4351084 - DNA, 25 bp, Homo sapien
tttcaagacatggaagtagatctcc

SEQ ID NO: 4351085 - DNA, 25 bp, Homo sapien
tgttaggtgacatactatctgcagc

SEQ ID NO: 4351086 - DNA, 25 bp, Homo sapien
tggaagccaccgcagcatttgaggt

SEQ ID NO: 4351087 - DNA, 25 bp, Homo sapien
tgaacttccccgacactgtgttgta

SEQ ID NO: 4351088 - DNA, 25 bp, Homo sapien
gatcagatggaacctcgtcagccaa

SEQ ID NO: 4351089 - DNA, 25 bp, Homo sapien
tgtagcttcactcaagatcaaggag

SEQ ID NO: 4351090 - DNA, 25 bp, Homo sapien
taaaggagagtttctgccagtggga

SEQ ID NO: 4351091 - DNA, 25 bp, Homo sapien
tcaaggtgcttctacgtggcttcag

SEQ ID NO: 4351092 - DNA, 25 bp, Homo sapien
tagattgaatgacaacagctacagc

SEQ ID NO: 4351093 - DNA, 25 bp, Homo sapien
tcagtggcaaacgttaaagaggccc

SEQ ID NO: 4351094 - DNA, 25 bp, Homo sapien
ccgcagctccattgttgcgattgct

SEQ ID NO: 4351095 - DNA, 25 bp, Homo sapien
attgttgcgattgctgaaagatgaa

SEQ ID NO: 4351096 - DNA, 25 bp, Homo sapien
taaacgcaaaactcgggttatagca

SEQ ID NO: 4351097 - DNA, 25 bp, Homo sapien
tgctaaacgcaaaactcgggttata

SEQ ID NO: 4351098 - DNA, 25 bp, Homo sapien
ctgctaaacgcaaaactcgggttat

SEQ ID NO: 4351099 - DNA, 25 bp, Homo sapien
aacgcaaaactcgggttatagcata

SEQ ID NO: 4351100 - DNA, 25 bp, Homo sapien
tagccagagggtaatcctgggaaac

SEQ ID NO: 4351101 - DNA, 25 bp, Homo sapien
atgttagccagagggtaatcctggg

SEQ ID NO: 4351102 - DNA, 25 bp, Homo sapien
gccagagggtaatcctgggaaacac

SEQ ID NO: 4351103 - DNA, 25 bp, Homo sapien
gttagccagagggtaatcctgggaa

SEQ ID NO: 4351104 - DNA, 25 bp, Homo sapien
gcccagtcaacgattttgctgacag

SEQ ID NO: 4351105 - DNA, 25 bp, Homo sapien
tggcccagtcaacgattttgctgac

SEQ ID NO: 4351106 - DNA, 25 bp, Homo sapien
gatggcccagtcaacgattttgctg

SEQ ID NO: 4351107 - DNA, 25 bp, Homo sapien
ctggatggcccagtcaacgattttg

SEQ ID NO: 4351108 - DNA, 25 bp, Homo sapien
ctttcttagcgccagcactgcccag

SEQ ID NO: 4351109 - DNA, 25 bp, Homo sapien
cagagtcaacaagcggatcttctca

SEQ ID NO: 4351110 - DNA, 25 bp, Homo sapien
gatcttctcaatggcaatgcggctt

SEQ ID NO: 4351111 - DNA, 25 bp, Homo sapien
tcagcaatccagtgagccacaacct

SEQ ID NO: 4351112 - DNA, 25 bp, Homo sapien
ctaaatgtatggtagtgaagctgct

SEQ ID NO: 4351113 - DNA, 25 bp, Homo sapien
tgaactgagcaactgccttaccgcc

SEQ ID NO: 4351114 - DNA, 25 bp, Homo sapien
aaaggccctcctgaatgctaattgc

SEQ ID NO: 4351115 - DNA, 25 bp, Homo sapien
catttgatatacaccagcctaacca

SEQ ID NO: 4351116 - DNA, 25 bp, Homo sapien
tgtgttgcccgctcacacatgatct

SEQ ID NO: 4351117 - DNA, 25 bp, Homo sapien
cacatgatctgcaaagcgcgttccg

SEQ ID NO: 4351118 - DNA, 25 bp, Homo sapien
gttctcatacagtggtggattctgc

SEQ ID NO: 4351119 - DNA, 25 bp, Homo sapien
agcgcgttccgccaaacctactgtt

SEQ ID NO: 4351120 - DNA, 25 bp, Homo sapien
aatagaggcctacagatcatgttct

SEQ ID NO: 4351121 - DNA, 25 bp, Homo sapien
ggagaaagtgtattgctctgaatta

SEQ ID NO: 4351122 - DNA, 25 bp, Homo sapien
tctaataagcaagaggatggcatac

SEQ ID NO: 4351123 - DNA, 25 bp, Homo sapien
tcatcattataacctcagggcctgg

SEQ ID NO: 4351124 - DNA, 25 bp, Homo sapien
ggcaggaactcgcacttgattaaaa

SEQ ID NO: 4351125 - DNA, 25 bp, Homo sapien
tttgtggcaggaactcgcacttgat

SEQ ID NO: 4351126 - DNA, 25 bp, Homo sapien
ggaactcgcacttgattaaaatgga

SEQ ID NO: 4351127 - DNA, 25 bp, Homo sapien
cgcacttgattaaaatggatctcaa

SEQ ID NO: 4351128 - DNA, 25 bp, Homo sapien
ttatttttactccaggtgtgttcat

SEQ ID NO: 4351129 - DNA, 25 bp, Homo sapien
ccaacatagtctgatgcaggctgtg

SEQ ID NO: 4351130 - DNA, 25 bp, Homo sapien
tgtaaaagacgtacaccaacatagt

SEQ ID NO: 4351131 - DNA, 25 bp, Homo sapien
gactggaatgggaactgtgtaaaag

SEQ ID NO: 4351132 - DNA, 25 bp, Homo sapien
tggaatgggaactgtgtaaaagacg

SEQ ID NO: 4351133 - DNA, 25 bp, Homo sapien
aattccacagcgaagaatgttcagc

SEQ ID NO: 4351134 - DNA, 25 bp, Homo sapien
caaacagctttgataatttagcaac

SEQ ID NO: 4351135 - DNA, 25 bp, Homo sapien
gaagactggctcattcctacacagg

SEQ ID NO: 4351136 - DNA, 25 bp, Homo sapien
tacacaggtttctcaatcagaattg

SEQ ID NO: 4351137 - DNA, 25 bp, Homo sapien
tcttcccaaaacaattgcaattttg

SEQ ID NO: 4351138 - DNA, 25 bp, Homo sapien
ggtttgtctatataaaactgctgta

SEQ ID NO: 4351139 - DNA, 25 bp, Homo sapien
tgtatgcaatacttagctccctaaa

SEQ ID NO: 4351140 - DNA, 25 bp, Homo sapien
cctaaaaatcagtatacagatgggc

SEQ ID NO: 4351141 - DNA, 25 bp, Homo sapien
cagatgggcaaagaacacaattgca

SEQ ID NO: 4351142 - DNA, 25 bp, Homo sapien
cttcaagaacaagggacattgctat

SEQ ID NO: 4351143 - DNA, 25 bp, Homo sapien
taggagccaatttatggtaagcagc

SEQ ID NO: 4351144 - DNA, 25 bp, Homo sapien
cacatgcctggcaagggtaggtaag

SEQ ID NO: 4351145 - DNA, 25 bp, Homo sapien
tagcaaaatgacagtacaagaggag

SEQ ID NO: 4351146 - DNA, 25 bp, Homo sapien
agccagtcagctagtttcaccatga

SEQ ID NO: 4351147 - DNA, 25 bp, Homo sapien
tacacacgctaccagaggaagctgc

SEQ ID NO: 4351148 - DNA, 25 bp, Homo sapien
tgaatttagaactccagctccattg

SEQ ID NO: 4351149 - DNA, 25 bp, Homo sapien
tgagtaaggtaccaagccaaatgct

SEQ ID NO: 4351150 - DNA, 25 bp, Homo sapien
tggcacccggtttttacataatgaa

SEQ ID NO: 4351151 - DNA, 25 bp, Homo sapien
aatgaaagcaattcttctatgtggt

SEQ ID NO: 4351152 - DNA, 25 bp, Homo sapien
ttggcacccggtttttacataatga

SEQ ID NO: 4351153 - DNA, 25 bp, Homo sapien
cataatgaaagcaattcttctatgt

SEQ ID NO: 4351154 - DNA, 25 bp, Homo sapien
ctatgtatcatagcaatattctagc

SEQ ID NO: 4351155 - DNA, 25 bp, Homo sapien
atgtatcatagcaatattctagcat

SEQ ID NO: 4351156 - DNA, 25 bp, Homo sapien
tatgtatcatagcaatattctagca

SEQ ID NO: 4351157 - DNA, 25 bp, Homo sapien
ctgcattcaatattcgtggcatcac

SEQ ID NO: 4351158 - DNA, 25 bp, Homo sapien
cattttttgccgttaattacatagc

SEQ ID NO: 4351159 - DNA, 25 bp, Homo sapien
tacatagctatcttcatctcgttgg

SEQ ID NO: 4351160 - DNA, 25 bp, Homo sapien
ggcatcacttgaagctacatcaggt

SEQ ID NO: 4351161 - DNA, 25 bp, Homo sapien
catccataataactccgggacgact

SEQ ID NO: 4351162 - DNA, 25 bp, Homo sapien
aatttgactgaaacacagaaccaca

SEQ ID NO: 4351163 - DNA, 25 bp, Homo sapien
tccataataactccgggacgactga

SEQ ID NO: 4351164 - DNA, 25 bp, Homo sapien
tttggccaatggcaaatttgactga

SEQ ID NO: 4351165 - DNA, 25 bp, Homo sapien
aaggagagaatggtgattggcattt

SEQ ID NO: 4351166 - DNA, 25 bp, Homo sapien
caaggagagaatggtgattggcatt

SEQ ID NO: 4351167 - DNA, 25 bp, Homo sapien
ggagagaatggtgattggcatttac

SEQ ID NO: 4351168 - DNA, 25 bp, Homo sapien
acaaggagagaatggtgattggcat

SEQ ID NO: 4351169 - DNA, 25 bp, Homo sapien
ctgtcatacagaagcaagaggtaat

SEQ ID NO: 4351170 - DNA, 25 bp, Homo sapien
ttgaagaagaggctcaagccactgt

SEQ ID NO: 4351171 - DNA, 25 bp, Homo sapien
aagaggtaatgttcccttgaagaag

SEQ ID NO: 4351172 - DNA, 25 bp, Homo sapien
tcctcacttccatacaggtgcagaa

SEQ ID NO: 4351173 - DNA, 25 bp, Homo sapien
caaagaattcttcatgactgccatg

SEQ ID NO: 4351174 - DNA, 25 bp, Homo sapien
aagatgtctgcactctgttcaggca

SEQ ID NO: 4351175 - DNA, 25 bp, Homo sapien
gatgcactgcagtattgcccttggc

SEQ ID NO: 4351176 - DNA, 25 bp, Homo sapien
tgttcaggcactcctaacagagcca

SEQ ID NO: 4351177 - DNA, 25 bp, Homo sapien
caatactgaggcctatcttgtgcag

SEQ ID NO: 4351178 - DNA, 25 bp, Homo sapien
gactgcgttttgtctcaggagtcca

SEQ ID NO: 4351179 - DNA, 25 bp, Homo sapien
ttgaagatacctcctatagactacg

SEQ ID NO: 4351180 - DNA, 25 bp, Homo sapien
gtagagctttagcaccagggccatg

SEQ ID NO: 4351181 - DNA, 25 bp, Homo sapien
tagaaatatccaattcccatggatc

SEQ ID NO: 4351182 - DNA, 25 bp, Homo sapien
cacgaccaatccctttggtggctaa

SEQ ID NO: 4351183 - DNA, 25 bp, Homo sapien
tgatccatgatccttacacgaccaa

SEQ ID NO: 4351184 - DNA, 25 bp, Homo sapien
tagtgaggctaaccaaaagatttga

SEQ ID NO: 4351185 - DNA, 25 bp, Homo sapien
caatcaaggcatagtccacgtggct

SEQ ID NO: 4351186 - DNA, 25 bp, Homo sapien
tggcaaaaacaagttccagagaccc

SEQ ID NO: 4351187 - DNA, 25 bp, Homo sapien
cagagaccctcgactttggccattt

SEQ ID NO: 4351188 - DNA, 25 bp, Homo sapien
ggctgagtccgctgacagctggcaa

SEQ ID NO: 4351189 - DNA, 25 bp, Homo sapien
tatcaatcactaaaggttttcccca

SEQ ID NO: 4351190 - DNA, 25 bp, Homo sapien
cactagctaaagttaatacaaagta

SEQ ID NO: 4351191 - DNA, 25 bp, Homo sapien
taatacaaagtaaacaatgtcataa

SEQ ID NO: 4351192 - DNA, 25 bp, Homo sapien
tttcactagctaaagttaatacaaa

SEQ ID NO: 4351193 - DNA, 25 bp, Homo sapien
ttaatacaaagtaaacaatgtcata

SEQ ID NO: 4351194 - DNA, 25 bp, Homo sapien
gccaatgaagccagagcatagtaaa

SEQ ID NO: 4351195 - DNA, 25 bp, Homo sapien
ggttgcctccttagcgcagtagggc

SEQ ID NO: 4351196 - DNA, 25 bp, Homo sapien
agtagggcagtgcatcagtctcata

SEQ ID NO: 4351197 - DNA, 25 bp, Homo sapien
ctcttagaaagaggaggttgcctcc

SEQ ID NO: 4351198 - DNA, 25 bp, Homo sapien
actataggtgtgcagcacgccgggc

SEQ ID NO: 4351199 - DNA, 25 bp, Homo sapien
taggtgtgcagcacgccgggctaat

SEQ ID NO: 4351200 - DNA, 25 bp, Homo sapien
ggtccatttgcattttttggagtgc

SEQ ID NO: 4351201 - DNA, 25 bp, Homo sapien
ggcttgagccagcacactggtccat

SEQ ID NO: 4351202 - DNA, 25 bp, Homo sapien
cttttcagctggaagaatgtgttgt

SEQ ID NO: 4351203 - DNA, 25 bp, Homo sapien
ttcagctggaagaatgtgttgtttc

SEQ ID NO: 4351204 - DNA, 25 bp, Homo sapien
ttttcagctggaagaatgtgttgtt

SEQ ID NO: 4351205 - DNA, 25 bp, Homo sapien
cagctggaagaatgtgttgtttcat

SEQ ID NO: 4351206 - DNA, 25 bp, Homo sapien
gaaatgcttcaccttaataagaact

SEQ ID NO: 4351207 - DNA, 25 bp, Homo sapien
caccttaataagaacttcctgacct

SEQ ID NO: 4351208 - DNA, 25 bp, Homo sapien
atgcttcaccttaataagaacttcc

SEQ ID NO: 4351209 - DNA, 25 bp, Homo sapien
tcaccttaataagaacttcctgacc

SEQ ID NO: 4351210 - DNA, 25 bp, Homo sapien
ccagtagtatcaatctgtggtagta

SEQ ID NO: 4351211 - DNA, 25 bp, Homo sapien
ctgtccagtagtatcaatctgtggt

SEQ ID NO: 4351212 - DNA, 25 bp, Homo sapien
tagtatcaatctgtggtagtacagt

SEQ ID NO: 4351213 - DNA, 25 bp, Homo sapien
atcaatctgtggtagtacagtactg

SEQ ID NO: 4351214 - DNA, 25 bp, Homo sapien
ataaaaagctatcctcagatgaatt

SEQ ID NO: 4351215 - DNA, 25 bp, Homo sapien
gaggttgcacaatattggcaaataa

SEQ ID NO: 4351216 - DNA, 25 bp, Homo sapien
ccagaggttgcacaatattggcaaa

SEQ ID NO: 4351217 - DNA, 25 bp, Homo sapien
tgccagaggttgcacaatattggca

SEQ ID NO: 4351218 - DNA, 25 bp, Homo sapien
gaattaattcccctgcagcggcaat

SEQ ID NO: 4351219 - DNA, 25 bp, Homo sapien
ctgtgctattccagccatcttaaaa

SEQ ID NO: 4351220 - DNA, 25 bp, Homo sapien
gcagcggcaatatattgaaatcagt

SEQ ID NO: 4351221 - DNA, 25 bp, Homo sapien
cttaaaatatgaaagggcaagaaag

SEQ ID NO: 4351222 - DNA, 25 bp, Homo sapien
tgagctaagtctgacaaaggatgac

SEQ ID NO: 4351223 - DNA, 25 bp, Homo sapien
aatccagcactgctataactcgaca

SEQ ID NO: 4351224 - DNA, 25 bp, Homo sapien
gatgaccaatggttgacagctccca

SEQ ID NO: 4351225 - DNA, 25 bp, Homo sapien
gagttttcactataagaaccttgat

SEQ ID NO: 4351226 - DNA, 25 bp, Homo sapien
tctaggcaagttatccaagctacat

SEQ ID NO: 4351227 - DNA, 25 bp, Homo sapien
gaggcagctgcagcaatactctagg

SEQ ID NO: 4351228 - DNA, 25 bp, Homo sapien
tactgggtttcatgcctccatataa

SEQ ID NO: 4351229 - DNA, 25 bp, Homo sapien
cataaaactgcagaccccatttggg

SEQ ID NO: 4351230 - DNA, 25 bp, Homo sapien
aaactatgttatctagtctgaaatc

SEQ ID NO: 4351231 - DNA, 25 bp, Homo sapien
aatctccatgaatcaaattctcttc

SEQ ID NO: 4351232 - DNA, 25 bp, Homo sapien
ccgatagctgttgcatggcagggat

SEQ ID NO: 4351233 - DNA, 25 bp, Homo sapien
tatcgggcaagttcttcattagcca

SEQ ID NO: 4351234 - DNA, 25 bp, Homo sapien
gtcacgagaaataagtaacccctga

SEQ ID NO: 4351235 - DNA, 25 bp, Homo sapien
tcgtaaagtcctccaacaggtggga

SEQ ID NO: 4351236 - DNA, 25 bp, Homo sapien
tagataatctctggaaagggtcacg

SEQ ID NO: 4351237 - DNA, 25 bp, Homo sapien
catttcccgaggtatctttgctcaa

SEQ ID NO: 4351238 - DNA, 25 bp, Homo sapien
taactgagccaatgtttctaccgtg

SEQ ID NO: 4351239 - DNA, 25 bp, Homo sapien
tatatggctgaacgttctgctgggc

SEQ ID NO: 4351240 - DNA, 25 bp, Homo sapien
tatattcaaggaacgtaactgagcc

SEQ ID NO: 4351241 - DNA, 25 bp, Homo sapien
tctaccgtggccacatatatggctg

SEQ ID NO: 4351242 - DNA, 25 bp, Homo sapien
gaagtatcactgcagtacagtatag

SEQ ID NO: 4351243 - DNA, 25 bp, Homo sapien
gttccaatgacagaagtatcactgc

SEQ ID NO: 4351244 - DNA, 25 bp, Homo sapien
tacgtaaaattctgttccaatgaca

SEQ ID NO: 4351245 - DNA, 25 bp, Homo sapien
cagtacagtataggcttgggaacgg

SEQ ID NO: 4351246 - DNA, 25 bp, Homo sapien
ctggagataaaaggttggattggac

SEQ ID NO: 4351247 - DNA, 25 bp, Homo sapien
gagcacatatgtttgaaagcccttc

SEQ ID NO: 4351248 - DNA, 25 bp, Homo sapien
tgtgctttaggaagaagtgaacctg

SEQ ID NO: 4351249 - DNA, 25 bp, Homo sapien
cccttctggagataaaaggttggat

SEQ ID NO: 4351250 - DNA, 25 bp, Homo sapien
cagacaatctcacgagaccctacta

SEQ ID NO: 4351251 - DNA, 25 bp, Homo sapien
ttaaacagacaatctcacgagaccc

SEQ ID NO: 4351252 - DNA, 25 bp, Homo sapien
aatctcacgagaccctactaagcca

SEQ ID NO: 4351253 - DNA, 25 bp, Homo sapien
tagagaagactttaaacagacaatc

SEQ ID NO: 4351254 - DNA, 25 bp, Homo sapien
cgacctcaagacataaccaactgct

SEQ ID NO: 4351255 - DNA, 25 bp, Homo sapien
tcttctttttgtcgatggctctcaa

SEQ ID NO: 4351256 - DNA, 25 bp, Homo sapien
catatctacttggatgtctaaaagg

SEQ ID NO: 4351257 - DNA, 25 bp, Homo sapien
gatcactaatacaaaccatggtttt

SEQ ID NO: 4351258 - DNA, 25 bp, Homo sapien
tgtggagagccgtaaaagccaatca

SEQ ID NO: 4351259 - DNA, 25 bp, Homo sapien
gtggagagccgtaaaagccaatcat

SEQ ID NO: 4351260 - DNA, 25 bp, Homo sapien
gacttgctgtcgaacttgtgctggg

SEQ ID NO: 4351261 - DNA, 25 bp, Homo sapien
aatggtcagcgtagcctcacgttcg

SEQ ID NO: 4351262 - DNA, 25 bp, Homo sapien
aagtgctggtttaggtaggcctcca

SEQ ID NO: 4351263 - DNA, 25 bp, Homo sapien
aatcggactcgccagtagcacctgg

SEQ ID NO: 4351264 - DNA, 25 bp, Homo sapien
taatgcaacagcaggcggaagacct

SEQ ID NO: 4351265 - DNA, 25 bp, Homo sapien
caaagccatggtcatcgttgcgggt

SEQ ID NO: 4351266 - DNA, 25 bp, Homo sapien
gaaaaagggccgtcagactgtcgag

SEQ ID NO: 4351267 - DNA, 25 bp, Homo sapien
cagtcagcgtcagagttggaggcct

SEQ ID NO: 4351268 - DNA, 25 bp, Homo sapien
caatagtaggtgttggtggagtagg

SEQ ID NO: 4351269 - DNA, 25 bp, Homo sapien
gatgtggcattggtaaggtaaaaac

SEQ ID NO: 4351270 - DNA, 25 bp, Homo sapien
tgtggcattggtaaggtaaaaacat

SEQ ID NO: 4351271 - DNA, 25 bp, Homo sapien
acaagatgtggcattggtaaggtaa

SEQ ID NO: 4351272 - DNA, 25 bp, Homo sapien
cagaatttcatatgaagaagggaca

SEQ ID NO: 4351273 - DNA, 25 bp, Homo sapien
gataagaaatgtgatctaatggcca

SEQ ID NO: 4351274 - DNA, 25 bp, Homo sapien
ggctctagcctgttcttactgataa

SEQ ID NO: 4351275 - DNA, 25 bp, Homo sapien
caggcttaagtgtatagcaggaaac

SEQ ID NO: 4351276 - DNA, 25 bp, Homo sapien
aaaatccatccagattacactcatt

SEQ ID NO: 4351277 - DNA, 25 bp, Homo sapien
ttttcgaggtagtgagatgtcggca

SEQ ID NO: 4351278 - DNA, 25 bp, Homo sapien
taggctactcctggatacttcattt

SEQ ID NO: 4351279 - DNA, 25 bp, Homo sapien
aaatttgattttcgaggtagtgaga

SEQ ID NO: 4351280 - DNA, 25 bp, Homo sapien
aatagcttttctagtatgagagatg

SEQ ID NO: 4351281 - DNA, 25 bp, Homo sapien
tagcttttctagtatgagagatgtt

SEQ ID NO: 4351282 - DNA, 25 bp, Homo sapien
taaaaatttagcttattgaactgta

SEQ ID NO: 4351283 - DNA, 25 bp, Homo sapien
ttagcttattgaactgtaaaatagc

SEQ ID NO: 4351284 - DNA, 25 bp, Homo sapien
tttcacttttacaatcaatacatgt

SEQ ID NO: 4351285 - DNA, 25 bp, Homo sapien
ttacaatcaatacatgttaggatct

SEQ ID NO: 4351286 - DNA, 25 bp, Homo sapien
ttcacttttacaatcaatacatgtt

SEQ ID NO: 4351287 - DNA, 25 bp, Homo sapien
agagcttgacctgttactgcattaa

SEQ ID NO: 4351288 - DNA, 25 bp, Homo sapien
gacttcagacattatgcagatacat

SEQ ID NO: 4351289 - DNA, 25 bp, Homo sapien
gaagagacagatttaggccatctaa

SEQ ID NO: 4351290 - DNA, 25 bp, Homo sapien
tacacaaatggtccaaaacaatatc

SEQ ID NO: 4351291 - DNA, 25 bp, Homo sapien
ctttgaggtagagaattgggccaga

SEQ ID NO: 4351292 - DNA, 25 bp, Homo sapien
ctttcctttgaggtagagaattggg

SEQ ID NO: 4351293 - DNA, 25 bp, Homo sapien
ttcctttgaggtagagaattgggcc

SEQ ID NO: 4351294 - DNA, 25 bp, Homo sapien
gaggtagagaattgggccagactac

SEQ ID NO: 4351295 - DNA, 25 bp, Homo sapien
caaatagcagttaaatcacacgtag

SEQ ID NO: 4351296 - DNA, 25 bp, Homo sapien
tcttgagagctcaaaagaatcatgg

SEQ ID NO: 4351297 - DNA, 25 bp, Homo sapien
tgttgaacaaagaccaatccgctct

SEQ ID NO: 4351298 - DNA, 25 bp, Homo sapien
gaggaatggcaaggctaaagtagct

SEQ ID NO: 4351299 - DNA, 25 bp, Homo sapien
tggcgtgaaggagcttttccaccca

SEQ ID NO: 4351300 - DNA, 25 bp, Homo sapien
gagctgtttttaagctaaacgtgtc

SEQ ID NO: 4351301 - DNA, 25 bp, Homo sapien
ggaaaacattaggagaatgagctgt

SEQ ID NO: 4351302 - DNA, 25 bp, Homo sapien
tccacttgatgaatggcgtgaagga

SEQ ID NO: 4351303 - DNA, 25 bp, Homo sapien
caaagctacttcgaataaaagaggc

SEQ ID NO: 4351304 - DNA, 25 bp, Homo sapien
cagtgtattcactcaagcagaccag

SEQ ID NO: 4351305 - DNA, 25 bp, Homo sapien
gcaaagttaggtattctctgcatcc

SEQ ID NO: 4351306 - DNA, 25 bp, Homo sapien
tgctcctctgcaaaatagatcatgc

SEQ ID NO: 4351307 - DNA, 25 bp, Homo sapien
agtgtttctccaactcgaggatgca

SEQ ID NO: 4351308 - DNA, 25 bp, Homo sapien
ctttaatgctctttcatataatggc

SEQ ID NO: 4351309 - DNA, 25 bp, Homo sapien
tccgacccaggctatcttcataaat

SEQ ID NO: 4351310 - DNA, 25 bp, Homo sapien
aatgctctttcatataatggcaaag

SEQ ID NO: 4351311 - DNA, 25 bp, Homo sapien
tttgggccaaaagatttctgtcgaa

SEQ ID NO: 4351312 - DNA, 25 bp, Homo sapien
agaacagctaagttcaccaaggcag

SEQ ID NO: 4351313 - DNA, 25 bp, Homo sapien
ttcaacagccaattcatacaaaggt

SEQ ID NO: 4351314 - DNA, 25 bp, Homo sapien
caaggcagtagctacactagggtgc

SEQ ID NO: 4351315 - DNA, 25 bp, Homo sapien
taaactaacctgtccctcataaaga

SEQ ID NO: 4351316 - DNA, 25 bp, Homo sapien
tatcactcagtatagaaccctatgg

SEQ ID NO: 4351317 - DNA, 25 bp, Homo sapien
ttgctgatagtagttatggcttaac

SEQ ID NO: 4351318 - DNA, 25 bp, Homo sapien
ccctatggcaaacaatggttacatt

SEQ ID NO: 4351319 - DNA, 25 bp, Homo sapien
ccgtatatgccaaagaagggtgatc

SEQ ID NO: 4351320 - DNA, 25 bp, Homo sapien
tgatcaggagctaatgcacgtctcc

SEQ ID NO: 4351321 - DNA, 25 bp, Homo sapien
ggtgatctggtcctagaactcgctc

SEQ ID NO: 4351322 - DNA, 25 bp, Homo sapien
tctaaggaacgcttcagaaactggt

SEQ ID NO: 4351323 - DNA, 25 bp, Homo sapien
tttaccattagtcccaagctgctgc

SEQ ID NO: 4351324 - DNA, 25 bp, Homo sapien
tcctgacagtttgagggcctaaaat

SEQ ID NO: 4351325 - DNA, 25 bp, Homo sapien
tgtgaacacaatcccaaaatggctt

SEQ ID NO: 4351326 - DNA, 25 bp, Homo sapien
cctaaaatgtgtggatgattgcctc

SEQ ID NO: 4351327 - DNA, 25 bp, Homo sapien
gaacacccagttcattgagggtccg

SEQ ID NO: 4351328 - DNA, 25 bp, Homo sapien
tttgaagatagtagagaacacccag

SEQ ID NO: 4351329 - DNA, 25 bp, Homo sapien
gggtccgagcattatcaggtgtgtc

SEQ ID NO: 4351330 - DNA, 25 bp, Homo sapien
caggtgtgtccttacctaatgtaag

SEQ ID NO: 4351331 - DNA, 25 bp, Homo sapien
ttttcctaaaatgttcagcttgttc

SEQ ID NO: 4351332 - DNA, 25 bp, Homo sapien
ttctttatagctttctgatgaattt

SEQ ID NO: 4351333 - DNA, 25 bp, Homo sapien
cctaaaatgttcagcttgttcatat

SEQ ID NO: 4351334 - DNA, 25 bp, Homo sapien
tttcctaaaatgttcagcttgttca

SEQ ID NO: 4351335 - DNA, 25 bp, Homo sapien
gatggtccgcaccataagcattttc

SEQ ID NO: 4351336 - DNA, 25 bp, Homo sapien
cacgagcagtatatggatggtccgc

SEQ ID NO: 4351337 - DNA, 25 bp, Homo sapien
gctactcttgggtgatcgggatcta

SEQ ID NO: 4351338 - DNA, 25 bp, Homo sapien
tacacttgctagttggtggagggac

SEQ ID NO: 4351339 - DNA, 25 bp, Homo sapien
gagaaatcgccccaaggtttcataa

SEQ ID NO: 4351340 - DNA, 25 bp, Homo sapien
aactcatgttgtcctcgccttcgca

SEQ ID NO: 4351341 - DNA, 25 bp, Homo sapien
tttctcatactgcttcaatgaatcg

SEQ ID NO: 4351342 - DNA, 25 bp, Homo sapien
taaagatcagctaagcaactcatgt

SEQ ID NO: 4351343 - DNA, 25 bp, Homo sapien
gcaatcatgcagcttctgtttactt

SEQ ID NO: 4351344 - DNA, 25 bp, Homo sapien
tgctgaaaaagccacgggagttcat

SEQ ID NO: 4351345 - DNA, 25 bp, Homo sapien
aaagagattaagaaggcaatcatgc

SEQ ID NO: 4351346 - DNA, 25 bp, Homo sapien
acgggagttcatctgcacttctcca

SEQ ID NO: 4351347 - DNA, 25 bp, Homo sapien
taacagtggggccttccaggtactc

SEQ ID NO: 4351348 - DNA, 25 bp, Homo sapien
aggtactccaatctcactgtttccc

SEQ ID NO: 4351349 - DNA, 25 bp, Homo sapien
tgattagcttttgcctgtatgaaga

SEQ ID NO: 4351350 - DNA, 25 bp, Homo sapien
ctgcaaggtgaaatagttgattagc

SEQ ID NO: 4351351 - DNA, 25 bp, Homo sapien
caggacatctcaggatagagttcca

SEQ ID NO: 4351352 - DNA, 25 bp, Homo sapien
ttgtataaactgtgaataagggagg

SEQ ID NO: 4351353 - DNA, 25 bp, Homo sapien
gttgaaacctaagcaagccacatcc

SEQ ID NO: 4351354 - DNA, 25 bp, Homo sapien
tgaataagggaggtcaagaaagtcc

SEQ ID NO: 4351355 - DNA, 25 bp, Homo sapien
atccacatcatttgccatggactcc

SEQ ID NO: 4351356 - DNA, 25 bp, Homo sapien
ttgccatggactcccggatagagtg

SEQ ID NO: 4351357 - DNA, 25 bp, Homo sapien
catttgccatggactcccggataga

SEQ ID NO: 4351358 - DNA, 25 bp, Homo sapien
catcatttgccatggactcccggat

SEQ ID NO: 4351359 - DNA, 25 bp, Homo sapien
tatataatgaaagagtatcttgaca

SEQ ID NO: 4351360 - DNA, 25 bp, Homo sapien
ctatataatgaaagagtatcttgac

SEQ ID NO: 4351361 - DNA, 25 bp, Homo sapien
acactgatgaaggattttatctaaa

SEQ ID NO: 4351362 - DNA, 25 bp, Homo sapien
aacactgatgaaggattttatctaa

SEQ ID NO: 4351363 - DNA, 25 bp, Homo sapien
ttatctaaattgcctgctctcccag

SEQ ID NO: 4351364 - DNA, 25 bp, Homo sapien
tgacaatcatggacagtaggcacct

SEQ ID NO: 4351365 - DNA, 25 bp, Homo sapien
tcttttgcaacctccaatagggaac

SEQ ID NO: 4351366 - DNA, 25 bp, Homo sapien
gaagtactagattcggtgtctggaa

SEQ ID NO: 4351367 - DNA, 25 bp, Homo sapien
tctgagtggctcaacagactggtgt

SEQ ID NO: 4351368 - DNA, 25 bp, Homo sapien
cgcgcgatcattttgccgaaaaggg

SEQ ID NO: 4351369 - DNA, 25 bp, Homo sapien
agaacgacagtgtcgttctagcttc

SEQ ID NO: 4351370 - DNA, 25 bp, Homo sapien
ccgaaaagggtgacataaagggcat

SEQ ID NO: 4351371 - DNA, 25 bp, Homo sapien
cataaagggcattgcaggttgtagc

SEQ ID NO: 4351372 - DNA, 25 bp, Homo sapien
gatgagagagtaaaagattgcatca

SEQ ID NO: 4351373 - DNA, 25 bp, Homo sapien
ttggacttaagggatcaagatgaag

SEQ ID NO: 4351374 - DNA, 25 bp, Homo sapien
acagagtggcattctgcaattataa

SEQ ID NO: 4351375 - DNA, 25 bp, Homo sapien
cttaagggatcaagatgaagtgtag

SEQ ID NO: 4351376 - DNA, 25 bp, Homo sapien
cttttggacttaagggatcaagatg

SEQ ID NO: 4351377 - DNA, 25 bp, Homo sapien
catgctggagggcatgtttctacat

SEQ ID NO: 4351378 - DNA, 25 bp, Homo sapien
ctggagggcatgtttctacattcac

SEQ ID NO: 4351379 - DNA, 25 bp, Homo sapien
gaaacaattactcttacattcactg

SEQ ID NO: 4351380 - DNA, 25 bp, Homo sapien
actggcagtggatctatcagccatt

SEQ ID NO: 4351381 - DNA, 25 bp, Homo sapien
tccagccaacgtggaaattcttcca

SEQ ID NO: 4351382 - DNA, 25 bp, Homo sapien
gagactgaccaagagtgctgcatca

SEQ ID NO: 4351383 - DNA, 25 bp, Homo sapien
tcaataacgatgatgatgctgcctt

SEQ ID NO: 4351384 - DNA, 25 bp, Homo sapien
ttccagaagcttagcaggatccagt

SEQ ID NO: 4351385 - DNA, 25 bp, Homo sapien
tagagttagtcgtttaataatcaag

SEQ ID NO: 4351386 - DNA, 25 bp, Homo sapien
taataatcaaggaggactctgagct

SEQ ID NO: 4351387 - DNA, 25 bp, Homo sapien
aaggaggactctgagctggttgaca

SEQ ID NO: 4351388 - DNA, 25 bp, Homo sapien
ttgacatgggccttcccacaaaatg

SEQ ID NO: 4351389 - DNA, 25 bp, Homo sapien
agaacctggtcctccagacacgaga

SEQ ID NO: 4351390 - DNA, 25 bp, Homo sapien
tggtgctgccactagatcattaagg

SEQ ID NO: 4351391 - DNA, 25 bp, Homo sapien
ctccagacacgagaagaggtggaat

SEQ ID NO: 4351392 - DNA, 25 bp, Homo sapien
cactttgataaaagaagagacttcc

SEQ ID NO: 4351393 - DNA, 25 bp, Homo sapien
gaccttgaaggtactagcagaccac

SEQ ID NO: 4351394 - DNA, 25 bp, Homo sapien
agaaaaggtccaaataacagcaggt

SEQ ID NO: 4351395 - DNA, 25 bp, Homo sapien
tcctggtcagaggaataaacacctg

SEQ ID NO: 4351396 - DNA, 25 bp, Homo sapien
tcaagacaatcaggttagcctaggc

SEQ ID NO: 4351397 - DNA, 25 bp, Homo sapien
caaatccttagtctccaagtctgtg

SEQ ID NO: 4351398 - DNA, 25 bp, Homo sapien
actgcccaaatccttagtctccaag

SEQ ID NO: 4351399 - DNA, 25 bp, Homo sapien
cttgttcatcatgtatgtcccacag

SEQ ID NO: 4351400 - DNA, 25 bp, Homo sapien
tgctcttgttcatcatgtatgtccc

SEQ ID NO: 4351401 - DNA, 25 bp, Homo sapien
caaacatagacataatatcaggcag

SEQ ID NO: 4351402 - DNA, 25 bp, Homo sapien
cacaggatggactcccaacagaaac

SEQ ID NO: 4351403 - DNA, 25 bp, Homo sapien
ttcatagagacttccagctcaaggc

SEQ ID NO: 4351404 - DNA, 25 bp, Homo sapien
ccctcttctgttagggataacatgg

SEQ ID NO: 4351405 - DNA, 25 bp, Homo sapien
cttctgcaggatctcctgagtgatc

SEQ ID NO: 4351406 - DNA, 25 bp, Homo sapien
agttttatatactccttctgcagga

SEQ ID NO: 4351407 - DNA, 25 bp, Homo sapien
tataagttttatatactccttctgc

SEQ ID NO: 4351408 - DNA, 25 bp, Homo sapien
ctgcaggatctcctgagtgatcaat

SEQ ID NO: 4351409 - DNA, 25 bp, Homo sapien
cttgtttagattagaaacttgatca

SEQ ID NO: 4351410 - DNA, 25 bp, Homo sapien
gatcaatcaattgctggacagagtc

SEQ ID NO: 4351411 - DNA, 25 bp, Homo sapien
cttccaaacgatgaaagattaatcg

SEQ ID NO: 4351412 - DNA, 25 bp, Homo sapien
aagattaatcgaggttttccttcag

SEQ ID NO: 4351413 - DNA, 25 bp, Homo sapien
ttggaaatcagcattttgtgtgcta

SEQ ID NO: 4351414 - DNA, 25 bp, Homo sapien
ctagattggaaatcagcattttgtg

SEQ ID NO: 4351415 - DNA, 25 bp, Homo sapien
gattggaaatcagcattttgtgtgc

SEQ ID NO: 4351416 - DNA, 25 bp, Homo sapien
ggaaatcagcattttgtgtgctata

SEQ ID NO: 4351417 - DNA, 25 bp, Homo sapien
actgcgaccaattcccctttctaga

SEQ ID NO: 4351418 - DNA, 25 bp, Homo sapien
tgcagcccacatctactggggtttt

SEQ ID NO: 4351419 - DNA, 25 bp, Homo sapien
acacaacaaaggacactgcgaccaa

SEQ ID NO: 4351420 - DNA, 25 bp, Homo sapien
gcattaaatgaaagttgtctaggga

SEQ ID NO: 4351421 - DNA, 25 bp, Homo sapien
gggaataattattgacaggaaagtg

SEQ ID NO: 4351422 - DNA, 25 bp, Homo sapien
aaataactctgtggataccatctgc

SEQ ID NO: 4351423 - DNA, 25 bp, Homo sapien
ataattattgacaggaaagtgtttc

SEQ ID NO: 4351424 - DNA, 25 bp, Homo sapien
actctgtggataccatctgcacaca

SEQ ID NO: 4351425 - DNA, 25 bp, Homo sapien
cagtgaggtattgattttcaacatc

SEQ ID NO: 4351426 - DNA, 25 bp, Homo sapien
aaaaatatcccattgtctcgcacat

SEQ ID NO: 4351427 - DNA, 25 bp, Homo sapien
tttcccattttcttacagtgaggta

SEQ ID NO: 4351428 - DNA, 25 bp, Homo sapien
cattgtctcgcacattctcttaagt

SEQ ID NO: 4351429 - DNA, 25 bp, Homo sapien
tgtaataaactagctacagcaatat

SEQ ID NO: 4351430 - DNA, 25 bp, Homo sapien
tgaggtaacatctgacagtgttact

SEQ ID NO: 4351431 - DNA, 25 bp, Homo sapien
aatgaggtaacatctgacagtgtta

SEQ ID NO: 4351432 - DNA, 25 bp, Homo sapien
taaactagctacagcaatatcccag

SEQ ID NO: 4351433 - DNA, 25 bp, Homo sapien
tctctagttatttacaatacctcat

SEQ ID NO: 4351434 - DNA, 25 bp, Homo sapien
tatttacaatacctcatgcaatgta

SEQ ID NO: 4351435 - DNA, 25 bp, Homo sapien
tagaaggaaaactgtactatattac

SEQ ID NO: 4351436 - DNA, 25 bp, Homo sapien
tagttatttacaatacctcatgcaa

SEQ ID NO: 4351437 - DNA, 25 bp, Homo sapien
ctccataacctgctctaatcttcaa

SEQ ID NO: 4351438 - DNA, 25 bp, Homo sapien
ggtattatctccataacctgctcta

SEQ ID NO: 4351439 - DNA, 25 bp, Homo sapien
tatctccataacctgctctaatctt

SEQ ID NO: 4351440 - DNA, 25 bp, Homo sapien
tttttggtattatctccataacctg

SEQ ID NO: 4351441 - DNA, 25 bp, Homo sapien
ctatcaaagaagcagagggaaagat

SEQ ID NO: 4351442 - DNA, 25 bp, Homo sapien
tatcaaagaagcagagggaaagatt

SEQ ID NO: 4351443 - DNA, 25 bp, Homo sapien
tcaaagaagcagagggaaagattaa

SEQ ID NO: 4351444 - DNA, 25 bp, Homo sapien
caaagaagcagagggaaagattaaa

SEQ ID NO: 4351445 - DNA, 25 bp, Homo sapien
tccttgttagttacagccccactgt

SEQ ID NO: 4351446 - DNA, 25 bp, Homo sapien
gccccactgtatgatggtttgtcaa

SEQ ID NO: 4351447 - DNA, 25 bp, Homo sapien
tggtattaatagttccagcacaaga

SEQ ID NO: 4351448 - DNA, 25 bp, Homo sapien
gaacagtcactaccactaggcaagt

SEQ ID NO: 4351449 - DNA, 25 bp, Homo sapien
gcaaagggtccttccacatctatag

SEQ ID NO: 4351450 - DNA, 25 bp, Homo sapien
caatattcacattgggttccagcag

SEQ ID NO: 4351451 - DNA, 25 bp, Homo sapien
caaggctccgccagtccaatattca

SEQ ID NO: 4351452 - DNA, 25 bp, Homo sapien
cagggcctctgaaggactgctgaag

SEQ ID NO: 4351453 - DNA, 25 bp, Homo sapien
tccaactgtacagcttagacaccag

SEQ ID NO: 4351454 - DNA, 25 bp, Homo sapien
tattaggacataaactctttgcagc

SEQ ID NO: 4351455 - DNA, 25 bp, Homo sapien
tctcagctactcttggccattaaga

SEQ ID NO: 4351456 - DNA, 25 bp, Homo sapien
cacatataccgaacaggattgctga

SEQ ID NO: 4351457 - DNA, 25 bp, Homo sapien
aggatgttggtcagattccaatgat

SEQ ID NO: 4351458 - DNA, 25 bp, Homo sapien
caggatgttggtcagattccaatga

SEQ ID NO: 4351459 - DNA, 25 bp, Homo sapien
ggatgttggtcagattccaatgata

SEQ ID NO: 4351460 - DNA, 25 bp, Homo sapien
cattttagttggacacatgtctgcc

SEQ ID NO: 4351461 - DNA, 25 bp, Homo sapien
aagttggctctacatgtcattacag

SEQ ID NO: 4351462 - DNA, 25 bp, Homo sapien
caaggctatactggaaaccactcag

SEQ ID NO: 4351463 - DNA, 25 bp, Homo sapien
tcccttggctaaaatgcagatgtgc

SEQ ID NO: 4351464 - DNA, 25 bp, Homo sapien
cagtgacatctgtacagttgtcatc

SEQ ID NO: 4351465 - DNA, 25 bp, Homo sapien
caaatacttggataccctgagcctg

SEQ ID NO: 4351466 - DNA, 25 bp, Homo sapien
tctgaagtttgctctccaactccct

SEQ ID NO: 4351467 - DNA, 25 bp, Homo sapien
cctcttggccctcagtaagtcctga

SEQ ID NO: 4351468 - DNA, 25 bp, Homo sapien
tgttcaaatgttgctgctctctcca

SEQ ID NO: 4351469 - DNA, 25 bp, Homo sapien
ttttctcgaagtatcttctgatacg

SEQ ID NO: 4351470 - DNA, 25 bp, Homo sapien
gctctctccattgcttggtatttcg

SEQ ID NO: 4351471 - DNA, 25 bp, Homo sapien
tggtatttcgcttctaaagcacttt

SEQ ID NO: 4351472 - DNA, 25 bp, Homo sapien
gacctgctacatggagggcatgcaa

SEQ ID NO: 4351473 - DNA, 25 bp, Homo sapien
gactccgggaactcttaggctgcct

SEQ ID NO: 4351474 - DNA, 25 bp, Homo sapien
gagttgcttcaacagatgtcaccag

SEQ ID NO: 4351475 - DNA, 25 bp, Homo sapien
aaacgacacaacaacgaccagaggg

SEQ ID NO: 4351476 - DNA, 25 bp, Homo sapien
cgcgatcgtgccaccgcagcgagac

SEQ ID NO: 4351477 - DNA, 25 bp, Homo sapien
gcgatcgtgccaccgcagcgagacc

SEQ ID NO: 4351478 - DNA, 25 bp, Homo sapien
ccgcgatcgtgccaccgcagcgaga

SEQ ID NO: 4351479 - DNA, 25 bp, Homo sapien
tcagactcgaagagaatatggcctc

SEQ ID NO: 4351480 - DNA, 25 bp, Homo sapien
tcaaattaaaatgggcagtttccgc

SEQ ID NO: 4351481 - DNA, 25 bp, Homo sapien
caggacggccgtgcttcccaagggt

SEQ ID NO: 4351482 - DNA, 25 bp, Homo sapien
ttcaaagccgcttggtttggagagg

SEQ ID NO: 4351483 - DNA, 25 bp, Homo sapien
catggacaacaactcctggttcttg

SEQ ID NO: 4351484 - DNA, 25 bp, Homo sapien
tggttcttgctgacgcgaaagatct

SEQ ID NO: 4351485 - DNA, 25 bp, Homo sapien
agatctcgtactccttcctgagccg

SEQ ID NO: 4351486 - DNA, 25 bp, Homo sapien
ttcctgagccgctcgtactcggccg

SEQ ID NO: 4351487 - DNA, 25 bp, Homo sapien
ctggcaccgacgagccagtggactt

SEQ ID NO: 4351488 - DNA, 25 bp, Homo sapien
cgcccgcgcccaccccgcggggcag

SEQ ID NO: 4351489 - DNA, 25 bp, Homo sapien
ccgcgcccaccccgcggggcagcga

SEQ ID NO: 4351490 - DNA, 25 bp, Homo sapien
gcagcgacccgggcccggcccctgc

SEQ ID NO: 4351491 - DNA, 25 bp, Homo sapien
gcgcccaccccgcggggcagcgacc

SEQ ID NO: 4351492 - DNA, 25 bp, Homo sapien
gagttgcgcagcaggcgggccttgg

SEQ ID NO: 4351493 - DNA, 25 bp, Homo sapien
ttgcgcagcaggcgggccttgggct

SEQ ID NO: 4351494 - DNA, 25 bp, Homo sapien
gcagcaggcgggccttgggcttcac

SEQ ID NO: 4351495 - DNA, 25 bp, Homo sapien
gcgcagcaggcgggccttgggcttc

SEQ ID NO: 4351496 - DNA, 25 bp, Homo sapien
ctccaccgggatctcgcaggcctcg

SEQ ID NO: 4351497 - DNA, 25 bp, Homo sapien
tccaccgggatctcgcaggcctcgc

SEQ ID NO: 4351498 - DNA, 25 bp, Homo sapien
accgggatctcgcaggcctcgccgc

SEQ ID NO: 4351499 - DNA, 25 bp, Homo sapien
ccaccgggatctcgcaggcctcgcc

SEQ ID NO: 4351500 - DNA, 25 bp, Homo sapien
tcacgagcgacgaggcggtccccat

SEQ ID NO: 4351501 - DNA, 25 bp, Homo sapien
cggggctcacgagcgacgaggcggt

SEQ ID NO: 4351502 - DNA, 25 bp, Homo sapien
ggctcacgagcgacgaggcggtccc

SEQ ID NO: 4351503 - DNA, 25 bp, Homo sapien
gcccgcggggctcacgagcgacgag

SEQ ID NO: 4351504 - DNA, 25 bp, Homo sapien
gccgctactacctagtgagtaccag

SEQ ID NO: 4351505 - DNA, 25 bp, Homo sapien
ggcgtccgttgccgctactacctag

SEQ ID NO: 4351506 - DNA, 25 bp, Homo sapien
tccgttgccgctactacctagtgag

SEQ ID NO: 4351507 - DNA, 25 bp, Homo sapien
gactgggcagcggaacggaacggga

SEQ ID NO: 4351508 - DNA, 25 bp, Homo sapien
gctgctcttcattccgtgctgcttt

SEQ ID NO: 4351509 - DNA, 25 bp, Homo sapien
ctgctcttcattccgtgctgctttc

SEQ ID NO: 4351510 - DNA, 25 bp, Homo sapien
tgctgctcttcattccgtgctgctt

SEQ ID NO: 4351511 - DNA, 25 bp, Homo sapien
ctctccttgtaccaggaggatactc

SEQ ID NO: 4351512 - DNA, 25 bp, Homo sapien
ctagcatgtggtggagttagactgt

SEQ ID NO: 4351513 - DNA, 25 bp, Homo sapien
aattaagcagctggcttgtgatgct

SEQ ID NO: 4351514 - DNA, 25 bp, Homo sapien
tgtggtctgtggtgtatcacttgga

SEQ ID NO: 4351515 - DNA, 25 bp, Homo sapien
tcagcttcttaatgcagtccctcat

SEQ ID NO: 4351516 - DNA, 25 bp, Homo sapien
gagtgtatgtggatagagtctataa

SEQ ID NO: 4351517 - DNA, 25 bp, Homo sapien
agtgtatgtggatagagtctataat

SEQ ID NO: 4351518 - DNA, 25 bp, Homo sapien
tgagtgtatgtggatagagtctata

SEQ ID NO: 4351519 - DNA, 25 bp, Homo sapien
tgaagctcgggcaaatgaaacaggt

SEQ ID NO: 4351520 - DNA, 25 bp, Homo sapien
tgtgattagcctcatcattgtagac

SEQ ID NO: 4351521 - DNA, 25 bp, Homo sapien
catttggcgtgctctataaggctca

SEQ ID NO: 4351522 - DNA, 25 bp, Homo sapien
gaaacaggtaggtgtaattgctgca

SEQ ID NO: 4351523 - DNA, 25 bp, Homo sapien
tataccctttagcaatcacacccct

SEQ ID NO: 4351524 - DNA, 25 bp, Homo sapien
gcgactgtcaccacaattaatttca

SEQ ID NO: 4351525 - DNA, 25 bp, Homo sapien
tgactgtcttctctcaattagtaca

SEQ ID NO: 4351526 - DNA, 25 bp, Homo sapien
gttctattgtatgggtaagaccaca

SEQ ID NO: 4351527 - DNA, 25 bp, Homo sapien
tatgcacaacttattaacacacgta

SEQ ID NO: 4351528 - DNA, 25 bp, Homo sapien
acattgatacctgctggtctgggaa

SEQ ID NO: 4351529 - DNA, 25 bp, Homo sapien
aaaccatggttctgaaactttagca

SEQ ID NO: 4351530 - DNA, 25 bp, Homo sapien
tctggggagggatccaataatttgc

SEQ ID NO: 4351531 - DNA, 25 bp, Homo sapien
ttgggtccaaattttggctctggga

SEQ ID NO: 4351532 - DNA, 25 bp, Homo sapien
aatcggtgctcttcacgaccatacc

SEQ ID NO: 4351533 - DNA, 25 bp, Homo sapien
gcaaagcagttgcaattctccttct

SEQ ID NO: 4351534 - DNA, 25 bp, Homo sapien
ctgggatttcaaaactaggctttca

SEQ ID NO: 4351535 - DNA, 25 bp, Homo sapien
gaagctggtggctccagaggaagct

SEQ ID NO: 4351536 - DNA, 25 bp, Homo sapien
gagtgtctctgatgccccacaagaa

SEQ ID NO: 4351537 - DNA, 25 bp, Homo sapien
tattcctagggccagttctggccac

SEQ ID NO: 4351538 - DNA, 25 bp, Homo sapien
gaccctgccttggacgactgttctt

SEQ ID NO: 4351539 - DNA, 25 bp, Homo sapien
agggagccagagagaagatccccag

SEQ ID NO: 4351540 - DNA, 25 bp, Homo sapien
ctagggagccagagagaagatcccc

SEQ ID NO: 4351541 - DNA, 25 bp, Homo sapien
tagggagccagagagaagatcccca

SEQ ID NO: 4351542 - DNA, 25 bp, Homo sapien
gggagccagagagaagatccccagc

SEQ ID NO: 4351543 - DNA, 25 bp, Homo sapien
catttgccacttgatgagcagtgta

SEQ ID NO: 4351544 - DNA, 25 bp, Homo sapien
gccacttgatgagcagtgtagggaa

SEQ ID NO: 4351545 - DNA, 25 bp, Homo sapien
cttgatgagcagtgtagggaagaaa

SEQ ID NO: 4351546 - DNA, 25 bp, Homo sapien
tttgccacttgatgagcagtgtagg

SEQ ID NO: 4351547 - DNA, 25 bp, Homo sapien
ctgatccatagagttgctttttgca

SEQ ID NO: 4351548 - DNA, 25 bp, Homo sapien
agttgctttttgcaaccctctgcat

SEQ ID NO: 4351549 - DNA, 25 bp, Homo sapien
gatccatagagttgctttttgcaac

SEQ ID NO: 4351550 - DNA, 25 bp, Homo sapien
agagttgctttttgcaaccctctgc

SEQ ID NO: 4351551 - DNA, 25 bp, Homo sapien
tacaagtgttgggatttggctgttt

SEQ ID NO: 4351552 - DNA, 25 bp, Homo sapien
tagggtccaggctgacttgataaag

SEQ ID NO: 4351553 - DNA, 25 bp, Homo sapien
gcagaggcatccaaggtcaaggtgg

SEQ ID NO: 4351554 - DNA, 25 bp, Homo sapien
tcaaggtgggtgctatgagagcatt

SEQ ID NO: 4351555 - DNA, 25 bp, Homo sapien
tctcctaggtcctcagctctcaagt

SEQ ID NO: 4351556 - DNA, 25 bp, Homo sapien
aggtcctctcctaggtcctcagctc

SEQ ID NO: 4351557 - DNA, 25 bp, Homo sapien
gaacaggtcctctcctaggtcctca

SEQ ID NO: 4351558 - DNA, 25 bp, Homo sapien
taggagaacaggtcctctcctaggt

SEQ ID NO: 4351559 - DNA, 25 bp, Homo sapien
taagccttatccagtatccttgccc

SEQ ID NO: 4351560 - DNA, 25 bp, Homo sapien
ctaagccttatccagtatccttgcc

SEQ ID NO: 4351561 - DNA, 25 bp, Homo sapien
ttttgtgcccctcattggcctgtgg

SEQ ID NO: 4351562 - DNA, 25 bp, Homo sapien
tttttgtgcccctcattggcctgtg

SEQ ID NO: 4351563 - DNA, 25 bp, Homo sapien
aatttttgtgcccctcattggcctg

SEQ ID NO: 4351564 - DNA, 25 bp, Homo sapien
tttttcagcctggtaatctttactc

SEQ ID NO: 4351565 - DNA, 25 bp, Homo sapien
ttctctctatcttgcatttctctcc

SEQ ID NO: 4351566 - DNA, 25 bp, Homo sapien
tttgttctaggtggctctgcctcct

SEQ ID NO: 4351567 - DNA, 25 bp, Homo sapien
cctttcccaaggcattaagcctcat

SEQ ID NO: 4351568 - DNA, 25 bp, Homo sapien
tcctttcccaaggcattaagcctca

SEQ ID NO: 4351569 - DNA, 25 bp, Homo sapien
catctgcagacatctttgttctagg

SEQ ID NO: 4351570 - DNA, 25 bp, Homo sapien
actttcaggtatcttgggatcattt

SEQ ID NO: 4351571 - DNA, 25 bp, Homo sapien
tataacttgtagctgcatctccact

SEQ ID NO: 4351572 - DNA, 25 bp, Homo sapien
cttgtataacttgtagctgcatctc

SEQ ID NO: 4351573 - DNA, 25 bp, Homo sapien
gcatctccactttcaggtatcttgg

SEQ ID NO: 4351574 - DNA, 25 bp, Homo sapien
tgggagctgattatatgcttctgat

SEQ ID NO: 4351575 - DNA, 25 bp, Homo sapien
ggaaccactcagattttgacccata

SEQ ID NO: 4351576 - DNA, 25 bp, Homo sapien
taaggatagctctttcatcaaattg

SEQ ID NO: 4351577 - DNA, 25 bp, Homo sapien
tcaagttggcggaactgggagctga

SEQ ID NO: 4351578 - DNA, 25 bp, Homo sapien
aatccagtggcctagtactctccat

SEQ ID NO: 4351579 - DNA, 25 bp, Homo sapien
tcgctaaagtctaaatccagtggcc

SEQ ID NO: 4351580 - DNA, 25 bp, Homo sapien
acttgtcgctaaagtctaaatccag

SEQ ID NO: 4351581 - DNA, 25 bp, Homo sapien
cttccattagacttgtcgctaaagt

SEQ ID NO: 4351582 - DNA, 25 bp, Homo sapien
tgggaattggagagagggttgcttc

SEQ ID NO: 4351583 - DNA, 25 bp, Homo sapien
gaattggagagagggttgcttcctt

SEQ ID NO: 4351584 - DNA, 25 bp, Homo sapien
gtaaaggtgatggtaagaaaggctc

SEQ ID NO: 4351585 - DNA, 25 bp, Homo sapien
ctgatttccatcaggtggggttgga

SEQ ID NO: 4351586 - DNA, 25 bp, Homo sapien
acttgcatatcttctgttgctgagt

SEQ ID NO: 4351587 - DNA, 25 bp, Homo sapien
agactgtgaaaggacaacttgcata

SEQ ID NO: 4351588 - DNA, 25 bp, Homo sapien
cttgcatatcttctgttgctgagtt

SEQ ID NO: 4351589 - DNA, 25 bp, Homo sapien
ccctggtctggtttggtctatcaca

SEQ ID NO: 4351590 - DNA, 25 bp, Homo sapien
gatctgtatcttgtccaggactgta

SEQ ID NO: 4351591 - DNA, 25 bp, Homo sapien
tgttgagctgcctcgccatagatct

SEQ ID NO: 4351592 - DNA, 25 bp, Homo sapien
tttgtctgttcgcatacctctggaa

SEQ ID NO: 4351593 - DNA, 25 bp, Homo sapien
tgctctacaacaatgcaatgccctg

SEQ ID NO: 4351594 - DNA, 25 bp, Homo sapien
caatgccctgacatttggttgaagg

SEQ ID NO: 4351595 - DNA, 25 bp, Homo sapien
caaccctcagagagttctcatcagc

SEQ ID NO: 4351596 - DNA, 25 bp, Homo sapien
tggttctgtagaatacccgagggta

SEQ ID NO: 4351597 - DNA, 25 bp, Homo sapien
cagaaacgtgtgaccctctaagacc

SEQ ID NO: 4351598 - DNA, 25 bp, Homo sapien
gaggctgtgatagcacagaaacgtg

SEQ ID NO: 4351599 - DNA, 25 bp, Homo sapien
tgatagcacagaaacgtgtgaccct

SEQ ID NO: 4351600 - DNA, 25 bp, Homo sapien
cgtgtgaccctctaagaccaagttg

SEQ ID NO: 4351601 - DNA, 25 bp, Homo sapien
tttgccatgaccttattgacacccc

SEQ ID NO: 4351602 - DNA, 25 bp, Homo sapien
tcctgggggccagattctactccta

SEQ ID NO: 4351603 - DNA, 25 bp, Homo sapien
ttttgccatgaccttattgacaccc

SEQ ID NO: 4351604 - DNA, 25 bp, Homo sapien
gggggccagattctactcctagctt

SEQ ID NO: 4351605 - DNA, 25 bp, Homo sapien
gcattactaaaggtgtcgatgattt

SEQ ID NO: 4351606 - DNA, 25 bp, Homo sapien
ctaaaggtgtcgatgattttatctt

SEQ ID NO: 4351607 - DNA, 25 bp, Homo sapien
catgcattactaaaggtgtcgatga

SEQ ID NO: 4351608 - DNA, 25 bp, Homo sapien
gatgcatgcattactaaaggtgtcg

SEQ ID NO: 4351609 - DNA, 25 bp, Homo sapien
taaagaaagccatacacttattaac

SEQ ID NO: 4351610 - DNA, 25 bp, Homo sapien
ttaaagaaagccatacacttattaa

SEQ ID NO: 4351611 - DNA, 25 bp, Homo sapien
cttaaagaaagccatacacttatta

SEQ ID NO: 4351612 - DNA, 25 bp, Homo sapien
attgatttttggcatgctttgtgga

SEQ ID NO: 4351613 - DNA, 25 bp, Homo sapien
gctttgtggataaatgttgttgaat

SEQ ID NO: 4351614 - DNA, 25 bp, Homo sapien
catgctttgtggataaatgttgttg

SEQ ID NO: 4351615 - DNA, 25 bp, Homo sapien
tttggcatgctttgtggataaatgt

SEQ ID NO: 4351616 - DNA, 25 bp, Homo sapien
ttaactgttactggcctgtgcttct

SEQ ID NO: 4351617 - DNA, 25 bp, Homo sapien
ggcttgtctctgaataatggctaca

SEQ ID NO: 4351618 - DNA, 25 bp, Homo sapien
cctgtgtttgattcaggaccatcaa

SEQ ID NO: 4351619 - DNA, 25 bp, Homo sapien
ggaccatcaaaggtctccaaagatt

SEQ ID NO: 4351620 - DNA, 25 bp, Homo sapien
tttgaagtcagacagcatgatgcct

SEQ ID NO: 4351621 - DNA, 25 bp, Homo sapien
cagatggttgtagatatacagcgtt

SEQ ID NO: 4351622 - DNA, 25 bp, Homo sapien
aagtcagacagcatgatgcctccag

SEQ ID NO: 4351623 - DNA, 25 bp, Homo sapien
gatggttgtagatatacagcgttat

SEQ ID NO: 4351624 - DNA, 25 bp, Homo sapien
tgaaatgttggctacacagatcggg

SEQ ID NO: 4351625 - DNA, 25 bp, Homo sapien
tggctacacagatcgggacacagca

SEQ ID NO: 4351626 - DNA, 25 bp, Homo sapien
ctacacagatcgggacacagcagag

SEQ ID NO: 4351627 - DNA, 25 bp, Homo sapien
tgttggctacacagatcgggacaca

SEQ ID NO: 4351628 - DNA, 25 bp, Homo sapien
tatgcatggattatcttctgcttct

SEQ ID NO: 4351629 - DNA, 25 bp, Homo sapien
gactgtgcaggtccatttatgcatg

SEQ ID NO: 4351630 - DNA, 25 bp, Homo sapien
catttatgcatggattatcttctgc

SEQ ID NO: 4351631 - DNA, 25 bp, Homo sapien
agaacacagctttggactgtgcagg

SEQ ID NO: 4351632 - DNA, 25 bp, Homo sapien
gacccaggttctaatccatccaaca

SEQ ID NO: 4351633 - DNA, 25 bp, Homo sapien
tccaacactcaggatctacgttcat

SEQ ID NO: 4351634 - DNA, 25 bp, Homo sapien
ccaggatgagggtccagacccaggt

SEQ ID NO: 4351635 - DNA, 25 bp, Homo sapien
catccaacaccatccaacactcagg

SEQ ID NO: 4351636 - DNA, 25 bp, Homo sapien
cagtccctcctttggtcataaccaa

SEQ ID NO: 4351637 - DNA, 25 bp, Homo sapien
tgtaggtgattctggtacacactca

SEQ ID NO: 4351638 - DNA, 25 bp, Homo sapien
gtttgaaacccactgacatagtgtt

SEQ ID NO: 4351639 - DNA, 25 bp, Homo sapien
gcattagcagtatctagaaacttgt

SEQ ID NO: 4351640 - DNA, 25 bp, Homo sapien
taagagcttggctacgctgaacgac

SEQ ID NO: 4351641 - DNA, 25 bp, Homo sapien
cttaagaatcttgaaccacggcggt

SEQ ID NO: 4351642 - DNA, 25 bp, Homo sapien
ccacggcggtacactactgggtaat

SEQ ID NO: 4351643 - DNA, 25 bp, Homo sapien
gcgatgccatctctgatagggacaa

SEQ ID NO: 4351644 - DNA, 25 bp, Homo sapien
ttcaccccagagttgcagcgaaatt

SEQ ID NO: 4351645 - DNA, 25 bp, Homo sapien
gctgcccgggaggttgctctgccgg

SEQ ID NO: 4351646 - DNA, 25 bp, Homo sapien
tgcagcgaaattgaacgctttgagc

SEQ ID NO: 4351647 - DNA, 25 bp, Homo sapien
tggacctggcggttttcaccccaga

SEQ ID NO: 4351648 - DNA, 25 bp, Homo sapien
ataaaagcccactagtgttgctttc

SEQ ID NO: 4351649 - DNA, 25 bp, Homo sapien
aataaaagcccactagtgttgcttt

SEQ ID NO: 4351650 - DNA, 25 bp, Homo sapien
taaaagcccactagtgttgctttca

SEQ ID NO: 4351651 - DNA, 25 bp, Homo sapien
aaaagcccactagtgttgctttcaa

SEQ ID NO: 4351652 - DNA, 25 bp, Homo sapien
tgagagggatctgagtaccttcctt

SEQ ID NO: 4351653 - DNA, 25 bp, Homo sapien
gatctgtgtcacattgtgtaagtat

SEQ ID NO: 4351654 - DNA, 25 bp, Homo sapien
gatctgagtaccttccttaggacac

SEQ ID NO: 4351655 - DNA, 25 bp, Homo sapien
tataagagccttcatattgagaggg

SEQ ID NO: 4351656 - DNA, 25 bp, Homo sapien
gattttgaaaggctatgtcagccct

SEQ ID NO: 4351657 - DNA, 25 bp, Homo sapien
cctggaggagctgaactatggagct

SEQ ID NO: 4351658 - DNA, 25 bp, Homo sapien
cagcagtgtgtagcctctagtcaga

SEQ ID NO: 4351659 - DNA, 25 bp, Homo sapien
tcagccctcaaacgaaatctcaaag

SEQ ID NO: 4351660 - DNA, 25 bp, Homo sapien
tctgacataatcaaatccgcagcct

SEQ ID NO: 4351661 - DNA, 25 bp, Homo sapien
tatgccctgacccttcgtggtgagg

SEQ ID NO: 4351662 - DNA, 25 bp, Homo sapien
gaggcttgtttgtgcaaggtgtctc

SEQ ID NO: 4351663 - DNA, 25 bp, Homo sapien
aaagtgccatgggtacatctctgac

SEQ ID NO: 4351664 - DNA, 25 bp, Homo sapien
gctctctcctggtccaaacagctgt

SEQ ID NO: 4351665 - DNA, 25 bp, Homo sapien
tcctggtccaaacagctgtgattta

SEQ ID NO: 4351666 - DNA, 25 bp, Homo sapien
tttgctttagtaagggctatgggcc

SEQ ID NO: 4351667 - DNA, 25 bp, Homo sapien
acagctgtgatttaagggtatttgc

SEQ ID NO: 4351668 - DNA, 25 bp, Homo sapien
ctagaagaaggtaatggtggggtag

SEQ ID NO: 4351669 - DNA, 25 bp, Homo sapien
agaaggtaatggtggggtaggctga

SEQ ID NO: 4351670 - DNA, 25 bp, Homo sapien
tgagaccccactggggtagagcagt

SEQ ID NO: 4351671 - DNA, 25 bp, Homo sapien
tggggtaggctgagaccccactggg

SEQ ID NO: 4351672 - DNA, 25 bp, Homo sapien
agaccttccttcacaacttctctct

SEQ ID NO: 4351673 - DNA, 25 bp, Homo sapien
tcttgtccctgaagttttccttcat

SEQ ID NO: 4351674 - DNA, 25 bp, Homo sapien
ctctcttgtccctgaagttttcctt

SEQ ID NO: 4351675 - DNA, 25 bp, Homo sapien
aacttctctcttgtccctgaagttt

SEQ ID NO: 4351676 - DNA, 25 bp, Homo sapien
ggtgaaggatggatcttgtgaaatc

SEQ ID NO: 4351677 - DNA, 25 bp, Homo sapien
tttcagtgagttgtctgacccagga

SEQ ID NO: 4351678 - DNA, 25 bp, Homo sapien
cacccatttcagtgagttgtctgac

SEQ ID NO: 4351679 - DNA, 25 bp, Homo sapien
ggaacacccatttcagtgagttgtc

SEQ ID NO: 4351680 - DNA, 25 bp, Homo sapien
gctgtatgctaaagtgagctgccta

SEQ ID NO: 4351681 - DNA, 25 bp, Homo sapien
cctaagcttccctacacatgaaaaa

SEQ ID NO: 4351682 - DNA, 25 bp, Homo sapien
ctgcctaagcttccctacacatgaa

SEQ ID NO: 4351683 - DNA, 25 bp, Homo sapien
tgctgtatgctaaagtgagctgcct

SEQ ID NO: 4351684 - DNA, 25 bp, Homo sapien
ttccactggcttggggttaaccaca

SEQ ID NO: 4351685 - DNA, 25 bp, Homo sapien
cactggcttggggttaaccacagag

SEQ ID NO: 4351686 - DNA, 25 bp, Homo sapien
tggggttaaccacagagatgtcttt

SEQ ID NO: 4351687 - DNA, 25 bp, Homo sapien
gcttggggttaaccacagagatgtc

SEQ ID NO: 4351688 - DNA, 25 bp, Homo sapien
cctggcgttgttggttagcttgctc

SEQ ID NO: 4351689 - DNA, 25 bp, Homo sapien
tcgggtatcttgagaacaaggactg

SEQ ID NO: 4351690 - DNA, 25 bp, Homo sapien
cctaacagggcttcgggtatcttga

SEQ ID NO: 4351691 - DNA, 25 bp, Homo sapien
tctggaccttgtctgcctaacaggg

SEQ ID NO: 4351692 - DNA, 25 bp, Homo sapien
cttgttgtcacatagccagagagta

SEQ ID NO: 4351693 - DNA, 25 bp, Homo sapien
catctgaaaggcatgttcgtgacat

SEQ ID NO: 4351694 - DNA, 25 bp, Homo sapien
ccagagagtattgtgaatccattgc

SEQ ID NO: 4351695 - DNA, 25 bp, Homo sapien
gatctgtgttatatcacagggccag

SEQ ID NO: 4351696 - DNA, 25 bp, Homo sapien
tgtataaaatctcacatttgtgcat

SEQ ID NO: 4351697 - DNA, 25 bp, Homo sapien
ttaaagctgaatactattctatata

SEQ ID NO: 4351698 - DNA, 25 bp, Homo sapien
gttcacgccattctatcgcccagga

SEQ ID NO: 4351699 - DNA, 25 bp, Homo sapien
gggactatagtcacctgccactgcc

SEQ ID NO: 4351700 - DNA, 25 bp, Homo sapien
cttggatactgagagcaaggttcat

SEQ ID NO: 4351701 - DNA, 25 bp, Homo sapien
ttggatactgagagcaaggttcatt

SEQ ID NO: 4351702 - DNA, 25 bp, Homo sapien
ccttggatactgagagcaaggttca

SEQ ID NO: 4351703 - DNA, 25 bp, Homo sapien
ctgtgtggtctaccctttgccaagg

SEQ ID NO: 4351704 - DNA, 25 bp, Homo sapien
tgtggtctaccctttgccaaggaga

SEQ ID NO: 4351705 - DNA, 25 bp, Homo sapien
tctaccctttgccaaggagatgtca

SEQ ID NO: 4351706 - DNA, 25 bp, Homo sapien
tggtctaccctttgccaaggagatg

SEQ ID NO: 4351707 - DNA, 25 bp, Homo sapien
ggatgctaaggtgagcagcagcatc

SEQ ID NO: 4351708 - DNA, 25 bp, Homo sapien
gtggaacagactccagggtctgcag

SEQ ID NO: 4351709 - DNA, 25 bp, Homo sapien
taacagatgttagggccgaatggtg

SEQ ID NO: 4351710 - DNA, 25 bp, Homo sapien
tcagtttccatagagctgggatgct

SEQ ID NO: 4351711 - DNA, 25 bp, Homo sapien
tgtgtccctgctaccagtaagagag

SEQ ID NO: 4351712 - DNA, 25 bp, Homo sapien
tctcgtttctcgttagccagaattg

SEQ ID NO: 4351713 - DNA, 25 bp, Homo sapien
gtgtccctgctaccagtaagagagg

SEQ ID NO: 4351714 - DNA, 25 bp, Homo sapien
ggtagacttctcgtttctcgttagc

SEQ ID NO: 4351715 - DNA, 25 bp, Homo sapien
ctgagaaattaatatttgggttagg

SEQ ID NO: 4351716 - DNA, 25 bp, Homo sapien
tgtccctagccatccagcagtcgtt

SEQ ID NO: 4351717 - DNA, 25 bp, Homo sapien
agctcactacttatgcttctgcagg

SEQ ID NO: 4351718 - DNA, 25 bp, Homo sapien
gcgagctcagccaagagagaagttc

SEQ ID NO: 4351719 - DNA, 25 bp, Homo sapien
cagcagtcgttctcacagtggccat

SEQ ID NO: 4351720 - DNA, 25 bp, Homo sapien
aaactagagagagattcaaggagct

SEQ ID NO: 4351721 - DNA, 25 bp, Homo sapien
ggagctgggtcatctctagctgaag

SEQ ID NO: 4351722 - DNA, 25 bp, Homo sapien
aactagagagagattcaaggagctg

SEQ ID NO: 4351723 - DNA, 25 bp, Homo sapien
ctagctgaagctggctcatgtattt

SEQ ID NO: 4351724 - DNA, 25 bp, Homo sapien
gaattcctctcaagtgttgtgggat

SEQ ID NO: 4351725 - DNA, 25 bp, Homo sapien
tctcaagtgttgtgggattaggaac

SEQ ID NO: 4351726 - DNA, 25 bp, Homo sapien
gagaaggagctagcagaattcctct

SEQ ID NO: 4351727 - DNA, 25 bp, Homo sapien
gattaggaactgttagaacttgaag

SEQ ID NO: 4351728 - DNA, 25 bp, Homo sapien
gaccttcggtaatccacctgccaca

SEQ ID NO: 4351729 - DNA, 25 bp, Homo sapien
tgaccttcggtaatccacctgccac

SEQ ID NO: 4351730 - DNA, 25 bp, Homo sapien
ctgaccttcggtaatccacctgcca

SEQ ID NO: 4351731 - DNA, 25 bp, Homo sapien
gcacaggtccatatcagttgcacca

SEQ ID NO: 4351732 - DNA, 25 bp, Homo sapien
tcattgagttagaacacccaggcag

SEQ ID NO: 4351733 - DNA, 25 bp, Homo sapien
catgactgtgccttgagtccagcag

SEQ ID NO: 4351734 - DNA, 25 bp, Homo sapien
caagttctcagtgctacatgtggtc

SEQ ID NO: 4351735 - DNA, 25 bp, Homo sapien
gatgcccagatagccagggtgccta

SEQ ID NO: 4351736 - DNA, 25 bp, Homo sapien
taagatgccacctgtctcagaggcc

SEQ ID NO: 4351737 - DNA, 25 bp, Homo sapien
tgaggagcagcatacttcacaagag

SEQ ID NO: 4351738 - DNA, 25 bp, Homo sapien
gaataatagaagtgtcagcctgcct

SEQ ID NO: 4351739 - DNA, 25 bp, Homo sapien
tataacttcagccagtgaactgctc

SEQ ID NO: 4351740 - DNA, 25 bp, Homo sapien
agaatcccagagcttcggtaggcac

SEQ ID NO: 4351741 - DNA, 25 bp, Homo sapien
ggtaggcaccgcctttgtatttgga

SEQ ID NO: 4351742 - DNA, 25 bp, Homo sapien
tgaagacagttgtgccatctgattg

SEQ ID NO: 4351743 - DNA, 25 bp, Homo sapien
tcctgctgctgattaaaagctgcta

SEQ ID NO: 4351744 - DNA, 25 bp, Homo sapien
gctgctgattaaaagctgctacctt

SEQ ID NO: 4351745 - DNA, 25 bp, Homo sapien
agctgctacctttgcgtggtcactg

SEQ ID NO: 4351746 - DNA, 25 bp, Homo sapien
gctacctttgcgtggtcactgaggg

SEQ ID NO: 4351747 - DNA, 25 bp, Homo sapien
aaggccagaaaggaagcatgtataa

SEQ ID NO: 4351748 - DNA, 25 bp, Homo sapien
gccagaaaggaagcatgtataatca

SEQ ID NO: 4351749 - DNA, 25 bp, Homo sapien
gagggtagaggtaggaaaggccaga

SEQ ID NO: 4351750 - DNA, 25 bp, Homo sapien
tagaggtaggaaaggccagaaagga

SEQ ID NO: 4351751 - DNA, 25 bp, Homo sapien
aaagtgcatcaagtgatctgtaagg

SEQ ID NO: 4351752 - DNA, 25 bp, Homo sapien
caagtgatctgtaaggttgtttcaa

SEQ ID NO: 4351753 - DNA, 25 bp, Homo sapien
tagtctctgattctagaattcttaa

SEQ ID NO: 4351754 - DNA, 25 bp, Homo sapien
ctatataaagtgcatcaagtgatct

SEQ ID NO: 4351755 - DNA, 25 bp, Homo sapien
tagagacgacaggaggtctttattg

SEQ ID NO: 4351756 - DNA, 25 bp, Homo sapien
ttatttcttgggtagagacgacagg

SEQ ID NO: 4351757 - DNA, 25 bp, Homo sapien
caaaatgcctgcaaggacactgcct

SEQ ID NO: 4351758 - DNA, 25 bp, Homo sapien
aatgcctgcaaggacactgccttcc

SEQ ID NO: 4351759 - DNA, 25 bp, Homo sapien
acactgagctatccctgtttggaag

SEQ ID NO: 4351760 - DNA, 25 bp, Homo sapien
gtataacactgagctatccctgttt

SEQ ID NO: 4351761 - DNA, 25 bp, Homo sapien
aaggaggggttgctttatgtatctc

SEQ ID NO: 4351762 - DNA, 25 bp, Homo sapien
gagctatccctgtttggaagaagcc

SEQ ID NO: 4351763 - DNA, 25 bp, Homo sapien
cattcattgtgttgtccggtgcctc

SEQ ID NO: 4351764 - DNA, 25 bp, Homo sapien
tatttggctctttgtagaaatacct

SEQ ID NO: 4351765 - DNA, 25 bp, Homo sapien
ggctgtatgtgaaacattcctatac

SEQ ID NO: 4351766 - DNA, 25 bp, Homo sapien
catagttctcctatatcaaggcaga

SEQ ID NO: 4351767 - DNA, 25 bp, Homo sapien
gacttcaaagggtccctctccctga

SEQ ID NO: 4351768 - DNA, 25 bp, Homo sapien
gtaagtactcagcaggactgacgta

SEQ ID NO: 4351769 - DNA, 25 bp, Homo sapien
tcagcaggactgacgtaggaagcag

SEQ ID NO: 4351770 - DNA, 25 bp, Homo sapien
tactcagcaggactgacgtaggaag

SEQ ID NO: 4351771 - DNA, 25 bp, Homo sapien
gcttctgtaaacagcgtcattccca

SEQ ID NO: 4351772 - DNA, 25 bp, Homo sapien
gatggggctttatgtgtcccagaga

SEQ ID NO: 4351773 - DNA, 25 bp, Homo sapien
tttatgtgtcccagagagagtcagc

SEQ ID NO: 4351774 - DNA, 25 bp, Homo sapien
tggcttcggcttctgtaaacagcgt

SEQ ID NO: 4351775 - DNA, 25 bp, Homo sapien
aatttgctctacttcgggccatccc

SEQ ID NO: 4351776 - DNA, 25 bp, Homo sapien
gggcctctcgtaactccacagtttc

SEQ ID NO: 4351777 - DNA, 25 bp, Homo sapien
cagacccctcaaaggcaggaattga

SEQ ID NO: 4351778 - DNA, 25 bp, Homo sapien
catcccttggttggctaaggcagac

SEQ ID NO: 4351779 - DNA, 25 bp, Homo sapien
ctggaaatgatgaatcccagctccc

SEQ ID NO: 4351780 - DNA, 25 bp, Homo sapien
acatccctggaaatgatgaatccca

SEQ ID NO: 4351781 - DNA, 25 bp, Homo sapien
tttgcataggataggagcctgaaag

SEQ ID NO: 4351782 - DNA, 25 bp, Homo sapien
cttgtcctctttgcataggatagga

SEQ ID NO: 4351783 - DNA, 25 bp, Homo sapien
tcggatgcctttagaacataatgtg

SEQ ID NO: 4351784 - DNA, 25 bp, Homo sapien
tgtttgctcaaatacgctagtggta

SEQ ID NO: 4351785 - DNA, 25 bp, Homo sapien
gctagtggtacgtgcatttgcagca

SEQ ID NO: 4351786 - DNA, 25 bp, Homo sapien
cctgttccctgtgatcatgggtgta

SEQ ID NO: 4351787 - DNA, 25 bp, Homo sapien
aataaaggtttcactgctaagctcc

SEQ ID NO: 4351788 - DNA, 25 bp, Homo sapien
cattgccagggtttcggttgatctc

SEQ ID NO: 4351789 - DNA, 25 bp, Homo sapien
aaagtgatggtttccttgcccagtc

SEQ ID NO: 4351790 - DNA, 25 bp, Homo sapien
ggctctcctttgatcctaccattgt

SEQ ID NO: 4351791 - DNA, 25 bp, Homo sapien
ttgcccagtcctcattaggcccatt

SEQ ID NO: 4351792 - DNA, 25 bp, Homo sapien
cagaggagctcatgaagattatgcc

SEQ ID NO: 4351793 - DNA, 25 bp, Homo sapien
gttgggccaaaattgtcacaggtcc

SEQ ID NO: 4351794 - DNA, 25 bp, Homo sapien
ggttttccagctgatgttgggccaa

SEQ ID NO: 4351795 - DNA, 25 bp, Homo sapien
gattatgccctcatcatgcttaagg

SEQ ID NO: 4351796 - DNA, 25 bp, Homo sapien
ggtgctttgtagcatggaatccatc

SEQ ID NO: 4351797 - DNA, 25 bp, Homo sapien
atgattgtttgggatctgctggtgc

SEQ ID NO: 4351798 - DNA, 25 bp, Homo sapien
ggaatccatcctggtaattggtgga

SEQ ID NO: 4351799 - DNA, 25 bp, Homo sapien
tagtccctcagatgtctatgattgt

SEQ ID NO: 4351800 - DNA, 25 bp, Homo sapien
agatgtgtgaatcaaaagtagagaa

SEQ ID NO: 4351801 - DNA, 25 bp, Homo sapien
caataaaggaccccttagcttggca

SEQ ID NO: 4351802 - DNA, 25 bp, Homo sapien
ttttggctatagataaggacacaga

SEQ ID NO: 4351803 - DNA, 25 bp, Homo sapien
tatgcccctgctataaattgtcttt

SEQ ID NO: 4351804 - DNA, 25 bp, Homo sapien
gagctaacctttgacgtggcataaa

SEQ ID NO: 4351805 - DNA, 25 bp, Homo sapien
agttaatacgatagctcctcctggg

SEQ ID NO: 4351806 - DNA, 25 bp, Homo sapien
tatagtgaagggatctgacacacgc

SEQ ID NO: 4351807 - DNA, 25 bp, Homo sapien
aaaatccgtgaggttcgagctgagc

SEQ ID NO: 4351808 - DNA, 25 bp, Homo sapien
gaagaggataggaaacacagtgctg

SEQ ID NO: 4351809 - DNA, 25 bp, Homo sapien
tgagagtgcaacaattgtgggacag

SEQ ID NO: 4351810 - DNA, 25 bp, Homo sapien
tgaatcaccgatggtacccttccct

SEQ ID NO: 4351811 - DNA, 25 bp, Homo sapien
tgcacggcacggagaaagaatctgt

SEQ ID NO: 4351812 - DNA, 25 bp, Homo sapien
gactcttgcattatgccaatatact

SEQ ID NO: 4351813 - DNA, 25 bp, Homo sapien
cttcaggcgggttaaagctgggaga

SEQ ID NO: 4351814 - DNA, 25 bp, Homo sapien
actcttgcattatgccaatatactt

SEQ ID NO: 4351815 - DNA, 25 bp, Homo sapien
ttgactcttgcattatgccaatata

SEQ ID NO: 4351816 - DNA, 25 bp, Homo sapien
caaagaacttgtaaacaagtgttca

SEQ ID NO: 4351817 - DNA, 25 bp, Homo sapien
aaagaacttgtaaacaagtgttcat

SEQ ID NO: 4351818 - DNA, 25 bp, Homo sapien
cacaaagaacttgtaaacaagtgtt

SEQ ID NO: 4351819 - DNA, 25 bp, Homo sapien
ctcacaaagaacttgtaaacaagtg

SEQ ID NO: 4351820 - DNA, 25 bp, Homo sapien
gtccctctgttttctggaaccttgc

SEQ ID NO: 4351821 - DNA, 25 bp, Homo sapien
gccaattccaagtgtagccccaaag

SEQ ID NO: 4351822 - DNA, 25 bp, Homo sapien
tgattgaaggttcccactcaccatg

SEQ ID NO: 4351823 - DNA, 25 bp, Homo sapien
tgcgctgtctctgatgatagtccct

SEQ ID NO: 4351824 - DNA, 25 bp, Homo sapien
tgggaagattcacatagctggaggc

SEQ ID NO: 4351825 - DNA, 25 bp, Homo sapien
catggaataacttctgcatagtctc

SEQ ID NO: 4351826 - DNA, 25 bp, Homo sapien
tccatctcgtgtggtctctcaagca

SEQ ID NO: 4351827 - DNA, 25 bp, Homo sapien
cagctgggactcctaagcatctctc

SEQ ID NO: 4351828 - DNA, 25 bp, Homo sapien
ttagattaaaaaggtgcagagggca

SEQ ID NO: 4351829 - DNA, 25 bp, Homo sapien
tagattaaaaaggtgcagagggcag

SEQ ID NO: 4351830 - DNA, 25 bp, Homo sapien
acccagccgggccagagggtgttgt

SEQ ID NO: 4351831 - DNA, 25 bp, Homo sapien
gggccagagggtgttgtttccagaa

SEQ ID NO: 4351832 - DNA, 25 bp, Homo sapien
ccttttacaggaaccagtcattgga

SEQ ID NO: 4351833 - DNA, 25 bp, Homo sapien
caggaaaggcgtgtaaccttgagca

SEQ ID NO: 4351834 - DNA, 25 bp, Homo sapien
tagcagctccggaatgagaacctca

SEQ ID NO: 4351835 - DNA, 25 bp, Homo sapien
tcccaaattgaagcaaggcagctct

SEQ ID NO: 4351836 - DNA, 25 bp, Homo sapien
gagctagacagaatcccaaccctgc

SEQ ID NO: 4351837 - DNA, 25 bp, Homo sapien
gacatcatgataaatggaaagagct

SEQ ID NO: 4351838 - DNA, 25 bp, Homo sapien
ggagggcacaggaaatacacatagg

SEQ ID NO: 4351839 - DNA, 25 bp, Homo sapien
cgtacctgggtttgttaagagctat

SEQ ID NO: 4351840 - DNA, 25 bp, Homo sapien
tgtgcaatatgctccacccaatgtg

SEQ ID NO: 4351841 - DNA, 25 bp, Homo sapien
cccaatgtgcttctgaattataggc

SEQ ID NO: 4351842 - DNA, 25 bp, Homo sapien
gttctttgtatgttgagcttgtctc

SEQ ID NO: 4351843 - DNA, 25 bp, Homo sapien
ggttccgtgacaagcttctacatgt

SEQ ID NO: 4351844 - DNA, 25 bp, Homo sapien
agggtctctgcagcagatcaacagg

SEQ ID NO: 4351845 - DNA, 25 bp, Homo sapien
agcagatcaacaggagttaggttcc

SEQ ID NO: 4351846 - DNA, 25 bp, Homo sapien
catggcgggagcaattgtggaatga

SEQ ID NO: 4351847 - DNA, 25 bp, Homo sapien
caggagttaggttccagctcagctt

SEQ ID NO: 4351848 - DNA, 25 bp, Homo sapien
ctttcatgtccggtgcctggctggg

SEQ ID NO: 4351849 - DNA, 25 bp, Homo sapien
tgttactctctgcaaggtctcttta

SEQ ID NO: 4351850 - DNA, 25 bp, Homo sapien
tctcctcaggcgttcctgttactct

SEQ ID NO: 4351851 - DNA, 25 bp, Homo sapien
tcaaaaatcttagggttgaccaggc

SEQ ID NO: 4351852 - DNA, 25 bp, Homo sapien
gcctaggaacaaattgcagcttgcc

SEQ ID NO: 4351853 - DNA, 25 bp, Homo sapien
ttttcctcaattgcaacagggagct

SEQ ID NO: 4351854 - DNA, 25 bp, Homo sapien
tacagagccctggaatagagataga

SEQ ID NO: 4351855 - DNA, 25 bp, Homo sapien
gagcatagactctgcagccaagctg

SEQ ID NO: 4351856 - DNA, 25 bp, Homo sapien
tgagcaggtcagagcataacagcac

SEQ ID NO: 4351857 - DNA, 25 bp, Homo sapien
catcaaaacatggaggtcaccacca

SEQ ID NO: 4351858 - DNA, 25 bp, Homo sapien
gggtgcataagtcagtccttaacaa

SEQ ID NO: 4351859 - DNA, 25 bp, Homo sapien
cacttaacacttgtgagctaaacag

SEQ ID NO: 4351860 - DNA, 25 bp, Homo sapien
gtcactcttctatggcactgagaca

SEQ ID NO: 4351861 - DNA, 25 bp, Homo sapien
gccctgttcgtttttgtgtcctcca

SEQ ID NO: 4351862 - DNA, 25 bp, Homo sapien
tgaacctccataattgtttggcgaa

SEQ ID NO: 4351863 - DNA, 25 bp, Homo sapien
atatgtgcgagcttatccagggcca

SEQ ID NO: 4351864 - DNA, 25 bp, Homo sapien
cgagggggacaaaccgcagcacaga

SEQ ID NO: 4351865 - DNA, 25 bp, Homo sapien
gaacatctcccatgtggccgagggg

SEQ ID NO: 4351866 - DNA, 25 bp, Homo sapien
gccaccatctgcctgagcaagatgg

SEQ ID NO: 4351867 - DNA, 25 bp, Homo sapien
tctccacagtggtatccacagccac

SEQ ID NO: 4351868 - DNA, 25 bp, Homo sapien
ttcttgtgttttctctcctcctgcc

SEQ ID NO: 4351869 - DNA, 25 bp, Homo sapien
ttcctctttatcttccatcctcttt

SEQ ID NO: 4351870 - DNA, 25 bp, Homo sapien
tatcttccatcctctttcttgtgtt

SEQ ID NO: 4351871 - DNA, 25 bp, Homo sapien
tctttatcttccatcctctttcttg

SEQ ID NO: 4351872 - DNA, 25 bp, Homo sapien
taggatgctctcgtttacaaagtgc

SEQ ID NO: 4351873 - DNA, 25 bp, Homo sapien
ggtgaagtgattgacccaaggtcct

SEQ ID NO: 4351874 - DNA, 25 bp, Homo sapien
caaggtcctgaccacacagtgagtc

SEQ ID NO: 4351875 - DNA, 25 bp, Homo sapien
tagaccagccagagacataaaagca

SEQ ID NO: 4351876 - DNA, 25 bp, Homo sapien
ggtagaagtgggagttgagtaaggc

SEQ ID NO: 4351877 - DNA, 25 bp, Homo sapien
tcagaattcagatgggcggggtgct

SEQ ID NO: 4351878 - DNA, 25 bp, Homo sapien
ggagttgagtaaggcagatcccagg

SEQ ID NO: 4351879 - DNA, 25 bp, Homo sapien
gctgggcagcggtgatcctctgctc

SEQ ID NO: 4351880 - DNA, 25 bp, Homo sapien
caatgcctgctcaaacaggcccggg

SEQ ID NO: 4351881 - DNA, 25 bp, Homo sapien
ggcctgcactagtacccctgtcatg

SEQ ID NO: 4351882 - DNA, 25 bp, Homo sapien
cctgtcatggtcaatcatggctgac

SEQ ID NO: 4351883 - DNA, 25 bp, Homo sapien
ccagtgggagtccttaagccattag

SEQ ID NO: 4351884 - DNA, 25 bp, Homo sapien
tcaggacaatacaggatagtggata

SEQ ID NO: 4351885 - DNA, 25 bp, Homo sapien
tataccctccggtgttcaggacaat

SEQ ID NO: 4351886 - DNA, 25 bp, Homo sapien
tgaagatcatcaagacctggactca

SEQ ID NO: 4351887 - DNA, 25 bp, Homo sapien
tacaaaacgcttctgcatatgtcat

SEQ ID NO: 4351888 - DNA, 25 bp, Homo sapien
tacttggcactgcaaacctgctcgc

SEQ ID NO: 4351889 - DNA, 25 bp, Homo sapien
aaaaggccatggtatcgtgcccctg

SEQ ID NO: 4351890 - DNA, 25 bp, Homo sapien
ggtttagatgcagatcccggccctg

SEQ ID NO: 4351891 - DNA, 25 bp, Homo sapien
taagtcttccttaagcagtaccaac

SEQ ID NO: 4351892 - DNA, 25 bp, Homo sapien
tctccagggtaaaacttatgtacag

SEQ ID NO: 4351893 - DNA, 25 bp, Homo sapien
tcctacattacagcatctggaaaag

SEQ ID NO: 4351894 - DNA, 25 bp, Homo sapien
atctggaaaagtatccagctctggg

SEQ ID NO: 4351895 - DNA, 25 bp, Homo sapien
cagggtaaaacttatgtacagaggt

SEQ ID NO: 4351896 - DNA, 25 bp, Homo sapien
tgttcaagaaacggccggtggtgaa

SEQ ID NO: 4351897 - DNA, 25 bp, Homo sapien
cacagcgggtgttcaagaaacggcc

SEQ ID NO: 4351898 - DNA, 25 bp, Homo sapien
gtgttcaagaaacggccggtggtga

SEQ ID NO: 4351899 - DNA, 25 bp, Homo sapien
cagcgggtgttcaagaaacggccgg

SEQ ID NO: 4351900 - DNA, 25 bp, Homo sapien
ctactgcccagagtacttccaggta

SEQ ID NO: 4351901 - DNA, 25 bp, Homo sapien
tactgcccagagtacttccaggtac

SEQ ID NO: 4351902 - DNA, 25 bp, Homo sapien
tgcccagagtacttccaggtaccat

SEQ ID NO: 4351903 - DNA, 25 bp, Homo sapien
actgcccagagtacttccaggtacc

SEQ ID NO: 4351904 - DNA, 25 bp, Homo sapien
tccgtaagactcatgaggataaaac

SEQ ID NO: 4351905 - DNA, 25 bp, Homo sapien
gcgtgacgtctgcaaacgttaacaa

SEQ ID NO: 4351906 - DNA, 25 bp, Homo sapien
tatgacccttgtgttgcgtgacgtc

SEQ ID NO: 4351907 - DNA, 25 bp, Homo sapien
acagtcttcactgaactgcaggcct

SEQ ID NO: 4351908 - DNA, 25 bp, Homo sapien
catacggggctacctaggaagatgg

SEQ ID NO: 4351909 - DNA, 25 bp, Homo sapien
tgggattatgtgcagtgtatttgtc

SEQ ID NO: 4351910 - DNA, 25 bp, Homo sapien
tgggcctctccataacatacggggc

SEQ ID NO: 4351911 - DNA, 25 bp, Homo sapien
gaacaaaggcccatggactgtcttc

SEQ ID NO: 4351912 - DNA, 25 bp, Homo sapien
gagtgcccgtttgataagatagagc

SEQ ID NO: 4351913 - DNA, 25 bp, Homo sapien
tagagtgcccgtttgataagataga

SEQ ID NO: 4351914 - DNA, 25 bp, Homo sapien
tatgtagagtgcccgtttgataaga

SEQ ID NO: 4351915 - DNA, 25 bp, Homo sapien
tgtagagtgcccgtttgataagata

SEQ ID NO: 4351916 - DNA, 25 bp, Homo sapien
tgggatgtgcctctttttctgtcct

SEQ ID NO: 4351917 - DNA, 25 bp, Homo sapien
actttgggatgtgcctctttttctg

SEQ ID NO: 4351918 - DNA, 25 bp, Homo sapien
tttgggatgtgcctctttttctgtc

SEQ ID NO: 4351919 - DNA, 25 bp, Homo sapien
gactttgggatgtgcctctttttct

SEQ ID NO: 4351920 - DNA, 25 bp, Homo sapien
ctggtactgaatacgtgagccttct

SEQ ID NO: 4351921 - DNA, 25 bp, Homo sapien
tactgaatacgtgagccttcttgct

SEQ ID NO: 4351922 - DNA, 25 bp, Homo sapien
ggtactgaatacgtgagccttcttg

SEQ ID NO: 4351923 - DNA, 25 bp, Homo sapien
gtactgaatacgtgagccttcttgc

SEQ ID NO: 4351924 - DNA, 25 bp, Homo sapien
caaagatgaggtttgagccctgtct

SEQ ID NO: 4351925 - DNA, 25 bp, Homo sapien
cacaatcactaagtgacaaagatga

SEQ ID NO: 4351926 - DNA, 25 bp, Homo sapien
catacatctcttttaatcatcttga

SEQ ID NO: 4351927 - DNA, 25 bp, Homo sapien
gacttttagagaattacacaatcac

SEQ ID NO: 4351928 - DNA, 25 bp, Homo sapien
gccatcaaacttccatcttgattct

SEQ ID NO: 4351929 - DNA, 25 bp, Homo sapien
ggcctgggacaagccatcaaacttc

SEQ ID NO: 4351930 - DNA, 25 bp, Homo sapien
tcccacgatattcccatgagtcctt

SEQ ID NO: 4351931 - DNA, 25 bp, Homo sapien
tcaaatcccacgatattcccatgag

SEQ ID NO: 4351932 - DNA, 25 bp, Homo sapien
cctacgtgatatgggcatgtgcctc

SEQ ID NO: 4351933 - DNA, 25 bp, Homo sapien
gcttcatgtccagtactgagtggga

SEQ ID NO: 4351934 - DNA, 25 bp, Homo sapien
ttcccctgtgcctctcatgatgaga

SEQ ID NO: 4351935 - DNA, 25 bp, Homo sapien
catgctgagtatgatgctggtgatt

SEQ ID NO: 4351936 - DNA, 25 bp, Homo sapien
ttagaccttcgtcaccattggtggg

SEQ ID NO: 4351937 - DNA, 25 bp, Homo sapien
gtgcttagcagctcaaggaacccag

SEQ ID NO: 4351938 - DNA, 25 bp, Homo sapien
gcaattgcaatgttctccttagacc

SEQ ID NO: 4351939 - DNA, 25 bp, Homo sapien
cattggtgggacttcagtgcttagc

SEQ ID NO: 4351940 - DNA, 25 bp, Homo sapien
tcaacaggtcccacgcgaatttctg

SEQ ID NO: 4351941 - DNA, 25 bp, Homo sapien
aggaacttagattcctctgatgttg

SEQ ID NO: 4351942 - DNA, 25 bp, Homo sapien
agtgcccaggaaatatcttgtcaga

SEQ ID NO: 4351943 - DNA, 25 bp, Homo sapien
tgatctgccgtaagcctcaacaggt

SEQ ID NO: 4351944 - DNA, 25 bp, Homo sapien
tgttaaatcccgcaactgattggat

SEQ ID NO: 4351945 - DNA, 25 bp, Homo sapien
tgagaatacccacattatggcacgc

SEQ ID NO: 4351946 - DNA, 25 bp, Homo sapien
aaaacaccttcacggaaacatctag

SEQ ID NO: 4351947 - DNA, 25 bp, Homo sapien
gaagaggtgacactgcagttcaagg

SEQ ID NO: 4351948 - DNA, 25 bp, Homo sapien
gagatttatctgtgttgacaaatct

SEQ ID NO: 4351949 - DNA, 25 bp, Homo sapien
tttcttcacttattgtgtttttgag

SEQ ID NO: 4351950 - DNA, 25 bp, Homo sapien
tatctgtgttgacaaatctatcatt

SEQ ID NO: 4351951 - DNA, 25 bp, Homo sapien
ttcttcacttattgtgtttttgaga

SEQ ID NO: 4351952 - DNA, 25 bp, Homo sapien
gaaccactagtgcaaagtacagtca

SEQ ID NO: 4351953 - DNA, 25 bp, Homo sapien
gagaaccactagtgcaaagtacagt

SEQ ID NO: 4351954 - DNA, 25 bp, Homo sapien
tgagaaccactagtgcaaagtacag

SEQ ID NO: 4351955 - DNA, 25 bp, Homo sapien
aaccactagtgcaaagtacagtcag

SEQ ID NO: 4351956 - DNA, 25 bp, Homo sapien
ctgtaaaatactttcagatccttga

SEQ ID NO: 4351957 - DNA, 25 bp, Homo sapien
tgggtcaggttaccccagcagtctc

SEQ ID NO: 4351958 - DNA, 25 bp, Homo sapien
gttaccccagcagtctcaaactcaa

SEQ ID NO: 4351959 - DNA, 25 bp, Homo sapien
cttgaagtgggtcaggttaccccag

SEQ ID NO: 4351960 - DNA, 25 bp, Homo sapien
tttctgctggctagaattctatgcc

SEQ ID NO: 4351961 - DNA, 25 bp, Homo sapien
tgctgcacaaacagttggcagggtg

SEQ ID NO: 4351962 - DNA, 25 bp, Homo sapien
tgtgagctggaacaaatggatgctc

SEQ ID NO: 4351963 - DNA, 25 bp, Homo sapien
tggcactggtctggacgacatcctt

SEQ ID NO: 4351964 - DNA, 25 bp, Homo sapien
catcttcagagtttgttcgggttct

SEQ ID NO: 4351965 - DNA, 25 bp, Homo sapien
tggcatcgttcaattccttgcagat

SEQ ID NO: 4351966 - DNA, 25 bp, Homo sapien
cagatgtaggcttgaggtcctcaac

SEQ ID NO: 4351967 - DNA, 25 bp, Homo sapien
tcagaggccatttacaacatggctg

SEQ ID NO: 4351968 - DNA, 25 bp, Homo sapien
taaatgctttgtgcgcagcgtccag

SEQ ID NO: 4351969 - DNA, 25 bp, Homo sapien
cagcaagagcagtgagttaggccga

SEQ ID NO: 4351970 - DNA, 25 bp, Homo sapien
catttagtgagtgccaaggcagacc

SEQ ID NO: 4351971 - DNA, 25 bp, Homo sapien
tcagagagcttaagtcatggcccaa

SEQ ID NO: 4351972 - DNA, 25 bp, Homo sapien
atgaccgaatggccatgcagttttt

SEQ ID NO: 4351973 - DNA, 25 bp, Homo sapien
ctatgaccgaatggccatgcagttt

SEQ ID NO: 4351974 - DNA, 25 bp, Homo sapien
ccgaatggccatgcagtttttagaa

SEQ ID NO: 4351975 - DNA, 25 bp, Homo sapien
gaccgaatggccatgcagtttttag

SEQ ID NO: 4351976 - DNA, 25 bp, Homo sapien
tgtatctgcgcatcctcctgagttt

SEQ ID NO: 4351977 - DNA, 25 bp, Homo sapien
tcctccgcaccatcatctcaaagag

SEQ ID NO: 4351978 - DNA, 25 bp, Homo sapien
tggaaagacgggagaatgtatctgc

SEQ ID NO: 4351979 - DNA, 25 bp, Homo sapien
gtgcagggctgcacacacttggtct

SEQ ID NO: 4351980 - DNA, 25 bp, Homo sapien
caggtatgagaaggcactgctggcc

SEQ ID NO: 4351981 - DNA, 25 bp, Homo sapien
caattacgctttggcagtggttcac

SEQ ID NO: 4351982 - DNA, 25 bp, Homo sapien
tcccaatgggattgctagagcatcc

SEQ ID NO: 4351983 - DNA, 25 bp, Homo sapien
tctgccagggcctcgtttaaatcag

SEQ ID NO: 4351984 - DNA, 25 bp, Homo sapien
ctgctcagtcagactattctgccag

SEQ ID NO: 4351985 - DNA, 25 bp, Homo sapien
aagatcaggcccctggccgggcgcc

SEQ ID NO: 4351986 - DNA, 25 bp, Homo sapien
agatcaggcccctggccgggcgccg

SEQ ID NO: 4351987 - DNA, 25 bp, Homo sapien
ttatcaagctcctacagtgtgccag

SEQ ID NO: 4351988 - DNA, 25 bp, Homo sapien
taagatagcaggagacgacaaacac

SEQ ID NO: 4351989 - DNA, 25 bp, Homo sapien
tatacttttactgtcctgcctccgg

SEQ ID NO: 4351990 - DNA, 25 bp, Homo sapien
ggagtctgccacatgcgtgaagcct

SEQ ID NO: 4351991 - DNA, 25 bp, Homo sapien
atgtctgcaatgtaaagaatccgat

SEQ ID NO: 4351992 - DNA, 25 bp, Homo sapien
tgtaaagaatccgatccacccaacc

SEQ ID NO: 4351993 - DNA, 25 bp, Homo sapien
tgcaatgtaaagaatccgatccacc

SEQ ID NO: 4351994 - DNA, 25 bp, Homo sapien
aacccttatcaacccgctcagacag

SEQ ID NO: 4351995 - DNA, 25 bp, Homo sapien
caatccacccaactaggcctcttaa

SEQ ID NO: 4351996 - DNA, 25 bp, Homo sapien
gagacccagagacaccttgcaagta

SEQ ID NO: 4351997 - DNA, 25 bp, Homo sapien
tgaacataatccaaggccggcacag

SEQ ID NO: 4351998 - DNA, 25 bp, Homo sapien
catgggcttggatccttcgaagggc

SEQ ID NO: 4351999 - DNA, 25 bp, Homo sapien
caaagtccgtaaactgggtggctga

SEQ ID NO: 4352000 - DNA, 25 bp, Homo sapien
taatgcggccaagtagccagggtca

SEQ ID NO: 4352001 - DNA, 25 bp, Homo sapien
gaagaaagtgatgcataatgcggcc

SEQ ID NO: 4352002 - DNA, 25 bp, Homo sapien
ccaggagtcagatgggacccaggtt

SEQ ID NO: 4352003 - DNA, 25 bp, Homo sapien
gtcattcagctagccccaggagtca

SEQ ID NO: 4352004 - DNA, 25 bp, Homo sapien
aatttctcgttccatacaactgcac

SEQ ID NO: 4352005 - DNA, 25 bp, Homo sapien
taatttctcgttccatacaactgca

SEQ ID NO: 4352006 - DNA, 25 bp, Homo sapien
ttaatttctcgttccatacaactgc

SEQ ID NO: 4352007 - DNA, 25 bp, Homo sapien
catttcttgcatattgtattggttt

SEQ ID NO: 4352008 - DNA, 25 bp, Homo sapien
agcacatttcttgcatattgtattg

SEQ ID NO: 4352009 - DNA, 25 bp, Homo sapien
gcacatttcttgcatattgtattgg

SEQ ID NO: 4352010 - DNA, 25 bp, Homo sapien
cacatttcttgcatattgtattggt

SEQ ID NO: 4352011 - DNA, 25 bp, Homo sapien
gtactcagtcctgcagtaggtgcac

SEQ ID NO: 4352012 - DNA, 25 bp, Homo sapien
cacaacagggtgtgcaatccgacat

SEQ ID NO: 4352013 - DNA, 25 bp, Homo sapien
tcacaacagggtgtgcaatccgaca

SEQ ID NO: 4352014 - DNA, 25 bp, Homo sapien
ggtactcagtcctgcagtaggtgca

SEQ ID NO: 4352015 - DNA, 25 bp, Homo sapien
ggggctgaggcgtcgccgcgcccgg

SEQ ID NO: 4352016 - DNA, 25 bp, Homo sapien
catccgggtcgaggaggccgaggcc

SEQ ID NO: 4352017 - DNA, 25 bp, Homo sapien
cccatccgggtcgaggaggccgagg

SEQ ID NO: 4352018 - DNA, 25 bp, Homo sapien
ccacccatccgggtcgaggaggccg

SEQ ID NO: 4352019 - DNA, 25 bp, Homo sapien
tactgttcagtagaagataggaccc

SEQ ID NO: 4352020 - DNA, 25 bp, Homo sapien
gataggaccctagagcttcaataca

SEQ ID NO: 4352021 - DNA, 25 bp, Homo sapien
caagtttgtcctgaaatagggtcac

SEQ ID NO: 4352022 - DNA, 25 bp, Homo sapien
gcttgaatttaaacctccacgtgga

SEQ ID NO: 4352023 - DNA, 25 bp, Homo sapien
gaagagtgtccacctaacaagatgg

SEQ ID NO: 4352024 - DNA, 25 bp, Homo sapien
tcctgagggtggaaccaaatagcct

SEQ ID NO: 4352025 - DNA, 25 bp, Homo sapien
catcatttgatgcagagtccgggtt

SEQ ID NO: 4352026 - DNA, 25 bp, Homo sapien
gaagctacccaggattacagaagag

SEQ ID NO: 4352027 - DNA, 25 bp, Homo sapien
ccgtgccggcaaactcctggtgtgc

SEQ ID NO: 4352028 - DNA, 25 bp, Homo sapien
tcctggtgggttagggactcattct

SEQ ID NO: 4352029 - DNA, 25 bp, Homo sapien
ggtgtgtaaacagatagctgccctc

SEQ ID NO: 4352030 - DNA, 25 bp, Homo sapien
tataaaggctctgtctacagtcaca

SEQ ID NO: 4352031 - DNA, 25 bp, Homo sapien
agctcagtccttaacagtgtaaata

SEQ ID NO: 4352032 - DNA, 25 bp, Homo sapien
caagctcagtccttaacagtgtaaa

SEQ ID NO: 4352033 - DNA, 25 bp, Homo sapien
tttagggggacaagctcagtcctta

SEQ ID NO: 4352034 - DNA, 25 bp, Homo sapien
gggacaagctcagtccttaacagtg

SEQ ID NO: 4352035 - DNA, 25 bp, Homo sapien
ctaaatctgagtataattgagtact

SEQ ID NO: 4352036 - DNA, 25 bp, Homo sapien
tgagtactgtatttacagtaaggat

SEQ ID NO: 4352037 - DNA, 25 bp, Homo sapien
ctgtatttacagtaaggattcctac

SEQ ID NO: 4352038 - DNA, 25 bp, Homo sapien
taaatctgagtataattgagtactg

SEQ ID NO: 4352039 - DNA, 25 bp, Homo sapien
aagtgctaagggaccatgtgttcca

SEQ ID NO: 4352040 - DNA, 25 bp, Homo sapien
ctcttcaagtgctaagggaccatgt

SEQ ID NO: 4352041 - DNA, 25 bp, Homo sapien
ggtttgttgctgaatcctaggcaca

SEQ ID NO: 4352042 - DNA, 25 bp, Homo sapien
tttgttgctgaatcctaggcacagg

SEQ ID NO: 4352043 - DNA, 25 bp, Homo sapien
taatctaatagggcaatattctaaa

SEQ ID NO: 4352044 - DNA, 25 bp, Homo sapien
tttaatctaatagggcaatattcta

SEQ ID NO: 4352045 - DNA, 25 bp, Homo sapien
aatctaatagggcaatattctaaat

SEQ ID NO: 4352046 - DNA, 25 bp, Homo sapien
tctaatagggcaatattctaaataa

SEQ ID NO: 4352047 - DNA, 25 bp, Homo sapien
aaaaatttatctatgtaaacacatc

SEQ ID NO: 4352048 - DNA, 25 bp, Homo sapien
aggcccctgcaattcattttttacg

SEQ ID NO: 4352049 - DNA, 25 bp, Homo sapien
cagatgccagggtgctcttttaaaa

SEQ ID NO: 4352050 - DNA, 25 bp, Homo sapien
aaatgttttgttgcttcaacagaag

SEQ ID NO: 4352051 - DNA, 25 bp, Homo sapien
tgcgcattcaaacttggcaaacatc

SEQ ID NO: 4352052 - DNA, 25 bp, Homo sapien
caatgtggtttaacagcaagctagc

SEQ ID NO: 4352053 - DNA, 25 bp, Homo sapien
cacatatttatagccccagcttcct

SEQ ID NO: 4352054 - DNA, 25 bp, Homo sapien
taaaccttgtgctcaggctcctgtt

SEQ ID NO: 4352055 - DNA, 25 bp, Homo sapien
tcaggtgttcaaaactcaagaaggg

SEQ ID NO: 4352056 - DNA, 25 bp, Homo sapien
gcagaattcttcaggtactcatctt

SEQ ID NO: 4352057 - DNA, 25 bp, Homo sapien
agggtcatcattatactctgaagca

SEQ ID NO: 4352058 - DNA, 25 bp, Homo sapien
tacccaaatctatcacagtcacatt

SEQ ID NO: 4352059 - DNA, 25 bp, Homo sapien
tgtttggtaactaaagggtagatgc

SEQ ID NO: 4352060 - DNA, 25 bp, Homo sapien
tttggtaactaaagggtagatgcga

SEQ ID NO: 4352061 - DNA, 25 bp, Homo sapien
atgtttggtaactaaagggtagatg

SEQ ID NO: 4352062 - DNA, 25 bp, Homo sapien
cagtcccaagttccttattattctg

SEQ ID NO: 4352063 - DNA, 25 bp, Homo sapien
ttttgtgataatccagtcccaagtt

SEQ ID NO: 4352064 - DNA, 25 bp, Homo sapien
tagcttctggtagacagtaattttc

SEQ ID NO: 4352065 - DNA, 25 bp, Homo sapien
aattttctacatgaggaggtgattc

SEQ ID NO: 4352066 - DNA, 25 bp, Homo sapien
gcatattcattcctaggttccagca

SEQ ID NO: 4352067 - DNA, 25 bp, Homo sapien
ggatgaatctgacaaacttaaagga

SEQ ID NO: 4352068 - DNA, 25 bp, Homo sapien
gaaatacgtgtatggttcaggtaga

SEQ ID NO: 4352069 - DNA, 25 bp, Homo sapien
gagtgggactagctcagatcttaca

SEQ ID NO: 4352070 - DNA, 25 bp, Homo sapien
acagaaagctagaattgatccccaa

SEQ ID NO: 4352071 - DNA, 25 bp, Homo sapien
caggtggctatagtttactgacccc

SEQ ID NO: 4352072 - DNA, 25 bp, Homo sapien
tactgcataaagcagaggtcagcac

SEQ ID NO: 4352073 - DNA, 25 bp, Homo sapien
gggaaaactgacactcaaactggta

SEQ ID NO: 4352074 - DNA, 25 bp, Homo sapien
tttagaaggccaatggataaaataa

SEQ ID NO: 4352075 - DNA, 25 bp, Homo sapien
tatttttgctttagaaggccaatgg

SEQ ID NO: 4352076 - DNA, 25 bp, Homo sapien
gcccggcctcaggaagtaatttgta

SEQ ID NO: 4352077 - DNA, 25 bp, Homo sapien
tgcccggcctcaggaagtaatttgt

SEQ ID NO: 4352078 - DNA, 25 bp, Homo sapien
actcctggaatcgatttctgcttta

SEQ ID NO: 4352079 - DNA, 25 bp, Homo sapien
tctatgcacataaacgtatctctgg

SEQ ID NO: 4352080 - DNA, 25 bp, Homo sapien
gaagagaataacaggagactaatct

SEQ ID NO: 4352081 - DNA, 25 bp, Homo sapien
taatcttctactaatcatgagctga

SEQ ID NO: 4352082 - DNA, 25 bp, Homo sapien
aagcagtacacgttctgggcagcag

SEQ ID NO: 4352083 - DNA, 25 bp, Homo sapien
tatattaactcctgagtcatctggt

SEQ ID NO: 4352084 - DNA, 25 bp, Homo sapien
taaaggtacagaatgaccaggtagc

SEQ ID NO: 4352085 - DNA, 25 bp, Homo sapien
gagataatcagcaatgtattctgtt

SEQ ID NO: 4352086 - DNA, 25 bp, Homo sapien
aataaccttccacccactaaatgct

SEQ ID NO: 4352087 - DNA, 25 bp, Homo sapien
tgaagcctgcttctcgagactgatc

SEQ ID NO: 4352088 - DNA, 25 bp, Homo sapien
actgaagaaggcgtttgaagcctgc

SEQ ID NO: 4352089 - DNA, 25 bp, Homo sapien
gcttctcgagactgatccacatgta

SEQ ID NO: 4352090 - DNA, 25 bp, Homo sapien
ccagtggaattactctaaaagagag

SEQ ID NO: 4352091 - DNA, 25 bp, Homo sapien
tggtcttctggccaagtgtctgtga

SEQ ID NO: 4352092 - DNA, 25 bp, Homo sapien
gagagggtatcatggctaataagga

SEQ ID NO: 4352093 - DNA, 25 bp, Homo sapien
ttttgtaagccatggatccctttgg

SEQ ID NO: 4352094 - DNA, 25 bp, Homo sapien
gttgctgtacattgattccagtcag

SEQ ID NO: 4352095 - DNA, 25 bp, Homo sapien
gaactacttccccattcatagtctt

SEQ ID NO: 4352096 - DNA, 25 bp, Homo sapien
caagtgctagtcttcgttgctgtac

SEQ ID NO: 4352097 - DNA, 25 bp, Homo sapien
attccagtcagaacatcaagtatgg

SEQ ID NO: 4352098 - DNA, 25 bp, Homo sapien
cactgcacccggtggacacttgctt

SEQ ID NO: 4352099 - DNA, 25 bp, Homo sapien
ccactgcacccggtggacacttgct

SEQ ID NO: 4352100 - DNA, 25 bp, Homo sapien
tctcgtttcgaagtggatgtcccac

SEQ ID NO: 4352101 - DNA, 25 bp, Homo sapien
tgccactgaggctaaatacttctcg

SEQ ID NO: 4352102 - DNA, 25 bp, Homo sapien
tacaggtgggatcaaagcactgctt

SEQ ID NO: 4352103 - DNA, 25 bp, Homo sapien
ttcaaggtaggagcgatgaagcacc

SEQ ID NO: 4352104 - DNA, 25 bp, Homo sapien
ttctcaatcagatgacaatagtcaa

SEQ ID NO: 4352105 - DNA, 25 bp, Homo sapien
gacaatagtcaatacgttcttgagg

SEQ ID NO: 4352106 - DNA, 25 bp, Homo sapien
tgaggattcagagatgataactgaa

SEQ ID NO: 4352107 - DNA, 25 bp, Homo sapien
catgagtctcctctatcgttataat

SEQ ID NO: 4352108 - DNA, 25 bp, Homo sapien
ttggcgagtggaaaggcaatactgg

SEQ ID NO: 4352109 - DNA, 25 bp, Homo sapien
gcttgaggcgtagggatcaggtggc

SEQ ID NO: 4352110 - DNA, 25 bp, Homo sapien
cttttctctagggtgcggagccaca

SEQ ID NO: 4352111 - DNA, 25 bp, Homo sapien
gggttggcgagtggaaaggcaatac

SEQ ID NO: 4352112 - DNA, 25 bp, Homo sapien
tcacacgtatgtttccaggatcaca

SEQ ID NO: 4352113 - DNA, 25 bp, Homo sapien
ccagttcttcagagattgggtgttt

SEQ ID NO: 4352114 - DNA, 25 bp, Homo sapien
ggagcttcagtcacacgtatgtttc

SEQ ID NO: 4352115 - DNA, 25 bp, Homo sapien
ttgggtgtttgggagcttcagtcac

SEQ ID NO: 4352116 - DNA, 25 bp, Homo sapien
gacaggatccaaataagactaaaaa

SEQ ID NO: 4352117 - DNA, 25 bp, Homo sapien
gtgtgacaggatccaaataagacta

SEQ ID NO: 4352118 - DNA, 25 bp, Homo sapien
tgtgacaggatccaaataagactaa

SEQ ID NO: 4352119 - DNA, 25 bp, Homo sapien
cagtgtgacaggatccaaataagac

SEQ ID NO: 4352120 - DNA, 25 bp, Homo sapien
ttagcattaaacagagcaagtgtgt

SEQ ID NO: 4352121 - DNA, 25 bp, Homo sapien
catgagagcaattctacacttggag

SEQ ID NO: 4352122 - DNA, 25 bp, Homo sapien
tatatctaatgggaggtcatcatgc

SEQ ID NO: 4352123 - DNA, 25 bp, Homo sapien
gagaactacaacatgctcatctgtt

SEQ ID NO: 4352124 - DNA, 25 bp, Homo sapien
gaagctcagagtattgtgtgggaca

SEQ ID NO: 4352125 - DNA, 25 bp, Homo sapien
gacatcaggtactgtctgacgagac

SEQ ID NO: 4352126 - DNA, 25 bp, Homo sapien
gagaatcctccaagttttgaatgtc

SEQ ID NO: 4352127 - DNA, 25 bp, Homo sapien
tagggtcatcccaaatgatctgttc

SEQ ID NO: 4352128 - DNA, 25 bp, Homo sapien
taaatccataagttagaccataaaa

SEQ ID NO: 4352129 - DNA, 25 bp, Homo sapien
ttaaatccataagttagaccataaa

SEQ ID NO: 4352130 - DNA, 25 bp, Homo sapien
cattaaatccataagttagaccata

SEQ ID NO: 4352131 - DNA, 25 bp, Homo sapien
tcattaaatccataagttagaccat

SEQ ID NO: 4352132 - DNA, 25 bp, Homo sapien
cagagtctacggtggaacagcaata

SEQ ID NO: 4352133 - DNA, 25 bp, Homo sapien
ggctattggtaaccactttccagag

SEQ ID NO: 4352134 - DNA, 25 bp, Homo sapien
cagtactgagataatgaactgcctc

SEQ ID NO: 4352135 - DNA, 25 bp, Homo sapien
cgattgtaatgattccacgtgacag

SEQ ID NO: 4352136 - DNA, 25 bp, Homo sapien
gggtttcactattgatgttgcagac

SEQ ID NO: 4352137 - DNA, 25 bp, Homo sapien
tacttcgtccactgcgagcagagcg

SEQ ID NO: 4352138 - DNA, 25 bp, Homo sapien
ttgaagatgcgctgttacaaccact

SEQ ID NO: 4352139 - DNA, 25 bp, Homo sapien
ttcttgaaagggaagtcctctgccc

SEQ ID NO: 4352140 - DNA, 25 bp, Homo sapien
tatctcctgtaactgcttctgaaag

SEQ ID NO: 4352141 - DNA, 25 bp, Homo sapien
tacataaggaactaataacactggg

SEQ ID NO: 4352142 - DNA, 25 bp, Homo sapien
ggaaaaacatatttacggctatata

SEQ ID NO: 4352143 - DNA, 25 bp, Homo sapien
cagctctagaaggatacataaggaa

SEQ ID NO: 4352144 - DNA, 25 bp, Homo sapien
tatttacggctatatatgcataaag

SEQ ID NO: 4352145 - DNA, 25 bp, Homo sapien
attattggtggccatattgtctaca

SEQ ID NO: 4352146 - DNA, 25 bp, Homo sapien
ctttattattggtggccatattgtc

SEQ ID NO: 4352147 - DNA, 25 bp, Homo sapien
gactctttattattggtggccatat

SEQ ID NO: 4352148 - DNA, 25 bp, Homo sapien
tattggtggccatattgtctacatc

SEQ ID NO: 4352149 - DNA, 25 bp, Homo sapien
taaatgtatcatccatatctcctac

SEQ ID NO: 4352150 - DNA, 25 bp, Homo sapien
gggtaaatgtatcatccatatctcc

SEQ ID NO: 4352151 - DNA, 25 bp, Homo sapien
gggggtaaatgtatcatccatatct

SEQ ID NO: 4352152 - DNA, 25 bp, Homo sapien
taagagggggtaaatgtatcatcca

SEQ ID NO: 4352153 - DNA, 25 bp, Homo sapien
tgcactgcgctgatatccaagctca

SEQ ID NO: 4352154 - DNA, 25 bp, Homo sapien
cacagctgagagtagtcgactatta

SEQ ID NO: 4352155 - DNA, 25 bp, Homo sapien
gccggccatcttgcactgcgctgat

SEQ ID NO: 4352156 - DNA, 25 bp, Homo sapien
gactattacagagccggccatcttg

SEQ ID NO: 4352157 - DNA, 25 bp, Homo sapien
tggccgcccttgatagatgaaatga

SEQ ID NO: 4352158 - DNA, 25 bp, Homo sapien
ccagtgctcggaaacaatgtgtact

SEQ ID NO: 4352159 - DNA, 25 bp, Homo sapien
tctaaaagccagtgctcggaaacaa

SEQ ID NO: 4352160 - DNA, 25 bp, Homo sapien
tacagatttatactcccgattagtg

SEQ ID NO: 4352161 - DNA, 25 bp, Homo sapien
tgctcacaatagctttaggtttcct

SEQ ID NO: 4352162 - DNA, 25 bp, Homo sapien
aatgtattcttgtagatgctcacaa

SEQ ID NO: 4352163 - DNA, 25 bp, Homo sapien
accatgaaacagaaagatgtgccaa

SEQ ID NO: 4352164 - DNA, 25 bp, Homo sapien
tccaatatttgttgtgcatacccta

SEQ ID NO: 4352165 - DNA, 25 bp, Homo sapien
tgcgatcccatttagttcactctgc

SEQ ID NO: 4352166 - DNA, 25 bp, Homo sapien
gtaatctgctcctagagaggctgcg

SEQ ID NO: 4352167 - DNA, 25 bp, Homo sapien
tttactaacacataccactactttg

SEQ ID NO: 4352168 - DNA, 25 bp, Homo sapien
ctcctagagaggctgcgatcccatt

SEQ ID NO: 4352169 - DNA, 25 bp, Homo sapien
tggctgggacgtcctggagtttcca

SEQ ID NO: 4352170 - DNA, 25 bp, Homo sapien
gagtttccaaggctgcaagtgcatc

SEQ ID NO: 4352171 - DNA, 25 bp, Homo sapien
gaaagagcgacagcatttcgagagc

SEQ ID NO: 4352172 - DNA, 25 bp, Homo sapien
tctgagagtggcgtactcggtttcc

SEQ ID NO: 4352173 - DNA, 25 bp, Homo sapien
ttctccagccatgaaagacgtgctc

SEQ ID NO: 4352174 - DNA, 25 bp, Homo sapien
cattttcgaccgtgattgtaatttt

SEQ ID NO: 4352175 - DNA, 25 bp, Homo sapien
tccccttcattttcgaccgtgattg

SEQ ID NO: 4352176 - DNA, 25 bp, Homo sapien
gaaagacgtgctcacttccccttca

SEQ ID NO: 4352177 - DNA, 25 bp, Homo sapien
gccactagtaccttcctctacttaa

SEQ ID NO: 4352178 - DNA, 25 bp, Homo sapien
gaagctcccataccacatctatctg

SEQ ID NO: 4352179 - DNA, 25 bp, Homo sapien
tggtaagtctttctatatgctaaac

SEQ ID NO: 4352180 - DNA, 25 bp, Homo sapien
cagttacactggcatatagttattt

SEQ ID NO: 4352181 - DNA, 25 bp, Homo sapien
tctgaagtggttgtcctactgctgg

SEQ ID NO: 4352182 - DNA, 25 bp, Homo sapien
tgtatccaggtgtaacgagggctcc

SEQ ID NO: 4352183 - DNA, 25 bp, Homo sapien
tctggcatgttgtgagaccacagca

SEQ ID NO: 4352184 - DNA, 25 bp, Homo sapien
tcatatctaaaggtgtaacgacggt

SEQ ID NO: 4352185 - DNA, 25 bp, Homo sapien
tgccaggatgctctgcagtatctga

SEQ ID NO: 4352186 - DNA, 25 bp, Homo sapien
gtgccaggatgctctgcagtatctg

SEQ ID NO: 4352187 - DNA, 25 bp, Homo sapien
ccaggatgctctgcagtatctgaat

SEQ ID NO: 4352188 - DNA, 25 bp, Homo sapien
gccaggatgctctgcagtatctgaa

SEQ ID NO: 4352189 - DNA, 25 bp, Homo sapien
gcttcatatttagagccaccacgtt

SEQ ID NO: 4352190 - DNA, 25 bp, Homo sapien
gaaaatggctttcgtctgctctctt

SEQ ID NO: 4352191 - DNA, 25 bp, Homo sapien
gttctagcagtctccaacagccaag

SEQ ID NO: 4352192 - DNA, 25 bp, Homo sapien
tatagtaacggcaggtaaattccac

SEQ ID NO: 4352193 - DNA, 25 bp, Homo sapien
gagaggattcgactttggatcaaac

SEQ ID NO: 4352194 - DNA, 25 bp, Homo sapien
tgaaataacacaatcctctaaagga

SEQ ID NO: 4352195 - DNA, 25 bp, Homo sapien
tgtcattactggaactggtgtgaag

SEQ ID NO: 4352196 - DNA, 25 bp, Homo sapien
cctctaaaggagtcattcctgtcat

SEQ ID NO: 4352197 - DNA, 25 bp, Homo sapien
gagtagaatcattaaagggcctggc

SEQ ID NO: 4352198 - DNA, 25 bp, Homo sapien
aagggcctggcttcagacgtcttag

SEQ ID NO: 4352199 - DNA, 25 bp, Homo sapien
aatccgcaacagttctgctcagaag

SEQ ID NO: 4352200 - DNA, 25 bp, Homo sapien
gagtagaatcattcaagggctcagc

SEQ ID NO: 4352201 - DNA, 25 bp, Homo sapien
tgaaacactctagcaaccactttgc

SEQ ID NO: 4352202 - DNA, 25 bp, Homo sapien
ggagctaccattttcatattgagag

SEQ ID NO: 4352203 - DNA, 25 bp, Homo sapien
ggagcaaagtctttcttagagaagc

SEQ ID NO: 4352204 - DNA, 25 bp, Homo sapien
ccactggctggtaattagcatggat

SEQ ID NO: 4352205 - DNA, 25 bp, Homo sapien
tagctttctgccactaaaaccgcaa

SEQ ID NO: 4352206 - DNA, 25 bp, Homo sapien
tcatttagctggttaaaacgaactc

SEQ ID NO: 4352207 - DNA, 25 bp, Homo sapien
aataagtcttctcagtttatctagc

SEQ ID NO: 4352208 - DNA, 25 bp, Homo sapien
tctcccacaataacatgagttacat

SEQ ID NO: 4352209 - DNA, 25 bp, Homo sapien
agtatagcatatgctgtttccatca

SEQ ID NO: 4352210 - DNA, 25 bp, Homo sapien
ttccatcaacaaacttataagacag

SEQ ID NO: 4352211 - DNA, 25 bp, Homo sapien
taagacagcggaaaaagtatagcat

SEQ ID NO: 4352212 - DNA, 25 bp, Homo sapien
ttgctactctgtgaaaattagtgca

SEQ ID NO: 4352213 - DNA, 25 bp, Homo sapien
gacatggtctagtaagtgcatctac

SEQ ID NO: 4352214 - DNA, 25 bp, Homo sapien
gaagggtcttcaaagtcaggctagg

SEQ ID NO: 4352215 - DNA, 25 bp, Homo sapien
gagcaagcccaactctgaagggtct

SEQ ID NO: 4352216 - DNA, 25 bp, Homo sapien
tacatagatagtaaggagcaagccc

SEQ ID NO: 4352217 - DNA, 25 bp, Homo sapien
tcaagtgtaggctccagtttgctgt

SEQ ID NO: 4352218 - DNA, 25 bp, Homo sapien
tattgattcacttacgcaacttgca

SEQ ID NO: 4352219 - DNA, 25 bp, Homo sapien
gcaacttgcatttatgttggaaata

SEQ ID NO: 4352220 - DNA, 25 bp, Homo sapien
ccatctaataaatcttcaggtgctt

SEQ ID NO: 4352221 - DNA, 25 bp, Homo sapien
taaacattttgccaacacgacacct

SEQ ID NO: 4352222 - DNA, 25 bp, Homo sapien
tatagggcaataaacaacttccaaa

SEQ ID NO: 4352223 - DNA, 25 bp, Homo sapien
tgctgactttaaggtccaagaagct

SEQ ID NO: 4352224 - DNA, 25 bp, Homo sapien
gatgatctataactgcagcaaaact

SEQ ID NO: 4352225 - DNA, 25 bp, Homo sapien
tgaagaattgggcatagtctttgct

SEQ ID NO: 4352226 - DNA, 25 bp, Homo sapien
tctcttggcacactcatacttctga

SEQ ID NO: 4352227 - DNA, 25 bp, Homo sapien
tctggctggtaggagttgaagaatt

SEQ ID NO: 4352228 - DNA, 25 bp, Homo sapien
tctggtctaggttctgtcttgtata

SEQ ID NO: 4352229 - DNA, 25 bp, Homo sapien
ccgcgcccggctataacaggttatt

SEQ ID NO: 4352230 - DNA, 25 bp, Homo sapien
cttttatacaaactgcaggaagaca

SEQ ID NO: 4352231 - DNA, 25 bp, Homo sapien
aagtagtattttagcttattgccta

SEQ ID NO: 4352232 - DNA, 25 bp, Homo sapien
tacatatgccatgtgagaggtttta

SEQ ID NO: 4352233 - DNA, 25 bp, Homo sapien
tttcatttgtccctttgtgaaacac

SEQ ID NO: 4352234 - DNA, 25 bp, Homo sapien
gtttcatttgtccctttgtgaaaca

SEQ ID NO: 4352235 - DNA, 25 bp, Homo sapien
ttcatttgtccctttgtgaaacaca

SEQ ID NO: 4352236 - DNA, 25 bp, Homo sapien
aatcttccatgtttatatcagtata

SEQ ID NO: 4352237 - DNA, 25 bp, Homo sapien
caattgtcccatgtattgacctcca

SEQ ID NO: 4352238 - DNA, 25 bp, Homo sapien
tgctgaacttctttcctgtctaagc

SEQ ID NO: 4352239 - DNA, 25 bp, Homo sapien
cagtcacacagattatgcaaccaag

SEQ ID NO: 4352240 - DNA, 25 bp, Homo sapien
gaattacactaattgttcacctagt

SEQ ID NO: 4352241 - DNA, 25 bp, Homo sapien
tcacctagttcaataacatgtctct

SEQ ID NO: 4352242 - DNA, 25 bp, Homo sapien
caaaacagaattacactaattgttc

SEQ ID NO: 4352243 - DNA, 25 bp, Homo sapien
tattgcttccctcattttttaggat

SEQ ID NO: 4352244 - DNA, 25 bp, Homo sapien
aaaataggtttcttcaggtttgcag

SEQ ID NO: 4352245 - DNA, 25 bp, Homo sapien
tcgtccgcccatcatttgtacatat

SEQ ID NO: 4352246 - DNA, 25 bp, Homo sapien
taaggtctctgtatactcgtccgcc

SEQ ID NO: 4352247 - DNA, 25 bp, Homo sapien
tctcctgcaataaggtgagttactg

SEQ ID NO: 4352248 - DNA, 25 bp, Homo sapien
tcttgggacacatcgctggtggtgc

SEQ ID NO: 4352249 - DNA, 25 bp, Homo sapien
cagacataaccatattataaactgg

SEQ ID NO: 4352250 - DNA, 25 bp, Homo sapien
ttttccagacttgtacaagatatgg

SEQ ID NO: 4352251 - DNA, 25 bp, Homo sapien
tataaactggatgttcggctcttgg

SEQ ID NO: 4352252 - DNA, 25 bp, Homo sapien
tatgactacttgaggaccaacaatt

SEQ ID NO: 4352253 - DNA, 25 bp, Homo sapien
cttgaggaccaacaattctgcagcc

SEQ ID NO: 4352254 - DNA, 25 bp, Homo sapien
gactacttgaggaccaacaattctg

SEQ ID NO: 4352255 - DNA, 25 bp, Homo sapien
aaaatatgactacttgaggaccaac

SEQ ID NO: 4352256 - DNA, 25 bp, Homo sapien
tataatccgcaaagaatgtatgtcc

SEQ ID NO: 4352257 - DNA, 25 bp, Homo sapien
aacataattagcctttcaatcctgg

SEQ ID NO: 4352258 - DNA, 25 bp, Homo sapien
tgtccattaaagcaaagataaacca

SEQ ID NO: 4352259 - DNA, 25 bp, Homo sapien
caaaggtacacactagaagtcagca

SEQ ID NO: 4352260 - DNA, 25 bp, Homo sapien
aagtgatctatcattctcctttatc

SEQ ID NO: 4352261 - DNA, 25 bp, Homo sapien
ttttgaggtgatcaaagacaacgcc

SEQ ID NO: 4352262 - DNA, 25 bp, Homo sapien
gatcaaagacaacgccactaaaagg

SEQ ID NO: 4352263 - DNA, 25 bp, Homo sapien
caacgccactaaaagggtcacagat

SEQ ID NO: 4352264 - DNA, 25 bp, Homo sapien
tgtacctgaaattactctcctgtat

SEQ ID NO: 4352265 - DNA, 25 bp, Homo sapien
tccttgccctaaatctgttctctac

SEQ ID NO: 4352266 - DNA, 25 bp, Homo sapien
gccttttccctattgaaagccacca

SEQ ID NO: 4352267 - DNA, 25 bp, Homo sapien
ttaggtcctattcaaattccatctc

SEQ ID NO: 4352268 - DNA, 25 bp, Homo sapien
aacatttggaattgtctgaagactt

SEQ ID NO: 4352269 - DNA, 25 bp, Homo sapien
catttggaattgtctgaagacttta

SEQ ID NO: 4352270 - DNA, 25 bp, Homo sapien
ttggaattgtctgaagactttaaaa

SEQ ID NO: 4352271 - DNA, 25 bp, Homo sapien
aaacatttggaattgtctgaagact

SEQ ID NO: 4352272 - DNA, 25 bp, Homo sapien
ctcggggtctccgggcggcgagtcg

SEQ ID NO: 4352273 - DNA, 25 bp, Homo sapien
gcggcgagtcgggggacgcgctggc

SEQ ID NO: 4352274 - DNA, 25 bp, Homo sapien
cctaccccaaagcaaacgctggaga

SEQ ID NO: 4352275 - DNA, 25 bp, Homo sapien
ccttttccggtggaagtgacgccat

SEQ ID NO: 4352276 - DNA, 25 bp, Homo sapien
gcggccgcgcttgccttttccggtg

SEQ ID NO: 4352277 - DNA, 25 bp, Homo sapien
tggagaacccggaaattgcccagaa

SEQ ID NO: 4352278 - DNA, 25 bp, Homo sapien
actggatcgtacattcttcctcctc

SEQ ID NO: 4352279 - DNA, 25 bp, Homo sapien
cactggatcgtacattcttcctcct

SEQ ID NO: 4352280 - DNA, 25 bp, Homo sapien
tcactggatcgtacattcttcctcc

SEQ ID NO: 4352281 - DNA, 25 bp, Homo sapien
cagacaagatcaggcgcattcaggg

SEQ ID NO: 4352282 - DNA, 25 bp, Homo sapien
ccaagatcagacaagatcaggcgca

SEQ ID NO: 4352283 - DNA, 25 bp, Homo sapien
cccatccaagtactagcaaggcctg

SEQ ID NO: 4352284 - DNA, 25 bp, Homo sapien
aagatcagacaagatcaggcgcatt

SEQ ID NO: 4352285 - DNA, 25 bp, Homo sapien
caccatctaccacctttcttagcag

SEQ ID NO: 4352286 - DNA, 25 bp, Homo sapien
tcaaacccacaccatctaccacctt

SEQ ID NO: 4352287 - DNA, 25 bp, Homo sapien
acctttcttagcagaccatttcacc

SEQ ID NO: 4352288 - DNA, 25 bp, Homo sapien
tcttagcagaccatttcacctgcac

SEQ ID NO: 4352289 - DNA, 25 bp, Homo sapien
aggtgcaatcctgcccacatatggg

SEQ ID NO: 4352290 - DNA, 25 bp, Homo sapien
tgtgcccctgggtctaatccggatt

SEQ ID NO: 4352291 - DNA, 25 bp, Homo sapien
caagtaatgtctgtgcaccaccttt

SEQ ID NO: 4352292 - DNA, 25 bp, Homo sapien
tacaacagccaggagagatactacg

SEQ ID NO: 4352293 - DNA, 25 bp, Homo sapien
agatctgttggagggatgctgagaa

SEQ ID NO: 4352294 - DNA, 25 bp, Homo sapien
ggatgctgagaaaaagccacataat

SEQ ID NO: 4352295 - DNA, 25 bp, Homo sapien
ctggacggcagaagagggcactgga

SEQ ID NO: 4352296 - DNA, 25 bp, Homo sapien
atgcaggctggcagatctgttggag

SEQ ID NO: 4352297 - DNA, 25 bp, Homo sapien
aatcagagagtcaccccttgcacat

SEQ ID NO: 4352298 - DNA, 25 bp, Homo sapien
tccgatattgtgagtttggatccaa

SEQ ID NO: 4352299 - DNA, 25 bp, Homo sapien
tgattttaatctccgatattgtgag

SEQ ID NO: 4352300 - DNA, 25 bp, Homo sapien
tgagtttggatccaatcagagagtc

SEQ ID NO: 4352301 - DNA, 25 bp, Homo sapien
ctggattacatttatcaatttgcgt

SEQ ID NO: 4352302 - DNA, 25 bp, Homo sapien
gattacatttatcaatttgcgtata

SEQ ID NO: 4352303 - DNA, 25 bp, Homo sapien
tacatttatcaatttgcgtatattg

SEQ ID NO: 4352304 - DNA, 25 bp, Homo sapien
acatttatcaatttgcgtatattga

SEQ ID NO: 4352305 - DNA, 25 bp, Homo sapien
ccagaccactgcctagagcctgctg

SEQ ID NO: 4352306 - DNA, 25 bp, Homo sapien
aatccagaccactgcctagagcctg

SEQ ID NO: 4352307 - DNA, 25 bp, Homo sapien
atccagaccactgcctagagcctgc

SEQ ID NO: 4352308 - DNA, 25 bp, Homo sapien
gaatccagaccactgcctagagcct

SEQ ID NO: 4352309 - DNA, 25 bp, Homo sapien
tgtcccacaggaagcttgagggcgg

SEQ ID NO: 4352310 - DNA, 25 bp, Homo sapien
cacaggaagcttgagggcgggaagt

SEQ ID NO: 4352311 - DNA, 25 bp, Homo sapien
tgagggcgggaagttttccagccca

SEQ ID NO: 4352312 - DNA, 25 bp, Homo sapien
gcttgagggcgggaagttttccagc

SEQ ID NO: 4352313 - DNA, 25 bp, Homo sapien
tggcaccgagcgagccgcgatgaca

SEQ ID NO: 4352314 - DNA, 25 bp, Homo sapien
gcaggatttcgagggacacctggtg

SEQ ID NO: 4352315 - DNA, 25 bp, Homo sapien
tgcctgtcattctgcagttctagtg

SEQ ID NO: 4352316 - DNA, 25 bp, Homo sapien
actgcgcagataggactggtggcac

SEQ ID NO: 4352317 - DNA, 25 bp, Homo sapien
gagcaacagacaagagttacagaca

SEQ ID NO: 4352318 - DNA, 25 bp, Homo sapien
tcttttgtgccctgagtagcagacc

SEQ ID NO: 4352319 - DNA, 25 bp, Homo sapien
taccctcaactactggccaagaagg

SEQ ID NO: 4352320 - DNA, 25 bp, Homo sapien
tagttcttcctaaacagagagcaac

SEQ ID NO: 4352321 - DNA, 25 bp, Homo sapien
ccttgtgcggatgggacggacttcc

SEQ ID NO: 4352322 - DNA, 25 bp, Homo sapien
tcagtctaggcgatggtggttctct

SEQ ID NO: 4352323 - DNA, 25 bp, Homo sapien
taaccaatacttcggctactcggga

SEQ ID NO: 4352324 - DNA, 25 bp, Homo sapien
tgagaaagacccgagataggccttg

SEQ ID NO: 4352325 - DNA, 25 bp, Homo sapien
gctgtgccttgatggtaccaggaaa

SEQ ID NO: 4352326 - DNA, 25 bp, Homo sapien
tggtcacacggaaagataaggaagc

SEQ ID NO: 4352327 - DNA, 25 bp, Homo sapien
agagccccgaatcacgctgtggtca

SEQ ID NO: 4352328 - DNA, 25 bp, Homo sapien
cctgtggaggagtatgcgaactgcc

SEQ ID NO: 4352329 - DNA, 25 bp, Homo sapien
taactgactgctcgggcaacttttg

SEQ ID NO: 4352330 - DNA, 25 bp, Homo sapien
gaaaccaaggaccttctgttcagag

SEQ ID NO: 4352331 - DNA, 25 bp, Homo sapien
gagatgacacagtatgtttggccaa

SEQ ID NO: 4352332 - DNA, 25 bp, Homo sapien
tatttggaagcaacgtaactgactg

SEQ ID NO: 4352333 - DNA, 25 bp, Homo sapien
tgagtgaacaatctaagcccggcat

SEQ ID NO: 4352334 - DNA, 25 bp, Homo sapien
cccggcatgtatgacaggctagact

SEQ ID NO: 4352335 - DNA, 25 bp, Homo sapien
ttccacaggagtatgcagataaggg

SEQ ID NO: 4352336 - DNA, 25 bp, Homo sapien
tagggcagttagtctttccacagga

SEQ ID NO: 4352337 - DNA, 25 bp, Homo sapien
aaatctcagaggtagggctgccacc

SEQ ID NO: 4352338 - DNA, 25 bp, Homo sapien
gtgagcctcgcccataagaaacaag

SEQ ID NO: 4352339 - DNA, 25 bp, Homo sapien
tgaagatgggaacgcagatgatcca

SEQ ID NO: 4352340 - DNA, 25 bp, Homo sapien
tagaaaagagcactgggagaacggc

SEQ ID NO: 4352341 - DNA, 25 bp, Homo sapien
ggtattatcctcctgatagtcataa

SEQ ID NO: 4352342 - DNA, 25 bp, Homo sapien
aaggagcatacttactctcaactct

SEQ ID NO: 4352343 - DNA, 25 bp, Homo sapien
gtattatcctcctgatagtcataat

SEQ ID NO: 4352344 - DNA, 25 bp, Homo sapien
cagcagtcagtatcgcatgtccttc

SEQ ID NO: 4352345 - DNA, 25 bp, Homo sapien
catgattggtatccctaggtctgag

SEQ ID NO: 4352346 - DNA, 25 bp, Homo sapien
ttcctctgcattcgtgcccacggag

SEQ ID NO: 4352347 - DNA, 25 bp, Homo sapien
taaaaacttatcagcaggcagcagt

SEQ ID NO: 4352348 - DNA, 25 bp, Homo sapien
tggctgaatagggtcggccctactt

SEQ ID NO: 4352349 - DNA, 25 bp, Homo sapien
tagggtcggccctactttcagcaga

SEQ ID NO: 4352350 - DNA, 25 bp, Homo sapien
cagttttcaacagccccagctctcc

SEQ ID NO: 4352351 - DNA, 25 bp, Homo sapien
ctctcctgggcgttgattttcctag

SEQ ID NO: 4352352 - DNA, 25 bp, Homo sapien
tagtgagatagcacctgagtcccag

SEQ ID NO: 4352353 - DNA, 25 bp, Homo sapien
tacctagacaccttgcggcaggagc

SEQ ID NO: 4352354 - DNA, 25 bp, Homo sapien
tgctgacgctaggtaaaaggcggcc

SEQ ID NO: 4352355 - DNA, 25 bp, Homo sapien
taggaaccaccattcgcgtgaggct

SEQ ID NO: 4352356 - DNA, 25 bp, Homo sapien
gaacactgaggaagactacaagtct

SEQ ID NO: 4352357 - DNA, 25 bp, Homo sapien
gaactgtaagtgtgaaagaggcctg

SEQ ID NO: 4352358 - DNA, 25 bp, Homo sapien
tgttcaccactcaataatgcctgtg

SEQ ID NO: 4352359 - DNA, 25 bp, Homo sapien
tttacatgccaacttgagaacggtg

SEQ ID NO: 4352360 - DNA, 25 bp, Homo sapien
tggagctgcgagtttatcaccctgt

SEQ ID NO: 4352361 - DNA, 25 bp, Homo sapien
gccaagactgcagttgggagcagct

SEQ ID NO: 4352362 - DNA, 25 bp, Homo sapien
cagcttcgggcattggcaaactcct

SEQ ID NO: 4352363 - DNA, 25 bp, Homo sapien
cagtggttcctttcccgtctggagc

SEQ ID NO: 4352364 - DNA, 25 bp, Homo sapien
taatgccaagggtctagtgtgttct

SEQ ID NO: 4352365 - DNA, 25 bp, Homo sapien
tccccacatgtgaagacaggtacaa

SEQ ID NO: 4352366 - DNA, 25 bp, Homo sapien
tggtccctggaaacaaatccgccta

SEQ ID NO: 4352367 - DNA, 25 bp, Homo sapien
gcttgtcacaaacccttggagtcat

SEQ ID NO: 4352368 - DNA, 25 bp, Homo sapien
catggtaaagaaaacagcctgtctg

SEQ ID NO: 4352369 - DNA, 25 bp, Homo sapien
tgctgtcttcttaaacacaaggctt

SEQ ID NO: 4352370 - DNA, 25 bp, Homo sapien
agttctctgtagatttctgaagtgc

SEQ ID NO: 4352371 - DNA, 25 bp, Homo sapien
gaagtgcatattcattgatgccaag

SEQ ID NO: 4352372 - DNA, 25 bp, Homo sapien
tctccagtccgggccttggtagcct

SEQ ID NO: 4352373 - DNA, 25 bp, Homo sapien
tccactaccaggtgcctgacagtct

SEQ ID NO: 4352374 - DNA, 25 bp, Homo sapien
accaggtgcctgacagtctactggg

SEQ ID NO: 4352375 - DNA, 25 bp, Homo sapien
ctagtgggtatggacacgggcagac

SEQ ID NO: 4352376 - DNA, 25 bp, Homo sapien
cttgactcctaagcgctgtgtgggc

SEQ ID NO: 4352377 - DNA, 25 bp, Homo sapien
aacgggactgccacttttccactgg

SEQ ID NO: 4352378 - DNA, 25 bp, Homo sapien
tctctcagtagtgtgagctccatca

SEQ ID NO: 4352379 - DNA, 25 bp, Homo sapien
gtgtggtttccctgctctctcagta

SEQ ID NO: 4352380 - DNA, 25 bp, Homo sapien
tcttttagtctggagataactgaga

SEQ ID NO: 4352381 - DNA, 25 bp, Homo sapien
tctggagataactgagacctggagg

SEQ ID NO: 4352382 - DNA, 25 bp, Homo sapien
gttcctctttggattggtcccagga

SEQ ID NO: 4352383 - DNA, 25 bp, Homo sapien
gggccactcagggatgttcctaact

SEQ ID NO: 4352384 - DNA, 25 bp, Homo sapien
cccttcggagttggtggacagccca

SEQ ID NO: 4352385 - DNA, 25 bp, Homo sapien
cagcaaagggctttaggtagtggac

SEQ ID NO: 4352386 - DNA, 25 bp, Homo sapien
gctttaggtagtggacataccaccc

SEQ ID NO: 4352387 - DNA, 25 bp, Homo sapien
tagtggacataccacccaggcatga

SEQ ID NO: 4352388 - DNA, 25 bp, Homo sapien
gggtgcccatgacaatcaatcagag

SEQ ID NO: 4352389 - DNA, 25 bp, Homo sapien
aacatggcggctatgtcttctgagc

SEQ ID NO: 4352390 - DNA, 25 bp, Homo sapien
ctcactcatatgctgggaagaacct

SEQ ID NO: 4352391 - DNA, 25 bp, Homo sapien
gaaggaaccatctaaacccctgctg

SEQ ID NO: 4352392 - DNA, 25 bp, Homo sapien
tctgctcggttgatgcacacagaca

SEQ ID NO: 4352393 - DNA, 25 bp, Homo sapien
acaatctgctcggttgatgcacaca

SEQ ID NO: 4352394 - DNA, 25 bp, Homo sapien
gagtgtgcgcacaatctgctcggtt

SEQ ID NO: 4352395 - DNA, 25 bp, Homo sapien
gcagttcggaaacgagtgtgcgcac

SEQ ID NO: 4352396 - DNA, 25 bp, Homo sapien
gttcagctgcccctcaagtggctca

SEQ ID NO: 4352397 - DNA, 25 bp, Homo sapien
tcagctgcccctcaagtggctcaga

SEQ ID NO: 4352398 - DNA, 25 bp, Homo sapien
ctgttcagctgcccctcaagtggct

SEQ ID NO: 4352399 - DNA, 25 bp, Homo sapien
cttctgttcagctgcccctcaagtg

SEQ ID NO: 4352400 - DNA, 25 bp, Homo sapien
gatgatgcagacgttgcaccccaga

SEQ ID NO: 4352401 - DNA, 25 bp, Homo sapien
tctgaccaagggaaactgctgccaa

SEQ ID NO: 4352402 - DNA, 25 bp, Homo sapien
tattgtcacaactggtatcccaggg

SEQ ID NO: 4352403 - DNA, 25 bp, Homo sapien
ggatcacacaactgcagccatggtg

SEQ ID NO: 4352404 - DNA, 25 bp, Homo sapien
tgtatgtatgatcacccagcaagtt

SEQ ID NO: 4352405 - DNA, 25 bp, Homo sapien
cccagcaagttaggagtgatcagaa

SEQ ID NO: 4352406 - DNA, 25 bp, Homo sapien
atcttacactcaactttcctgatgc

SEQ ID NO: 4352407 - DNA, 25 bp, Homo sapien
tcagaaccaatgtgtttccacttgt

SEQ ID NO: 4352408 - DNA, 25 bp, Homo sapien
ttgttgataagcttttaagattcac

SEQ ID NO: 4352409 - DNA, 25 bp, Homo sapien
aggagctttgttgataagcttttaa

SEQ ID NO: 4352410 - DNA, 25 bp, Homo sapien
ctgcagaacaggagctttgttgata

SEQ ID NO: 4352411 - DNA, 25 bp, Homo sapien
gaacaggagctttgttgataagctt

SEQ ID NO: 4352412 - DNA, 25 bp, Homo sapien
gcaatgccatgacatcttcttcaag

SEQ ID NO: 4352413 - DNA, 25 bp, Homo sapien
tttgccctctgctaacccatctgga

SEQ ID NO: 4352414 - DNA, 25 bp, Homo sapien
gaaggccaagaggatcctgctaatc

SEQ ID NO: 4352415 - DNA, 25 bp, Homo sapien
tattatggaaccttaactctgtgcc

SEQ ID NO: 4352416 - DNA, 25 bp, Homo sapien
tgtggactcctgtaaattctctcga

SEQ ID NO: 4352417 - DNA, 25 bp, Homo sapien
ggagcgccatggaaccactgagatg

SEQ ID NO: 4352418 - DNA, 25 bp, Homo sapien
tattcccgtgggctatgtttgcctg

SEQ ID NO: 4352419 - DNA, 25 bp, Homo sapien
gaaacacagtccacggtgccttgga

SEQ ID NO: 4352420 - DNA, 25 bp, Homo sapien
tatcagtcctgccagattctgctgc

SEQ ID NO: 4352421 - DNA, 25 bp, Homo sapien
tgagcacatgtatctccgtgaggat

SEQ ID NO: 4352422 - DNA, 25 bp, Homo sapien
gatgagctctggcatacagcctcct

SEQ ID NO: 4352423 - DNA, 25 bp, Homo sapien
tgaaacacgttcaaacattggtcct

SEQ ID NO: 4352424 - DNA, 25 bp, Homo sapien
cccatctatgacatgcccagcagca

SEQ ID NO: 4352425 - DNA, 25 bp, Homo sapien
atggtcattcatcccatctatgaca

SEQ ID NO: 4352426 - DNA, 25 bp, Homo sapien
ccatctatgacatgcccagcagcag

SEQ ID NO: 4352427 - DNA, 25 bp, Homo sapien
cagatggtcattcatcccatctatg

SEQ ID NO: 4352428 - DNA, 25 bp, Homo sapien
ttttcagaagtacacatggcacccc

SEQ ID NO: 4352429 - DNA, 25 bp, Homo sapien
tggtctcagctccacacgaggttga

SEQ ID NO: 4352430 - DNA, 25 bp, Homo sapien
caagcaaggagtgtcatgggaagcc

SEQ ID NO: 4352431 - DNA, 25 bp, Homo sapien
cagccgttaagagtgatgtgatccc

SEQ ID NO: 4352432 - DNA, 25 bp, Homo sapien
gcaggagcagccgccctcgctggcc

SEQ ID NO: 4352433 - DNA, 25 bp, Homo sapien
ggtttgtccagcttgatgtcgatca

SEQ ID NO: 4352434 - DNA, 25 bp, Homo sapien
tggggtttgtccagcttgatgtcga

SEQ ID NO: 4352435 - DNA, 25 bp, Homo sapien
cctggggtttgtccagcttgatgtc

SEQ ID NO: 4352436 - DNA, 25 bp, Homo sapien
tatggtgagccaaaacgtctgaaga

SEQ ID NO: 4352437 - DNA, 25 bp, Homo sapien
tctatgagatgccagttaaacccca

SEQ ID NO: 4352438 - DNA, 25 bp, Homo sapien
cctggttgagaactagtggtctagc

SEQ ID NO: 4352439 - DNA, 25 bp, Homo sapien
tggccactgttacagcattacgttc

SEQ ID NO: 4352440 - DNA, 25 bp, Homo sapien
gacccatgtctaaataatgtcccag

SEQ ID NO: 4352441 - DNA, 25 bp, Homo sapien
tccttgttacgccacatgctgctga

SEQ ID NO: 4352442 - DNA, 25 bp, Homo sapien
agaatgactggacccatgtctaaat

SEQ ID NO: 4352443 - DNA, 25 bp, Homo sapien
tgctgaaatgcagtgctcaggggct

SEQ ID NO: 4352444 - DNA, 25 bp, Homo sapien
ttctcacaagcctcaagaggttaga

SEQ ID NO: 4352445 - DNA, 25 bp, Homo sapien
caagaggttagatatgtgcctttcc

SEQ ID NO: 4352446 - DNA, 25 bp, Homo sapien
ctttccggcaggcatggccagagca

SEQ ID NO: 4352447 - DNA, 25 bp, Homo sapien
tagatatgtgcctttccggcaggca

SEQ ID NO: 4352448 - DNA, 25 bp, Homo sapien
acattcagtgcccaatgtcccttct

SEQ ID NO: 4352449 - DNA, 25 bp, Homo sapien
tcaagtgtggcccatcacgggccac

SEQ ID NO: 4352450 - DNA, 25 bp, Homo sapien
ccctctgggtcaagtgtggcccatc

SEQ ID NO: 4352451 - DNA, 25 bp, Homo sapien
tgtggcccatcacgggccacattca

SEQ ID NO: 4352452 - DNA, 25 bp, Homo sapien
tagagccgacgccacacgtcgaaaa

SEQ ID NO: 4352453 - DNA, 25 bp, Homo sapien
tccattccgggtagagccgacgcca

SEQ ID NO: 4352454 - DNA, 25 bp, Homo sapien
cctggacattctccattccgggtag

SEQ ID NO: 4352455 - DNA, 25 bp, Homo sapien
gagccgacgccacacgtcgaaaaag

SEQ ID NO: 4352456 - DNA, 25 bp, Homo sapien
tgggcggctctgatctgcctgtctg

SEQ ID NO: 4352457 - DNA, 25 bp, Homo sapien
cagtcacagcctctactagtggcca

SEQ ID NO: 4352458 - DNA, 25 bp, Homo sapien
tagtggccaaaatgccactagggat

SEQ ID NO: 4352459 - DNA, 25 bp, Homo sapien
tagccattagtaggcaagggtaaaa

SEQ ID NO: 4352460 - DNA, 25 bp, Homo sapien
gtctcttcttgtcgttctgccagcc

SEQ ID NO: 4352461 - DNA, 25 bp, Homo sapien
ttgtctcttcttgtcgttctgccag

SEQ ID NO: 4352462 - DNA, 25 bp, Homo sapien
tcttgtctcttcttgtcgttctgcc

SEQ ID NO: 4352463 - DNA, 25 bp, Homo sapien
ttcttgtctcttcttgtcgttctgc

SEQ ID NO: 4352464 - DNA, 25 bp, Homo sapien
acagggcaaaccatcactgcatcca

SEQ ID NO: 4352465 - DNA, 25 bp, Homo sapien
agcactgtccacacagggcaaacca

SEQ ID NO: 4352466 - DNA, 25 bp, Homo sapien
gtccacacagggcaaaccatcactg

SEQ ID NO: 4352467 - DNA, 25 bp, Homo sapien
accatcactgcatccagaaggccag

SEQ ID NO: 4352468 - DNA, 25 bp, Homo sapien
cacagcttgccaagggttcccagca

SEQ ID NO: 4352469 - DNA, 25 bp, Homo sapien
acagcttgccaagggttcccagcaa

SEQ ID NO: 4352470 - DNA, 25 bp, Homo sapien
cagcttgccaagggttcccagcaat

SEQ ID NO: 4352471 - DNA, 25 bp, Homo sapien
cagtcttcgcactggtctcaatgaa

SEQ ID NO: 4352472 - DNA, 25 bp, Homo sapien
tctcaatgaacatgacgctcagttc

SEQ ID NO: 4352473 - DNA, 25 bp, Homo sapien
gctcagttctttggcgcgctgctcc

SEQ ID NO: 4352474 - DNA, 25 bp, Homo sapien
tgcttcacgttgtagccagtcttcg

SEQ ID NO: 4352475 - DNA, 25 bp, Homo sapien
gctaagcaggctacggccataggtt

SEQ ID NO: 4352476 - DNA, 25 bp, Homo sapien
agagaaagcttcatgccagacgcag

SEQ ID NO: 4352477 - DNA, 25 bp, Homo sapien
cagacgcagccacaaaccaggctaa

SEQ ID NO: 4352478 - DNA, 25 bp, Homo sapien
gccataggtttgtggtctgaatgct

SEQ ID NO: 4352479 - DNA, 25 bp, Homo sapien
tcgtcgatccacttagaggtctgtt

SEQ ID NO: 4352480 - DNA, 25 bp, Homo sapien
tctctgtcctgacgtcgtcgatcca

SEQ ID NO: 4352481 - DNA, 25 bp, Homo sapien
cttatcagccaggtccgtcttgttg

SEQ ID NO: 4352482 - DNA, 25 bp, Homo sapien
tagaggtctgttggaaggagttgag

SEQ ID NO: 4352483 - DNA, 25 bp, Homo sapien
tggcgggggcatgcaccagcgcggg

SEQ ID NO: 4352484 - DNA, 25 bp, Homo sapien
catgcaccagcgcggggacatgcat

SEQ ID NO: 4352485 - DNA, 25 bp, Homo sapien
gggtggcgggggcatgcaccagcgc

SEQ ID NO: 4352486 - DNA, 25 bp, Homo sapien
ggggcatgcaccagcgcggggacat

SEQ ID NO: 4352487 - DNA, 25 bp, Homo sapien
gatgtagctggggatcaggctgcgg

SEQ ID NO: 4352488 - DNA, 25 bp, Homo sapien
tggggatcaggctgcggaacctctc

SEQ ID NO: 4352489 - DNA, 25 bp, Homo sapien
atcaggctgcggaacctctcctgac

SEQ ID NO: 4352490 - DNA, 25 bp, Homo sapien
aggctgcggaacctctcctgaccag

SEQ ID NO: 4352491 - DNA, 25 bp, Homo sapien
ctgtctcagggagggcaggaccatg

SEQ ID NO: 4352492 - DNA, 25 bp, Homo sapien
cagggagggcaggaccatgggcaga

SEQ ID NO: 4352493 - DNA, 25 bp, Homo sapien
aggaccatgggcagaggggtcagtg

SEQ ID NO: 4352494 - DNA, 25 bp, Homo sapien
tctcagggagggcaggaccatgggc

SEQ ID NO: 4352495 - DNA, 25 bp, Homo sapien
gactgggagagccgggctctgcaat

SEQ ID NO: 4352496 - DNA, 25 bp, Homo sapien
cgggctctgcaatgctggcatcacc

SEQ ID NO: 4352497 - DNA, 25 bp, Homo sapien
ggctctgcaatgctggcatcaccag

SEQ ID NO: 4352498 - DNA, 25 bp, Homo sapien
ggagagccgggctctgcaatgctgg

SEQ ID NO: 4352499 - DNA, 25 bp, Homo sapien
tggtttttgacaagaagtcaatccc

SEQ ID NO: 4352500 - DNA, 25 bp, Homo sapien
catggtttttgacaagaagtcaatc

SEQ ID NO: 4352501 - DNA, 25 bp, Homo sapien
atggtttttgacaagaagtcaatcc

SEQ ID NO: 4352502 - DNA, 25 bp, Homo sapien
ggtcccttaactgtccactctctca

SEQ ID NO: 4352503 - DNA, 25 bp, Homo sapien
caacgaggaacctgaacaaggccaa

SEQ ID NO: 4352504 - DNA, 25 bp, Homo sapien
tcagacctgttctagccacactctc

SEQ ID NO: 4352505 - DNA, 25 bp, Homo sapien
gaggcagcaacgaggaacctgaaca

SEQ ID NO: 4352506 - DNA, 25 bp, Homo sapien
actgagccactgaagaacttctata

SEQ ID NO: 4352507 - DNA, 25 bp, Homo sapien
ctgagccactgaagaacttctatag

SEQ ID NO: 4352508 - DNA, 25 bp, Homo sapien
ggagatggcgccaaagcataggcat

SEQ ID NO: 4352509 - DNA, 25 bp, Homo sapien
tggagatggcgccaaagcataggca

SEQ ID NO: 4352510 - DNA, 25 bp, Homo sapien
tgtggagatggcgccaaagcatagg

SEQ ID NO: 4352511 - DNA, 25 bp, Homo sapien
ctgtggagatggcgccaaagcatag

SEQ ID NO: 4352512 - DNA, 25 bp, Homo sapien
gaccagcctccactttatattttag

SEQ ID NO: 4352513 - DNA, 25 bp, Homo sapien
taagagatagctcaaacacttcaag

SEQ ID NO: 4352514 - DNA, 25 bp, Homo sapien
ctcttaataccgtcacaatgggaat

SEQ ID NO: 4352515 - DNA, 25 bp, Homo sapien
cctataatgctgttcagggcctgcc

SEQ ID NO: 4352516 - DNA, 25 bp, Homo sapien
caatatctggctcaaaatgcaagcc

SEQ ID NO: 4352517 - DNA, 25 bp, Homo sapien
cctgggagcattttgccactagtat

SEQ ID NO: 4352518 - DNA, 25 bp, Homo sapien
gtggcatgaacacagatccctgtag

SEQ ID NO: 4352519 - DNA, 25 bp, Homo sapien
catgcctggcaaatccttgattcta

SEQ ID NO: 4352520 - DNA, 25 bp, Homo sapien
tcctttccgatgctagtttttcctc

SEQ ID NO: 4352521 - DNA, 25 bp, Homo sapien
tctgtagtacagtcatatctgtggc

SEQ ID NO: 4352522 - DNA, 25 bp, Homo sapien
ctctgcatctgtagtacagtcatat

SEQ ID NO: 4352523 - DNA, 25 bp, Homo sapien
agtacagtcatatctgtggctccta

SEQ ID NO: 4352524 - DNA, 25 bp, Homo sapien
gaaaaatggcttagcttccctggcc

SEQ ID NO: 4352525 - DNA, 25 bp, Homo sapien
cagtgttggcaaggtctgagtgctc

SEQ ID NO: 4352526 - DNA, 25 bp, Homo sapien
tattagtgaccgactgacctagagg

SEQ ID NO: 4352527 - DNA, 25 bp, Homo sapien
ttaagagaagctgtagaacccaccc

SEQ ID NO: 4352528 - DNA, 25 bp, Homo sapien
accagcaaaggcagtgcgagggctt

SEQ ID NO: 4352529 - DNA, 25 bp, Homo sapien
cacggggaaccttctggcttgatcc

SEQ ID NO: 4352530 - DNA, 25 bp, Homo sapien
gttttcatcattgggtcctacctca

SEQ ID NO: 4352531 - DNA, 25 bp, Homo sapien
ccgagtctctgtttgttaaggtcat

SEQ ID NO: 4352532 - DNA, 25 bp, Homo sapien
tgtcactgaggatagggttaaacgc

SEQ ID NO: 4352533 - DNA, 25 bp, Homo sapien
cagctgtcactgaggatagggttaa

SEQ ID NO: 4352534 - DNA, 25 bp, Homo sapien
gctgtcactgaggatagggttaaac

SEQ ID NO: 4352535 - DNA, 25 bp, Homo sapien
tcactgaggatagggttaaacgccc

SEQ ID NO: 4352536 - DNA, 25 bp, Homo sapien
aaggcagggccagattctgtggcca

SEQ ID NO: 4352537 - DNA, 25 bp, Homo sapien
gctgaaggcagggccagattctgtg

SEQ ID NO: 4352538 - DNA, 25 bp, Homo sapien
cagggccagattctgtggccaggcc

SEQ ID NO: 4352539 - DNA, 25 bp, Homo sapien
gggccagattctgtggccaggccac

SEQ ID NO: 4352540 - DNA, 25 bp, Homo sapien
aagagaggtcagccactgccagatg

SEQ ID NO: 4352541 - DNA, 25 bp, Homo sapien
aaagagaggtcagccactgccagat

SEQ ID NO: 4352542 - DNA, 25 bp, Homo sapien
tcaaagagaggtcagccactgccag

SEQ ID NO: 4352543 - DNA, 25 bp, Homo sapien
caaagagaggtcagccactgccaga

SEQ ID NO: 4352544 - DNA, 25 bp, Homo sapien
tgtcgaagctgtcgtacatgaacct

SEQ ID NO: 4352545 - DNA, 25 bp, Homo sapien
tacatgaacctcgtaatcagagacg

SEQ ID NO: 4352546 - DNA, 25 bp, Homo sapien
ctggtatgtgttgtcgaagctgtcg

SEQ ID NO: 4352547 - DNA, 25 bp, Homo sapien
ctcgtaatcagagacgtcttcccga

SEQ ID NO: 4352548 - DNA, 25 bp, Homo sapien
aggtgttcagtcatggcatctgagc

SEQ ID NO: 4352549 - DNA, 25 bp, Homo sapien
atggcatctgagctaggctcttcta

SEQ ID NO: 4352550 - DNA, 25 bp, Homo sapien
gagagaggtgttcagtcatggcatc

SEQ ID NO: 4352551 - DNA, 25 bp, Homo sapien
tgcaaaacaacaaggagagaggtgt

SEQ ID NO: 4352552 - DNA, 25 bp, Homo sapien
gaggctcctctcgtacttgcccatg

SEQ ID NO: 4352553 - DNA, 25 bp, Homo sapien
tacactggaatggaagcctgccctt

SEQ ID NO: 4352554 - DNA, 25 bp, Homo sapien
agaacccagctgatgcaagaaccat

SEQ ID NO: 4352555 - DNA, 25 bp, Homo sapien
caaggtaagtgggtgcaaaacagga

SEQ ID NO: 4352556 - DNA, 25 bp, Homo sapien
ggcagtgacagaaatgccaactgct

SEQ ID NO: 4352557 - DNA, 25 bp, Homo sapien
agtgacagaaatgccaactgctgca

SEQ ID NO: 4352558 - DNA, 25 bp, Homo sapien
tcaccctgtgcagctcccctggggc

SEQ ID NO: 4352559 - DNA, 25 bp, Homo sapien
gggcctggcagtgacagaaatgcca

SEQ ID NO: 4352560 - DNA, 25 bp, Homo sapien
gtacatccacaagctgtgcctggtg

SEQ ID NO: 4352561 - DNA, 25 bp, Homo sapien
ctggcagtacatccacaagctgtgc

SEQ ID NO: 4352562 - DNA, 25 bp, Homo sapien
atttcccaggctggcagtacatcca

SEQ ID NO: 4352563 - DNA, 25 bp, Homo sapien
tcccatttcccaggctggcagtaca

SEQ ID NO: 4352564 - DNA, 25 bp, Homo sapien
acatacacttggcagcttcaaaaag

SEQ ID NO: 4352565 - DNA, 25 bp, Homo sapien
cacatacacttggcagcttcaaaaa

SEQ ID NO: 4352566 - DNA, 25 bp, Homo sapien
catacacttggcagcttcaaaaagg

SEQ ID NO: 4352567 - DNA, 25 bp, Homo sapien
tcagaggaacccttggccttggcag

SEQ ID NO: 4352568 - DNA, 25 bp, Homo sapien
tggccttggcagccatagtgctgac

SEQ ID NO: 4352569 - DNA, 25 bp, Homo sapien
cccttggccttggcagccatagtgc

SEQ ID NO: 4352570 - DNA, 25 bp, Homo sapien
ttggccttggcagccatagtgctga

SEQ ID NO: 4352571 - DNA, 25 bp, Homo sapien
ctgctaacccaggaagccctgcggt

SEQ ID NO: 4352572 - DNA, 25 bp, Homo sapien
gctcgctgctgctcaacttttctac

SEQ ID NO: 4352573 - DNA, 25 bp, Homo sapien
gctaacccaggaagccctgcggtct

SEQ ID NO: 4352574 - DNA, 25 bp, Homo sapien
ctgctcgctgctgctcaacttttct

SEQ ID NO: 4352575 - DNA, 25 bp, Homo sapien
tgggaacctccagcctttcattaaa

SEQ ID NO: 4352576 - DNA, 25 bp, Homo sapien
ctgtttgccctcttagccctcctct

SEQ ID NO: 4352577 - DNA, 25 bp, Homo sapien
aacacagaactggtccatcgtcctg

SEQ ID NO: 4352578 - DNA, 25 bp, Homo sapien
ccttcggtctcagcacttctatgga

SEQ ID NO: 4352579 - DNA, 25 bp, Homo sapien
cagcagtcccgcagaacacccatgg

SEQ ID NO: 4352580 - DNA, 25 bp, Homo sapien
ggaggagtccggaagggctgccagc

SEQ ID NO: 4352581 - DNA, 25 bp, Homo sapien
gagagggaggagtccggaagggctg

SEQ ID NO: 4352582 - DNA, 25 bp, Homo sapien
cagtttctggtcatatgccacatcc

SEQ ID NO: 4352583 - DNA, 25 bp, Homo sapien
aggaagtaacggagctgtgaagatg

SEQ ID NO: 4352584 - DNA, 25 bp, Homo sapien
gagtctgtcccactttttgccagcc

SEQ ID NO: 4352585 - DNA, 25 bp, Homo sapien
ggtgagtctgtcccactttttgcca

SEQ ID NO: 4352586 - DNA, 25 bp, Homo sapien
agatgaggtactcttcccctgagca

SEQ ID NO: 4352587 - DNA, 25 bp, Homo sapien
tcacgaggatgtagaccccacagtt

SEQ ID NO: 4352588 - DNA, 25 bp, Homo sapien
attctcaaaatctcgcaccctactt

SEQ ID NO: 4352589 - DNA, 25 bp, Homo sapien
tgccagatcacgaggatgtagaccc

SEQ ID NO: 4352590 - DNA, 25 bp, Homo sapien
ggcagaccttcgctttctttataaa

SEQ ID NO: 4352591 - DNA, 25 bp, Homo sapien
agaagtgcaggatagccccatcctt

SEQ ID NO: 4352592 - DNA, 25 bp, Homo sapien
aggatagccccatccttgttgcttg

SEQ ID NO: 4352593 - DNA, 25 bp, Homo sapien
gcaggatagccccatccttgttgct

SEQ ID NO: 4352594 - DNA, 25 bp, Homo sapien
aagtgcaggatagccccatccttgt

SEQ ID NO: 4352595 - DNA, 25 bp, Homo sapien
ccagagcagagctgaccagagctca

SEQ ID NO: 4352596 - DNA, 25 bp, Homo sapien
ggtcctgtcccgcaaggacagcctt

SEQ ID NO: 4352597 - DNA, 25 bp, Homo sapien
agccccatgcgagaggcctctggag

SEQ ID NO: 4352598 - DNA, 25 bp, Homo sapien
caggtgaacaggactggtctgcaga

SEQ ID NO: 4352599 - DNA, 25 bp, Homo sapien
ctcagtggattcccaaaatctcccc

SEQ ID NO: 4352600 - DNA, 25 bp, Homo sapien
aggcggccggcggtgcgggagccgg

SEQ ID NO: 4352601 - DNA, 25 bp, Homo sapien
gagagtaggagggcgaggggaggcg

SEQ ID NO: 4352602 - DNA, 25 bp, Homo sapien
ggtgctggcagccggggccgggaga

SEQ ID NO: 4352603 - DNA, 25 bp, Homo sapien
aggaaaaagcgaaggagcagggagg

SEQ ID NO: 4352604 - DNA, 25 bp, Homo sapien
ggcgcgctctttacgcccgaggcgc

SEQ ID NO: 4352605 - DNA, 25 bp, Homo sapien
ctgcggctgcgtgtccggcggcgga

SEQ ID NO: 4352606 - DNA, 25 bp, Homo sapien
tgggctgctgcggtcggcactggct

SEQ ID NO: 4352607 - DNA, 25 bp, Homo sapien
ggtcggcactggctgcggtgcgagg

SEQ ID NO: 4352608 - DNA, 25 bp, Homo sapien
tcccaaggtagaaggagtccaaatg

SEQ ID NO: 4352609 - DNA, 25 bp, Homo sapien
tttaatccaattccagagactgagc

SEQ ID NO: 4352610 - DNA, 25 bp, Homo sapien
ggttctcatcccaacgctaggctat

SEQ ID NO: 4352611 - DNA, 25 bp, Homo sapien
ttttttgaagctacaggcccactag

SEQ ID NO: 4352612 - DNA, 25 bp, Homo sapien
aaggcttattggttgcttgcacaag

SEQ ID NO: 4352613 - DNA, 25 bp, Homo sapien
ggactgaactacttatacacatagc

SEQ ID NO: 4352614 - DNA, 25 bp, Homo sapien
tctatatctcgattaaaatggtggt

SEQ ID NO: 4352615 - DNA, 25 bp, Homo sapien
cacatagccacacgaatgaatttca

SEQ ID NO: 4352616 - DNA, 25 bp, Homo sapien
taaaattctgtcagcgacgccccat

SEQ ID NO: 4352617 - DNA, 25 bp, Homo sapien
cacatgtagccccagtggcctttta

SEQ ID NO: 4352618 - DNA, 25 bp, Homo sapien
tggttgcatcttgcctctgttaaaa

SEQ ID NO: 4352619 - DNA, 25 bp, Homo sapien
tacaccctgaaatctggttgcatct

SEQ ID NO: 4352620 - DNA, 25 bp, Homo sapien
tctaaggcccctgtcaacaaactta

SEQ ID NO: 4352621 - DNA, 25 bp, Homo sapien
tgccctccaggcaaacatggtccag

SEQ ID NO: 4352622 - DNA, 25 bp, Homo sapien
gatctccaatccctagggaacgggc

SEQ ID NO: 4352623 - DNA, 25 bp, Homo sapien
cttccaggcacagttagagctcatc

SEQ ID NO: 4352624 - DNA, 25 bp, Homo sapien
aaacaaatgttggtccctatctggg

SEQ ID NO: 4352625 - DNA, 25 bp, Homo sapien
tatctgggacctctgaagtcacttt

SEQ ID NO: 4352626 - DNA, 25 bp, Homo sapien
tactgtggcccatttatagacctgt

SEQ ID NO: 4352627 - DNA, 25 bp, Homo sapien
cagatttaaaaaggggtgcctactg

SEQ ID NO: 4352628 - DNA, 25 bp, Homo sapien
ttagttgccccgctctgccttgaga

SEQ ID NO: 4352629 - DNA, 25 bp, Homo sapien
tccaggagggtactctgagctagga

SEQ ID NO: 4352630 - DNA, 25 bp, Homo sapien
agacacgtgagcactaacccaggag

SEQ ID NO: 4352631 - DNA, 25 bp, Homo sapien
tggttccccccaggtgagcaaggtg

SEQ ID NO: 4352632 - DNA, 25 bp, Homo sapien
gtgtcccggtgagcaactgtgtcca

SEQ ID NO: 4352633 - DNA, 25 bp, Homo sapien
tctctcccgcatggctaggatcaag

SEQ ID NO: 4352634 - DNA, 25 bp, Homo sapien
tagcagtgcgggatcttccaggact

SEQ ID NO: 4352635 - DNA, 25 bp, Homo sapien
gactagtcatagtggccgcacaggg

SEQ ID NO: 4352636 - DNA, 25 bp, Homo sapien
tataaacccaagagcagtgatgcgg

SEQ ID NO: 4352637 - DNA, 25 bp, Homo sapien
tctcagtggcctaagcacaaatggg

SEQ ID NO: 4352638 - DNA, 25 bp, Homo sapien
tgaacataccaaaggcctatcgagc

SEQ ID NO: 4352639 - DNA, 25 bp, Homo sapien
tgtgccatggacatagctgtttgcg

SEQ ID NO: 4352640 - DNA, 25 bp, Homo sapien
tctgacagatgtatatgacaacata

SEQ ID NO: 4352641 - DNA, 25 bp, Homo sapien
ctctgacagatgtatatgacaacat

SEQ ID NO: 4352642 - DNA, 25 bp, Homo sapien
tctctgacagatgtatatgacaaca

SEQ ID NO: 4352643 - DNA, 25 bp, Homo sapien
ccagaggtggcttccagtatgcttc

SEQ ID NO: 4352644 - DNA, 25 bp, Homo sapien
caagaagggtggcacttaagggtca

SEQ ID NO: 4352645 - DNA, 25 bp, Homo sapien
tactcctcggaatacgggctgaagt

SEQ ID NO: 4352646 - DNA, 25 bp, Homo sapien
gacagggaagtgcatgtgaagccac

SEQ ID NO: 4352647 - DNA, 25 bp, Homo sapien
ccttctgcacgttgtactccttgtt

SEQ ID NO: 4352648 - DNA, 25 bp, Homo sapien
catgcccagcgccttgtagcccatc

SEQ ID NO: 4352649 - DNA, 25 bp, Homo sapien
tcagatgaggcctgccgccttctgc

SEQ ID NO: 4352650 - DNA, 25 bp, Homo sapien
ctgcacgttgtactccttgttcttc

SEQ ID NO: 4352651 - DNA, 25 bp, Homo sapien
agaaccacatcattcccacgctggc

SEQ ID NO: 4352652 - DNA, 25 bp, Homo sapien
tcccacgctggcccgcggaaggtgt

SEQ ID NO: 4352653 - DNA, 25 bp, Homo sapien
accatccaggtgaggatcactttcc

SEQ ID NO: 4352654 - DNA, 25 bp, Homo sapien
ccaggtgaggatcactttcctcatt

SEQ ID NO: 4352655 - DNA, 25 bp, Homo sapien
agaacccaatagcactgcagctgga

SEQ ID NO: 4352656 - DNA, 25 bp, Homo sapien
agcaggaggctgcccccaatttttc

SEQ ID NO: 4352657 - DNA, 25 bp, Homo sapien
ctggacttggcccattgaggcaggt

SEQ ID NO: 4352658 - DNA, 25 bp, Homo sapien
gagccatgatgtggcccccctctgt

SEQ ID NO: 4352659 - DNA, 25 bp, Homo sapien
tgtctcggagagcatcgttgtcata

SEQ ID NO: 4352660 - DNA, 25 bp, Homo sapien
gttgtcatagtaggcgcaggcccct

SEQ ID NO: 4352661 - DNA, 25 bp, Homo sapien
aagcacagcgagttccaccggatgc

SEQ ID NO: 4352662 - DNA, 25 bp, Homo sapien
gcaggagtggtcaatggtgaggcca

SEQ ID NO: 4352663 - DNA, 25 bp, Homo sapien
ggttcagaaagccctggtcaggtgg

SEQ ID NO: 4352664 - DNA, 25 bp, Homo sapien
ctggaagagggttcagaaagccctg

SEQ ID NO: 4352665 - DNA, 25 bp, Homo sapien
ttcagaaagccctggtcaggtggaa

SEQ ID NO: 4352666 - DNA, 25 bp, Homo sapien
aagagggttcagaaagccctggtca

SEQ ID NO: 4352667 - DNA, 25 bp, Homo sapien
ctctggaaagcagaatagctttcag

SEQ ID NO: 4352668 - DNA, 25 bp, Homo sapien
gactctggaaagcagaatagctttc

SEQ ID NO: 4352669 - DNA, 25 bp, Homo sapien
agtgactctggaaagcagaatagct

SEQ ID NO: 4352670 - DNA, 25 bp, Homo sapien
aagcagaatagctttcagtgaagcc

SEQ ID NO: 4352671 - DNA, 25 bp, Homo sapien
tggctgtctaatattccggatgcca

SEQ ID NO: 4352672 - DNA, 25 bp, Homo sapien
cctggctgtctaatattccggatgc

SEQ ID NO: 4352673 - DNA, 25 bp, Homo sapien
tctaatattccggatgccacactac

SEQ ID NO: 4352674 - DNA, 25 bp, Homo sapien
ctgtctaatattccggatgccacac

SEQ ID NO: 4352675 - DNA, 25 bp, Homo sapien
gaaacgacaccttatagtaactgaa

SEQ ID NO: 4352676 - DNA, 25 bp, Homo sapien
ggcacagtgggctatacattatttc

SEQ ID NO: 4352677 - DNA, 25 bp, Homo sapien
aattaggtccctttactactgtgtg

SEQ ID NO: 4352678 - DNA, 25 bp, Homo sapien
ttgacctggcccctgggtaatgagg

SEQ ID NO: 4352679 - DNA, 25 bp, Homo sapien
ccagcaagcgcatcaacaagaactg

SEQ ID NO: 4352680 - DNA, 25 bp, Homo sapien
acaagaactgcaccccgatggcaaa

SEQ ID NO: 4352681 - DNA, 25 bp, Homo sapien
atcaacaagaactgcaccccgatgg

SEQ ID NO: 4352682 - DNA, 25 bp, Homo sapien
ctgcaccccgatggcaaatgacttt

SEQ ID NO: 4352683 - DNA, 25 bp, Homo sapien
agcagaggcacctgatgagtgactt

SEQ ID NO: 4352684 - DNA, 25 bp, Homo sapien
cacacactcccggtgggtgcttgtc

SEQ ID NO: 4352685 - DNA, 25 bp, Homo sapien
cacctgatgagtgacttgactccag

SEQ ID NO: 4352686 - DNA, 25 bp, Homo sapien
actcccggtgggtgcttgtcaggaa

SEQ ID NO: 4352687 - DNA, 25 bp, Homo sapien
taagcctctccttcttcacactaaa

SEQ ID NO: 4352688 - DNA, 25 bp, Homo sapien
tctttaaatcgttgtgggatcctgg

SEQ ID NO: 4352689 - DNA, 25 bp, Homo sapien
cacactaaatagcatcaattctgtc

SEQ ID NO: 4352690 - DNA, 25 bp, Homo sapien
cacccggcctacaaagtcatcttta

SEQ ID NO: 4352691 - DNA, 25 bp, Homo sapien
gacagtggtgtcaaaggaggcaaca

SEQ ID NO: 4352692 - DNA, 25 bp, Homo sapien
gctgcatagcgacttgccagggaga

SEQ ID NO: 4352693 - DNA, 25 bp, Homo sapien
tgtacctagggtttgacaggagtcc

SEQ ID NO: 4352694 - DNA, 25 bp, Homo sapien
gagtaagctcagaatgcaaggtcct

SEQ ID NO: 4352695 - DNA, 25 bp, Homo sapien
gctatcagggacacgaaggagatga

SEQ ID NO: 4352696 - DNA, 25 bp, Homo sapien
gggcacgatcctgtctttgctgaag

SEQ ID NO: 4352697 - DNA, 25 bp, Homo sapien
agatgaggaagatggccgggagcag

SEQ ID NO: 4352698 - DNA, 25 bp, Homo sapien
gagatgcaggctatcagggacacga

SEQ ID NO: 4352699 - DNA, 25 bp, Homo sapien
ggcatgttcctagcttacactaact

SEQ ID NO: 4352700 - DNA, 25 bp, Homo sapien
ggcttaagggaataaggcatgttcc

SEQ ID NO: 4352701 - DNA, 25 bp, Homo sapien
taagtaggcactaggcttgcccatc

SEQ ID NO: 4352702 - DNA, 25 bp, Homo sapien
tgtatgctgttacgggaaacttgcc

SEQ ID NO: 4352703 - DNA, 25 bp, Homo sapien
tgcttggaggttgcagagctcatgt

SEQ ID NO: 4352704 - DNA, 25 bp, Homo sapien
ccacagaccgggtggaagatagaat

SEQ ID NO: 4352705 - DNA, 25 bp, Homo sapien
gggagaggtactcgattccattgtc

SEQ ID NO: 4352706 - DNA, 25 bp, Homo sapien
gagctcatgttgatgttgctgcagc

SEQ ID NO: 4352707 - DNA, 25 bp, Homo sapien
ctgcggatgtatagaacttgatgtg

SEQ ID NO: 4352708 - DNA, 25 bp, Homo sapien
gcaggagactgcggatgtatagaac

SEQ ID NO: 4352709 - DNA, 25 bp, Homo sapien
gagactgcggatgtatagaacttga

SEQ ID NO: 4352710 - DNA, 25 bp, Homo sapien
caggagactgcggatgtatagaact

SEQ ID NO: 4352711 - DNA, 25 bp, Homo sapien
caaaggaacacaaaggatcatggag

SEQ ID NO: 4352712 - DNA, 25 bp, Homo sapien
cacagttggggtggagcatcccatg

SEQ ID NO: 4352713 - DNA, 25 bp, Homo sapien
gcatcccatgaagaacaaaggaaca

SEQ ID NO: 4352714 - DNA, 25 bp, Homo sapien
ctaggggggtagacttcggccacag

SEQ ID NO: 4352715 - DNA, 25 bp, Homo sapien
ttaaattgtaatcgaagtagctgac

SEQ ID NO: 4352716 - DNA, 25 bp, Homo sapien
cactgagctggatcactgagaagga

SEQ ID NO: 4352717 - DNA, 25 bp, Homo sapien
cgaagtagctgacattaattgagca

SEQ ID NO: 4352718 - DNA, 25 bp, Homo sapien
catgtgggctacaaacactgagctg

SEQ ID NO: 4352719 - DNA, 25 bp, Homo sapien
caatgacggaggagaaggtgcactg

SEQ ID NO: 4352720 - DNA, 25 bp, Homo sapien
gtggagaggccagcaatgacggagg

SEQ ID NO: 4352721 - DNA, 25 bp, Homo sapien
gaagagtgagttcatcaggagcctc

SEQ ID NO: 4352722 - DNA, 25 bp, Homo sapien
caggaccaccaggacgaagagtgag

SEQ ID NO: 4352723 - DNA, 25 bp, Homo sapien
ctgtgaacagaccgctgtcaaggct

SEQ ID NO: 4352724 - DNA, 25 bp, Homo sapien
gtgaacagaccgctgtcaaggctct

SEQ ID NO: 4352725 - DNA, 25 bp, Homo sapien
gaacagaccgctgtcaaggctctgg

SEQ ID NO: 4352726 - DNA, 25 bp, Homo sapien
tgaacagaccgctgtcaaggctctg

SEQ ID NO: 4352727 - DNA, 25 bp, Homo sapien
tccaacttccttgcttcatctgctg

SEQ ID NO: 4352728 - DNA, 25 bp, Homo sapien
caccagggagcctcttgacttggcc

SEQ ID NO: 4352729 - DNA, 25 bp, Homo sapien
gaatgctctcctgaagcaaacagca

SEQ ID NO: 4352730 - DNA, 25 bp, Homo sapien
agcacctgcatttccgtgagcctgg

SEQ ID NO: 4352731 - DNA, 25 bp, Homo sapien
gcctggtgttttggccgacaatcag

SEQ ID NO: 4352732 - DNA, 25 bp, Homo sapien
catgggagggcatccagagaatgct

SEQ ID NO: 4352733 - DNA, 25 bp, Homo sapien
ggctctgacagcattaggatcctgc

SEQ ID NO: 4352734 - DNA, 25 bp, Homo sapien
tctgaactacctttcagatgcaagg

SEQ ID NO: 4352735 - DNA, 25 bp, Homo sapien
gcactttcttgggtatactacccca

SEQ ID NO: 4352736 - DNA, 25 bp, Homo sapien
cctgagcctaaaggtgagtgctgct

SEQ ID NO: 4352737 - DNA, 25 bp, Homo sapien
cagcacctgcatgatgtgtagccaa

SEQ ID NO: 4352738 - DNA, 25 bp, Homo sapien
tattttgggacttgaagcctaggca

SEQ ID NO: 4352739 - DNA, 25 bp, Homo sapien
gagattatacacctggccaactcag

SEQ ID NO: 4352740 - DNA, 25 bp, Homo sapien
gggcatccaccctaggaatgtctat

SEQ ID NO: 4352741 - DNA, 25 bp, Homo sapien
tcacccgggaccaagttaactgcag

SEQ ID NO: 4352742 - DNA, 25 bp, Homo sapien
gctgaagaaatgagcaggcctagcc

SEQ ID NO: 4352743 - DNA, 25 bp, Homo sapien
gaaagaggtgagaaccaataaagct

SEQ ID NO: 4352744 - DNA, 25 bp, Homo sapien
ctttgctcctatgggcattgctcga

SEQ ID NO: 4352745 - DNA, 25 bp, Homo sapien
cttaaagaaccagcaacatcttaga

SEQ ID NO: 4352746 - DNA, 25 bp, Homo sapien
cttagaatcaaagaaccatagaatt

SEQ ID NO: 4352747 - DNA, 25 bp, Homo sapien
ttaatgccaccaagatgggcgctgt

SEQ ID NO: 4352748 - DNA, 25 bp, Homo sapien
taatgccaccaagatgggcgctgtg

SEQ ID NO: 4352749 - DNA, 25 bp, Homo sapien
aaagtgagtttgcttcagcagcttg

SEQ ID NO: 4352750 - DNA, 25 bp, Homo sapien
cagaaagtgagtttgcttcagcagc

SEQ ID NO: 4352751 - DNA, 25 bp, Homo sapien
ttcctcacagtggccagcgtgggcc

SEQ ID NO: 4352752 - DNA, 25 bp, Homo sapien
tcctcacagtggccagcgtgggccc

SEQ ID NO: 4352753 - DNA, 25 bp, Homo sapien
gggatgggaatgggtgtcctctgca

SEQ ID NO: 4352754 - DNA, 25 bp, Homo sapien
gagcgcatctggagctgaagcttca

SEQ ID NO: 4352755 - DNA, 25 bp, Homo sapien
ctgctttattgagctggggatggga

SEQ ID NO: 4352756 - DNA, 25 bp, Homo sapien
gatgggaatgggtgtcctctgcaca

SEQ ID NO: 4352757 - DNA, 25 bp, Homo sapien
tgtgttgaccctgccatagtccaca

SEQ ID NO: 4352758 - DNA, 25 bp, Homo sapien
cccgaaagccggtccaaatacagag

SEQ ID NO: 4352759 - DNA, 25 bp, Homo sapien
gaccctgccatagtccacaaagatc

SEQ ID NO: 4352760 - DNA, 25 bp, Homo sapien
cagcaggtacccgaaagccggtcca

SEQ ID NO: 4352761 - DNA, 25 bp, Homo sapien
gaaggaaacaggctccaaggcattt

SEQ ID NO: 4352762 - DNA, 25 bp, Homo sapien
ttaaaaatgccaggtgatgctccct

SEQ ID NO: 4352763 - DNA, 25 bp, Homo sapien
taggccctgaggatgctcaaagtgg

SEQ ID NO: 4352764 - DNA, 25 bp, Homo sapien
tctgtgtggtctggagtataggccc

SEQ ID NO: 4352765 - DNA, 25 bp, Homo sapien
tccacataggagatcccaaatggct

SEQ ID NO: 4352766 - DNA, 25 bp, Homo sapien
ccaaatggctgaataggcactgtcc

SEQ ID NO: 4352767 - DNA, 25 bp, Homo sapien
ctgagaagtcatccacataggagat

SEQ ID NO: 4352768 - DNA, 25 bp, Homo sapien
ctgaataggcactgtcccgatgcca

SEQ ID NO: 4352769 - DNA, 25 bp, Homo sapien
ctccttctgggggttctgggtggtg

SEQ ID NO: 4352770 - DNA, 25 bp, Homo sapien
gctgctggtctccttctgggggttc

SEQ ID NO: 4352771 - DNA, 25 bp, Homo sapien
tgctggtctccttctgggggttctg

SEQ ID NO: 4352772 - DNA, 25 bp, Homo sapien
ctggtctccttctgggggttctggg

SEQ ID NO: 4352773 - DNA, 25 bp, Homo sapien
gtggcacttactgggaggcaggtcc

SEQ ID NO: 4352774 - DNA, 25 bp, Homo sapien
tggggaaggaccaactttggccaga

SEQ ID NO: 4352775 - DNA, 25 bp, Homo sapien
gcaacgagagtgcttgctggtctcc

SEQ ID NO: 4352776 - DNA, 25 bp, Homo sapien
aggaccgcgtccttctgtctggcca

SEQ ID NO: 4352777 - DNA, 25 bp, Homo sapien
gctgtgctagcaaatgggacatggt

SEQ ID NO: 4352778 - DNA, 25 bp, Homo sapien
tcatctgtggaggaaaggggcaccc

SEQ ID NO: 4352779 - DNA, 25 bp, Homo sapien
catctgtggaggaaaggggcaccca

SEQ ID NO: 4352780 - DNA, 25 bp, Homo sapien
cttcatctgtggaggaaaggggcac

SEQ ID NO: 4352781 - DNA, 25 bp, Homo sapien
atctgtggaggaaaggggcacccag

SEQ ID NO: 4352782 - DNA, 25 bp, Homo sapien
tctcactcgcttaacactaatggga

SEQ ID NO: 4352783 - DNA, 25 bp, Homo sapien
ggttctcgagggctcctttccatga

SEQ ID NO: 4352784 - DNA, 25 bp, Homo sapien
aatttggcccacactaagcaatcag

SEQ ID NO: 4352785 - DNA, 25 bp, Homo sapien
tggaaaccactgacgtcaccaatct

SEQ ID NO: 4352786 - DNA, 25 bp, Homo sapien
ggtctgtgctcttcattgccctttc

SEQ ID NO: 4352787 - DNA, 25 bp, Homo sapien
gagaggggtctgtgctcttcattgc

SEQ ID NO: 4352788 - DNA, 25 bp, Homo sapien
actctgccggtgctgttgggctcag

SEQ ID NO: 4352789 - DNA, 25 bp, Homo sapien
gtcgcacacgcctcgtccagcctgg

SEQ ID NO: 4352790 - DNA, 25 bp, Homo sapien
gaattcaaatagagtggcccgacca

SEQ ID NO: 4352791 - DNA, 25 bp, Homo sapien
gacgtcaccgatcttgctcacttaa

SEQ ID NO: 4352792 - DNA, 25 bp, Homo sapien
taggctctaggcctgcaacagtgga

SEQ ID NO: 4352793 - DNA, 25 bp, Homo sapien
ggcccgaccacatggtgatataata

SEQ ID NO: 4352794 - DNA, 25 bp, Homo sapien
taactgactcaacacagctgtgcag

SEQ ID NO: 4352795 - DNA, 25 bp, Homo sapien
tggcatggctaactgactcaacaca

SEQ ID NO: 4352796 - DNA, 25 bp, Homo sapien
ctgacctggcatggctaactgactc

SEQ ID NO: 4352797 - DNA, 25 bp, Homo sapien
aatcaacacgcacacttctctgcta

SEQ ID NO: 4352798 - DNA, 25 bp, Homo sapien
cactgaaggaccatgcctagatgcc

SEQ ID NO: 4352799 - DNA, 25 bp, Homo sapien
atgcctagatgcctaggtctgagca

SEQ ID NO: 4352800 - DNA, 25 bp, Homo sapien
catgcctagatgcctaggtctgagc

SEQ ID NO: 4352801 - DNA, 25 bp, Homo sapien
tgcctagatgcctaggtctgagcag

SEQ ID NO: 4352802 - DNA, 25 bp, Homo sapien
tcgctcagttatttggttgatagtg

SEQ ID NO: 4352803 - DNA, 25 bp, Homo sapien
attcattcttcagtcgctcagttat

SEQ ID NO: 4352804 - DNA, 25 bp, Homo sapien
cagttatttggttgatagtggctgt

SEQ ID NO: 4352805 - DNA, 25 bp, Homo sapien
gcactctgcttgggtgggagatgtg

SEQ ID NO: 4352806 - DNA, 25 bp, Homo sapien
tcacgttggccagtttcccatagag

SEQ ID NO: 4352807 - DNA, 25 bp, Homo sapien
tccagacgtggtcttagaggctttg

SEQ ID NO: 4352808 - DNA, 25 bp, Homo sapien
catagaggaaaacctctccgcgcct

SEQ ID NO: 4352809 - DNA, 25 bp, Homo sapien
gctcgttttttctctaaaggcgcca

SEQ ID NO: 4352810 - DNA, 25 bp, Homo sapien
aaagaagctgccttcagatgtcccc

SEQ ID NO: 4352811 - DNA, 25 bp, Homo sapien
tgtagaccagaaagaagctgccttc

SEQ ID NO: 4352812 - DNA, 25 bp, Homo sapien
aggacctatgatgtagaccagaaag

SEQ ID NO: 4352813 - DNA, 25 bp, Homo sapien
tcttcacaggaagtaaggtgctttc

SEQ ID NO: 4352814 - DNA, 25 bp, Homo sapien
tcacgtgacgagaaagggcagggat

SEQ ID NO: 4352815 - DNA, 25 bp, Homo sapien
cacgtgacgagaaagggcagggatt

SEQ ID NO: 4352816 - DNA, 25 bp, Homo sapien
acgtgacgagaaagggcagggattg

SEQ ID NO: 4352817 - DNA, 25 bp, Homo sapien
tgccaagccccattgcagaaactgc

SEQ ID NO: 4352818 - DNA, 25 bp, Homo sapien
ctgccaagccccattgcagaaactg

SEQ ID NO: 4352819 - DNA, 25 bp, Homo sapien
ttgaggcaggggttggaagccactc

SEQ ID NO: 4352820 - DNA, 25 bp, Homo sapien
tgaggcaggggttggaagccactca

SEQ ID NO: 4352821 - DNA, 25 bp, Homo sapien
tgccaaagtagctgacaaagatgat

SEQ ID NO: 4352822 - DNA, 25 bp, Homo sapien
ccaggaagagacctccgatgccaat

SEQ ID NO: 4352823 - DNA, 25 bp, Homo sapien
tgccaatcagacgtggacggtgcac

SEQ ID NO: 4352824 - DNA, 25 bp, Homo sapien
ccaaggtgtactggtagggctcgga

SEQ ID NO: 4352825 - DNA, 25 bp, Homo sapien
caaagatggtcctctcctcagagca

SEQ ID NO: 4352826 - DNA, 25 bp, Homo sapien
ccaaagatggtcctctcctcagagc

SEQ ID NO: 4352827 - DNA, 25 bp, Homo sapien
aaagatggtcctctcctcagagcac

SEQ ID NO: 4352828 - DNA, 25 bp, Homo sapien
accaaagatggtcctctcctcagag

SEQ ID NO: 4352829 - DNA, 25 bp, Homo sapien
agaaggctctctgagactggaagct

SEQ ID NO: 4352830 - DNA, 25 bp, Homo sapien
gaaggctctctgagactggaagctg

SEQ ID NO: 4352831 - DNA, 25 bp, Homo sapien
tcactaagtcaagggaagacctcat

SEQ ID NO: 4352832 - DNA, 25 bp, Homo sapien
gactgcactgacttgaatttcacta

SEQ ID NO: 4352833 - DNA, 25 bp, Homo sapien
gctctaagtgactgcactgacttga

SEQ ID NO: 4352834 - DNA, 25 bp, Homo sapien
tccagaggagcaacccggctctggg

SEQ ID NO: 4352835 - DNA, 25 bp, Homo sapien
tcaagctggaaatgagacccgatga

SEQ ID NO: 4352836 - DNA, 25 bp, Homo sapien
aagcgcttctcaatggtggtgaggc

SEQ ID NO: 4352837 - DNA, 25 bp, Homo sapien
aagaactggagagcccaaagcgctt

SEQ ID NO: 4352838 - DNA, 25 bp, Homo sapien
gagacccgatgaagaactggagagc

SEQ ID NO: 4352839 - DNA, 25 bp, Homo sapien
ggaggccttggcagagcacaaacac

SEQ ID NO: 4352840 - DNA, 25 bp, Homo sapien
aggaggccttggcagagcacaaaca

SEQ ID NO: 4352841 - DNA, 25 bp, Homo sapien
gaagagtgatgggcccgtgaggttt

SEQ ID NO: 4352842 - DNA, 25 bp, Homo sapien
ctggggtactgagtaaatgtgagtt

SEQ ID NO: 4352843 - DNA, 25 bp, Homo sapien
ggggtactgagtaaatgtgagttcc

SEQ ID NO: 4352844 - DNA, 25 bp, Homo sapien
gtcctggggtactgagtaaatgtga

SEQ ID NO: 4352845 - DNA, 25 bp, Homo sapien
cctggtcctggggtactgagtaaat

SEQ ID NO: 4352846 - DNA, 25 bp, Homo sapien
tgccctctgagtaatttaacttccc

SEQ ID NO: 4352847 - DNA, 25 bp, Homo sapien
cctcttgccctctgagtaatttaac

SEQ ID NO: 4352848 - DNA, 25 bp, Homo sapien
ccggttgctttcagttctccggtag

SEQ ID NO: 4352849 - DNA, 25 bp, Homo sapien
tgctttcagttctccggtagtctga

SEQ ID NO: 4352850 - DNA, 25 bp, Homo sapien
tctaaatctgttgcctctccgggct

SEQ ID NO: 4352851 - DNA, 25 bp, Homo sapien
cttctgccacgttcgccaattctaa

SEQ ID NO: 4352852 - DNA, 25 bp, Homo sapien
cgttcgccaattctaaatctgttgc

SEQ ID NO: 4352853 - DNA, 25 bp, Homo sapien
aggccccgtgcacgcagttgaccat

SEQ ID NO: 4352854 - DNA, 25 bp, Homo sapien
tagtttagtacgctcaacttcagca

SEQ ID NO: 4352855 - DNA, 25 bp, Homo sapien
caatatgactgagcaaaggcaccct

SEQ ID NO: 4352856 - DNA, 25 bp, Homo sapien
ggcaccctctgaggcctatgagaac

SEQ ID NO: 4352857 - DNA, 25 bp, Homo sapien
tgaccgaatcggacttgcccaggat

SEQ ID NO: 4352858 - DNA, 25 bp, Homo sapien
agcctttgataagacaggctcctgg

SEQ ID NO: 4352859 - DNA, 25 bp, Homo sapien
aaaagcctttgataagacaggctcc

SEQ ID NO: 4352860 - DNA, 25 bp, Homo sapien
aagcctttgataagacaggctcctg

SEQ ID NO: 4352861 - DNA, 25 bp, Homo sapien
ttttgcaccttgtgttattataagc

SEQ ID NO: 4352862 - DNA, 25 bp, Homo sapien
tttgaaatccttgtggcagccctct

SEQ ID NO: 4352863 - DNA, 25 bp, Homo sapien
tcattagtcctgtgcccatcttccg

SEQ ID NO: 4352864 - DNA, 25 bp, Homo sapien
gtgtctgggttctgtcattagtcct

SEQ ID NO: 4352865 - DNA, 25 bp, Homo sapien
tctccccacatgatgttgatggtgt

SEQ ID NO: 4352866 - DNA, 25 bp, Homo sapien
gactggagactcactcctctttgca

SEQ ID NO: 4352867 - DNA, 25 bp, Homo sapien
gagctcccaatacaaccatctccat

SEQ ID NO: 4352868 - DNA, 25 bp, Homo sapien
gactcactcctctttgcagtgagga

SEQ ID NO: 4352869 - DNA, 25 bp, Homo sapien
aagagactggagactcactcctctt

SEQ ID NO: 4352870 - DNA, 25 bp, Homo sapien
tcccaggcgctcctgtccacactgg

SEQ ID NO: 4352871 - DNA, 25 bp, Homo sapien
ctcctgtccacactggccttttgtc

SEQ ID NO: 4352872 - DNA, 25 bp, Homo sapien
caggcgctcctgtccacactggcct

SEQ ID NO: 4352873 - DNA, 25 bp, Homo sapien
tcctgtccacactggccttttgtcc

SEQ ID NO: 4352874 - DNA, 25 bp, Homo sapien
gagggttctgactgttcatgtccca

SEQ ID NO: 4352875 - DNA, 25 bp, Homo sapien
gttcatgtcccatgagcatcttcct

SEQ ID NO: 4352876 - DNA, 25 bp, Homo sapien
tgttcatgtcccatgagcatcttcc

SEQ ID NO: 4352877 - DNA, 25 bp, Homo sapien
ctggagggttctgactgttcatgtc

SEQ ID NO: 4352878 - DNA, 25 bp, Homo sapien
tgtgagccacgtagctacaggaagc

SEQ ID NO: 4352879 - DNA, 25 bp, Homo sapien
gaagctgtcgtgcagaatggcgccc

SEQ ID NO: 4352880 - DNA, 25 bp, Homo sapien
ggcaaattcttgcaaccaccagagt

SEQ ID NO: 4352881 - DNA, 25 bp, Homo sapien
ccaccagagtgggtctacagacatt

SEQ ID NO: 4352882 - DNA, 25 bp, Homo sapien
catgggtggattcacgtctgcagcc

SEQ ID NO: 4352883 - DNA, 25 bp, Homo sapien
ctttccagcacatgggtggattcac

SEQ ID NO: 4352884 - DNA, 25 bp, Homo sapien
agcacatgggtggattcacgtctgc

SEQ ID NO: 4352885 - DNA, 25 bp, Homo sapien
tgggtggattcacgtctgcagccca

SEQ ID NO: 4352886 - DNA, 25 bp, Homo sapien
ctgtcttgagtgtcactgcccttgg

SEQ ID NO: 4352887 - DNA, 25 bp, Homo sapien
tatacctgtcttgagtgtcactgcc

SEQ ID NO: 4352888 - DNA, 25 bp, Homo sapien
cacattctgtcctatacctgtcttg

SEQ ID NO: 4352889 - DNA, 25 bp, Homo sapien
gtcctatacctgtcttgagtgtcac

SEQ ID NO: 4352890 - DNA, 25 bp, Homo sapien
tcctcattgttcctgtgttcaattc

SEQ ID NO: 4352891 - DNA, 25 bp, Homo sapien
gtgcagggtcaactgatgtcctcat

SEQ ID NO: 4352892 - DNA, 25 bp, Homo sapien
tcatttctttcacctaaagatttca

SEQ ID NO: 4352893 - DNA, 25 bp, Homo sapien
tagcatctctttactggtctaatca

SEQ ID NO: 4352894 - DNA, 25 bp, Homo sapien
ctgcaatctctttggcagccaaacg

SEQ ID NO: 4352895 - DNA, 25 bp, Homo sapien
gcagccaaacgagcagcaggagtgt

SEQ ID NO: 4352896 - DNA, 25 bp, Homo sapien
ctggttctgtctgacggtgtcccat

SEQ ID NO: 4352897 - DNA, 25 bp, Homo sapien
ggcctcattgtgctctctagctggt

SEQ ID NO: 4352898 - DNA, 25 bp, Homo sapien
tccaggaagaggaggtctgagcgac

SEQ ID NO: 4352899 - DNA, 25 bp, Homo sapien
gaagaggaggtctgagcgacccatg

SEQ ID NO: 4352900 - DNA, 25 bp, Homo sapien
cgacccatggcccacctgatcctac

SEQ ID NO: 4352901 - DNA, 25 bp, Homo sapien
gaggtctgagcgacccatggcccac

SEQ ID NO: 4352902 - DNA, 25 bp, Homo sapien
tcccgttgttctctcttcctttctc

SEQ ID NO: 4352903 - DNA, 25 bp, Homo sapien
gtcttcaatgttagagaaacaccac

SEQ ID NO: 4352904 - DNA, 25 bp, Homo sapien
caatgttgtcttcaatgttagagaa

SEQ ID NO: 4352905 - DNA, 25 bp, Homo sapien
caggaggcagatgcttaggaacaga

SEQ ID NO: 4352906 - DNA, 25 bp, Homo sapien
gcttaggaacagaacaatgttgtct

SEQ ID NO: 4352907 - DNA, 25 bp, Homo sapien
aagagcccgagtgcggattgaacca

SEQ ID NO: 4352908 - DNA, 25 bp, Homo sapien
aggcagaacgggcaaaagagcccga

SEQ ID NO: 4352909 - DNA, 25 bp, Homo sapien
gcaaaagagcccgagtgcggattga

SEQ ID NO: 4352910 - DNA, 25 bp, Homo sapien
gagtgcggattgaaccattccaggt

SEQ ID NO: 4352911 - DNA, 25 bp, Homo sapien
cttaatgttgccgaagaccgagcgg

SEQ ID NO: 4352912 - DNA, 25 bp, Homo sapien
ggacgcgccgagcttgggcaggagc

SEQ ID NO: 4352913 - DNA, 25 bp, Homo sapien
cggctagtagaggtgtcgctgccct

SEQ ID NO: 4352914 - DNA, 25 bp, Homo sapien
cacagcggccggctcggctagtaga

SEQ ID NO: 4352915 - DNA, 25 bp, Homo sapien
gagattcgcggagcggagactgagc

SEQ ID NO: 4352916 - DNA, 25 bp, Homo sapien
cgcgcctagaagtttttataagtgg

SEQ ID NO: 4352917 - DNA, 25 bp, Homo sapien
gactgagccagcgagtgcgcgccta

SEQ ID NO: 4352918 - DNA, 25 bp, Homo sapien
tggccgccgccgatgatgaaacgcg

SEQ ID NO: 4352919 - DNA, 25 bp, Homo sapien
ggctttccacggcacatactgcgtg

SEQ ID NO: 4352920 - DNA, 25 bp, Homo sapien
actggtgggccctcactagatccag

SEQ ID NO: 4352921 - DNA, 25 bp, Homo sapien
agatccagccccgagaacctctttt

SEQ ID NO: 4352922 - DNA, 25 bp, Homo sapien
gacatgaggcagactttgccctcct

SEQ ID NO: 4352923 - DNA, 25 bp, Homo sapien
acagcgcctggcacacgacgatggg

SEQ ID NO: 4352924 - DNA, 25 bp, Homo sapien
tctaccctctgtgcacagcgcctgg

SEQ ID NO: 4352925 - DNA, 25 bp, Homo sapien
ggcacacgacgatggggtttccatt

SEQ ID NO: 4352926 - DNA, 25 bp, Homo sapien
ttccctggggtctaccctctgtgca

SEQ ID NO: 4352927 - DNA, 25 bp, Homo sapien
agtgccaagagcactgggggtgggc

SEQ ID NO: 4352928 - DNA, 25 bp, Homo sapien
agcctcttcctgtgcttgagcccct

SEQ ID NO: 4352929 - DNA, 25 bp, Homo sapien
tcccacgcagcgtcagttctccctt

SEQ ID NO: 4352930 - DNA, 25 bp, Homo sapien
gtctctcccacgcagcgtcagttct

SEQ ID NO: 4352931 - DNA, 25 bp, Homo sapien
cattgcagggcactcaggaagagaa

SEQ ID NO: 4352932 - DNA, 25 bp, Homo sapien
ggtgtggctccattgcagggcactc

SEQ ID NO: 4352933 - DNA, 25 bp, Homo sapien
ctcctccctgttcatggtcacaggg

SEQ ID NO: 4352934 - DNA, 25 bp, Homo sapien
tgcctggaggtgtggctccattgca

SEQ ID NO: 4352935 - DNA, 25 bp, Homo sapien
ttgccgtgaatttctccccaggtcc

SEQ ID NO: 4352936 - DNA, 25 bp, Homo sapien
cctgtttgccgtgaatttctcccca

SEQ ID NO: 4352937 - DNA, 25 bp, Homo sapien
tctgtgaggctccacacccaccctt

SEQ ID NO: 4352938 - DNA, 25 bp, Homo sapien
ctctttctgtgaggctccacaccca

SEQ ID NO: 4352939 - DNA, 25 bp, Homo sapien
ggcaatgtccgcgtcctcagggacc

SEQ ID NO: 4352940 - DNA, 25 bp, Homo sapien
tgggcaatgtccgcgtcctcaggga

SEQ ID NO: 4352941 - DNA, 25 bp, Homo sapien
ctgggcaatgtccgcgtcctcaggg

SEQ ID NO: 4352942 - DNA, 25 bp, Homo sapien
caatgtccgcgtcctcagggaccgc

SEQ ID NO: 4352943 - DNA, 25 bp, Homo sapien
gggatctgggtattctgccctggaa

SEQ ID NO: 4352944 - DNA, 25 bp, Homo sapien
tctgccctggaaagtccgtgtggaa

SEQ ID NO: 4352945 - DNA, 25 bp, Homo sapien
gtaaacgttggtgaagagagaagcc

SEQ ID NO: 4352946 - DNA, 25 bp, Homo sapien
ggaaacatttgtgaggcctggcata

SEQ ID NO: 4352947 - DNA, 25 bp, Homo sapien
caagtctcagaggtgttattgaaga

SEQ ID NO: 4352948 - DNA, 25 bp, Homo sapien
caaggttaatctaagttctcaaacg

SEQ ID NO: 4352949 - DNA, 25 bp, Homo sapien
gatgtgtaccaaggtgtcattaacc

SEQ ID NO: 4352950 - DNA, 25 bp, Homo sapien
caatgtcaaaaggtggatgctctcc

SEQ ID NO: 4352951 - DNA, 25 bp, Homo sapien
tgttggccaatcagccagatgtctc

SEQ ID NO: 4352952 - DNA, 25 bp, Homo sapien
tggccaatcagccagatgtctccca

SEQ ID NO: 4352953 - DNA, 25 bp, Homo sapien
ctctacctgctgttggccaatcagc

SEQ ID NO: 4352954 - DNA, 25 bp, Homo sapien
cctgctgttggccaatcagccagat

SEQ ID NO: 4352955 - DNA, 25 bp, Homo sapien
tgaatcatgtctctcctcggaagct

SEQ ID NO: 4352956 - DNA, 25 bp, Homo sapien
tcaatacttggcctgaaagctggct

SEQ ID NO: 4352957 - DNA, 25 bp, Homo sapien
tgaaagctggctctcacatgaatcg

SEQ ID NO: 4352958 - DNA, 25 bp, Homo sapien
catgaatcgtctctttggatgaatc

SEQ ID NO: 4352959 - DNA, 25 bp, Homo sapien
tttctcagggagtctgaaagtgaaa

SEQ ID NO: 4352960 - DNA, 25 bp, Homo sapien
ctcagggagtctgaaagtgaaaata

SEQ ID NO: 4352961 - DNA, 25 bp, Homo sapien
gaaaataactggcaagaaaagtgaa

SEQ ID NO: 4352962 - DNA, 25 bp, Homo sapien
gaaagtgaaaataactggcaagaaa

SEQ ID NO: 4352963 - DNA, 25 bp, Homo sapien
acacacatgcccagttgcccagttc

SEQ ID NO: 4352964 - DNA, 25 bp, Homo sapien
accacgtctccgttgggcagcagag

SEQ ID NO: 4352965 - DNA, 25 bp, Homo sapien
tgtcctctggacaagaacaccagct

SEQ ID NO: 4352966 - DNA, 25 bp, Homo sapien
gacatagcgcactcttgcatgtaca

SEQ ID NO: 4352967 - DNA, 25 bp, Homo sapien
ccaaagggcacttgagatccaggcc

SEQ ID NO: 4352968 - DNA, 25 bp, Homo sapien
gatccaggcccttcaaagctcaagc

SEQ ID NO: 4352969 - DNA, 25 bp, Homo sapien
tgcactgacccaaagggcacttgag

SEQ ID NO: 4352970 - DNA, 25 bp, Homo sapien
ttttgtccagtttgcactgacccaa

SEQ ID NO: 4352971 - DNA, 25 bp, Homo sapien
ctaccactatcgtttagtttctgca

SEQ ID NO: 4352972 - DNA, 25 bp, Homo sapien
tttattgaggcataactagcacata

SEQ ID NO: 4352973 - DNA, 25 bp, Homo sapien
cagtcaagatacttcacattcccat

SEQ ID NO: 4352974 - DNA, 25 bp, Homo sapien
caagcccctcggatctattttctac

SEQ ID NO: 4352975 - DNA, 25 bp, Homo sapien
acgtggaaaaggcattggtggcagc

SEQ ID NO: 4352976 - DNA, 25 bp, Homo sapien
cctggagttgcagagacagcttgtc

SEQ ID NO: 4352977 - DNA, 25 bp, Homo sapien
aagagcctggagttgcagagacagc

SEQ ID NO: 4352978 - DNA, 25 bp, Homo sapien
caagcagctccccacgtggaaaagg

SEQ ID NO: 4352979 - DNA, 25 bp, Homo sapien
caggccctgagtcacatgaatagga

SEQ ID NO: 4352980 - DNA, 25 bp, Homo sapien
taatgtttctggtgcccgcacagtg

SEQ ID NO: 4352981 - DNA, 25 bp, Homo sapien
tgtacatgcttattgaaccacgtgg

SEQ ID NO: 4352982 - DNA, 25 bp, Homo sapien
catcagctggagagcgatttcccag

SEQ ID NO: 4352983 - DNA, 25 bp, Homo sapien
gaagaccccaatcctgctaaaacat

SEQ ID NO: 4352984 - DNA, 25 bp, Homo sapien
tgcttccccagtaagcatgggcggg

SEQ ID NO: 4352985 - DNA, 25 bp, Homo sapien
ccagctgtatgcaggacctcatgga

SEQ ID NO: 4352986 - DNA, 25 bp, Homo sapien
gcatgggcgggcactcccactgtgt

SEQ ID NO: 4352987 - DNA, 25 bp, Homo sapien
cacacaggcagcaggcactgtccca

SEQ ID NO: 4352988 - DNA, 25 bp, Homo sapien
acacaggcagcaggcactgtcccag

SEQ ID NO: 4352989 - DNA, 25 bp, Homo sapien
acaggcagcaggcactgtcccagcc

SEQ ID NO: 4352990 - DNA, 25 bp, Homo sapien
ggcagcaggcactgtcccagccctc

SEQ ID NO: 4352991 - DNA, 25 bp, Homo sapien
gtccaggctgggtggtcacatggca

SEQ ID NO: 4352992 - DNA, 25 bp, Homo sapien
ctccgggaggtccatacaggcatcc

SEQ ID NO: 4352993 - DNA, 25 bp, Homo sapien
ggccccaagaactttgcccgtcaga

SEQ ID NO: 4352994 - DNA, 25 bp, Homo sapien
ctgcagccggagtgagtcaacggat

SEQ ID NO: 4352995 - DNA, 25 bp, Homo sapien
tctcagtggactgtagcccaggcct

SEQ ID NO: 4352996 - DNA, 25 bp, Homo sapien
gaatttctgccttggtcaaaaactc

SEQ ID NO: 4352997 - DNA, 25 bp, Homo sapien
agtttctgactgaggcggaaaggct

SEQ ID NO: 4352998 - DNA, 25 bp, Homo sapien
ctgctgagagtttctgactgaggcg

SEQ ID NO: 4352999 - DNA, 25 bp, Homo sapien
catccacttcccttaggatggttca

SEQ ID NO: 4353000 - DNA, 25 bp, Homo sapien
gcatccacttcccttaggatggttc

SEQ ID NO: 4353001 - DNA, 25 bp, Homo sapien
aagcatccacttcccttaggatggt

SEQ ID NO: 4353002 - DNA, 25 bp, Homo sapien
taggatggttcacacaaaggcctgg

SEQ ID NO: 4353003 - DNA, 25 bp, Homo sapien
cactagtgcccttgattctgaaacc

SEQ ID NO: 4353004 - DNA, 25 bp, Homo sapien
atgcccctgtcacgccaagacttgg

SEQ ID NO: 4353005 - DNA, 25 bp, Homo sapien
gatggagacttcctccgcactagtg

SEQ ID NO: 4353006 - DNA, 25 bp, Homo sapien
tggtgacttagctggatccgttgag

SEQ ID NO: 4353007 - DNA, 25 bp, Homo sapien
gcaggggcaggggatgcacacacac

SEQ ID NO: 4353008 - DNA, 25 bp, Homo sapien
caggggcaggggatgcacacacacg

SEQ ID NO: 4353009 - DNA, 25 bp, Homo sapien
ggggcaggggatgcacacacacgca

SEQ ID NO: 4353010 - DNA, 25 bp, Homo sapien
ctgcaggggcaggggatgcacacac

SEQ ID NO: 4353011 - DNA, 25 bp, Homo sapien
tctggacccaatggtaataatgcca

SEQ ID NO: 4353012 - DNA, 25 bp, Homo sapien
cctgggattggcacgagactctgtt

SEQ ID NO: 4353013 - DNA, 25 bp, Homo sapien
taagtcaaggcgacaaatggcagca

SEQ ID NO: 4353014 - DNA, 25 bp, Homo sapien
gcagccccacgacagagaattatct

SEQ ID NO: 4353015 - DNA, 25 bp, Homo sapien
tatttttggaggcttctagggtgac

SEQ ID NO: 4353016 - DNA, 25 bp, Homo sapien
agggtgaccgtcttgacacagctgc

SEQ ID NO: 4353017 - DNA, 25 bp, Homo sapien
gaggcttctagggtgaccgtcttga

SEQ ID NO: 4353018 - DNA, 25 bp, Homo sapien
atggtgaccatgcagcgaccgcttt

SEQ ID NO: 4353019 - DNA, 25 bp, Homo sapien
gagaccacaggctccaggaccgggc

SEQ ID NO: 4353020 - DNA, 25 bp, Homo sapien
catggagagaccacaggctccagga

SEQ ID NO: 4353021 - DNA, 25 bp, Homo sapien
ggagagaccacaggctccaggaccg

SEQ ID NO: 4353022 - DNA, 25 bp, Homo sapien
gcccccaggccaacccagttctctg

SEQ ID NO: 4353023 - DNA, 25 bp, Homo sapien
catgcacagagcatgtgggctggaa

SEQ ID NO: 4353024 - DNA, 25 bp, Homo sapien
gccaaccatgcacagagcatgtggg

SEQ ID NO: 4353025 - DNA, 25 bp, Homo sapien
gcacaccacggctgcagccaaccat

SEQ ID NO: 4353026 - DNA, 25 bp, Homo sapien
cattgggcatctgccaagtgctgca

SEQ ID NO: 4353027 - DNA, 25 bp, Homo sapien
gagtggacgatgctcgtagccttgg

SEQ ID NO: 4353028 - DNA, 25 bp, Homo sapien
tgagagaagttgagtcaataagagg

SEQ ID NO: 4353029 - DNA, 25 bp, Homo sapien
agaagttgagtcaataagagggaga

SEQ ID NO: 4353030 - DNA, 25 bp, Homo sapien
gagttccttgactcagcggcagcac

SEQ ID NO: 4353031 - DNA, 25 bp, Homo sapien
gccagagtgggcatcggaagtccac

SEQ ID NO: 4353032 - DNA, 25 bp, Homo sapien
ccagagtgggcatcggaagtccact

SEQ ID NO: 4353033 - DNA, 25 bp, Homo sapien
tgccctggggattccatttcagaac

SEQ ID NO: 4353034 - DNA, 25 bp, Homo sapien
ctgccctggggattccatttcagaa

SEQ ID NO: 4353035 - DNA, 25 bp, Homo sapien
gccctggggattccatttcagaacc

SEQ ID NO: 4353036 - DNA, 25 bp, Homo sapien
ccctggggattccatttcagaacct

SEQ ID NO: 4353037 - DNA, 25 bp, Homo sapien
cacttaaggctgagtaagacgtctg

SEQ ID NO: 4353038 - DNA, 25 bp, Homo sapien
acttaaggctgagtaagacgtctgc

SEQ ID NO: 4353039 - DNA, 25 bp, Homo sapien
aagaggtttgcttgccataaaactg

SEQ ID NO: 4353040 - DNA, 25 bp, Homo sapien
ctgaagaggtttgcttgccataaaa

SEQ ID NO: 4353041 - DNA, 25 bp, Homo sapien
ttgaggtactcactctctgctgcct

SEQ ID NO: 4353042 - DNA, 25 bp, Homo sapien
taggaggtcatctccgatcaatccc

SEQ ID NO: 4353043 - DNA, 25 bp, Homo sapien
ccttgttcaggctgatgagagaagc

SEQ ID NO: 4353044 - DNA, 25 bp, Homo sapien
tgcctcagtgtctaaggcccagaac

SEQ ID NO: 4353045 - DNA, 25 bp, Homo sapien
cctctgcatttctctcaatgtaaag

SEQ ID NO: 4353046 - DNA, 25 bp, Homo sapien
aaataatccaaggaactgtattgga

SEQ ID NO: 4353047 - DNA, 25 bp, Homo sapien
aaatgtctagaggtaggactggccc

SEQ ID NO: 4353048 - DNA, 25 bp, Homo sapien
caaggaactgtattggataacaaat

SEQ ID NO: 4353049 - DNA, 25 bp, Homo sapien
aatcaaaatgtctagaggtaggact

SEQ ID NO: 4353050 - DNA, 25 bp, Homo sapien
ctttaaggcctccctcatgttcttc

SEQ ID NO: 4353051 - DNA, 25 bp, Homo sapien
gcccacaaccattcacacctccagt

SEQ ID NO: 4353052 - DNA, 25 bp, Homo sapien
caaccattcacacctccagtatcat

SEQ ID NO: 4353053 - DNA, 25 bp, Homo sapien
gtcagctgcccacaaccattcacac

SEQ ID NO: 4353054 - DNA, 25 bp, Homo sapien
aaaggaaatctccaaaagttctcag

SEQ ID NO: 4353055 - DNA, 25 bp, Homo sapien
cacaaaggaaatctccaaaagttct

SEQ ID NO: 4353056 - DNA, 25 bp, Homo sapien
caaaggaaatctccaaaagttctca

SEQ ID NO: 4353057 - DNA, 25 bp, Homo sapien
gttcataatcgtctctggtgatatt

SEQ ID NO: 4353058 - DNA, 25 bp, Homo sapien
tagtttgtgagtgtatcattgttca

SEQ ID NO: 4353059 - DNA, 25 bp, Homo sapien
aacttttcattttgtcgatcccttg

SEQ ID NO: 4353060 - DNA, 25 bp, Homo sapien
tggtctctacttcgtttagttctgc

SEQ ID NO: 4353061 - DNA, 25 bp, Homo sapien
attgtgactgggtccatcaaggcca

SEQ ID NO: 4353062 - DNA, 25 bp, Homo sapien
aattgtgactgggtccatcaaggcc

SEQ ID NO: 4353063 - DNA, 25 bp, Homo sapien
aaattgtgactgggtccatcaaggc

SEQ ID NO: 4353064 - DNA, 25 bp, Homo sapien
cttaaggcaccatagagttaatttc

SEQ ID NO: 4353065 - DNA, 25 bp, Homo sapien
gagtgctcactcctctaaagacaaa

SEQ ID NO: 4353066 - DNA, 25 bp, Homo sapien
tattgcaaatgtaaccttaaggcac

SEQ ID NO: 4353067 - DNA, 25 bp, Homo sapien
taatgttgaacatcatcaatcccta

SEQ ID NO: 4353068 - DNA, 25 bp, Homo sapien
cattaaaacctatagacctggttag

SEQ ID NO: 4353069 - DNA, 25 bp, Homo sapien
tgagcacaccactaaagcaatggag

SEQ ID NO: 4353070 - DNA, 25 bp, Homo sapien
tccggtggccaaagaaatagcaggt

SEQ ID NO: 4353071 - DNA, 25 bp, Homo sapien
tacatcaggcttattattccggtgg

SEQ ID NO: 4353072 - DNA, 25 bp, Homo sapien
tgaggcgcatggaagaataacacct

SEQ ID NO: 4353073 - DNA, 25 bp, Homo sapien
aaaggctgaaaagcaaccacgaagc

SEQ ID NO: 4353074 - DNA, 25 bp, Homo sapien
agcctggaggagagcagtaaggtgt

SEQ ID NO: 4353075 - DNA, 25 bp, Homo sapien
ttcttggtcccaaggcggcagtgtg

SEQ ID NO: 4353076 - DNA, 25 bp, Homo sapien
cctggaggagagcagtaaggtgtga

SEQ ID NO: 4353077 - DNA, 25 bp, Homo sapien
aaggagcatgccgagcggcgggaag

SEQ ID NO: 4353078 - DNA, 25 bp, Homo sapien
tataaagtgttacctgggcagttgc

SEQ ID NO: 4353079 - DNA, 25 bp, Homo sapien
gagtggatactctgcctaggtctga

SEQ ID NO: 4353080 - DNA, 25 bp, Homo sapien
cgggaagcgtgcaggcccgaagtgg

SEQ ID NO: 4353081 - DNA, 25 bp, Homo sapien
ctgttgggtaatgggacggtggcag

SEQ ID NO: 4353082 - DNA, 25 bp, Homo sapien
agcagctatgggcaatctgggcaag

SEQ ID NO: 4353083 - DNA, 25 bp, Homo sapien
cagctgcaagcacaatgagggtgcc

SEQ ID NO: 4353084 - DNA, 25 bp, Homo sapien
gaaagcccctcaacagaggcaggct

SEQ ID NO: 4353085 - DNA, 25 bp, Homo sapien
cacatttctcccccagtaaacacac

SEQ ID NO: 4353086 - DNA, 25 bp, Homo sapien
acatttctcccccagtaaacacaca

SEQ ID NO: 4353087 - DNA, 25 bp, Homo sapien
gaagggacgcttgagttgaaccact

SEQ ID NO: 4353088 - DNA, 25 bp, Homo sapien
tagggctttggaacttgactggaac

SEQ ID NO: 4353089 - DNA, 25 bp, Homo sapien
tacacagaaaatcatgcccttggct

SEQ ID NO: 4353090 - DNA, 25 bp, Homo sapien
gctatttttcccgatgtgctgctga

SEQ ID NO: 4353091 - DNA, 25 bp, Homo sapien
aaaacgacaacaactcaagcacccg

SEQ ID NO: 4353092 - DNA, 25 bp, Homo sapien
cactattctaggtgcaataaaaggg

SEQ ID NO: 4353093 - DNA, 25 bp, Homo sapien
agccagccttgaagataagcacaaa

SEQ ID NO: 4353094 - DNA, 25 bp, Homo sapien
tcaagcacccgctctgtgcatagca

SEQ ID NO: 4353095 - DNA, 25 bp, Homo sapien
tgtaagaatgtacccctagtccaaa

SEQ ID NO: 4353096 - DNA, 25 bp, Homo sapien
aaaccatttcccagagtagtgataa

SEQ ID NO: 4353097 - DNA, 25 bp, Homo sapien
gacaggcttcaagtgagccccgaca

SEQ ID NO: 4353098 - DNA, 25 bp, Homo sapien
catttctaaggcacggtgttctgga

SEQ ID NO: 4353099 - DNA, 25 bp, Homo sapien
ctctgttaggcactgtaccagctgc

SEQ ID NO: 4353100 - DNA, 25 bp, Homo sapien
atgaaactctgttaggcactgtacc

SEQ ID NO: 4353101 - DNA, 25 bp, Homo sapien
gctgcatgaaactctgttaggcact

SEQ ID NO: 4353102 - DNA, 25 bp, Homo sapien
ccagggctgcatgaaactctgttag

SEQ ID NO: 4353103 - DNA, 25 bp, Homo sapien
ggtcaatgtccacgtagggagtctg

SEQ ID NO: 4353104 - DNA, 25 bp, Homo sapien
aatgtccacgtagggagtctggccc

SEQ ID NO: 4353105 - DNA, 25 bp, Homo sapien
gggtcaatgtccacgtagggagtct

SEQ ID NO: 4353106 - DNA, 25 bp, Homo sapien
tcaatgtccacgtagggagtctggc

SEQ ID NO: 4353107 - DNA, 25 bp, Homo sapien
tccatagagaaggtagttccctgca

SEQ ID NO: 4353108 - DNA, 25 bp, Homo sapien
taatcaagacaaaatggcgcagaga

SEQ ID NO: 4353109 - DNA, 25 bp, Homo sapien
tgaaactggtcggaagggtgctccc

SEQ ID NO: 4353110 - DNA, 25 bp, Homo sapien
acagtggaagcatcatcaggtggtc

SEQ ID NO: 4353111 - DNA, 25 bp, Homo sapien
cactgagtgaacatatgtgggaccc

SEQ ID NO: 4353112 - DNA, 25 bp, Homo sapien
tgtgggaccctataagcagaagttt

SEQ ID NO: 4353113 - DNA, 25 bp, Homo sapien
tatgaacaagtgaacgtggcttctg

SEQ ID NO: 4353114 - DNA, 25 bp, Homo sapien
cactttgaaacaaaagagtagccct

SEQ ID NO: 4353115 - DNA, 25 bp, Homo sapien
accagactttcaagagccatccaac

SEQ ID NO: 4353116 - DNA, 25 bp, Homo sapien
ttcattgtcccccagacagtgatag

SEQ ID NO: 4353117 - DNA, 25 bp, Homo sapien
ggcattgtctgtgatcttaacttga

SEQ ID NO: 4353118 - DNA, 25 bp, Homo sapien
tattaaccagactttcaagagccat

SEQ ID NO: 4353119 - DNA, 25 bp, Homo sapien
gaatagccatgtgtaccaggtcttg

SEQ ID NO: 4353120 - DNA, 25 bp, Homo sapien
tctgaatagccatgtgtaccaggtc

SEQ ID NO: 4353121 - DNA, 25 bp, Homo sapien
gcaatctgaatagccatgtgtacca

SEQ ID NO: 4353122 - DNA, 25 bp, Homo sapien
tccacaggcaatctgaatagccatg

SEQ ID NO: 4353123 - DNA, 25 bp, Homo sapien
gcacacaaatatgatggcactttct

SEQ ID NO: 4353124 - DNA, 25 bp, Homo sapien
tcctactccatccaaaaatactgct

SEQ ID NO: 4353125 - DNA, 25 bp, Homo sapien
gctgctcaatacatctgttcagtga

SEQ ID NO: 4353126 - DNA, 25 bp, Homo sapien
cagtgaatgctgagttctcaaggta

SEQ ID NO: 4353127 - DNA, 25 bp, Homo sapien
acttgcactgtcgtaaaaacaattt

SEQ ID NO: 4353128 - DNA, 25 bp, Homo sapien
ttgcactgtcgtaaaaacaatttaa

SEQ ID NO: 4353129 - DNA, 25 bp, Homo sapien
cttgcactgtcgtaaaaacaattta

SEQ ID NO: 4353130 - DNA, 25 bp, Homo sapien
acaatttaagattcccccaattcat

SEQ ID NO: 4353131 - DNA, 25 bp, Homo sapien
taaaaccgtggcacaatcaccaatg

SEQ ID NO: 4353132 - DNA, 25 bp, Homo sapien
ggcaacctctctataaccgctcaag

SEQ ID NO: 4353133 - DNA, 25 bp, Homo sapien
tcaagtggcagcgattaggagttcc

SEQ ID NO: 4353134 - DNA, 25 bp, Homo sapien
tgtgcgctcccctcatatttgcagg

SEQ ID NO: 4353135 - DNA, 25 bp, Homo sapien
aatggctacatggatttacagttgc

SEQ ID NO: 4353136 - DNA, 25 bp, Homo sapien
ccattcagtggactactatgtagcc

SEQ ID NO: 4353137 - DNA, 25 bp, Homo sapien
gctatggcataatgattgtatacca

SEQ ID NO: 4353138 - DNA, 25 bp, Homo sapien
aaaggtcttcatatagaactataag

SEQ ID NO: 4353139 - DNA, 25 bp, Homo sapien
tgatgaagacctcgcagcttacaac

SEQ ID NO: 4353140 - DNA, 25 bp, Homo sapien
gacctcgcagcttacaactttcagt

SEQ ID NO: 4353141 - DNA, 25 bp, Homo sapien
gaagacctcgcagcttacaactttc

SEQ ID NO: 4353142 - DNA, 25 bp, Homo sapien
gtgatgaagacctcgcagcttacaa

SEQ ID NO: 4353143 - DNA, 25 bp, Homo sapien
tcttgcaaatctaccagtaatagga

SEQ ID NO: 4353144 - DNA, 25 bp, Homo sapien
aactatttaagctttcacaagcatc

SEQ ID NO: 4353145 - DNA, 25 bp, Homo sapien
cactgtagtatcttgatagggaatc

SEQ ID NO: 4353146 - DNA, 25 bp, Homo sapien
aaaattaggcgtcacatttcaaacg

SEQ ID NO: 4353147 - DNA, 25 bp, Homo sapien
taactgttttgacaaatgcttgttt

SEQ ID NO: 4353148 - DNA, 25 bp, Homo sapien
tttcatctattaaaatcccatggaa

SEQ ID NO: 4353149 - DNA, 25 bp, Homo sapien
atcccatggaaaatacgcccaaaag

SEQ ID NO: 4353150 - DNA, 25 bp, Homo sapien
ctttaactgttttgacaaatgcttg

SEQ ID NO: 4353151 - DNA, 25 bp, Homo sapien
tacctgacttagctgtgattgacct

SEQ ID NO: 4353152 - DNA, 25 bp, Homo sapien
cataaggaggactcataagtatcca

SEQ ID NO: 4353153 - DNA, 25 bp, Homo sapien
taaatgtgtcccaaccagcaaagga

SEQ ID NO: 4353154 - DNA, 25 bp, Homo sapien
aaaagatctgcaaactagttatgct

SEQ ID NO: 4353155 - DNA, 25 bp, Homo sapien
tcttttagagttatcctctctctgg

SEQ ID NO: 4353156 - DNA, 25 bp, Homo sapien
ttttagagttatcctctctctggat

SEQ ID NO: 4353157 - DNA, 25 bp, Homo sapien
cttttagagttatcctctctctgga

SEQ ID NO: 4353158 - DNA, 25 bp, Homo sapien
tttagagttatcctctctctggata

SEQ ID NO: 4353159 - DNA, 25 bp, Homo sapien
ttgggcgtgtctgctctcagatact

SEQ ID NO: 4353160 - DNA, 25 bp, Homo sapien
ttgcattgttgggcgtgtctgctct

SEQ ID NO: 4353161 - DNA, 25 bp, Homo sapien
attgttgggcgtgtctgctctcaga

SEQ ID NO: 4353162 - DNA, 25 bp, Homo sapien
gcattgttgggcgtgtctgctctca

SEQ ID NO: 4353163 - DNA, 25 bp, Homo sapien
acaaaatgcacatagccattaaaac

SEQ ID NO: 4353164 - DNA, 25 bp, Homo sapien
aagtcagtttcaatgagaaatttcc

SEQ ID NO: 4353165 - DNA, 25 bp, Homo sapien
cttacggagatcacaataattcatg

SEQ ID NO: 4353166 - DNA, 25 bp, Homo sapien
accagcctaaaatccttacggagat

SEQ ID NO: 4353167 - DNA, 25 bp, Homo sapien
ggaactacggatcatctctcaaaaa

SEQ ID NO: 4353168 - DNA, 25 bp, Homo sapien
catgtcattcaattagattgctttt

SEQ ID NO: 4353169 - DNA, 25 bp, Homo sapien
catgctcggagcttagaaaggagta

SEQ ID NO: 4353170 - DNA, 25 bp, Homo sapien
tcaatgatggcccaatatcaaatgg

SEQ ID NO: 4353171 - DNA, 25 bp, Homo sapien
tacatagctatatcacaagaggtgg

SEQ ID NO: 4353172 - DNA, 25 bp, Homo sapien
tatgtatggagatactaaccctgtc

SEQ ID NO: 4353173 - DNA, 25 bp, Homo sapien
gtgacccctacattccagtaaggat

SEQ ID NO: 4353174 - DNA, 25 bp, Homo sapien
gcaagaagcaattagggacctaccc

SEQ ID NO: 4353175 - DNA, 25 bp, Homo sapien
gaacgaaccactccggatgcaccac

SEQ ID NO: 4353176 - DNA, 25 bp, Homo sapien
cgaaccactccggatgcaccacctt

SEQ ID NO: 4353177 - DNA, 25 bp, Homo sapien
aggaacgaaccactccggatgcacc

SEQ ID NO: 4353178 - DNA, 25 bp, Homo sapien
gaggaacgaaccactccggatgcac

SEQ ID NO: 4353179 - DNA, 25 bp, Homo sapien
gatggtctggctctagagtccgtac

SEQ ID NO: 4353180 - DNA, 25 bp, Homo sapien
gactaattaggactggtgactcaac

SEQ ID NO: 4353181 - DNA, 25 bp, Homo sapien
gcagaggtagatgccccatggaatc

SEQ ID NO: 4353182 - DNA, 25 bp, Homo sapien
aaattctggcctatgtgggctcaca

SEQ ID NO: 4353183 - DNA, 25 bp, Homo sapien
tgtgtatgggctcccacatatatac

SEQ ID NO: 4353184 - DNA, 25 bp, Homo sapien
cagagacagtgattaggtcatctta

SEQ ID NO: 4353185 - DNA, 25 bp, Homo sapien
gcaccactgtgcatcgatgtgtatg

SEQ ID NO: 4353186 - DNA, 25 bp, Homo sapien
tttggctggggcttaatcatcctcc

SEQ ID NO: 4353187 - DNA, 25 bp, Homo sapien
tattattgctacgagaaatattact

SEQ ID NO: 4353188 - DNA, 25 bp, Homo sapien
tttcatactatgaaggtgcaaaaca

SEQ ID NO: 4353189 - DNA, 25 bp, Homo sapien
acacgcgtagaagtggttggagctg

SEQ ID NO: 4353190 - DNA, 25 bp, Homo sapien
ttgctacgagaaatattactgcaca

SEQ ID NO: 4353191 - DNA, 25 bp, Homo sapien
tgtccaaggctgaagtttttacttc

SEQ ID NO: 4353192 - DNA, 25 bp, Homo sapien
gctagtgtttttgtccaaggctgaa

SEQ ID NO: 4353193 - DNA, 25 bp, Homo sapien
aaatagttctgctagtgtttttgtc

SEQ ID NO: 4353194 - DNA, 25 bp, Homo sapien
agtgtttttgtccaaggctgaagtt

SEQ ID NO: 4353195 - DNA, 25 bp, Homo sapien
atctactttgccagtacaggaaagc

SEQ ID NO: 4353196 - DNA, 25 bp, Homo sapien
cagaatctactttgccagtacagga

SEQ ID NO: 4353197 - DNA, 25 bp, Homo sapien
gctgcattagtatcataacttcaga

SEQ ID NO: 4353198 - DNA, 25 bp, Homo sapien
ttgagctgcattagtatcataactt

SEQ ID NO: 4353199 - DNA, 25 bp, Homo sapien
tgacctggggcatatccattgccaa

SEQ ID NO: 4353200 - DNA, 25 bp, Homo sapien
ttgacctggggcatatccattgcca

SEQ ID NO: 4353201 - DNA, 25 bp, Homo sapien
gttgacctggggcatatccattgcc

SEQ ID NO: 4353202 - DNA, 25 bp, Homo sapien
cagctggttgactccttccaaaccc

SEQ ID NO: 4353203 - DNA, 25 bp, Homo sapien
agctggttgactccttccaaaccct

SEQ ID NO: 4353204 - DNA, 25 bp, Homo sapien
ttcagctggttgactccttccaaac

SEQ ID NO: 4353205 - DNA, 25 bp, Homo sapien
tcagctggttgactccttccaaacc

SEQ ID NO: 4353206 - DNA, 25 bp, Homo sapien
ataggaagctggtaagtaaagccat

SEQ ID NO: 4353207 - DNA, 25 bp, Homo sapien
aatggcaattacaaataggaagctg

SEQ ID NO: 4353208 - DNA, 25 bp, Homo sapien
caaataggaagctggtaagtaaagc

SEQ ID NO: 4353209 - DNA, 25 bp, Homo sapien
atggcaattacaaataggaagctgg

SEQ ID NO: 4353210 - DNA, 25 bp, Homo sapien
ttccctgcaactcctagaaaatgat

SEQ ID NO: 4353211 - DNA, 25 bp, Homo sapien
cagcacaggcattattgggtccaac

SEQ ID NO: 4353212 - DNA, 25 bp, Homo sapien
gcccttatgggtaaagaagcctcac

SEQ ID NO: 4353213 - DNA, 25 bp, Homo sapien
ttatatcacatcaccagcggaccct

SEQ ID NO: 4353214 - DNA, 25 bp, Homo sapien
tacaccgtttctccatgagtgggag

SEQ ID NO: 4353215 - DNA, 25 bp, Homo sapien
ctaaaggatagagcgtagtgactaa

SEQ ID NO: 4353216 - DNA, 25 bp, Homo sapien
actaaaggatagagcgtagtgacta

SEQ ID NO: 4353217 - DNA, 25 bp, Homo sapien
gactaaaggatagagcgtagtgact

SEQ ID NO: 4353218 - DNA, 25 bp, Homo sapien
agactaaaggatagagcgtagtgac

SEQ ID NO: 4353219 - DNA, 25 bp, Homo sapien
cacatttactgagccggcactatgg

SEQ ID NO: 4353220 - DNA, 25 bp, Homo sapien
taaagttctatccaggtgtccctct

SEQ ID NO: 4353221 - DNA, 25 bp, Homo sapien
gaaatttaaggcacgccacataggg

SEQ ID NO: 4353222 - DNA, 25 bp, Homo sapien
gggtctgaaacctcacagtatgcag

SEQ ID NO: 4353223 - DNA, 25 bp, Homo sapien
ctatccgggcttgacagagggctca

SEQ ID NO: 4353224 - DNA, 25 bp, Homo sapien
cctatccgggcttgacagagggctc

SEQ ID NO: 4353225 - DNA, 25 bp, Homo sapien
ccctatccgggcttgacagagggct

SEQ ID NO: 4353226 - DNA, 25 bp, Homo sapien
gccctatccgggcttgacagagggc

SEQ ID NO: 4353227 - DNA, 25 bp, Homo sapien
cacagtagagtcactagttaacagt

SEQ ID NO: 4353228 - DNA, 25 bp, Homo sapien
tgatgaatacactaccctgactgga

SEQ ID NO: 4353229 - DNA, 25 bp, Homo sapien
tgactggatcattatacagcagaga

SEQ ID NO: 4353230 - DNA, 25 bp, Homo sapien
gatatcataggaatagagcacagca

SEQ ID NO: 4353231 - DNA, 25 bp, Homo sapien
tcttaaccatcacaaatggtttcaa

SEQ ID NO: 4353232 - DNA, 25 bp, Homo sapien
ctatattcttaaccatcacaaatgg

SEQ ID NO: 4353233 - DNA, 25 bp, Homo sapien
tatattcttaaccatcacaaatggt

SEQ ID NO: 4353234 - DNA, 25 bp, Homo sapien
tattcttaaccatcacaaatggttt

SEQ ID NO: 4353235 - DNA, 25 bp, Homo sapien
tcgtcctcgctcaggtagagactca

SEQ ID NO: 4353236 - DNA, 25 bp, Homo sapien
gtcctcgctcaggtagagactcacg

SEQ ID NO: 4353237 - DNA, 25 bp, Homo sapien
cgtcctcgctcaggtagagactcac

SEQ ID NO: 4353238 - DNA, 25 bp, Homo sapien
ctcgtcctcgctcaggtagagactc

SEQ ID NO: 4353239 - DNA, 25 bp, Homo sapien
gcagcggcaacagcgcaagcagaag

SEQ ID NO: 4353240 - DNA, 25 bp, Homo sapien
agcagcggcaacagcgcaagcagaa

SEQ ID NO: 4353241 - DNA, 25 bp, Homo sapien
gcggcaacagcgcaagcagaagcag

SEQ ID NO: 4353242 - DNA, 25 bp, Homo sapien
agcggcaacagcgcaagcagaagca

SEQ ID NO: 4353243 - DNA, 25 bp, Homo sapien
ccgcgccgcccacgcatggccgccg

SEQ ID NO: 4353244 - DNA, 25 bp, Homo sapien
agccgcgccgcccacgcatggccgc

SEQ ID NO: 4353245 - DNA, 25 bp, Homo sapien
gccgcgccgcccacgcatggccgcc

SEQ ID NO: 4353246 - DNA, 25 bp, Homo sapien
cgagccgggggcggctgcccagctc

SEQ ID NO: 4353247 - DNA, 25 bp, Homo sapien
ggcttcagacctccggagcgcgccg

SEQ ID NO: 4353248 - DNA, 25 bp, Homo sapien
agtggcttcagacctccggagcgcg

SEQ ID NO: 4353249 - DNA, 25 bp, Homo sapien
gcagtggcttcagacctccggagcg

SEQ ID NO: 4353250 - DNA, 25 bp, Homo sapien
agcagtggcttcagacctccggagc

SEQ ID NO: 4353251 - DNA, 25 bp, Homo sapien
ggcctaatggtatattcttgcttca

SEQ ID NO: 4353252 - DNA, 25 bp, Homo sapien
cctaatggtatattcttgcttcata

SEQ ID NO: 4353253 - DNA, 25 bp, Homo sapien
tcttacagctctgatagtaataata

SEQ ID NO: 4353254 - DNA, 25 bp, Homo sapien
tacagctctgatagtaataatatat

SEQ ID NO: 4353255 - DNA, 25 bp, Homo sapien
ggacactcctacagacccactttga

SEQ ID NO: 4353256 - DNA, 25 bp, Homo sapien
gagtggtttctataccgtcgtggaa

SEQ ID NO: 4353257 - DNA, 25 bp, Homo sapien
tggtgtttccacgtgagcgcagctg

SEQ ID NO: 4353258 - DNA, 25 bp, Homo sapien
ccaagagcgtgatcctcactacggg

SEQ ID NO: 4353259 - DNA, 25 bp, Homo sapien
gtccgtctgtccgggtggaggacag

SEQ ID NO: 4353260 - DNA, 25 bp, Homo sapien
ccgtctgtccgggtggaggacaggg

SEQ ID NO: 4353261 - DNA, 25 bp, Homo sapien
ccgcgaccaggagggactcgcagga

SEQ ID NO: 4353262 - DNA, 25 bp, Homo sapien
caggggtgcggcgagaccagtcgcg

SEQ ID NO: 4353263 - DNA, 25 bp, Homo sapien
gaaccttatgtgcagaggaagagcc

SEQ ID NO: 4353264 - DNA, 25 bp, Homo sapien
gaagagtattttagacagagggaac

SEQ ID NO: 4353265 - DNA, 25 bp, Homo sapien
gctgcagagtgacacggaagatcag

SEQ ID NO: 4353266 - DNA, 25 bp, Homo sapien
ggaagatcagtaggagtcagcccaa

SEQ ID NO: 4353267 - DNA, 25 bp, Homo sapien
tgggtctggtcatggaacttcctgc

SEQ ID NO: 4353268 - DNA, 25 bp, Homo sapien
gactggcatggaagagggcatcata

SEQ ID NO: 4353269 - DNA, 25 bp, Homo sapien
cgtagtactgatttctggttccgaa

SEQ ID NO: 4353270 - DNA, 25 bp, Homo sapien
catgcaggacatgagactggcatgg

SEQ ID NO: 4353271 - DNA, 25 bp, Homo sapien
caggtgcagcatgggagattggccc

SEQ ID NO: 4353272 - DNA, 25 bp, Homo sapien
gcaggtgcagcatgggagattggcc

SEQ ID NO: 4353273 - DNA, 25 bp, Homo sapien
ggtgcagcatgggagattggcccat

SEQ ID NO: 4353274 - DNA, 25 bp, Homo sapien
aggtgcagcatgggagattggccca

SEQ ID NO: 4353275 - DNA, 25 bp, Homo sapien
aaggcaggcgagtcttcagggtcca

SEQ ID NO: 4353276 - DNA, 25 bp, Homo sapien
cctctgaaggcaggcgagtcttcag

SEQ ID NO: 4353277 - DNA, 25 bp, Homo sapien
aggcaggcgagtcttcagggtccac

SEQ ID NO: 4353278 - DNA, 25 bp, Homo sapien
tgaggcatgtggtggcgccagcctc

SEQ ID NO: 4353279 - DNA, 25 bp, Homo sapien
tccactgatgttgtttttcaactga

SEQ ID NO: 4353280 - DNA, 25 bp, Homo sapien
ctcttccactgatgttgtttttcaa

SEQ ID NO: 4353281 - DNA, 25 bp, Homo sapien
tgttgtttttcaactgagaacagaa

SEQ ID NO: 4353282 - DNA, 25 bp, Homo sapien
atgttgtttttcaactgagaacaga

SEQ ID NO: 4353283 - DNA, 25 bp, Homo sapien
cctggatagatgtgcctagccccat

SEQ ID NO: 4353284 - DNA, 25 bp, Homo sapien
agcctggatagatgtgcctagcccc

SEQ ID NO: 4353285 - DNA, 25 bp, Homo sapien
gcctggatagatgtgcctagcccca

SEQ ID NO: 4353286 - DNA, 25 bp, Homo sapien
aagcctggatagatgtgcctagccc

SEQ ID NO: 4353287 - DNA, 25 bp, Homo sapien
tgggtcctacctccaaagagtttga

SEQ ID NO: 4353288 - DNA, 25 bp, Homo sapien
gggcgctggcctctcttaaatccca

SEQ ID NO: 4353289 - DNA, 25 bp, Homo sapien
tcaagcagttgcaaggtagtcccct

SEQ ID NO: 4353290 - DNA, 25 bp, Homo sapien
tggtcaggtggtgagagcactctcc

SEQ ID NO: 4353291 - DNA, 25 bp, Homo sapien
ctcccggaggccacgactctgtttc

SEQ ID NO: 4353292 - DNA, 25 bp, Homo sapien
gtgtctaatggcgaacatgcaccag

SEQ ID NO: 4353293 - DNA, 25 bp, Homo sapien
gcgaacatgcaccagtcacaggttt

SEQ ID NO: 4353294 - DNA, 25 bp, Homo sapien
tcaccagccagtgtgtctaatggcg

SEQ ID NO: 4353295 - DNA, 25 bp, Homo sapien
tcagcagtgcagcaggcattcgatc

SEQ ID NO: 4353296 - DNA, 25 bp, Homo sapien
agcagtgcagcaggcattcgatcgg

SEQ ID NO: 4353297 - DNA, 25 bp, Homo sapien
cagcagtgcagcaggcattcgatcg

SEQ ID NO: 4353298 - DNA, 25 bp, Homo sapien
cttaggcggttgtggtgtctgcttg

SEQ ID NO: 4353299 - DNA, 25 bp, Homo sapien
gcggttgtggtgtctgcttgcctgc

SEQ ID NO: 4353300 - DNA, 25 bp, Homo sapien
tctgcttccacagtccagcctggag

SEQ ID NO: 4353301 - DNA, 25 bp, Homo sapien
tttctgcttccacagtccagcctgg

SEQ ID NO: 4353302 - DNA, 25 bp, Homo sapien
gcaaggttctcagcgaggacaatgt

SEQ ID NO: 4353303 - DNA, 25 bp, Homo sapien
cctggtgagcagaaaggtggtggcc

SEQ ID NO: 4353304 - DNA, 25 bp, Homo sapien
agagcctggtgcaaggttctcagcg

SEQ ID NO: 4353305 - DNA, 25 bp, Homo sapien
cgaggacaatgtgaggttgtccaca

SEQ ID NO: 4353306 - DNA, 25 bp, Homo sapien
ccttcacagtaaaacactaccactt

SEQ ID NO: 4353307 - DNA, 25 bp, Homo sapien
tccttcacagtaaaacactaccact

SEQ ID NO: 4353308 - DNA, 25 bp, Homo sapien
cacagtaaaacactaccacttcctg

SEQ ID NO: 4353309 - DNA, 25 bp, Homo sapien
ttcacagtaaaacactaccacttcc

SEQ ID NO: 4353310 - DNA, 25 bp, Homo sapien
ggcaccgttggtgacccagagcagc

SEQ ID NO: 4353311 - DNA, 25 bp, Homo sapien
tggtgacccagagcagctctttcat

SEQ ID NO: 4353312 - DNA, 25 bp, Homo sapien
ttggtgacccagagcagctctttca

SEQ ID NO: 4353313 - DNA, 25 bp, Homo sapien
gctggcaccgttggtgacccagagc

SEQ ID NO: 4353314 - DNA, 25 bp, Homo sapien
aagccctggcctggctgactctgct

SEQ ID NO: 4353315 - DNA, 25 bp, Homo sapien
tggtcatgggggcatttcaagccaa

SEQ ID NO: 4353316 - DNA, 25 bp, Homo sapien
gctgagagcacagctggttggtcat

SEQ ID NO: 4353317 - DNA, 25 bp, Homo sapien
ggggcatttcaagccaaagccctgg

SEQ ID NO: 4353318 - DNA, 25 bp, Homo sapien
ccatggcctttgtgttgtgactgga

SEQ ID NO: 4353319 - DNA, 25 bp, Homo sapien
gtgactggactgtccttattgtggg

SEQ ID NO: 4353320 - DNA, 25 bp, Homo sapien
cttattgtgggcataaacagccagc

SEQ ID NO: 4353321 - DNA, 25 bp, Homo sapien
ggactgtccttattgtgggcataaa

SEQ ID NO: 4353322 - DNA, 25 bp, Homo sapien
tcagggctgtattggtagggccacc

SEQ ID NO: 4353323 - DNA, 25 bp, Homo sapien
caagtcttttccagtcaccgtaggt

SEQ ID NO: 4353324 - DNA, 25 bp, Homo sapien
tgtgtgtataagtgcgcatgcccat

SEQ ID NO: 4353325 - DNA, 25 bp, Homo sapien
aaaatggagggacgtcagcttggcc

SEQ ID NO: 4353326 - DNA, 25 bp, Homo sapien
tgttcccaggaccacgccttgacgg

SEQ ID NO: 4353327 - DNA, 25 bp, Homo sapien
accacgccttgacggtccagcttgg

SEQ ID NO: 4353328 - DNA, 25 bp, Homo sapien
tgggatggctgcaaaagttcaacca

SEQ ID NO: 4353329 - DNA, 25 bp, Homo sapien
gagaggtgaatatctttcaatggac

SEQ ID NO: 4353330 - DNA, 25 bp, Homo sapien
ctcctcttggagttgtacctgattt

SEQ ID NO: 4353331 - DNA, 25 bp, Homo sapien
ctagcttggttcttttccaatgtct

SEQ ID NO: 4353332 - DNA, 25 bp, Homo sapien
ggttcttttccaatgtctcctcttg

SEQ ID NO: 4353333 - DNA, 25 bp, Homo sapien
ttggttcttttccaatgtctcctct

SEQ ID NO: 4353334 - DNA, 25 bp, Homo sapien
gagaggcggagccaaacacacacta

SEQ ID NO: 4353335 - DNA, 25 bp, Homo sapien
acacacactacaatggtggagaaag

SEQ ID NO: 4353336 - DNA, 25 bp, Homo sapien
agaggcggagccaaacacacactac

SEQ ID NO: 4353337 - DNA, 25 bp, Homo sapien
cacacactacaatggtggagaaagg

SEQ ID NO: 4353338 - DNA, 25 bp, Homo sapien
tgggtacactgggaccgatttctta

SEQ ID NO: 4353339 - DNA, 25 bp, Homo sapien
atgtgctgggtacactgggaccgat

SEQ ID NO: 4353340 - DNA, 25 bp, Homo sapien
cactgggaccgatttcttattcctc

SEQ ID NO: 4353341 - DNA, 25 bp, Homo sapien
tgctgggtacactgggaccgatttc

SEQ ID NO: 4353342 - DNA, 25 bp, Homo sapien
ggcggtggctaagaacatgcacatt

SEQ ID NO: 4353343 - DNA, 25 bp, Homo sapien
attggactatgacttgggtggcccc

SEQ ID NO: 4353344 - DNA, 25 bp, Homo sapien
gaaggataaagccatctttggacac

SEQ ID NO: 4353345 - DNA, 25 bp, Homo sapien
gcgtgtggccgaacaaagctgatta

SEQ ID NO: 4353346 - DNA, 25 bp, Homo sapien
tacccagtggaatgcggcagcaatc

SEQ ID NO: 4353347 - DNA, 25 bp, Homo sapien
catggagacacatcggaacctgcag

SEQ ID NO: 4353348 - DNA, 25 bp, Homo sapien
ttgattagtgaaccagtccacctgg

SEQ ID NO: 4353349 - DNA, 25 bp, Homo sapien
tcgagcagctttaacatccacgggc

SEQ ID NO: 4353350 - DNA, 25 bp, Homo sapien
tcattctccataaggcccggaggaa

SEQ ID NO: 4353351 - DNA, 25 bp, Homo sapien
gaatgtgggctaagaagcagagtct

SEQ ID NO: 4353352 - DNA, 25 bp, Homo sapien
gagctgtcagttgctaccccagtag

SEQ ID NO: 4353353 - DNA, 25 bp, Homo sapien
tctgagctgtcagttgctaccccag

SEQ ID NO: 4353354 - DNA, 25 bp, Homo sapien
ctgggaccagatggtcaatgggaat

SEQ ID NO: 4353355 - DNA, 25 bp, Homo sapien
tcaatgggaatgagtgtctggctgg

SEQ ID NO: 4353356 - DNA, 25 bp, Homo sapien
gacggagcagcggttgacggggctg

SEQ ID NO: 4353357 - DNA, 25 bp, Homo sapien
cagatggtcaatgggaatgagtgtc

SEQ ID NO: 4353358 - DNA, 25 bp, Homo sapien
agagaatggctcagagtcctgaagc

SEQ ID NO: 4353359 - DNA, 25 bp, Homo sapien
ggagagaatggctcagagtcctgaa

SEQ ID NO: 4353360 - DNA, 25 bp, Homo sapien
ggctcagagtcctgaagcaccacct

SEQ ID NO: 4353361 - DNA, 25 bp, Homo sapien
gaatggctcagagtcctgaagcacc

SEQ ID NO: 4353362 - DNA, 25 bp, Homo sapien
tgtctgacaagtcctggactctgga

SEQ ID NO: 4353363 - DNA, 25 bp, Homo sapien
ccatgtctgacaagtcctggactct

SEQ ID NO: 4353364 - DNA, 25 bp, Homo sapien
atgtctgacaagtcctggactctgg

SEQ ID NO: 4353365 - DNA, 25 bp, Homo sapien
catgtctgacaagtcctggactctg

SEQ ID NO: 4353366 - DNA, 25 bp, Homo sapien
caagcacaatgctctgccccctttc

SEQ ID NO: 4353367 - DNA, 25 bp, Homo sapien
agacaaagatcgttcttcaccaact

SEQ ID NO: 4353368 - DNA, 25 bp, Homo sapien
caaccaagcacaatgctctgccccc

SEQ ID NO: 4353369 - DNA, 25 bp, Homo sapien
gacaaagatcgttcttcaccaactt

SEQ ID NO: 4353370 - DNA, 25 bp, Homo sapien
ccgatgtgtaggatgcatttgtttc

SEQ ID NO: 4353371 - DNA, 25 bp, Homo sapien
caacctccgatgtgtaggatgcatt

SEQ ID NO: 4353372 - DNA, 25 bp, Homo sapien
tgtaggatgcatttgtttctaactt

SEQ ID NO: 4353373 - DNA, 25 bp, Homo sapien
cctccgatgtgtaggatgcatttgt

SEQ ID NO: 4353374 - DNA, 25 bp, Homo sapien
gcaggctgcagcattcttttcatgc

SEQ ID NO: 4353375 - DNA, 25 bp, Homo sapien
gacttgcgagctccattctcttgga

SEQ ID NO: 4353376 - DNA, 25 bp, Homo sapien
agtgccatcggcatgacttgcgagc

SEQ ID NO: 4353377 - DNA, 25 bp, Homo sapien
taaacaggcttccagagtgccatcg

SEQ ID NO: 4353378 - DNA, 25 bp, Homo sapien
atttccctattcatgcaaccagcca

SEQ ID NO: 4353379 - DNA, 25 bp, Homo sapien
tccctcatgttcacattgaggtggg

SEQ ID NO: 4353380 - DNA, 25 bp, Homo sapien
tcagggtttccaatttccctattca

SEQ ID NO: 4353381 - DNA, 25 bp, Homo sapien
cagccatccctcatgttcacattga

SEQ ID NO: 4353382 - DNA, 25 bp, Homo sapien
ggagtgcgggcaatgacccggaggg

SEQ ID NO: 4353383 - DNA, 25 bp, Homo sapien
ctctggctatgcacggctccccatg

SEQ ID NO: 4353384 - DNA, 25 bp, Homo sapien
tgtgttccagttcacaccccagtgc

SEQ ID NO: 4353385 - DNA, 25 bp, Homo sapien
aaggccttgtgttccagttcacacc

SEQ ID NO: 4353386 - DNA, 25 bp, Homo sapien
ctagcacagaagtggggtcaggagg

SEQ ID NO: 4353387 - DNA, 25 bp, Homo sapien
cacagaagtggggtcaggaggactt

SEQ ID NO: 4353388 - DNA, 25 bp, Homo sapien
cagaagtggggtcaggaggacttac

SEQ ID NO: 4353389 - DNA, 25 bp, Homo sapien
tagcacagaagtggggtcaggagga

SEQ ID NO: 4353390 - DNA, 25 bp, Homo sapien
gccctcagtctgggtgctcccatct

SEQ ID NO: 4353391 - DNA, 25 bp, Homo sapien
tgcaccccagaaggctgtcaggctc

SEQ ID NO: 4353392 - DNA, 25 bp, Homo sapien
cccatctctgctcccgtgtttggca

SEQ ID NO: 4353393 - DNA, 25 bp, Homo sapien
gctcccgtgtttggcatgggcagca

SEQ ID NO: 4353394 - DNA, 25 bp, Homo sapien
atggcaccgacttggcaggccgcag

SEQ ID NO: 4353395 - DNA, 25 bp, Homo sapien
aggggcgtctgctgtttgtcgctca

SEQ ID NO: 4353396 - DNA, 25 bp, Homo sapien
cagccgcgaaaacagatggcaccga

SEQ ID NO: 4353397 - DNA, 25 bp, Homo sapien
ctgaaggaccttgatcactgcatcc

SEQ ID NO: 4353398 - DNA, 25 bp, Homo sapien
cctgggcagaccaaggactcggtat

SEQ ID NO: 4353399 - DNA, 25 bp, Homo sapien
tgtgccaatcatgcaggttcagctc

SEQ ID NO: 4353400 - DNA, 25 bp, Homo sapien
ccacagtaagagtctcctgggcaga

SEQ ID NO: 4353401 - DNA, 25 bp, Homo sapien
tcataggagttagaggaaaagcccc

SEQ ID NO: 4353402 - DNA, 25 bp, Homo sapien
gtggcagccgcatccatggcaaact

SEQ ID NO: 4353403 - DNA, 25 bp, Homo sapien
gagcagaccctcattgaagctgctg

SEQ ID NO: 4353404 - DNA, 25 bp, Homo sapien
gggaatgtcggatgagagtggtgtc

SEQ ID NO: 4353405 - DNA, 25 bp, Homo sapien
agtggtgtcacgctgagcagcagcc

SEQ ID NO: 4353406 - DNA, 25 bp, Homo sapien
agttgttctgacagtcgcagggcgc

SEQ ID NO: 4353407 - DNA, 25 bp, Homo sapien
gagctctggagacccaccactgcca

SEQ ID NO: 4353408 - DNA, 25 bp, Homo sapien
tgttctgacagtcgcagggcgctga

SEQ ID NO: 4353409 - DNA, 25 bp, Homo sapien
ctgacagtcgcagggcgctgagctc

SEQ ID NO: 4353410 - DNA, 25 bp, Homo sapien
ttcttgcgcagctcctcttcggctc

SEQ ID NO: 4353411 - DNA, 25 bp, Homo sapien
tccagctgctcccgcttctcacagg

SEQ ID NO: 4353412 - DNA, 25 bp, Homo sapien
tcctcttcggctcgagctgcccggc

SEQ ID NO: 4353413 - DNA, 25 bp, Homo sapien
ctccacataggcctgcttcttgcgc

SEQ ID NO: 4353414 - DNA, 25 bp, Homo sapien
cgatggcgccgcgcagcagtgccat

SEQ ID NO: 4353415 - DNA, 25 bp, Homo sapien
agcagctcggcacgccgccgctggt

SEQ ID NO: 4353416 - DNA, 25 bp, Homo sapien
gctggtcctcgatggcgccgcgcag

SEQ ID NO: 4353417 - DNA, 25 bp, Homo sapien
gccgccgctggtcctcgatggcgcc

SEQ ID NO: 4353418 - DNA, 25 bp, Homo sapien
cctcctgtgtcttgcttgccaggcg

SEQ ID NO: 4353419 - DNA, 25 bp, Homo sapien
accatgtcctgactgccggcctggg

SEQ ID NO: 4353420 - DNA, 25 bp, Homo sapien
agcttggccaccatgtcctgactgc

SEQ ID NO: 4353421 - DNA, 25 bp, Homo sapien
ggcggcgatttgcagattccaatct

SEQ ID NO: 4353422 - DNA, 25 bp, Homo sapien
agatcccggttgaagtcttgcagcc

SEQ ID NO: 4353423 - DNA, 25 bp, Homo sapien
catcttgttccgcatggtcttctcc

SEQ ID NO: 4353424 - DNA, 25 bp, Homo sapien
gggcctcacgcttggaggaggctct

SEQ ID NO: 4353425 - DNA, 25 bp, Homo sapien
cactgtccatcttgttccgcatggt

SEQ ID NO: 4353426 - DNA, 25 bp, Homo sapien
aaacctccaggtgactatggtggga

SEQ ID NO: 4353427 - DNA, 25 bp, Homo sapien
gcctccggaagtagaatagactgct

SEQ ID NO: 4353428 - DNA, 25 bp, Homo sapien
tactttggaagtagctgcctgcggg

SEQ ID NO: 4353429 - DNA, 25 bp, Homo sapien
ggctggcttccaccaagaaactgag

SEQ ID NO: 4353430 - DNA, 25 bp, Homo sapien
ggcattctccctcagcacggcctcc

SEQ ID NO: 4353431 - DNA, 25 bp, Homo sapien
tggcattctccctcagcacggcctc

SEQ ID NO: 4353432 - DNA, 25 bp, Homo sapien
gcattctccctcagcacggcctcca

SEQ ID NO: 4353433 - DNA, 25 bp, Homo sapien
ggtgctcctgagattgctgcaggta

SEQ ID NO: 4353434 - DNA, 25 bp, Homo sapien
tgggcactgcccgaggtggctgagg

SEQ ID NO: 4353435 - DNA, 25 bp, Homo sapien
gctcctgagattgctgcaggtactg

SEQ ID NO: 4353436 - DNA, 25 bp, Homo sapien
ggcactgcccgaggtggctgaggag

SEQ ID NO: 4353437 - DNA, 25 bp, Homo sapien
acagaagagacggtgctcagagaca

SEQ ID NO: 4353438 - DNA, 25 bp, Homo sapien
gggaacagaagagacggtgctcaga

SEQ ID NO: 4353439 - DNA, 25 bp, Homo sapien
aagagacggtgctcagagacagcac

SEQ ID NO: 4353440 - DNA, 25 bp, Homo sapien
agaagagacggtgctcagagacagc

SEQ ID NO: 4353441 - DNA, 25 bp, Homo sapien
caaccctctagtgttaggcagggac

SEQ ID NO: 4353442 - DNA, 25 bp, Homo sapien
tctagtgttaggcagggaccagtag

SEQ ID NO: 4353443 - DNA, 25 bp, Homo sapien
tactgcagataattattcaaccctc

SEQ ID NO: 4353444 - DNA, 25 bp, Homo sapien
aattattcaaccctctagtgttagg

SEQ ID NO: 4353445 - DNA, 25 bp, Homo sapien
gtgtctattacacgagtcgccagtt

SEQ ID NO: 4353446 - DNA, 25 bp, Homo sapien
catgactgagcatataaccttccag

SEQ ID NO: 4353447 - DNA, 25 bp, Homo sapien
gcaatcctgggcctcctaagcaact

SEQ ID NO: 4353448 - DNA, 25 bp, Homo sapien
gcaccctgacacttctaatcaatgg

SEQ ID NO: 4353449 - DNA, 25 bp, Homo sapien
gactccagttaaggttagagcaatg

SEQ ID NO: 4353450 - DNA, 25 bp, Homo sapien
ttagaagactccagttaaggttaga

SEQ ID NO: 4353451 - DNA, 25 bp, Homo sapien
ttctccttcctatttcaagtcctgc

SEQ ID NO: 4353452 - DNA, 25 bp, Homo sapien
ccagttaaggttagagcaatgagac

SEQ ID NO: 4353453 - DNA, 25 bp, Homo sapien
ctgggatttgttgaggatgacgcta

SEQ ID NO: 4353454 - DNA, 25 bp, Homo sapien
ctgtttaaccttgggcgagtgcctc

SEQ ID NO: 4353455 - DNA, 25 bp, Homo sapien
gacgctatgtaaggcctggcagagt

SEQ ID NO: 4353456 - DNA, 25 bp, Homo sapien
ccacagactgggcattgctctgttg

SEQ ID NO: 4353457 - DNA, 25 bp, Homo sapien
caatattctattggcctctggcact

SEQ ID NO: 4353458 - DNA, 25 bp, Homo sapien
cttctcaggaccctaggctaggagt

SEQ ID NO: 4353459 - DNA, 25 bp, Homo sapien
tctggcactggtgtaacatcacccc

SEQ ID NO: 4353460 - DNA, 25 bp, Homo sapien
cctctggactactgtggtcactgag

SEQ ID NO: 4353461 - DNA, 25 bp, Homo sapien
catagtactgcgagtgggctttggc

SEQ ID NO: 4353462 - DNA, 25 bp, Homo sapien
gacagcagtggtggtctcatgagct

SEQ ID NO: 4353463 - DNA, 25 bp, Homo sapien
tgagctagtacaacatgagggtact

SEQ ID NO: 4353464 - DNA, 25 bp, Homo sapien
tccagggacaactgaaggagccgtt

SEQ ID NO: 4353465 - DNA, 25 bp, Homo sapien
ctgtccccgaggagtcttccagtgt

SEQ ID NO: 4353466 - DNA, 25 bp, Homo sapien
gcatagccggtagagggtgttctct

SEQ ID NO: 4353467 - DNA, 25 bp, Homo sapien
atggctagcagcgtgcgcgtctcag

SEQ ID NO: 4353468 - DNA, 25 bp, Homo sapien
gtctcagtcaggttgccgtagcgca

SEQ ID NO: 4353469 - DNA, 25 bp, Homo sapien
gcttctttggcttgcacacagctgc

SEQ ID NO: 4353470 - DNA, 25 bp, Homo sapien
tggacaatggccggtggcacctggc

SEQ ID NO: 4353471 - DNA, 25 bp, Homo sapien
ggacaatggccggtggcacctggcc

SEQ ID NO: 4353472 - DNA, 25 bp, Homo sapien
ctggacaatggccggtggcacctgg

SEQ ID NO: 4353473 - DNA, 25 bp, Homo sapien
tctgaaggccgcctttctaagccag

SEQ ID NO: 4353474 - DNA, 25 bp, Homo sapien
cactcgcccgctgcgctctctgaag

SEQ ID NO: 4353475 - DNA, 25 bp, Homo sapien
ctctgctgcactcgcccgctgcgct

SEQ ID NO: 4353476 - DNA, 25 bp, Homo sapien
tttctaagccagcgcgcgtctccag

SEQ ID NO: 4353477 - DNA, 25 bp, Homo sapien
gagccggtgagggtagcccgaggcc

SEQ ID NO: 4353478 - DNA, 25 bp, Homo sapien
caccggtggccgctggtacgcctgg

SEQ ID NO: 4353479 - DNA, 25 bp, Homo sapien
tacgcctggggcgagccggtgaggg

SEQ ID NO: 4353480 - DNA, 25 bp, Homo sapien
accggtggccgctggtacgcctggg

SEQ ID NO: 4353481 - DNA, 25 bp, Homo sapien
tggcgccgacgctctggctgttcgc

SEQ ID NO: 4353482 - DNA, 25 bp, Homo sapien
gctatgccaggaatgtgagagtttc

SEQ ID NO: 4353483 - DNA, 25 bp, Homo sapien
aagatgtgttctcggccgtggcgcc

SEQ ID NO: 4353484 - DNA, 25 bp, Homo sapien
gatcaaagcgaaccacaaataacct

SEQ ID NO: 4353485 - DNA, 25 bp, Homo sapien
aatggctctcagacgacagatggcg

SEQ ID NO: 4353486 - DNA, 25 bp, Homo sapien
ggtgaatagatttgcagcccgccgg

SEQ ID NO: 4353487 - DNA, 25 bp, Homo sapien
caataagtgaattctccgaagcgac

SEQ ID NO: 4353488 - DNA, 25 bp, Homo sapien
gccgagccctgcaaacaataagtga

SEQ ID NO: 4353489 - DNA, 25 bp, Homo sapien
cctctgccatagtaagaagtgtagt

SEQ ID NO: 4353490 - DNA, 25 bp, Homo sapien
cattcctttcggtgtgagggcaggt

SEQ ID NO: 4353491 - DNA, 25 bp, Homo sapien
aaggaagcaaatgcacaccgggcag

SEQ ID NO: 4353492 - DNA, 25 bp, Homo sapien
tgagcactcagggacagtaggccct

SEQ ID NO: 4353493 - DNA, 25 bp, Homo sapien
cacaaggaggtctgagggcaaatac

SEQ ID NO: 4353494 - DNA, 25 bp, Homo sapien
ggcaaatacatctccttggctggct

SEQ ID NO: 4353495 - DNA, 25 bp, Homo sapien
gtctgagggcaaatacatctccttg

SEQ ID NO: 4353496 - DNA, 25 bp, Homo sapien
tccctgaaggggtcacaaggaggtc

SEQ ID NO: 4353497 - DNA, 25 bp, Homo sapien
ccacaggagacagcgggaggtctgg

SEQ ID NO: 4353498 - DNA, 25 bp, Homo sapien
gccacaggagacagcgggaggtctg

SEQ ID NO: 4353499 - DNA, 25 bp, Homo sapien
acaggagacagcgggaggtctggct

SEQ ID NO: 4353500 - DNA, 25 bp, Homo sapien
aggagacagcgggaggtctggctgg

SEQ ID NO: 4353501 - DNA, 25 bp, Homo sapien
tttgacaaaaggcaagctttccagg

SEQ ID NO: 4353502 - DNA, 25 bp, Homo sapien
gtttgacaaaaggcaagctttccag

SEQ ID NO: 4353503 - DNA, 25 bp, Homo sapien
aattcttcgatcttttgtactgttg

SEQ ID NO: 4353504 - DNA, 25 bp, Homo sapien
aataccacttcaggatataatacag

SEQ ID NO: 4353505 - DNA, 25 bp, Homo sapien
gtgtttgtctgaaaagatctttact

SEQ ID NO: 4353506 - DNA, 25 bp, Homo sapien
gttgacaatgcattctctcagtttg

SEQ ID NO: 4353507 - DNA, 25 bp, Homo sapien
gcttctgttgccactctcaccacag

SEQ ID NO: 4353508 - DNA, 25 bp, Homo sapien
cagaagccagagatcaagcatcaca

SEQ ID NO: 4353509 - DNA, 25 bp, Homo sapien
aacttgaccagctgagactgagcct

SEQ ID NO: 4353510 - DNA, 25 bp, Homo sapien
gaagccagagatcaagcatcacatc

SEQ ID NO: 4353511 - DNA, 25 bp, Homo sapien
ctgcagggtgctcctcacccagaac

SEQ ID NO: 4353512 - DNA, 25 bp, Homo sapien
tcacacaaaattgaacgttagagca

SEQ ID NO: 4353513 - DNA, 25 bp, Homo sapien
tcacccagaacacgtctggactcag

SEQ ID NO: 4353514 - DNA, 25 bp, Homo sapien
aatagctccgatgtttcttctcatg

SEQ ID NO: 4353515 - DNA, 25 bp, Homo sapien
tcatgaatgacctggaaaaatgggt

SEQ ID NO: 4353516 - DNA, 25 bp, Homo sapien
gggtaaagacctctactcttcagtc

SEQ ID NO: 4353517 - DNA, 25 bp, Homo sapien
actcagtgttgaggtgcaggtttcc

SEQ ID NO: 4353518 - DNA, 25 bp, Homo sapien
ggtcttgcaagcatttaggacactc

SEQ ID NO: 4353519 - DNA, 25 bp, Homo sapien
cactccgaatgcttctcaatgtggg

SEQ ID NO: 4353520 - DNA, 25 bp, Homo sapien
cagagtttcaacaagggatacagat

SEQ ID NO: 4353521 - DNA, 25 bp, Homo sapien
gtctcagagattacataccacaagt

SEQ ID NO: 4353522 - DNA, 25 bp, Homo sapien
tctaggcagaactactgatgcaaag

SEQ ID NO: 4353523 - DNA, 25 bp, Homo sapien
ccatccacaagaaaggagccaagcg

SEQ ID NO: 4353524 - DNA, 25 bp, Homo sapien
tatctgtgtactttgagaaaatcca

SEQ ID NO: 4353525 - DNA, 25 bp, Homo sapien
gctgatttattactcaaaggtttga

SEQ ID NO: 4353526 - DNA, 25 bp, Homo sapien
tttggagactgaaacaaaccatgct

SEQ ID NO: 4353527 - DNA, 25 bp, Homo sapien
tctcatggaggtactgtaaggctaa

SEQ ID NO: 4353528 - DNA, 25 bp, Homo sapien
gtactgtaaggctaagtctgtccac

SEQ ID NO: 4353529 - DNA, 25 bp, Homo sapien
ctgtggtgccaccattgtcttgttc

SEQ ID NO: 4353530 - DNA, 25 bp, Homo sapien
tcagtttccaatggggggaacattc

SEQ ID NO: 4353531 - DNA, 25 bp, Homo sapien
gtattgcgacatcctcataaggcag

SEQ ID NO: 4353532 - DNA, 25 bp, Homo sapien
tcttctcgccaagcatcatcaatca

SEQ ID NO: 4353533 - DNA, 25 bp, Homo sapien
taaggcagcttgtcttctcgccaag

SEQ ID NO: 4353534 - DNA, 25 bp, Homo sapien
tcaatcaaatccaagatccttccat

SEQ ID NO: 4353535 - DNA, 25 bp, Homo sapien
catagcccagctgacagaccagtgt

SEQ ID NO: 4353536 - DNA, 25 bp, Homo sapien
tatgggccgggtgactactttgatc

SEQ ID NO: 4353537 - DNA, 25 bp, Homo sapien
caggagagcaacacgttaaacgagg

SEQ ID NO: 4353538 - DNA, 25 bp, Homo sapien
tagtgtatactggacaggcatagcc

SEQ ID NO: 4353539 - DNA, 25 bp, Homo sapien
ttcggaggcccacgtagattttcca

SEQ ID NO: 4353540 - DNA, 25 bp, Homo sapien
tcggaggcccacgtagattttccac

SEQ ID NO: 4353541 - DNA, 25 bp, Homo sapien
tgactttcggaggcccacgtagatt

SEQ ID NO: 4353542 - DNA, 25 bp, Homo sapien
tctcacagttccctaagcacagagc

SEQ ID NO: 4353543 - DNA, 25 bp, Homo sapien
gaatgtctttccaaacacgcggtgc

SEQ ID NO: 4353544 - DNA, 25 bp, Homo sapien
ggtcccaggtcgcttcctataggag

SEQ ID NO: 4353545 - DNA, 25 bp, Homo sapien
tgacagtcccgatgcctgcaatgct

SEQ ID NO: 4353546 - DNA, 25 bp, Homo sapien
ttccttgctagaaatgagcctcgca

SEQ ID NO: 4353547 - DNA, 25 bp, Homo sapien
cttgctagaaatgagcctcgcaggc

SEQ ID NO: 4353548 - DNA, 25 bp, Homo sapien
tagaaatgagcctcgcaggccacca

SEQ ID NO: 4353549 - DNA, 25 bp, Homo sapien
tgctagaaatgagcctcgcaggcca

SEQ ID NO: 4353550 - DNA, 25 bp, Homo sapien
tgcctcaggcaggatgtaccaaacg

SEQ ID NO: 4353551 - DNA, 25 bp, Homo sapien
cagtaaagaaaaacggttatgagcg

SEQ ID NO: 4353552 - DNA, 25 bp, Homo sapien
tcctcccgacacgagtgcagtaaag

SEQ ID NO: 4353553 - DNA, 25 bp, Homo sapien
tgtaccaaacgtggaagcggagacg

SEQ ID NO: 4353554 - DNA, 25 bp, Homo sapien
actgagcaacgaacgcattcccgcg

SEQ ID NO: 4353555 - DNA, 25 bp, Homo sapien
gtccgacactgagcaacgaacgcat

SEQ ID NO: 4353556 - DNA, 25 bp, Homo sapien
aatagggggaagtccgacactgagc

SEQ ID NO: 4353557 - DNA, 25 bp, Homo sapien
cattcccgcgcctccaaaacctagg

SEQ ID NO: 4353558 - DNA, 25 bp, Homo sapien
acgcttgctcctgccacgccccccc

SEQ ID NO: 4353559 - DNA, 25 bp, Homo sapien
cagacgcttgctcctgccacgcccc

SEQ ID NO: 4353560 - DNA, 25 bp, Homo sapien
cggccaccgcggcagacgcttgctc

SEQ ID NO: 4353561 - DNA, 25 bp, Homo sapien
ccggccaccgcggcagacgcttgct

SEQ ID NO: 4353562 - DNA, 25 bp, Homo sapien
tgttgggactacttcattcacggca

SEQ ID NO: 4353563 - DNA, 25 bp, Homo sapien
gctgctgtctagctagcgctgttgg

SEQ ID NO: 4353564 - DNA, 25 bp, Homo sapien
cttccttttcagcggagagacccca

SEQ ID NO: 4353565 - DNA, 25 bp, Homo sapien
tagctagcgctgttgggactacttc

SEQ ID NO: 4353566 - DNA, 25 bp, Homo sapien
caggagcatgctacttacagtggac

SEQ ID NO: 4353567 - DNA, 25 bp, Homo sapien
cacaatgtctaggttgaatccagga

SEQ ID NO: 4353568 - DNA, 25 bp, Homo sapien
tatccgtgtatggttgtcaggagca

SEQ ID NO: 4353569 - DNA, 25 bp, Homo sapien
tagacaatgtgtacaaggcagctgt

SEQ ID NO: 4353570 - DNA, 25 bp, Homo sapien
tgtgcagccagacagaccagtgaaa

SEQ ID NO: 4353571 - DNA, 25 bp, Homo sapien
tgccaaagcaccatagagacctaat

SEQ ID NO: 4353572 - DNA, 25 bp, Homo sapien
gataaactaccgacagtggctgtgg

SEQ ID NO: 4353573 - DNA, 25 bp, Homo sapien
ggaaaagtccacaacaattgcaagg

SEQ ID NO: 4353574 - DNA, 25 bp, Homo sapien
ctgttgtgattattgactctatgta

SEQ ID NO: 4353575 - DNA, 25 bp, Homo sapien
gttctcaattatttatccatggagt

SEQ ID NO: 4353576 - DNA, 25 bp, Homo sapien
ccacacttgaccaagatattgttat

SEQ ID NO: 4353577 - DNA, 25 bp, Homo sapien
tgtagccttcagattgacaaaaaag

SEQ ID NO: 4353578 - DNA, 25 bp, Homo sapien
gaaatagagcgcctcaccatgaggg

SEQ ID NO: 4353579 - DNA, 25 bp, Homo sapien
gactgtcctacaggagcagcagcaa

SEQ ID NO: 4353580 - DNA, 25 bp, Homo sapien
cacttaagcagtaaactggagcggg

SEQ ID NO: 4353581 - DNA, 25 bp, Homo sapien
tggttggaaccagtatgactgtcct

SEQ ID NO: 4353582 - DNA, 25 bp, Homo sapien
tcaagtagtgtcttaccaggaaaca

SEQ ID NO: 4353583 - DNA, 25 bp, Homo sapien
gaaaagaccaagctaaccatggtat

SEQ ID NO: 4353584 - DNA, 25 bp, Homo sapien
caggaaacacctagaattgaagagc

SEQ ID NO: 4353585 - DNA, 25 bp, Homo sapien
tgaatcctgctttatcatgtccaaa

SEQ ID NO: 4353586 - DNA, 25 bp, Homo sapien
caatcccagccaaggtcgaagtagg

SEQ ID NO: 4353587 - DNA, 25 bp, Homo sapien
tcagtatgcgcagcacttccacagt

SEQ ID NO: 4353588 - DNA, 25 bp, Homo sapien
cagtaattcgtggacatatgcagag

SEQ ID NO: 4353589 - DNA, 25 bp, Homo sapien
gagtgaccgacttgcacaatcccag

SEQ ID NO: 4353590 - DNA, 25 bp, Homo sapien
cctgtatctccccttggttcaatag

SEQ ID NO: 4353591 - DNA, 25 bp, Homo sapien
ggttcaatagctaccagatttttgg

SEQ ID NO: 4353592 - DNA, 25 bp, Homo sapien
cattctagagcgcttggatgcccat

SEQ ID NO: 4353593 - DNA, 25 bp, Homo sapien
aatgtcatgaacagtgtatcttaga

SEQ ID NO: 4353594 - DNA, 25 bp, Homo sapien
acacataacacctggtaaactgtgg

SEQ ID NO: 4353595 - DNA, 25 bp, Homo sapien
tacacataacacctggtaaactgtg

SEQ ID NO: 4353596 - DNA, 25 bp, Homo sapien
tacagtctctgtaggtcacaatccc

SEQ ID NO: 4353597 - DNA, 25 bp, Homo sapien
aatgcttgacatgcagcctcgtggg

SEQ ID NO: 4353598 - DNA, 25 bp, Homo sapien
cagagttgcagggtatgctactgtc

SEQ ID NO: 4353599 - DNA, 25 bp, Homo sapien
taattgctcactgccgaagtgcagc

SEQ ID NO: 4353600 - DNA, 25 bp, Homo sapien
gggctgagccacaggcttccccagg

SEQ ID NO: 4353601 - DNA, 25 bp, Homo sapien
ggctgagccacaggcttccccaggc

SEQ ID NO: 4353602 - DNA, 25 bp, Homo sapien
tgagccacaggcttccccaggctca

SEQ ID NO: 4353603 - DNA, 25 bp, Homo sapien
ctgctgtcaaacaggggctgagcca

SEQ ID NO: 4353604 - DNA, 25 bp, Homo sapien
ggctatcccaaagggcataggagga

SEQ ID NO: 4353605 - DNA, 25 bp, Homo sapien
caatcaggttaacgtgttctctcca

SEQ ID NO: 4353606 - DNA, 25 bp, Homo sapien
gaccagtggctaagaggccatcttt

SEQ ID NO: 4353607 - DNA, 25 bp, Homo sapien
ggctcctgaccacacaagacagatt

SEQ ID NO: 4353608 - DNA, 25 bp, Homo sapien
ggctagcttaatgggaagccagtgc

SEQ ID NO: 4353609 - DNA, 25 bp, Homo sapien
tccatgggctagcttaatgggaagc

SEQ ID NO: 4353610 - DNA, 25 bp, Homo sapien
ccccactggtctgaatagcctctga

SEQ ID NO: 4353611 - DNA, 25 bp, Homo sapien
ttgaaagctgactggttgtcagtcc

SEQ ID NO: 4353612 - DNA, 25 bp, Homo sapien
tattcagggctatccacaagactcc

SEQ ID NO: 4353613 - DNA, 25 bp, Homo sapien
gaaaaagcccggtgatagatcagcc

SEQ ID NO: 4353614 - DNA, 25 bp, Homo sapien
taaaatcagaagtgtgcaagacggc

SEQ ID NO: 4353615 - DNA, 25 bp, Homo sapien
gagaagccacgagaaagcacctagt

SEQ ID NO: 4353616 - DNA, 25 bp, Homo sapien
tgtgaaaagctgtcaacctgggcaa

SEQ ID NO: 4353617 - DNA, 25 bp, Homo sapien
cagccacacctgagtgaagccttca

SEQ ID NO: 4353618 - DNA, 25 bp, Homo sapien
cagaggcctagaagggatttcatgc

SEQ ID NO: 4353619 - DNA, 25 bp, Homo sapien
tttcatgcagactcagtggtgtcca

SEQ ID NO: 4353620 - DNA, 25 bp, Homo sapien
agtagaaattgtggttggcattctc

SEQ ID NO: 4353621 - DNA, 25 bp, Homo sapien
aggagtagaaattgtggttggcatt

SEQ ID NO: 4353622 - DNA, 25 bp, Homo sapien
ggagtagaaattgtggttggcattc

SEQ ID NO: 4353623 - DNA, 25 bp, Homo sapien
tagaaattgtggttggcattctcca

SEQ ID NO: 4353624 - DNA, 25 bp, Homo sapien
gctctcagggaacatgggccagttc

SEQ ID NO: 4353625 - DNA, 25 bp, Homo sapien
taaagacgaagatgtagtttcctgg

SEQ ID NO: 4353626 - DNA, 25 bp, Homo sapien
gcaggaagcacacctgacagaggtt

SEQ ID NO: 4353627 - DNA, 25 bp, Homo sapien
ggactttggcaataccatgcagctt

SEQ ID NO: 4353628 - DNA, 25 bp, Homo sapien
ttgagcgtgtactccagcactgagc

SEQ ID NO: 4353629 - DNA, 25 bp, Homo sapien
tagatgtcggagttgcccttggcaa

SEQ ID NO: 4353630 - DNA, 25 bp, Homo sapien
tctgcagcttgtgagtgcccatggt

SEQ ID NO: 4353631 - DNA, 25 bp, Homo sapien
tgcccatggttggagggtacacctc

SEQ ID NO: 4353632 - DNA, 25 bp, Homo sapien
tcggggcgcagctctcaatggtgac

SEQ ID NO: 4353633 - DNA, 25 bp, Homo sapien
ctctcaatggtgaccgtggccttcc

SEQ ID NO: 4353634 - DNA, 25 bp, Homo sapien
aatggtgaccgtggccttcccattc

SEQ ID NO: 4353635 - DNA, 25 bp, Homo sapien
cgcagctctcaatggtgaccgtggc

SEQ ID NO: 4353636 - DNA, 25 bp, Homo sapien
tgcagacctctatgggagtccacgg

SEQ ID NO: 4353637 - DNA, 25 bp, Homo sapien
gcttcatggtaatgtccccgtggca

SEQ ID NO: 4353638 - DNA, 25 bp, Homo sapien
tgtagtgtccgaactccttgctggc

SEQ ID NO: 4353639 - DNA, 25 bp, Homo sapien
tcacctttgattgtggagcaccacc

SEQ ID NO: 4353640 - DNA, 25 bp, Homo sapien
ctcaatgacatcagtttggtgttgc

SEQ ID NO: 4353641 - DNA, 25 bp, Homo sapien
taaaaaggcaaactccactcaatga

SEQ ID NO: 4353642 - DNA, 25 bp, Homo sapien
gacctggtcagttctttccgatatt

SEQ ID NO: 4353643 - DNA, 25 bp, Homo sapien
cacggcctatgatacattgaacaag

SEQ ID NO: 4353644 - DNA, 25 bp, Homo sapien
caacttggcaaaggaagtcattgtg

SEQ ID NO: 4353645 - DNA, 25 bp, Homo sapien
cctgcaatgtgggttggagctcccc

SEQ ID NO: 4353646 - DNA, 25 bp, Homo sapien
aggaaatggattctcaaattgagca

SEQ ID NO: 4353647 - DNA, 25 bp, Homo sapien
acttcacgctgttattttagctgca

SEQ ID NO: 4353648 - DNA, 25 bp, Homo sapien
gcagtcctttgctgaggtgtgggag

SEQ ID NO: 4353649 - DNA, 25 bp, Homo sapien
gggaggctggactgacccgacttac

SEQ ID NO: 4353650 - DNA, 25 bp, Homo sapien
ccaggcagtcctttgctgaggtgtg

SEQ ID NO: 4353651 - DNA, 25 bp, Homo sapien
ccaccaggcagtcctttgctgaggt

SEQ ID NO: 4353652 - DNA, 25 bp, Homo sapien
aaggccttggagaggcataagagac

SEQ ID NO: 4353653 - DNA, 25 bp, Homo sapien
gccaaggccttggagaggcataaga

SEQ ID NO: 4353654 - DNA, 25 bp, Homo sapien
aggtgccaaggccttggagaggcat

SEQ ID NO: 4353655 - DNA, 25 bp, Homo sapien
gtgccaaggccttggagaggcataa

SEQ ID NO: 4353656 - DNA, 25 bp, Homo sapien
cttgaaagcgcagtctcaggcgggc

SEQ ID NO: 4353657 - DNA, 25 bp, Homo sapien
gaggccatgtattctctccagcagg

SEQ ID NO: 4353658 - DNA, 25 bp, Homo sapien
aaggttgggagagcacatgtcagcc

SEQ ID NO: 4353659 - DNA, 25 bp, Homo sapien
tcctggaggacagtgcgaaatgctc

SEQ ID NO: 4353660 - DNA, 25 bp, Homo sapien
atccctttgttgtagaattcactct

SEQ ID NO: 4353661 - DNA, 25 bp, Homo sapien
gaagtggtcctcgatgaacagtgca

SEQ ID NO: 4353662 - DNA, 25 bp, Homo sapien
cagagattgaggaggttttagcagc

SEQ ID NO: 4353663 - DNA, 25 bp, Homo sapien
catggaagtctctgggtgggcactc

SEQ ID NO: 4353664 - DNA, 25 bp, Homo sapien
aggtgatggtgtccaccaggccgct

SEQ ID NO: 4353665 - DNA, 25 bp, Homo sapien
tgatggtgtccaccaggccgctgcc

SEQ ID NO: 4353666 - DNA, 25 bp, Homo sapien
aggaaggtgaatttggaggtgatgg

SEQ ID NO: 4353667 - DNA, 25 bp, Homo sapien
caccaggccgctgccccaggtgctg

SEQ ID NO: 4353668 - DNA, 25 bp, Homo sapien
tggtagccgaaacccttggagtagc

SEQ ID NO: 4353669 - DNA, 25 bp, Homo sapien
gaagctctgccctgtctggtagccg

SEQ ID NO: 4353670 - DNA, 25 bp, Homo sapien
gcattccaggcatggtcaaactccc

SEQ ID NO: 4353671 - DNA, 25 bp, Homo sapien
tagccaggcacggtcatacactgca

SEQ ID NO: 4353672 - DNA, 25 bp, Homo sapien
ttggtacagactggctgcagtctcc

SEQ ID NO: 4353673 - DNA, 25 bp, Homo sapien
gctggtcctgttggtacagactggc

SEQ ID NO: 4353674 - DNA, 25 bp, Homo sapien
tgatggcttttatctcggggcactg

SEQ ID NO: 4353675 - DNA, 25 bp, Homo sapien
gagatacagtgctggctggtcctgt

SEQ ID NO: 4353676 - DNA, 25 bp, Homo sapien
gagaccaacaccattcagatcactt

SEQ ID NO: 4353677 - DNA, 25 bp, Homo sapien
tgcttgacacgctcctcaagcagct

SEQ ID NO: 4353678 - DNA, 25 bp, Homo sapien
tctgaaatgttcatccctagagcct

SEQ ID NO: 4353679 - DNA, 25 bp, Homo sapien
atccctagagcctgcttgacacgct

SEQ ID NO: 4353680 - DNA, 25 bp, Homo sapien
tggctcgttttgcattaaggtgaac

SEQ ID NO: 4353681 - DNA, 25 bp, Homo sapien
ttgctgcctagaatgtctgtgcata

SEQ ID NO: 4353682 - DNA, 25 bp, Homo sapien
tatcactttctaggatgatgtggag

SEQ ID NO: 4353683 - DNA, 25 bp, Homo sapien
taaggtgaactgatttagcggcgct

SEQ ID NO: 4353684 - DNA, 25 bp, Homo sapien
tataaagcactgtagcagggaatgc

SEQ ID NO: 4353685 - DNA, 25 bp, Homo sapien
tcactggccgcacacactgtgtata

SEQ ID NO: 4353686 - DNA, 25 bp, Homo sapien
taagacgatgattgtggaacccaca

SEQ ID NO: 4353687 - DNA, 25 bp, Homo sapien
catgtcatcaaaagatcactggccg

SEQ ID NO: 4353688 - DNA, 25 bp, Homo sapien
caggatgtcagtgggtttgaaggct

SEQ ID NO: 4353689 - DNA, 25 bp, Homo sapien
ctgcacattctctcgaagaggccag

SEQ ID NO: 4353690 - DNA, 25 bp, Homo sapien
cagtgggtttgaaggcttggcggtc

SEQ ID NO: 4353691 - DNA, 25 bp, Homo sapien
ttctctcgaagaggccagcatagcc

SEQ ID NO: 4353692 - DNA, 25 bp, Homo sapien
ctctttgtgcaagtggtgagaggaa

SEQ ID NO: 4353693 - DNA, 25 bp, Homo sapien
agcaggccttggcagagggggccac

SEQ ID NO: 4353694 - DNA, 25 bp, Homo sapien
ggccacctggctccccaagcctctg

SEQ ID NO: 4353695 - DNA, 25 bp, Homo sapien
ctggctccccaagcctctgaggagg

SEQ ID NO: 4353696 - DNA, 25 bp, Homo sapien
caggcgagctcattctctaagctgc

SEQ ID NO: 4353697 - DNA, 25 bp, Homo sapien
gctcattctctaagctgcattccaa

SEQ ID NO: 4353698 - DNA, 25 bp, Homo sapien
ctgtgccaggcgagctcattctcta

SEQ ID NO: 4353699 - DNA, 25 bp, Homo sapien
cgagctcattctctaagctgcattc

SEQ ID NO: 4353700 - DNA, 25 bp, Homo sapien
ctttcatgtcactctgcacacgtga

SEQ ID NO: 4353701 - DNA, 25 bp, Homo sapien
tttcatgtcactctgcacacgtgaa

SEQ ID NO: 4353702 - DNA, 25 bp, Homo sapien
atgtcactctgcacacgtgaataag

SEQ ID NO: 4353703 - DNA, 25 bp, Homo sapien
tcatgtcactctgcacacgtgaata

SEQ ID NO: 4353704 - DNA, 25 bp, Homo sapien
cagatccagatggcgcggacccttt

SEQ ID NO: 4353705 - DNA, 25 bp, Homo sapien
ctatgtgatggcagatccagatcca

SEQ ID NO: 4353706 - DNA, 25 bp, Homo sapien
agatccagatggcgcggaccctttc

SEQ ID NO: 4353707 - DNA, 25 bp, Homo sapien
caggtcagtgtgggcctcctggagc

SEQ ID NO: 4353708 - DNA, 25 bp, Homo sapien
caggtcactcaccagttcgtctagg

SEQ ID NO: 4353709 - DNA, 25 bp, Homo sapien
tcaccagttcgtctaggccactctt

SEQ ID NO: 4353710 - DNA, 25 bp, Homo sapien
ccagttcgtctaggccactcttggc

SEQ ID NO: 4353711 - DNA, 25 bp, Homo sapien
ggcccatggtcagagcggccagctg

SEQ ID NO: 4353712 - DNA, 25 bp, Homo sapien
cccatggtcagagcggccagctgtc

SEQ ID NO: 4353713 - DNA, 25 bp, Homo sapien
gcccatggtcagagcggccagctgt

SEQ ID NO: 4353714 - DNA, 25 bp, Homo sapien
tgaggcgtagatatccaatttctca

SEQ ID NO: 4353715 - DNA, 25 bp, Homo sapien
ccaatttctcaaactgctgcaggtc

SEQ ID NO: 4353716 - DNA, 25 bp, Homo sapien
atccaatttctcaaactgctgcagg

SEQ ID NO: 4353717 - DNA, 25 bp, Homo sapien
ctgtgaggcgtagatatccaatttc

SEQ ID NO: 4353718 - DNA, 25 bp, Homo sapien
atttcaggctagatcgatcccaggg

SEQ ID NO: 4353719 - DNA, 25 bp, Homo sapien
cagggacatggatttcaggctagat

SEQ ID NO: 4353720 - DNA, 25 bp, Homo sapien
ggacatggatttcaggctagatcga

SEQ ID NO: 4353721 - DNA, 25 bp, Homo sapien
tggatttcaggctagatcgatccca

SEQ ID NO: 4353722 - DNA, 25 bp, Homo sapien
tgggcatctttccctccaggttgcc

SEQ ID NO: 4353723 - DNA, 25 bp, Homo sapien
ctccaggttgccggggtcttgtgtt

SEQ ID NO: 4353724 - DNA, 25 bp, Homo sapien
ggcatctttccctccaggttgccgg

SEQ ID NO: 4353725 - DNA, 25 bp, Homo sapien
gggtcttgtgtttccatttttatca

SEQ ID NO: 4353726 - DNA, 25 bp, Homo sapien
tgctgcttgaattgccaggaacttc

SEQ ID NO: 4353727 - DNA, 25 bp, Homo sapien
tgcttttgacccctcctctttactc

SEQ ID NO: 4353728 - DNA, 25 bp, Homo sapien
ctgaattgctgcttgaattgccagg

SEQ ID NO: 4353729 - DNA, 25 bp, Homo sapien
ccccactgaccactgaattgctgct

SEQ ID NO: 4353730 - DNA, 25 bp, Homo sapien
caaaatcagcggtagctgggtgtag

SEQ ID NO: 4353731 - DNA, 25 bp, Homo sapien
cttccctcagaagatgcttgggctg

SEQ ID NO: 4353732 - DNA, 25 bp, Homo sapien
ctagttccagagatgcaaaatcagc

SEQ ID NO: 4353733 - DNA, 25 bp, Homo sapien
gataaagctgtcatgcttctgcctt

SEQ ID NO: 4353734 - DNA, 25 bp, Homo sapien
tctcgagggtggacttccacagtca

SEQ ID NO: 4353735 - DNA, 25 bp, Homo sapien
gggcatggcatctcgagggtggact

SEQ ID NO: 4353736 - DNA, 25 bp, Homo sapien
tagccaaggagaacttcttgagcag

SEQ ID NO: 4353737 - DNA, 25 bp, Homo sapien
gtttagccaaggagaacttcttgag

SEQ ID NO: 4353738 - DNA, 25 bp, Homo sapien
ccaacctgggccacagagtgacacc

SEQ ID NO: 4353739 - DNA, 25 bp, Homo sapien
gctggagtgagctatgatcgcacct

SEQ ID NO: 4353740 - DNA, 25 bp, Homo sapien
gagtgagctatgatcgcacctctgc

SEQ ID NO: 4353741 - DNA, 25 bp, Homo sapien
ctatgatcgcacctctgcactccaa

SEQ ID NO: 4353742 - DNA, 25 bp, Homo sapien
ctactccactttaaattgtcccctg

SEQ ID NO: 4353743 - DNA, 25 bp, Homo sapien
ttgtcccctgggataggctgaagaa

SEQ ID NO: 4353744 - DNA, 25 bp, Homo sapien
tccttgcttagatgtcactttctca

SEQ ID NO: 4353745 - DNA, 25 bp, Homo sapien
gaatggcctttagagatatccatgc

SEQ ID NO: 4353746 - DNA, 25 bp, Homo sapien
cttggctgttgtaggaagtgatgac

SEQ ID NO: 4353747 - DNA, 25 bp, Homo sapien
gctgttgtaggaagtgatgacctgg

SEQ ID NO: 4353748 - DNA, 25 bp, Homo sapien
ctgttgtaggaagtgatgacctggg

SEQ ID NO: 4353749 - DNA, 25 bp, Homo sapien
tggctgttgtaggaagtgatgacct

SEQ ID NO: 4353750 - DNA, 25 bp, Homo sapien
tgagggtgctgcttctccaccaagt

SEQ ID NO: 4353751 - DNA, 25 bp, Homo sapien
ctgagggtgctgcttctccaccaag

SEQ ID NO: 4353752 - DNA, 25 bp, Homo sapien
gagggtgctgcttctccaccaagtt

SEQ ID NO: 4353753 - DNA, 25 bp, Homo sapien
gggtgctgcttctccaccaagtttt

SEQ ID NO: 4353754 - DNA, 25 bp, Homo sapien
tttctgtggctaacaggtctctggg

SEQ ID NO: 4353755 - DNA, 25 bp, Homo sapien
aaattctcaataacccatagcagag

SEQ ID NO: 4353756 - DNA, 25 bp, Homo sapien
tagctttggcgtctacttcagtaga

SEQ ID NO: 4353757 - DNA, 25 bp, Homo sapien
taaagctggcatgtctaccagctga

SEQ ID NO: 4353758 - DNA, 25 bp, Homo sapien
ttgaggactcttaccaaaggcaggg

SEQ ID NO: 4353759 - DNA, 25 bp, Homo sapien
cagaaggatggtagaacatagcagt

SEQ ID NO: 4353760 - DNA, 25 bp, Homo sapien
agcactataggcatttgtgaacaga

SEQ ID NO: 4353761 - DNA, 25 bp, Homo sapien
cattttaatgtagctcccctgaggg

SEQ ID NO: 4353762 - DNA, 25 bp, Homo sapien
cttctaatttctgccatcttcggac

SEQ ID NO: 4353763 - DNA, 25 bp, Homo sapien
ctgccatcttcggactccatttcca

SEQ ID NO: 4353764 - DNA, 25 bp, Homo sapien
cgtgaaagtcatttccttctaattt

SEQ ID NO: 4353765 - DNA, 25 bp, Homo sapien
gactccatttccaacaccttggaat

SEQ ID NO: 4353766 - DNA, 25 bp, Homo sapien
gcaggaattccaaggagctccagag

SEQ ID NO: 4353767 - DNA, 25 bp, Homo sapien
gacagaagaaccaagggcagagcag

SEQ ID NO: 4353768 - DNA, 25 bp, Homo sapien
caatgagcacagaggctctggggac

SEQ ID NO: 4353769 - DNA, 25 bp, Homo sapien
tctggggacagaagaaccaagggca

SEQ ID NO: 4353770 - DNA, 25 bp, Homo sapien
tattttaccaatctacaacttacaa

SEQ ID NO: 4353771 - DNA, 25 bp, Homo sapien
gataagttcaagtggagacagcagg

SEQ ID NO: 4353772 - DNA, 25 bp, Homo sapien
ttattttaccaatctacaacttaca

SEQ ID NO: 4353773 - DNA, 25 bp, Homo sapien
taagttcaagtggagacagcaggtt

SEQ ID NO: 4353774 - DNA, 25 bp, Homo sapien
gcgttccttttacgcctttcatgcc

SEQ ID NO: 4353775 - DNA, 25 bp, Homo sapien
ttttacgcctttcatgccttccatc

SEQ ID NO: 4353776 - DNA, 25 bp, Homo sapien
cctgcgttccttttacgcctttcat

SEQ ID NO: 4353777 - DNA, 25 bp, Homo sapien
ttccttttacgcctttcatgccttc

SEQ ID NO: 4353778 - DNA, 25 bp, Homo sapien
gaggctgtaaattgtgcaaggccac

SEQ ID NO: 4353779 - DNA, 25 bp, Homo sapien
caggcctctgctacccatgagtcag

SEQ ID NO: 4353780 - DNA, 25 bp, Homo sapien
caatcttgctctacacccgttaggg

SEQ ID NO: 4353781 - DNA, 25 bp, Homo sapien
gggagctccccatctaaaagtctga

SEQ ID NO: 4353782 - DNA, 25 bp, Homo sapien
cacaggcctgcacagggagtgaaac

SEQ ID NO: 4353783 - DNA, 25 bp, Homo sapien
caggcctgcacagggagtgaaactg

SEQ ID NO: 4353784 - DNA, 25 bp, Homo sapien
gcctgcacagggagtgaaactgggg

SEQ ID NO: 4353785 - DNA, 25 bp, Homo sapien
ccacaggcctgcacagggagtgaaa

SEQ ID NO: 4353786 - DNA, 25 bp, Homo sapien
gcgttgccacgggacgccggtgcca

SEQ ID NO: 4353787 - DNA, 25 bp, Homo sapien
ctgcggggaagcgacggcagccatg

SEQ ID NO: 4353788 - DNA, 25 bp, Homo sapien
gggctgcgcgttgccacgggactgc

SEQ ID NO: 4353789 - DNA, 25 bp, Homo sapien
ttgccacgggactgcgcgttgccac

SEQ ID NO: 4353790 - DNA, 25 bp, Homo sapien
cttgtggcaaggaggccaaggtgcc

SEQ ID NO: 4353791 - DNA, 25 bp, Homo sapien
tgtggcaaggaggccaaggtgccgg

SEQ ID NO: 4353792 - DNA, 25 bp, Homo sapien
gcaaggaggccaaggtgccggggga

SEQ ID NO: 4353793 - DNA, 25 bp, Homo sapien
tggcaaggaggccaaggtgccgggg

SEQ ID NO: 4353794 - DNA, 25 bp, Homo sapien
cagcgagctcgggttcgcctgctgg

SEQ ID NO: 4353795 - DNA, 25 bp, Homo sapien
gcagcgagctcgggttcgcctgctg

SEQ ID NO: 4353796 - DNA, 25 bp, Homo sapien
cagcagcgagctcgggttcgcctgc

SEQ ID NO: 4353797 - DNA, 25 bp, Homo sapien
agcagcgagctcgggttcgcctgct

SEQ ID NO: 4353798 - DNA, 25 bp, Homo sapien
tagatacagcgttgatgtccttctt

SEQ ID NO: 4353799 - DNA, 25 bp, Homo sapien
tccgagtgcacgatcagcagcatgt

SEQ ID NO: 4353800 - DNA, 25 bp, Homo sapien
gcggcgcgccgcttctccgagtgca

SEQ ID NO: 4353801 - DNA, 25 bp, Homo sapien
tcagcagcatgtcgatagatacagc

SEQ ID NO: 4353802 - DNA, 25 bp, Homo sapien
ttgcgctgcaaatggccccgtgcgc

SEQ ID NO: 4353803 - DNA, 25 bp, Homo sapien
gatgccgcctcctttccgacctggg

SEQ ID NO: 4353804 - DNA, 25 bp, Homo sapien
gctaggctgcttgcgctgcaaatgg

SEQ ID NO: 4353805 - DNA, 25 bp, Homo sapien
ggccgcacgctaggctgcttgcgct

SEQ ID NO: 4353806 - DNA, 25 bp, Homo sapien
gggcgctgcttttcgctgactctgc

SEQ ID NO: 4353807 - DNA, 25 bp, Homo sapien
cgctgcttttcgctgactctgccaa

SEQ ID NO: 4353808 - DNA, 25 bp, Homo sapien
ccgcagggcgctgcttttcgctgac

SEQ ID NO: 4353809 - DNA, 25 bp, Homo sapien
ttttcgctgactctgccaaacacgc

SEQ ID NO: 4353810 - DNA, 25 bp, Homo sapien
gaagcggctctaagtcacctttgaa

SEQ ID NO: 4353811 - DNA, 25 bp, Homo sapien
tgggagggcgctaccctaatgaagc

SEQ ID NO: 4353812 - DNA, 25 bp, Homo sapien
cacttgaagcgctggtcctgggctc

SEQ ID NO: 4353813 - DNA, 25 bp, Homo sapien
cacggtctccggagggttctcgaga

SEQ ID NO: 4353814 - DNA, 25 bp, Homo sapien
gttcaccaggggcagggcttgctcc

SEQ ID NO: 4353815 - DNA, 25 bp, Homo sapien
ttgtctgaatggttctgggccctga

SEQ ID NO: 4353816 - DNA, 25 bp, Homo sapien
catccgatactcctctgctagaagg

SEQ ID NO: 4353817 - DNA, 25 bp, Homo sapien
tcttggagataaggagggttcacca

SEQ ID NO: 4353818 - DNA, 25 bp, Homo sapien
tgtatttcgtagcaaagtctgtggc

SEQ ID NO: 4353819 - DNA, 25 bp, Homo sapien
cagatctgttgtatttcgtagcaaa

SEQ ID NO: 4353820 - DNA, 25 bp, Homo sapien
tcagatctgttgtatttcgtagcaa

SEQ ID NO: 4353821 - DNA, 25 bp, Homo sapien
tctgttgtatttcgtagcaaagtct

SEQ ID NO: 4353822 - DNA, 25 bp, Homo sapien
gcgatgtccaccaactgagctgttt

SEQ ID NO: 4353823 - DNA, 25 bp, Homo sapien
caccaactgagctgttttctcatct

SEQ ID NO: 4353824 - DNA, 25 bp, Homo sapien
ggtggcgatgtccaccaactgagct

SEQ ID NO: 4353825 - DNA, 25 bp, Homo sapien
tgtccaccaactgagctgttttctc

SEQ ID NO: 4353826 - DNA, 25 bp, Homo sapien
ctagcctggcagacatgtcctgtgc

SEQ ID NO: 4353827 - DNA, 25 bp, Homo sapien
atctccacgtattggctcctcgctc

SEQ ID NO: 4353828 - DNA, 25 bp, Homo sapien
tttccatctccacgtattggctcct

SEQ ID NO: 4353829 - DNA, 25 bp, Homo sapien
cctctgggcaacgctgtttccttct

SEQ ID NO: 4353830 - DNA, 25 bp, Homo sapien
gtgctttctcttcggcttatgatga

SEQ ID NO: 4353831 - DNA, 25 bp, Homo sapien
ttctcttcggcttatgatgacttct

SEQ ID NO: 4353832 - DNA, 25 bp, Homo sapien
ctttctcttcggcttatgatgactt

SEQ ID NO: 4353833 - DNA, 25 bp, Homo sapien
cagtgctttctcttcggcttatgat

SEQ ID NO: 4353834 - DNA, 25 bp, Homo sapien
tctccaccagttcactgtcctctgg

SEQ ID NO: 4353835 - DNA, 25 bp, Homo sapien
cttctccaccagttcactgtcctct

SEQ ID NO: 4353836 - DNA, 25 bp, Homo sapien
cttgactttcaggttgtacaacggt

SEQ ID NO: 4353837 - DNA, 25 bp, Homo sapien
tcctcagtagcaggataaatgcacc

SEQ ID NO: 4353838 - DNA, 25 bp, Homo sapien
cctcagtagcaggataaatgcaccc

SEQ ID NO: 4353839 - DNA, 25 bp, Homo sapien
tgatgttgaacagtgcaggcttctc

SEQ ID NO: 4353840 - DNA, 25 bp, Homo sapien
tagacctttggcgtaggagccacct

SEQ ID NO: 4353841 - DNA, 25 bp, Homo sapien
ggagccacctcattttggcaccaga

SEQ ID NO: 4353842 - DNA, 25 bp, Homo sapien
ttcagttctcataggctccagatgc

SEQ ID NO: 4353843 - DNA, 25 bp, Homo sapien
gatgatagagcttcccatgagagag

SEQ ID NO: 4353844 - DNA, 25 bp, Homo sapien
tcaggattccagagtattggacatt

SEQ ID NO: 4353845 - DNA, 25 bp, Homo sapien
caggattccagagtattggacattg

SEQ ID NO: 4353846 - DNA, 25 bp, Homo sapien
ggaggtaggaaatgatgagggtgat

SEQ ID NO: 4353847 - DNA, 25 bp, Homo sapien
tgcttggagatagccaagttgatag

SEQ ID NO: 4353848 - DNA, 25 bp, Homo sapien
cttggagatagccaagttgatagtc

SEQ ID NO: 4353849 - DNA, 25 bp, Homo sapien
tgtgcttggagatagccaagttgat

SEQ ID NO: 4353850 - DNA, 25 bp, Homo sapien
actgtgcttggagatagccaagttg

SEQ ID NO: 4353851 - DNA, 25 bp, Homo sapien
cctgaaggacgggagtctgtggaag

SEQ ID NO: 4353852 - DNA, 25 bp, Homo sapien
tggccctgaaggacgggagtctgtg

SEQ ID NO: 4353853 - DNA, 25 bp, Homo sapien
aggacgggagtctgtggaaggacat

SEQ ID NO: 4353854 - DNA, 25 bp, Homo sapien
gtggccctgaaggacgggagtctgt

SEQ ID NO: 4353855 - DNA, 25 bp, Homo sapien
tgcaaacaagagcaactctgaagtg

SEQ ID NO: 4353856 - DNA, 25 bp, Homo sapien
aacaagagcaactctgaagtgtagt

SEQ ID NO: 4353857 - DNA, 25 bp, Homo sapien
caaacaagagcaactctgaagtgta

SEQ ID NO: 4353858 - DNA, 25 bp, Homo sapien
ctgcaaacaagagcaactctgaagt

SEQ ID NO: 4353859 - DNA, 25 bp, Homo sapien
tgatggcagaaagagctgtgagaac

SEQ ID NO: 4353860 - DNA, 25 bp, Homo sapien
tggcagaaagagctgtgagaactga

SEQ ID NO: 4353861 - DNA, 25 bp, Homo sapien
ctggtcctcttgagtgtttgatggc

SEQ ID NO: 4353862 - DNA, 25 bp, Homo sapien
gtcctcttgagtgtttgatggcaga

SEQ ID NO: 4353863 - DNA, 25 bp, Homo sapien
tgtctctggcgtcatcacccattgg

SEQ ID NO: 4353864 - DNA, 25 bp, Homo sapien
tttgtctctggcgtcatcacccatt

SEQ ID NO: 4353865 - DNA, 25 bp, Homo sapien
ctctggcgtcatcacccattggatt

SEQ ID NO: 4353866 - DNA, 25 bp, Homo sapien
gtctctggcgtcatcacccattgga

SEQ ID NO: 4353867 - DNA, 25 bp, Homo sapien
aaaggcatgcgtggagccccggaca

SEQ ID NO: 4353868 - DNA, 25 bp, Homo sapien
tgcagccctcggtctgagcattcag

SEQ ID NO: 4353869 - DNA, 25 bp, Homo sapien
gacaccgccttggcattgtgcagcc

SEQ ID NO: 4353870 - DNA, 25 bp, Homo sapien
cctgtgagcaggtgtcccctggcat

SEQ ID NO: 4353871 - DNA, 25 bp, Homo sapien
acccctcccggtctctgcatcaggt

SEQ ID NO: 4353872 - DNA, 25 bp, Homo sapien
atcagctgtggatgtggggcttccc

SEQ ID NO: 4353873 - DNA, 25 bp, Homo sapien
gggcttcccgctttctttctgcagg

SEQ ID NO: 4353874 - DNA, 25 bp, Homo sapien
tcaatcagctgtggatgtggggctt

SEQ ID NO: 4353875 - DNA, 25 bp, Homo sapien
tacctttgcagaggagccgtgctaa

SEQ ID NO: 4353876 - DNA, 25 bp, Homo sapien
agaggagccgtgctaatctgtatca

SEQ ID NO: 4353877 - DNA, 25 bp, Homo sapien
tgcagaggagccgtgctaatctgta

SEQ ID NO: 4353878 - DNA, 25 bp, Homo sapien
ttacctttgcagaggagccgtgcta

SEQ ID NO: 4353879 - DNA, 25 bp, Homo sapien
catggcattaaggtggatgatgaga

SEQ ID NO: 4353880 - DNA, 25 bp, Homo sapien
gtagagggcagctaacatggcatta

SEQ ID NO: 4353881 - DNA, 25 bp, Homo sapien
tggtgtggaggcgtagagggcagct

SEQ ID NO: 4353882 - DNA, 25 bp, Homo sapien
taacatggcattaaggtggatgatg

SEQ ID NO: 4353883 - DNA, 25 bp, Homo sapien
catttaaagcggatccagtcctggg

SEQ ID NO: 4353884 - DNA, 25 bp, Homo sapien
taccaacccatgctagagagtgaag

SEQ ID NO: 4353885 - DNA, 25 bp, Homo sapien
tcacagagaagatgaacgaaggctc

SEQ ID NO: 4353886 - DNA, 25 bp, Homo sapien
ttttaatgagggagagaccccacga

SEQ ID NO: 4353887 - DNA, 25 bp, Homo sapien
tgtgacaccaggacgcactcgctct

SEQ ID NO: 4353888 - DNA, 25 bp, Homo sapien
ctagcaatgtgacaccaggacgcac

SEQ ID NO: 4353889 - DNA, 25 bp, Homo sapien
gcaatgtgacaccaggacgcactcg

SEQ ID NO: 4353890 - DNA, 25 bp, Homo sapien
tctcgcgcgctctcccaggctcgtt

SEQ ID NO: 4353891 - DNA, 25 bp, Homo sapien
gcggagagcgcagcggcgccctggg

SEQ ID NO: 4353892 - DNA, 25 bp, Homo sapien
ataccgagaagccacccgcggagag

SEQ ID NO: 4353893 - DNA, 25 bp, Homo sapien
tccggtccgggcgagagcgcgaaag

SEQ ID NO: 4353894 - DNA, 25 bp, Homo sapien
acgcagcgctccgggaagtccggtc

SEQ ID NO: 4353895 - DNA, 25 bp, Homo sapien
gccgtcggccggcgatggccctgga

SEQ ID NO: 4353896 - DNA, 25 bp, Homo sapien
gggccgtcggccggcgatggccctg

SEQ ID NO: 4353897 - DNA, 25 bp, Homo sapien
ctgcgggccgtcggccggcgatggc

SEQ ID NO: 4353898 - DNA, 25 bp, Homo sapien
tgcgggccgtcggccggcgatggcc

SEQ ID NO: 4353899 - DNA, 25 bp, Homo sapien
gctcctcctggcatccgcagtggct

SEQ ID NO: 4353900 - DNA, 25 bp, Homo sapien
gtggctgcgatggaaggtaacgtac

SEQ ID NO: 4353901 - DNA, 25 bp, Homo sapien
agtggctgcgatggaaggtaacgta

SEQ ID NO: 4353902 - DNA, 25 bp, Homo sapien
cctggcatccgcagtggctgcgatg

SEQ ID NO: 4353903 - DNA, 25 bp, Homo sapien
gctctgccgtggtatcccgcaagtg

SEQ ID NO: 4353904 - DNA, 25 bp, Homo sapien
caggcacggatacgcttctgagcag

SEQ ID NO: 4353905 - DNA, 25 bp, Homo sapien
gtggagttcattggccgtacccttg

SEQ ID NO: 4353906 - DNA, 25 bp, Homo sapien
gctgcattgcggtgcatgctcctta

SEQ ID NO: 4353907 - DNA, 25 bp, Homo sapien
cttttcgcctcttgagccttggaac

SEQ ID NO: 4353908 - DNA, 25 bp, Homo sapien
aacccttttcgcctcttgagccttg

SEQ ID NO: 4353909 - DNA, 25 bp, Homo sapien
tggaaacccttttcgcctcttgagc

SEQ ID NO: 4353910 - DNA, 25 bp, Homo sapien
ctgcaggtttccagggtcagtcggg

SEQ ID NO: 4353911 - DNA, 25 bp, Homo sapien
gagcctgggcgctcggtagcgctcg

SEQ ID NO: 4353912 - DNA, 25 bp, Homo sapien
ggagtcgtcgggcagcgtcactctc

SEQ ID NO: 4353913 - DNA, 25 bp, Homo sapien
tgggaaagcgcgctccaaagacacc

SEQ ID NO: 4353914 - DNA, 25 bp, Homo sapien
ccaccccggagaggatactcggcgg

SEQ ID NO: 4353915 - DNA, 25 bp, Homo sapien
tcttggctagccagaggtccctgtc

SEQ ID NO: 4353916 - DNA, 25 bp, Homo sapien
ttgcaagggcaattccagactggac

SEQ ID NO: 4353917 - DNA, 25 bp, Homo sapien
cattgggttcctgtgcatgcaagcg

SEQ ID NO: 4353918 - DNA, 25 bp, Homo sapien
gacttattgagagacacgtgtggga

SEQ ID NO: 4353919 - DNA, 25 bp, Homo sapien
ggtgtctgtgaagcgaaggcagctg

SEQ ID NO: 4353920 - DNA, 25 bp, Homo sapien
tggtgtctgtgaagcgaaggcagct

SEQ ID NO: 4353921 - DNA, 25 bp, Homo sapien
ctggtgtctgtgaagcgaaggcagc

SEQ ID NO: 4353922 - DNA, 25 bp, Homo sapien
gctggtgtctgtgaagcgaaggcag

SEQ ID NO: 4353923 - DNA, 25 bp, Homo sapien
tctttgggcacttctacaacttctt

SEQ ID NO: 4353924 - DNA, 25 bp, Homo sapien
gttgtttcttgagctctggctgctt

SEQ ID NO: 4353925 - DNA, 25 bp, Homo sapien
gggccatgttgtttcttgagctctg

SEQ ID NO: 4353926 - DNA, 25 bp, Homo sapien
ttgtctttgggcacttctacaactt

SEQ ID NO: 4353927 - DNA, 25 bp, Homo sapien
tatttttccagcacatcaacatagg

SEQ ID NO: 4353928 - DNA, 25 bp, Homo sapien
tcaacataggacctttgcccttggc

SEQ ID NO: 4353929 - DNA, 25 bp, Homo sapien
cccttggctttctcattgacgctga

SEQ ID NO: 4353930 - DNA, 25 bp, Homo sapien
gggccttgcagttaattgttctgtt

SEQ ID NO: 4353931 - DNA, 25 bp, Homo sapien
gaccagaaagcccatccggggatgc

SEQ ID NO: 4353932 - DNA, 25 bp, Homo sapien
aatgcctccaaatggtttgggatgg

SEQ ID NO: 4353933 - DNA, 25 bp, Homo sapien
gaactatctgtgcaggttcctccag

SEQ ID NO: 4353934 - DNA, 25 bp, Homo sapien
gggccgttgtcacaggaccagaaag

SEQ ID NO: 4353935 - DNA, 25 bp, Homo sapien
caactcccacttcacgttgttatta

SEQ ID NO: 4353936 - DNA, 25 bp, Homo sapien
gcaactcccacttcacgttgttatt

SEQ ID NO: 4353937 - DNA, 25 bp, Homo sapien
cagctgaaaactccgaatgttttgg

SEQ ID NO: 4353938 - DNA, 25 bp, Homo sapien
aaactccgaatgttttgggtgcagt

SEQ ID NO: 4353939 - DNA, 25 bp, Homo sapien
tgaaaactccgaatgttttgggtgc

SEQ ID NO: 4353940 - DNA, 25 bp, Homo sapien
accagctgaaaactccgaatgtttt

SEQ ID NO: 4353941 - DNA, 25 bp, Homo sapien
tgcaattctagtcgtcacagctcct

SEQ ID NO: 4353942 - DNA, 25 bp, Homo sapien
ttctctcctctgtagaacaatgtca

SEQ ID NO: 4353943 - DNA, 25 bp, Homo sapien
acaatgtcagtattgcctgcaattc

SEQ ID NO: 4353944 - DNA, 25 bp, Homo sapien
agctccttcaccgtttagagggccg

SEQ ID NO: 4353945 - DNA, 25 bp, Homo sapien
cgggggtgaagtactgggaggcatg

SEQ ID NO: 4353946 - DNA, 25 bp, Homo sapien
agggtggagatgacaatgaggcgga

SEQ ID NO: 4353947 - DNA, 25 bp, Homo sapien
ttaattcccattgatatggcgtatc

SEQ ID NO: 4353948 - DNA, 25 bp, Homo sapien
cattgatatggcgtatcagggtgga

SEQ ID NO: 4353949 - DNA, 25 bp, Homo sapien
gttggtgcacactgggtttgaaggg

SEQ ID NO: 4353950 - DNA, 25 bp, Homo sapien
gaatgggaggcagaaactcgatgtt

SEQ ID NO: 4353951 - DNA, 25 bp, Homo sapien
gagaatgggaggcagaaactcgatg

SEQ ID NO: 4353952 - DNA, 25 bp, Homo sapien
tggtgcacactgggtttgaagggcc

SEQ ID NO: 4353953 - DNA, 25 bp, Homo sapien
caacctggatagcatagtgcatgca

SEQ ID NO: 4353954 - DNA, 25 bp, Homo sapien
agtgcatgcaataggttccctgggt

SEQ ID NO: 4353955 - DNA, 25 bp, Homo sapien
gcatgcaataggttccctgggtggc

SEQ ID NO: 4353956 - DNA, 25 bp, Homo sapien
cacttttcaacctggatagcatagt

SEQ ID NO: 4353957 - DNA, 25 bp, Homo sapien
gcttttagaaccctgcgtctctgag

SEQ ID NO: 4353958 - DNA, 25 bp, Homo sapien
ctgtttgctggtgggcttttagaac

SEQ ID NO: 4353959 - DNA, 25 bp, Homo sapien
tagaaccctgcgtctctgagaaggc

SEQ ID NO: 4353960 - DNA, 25 bp, Homo sapien
gaaccctgcgtctctgagaaggcat

SEQ ID NO: 4353961 - DNA, 25 bp, Homo sapien
cagagcattaattttgggcataatc

SEQ ID NO: 4353962 - DNA, 25 bp, Homo sapien
attaattttgggcataatcaaagcc

SEQ ID NO: 4353963 - DNA, 25 bp, Homo sapien
agcattaattttgggcataatcaaa

SEQ ID NO: 4353964 - DNA, 25 bp, Homo sapien
aatagacataatctccaccagagca

SEQ ID NO: 4353965 - DNA, 25 bp, Homo sapien
taaggttttagtgaaaggctgtatc

SEQ ID NO: 4353966 - DNA, 25 bp, Homo sapien
tttgtgccttctgtggacactccat

SEQ ID NO: 4353967 - DNA, 25 bp, Homo sapien
tccatttgacggcagaagtgaaggc

SEQ ID NO: 4353968 - DNA, 25 bp, Homo sapien
tgtatcacagtcagtagtttgtgcc

SEQ ID NO: 4353969 - DNA, 25 bp, Homo sapien
ggttcccattgagtccaggatgctt

SEQ ID NO: 4353970 - DNA, 25 bp, Homo sapien
tcagatggttcccattgagtccagg

SEQ ID NO: 4353971 - DNA, 25 bp, Homo sapien
gggcaactacaccttgttggtgcag

SEQ ID NO: 4353972 - DNA, 25 bp, Homo sapien
gcaactacaccttgttggtgcaggg

SEQ ID NO: 4353973 - DNA, 25 bp, Homo sapien
ggaggttctggctatgttatctttc

SEQ ID NO: 4353974 - DNA, 25 bp, Homo sapien
ggttctggctatgttatctttcact

SEQ ID NO: 4353975 - DNA, 25 bp, Homo sapien
tggctatgttatctttcactgctgt

SEQ ID NO: 4353976 - DNA, 25 bp, Homo sapien
gttggaggttctggctatgttatct

SEQ ID NO: 4353977 - DNA, 25 bp, Homo sapien
gcccttgttcaacctgctgctcatg

SEQ ID NO: 4353978 - DNA, 25 bp, Homo sapien
cctcaaaggcttatgtcctgtcact

SEQ ID NO: 4353979 - DNA, 25 bp, Homo sapien
tggtgtcactgttgtccctcaaagg

SEQ ID NO: 4353980 - DNA, 25 bp, Homo sapien
gggcccttgttcaacctgctgctca

SEQ ID NO: 4353981 - DNA, 25 bp, Homo sapien
gtattttgctttctagggaggcttc

SEQ ID NO: 4353982 - DNA, 25 bp, Homo sapien
ttcacaaggatggaggcagtaggat

SEQ ID NO: 4353983 - DNA, 25 bp, Homo sapien
cactgctgagctcaggtattttgct

SEQ ID NO: 4353984 - DNA, 25 bp, Homo sapien
ggaggcttcacaaggatggaggcag

SEQ ID NO: 4353985 - DNA, 25 bp, Homo sapien
tccgaggccccatttggaggaatgt

SEQ ID NO: 4353986 - DNA, 25 bp, Homo sapien
ccattttagaagttgagtgctcggt

SEQ ID NO: 4353987 - DNA, 25 bp, Homo sapien
tgctgcctttgcgataccttccaag

SEQ ID NO: 4353988 - DNA, 25 bp, Homo sapien
tgcttgcacgttgcaatctgccggg

SEQ ID NO: 4353989 - DNA, 25 bp, Homo sapien
ggctgtcacgctttctctctgctgt

SEQ ID NO: 4353990 - DNA, 25 bp, Homo sapien
agtggtagaaccatgcccaaaggcc

SEQ ID NO: 4353991 - DNA, 25 bp, Homo sapien
tagttggtaggcagtcttcagccca

SEQ ID NO: 4353992 - DNA, 25 bp, Homo sapien
tgctagagactttgcgggagccgtt

SEQ ID NO: 4353993 - DNA, 25 bp, Homo sapien
atggaggtggactggcacgtggagc

SEQ ID NO: 4353994 - DNA, 25 bp, Homo sapien
gatggaggtggactggcacgtggag

SEQ ID NO: 4353995 - DNA, 25 bp, Homo sapien
cacgtggagcctgtagttggagatg

SEQ ID NO: 4353996 - DNA, 25 bp, Homo sapien
ctggcacgtggagcctgtagttgga

SEQ ID NO: 4353997 - DNA, 25 bp, Homo sapien
taccctgggagctcttgtggctact

SEQ ID NO: 4353998 - DNA, 25 bp, Homo sapien
tccataccctgggagctcttgtggc

SEQ ID NO: 4353999 - DNA, 25 bp, Homo sapien
actctccataccctgggagctcttg

SEQ ID NO: 4354000 - DNA, 25 bp, Homo sapien
cgcttcactctccataccctgggag

SEQ ID NO: 4354001 - DNA, 25 bp, Homo sapien
aattgcatcacaatggaaggatggg

SEQ ID NO: 4354002 - DNA, 25 bp, Homo sapien
gccaggggggcattcatctgcttcc

SEQ ID NO: 4354003 - DNA, 25 bp, Homo sapien
catcacaatggaaggatgggccttg

SEQ ID NO: 4354004 - DNA, 25 bp, Homo sapien
acaatggaaggatgggccttggcca

SEQ ID NO: 4354005 - DNA, 25 bp, Homo sapien
gaagggaaaggtgctggtcctgtgt

SEQ ID NO: 4354006 - DNA, 25 bp, Homo sapien
tgagtgtgtttgaagggaaaggtgc

SEQ ID NO: 4354007 - DNA, 25 bp, Homo sapien
tccctccagtgtctggctgggtcca

SEQ ID NO: 4354008 - DNA, 25 bp, Homo sapien
tgtgtttgaagggaaaggtgctggt

SEQ ID NO: 4354009 - DNA, 25 bp, Homo sapien
gttcagattatgtgccccatgtccc

SEQ ID NO: 4354010 - DNA, 25 bp, Homo sapien
gctttgtccatgttcagagctctgc

SEQ ID NO: 4354011 - DNA, 25 bp, Homo sapien
ggcagtcggctgtgcactttaccca

SEQ ID NO: 4354012 - DNA, 25 bp, Homo sapien
catgggccttaggatgaacctgaga

SEQ ID NO: 4354013 - DNA, 25 bp, Homo sapien
tctacctgttttaagtggtcacaac

SEQ ID NO: 4354014 - DNA, 25 bp, Homo sapien
tttctacctgttttaagtggtcaca

SEQ ID NO: 4354015 - DNA, 25 bp, Homo sapien
ttctacctgttttaagtggtcacaa

SEQ ID NO: 4354016 - DNA, 25 bp, Homo sapien
gtccccacccctcaccactgtctgc

SEQ ID NO: 4354017 - DNA, 25 bp, Homo sapien
ccacccctcaccactgtctgcctca

SEQ ID NO: 4354018 - DNA, 25 bp, Homo sapien
ccccacccctcaccactgtctgcct

SEQ ID NO: 4354019 - DNA, 25 bp, Homo sapien
cccacccctcaccactgtctgcctc

SEQ ID NO: 4354020 - DNA, 25 bp, Homo sapien
gacgggttccgaagatgttattgga

SEQ ID NO: 4354021 - DNA, 25 bp, Homo sapien
gtagccctcttgtgccaagaacata

SEQ ID NO: 4354022 - DNA, 25 bp, Homo sapien
tgttattggatttctgtagccctct

SEQ ID NO: 4354023 - DNA, 25 bp, Homo sapien
tggctctgtcaaatctggacgggtt

SEQ ID NO: 4354024 - DNA, 25 bp, Homo sapien
tgctggatgttaacttgggagcaga

SEQ ID NO: 4354025 - DNA, 25 bp, Homo sapien
gagatttctagcttgttcaaggcca

SEQ ID NO: 4354026 - DNA, 25 bp, Homo sapien
cctgctggatgttaacttgggagca

SEQ ID NO: 4354027 - DNA, 25 bp, Homo sapien
aaagagatttctagcttgttcaagg

SEQ ID NO: 4354028 - DNA, 25 bp, Homo sapien
ggcctccatattcaaccagttgctg

SEQ ID NO: 4354029 - DNA, 25 bp, Homo sapien
ccagaaacagggtcaccatcggtca

SEQ ID NO: 4354030 - DNA, 25 bp, Homo sapien
ggtttgctgaacatacccatgacac

SEQ ID NO: 4354031 - DNA, 25 bp, Homo sapien
ccatcggtcaggagataagccacaa

SEQ ID NO: 4354032 - DNA, 25 bp, Homo sapien
taggatctgggtgttagagccctcc

SEQ ID NO: 4354033 - DNA, 25 bp, Homo sapien
tcagcatttacagtaggaaccagtt

SEQ ID NO: 4354034 - DNA, 25 bp, Homo sapien
gatgttcattgagacacctggataa

SEQ ID NO: 4354035 - DNA, 25 bp, Homo sapien
aactgtgtatgaagcatcctggtag

SEQ ID NO: 4354036 - DNA, 25 bp, Homo sapien
ggctccttgtaatcctatgacttga

SEQ ID NO: 4354037 - DNA, 25 bp, Homo sapien
acttggactggccatgaagctcagg

SEQ ID NO: 4354038 - DNA, 25 bp, Homo sapien
tcatcttgaggtgccttgggacaca

SEQ ID NO: 4354039 - DNA, 25 bp, Homo sapien
ttcaccacttcggagttcagcatgg

SEQ ID NO: 4354040 - DNA, 25 bp, Homo sapien
ctgtctaaacactgtttataaagcc

SEQ ID NO: 4354041 - DNA, 25 bp, Homo sapien
cctgtctaaacactgtttataaagc

SEQ ID NO: 4354042 - DNA, 25 bp, Homo sapien
ccctgtctaaacactgtttataaag

SEQ ID NO: 4354043 - DNA, 25 bp, Homo sapien
ctccctgtctaaacactgtttataa

SEQ ID NO: 4354044 - DNA, 25 bp, Homo sapien
cagagagtcaggatccagatggaca

SEQ ID NO: 4354045 - DNA, 25 bp, Homo sapien
cagtcacagagagtcaggatccaga

SEQ ID NO: 4354046 - DNA, 25 bp, Homo sapien
tcacagagagtcaggatccagatgg

SEQ ID NO: 4354047 - DNA, 25 bp, Homo sapien
agtcaggatccagatggacacaggg

SEQ ID NO: 4354048 - DNA, 25 bp, Homo sapien
tgtggagtgacctgatgatttcctc

SEQ ID NO: 4354049 - DNA, 25 bp, Homo sapien
ttctctttgtggagtgacctgatga

SEQ ID NO: 4354050 - DNA, 25 bp, Homo sapien
ctttgtggagtgacctgatgatttc

SEQ ID NO: 4354051 - DNA, 25 bp, Homo sapien
gagtgacctgatgatttcctctgcc

SEQ ID NO: 4354052 - DNA, 25 bp, Homo sapien
tgaagccttggctcatcagggataa

SEQ ID NO: 4354053 - DNA, 25 bp, Homo sapien
ccttggctcatcagggataattccc

SEQ ID NO: 4354054 - DNA, 25 bp, Homo sapien
atcagggataattccctgaggtgcc

SEQ ID NO: 4354055 - DNA, 25 bp, Homo sapien
tgaggtgccaggttcagggggaagc

SEQ ID NO: 4354056 - DNA, 25 bp, Homo sapien
tggcccatatgggaaaggcatctca

SEQ ID NO: 4354057 - DNA, 25 bp, Homo sapien
gcagccactggtggcccatatggga

SEQ ID NO: 4354058 - DNA, 25 bp, Homo sapien
gcatctcactgagtgcagcctctaa

SEQ ID NO: 4354059 - DNA, 25 bp, Homo sapien
tggcttggcagccactggtggccca

SEQ ID NO: 4354060 - DNA, 25 bp, Homo sapien
tctcttgtcactttccgcatgtcag

SEQ ID NO: 4354061 - DNA, 25 bp, Homo sapien
tcactttccgcatgtcaggcatttc

SEQ ID NO: 4354062 - DNA, 25 bp, Homo sapien
ttactgactgcccagcattgccaac

SEQ ID NO: 4354063 - DNA, 25 bp, Homo sapien
atttctcttgtcattcccggcatta

SEQ ID NO: 4354064 - DNA, 25 bp, Homo sapien
gattggtggtttccataagatcaga

SEQ ID NO: 4354065 - DNA, 25 bp, Homo sapien
agaggagactcttccgagagcccag

SEQ ID NO: 4354066 - DNA, 25 bp, Homo sapien
cccatggcccttctgagcgctccca

SEQ ID NO: 4354067 - DNA, 25 bp, Homo sapien
gtttccataagatcagaggagactc

SEQ ID NO: 4354068 - DNA, 25 bp, Homo sapien
gaggcataagcatgatgccttgaaa

SEQ ID NO: 4354069 - DNA, 25 bp, Homo sapien
tgatgccttgaaacagggaagcaag

SEQ ID NO: 4354070 - DNA, 25 bp, Homo sapien
catttgaagaactgcactgctcgag

SEQ ID NO: 4354071 - DNA, 25 bp, Homo sapien
gggaagcaaggtccaaaatgagctg

SEQ ID NO: 4354072 - DNA, 25 bp, Homo sapien
gcctggctccattgcttgtggttgc

SEQ ID NO: 4354073 - DNA, 25 bp, Homo sapien
ctgcctggctccattgcttgtggtt

SEQ ID NO: 4354074 - DNA, 25 bp, Homo sapien
gctccattgcttgtggttgccttca

SEQ ID NO: 4354075 - DNA, 25 bp, Homo sapien
ctggctccattgcttgtggttgcct

SEQ ID NO: 4354076 - DNA, 25 bp, Homo sapien
tatggtcccacaggacatggtggca

SEQ ID NO: 4354077 - DNA, 25 bp, Homo sapien
gcctttgagtaaatccctgccttgg

SEQ ID NO: 4354078 - DNA, 25 bp, Homo sapien
gtaggaatttatgccccacggactg

SEQ ID NO: 4354079 - DNA, 25 bp, Homo sapien
tttgtgcccaaaaacagactgctga

SEQ ID NO: 4354080 - DNA, 25 bp, Homo sapien
tgctattacagagggcacgtgccaa

SEQ ID NO: 4354081 - DNA, 25 bp, Homo sapien
tgtgacaacccctgagtggccagat

SEQ ID NO: 4354082 - DNA, 25 bp, Homo sapien
tatgcttgggtgcaagagacctaac

SEQ ID NO: 4354083 - DNA, 25 bp, Homo sapien
gttcttcccctgagtgctgcctgag

SEQ ID NO: 4354084 - DNA, 25 bp, Homo sapien
gctgggtccctaggtactgtcttaa

SEQ ID NO: 4354085 - DNA, 25 bp, Homo sapien
cacagctgataaagcccgaaaaggg

SEQ ID NO: 4354086 - DNA, 25 bp, Homo sapien
gaaagccatacagggcagccctgaa

SEQ ID NO: 4354087 - DNA, 25 bp, Homo sapien
taccccttgaataaagactggaggc

SEQ ID NO: 4354088 - DNA, 25 bp, Homo sapien
acacacaacaacaggattgctttct

SEQ ID NO: 4354089 - DNA, 25 bp, Homo sapien
gacacacaacaacaggattgctttc

SEQ ID NO: 4354090 - DNA, 25 bp, Homo sapien
ctgagaggtggcaacactactgcca

SEQ ID NO: 4354091 - DNA, 25 bp, Homo sapien
ggcaacactactgccatctggcttc

SEQ ID NO: 4354092 - DNA, 25 bp, Homo sapien
aacctgagaggtggcaacactactg

SEQ ID NO: 4354093 - DNA, 25 bp, Homo sapien
ggtggcaacactactgccatctggc

SEQ ID NO: 4354094 - DNA, 25 bp, Homo sapien
aggcaaacacttaggatttctggcc

SEQ ID NO: 4354095 - DNA, 25 bp, Homo sapien
ggcaaacacttaggatttctggcct

SEQ ID NO: 4354096 - DNA, 25 bp, Homo sapien
ggcctcataatgtggcttataaaag

SEQ ID NO: 4354097 - DNA, 25 bp, Homo sapien
ctggcctcataatgtggcttataaa

SEQ ID NO: 4354098 - DNA, 25 bp, Homo sapien
ttgaggggccaactcaggttcagca

SEQ ID NO: 4354099 - DNA, 25 bp, Homo sapien
atcccagccaacatgcggctgattc

SEQ ID NO: 4354100 - DNA, 25 bp, Homo sapien
ctgattccagatgttagcttgaggg

SEQ ID NO: 4354101 - DNA, 25 bp, Homo sapien
tgagcatgtgcattgacatatgtct

SEQ ID NO: 4354102 - DNA, 25 bp, Homo sapien
cagagtccctgttatttgcatgcac

SEQ ID NO: 4354103 - DNA, 25 bp, Homo sapien
tgatgggtaaatctagaagcaggcc

SEQ ID NO: 4354104 - DNA, 25 bp, Homo sapien
gggagtcttgctgacccctccaatg

SEQ ID NO: 4354105 - DNA, 25 bp, Homo sapien
tgtggttacacttttccaggacttc

SEQ ID NO: 4354106 - DNA, 25 bp, Homo sapien
agccaggaaggccttagaatacaga

SEQ ID NO: 4354107 - DNA, 25 bp, Homo sapien
ggccttagaatacagaacaccaatt

SEQ ID NO: 4354108 - DNA, 25 bp, Homo sapien
aggtctgttcagctggctcggagca

SEQ ID NO: 4354109 - DNA, 25 bp, Homo sapien
gaacaccaatttctgcaacttccac

SEQ ID NO: 4354110 - DNA, 25 bp, Homo sapien
tccagcagtgtgaagcatgaacagc

SEQ ID NO: 4354111 - DNA, 25 bp, Homo sapien
cagcagtgtgaagcatgaacagcca

SEQ ID NO: 4354112 - DNA, 25 bp, Homo sapien
agtgtgaagcatgaacagccaggcg

SEQ ID NO: 4354113 - DNA, 25 bp, Homo sapien
gcagtgtgaagcatgaacagccagg

SEQ ID NO: 4354114 - DNA, 25 bp, Homo sapien
atcttgcagctctccaaattacttt

SEQ ID NO: 4354115 - DNA, 25 bp, Homo sapien
tccatcttgcagctctccaaattac

SEQ ID NO: 4354116 - DNA, 25 bp, Homo sapien
cttccatcttgcagctctccaaatt

SEQ ID NO: 4354117 - DNA, 25 bp, Homo sapien
catcttgcagctctccaaattactt

SEQ ID NO: 4354118 - DNA, 25 bp, Homo sapien
tgttagtagttcttaggccaattac

SEQ ID NO: 4354119 - DNA, 25 bp, Homo sapien
cttctgttagtagttcttaggccaa

SEQ ID NO: 4354120 - DNA, 25 bp, Homo sapien
tctgttagtagttcttaggccaatt

SEQ ID NO: 4354121 - DNA, 25 bp, Homo sapien
tcttctgttagtagttcttaggcca

SEQ ID NO: 4354122 - DNA, 25 bp, Homo sapien
cacaggggcgtggacttatggatcc

SEQ ID NO: 4354123 - DNA, 25 bp, Homo sapien
ctgggtgttagaaagattgagtgca

SEQ ID NO: 4354124 - DNA, 25 bp, Homo sapien
attgagtgcattcagtgcggccagg

SEQ ID NO: 4354125 - DNA, 25 bp, Homo sapien
cttatggatcccatcctactctgtt

SEQ ID NO: 4354126 - DNA, 25 bp, Homo sapien
gcggctgaagtctacaggccccaga

SEQ ID NO: 4354127 - DNA, 25 bp, Homo sapien
cggctgaagtctacaggccccagag

SEQ ID NO: 4354128 - DNA, 25 bp, Homo sapien
ggctgaagtctacaggccccagagc

SEQ ID NO: 4354129 - DNA, 25 bp, Homo sapien
acctccatgatgtcagtactgctgc

SEQ ID NO: 4354130 - DNA, 25 bp, Homo sapien
gcccggccgagggtctgtatttcta

SEQ ID NO: 4354131 - DNA, 25 bp, Homo sapien
cgtgcccggccgagggtctgtattt

SEQ ID NO: 4354132 - DNA, 25 bp, Homo sapien
cccaacctccatgatgtcagtactg

SEQ ID NO: 4354133 - DNA, 25 bp, Homo sapien
tatatacgtaatgagggaccacttg

SEQ ID NO: 4354134 - DNA, 25 bp, Homo sapien
tctgaggaggtgtgagtctgctttc

SEQ ID NO: 4354135 - DNA, 25 bp, Homo sapien
tccatgccagagagagtctgtcaga

SEQ ID NO: 4354136 - DNA, 25 bp, Homo sapien
aaggtgccttgtcctgaaggaatca

SEQ ID NO: 4354137 - DNA, 25 bp, Homo sapien
caggacagagtagtgctcagctgag

SEQ ID NO: 4354138 - DNA, 25 bp, Homo sapien
acatcagggcattctttgctcccaa

SEQ ID NO: 4354139 - DNA, 25 bp, Homo sapien
aaggcatcaacattgcagcttggtg

SEQ ID NO: 4354140 - DNA, 25 bp, Homo sapien
tgctcccaaggcatcaacattgcag

SEQ ID NO: 4354141 - DNA, 25 bp, Homo sapien
ggaatccgtatgtcggaagacacat

SEQ ID NO: 4354142 - DNA, 25 bp, Homo sapien
ccaccgcataccgaggaatccgtat

SEQ ID NO: 4354143 - DNA, 25 bp, Homo sapien
atatcaccaccgcataccgaggaat

SEQ ID NO: 4354144 - DNA, 25 bp, Homo sapien
cataccgaggaatccgtatgtcgga

SEQ ID NO: 4354145 - DNA, 25 bp, Homo sapien
ctctggtcctgactccccctgtgcg

SEQ ID NO: 4354146 - DNA, 25 bp, Homo sapien
tgactccccctgtgcgtggccattc

SEQ ID NO: 4354147 - DNA, 25 bp, Homo sapien
cccctgtgcgtggccattccagcaa

SEQ ID NO: 4354148 - DNA, 25 bp, Homo sapien
tgtgcgtggccattccagcaactgc

SEQ ID NO: 4354149 - DNA, 25 bp, Homo sapien
gtggcctttggcatacccctgagag

SEQ ID NO: 4354150 - DNA, 25 bp, Homo sapien
tgctgatcttttaacctggatgaac

SEQ ID NO: 4354151 - DNA, 25 bp, Homo sapien
ctatgaaaaggtggcacagatccag

SEQ ID NO: 4354152 - DNA, 25 bp, Homo sapien
agagatctgctgactatgaaaaggt

SEQ ID NO: 4354153 - DNA, 25 bp, Homo sapien
tgtggccctgagcttgatgtaatga

SEQ ID NO: 4354154 - DNA, 25 bp, Homo sapien
gcttgatgtaatgagtctgactgag

SEQ ID NO: 4354155 - DNA, 25 bp, Homo sapien
cctgagcttgatgtaatgagtctga

SEQ ID NO: 4354156 - DNA, 25 bp, Homo sapien
gtaatgagtctgactgagttggaga

SEQ ID NO: 4354157 - DNA, 25 bp, Homo sapien
ccctgttaaaggtccattggcatct

SEQ ID NO: 4354158 - DNA, 25 bp, Homo sapien
tcttgttaattggaaaagcatcgaa

SEQ ID NO: 4354159 - DNA, 25 bp, Homo sapien
gcttctcagaggacccattcccgtg

SEQ ID NO: 4354160 - DNA, 25 bp, Homo sapien
agtttcccagtgtcatactctccag

SEQ ID NO: 4354161 - DNA, 25 bp, Homo sapien
ctggcatctagccacatctggcatg

SEQ ID NO: 4354162 - DNA, 25 bp, Homo sapien
ctcgtgcacgcacatgctggcatct

SEQ ID NO: 4354163 - DNA, 25 bp, Homo sapien
tggcatctagccacatctggcatgc

SEQ ID NO: 4354164 - DNA, 25 bp, Homo sapien
tgcacgcacatgctggcatctagcc

SEQ ID NO: 4354165 - DNA, 25 bp, Homo sapien
catagcttcaagattgattagtaac

SEQ ID NO: 4354166 - DNA, 25 bp, Homo sapien
ttctaaatggtttctgatcatagct

SEQ ID NO: 4354167 - DNA, 25 bp, Homo sapien
tctcctatttctccccacctggagg

SEQ ID NO: 4354168 - DNA, 25 bp, Homo sapien
tagtaactgctctcctatttctccc

SEQ ID NO: 4354169 - DNA, 25 bp, Homo sapien
tgactttgtacaggacaatcaattt

SEQ ID NO: 4354170 - DNA, 25 bp, Homo sapien
ttgactttgtacaggacaatcaatt

SEQ ID NO: 4354171 - DNA, 25 bp, Homo sapien
ggacaatcaattttttcacgttcca

SEQ ID NO: 4354172 - DNA, 25 bp, Homo sapien
gacaatcaattttttcacgttccat

SEQ ID NO: 4354173 - DNA, 25 bp, Homo sapien
cagcctgccagcctactgtgcagat

SEQ ID NO: 4354174 - DNA, 25 bp, Homo sapien
ttgccagtccccacacttgcatgag

SEQ ID NO: 4354175 - DNA, 25 bp, Homo sapien
cacacacatagcattatttatatga

SEQ ID NO: 4354176 - DNA, 25 bp, Homo sapien
gattatcccccataatgtagatggg

SEQ ID NO: 4354177 - DNA, 25 bp, Homo sapien
ggcaaaggtagcatcgtcagaggtc

SEQ ID NO: 4354178 - DNA, 25 bp, Homo sapien
gaggtccaagattgaatagtctgag

SEQ ID NO: 4354179 - DNA, 25 bp, Homo sapien
caagattgaatagtctgaggagaga

SEQ ID NO: 4354180 - DNA, 25 bp, Homo sapien
tagcatcgtcagaggtccaagattg

SEQ ID NO: 4354181 - DNA, 25 bp, Homo sapien
atcctctattgcaaatctccatcct

SEQ ID NO: 4354182 - DNA, 25 bp, Homo sapien
catcctctattgcaaatctccatcc

SEQ ID NO: 4354183 - DNA, 25 bp, Homo sapien
tcctctattgcaaatctccatccta

SEQ ID NO: 4354184 - DNA, 25 bp, Homo sapien
cctctattgcaaatctccatcctat

SEQ ID NO: 4354185 - DNA, 25 bp, Homo sapien
actcatgtggatgtgaccccttcaa

SEQ ID NO: 4354186 - DNA, 25 bp, Homo sapien
gggctgatttgccagcggacaatcc

SEQ ID NO: 4354187 - DNA, 25 bp, Homo sapien
gccagcggacaatccactcatgtgg

SEQ ID NO: 4354188 - DNA, 25 bp, Homo sapien
catgtggatgtgaccccttcaatac

SEQ ID NO: 4354189 - DNA, 25 bp, Homo sapien
ctgtgggcagaaaacacagagctgc

SEQ ID NO: 4354190 - DNA, 25 bp, Homo sapien
tgtgggcagaaaacacagagctgca

SEQ ID NO: 4354191 - DNA, 25 bp, Homo sapien
gcagaaaacacagagctgcataact

SEQ ID NO: 4354192 - DNA, 25 bp, Homo sapien
tgggcagaaaacacagagctgcata

SEQ ID NO: 4354193 - DNA, 25 bp, Homo sapien
gccatgtccagctgtgttcaccggg

SEQ ID NO: 4354194 - DNA, 25 bp, Homo sapien
tattgtctaggtactggcaggctga

SEQ ID NO: 4354195 - DNA, 25 bp, Homo sapien
catgggacgttctgtagttgaggca

SEQ ID NO: 4354196 - DNA, 25 bp, Homo sapien
gacagtcatacccagcatgggacgt

SEQ ID NO: 4354197 - DNA, 25 bp, Homo sapien
taggctccagaatgtcgggtgtctg

SEQ ID NO: 4354198 - DNA, 25 bp, Homo sapien
caggaggggcctgtcggctgcctcc

SEQ ID NO: 4354199 - DNA, 25 bp, Homo sapien
tctgtgggggcagatcgacatgttt

SEQ ID NO: 4354200 - DNA, 25 bp, Homo sapien
gggcagatcgacatgtttatgctgt

SEQ ID NO: 4354201 - DNA, 25 bp, Homo sapien
gtgacggtacaggttaccatttatt

SEQ ID NO: 4354202 - DNA, 25 bp, Homo sapien
aataaatggtaacctgtaccgtcac

SEQ ID NO: 4354203 - DNA, 25 bp, Homo sapien
ttgtgagagctaaagaggctctggt

SEQ ID NO: 4354204 - DNA, 25 bp, Homo sapien
aaagtggttattccctcttgcttct

SEQ ID NO: 4354205 - DNA, 25 bp, Homo sapien
tttgtaacctgatgctgcagatggg

SEQ ID NO: 4354206 - DNA, 25 bp, Homo sapien
taaagggctccaataaagattagat

SEQ ID NO: 4354207 - DNA, 25 bp, Homo sapien
caggttggagtgaacttgcatggca

SEQ ID NO: 4354208 - DNA, 25 bp, Homo sapien
gagtgaacttgcatggcagctgtgt

SEQ ID NO: 4354209 - DNA, 25 bp, Homo sapien
acttgcatggcagctgtgtagtgag

SEQ ID NO: 4354210 - DNA, 25 bp, Homo sapien
tgtagtgagatgaagccaggtgcag

SEQ ID NO: 4354211 - DNA, 25 bp, Homo sapien
gaattgttgtcttaggaacgagggc

SEQ ID NO: 4354212 - DNA, 25 bp, Homo sapien
attgttgtcttaggaacgagggcct

SEQ ID NO: 4354213 - DNA, 25 bp, Homo sapien
cttgaattgttgtcttaggaacgag

SEQ ID NO: 4354214 - DNA, 25 bp, Homo sapien
tgaattgttgtcttaggaacgaggg

SEQ ID NO: 4354215 - DNA, 25 bp, Homo sapien
gcaaggctttcatcgtatgtgacct

SEQ ID NO: 4354216 - DNA, 25 bp, Homo sapien
aaggctttcatcgtatgtgacctcc

SEQ ID NO: 4354217 - DNA, 25 bp, Homo sapien
tgcaaggctttcatcgtatgtgacc

SEQ ID NO: 4354218 - DNA, 25 bp, Homo sapien
ctgcaaggctttcatcgtatgtgac

SEQ ID NO: 4354219 - DNA, 25 bp, Homo sapien
gatccagaatcattgggccttgctg

SEQ ID NO: 4354220 - DNA, 25 bp, Homo sapien
actcttttggtcctgagatcatcag

SEQ ID NO: 4354221 - DNA, 25 bp, Homo sapien
aggaccagcctgtccccgtcattga

SEQ ID NO: 4354222 - DNA, 25 bp, Homo sapien
tatgagctagattcacccatgtgtc

SEQ ID NO: 4354223 - DNA, 25 bp, Homo sapien
tttgtattacataacaacctcatag

SEQ ID NO: 4354224 - DNA, 25 bp, Homo sapien
tacacctgaatttgtattacataac

SEQ ID NO: 4354225 - DNA, 25 bp, Homo sapien
gcagtactccggttgaaaactgtta

SEQ ID NO: 4354226 - DNA, 25 bp, Homo sapien
tgttcttgttgcagtactccggttg

SEQ ID NO: 4354227 - DNA, 25 bp, Homo sapien
ttagctgtggctcacgacactccag

SEQ ID NO: 4354228 - DNA, 25 bp, Homo sapien
gcagcacttgcaacccatttccaga

SEQ ID NO: 4354229 - DNA, 25 bp, Homo sapien
tacgatgtgcacttgtcctttcagg

SEQ ID NO: 4354230 - DNA, 25 bp, Homo sapien
cattggtctgttcaaacctgctggg

SEQ ID NO: 4354231 - DNA, 25 bp, Homo sapien
tctgtgaggccaacaaaggcccggg

SEQ ID NO: 4354232 - DNA, 25 bp, Homo sapien
tctccaggaacatagtcaaagtagc

SEQ ID NO: 4354233 - DNA, 25 bp, Homo sapien
caacattcagaggatagcttgccga

SEQ ID NO: 4354234 - DNA, 25 bp, Homo sapien
tcacatgaatgtaaccctagggctg

SEQ ID NO: 4354235 - DNA, 25 bp, Homo sapien
cgtggcaggatcaccatgggaaaat

SEQ ID NO: 4354236 - DNA, 25 bp, Homo sapien
aattgaggacctcgtggcaggatca

SEQ ID NO: 4354237 - DNA, 25 bp, Homo sapien
gaaatccagaaaagctgatattcgc

SEQ ID NO: 4354238 - DNA, 25 bp, Homo sapien
tattcgcgaaggaaaattgaggacc

SEQ ID NO: 4354239 - DNA, 25 bp, Homo sapien
cacaaacagcccgagaccttcttgg

SEQ ID NO: 4354240 - DNA, 25 bp, Homo sapien
cgagaccttcttggctttgacacag

SEQ ID NO: 4354241 - DNA, 25 bp, Homo sapien
tcttggctttgacacagccaagatg

SEQ ID NO: 4354242 - DNA, 25 bp, Homo sapien
aggagatgtgggtgccacaaacagc

SEQ ID NO: 4354243 - DNA, 25 bp, Homo sapien
ttccacgtagtatggagagagacag

SEQ ID NO: 4354244 - DNA, 25 bp, Homo sapien
gctaacgtcaaccatgtatctttgg

SEQ ID NO: 4354245 - DNA, 25 bp, Homo sapien
aaaagcatgaaagggtgaaatcctg

SEQ ID NO: 4354246 - DNA, 25 bp, Homo sapien
cagagcctaagcatggaaaaaagca

SEQ ID NO: 4354247 - DNA, 25 bp, Homo sapien
catgtttgagatgccgtgggaaacc

SEQ ID NO: 4354248 - DNA, 25 bp, Homo sapien
caaccggacctgttgctagcaggca

SEQ ID NO: 4354249 - DNA, 25 bp, Homo sapien
aaggactttgctgaccactgcatgg

SEQ ID NO: 4354250 - DNA, 25 bp, Homo sapien
gataagtcagtcaccaacggcaatg

SEQ ID NO: 4354251 - DNA, 25 bp, Homo sapien
cacttttggcatgaagtgattgatg

SEQ ID NO: 4354252 - DNA, 25 bp, Homo sapien
ggctggttcgcatcttgtgtctctt

SEQ ID NO: 4354253 - DNA, 25 bp, Homo sapien
gctttcctaacaccttcaaagaagc

SEQ ID NO: 4354254 - DNA, 25 bp, Homo sapien
tcttccactggcacatttagctcca

SEQ ID NO: 4354255 - DNA, 25 bp, Homo sapien
cagcttttacgcctcttaatggatt

SEQ ID NO: 4354256 - DNA, 25 bp, Homo sapien
ggtctttgaagattcccaggcattc

SEQ ID NO: 4354257 - DNA, 25 bp, Homo sapien
gcttttacgcctcttaatggattca

SEQ ID NO: 4354258 - DNA, 25 bp, Homo sapien
ccctgctatggtctttgaagattcc

SEQ ID NO: 4354259 - DNA, 25 bp, Homo sapien
agactgtgatcttctcaggccccat

SEQ ID NO: 4354260 - DNA, 25 bp, Homo sapien
aaagactgtgatcttctcaggcccc

SEQ ID NO: 4354261 - DNA, 25 bp, Homo sapien
tccaaagactgtgatcttctcaggc

SEQ ID NO: 4354262 - DNA, 25 bp, Homo sapien
tttctccaaagactgtgatcttctc

SEQ ID NO: 4354263 - DNA, 25 bp, Homo sapien
gaaatattcttgctgtttgtccact

SEQ ID NO: 4354264 - DNA, 25 bp, Homo sapien
gaccaaataggaaatattcttgctg

SEQ ID NO: 4354265 - DNA, 25 bp, Homo sapien
actggcctgtttgtccacagccact

SEQ ID NO: 4354266 - DNA, 25 bp, Homo sapien
ttgtccactggcctgtttgtccaca

SEQ ID NO: 4354267 - DNA, 25 bp, Homo sapien
cagtcacactactttctaactccag

SEQ ID NO: 4354268 - DNA, 25 bp, Homo sapien
gagactttgtcacattgctggacca

SEQ ID NO: 4354269 - DNA, 25 bp, Homo sapien
ctgccctgaggggatgtactgagac

SEQ ID NO: 4354270 - DNA, 25 bp, Homo sapien
tgcctctgagttcttcacagagcca

SEQ ID NO: 4354271 - DNA, 25 bp, Homo sapien
tttttgctcaccacgtggccaggaa

SEQ ID NO: 4354272 - DNA, 25 bp, Homo sapien
aatgggttgtagacatcccgtcctc

SEQ ID NO: 4354273 - DNA, 25 bp, Homo sapien
caggaaggatctgggcatgtccttc

SEQ ID NO: 4354274 - DNA, 25 bp, Homo sapien
gtccttcaatgggttgtagacatcc

SEQ ID NO: 4354275 - DNA, 25 bp, Homo sapien
catttaagcacaccataggactgca

SEQ ID NO: 4354276 - DNA, 25 bp, Homo sapien
ctgataagaaatcgccagtgtccct

SEQ ID NO: 4354277 - DNA, 25 bp, Homo sapien
ggtgattttatgagtccctccggat

SEQ ID NO: 4354278 - DNA, 25 bp, Homo sapien
tgactattatgagagccaaaacggc

SEQ ID NO: 4354279 - DNA, 25 bp, Homo sapien
tccagaactacgtgcagagtggtcc

SEQ ID NO: 4354280 - DNA, 25 bp, Homo sapien
catacatcttgtacactggacggaa

SEQ ID NO: 4354281 - DNA, 25 bp, Homo sapien
gatgatatcacctaaactagctgga

SEQ ID NO: 4354282 - DNA, 25 bp, Homo sapien
catgacccggtatgggctaagtccc

SEQ ID NO: 4354283 - DNA, 25 bp, Homo sapien
ctgcttttgaagtgcacaagagcag

SEQ ID NO: 4354284 - DNA, 25 bp, Homo sapien
tctgcttttgaagtgcacaagagca

SEQ ID NO: 4354285 - DNA, 25 bp, Homo sapien
attgctgcttaaaaggcaactttca

SEQ ID NO: 4354286 - DNA, 25 bp, Homo sapien
cctttttgctccagcgttcattggg

SEQ ID NO: 4354287 - DNA, 25 bp, Homo sapien
tgcaccttgtctctcttgctttgtg

SEQ ID NO: 4354288 - DNA, 25 bp, Homo sapien
gacaaccaccttttctaacctgatg

SEQ ID NO: 4354289 - DNA, 25 bp, Homo sapien
ttcacatctttgtagcctttttgct

SEQ ID NO: 4354290 - DNA, 25 bp, Homo sapien
ttcataagctaaatcaatatcaggt

SEQ ID NO: 4354291 - DNA, 25 bp, Homo sapien
aagctaaatcaatatcaggtgtcac

SEQ ID NO: 4354292 - DNA, 25 bp, Homo sapien
cataagctaaatcaatatcaggtgt

SEQ ID NO: 4354293 - DNA, 25 bp, Homo sapien
taagctaaatcaatatcaggtgtca

SEQ ID NO: 4354294 - DNA, 25 bp, Homo sapien
gcaggtaagggcaatccgatggttt

SEQ ID NO: 4354295 - DNA, 25 bp, Homo sapien
caagagaggacacgaaatagggaat

SEQ ID NO: 4354296 - DNA, 25 bp, Homo sapien
taccttgtggacattgattttccac

SEQ ID NO: 4354297 - DNA, 25 bp, Homo sapien
ggaatggatgagtatgcaaaagtaa

SEQ ID NO: 4354298 - DNA, 25 bp, Homo sapien
tgaatagcatcattagcgtacccat

SEQ ID NO: 4354299 - DNA, 25 bp, Homo sapien
aattttctcttattatgcatacgta

SEQ ID NO: 4354300 - DNA, 25 bp, Homo sapien
tatgcatacgtattaaccaaactat

SEQ ID NO: 4354301 - DNA, 25 bp, Homo sapien
ggctgtaaatctgcttcactcccaa

SEQ ID NO: 4354302 - DNA, 25 bp, Homo sapien
tcttctcagccacttgccgtacacc

SEQ ID NO: 4354303 - DNA, 25 bp, Homo sapien
ttcttgaatggagcctacatcagtt

SEQ ID NO: 4354304 - DNA, 25 bp, Homo sapien
cttgaatggagcctacatcagttgc

SEQ ID NO: 4354305 - DNA, 25 bp, Homo sapien
acttgccgtacaccttctatcctct

SEQ ID NO: 4354306 - DNA, 25 bp, Homo sapien
cacagggcccagacatagggaggtc

SEQ ID NO: 4354307 - DNA, 25 bp, Homo sapien
tcctcaccaagctgattgaagggaa

SEQ ID NO: 4354308 - DNA, 25 bp, Homo sapien
ggaagtctctcttcaatcactggaa

SEQ ID NO: 4354309 - DNA, 25 bp, Homo sapien
tggttcaccctggattaccactgag

SEQ ID NO: 4354310 - DNA, 25 bp, Homo sapien
gcacataagcgcagagtttgcaacc

SEQ ID NO: 4354311 - DNA, 25 bp, Homo sapien
tgaggcacataagcgcagagtttgc

SEQ ID NO: 4354312 - DNA, 25 bp, Homo sapien
ccctgtctcttgaggcacataagcg

SEQ ID NO: 4354313 - DNA, 25 bp, Homo sapien
tctcttgaggcacataagcgcagag

SEQ ID NO: 4354314 - DNA, 25 bp, Homo sapien
tgaacaccgtattcagggccctcgt

SEQ ID NO: 4354315 - DNA, 25 bp, Homo sapien
gagcctgagcgcttaaccactgcaa

SEQ ID NO: 4354316 - DNA, 25 bp, Homo sapien
catcgttttgcagccgtggagcaca

SEQ ID NO: 4354317 - DNA, 25 bp, Homo sapien
gaagaaactgattccggagcctgag

SEQ ID NO: 4354318 - DNA, 25 bp, Homo sapien
tgaaacatgacagtccagttcctgg

SEQ ID NO: 4354319 - DNA, 25 bp, Homo sapien
cagttcctggaatagtgcccattta

SEQ ID NO: 4354320 - DNA, 25 bp, Homo sapien
tcctggaatagtgcccatttaggta

SEQ ID NO: 4354321 - DNA, 25 bp, Homo sapien
agaatgcccttacattggttcggtg

SEQ ID NO: 4354322 - DNA, 25 bp, Homo sapien
gatgctgccagtatccctcccctac

SEQ ID NO: 4354323 - DNA, 25 bp, Homo sapien
caaaccagagatgctgccagtatcc

SEQ ID NO: 4354324 - DNA, 25 bp, Homo sapien
tccccaaaccagagatgctgccagt

SEQ ID NO: 4354325 - DNA, 25 bp, Homo sapien
accagagatgctgccagtatccctc

SEQ ID NO: 4354326 - DNA, 25 bp, Homo sapien
caaactgggtggatatgtgagcaac

SEQ ID NO: 4354327 - DNA, 25 bp, Homo sapien
agcaacggggtctgtgtcacaggct

SEQ ID NO: 4354328 - DNA, 25 bp, Homo sapien
ctaccacctatggcaccaaactggg

SEQ ID NO: 4354329 - DNA, 25 bp, Homo sapien
ggctcataggatgggaaagtcttca

SEQ ID NO: 4354330 - DNA, 25 bp, Homo sapien
agtgcagctaatgataatgaccttg

SEQ ID NO: 4354331 - DNA, 25 bp, Homo sapien
tcctgtaaagtgcagctaatgataa

SEQ ID NO: 4354332 - DNA, 25 bp, Homo sapien
gctaatgataatgaccttgcagggt

SEQ ID NO: 4354333 - DNA, 25 bp, Homo sapien
tcctctcctgtaaagtgcagctaat

SEQ ID NO: 4354334 - DNA, 25 bp, Homo sapien
ttgtttgacttctttgtagatcctg

SEQ ID NO: 4354335 - DNA, 25 bp, Homo sapien
cctgacttttttaaagatcgccatt

SEQ ID NO: 4354336 - DNA, 25 bp, Homo sapien
ctgacttttttaaagatcgccattc

SEQ ID NO: 4354337 - DNA, 25 bp, Homo sapien
gtttgacttctttgtagatcctgga

SEQ ID NO: 4354338 - DNA, 25 bp, Homo sapien
tatggctctaaccagatcccggtaa

SEQ ID NO: 4354339 - DNA, 25 bp, Homo sapien
tcagctgtgtagaagaacactctgg

SEQ ID NO: 4354340 - DNA, 25 bp, Homo sapien
tctgggatgaggtctttcagtggac

SEQ ID NO: 4354341 - DNA, 25 bp, Homo sapien
gcttcacctgctgtgtaggaaacta

SEQ ID NO: 4354342 - DNA, 25 bp, Homo sapien
tggatcatgaggctcacctccatgc

SEQ ID NO: 4354343 - DNA, 25 bp, Homo sapien
ctggatcatgaggctcacctccatg

SEQ ID NO: 4354344 - DNA, 25 bp, Homo sapien
ggcatcataattgaaaactccagca

SEQ ID NO: 4354345 - DNA, 25 bp, Homo sapien
catggcttgtcagagcgctaaccaa

SEQ ID NO: 4354346 - DNA, 25 bp, Homo sapien
tctcccattgactggcatcataatt

SEQ ID NO: 4354347 - DNA, 25 bp, Homo sapien
tcagagcgctaaccaaatattccat

SEQ ID NO: 4354348 - DNA, 25 bp, Homo sapien
tagcagcaggtagcctctttggagg

SEQ ID NO: 4354349 - DNA, 25 bp, Homo sapien
agcagcaggtagcctctttggaggt

SEQ ID NO: 4354350 - DNA, 25 bp, Homo sapien
ctagcagcaggtagcctctttggag

SEQ ID NO: 4354351 - DNA, 25 bp, Homo sapien
ctctgcggctttgtggtctgtattt

SEQ ID NO: 4354352 - DNA, 25 bp, Homo sapien
ggacagacagcttgagtaccaggca

SEQ ID NO: 4354353 - DNA, 25 bp, Homo sapien
caggcaggtaccctgaggatgtgcc

SEQ ID NO: 4354354 - DNA, 25 bp, Homo sapien
ggtctgtatttacggcccatccatg

SEQ ID NO: 4354355 - DNA, 25 bp, Homo sapien
cagttctgttgtccagtgttgtggg

SEQ ID NO: 4354356 - DNA, 25 bp, Homo sapien
tcaacagacagttctgttgtccagt

SEQ ID NO: 4354357 - DNA, 25 bp, Homo sapien
cagacagttctgttgtccagtgttg

SEQ ID NO: 4354358 - DNA, 25 bp, Homo sapien
gttctgttgtccagtgttgtgggct

SEQ ID NO: 4354359 - DNA, 25 bp, Homo sapien
gacaagtcttctgtgaatttctagg

SEQ ID NO: 4354360 - DNA, 25 bp, Homo sapien
aggtttctggaatgcagggtcggga

SEQ ID NO: 4354361 - DNA, 25 bp, Homo sapien
gaatttctaggtttctggaatgcag

SEQ ID NO: 4354362 - DNA, 25 bp, Homo sapien
cagacaagtcttctgtgaatttcta

SEQ ID NO: 4354363 - DNA, 25 bp, Homo sapien
ccagccagaggggtcgcactcaagg

SEQ ID NO: 4354364 - DNA, 25 bp, Homo sapien
agccagaggggtcgcactcaaggca

SEQ ID NO: 4354365 - DNA, 25 bp, Homo sapien
cagaggggtcgcactcaaggcaaaa

SEQ ID NO: 4354366 - DNA, 25 bp, Homo sapien
ggggtcgcactcaaggcaaaagtac

SEQ ID NO: 4354367 - DNA, 25 bp, Homo sapien
ttgtactccttcttcagcagctgtg

SEQ ID NO: 4354368 - DNA, 25 bp, Homo sapien
actccttcttcagcagctgtggcat

SEQ ID NO: 4354369 - DNA, 25 bp, Homo sapien
ctttgtactccttcttcagcagctg

SEQ ID NO: 4354370 - DNA, 25 bp, Homo sapien
tgtactccttcttcagcagctgtgg

SEQ ID NO: 4354371 - DNA, 25 bp, Homo sapien
gcctcgtccttggtagtatttgtca

SEQ ID NO: 4354372 - DNA, 25 bp, Homo sapien
ccttggtagtatttgtcatagtcat

SEQ ID NO: 4354373 - DNA, 25 bp, Homo sapien
ctagcctcgtccttggtagtatttg

SEQ ID NO: 4354374 - DNA, 25 bp, Homo sapien
cgtccttggtagtatttgtcatagt

SEQ ID NO: 4354375 - DNA, 25 bp, Homo sapien
actgctcagcacagctgagctcagc

SEQ ID NO: 4354376 - DNA, 25 bp, Homo sapien
agctgtctgcagctttgttcatcca

SEQ ID NO: 4354377 - DNA, 25 bp, Homo sapien
tgtctgcagctttgttcatccatag

SEQ ID NO: 4354378 - DNA, 25 bp, Homo sapien
ttcatccatagactgagtccccacc

SEQ ID NO: 4354379 - DNA, 25 bp, Homo sapien
cttgtgtacgcaagtgacagcattc

SEQ ID NO: 4354380 - DNA, 25 bp, Homo sapien
aaatcaggtactgatgagaccggct

SEQ ID NO: 4354381 - DNA, 25 bp, Homo sapien
ccttgtgtacttgtgtacgcaagtg

SEQ ID NO: 4354382 - DNA, 25 bp, Homo sapien
tgtgtacttgtgtacgcaagtgaca

SEQ ID NO: 4354383 - DNA, 25 bp, Homo sapien
tcatcctcattttctctgtcatcca

SEQ ID NO: 4354384 - DNA, 25 bp, Homo sapien
ctctgtcattatcatcctcattttc

SEQ ID NO: 4354385 - DNA, 25 bp, Homo sapien
tatcatcctcattttctctgtcatc

SEQ ID NO: 4354386 - DNA, 25 bp, Homo sapien
cattatcatcctcattttctctgtc

SEQ ID NO: 4354387 - DNA, 25 bp, Homo sapien
tgggagaagtggaactaacccaata

SEQ ID NO: 4354388 - DNA, 25 bp, Homo sapien
acccaataatccgtgaaaagctcat

SEQ ID NO: 4354389 - DNA, 25 bp, Homo sapien
gtgggaaaggactcagagccttttc

SEQ ID NO: 4354390 - DNA, 25 bp, Homo sapien
tttcagctctggagaacatgcagac

SEQ ID NO: 4354391 - DNA, 25 bp, Homo sapien
agcagttccacagtcgcatctcggg

SEQ ID NO: 4354392 - DNA, 25 bp, Homo sapien
gtagttctgctggtacaccctgaag

SEQ ID NO: 4354393 - DNA, 25 bp, Homo sapien
tgaggtggtcctactaatgcttccc

SEQ ID NO: 4354394 - DNA, 25 bp, Homo sapien
agagttttctggtgctatcctgggc

SEQ ID NO: 4354395 - DNA, 25 bp, Homo sapien
actggcctctaagcccgtaggtgga

SEQ ID NO: 4354396 - DNA, 25 bp, Homo sapien
gcagagagcatgttgggccatcgtc

SEQ ID NO: 4354397 - DNA, 25 bp, Homo sapien
tcaagcatggcctgcatgggagtcc

SEQ ID NO: 4354398 - DNA, 25 bp, Homo sapien
aaaggccattgcacaggtcacagca

SEQ ID NO: 4354399 - DNA, 25 bp, Homo sapien
gagcaaagatagcaggtggaagcat

SEQ ID NO: 4354400 - DNA, 25 bp, Homo sapien
tatgtatattccatgtcaatcagca

SEQ ID NO: 4354401 - DNA, 25 bp, Homo sapien
gcctgcagcagatacatttttcaag

SEQ ID NO: 4354402 - DNA, 25 bp, Homo sapien
agctccaggagatggatggctatgg

SEQ ID NO: 4354403 - DNA, 25 bp, Homo sapien
tttgctccttcataccactctgggt

SEQ ID NO: 4354404 - DNA, 25 bp, Homo sapien
actctgggtctcattctggtttcct

SEQ ID NO: 4354405 - DNA, 25 bp, Homo sapien
ccactctgggtctcattctggtttc

SEQ ID NO: 4354406 - DNA, 25 bp, Homo sapien
tgctccttcataccactctgggtct

SEQ ID NO: 4354407 - DNA, 25 bp, Homo sapien
gaatgtccgtactcagtattgtccc

SEQ ID NO: 4354408 - DNA, 25 bp, Homo sapien
cagcaaatttgtcactggtagagta

SEQ ID NO: 4354409 - DNA, 25 bp, Homo sapien
gagtatctcagccatgaaaattctc

SEQ ID NO: 4354410 - DNA, 25 bp, Homo sapien
gcaatttcccaatctcgtctccatg

SEQ ID NO: 4354411 - DNA, 25 bp, Homo sapien
cttatccaactctggtaggtcatgc

SEQ ID NO: 4354412 - DNA, 25 bp, Homo sapien
aactctggtaggtcatgctgcctca

SEQ ID NO: 4354413 - DNA, 25 bp, Homo sapien
tccaactctggtaggtcatgctgcc

SEQ ID NO: 4354414 - DNA, 25 bp, Homo sapien
tatccaactctggtaggtcatgctg

SEQ ID NO: 4354415 - DNA, 25 bp, Homo sapien
aagagagatgactgcggagagagaa

SEQ ID NO: 4354416 - DNA, 25 bp, Homo sapien
ggcagccggaggtcccattatttct

SEQ ID NO: 4354417 - DNA, 25 bp, Homo sapien
gccgctagggcaatctgggcccaca

SEQ ID NO: 4354418 - DNA, 25 bp, Homo sapien
agtgtacctcctctccttgtgacca

SEQ ID NO: 4354419 - DNA, 25 bp, Homo sapien
ctcatatttgtgagatttccgagag

SEQ ID NO: 4354420 - DNA, 25 bp, Homo sapien
tatttgtgagatttccgagagaggc

SEQ ID NO: 4354421 - DNA, 25 bp, Homo sapien
tgtgagatttccgagagaggctttg

SEQ ID NO: 4354422 - DNA, 25 bp, Homo sapien
ctgagaactctagccccttgcaaag

SEQ ID NO: 4354423 - DNA, 25 bp, Homo sapien
ctagtccagcaaacacaaccaagct

SEQ ID NO: 4354424 - DNA, 25 bp, Homo sapien
agtccagcaaacacaaccaagcttc

SEQ ID NO: 4354425 - DNA, 25 bp, Homo sapien
tccagcaaacacaaccaagcttcac

SEQ ID NO: 4354426 - DNA, 25 bp, Homo sapien
tagtccagcaaacacaaccaagctt

SEQ ID NO: 4354427 - DNA, 25 bp, Homo sapien
ccacctcctgaactccctgtaagct

SEQ ID NO: 4354428 - DNA, 25 bp, Homo sapien
gcaggccatgcaacccgctgggcag

SEQ ID NO: 4354429 - DNA, 25 bp, Homo sapien
gaggccctgcccacttaaggcagct

SEQ ID NO: 4354430 - DNA, 25 bp, Homo sapien
tggccccagtggagtaatggaccag

SEQ ID NO: 4354431 - DNA, 25 bp, Homo sapien
gatccttattttgtgagaagacctc

SEQ ID NO: 4354432 - DNA, 25 bp, Homo sapien
gagaacttctcggtgcaataatgca

SEQ ID NO: 4354433 - DNA, 25 bp, Homo sapien
agaggtgtgatagcactgcagtcag

SEQ ID NO: 4354434 - DNA, 25 bp, Homo sapien
tgaaggtcccttatgatcaccccta

SEQ ID NO: 4354435 - DNA, 25 bp, Homo sapien
aatctaaccggcaacaaagcatccc

SEQ ID NO: 4354436 - DNA, 25 bp, Homo sapien
tcaggggcccttgctctcacattgg

SEQ ID NO: 4354437 - DNA, 25 bp, Homo sapien
tatctcttgtctgcaaaggcccagt

SEQ ID NO: 4354438 - DNA, 25 bp, Homo sapien
ccagcccaaacatacagactcaggg

SEQ ID NO: 4354439 - DNA, 25 bp, Homo sapien
ttctgacccactgatgaccgacagt

SEQ ID NO: 4354440 - DNA, 25 bp, Homo sapien
gaagttctggcataaaactgccagc

SEQ ID NO: 4354441 - DNA, 25 bp, Homo sapien
ggtcctggtgctacccatttagcaa

SEQ ID NO: 4354442 - DNA, 25 bp, Homo sapien
gaccgacagtgctctatgtatgggc

SEQ ID NO: 4354443 - DNA, 25 bp, Homo sapien
cttcatagtgtggaaagtgggtcaa

SEQ ID NO: 4354444 - DNA, 25 bp, Homo sapien
tggtctctgtcaaggcaccaagtaa

SEQ ID NO: 4354445 - DNA, 25 bp, Homo sapien
tggcaatgagcctcactccctgtgg

SEQ ID NO: 4354446 - DNA, 25 bp, Homo sapien
gcccatgggcactagacaatcttca

SEQ ID NO: 4354447 - DNA, 25 bp, Homo sapien
ccaaggcaggtagttacaagtacca

SEQ ID NO: 4354448 - DNA, 25 bp, Homo sapien
caggtagttacaagtaccaaataag

SEQ ID NO: 4354449 - DNA, 25 bp, Homo sapien
gacgcctgaggctcttatctttcca

SEQ ID NO: 4354450 - DNA, 25 bp, Homo sapien
ccagtggtgttagcatcaagaaggc

SEQ ID NO: 4354451 - DNA, 25 bp, Homo sapien
taagctcagagacatatgagtatac

SEQ ID NO: 4354452 - DNA, 25 bp, Homo sapien
tcagagacatatgagtatactggca

SEQ ID NO: 4354453 - DNA, 25 bp, Homo sapien
ttgtaagctcagagacatatgagta

SEQ ID NO: 4354454 - DNA, 25 bp, Homo sapien
gagacatatgagtatactggcaata

SEQ ID NO: 4354455 - DNA, 25 bp, Homo sapien
gctgtactcatttccaggtaagctg

SEQ ID NO: 4354456 - DNA, 25 bp, Homo sapien
catgttcatggcaagcctcttagtc

SEQ ID NO: 4354457 - DNA, 25 bp, Homo sapien
gagctgtactcatttccaggtaagc

SEQ ID NO: 4354458 - DNA, 25 bp, Homo sapien
acatgtatggattgtctccataggc

SEQ ID NO: 4354459 - DNA, 25 bp, Homo sapien
caagagtccgtatcctataagtcag

SEQ ID NO: 4354460 - DNA, 25 bp, Homo sapien
cgtatcctataagtcagacctggga

SEQ ID NO: 4354461 - DNA, 25 bp, Homo sapien
gcagtgacaagagtccgtatcctat

SEQ ID NO: 4354462 - DNA, 25 bp, Homo sapien
agcagcagtgacaagagtccgtatc

SEQ ID NO: 4354463 - DNA, 25 bp, Homo sapien
catttgtgaggatatgaggaggtcc

SEQ ID NO: 4354464 - DNA, 25 bp, Homo sapien
ggatatgaggaggtccgagggcccc

SEQ ID NO: 4354465 - DNA, 25 bp, Homo sapien
ccagagccatttgtgaggatatgag

SEQ ID NO: 4354466 - DNA, 25 bp, Homo sapien
agagccatttgtgaggatatgagga

SEQ ID NO: 4354467 - DNA, 25 bp, Homo sapien
agaaaccactgtagccatgaagtaa

SEQ ID NO: 4354468 - DNA, 25 bp, Homo sapien
ttcttgcaactttccatataggatc

SEQ ID NO: 4354469 - DNA, 25 bp, Homo sapien
gccatgaagtaacagaataattttg

SEQ ID NO: 4354470 - DNA, 25 bp, Homo sapien
ccatataggatcctgtgttgtatta

SEQ ID NO: 4354471 - DNA, 25 bp, Homo sapien
tagttctctggatacccaaattcag

SEQ ID NO: 4354472 - DNA, 25 bp, Homo sapien
aaattcagccttgtgtctagtgcca

SEQ ID NO: 4354473 - DNA, 25 bp, Homo sapien
tcagcagcgactgaactccaactgc

SEQ ID NO: 4354474 - DNA, 25 bp, Homo sapien
gaacttaacttctgtagtgtctgtg

SEQ ID NO: 4354475 - DNA, 25 bp, Homo sapien
tctcccgctgccactaagtatgttc

SEQ ID NO: 4354476 - DNA, 25 bp, Homo sapien
cagagaatctatggccaggatcacc

SEQ ID NO: 4354477 - DNA, 25 bp, Homo sapien
ttctcaaagctatggcaatgtcatc

SEQ ID NO: 4354478 - DNA, 25 bp, Homo sapien
tcatcagtggggctgaacatcctgg

SEQ ID NO: 4354479 - DNA, 25 bp, Homo sapien
gctccccagaagggaattggtcacc

SEQ ID NO: 4354480 - DNA, 25 bp, Homo sapien
gaagggaattggtcaccaacttcca

SEQ ID NO: 4354481 - DNA, 25 bp, Homo sapien
tccccagaagggaattggtcaccaa

SEQ ID NO: 4354482 - DNA, 25 bp, Homo sapien
ccagaagggaattggtcaccaactt

SEQ ID NO: 4354483 - DNA, 25 bp, Homo sapien
tatgaaagacggcaccagaggcagg

SEQ ID NO: 4354484 - DNA, 25 bp, Homo sapien
agcacctttgcaagatgggtcacaa

SEQ ID NO: 4354485 - DNA, 25 bp, Homo sapien
agtttatatgaaagacggcaccaga

SEQ ID NO: 4354486 - DNA, 25 bp, Homo sapien
tttgcaagatgggtcacaaggagca

SEQ ID NO: 4354487 - DNA, 25 bp, Homo sapien
acaccatcatgaactacacaaggac

SEQ ID NO: 4354488 - DNA, 25 bp, Homo sapien
ccagggaaggctactgcggaaatca

SEQ ID NO: 4354489 - DNA, 25 bp, Homo sapien
tgcaggacccactctctctgtacca

SEQ ID NO: 4354490 - DNA, 25 bp, Homo sapien
tgaactacacaaggacttgtcccac

SEQ ID NO: 4354491 - DNA, 25 bp, Homo sapien
tcttcaagaataaatggccctggcc

SEQ ID NO: 4354492 - DNA, 25 bp, Homo sapien
tttcttactccttctgaataagcag

SEQ ID NO: 4354493 - DNA, 25 bp, Homo sapien
ttatttcttactccttctgaataag

SEQ ID NO: 4354494 - DNA, 25 bp, Homo sapien
ttcaagaataaatggccctggccag

SEQ ID NO: 4354495 - DNA, 25 bp, Homo sapien
gttacacaatattatccaactctct

SEQ ID NO: 4354496 - DNA, 25 bp, Homo sapien
catcaaatcagtggcaaagtttaca

SEQ ID NO: 4354497 - DNA, 25 bp, Homo sapien
tctttctgacaacccacaaactgaa

SEQ ID NO: 4354498 - DNA, 25 bp, Homo sapien
tctggagtctttattatcatcaacc

SEQ ID NO: 4354499 - DNA, 25 bp, Homo sapien
gccagcgttttggaagaactgagag

SEQ ID NO: 4354500 - DNA, 25 bp, Homo sapien
agaactgagagtcacgtcgttaggc

SEQ ID NO: 4354501 - DNA, 25 bp, Homo sapien
gtcacgtcgttaggcgctgaggctt

SEQ ID NO: 4354502 - DNA, 25 bp, Homo sapien
gagaaacaaatgccagcgttttgga

SEQ ID NO: 4354503 - DNA, 25 bp, Homo sapien
aaaggttgagaaacattgatctgca

SEQ ID NO: 4354504 - DNA, 25 bp, Homo sapien
aaaaggttgagaaacattgatctgc

SEQ ID NO: 4354505 - DNA, 25 bp, Homo sapien
aataaaaggttgagaaacattgatc

SEQ ID NO: 4354506 - DNA, 25 bp, Homo sapien
tcaaataaaaggttgagaaacattg

SEQ ID NO: 4354507 - DNA, 25 bp, Homo sapien
gtactgattgatgtccgattggatc

SEQ ID NO: 4354508 - DNA, 25 bp, Homo sapien
gatgtccgattggatctggattcag

SEQ ID NO: 4354509 - DNA, 25 bp, Homo sapien
tggatctggattcagattggccagc

SEQ ID NO: 4354510 - DNA, 25 bp, Homo sapien
gaccactgaaattgtactgattgat

SEQ ID NO: 4354511 - DNA, 25 bp, Homo sapien
tttaaaatagtcagaatgctgccac

SEQ ID NO: 4354512 - DNA, 25 bp, Homo sapien
tgcttcctttctgtaccttacttac

SEQ ID NO: 4354513 - DNA, 25 bp, Homo sapien
cttgcttcctttctgtaccttactt

SEQ ID NO: 4354514 - DNA, 25 bp, Homo sapien
taaaatagtcagaatgctgccacag

SEQ ID NO: 4354515 - DNA, 25 bp, Homo sapien
tttttgaagtggacatgacaaataa

SEQ ID NO: 4354516 - DNA, 25 bp, Homo sapien
tatttttgaagtggacatgacaaat

SEQ ID NO: 4354517 - DNA, 25 bp, Homo sapien
tgaagtggacatgacaaataaaata

SEQ ID NO: 4354518 - DNA, 25 bp, Homo sapien
tttgaagtggacatgacaaataaaa

SEQ ID NO: 4354519 - DNA, 25 bp, Homo sapien
tttattccacaaataggccttactg

SEQ ID NO: 4354520 - DNA, 25 bp, Homo sapien
tggcatggacattcaatcaactctg

SEQ ID NO: 4354521 - DNA, 25 bp, Homo sapien
tttcatcagctgagataagcagtgg

SEQ ID NO: 4354522 - DNA, 25 bp, Homo sapien
gagtcatccacccaagattgcctat

SEQ ID NO: 4354523 - DNA, 25 bp, Homo sapien
caccgtctttgtctgatgcccctga

SEQ ID NO: 4354524 - DNA, 25 bp, Homo sapien
gcgtttgtcaattagtgggcttcac

SEQ ID NO: 4354525 - DNA, 25 bp, Homo sapien
aagattctttaatccacagtggaga

SEQ ID NO: 4354526 - DNA, 25 bp, Homo sapien
gactaggagctggagttagtaagcc

SEQ ID NO: 4354527 - DNA, 25 bp, Homo sapien
aattctcagagctgcgtctccaacc

SEQ ID NO: 4354528 - DNA, 25 bp, Homo sapien
taaattctcagagctgcgtctccaa

SEQ ID NO: 4354529 - DNA, 25 bp, Homo sapien
gagtaaattctcagagctgcgtctc

SEQ ID NO: 4354530 - DNA, 25 bp, Homo sapien
ccctgagtaaattctcagagctgcg

SEQ ID NO: 4354531 - DNA, 25 bp, Homo sapien
cacttagatattccacaggtacctc

SEQ ID NO: 4354532 - DNA, 25 bp, Homo sapien
acaggtacctcctcaaacaacacat

SEQ ID NO: 4354533 - DNA, 25 bp, Homo sapien
caccacttagatattccacaggtac

SEQ ID NO: 4354534 - DNA, 25 bp, Homo sapien
ggtacctcctcaaacaacacattca

SEQ ID NO: 4354535 - DNA, 25 bp, Homo sapien
cactgactcctaccactagaatgaa

SEQ ID NO: 4354536 - DNA, 25 bp, Homo sapien
gattccactattttagccaggcttg

SEQ ID NO: 4354537 - DNA, 25 bp, Homo sapien
agaatgaaacctctatgagaacagg

SEQ ID NO: 4354538 - DNA, 25 bp, Homo sapien
ttgcagtccttcataagaactggga

SEQ ID NO: 4354539 - DNA, 25 bp, Homo sapien
ggtgtcaccactcttaagattcttt

SEQ ID NO: 4354540 - DNA, 25 bp, Homo sapien
taggttacgtagtactttggtgtca

SEQ ID NO: 4354541 - DNA, 25 bp, Homo sapien
atgagagtgtgcctaggcagtgatc

SEQ ID NO: 4354542 - DNA, 25 bp, Homo sapien
gagagtgtgcctaggcagtgatctt

SEQ ID NO: 4354543 - DNA, 25 bp, Homo sapien
acagagcgagaaggggccactgaat

SEQ ID NO: 4354544 - DNA, 25 bp, Homo sapien
taattatccactcaccagactgtcc

SEQ ID NO: 4354545 - DNA, 25 bp, Homo sapien
tactccataattatccactcaccag

SEQ ID NO: 4354546 - DNA, 25 bp, Homo sapien
gaaggggccactgaatactccataa

SEQ ID NO: 4354547 - DNA, 25 bp, Homo sapien
tcatggacgatggttacggtttagc

SEQ ID NO: 4354548 - DNA, 25 bp, Homo sapien
gaaaagtattgcctttatggagcat

SEQ ID NO: 4354549 - DNA, 25 bp, Homo sapien
caggatgttcagacctaacttagca

SEQ ID NO: 4354550 - DNA, 25 bp, Homo sapien
tatatttttgtcctagctgtcagga

SEQ ID NO: 4354551 - DNA, 25 bp, Homo sapien
gactcccacacaataatagtgggac

SEQ ID NO: 4354552 - DNA, 25 bp, Homo sapien
ctcccacacaataatagtgggacac

SEQ ID NO: 4354553 - DNA, 25 bp, Homo sapien
gcaagttctcagagacctacaaaga

SEQ ID NO: 4354554 - DNA, 25 bp, Homo sapien
aaagcaagttctcagagacctacaa

SEQ ID NO: 4354555 - DNA, 25 bp, Homo sapien
aagacacctatgcagccaacagaca

SEQ ID NO: 4354556 - DNA, 25 bp, Homo sapien
aaactaccatcaccatcagagtgaa

SEQ ID NO: 4354557 - DNA, 25 bp, Homo sapien
aagaaactaccatcaccatcagagt

SEQ ID NO: 4354558 - DNA, 25 bp, Homo sapien
gaagacacctatgcagccaacagac

SEQ ID NO: 4354559 - DNA, 25 bp, Homo sapien
accgttgtatatgagaggctcttgc

SEQ ID NO: 4354560 - DNA, 25 bp, Homo sapien
gctgcttgctggataccccacttct

SEQ ID NO: 4354561 - DNA, 25 bp, Homo sapien
tcaaccgttgtatatgagaggctct

SEQ ID NO: 4354562 - DNA, 25 bp, Homo sapien
gataccccacttctgttgtgggaga

SEQ ID NO: 4354563 - DNA, 25 bp, Homo sapien
ttcacttgcattagcggaaagttcc

SEQ ID NO: 4354564 - DNA, 25 bp, Homo sapien
agaacagaggctctgccatcaacca

SEQ ID NO: 4354565 - DNA, 25 bp, Homo sapien
cagacaacacgttagggcaccaagg

SEQ ID NO: 4354566 - DNA, 25 bp, Homo sapien
ttgagaattttgttccccagaacag

SEQ ID NO: 4354567 - DNA, 25 bp, Homo sapien
ctagcaccatctgtaattctctcac

SEQ ID NO: 4354568 - DNA, 25 bp, Homo sapien
ctggtcttgaggctcggatttgcca

SEQ ID NO: 4354569 - DNA, 25 bp, Homo sapien
tagagtgttgcctccttcacggcag

SEQ ID NO: 4354570 - DNA, 25 bp, Homo sapien
tctgacatggacttaagctttaagg

SEQ ID NO: 4354571 - DNA, 25 bp, Homo sapien
tcacggcagttgagttgctcacggc

SEQ ID NO: 4354572 - DNA, 25 bp, Homo sapien
tccatccagcctttaccagggaaga

SEQ ID NO: 4354573 - DNA, 25 bp, Homo sapien
tcctaggaatcctgcctgtcacaag

SEQ ID NO: 4354574 - DNA, 25 bp, Homo sapien
tacagtgagagttaacaatcctagg

SEQ ID NO: 4354575 - DNA, 25 bp, Homo sapien
tacctaggttccctccttgctggca

SEQ ID NO: 4354576 - DNA, 25 bp, Homo sapien
ttggttctccttactgaagtcctct

SEQ ID NO: 4354577 - DNA, 25 bp, Homo sapien
taaaagctgagggttatcatgacct

SEQ ID NO: 4354578 - DNA, 25 bp, Homo sapien
tgtcactgtgtaccattcaaagtgt

SEQ ID NO: 4354579 - DNA, 25 bp, Homo sapien
tcccaggccccttgataaaagctga

SEQ ID NO: 4354580 - DNA, 25 bp, Homo sapien
cctcctcccggaaatgcagacttaa

SEQ ID NO: 4354581 - DNA, 25 bp, Homo sapien
ttcaacaaggtcaccaataaattgt

SEQ ID NO: 4354582 - DNA, 25 bp, Homo sapien
gcagacttaataaggctaaccaaaa

SEQ ID NO: 4354583 - DNA, 25 bp, Homo sapien
ttatccctaggaccatactacacct

SEQ ID NO: 4354584 - DNA, 25 bp, Homo sapien
tataatacagaccattcagagcatg

SEQ ID NO: 4354585 - DNA, 25 bp, Homo sapien
tcaaatcctgatgaagtaaatccag

SEQ ID NO: 4354586 - DNA, 25 bp, Homo sapien
tcaatcatccctcgttagccatttg

SEQ ID NO: 4354587 - DNA, 25 bp, Homo sapien
gcattcctaagtaactcgtggtata

SEQ ID NO: 4354588 - DNA, 25 bp, Homo sapien
caactttatatagcagggcatctgg

SEQ ID NO: 4354589 - DNA, 25 bp, Homo sapien
gaaaataagtcaaagtggcggccag

SEQ ID NO: 4354590 - DNA, 25 bp, Homo sapien
gcaagtctgggagcattattccaaa

SEQ ID NO: 4354591 - DNA, 25 bp, Homo sapien
caggagctccggcaagttaaaccaa

SEQ ID NO: 4354592 - DNA, 25 bp, Homo sapien
tagtctttgcaccagctacaggaag

SEQ ID NO: 4354593 - DNA, 25 bp, Homo sapien
cacttggattttgagtagcacgccc

SEQ ID NO: 4354594 - DNA, 25 bp, Homo sapien
tggcctcggcatgtaagaacacttg

SEQ ID NO: 4354595 - DNA, 25 bp, Homo sapien
tgataacccatgaagtgcaggactg

SEQ ID NO: 4354596 - DNA, 25 bp, Homo sapien
ggccttgtgatggatgagcacctca

SEQ ID NO: 4354597 - DNA, 25 bp, Homo sapien
gccttgtgatggatgagcacctcat

SEQ ID NO: 4354598 - DNA, 25 bp, Homo sapien
tgtgtatttcctagcactatgtgtg

SEQ ID NO: 4354599 - DNA, 25 bp, Homo sapien
ctagcactatccactgaagaggcct

SEQ ID NO: 4354600 - DNA, 25 bp, Homo sapien
cctgtagccctaaaatgaatttcaa

SEQ ID NO: 4354601 - DNA, 25 bp, Homo sapien
agaaccccagcagcaatgaatacag

SEQ ID NO: 4354602 - DNA, 25 bp, Homo sapien
aatggatgggcaatatacaacagga

SEQ ID NO: 4354603 - DNA, 25 bp, Homo sapien
gaagagtaaccatgccaactgttga

SEQ ID NO: 4354604 - DNA, 25 bp, Homo sapien
ttaactattaaagatgcccattggc

SEQ ID NO: 4354605 - DNA, 25 bp, Homo sapien
gatttagcatagatcgtgttccata

SEQ ID NO: 4354606 - DNA, 25 bp, Homo sapien
aagacagagtactccctctatcgcc

SEQ ID NO: 4354607 - DNA, 25 bp, Homo sapien
aatttggtcacaggtgttcactttg

SEQ ID NO: 4354608 - DNA, 25 bp, Homo sapien
taatggtcataaaccttgtgttcaa

SEQ ID NO: 4354609 - DNA, 25 bp, Homo sapien
ccagtcttagtgtaatggtcataaa

SEQ ID NO: 4354610 - DNA, 25 bp, Homo sapien
gcttcccaaattctgatgaaccagg

SEQ ID NO: 4354611 - DNA, 25 bp, Homo sapien
gcagggaccaccatccttaatgttt

SEQ ID NO: 4354612 - DNA, 25 bp, Homo sapien
tctacctgccttggcatctcaagtg

SEQ ID NO: 4354613 - DNA, 25 bp, Homo sapien
cctgcccagcgaggaatgtgtattt

SEQ ID NO: 4354614 - DNA, 25 bp, Homo sapien
agatccctccactgcactccagctt

SEQ ID NO: 4354615 - DNA, 25 bp, Homo sapien
tccctccactgcactccagcttggg

SEQ ID NO: 4354616 - DNA, 25 bp, Homo sapien
ggcagaggttgcagtgagctgagat

SEQ ID NO: 4354617 - DNA, 25 bp, Homo sapien
ggcaagagaacacttgaacccagga

SEQ ID NO: 4354618 - DNA, 25 bp, Homo sapien
gaagtattgaaacaatgagtaagag

SEQ ID NO: 4354619 - DNA, 25 bp, Homo sapien
catcatctagtatttcattatcgac

SEQ ID NO: 4354620 - DNA, 25 bp, Homo sapien
taatgcttcttgtctctaaccgttg

SEQ ID NO: 4354621 - DNA, 25 bp, Homo sapien
cttcatgacagaaggattaagctga

SEQ ID NO: 4354622 - DNA, 25 bp, Homo sapien
gctgtcataaacacctacatgtaag

SEQ ID NO: 4354623 - DNA, 25 bp, Homo sapien
cctctgaggctgtcataaacaccta

SEQ ID NO: 4354624 - DNA, 25 bp, Homo sapien
tcataaacacctacatgtaagtcac

SEQ ID NO: 4354625 - DNA, 25 bp, Homo sapien
aggctgtcataaacacctacatgta

SEQ ID NO: 4354626 - DNA, 25 bp, Homo sapien
cattttgaacgttaacgccgctgca

SEQ ID NO: 4354627 - DNA, 25 bp, Homo sapien
cacaaagcggtatgaaagggttctc

SEQ ID NO: 4354628 - DNA, 25 bp, Homo sapien
cagatgaaccgaggcgaattaaacc

SEQ ID NO: 4354629 - DNA, 25 bp, Homo sapien
accaccaccagatgaaccgaggcga

SEQ ID NO: 4354630 - DNA, 25 bp, Homo sapien
aacaagcattgaaaagggaacaata

SEQ ID NO: 4354631 - DNA, 25 bp, Homo sapien
gttaccactgcccagaaggctttta

SEQ ID NO: 4354632 - DNA, 25 bp, Homo sapien
taccactgcccagaaggcttttaaa

SEQ ID NO: 4354633 - DNA, 25 bp, Homo sapien
gaaggcttttaaaaacaagcattga

SEQ ID NO: 4354634 - DNA, 25 bp, Homo sapien
gactgtcggaagtaaggcaagagcc

SEQ ID NO: 4354635 - DNA, 25 bp, Homo sapien
caaacacagcacgaaagggactgtc

SEQ ID NO: 4354636 - DNA, 25 bp, Homo sapien
cactaggcggctcgcggaaatgtag

SEQ ID NO: 4354637 - DNA, 25 bp, Homo sapien
tgttaatctcagtaaacgccttggg

SEQ ID NO: 4354638 - DNA, 25 bp, Homo sapien
cgacaccaatggctcccggttgaaa

SEQ ID NO: 4354639 - DNA, 25 bp, Homo sapien
acaccaatggctcccggttgaaaag

SEQ ID NO: 4354640 - DNA, 25 bp, Homo sapien
cttcgacaccaatggctcccggttg

SEQ ID NO: 4354641 - DNA, 25 bp, Homo sapien
caatggctcccggttgaaaagaaat

SEQ ID NO: 4354642 - DNA, 25 bp, Homo sapien
tagtaagcagccagggaacgatggc

SEQ ID NO: 4354643 - DNA, 25 bp, Homo sapien
agaaaccagcgttcgagttcgtccg

SEQ ID NO: 4354644 - DNA, 25 bp, Homo sapien
gcttcccggatctagtgcaagacgc

SEQ ID NO: 4354645 - DNA, 25 bp, Homo sapien
gaaatcagagccgaaccattggcca

SEQ ID NO: 4354646 - DNA, 25 bp, Homo sapien
gaaggctgcagtagtcaacgtggct

SEQ ID NO: 4354647 - DNA, 25 bp, Homo sapien
tgtgaggaaatagccgcgccaggcc

SEQ ID NO: 4354648 - DNA, 25 bp, Homo sapien
cccagcaggcgtgcggacggctttt

SEQ ID NO: 4354649 - DNA, 25 bp, Homo sapien
tggttcgcagtcagagggctctaag

SEQ ID NO: 4354650 - DNA, 25 bp, Homo sapien
atggaacattccttgttcctttggc

SEQ ID NO: 4354651 - DNA, 25 bp, Homo sapien
cagtatggaacattccttgttcctt

SEQ ID NO: 4354652 - DNA, 25 bp, Homo sapien
tcagtatggaacattccttgttcct

SEQ ID NO: 4354653 - DNA, 25 bp, Homo sapien
gtatggaacattccttgttcctttg

SEQ ID NO: 4354654 - DNA, 25 bp, Homo sapien
taggggcacacttctggaagcccgc

SEQ ID NO: 4354655 - DNA, 25 bp, Homo sapien
ggaagcccgctccatagatgtggtt

SEQ ID NO: 4354656 - DNA, 25 bp, Homo sapien
ctggaagcccgctccatagatgtgg

SEQ ID NO: 4354657 - DNA, 25 bp, Homo sapien
ctaggggcacacttctggaagcccg

SEQ ID NO: 4354658 - DNA, 25 bp, Homo sapien
gccaggtccaagttgataaaaagcg

SEQ ID NO: 4354659 - DNA, 25 bp, Homo sapien
aggtccaagttgataaaaagcgtgt

SEQ ID NO: 4354660 - DNA, 25 bp, Homo sapien
tccaagttgataaaaagcgtgttta

SEQ ID NO: 4354661 - DNA, 25 bp, Homo sapien
ctgccaggtccaagttgataaaaag

SEQ ID NO: 4354662 - DNA, 25 bp, Homo sapien
agaatacatgggtctggaaagcaaa

SEQ ID NO: 4354663 - DNA, 25 bp, Homo sapien
ggacaaggacatgattaggtgcttc

SEQ ID NO: 4354664 - DNA, 25 bp, Homo sapien
tatgtcctcagtaggaagaatacat

SEQ ID NO: 4354665 - DNA, 25 bp, Homo sapien
gcttcttgtccccacaactcttgat

SEQ ID NO: 4354666 - DNA, 25 bp, Homo sapien
gagaatcactaaggctgttttggtt

SEQ ID NO: 4354667 - DNA, 25 bp, Homo sapien
gaagggagagaatcactaaggctgt

SEQ ID NO: 4354668 - DNA, 25 bp, Homo sapien
agggagagaatcactaaggctgttt

SEQ ID NO: 4354669 - DNA, 25 bp, Homo sapien
agagaatcactaaggctgttttggt

SEQ ID NO: 4354670 - DNA, 25 bp, Homo sapien
gatacgggcttctgccatgtcgccc

SEQ ID NO: 4354671 - DNA, 25 bp, Homo sapien
gcagatacgggcttctgccatgtcg

SEQ ID NO: 4354672 - DNA, 25 bp, Homo sapien
agatacgggcttctgccatgtcgcc

SEQ ID NO: 4354673 - DNA, 25 bp, Homo sapien
ttgcagatacgggcttctgccatgt

SEQ ID NO: 4354674 - DNA, 25 bp, Homo sapien
aattccacactcaaataggactttt

SEQ ID NO: 4354675 - DNA, 25 bp, Homo sapien
aaaacaaacttcattggtgtgtcca

SEQ ID NO: 4354676 - DNA, 25 bp, Homo sapien
cttagcagcagttgaggttttccac

SEQ ID NO: 4354677 - DNA, 25 bp, Homo sapien
cattggtgtgtccatcttagcagca

SEQ ID NO: 4354678 - DNA, 25 bp, Homo sapien
tgagccggacgtggcagagggtgcc

SEQ ID NO: 4354679 - DNA, 25 bp, Homo sapien
aaatgagccggacgtggcagagggt

SEQ ID NO: 4354680 - DNA, 25 bp, Homo sapien
tctcctattgaatccttgtagtgaa

SEQ ID NO: 4354681 - DNA, 25 bp, Homo sapien
tatttaagactagtttaggctgggc

SEQ ID NO: 4354682 - DNA, 25 bp, Homo sapien
ttaatcttgtctgtcaataaacttt

SEQ ID NO: 4354683 - DNA, 25 bp, Homo sapien
tttgtaactgataactaatttgtgg

SEQ ID NO: 4354684 - DNA, 25 bp, Homo sapien
tcttgtctgtcaataaactttcacc

SEQ ID NO: 4354685 - DNA, 25 bp, Homo sapien
ctgtcaataaactttcacctgggcc

SEQ ID NO: 4354686 - DNA, 25 bp, Homo sapien
gcactaggtattcacactgatactg

SEQ ID NO: 4354687 - DNA, 25 bp, Homo sapien
tctgacaagataatgctctaggctt

SEQ ID NO: 4354688 - DNA, 25 bp, Homo sapien
tttagaagctaaaattggcactagg

SEQ ID NO: 4354689 - DNA, 25 bp, Homo sapien
ccaaggagtttctttaataggtatg

SEQ ID NO: 4354690 - DNA, 25 bp, Homo sapien
ccagagtccttagcccacgtaggtg

SEQ ID NO: 4354691 - DNA, 25 bp, Homo sapien
ccaatcctagttgggctctgaggac

SEQ ID NO: 4354692 - DNA, 25 bp, Homo sapien
gcctagtgagttttctgagcccaca

SEQ ID NO: 4354693 - DNA, 25 bp, Homo sapien
cgtgatctctgctatggtccataaa

SEQ ID NO: 4354694 - DNA, 25 bp, Homo sapien
tacaagactgtcacgcaaaggatca

SEQ ID NO: 4354695 - DNA, 25 bp, Homo sapien
taactggagcccaagaattgctgaa

SEQ ID NO: 4354696 - DNA, 25 bp, Homo sapien
ttcccgcacaaaagatgatcactgg

SEQ ID NO: 4354697 - DNA, 25 bp, Homo sapien
gcagcaagtcataaaagtctaggca

SEQ ID NO: 4354698 - DNA, 25 bp, Homo sapien
tctgtcactgcaaaaagggattgac

SEQ ID NO: 4354699 - DNA, 25 bp, Homo sapien
tatcacagtatataggcctctagct

SEQ ID NO: 4354700 - DNA, 25 bp, Homo sapien
caaaacactcttcgcaattaggatg

SEQ ID NO: 4354701 - DNA, 25 bp, Homo sapien
cacacatctgtattgggataagtcc

SEQ ID NO: 4354702 - DNA, 25 bp, Homo sapien
attaatttcatgcataaacaggacc

SEQ ID NO: 4354703 - DNA, 25 bp, Homo sapien
taattattaatttcatgcataaaca

SEQ ID NO: 4354704 - DNA, 25 bp, Homo sapien
aatttcatgcataaacaggacccag

SEQ ID NO: 4354705 - DNA, 25 bp, Homo sapien
cataattattaatttcatgcataaa

SEQ ID NO: 4354706 - DNA, 25 bp, Homo sapien
cataaataaaaagcagtaataattt

SEQ ID NO: 4354707 - DNA, 25 bp, Homo sapien
aaaagcagtaataatttgacattta

SEQ ID NO: 4354708 - DNA, 25 bp, Homo sapien
aataaaaagcagtaataatttgaca

SEQ ID NO: 4354709 - DNA, 25 bp, Homo sapien
taaaaagcagtaataatttgacatt

SEQ ID NO: 4354710 - DNA, 25 bp, Homo sapien
ctctctcgccgatttcttgatggag

SEQ ID NO: 4354711 - DNA, 25 bp, Homo sapien
gaatcatcttctatgatagctgcag

SEQ ID NO: 4354712 - DNA, 25 bp, Homo sapien
tcatcttctatgatagctgcagagt

SEQ ID NO: 4354713 - DNA, 25 bp, Homo sapien
gaagtctggccttagctcagctctc

SEQ ID NO: 4354714 - DNA, 25 bp, Homo sapien
ttcgggatgacatcatcacatcttc

SEQ ID NO: 4354715 - DNA, 25 bp, Homo sapien
tcatatcttctaactggcttcggga

SEQ ID NO: 4354716 - DNA, 25 bp, Homo sapien
tcttctaactggcttcgggatgaca

SEQ ID NO: 4354717 - DNA, 25 bp, Homo sapien
aactggcttcgggatgacatcatca

SEQ ID NO: 4354718 - DNA, 25 bp, Homo sapien
ccgcgcctagccagcacagatgttt

SEQ ID NO: 4354719 - DNA, 25 bp, Homo sapien
tgaaagtgttaagaactcacaccct

SEQ ID NO: 4354720 - DNA, 25 bp, Homo sapien
tgctgcatagcatatcacgaattat

SEQ ID NO: 4354721 - DNA, 25 bp, Homo sapien
tatgtgtcaattaccctaaaaatct

SEQ ID NO: 4354722 - DNA, 25 bp, Homo sapien
gatttaagtcttctaacttcggctg

SEQ ID NO: 4354723 - DNA, 25 bp, Homo sapien
tgtccttccgatttaagtcttctaa

SEQ ID NO: 4354724 - DNA, 25 bp, Homo sapien
tctaacttcggctggcctaaccaag

SEQ ID NO: 4354725 - DNA, 25 bp, Homo sapien
tgttctgtccttccgatttaagtct

SEQ ID NO: 4354726 - DNA, 25 bp, Homo sapien
aatctggtctcccatgggccgactg

SEQ ID NO: 4354727 - DNA, 25 bp, Homo sapien
tgttctcccgcagtacagtggatgt

SEQ ID NO: 4354728 - DNA, 25 bp, Homo sapien
tcatggtgtcagtcctgtttagcca

SEQ ID NO: 4354729 - DNA, 25 bp, Homo sapien
gttcagaaccatgttcagactcagg

SEQ ID NO: 4354730 - DNA, 25 bp, Homo sapien
ttagacctgtacattctagatgggc

SEQ ID NO: 4354731 - DNA, 25 bp, Homo sapien
tgccatcgagcatcctgtttctcct

SEQ ID NO: 4354732 - DNA, 25 bp, Homo sapien
ataagctactatgcccggccaagtt

SEQ ID NO: 4354733 - DNA, 25 bp, Homo sapien
gttaggttcctcttttgccatcgag

SEQ ID NO: 4354734 - DNA, 25 bp, Homo sapien
cttactgttccaaccaagtggtaga

SEQ ID NO: 4354735 - DNA, 25 bp, Homo sapien
cattccccatagtccaagagggtta

SEQ ID NO: 4354736 - DNA, 25 bp, Homo sapien
ggaggccatcactgtcttactgttc

SEQ ID NO: 4354737 - DNA, 25 bp, Homo sapien
aaattaaatgatgggagtcttcctc

SEQ ID NO: 4354738 - DNA, 25 bp, Homo sapien
tataggagatgagtggaagccatac

SEQ ID NO: 4354739 - DNA, 25 bp, Homo sapien
ctttccatcatctgctcggtaagga

SEQ ID NO: 4354740 - DNA, 25 bp, Homo sapien
ctcgttttttatgaagtggaggtcg

SEQ ID NO: 4354741 - DNA, 25 bp, Homo sapien
cggtaaggaatttctctaggtatga

SEQ ID NO: 4354742 - DNA, 25 bp, Homo sapien
tttttcttaatctgaggctctcttt

SEQ ID NO: 4354743 - DNA, 25 bp, Homo sapien
aatctgaggctctctttctgcaggt

SEQ ID NO: 4354744 - DNA, 25 bp, Homo sapien
taatctgaggctctctttctgcagg

SEQ ID NO: 4354745 - DNA, 25 bp, Homo sapien
ttcttaatctgaggctctctttctg

SEQ ID NO: 4354746 - DNA, 25 bp, Homo sapien
tgacagcgcaaaacagccggaagtt

SEQ ID NO: 4354747 - DNA, 25 bp, Homo sapien
ggtagttctctgacactagcagcaa

SEQ ID NO: 4354748 - DNA, 25 bp, Homo sapien
gagtcatagtcaatcctgggagttg

SEQ ID NO: 4354749 - DNA, 25 bp, Homo sapien
gattcatttgaacgtagcctaccaa

SEQ ID NO: 4354750 - DNA, 25 bp, Homo sapien
aggtggatactcttgtcctttctga

SEQ ID NO: 4354751 - DNA, 25 bp, Homo sapien
aaagccagattaggaggtggatact

SEQ ID NO: 4354752 - DNA, 25 bp, Homo sapien
ttcacttagtacttcaagaaaagcc

SEQ ID NO: 4354753 - DNA, 25 bp, Homo sapien
tttaaatgcaaactctatgccatcc

SEQ ID NO: 4354754 - DNA, 25 bp, Homo sapien
gcgacgtgccagttctttaatgcca

SEQ ID NO: 4354755 - DNA, 25 bp, Homo sapien
ggttgggaccttgctcttgaacaag

SEQ ID NO: 4354756 - DNA, 25 bp, Homo sapien
caaatgtaagggcaaagcgacgtgc

SEQ ID NO: 4354757 - DNA, 25 bp, Homo sapien
gtggcaactgcttctcgtgtcttaa

SEQ ID NO: 4354758 - DNA, 25 bp, Homo sapien
tgttatatataattaatgcttcttt

SEQ ID NO: 4354759 - DNA, 25 bp, Homo sapien
tgcttggctttcattaattattaat

SEQ ID NO: 4354760 - DNA, 25 bp, Homo sapien
cactgtgcttggctttcattaatta

SEQ ID NO: 4354761 - DNA, 25 bp, Homo sapien
ttatatataattaatgcttcttttc

SEQ ID NO: 4354762 - DNA, 25 bp, Homo sapien
tgcaaactgagaatgagagtcttgg

SEQ ID NO: 4354763 - DNA, 25 bp, Homo sapien
gaatgagagtcttggcacactgaat

SEQ ID NO: 4354764 - DNA, 25 bp, Homo sapien
actgagaatgagagtcttggcacac

SEQ ID NO: 4354765 - DNA, 25 bp, Homo sapien
ctgttgcaaactgagaatgagagtc

SEQ ID NO: 4354766 - DNA, 25 bp, Homo sapien
ggaggaaaagccacatagccatata

SEQ ID NO: 4354767 - DNA, 25 bp, Homo sapien
taaaaggcgaacagctcaaaaggat

SEQ ID NO: 4354768 - DNA, 25 bp, Homo sapien
taatactcacaaaaaggttagagcc

SEQ ID NO: 4354769 - DNA, 25 bp, Homo sapien
caaaacactaaagtactggagcagg

SEQ ID NO: 4354770 - DNA, 25 bp, Homo sapien
cttcttttatgtaaggcctcaattt

SEQ ID NO: 4354771 - DNA, 25 bp, Homo sapien
gcatgcatgtcaacaatgtcataaa

SEQ ID NO: 4354772 - DNA, 25 bp, Homo sapien
gatgtctgcagctgcatgcatgtca

SEQ ID NO: 4354773 - DNA, 25 bp, Homo sapien
tgtcataaatgataagtttgctgaa

SEQ ID NO: 4354774 - DNA, 25 bp, Homo sapien
cctgtcattaattggtggctgaaaa

SEQ ID NO: 4354775 - DNA, 25 bp, Homo sapien
gctctggttctcctcgtcttggtca

SEQ ID NO: 4354776 - DNA, 25 bp, Homo sapien
aacgtgatccatcacaaaactgagg

SEQ ID NO: 4354777 - DNA, 25 bp, Homo sapien
tcagattggagtccagtatctggat

SEQ ID NO: 4354778 - DNA, 25 bp, Homo sapien
cagtacaggatcatagcctaagagg

SEQ ID NO: 4354779 - DNA, 25 bp, Homo sapien
tgatgtatagtaatgtcttaggcct

SEQ ID NO: 4354780 - DNA, 25 bp, Homo sapien
tagagcataggcatgtggtaggcaa

SEQ ID NO: 4354781 - DNA, 25 bp, Homo sapien
gaataggccataccatagagcatag

SEQ ID NO: 4354782 - DNA, 25 bp, Homo sapien
gatttcaccgttttcctcaatacca

SEQ ID NO: 4354783 - DNA, 25 bp, Homo sapien
gttctttcactggagtattaacatt

SEQ ID NO: 4354784 - DNA, 25 bp, Homo sapien
tttcactggagtattaacattagac

SEQ ID NO: 4354785 - DNA, 25 bp, Homo sapien
tctttcactggagtattaacattag

SEQ ID NO: 4354786 - DNA, 25 bp, Homo sapien
tttgcaagcgtgaattacaggatca

SEQ ID NO: 4354787 - DNA, 25 bp, Homo sapien
caagcgtgaattacaggatcacaga

SEQ ID NO: 4354788 - DNA, 25 bp, Homo sapien
cattcaaatttgcaagcgtgaatta

SEQ ID NO: 4354789 - DNA, 25 bp, Homo sapien
tcaaatttgcaagcgtgaattacag

SEQ ID NO: 4354790 - DNA, 25 bp, Homo sapien
gctgactcctgccattgcctcaaag

SEQ ID NO: 4354791 - DNA, 25 bp, Homo sapien
taagctgcctactgtagttccaaaa

SEQ ID NO: 4354792 - DNA, 25 bp, Homo sapien
tatgatccaggaacccttaagctgc

SEQ ID NO: 4354793 - DNA, 25 bp, Homo sapien
aaggctaatccacttatgatccagg

SEQ ID NO: 4354794 - DNA, 25 bp, Homo sapien
taattggacttgtagctacctaggg

SEQ ID NO: 4354795 - DNA, 25 bp, Homo sapien
gaggagaacctttagtcaagacagt

SEQ ID NO: 4354796 - DNA, 25 bp, Homo sapien
catggaacgaccgaaaggaaaggct

SEQ ID NO: 4354797 - DNA, 25 bp, Homo sapien
tattacaggaattccgggccaggac

SEQ ID NO: 4354798 - DNA, 25 bp, Homo sapien
gcaccaggctgtaacacagttttaa

SEQ ID NO: 4354799 - DNA, 25 bp, Homo sapien
ctaaatgcagagatcctcaaattgt

SEQ ID NO: 4354800 - DNA, 25 bp, Homo sapien
gagatcctcaaattgttactcagaa

SEQ ID NO: 4354801 - DNA, 25 bp, Homo sapien
caagaggctaaccaatatattacca

SEQ ID NO: 4354802 - DNA, 25 bp, Homo sapien
gagagccatcagtaattttcaccaa

SEQ ID NO: 4354803 - DNA, 25 bp, Homo sapien
caccaactgccaaagaatcgaataa

SEQ ID NO: 4354804 - DNA, 25 bp, Homo sapien
gaacactgcagtgcttgcacgacta

SEQ ID NO: 4354805 - DNA, 25 bp, Homo sapien
gaaggagagccatcagtaattttca

SEQ ID NO: 4354806 - DNA, 25 bp, Homo sapien
gctttgcattgttacaatacattgt

SEQ ID NO: 4354807 - DNA, 25 bp, Homo sapien
aactgaattttcctatctgctttgc

SEQ ID NO: 4354808 - DNA, 25 bp, Homo sapien
tttgcattgttacaatacattgttt

SEQ ID NO: 4354809 - DNA, 25 bp, Homo sapien
caactgaattttcctatctgctttg

SEQ ID NO: 4354810 - DNA, 25 bp, Homo sapien
tatgatcttccccacttgataaact

SEQ ID NO: 4354811 - DNA, 25 bp, Homo sapien
tagttgagagttagagctgatttta

SEQ ID NO: 4354812 - DNA, 25 bp, Homo sapien
gtaatcagtaaatttatcttgtgtc

SEQ ID NO: 4354813 - DNA, 25 bp, Homo sapien
agaatgctgcaggaactagttgaga

SEQ ID NO: 4354814 - DNA, 25 bp, Homo sapien
ttggtctacatgaatatctgcagtg

SEQ ID NO: 4354815 - DNA, 25 bp, Homo sapien
ctaaagtctattaaaggctgccatg

SEQ ID NO: 4354816 - DNA, 25 bp, Homo sapien
tgattaatacctagaacacggctgg

SEQ ID NO: 4354817 - DNA, 25 bp, Homo sapien
taataaggtatcatctaagcattct

SEQ ID NO: 4354818 - DNA, 25 bp, Homo sapien
ttctggcatggctccatgttcaatt

SEQ ID NO: 4354819 - DNA, 25 bp, Homo sapien
tggctccatgttcaattccagtctt

SEQ ID NO: 4354820 - DNA, 25 bp, Homo sapien
atcccattttgtgagatcatgtgca

SEQ ID NO: 4354821 - DNA, 25 bp, Homo sapien
ccaaagagatcccattttgtgagat

SEQ ID NO: 4354822 - DNA, 25 bp, Homo sapien
tgtcatcatcatcagcttcttctcc

SEQ ID NO: 4354823 - DNA, 25 bp, Homo sapien
aaccgctttaatgtagaaagaacat

SEQ ID NO: 4354824 - DNA, 25 bp, Homo sapien
gaaagaacattgtaaatgtcatcat

SEQ ID NO: 4354825 - DNA, 25 bp, Homo sapien
taaccgctttaatgtagaaagaaca

SEQ ID NO: 4354826 - DNA, 25 bp, Homo sapien
tataggttttactgcaggcttctag

SEQ ID NO: 4354827 - DNA, 25 bp, Homo sapien
cttgcaataggtcttccacagaatg

SEQ ID NO: 4354828 - DNA, 25 bp, Homo sapien
cgagctatgtcaactctgttctgga

SEQ ID NO: 4354829 - DNA, 25 bp, Homo sapien
aaactcatcaatcagctggcttcga

SEQ ID NO: 4354830 - DNA, 25 bp, Homo sapien
aaaatactgtgggatttgtagcaag

SEQ ID NO: 4354831 - DNA, 25 bp, Homo sapien
tagcaagtttgctaccttctctgca

SEQ ID NO: 4354832 - DNA, 25 bp, Homo sapien
ccattctacctgtgctgtagatttc

SEQ ID NO: 4354833 - DNA, 25 bp, Homo sapien
gtttgctaccttctctgcatctgca

SEQ ID NO: 4354834 - DNA, 25 bp, Homo sapien
ttgtttctatcatcaatttgagttt

SEQ ID NO: 4354835 - DNA, 25 bp, Homo sapien
ataaaatgttcagtcaatttgtttc

SEQ ID NO: 4354836 - DNA, 25 bp, Homo sapien
tttgtttctatcatcaatttgagtt

SEQ ID NO: 4354837 - DNA, 25 bp, Homo sapien
aaaatgttcagtcaatttgtttcta

SEQ ID NO: 4354838 - DNA, 25 bp, Homo sapien
atattgatccaaattcagtatatct

SEQ ID NO: 4354839 - DNA, 25 bp, Homo sapien
catcttctctatattgatccaaatt

SEQ ID NO: 4354840 - DNA, 25 bp, Homo sapien
tctatattgatccaaattcagtata

SEQ ID NO: 4354841 - DNA, 25 bp, Homo sapien
tcatcttctctatattgatccaaat

SEQ ID NO: 4354842 - DNA, 25 bp, Homo sapien
tggactccactatttctgataagct

SEQ ID NO: 4354843 - DNA, 25 bp, Homo sapien
cagtgcacatgatggtggttccaca

SEQ ID NO: 4354844 - DNA, 25 bp, Homo sapien
tatagccctactgagaagccatttc

SEQ ID NO: 4354845 - DNA, 25 bp, Homo sapien
tgtgcattgtacttctcaccagaaa

SEQ ID NO: 4354846 - DNA, 25 bp, Homo sapien
aagaaggccacagacttccgctgct

SEQ ID NO: 4354847 - DNA, 25 bp, Homo sapien
cttctggtttttgcacgcagtgcca

SEQ ID NO: 4354848 - DNA, 25 bp, Homo sapien
gcagtgccactctggtaacaaacta

SEQ ID NO: 4354849 - DNA, 25 bp, Homo sapien
gatcttatcgaccaagcatgtgggt

SEQ ID NO: 4354850 - DNA, 25 bp, Homo sapien
gcactctcttgacgatcagacattg

SEQ ID NO: 4354851 - DNA, 25 bp, Homo sapien
tacaaaccattagctctataagagc

SEQ ID NO: 4354852 - DNA, 25 bp, Homo sapien
gcagcttgacgaattgtacaaacca

SEQ ID NO: 4354853 - DNA, 25 bp, Homo sapien
actggaggatgtgcctcagcagctt

SEQ ID NO: 4354854 - DNA, 25 bp, Homo sapien
tttattcccaccaaatagccagttg

SEQ ID NO: 4354855 - DNA, 25 bp, Homo sapien
agttcgtattcaccatatctcccag

SEQ ID NO: 4354856 - DNA, 25 bp, Homo sapien
gaactcaggtagtttgaccccagag

SEQ ID NO: 4354857 - DNA, 25 bp, Homo sapien
tatctaaagcacgatcataagtggc

SEQ ID NO: 4354858 - DNA, 25 bp, Homo sapien
aacaggttcttctaatagcaactct

SEQ ID NO: 4354859 - DNA, 25 bp, Homo sapien
tagcaactctgtcatacattcccag

SEQ ID NO: 4354860 - DNA, 25 bp, Homo sapien
ctgtccaccaagtaggctgcatgtt

SEQ ID NO: 4354861 - DNA, 25 bp, Homo sapien
tgagagctctcccataaactgtcca

SEQ ID NO: 4354862 - DNA, 25 bp, Homo sapien
gatccttggaccacgagcatgagca

SEQ ID NO: 4354863 - DNA, 25 bp, Homo sapien
gcatgagcactatcttggagactgt

SEQ ID NO: 4354864 - DNA, 25 bp, Homo sapien
catgcacccttgcttgttaagaaaa

SEQ ID NO: 4354865 - DNA, 25 bp, Homo sapien
aggccccattctagagctattgaat

SEQ ID NO: 4354866 - DNA, 25 bp, Homo sapien
ttaatgtaatgtaaaagctacaggc

SEQ ID NO: 4354867 - DNA, 25 bp, Homo sapien
aactgtttaatgtaatgtaaaagct

SEQ ID NO: 4354868 - DNA, 25 bp, Homo sapien
tgtaatgtaaaagctacaggcataa

SEQ ID NO: 4354869 - DNA, 25 bp, Homo sapien
taatgtaaaagctacaggcataaaa

SEQ ID NO: 4354870 - DNA, 25 bp, Homo sapien
tatatattcagaacacctttccaca

SEQ ID NO: 4354871 - DNA, 25 bp, Homo sapien
aaagtttaacaattgccagtctgta

SEQ ID NO: 4354872 - DNA, 25 bp, Homo sapien
tccacaaaaggtaaaggactgattc

SEQ ID NO: 4354873 - DNA, 25 bp, Homo sapien
tgtattcagtgttgatccacaccta

SEQ ID NO: 4354874 - DNA, 25 bp, Homo sapien
ttaaaatgaattgacatttaaaatg

SEQ ID NO: 4354875 - DNA, 25 bp, Homo sapien
tgtaatataataaaagaaataagga

SEQ ID NO: 4354876 - DNA, 25 bp, Homo sapien
agaaacagacttgtttttatttgat

SEQ ID NO: 4354877 - DNA, 25 bp, Homo sapien
aaatgaattgacatttaaaatgtaa

SEQ ID NO: 4354878 - DNA, 25 bp, Homo sapien
tcttctgcttgtgggtcatgtctgc

SEQ ID NO: 4354879 - DNA, 25 bp, Homo sapien
ttcccctcctctttgctaatgcttc

SEQ ID NO: 4354880 - DNA, 25 bp, Homo sapien
aaagaaccagcatcctaatgaggtt

SEQ ID NO: 4354881 - DNA, 25 bp, Homo sapien
gaaaagaaccagcatcctaatgagg

SEQ ID NO: 4354882 - DNA, 25 bp, Homo sapien
gaatatgaactttagtcttccctca

SEQ ID NO: 4354883 - DNA, 25 bp, Homo sapien
tcaacacacaaatcatttcagtgtt

SEQ ID NO: 4354884 - DNA, 25 bp, Homo sapien
gcattgcaaagttacatgaatatga

SEQ ID NO: 4354885 - DNA, 25 bp, Homo sapien
gaaatgaaaaacagggcattgcaaa

SEQ ID NO: 4354886 - DNA, 25 bp, Homo sapien
gcaactggtgcacatcacagcaact

SEQ ID NO: 4354887 - DNA, 25 bp, Homo sapien
aactggtgcacggatcttggcagcc

SEQ ID NO: 4354888 - DNA, 25 bp, Homo sapien
gcagtacccacttaaggatttccca

SEQ ID NO: 4354889 - DNA, 25 bp, Homo sapien
attttccacaaagcccaggtgactg

SEQ ID NO: 4354890 - DNA, 25 bp, Homo sapien
gccgagtacaccaagtggtaaacat

SEQ ID NO: 4354891 - DNA, 25 bp, Homo sapien
gcgatgtgccgagtacaccaagtgg

SEQ ID NO: 4354892 - DNA, 25 bp, Homo sapien
aacagggcgatgtgccgagtacacc

SEQ ID NO: 4354893 - DNA, 25 bp, Homo sapien
tgccacagcaacagggcgatgtgcc

SEQ ID NO: 4354894 - DNA, 25 bp, Homo sapien
cagagtaaccaatcgaatagcttcc

SEQ ID NO: 4354895 - DNA, 25 bp, Homo sapien
tctttatcaagtgtcattgatacaa

SEQ ID NO: 4354896 - DNA, 25 bp, Homo sapien
aaccaatcgaatagcttccacagca

SEQ ID NO: 4354897 - DNA, 25 bp, Homo sapien
caagtgtcattgatacaatgcgatc

SEQ ID NO: 4354898 - DNA, 25 bp, Homo sapien
ttccaatttggggaataattctcta

SEQ ID NO: 4354899 - DNA, 25 bp, Homo sapien
cttgaatcggttagtgaatagttcc

SEQ ID NO: 4354900 - DNA, 25 bp, Homo sapien
tctattggtatatagactctgcaga

SEQ ID NO: 4354901 - DNA, 25 bp, Homo sapien
taattctctattggtatatagactc

SEQ ID NO: 4354902 - DNA, 25 bp, Homo sapien
taactgaagggcaacccatagggat

SEQ ID NO: 4354903 - DNA, 25 bp, Homo sapien
gatgatactaaagaccaggcctagc

SEQ ID NO: 4354904 - DNA, 25 bp, Homo sapien
acagggccagggtgtttcatcacca

SEQ ID NO: 4354905 - DNA, 25 bp, Homo sapien
cagttcaaagccaagtgttgcctct

SEQ ID NO: 4354906 - DNA, 25 bp, Homo sapien
taaatagttattcagctgcatcatc

SEQ ID NO: 4354907 - DNA, 25 bp, Homo sapien
tagtactgagacaaacataacttcc

SEQ ID NO: 4354908 - DNA, 25 bp, Homo sapien
tataccaggttgtcaaacttggttc

SEQ ID NO: 4354909 - DNA, 25 bp, Homo sapien
gatagggtcttcacccctgggcaaa

SEQ ID NO: 4354910 - DNA, 25 bp, Homo sapien
ggctctaatctcagcaatagcatca

SEQ ID NO: 4354911 - DNA, 25 bp, Homo sapien
cctgtcatgaagagtccagccaaca

SEQ ID NO: 4354912 - DNA, 25 bp, Homo sapien
tatacattttcatccatactccaat

SEQ ID NO: 4354913 - DNA, 25 bp, Homo sapien
gtaactgtcatttaggaaggcatca

SEQ ID NO: 4354914 - DNA, 25 bp, Homo sapien
ctaatgctgtttgtatatatttgca

SEQ ID NO: 4354915 - DNA, 25 bp, Homo sapien
tgcattcatactcgctttccataag

SEQ ID NO: 4354916 - DNA, 25 bp, Homo sapien
tatacaaagctagaatgcattcata

SEQ ID NO: 4354917 - DNA, 25 bp, Homo sapien
actattttgacccaattactctatt

SEQ ID NO: 4354918 - DNA, 25 bp, Homo sapien
tcttctatagttgtagtgtgacact

SEQ ID NO: 4354919 - DNA, 25 bp, Homo sapien
gaagagtataacagtggtagtggca

SEQ ID NO: 4354920 - DNA, 25 bp, Homo sapien
ttgcccatggaacaaaatgagtacc

SEQ ID NO: 4354921 - DNA, 25 bp, Homo sapien
taccacagagcaagaagtagggcac

SEQ ID NO: 4354922 - DNA, 25 bp, Homo sapien
gagttcatcatattttcgatttcat

SEQ ID NO: 4354923 - DNA, 25 bp, Homo sapien
agagttcatcatattttcgatttca

SEQ ID NO: 4354924 - DNA, 25 bp, Homo sapien
cggtatctatgaacaaatataccct

SEQ ID NO: 4354925 - DNA, 25 bp, Homo sapien
tctatgaacaaatatacccttaaaa

SEQ ID NO: 4354926 - DNA, 25 bp, Homo sapien
ctctttgcgtttctgaagtagtaac

SEQ ID NO: 4354927 - DNA, 25 bp, Homo sapien
catattgtctctgggtattatcctg

SEQ ID NO: 4354928 - DNA, 25 bp, Homo sapien
gtagtaactccaacctttcattggc

SEQ ID NO: 4354929 - DNA, 25 bp, Homo sapien
tttatttctctcggcttcatattgt

SEQ ID NO: 4354930 - DNA, 25 bp, Homo sapien
tgttattcggaaactctatctacat

SEQ ID NO: 4354931 - DNA, 25 bp, Homo sapien
gtatttctatctacacgtatactca

SEQ ID NO: 4354932 - DNA, 25 bp, Homo sapien
cacgtatactcaatttgttattcgg

SEQ ID NO: 4354933 - DNA, 25 bp, Homo sapien
tatctacattttgatcagttctatg

SEQ ID NO: 4354934 - DNA, 25 bp, Homo sapien
ggcttcttcttgtctagcaaggaga

SEQ ID NO: 4354935 - DNA, 25 bp, Homo sapien
aaagtactaggttgtgacagattcg

SEQ ID NO: 4354936 - DNA, 25 bp, Homo sapien
tctgcaaatgggtgctgaccacaac

SEQ ID NO: 4354937 - DNA, 25 bp, Homo sapien
aatgtgacatcagctcttaagtggc

SEQ ID NO: 4354938 - DNA, 25 bp, Homo sapien
gtgcctggtctactttgaattttaa

SEQ ID NO: 4354939 - DNA, 25 bp, Homo sapien
tagtgcctggtctactttgaatttt

SEQ ID NO: 4354940 - DNA, 25 bp, Homo sapien
agtgcctggtctactttgaatttta

SEQ ID NO: 4354941 - DNA, 25 bp, Homo sapien
gtagtgcctggtctactttgaattt

SEQ ID NO: 4354942 - DNA, 25 bp, Homo sapien
accaaggctgtgaatgcagtggtgc

SEQ ID NO: 4354943 - DNA, 25 bp, Homo sapien
atgcccagctaggttatttttttct

SEQ ID NO: 4354944 - DNA, 25 bp, Homo sapien
tgtcaccaaggctgtgaatgcagtg

SEQ ID NO: 4354945 - DNA, 25 bp, Homo sapien
tgtgtcaccaaggctgtgaatgcag

SEQ ID NO: 4354946 - DNA, 25 bp, Homo sapien
tcagctattagaagtagtaggttcc

SEQ ID NO: 4354947 - DNA, 25 bp, Homo sapien
taggaatattatctcaaagtctgta

SEQ ID NO: 4354948 - DNA, 25 bp, Homo sapien
gatgaagtgtgttatggtctgaaaa

SEQ ID NO: 4354949 - DNA, 25 bp, Homo sapien
tttagcttagtagaatccagacacc

SEQ ID NO: 4354950 - DNA, 25 bp, Homo sapien
ggtatctacgaaacacagaatattt

SEQ ID NO: 4354951 - DNA, 25 bp, Homo sapien
taactacagagccaagaaacaaata

SEQ ID NO: 4354952 - DNA, 25 bp, Homo sapien
gaaaaaaggttaggactgacagcag

SEQ ID NO: 4354953 - DNA, 25 bp, Homo sapien
taccatcaacgaaaaggtatctacg

SEQ ID NO: 4354954 - DNA, 25 bp, Homo sapien
acatgtttttcaggcacgtaaagtc

SEQ ID NO: 4354955 - DNA, 25 bp, Homo sapien
caaccaaaccaagtaagcttagctg

SEQ ID NO: 4354956 - DNA, 25 bp, Homo sapien
gcttcacaagtacacatgacaaaga

SEQ ID NO: 4354957 - DNA, 25 bp, Homo sapien
acagcagaaacaattaagtagcatc

SEQ ID NO: 4354958 - DNA, 25 bp, Homo sapien
tcctcagaggaaaagtctggagatg

SEQ ID NO: 4354959 - DNA, 25 bp, Homo sapien
cagaggaaaagtctggagatgctga

SEQ ID NO: 4354960 - DNA, 25 bp, Homo sapien
gaggaaaagtctggagatgctgatt

SEQ ID NO: 4354961 - DNA, 25 bp, Homo sapien
ctcagaggaaaagtctggagatgct

SEQ ID NO: 4354962 - DNA, 25 bp, Homo sapien
taagatttaagcaatgtcaaggagc

SEQ ID NO: 4354963 - DNA, 25 bp, Homo sapien
aaggagcattttattccaaagccga

SEQ ID NO: 4354964 - DNA, 25 bp, Homo sapien
tactactgataagaccactctgatg

SEQ ID NO: 4354965 - DNA, 25 bp, Homo sapien
gccttgtaactgtccatgcacatag

SEQ ID NO: 4354966 - DNA, 25 bp, Homo sapien
ttaactgagtaagggaaaaatgaga

SEQ ID NO: 4354967 - DNA, 25 bp, Homo sapien
tatcttattggctttgggcaacagg

SEQ ID NO: 4354968 - DNA, 25 bp, Homo sapien
gtaactaacagaataacagacacta

SEQ ID NO: 4354969 - DNA, 25 bp, Homo sapien
tgcttcatgtttacttggttaggac

SEQ ID NO: 4354970 - DNA, 25 bp, Homo sapien
cagccagggtacttgtatgcctaaa

SEQ ID NO: 4354971 - DNA, 25 bp, Homo sapien
cactgaggtccaggcatggtaagag

SEQ ID NO: 4354972 - DNA, 25 bp, Homo sapien
tctgacaaacccgtcaaaagggaga

SEQ ID NO: 4354973 - DNA, 25 bp, Homo sapien
tgacactgtcgaatcaggactccaa

SEQ ID NO: 4354974 - DNA, 25 bp, Homo sapien
tcatcaggggtattgatctaaagtt

SEQ ID NO: 4354975 - DNA, 25 bp, Homo sapien
tcaggggtattgatctaaagttctc

SEQ ID NO: 4354976 - DNA, 25 bp, Homo sapien
caggggtattgatctaaagttctct

SEQ ID NO: 4354977 - DNA, 25 bp, Homo sapien
catcaggggtattgatctaaagttc

SEQ ID NO: 4354978 - DNA, 25 bp, Homo sapien
acctgattgttcctcgggaagcttc

SEQ ID NO: 4354979 - DNA, 25 bp, Homo sapien
tccggccgtatgatgtgtcagtctg

SEQ ID NO: 4354980 - DNA, 25 bp, Homo sapien
cttcatctcagagggttatccggcc

SEQ ID NO: 4354981 - DNA, 25 bp, Homo sapien
gccacctgattgttcctcgggaagc

SEQ ID NO: 4354982 - DNA, 25 bp, Homo sapien
tcctcaaggatgcttataatcacag

SEQ ID NO: 4354983 - DNA, 25 bp, Homo sapien
tgctcgtcttatggtgaggtcctca

SEQ ID NO: 4354984 - DNA, 25 bp, Homo sapien
cagcagaacgtgaaggtgagccagt

SEQ ID NO: 4354985 - DNA, 25 bp, Homo sapien
tgcaaggaggataccaagccactca

SEQ ID NO: 4354986 - DNA, 25 bp, Homo sapien
gagtcttgagttattagcctgtgat

SEQ ID NO: 4354987 - DNA, 25 bp, Homo sapien
gatatacacccattaccaacattag

SEQ ID NO: 4354988 - DNA, 25 bp, Homo sapien
gaaatgtggtggcactgtcactcct

SEQ ID NO: 4354989 - DNA, 25 bp, Homo sapien
gcacgcattcatcttagtccactat

SEQ ID NO: 4354990 - DNA, 25 bp, Homo sapien
cttcagtcatttttctgatgatttc

SEQ ID NO: 4354991 - DNA, 25 bp, Homo sapien
tcatcaaattcttcagtcatttttc

SEQ ID NO: 4354992 - DNA, 25 bp, Homo sapien
tttttctgatgatttctgcattctg

SEQ ID NO: 4354993 - DNA, 25 bp, Homo sapien
ttctgatgatttctgcattctgcat

SEQ ID NO: 4354994 - DNA, 25 bp, Homo sapien
ggttctctgtgattccatatgaagt

SEQ ID NO: 4354995 - DNA, 25 bp, Homo sapien
tttgggtattaagggttctctgtga

SEQ ID NO: 4354996 - DNA, 25 bp, Homo sapien
tgaatcggtaagaccactttaggca

SEQ ID NO: 4354997 - DNA, 25 bp, Homo sapien
aatttcactgaatcggtaagaccac

SEQ ID NO: 4354998 - DNA, 25 bp, Homo sapien
ctcaggaaatctgcccaaagaaatt

SEQ ID NO: 4354999 - DNA, 25 bp, Homo sapien
gacctcaggaaatctgcccaaagaa

SEQ ID NO: 4355000 - DNA, 25 bp, Homo sapien
cctcaggaaatctgcccaaagaaat

SEQ ID NO: 4355001 - DNA, 25 bp, Homo sapien
ctgacctcaggaaatctgcccaaag

SEQ ID NO: 4355002 - DNA, 25 bp, Homo sapien
tatatgattcaatccagtcatccac

SEQ ID NO: 4355003 - DNA, 25 bp, Homo sapien
taaatccagaagtgcgatgtccctg

SEQ ID NO: 4355004 - DNA, 25 bp, Homo sapien
aaagttgattaaatccagaagtgcg

SEQ ID NO: 4355005 - DNA, 25 bp, Homo sapien
cgatgtccctgtcttgtttatatga

SEQ ID NO: 4355006 - DNA, 25 bp, Homo sapien
tgtgtcaggctctgcaagctcagga

SEQ ID NO: 4355007 - DNA, 25 bp, Homo sapien
tgggcaaggttcacctctgctgaat

SEQ ID NO: 4355008 - DNA, 25 bp, Homo sapien
cacctctgctgaataatgtgtcagg

SEQ ID NO: 4355009 - DNA, 25 bp, Homo sapien
taatgtgtcaggctctgcaagctca

SEQ ID NO: 4355010 - DNA, 25 bp, Homo sapien
gtggattgtctctatctggaggata

SEQ ID NO: 4355011 - DNA, 25 bp, Homo sapien
tggcctaccaaagtggcttctacct

SEQ ID NO: 4355012 - DNA, 25 bp, Homo sapien
gcctaccaaagtggcttctacctta

SEQ ID NO: 4355013 - DNA, 25 bp, Homo sapien
taccaaagtggcttctaccttaata

SEQ ID NO: 4355014 - DNA, 25 bp, Homo sapien
gagccatagatcctcaatgagaaag

SEQ ID NO: 4355015 - DNA, 25 bp, Homo sapien
gagcagtcaatatggtggttaaaga

SEQ ID NO: 4355016 - DNA, 25 bp, Homo sapien
taacaagcagcatctgaatcataga

SEQ ID NO: 4355017 - DNA, 25 bp, Homo sapien
ttatcatattgtactagaaggcagt

SEQ ID NO: 4355018 - DNA, 25 bp, Homo sapien
gctgaatttaggaattacggcaata

SEQ ID NO: 4355019 - DNA, 25 bp, Homo sapien
ggctgctgaatttaggaattacggc

SEQ ID NO: 4355020 - DNA, 25 bp, Homo sapien
atggctgctgaatttaggaattacg

SEQ ID NO: 4355021 - DNA, 25 bp, Homo sapien
ctgctgaatttaggaattacggcaa

SEQ ID NO: 4355022 - DNA, 25 bp, Homo sapien
cagcccctgatgccactagatccat

SEQ ID NO: 4355023 - DNA, 25 bp, Homo sapien
gagaactatacacatgcagccccat

SEQ ID NO: 4355024 - DNA, 25 bp, Homo sapien
tgtgagaactatacacatgcagccc

SEQ ID NO: 4355025 - DNA, 25 bp, Homo sapien
catgtgagaactatacacatgcagc

SEQ ID NO: 4355026 - DNA, 25 bp, Homo sapien
tgagaactatacacatgcagcccca

SEQ ID NO: 4355027 - DNA, 25 bp, Homo sapien
tggctattatatggtaaaaggctga

SEQ ID NO: 4355028 - DNA, 25 bp, Homo sapien
gcgcccggctcatttgatttgttta

SEQ ID NO: 4355029 - DNA, 25 bp, Homo sapien
aactgtggtgacaatattaacatca

SEQ ID NO: 4355030 - DNA, 25 bp, Homo sapien
cgcacccggcctcttgtataattct

SEQ ID NO: 4355031 - DNA, 25 bp, Homo sapien
taaacacggctagaagaggctcacc

SEQ ID NO: 4355032 - DNA, 25 bp, Homo sapien
atgagagaagttcaggtaataaaca

SEQ ID NO: 4355033 - DNA, 25 bp, Homo sapien
gttaacattaaccacctgtttctca

SEQ ID NO: 4355034 - DNA, 25 bp, Homo sapien
gtagcagttaacattaaccacctgt

SEQ ID NO: 4355035 - DNA, 25 bp, Homo sapien
acactgtctctcaaggagatttaaa

SEQ ID NO: 4355036 - DNA, 25 bp, Homo sapien
aatgtaaatagaggggccaaaggct

SEQ ID NO: 4355037 - DNA, 25 bp, Homo sapien
ccttccaaccaagtgaatgcaaaca

SEQ ID NO: 4355038 - DNA, 25 bp, Homo sapien
aaggcttctaagaagtagacactgc

SEQ ID NO: 4355039 - DNA, 25 bp, Homo sapien
tcaatggaatgtaaatagaggggcc

SEQ ID NO: 4355040 - DNA, 25 bp, Homo sapien
tggacaacactgacctatttgaaag

SEQ ID NO: 4355041 - DNA, 25 bp, Homo sapien
ctggacaacactgacctatttgaaa

SEQ ID NO: 4355042 - DNA, 25 bp, Homo sapien
ggacaacactgacctatttgaaagg

SEQ ID NO: 4355043 - DNA, 25 bp, Homo sapien
tcaacccttgatctctatcttctta

SEQ ID NO: 4355044 - DNA, 25 bp, Homo sapien
ctctatcttcttatatttccccaac

SEQ ID NO: 4355045 - DNA, 25 bp, Homo sapien
cttatatttccccaactttctcctg

SEQ ID NO: 4355046 - DNA, 25 bp, Homo sapien
tttccccaactttctcctgatggtg

SEQ ID NO: 4355047 - DNA, 25 bp, Homo sapien
gacaacgctaaggttagttgccaaa

SEQ ID NO: 4355048 - DNA, 25 bp, Homo sapien
aaaatgacaacgctaaggttagttg

SEQ ID NO: 4355049 - DNA, 25 bp, Homo sapien
caacgctaaggttagttgccaaata

SEQ ID NO: 4355050 - DNA, 25 bp, Homo sapien
aatgacaacgctaaggttagttgcc

SEQ ID NO: 4355051 - DNA, 25 bp, Homo sapien
tgggttcaagcagctctccttgaaa

SEQ ID NO: 4355052 - DNA, 25 bp, Homo sapien
cgtgagcaaccacgcacagctgtgc

SEQ ID NO: 4355053 - DNA, 25 bp, Homo sapien
tgagcaaccacgcacagctgtgctc

SEQ ID NO: 4355054 - DNA, 25 bp, Homo sapien
tgttttgtttgagaagaagtcttcc

SEQ ID NO: 4355055 - DNA, 25 bp, Homo sapien
agagagaagaaaaatatctgaaatg

SEQ ID NO: 4355056 - DNA, 25 bp, Homo sapien
gagagagaagaaaaatatctgaaat

SEQ ID NO: 4355057 - DNA, 25 bp, Homo sapien
aagaaaaatatctgaaatgcaatta

SEQ ID NO: 4355058 - DNA, 25 bp, Homo sapien
aatatctgaaatgcaattatcaaaa

SEQ ID NO: 4355059 - DNA, 25 bp, Homo sapien
tctattaaagtataatgaggccggg

SEQ ID NO: 4355060 - DNA, 25 bp, Homo sapien
taatgcttccgtagcttgttaacaa

SEQ ID NO: 4355061 - DNA, 25 bp, Homo sapien
taatggcaaaaggtcacaaatctat

SEQ ID NO: 4355062 - DNA, 25 bp, Homo sapien
tgggaagcaatagaaaaggtcttta

SEQ ID NO: 4355063 - DNA, 25 bp, Homo sapien
ccattagctcttccacggcctgctc

SEQ ID NO: 4355064 - DNA, 25 bp, Homo sapien
tcctctaattccagcttcaattctg

SEQ ID NO: 4355065 - DNA, 25 bp, Homo sapien
cctctaattccagcttcaattctgc

SEQ ID NO: 4355066 - DNA, 25 bp, Homo sapien
ctggagattttcgaggtttcttatt

SEQ ID NO: 4355067 - DNA, 25 bp, Homo sapien
ccccactgcaatgatgcccaagagg

SEQ ID NO: 4355068 - DNA, 25 bp, Homo sapien
ggcccactagcacccagtatgtact

SEQ ID NO: 4355069 - DNA, 25 bp, Homo sapien
ccagtatgtactctccccactgcaa

SEQ ID NO: 4355070 - DNA, 25 bp, Homo sapien
catggcccactagcacccagtatgt

SEQ ID NO: 4355071 - DNA, 25 bp, Homo sapien
ccttctggtactcattaatcttttg

SEQ ID NO: 4355072 - DNA, 25 bp, Homo sapien
gctcgctgccagcatcggaatgggc

SEQ ID NO: 4355073 - DNA, 25 bp, Homo sapien
ggcagtagtttcattagttgaatcc

SEQ ID NO: 4355074 - DNA, 25 bp, Homo sapien
tctgtttcttcaagctcgctgccag

SEQ ID NO: 4355075 - DNA, 25 bp, Homo sapien
cagcatcggaatgggcagtagtttc

SEQ ID NO: 4355076 - DNA, 25 bp, Homo sapien
catgaagggcagtgttatgccagtc

SEQ ID NO: 4355077 - DNA, 25 bp, Homo sapien
gtacaaaaatatgaaggcttaggaa

SEQ ID NO: 4355078 - DNA, 25 bp, Homo sapien
attgtggaaatgatagctgctatac

SEQ ID NO: 4355079 - DNA, 25 bp, Homo sapien
gtattaagacatacggccgggcacg

SEQ ID NO: 4355080 - DNA, 25 bp, Homo sapien
tgtaacactggtaattctgaagtaa

SEQ ID NO: 4355081 - DNA, 25 bp, Homo sapien
taatcaagtgctgtacaactcaaaa

SEQ ID NO: 4355082 - DNA, 25 bp, Homo sapien
gctggagaggtcctttcacaatgca

SEQ ID NO: 4355083 - DNA, 25 bp, Homo sapien
gtgctgtacaactcaaaacttttaa

SEQ ID NO: 4355084 - DNA, 25 bp, Homo sapien
gaggtcctttcacaatgcagcaaaa

SEQ ID NO: 4355085 - DNA, 25 bp, Homo sapien
tgaaaagaactataacgagacactg

SEQ ID NO: 4355086 - DNA, 25 bp, Homo sapien
gagacaagaaggaactactttcgaa

SEQ ID NO: 4355087 - DNA, 25 bp, Homo sapien
ggaccagatggccttactgcttaat

SEQ ID NO: 4355088 - DNA, 25 bp, Homo sapien
gcacaaatcgtcaaaactggctcaa

SEQ ID NO: 4355089 - DNA, 25 bp, Homo sapien
aatgatgttatttgtgaagccactt

SEQ ID NO: 4355090 - DNA, 25 bp, Homo sapien
agtggtactccatctacatagaaga

SEQ ID NO: 4355091 - DNA, 25 bp, Homo sapien
ctaagtcttaacgtcaaccatgggt

SEQ ID NO: 4355092 - DNA, 25 bp, Homo sapien
cacagacatacaacgcaggtggtgg

SEQ ID NO: 4355093 - DNA, 25 bp, Homo sapien
caaacattaagcagacagaaggata

SEQ ID NO: 4355094 - DNA, 25 bp, Homo sapien
ggcaacagcaggttagatcattatt

SEQ ID NO: 4355095 - DNA, 25 bp, Homo sapien
tagcgatgaggttcactggcaacag

SEQ ID NO: 4355096 - DNA, 25 bp, Homo sapien
gaatgatgtgctcaatgggatagcg

SEQ ID NO: 4355097 - DNA, 25 bp, Homo sapien
tcctagtcaatatggtgtctatctc

SEQ ID NO: 4355098 - DNA, 25 bp, Homo sapien
tatcccatagagttcgatggaactc

SEQ ID NO: 4355099 - DNA, 25 bp, Homo sapien
tggcattagtgctatgtaagttccc

SEQ ID NO: 4355100 - DNA, 25 bp, Homo sapien
gatggaactctatggaacacgtact

SEQ ID NO: 4355101 - DNA, 25 bp, Homo sapien
tacatgttaggcactatacaccttg

SEQ ID NO: 4355102 - DNA, 25 bp, Homo sapien
tttgctaagtctacaaaccacccaa

SEQ ID NO: 4355103 - DNA, 25 bp, Homo sapien
ttaaaacatatagcctgtaatttcg

SEQ ID NO: 4355104 - DNA, 25 bp, Homo sapien
gtcaatatttcatttccctactagc

SEQ ID NO: 4355105 - DNA, 25 bp, Homo sapien
tggcaattcattggcgatagatgtc

SEQ ID NO: 4355106 - DNA, 25 bp, Homo sapien
gacattctactattttcaggaaaaa

SEQ ID NO: 4355107 - DNA, 25 bp, Homo sapien
atgtttttcaacatacatgcagcat

SEQ ID NO: 4355108 - DNA, 25 bp, Homo sapien
gagagatgtacagctacccagggtt

SEQ ID NO: 4355109 - DNA, 25 bp, Homo sapien
tttaaacctggggactggcgaggca

SEQ ID NO: 4355110 - DNA, 25 bp, Homo sapien
gaaaacactaatgattatactgtaa

SEQ ID NO: 4355111 - DNA, 25 bp, Homo sapien
aacatactctaaagagagactttaa

SEQ ID NO: 4355112 - DNA, 25 bp, Homo sapien
catacacattctaagtttcctacaa

SEQ ID NO: 4355113 - DNA, 25 bp, Homo sapien
gagttcctggtacagtcaatgttgc

SEQ ID NO: 4355114 - DNA, 25 bp, Homo sapien
tatcttgtccccagtcaacttccag

SEQ ID NO: 4355115 - DNA, 25 bp, Homo sapien
acttccagaaaagagtgaccatttg

SEQ ID NO: 4355116 - DNA, 25 bp, Homo sapien
tgcttccaatgcttggagccacaac

SEQ ID NO: 4355117 - DNA, 25 bp, Homo sapien
aaaaactaaggcacaggcatacaca

SEQ ID NO: 4355118 - DNA, 25 bp, Homo sapien
tccacatgctgtcccactggaaatt

SEQ ID NO: 4355119 - DNA, 25 bp, Homo sapien
ctagaatatctccttaaagacctgc

SEQ ID NO: 4355120 - DNA, 25 bp, Homo sapien
ccttccctctagaatatctccttaa

SEQ ID NO: 4355121 - DNA, 25 bp, Homo sapien
aaacatcagtctagacacagacctt

SEQ ID NO: 4355122 - DNA, 25 bp, Homo sapien
aagcaaaaaacatcagtctagacac

SEQ ID NO: 4355123 - DNA, 25 bp, Homo sapien
gctagaacaatttgacatccacaag

SEQ ID NO: 4355124 - DNA, 25 bp, Homo sapien
agaagacaatctagatgaccctggg

SEQ ID NO: 4355125 - DNA, 25 bp, Homo sapien
tctctgaataccacctggagtctgt

SEQ ID NO: 4355126 - DNA, 25 bp, Homo sapien
tacttatcccaatatcgtaggccag

SEQ ID NO: 4355127 - DNA, 25 bp, Homo sapien
catttggctctaggatacaagcttg

SEQ ID NO: 4355128 - DNA, 25 bp, Homo sapien
caattctagtagagtcaacatccac

SEQ ID NO: 4355129 - DNA, 25 bp, Homo sapien
gaagcaggaggatcaaagagtacat

SEQ ID NO: 4355130 - DNA, 25 bp, Homo sapien
aaaagcaacacacagaagcaggagg

SEQ ID NO: 4355131 - DNA, 25 bp, Homo sapien
aaaaaagcaacacacagaagcagga

SEQ ID NO: 4355132 - DNA, 25 bp, Homo sapien
gaaaaaaagcaacacacagaagcag

SEQ ID NO: 4355133 - DNA, 25 bp, Homo sapien
ttcacagctacttggatggaggtag

SEQ ID NO: 4355134 - DNA, 25 bp, Homo sapien
tggttatgctctcacttcgaagtgg

SEQ ID NO: 4355135 - DNA, 25 bp, Homo sapien
caagcaggtttgatacatccgagga

SEQ ID NO: 4355136 - DNA, 25 bp, Homo sapien
gattaccagggtgagacatgtcttt

SEQ ID NO: 4355137 - DNA, 25 bp, Homo sapien
tttaaagatgcaactatatgctagt

SEQ ID NO: 4355138 - DNA, 25 bp, Homo sapien
agccaacgagcccaggcatgatttt

SEQ ID NO: 4355139 - DNA, 25 bp, Homo sapien
taaagatgcaactatatgctagtta

SEQ ID NO: 4355140 - DNA, 25 bp, Homo sapien
ccaacgagcccaggcatgatttttt

SEQ ID NO: 4355141 - DNA, 25 bp, Homo sapien
aatacatgatattaacagaaggaaa

SEQ ID NO: 4355142 - DNA, 25 bp, Homo sapien
taatcccagctatacaccatgaaca

SEQ ID NO: 4355143 - DNA, 25 bp, Homo sapien
agttcaacgtatgatattgttttgc

SEQ ID NO: 4355144 - DNA, 25 bp, Homo sapien
cacacacacaacgaagttcaacgta

SEQ ID NO: 4355145 - DNA, 25 bp, Homo sapien
gaatttttctctaatcaatgaaggg

SEQ ID NO: 4355146 - DNA, 25 bp, Homo sapien
aaagcaggttaccatatcatttaca

SEQ ID NO: 4355147 - DNA, 25 bp, Homo sapien
tagaagaactccagttatttctgag

SEQ ID NO: 4355148 - DNA, 25 bp, Homo sapien
tatcatttacatagaagaactccag

SEQ ID NO: 4355149 - DNA, 25 bp, Homo sapien
tattctaattagctaaccaatccaa

SEQ ID NO: 4355150 - DNA, 25 bp, Homo sapien
cgggacaactaaagtgagaccctgt

SEQ ID NO: 4355151 - DNA, 25 bp, Homo sapien
aactctatattctaattagctaacc

SEQ ID NO: 4355152 - DNA, 25 bp, Homo sapien
cacttcagccgggacaactaaagtg

SEQ ID NO: 4355153 - DNA, 25 bp, Homo sapien
gaaagcacaggacctaaaatcccta

SEQ ID NO: 4355154 - DNA, 25 bp, Homo sapien
agcaatcatgctcacctggtagaaa

SEQ ID NO: 4355155 - DNA, 25 bp, Homo sapien
cactgttctaaggagtgtctttaag

SEQ ID NO: 4355156 - DNA, 25 bp, Homo sapien
gaatgagtgaattttgaagctgggt

SEQ ID NO: 4355157 - DNA, 25 bp, Homo sapien
agagcagggctctacctcaaataaa

SEQ ID NO: 4355158 - DNA, 25 bp, Homo sapien
cataagagcatataaatgattccaa

SEQ ID NO: 4355159 - DNA, 25 bp, Homo sapien
caatcctaggtatctgccaaagagg

SEQ ID NO: 4355160 - DNA, 25 bp, Homo sapien
gtattgaaacatgccttaacatgga

SEQ ID NO: 4355161 - DNA, 25 bp, Homo sapien
ttggtgacaaaataagtattgctaa

SEQ ID NO: 4355162 - DNA, 25 bp, Homo sapien
acccaatctgtaatttaatatgaaa

SEQ ID NO: 4355163 - DNA, 25 bp, Homo sapien
tggtgacaaaataagtattgctaac

SEQ ID NO: 4355164 - DNA, 25 bp, Homo sapien
ggtgacaaaataagtattgctaaca

SEQ ID NO: 4355165 - DNA, 25 bp, Homo sapien
tgtggaatctaaacacagtgaactc

SEQ ID NO: 4355166 - DNA, 25 bp, Homo sapien
gatatcctgccattcgtgacaacat

SEQ ID NO: 4355167 - DNA, 25 bp, Homo sapien
caattttgtataccactgccacaca

SEQ ID NO: 4355168 - DNA, 25 bp, Homo sapien
cagaactcttgacactaacctagga

SEQ ID NO: 4355169 - DNA, 25 bp, Homo sapien
tatgtttaactgtatgagttccaca

SEQ ID NO: 4355170 - DNA, 25 bp, Homo sapien
tcagggcatcagatgccactctgtg

SEQ ID NO: 4355171 - DNA, 25 bp, Homo sapien
tatgagttccacaaactacccacga

SEQ ID NO: 4355172 - DNA, 25 bp, Homo sapien
gcatcagggcatcagatgccactct

SEQ ID NO: 4355173 - DNA, 25 bp, Homo sapien
tcatcctcctctacaattgtaggtt

SEQ ID NO: 4355174 - DNA, 25 bp, Homo sapien
cagctcagcaaagagtttcattgtc

SEQ ID NO: 4355175 - DNA, 25 bp, Homo sapien
gtttcattgtctgtttatatacagc

SEQ ID NO: 4355176 - DNA, 25 bp, Homo sapien
tacagcttgtttgaacagctcagga

SEQ ID NO: 4355177 - DNA, 25 bp, Homo sapien
ccttttgtgctctgtcagcatcatc

SEQ ID NO: 4355178 - DNA, 25 bp, Homo sapien
gccttttgtgctctgtcagcatcat

SEQ ID NO: 4355179 - DNA, 25 bp, Homo sapien
ttttgtgctctgtcagcatcatctt

SEQ ID NO: 4355180 - DNA, 25 bp, Homo sapien
agccttttgtgctctgtcagcatca

SEQ ID NO: 4355181 - DNA, 25 bp, Homo sapien
caaatggggtgaaactgaagtaaga

SEQ ID NO: 4355182 - DNA, 25 bp, Homo sapien
tcacgttagaaccaagtctctcttc

SEQ ID NO: 4355183 - DNA, 25 bp, Homo sapien
ggaaccaggacaggtcagtctttca

SEQ ID NO: 4355184 - DNA, 25 bp, Homo sapien
atctgattttttcacgttagaacca

SEQ ID NO: 4355185 - DNA, 25 bp, Homo sapien
tgcctccgccacacgaagtcccgct

SEQ ID NO: 4355186 - DNA, 25 bp, Homo sapien
ctgcctccgccacacgaagtcccgc

SEQ ID NO: 4355187 - DNA, 25 bp, Homo sapien
aatgctgcctccgccacacgaagtc

SEQ ID NO: 4355188 - DNA, 25 bp, Homo sapien
tccgccacacgaagtcccgctctct

SEQ ID NO: 4355189 - DNA, 25 bp, Homo sapien
gacacagtgcatcgttcttcatcta

SEQ ID NO: 4355190 - DNA, 25 bp, Homo sapien
tgactgtctggctactgacacagtg

SEQ ID NO: 4355191 - DNA, 25 bp, Homo sapien
gcttgggatttcactacttgtgcag

SEQ ID NO: 4355192 - DNA, 25 bp, Homo sapien
tggaagacaactctccatggagtct

SEQ ID NO: 4355193 - DNA, 25 bp, Homo sapien
gcttcttggactgctaaaccgtatg

SEQ ID NO: 4355194 - DNA, 25 bp, Homo sapien
ctgtcttaattgcctcttcatgaaa

SEQ ID NO: 4355195 - DNA, 25 bp, Homo sapien
tttgcttcttggactgctaaaccgt

SEQ ID NO: 4355196 - DNA, 25 bp, Homo sapien
cttggactgctaaaccgtatgccat

SEQ ID NO: 4355197 - DNA, 25 bp, Homo sapien
gtgacgtgacaatcctaaaacctga

SEQ ID NO: 4355198 - DNA, 25 bp, Homo sapien
agaagaacccagttcggaccctgca

SEQ ID NO: 4355199 - DNA, 25 bp, Homo sapien
gcccctccgctgaaatgaactcgtt

SEQ ID NO: 4355200 - DNA, 25 bp, Homo sapien
tatgacttatactcccggagcacga

SEQ ID NO: 4355201 - DNA, 25 bp, Homo sapien
ctcagctgcccatccgggcgccgcc

SEQ ID NO: 4355202 - DNA, 25 bp, Homo sapien
aagtctccggtgtgttattcccgat

SEQ ID NO: 4355203 - DNA, 25 bp, Homo sapien
gcgccgccgaccatcgacctagttt

SEQ ID NO: 4355204 - DNA, 25 bp, Homo sapien
tccggtgtgttattcccgatgtggg

SEQ ID NO: 4355205 - DNA, 25 bp, Homo sapien
cgccgctgcagacttgggtccggac

SEQ ID NO: 4355206 - DNA, 25 bp, Homo sapien
ttttccacacgccaatggcgccgct

SEQ ID NO: 4355207 - DNA, 25 bp, Homo sapien
ctctgctggccgcggtgctcactgc

SEQ ID NO: 4355208 - DNA, 25 bp, Homo sapien
ctcactgccttgctgacgggacggg

SEQ ID NO: 4355209 - DNA, 25 bp, Homo sapien
aggcgcgagctaggggccgcggcag

SEQ ID NO: 4355210 - DNA, 25 bp, Homo sapien
gagctgaggcgcgagctaggggccg

SEQ ID NO: 4355211 - DNA, 25 bp, Homo sapien
aggggcgcgcgcaaacgctttccag

SEQ ID NO: 4355212 - DNA, 25 bp, Homo sapien
gcaggggcgcgcgcaaacgctttcc

SEQ ID NO: 4355213 - DNA, 25 bp, Homo sapien
gcttctggataagggcgctgtggac

SEQ ID NO: 4355214 - DNA, 25 bp, Homo sapien
ctggcggaaggacggccacggtggc

SEQ ID NO: 4355215 - DNA, 25 bp, Homo sapien
gctgtggacggttcttgggccgccc

SEQ ID NO: 4355216 - DNA, 25 bp, Homo sapien
ccaatcgcgagaggcgtaggcttct

SEQ ID NO: 4355217 - DNA, 25 bp, Homo sapien
aagcacatctttccgtggtgtcggc

SEQ ID NO: 4355218 - DNA, 25 bp, Homo sapien
tgtcggctttgcataaggcggcagc

SEQ ID NO: 4355219 - DNA, 25 bp, Homo sapien
ttaatctagacgaaacaccgccggc

SEQ ID NO: 4355220 - DNA, 25 bp, Homo sapien
ccctaggccgattggcgtcatcctg

SEQ ID NO: 4355221 - DNA, 25 bp, Homo sapien
tatgaattcgtgactggactcctac

SEQ ID NO: 4355222 - DNA, 25 bp, Homo sapien
tctctcaagggtttgcaagatgtgt

SEQ ID NO: 4355223 - DNA, 25 bp, Homo sapien
ttcgctggaggaagtcataactgac

SEQ ID NO: 4355224 - DNA, 25 bp, Homo sapien
actgaccagattggatatgaattcg

SEQ ID NO: 4355225 - DNA, 25 bp, Homo sapien
tcaccaggtggcacgtggtaggaat

SEQ ID NO: 4355226 - DNA, 25 bp, Homo sapien
aggaatctgggtcatgctgtgtaac

SEQ ID NO: 4355227 - DNA, 25 bp, Homo sapien
taacaagtctctcagaaccactgta

SEQ ID NO: 4355228 - DNA, 25 bp, Homo sapien
gagaccaaaactaacaagtctctca

SEQ ID NO: 4355229 - DNA, 25 bp, Homo sapien
aagagagtggggattcctgcagttc

SEQ ID NO: 4355230 - DNA, 25 bp, Homo sapien
ctggggctgtgtatctgctgaggtt

SEQ ID NO: 4355231 - DNA, 25 bp, Homo sapien
agttctgtccacgttgtctcctggg

SEQ ID NO: 4355232 - DNA, 25 bp, Homo sapien
cctagaccaaagagagtggggattc

SEQ ID NO: 4355233 - DNA, 25 bp, Homo sapien
taaggctattaaattgactgtgaag

SEQ ID NO: 4355234 - DNA, 25 bp, Homo sapien
taacctttaggcagaaattccatta

SEQ ID NO: 4355235 - DNA, 25 bp, Homo sapien
gaagaaagctgaaagtagagggtct

SEQ ID NO: 4355236 - DNA, 25 bp, Homo sapien
agaaagctgaaagtagagggtcttg

SEQ ID NO: 4355237 - DNA, 25 bp, Homo sapien
ctgggttgcgaattctctgggagtc

SEQ ID NO: 4355238 - DNA, 25 bp, Homo sapien
tgggttgcgaattctctgggagtca

SEQ ID NO: 4355239 - DNA, 25 bp, Homo sapien
gggttgcgaattctctgggagtcac

SEQ ID NO: 4355240 - DNA, 25 bp, Homo sapien
tgaaggttatcctgcagtcattctt

SEQ ID NO: 4355241 - DNA, 25 bp, Homo sapien
catgaaggttatcctgcagtcattc

SEQ ID NO: 4355242 - DNA, 25 bp, Homo sapien
gccatgaaggttatcctgcagtcat

SEQ ID NO: 4355243 - DNA, 25 bp, Homo sapien
atgccatgaaggttatcctgcagtc

SEQ ID NO: 4355244 - DNA, 25 bp, Homo sapien
gcctgtcccctggacccatcaaatc

SEQ ID NO: 4355245 - DNA, 25 bp, Homo sapien
ttaatgaccagtctgtttccaagag

SEQ ID NO: 4355246 - DNA, 25 bp, Homo sapien
aatgaccagtctgtttccaagaggc

SEQ ID NO: 4355247 - DNA, 25 bp, Homo sapien
taatgaccagtctgtttccaagagg

SEQ ID NO: 4355248 - DNA, 25 bp, Homo sapien
atgaccagtctgtttccaagaggct

SEQ ID NO: 4355249 - DNA, 25 bp, Homo sapien
gggtagaagaaccagctgtgcagtg

SEQ ID NO: 4355250 - DNA, 25 bp, Homo sapien
gtagaagaaccagctgtgcagtgtc

SEQ ID NO: 4355251 - DNA, 25 bp, Homo sapien
ggtagaagaaccagctgtgcagtgt

SEQ ID NO: 4355252 - DNA, 25 bp, Homo sapien
tatcagtaaaatggcgggtggactc

SEQ ID NO: 4355253 - DNA, 25 bp, Homo sapien
cttttaagcgcaaacaatgggtgga

SEQ ID NO: 4355254 - DNA, 25 bp, Homo sapien
gaccacgattttccgatgctggaca

SEQ ID NO: 4355255 - DNA, 25 bp, Homo sapien
acttgcagcggactacgtagccctg

SEQ ID NO: 4355256 - DNA, 25 bp, Homo sapien
caactccggcgccagtcaggttgtg

SEQ ID NO: 4355257 - DNA, 25 bp, Homo sapien
ctcgattttcccaggcgagggcacg

SEQ ID NO: 4355258 - DNA, 25 bp, Homo sapien
cggcggactgggaccttgatcctgc

SEQ ID NO: 4355259 - DNA, 25 bp, Homo sapien
tcagttcaggcacaaccctgagcgt

SEQ ID NO: 4355260 - DNA, 25 bp, Homo sapien
tcccgtttctttccgctgtcgcgtg

SEQ ID NO: 4355261 - DNA, 25 bp, Homo sapien
ttccgctgtcgcgtgtctgggccct

SEQ ID NO: 4355262 - DNA, 25 bp, Homo sapien
gcccagtagccaacccaagcaaggg

SEQ ID NO: 4355263 - DNA, 25 bp, Homo sapien
aggccaggggctgttgctttcctct

SEQ ID NO: 4355264 - DNA, 25 bp, Homo sapien
gctctgggcgctgtagaatttctac

SEQ ID NO: 4355265 - DNA, 25 bp, Homo sapien
tgagattttcgtggtacatcgacgg

SEQ ID NO: 4355266 - DNA, 25 bp, Homo sapien
ccggcaggaaagagactcgtgttgc

SEQ ID NO: 4355267 - DNA, 25 bp, Homo sapien
gaatttctacgccacgtgcacccat

SEQ ID NO: 4355268 - DNA, 25 bp, Homo sapien
tgcatctcgggccaggttttctttc

SEQ ID NO: 4355269 - DNA, 25 bp, Homo sapien
catctcgggccaggttttctttcac

SEQ ID NO: 4355270 - DNA, 25 bp, Homo sapien
ctgcatctcgggccaggttttcttt

SEQ ID NO: 4355271 - DNA, 25 bp, Homo sapien
gcatctcgggccaggttttctttca

SEQ ID NO: 4355272 - DNA, 25 bp, Homo sapien
gggtccgagtgttgatcgaggacct

SEQ ID NO: 4355273 - DNA, 25 bp, Homo sapien
ggagcgaggcggaaagctcgggtcc

SEQ ID NO: 4355274 - DNA, 25 bp, Homo sapien
tccgagtgttgatcgaggacctgga

SEQ ID NO: 4355275 - DNA, 25 bp, Homo sapien
gctcgggtccgagtgttgatcgagg

SEQ ID NO: 4355276 - DNA, 25 bp, Homo sapien
gcctgcgttgcccttctactctgca

SEQ ID NO: 4355277 - DNA, 25 bp, Homo sapien
tgggccgcggcctgcgttgcccttc

SEQ ID NO: 4355278 - DNA, 25 bp, Homo sapien
gcggcctgcgttgcccttctactct

SEQ ID NO: 4355279 - DNA, 25 bp, Homo sapien
ccgcggcctgcgttgcccttctact

SEQ ID NO: 4355280 - DNA, 25 bp, Homo sapien
gcatatgcataacagattttattac

SEQ ID NO: 4355281 - DNA, 25 bp, Homo sapien
caaatgtggcttgccttggaggtac

SEQ ID NO: 4355282 - DNA, 25 bp, Homo sapien
tttcctgaacataacccgaaagcaa

SEQ ID NO: 4355283 - DNA, 25 bp, Homo sapien
ttggaggtacagataagcatatgca

SEQ ID NO: 4355284 - DNA, 25 bp, Homo sapien
ttgctcttctgacagtgtattttca

SEQ ID NO: 4355285 - DNA, 25 bp, Homo sapien
taattatatgtgaactcaatccaca

SEQ ID NO: 4355286 - DNA, 25 bp, Homo sapien
ttttcaacttaacactatttcatag

SEQ ID NO: 4355287 - DNA, 25 bp, Homo sapien
ttttcaaatggcctgtctttaatct

SEQ ID NO: 4355288 - DNA, 25 bp, Homo sapien
tttactttaggaactcaatggagga

SEQ ID NO: 4355289 - DNA, 25 bp, Homo sapien
tatttaagaccccaaagtatcagca

SEQ ID NO: 4355290 - DNA, 25 bp, Homo sapien
tgtaaatgggagtgaagaccctgaa

SEQ ID NO: 4355291 - DNA, 25 bp, Homo sapien
tggtggacaacagctagatactcac

SEQ ID NO: 4355292 - DNA, 25 bp, Homo sapien
tatatccctgaaaatagcattgctg

SEQ ID NO: 4355293 - DNA, 25 bp, Homo sapien
cacatgttcctggtacaattaactc

SEQ ID NO: 4355294 - DNA, 25 bp, Homo sapien
gtgatgatcttaggatatatccctg

SEQ ID NO: 4355295 - DNA, 25 bp, Homo sapien
tactcagcaatatgacatgagggtt

SEQ ID NO: 4355296 - DNA, 25 bp, Homo sapien
ttatatataatgtccctgtcaatga

SEQ ID NO: 4355297 - DNA, 25 bp, Homo sapien
tcttgatgaggtgaattacagtatg

SEQ ID NO: 4355298 - DNA, 25 bp, Homo sapien
caatgacagaacttggtaaagtctc

SEQ ID NO: 4355299 - DNA, 25 bp, Homo sapien
aattaactcttgatgaggtgaatta

SEQ ID NO: 4355300 - DNA, 25 bp, Homo sapien
tactgcatagctgataagcccctga

SEQ ID NO: 4355301 - DNA, 25 bp, Homo sapien
gaatttaaagctgctgactcacagg

SEQ ID NO: 4355302 - DNA, 25 bp, Homo sapien
ttaacatgcatattggaacagccca

SEQ ID NO: 4355303 - DNA, 25 bp, Homo sapien
catatcctgggcagttggaagcctt

SEQ ID NO: 4355304 - DNA, 25 bp, Homo sapien
tgggactataggcgcattccaccat

SEQ ID NO: 4355305 - DNA, 25 bp, Homo sapien
ggactataggcgcattccaccatgc

SEQ ID NO: 4355306 - DNA, 25 bp, Homo sapien
ctgggactataggcgcattccacca

SEQ ID NO: 4355307 - DNA, 25 bp, Homo sapien
actataggcgcattccaccatgcct

SEQ ID NO: 4355308 - DNA, 25 bp, Homo sapien
tacctaagagtcaccatcagacagc

SEQ ID NO: 4355309 - DNA, 25 bp, Homo sapien
ttagcataaatacctaagagtcacc

SEQ ID NO: 4355310 - DNA, 25 bp, Homo sapien
tgtccacaaatcgtgtggaaaaacc

SEQ ID NO: 4355311 - DNA, 25 bp, Homo sapien
aatgtggaagagaatcacttctgac

SEQ ID NO: 4355312 - DNA, 25 bp, Homo sapien
atacaggatttaataagttgtctta

SEQ ID NO: 4355313 - DNA, 25 bp, Homo sapien
tacaggatttaataagttgtcttaa

SEQ ID NO: 4355314 - DNA, 25 bp, Homo sapien
gttgtcttaatatttctgataaata

SEQ ID NO: 4355315 - DNA, 25 bp, Homo sapien
aggatttaataagttgtcttaatat

SEQ ID NO: 4355316 - DNA, 25 bp, Homo sapien
tcgggatctgcttcaaatgacaaag

SEQ ID NO: 4355317 - DNA, 25 bp, Homo sapien
tgagggacctggaaccagcatcacc

SEQ ID NO: 4355318 - DNA, 25 bp, Homo sapien
gcagagatgctgatccctctcccag

SEQ ID NO: 4355319 - DNA, 25 bp, Homo sapien
ggcctttctgacaatcctgggatac

SEQ ID NO: 4355320 - DNA, 25 bp, Homo sapien
tgatactggtttagagcactcgtct

SEQ ID NO: 4355321 - DNA, 25 bp, Homo sapien
tggagccatgatactggtttagagc

SEQ ID NO: 4355322 - DNA, 25 bp, Homo sapien
aggaactggagccatgatactggtt

SEQ ID NO: 4355323 - DNA, 25 bp, Homo sapien
ccatgatactggtttagagcactcg

SEQ ID NO: 4355324 - DNA, 25 bp, Homo sapien
agtgagccaagatcatgtcattaca

SEQ ID NO: 4355325 - DNA, 25 bp, Homo sapien
gagccaagatcatgtcattacactc

SEQ ID NO: 4355326 - DNA, 25 bp, Homo sapien
ggagagtcgcttgaatccggaggtg

SEQ ID NO: 4355327 - DNA, 25 bp, Homo sapien
gaggttgtagtgagccaagatcatg

SEQ ID NO: 4355328 - DNA, 25 bp, Homo sapien
gttgcctgattctggttagtccctg

SEQ ID NO: 4355329 - DNA, 25 bp, Homo sapien
gattctggttagtccctgatccact

SEQ ID NO: 4355330 - DNA, 25 bp, Homo sapien
actcagcactaattagcaaggatga

SEQ ID NO: 4355331 - DNA, 25 bp, Homo sapien
agcactaattagcaaggatgattcc

SEQ ID NO: 4355332 - DNA, 25 bp, Homo sapien
caagcacgaggacacttttagaggg

SEQ ID NO: 4355333 - DNA, 25 bp, Homo sapien
ggtcctcttcataacactactgccg

SEQ ID NO: 4355334 - DNA, 25 bp, Homo sapien
tactgccgccaagaatgtaagctgc

SEQ ID NO: 4355335 - DNA, 25 bp, Homo sapien
tgcctcaaattaagcacatgtctta

SEQ ID NO: 4355336 - DNA, 25 bp, Homo sapien
cgctcctaagaaccttcggctggga

SEQ ID NO: 4355337 - DNA, 25 bp, Homo sapien
ccttcggctgggatgacattcttca

SEQ ID NO: 4355338 - DNA, 25 bp, Homo sapien
gctaagacagttctggtccggccca

SEQ ID NO: 4355339 - DNA, 25 bp, Homo sapien
ggcaggctcaaagtaaccaaccaga

SEQ ID NO: 4355340 - DNA, 25 bp, Homo sapien
gacctgcttcagattcgtacgcgag

SEQ ID NO: 4355341 - DNA, 25 bp, Homo sapien
gccagctgtggcgtaatccgaggcc

SEQ ID NO: 4355342 - DNA, 25 bp, Homo sapien
gcttcctcttctcgcgctgagttag

SEQ ID NO: 4355343 - DNA, 25 bp, Homo sapien
gctgctcggagggtccagacttctg

SEQ ID NO: 4355344 - DNA, 25 bp, Homo sapien
tgtgctaagtatactaaagaccaca

SEQ ID NO: 4355345 - DNA, 25 bp, Homo sapien
tagtttgtatcactaagttactgcc

SEQ ID NO: 4355346 - DNA, 25 bp, Homo sapien
gaagtgactctagggtatggagttt

SEQ ID NO: 4355347 - DNA, 25 bp, Homo sapien
taagaaaggttgagtctagattcct

SEQ ID NO: 4355348 - DNA, 25 bp, Homo sapien
tattgctgctacttccagatgctgg

SEQ ID NO: 4355349 - DNA, 25 bp, Homo sapien
ctgatttggagacttcatggacact

SEQ ID NO: 4355350 - DNA, 25 bp, Homo sapien
gtagaaccatttaggtctcttgctt

SEQ ID NO: 4355351 - DNA, 25 bp, Homo sapien
atggacactcctgccagtgcgctgc

SEQ ID NO: 4355352 - DNA, 25 bp, Homo sapien
agataaatctcttttggcgaggact

SEQ ID NO: 4355353 - DNA, 25 bp, Homo sapien
agaaagataaatctcttttggcgag

SEQ ID NO: 4355354 - DNA, 25 bp, Homo sapien
aagaaagataaatctcttttggcga

SEQ ID NO: 4355355 - DNA, 25 bp, Homo sapien
taaatctcttttggcgaggactgag

SEQ ID NO: 4355356 - DNA, 25 bp, Homo sapien
aagtcactaaagcattacatttgga

SEQ ID NO: 4355357 - DNA, 25 bp, Homo sapien
ttgatggcagccagagcagtctacc

SEQ ID NO: 4355358 - DNA, 25 bp, Homo sapien
gagcagtctaccaaagtcactaaag

SEQ ID NO: 4355359 - DNA, 25 bp, Homo sapien
ctgatttgatggcagccagagcagt

SEQ ID NO: 4355360 - DNA, 25 bp, Homo sapien
catagaggagtctttgtcattatcc

SEQ ID NO: 4355361 - DNA, 25 bp, Homo sapien
tcatagaggagtctttgtcattatc

SEQ ID NO: 4355362 - DNA, 25 bp, Homo sapien
gaggagtctttgtcattatcctcac

SEQ ID NO: 4355363 - DNA, 25 bp, Homo sapien
tagaggagtctttgtcattatcctc

SEQ ID NO: 4355364 - DNA, 25 bp, Homo sapien
tattagcactattgccatcactgcc

SEQ ID NO: 4355365 - DNA, 25 bp, Homo sapien
caagtctggtttggtgttattagca

SEQ ID NO: 4355366 - DNA, 25 bp, Homo sapien
tctgttgtaccgcagctttagatgc

SEQ ID NO: 4355367 - DNA, 25 bp, Homo sapien
tagagatacgaggagacttactcac

SEQ ID NO: 4355368 - DNA, 25 bp, Homo sapien
caaagagtaacctgacaagagattc

SEQ ID NO: 4355369 - DNA, 25 bp, Homo sapien
ttgatctccttgaacatttgcttgg

SEQ ID NO: 4355370 - DNA, 25 bp, Homo sapien
tagaagtctcttatgcacaacaagc

SEQ ID NO: 4355371 - DNA, 25 bp, Homo sapien
tctgctgattctgctagtggcctcc

SEQ ID NO: 4355372 - DNA, 25 bp, Homo sapien
cactcactggaaagtttgctggcaa

SEQ ID NO: 4355373 - DNA, 25 bp, Homo sapien
taaatgttccaaagctaaagtccgc

SEQ ID NO: 4355374 - DNA, 25 bp, Homo sapien
taacaagctgggacgtaacataagc

SEQ ID NO: 4355375 - DNA, 25 bp, Homo sapien
tattatggcaaagtcaccaggcatc

SEQ ID NO: 4355376 - DNA, 25 bp, Homo sapien
ttcatggtctcttttagatactgct

SEQ ID NO: 4355377 - DNA, 25 bp, Homo sapien
ggctttgcgtgagtatatttgtaca

SEQ ID NO: 4355378 - DNA, 25 bp, Homo sapien
caaaagggaatgtgtaattgcacaa

SEQ ID NO: 4355379 - DNA, 25 bp, Homo sapien
ggatattagaatttgatgacactca

SEQ ID NO: 4355380 - DNA, 25 bp, Homo sapien
cttcagtcatacagcaagacacatg

SEQ ID NO: 4355381 - DNA, 25 bp, Homo sapien
tcttggagagtgttaatcttttctg

SEQ ID NO: 4355382 - DNA, 25 bp, Homo sapien
taccaagtatattgtgtctgccata

SEQ ID NO: 4355383 - DNA, 25 bp, Homo sapien
taaaggcaccctgttctgttatggt

SEQ ID NO: 4355384 - DNA, 25 bp, Homo sapien
gctttctgtaatcctacaaactggg

SEQ ID NO: 4355385 - DNA, 25 bp, Homo sapien
taaagggctaaatactatcacaagg

SEQ ID NO: 4355386 - DNA, 25 bp, Homo sapien
tagtgatgctatgtttccttacgaa

SEQ ID NO: 4355387 - DNA, 25 bp, Homo sapien
cacatagtaggccttcagtgaaggt

SEQ ID NO: 4355388 - DNA, 25 bp, Homo sapien
tgcagagtcctttaggacagagcct

SEQ ID NO: 4355389 - DNA, 25 bp, Homo sapien
gtgcttcggagcccgccctttctga

SEQ ID NO: 4355390 - DNA, 25 bp, Homo sapien
tgtggtccgggtattgctcataggc

SEQ ID NO: 4355391 - DNA, 25 bp, Homo sapien
tacattttctctggaactctcctag

SEQ ID NO: 4355392 - DNA, 25 bp, Homo sapien
gtccttatgagcaggttcagcttca

SEQ ID NO: 4355393 - DNA, 25 bp, Homo sapien
tgactgcccaaagtccttatgagca

SEQ ID NO: 4355394 - DNA, 25 bp, Homo sapien
tatgagcaggttcagcttcataggc

SEQ ID NO: 4355395 - DNA, 25 bp, Homo sapien
caaagtccttatgagcaggttcagc

SEQ ID NO: 4355396 - DNA, 25 bp, Homo sapien
gattagttagatacagagtatagac

SEQ ID NO: 4355397 - DNA, 25 bp, Homo sapien
agattagttagatacagagtataga

SEQ ID NO: 4355398 - DNA, 25 bp, Homo sapien
agttagatacagagtatagacacaa

SEQ ID NO: 4355399 - DNA, 25 bp, Homo sapien
ttagttagatacagagtatagacac

SEQ ID NO: 4355400 - DNA, 25 bp, Homo sapien
gatggtcccaaattagtaattcttc

SEQ ID NO: 4355401 - DNA, 25 bp, Homo sapien
aaccgtccaagtatgaccttgcatg

SEQ ID NO: 4355402 - DNA, 25 bp, Homo sapien
gtaggtagcaagcataaagatggtc

SEQ ID NO: 4355403 - DNA, 25 bp, Homo sapien
ttctgctgtaatgtaggtagcaagc

SEQ ID NO: 4355404 - DNA, 25 bp, Homo sapien
gataagtccctgcatagccacatgg

SEQ ID NO: 4355405 - DNA, 25 bp, Homo sapien
tgccagggtccagtgaataaaatcc

SEQ ID NO: 4355406 - DNA, 25 bp, Homo sapien
tagtaattacggcaggaccacagct

SEQ ID NO: 4355407 - DNA, 25 bp, Homo sapien
tgtaaatcgggactcctctgggcaa

SEQ ID NO: 4355408 - DNA, 25 bp, Homo sapien
gggaagacccattacatccacgggc

SEQ ID NO: 4355409 - DNA, 25 bp, Homo sapien
tttcaatctggaggacttgatccca

SEQ ID NO: 4355410 - DNA, 25 bp, Homo sapien
tagagtaactttccgggcctgcaga

SEQ ID NO: 4355411 - DNA, 25 bp, Homo sapien
tctgttcccactcgcaatgaaactc

SEQ ID NO: 4355412 - DNA, 25 bp, Homo sapien
tatctgtcccgagctcatggtttgg

SEQ ID NO: 4355413 - DNA, 25 bp, Homo sapien
gctctcgctcttttctgggaccttg

SEQ ID NO: 4355414 - DNA, 25 bp, Homo sapien
ggtttggggcttcacgctgtaccca

SEQ ID NO: 4355415 - DNA, 25 bp, Homo sapien
tcgcactctcctgtctgttgatctt

SEQ ID NO: 4355416 - DNA, 25 bp, Homo sapien
gatcaggcctagattatggagggcc

SEQ ID NO: 4355417 - DNA, 25 bp, Homo sapien
gagccaccgcctgtgttttaaatga

SEQ ID NO: 4355418 - DNA, 25 bp, Homo sapien
ggttgacaaaggcaaggctcaggtt

SEQ ID NO: 4355419 - DNA, 25 bp, Homo sapien
cctctgttgcaactttgggttgaca

SEQ ID NO: 4355420 - DNA, 25 bp, Homo sapien
ctagcttgtgctcaatgtgtgcagc

SEQ ID NO: 4355421 - DNA, 25 bp, Homo sapien
tcaatgtgtgcagccaatgaaggaa

SEQ ID NO: 4355422 - DNA, 25 bp, Homo sapien
agccaatgaaggaaacggaggagtc

SEQ ID NO: 4355423 - DNA, 25 bp, Homo sapien
tgtgctcaatgtgtgcagccaatga

SEQ ID NO: 4355424 - DNA, 25 bp, Homo sapien
gaagggagagtctggtctatgtgat

SEQ ID NO: 4355425 - DNA, 25 bp, Homo sapien
gtctggtctatgtgataccagcatt

SEQ ID NO: 4355426 - DNA, 25 bp, Homo sapien
gtggtgtagccataggagagagcag

SEQ ID NO: 4355427 - DNA, 25 bp, Homo sapien
tggtgtagccataggagagagcagg

SEQ ID NO: 4355428 - DNA, 25 bp, Homo sapien
gagggcttagggaggcctctggcat

SEQ ID NO: 4355429 - DNA, 25 bp, Homo sapien
ctggggtgagaaggagggcttaggg

SEQ ID NO: 4355430 - DNA, 25 bp, Homo sapien
agaaggagggcttagggaggcctct

SEQ ID NO: 4355431 - DNA, 25 bp, Homo sapien
ggtgagaaggagggcttagggaggc

SEQ ID NO: 4355432 - DNA, 25 bp, Homo sapien
ggctccatgactggggccctgctga

SEQ ID NO: 4355433 - DNA, 25 bp, Homo sapien
ggatttcccaagcactggaacctgg

SEQ ID NO: 4355434 - DNA, 25 bp, Homo sapien
ttatttcaggatttcccaagcactg

SEQ ID NO: 4355435 - DNA, 25 bp, Homo sapien
caagcactggaacctggctccatga

SEQ ID NO: 4355436 - DNA, 25 bp, Homo sapien
tcgaattctccagatagagtttggg

SEQ ID NO: 4355437 - DNA, 25 bp, Homo sapien
actcaggtgcagaagtgtcagcgac

SEQ ID NO: 4355438 - DNA, 25 bp, Homo sapien
ctctccctgagactgagatatgagg

SEQ ID NO: 4355439 - DNA, 25 bp, Homo sapien
tgcagaagtgtcagcgacaaacttc

SEQ ID NO: 4355440 - DNA, 25 bp, Homo sapien
caaagagctggtgaaaacaaaaatt

SEQ ID NO: 4355441 - DNA, 25 bp, Homo sapien
tcaccaaagagctggtgaaaacaaa

SEQ ID NO: 4355442 - DNA, 25 bp, Homo sapien
agagctggtgaaaacaaaaatttgt

SEQ ID NO: 4355443 - DNA, 25 bp, Homo sapien
ccaaagagctggtgaaaacaaaaat

SEQ ID NO: 4355444 - DNA, 25 bp, Homo sapien
tggttggtcaactgcaggctacggt

SEQ ID NO: 4355445 - DNA, 25 bp, Homo sapien
gagacgccactaggtgacaatgtag

SEQ ID NO: 4355446 - DNA, 25 bp, Homo sapien
taacaaatgtccgtcgtgcagggca

SEQ ID NO: 4355447 - DNA, 25 bp, Homo sapien
cattgtttggcgtctctgaacgcgg

SEQ ID NO: 4355448 - DNA, 25 bp, Homo sapien
catccctgtcaaagtctggtcctgg

SEQ ID NO: 4355449 - DNA, 25 bp, Homo sapien
tactaccagggtcatgagaatcgcc

SEQ ID NO: 4355450 - DNA, 25 bp, Homo sapien
tgcatgagtcccgacgagcttctac

SEQ ID NO: 4355451 - DNA, 25 bp, Homo sapien
ctctgggcaccaagctgtgatcact

SEQ ID NO: 4355452 - DNA, 25 bp, Homo sapien
ctgtccaacccttttccaggttctg

SEQ ID NO: 4355453 - DNA, 25 bp, Homo sapien
caatctataatgaatggtgcactta

SEQ ID NO: 4355454 - DNA, 25 bp, Homo sapien
ttgccctgccccgtgttctttgccg

SEQ ID NO: 4355455 - DNA, 25 bp, Homo sapien
ggtcttgatgttgggtcccttgccc

SEQ ID NO: 4355456 - DNA, 25 bp, Homo sapien
tctttgccgctacaatctataatga

SEQ ID NO: 4355457 - DNA, 25 bp, Homo sapien
gtctggggcaaaacgcaggcctgat

SEQ ID NO: 4355458 - DNA, 25 bp, Homo sapien
tgtgataccactcaatgtgcctcca

SEQ ID NO: 4355459 - DNA, 25 bp, Homo sapien
aaacgcaggcctgatggcactgtct

SEQ ID NO: 4355460 - DNA, 25 bp, Homo sapien
gtgtgataccactcaatgtgcctcc

SEQ ID NO: 4355461 - DNA, 25 bp, Homo sapien
ggcagtctggctgtactaatgtcac

SEQ ID NO: 4355462 - DNA, 25 bp, Homo sapien
ccacttagcacaacagaagctaaca

SEQ ID NO: 4355463 - DNA, 25 bp, Homo sapien
taaattggcacctgatgctcggcag

SEQ ID NO: 4355464 - DNA, 25 bp, Homo sapien
ttctcacctacataagtgacataac

SEQ ID NO: 4355465 - DNA, 25 bp, Homo sapien
tggttagcaaacagaacatccaaga

SEQ ID NO: 4355466 - DNA, 25 bp, Homo sapien
cagaacatccaagaaaagcctgtaa

SEQ ID NO: 4355467 - DNA, 25 bp, Homo sapien
caggctatggttagcaaacagaaca

SEQ ID NO: 4355468 - DNA, 25 bp, Homo sapien
caaacagaacatccaagaaaagcct

SEQ ID NO: 4355469 - DNA, 25 bp, Homo sapien
ccatctggtcacagcttcctcttct

SEQ ID NO: 4355470 - DNA, 25 bp, Homo sapien
catggtcagggatgcgatgcggttc

SEQ ID NO: 4355471 - DNA, 25 bp, Homo sapien
gatgcgatgcggttcacctcctgcc

SEQ ID NO: 4355472 - DNA, 25 bp, Homo sapien
catagggatgtgacatggtcaggga

SEQ ID NO: 4355473 - DNA, 25 bp, Homo sapien
gtgctgtgaccatagattggctgtc

SEQ ID NO: 4355474 - DNA, 25 bp, Homo sapien
gctgtgaccatagattggctgtcca

SEQ ID NO: 4355475 - DNA, 25 bp, Homo sapien
cagtgctgtgaccatagattggctg

SEQ ID NO: 4355476 - DNA, 25 bp, Homo sapien
agcagtgctgtgaccatagattggc

SEQ ID NO: 4355477 - DNA, 25 bp, Homo sapien
tcttctggggaaccgctctgaagtc

SEQ ID NO: 4355478 - DNA, 25 bp, Homo sapien
aggccacttgggcattgggttgagt

SEQ ID NO: 4355479 - DNA, 25 bp, Homo sapien
tgagtgtgaccctgaatgaaggtga

SEQ ID NO: 4355480 - DNA, 25 bp, Homo sapien
tgaatgaaggtgatgccctgaatct

SEQ ID NO: 4355481 - DNA, 25 bp, Homo sapien
ttggcatgcagattgtgtctgatgg

SEQ ID NO: 4355482 - DNA, 25 bp, Homo sapien
cctggccggttgaagccttttcttg

SEQ ID NO: 4355483 - DNA, 25 bp, Homo sapien
ggtctgtgccagtaattggcatgca

SEQ ID NO: 4355484 - DNA, 25 bp, Homo sapien
agctggaaatagagagcgagaaaga

SEQ ID NO: 4355485 - DNA, 25 bp, Homo sapien
gctgcacaacctatgggcctggaga

SEQ ID NO: 4355486 - DNA, 25 bp, Homo sapien
ctgctgcacaacctatgggcctgga

SEQ ID NO: 4355487 - DNA, 25 bp, Homo sapien
aggctgctgcacaacctatgggcct

SEQ ID NO: 4355488 - DNA, 25 bp, Homo sapien
ctgtgcaccccgtcctccagacaga

SEQ ID NO: 4355489 - DNA, 25 bp, Homo sapien
gggttttctttaccgctcatcagcc

SEQ ID NO: 4355490 - DNA, 25 bp, Homo sapien
tctttaccgctcatcagccgctttg

SEQ ID NO: 4355491 - DNA, 25 bp, Homo sapien
taccgctcatcagccgctttgactg

SEQ ID NO: 4355492 - DNA, 25 bp, Homo sapien
tgctggagagaactggttctgcagg

SEQ ID NO: 4355493 - DNA, 25 bp, Homo sapien
aggtcagtttgtatgtataggatgg

SEQ ID NO: 4355494 - DNA, 25 bp, Homo sapien
cagtttgtatgtataggatggcaaa

SEQ ID NO: 4355495 - DNA, 25 bp, Homo sapien
ctagaggtcagtttgtatgtatagg

SEQ ID NO: 4355496 - DNA, 25 bp, Homo sapien
tttgtatgtataggatggcaaagtc

SEQ ID NO: 4355497 - DNA, 25 bp, Homo sapien
catccatcctagtgacctgctgaga

SEQ ID NO: 4355498 - DNA, 25 bp, Homo sapien
tcttgtcttgaccacagggaccctc

SEQ ID NO: 4355499 - DNA, 25 bp, Homo sapien
tgtctggtcacagcaaaagtccctg

SEQ ID NO: 4355500 - DNA, 25 bp, Homo sapien
tatcttctgttcgtcctaagccaca

SEQ ID NO: 4355501 - DNA, 25 bp, Homo sapien
tcccacttctgcattaatctctgac

SEQ ID NO: 4355502 - DNA, 25 bp, Homo sapien
gagggtgcagattcccacttctgca

SEQ ID NO: 4355503 - DNA, 25 bp, Homo sapien
gcagattcccacttctgcattaatc

SEQ ID NO: 4355504 - DNA, 25 bp, Homo sapien
ctgagggtgcagattcccacttctg

SEQ ID NO: 4355505 - DNA, 25 bp, Homo sapien
tctaccatgtgactcagttcagaaa

SEQ ID NO: 4355506 - DNA, 25 bp, Homo sapien
taccatgtgactcagttcagaaaat

SEQ ID NO: 4355507 - DNA, 25 bp, Homo sapien
ttctaccatgtgactcagttcagaa

SEQ ID NO: 4355508 - DNA, 25 bp, Homo sapien
ccatgtgactcagttcagaaaatgc

SEQ ID NO: 4355509 - DNA, 25 bp, Homo sapien
gagctggacaccttcagatgctgag

SEQ ID NO: 4355510 - DNA, 25 bp, Homo sapien
gaaggtatggagcatcagaataagc

SEQ ID NO: 4355511 - DNA, 25 bp, Homo sapien
cacagtgaggtcaagctgagagact

SEQ ID NO: 4355512 - DNA, 25 bp, Homo sapien
agtacacagtccttgagggctctgg

SEQ ID NO: 4355513 - DNA, 25 bp, Homo sapien
cgcttcaatggggttgctgttgagt

SEQ ID NO: 4355514 - DNA, 25 bp, Homo sapien
gctcctccgcttcaatggggttgct

SEQ ID NO: 4355515 - DNA, 25 bp, Homo sapien
caatggggttgctgttgagttctag

SEQ ID NO: 4355516 - DNA, 25 bp, Homo sapien
ctccgcttcaatggggttgctgttg

SEQ ID NO: 4355517 - DNA, 25 bp, Homo sapien
tagtgacaatcatactggcttttga

SEQ ID NO: 4355518 - DNA, 25 bp, Homo sapien
cttatttttgagcagtatgatgtca

SEQ ID NO: 4355519 - DNA, 25 bp, Homo sapien
ttgatatcccaatattcttgtaggg

SEQ ID NO: 4355520 - DNA, 25 bp, Homo sapien
tcttccttcccacttagtgacaatc

SEQ ID NO: 4355521 - DNA, 25 bp, Homo sapien
ttatcctatctgcacaatgacatta

SEQ ID NO: 4355522 - DNA, 25 bp, Homo sapien
tatcctatctgcacaatgacattac

SEQ ID NO: 4355523 - DNA, 25 bp, Homo sapien
ggtgcgatgatggaggtagcaccat

SEQ ID NO: 4355524 - DNA, 25 bp, Homo sapien
gttggtgcgatgatggaggtagcac

SEQ ID NO: 4355525 - DNA, 25 bp, Homo sapien
tgcgatgatggaggtagcaccatga

SEQ ID NO: 4355526 - DNA, 25 bp, Homo sapien
aaggaggactctggcatagcctcct

SEQ ID NO: 4355527 - DNA, 25 bp, Homo sapien
ctcttcacctcctaactgagactta

SEQ ID NO: 4355528 - DNA, 25 bp, Homo sapien
cttcacatacatccttacagttctc

SEQ ID NO: 4355529 - DNA, 25 bp, Homo sapien
tacatccttacagttctcttcacct

SEQ ID NO: 4355530 - DNA, 25 bp, Homo sapien
cctaactgagacttatttgagttac

SEQ ID NO: 4355531 - DNA, 25 bp, Homo sapien
aagcattcattatttccagccacca

SEQ ID NO: 4355532 - DNA, 25 bp, Homo sapien
cattcattatttccagccaccagga

SEQ ID NO: 4355533 - DNA, 25 bp, Homo sapien
tgcatttgaaagcattcattatttc

SEQ ID NO: 4355534 - DNA, 25 bp, Homo sapien
gcatttgaaagcattcattatttcc

SEQ ID NO: 4355535 - DNA, 25 bp, Homo sapien
ttgggtaccacttgatgctgccctt

SEQ ID NO: 4355536 - DNA, 25 bp, Homo sapien
gtcttgggtaccacttgatgctgcc

SEQ ID NO: 4355537 - DNA, 25 bp, Homo sapien
gagggtcttgggtaccacttgatgc

SEQ ID NO: 4355538 - DNA, 25 bp, Homo sapien
gggtcttgggtaccacttgatgctg

SEQ ID NO: 4355539 - DNA, 25 bp, Homo sapien
cctcaaaatccagttcatgtctgaa

SEQ ID NO: 4355540 - DNA, 25 bp, Homo sapien
gctgtggctttataacctcaaaatc

SEQ ID NO: 4355541 - DNA, 25 bp, Homo sapien
tccggttgaccgctgtggctttata

SEQ ID NO: 4355542 - DNA, 25 bp, Homo sapien
tcaatttccggttgaccgctgtggc

SEQ ID NO: 4355543 - DNA, 25 bp, Homo sapien
gttttctgagcactctgtgagggta

SEQ ID NO: 4355544 - DNA, 25 bp, Homo sapien
catgattctggtcagcagggttttc

SEQ ID NO: 4355545 - DNA, 25 bp, Homo sapien
tgagggtaggagtatcctgcagagt

SEQ ID NO: 4355546 - DNA, 25 bp, Homo sapien
gtggcctcccagagaggacaggtac

SEQ ID NO: 4355547 - DNA, 25 bp, Homo sapien
tgaaggctcccatcagttctgccaa

SEQ ID NO: 4355548 - DNA, 25 bp, Homo sapien
ctgccttcaggatgcagaagtagat

SEQ ID NO: 4355549 - DNA, 25 bp, Homo sapien
caggatgcagaagtagatcagacat

SEQ ID NO: 4355550 - DNA, 25 bp, Homo sapien
gaaggctcccatcagttctgccaac

SEQ ID NO: 4355551 - DNA, 25 bp, Homo sapien
ctcaatgagcttgcttgcaatagct

SEQ ID NO: 4355552 - DNA, 25 bp, Homo sapien
gcttgcaatagctgccttactgcat

SEQ ID NO: 4355553 - DNA, 25 bp, Homo sapien
tgagcttgcttgcaatagctgcctt

SEQ ID NO: 4355554 - DNA, 25 bp, Homo sapien
ttttccctgatattgctgtctactt

SEQ ID NO: 4355555 - DNA, 25 bp, Homo sapien
gaagtagcagtcttgctaatattcc

SEQ ID NO: 4355556 - DNA, 25 bp, Homo sapien
cttgctaatattccccagggccaca

SEQ ID NO: 4355557 - DNA, 25 bp, Homo sapien
agaagtagattgtcacaagctgcag

SEQ ID NO: 4355558 - DNA, 25 bp, Homo sapien
catgggagaagtagattgtcacaag

SEQ ID NO: 4355559 - DNA, 25 bp, Homo sapien
tgaccgctccaaagtcatgacattt

SEQ ID NO: 4355560 - DNA, 25 bp, Homo sapien
tctttggagattgctacaaggtgga

SEQ ID NO: 4355561 - DNA, 25 bp, Homo sapien
aatagagccacacggtcttctttgg

SEQ ID NO: 4355562 - DNA, 25 bp, Homo sapien
gcaaattgtggacttaatagagcca

SEQ ID NO: 4355563 - DNA, 25 bp, Homo sapien
tggagagtttcagcccaatgaattt

SEQ ID NO: 4355564 - DNA, 25 bp, Homo sapien
cagagccaggaaggataggtcttct

SEQ ID NO: 4355565 - DNA, 25 bp, Homo sapien
gaaggataggtcttctagggccatt

SEQ ID NO: 4355566 - DNA, 25 bp, Homo sapien
gaaatgcaagggttcagctgcactg

SEQ ID NO: 4355567 - DNA, 25 bp, Homo sapien
gaagatagctactttcattgaagaa

SEQ ID NO: 4355568 - DNA, 25 bp, Homo sapien
cccatgttagtagtggatgtttcct

SEQ ID NO: 4355569 - DNA, 25 bp, Homo sapien
cattgaagaatagtatgagttgtag

SEQ ID NO: 4355570 - DNA, 25 bp, Homo sapien
gaaagatgtctttaggagttgagaa

SEQ ID NO: 4355571 - DNA, 25 bp, Homo sapien
atgcttgctgcttctagttcaattc

SEQ ID NO: 4355572 - DNA, 25 bp, Homo sapien
tgcttgctgcttctagttcaattct

SEQ ID NO: 4355573 - DNA, 25 bp, Homo sapien
gcttgctgcttctagttcaattctc

SEQ ID NO: 4355574 - DNA, 25 bp, Homo sapien
cttgctgcttctagttcaattctca

SEQ ID NO: 4355575 - DNA, 25 bp, Homo sapien
tccaacaatgcaaggagtacatagc

SEQ ID NO: 4355576 - DNA, 25 bp, Homo sapien
ccacagtggtaacccggtcagaaga

SEQ ID NO: 4355577 - DNA, 25 bp, Homo sapien
agtacatagctttttccaaacacca

SEQ ID NO: 4355578 - DNA, 25 bp, Homo sapien
cttccacagtggtaacccggtcaga

SEQ ID NO: 4355579 - DNA, 25 bp, Homo sapien
aaagagcttcaactttcaagacaga

SEQ ID NO: 4355580 - DNA, 25 bp, Homo sapien
ccttgaagctctcttgaaagagctt

SEQ ID NO: 4355581 - DNA, 25 bp, Homo sapien
taggaggaggaccttttcagtcaac

SEQ ID NO: 4355582 - DNA, 25 bp, Homo sapien
gaggaggaccttttcagtcaacttc

SEQ ID NO: 4355583 - DNA, 25 bp, Homo sapien
taaggcacgggaagcagtatagcaa

SEQ ID NO: 4355584 - DNA, 25 bp, Homo sapien
taggtcaaggttgtaagtctgctca

SEQ ID NO: 4355585 - DNA, 25 bp, Homo sapien
gaatctggcatccaggtaaggcacg

SEQ ID NO: 4355586 - DNA, 25 bp, Homo sapien
tgagtcttggctcccaatacagaga

SEQ ID NO: 4355587 - DNA, 25 bp, Homo sapien
ctctgtgccgtaggcagagcacacc

SEQ ID NO: 4355588 - DNA, 25 bp, Homo sapien
tctctctgtgccgtaggcagagcac

SEQ ID NO: 4355589 - DNA, 25 bp, Homo sapien
tctctgtgccgtaggcagagcacac

SEQ ID NO: 4355590 - DNA, 25 bp, Homo sapien
gttctctctgtgccgtaggcagagc

SEQ ID NO: 4355591 - DNA, 25 bp, Homo sapien
ggtagagtcgttggctccttctttg

SEQ ID NO: 4355592 - DNA, 25 bp, Homo sapien
gggaaaaatctccagaatgggtcat

SEQ ID NO: 4355593 - DNA, 25 bp, Homo sapien
attttgttctagaggtagagtcgtt

SEQ ID NO: 4355594 - DNA, 25 bp, Homo sapien
agagaaatgcctttagaagttgcag

SEQ ID NO: 4355595 - DNA, 25 bp, Homo sapien
gcagttacacctaacatgtgaaaaa

SEQ ID NO: 4355596 - DNA, 25 bp, Homo sapien
aggcagttacacctaacatgtgaaa

SEQ ID NO: 4355597 - DNA, 25 bp, Homo sapien
ggcagttacacctaacatgtgaaaa

SEQ ID NO: 4355598 - DNA, 25 bp, Homo sapien
atccaagcaaggagcctacccggtg

SEQ ID NO: 4355599 - DNA, 25 bp, Homo sapien
caggcatccaagcaaggagcctacc

SEQ ID NO: 4355600 - DNA, 25 bp, Homo sapien
ctccaggcatccaagcaaggagcct

SEQ ID NO: 4355601 - DNA, 25 bp, Homo sapien
agcaaggagcctacccggtgttgag

SEQ ID NO: 4355602 - DNA, 25 bp, Homo sapien
caaatgcttattgcacctttgtatg

SEQ ID NO: 4355603 - DNA, 25 bp, Homo sapien
gcttggtgttggattatagagcaaa

SEQ ID NO: 4355604 - DNA, 25 bp, Homo sapien
tgctctgcttggtgttggattatag

SEQ ID NO: 4355605 - DNA, 25 bp, Homo sapien
gcttattgcacctttgtatgctgag

SEQ ID NO: 4355606 - DNA, 25 bp, Homo sapien
tctaaggtttcccagctcagacttc

SEQ ID NO: 4355607 - DNA, 25 bp, Homo sapien
ctaaggtttcccagctcagacttct

SEQ ID NO: 4355608 - DNA, 25 bp, Homo sapien
agtctcagctctagctccacttgct

SEQ ID NO: 4355609 - DNA, 25 bp, Homo sapien
tcagctctagctccacttgctgcag

SEQ ID NO: 4355610 - DNA, 25 bp, Homo sapien
ggggtccagtctcagctctagctcc

SEQ ID NO: 4355611 - DNA, 25 bp, Homo sapien
cacttgctgcagtaaggaacctatc

SEQ ID NO: 4355612 - DNA, 25 bp, Homo sapien
gggctgccccaaacatggaatcctg

SEQ ID NO: 4355613 - DNA, 25 bp, Homo sapien
cccattgacatcacttggacaagct

SEQ ID NO: 4355614 - DNA, 25 bp, Homo sapien
gacaagcttgctttgctagttttgg

SEQ ID NO: 4355615 - DNA, 25 bp, Homo sapien
tggaatatgtaactcccattgacat

SEQ ID NO: 4355616 - DNA, 25 bp, Homo sapien
gcttcactgacatatcaattctcca

SEQ ID NO: 4355617 - DNA, 25 bp, Homo sapien
ttctccaggttctaggagatagtga

SEQ ID NO: 4355618 - DNA, 25 bp, Homo sapien
ccaggttctaggagatagtgacacc

SEQ ID NO: 4355619 - DNA, 25 bp, Homo sapien
ctccaggttctaggagatagtgaca

SEQ ID NO: 4355620 - DNA, 25 bp, Homo sapien
cagaagttcctctggtaaccctgtg

SEQ ID NO: 4355621 - DNA, 25 bp, Homo sapien
gctgtctgcatcagaagttcctctg

SEQ ID NO: 4355622 - DNA, 25 bp, Homo sapien
agaagttcctctggtaaccctgtga

SEQ ID NO: 4355623 - DNA, 25 bp, Homo sapien
gtcttaattatttgtgagagcggga

SEQ ID NO: 4355624 - DNA, 25 bp, Homo sapien
cagaagccgctgatcatttctgaat

SEQ ID NO: 4355625 - DNA, 25 bp, Homo sapien
gccgctgatcatttctgaattagca

SEQ ID NO: 4355626 - DNA, 25 bp, Homo sapien
gagcgggataacaggagtacccagc

SEQ ID NO: 4355627 - DNA, 25 bp, Homo sapien
tgggtcccttcgcattggcccaagg

SEQ ID NO: 4355628 - DNA, 25 bp, Homo sapien
cccaaggggctatcaggattccaga

SEQ ID NO: 4355629 - DNA, 25 bp, Homo sapien
gaatactcgcttctggtcccattcc

SEQ ID NO: 4355630 - DNA, 25 bp, Homo sapien
ccccaagttgaatactcgcttctgg

SEQ ID NO: 4355631 - DNA, 25 bp, Homo sapien
gtagcaggtggaccaggaagcacat

SEQ ID NO: 4355632 - DNA, 25 bp, Homo sapien
gctggggtagcaggtggaccaggaa

SEQ ID NO: 4355633 - DNA, 25 bp, Homo sapien
cagcagaataaaagtgggaggcccg

SEQ ID NO: 4355634 - DNA, 25 bp, Homo sapien
gggtagcaggtggaccaggaagcac

SEQ ID NO: 4355635 - DNA, 25 bp, Homo sapien
ggttggtgacataaagctcattcca

SEQ ID NO: 4355636 - DNA, 25 bp, Homo sapien
ttggtgacataaagctcattccagc

SEQ ID NO: 4355637 - DNA, 25 bp, Homo sapien
ggctcttgtagttggttttgggtgc

SEQ ID NO: 4355638 - DNA, 25 bp, Homo sapien
ctcttgtagttggttttgggtgctt

SEQ ID NO: 4355639 - DNA, 25 bp, Homo sapien
cttgaggtggtgtttgaagtccttc

SEQ ID NO: 4355640 - DNA, 25 bp, Homo sapien
gaggtggtgtttgaagtccttcaga

SEQ ID NO: 4355641 - DNA, 25 bp, Homo sapien
tgctagaggtcagttccacttgagg

SEQ ID NO: 4355642 - DNA, 25 bp, Homo sapien
cacagttcagtgctagaggtcagtt

SEQ ID NO: 4355643 - DNA, 25 bp, Homo sapien
aataaagaggaataccaggtggaag

SEQ ID NO: 4355644 - DNA, 25 bp, Homo sapien
agaataaagaggaataccaggtgga

SEQ ID NO: 4355645 - DNA, 25 bp, Homo sapien
taagaataaagaggaataccaggtg

SEQ ID NO: 4355646 - DNA, 25 bp, Homo sapien
ctaagaataaagaggaataccaggt

SEQ ID NO: 4355647 - DNA, 25 bp, Homo sapien
tttgcagtggtctgaggcgtctcct

SEQ ID NO: 4355648 - DNA, 25 bp, Homo sapien
taatccgatacacaattttactgcc

SEQ ID NO: 4355649 - DNA, 25 bp, Homo sapien
aaacgacgcagttatggagcgcaca

SEQ ID NO: 4355650 - DNA, 25 bp, Homo sapien
gatcagcatcacttctaatccgata

SEQ ID NO: 4355651 - DNA, 25 bp, Homo sapien
tacactggaacggattacatttgga

SEQ ID NO: 4355652 - DNA, 25 bp, Homo sapien
gtcttgcatcttgcgcagtttaggg

SEQ ID NO: 4355653 - DNA, 25 bp, Homo sapien
gttttgacatgtagctaaaattctg

SEQ ID NO: 4355654 - DNA, 25 bp, Homo sapien
cctcctgtgagtattgggtgatatt

SEQ ID NO: 4355655 - DNA, 25 bp, Homo sapien
agtgtatccttataagtccatccat

SEQ ID NO: 4355656 - DNA, 25 bp, Homo sapien
cagtgccttgcgtggctctgtgttt

SEQ ID NO: 4355657 - DNA, 25 bp, Homo sapien
agggcgcccaccagctgtttgtaag

SEQ ID NO: 4355658 - DNA, 25 bp, Homo sapien
tcctctttggttctagcactggaaa

SEQ ID NO: 4355659 - DNA, 25 bp, Homo sapien
tggctctgtgtttggcatattttgg

SEQ ID NO: 4355660 - DNA, 25 bp, Homo sapien
tgccaattgatgaggaaggatgatt

SEQ ID NO: 4355661 - DNA, 25 bp, Homo sapien
tttgccaattgatgaggaaggatga

SEQ ID NO: 4355662 - DNA, 25 bp, Homo sapien
ttgccaattgatgaggaaggatgat

SEQ ID NO: 4355663 - DNA, 25 bp, Homo sapien
gaaactgtgatatagttggtccaag

SEQ ID NO: 4355664 - DNA, 25 bp, Homo sapien
aactgtgatatagttggtccaaggg

SEQ ID NO: 4355665 - DNA, 25 bp, Homo sapien
cagaaactgtgatatagttggtcca

SEQ ID NO: 4355666 - DNA, 25 bp, Homo sapien
tgtgatatagttggtccaagggtaa

SEQ ID NO: 4355667 - DNA, 25 bp, Homo sapien
tgaagaggagcacacactttattct

SEQ ID NO: 4355668 - DNA, 25 bp, Homo sapien
tctgtccctaggaatactcgtaggc

SEQ ID NO: 4355669 - DNA, 25 bp, Homo sapien
ctaggaatactcgtaggctctttgc

SEQ ID NO: 4355670 - DNA, 25 bp, Homo sapien
aatactcgtaggctctttgctagct

SEQ ID NO: 4355671 - DNA, 25 bp, Homo sapien
caagaaagtgtacctcagtaagacc

SEQ ID NO: 4355672 - DNA, 25 bp, Homo sapien
tgcctatgggcagacttgaaattct

SEQ ID NO: 4355673 - DNA, 25 bp, Homo sapien
cattctcaagggttcctcaaaattc

SEQ ID NO: 4355674 - DNA, 25 bp, Homo sapien
gtttcttggatactcttccagtagg

SEQ ID NO: 4355675 - DNA, 25 bp, Homo sapien
tccttgctttctcacagtgccacca

SEQ ID NO: 4355676 - DNA, 25 bp, Homo sapien
ccttgctttctcacagtgccaccac

SEQ ID NO: 4355677 - DNA, 25 bp, Homo sapien
ttaagctccttgctttctcacagtg

SEQ ID NO: 4355678 - DNA, 25 bp, Homo sapien
agctccttgctttctcacagtgcca

SEQ ID NO: 4355679 - DNA, 25 bp, Homo sapien
tcctatcctcttgttgtctgaccat

SEQ ID NO: 4355680 - DNA, 25 bp, Homo sapien
ttcctatcctcttgttgtctgacca

SEQ ID NO: 4355681 - DNA, 25 bp, Homo sapien
ctttcctatcctcttgttgtctgac

SEQ ID NO: 4355682 - DNA, 25 bp, Homo sapien
tttcctatcctcttgttgtctgacc

SEQ ID NO: 4355683 - DNA, 25 bp, Homo sapien
gacactgcgcaaaatatccttgact

SEQ ID NO: 4355684 - DNA, 25 bp, Homo sapien
ttggtgggtcaaattcacgtggatc

SEQ ID NO: 4355685 - DNA, 25 bp, Homo sapien
cacgtggatcaagtagacactgcgc

SEQ ID NO: 4355686 - DNA, 25 bp, Homo sapien
cctgaagacctgagaatgatggcag

SEQ ID NO: 4355687 - DNA, 25 bp, Homo sapien
tgaaatagccttgctttaccaacga

SEQ ID NO: 4355688 - DNA, 25 bp, Homo sapien
cattctgagattactggcctcatct

SEQ ID NO: 4355689 - DNA, 25 bp, Homo sapien
tgaatgctgccaagactataggtgc

SEQ ID NO: 4355690 - DNA, 25 bp, Homo sapien
aaatgcataatcaggtgctactggc

SEQ ID NO: 4355691 - DNA, 25 bp, Homo sapien
ctctcccatgcagatatcccccagt

SEQ ID NO: 4355692 - DNA, 25 bp, Homo sapien
ccatgcagatatcccccagttggct

SEQ ID NO: 4355693 - DNA, 25 bp, Homo sapien
gcagatatcccccagttggcttcca

SEQ ID NO: 4355694 - DNA, 25 bp, Homo sapien
ccccagttggcttccagttgcttta

SEQ ID NO: 4355695 - DNA, 25 bp, Homo sapien
ggaagaaatgtggtccctcaataca

SEQ ID NO: 4355696 - DNA, 25 bp, Homo sapien
tacaagccgtgtcctcaatagaggt

SEQ ID NO: 4355697 - DNA, 25 bp, Homo sapien
gactgtgctccacagggaagaaatg

SEQ ID NO: 4355698 - DNA, 25 bp, Homo sapien
taaattatggcaggactgtgctcca

SEQ ID NO: 4355699 - DNA, 25 bp, Homo sapien
tcctgactgacatagagtctccttc

SEQ ID NO: 4355700 - DNA, 25 bp, Homo sapien
actgacatagagtctccttctcctt

SEQ ID NO: 4355701 - DNA, 25 bp, Homo sapien
cctgactgacatagagtctccttct

SEQ ID NO: 4355702 - DNA, 25 bp, Homo sapien
tgactgacatagagtctccttctcc

SEQ ID NO: 4355703 - DNA, 25 bp, Homo sapien
tgcaggcccaacaaagtcagtaagg

SEQ ID NO: 4355704 - DNA, 25 bp, Homo sapien
tggctcccaggttctcaatgatgat

SEQ ID NO: 4355705 - DNA, 25 bp, Homo sapien
cctgtcctctcttattctgtccaaa

SEQ ID NO: 4355706 - DNA, 25 bp, Homo sapien
tctttgagcaatttgagccatggga

SEQ ID NO: 4355707 - DNA, 25 bp, Homo sapien
ggtctgtagattcatgtgagcagca

SEQ ID NO: 4355708 - DNA, 25 bp, Homo sapien
ctgctgcctgggaagttatccaacg

SEQ ID NO: 4355709 - DNA, 25 bp, Homo sapien
gatgaggtctgtagattcatgtgag

SEQ ID NO: 4355710 - DNA, 25 bp, Homo sapien
cctgggaagttatccaacgctccat

SEQ ID NO: 4355711 - DNA, 25 bp, Homo sapien
caacatccgggctgggcacggaaag

SEQ ID NO: 4355712 - DNA, 25 bp, Homo sapien
agtgccctgccaattgccagtccct

SEQ ID NO: 4355713 - DNA, 25 bp, Homo sapien
tccggtctatgaagggcaggcaaca

SEQ ID NO: 4355714 - DNA, 25 bp, Homo sapien
ccccaaagcagcagttccggtctat

SEQ ID NO: 4355715 - DNA, 25 bp, Homo sapien
aacaggaggtgacagccggtgtata

SEQ ID NO: 4355716 - DNA, 25 bp, Homo sapien
gaggtgacagccggtgtatagcagc

SEQ ID NO: 4355717 - DNA, 25 bp, Homo sapien
acaggaggtgacagccggtgtatag

SEQ ID NO: 4355718 - DNA, 25 bp, Homo sapien
aggtgacagccggtgtatagcagct

SEQ ID NO: 4355719 - DNA, 25 bp, Homo sapien
gtggcggcagttgggccatatttca

SEQ ID NO: 4355720 - DNA, 25 bp, Homo sapien
tgaaaatccataagtggtgcacaga

SEQ ID NO: 4355721 - DNA, 25 bp, Homo sapien
ttcactcggcggctggtgattccag

SEQ ID NO: 4355722 - DNA, 25 bp, Homo sapien
aatacaacagtctttaggagctgtt

SEQ ID NO: 4355723 - DNA, 25 bp, Homo sapien
gtgcagtaccagacatagactttaa

SEQ ID NO: 4355724 - DNA, 25 bp, Homo sapien
tttatagaacttgtgttacagtgcc

SEQ ID NO: 4355725 - DNA, 25 bp, Homo sapien
cctggctctgtagaatatgtggtgc

SEQ ID NO: 4355726 - DNA, 25 bp, Homo sapien
tgagactatcataatcctgtaatga

SEQ ID NO: 4355727 - DNA, 25 bp, Homo sapien
ctctgagagattccttcttcagtga

SEQ ID NO: 4355728 - DNA, 25 bp, Homo sapien
tcatgctctctgagagattccttct

SEQ ID NO: 4355729 - DNA, 25 bp, Homo sapien
tgctctctgagagattccttcttca

SEQ ID NO: 4355730 - DNA, 25 bp, Homo sapien
gctctctgagagattccttcttcag

SEQ ID NO: 4355731 - DNA, 25 bp, Homo sapien
gctggcagaatagttttcacagtcg

SEQ ID NO: 4355732 - DNA, 25 bp, Homo sapien
gagctggcagaatagttttcacagt

SEQ ID NO: 4355733 - DNA, 25 bp, Homo sapien
ctgagctggcagaatagttttcaca

SEQ ID NO: 4355734 - DNA, 25 bp, Homo sapien
ctggcagaatagttttcacagtcgc

SEQ ID NO: 4355735 - DNA, 25 bp, Homo sapien
ataaacttcaattgaccagcaagtg

SEQ ID NO: 4355736 - DNA, 25 bp, Homo sapien
aaacttcaattgaccagcaagtgag

SEQ ID NO: 4355737 - DNA, 25 bp, Homo sapien
gcaagtgagggaggcttggtcccca

SEQ ID NO: 4355738 - DNA, 25 bp, Homo sapien
gccactataaactgcggaaccctta

SEQ ID NO: 4355739 - DNA, 25 bp, Homo sapien
tggacacagactgtgatcccatggt

SEQ ID NO: 4355740 - DNA, 25 bp, Homo sapien
tctttgatgcgttgagatggatcaa

SEQ ID NO: 4355741 - DNA, 25 bp, Homo sapien
gaagtttgttgtgagtctttgatgc

SEQ ID NO: 4355742 - DNA, 25 bp, Homo sapien
tttgctgtggagtctgctgtcagaa

SEQ ID NO: 4355743 - DNA, 25 bp, Homo sapien
cagtagttacctttagaaccatcaa

SEQ ID NO: 4355744 - DNA, 25 bp, Homo sapien
aagggcattattccgccttgtacac

SEQ ID NO: 4355745 - DNA, 25 bp, Homo sapien
caactggtagaaccagaaaggcatc

SEQ ID NO: 4355746 - DNA, 25 bp, Homo sapien
gtcacaggtttcaaagattaggact

SEQ ID NO: 4355747 - DNA, 25 bp, Homo sapien
aatgacaaagcacccacccattctg

SEQ ID NO: 4355748 - DNA, 25 bp, Homo sapien
aatgtaattcagtccccgagctggg

SEQ ID NO: 4355749 - DNA, 25 bp, Homo sapien
ccaatatgatacagaccttcggaga

SEQ ID NO: 4355750 - DNA, 25 bp, Homo sapien
ccttcggagataatgacagccactt

SEQ ID NO: 4355751 - DNA, 25 bp, Homo sapien
actcttgagttgtttgggggtcaca

SEQ ID NO: 4355752 - DNA, 25 bp, Homo sapien
ttgttcatgcgtgtctaccttcgtg

SEQ ID NO: 4355753 - DNA, 25 bp, Homo sapien
tcaaagaagtggcatatcaggatac

SEQ ID NO: 4355754 - DNA, 25 bp, Homo sapien
gaggtcttcccaattgctggttttc

SEQ ID NO: 4355755 - DNA, 25 bp, Homo sapien
acccaaccccgcttagctcctgaga

SEQ ID NO: 4355756 - DNA, 25 bp, Homo sapien
tgagatcagaaaagatcgggtgtgt

SEQ ID NO: 4355757 - DNA, 25 bp, Homo sapien
cgggtgtgttcagggtagcatggcc

SEQ ID NO: 4355758 - DNA, 25 bp, Homo sapien
gtgttcagggtagcatggccatgga

SEQ ID NO: 4355759 - DNA, 25 bp, Homo sapien
ttaacctatgtctactctctcctct

SEQ ID NO: 4355760 - DNA, 25 bp, Homo sapien
ccttcagtagaccatgtgtctccat

SEQ ID NO: 4355761 - DNA, 25 bp, Homo sapien
ttttccctcatttaacctatgtcta

SEQ ID NO: 4355762 - DNA, 25 bp, Homo sapien
tcagtagaccatgtgtctccatttc

SEQ ID NO: 4355763 - DNA, 25 bp, Homo sapien
gttgtaaaatctggcttccttgtcc

SEQ ID NO: 4355764 - DNA, 25 bp, Homo sapien
tgtacccccacacttgactttctgg

SEQ ID NO: 4355765 - DNA, 25 bp, Homo sapien
ccacacttgactttctggttgtaaa

SEQ ID NO: 4355766 - DNA, 25 bp, Homo sapien
actttctggttgtaaaatctggctt

SEQ ID NO: 4355767 - DNA, 25 bp, Homo sapien
aatatcttggagagtaaggagggca

SEQ ID NO: 4355768 - DNA, 25 bp, Homo sapien
tcaaattaacattgtcaggcaagaa

SEQ ID NO: 4355769 - DNA, 25 bp, Homo sapien
tgtagcatgcaccaataatctatcg

SEQ ID NO: 4355770 - DNA, 25 bp, Homo sapien
agtcttcccaaaagggatcttccag

SEQ ID NO: 4355771 - DNA, 25 bp, Homo sapien
tcttgctccaacataacatcctgct

SEQ ID NO: 4355772 - DNA, 25 bp, Homo sapien
tccaagcaccacactaaagagcttc

SEQ ID NO: 4355773 - DNA, 25 bp, Homo sapien
ttgtgtaattccctgtattcaccac

SEQ ID NO: 4355774 - DNA, 25 bp, Homo sapien
ctgtcttgctccaacataacatcct

SEQ ID NO: 4355775 - DNA, 25 bp, Homo sapien
ggtgagacaaatgctggcttccaac

SEQ ID NO: 4355776 - DNA, 25 bp, Homo sapien
ggcttccaacttctaggctttgtcg

SEQ ID NO: 4355777 - DNA, 25 bp, Homo sapien
tgtcgaagtaccatgggcactgtat

SEQ ID NO: 4355778 - DNA, 25 bp, Homo sapien
caacttctgatttcgtggagccagg

SEQ ID NO: 4355779 - DNA, 25 bp, Homo sapien
cagagctgaatgaggcacgaggacg

SEQ ID NO: 4355780 - DNA, 25 bp, Homo sapien
gaaaacttcactcagcagagctgaa

SEQ ID NO: 4355781 - DNA, 25 bp, Homo sapien
gctgtgcttgtgaaaacttcactca

SEQ ID NO: 4355782 - DNA, 25 bp, Homo sapien
ctagagaaggactatcaaggctgtg

SEQ ID NO: 4355783 - DNA, 25 bp, Homo sapien
cttaatgacttgagactatagtcca

SEQ ID NO: 4355784 - DNA, 25 bp, Homo sapien
cctccatcagacactctactatagg

SEQ ID NO: 4355785 - DNA, 25 bp, Homo sapien
tagtccactatccatcctccatcag

SEQ ID NO: 4355786 - DNA, 25 bp, Homo sapien
atcagacactctactataggcagca

SEQ ID NO: 4355787 - DNA, 25 bp, Homo sapien
agggctagtccacaccttcgccaag

SEQ ID NO: 4355788 - DNA, 25 bp, Homo sapien
ctccactactggacgtgtttccagg

SEQ ID NO: 4355789 - DNA, 25 bp, Homo sapien
gacgtgtttccagggctagtccaca

SEQ ID NO: 4355790 - DNA, 25 bp, Homo sapien
tactggacgtgtttccagggctagt

SEQ ID NO: 4355791 - DNA, 25 bp, Homo sapien
tactttgtgagtgccttcttggctg

SEQ ID NO: 4355792 - DNA, 25 bp, Homo sapien
ccttcttggctgctgcccagatcct

SEQ ID NO: 4355793 - DNA, 25 bp, Homo sapien
ctactttgtgagtgccttcttggct

SEQ ID NO: 4355794 - DNA, 25 bp, Homo sapien
tcttggctgctgcccagatcctcac

SEQ ID NO: 4355795 - DNA, 25 bp, Homo sapien
actgtctctggcctttgtgttgccc

SEQ ID NO: 4355796 - DNA, 25 bp, Homo sapien
ggtcactgtctctggcctttgtgtt

SEQ ID NO: 4355797 - DNA, 25 bp, Homo sapien
tgtctctggcctttgtgttgccctg

SEQ ID NO: 4355798 - DNA, 25 bp, Homo sapien
ctctggcctttgtgttgccctgttc

SEQ ID NO: 4355799 - DNA, 25 bp, Homo sapien
ctgtgggtagaggagaggcagccca

SEQ ID NO: 4355800 - DNA, 25 bp, Homo sapien
ggagaggcagcccactgaaagatct

SEQ ID NO: 4355801 - DNA, 25 bp, Homo sapien
tgtgggtagaggagaggcagcccac

SEQ ID NO: 4355802 - DNA, 25 bp, Homo sapien
gaggcagcccactgaaagatctcac

SEQ ID NO: 4355803 - DNA, 25 bp, Homo sapien
ccccgattgcatctctttaggagaa

SEQ ID NO: 4355804 - DNA, 25 bp, Homo sapien
ttactaacatgaagtcgaagctgca

SEQ ID NO: 4355805 - DNA, 25 bp, Homo sapien
agactgtaggaaatgcaggatttgc

SEQ ID NO: 4355806 - DNA, 25 bp, Homo sapien
aatcaatccagtgtctgtaatcccc

SEQ ID NO: 4355807 - DNA, 25 bp, Homo sapien
tccactccaactaaacaagttggat

SEQ ID NO: 4355808 - DNA, 25 bp, Homo sapien
tgcacaacaaaagtgagatctccag

SEQ ID NO: 4355809 - DNA, 25 bp, Homo sapien
caagttggatacactatgaagctca

SEQ ID NO: 4355810 - DNA, 25 bp, Homo sapien
gatctccagccacatgctcattaga

SEQ ID NO: 4355811 - DNA, 25 bp, Homo sapien
tgttttcaatgcgactttgcaggct

SEQ ID NO: 4355812 - DNA, 25 bp, Homo sapien
gtggtttgttttcaatgcgactttg

SEQ ID NO: 4355813 - DNA, 25 bp, Homo sapien
tcaatgcgactttgcaggctctgca

SEQ ID NO: 4355814 - DNA, 25 bp, Homo sapien
tttgttttcaatgcgactttgcagg

SEQ ID NO: 4355815 - DNA, 25 bp, Homo sapien
cttgatcattgggtgcagtagccat

SEQ ID NO: 4355816 - DNA, 25 bp, Homo sapien
catttcaatagtccagtcaaacaac

SEQ ID NO: 4355817 - DNA, 25 bp, Homo sapien
ttagtccctgaagagtctcagcttc

SEQ ID NO: 4355818 - DNA, 25 bp, Homo sapien
caaaaatactcttcggccatttcaa

SEQ ID NO: 4355819 - DNA, 25 bp, Homo sapien
ccaagttgaagtcatgttcccctgc

SEQ ID NO: 4355820 - DNA, 25 bp, Homo sapien
gttgcctgccttgacagatgaccaa

SEQ ID NO: 4355821 - DNA, 25 bp, Homo sapien
cagtgtgagccaggagttggattcc

SEQ ID NO: 4355822 - DNA, 25 bp, Homo sapien
ctggatattgggttcttatggaaac

SEQ ID NO: 4355823 - DNA, 25 bp, Homo sapien
tgctggtggatttcccatcaccctc

SEQ ID NO: 4355824 - DNA, 25 bp, Homo sapien
cacttgtttctctccctcagaggat

SEQ ID NO: 4355825 - DNA, 25 bp, Homo sapien
ctgagatgctggtggatttcccatc

SEQ ID NO: 4355826 - DNA, 25 bp, Homo sapien
acttgtttctctccctcagaggatg

SEQ ID NO: 4355827 - DNA, 25 bp, Homo sapien
ctggtgggaagctattgaaggtttt

SEQ ID NO: 4355828 - DNA, 25 bp, Homo sapien
tggtgggaagctattgaaggtttta

SEQ ID NO: 4355829 - DNA, 25 bp, Homo sapien
taggaagatcaatctggtgccagcc

SEQ ID NO: 4355830 - DNA, 25 bp, Homo sapien
aggaagatcaatctggtgccagcct

SEQ ID NO: 4355831 - DNA, 25 bp, Homo sapien
aatgtgtcatttgtaggcagtgtat

SEQ ID NO: 4355832 - DNA, 25 bp, Homo sapien
tccttgtcttgaggtctattttgcc

SEQ ID NO: 4355833 - DNA, 25 bp, Homo sapien
gcattaaccctgttgtcattttgaa

SEQ ID NO: 4355834 - DNA, 25 bp, Homo sapien
gcaccacagtatttgttagctagct

SEQ ID NO: 4355835 - DNA, 25 bp, Homo sapien
tatactgcggtcattcagtgtaatt

SEQ ID NO: 4355836 - DNA, 25 bp, Homo sapien
gatccaagggactctcttctacacc

SEQ ID NO: 4355837 - DNA, 25 bp, Homo sapien
cctttactttcatccacatagttat

SEQ ID NO: 4355838 - DNA, 25 bp, Homo sapien
catgacaaacatgaagatccaaggg

SEQ ID NO: 4355839 - DNA, 25 bp, Homo sapien
aattgtttttggcatatacagcttt

SEQ ID NO: 4355840 - DNA, 25 bp, Homo sapien
taattgtttttggcatatacagctt

SEQ ID NO: 4355841 - DNA, 25 bp, Homo sapien
catggtaagtactcagagaagtttc

SEQ ID NO: 4355842 - DNA, 25 bp, Homo sapien
tggtacatggtaagtactcagagaa

SEQ ID NO: 4355843 - DNA, 25 bp, Homo sapien
cttcactttgacctgtttcagcccc

SEQ ID NO: 4355844 - DNA, 25 bp, Homo sapien
atcttcactttgacctgtttcagcc

SEQ ID NO: 4355845 - DNA, 25 bp, Homo sapien
tcttcactttgacctgtttcagccc

SEQ ID NO: 4355846 - DNA, 25 bp, Homo sapien
ttcactttgacctgtttcagcccca

SEQ ID NO: 4355847 - DNA, 25 bp, Homo sapien
ggacttttcattgtagacattggga

SEQ ID NO: 4355848 - DNA, 25 bp, Homo sapien
gaagttacaggaaagatatggagcc

SEQ ID NO: 4355849 - DNA, 25 bp, Homo sapien
cgaacgaagaatattaggattgaag

SEQ ID NO: 4355850 - DNA, 25 bp, Homo sapien
aatctgtaggagcagggaatcgaac

SEQ ID NO: 4355851 - DNA, 25 bp, Homo sapien
ttaagacagaagtatccttcagccc

SEQ ID NO: 4355852 - DNA, 25 bp, Homo sapien
ttgtttcttggtgtaagcggtgccc

SEQ ID NO: 4355853 - DNA, 25 bp, Homo sapien
tacccctggttttgctcggcttctc

SEQ ID NO: 4355854 - DNA, 25 bp, Homo sapien
gcgtgcttgggatgttaagacagaa

SEQ ID NO: 4355855 - DNA, 25 bp, Homo sapien
gtggccacagtgagcgggcaggact

SEQ ID NO: 4355856 - DNA, 25 bp, Homo sapien
tggacgcaggtgactcttctggcct

SEQ ID NO: 4355857 - DNA, 25 bp, Homo sapien
tctttggaaagccattggagctcga

SEQ ID NO: 4355858 - DNA, 25 bp, Homo sapien
ccaggccctctggacgcaggtgact

SEQ ID NO: 4355859 - DNA, 25 bp, Homo sapien
cctccgggcaactggaaaggattgt

SEQ ID NO: 4355860 - DNA, 25 bp, Homo sapien
aggaattgcaggaaggcgctcgcct

SEQ ID NO: 4355861 - DNA, 25 bp, Homo sapien
gctcctcattgcgaattggactgcg

SEQ ID NO: 4355862 - DNA, 25 bp, Homo sapien
gaaaggacgtaggaccttgtgccag

SEQ ID NO: 4355863 - DNA, 25 bp, Homo sapien
tggctctgcgggttatttcgtcctc

SEQ ID NO: 4355864 - DNA, 25 bp, Homo sapien
ttgacgcaagaaacgagtctcgcag

SEQ ID NO: 4355865 - DNA, 25 bp, Homo sapien
tcgtcctctttacccgaagaatgct

SEQ ID NO: 4355866 - DNA, 25 bp, Homo sapien
tcaaaggaaacaggcgcgcaggttg

SEQ ID NO: 4355867 - DNA, 25 bp, Homo sapien
tctctgcattgcctgacgcgaggcc

SEQ ID NO: 4355868 - DNA, 25 bp, Homo sapien
ccaggagcaggtcagacaacattgc

SEQ ID NO: 4355869 - DNA, 25 bp, Homo sapien
caggtcagacaacattgctcagcca

SEQ ID NO: 4355870 - DNA, 25 bp, Homo sapien
caactagggttcgaaatctctgcat

SEQ ID NO: 4355871 - DNA, 25 bp, Homo sapien
ccaccagtcgcgctctctgtttctt

SEQ ID NO: 4355872 - DNA, 25 bp, Homo sapien
gttggcaggtgcgccccctcggctt

SEQ ID NO: 4355873 - DNA, 25 bp, Homo sapien
ctgctgctgattggcgcccaggttg

SEQ ID NO: 4355874 - DNA, 25 bp, Homo sapien
tctgtttcttgcaccggcgtgttgg

SEQ ID NO: 4355875 - DNA, 25 bp, Homo sapien
tcagagtgcgtgcagtcccggccca

SEQ ID NO: 4355876 - DNA, 25 bp, Homo sapien
ttatgtcagagtgcgtgcagtcccg

SEQ ID NO: 4355877 - DNA, 25 bp, Homo sapien
atgtcagagtgcgtgcagtcccggc

SEQ ID NO: 4355878 - DNA, 25 bp, Homo sapien
tgtcagagtgcgtgcagtcccggcc

SEQ ID NO: 4355879 - DNA, 25 bp, Homo sapien
gccaggtgcagcgctaggcgcggca

SEQ ID NO: 4355880 - DNA, 25 bp, Homo sapien
ccagcctccccgcattctcagccag

SEQ ID NO: 4355881 - DNA, 25 bp, Homo sapien
ccaggtgcagcgctaggcgcggcag

SEQ ID NO: 4355882 - DNA, 25 bp, Homo sapien
gcctccccgcattctcagccaggtg

SEQ ID NO: 4355883 - DNA, 25 bp, Homo sapien
ctggaaacgcaagaggagagaaggg

SEQ ID NO: 4355884 - DNA, 25 bp, Homo sapien
cggagactccgatacttgggtccca

SEQ ID NO: 4355885 - DNA, 25 bp, Homo sapien
ctggccacttaatcccggagactcc

SEQ ID NO: 4355886 - DNA, 25 bp, Homo sapien
tcccggagactccgatacttgggtc

SEQ ID NO: 4355887 - DNA, 25 bp, Homo sapien
agactccgatacttgggtcccagcc

SEQ ID NO: 4355888 - DNA, 25 bp, Homo sapien
tgtttccaaaggagtcggtggctcg

SEQ ID NO: 4355889 - DNA, 25 bp, Homo sapien
tgagagatttgtacgcttgcctccg

SEQ ID NO: 4355890 - DNA, 25 bp, Homo sapien
gaaacccgcggattagcatattgtc

SEQ ID NO: 4355891 - DNA, 25 bp, Homo sapien
tggctcgaagtgcacgggaaacgtt

SEQ ID NO: 4355892 - DNA, 25 bp, Homo sapien
gctgaatagcaaagtgatccatgtt

SEQ ID NO: 4355893 - DNA, 25 bp, Homo sapien
taacacaattaacatacacgggcgc

SEQ ID NO: 4355894 - DNA, 25 bp, Homo sapien
tcattaagagctcttttgagaccga

SEQ ID NO: 4355895 - DNA, 25 bp, Homo sapien
cagttgtccatctggctaagctgaa

SEQ ID NO: 4355896 - DNA, 25 bp, Homo sapien
aaaatcctgctcgtcacgccgctga

SEQ ID NO: 4355897 - DNA, 25 bp, Homo sapien
gctgcggagcgtccgccgaggtgcg

SEQ ID NO: 4355898 - DNA, 25 bp, Homo sapien
gggccgattactgactttgaagtca

SEQ ID NO: 4355899 - DNA, 25 bp, Homo sapien
agctttgcctccgtcgccccgaggg

SEQ ID NO: 4355900 - DNA, 25 bp, Homo sapien
ttaggcacgcgtccggtagccaggg

SEQ ID NO: 4355901 - DNA, 25 bp, Homo sapien
cctgggcctccttcgagcggggttg

SEQ ID NO: 4355902 - DNA, 25 bp, Homo sapien
ccccagacttctctcgcttagcaac

SEQ ID NO: 4355903 - DNA, 25 bp, Homo sapien
ttctctcgcttagcaacctgggcct

SEQ ID NO: 4355904 - DNA, 25 bp, Homo sapien
atacatgccgcgttcagcgccgtcg

SEQ ID NO: 4355905 - DNA, 25 bp, Homo sapien
tgaggctcccattgcttccccggga

SEQ ID NO: 4355906 - DNA, 25 bp, Homo sapien
cagcgccgtcgctcctctgctgggt

SEQ ID NO: 4355907 - DNA, 25 bp, Homo sapien
cccgccaaaagtgacccaaatacat

SEQ ID NO: 4355908 - DNA, 25 bp, Homo sapien
agagacctgaacagcatgctgctgg

SEQ ID NO: 4355909 - DNA, 25 bp, Homo sapien
agcagagacctgaacagcatgctgc

SEQ ID NO: 4355910 - DNA, 25 bp, Homo sapien
gacagcagagacctgaacagcatgc

SEQ ID NO: 4355911 - DNA, 25 bp, Homo sapien
cagagacctgaacagcatgctgctg

SEQ ID NO: 4355912 - DNA, 25 bp, Homo sapien
tcgctcgaatccctgcgctaggcat

SEQ ID NO: 4355913 - DNA, 25 bp, Homo sapien
gcagagccgtcatcgcaggctcctg

SEQ ID NO: 4355914 - DNA, 25 bp, Homo sapien
caaggtgttctcttcggaagcggga

SEQ ID NO: 4355915 - DNA, 25 bp, Homo sapien
tgattctgcatccttttcgctcgaa

SEQ ID NO: 4355916 - DNA, 25 bp, Homo sapien
aggaggccctgctagcgctagcgcg

SEQ ID NO: 4355917 - DNA, 25 bp, Homo sapien
gtgggtgagaggtgcggctgtcgag

SEQ ID NO: 4355918 - DNA, 25 bp, Homo sapien
ggctgtcgaggcaaacgcagagcac

SEQ ID NO: 4355919 - DNA, 25 bp, Homo sapien
cgcggcggtgataaccgagggaggt

SEQ ID NO: 4355920 - DNA, 25 bp, Homo sapien
gaacgccgcttaagcagctccttgc

SEQ ID NO: 4355921 - DNA, 25 bp, Homo sapien
agagccgggagtcccgaacgccgct

SEQ ID NO: 4355922 - DNA, 25 bp, Homo sapien
ttcccgcagcccgtccacatccctg

SEQ ID NO: 4355923 - DNA, 25 bp, Homo sapien
tgcgggatttctggacgccccgccc

SEQ ID NO: 4355924 - DNA, 25 bp, Homo sapien
gatttgcacactcgaggtgtaacag

SEQ ID NO: 4355925 - DNA, 25 bp, Homo sapien
cacactcgaggtgtaacagcattac

SEQ ID NO: 4355926 - DNA, 25 bp, Homo sapien
ccgtggcgcggcgagtcaatgggat

SEQ ID NO: 4355927 - DNA, 25 bp, Homo sapien
agtcaatgggatttgcacactcgag

SEQ ID NO: 4355928 - DNA, 25 bp, Homo sapien
catttccatttcacgtccagattgt

SEQ ID NO: 4355929 - DNA, 25 bp, Homo sapien
tccatttcacgtccagattgtttac

SEQ ID NO: 4355930 - DNA, 25 bp, Homo sapien
tttcacgtccagattgtttacttat

SEQ ID NO: 4355931 - DNA, 25 bp, Homo sapien
catttcacgtccagattgtttactt

SEQ ID NO: 4355932 - DNA, 25 bp, Homo sapien
gaaatgaaacaatcctccgctggtt

SEQ ID NO: 4355933 - DNA, 25 bp, Homo sapien
tgctccgctgcccaaggtgcaattc

SEQ ID NO: 4355934 - DNA, 25 bp, Homo sapien
tgaggatcctccattgagcggcata

SEQ ID NO: 4355935 - DNA, 25 bp, Homo sapien
tatctgccgctgtaaattatgagga

SEQ ID NO: 4355936 - DNA, 25 bp, Homo sapien
gaagtcagatgggaggtcaatttgc

SEQ ID NO: 4355937 - DNA, 25 bp, Homo sapien
tcagaccagtcttgttaccacatgc

SEQ ID NO: 4355938 - DNA, 25 bp, Homo sapien
tgctgtgggaggttcaactgacacc

SEQ ID NO: 4355939 - DNA, 25 bp, Homo sapien
gcattcatggccaacctatttggta

SEQ ID NO: 4355940 - DNA, 25 bp, Homo sapien
gctttatcatcccaagtcttactgg

SEQ ID NO: 4355941 - DNA, 25 bp, Homo sapien
tatcatcccaagtcttactggctgc

SEQ ID NO: 4355942 - DNA, 25 bp, Homo sapien
cccaagtcttactggctgcttctga

SEQ ID NO: 4355943 - DNA, 25 bp, Homo sapien
cttcagctttatcatcccaagtctt

SEQ ID NO: 4355944 - DNA, 25 bp, Homo sapien
cagatgagcccccagccccttccag

SEQ ID NO: 4355945 - DNA, 25 bp, Homo sapien
agatgagcccccagccccttccagt

SEQ ID NO: 4355946 - DNA, 25 bp, Homo sapien
agcccccagccccttccagtcccat

SEQ ID NO: 4355947 - DNA, 25 bp, Homo sapien
ccagccccttccagtcccatttcat

SEQ ID NO: 4355948 - DNA, 25 bp, Homo sapien
gacacgttcgctcatccaaatcact

SEQ ID NO: 4355949 - DNA, 25 bp, Homo sapien
tgtgacaccatcatgcaggatccct

SEQ ID NO: 4355950 - DNA, 25 bp, Homo sapien
tcactgaaacttgggaaattggttc

SEQ ID NO: 4355951 - DNA, 25 bp, Homo sapien
tgtgatgcagcttggacattccgtc

SEQ ID NO: 4355952 - DNA, 25 bp, Homo sapien
aagcgttctgccagtcccaggagga

SEQ ID NO: 4355953 - DNA, 25 bp, Homo sapien
gaggaaggaacaatgccgaccacct

SEQ ID NO: 4355954 - DNA, 25 bp, Homo sapien
tcaagaaacgccagcgctgaatgct

SEQ ID NO: 4355955 - DNA, 25 bp, Homo sapien
ccttagtgtaaggacggaccagctt

SEQ ID NO: 4355956 - DNA, 25 bp, Homo sapien
agaaatcactgtccactagacctcc

SEQ ID NO: 4355957 - DNA, 25 bp, Homo sapien
tttctgctgataagtgaggcgctgt

SEQ ID NO: 4355958 - DNA, 25 bp, Homo sapien
tgctgccttgcagcgtgcaattttc

SEQ ID NO: 4355959 - DNA, 25 bp, Homo sapien
gtgaggcgctgttatcagtccacat

SEQ ID NO: 4355960 - DNA, 25 bp, Homo sapien
tggcatcatcagacccaatggaaga

SEQ ID NO: 4355961 - DNA, 25 bp, Homo sapien
gccagccgccttgtgttcaggtttt

SEQ ID NO: 4355962 - DNA, 25 bp, Homo sapien
gaagactgagttccaacggtggcca

SEQ ID NO: 4355963 - DNA, 25 bp, Homo sapien
aaaagcccaacttccctggcatcat

SEQ ID NO: 4355964 - DNA, 25 bp, Homo sapien
tctgtgggctccacaatttccaaaa

SEQ ID NO: 4355965 - DNA, 25 bp, Homo sapien
ctgtgggctccacaatttccaaaac

SEQ ID NO: 4355966 - DNA, 25 bp, Homo sapien
gagcagtaagcatagaggaagcaga

SEQ ID NO: 4355967 - DNA, 25 bp, Homo sapien
cccaggtgagagcagtaagcataga

SEQ ID NO: 4355968 - DNA, 25 bp, Homo sapien
tggcccaggtgagagcagtaagcat

SEQ ID NO: 4355969 - DNA, 25 bp, Homo sapien
tgagagcagtaagcatagaggaagc

SEQ ID NO: 4355970 - DNA, 25 bp, Homo sapien
gacaggactcttgatagcagctcag

SEQ ID NO: 4355971 - DNA, 25 bp, Homo sapien
tataggctgcttactgggctctgct

SEQ ID NO: 4355972 - DNA, 25 bp, Homo sapien
aatgctgcatctactctgagcctgg

SEQ ID NO: 4355973 - DNA, 25 bp, Homo sapien
gatggccaacaacaagcctgagaag

SEQ ID NO: 4355974 - DNA, 25 bp, Homo sapien
tagtcacaaatttctcgagcctccc

SEQ ID NO: 4355975 - DNA, 25 bp, Homo sapien
cagtagtcacaaatttctcgagcct

SEQ ID NO: 4355976 - DNA, 25 bp, Homo sapien
tcagtagtcacaaatttctcgagcc

SEQ ID NO: 4355977 - DNA, 25 bp, Homo sapien
tcacaaatttctcgagcctccccaa

SEQ ID NO: 4355978 - DNA, 25 bp, Homo sapien
tcagttcctgcaccctcagtcagat

SEQ ID NO: 4355979 - DNA, 25 bp, Homo sapien
tagtcatggtccttagggacttttc

SEQ ID NO: 4355980 - DNA, 25 bp, Homo sapien
tgagccacttgtgagttcatagtca

SEQ ID NO: 4355981 - DNA, 25 bp, Homo sapien
cttctgtccctgatgtgaatgactt

SEQ ID NO: 4355982 - DNA, 25 bp, Homo sapien
gatgctaatgtactgaccgccagcg

SEQ ID NO: 4355983 - DNA, 25 bp, Homo sapien
ggtctgaccaaagacaggcctgtga

SEQ ID NO: 4355984 - DNA, 25 bp, Homo sapien
taattgttgcaatcaggtctgacca

SEQ ID NO: 4355985 - DNA, 25 bp, Homo sapien
aaagattgtattgtggtgctcctga

SEQ ID NO: 4355986 - DNA, 25 bp, Homo sapien
tctctaagcatagaaatagtggaag

SEQ ID NO: 4355987 - DNA, 25 bp, Homo sapien
tagaataactatctcctaaatggaa

SEQ ID NO: 4355988 - DNA, 25 bp, Homo sapien
taaatacatagctcagataaactga

SEQ ID NO: 4355989 - DNA, 25 bp, Homo sapien
aatgttgcagaagtcattgactagc

SEQ ID NO: 4355990 - DNA, 25 bp, Homo sapien
tgcccaaggcctcgtggatagaaga

SEQ ID NO: 4355991 - DNA, 25 bp, Homo sapien
agagcttggtctaggcttgagcaca

SEQ ID NO: 4355992 - DNA, 25 bp, Homo sapien
tgagcacaataagcgcagagggtat

SEQ ID NO: 4355993 - DNA, 25 bp, Homo sapien
tacagcatgcagtactctgaggaca

SEQ ID NO: 4355994 - DNA, 25 bp, Homo sapien
caagtcaaagctttgtggagttgcc

SEQ ID NO: 4355995 - DNA, 25 bp, Homo sapien
tgatcctcacagatctatgcaagag

SEQ ID NO: 4355996 - DNA, 25 bp, Homo sapien
gacctctgtgtcgattccctggaat

SEQ ID NO: 4355997 - DNA, 25 bp, Homo sapien
tatgccaagtagcatctgatcctca

SEQ ID NO: 4355998 - DNA, 25 bp, Homo sapien
cccttcaggtctgataacacttcat

SEQ ID NO: 4355999 - DNA, 25 bp, Homo sapien
cagctacttggggaattaaggtatt

SEQ ID NO: 4356000 - DNA, 25 bp, Homo sapien
ccacccttcaggtctgataacactt

SEQ ID NO: 4356001 - DNA, 25 bp, Homo sapien
gataacacttcattgttcattggga

SEQ ID NO: 4356002 - DNA, 25 bp, Homo sapien
agactgttgatcgttgtttgtagaa

SEQ ID NO: 4356003 - DNA, 25 bp, Homo sapien
acctgctcccatgacagttgccagt

SEQ ID NO: 4356004 - DNA, 25 bp, Homo sapien
ccagtgggaccaagactgttgatcg

SEQ ID NO: 4356005 - DNA, 25 bp, Homo sapien
catgacagttgccagtgggaccaag

SEQ ID NO: 4356006 - DNA, 25 bp, Homo sapien
tcccagcaaagaagcaaagttaaaa

SEQ ID NO: 4356007 - DNA, 25 bp, Homo sapien
agaagcaaagttaaaatcagaagtt

SEQ ID NO: 4356008 - DNA, 25 bp, Homo sapien
aaagaagcaaagttaaaatcagaag

SEQ ID NO: 4356009 - DNA, 25 bp, Homo sapien
cttcccagcaaagaagcaaagttaa

SEQ ID NO: 4356010 - DNA, 25 bp, Homo sapien
actggagagagttctctcccaggac

SEQ ID NO: 4356011 - DNA, 25 bp, Homo sapien
gtgactggagagagttctctcccag

SEQ ID NO: 4356012 - DNA, 25 bp, Homo sapien
tccactgatgttagctgttgtagga

SEQ ID NO: 4356013 - DNA, 25 bp, Homo sapien
cactgatgttagctgttgtaggaga

SEQ ID NO: 4356014 - DNA, 25 bp, Homo sapien
gaggtcccctcacatctgcaagggg

SEQ ID NO: 4356015 - DNA, 25 bp, Homo sapien
ccacactgtggaatgcgatgtcttt

SEQ ID NO: 4356016 - DNA, 25 bp, Homo sapien
tgtctttgcagccataagacttggc

SEQ ID NO: 4356017 - DNA, 25 bp, Homo sapien
taagacttggcatgagaggtcccct

SEQ ID NO: 4356018 - DNA, 25 bp, Homo sapien
acaataagactttaaaggttagcat

SEQ ID NO: 4356019 - DNA, 25 bp, Homo sapien
tggaaactctccaaaaacaataaga

SEQ ID NO: 4356020 - DNA, 25 bp, Homo sapien
gaaaccacggactcccaaggacagc

SEQ ID NO: 4356021 - DNA, 25 bp, Homo sapien
ctgaaggaaaccacggactcccaag

SEQ ID NO: 4356022 - DNA, 25 bp, Homo sapien
aaccacggactcccaaggacagcat

SEQ ID NO: 4356023 - DNA, 25 bp, Homo sapien
aaaccacggactcccaaggacagca

SEQ ID NO: 4356024 - DNA, 25 bp, Homo sapien
tcagaaatcacggacttaagaggaa

SEQ ID NO: 4356025 - DNA, 25 bp, Homo sapien
tatactggagggataaaacaattgg

SEQ ID NO: 4356026 - DNA, 25 bp, Homo sapien
gtgactgtcattcgccactttggca

SEQ ID NO: 4356027 - DNA, 25 bp, Homo sapien
ctgtcatcccatggccagtcaggag

SEQ ID NO: 4356028 - DNA, 25 bp, Homo sapien
gaaatagatacaatccaagggcccc

SEQ ID NO: 4356029 - DNA, 25 bp, Homo sapien
gagtgcatgtccttcatcagtcaga

SEQ ID NO: 4356030 - DNA, 25 bp, Homo sapien
tgatcgtaggcatcgtcctgggtgc

SEQ ID NO: 4356031 - DNA, 25 bp, Homo sapien
cagtgcgagccctgatgatcgtagg

SEQ ID NO: 4356032 - DNA, 25 bp, Homo sapien
gaaatagcctcacccctacatgtgg

SEQ ID NO: 4356033 - DNA, 25 bp, Homo sapien
tctgtcgcgggtcagaaattgtccc

SEQ ID NO: 4356034 - DNA, 25 bp, Homo sapien
cacagtgttgcctacaagcctggag

SEQ ID NO: 4356035 - DNA, 25 bp, Homo sapien
gaagatatacgatggaggtgcccgc

SEQ ID NO: 4356036 - DNA, 25 bp, Homo sapien
gaattcacctagagtggttggacca

SEQ ID NO: 4356037 - DNA, 25 bp, Homo sapien
gaaagaacggattatgccccattaa

SEQ ID NO: 4356038 - DNA, 25 bp, Homo sapien
gaccatcagatgtttgggcaaaact

SEQ ID NO: 4356039 - DNA, 25 bp, Homo sapien
catcacaactagctggtggtcagtt

SEQ ID NO: 4356040 - DNA, 25 bp, Homo sapien
tcaagtggaactagatgtgacctgc

SEQ ID NO: 4356041 - DNA, 25 bp, Homo sapien
tgaccagtccaagctttccctgtta

SEQ ID NO: 4356042 - DNA, 25 bp, Homo sapien
cactctggtttcgagtttttgacca

SEQ ID NO: 4356043 - DNA, 25 bp, Homo sapien
tgttatcaaagctgccgcccttagc

SEQ ID NO: 4356044 - DNA, 25 bp, Homo sapien
gccaatgcatctgaatcaaaacatg

SEQ ID NO: 4356045 - DNA, 25 bp, Homo sapien
tattgcttaagtcaatttcagttgg

SEQ ID NO: 4356046 - DNA, 25 bp, Homo sapien
agatcatgtgtaggtccaactccca

SEQ ID NO: 4356047 - DNA, 25 bp, Homo sapien
gaaatatccactgtatcatgtgggt

SEQ ID NO: 4356048 - DNA, 25 bp, Homo sapien
gttccttgaagagcaacagcactcc

SEQ ID NO: 4356049 - DNA, 25 bp, Homo sapien
gggtcccacttcatgatgtccgtat

SEQ ID NO: 4356050 - DNA, 25 bp, Homo sapien
caaaagtgcactgtctctaaccaat

SEQ ID NO: 4356051 - DNA, 25 bp, Homo sapien
tgcttcagggtacttgacaatcctc

SEQ ID NO: 4356052 - DNA, 25 bp, Homo sapien
tgaatactcaagctctcacacgaag

SEQ ID NO: 4356053 - DNA, 25 bp, Homo sapien
caaacgtgtctctgaataagggaac

SEQ ID NO: 4356054 - DNA, 25 bp, Homo sapien
aggacacccgtctctgcattgaaac

SEQ ID NO: 4356055 - DNA, 25 bp, Homo sapien
cctgattaaaagcaagtccagcccc

SEQ ID NO: 4356056 - DNA, 25 bp, Homo sapien
tcccagagtacgaatcccacgatgt

SEQ ID NO: 4356057 - DNA, 25 bp, Homo sapien
tccgagagccttcgagactgttgct

SEQ ID NO: 4356058 - DNA, 25 bp, Homo sapien
tgccacatatgaagcaggcctctgg

SEQ ID NO: 4356059 - DNA, 25 bp, Homo sapien
tccaatggcagcaggcatcgttcac

SEQ ID NO: 4356060 - DNA, 25 bp, Homo sapien
caagattgtgggctgatctggtagc

SEQ ID NO: 4356061 - DNA, 25 bp, Homo sapien
gaggaaggccgatgaactatgcatt

SEQ ID NO: 4356062 - DNA, 25 bp, Homo sapien
tagtcaaaccctccaaagtagatag

SEQ ID NO: 4356063 - DNA, 25 bp, Homo sapien
tgcagattaatttacctcagaggtg

SEQ ID NO: 4356064 - DNA, 25 bp, Homo sapien
tctgttgaagtggacctgagctggc

SEQ ID NO: 4356065 - DNA, 25 bp, Homo sapien
gattactaccttgtgctggcactgg

SEQ ID NO: 4356066 - DNA, 25 bp, Homo sapien
caaaaggaccccagataggaaccat

SEQ ID NO: 4356067 - DNA, 25 bp, Homo sapien
gtttgtgaagacaagaggcccagca

SEQ ID NO: 4356068 - DNA, 25 bp, Homo sapien
ctttgagcgagacaagggcttgggt

SEQ ID NO: 4356069 - DNA, 25 bp, Homo sapien
ggcagggaccctgggttggccagag

SEQ ID NO: 4356070 - DNA, 25 bp, Homo sapien
ctctgggagctttgagcgagacaag

SEQ ID NO: 4356071 - DNA, 25 bp, Homo sapien
ggagctttgagcgagacaagggctt

SEQ ID NO: 4356072 - DNA, 25 bp, Homo sapien
tagcactgattatcccaggatgcac

SEQ ID NO: 4356073 - DNA, 25 bp, Homo sapien
tgcttgaaaaataacagcagtgtgc

SEQ ID NO: 4356074 - DNA, 25 bp, Homo sapien
gcttgaaaaataacagcagtgtgca

SEQ ID NO: 4356075 - DNA, 25 bp, Homo sapien
ggccccccaaactcagagctggttc

SEQ ID NO: 4356076 - DNA, 25 bp, Homo sapien
ggtcacccacaatgtcccactaggg

SEQ ID NO: 4356077 - DNA, 25 bp, Homo sapien
taaactctaagcatcctacatccta

SEQ ID NO: 4356078 - DNA, 25 bp, Homo sapien
gagctggttctgtagagaattccag

SEQ ID NO: 4356079 - DNA, 25 bp, Homo sapien
ttgaccatcgactgcaccagtgttc

SEQ ID NO: 4356080 - DNA, 25 bp, Homo sapien
tccaggtttttgaccatcgactgca

SEQ ID NO: 4356081 - DNA, 25 bp, Homo sapien
tttttgaccatcgactgcaccagtg

SEQ ID NO: 4356082 - DNA, 25 bp, Homo sapien
ggtttttgaccatcgactgcaccag

SEQ ID NO: 4356083 - DNA, 25 bp, Homo sapien
tgtgtcagaccagtcccagtcatcc

SEQ ID NO: 4356084 - DNA, 25 bp, Homo sapien
ttttgggggctgtagagacacacgc

SEQ ID NO: 4356085 - DNA, 25 bp, Homo sapien
tcctcttcagaactgaacgggggcg

SEQ ID NO: 4356086 - DNA, 25 bp, Homo sapien
tgggcattctcctccgaggtctctg

SEQ ID NO: 4356087 - DNA, 25 bp, Homo sapien
agccacaccagtatctcccttagta

SEQ ID NO: 4356088 - DNA, 25 bp, Homo sapien
gtatctcccttagtagagccctgcc

SEQ ID NO: 4356089 - DNA, 25 bp, Homo sapien
tggtttggtttgctcagggccagcc

SEQ ID NO: 4356090 - DNA, 25 bp, Homo sapien
cacgcttcaagctggtttggtttgc

SEQ ID NO: 4356091 - DNA, 25 bp, Homo sapien
ggcaccttctattcacatgtgtctg

SEQ ID NO: 4356092 - DNA, 25 bp, Homo sapien
accttctattcacatgtgtctgccc

SEQ ID NO: 4356093 - DNA, 25 bp, Homo sapien
gaggcaccttctattcacatgtgtc

SEQ ID NO: 4356094 - DNA, 25 bp, Homo sapien
tgaggcaccttctattcacatgtgt

SEQ ID NO: 4356095 - DNA, 25 bp, Homo sapien
ctgcagaagcctggagggagcccag

SEQ ID NO: 4356096 - DNA, 25 bp, Homo sapien
tggagggagcccagaacaggactgc

SEQ ID NO: 4356097 - DNA, 25 bp, Homo sapien
gcctggagggagcccagaacaggac

SEQ ID NO: 4356098 - DNA, 25 bp, Homo sapien
cagaagcctggagggagcccagaac

SEQ ID NO: 4356099 - DNA, 25 bp, Homo sapien
ctgccatggctctgacgagttggtg

SEQ ID NO: 4356100 - DNA, 25 bp, Homo sapien
ctctctggtgaccagtgtgctctgc

SEQ ID NO: 4356101 - DNA, 25 bp, Homo sapien
gtggctctgccggtgtggatggcaa

SEQ ID NO: 4356102 - DNA, 25 bp, Homo sapien
ggtccatgcagtccggggcgtggag

SEQ ID NO: 4356103 - DNA, 25 bp, Homo sapien
tacgtggattttcttccgactctgc

SEQ ID NO: 4356104 - DNA, 25 bp, Homo sapien
tcttacagtaattcaagatcagaaa

SEQ ID NO: 4356105 - DNA, 25 bp, Homo sapien
ggttgaacagccatgggtccactta

SEQ ID NO: 4356106 - DNA, 25 bp, Homo sapien
tgtttgaaatacagttgaccccgaa

SEQ ID NO: 4356107 - DNA, 25 bp, Homo sapien
tcagaagtggagcttccaggaaaga

SEQ ID NO: 4356108 - DNA, 25 bp, Homo sapien
agaagtggagcttccaggaaagagt

SEQ ID NO: 4356109 - DNA, 25 bp, Homo sapien
aagtggagcttccaggaaagagtga

SEQ ID NO: 4356110 - DNA, 25 bp, Homo sapien
agtggagcttccaggaaagagtgaa

SEQ ID NO: 4356111 - DNA, 25 bp, Homo sapien
ccctgagcaagccctctccccagtg

SEQ ID NO: 4356112 - DNA, 25 bp, Homo sapien
aggtcacagccctgagcaagccctc

SEQ ID NO: 4356113 - DNA, 25 bp, Homo sapien
agccctgagcaagccctctccccag

SEQ ID NO: 4356114 - DNA, 25 bp, Homo sapien
ctgagcaagccctctccccagtgta

SEQ ID NO: 4356115 - DNA, 25 bp, Homo sapien
gagtctgaatcgagattccctttgc

SEQ ID NO: 4356116 - DNA, 25 bp, Homo sapien
tctctccttcgctctgctggtgact

SEQ ID NO: 4356117 - DNA, 25 bp, Homo sapien
ccgctggactctcagcagggattcc

SEQ ID NO: 4356118 - DNA, 25 bp, Homo sapien
gattccaggtgtctgagagtctgaa

SEQ ID NO: 4356119 - DNA, 25 bp, Homo sapien
tccttatccccatgctttcgagctt

SEQ ID NO: 4356120 - DNA, 25 bp, Homo sapien
gcaccttgtgctgttcatcctggga

SEQ ID NO: 4356121 - DNA, 25 bp, Homo sapien
caaagtggggttacgcctcagagct

SEQ ID NO: 4356122 - DNA, 25 bp, Homo sapien
gtctgaagtgcttcagcaaagtggg

SEQ ID NO: 4356123 - DNA, 25 bp, Homo sapien
tctccctgactatccctaagatctt

SEQ ID NO: 4356124 - DNA, 25 bp, Homo sapien
agaggtctgcgaatcagagtcaatc

SEQ ID NO: 4356125 - DNA, 25 bp, Homo sapien
tgcatcccttggctacatctggttg

SEQ ID NO: 4356126 - DNA, 25 bp, Homo sapien
gatcttcttgcagtcagggagcatc

SEQ ID NO: 4356127 - DNA, 25 bp, Homo sapien
ggacaagctaatgaccctctctagg

SEQ ID NO: 4356128 - DNA, 25 bp, Homo sapien
tgcatagtcgcaggtgagagtcagt

SEQ ID NO: 4356129 - DNA, 25 bp, Homo sapien
ggctgtgaatcagacgtccctccaa

SEQ ID NO: 4356130 - DNA, 25 bp, Homo sapien
tacctgctagctttgtgactctgga

SEQ ID NO: 4356131 - DNA, 25 bp, Homo sapien
acagcctttggcaccttgtggatcc

SEQ ID NO: 4356132 - DNA, 25 bp, Homo sapien
caccttcctgagagacaaggactgg

SEQ ID NO: 4356133 - DNA, 25 bp, Homo sapien
ccttcctgagagacaaggactggat

SEQ ID NO: 4356134 - DNA, 25 bp, Homo sapien
tccaccttcctgagagacaaggact

SEQ ID NO: 4356135 - DNA, 25 bp, Homo sapien
cttccaccttcctgagagacaagga

SEQ ID NO: 4356136 - DNA, 25 bp, Homo sapien
gcgggttacaaccagcagagaacat

SEQ ID NO: 4356137 - DNA, 25 bp, Homo sapien
gggttacaaccagcagagaacattg

SEQ ID NO: 4356138 - DNA, 25 bp, Homo sapien
tagagcgggttacaaccagcagaga

SEQ ID NO: 4356139 - DNA, 25 bp, Homo sapien
ggaatagagcgggttacaaccagca

SEQ ID NO: 4356140 - DNA, 25 bp, Homo sapien
catctctggggtccgtgtgtgaaag

SEQ ID NO: 4356141 - DNA, 25 bp, Homo sapien
gggaatggcagcatgctccattttc

SEQ ID NO: 4356142 - DNA, 25 bp, Homo sapien
aagggaatggcagcatgctccattt

SEQ ID NO: 4356143 - DNA, 25 bp, Homo sapien
tgacacatctctggggtccgtgtgt

SEQ ID NO: 4356144 - DNA, 25 bp, Homo sapien
aagaattatgcctcgagggcaggag

SEQ ID NO: 4356145 - DNA, 25 bp, Homo sapien
ttcaaagaagaattatgcctcgagg

SEQ ID NO: 4356146 - DNA, 25 bp, Homo sapien
ggcaggagccccatagaaacagagt

SEQ ID NO: 4356147 - DNA, 25 bp, Homo sapien
ggagccccatagaaacagagtggga

SEQ ID NO: 4356148 - DNA, 25 bp, Homo sapien
ggacagccacaggtgaacaatgaga

SEQ ID NO: 4356149 - DNA, 25 bp, Homo sapien
cacagccggacccaacacccaagtt

SEQ ID NO: 4356150 - DNA, 25 bp, Homo sapien
gctgctggcagccaattgtttgtgg

SEQ ID NO: 4356151 - DNA, 25 bp, Homo sapien
gctggcagccaattgtttgtggttt

SEQ ID NO: 4356152 - DNA, 25 bp, Homo sapien
tgctggcagccaattgtttgtggtt

SEQ ID NO: 4356153 - DNA, 25 bp, Homo sapien
ctgggaggcaatgatcctagcttgt

SEQ ID NO: 4356154 - DNA, 25 bp, Homo sapien
gcacggagggtgctgatctggcact

SEQ ID NO: 4356155 - DNA, 25 bp, Homo sapien
agccatgtgctcttcatgcagttcc

SEQ ID NO: 4356156 - DNA, 25 bp, Homo sapien
tcagccatgtgctcttcatgcagtt

SEQ ID NO: 4356157 - DNA, 25 bp, Homo sapien
agctcccgtgcctgccgaagccact

SEQ ID NO: 4356158 - DNA, 25 bp, Homo sapien
cacactgtgggactgcagtgcccgc

SEQ ID NO: 4356159 - DNA, 25 bp, Homo sapien
ctgtgggactgcagtgcccgcagtt

SEQ ID NO: 4356160 - DNA, 25 bp, Homo sapien
cctgaagctcccgtgcctgccgaag

SEQ ID NO: 4356161 - DNA, 25 bp, Homo sapien
aaggccagggcatagttttattcag

SEQ ID NO: 4356162 - DNA, 25 bp, Homo sapien
tagagcctatgggagggtctcaccc

SEQ ID NO: 4356163 - DNA, 25 bp, Homo sapien
tcaaaatcccgagctctcctgactg

SEQ ID NO: 4356164 - DNA, 25 bp, Homo sapien
ttttatacccagaacagtgtcagag

SEQ ID NO: 4356165 - DNA, 25 bp, Homo sapien
cacagcgagacagtgagagcaagaa

SEQ ID NO: 4356166 - DNA, 25 bp, Homo sapien
gcgacacagcgagacagtgagagca

SEQ ID NO: 4356167 - DNA, 25 bp, Homo sapien
gacacagcgagacagtgagagcaag

SEQ ID NO: 4356168 - DNA, 25 bp, Homo sapien
cgacacagcgagacagtgagagcaa

SEQ ID NO: 4356169 - DNA, 25 bp, Homo sapien
cttctagtgtagagttctgcttggc

SEQ ID NO: 4356170 - DNA, 25 bp, Homo sapien
tctagtgtagagttctgcttggcga

SEQ ID NO: 4356171 - DNA, 25 bp, Homo sapien
tctgcttggcgacatttttaaattc

SEQ ID NO: 4356172 - DNA, 25 bp, Homo sapien
ctgcttggcgacatttttaaattca

SEQ ID NO: 4356173 - DNA, 25 bp, Homo sapien
tgcctctccgcctccctctgggctt

SEQ ID NO: 4356174 - DNA, 25 bp, Homo sapien
ctgggcttccagctccccttgggtc

SEQ ID NO: 4356175 - DNA, 25 bp, Homo sapien
ctggagctgccgctgcctctccgcc

SEQ ID NO: 4356176 - DNA, 25 bp, Homo sapien
gggcttccagctccccttgggtcca

SEQ ID NO: 4356177 - DNA, 25 bp, Homo sapien
tttagcttggcccgtagctcttcta

SEQ ID NO: 4356178 - DNA, 25 bp, Homo sapien
tctaacacctcttccactggctgtt

SEQ ID NO: 4356179 - DNA, 25 bp, Homo sapien
tagcttggcccgtagctcttctaac

SEQ ID NO: 4356180 - DNA, 25 bp, Homo sapien
gtagctcttctaacacctcttccac

SEQ ID NO: 4356181 - DNA, 25 bp, Homo sapien
aaatcaagggagtgtagtttctcac

SEQ ID NO: 4356182 - DNA, 25 bp, Homo sapien
aaaatcaagggagtgtagtttctca

SEQ ID NO: 4356183 - DNA, 25 bp, Homo sapien
caccttctgccacgcctgcatgcct

SEQ ID NO: 4356184 - DNA, 25 bp, Homo sapien
tggccccggagaaaggtggcattca

SEQ ID NO: 4356185 - DNA, 25 bp, Homo sapien
catgcctgcgctggatgtggccccg

SEQ ID NO: 4356186 - DNA, 25 bp, Homo sapien
attcatgaatgtcttgtcacacagg

SEQ ID NO: 4356187 - DNA, 25 bp, Homo sapien
tcccgttccctgtgctaccctgcac

SEQ ID NO: 4356188 - DNA, 25 bp, Homo sapien
ccgttccctgtgctaccctgcacag

SEQ ID NO: 4356189 - DNA, 25 bp, Homo sapien
tcccccgcaggtgggttgagggcta

SEQ ID NO: 4356190 - DNA, 25 bp, Homo sapien
gttccctgtgctaccctgcacagca

SEQ ID NO: 4356191 - DNA, 25 bp, Homo sapien
gcttcccatcgcaagtctctatctt

SEQ ID NO: 4356192 - DNA, 25 bp, Homo sapien
cttcccatcgcaagtctctatcttc

SEQ ID NO: 4356193 - DNA, 25 bp, Homo sapien
ttcccatcgcaagtctctatcttct

SEQ ID NO: 4356194 - DNA, 25 bp, Homo sapien
agcttcccatcgcaagtctctatct

SEQ ID NO: 4356195 - DNA, 25 bp, Homo sapien
tcctgatactcacgcagctgccgct

SEQ ID NO: 4356196 - DNA, 25 bp, Homo sapien
cttgacattcatcagctcctgatac

SEQ ID NO: 4356197 - DNA, 25 bp, Homo sapien
gcttcctataggtggcgatcttgat

SEQ ID NO: 4356198 - DNA, 25 bp, Homo sapien
tccagccggctttccttgccctcca

SEQ ID NO: 4356199 - DNA, 25 bp, Homo sapien
ctcggcatctgcgatgccctctggc

SEQ ID NO: 4356200 - DNA, 25 bp, Homo sapien
ttgtatgctgcaggtcatctccatg

SEQ ID NO: 4356201 - DNA, 25 bp, Homo sapien
tatgctgcaggtcatctccatgctt

SEQ ID NO: 4356202 - DNA, 25 bp, Homo sapien
ctttgtatgctgcaggtcatctcca

SEQ ID NO: 4356203 - DNA, 25 bp, Homo sapien
tgtatgctgcaggtcatctccatgc

SEQ ID NO: 4356204 - DNA, 25 bp, Homo sapien
atccacatctttctcgatgaaggca

SEQ ID NO: 4356205 - DNA, 25 bp, Homo sapien
catctttctcgatgaaggcaaattt

SEQ ID NO: 4356206 - DNA, 25 bp, Homo sapien
ctttctcgatgaaggcaaatttatt

SEQ ID NO: 4356207 - DNA, 25 bp, Homo sapien
tctcgatgaaggcaaatttattctc

SEQ ID NO: 4356208 - DNA, 25 bp, Homo sapien
tttgtatgcttattgatctcatcct

SEQ ID NO: 4356209 - DNA, 25 bp, Homo sapien
ctttgtatgcttattgatctcatcc

SEQ ID NO: 4356210 - DNA, 25 bp, Homo sapien
catcctcatacttgttctcgaagtc

SEQ ID NO: 4356211 - DNA, 25 bp, Homo sapien
atctcatcctcatacttgttctcga

SEQ ID NO: 4356212 - DNA, 25 bp, Homo sapien
tctccagctgctgcctaaggttgtt

SEQ ID NO: 4356213 - DNA, 25 bp, Homo sapien
gatgtagctctgaacatgttgtcca

SEQ ID NO: 4356214 - DNA, 25 bp, Homo sapien
catgttgccaagctctgccttcagc

SEQ ID NO: 4356215 - DNA, 25 bp, Homo sapien
agagtctccagctgctgcctaaggt

SEQ ID NO: 4356216 - DNA, 25 bp, Homo sapien
tgagccgtcttctgctgctgcagga

SEQ ID NO: 4356217 - DNA, 25 bp, Homo sapien
ccgtcttctgctgctgcaggaggct

SEQ ID NO: 4356218 - DNA, 25 bp, Homo sapien
agccgtcttctgctgctgcaggagg

SEQ ID NO: 4356219 - DNA, 25 bp, Homo sapien
ttaactctgagccgtcttctgctgc

SEQ ID NO: 4356220 - DNA, 25 bp, Homo sapien
ccagttggtctccagcatcttgttc

SEQ ID NO: 4356221 - DNA, 25 bp, Homo sapien
cagcatcttgttctgctgctccagg

SEQ ID NO: 4356222 - DNA, 25 bp, Homo sapien
catcttgttctgctgctccaggaac

SEQ ID NO: 4356223 - DNA, 25 bp, Homo sapien
cagttggtctccagcatcttgttct

SEQ ID NO: 4356224 - DNA, 25 bp, Homo sapien
tcctgggtgcacatggcctgaatgt

SEQ ID NO: 4356225 - DNA, 25 bp, Homo sapien
ggtgcacatggcctgaatgttgggg

SEQ ID NO: 4356226 - DNA, 25 bp, Homo sapien
tctcctgggtgcacatggcctgaat

SEQ ID NO: 4356227 - DNA, 25 bp, Homo sapien
ctgggtgcacatggcctgaatgttg

SEQ ID NO: 4356228 - DNA, 25 bp, Homo sapien
tgatggcagtgatgcctcccatgcc

SEQ ID NO: 4356229 - DNA, 25 bp, Homo sapien
ctggttgacagtgatggcagtgatg

SEQ ID NO: 4356230 - DNA, 25 bp, Homo sapien
cagtgatggcagtgatgcctcccat

SEQ ID NO: 4356231 - DNA, 25 bp, Homo sapien
gatggcagtgatgcctcccatgcca

SEQ ID NO: 4356232 - DNA, 25 bp, Homo sapien
ccaccatagcctccgcccaggtcac

SEQ ID NO: 4356233 - DNA, 25 bp, Homo sapien
ctggccccaccatagcctccgccca

SEQ ID NO: 4356234 - DNA, 25 bp, Homo sapien
cccaccatagcctccgcccaggtca

SEQ ID NO: 4356235 - DNA, 25 bp, Homo sapien
gccccaccatagcctccgcccaggt

SEQ ID NO: 4356236 - DNA, 25 bp, Homo sapien
cagcactgggcccactcatgtagaa

SEQ ID NO: 4356237 - DNA, 25 bp, Homo sapien
gccagcactgggcccactcatgtag

SEQ ID NO: 4356238 - DNA, 25 bp, Homo sapien
ctcatgtagaagcagctgctgaaga

SEQ ID NO: 4356239 - DNA, 25 bp, Homo sapien
atgtagaagcagctgctgaagacct

SEQ ID NO: 4356240 - DNA, 25 bp, Homo sapien
ggaggcaggtgggctgaaccaggcg

SEQ ID NO: 4356241 - DNA, 25 bp, Homo sapien
gtgggctgaaccaggcggagattcc

SEQ ID NO: 4356242 - DNA, 25 bp, Homo sapien
aggcaggtgggctgaaccaggcgga

SEQ ID NO: 4356243 - DNA, 25 bp, Homo sapien
ctgatgaacatggtggaagcaggag

SEQ ID NO: 4356244 - DNA, 25 bp, Homo sapien
ccatgctatcatggcgaggctgaaa

SEQ ID NO: 4356245 - DNA, 25 bp, Homo sapien
acacctcccggtccaagttgcagaa

SEQ ID NO: 4356246 - DNA, 25 bp, Homo sapien
tacatccagggtgctaatgcgtctc

SEQ ID NO: 4356247 - DNA, 25 bp, Homo sapien
gtgctgatcatcttgcgacgccggc

SEQ ID NO: 4356248 - DNA, 25 bp, Homo sapien
ggcaccaaggccacggcagtaggcc

SEQ ID NO: 4356249 - DNA, 25 bp, Homo sapien
accaccagaggaggggggcaccaag

SEQ ID NO: 4356250 - DNA, 25 bp, Homo sapien
caaggccacggcagtaggccaagga

SEQ ID NO: 4356251 - DNA, 25 bp, Homo sapien
cctgagctgaccaccagaggagggg

SEQ ID NO: 4356252 - DNA, 25 bp, Homo sapien
ataagaagagagtccaagttaggtg

SEQ ID NO: 4356253 - DNA, 25 bp, Homo sapien
tgtatatctggccagcaagggccta

SEQ ID NO: 4356254 - DNA, 25 bp, Homo sapien
tatctggccagcaagggcctaagcg

SEQ ID NO: 4356255 - DNA, 25 bp, Homo sapien
tatatctggccagcaagggcctaag

SEQ ID NO: 4356256 - DNA, 25 bp, Homo sapien
ccagcaagggcctaagcggggcaaa

SEQ ID NO: 4356257 - DNA, 25 bp, Homo sapien
tgtctaaggaggaacatgggtccca

SEQ ID NO: 4356258 - DNA, 25 bp, Homo sapien
tgctgtgagtgaccaaggttcctaa

SEQ ID NO: 4356259 - DNA, 25 bp, Homo sapien
gataaagtccgacaacttgctgtga

SEQ ID NO: 4356260 - DNA, 25 bp, Homo sapien
gctgacatggccagagctgtggaaa

SEQ ID NO: 4356261 - DNA, 25 bp, Homo sapien
gcctcggagcaacagcaggttacca

SEQ ID NO: 4356262 - DNA, 25 bp, Homo sapien
gctgtgcctcggagcaacagcaggt

SEQ ID NO: 4356263 - DNA, 25 bp, Homo sapien
gagcaacagcaggttaccaggcatg

SEQ ID NO: 4356264 - DNA, 25 bp, Homo sapien
aacaagctgtgcctcggagcaacag

SEQ ID NO: 4356265 - DNA, 25 bp, Homo sapien
gcagccctgaaaccttcatacttac

SEQ ID NO: 4356266 - DNA, 25 bp, Homo sapien
ctgagcatactccataaacacagaa

SEQ ID NO: 4356267 - DNA, 25 bp, Homo sapien
tcatacttacactctgagcatactc

SEQ ID NO: 4356268 - DNA, 25 bp, Homo sapien
gaaaccttcatacttacactctgag

SEQ ID NO: 4356269 - DNA, 25 bp, Homo sapien
aagtgcaagcgctgacagagtttac

SEQ ID NO: 4356270 - DNA, 25 bp, Homo sapien
ggcttgtctgaacccgactcagctc

SEQ ID NO: 4356271 - DNA, 25 bp, Homo sapien
ccctgtatttcagcagggcttgtct

SEQ ID NO: 4356272 - DNA, 25 bp, Homo sapien
tagtgttggggattctaaattctcc

SEQ ID NO: 4356273 - DNA, 25 bp, Homo sapien
tctccctgtatttcagcagggcttg

SEQ ID NO: 4356274 - DNA, 25 bp, Homo sapien
gccaaatgagagtgttgcatgttac

SEQ ID NO: 4356275 - DNA, 25 bp, Homo sapien
tgattaggataggcggacaaaaagc

SEQ ID NO: 4356276 - DNA, 25 bp, Homo sapien
gattaggataggcggacaaaaagcc

SEQ ID NO: 4356277 - DNA, 25 bp, Homo sapien
ctgattaggataggcggacaaaaag

SEQ ID NO: 4356278 - DNA, 25 bp, Homo sapien
ggacatcgtgcttttttcagacgaa

SEQ ID NO: 4356279 - DNA, 25 bp, Homo sapien
gggcaaggacatcgtgcttttttca

SEQ ID NO: 4356280 - DNA, 25 bp, Homo sapien
gcttttttcagacgaattgtgagca

SEQ ID NO: 4356281 - DNA, 25 bp, Homo sapien
aattgtgagcagactgcttttccca

SEQ ID NO: 4356282 - DNA, 25 bp, Homo sapien
gaacttgagggagccaagtttccaa

SEQ ID NO: 4356283 - DNA, 25 bp, Homo sapien
ttaatgctaattgttgtggctgcca

SEQ ID NO: 4356284 - DNA, 25 bp, Homo sapien
gctcaggcgtgtcattaatgctaat

SEQ ID NO: 4356285 - DNA, 25 bp, Homo sapien
gggagctcaggcgtgtcattaatgc

SEQ ID NO: 4356286 - DNA, 25 bp, Homo sapien
tgctaattgttgtggctgccaagga

SEQ ID NO: 4356287 - DNA, 25 bp, Homo sapien
cagtgactaagccagaactactaga

SEQ ID NO: 4356288 - DNA, 25 bp, Homo sapien
tcagtgactaagccagaactactag

SEQ ID NO: 4356289 - DNA, 25 bp, Homo sapien
cccgggacgaattcctggcatagtt

SEQ ID NO: 4356290 - DNA, 25 bp, Homo sapien
cgaatcgctgatccctcggactgca

SEQ ID NO: 4356291 - DNA, 25 bp, Homo sapien
taatgtttaacctcccgaatcgctg

SEQ ID NO: 4356292 - DNA, 25 bp, Homo sapien
tggcatagttttcccgcgcggcccg

SEQ ID NO: 4356293 - DNA, 25 bp, Homo sapien
ggtggcggctcccatactcgcccca

SEQ ID NO: 4356294 - DNA, 25 bp, Homo sapien
cgggaagacgtctcgaggtggcggc

SEQ ID NO: 4356295 - DNA, 25 bp, Homo sapien
agacttgctccaccgccccagacag

SEQ ID NO: 4356296 - DNA, 25 bp, Homo sapien
ccagagatggttcccggaatgctca

SEQ ID NO: 4356297 - DNA, 25 bp, Homo sapien
gaatgccacgtttaatccgttagta

SEQ ID NO: 4356298 - DNA, 25 bp, Homo sapien
tcaagaagaggtggagcctctcccg

SEQ ID NO: 4356299 - DNA, 25 bp, Homo sapien
tcctcggtgcgtcggtcagctcgtg

SEQ ID NO: 4356300 - DNA, 25 bp, Homo sapien
gagctatttttaggtctgtaacgga

SEQ ID NO: 4356301 - DNA, 25 bp, Homo sapien
cagtcctgttgaattgtgggtggga

SEQ ID NO: 4356302 - DNA, 25 bp, Homo sapien
agagacagtcctgttgaattgtggg

SEQ ID NO: 4356303 - DNA, 25 bp, Homo sapien
tcctgttgaattgtgggtgggagtc

SEQ ID NO: 4356304 - DNA, 25 bp, Homo sapien
agacagtcctgttgaattgtgggtg

SEQ ID NO: 4356305 - DNA, 25 bp, Homo sapien
cagcagcagcaaacgagtgttagct

SEQ ID NO: 4356306 - DNA, 25 bp, Homo sapien
cagtgcttgcgatagagattttcca

SEQ ID NO: 4356307 - DNA, 25 bp, Homo sapien
tagtagcgcctccactctcgatagg

SEQ ID NO: 4356308 - DNA, 25 bp, Homo sapien
tccctgtaagtcctgggacagtgct

SEQ ID NO: 4356309 - DNA, 25 bp, Homo sapien
cataagagacattgaagcttggctc

SEQ ID NO: 4356310 - DNA, 25 bp, Homo sapien
ggtgtaagaaggatatgttcagaca

SEQ ID NO: 4356311 - DNA, 25 bp, Homo sapien
ttgggggtgtaagaaggatatgttc

SEQ ID NO: 4356312 - DNA, 25 bp, Homo sapien
gtgtaagaaggatatgttcagacac

SEQ ID NO: 4356313 - DNA, 25 bp, Homo sapien
ggggtgtaagaaggatatgttcaga

SEQ ID NO: 4356314 - DNA, 25 bp, Homo sapien
attactagagtaccgagaagcctgc

SEQ ID NO: 4356315 - DNA, 25 bp, Homo sapien
gacatcggtgtccatgtagatgcca

SEQ ID NO: 4356316 - DNA, 25 bp, Homo sapien
gtagatgccaccgtatttccagatg

SEQ ID NO: 4356317 - DNA, 25 bp, Homo sapien
tccttgtcatcaactcagggccttg

SEQ ID NO: 4356318 - DNA, 25 bp, Homo sapien
cccatatatacaattcgttgacatt

SEQ ID NO: 4356319 - DNA, 25 bp, Homo sapien
tctattcccatctccgacctgagtc

SEQ ID NO: 4356320 - DNA, 25 bp, Homo sapien
aaaagagggccaaatgagagtcaac

SEQ ID NO: 4356321 - DNA, 25 bp, Homo sapien
agagggccaaatgagagtcaaccca

SEQ ID NO: 4356322 - DNA, 25 bp, Homo sapien
aaaacaatggtgtgtcttcaagcag

SEQ ID NO: 4356323 - DNA, 25 bp, Homo sapien
tcataaagaacaccacaggccactc

SEQ ID NO: 4356324 - DNA, 25 bp, Homo sapien
catcggtgtggaatcagtaagaccc

SEQ ID NO: 4356325 - DNA, 25 bp, Homo sapien
gaaaacgttgtctattgctgacagg

SEQ ID NO: 4356326 - DNA, 25 bp, Homo sapien
cgtctgtggctcaggagggcttcca

SEQ ID NO: 4356327 - DNA, 25 bp, Homo sapien
agctggacttcagggtgaactggta

SEQ ID NO: 4356328 - DNA, 25 bp, Homo sapien
caagcagcaaggtgactgacaggga

SEQ ID NO: 4356329 - DNA, 25 bp, Homo sapien
tagaaacacaatgccacgtctgtgg

SEQ ID NO: 4356330 - DNA, 25 bp, Homo sapien
gtcctcttctctgtgccagcctgct

SEQ ID NO: 4356331 - DNA, 25 bp, Homo sapien
tcctcttctctgtgccagcctgctc

SEQ ID NO: 4356332 - DNA, 25 bp, Homo sapien
gcagtgctttcctcaccaaaaatgt

SEQ ID NO: 4356333 - DNA, 25 bp, Homo sapien
agtgctttcctcaccaaaaatgtta

SEQ ID NO: 4356334 - DNA, 25 bp, Homo sapien
ctgcagtgctttcctcaccaaaaat

SEQ ID NO: 4356335 - DNA, 25 bp, Homo sapien
tgctttcctcaccaaaaatgttagc

SEQ ID NO: 4356336 - DNA, 25 bp, Homo sapien
cacgtcttggcaggtctatctttca

SEQ ID NO: 4356337 - DNA, 25 bp, Homo sapien
aaccaaggagaacacagatctcacg

SEQ ID NO: 4356338 - DNA, 25 bp, Homo sapien
gcctaacttctagctgcaaatgcag

SEQ ID NO: 4356339 - DNA, 25 bp, Homo sapien
aaaacagtgaatcagagcctaactt

SEQ ID NO: 4356340 - DNA, 25 bp, Homo sapien
ctctagtgtgagcaggtaggcctgc

SEQ ID NO: 4356341 - DNA, 25 bp, Homo sapien
gctcctgagcagactttagattcta

SEQ ID NO: 4356342 - DNA, 25 bp, Homo sapien
cctgctcctgagcagactttagatt

SEQ ID NO: 4356343 - DNA, 25 bp, Homo sapien
gctctagtgtgagcaggtaggcctg

SEQ ID NO: 4356344 - DNA, 25 bp, Homo sapien
tacatgaagggagttaaagctgccc

SEQ ID NO: 4356345 - DNA, 25 bp, Homo sapien
ctacatgaagggagttaaagctgcc

SEQ ID NO: 4356346 - DNA, 25 bp, Homo sapien
acatgaagggagttaaagctgcccc

SEQ ID NO: 4356347 - DNA, 25 bp, Homo sapien
cagcttgtaggtctccacaaacctc

SEQ ID NO: 4356348 - DNA, 25 bp, Homo sapien
tggttttctatgtgtccaaggaccc

SEQ ID NO: 4356349 - DNA, 25 bp, Homo sapien
tgtaattggacagattggttgttct

SEQ ID NO: 4356350 - DNA, 25 bp, Homo sapien
ggacctcattaattctgggctcaga

SEQ ID NO: 4356351 - DNA, 25 bp, Homo sapien
ggagtggagattagtgctcctgctc

SEQ ID NO: 4356352 - DNA, 25 bp, Homo sapien
tatgaaggggagtggagattagtgc

SEQ ID NO: 4356353 - DNA, 25 bp, Homo sapien
gctccttgcccaggggtaactagag

SEQ ID NO: 4356354 - DNA, 25 bp, Homo sapien
tgctccttgcccaggggtaactaga

SEQ ID NO: 4356355 - DNA, 25 bp, Homo sapien
gctaagttctgtaagccggagttta

SEQ ID NO: 4356356 - DNA, 25 bp, Homo sapien
gggctatttgaagcgaccttgctaa

SEQ ID NO: 4356357 - DNA, 25 bp, Homo sapien
ctttctgagagcgaggggctatttg

SEQ ID NO: 4356358 - DNA, 25 bp, Homo sapien
tttgaagcgaccttgctaagttctg

SEQ ID NO: 4356359 - DNA, 25 bp, Homo sapien
ggtattgaaggactgcatccttttc

SEQ ID NO: 4356360 - DNA, 25 bp, Homo sapien
taatccatggtaggtattgaaggac

SEQ ID NO: 4356361 - DNA, 25 bp, Homo sapien
ctggctttgtctggtagtcttaatc

SEQ ID NO: 4356362 - DNA, 25 bp, Homo sapien
tctggtagtcttaatccatggtagg

SEQ ID NO: 4356363 - DNA, 25 bp, Homo sapien
gaattgcagggtatcagctctgtgc

SEQ ID NO: 4356364 - DNA, 25 bp, Homo sapien
tgcagggtatcagctctgtgctgaa

SEQ ID NO: 4356365 - DNA, 25 bp, Homo sapien
agccccaagaattgcagggtatcag

SEQ ID NO: 4356366 - DNA, 25 bp, Homo sapien
ccaagaattgcagggtatcagctct

SEQ ID NO: 4356367 - DNA, 25 bp, Homo sapien
aactcaaagcatccaaaagatactc

SEQ ID NO: 4356368 - DNA, 25 bp, Homo sapien
actcaaagcatccaaaagatactca

SEQ ID NO: 4356369 - DNA, 25 bp, Homo sapien
ctcaaagcatccaaaagatactcac

SEQ ID NO: 4356370 - DNA, 25 bp, Homo sapien
gcaatgtgggaacagcaccgaaact

SEQ ID NO: 4356371 - DNA, 25 bp, Homo sapien
tgaacttggaaaattgagcaaccag

SEQ ID NO: 4356372 - DNA, 25 bp, Homo sapien
aaaggtgagccctgtgattgtccta

SEQ ID NO: 4356373 - DNA, 25 bp, Homo sapien
caggttgaccctgtcacgtgaaaca

SEQ ID NO: 4356374 - DNA, 25 bp, Homo sapien
aaatgacctacatagttactatagt

SEQ ID NO: 4356375 - DNA, 25 bp, Homo sapien
aatgacctacatagttactatagtt

SEQ ID NO: 4356376 - DNA, 25 bp, Homo sapien
gtcagcagggttatactaatctcag

SEQ ID NO: 4356377 - DNA, 25 bp, Homo sapien
gcagggttatactaatctcagcaaa

SEQ ID NO: 4356378 - DNA, 25 bp, Homo sapien
cagcagggttatactaatctcagca

SEQ ID NO: 4356379 - DNA, 25 bp, Homo sapien
aaagtcagcagggttatactaatct

SEQ ID NO: 4356380 - DNA, 25 bp, Homo sapien
gagtagtttatttcctgaaatctta

SEQ ID NO: 4356381 - DNA, 25 bp, Homo sapien
ttatttcctgaaatcttatatacca

SEQ ID NO: 4356382 - DNA, 25 bp, Homo sapien
atttcctgaaatcttatataccatc

SEQ ID NO: 4356383 - DNA, 25 bp, Homo sapien
cagagtagtttatttcctgaaatct

SEQ ID NO: 4356384 - DNA, 25 bp, Homo sapien
tcccatattatagcagagtgcttgg

SEQ ID NO: 4356385 - DNA, 25 bp, Homo sapien
tatagccatattgtatacatcaaaa

SEQ ID NO: 4356386 - DNA, 25 bp, Homo sapien
aaaagaaagcatacatcataatata

SEQ ID NO: 4356387 - DNA, 25 bp, Homo sapien
gtttacagtgataacaagtccttgg

SEQ ID NO: 4356388 - DNA, 25 bp, Homo sapien
aagtcaatatctaactaaaattctc

SEQ ID NO: 4356389 - DNA, 25 bp, Homo sapien
actaagacaagtaaattgtcggcca

SEQ ID NO: 4356390 - DNA, 25 bp, Homo sapien
agacaagtaaattgtcggccaggca

SEQ ID NO: 4356391 - DNA, 25 bp, Homo sapien
tatctaactaaaattctctaatgta

SEQ ID NO: 4356392 - DNA, 25 bp, Homo sapien
tagagcctggcaagatcctgacatc

SEQ ID NO: 4356393 - DNA, 25 bp, Homo sapien
gaagcttgatcagaaggttctaccg

SEQ ID NO: 4356394 - DNA, 25 bp, Homo sapien
tcatccactgcagcgtaaatggctt

SEQ ID NO: 4356395 - DNA, 25 bp, Homo sapien
tggaatccaccgtatcatcagaaga

SEQ ID NO: 4356396 - DNA, 25 bp, Homo sapien
tgtgcacttacaatactatcttcat

SEQ ID NO: 4356397 - DNA, 25 bp, Homo sapien
gcagatgtgtctgtattatattcac

SEQ ID NO: 4356398 - DNA, 25 bp, Homo sapien
gagcagatgtgtctgtattatattc

SEQ ID NO: 4356399 - DNA, 25 bp, Homo sapien
gccactatgtgcacttacaatacta

SEQ ID NO: 4356400 - DNA, 25 bp, Homo sapien
gccaagttgggcacaaaattcagtt

SEQ ID NO: 4356401 - DNA, 25 bp, Homo sapien
ggattgatcctatgaatcagctgca

SEQ ID NO: 4356402 - DNA, 25 bp, Homo sapien
catggaaccttgagatcatgattca

SEQ ID NO: 4356403 - DNA, 25 bp, Homo sapien
gctaggatcataacaagcagctgtt

SEQ ID NO: 4356404 - DNA, 25 bp, Homo sapien
tattccaagtaatcaggagcactgg

SEQ ID NO: 4356405 - DNA, 25 bp, Homo sapien
caggcgcccagtcacattaataaga

SEQ ID NO: 4356406 - DNA, 25 bp, Homo sapien
taataagatcatccgtagccctgag

SEQ ID NO: 4356407 - DNA, 25 bp, Homo sapien
tttctggcatattccacaggcgccc

SEQ ID NO: 4356408 - DNA, 25 bp, Homo sapien
tccaaggctaaaaatttggttgctc

SEQ ID NO: 4356409 - DNA, 25 bp, Homo sapien
tatgtggtaagcatttgtccaaggc

SEQ ID NO: 4356410 - DNA, 25 bp, Homo sapien
tgtccaaggctaaaaatttggttgc

SEQ ID NO: 4356411 - DNA, 25 bp, Homo sapien
catttgtccaaggctaaaaatttgg

SEQ ID NO: 4356412 - DNA, 25 bp, Homo sapien
gaaaataatctttatcacacatacc

SEQ ID NO: 4356413 - DNA, 25 bp, Homo sapien
taaaacaaccacaggtaattcttca

SEQ ID NO: 4356414 - DNA, 25 bp, Homo sapien
cacatacccctaagttgtgtgtcaa

SEQ ID NO: 4356415 - DNA, 25 bp, Homo sapien
catacacggaataggatgaaaataa

SEQ ID NO: 4356416 - DNA, 25 bp, Homo sapien
ggcaaacttcacatgaaggtgggca

SEQ ID NO: 4356417 - DNA, 25 bp, Homo sapien
gcagctggacttcctaatgtgttat

SEQ ID NO: 4356418 - DNA, 25 bp, Homo sapien
ccaataagtaggtttgagatgctct

SEQ ID NO: 4356419 - DNA, 25 bp, Homo sapien
gatgctgcatcaaggcggcaaactt

SEQ ID NO: 4356420 - DNA, 25 bp, Homo sapien
aatgatatatacttcttggccaatc

SEQ ID NO: 4356421 - DNA, 25 bp, Homo sapien
gagacaagaatatatctataggctg

SEQ ID NO: 4356422 - DNA, 25 bp, Homo sapien
tccataatgatatatacttcttggc

SEQ ID NO: 4356423 - DNA, 25 bp, Homo sapien
ggccaatcatgagacaagaatatat

SEQ ID NO: 4356424 - DNA, 25 bp, Homo sapien
cctgattgtagatgaattataaggg

SEQ ID NO: 4356425 - DNA, 25 bp, Homo sapien
catgatatatactcctgattgtaga

SEQ ID NO: 4356426 - DNA, 25 bp, Homo sapien
tttctcacatgatatatactcctga

SEQ ID NO: 4356427 - DNA, 25 bp, Homo sapien
ttataaggggggcactcaaaatgac

SEQ ID NO: 4356428 - DNA, 25 bp, Homo sapien
cttttcgatagtcatgagatttaaa

SEQ ID NO: 4356429 - DNA, 25 bp, Homo sapien
caccgatccttacacctcggtattt

SEQ ID NO: 4356430 - DNA, 25 bp, Homo sapien
tacacctcggtattttaccacacca

SEQ ID NO: 4356431 - DNA, 25 bp, Homo sapien
gatttaaagataccagagattccac

SEQ ID NO: 4356432 - DNA, 25 bp, Homo sapien
ctcttgcaaatgatttgaggcttca

SEQ ID NO: 4356433 - DNA, 25 bp, Homo sapien
ccaccatagggtaactcttgcaaat

SEQ ID NO: 4356434 - DNA, 25 bp, Homo sapien
gaggcttcatggtttcccccaatga

SEQ ID NO: 4356435 - DNA, 25 bp, Homo sapien
acccagccaccatagggtaactctt

SEQ ID NO: 4356436 - DNA, 25 bp, Homo sapien
ggccatgcagcgtagatccgcctcg

SEQ ID NO: 4356437 - DNA, 25 bp, Homo sapien
aaggtttgcatgtgacgatacttgg

SEQ ID NO: 4356438 - DNA, 25 bp, Homo sapien
tgcagcgtagatccgcctcgttgcg

SEQ ID NO: 4356439 - DNA, 25 bp, Homo sapien
atacttgggcggcacggccatgcag

SEQ ID NO: 4356440 - DNA, 25 bp, Homo sapien
ctggaagtcgccgcagcacagcaag

SEQ ID NO: 4356441 - DNA, 25 bp, Homo sapien
tggaagtcgccgcagcacagcaaga

SEQ ID NO: 4356442 - DNA, 25 bp, Homo sapien
ggaagtcgccgcagcacagcaagag

SEQ ID NO: 4356443 - DNA, 25 bp, Homo sapien
cagcgtctcatagatcttatccagc

SEQ ID NO: 4356444 - DNA, 25 bp, Homo sapien
tcatagatcttatccagctcgccgt

SEQ ID NO: 4356445 - DNA, 25 bp, Homo sapien
atcttatccagctcgccgtggcagc

SEQ ID NO: 4356446 - DNA, 25 bp, Homo sapien
tctgccagcgccagcgtctcataga

SEQ ID NO: 4356447 - DNA, 25 bp, Homo sapien
cctgggtgtagactcctgcaaaata

SEQ ID NO: 4356448 - DNA, 25 bp, Homo sapien
ggtgagcgctgcctgcaacgcccta

SEQ ID NO: 4356449 - DNA, 25 bp, Homo sapien
agcccaggaccgactgatcgctcag

SEQ ID NO: 4356450 - DNA, 25 bp, Homo sapien
tcagctcccgccaactttaataagt

SEQ ID NO: 4356451 - DNA, 25 bp, Homo sapien
gtggctgggcttatagacaactggc

SEQ ID NO: 4356452 - DNA, 25 bp, Homo sapien
aacgctctgccttgtgaagcgccgg

SEQ ID NO: 4356453 - DNA, 25 bp, Homo sapien
ccttttagcgatgccgcttcccggg

SEQ ID NO: 4356454 - DNA, 25 bp, Homo sapien
ggactttgccaagcgtttcactgag

SEQ ID NO: 4356455 - DNA, 25 bp, Homo sapien
ccctttctagtggtgtgcttggaca

SEQ ID NO: 4356456 - DNA, 25 bp, Homo sapien
gatacgttgtggatcagttggcact

SEQ ID NO: 4356457 - DNA, 25 bp, Homo sapien
taaagataacactgcccatattgcc

SEQ ID NO: 4356458 - DNA, 25 bp, Homo sapien
gagacctaattagctgtcagctaga

SEQ ID NO: 4356459 - DNA, 25 bp, Homo sapien
ttaatgtactgatgatatgagttta

SEQ ID NO: 4356460 - DNA, 25 bp, Homo sapien
tgcatgagctaaagataaagagttc

SEQ ID NO: 4356461 - DNA, 25 bp, Homo sapien
gctccaggaaattttgtatctctgg

SEQ ID NO: 4356462 - DNA, 25 bp, Homo sapien
tctctggtttcagtagaatgtagac

SEQ ID NO: 4356463 - DNA, 25 bp, Homo sapien
ttgcaaagagagtaagccagtcacc

SEQ ID NO: 4356464 - DNA, 25 bp, Homo sapien
tgctgctggtctcaaagtactttct

SEQ ID NO: 4356465 - DNA, 25 bp, Homo sapien
tcctgctcaaaggatcccatagagg

SEQ ID NO: 4356466 - DNA, 25 bp, Homo sapien
tcagggagtcatgcctcataaatct

SEQ ID NO: 4356467 - DNA, 25 bp, Homo sapien
ccacccctggctgattttttctata

SEQ ID NO: 4356468 - DNA, 25 bp, Homo sapien
gcgtgagccaccgtgtccggcctgt

SEQ ID NO: 4356469 - DNA, 25 bp, Homo sapien
tatattttagtagagacagggtttc

SEQ ID NO: 4356470 - DNA, 25 bp, Homo sapien
aggcgtgagccaccgtgtccggcct

SEQ ID NO: 4356471 - DNA, 25 bp, Homo sapien
ttttacaggttcgaatgcaagcact

SEQ ID NO: 4356472 - DNA, 25 bp, Homo sapien
aggtatcgatgaccctggtaaatgg

SEQ ID NO: 4356473 - DNA, 25 bp, Homo sapien
tactctgcagctgtacaggtgttat

SEQ ID NO: 4356474 - DNA, 25 bp, Homo sapien
cagtggcacctacatgatttaattg

SEQ ID NO: 4356475 - DNA, 25 bp, Homo sapien
catggccgtgctggaatgacaaata

SEQ ID NO: 4356476 - DNA, 25 bp, Homo sapien
tttaaaacatgctcacgaactccgc

SEQ ID NO: 4356477 - DNA, 25 bp, Homo sapien
tttagaacatagagtggcatggccg

SEQ ID NO: 4356478 - DNA, 25 bp, Homo sapien
gagtgacgtcaacctgaaagtcgtg

SEQ ID NO: 4356479 - DNA, 25 bp, Homo sapien
aggatgttctcgatgtcccgacctc

SEQ ID NO: 4356480 - DNA, 25 bp, Homo sapien
caggatgttctcgatgtcccgacct

SEQ ID NO: 4356481 - DNA, 25 bp, Homo sapien
ggatgttctcgatgtcccgacctcg

SEQ ID NO: 4356482 - DNA, 25 bp, Homo sapien
atgttctcgatgtcccgacctcgtg

SEQ ID NO: 4356483 - DNA, 25 bp, Homo sapien
tgtcagtgtattcactatagtgccc

SEQ ID NO: 4356484 - DNA, 25 bp, Homo sapien
tttgtatccatacacagacggtctc

SEQ ID NO: 4356485 - DNA, 25 bp, Homo sapien
gtctccatgccctcaagcttgcaaa

SEQ ID NO: 4356486 - DNA, 25 bp, Homo sapien
tccttccctgctgacctgaaaattt

SEQ ID NO: 4356487 - DNA, 25 bp, Homo sapien
tacttgtttcagtgtgtggccccat

SEQ ID NO: 4356488 - DNA, 25 bp, Homo sapien
ggtttttctagagcaacatcagcag

SEQ ID NO: 4356489 - DNA, 25 bp, Homo sapien
gcttacacggaaagaacagtcatgt

SEQ ID NO: 4356490 - DNA, 25 bp, Homo sapien
catggagacctttcgtcagaagtgg

SEQ ID NO: 4356491 - DNA, 25 bp, Homo sapien
tcaaggtccctacgaagatgaggtg

SEQ ID NO: 4356492 - DNA, 25 bp, Homo sapien
aaccttggctgtgtactggactcac

SEQ ID NO: 4356493 - DNA, 25 bp, Homo sapien
tcaaccttggctgtgtactggactc

SEQ ID NO: 4356494 - DNA, 25 bp, Homo sapien
cttcaaccttggctgtgtactggac

SEQ ID NO: 4356495 - DNA, 25 bp, Homo sapien
caaccttggctgtgtactggactca

SEQ ID NO: 4356496 - DNA, 25 bp, Homo sapien
tattaactaagctttagttactcat

SEQ ID NO: 4356497 - DNA, 25 bp, Homo sapien
acagagataatgtgttgttcttagt

SEQ ID NO: 4356498 - DNA, 25 bp, Homo sapien
tattacaccttaaccttatatccag

SEQ ID NO: 4356499 - DNA, 25 bp, Homo sapien
tgttcttagtctcggcaatccctgg

SEQ ID NO: 4356500 - DNA, 25 bp, Homo sapien
tatacgtgccatacgacccagcaat

SEQ ID NO: 4356501 - DNA, 25 bp, Homo sapien
cagcaatgccattcctagccgttta

SEQ ID NO: 4356502 - DNA, 25 bp, Homo sapien
gcagagcatctagtggaaatgcaaa

SEQ ID NO: 4356503 - DNA, 25 bp, Homo sapien
tacagttgctagcaaggatgcagag

SEQ ID NO: 4356504 - DNA, 25 bp, Homo sapien
tgagtgtaccatcaaagtcaagtcc

SEQ ID NO: 4356505 - DNA, 25 bp, Homo sapien
gctgctggcataaacagtgggctct

SEQ ID NO: 4356506 - DNA, 25 bp, Homo sapien
tgagcttgtaccttgaggactggaa

SEQ ID NO: 4356507 - DNA, 25 bp, Homo sapien
ccatccacatgctgaaggctggatc

SEQ ID NO: 4356508 - DNA, 25 bp, Homo sapien
gaacaagatgaaattgtagccttct

SEQ ID NO: 4356509 - DNA, 25 bp, Homo sapien
cagttatggtgtcatcaggtgtgat

SEQ ID NO: 4356510 - DNA, 25 bp, Homo sapien
ccgtaacaacacacatctcacattg

SEQ ID NO: 4356511 - DNA, 25 bp, Homo sapien
tgaaattgtagccttcttccacggt

SEQ ID NO: 4356512 - DNA, 25 bp, Homo sapien
ttttccagggtttaagcattgcttg

SEQ ID NO: 4356513 - DNA, 25 bp, Homo sapien
caatttttgcctatgctgcagccac

SEQ ID NO: 4356514 - DNA, 25 bp, Homo sapien
gagctactcggactctttattagaa

SEQ ID NO: 4356515 - DNA, 25 bp, Homo sapien
tgtatgtgcacgtacatgggccaga

SEQ ID NO: 4356516 - DNA, 25 bp, Homo sapien
tcgctctaatactgcattctgtttc

SEQ ID NO: 4356517 - DNA, 25 bp, Homo sapien
ctaagcttctcgctctaatactgca

SEQ ID NO: 4356518 - DNA, 25 bp, Homo sapien
cctgattgtaatccaaaatttatga

SEQ ID NO: 4356519 - DNA, 25 bp, Homo sapien
tgtttctccttttgtgccctgattg

SEQ ID NO: 4356520 - DNA, 25 bp, Homo sapien
gcatccagcttcctgacaggtcctg

SEQ ID NO: 4356521 - DNA, 25 bp, Homo sapien
ctgttgggcacattgagatcctgta

SEQ ID NO: 4356522 - DNA, 25 bp, Homo sapien
gttccgatgagcactgtggacatgt

SEQ ID NO: 4356523 - DNA, 25 bp, Homo sapien
tccaagtcgtttgccactcgtgaag

SEQ ID NO: 4356524 - DNA, 25 bp, Homo sapien
tataacccagtatcctctgagatga

SEQ ID NO: 4356525 - DNA, 25 bp, Homo sapien
tctgagatgacacttatatctcaca

SEQ ID NO: 4356526 - DNA, 25 bp, Homo sapien
aacaccatctcatataacccagtat

SEQ ID NO: 4356527 - DNA, 25 bp, Homo sapien
cacttatatctcacaacaggatgta

SEQ ID NO: 4356528 - DNA, 25 bp, Homo sapien
tttaataaggcagaaaagtatatac

SEQ ID NO: 4356529 - DNA, 25 bp, Homo sapien
tctacaaaagacagctaaaccaaaa

SEQ ID NO: 4356530 - DNA, 25 bp, Homo sapien
tccgattccggaggtctgttttgtg

SEQ ID NO: 4356531 - DNA, 25 bp, Homo sapien
ttgtgcagtagacccctggtcacgt

SEQ ID NO: 4356532 - DNA, 25 bp, Homo sapien
tattggtactcaaaagagtaagttc

SEQ ID NO: 4356533 - DNA, 25 bp, Homo sapien
cagtgggccccgctgttgcttcagc

SEQ ID NO: 4356534 - DNA, 25 bp, Homo sapien
gtgggccccgctgttgcttcagcct

SEQ ID NO: 4356535 - DNA, 25 bp, Homo sapien
aagcaaagcgcctcagtgggccccg

SEQ ID NO: 4356536 - DNA, 25 bp, Homo sapien
gaaagcaaagcgcctcagtgggccc

SEQ ID NO: 4356537 - DNA, 25 bp, Homo sapien
aagcacatagttacaaattccttgt

SEQ ID NO: 4356538 - DNA, 25 bp, Homo sapien
aacaggactgtattaggttgaagac

SEQ ID NO: 4356539 - DNA, 25 bp, Homo sapien
tgatttaataaagaccaagtctgcc

SEQ ID NO: 4356540 - DNA, 25 bp, Homo sapien
gacctgtattttcagaacaggactg

SEQ ID NO: 4356541 - DNA, 25 bp, Homo sapien
catttctgtgccgtactgagctcgg

SEQ ID NO: 4356542 - DNA, 25 bp, Homo sapien
gaaaatttcaaactggggaagagca

SEQ ID NO: 4356543 - DNA, 25 bp, Homo sapien
catggacggcattgaagggcatttc

SEQ ID NO: 4356544 - DNA, 25 bp, Homo sapien
tctctgtcccggcttccatggacgg

SEQ ID NO: 4356545 - DNA, 25 bp, Homo sapien
catgatcaccgactaccaatcagca

SEQ ID NO: 4356546 - DNA, 25 bp, Homo sapien
tttgctttctggcaacatgatcacc

SEQ ID NO: 4356547 - DNA, 25 bp, Homo sapien
catttatttggtcatggcagtgtgc

SEQ ID NO: 4356548 - DNA, 25 bp, Homo sapien
tagcagctggcatttatttggtcat

SEQ ID NO: 4356549 - DNA, 25 bp, Homo sapien
acattttcgccacagctctatgagg

SEQ ID NO: 4356550 - DNA, 25 bp, Homo sapien
ttttcgccacagctctatgagggag

SEQ ID NO: 4356551 - DNA, 25 bp, Homo sapien
gccacagctctatgagggagtctac

SEQ ID NO: 4356552 - DNA, 25 bp, Homo sapien
tcgccacagctctatgagggagtct

SEQ ID NO: 4356553 - DNA, 25 bp, Homo sapien
gatttggattgctggcgccaagcta

SEQ ID NO: 4356554 - DNA, 25 bp, Homo sapien
taccaaaggctagcaccataccaag

SEQ ID NO: 4356555 - DNA, 25 bp, Homo sapien
tgtgtgtcaagcactactcggtgag

SEQ ID NO: 4356556 - DNA, 25 bp, Homo sapien
tgtcagcttcaaaggccaaggtaaa

SEQ ID NO: 4356557 - DNA, 25 bp, Homo sapien
ggcttggtccactgcacatgtgatg

SEQ ID NO: 4356558 - DNA, 25 bp, Homo sapien
atgacggttcgccaggtagtgacca

SEQ ID NO: 4356559 - DNA, 25 bp, Homo sapien
tcctcgaagccctcagtcctggtga

SEQ ID NO: 4356560 - DNA, 25 bp, Homo sapien
tgcacatgtgatgtaccagcttctc

SEQ ID NO: 4356561 - DNA, 25 bp, Homo sapien
tgatatcaatctataagcataatgt

SEQ ID NO: 4356562 - DNA, 25 bp, Homo sapien
ttcttctgtcacaaactgatatcaa

SEQ ID NO: 4356563 - DNA, 25 bp, Homo sapien
acagtgtgttgaacttgtggaagta

SEQ ID NO: 4356564 - DNA, 25 bp, Homo sapien
gtgtgttgaacttgtggaagtagat

SEQ ID NO: 4356565 - DNA, 25 bp, Homo sapien
tggtagaaaagtcgcacttctgcct

SEQ ID NO: 4356566 - DNA, 25 bp, Homo sapien
gcctctgtcatggttctctcttcat

SEQ ID NO: 4356567 - DNA, 25 bp, Homo sapien
ctctccagctttgtgttggtagaaa

SEQ ID NO: 4356568 - DNA, 25 bp, Homo sapien
tgcctctgtcatggttctctcttca

SEQ ID NO: 4356569 - DNA, 25 bp, Homo sapien
tatatataaatattctaaaagggta

SEQ ID NO: 4356570 - DNA, 25 bp, Homo sapien
gtaaatcaagcccaaattcacattg

SEQ ID NO: 4356571 - DNA, 25 bp, Homo sapien
atatatataaatattctaaaagggt

SEQ ID NO: 4356572 - DNA, 25 bp, Homo sapien
agggtaaatcaagcccaaattcaca

SEQ ID NO: 4356573 - DNA, 25 bp, Homo sapien
catccctgtttatccacaaaagagg

SEQ ID NO: 4356574 - DNA, 25 bp, Homo sapien
gacacaaggacagtggtgcatggta

SEQ ID NO: 4356575 - DNA, 25 bp, Homo sapien
ggtgcatggtaagtgttgtctctct

SEQ ID NO: 4356576 - DNA, 25 bp, Homo sapien
tgcactaagatatcactgcccagtg

SEQ ID NO: 4356577 - DNA, 25 bp, Homo sapien
actgcatctggtttaatgatggcca

SEQ ID NO: 4356578 - DNA, 25 bp, Homo sapien
tcagtctttccatgggccactgcat

SEQ ID NO: 4356579 - DNA, 25 bp, Homo sapien
tcatgataatctcatcagtctttcc

SEQ ID NO: 4356580 - DNA, 25 bp, Homo sapien
atgatggccaaggtacaggtcctct

SEQ ID NO: 4356581 - DNA, 25 bp, Homo sapien
atggtgctgtcagatgctgatgttt

SEQ ID NO: 4356582 - DNA, 25 bp, Homo sapien
agaggccatccacaaaaaacaatgc

SEQ ID NO: 4356583 - DNA, 25 bp, Homo sapien
tacacaaggctccattgcaccaagt

SEQ ID NO: 4356584 - DNA, 25 bp, Homo sapien
aacctctacacaaggctccattgca

SEQ ID NO: 4356585 - DNA, 25 bp, Homo sapien
gaggccatccacaaaaaacaatgca

SEQ ID NO: 4356586 - DNA, 25 bp, Homo sapien
ctgtgcctctgatactttttccctt

SEQ ID NO: 4356587 - DNA, 25 bp, Homo sapien
ctcctgtgcctctgatactttttcc

SEQ ID NO: 4356588 - DNA, 25 bp, Homo sapien
ctgccatgtggctaaaaatggctcc

SEQ ID NO: 4356589 - DNA, 25 bp, Homo sapien
tcctgtgcctctgatactttttccc

SEQ ID NO: 4356590 - DNA, 25 bp, Homo sapien
agtaaactgaatactcatctatttt

SEQ ID NO: 4356591 - DNA, 25 bp, Homo sapien
taaactgaatactcatctattttaa

SEQ ID NO: 4356592 - DNA, 25 bp, Homo sapien
gtaaactgaatactcatctatttta

SEQ ID NO: 4356593 - DNA, 25 bp, Homo sapien
atcttcatcagaaagagcctcatct

SEQ ID NO: 4356594 - DNA, 25 bp, Homo sapien
atgggaaacacattcatcttcatca

SEQ ID NO: 4356595 - DNA, 25 bp, Homo sapien
tcaccattattctttccatgggaaa

SEQ ID NO: 4356596 - DNA, 25 bp, Homo sapien
ccattattctttccatgggaaacac

SEQ ID NO: 4356597 - DNA, 25 bp, Homo sapien
atggggactgctgatctcgccctac

SEQ ID NO: 4356598 - DNA, 25 bp, Homo sapien
gagatggggactgctgatctcgccc

SEQ ID NO: 4356599 - DNA, 25 bp, Homo sapien
aggagatggggactgctgatctcgc

SEQ ID NO: 4356600 - DNA, 25 bp, Homo sapien
gatggggactgctgatctcgcccta

SEQ ID NO: 4356601 - DNA, 25 bp, Homo sapien
gtgagttagctgcttatagaagtga

SEQ ID NO: 4356602 - DNA, 25 bp, Homo sapien
tgtgagttagctgcttatagaagtg

SEQ ID NO: 4356603 - DNA, 25 bp, Homo sapien
ttgtgagttagctgcttatagaagt

SEQ ID NO: 4356604 - DNA, 25 bp, Homo sapien
cttttcggcctccagctggtctagg

SEQ ID NO: 4356605 - DNA, 25 bp, Homo sapien
tcttttcggcctccagctggtctag

SEQ ID NO: 4356606 - DNA, 25 bp, Homo sapien
actttcttttcggcctccagctggt

SEQ ID NO: 4356607 - DNA, 25 bp, Homo sapien
tttcttttcggcctccagctggtct

SEQ ID NO: 4356608 - DNA, 25 bp, Homo sapien
catagagtgggtcctccttccattt

SEQ ID NO: 4356609 - DNA, 25 bp, Homo sapien
gtgggccaccatagggttgaagatt

SEQ ID NO: 4356610 - DNA, 25 bp, Homo sapien
ggagaagttcacatagagtgggtcc

SEQ ID NO: 4356611 - DNA, 25 bp, Homo sapien
aaagaaatggatctggagagggaga

SEQ ID NO: 4356612 - DNA, 25 bp, Homo sapien
tctgtacttttcgaggacatcaaga

SEQ ID NO: 4356613 - DNA, 25 bp, Homo sapien
tggctcgcacttccctctgtacttt

SEQ ID NO: 4356614 - DNA, 25 bp, Homo sapien
aggacatcaagacgatctgcctctg

SEQ ID NO: 4356615 - DNA, 25 bp, Homo sapien
aaacagaaaggttggctcgcacttc

SEQ ID NO: 4356616 - DNA, 25 bp, Homo sapien
gggaataggaaccttcataactaga

SEQ ID NO: 4356617 - DNA, 25 bp, Homo sapien
gaaaggtcactctcacacttctcct

SEQ ID NO: 4356618 - DNA, 25 bp, Homo sapien
tacaatgttgtatgactgttggctg

SEQ ID NO: 4356619 - DNA, 25 bp, Homo sapien
gaaccttcataactagagaaattag

SEQ ID NO: 4356620 - DNA, 25 bp, Homo sapien
caaagtgcagaaggtccaggccgac

SEQ ID NO: 4356621 - DNA, 25 bp, Homo sapien
gcaaagtgcagaaggtccaggccga

SEQ ID NO: 4356622 - DNA, 25 bp, Homo sapien
tcatcttctggaagaggctcaccac

SEQ ID NO: 4356623 - DNA, 25 bp, Homo sapien
agaggctcaccacaggtttgcaggg

SEQ ID NO: 4356624 - DNA, 25 bp, Homo sapien
caccagccttgatagacatcaacaa

SEQ ID NO: 4356625 - DNA, 25 bp, Homo sapien
ccacaccagccttgatagacatcaa

SEQ ID NO: 4356626 - DNA, 25 bp, Homo sapien
cagttagtcctttggaactgagcat

SEQ ID NO: 4356627 - DNA, 25 bp, Homo sapien
ccaaagctcttgggtgctgatgttg

SEQ ID NO: 4356628 - DNA, 25 bp, Homo sapien
aaagctcttgggtgctgatgttgac

SEQ ID NO: 4356629 - DNA, 25 bp, Homo sapien
caaagctcttgggtgctgatgttga

SEQ ID NO: 4356630 - DNA, 25 bp, Homo sapien
cccaaagctcttgggtgctgatgtt

SEQ ID NO: 4356631 - DNA, 25 bp, Homo sapien
tgagaactgcttgaacgtgagaggt

SEQ ID NO: 4356632 - DNA, 25 bp, Homo sapien
ttgcactgagatgagatcatgccgc

SEQ ID NO: 4356633 - DNA, 25 bp, Homo sapien
gttgcactgagatgagatcatgccg

SEQ ID NO: 4356634 - DNA, 25 bp, Homo sapien
agacatgagaactgcttgaacgtga

SEQ ID NO: 4356635 - DNA, 25 bp, Homo sapien
gtcatcactggggttccaagataag

SEQ ID NO: 4356636 - DNA, 25 bp, Homo sapien
cactggggttccaagataagttttg

SEQ ID NO: 4356637 - DNA, 25 bp, Homo sapien
attttgtttgcgtaaaatttgtcat

SEQ ID NO: 4356638 - DNA, 25 bp, Homo sapien
ttttgtttgcgtaaaatttgtcatc

SEQ ID NO: 4356639 - DNA, 25 bp, Homo sapien
tgcagggcaatttccttcttcctgc

SEQ ID NO: 4356640 - DNA, 25 bp, Homo sapien
gggcaatttccttcttcctgctgcc

SEQ ID NO: 4356641 - DNA, 25 bp, Homo sapien
ctgcagggcaatttccttcttcctg

SEQ ID NO: 4356642 - DNA, 25 bp, Homo sapien
caatttccttcttcctgctgcccat

SEQ ID NO: 4356643 - DNA, 25 bp, Homo sapien
tgcaaagaagacgaagccctgttac

SEQ ID NO: 4356644 - DNA, 25 bp, Homo sapien
gcgtggatcagcaagcccagagcct

SEQ ID NO: 4356645 - DNA, 25 bp, Homo sapien
agcctcgcgacaaaccgctgcgtgg

SEQ ID NO: 4356646 - DNA, 25 bp, Homo sapien
cgaagccctgttaccgcggccgtgg

SEQ ID NO: 4356647 - DNA, 25 bp, Homo sapien
aagtgagccactgcgaacgacaggt

SEQ ID NO: 4356648 - DNA, 25 bp, Homo sapien
cgagtctgccgcgacctagccgcgg

SEQ ID NO: 4356649 - DNA, 25 bp, Homo sapien
gcgacctagccgcggtcgtcatggc

SEQ ID NO: 4356650 - DNA, 25 bp, Homo sapien
gcggtcgtcatggcaacctggcccc

SEQ ID NO: 4356651 - DNA, 25 bp, Homo sapien
tgccgcgacctagccgcggtcgtca

SEQ ID NO: 4356652 - DNA, 25 bp, Homo sapien
catctgtgcgttgcacagtcgcatc

SEQ ID NO: 4356653 - DNA, 25 bp, Homo sapien
tgtgcgttgcacagtcgcatctgtg

SEQ ID NO: 4356654 - DNA, 25 bp, Homo sapien
ccagtgcatctgtgcgttgcacagt

SEQ ID NO: 4356655 - DNA, 25 bp, Homo sapien
ttgcacagtcgcatctgtgaatccc

SEQ ID NO: 4356656 - DNA, 25 bp, Homo sapien
tgatcatcagcaagtgccccaaact

SEQ ID NO: 4356657 - DNA, 25 bp, Homo sapien
ctccattacaggtcctcctgctagg

SEQ ID NO: 4356658 - DNA, 25 bp, Homo sapien
ggtcactgaacgctttgctggtttc

SEQ ID NO: 4356659 - DNA, 25 bp, Homo sapien
cctcctgctaggcaaacttgatcat

SEQ ID NO: 4356660 - DNA, 25 bp, Homo sapien
ggagatttaaaggttggagcgcaga

SEQ ID NO: 4356661 - DNA, 25 bp, Homo sapien
agaggccgagtcgaattcccactcg

SEQ ID NO: 4356662 - DNA, 25 bp, Homo sapien
atctgacccgggtaagtgctgggcc

SEQ ID NO: 4356663 - DNA, 25 bp, Homo sapien
gcgcagaggctcttaaagaggccga

SEQ ID NO: 4356664 - DNA, 25 bp, Homo sapien
cgtgaaatcggccacgaccaagacc

SEQ ID NO: 4356665 - DNA, 25 bp, Homo sapien
cgcggtgagtggtcgggcggccttg

SEQ ID NO: 4356666 - DNA, 25 bp, Homo sapien
ggctcccgcgtaacggtgtgcgttc

SEQ ID NO: 4356667 - DNA, 25 bp, Homo sapien
accggctgtgcgtggcgttttgccc

SEQ ID NO: 4356668 - DNA, 25 bp, Homo sapien
gactattggcctctgataaattagg

SEQ ID NO: 4356669 - DNA, 25 bp, Homo sapien
cctggaaccaggaatgactattggc

SEQ ID NO: 4356670 - DNA, 25 bp, Homo sapien
cctgggatgactggtcctaacctca

SEQ ID NO: 4356671 - DNA, 25 bp, Homo sapien
cctaagctctagtgatcacctggaa

SEQ ID NO: 4356672 - DNA, 25 bp, Homo sapien
cattgtgtagtttgtacaagcatac

SEQ ID NO: 4356673 - DNA, 25 bp, Homo sapien
aatgttcttaagtgtccagaggatg

SEQ ID NO: 4356674 - DNA, 25 bp, Homo sapien
catactcatgtgaactgaatgggaa

SEQ ID NO: 4356675 - DNA, 25 bp, Homo sapien
gaatgcattcttgtgcaatgctgga

SEQ ID NO: 4356676 - DNA, 25 bp, Homo sapien
caggcatagaaggtacagtcacctt

SEQ ID NO: 4356677 - DNA, 25 bp, Homo sapien
gcatagaaggtacagtcacctttat

SEQ ID NO: 4356678 - DNA, 25 bp, Homo sapien
ggcaggcatagaaggtacagtcacc

SEQ ID NO: 4356679 - DNA, 25 bp, Homo sapien
ggcatagaaggtacagtcaccttta

SEQ ID NO: 4356680 - DNA, 25 bp, Homo sapien
aaccaggtgcctggtactgggtcct

SEQ ID NO: 4356681 - DNA, 25 bp, Homo sapien
accaggtgcctggtactgggtcctt

SEQ ID NO: 4356682 - DNA, 25 bp, Homo sapien
agaaaaaaccaggtgcctggtactg

SEQ ID NO: 4356683 - DNA, 25 bp, Homo sapien
cagaaaaaaccaggtgcctggtact

SEQ ID NO: 4356684 - DNA, 25 bp, Homo sapien
ctgaatccactaatctggggctggg

SEQ ID NO: 4356685 - DNA, 25 bp, Homo sapien
cctgaatccactaatctggggctgg

SEQ ID NO: 4356686 - DNA, 25 bp, Homo sapien
tgaatccactaatctggggctgggt

SEQ ID NO: 4356687 - DNA, 25 bp, Homo sapien
ctttggacaggccttgcctcgcagg

SEQ ID NO: 4356688 - DNA, 25 bp, Homo sapien
caggaatggagcagcaagctggtta

SEQ ID NO: 4356689 - DNA, 25 bp, Homo sapien
cttgcctcgcaggaatggagcagca

SEQ ID NO: 4356690 - DNA, 25 bp, Homo sapien
acaggccttgcctcgcaggaatgga

SEQ ID NO: 4356691 - DNA, 25 bp, Homo sapien
caggagactctgtgcttgggttagt

SEQ ID NO: 4356692 - DNA, 25 bp, Homo sapien
ggacaatgctagtggtggttgctca

SEQ ID NO: 4356693 - DNA, 25 bp, Homo sapien
acagtggtggacagccttgctaggc

SEQ ID NO: 4356694 - DNA, 25 bp, Homo sapien
gagagcttcatggatggcattccag

SEQ ID NO: 4356695 - DNA, 25 bp, Homo sapien
ggccaggtggccaagtagcaggcat

SEQ ID NO: 4356696 - DNA, 25 bp, Homo sapien
aggccaggtggccaagtagcaggca

SEQ ID NO: 4356697 - DNA, 25 bp, Homo sapien
gaggccaggtggccaagtagcaggc

SEQ ID NO: 4356698 - DNA, 25 bp, Homo sapien
tggtttctgcatacctactctgaga

SEQ ID NO: 4356699 - DNA, 25 bp, Homo sapien
ggtcgcagatggctccgccctgagt

SEQ ID NO: 4356700 - DNA, 25 bp, Homo sapien
aaatgttcctattgcttttaacgtg

SEQ ID NO: 4356701 - DNA, 25 bp, Homo sapien
taacgtgatcactattgaattataa

SEQ ID NO: 4356702 - DNA, 25 bp, Homo sapien
ttgccatatgaggaagcatgtggta

SEQ ID NO: 4356703 - DNA, 25 bp, Homo sapien
tgtttgggaggtgcccgaatactga

SEQ ID NO: 4356704 - DNA, 25 bp, Homo sapien
aaagacccagttattgacagttgcc

SEQ ID NO: 4356705 - DNA, 25 bp, Homo sapien
tactgatgggaaagacccagttatt

SEQ ID NO: 4356706 - DNA, 25 bp, Homo sapien
tgcaggtcagcgctctggtgaagct

SEQ ID NO: 4356707 - DNA, 25 bp, Homo sapien
gtcactctccccagcgtgtcctcat

SEQ ID NO: 4356708 - DNA, 25 bp, Homo sapien
catttctgggaattgtgcagaaggg

SEQ ID NO: 4356709 - DNA, 25 bp, Homo sapien
tcctggaatgcagagccatttcctc

SEQ ID NO: 4356710 - DNA, 25 bp, Homo sapien
agtgtggttcatatctcttggcgtc

SEQ ID NO: 4356711 - DNA, 25 bp, Homo sapien
aaaaaatctttctctgtaccgcatg

SEQ ID NO: 4356712 - DNA, 25 bp, Homo sapien
tgcggtgacttttcgtcgtagcctg

SEQ ID NO: 4356713 - DNA, 25 bp, Homo sapien
catgagaccagcttattttgtagga

SEQ ID NO: 4356714 - DNA, 25 bp, Homo sapien
gcagccagcgacaggcattgaatgt

SEQ ID NO: 4356715 - DNA, 25 bp, Homo sapien
cagtagagtataaggggctgcggca

SEQ ID NO: 4356716 - DNA, 25 bp, Homo sapien
gtataaggggctgcggcacgggtgt

SEQ ID NO: 4356717 - DNA, 25 bp, Homo sapien
cagcgacaggcattgaatgtcctgt

SEQ ID NO: 4356718 - DNA, 25 bp, Homo sapien
agcaaaagcctggctcttctcctgc

SEQ ID NO: 4356719 - DNA, 25 bp, Homo sapien
aaagcctggctcttctcctgcacca

SEQ ID NO: 4356720 - DNA, 25 bp, Homo sapien
caaaagcctggctcttctcctgcac

SEQ ID NO: 4356721 - DNA, 25 bp, Homo sapien
tcaaagagcaaaagcctggctcttc

SEQ ID NO: 4356722 - DNA, 25 bp, Homo sapien
cccaaacctcagacacaagtgctgt

SEQ ID NO: 4356723 - DNA, 25 bp, Homo sapien
ccacacacttgaatccacattcttt

SEQ ID NO: 4356724 - DNA, 25 bp, Homo sapien
caagtgctgttgtcttctcagaggg

SEQ ID NO: 4356725 - DNA, 25 bp, Homo sapien
tggcttttcccccacacacttgaat

SEQ ID NO: 4356726 - DNA, 25 bp, Homo sapien
cgcagctgctctgcagccagtgtac

SEQ ID NO: 4356727 - DNA, 25 bp, Homo sapien
caggtgagcgcagctgctctgcagc

SEQ ID NO: 4356728 - DNA, 25 bp, Homo sapien
tttccaggtgagcgcagctgctctg

SEQ ID NO: 4356729 - DNA, 25 bp, Homo sapien
tccaggtgagcgcagctgctctgca

SEQ ID NO: 4356730 - DNA, 25 bp, Homo sapien
ctcagtgaggcttggactcagtgat

SEQ ID NO: 4356731 - DNA, 25 bp, Homo sapien
ggtgtgagtggaatatgcaactccc

SEQ ID NO: 4356732 - DNA, 25 bp, Homo sapien
tctctaccactggaaaattgctgct

SEQ ID NO: 4356733 - DNA, 25 bp, Homo sapien
tgggctcgttccagatttgtcagca

SEQ ID NO: 4356734 - DNA, 25 bp, Homo sapien
tctttgtccgtttcatgatctggcc

SEQ ID NO: 4356735 - DNA, 25 bp, Homo sapien
gatgcttgtacctttccgattataa

SEQ ID NO: 4356736 - DNA, 25 bp, Homo sapien
tggctcctaccctcacacattggat

SEQ ID NO: 4356737 - DNA, 25 bp, Homo sapien
tcttttggttaccatgtggctggca

SEQ ID NO: 4356738 - DNA, 25 bp, Homo sapien
tccagattccgtacatagaaaccag

SEQ ID NO: 4356739 - DNA, 25 bp, Homo sapien
aggacccacctctcaatgtcgacaa

SEQ ID NO: 4356740 - DNA, 25 bp, Homo sapien
gatcaagttgagctttgccttccag

SEQ ID NO: 4356741 - DNA, 25 bp, Homo sapien
aagccttccatgacctcgttagagt

SEQ ID NO: 4356742 - DNA, 25 bp, Homo sapien
tccacactgtacaaactaggtctct

SEQ ID NO: 4356743 - DNA, 25 bp, Homo sapien
tcagaggcattgcacatgtatctcc

SEQ ID NO: 4356744 - DNA, 25 bp, Homo sapien
gatgtctgctgcacatgttaagtgg

SEQ ID NO: 4356745 - DNA, 25 bp, Homo sapien
gccctgatatcagagcaccctttga

SEQ ID NO: 4356746 - DNA, 25 bp, Homo sapien
gaaacccaaggaaagtgagcaccca

SEQ ID NO: 4356747 - DNA, 25 bp, Homo sapien
gacacccgggttctgaaaatgtgct

SEQ ID NO: 4356748 - DNA, 25 bp, Homo sapien
gccactctggagaaagaaacccaag

SEQ ID NO: 4356749 - DNA, 25 bp, Homo sapien
gggcccagctggagaatgattctgc

SEQ ID NO: 4356750 - DNA, 25 bp, Homo sapien
tccaggagacatgacccactaacgt

SEQ ID NO: 4356751 - DNA, 25 bp, Homo sapien
caggtggccattgtcgtgaaacgag

SEQ ID NO: 4356752 - DNA, 25 bp, Homo sapien
tgaccgaggagccaactgggacttc

SEQ ID NO: 4356753 - DNA, 25 bp, Homo sapien
gactgaggtagcttccagataggcc

SEQ ID NO: 4356754 - DNA, 25 bp, Homo sapien
cttcctctgcatgactcaacagcag

SEQ ID NO: 4356755 - DNA, 25 bp, Homo sapien
ttcctctgcatgactcaacagcagc

SEQ ID NO: 4356756 - DNA, 25 bp, Homo sapien
acttcctctgcatgactcaacagca

SEQ ID NO: 4356757 - DNA, 25 bp, Homo sapien
tcagacccaaatgtgtctgatccat

SEQ ID NO: 4356758 - DNA, 25 bp, Homo sapien
caaggtacatgctgagaatcctcac

SEQ ID NO: 4356759 - DNA, 25 bp, Homo sapien
tcaaggcgaggactcagacccaaat

SEQ ID NO: 4356760 - DNA, 25 bp, Homo sapien
tctcagagaaagaaaccgagcttca

SEQ ID NO: 4356761 - DNA, 25 bp, Homo sapien
cattggccatgtcgtgtgagggcat

SEQ ID NO: 4356762 - DNA, 25 bp, Homo sapien
agggcatgctgccttagatcacaga

SEQ ID NO: 4356763 - DNA, 25 bp, Homo sapien
agatcacagatggagcttattaaaa

SEQ ID NO: 4356764 - DNA, 25 bp, Homo sapien
catgtcgtgtgagggcatgctgcct

SEQ ID NO: 4356765 - DNA, 25 bp, Homo sapien
ggaggattgagaggtacagccccat

SEQ ID NO: 4356766 - DNA, 25 bp, Homo sapien
tggaggattgagaggtacagcccca

SEQ ID NO: 4356767 - DNA, 25 bp, Homo sapien
ctggaggattgagaggtacagcccc

SEQ ID NO: 4356768 - DNA, 25 bp, Homo sapien
gagggagaagtctacattgccaact

SEQ ID NO: 4356769 - DNA, 25 bp, Homo sapien
aggctgagggagaagtctacattgc

SEQ ID NO: 4356770 - DNA, 25 bp, Homo sapien
ctgaaggaaggcctgcatttccagc

SEQ ID NO: 4356771 - DNA, 25 bp, Homo sapien
catgggtgaggactgtctgaaggaa

SEQ ID NO: 4356772 - DNA, 25 bp, Homo sapien
ttaaagactgtgtacctgaaaccag

SEQ ID NO: 4356773 - DNA, 25 bp, Homo sapien
aagactgtgtacctgaaaccagtaa

SEQ ID NO: 4356774 - DNA, 25 bp, Homo sapien
gactgtgtacctgaaaccagtaact

SEQ ID NO: 4356775 - DNA, 25 bp, Homo sapien
tgaaaccagtaactcatgtcttttt

SEQ ID NO: 4356776 - DNA, 25 bp, Homo sapien
tatctggactattataaggtgtatc

SEQ ID NO: 4356777 - DNA, 25 bp, Homo sapien
tatactctccataatttcagaccct

SEQ ID NO: 4356778 - DNA, 25 bp, Homo sapien
gaggtaggaatgcagatcactggtt

SEQ ID NO: 4356779 - DNA, 25 bp, Homo sapien
tcttaagctctaatgtaattccact

SEQ ID NO: 4356780 - DNA, 25 bp, Homo sapien
cctcccaaactagcccaggttgagg

SEQ ID NO: 4356781 - DNA, 25 bp, Homo sapien
ggatgacagattcagcaggatcctg

SEQ ID NO: 4356782 - DNA, 25 bp, Homo sapien
tctctctggattggtgagacctgtg

SEQ ID NO: 4356783 - DNA, 25 bp, Homo sapien
gacaggataagggtcaaggcagtct

SEQ ID NO: 4356784 - DNA, 25 bp, Homo sapien
gactgtgtacatgcaactctcaaga

SEQ ID NO: 4356785 - DNA, 25 bp, Homo sapien
tcaagaaggaactccagcgagcagc

SEQ ID NO: 4356786 - DNA, 25 bp, Homo sapien
gcatttcttccgttgatttcccagg

SEQ ID NO: 4356787 - DNA, 25 bp, Homo sapien
cctctgttttggctgagtcctggaa

SEQ ID NO: 4356788 - DNA, 25 bp, Homo sapien
ccatgggcttcaccattgactctca

SEQ ID NO: 4356789 - DNA, 25 bp, Homo sapien
agaaaccatgggcttcaccattgac

SEQ ID NO: 4356790 - DNA, 25 bp, Homo sapien
ttagaaaccatgggcttcaccattg

SEQ ID NO: 4356791 - DNA, 25 bp, Homo sapien
aaaccatgggcttcaccattgactc

SEQ ID NO: 4356792 - DNA, 25 bp, Homo sapien
tttattcgccggtcgcttgcccttg

SEQ ID NO: 4356793 - DNA, 25 bp, Homo sapien
gatgatgcagggaatgacgatccaa

SEQ ID NO: 4356794 - DNA, 25 bp, Homo sapien
ccacagatggccaagacgggccggt

SEQ ID NO: 4356795 - DNA, 25 bp, Homo sapien
ggaagttccccgtctgatgatgcag

SEQ ID NO: 4356796 - DNA, 25 bp, Homo sapien
tggccgccgccttcgaattccttga

SEQ ID NO: 4356797 - DNA, 25 bp, Homo sapien
ctcggcgccctgctgtggatgtggt

SEQ ID NO: 4356798 - DNA, 25 bp, Homo sapien
gaaccgccgcgggaagcttgggcgc

SEQ ID NO: 4356799 - DNA, 25 bp, Homo sapien
acaatgaacgcgagttcatcagccg

SEQ ID NO: 4356800 - DNA, 25 bp, Homo sapien
gagccaagccgggtgggagtgggag

SEQ ID NO: 4356801 - DNA, 25 bp, Homo sapien
ttcggaggaacttgcggtcagcggg

SEQ ID NO: 4356802 - DNA, 25 bp, Homo sapien
tggtgcgcgcaaacccgaggcaggg

SEQ ID NO: 4356803 - DNA, 25 bp, Homo sapien
gggagatgcctttcgaggttcggag

SEQ ID NO: 4356804 - DNA, 25 bp, Homo sapien
cgtagatgggcaaataccgcagtga

SEQ ID NO: 4356805 - DNA, 25 bp, Homo sapien
tgttgattcagagaacgaacgccgg

SEQ ID NO: 4356806 - DNA, 25 bp, Homo sapien
gaacgccggacgcaaaacgtagatg

SEQ ID NO: 4356807 - DNA, 25 bp, Homo sapien
tgctttcggccgaggcctggactgc

SEQ ID NO: 4356808 - DNA, 25 bp, Homo sapien
cattgcataactcccagggtggcac

SEQ ID NO: 4356809 - DNA, 25 bp, Homo sapien
caatggttggtctgcggcaaaccct

SEQ ID NO: 4356810 - DNA, 25 bp, Homo sapien
agttctgggccccattgcataactc

SEQ ID NO: 4356811 - DNA, 25 bp, Homo sapien
tatgattaggtgagcttgggaaaca

SEQ ID NO: 4356812 - DNA, 25 bp, Homo sapien
tcagatttcttccagttactctcag

SEQ ID NO: 4356813 - DNA, 25 bp, Homo sapien
tagcctgtggcctataaagtccagc

SEQ ID NO: 4356814 - DNA, 25 bp, Homo sapien
ggccataggttcctcctgacagtag

SEQ ID NO: 4356815 - DNA, 25 bp, Homo sapien
gggaggtcgccagacccctcactgt

SEQ ID NO: 4356816 - DNA, 25 bp, Homo sapien
cacagactttggtcatcctgatggt

SEQ ID NO: 4356817 - DNA, 25 bp, Homo sapien
tcttcctgataagggtgcacacttt

SEQ ID NO: 4356818 - DNA, 25 bp, Homo sapien
ggatgaggggccaaagactcttcct

SEQ ID NO: 4356819 - DNA, 25 bp, Homo sapien
gcacacttttctacggtagtagcca

SEQ ID NO: 4356820 - DNA, 25 bp, Homo sapien
ccccttgatggccttagcccatgag

SEQ ID NO: 4356821 - DNA, 25 bp, Homo sapien
ccttctgtatcagggaagcctctag

SEQ ID NO: 4356822 - DNA, 25 bp, Homo sapien
acacagttgagggagtccaggccat

SEQ ID NO: 4356823 - DNA, 25 bp, Homo sapien
tattgggtcaaaaatcagatcgtgt

SEQ ID NO: 4356824 - DNA, 25 bp, Homo sapien
accagggcctggataacctgttgga

SEQ ID NO: 4356825 - DNA, 25 bp, Homo sapien
gcattctgcagactcgcctggctgg

SEQ ID NO: 4356826 - DNA, 25 bp, Homo sapien
taacctgttggactgggccactggt

SEQ ID NO: 4356827 - DNA, 25 bp, Homo sapien
atatcatattgtccccgaatcacag

SEQ ID NO: 4356828 - DNA, 25 bp, Homo sapien
tggaggtgtgacatagccactgcat

SEQ ID NO: 4356829 - DNA, 25 bp, Homo sapien
gtgtgacatagccactgcatgaggg

SEQ ID NO: 4356830 - DNA, 25 bp, Homo sapien
cagcatggaggtgtgacatagccac

SEQ ID NO: 4356831 - DNA, 25 bp, Homo sapien
gcacagcatggaggtgtgacatagc

SEQ ID NO: 4356832 - DNA, 25 bp, Homo sapien
gatctcttcatcatcacatgctgac

SEQ ID NO: 4356833 - DNA, 25 bp, Homo sapien
tctctgcctctttaggaacacaaac

SEQ ID NO: 4356834 - DNA, 25 bp, Homo sapien
ttctctctgcctctttaggaacaca

SEQ ID NO: 4356835 - DNA, 25 bp, Homo sapien
tctgcctctttaggaacacaaactg

SEQ ID NO: 4356836 - DNA, 25 bp, Homo sapien
ttttagcatgccttccctctggaga

SEQ ID NO: 4356837 - DNA, 25 bp, Homo sapien
cttttagcatgccttccctctggag

SEQ ID NO: 4356838 - DNA, 25 bp, Homo sapien
catgccttccctctggagaactgat

SEQ ID NO: 4356839 - DNA, 25 bp, Homo sapien
gccttccctctggagaactgatttc

SEQ ID NO: 4356840 - DNA, 25 bp, Homo sapien
gatggcttatgacctcctttggtat

SEQ ID NO: 4356841 - DNA, 25 bp, Homo sapien
aggatgatggcttatgacctccttt

SEQ ID NO: 4356842 - DNA, 25 bp, Homo sapien
ctgcgtgaaagagaggatgatggct

SEQ ID NO: 4356843 - DNA, 25 bp, Homo sapien
ttatgacctcctttggtatcaagaa

SEQ ID NO: 4356844 - DNA, 25 bp, Homo sapien
tcctgtgggttctcggagtcccggc

SEQ ID NO: 4356845 - DNA, 25 bp, Homo sapien
gaagggacgcgcagagcacttctgt

SEQ ID NO: 4356846 - DNA, 25 bp, Homo sapien
tagagctgccttctgatcttcagag

SEQ ID NO: 4356847 - DNA, 25 bp, Homo sapien
tatgaaatgaatgcccaagtgtccc

SEQ ID NO: 4356848 - DNA, 25 bp, Homo sapien
gagattcagctcacagtgcgctatg

SEQ ID NO: 4356849 - DNA, 25 bp, Homo sapien
tcctttgggagcatcaggtgaccat

SEQ ID NO: 4356850 - DNA, 25 bp, Homo sapien
gctgcctcagcgtgctaatcaatgg

SEQ ID NO: 4356851 - DNA, 25 bp, Homo sapien
gccaagggctttgctcagacgcaac

SEQ ID NO: 4356852 - DNA, 25 bp, Homo sapien
gaagttgatattctgtatcccctag

SEQ ID NO: 4356853 - DNA, 25 bp, Homo sapien
catgtttggttacctgtgcaatgtg

SEQ ID NO: 4356854 - DNA, 25 bp, Homo sapien
agaattgctaactagtaaaaggtgg

SEQ ID NO: 4356855 - DNA, 25 bp, Homo sapien
atcaaccctgcaaaacgtaggaggg

SEQ ID NO: 4356856 - DNA, 25 bp, Homo sapien
gatccgatagggaaagcctaaagct

SEQ ID NO: 4356857 - DNA, 25 bp, Homo sapien
tcagtggcccttgaggcaccttcaa

SEQ ID NO: 4356858 - DNA, 25 bp, Homo sapien
aataaagccctagccctctgaagaa

SEQ ID NO: 4356859 - DNA, 25 bp, Homo sapien
taaactaagtcttaaccacaggctc

SEQ ID NO: 4356860 - DNA, 25 bp, Homo sapien
acctggcctagttttcttttgatgt

SEQ ID NO: 4356861 - DNA, 25 bp, Homo sapien
ctcacagaatgaggttggaagtatt

SEQ ID NO: 4356862 - DNA, 25 bp, Homo sapien
tgaggttggaagtattcccttctcc

SEQ ID NO: 4356863 - DNA, 25 bp, Homo sapien
ctggcctagttttcttttgatgtgt

SEQ ID NO: 4356864 - DNA, 25 bp, Homo sapien
gaaagggcaactgtcatgagggata

SEQ ID NO: 4356865 - DNA, 25 bp, Homo sapien
tactacttgcaatctgtctccctgg

SEQ ID NO: 4356866 - DNA, 25 bp, Homo sapien
tgccaattaatccttgccaggagag

SEQ ID NO: 4356867 - DNA, 25 bp, Homo sapien
gagggatatcttaacagaatgtgcc

SEQ ID NO: 4356868 - DNA, 25 bp, Homo sapien
actgcaggtacaatggcatccaagt

SEQ ID NO: 4356869 - DNA, 25 bp, Homo sapien
ctgcaggtacaatggcatccaagtc

SEQ ID NO: 4356870 - DNA, 25 bp, Homo sapien
tactgcaggtacaatggcatccaag

SEQ ID NO: 4356871 - DNA, 25 bp, Homo sapien
gattcggatacagatgcttcacagg

SEQ ID NO: 4356872 - DNA, 25 bp, Homo sapien
tgaagtttttctccgatagtgatga

SEQ ID NO: 4356873 - DNA, 25 bp, Homo sapien
gaaacaagaacctatatgcaaaggc

SEQ ID NO: 4356874 - DNA, 25 bp, Homo sapien
tataagttaccacatacccacaagt

SEQ ID NO: 4356875 - DNA, 25 bp, Homo sapien
cattgtgtagctggatcttggttgc

SEQ ID NO: 4356876 - DNA, 25 bp, Homo sapien
tgttactcagtatgccaccctgcac

SEQ ID NO: 4356877 - DNA, 25 bp, Homo sapien
ggtacaagatcaaggtattccctga

SEQ ID NO: 4356878 - DNA, 25 bp, Homo sapien
gcaaaggaccttggccgatatggga

SEQ ID NO: 4356879 - DNA, 25 bp, Homo sapien
ttaaaatatgtttattaatgtgcca

SEQ ID NO: 4356880 - DNA, 25 bp, Homo sapien
ccctattaaaatatgtttattaatg

SEQ ID NO: 4356881 - DNA, 25 bp, Homo sapien
attaaaatatgtttattaatgtgcc

SEQ ID NO: 4356882 - DNA, 25 bp, Homo sapien
tattaaaatatgtttattaatgtgc

SEQ ID NO: 4356883 - DNA, 25 bp, Homo sapien
gctcttcaggatatcagacaacaca

SEQ ID NO: 4356884 - DNA, 25 bp, Homo sapien
tattctatgaaaccaggctcttcag

SEQ ID NO: 4356885 - DNA, 25 bp, Homo sapien
tgcacataagactggtcacaaaact

SEQ ID NO: 4356886 - DNA, 25 bp, Homo sapien
gaggacaagcctaaagcaagctcac

SEQ ID NO: 4356887 - DNA, 25 bp, Homo sapien
atctttcaaatgagctatacagaaa

SEQ ID NO: 4356888 - DNA, 25 bp, Homo sapien
aatgagctatacagaaaaaattcac

SEQ ID NO: 4356889 - DNA, 25 bp, Homo sapien
attcactggtgaatacatcacttta

SEQ ID NO: 4356890 - DNA, 25 bp, Homo sapien
aaattcactggtgaatacatcactt

SEQ ID NO: 4356891 - DNA, 25 bp, Homo sapien
ttccagaactgttagtggtttccaa

SEQ ID NO: 4356892 - DNA, 25 bp, Homo sapien
ccactaggtaaaaatactaatccag

SEQ ID NO: 4356893 - DNA, 25 bp, Homo sapien
ctgttagtggtttccaaccactagg

SEQ ID NO: 4356894 - DNA, 25 bp, Homo sapien
aaaatactaatccagtgaccaagga

SEQ ID NO: 4356895 - DNA, 25 bp, Homo sapien
tcctcgtgttcttccaatttgtaga

SEQ ID NO: 4356896 - DNA, 25 bp, Homo sapien
tcattagtaaatgcctgaaatgctg

SEQ ID NO: 4356897 - DNA, 25 bp, Homo sapien
tttcaagtagatcattagtaaatgc

SEQ ID NO: 4356898 - DNA, 25 bp, Homo sapien
aattcctcgtgttcttccaatttgt

SEQ ID NO: 4356899 - DNA, 25 bp, Homo sapien
cctgatttctaactttgggttcttg

SEQ ID NO: 4356900 - DNA, 25 bp, Homo sapien
tgcacaatttaaacctgatttctaa

SEQ ID NO: 4356901 - DNA, 25 bp, Homo sapien
taactttgggttcttgcatctgatt

SEQ ID NO: 4356902 - DNA, 25 bp, Homo sapien
ttctaactttgggttcttgcatctg

SEQ ID NO: 4356903 - DNA, 25 bp, Homo sapien
gccattctggatgatactttgtaaa

SEQ ID NO: 4356904 - DNA, 25 bp, Homo sapien
cagccattctggatgatactttgta

SEQ ID NO: 4356905 - DNA, 25 bp, Homo sapien
actgccttgctcagactggacttaa

SEQ ID NO: 4356906 - DNA, 25 bp, Homo sapien
acacccagccattctggatgatact

SEQ ID NO: 4356907 - DNA, 25 bp, Homo sapien
tctggaggtcttcaggtcctaatac

SEQ ID NO: 4356908 - DNA, 25 bp, Homo sapien
ctctggaggtcttcaggtcctaata

SEQ ID NO: 4356909 - DNA, 25 bp, Homo sapien
ttaatcagcctacagagttttccaa

SEQ ID NO: 4356910 - DNA, 25 bp, Homo sapien
tgcataacctgctcattcacatctt

SEQ ID NO: 4356911 - DNA, 25 bp, Homo sapien
ttactagcacacacaatgaggatga

SEQ ID NO: 4356912 - DNA, 25 bp, Homo sapien
ttccaacagtgcttactagcacaca

SEQ ID NO: 4356913 - DNA, 25 bp, Homo sapien
gagttcttggaggtttctcacagca

SEQ ID NO: 4356914 - DNA, 25 bp, Homo sapien
aaacttcattcattcggggatagac

SEQ ID NO: 4356915 - DNA, 25 bp, Homo sapien
tctccaagcctagtataaacttcat

SEQ ID NO: 4356916 - DNA, 25 bp, Homo sapien
ttggaagtgagaaacaatagcttgc

SEQ ID NO: 4356917 - DNA, 25 bp, Homo sapien
aaattaagccaaggtaccagttctg

SEQ ID NO: 4356918 - DNA, 25 bp, Homo sapien
tcaaattaagccaaggtaccagttc

SEQ ID NO: 4356919 - DNA, 25 bp, Homo sapien
gcatagtatctactataaacaacaa

SEQ ID NO: 4356920 - DNA, 25 bp, Homo sapien
ttcaactttgataccttcattttca

SEQ ID NO: 4356921 - DNA, 25 bp, Homo sapien
gatgttctggtctcctaagcagtga

SEQ ID NO: 4356922 - DNA, 25 bp, Homo sapien
gacaggatggttgtagcacagtcca

SEQ ID NO: 4356923 - DNA, 25 bp, Homo sapien
tagaagtactaccatgagccagcct

SEQ ID NO: 4356924 - DNA, 25 bp, Homo sapien
taccgtgtacgtctggcctctgaag

SEQ ID NO: 4356925 - DNA, 25 bp, Homo sapien
taacctttgatatgaggcctcagag

SEQ ID NO: 4356926 - DNA, 25 bp, Homo sapien
gaagcactgctcaaaatccatgagt

SEQ ID NO: 4356927 - DNA, 25 bp, Homo sapien
tgtcccaaacttagaggttgctaca

SEQ ID NO: 4356928 - DNA, 25 bp, Homo sapien
ccatgagttactccaatggcagaag

SEQ ID NO: 4356929 - DNA, 25 bp, Homo sapien
gggggctacaatcagagtgttctct

SEQ ID NO: 4356930 - DNA, 25 bp, Homo sapien
gggctacaatcagagtgttctcttt

SEQ ID NO: 4356931 - DNA, 25 bp, Homo sapien
tgggggctacaatcagagtgttctc

SEQ ID NO: 4356932 - DNA, 25 bp, Homo sapien
ggggctacaatcagagtgttctctt

SEQ ID NO: 4356933 - DNA, 25 bp, Homo sapien
ctcagaacttcaaccggtaatctat

SEQ ID NO: 4356934 - DNA, 25 bp, Homo sapien
cagaacttcaaccggtaatctattt

SEQ ID NO: 4356935 - DNA, 25 bp, Homo sapien
tcagaacttcaaccggtaatctatt

SEQ ID NO: 4356936 - DNA, 25 bp, Homo sapien
tttaaggatgtcagttgatctgccc

SEQ ID NO: 4356937 - DNA, 25 bp, Homo sapien
tataaattattactggagctcttgg

SEQ ID NO: 4356938 - DNA, 25 bp, Homo sapien
agctcttggattgtggataattgaa

SEQ ID NO: 4356939 - DNA, 25 bp, Homo sapien
gatgctcaaatccacaatcttgaac

SEQ ID NO: 4356940 - DNA, 25 bp, Homo sapien
gtcctcagccttcttatgattaata

SEQ ID NO: 4356941 - DNA, 25 bp, Homo sapien
caattagggcctgttgctgattata

SEQ ID NO: 4356942 - DNA, 25 bp, Homo sapien
aagtatctctggtcaattagggcct

SEQ ID NO: 4356943 - DNA, 25 bp, Homo sapien
gctgattatatttgctgggctcatc

SEQ ID NO: 4356944 - DNA, 25 bp, Homo sapien
catgaagtgtgtcctttaagtgaaa

SEQ ID NO: 4356945 - DNA, 25 bp, Homo sapien
gcttatccatgctgtaactgtatac

SEQ ID NO: 4356946 - DNA, 25 bp, Homo sapien
tcagatcaactgttgggtaccacag

SEQ ID NO: 4356947 - DNA, 25 bp, Homo sapien
tgaggttgctaagatatacagtgag

SEQ ID NO: 4356948 - DNA, 25 bp, Homo sapien
atactgtgttaggactaatggcatg

SEQ ID NO: 4356949 - DNA, 25 bp, Homo sapien
aatactgtgttaggactaatggcat

SEQ ID NO: 4356950 - DNA, 25 bp, Homo sapien
aaatactgtgttaggactaatggca

SEQ ID NO: 4356951 - DNA, 25 bp, Homo sapien
aagtcttaattcatgctgcgtaggc

SEQ ID NO: 4356952 - DNA, 25 bp, Homo sapien
attccttgagttgattctgtaatga

SEQ ID NO: 4356953 - DNA, 25 bp, Homo sapien
ttgattccttgagttgattctgtaa

SEQ ID NO: 4356954 - DNA, 25 bp, Homo sapien
gaaagtgcatcaatcttagattttg

SEQ ID NO: 4356955 - DNA, 25 bp, Homo sapien
tgaaagtgcatcaatcttagatttt

SEQ ID NO: 4356956 - DNA, 25 bp, Homo sapien
gtatttattagttatgcagtcccca

SEQ ID NO: 4356957 - DNA, 25 bp, Homo sapien
aagtatttattagttatgcagtccc

SEQ ID NO: 4356958 - DNA, 25 bp, Homo sapien
aaaagtatttattagttatgcagtc

SEQ ID NO: 4356959 - DNA, 25 bp, Homo sapien
tttattagttatgcagtccccatac

SEQ ID NO: 4356960 - DNA, 25 bp, Homo sapien
aggcctttataagttggtgaggcat

SEQ ID NO: 4356961 - DNA, 25 bp, Homo sapien
ggcctttataagttggtgaggcatc

SEQ ID NO: 4356962 - DNA, 25 bp, Homo sapien
aaatatgtatgcagtatacttatga

SEQ ID NO: 4356963 - DNA, 25 bp, Homo sapien
tatgaaaatatgtatgcagtatact

SEQ ID NO: 4356964 - DNA, 25 bp, Homo sapien
tgaaaatatgtatgcagtatactta

SEQ ID NO: 4356965 - DNA, 25 bp, Homo sapien
ctatgaaaatatgtatgcagtatac

SEQ ID NO: 4356966 - DNA, 25 bp, Homo sapien
atagtaatcaattagacaaagcaac

SEQ ID NO: 4356967 - DNA, 25 bp, Homo sapien
tagattcatagtaatcaattagaca

SEQ ID NO: 4356968 - DNA, 25 bp, Homo sapien
taattttagattcatagtaatcaat

SEQ ID NO: 4356969 - DNA, 25 bp, Homo sapien
tcatagtaatcaattagacaaagca

SEQ ID NO: 4356970 - DNA, 25 bp, Homo sapien
agtaagtacagattatctggcaggc

SEQ ID NO: 4356971 - DNA, 25 bp, Homo sapien
tacctctagcaatatctcccacaga

SEQ ID NO: 4356972 - DNA, 25 bp, Homo sapien
caaaggatgcaactcaatatgaaca

SEQ ID NO: 4356973 - DNA, 25 bp, Homo sapien
gaacaaagttgttcactgcaccatt

SEQ ID NO: 4356974 - DNA, 25 bp, Homo sapien
taaatgtttacacattcaaaagtaa

SEQ ID NO: 4356975 - DNA, 25 bp, Homo sapien
tattaatatcaaagaaagctgccca

SEQ ID NO: 4356976 - DNA, 25 bp, Homo sapien
catcttgactgcatacatagtggaa

SEQ ID NO: 4356977 - DNA, 25 bp, Homo sapien
ttggtgacgcaaacacacagagaaa

SEQ ID NO: 4356978 - DNA, 25 bp, Homo sapien
gaatctagctacatatcaatttatg

SEQ ID NO: 4356979 - DNA, 25 bp, Homo sapien
caaacacaacaatgaatctagctac

SEQ ID NO: 4356980 - DNA, 25 bp, Homo sapien
aagaacaggatgagcagggaaaaac

SEQ ID NO: 4356981 - DNA, 25 bp, Homo sapien
taaccacccccaagataatatcagg

SEQ ID NO: 4356982 - DNA, 25 bp, Homo sapien
ttgagtgacaatgcgatcttcttcc

SEQ ID NO: 4356983 - DNA, 25 bp, Homo sapien
ttttcttataatgctggcacttcac

SEQ ID NO: 4356984 - DNA, 25 bp, Homo sapien
gaggaactcttttgcacagataggc

SEQ ID NO: 4356985 - DNA, 25 bp, Homo sapien
tatccaagacggtatgaggaactct

SEQ ID NO: 4356986 - DNA, 25 bp, Homo sapien
catctaggttagctaatctgttgtc

SEQ ID NO: 4356987 - DNA, 25 bp, Homo sapien
caactttcagtgatgttaaatctct

SEQ ID NO: 4356988 - DNA, 25 bp, Homo sapien
tttctgtgttgctagaaatatgtcc

SEQ ID NO: 4356989 - DNA, 25 bp, Homo sapien
tattgacataatccattgttacaca

SEQ ID NO: 4356990 - DNA, 25 bp, Homo sapien
tcggccaggaacgtgttacagctcc

SEQ ID NO: 4356991 - DNA, 25 bp, Homo sapien
ttacagctcctttcactcccgccat

SEQ ID NO: 4356992 - DNA, 25 bp, Homo sapien
tttcactcccgccattcagtgagtc

SEQ ID NO: 4356993 - DNA, 25 bp, Homo sapien
acagcccggcgagtcggccaggaac

SEQ ID NO: 4356994 - DNA, 25 bp, Homo sapien
taaaaaagagtcagtatgtacccta

SEQ ID NO: 4356995 - DNA, 25 bp, Homo sapien
gacatcatggacctaccaatatgtg

SEQ ID NO: 4356996 - DNA, 25 bp, Homo sapien
tatcaaaaagcactatcatagccag

SEQ ID NO: 4356997 - DNA, 25 bp, Homo sapien
cttgtcatcagcaagatatcacttg

SEQ ID NO: 4356998 - DNA, 25 bp, Homo sapien
gtagcagttttactcacagtataaa

SEQ ID NO: 4356999 - DNA, 25 bp, Homo sapien
aaagccgcccagaagttcgaactag

SEQ ID NO: 4357000 - DNA, 25 bp, Homo sapien
caagaggtctgggtaggcaggtccc

SEQ ID NO: 4357001 - DNA, 25 bp, Homo sapien
ctagatggagcgcaccacagctcag

SEQ ID NO: 4357002 - DNA, 25 bp, Homo sapien
tttcagttgatcatattggcacaga

SEQ ID NO: 4357003 - DNA, 25 bp, Homo sapien
ttccccttctatgggtgactgaagc

SEQ ID NO: 4357004 - DNA, 25 bp, Homo sapien
gcatgaaacctcctctgtaccaatt

SEQ ID NO: 4357005 - DNA, 25 bp, Homo sapien
taagctacacgacaaatctttggga

SEQ ID NO: 4357006 - DNA, 25 bp, Homo sapien
atcatctaagaattcataactcagt

SEQ ID NO: 4357007 - DNA, 25 bp, Homo sapien
catcatctaagaattcataactcag

SEQ ID NO: 4357008 - DNA, 25 bp, Homo sapien
tcatctaagaattcataactcagta

SEQ ID NO: 4357009 - DNA, 25 bp, Homo sapien
catctaagaattcataactcagtac

SEQ ID NO: 4357010 - DNA, 25 bp, Homo sapien
tgttggtggcaagccctacttagtg

SEQ ID NO: 4357011 - DNA, 25 bp, Homo sapien
cattagctcgttgttcttgattggc

SEQ ID NO: 4357012 - DNA, 25 bp, Homo sapien
tcatcctccaattcaccaattttgg

SEQ ID NO: 4357013 - DNA, 25 bp, Homo sapien
taatttgttccaagtcattagctcg

SEQ ID NO: 4357014 - DNA, 25 bp, Homo sapien
gctgttgattagtttctataagctc

SEQ ID NO: 4357015 - DNA, 25 bp, Homo sapien
agctgttgattagtttctataagct

SEQ ID NO: 4357016 - DNA, 25 bp, Homo sapien
ctgtatcatgttctgttgacatgat

SEQ ID NO: 4357017 - DNA, 25 bp, Homo sapien
tttctataagctcctgtatcatgtt

SEQ ID NO: 4357018 - DNA, 25 bp, Homo sapien
ttgtgatgactgtttgtcaaaaatg

SEQ ID NO: 4357019 - DNA, 25 bp, Homo sapien
atgactgtttgtcaaaaatgatgag

SEQ ID NO: 4357020 - DNA, 25 bp, Homo sapien
cctttgtgatgactgtttgtcaaaa

SEQ ID NO: 4357021 - DNA, 25 bp, Homo sapien
tgatgactgtttgtcaaaaatgatg

SEQ ID NO: 4357022 - DNA, 25 bp, Homo sapien
tcaatagcacatttatgctttccca

SEQ ID NO: 4357023 - DNA, 25 bp, Homo sapien
gagatctgttcttttgactagagac

SEQ ID NO: 4357024 - DNA, 25 bp, Homo sapien
ggttttaagccatgcatcatcaata

SEQ ID NO: 4357025 - DNA, 25 bp, Homo sapien
tgactagagacaaaggttttaagcc

SEQ ID NO: 4357026 - DNA, 25 bp, Homo sapien
tgagtctgtctgatggttgactgga

SEQ ID NO: 4357027 - DNA, 25 bp, Homo sapien
atgagtctgtctgatggttgactgg

SEQ ID NO: 4357028 - DNA, 25 bp, Homo sapien
ctgtttttcagtcatgagtctgtct

SEQ ID NO: 4357029 - DNA, 25 bp, Homo sapien
catgagtctgtctgatggttgactg

SEQ ID NO: 4357030 - DNA, 25 bp, Homo sapien
ttgtagaatcaaaagaaacagaaat

SEQ ID NO: 4357031 - DNA, 25 bp, Homo sapien
cttttgtagaatcaaaagaaacaga

SEQ ID NO: 4357032 - DNA, 25 bp, Homo sapien
ttggcaattaaaaaatttgagttgc

SEQ ID NO: 4357033 - DNA, 25 bp, Homo sapien
cagaaattggcaattaaaaaatttg

SEQ ID NO: 4357034 - DNA, 25 bp, Homo sapien
gagactactaacgagaacaagggaa

SEQ ID NO: 4357035 - DNA, 25 bp, Homo sapien
aaataattacgctgaaagccagcca

SEQ ID NO: 4357036 - DNA, 25 bp, Homo sapien
cataagacccagtcatgccattcct

SEQ ID NO: 4357037 - DNA, 25 bp, Homo sapien
ccattggatggaatacccctcagca

SEQ ID NO: 4357038 - DNA, 25 bp, Homo sapien
ggataataaaagtactcagctcacg

SEQ ID NO: 4357039 - DNA, 25 bp, Homo sapien
cacagccaggagagtacagtactaa

SEQ ID NO: 4357040 - DNA, 25 bp, Homo sapien
gggatactcaacctgcagagctctg

SEQ ID NO: 4357041 - DNA, 25 bp, Homo sapien
aaatcatggattctgccacacagcc

SEQ ID NO: 4357042 - DNA, 25 bp, Homo sapien
tcttgcactttacacctggtcattc

SEQ ID NO: 4357043 - DNA, 25 bp, Homo sapien
ggtcattcaggttgatctcaatgaa

SEQ ID NO: 4357044 - DNA, 25 bp, Homo sapien
tcagtcatagcatattactcttgca

SEQ ID NO: 4357045 - DNA, 25 bp, Homo sapien
atgaaatgatcacccaacgagtctc

SEQ ID NO: 4357046 - DNA, 25 bp, Homo sapien
aaagaacaaaatcttgaaatgttca

SEQ ID NO: 4357047 - DNA, 25 bp, Homo sapien
aagaacaaaatcttgaaatgttcaa

SEQ ID NO: 4357048 - DNA, 25 bp, Homo sapien
agaacaaaatcttgaaatgttcaac

SEQ ID NO: 4357049 - DNA, 25 bp, Homo sapien
ataaaaagaacaaaatcttgaaatg

SEQ ID NO: 4357050 - DNA, 25 bp, Homo sapien
ggccaatagtttgcagcagcctttt

SEQ ID NO: 4357051 - DNA, 25 bp, Homo sapien
ccattctgtgaaataaacgggccaa

SEQ ID NO: 4357052 - DNA, 25 bp, Homo sapien
aataaacgggccaatagtttgcagc

SEQ ID NO: 4357053 - DNA, 25 bp, Homo sapien
tctgtgaaataaacgggccaatagt

SEQ ID NO: 4357054 - DNA, 25 bp, Homo sapien
gacacaaaactagcgcttcagcccg

SEQ ID NO: 4357055 - DNA, 25 bp, Homo sapien
acaaccttcgcggttgtttgacaca

SEQ ID NO: 4357056 - DNA, 25 bp, Homo sapien
tgacacaaaactagcgcttcagccc

SEQ ID NO: 4357057 - DNA, 25 bp, Homo sapien
ttcgcggttgtttgacacaaaacta

SEQ ID NO: 4357058 - DNA, 25 bp, Homo sapien
gattctaagctttactcttactgcc

SEQ ID NO: 4357059 - DNA, 25 bp, Homo sapien
tctaagctttactcttactgcctca

SEQ ID NO: 4357060 - DNA, 25 bp, Homo sapien
gacgtgattctaagctttactctta

SEQ ID NO: 4357061 - DNA, 25 bp, Homo sapien
ccgacgtgattctaagctttactct

SEQ ID NO: 4357062 - DNA, 25 bp, Homo sapien
tgaccacttttaggcccaggtgagg

SEQ ID NO: 4357063 - DNA, 25 bp, Homo sapien
gaggcagttttgtccgatccccaaa

SEQ ID NO: 4357064 - DNA, 25 bp, Homo sapien
taaagaatcggaggcgctgagacat

SEQ ID NO: 4357065 - DNA, 25 bp, Homo sapien
gcagggatttttaattggcgcgacc

SEQ ID NO: 4357066 - DNA, 25 bp, Homo sapien
gccgacgcctctgagagccccgaga

SEQ ID NO: 4357067 - DNA, 25 bp, Homo sapien
ccgacgcctctgagagccccgagag

SEQ ID NO: 4357068 - DNA, 25 bp, Homo sapien
gacgcctctgagagccccgagagcc

SEQ ID NO: 4357069 - DNA, 25 bp, Homo sapien
cgacgcctctgagagccccgagagc

SEQ ID NO: 4357070 - DNA, 25 bp, Homo sapien
ttaccgcaaacgaaggcgtcggtgc

SEQ ID NO: 4357071 - DNA, 25 bp, Homo sapien
taggctgggatcagctacgtcaggc

SEQ ID NO: 4357072 - DNA, 25 bp, Homo sapien
ccaatcgagcccgagcgcgtcgagg

SEQ ID NO: 4357073 - DNA, 25 bp, Homo sapien
tggcgcttccaacgcactccttggg

SEQ ID NO: 4357074 - DNA, 25 bp, Homo sapien
ccagagactgccctctctctcgccc

SEQ ID NO: 4357075 - DNA, 25 bp, Homo sapien
caccagagactgccctctctctcgc

SEQ ID NO: 4357076 - DNA, 25 bp, Homo sapien
ctggccaccagagactgccctctct

SEQ ID NO: 4357077 - DNA, 25 bp, Homo sapien
ggccaccagagactgccctctctct

SEQ ID NO: 4357078 - DNA, 25 bp, Homo sapien
gatgttccagacctgaatgaccact

SEQ ID NO: 4357079 - DNA, 25 bp, Homo sapien
gggtacgggtcagcatgttctcgat

SEQ ID NO: 4357080 - DNA, 25 bp, Homo sapien
tgttgacgacagttcatcttcccat

SEQ ID NO: 4357081 - DNA, 25 bp, Homo sapien
tgacatttggaggaccccaataaat

SEQ ID NO: 4357082 - DNA, 25 bp, Homo sapien
tgtgacagggactgcatgtactggt

SEQ ID NO: 4357083 - DNA, 25 bp, Homo sapien
tatgtgacagggactgcatgtactg

SEQ ID NO: 4357084 - DNA, 25 bp, Homo sapien
ggtatgtgacagggactgcatgtac

SEQ ID NO: 4357085 - DNA, 25 bp, Homo sapien
ggggtatgtgacagggactgcatgt

SEQ ID NO: 4357086 - DNA, 25 bp, Homo sapien
gagcccggctgtttctttttgtgtg

SEQ ID NO: 4357087 - DNA, 25 bp, Homo sapien
ctgagcccggctgtttctttttgtg

SEQ ID NO: 4357088 - DNA, 25 bp, Homo sapien
cactgagcccggctgtttctttttg

SEQ ID NO: 4357089 - DNA, 25 bp, Homo sapien
gggttttgccatgcctgcctcagca

SEQ ID NO: 4357090 - DNA, 25 bp, Homo sapien
ggtactcgcgcctgcagagctttca

SEQ ID NO: 4357091 - DNA, 25 bp, Homo sapien
aacagtcggcgcgtttggtactcgc

SEQ ID NO: 4357092 - DNA, 25 bp, Homo sapien
gccttcggctaaggcagaggaccag

SEQ ID NO: 4357093 - DNA, 25 bp, Homo sapien
ctgagaggcgcgacaaacagtcggc

SEQ ID NO: 4357094 - DNA, 25 bp, Homo sapien
tcataaacttaactctggaatccag

SEQ ID NO: 4357095 - DNA, 25 bp, Homo sapien
atcataaacttaactctggaatcca

SEQ ID NO: 4357096 - DNA, 25 bp, Homo sapien
cataatcataaacttaactctggaa

SEQ ID NO: 4357097 - DNA, 25 bp, Homo sapien
taatcataaacttaactctggaatc

SEQ ID NO: 4357098 - DNA, 25 bp, Homo sapien
ggtcttgccattccaggacccaaag

SEQ ID NO: 4357099 - DNA, 25 bp, Homo sapien
tcttgccattccaggacccaaagtc

SEQ ID NO: 4357100 - DNA, 25 bp, Homo sapien
ttgccattccaggacccaaagtccc

SEQ ID NO: 4357101 - DNA, 25 bp, Homo sapien
tgccattccaggacccaaagtcccc

SEQ ID NO: 4357102 - DNA, 25 bp, Homo sapien
acacacctcaagggctcaccatcga

SEQ ID NO: 4357103 - DNA, 25 bp, Homo sapien
agacacacctcaagggctcaccatc

SEQ ID NO: 4357104 - DNA, 25 bp, Homo sapien
cacctcaagggctcaccatcgacgg

SEQ ID NO: 4357105 - DNA, 25 bp, Homo sapien
acacctcaagggctcaccatcgacg

SEQ ID NO: 4357106 - DNA, 25 bp, Homo sapien
tagagtaacaacactcctattcctg

SEQ ID NO: 4357107 - DNA, 25 bp, Homo sapien
tctgctctacactacttttgttaag

SEQ ID NO: 4357108 - DNA, 25 bp, Homo sapien
tttttgttagccattcagccagtct

SEQ ID NO: 4357109 - DNA, 25 bp, Homo sapien
tgtttcctggtgtagggctccctta

SEQ ID NO: 4357110 - DNA, 25 bp, Homo sapien
aatgatcgccactgtaactgatgtc

SEQ ID NO: 4357111 - DNA, 25 bp, Homo sapien
ccactgtaactgatgtcagatagta

SEQ ID NO: 4357112 - DNA, 25 bp, Homo sapien
gtaactgatgtcagatagtatctca

SEQ ID NO: 4357113 - DNA, 25 bp, Homo sapien
gatcgccactgtaactgatgtcaga

SEQ ID NO: 4357114 - DNA, 25 bp, Homo sapien
caggaaagatacaatttggtgccca

SEQ ID NO: 4357115 - DNA, 25 bp, Homo sapien
catcaactactctgtgactatggtc

SEQ ID NO: 4357116 - DNA, 25 bp, Homo sapien
caataaagtcacttacccaggaatc

SEQ ID NO: 4357117 - DNA, 25 bp, Homo sapien
ccaggaatctaacaaacgatgcata

SEQ ID NO: 4357118 - DNA, 25 bp, Homo sapien
tatcaccgaggattgagagctccca

SEQ ID NO: 4357119 - DNA, 25 bp, Homo sapien
gcctcattatagaagcagctggaag

SEQ ID NO: 4357120 - DNA, 25 bp, Homo sapien
caaatacattaggagcgaaggctga

SEQ ID NO: 4357121 - DNA, 25 bp, Homo sapien
ttccttggcgtgcaaagtcagcagg

SEQ ID NO: 4357122 - DNA, 25 bp, Homo sapien
taagatctgtagtctttccgaactg

SEQ ID NO: 4357123 - DNA, 25 bp, Homo sapien
cctgagcgcctcatcaaatttttgc

SEQ ID NO: 4357124 - DNA, 25 bp, Homo sapien
catccagttcactttagtagtccag

SEQ ID NO: 4357125 - DNA, 25 bp, Homo sapien
ttccgaactgtgtgggccatccagt

SEQ ID NO: 4357126 - DNA, 25 bp, Homo sapien
taattactgcaggatgcacagctgc

SEQ ID NO: 4357127 - DNA, 25 bp, Homo sapien
attactgcaggatgcacagctgctt

SEQ ID NO: 4357128 - DNA, 25 bp, Homo sapien
caagatagggagataatatgacttc

SEQ ID NO: 4357129 - DNA, 25 bp, Homo sapien
gctggattggttgtgcctccccagc

SEQ ID NO: 4357130 - DNA, 25 bp, Homo sapien
aagccctgcagtcaacatcagcgca

SEQ ID NO: 4357131 - DNA, 25 bp, Homo sapien
caaagagagtgatgaagagattccc

SEQ ID NO: 4357132 - DNA, 25 bp, Homo sapien
cagtcaacatcagcgcaaagagagt

SEQ ID NO: 4357133 - DNA, 25 bp, Homo sapien
gattcccatgccgtcgtaaaatcag

SEQ ID NO: 4357134 - DNA, 25 bp, Homo sapien
tgacagcagatgtcttttcagcatc

SEQ ID NO: 4357135 - DNA, 25 bp, Homo sapien
ggtccacctggtcagataagaaaat

SEQ ID NO: 4357136 - DNA, 25 bp, Homo sapien
gccttggcacaagggcagtactcac

SEQ ID NO: 4357137 - DNA, 25 bp, Homo sapien
caataatctgacaggcaaattcccc

SEQ ID NO: 4357138 - DNA, 25 bp, Homo sapien
aagaataaaaggcactcgctccctt

SEQ ID NO: 4357139 - DNA, 25 bp, Homo sapien
tttccaagaatatgtccaaagtcaa

SEQ ID NO: 4357140 - DNA, 25 bp, Homo sapien
aaggcactcgctcccttttaatgcc

SEQ ID NO: 4357141 - DNA, 25 bp, Homo sapien
atgccaaacttagatttgaaatttc

SEQ ID NO: 4357142 - DNA, 25 bp, Homo sapien
gctattgccgccactctataaggtt

SEQ ID NO: 4357143 - DNA, 25 bp, Homo sapien
ctataaggttgtcatcaggcctgaa

SEQ ID NO: 4357144 - DNA, 25 bp, Homo sapien
ataaagcacttacaactatgcctgc

SEQ ID NO: 4357145 - DNA, 25 bp, Homo sapien
caaactgccagggttaaaatcctga

SEQ ID NO: 4357146 - DNA, 25 bp, Homo sapien
tataaacaacatggtctagattccc

SEQ ID NO: 4357147 - DNA, 25 bp, Homo sapien
gagattcctcaatcgtacatggtgc

SEQ ID NO: 4357148 - DNA, 25 bp, Homo sapien
gaatgctattactcacacgactgtt

SEQ ID NO: 4357149 - DNA, 25 bp, Homo sapien
tgtgggtccctcatagaaccaaagt

SEQ ID NO: 4357150 - DNA, 25 bp, Homo sapien
ctcaatggctcggtccaggtcatcc

SEQ ID NO: 4357151 - DNA, 25 bp, Homo sapien
ggacataagaagctacacagtagcc

SEQ ID NO: 4357152 - DNA, 25 bp, Homo sapien
tgaccatgatgttgtcactatgtct

SEQ ID NO: 4357153 - DNA, 25 bp, Homo sapien
tgtctgtcaccaatcccaaggacat

SEQ ID NO: 4357154 - DNA, 25 bp, Homo sapien
cagcaattgtttcagaggtgctcac

SEQ ID NO: 4357155 - DNA, 25 bp, Homo sapien
ctttaagccagttcagaagggcatc

SEQ ID NO: 4357156 - DNA, 25 bp, Homo sapien
ctgttgctaaacagccataaggcaa

SEQ ID NO: 4357157 - DNA, 25 bp, Homo sapien
tgaggccagagcgatctcctgttgc

SEQ ID NO: 4357158 - DNA, 25 bp, Homo sapien
gagtatgcaatggtgccatctccgc

SEQ ID NO: 4357159 - DNA, 25 bp, Homo sapien
ctggagtatgcaatggtgccatctc

SEQ ID NO: 4357160 - DNA, 25 bp, Homo sapien
tggagtatgcaatggtgccatctcc

SEQ ID NO: 4357161 - DNA, 25 bp, Homo sapien
ggagtatgcaatggtgccatctccg

SEQ ID NO: 4357162 - DNA, 25 bp, Homo sapien
gattctatataagagctgggtatgg

SEQ ID NO: 4357163 - DNA, 25 bp, Homo sapien
ttctatataagagctgggtatggtg

SEQ ID NO: 4357164 - DNA, 25 bp, Homo sapien
agattctatataagagctgggtatg

SEQ ID NO: 4357165 - DNA, 25 bp, Homo sapien
taaagattctatataagagctgggt

SEQ ID NO: 4357166 - DNA, 25 bp, Homo sapien
gagctaggattgtgttaccaaggag

SEQ ID NO: 4357167 - DNA, 25 bp, Homo sapien
agtgcactcaagcgtgggtaacagt

SEQ ID NO: 4357168 - DNA, 25 bp, Homo sapien
agctaggattgtgttaccaaggagt

SEQ ID NO: 4357169 - DNA, 25 bp, Homo sapien
gtgcactcaagcgtgggtaacagtg

SEQ ID NO: 4357170 - DNA, 25 bp, Homo sapien
atttactgagctagggtcttgctct

SEQ ID NO: 4357171 - DNA, 25 bp, Homo sapien
tttatttactgagctagggtcttgc

SEQ ID NO: 4357172 - DNA, 25 bp, Homo sapien
cttctttccagagtaaatccatcaa

SEQ ID NO: 4357173 - DNA, 25 bp, Homo sapien
tccatcaagcgcaacatttggagtg

SEQ ID NO: 4357174 - DNA, 25 bp, Homo sapien
catcaagcgcaacatttggagtgtc

SEQ ID NO: 4357175 - DNA, 25 bp, Homo sapien
gtaaatccatcaagcgcaacatttg

SEQ ID NO: 4357176 - DNA, 25 bp, Homo sapien
taagtaactgcatcacgaggtcaca

SEQ ID NO: 4357177 - DNA, 25 bp, Homo sapien
gattatattctacctcccgaggctg

SEQ ID NO: 4357178 - DNA, 25 bp, Homo sapien
tactagaggtccgagaggataacac

SEQ ID NO: 4357179 - DNA, 25 bp, Homo sapien
gcttgcttttaccactatacggaga

SEQ ID NO: 4357180 - DNA, 25 bp, Homo sapien
ccaaataccttgttattgtatacca

SEQ ID NO: 4357181 - DNA, 25 bp, Homo sapien
ttattgtataccagccacaaaggct

SEQ ID NO: 4357182 - DNA, 25 bp, Homo sapien
tttggaatccatgtatttgcacttt

SEQ ID NO: 4357183 - DNA, 25 bp, Homo sapien
aaatcactccaactgaatcctcacc

SEQ ID NO: 4357184 - DNA, 25 bp, Homo sapien
acttagaagagtcccacttggtaga

SEQ ID NO: 4357185 - DNA, 25 bp, Homo sapien
tactaatgccagataggctggactc

SEQ ID NO: 4357186 - DNA, 25 bp, Homo sapien
gctggactcaaaacctaagattggc

SEQ ID NO: 4357187 - DNA, 25 bp, Homo sapien
tgccaaattcactcaagacaagatc

SEQ ID NO: 4357188 - DNA, 25 bp, Homo sapien
ttttaaacaggtatgcatggcctcc

SEQ ID NO: 4357189 - DNA, 25 bp, Homo sapien
gagggcttcccggtaagcactctgt

SEQ ID NO: 4357190 - DNA, 25 bp, Homo sapien
acttcacggcattcagtttgattaa

SEQ ID NO: 4357191 - DNA, 25 bp, Homo sapien
tgtttaacttcacggcattcagttt

SEQ ID NO: 4357192 - DNA, 25 bp, Homo sapien
aaaagtataccgtaacaagcatata

SEQ ID NO: 4357193 - DNA, 25 bp, Homo sapien
ttttatgtcacagtacataaaattc

SEQ ID NO: 4357194 - DNA, 25 bp, Homo sapien
tcagccacgcataaagaaggagcag

SEQ ID NO: 4357195 - DNA, 25 bp, Homo sapien
agtacataaaattcataacaacttc

SEQ ID NO: 4357196 - DNA, 25 bp, Homo sapien
gacagcaggaatgtgcacttctgac

SEQ ID NO: 4357197 - DNA, 25 bp, Homo sapien
tgtgccccacacttccccggcagta

SEQ ID NO: 4357198 - DNA, 25 bp, Homo sapien
tgacaccaaattgtactgagacagc

SEQ ID NO: 4357199 - DNA, 25 bp, Homo sapien
aaagcactttcatgtgccccacact

SEQ ID NO: 4357200 - DNA, 25 bp, Homo sapien
tatcctccgattaccaagtgctctt

SEQ ID NO: 4357201 - DNA, 25 bp, Homo sapien
gcaccagttgtaaaagatattgaga

SEQ ID NO: 4357202 - DNA, 25 bp, Homo sapien
aaaatagaaactgccctatcctccg

SEQ ID NO: 4357203 - DNA, 25 bp, Homo sapien
gggcacaatcaagaaaaggctcata

SEQ ID NO: 4357204 - DNA, 25 bp, Homo sapien
ggcaggagtacatgagcaaatgctt

SEQ ID NO: 4357205 - DNA, 25 bp, Homo sapien
cttttctttcttatgagacatcaag

SEQ ID NO: 4357206 - DNA, 25 bp, Homo sapien
gcaggagtacatgagcaaatgcttt

SEQ ID NO: 4357207 - DNA, 25 bp, Homo sapien
gagacatcaaggagacaccctcatc

SEQ ID NO: 4357208 - DNA, 25 bp, Homo sapien
tcatctgtcgcaggcagcctacagc

SEQ ID NO: 4357209 - DNA, 25 bp, Homo sapien
aggcagcctacagcatattctcgaa

SEQ ID NO: 4357210 - DNA, 25 bp, Homo sapien
tctcgaacgtactggtctggatagt

SEQ ID NO: 4357211 - DNA, 25 bp, Homo sapien
tactggtctggatagttgaaatcca

SEQ ID NO: 4357212 - DNA, 25 bp, Homo sapien
caccaagataggtcaaaagaaggca

SEQ ID NO: 4357213 - DNA, 25 bp, Homo sapien
gggtatcacctaagtaccactgaca

SEQ ID NO: 4357214 - DNA, 25 bp, Homo sapien
cactgacatcaacgtcatggaaggt

SEQ ID NO: 4357215 - DNA, 25 bp, Homo sapien
ttaagtctgaaaagctatgaagtac

SEQ ID NO: 4357216 - DNA, 25 bp, Homo sapien
tgattgacagcagtaattttggcag

SEQ ID NO: 4357217 - DNA, 25 bp, Homo sapien
aaaatctctcggcagtcttgtcgca

SEQ ID NO: 4357218 - DNA, 25 bp, Homo sapien
tgtcgcaaagtccaaataagatcca

SEQ ID NO: 4357219 - DNA, 25 bp, Homo sapien
acacagttgagacaagggatccctg

SEQ ID NO: 4357220 - DNA, 25 bp, Homo sapien
gactaggagtctggcactactgctc

SEQ ID NO: 4357221 - DNA, 25 bp, Homo sapien
tggctattatggtcccaaactggcc

SEQ ID NO: 4357222 - DNA, 25 bp, Homo sapien
tactgctctctttcctaaggtcaag

SEQ ID NO: 4357223 - DNA, 25 bp, Homo sapien
taaactgatgacgagaatactggat

SEQ ID NO: 4357224 - DNA, 25 bp, Homo sapien
gcactatcactgcttgcaatctcag

SEQ ID NO: 4357225 - DNA, 25 bp, Homo sapien
cattagcactatcactgcttgcaat

SEQ ID NO: 4357226 - DNA, 25 bp, Homo sapien
gacacattagcactatcactgcttg

SEQ ID NO: 4357227 - DNA, 25 bp, Homo sapien
tagcactatcactgcttgcaatctc

SEQ ID NO: 4357228 - DNA, 25 bp, Homo sapien
tgcattttcagtatatggatttgtt

SEQ ID NO: 4357229 - DNA, 25 bp, Homo sapien
cagtatatggatttgtttgaacagt

SEQ ID NO: 4357230 - DNA, 25 bp, Homo sapien
ctggaaatttaacatgcaaagctgt

SEQ ID NO: 4357231 - DNA, 25 bp, Homo sapien
gaacagttcccattggattcaacat

SEQ ID NO: 4357232 - DNA, 25 bp, Homo sapien
ctaaaacatgcaaataattttggtt

SEQ ID NO: 4357233 - DNA, 25 bp, Homo sapien
tgaagaccagctgtgtaatattatg

SEQ ID NO: 4357234 - DNA, 25 bp, Homo sapien
tatttacccacgctacaggataatg

SEQ ID NO: 4357235 - DNA, 25 bp, Homo sapien
aaccatcgtatttacccacgctaca

SEQ ID NO: 4357236 - DNA, 25 bp, Homo sapien
ccagctgtgtaatattatgtctcca

SEQ ID NO: 4357237 - DNA, 25 bp, Homo sapien
gcacatgtcctttgtttcaataatg

SEQ ID NO: 4357238 - DNA, 25 bp, Homo sapien
ctgttgaaaaagataccattgcata

SEQ ID NO: 4357239 - DNA, 25 bp, Homo sapien
taactttaaggtgtaaacatgcaca

SEQ ID NO: 4357240 - DNA, 25 bp, Homo sapien
taaatatgctaagaataactttaag

SEQ ID NO: 4357241 - DNA, 25 bp, Homo sapien
cacctacctaagcctcttaaagtgt

SEQ ID NO: 4357242 - DNA, 25 bp, Homo sapien
cagtcttaaaattattccgttatat

SEQ ID NO: 4357243 - DNA, 25 bp, Homo sapien
tctgagcttacgatggttttacaca

SEQ ID NO: 4357244 - DNA, 25 bp, Homo sapien
cctgatggtctgatatttagaggga

SEQ ID NO: 4357245 - DNA, 25 bp, Homo sapien
tcgagccattcttggtaagtcacaa

SEQ ID NO: 4357246 - DNA, 25 bp, Homo sapien
gttttacacaggagctcagtaccat

SEQ ID NO: 4357247 - DNA, 25 bp, Homo sapien
ctgtaacgaagcagacaaaaacaaa

SEQ ID NO: 4357248 - DNA, 25 bp, Homo sapien
tgtaacgaagcagacaaaaacaaaa

SEQ ID NO: 4357249 - DNA, 25 bp, Homo sapien
cagagaagtctttcaaggctgaaga

SEQ ID NO: 4357250 - DNA, 25 bp, Homo sapien
tcctgagcaattaagaaacagcccc

SEQ ID NO: 4357251 - DNA, 25 bp, Homo sapien
tatgagcctttaacaccggtctagc

SEQ ID NO: 4357252 - DNA, 25 bp, Homo sapien
tagttgcctgtaagaaccatacaac

SEQ ID NO: 4357253 - DNA, 25 bp, Homo sapien
agtggtattcaattcttactctcga

SEQ ID NO: 4357254 - DNA, 25 bp, Homo sapien
tcaaaactgtctgtattgtatgtgc

SEQ ID NO: 4357255 - DNA, 25 bp, Homo sapien
cacacgtgtgtaggctcacctcaaa

SEQ ID NO: 4357256 - DNA, 25 bp, Homo sapien
gcatctgttgtatgggaggttataa

SEQ ID NO: 4357257 - DNA, 25 bp, Homo sapien
gcagtaacaaaatccatcctctaaa

SEQ ID NO: 4357258 - DNA, 25 bp, Homo sapien
tatcttcaatcttgagaagtaaagc

SEQ ID NO: 4357259 - DNA, 25 bp, Homo sapien
atgatttaaaacctggcacagtggc

SEQ ID NO: 4357260 - DNA, 25 bp, Homo sapien
taatcatgctttatacggttacatg

SEQ ID NO: 4357261 - DNA, 25 bp, Homo sapien
acgcccagcctgtttgcactttttc

SEQ ID NO: 4357262 - DNA, 25 bp, Homo sapien
cactttttcatttgttgcaacaatt

SEQ ID NO: 4357263 - DNA, 25 bp, Homo sapien
tgtcaccggggtggaaggcagtgac

SEQ ID NO: 4357264 - DNA, 25 bp, Homo sapien
gtcaccggggtggaaggcagtgaca

SEQ ID NO: 4357265 - DNA, 25 bp, Homo sapien
cagtttcctctgtgttaagtttatt

SEQ ID NO: 4357266 - DNA, 25 bp, Homo sapien
acagtttcctctgtgttaagtttat

SEQ ID NO: 4357267 - DNA, 25 bp, Homo sapien
tacagtttcctctgtgttaagttta

SEQ ID NO: 4357268 - DNA, 25 bp, Homo sapien
gggcagggctctgttcatcacacag

SEQ ID NO: 4357269 - DNA, 25 bp, Homo sapien
tcgtgttttctttggtggtaatgga

SEQ ID NO: 4357270 - DNA, 25 bp, Homo sapien
gattagatgaatttcgatttatggc

SEQ ID NO: 4357271 - DNA, 25 bp, Homo sapien
cagcattccacaagtataaaatggg

SEQ ID NO: 4357272 - DNA, 25 bp, Homo sapien
aaaaacatattctactctcccgctg

SEQ ID NO: 4357273 - DNA, 25 bp, Homo sapien
tagtcaaacgtttttggattgccaa

SEQ ID NO: 4357274 - DNA, 25 bp, Homo sapien
actgaattagtggatgatcaccaaa

SEQ ID NO: 4357275 - DNA, 25 bp, Homo sapien
tgacttgcaacacataatcataggg

SEQ ID NO: 4357276 - DNA, 25 bp, Homo sapien
tgaacagctacgatgagctttcccc

SEQ ID NO: 4357277 - DNA, 25 bp, Homo sapien
caagacaatcccacaagtgacagga

SEQ ID NO: 4357278 - DNA, 25 bp, Homo sapien
tcagggatggatggttcatgctctg

SEQ ID NO: 4357279 - DNA, 25 bp, Homo sapien
tgttttagccagtccatccaagaca

SEQ ID NO: 4357280 - DNA, 25 bp, Homo sapien
cttcaaggaatcaaattcatgcaga

SEQ ID NO: 4357281 - DNA, 25 bp, Homo sapien
gacagagaaactgctcaagtggaga

SEQ ID NO: 4357282 - DNA, 25 bp, Homo sapien
tacatgagaactcggagagatccct

SEQ ID NO: 4357283 - DNA, 25 bp, Homo sapien
caatatgcaatttactagacagaga

SEQ ID NO: 4357284 - DNA, 25 bp, Homo sapien
ttattcaaggtttgcagtattccag

SEQ ID NO: 4357285 - DNA, 25 bp, Homo sapien
agaggtaatggtggccaatgaatcc

SEQ ID NO: 4357286 - DNA, 25 bp, Homo sapien
ccttgaagaaacttggcccacatcc

SEQ ID NO: 4357287 - DNA, 25 bp, Homo sapien
accaatgccttgaagaaacttggcc

SEQ ID NO: 4357288 - DNA, 25 bp, Homo sapien
tttttatttgccacatttggcaggc

SEQ ID NO: 4357289 - DNA, 25 bp, Homo sapien
tatgcactcagagggagtagtccca

SEQ ID NO: 4357290 - DNA, 25 bp, Homo sapien
cgcttgcgactgagggtcgagtcaa

SEQ ID NO: 4357291 - DNA, 25 bp, Homo sapien
aaataaactagccaccctctgaagt

SEQ ID NO: 4357292 - DNA, 25 bp, Homo sapien
gtagtcccacagtataatcattagc

SEQ ID NO: 4357293 - DNA, 25 bp, Homo sapien
taaggactccaatttttgagtctaa

SEQ ID NO: 4357294 - DNA, 25 bp, Homo sapien
ttcctataaggactccaatttttga

SEQ ID NO: 4357295 - DNA, 25 bp, Homo sapien
tataaggactccaatttttgagtct

SEQ ID NO: 4357296 - DNA, 25 bp, Homo sapien
cctataaggactccaatttttgagt

SEQ ID NO: 4357297 - DNA, 25 bp, Homo sapien
cttgtcactaatttgagaactggaa

SEQ ID NO: 4357298 - DNA, 25 bp, Homo sapien
ttcttgtcactaatttgagaactgg

SEQ ID NO: 4357299 - DNA, 25 bp, Homo sapien
tgtcactaatttgagaactggaaga

SEQ ID NO: 4357300 - DNA, 25 bp, Homo sapien
gtcactaatttgagaactggaagaa

SEQ ID NO: 4357301 - DNA, 25 bp, Homo sapien
tcctcatatacagcagtctgattca

SEQ ID NO: 4357302 - DNA, 25 bp, Homo sapien
tccataaggaggttgaacattgggt

SEQ ID NO: 4357303 - DNA, 25 bp, Homo sapien
cagcagtctgattcacacatgcaaa

SEQ ID NO: 4357304 - DNA, 25 bp, Homo sapien
ggtaattgtgaacttgcttccataa

SEQ ID NO: 4357305 - DNA, 25 bp, Homo sapien
gctatctgtgaatccaccgcccaga

SEQ ID NO: 4357306 - DNA, 25 bp, Homo sapien
gcccagatgtcaaggatgtctgcca

SEQ ID NO: 4357307 - DNA, 25 bp, Homo sapien
gaaatccacaggtatggagccatca

SEQ ID NO: 4357308 - DNA, 25 bp, Homo sapien
tataagaaatggtagcttcccgagg

SEQ ID NO: 4357309 - DNA, 25 bp, Homo sapien
tacagcccgagactggtatcacagt

SEQ ID NO: 4357310 - DNA, 25 bp, Homo sapien
caaatcgctcaatacagatggcaag

SEQ ID NO: 4357311 - DNA, 25 bp, Homo sapien
gctgctagacctatgttcacatgag

SEQ ID NO: 4357312 - DNA, 25 bp, Homo sapien
aattttctatcaacctcacggccca

SEQ ID NO: 4357313 - DNA, 25 bp, Homo sapien
attgagctaaaatagtaccactgca

SEQ ID NO: 4357314 - DNA, 25 bp, Homo sapien
agtccaagaatctaaggctgcattg

SEQ ID NO: 4357315 - DNA, 25 bp, Homo sapien
ggctgcattgagctaaaatagtacc

SEQ ID NO: 4357316 - DNA, 25 bp, Homo sapien
ccaagaatctaaggctgcattgagc

SEQ ID NO: 4357317 - DNA, 25 bp, Homo sapien
cctagcaggctgcactcgattcaca

SEQ ID NO: 4357318 - DNA, 25 bp, Homo sapien
gccttagttttgacagggcccacta

SEQ ID NO: 4357319 - DNA, 25 bp, Homo sapien
tatgggactggatcccatgactgcc

SEQ ID NO: 4357320 - DNA, 25 bp, Homo sapien
tacggctggaccaggtgtaccacaa

SEQ ID NO: 4357321 - DNA, 25 bp, Homo sapien
cttgcctggcaagatcctcagtctt

SEQ ID NO: 4357322 - DNA, 25 bp, Homo sapien
ctcagtcttgtatcattcttctgtt

SEQ ID NO: 4357323 - DNA, 25 bp, Homo sapien
caagcatacaccacttcacctgact

SEQ ID NO: 4357324 - DNA, 25 bp, Homo sapien
acaagcatacaccacttcacctgac

SEQ ID NO: 4357325 - DNA, 25 bp, Homo sapien
agcatacaccacttcacctgactaa

SEQ ID NO: 4357326 - DNA, 25 bp, Homo sapien
aagcatacaccacttcacctgacta

SEQ ID NO: 4357327 - DNA, 25 bp, Homo sapien
tactgtctatggcaaactgcatgac

SEQ ID NO: 4357328 - DNA, 25 bp, Homo sapien
tctatggcaaactgcatgacaatct

SEQ ID NO: 4357329 - DNA, 25 bp, Homo sapien
atccttactgtctatggcaaactgc

SEQ ID NO: 4357330 - DNA, 25 bp, Homo sapien
cttactgtctatggcaaactgcatg

SEQ ID NO: 4357331 - DNA, 25 bp, Homo sapien
tatattgtgtgtatttcaccaattt

SEQ ID NO: 4357332 - DNA, 25 bp, Homo sapien
aattttatattgtgtgtatttcacc

SEQ ID NO: 4357333 - DNA, 25 bp, Homo sapien
tttatattgtgtgtatttcaccaat

SEQ ID NO: 4357334 - DNA, 25 bp, Homo sapien
ttttatattgtgtgtatttcaccaa

SEQ ID NO: 4357335 - DNA, 25 bp, Homo sapien
atctgttttattgtacaccctcttc

SEQ ID NO: 4357336 - DNA, 25 bp, Homo sapien
tctgttttattgtacaccctcttct

SEQ ID NO: 4357337 - DNA, 25 bp, Homo sapien
aatctgttttattgtacaccctctt

SEQ ID NO: 4357338 - DNA, 25 bp, Homo sapien
tgttttattgtacaccctcttctct

SEQ ID NO: 4357339 - DNA, 25 bp, Homo sapien
tggtcgcccccatttcagtctttta

SEQ ID NO: 4357340 - DNA, 25 bp, Homo sapien
aaaagtgacgttttcatggaagact

SEQ ID NO: 4357341 - DNA, 25 bp, Homo sapien
ttaaaagtgacgttttcatggaaga

SEQ ID NO: 4357342 - DNA, 25 bp, Homo sapien
taagaatggtcgcccccatttcagt

SEQ ID NO: 4357343 - DNA, 25 bp, Homo sapien
tgggactagagacgtgcaccaccac

SEQ ID NO: 4357344 - DNA, 25 bp, Homo sapien
gggactagagacgtgcaccaccacg

SEQ ID NO: 4357345 - DNA, 25 bp, Homo sapien
gaggataacttttaacccatgacac

SEQ ID NO: 4357346 - DNA, 25 bp, Homo sapien
ctggagaatagaacagtcttgagga

SEQ ID NO: 4357347 - DNA, 25 bp, Homo sapien
tcttctactggagaatagaacagtc

SEQ ID NO: 4357348 - DNA, 25 bp, Homo sapien
gaacagtcttgaggataacttttaa

SEQ ID NO: 4357349 - DNA, 25 bp, Homo sapien
actggtcttgaactcctgatctcgt

SEQ ID NO: 4357350 - DNA, 25 bp, Homo sapien
tgcaatggtatgacctcagctgact

SEQ ID NO: 4357351 - DNA, 25 bp, Homo sapien
agctgactgcaacccctgactcccg

SEQ ID NO: 4357352 - DNA, 25 bp, Homo sapien
caccacattggtcaaactggtcttg

SEQ ID NO: 4357353 - DNA, 25 bp, Homo sapien
taagaacgcctaatagaaggctggg

SEQ ID NO: 4357354 - DNA, 25 bp, Homo sapien
taataaccacttaggaggccggtgc

SEQ ID NO: 4357355 - DNA, 25 bp, Homo sapien
gactaatgattcaggacgcagtgaa

SEQ ID NO: 4357356 - DNA, 25 bp, Homo sapien
gggtagagcaccttaacgaagattg

SEQ ID NO: 4357357 - DNA, 25 bp, Homo sapien
gacagtcacactgcccacaatgatg

SEQ ID NO: 4357358 - DNA, 25 bp, Homo sapien
tatctccaaacttccattcagtgct

SEQ ID NO: 4357359 - DNA, 25 bp, Homo sapien
aattatcatgacttcaccagacagt

SEQ ID NO: 4357360 - DNA, 25 bp, Homo sapien
aagcacttgtcactccctttggatg

SEQ ID NO: 4357361 - DNA, 25 bp, Homo sapien
gcacttcaagtttacgtcccaccat

SEQ ID NO: 4357362 - DNA, 25 bp, Homo sapien
catctttcatcctaagcgaatcccg

SEQ ID NO: 4357363 - DNA, 25 bp, Homo sapien
aatttgctcggtttcatttcagcag

SEQ ID NO: 4357364 - DNA, 25 bp, Homo sapien
tcagtacctgagacagggttccaat

SEQ ID NO: 4357365 - DNA, 25 bp, Homo sapien
caaagcgacagtgacccgggacgcc

SEQ ID NO: 4357366 - DNA, 25 bp, Homo sapien
gcgagtacgccgtctctccacagaa

SEQ ID NO: 4357367 - DNA, 25 bp, Homo sapien
ctcaggaacgggacccaaagcgaca

SEQ ID NO: 4357368 - DNA, 25 bp, Homo sapien
gaagttccggaggtgtccgcataga

SEQ ID NO: 4357369 - DNA, 25 bp, Homo sapien
gcggtgcaaccacaagagtcgccag

SEQ ID NO: 4357370 - DNA, 25 bp, Homo sapien
agggcgggccgcaaccaagccagac

SEQ ID NO: 4357371 - DNA, 25 bp, Homo sapien
ggtaggcggttatcctccaagctgg

SEQ ID NO: 4357372 - DNA, 25 bp, Homo sapien
ggtagcggcaagctagaacgcaccg

SEQ ID NO: 4357373 - DNA, 25 bp, Homo sapien
ctgcctggcgttccgccgccgccgc

SEQ ID NO: 4357374 - DNA, 25 bp, Homo sapien
tactattccaagtgcgcagtcagca

SEQ ID NO: 4357375 - DNA, 25 bp, Homo sapien
agtcagcagcccaggccgccgcaac

SEQ ID NO: 4357376 - DNA, 25 bp, Homo sapien
gcctctctcgatcacctcccgcctg

SEQ ID NO: 4357377 - DNA, 25 bp, Homo sapien
cctgccccgcgcagcactacactcg

SEQ ID NO: 4357378 - DNA, 25 bp, Homo sapien
gaatgagagtttcgctactgttgcc

SEQ ID NO: 4357379 - DNA, 25 bp, Homo sapien
ttgaatgagagtttcgctactgttg

SEQ ID NO: 4357380 - DNA, 25 bp, Homo sapien
attttgaatgagagtttcgctactg

SEQ ID NO: 4357381 - DNA, 25 bp, Homo sapien
tcaccgcaactctgcgtcccccggt

SEQ ID NO: 4357382 - DNA, 25 bp, Homo sapien
tcttgagccctgtcgcctatgcata

SEQ ID NO: 4357383 - DNA, 25 bp, Homo sapien
cattctatgcaggatcccgattgga

SEQ ID NO: 4357384 - DNA, 25 bp, Homo sapien
taaactcccttctaaaccagcagtg

SEQ ID NO: 4357385 - DNA, 25 bp, Homo sapien
ggattttgccttggtgtagactcaa

SEQ ID NO: 4357386 - DNA, 25 bp, Homo sapien
tgctaaaaagcgtctgacactcaca

SEQ ID NO: 4357387 - DNA, 25 bp, Homo sapien
atgctaaaaagcgtctgacactcac

SEQ ID NO: 4357388 - DNA, 25 bp, Homo sapien
gaatgatcaagttgccagacaccat

SEQ ID NO: 4357389 - DNA, 25 bp, Homo sapien
ggcatagaagagctgttccttgaga

SEQ ID NO: 4357390 - DNA, 25 bp, Homo sapien
gatggcatagtgaatgatcaagttg

SEQ ID NO: 4357391 - DNA, 25 bp, Homo sapien
tgggctgatggcatagtgaatgatc

SEQ ID NO: 4357392 - DNA, 25 bp, Homo sapien
tctgagctttggagctgcgtcctct

SEQ ID NO: 4357393 - DNA, 25 bp, Homo sapien
tttggagctgcgtcctctagaggga

SEQ ID NO: 4357394 - DNA, 25 bp, Homo sapien
tcctctagagggagggaattcagtg

SEQ ID NO: 4357395 - DNA, 25 bp, Homo sapien
gggagggaattcagtggagcagcga

SEQ ID NO: 4357396 - DNA, 25 bp, Homo sapien
attcagtgtatcacactgcatctag

SEQ ID NO: 4357397 - DNA, 25 bp, Homo sapien
ttgtaatcccggataccattcagtg

SEQ ID NO: 4357398 - DNA, 25 bp, Homo sapien
gccgatttccttaatcttcacctaa

SEQ ID NO: 4357399 - DNA, 25 bp, Homo sapien
tccttaatcttcacctaatgtcctt

SEQ ID NO: 4357400 - DNA, 25 bp, Homo sapien
tgattattgatataggccacccctg

SEQ ID NO: 4357401 - DNA, 25 bp, Homo sapien
gcttgtcatctcattctcttgagac

SEQ ID NO: 4357402 - DNA, 25 bp, Homo sapien
caccatgtttgtagctgttttctac

SEQ ID NO: 4357403 - DNA, 25 bp, Homo sapien
gaggacttccctacccattgcagtt

SEQ ID NO: 4357404 - DNA, 25 bp, Homo sapien
cctaggtcctgcaccagggttttgg

SEQ ID NO: 4357405 - DNA, 25 bp, Homo sapien
tcgggcgcggtatgggcgagtgccc

SEQ ID NO: 4357406 - DNA, 25 bp, Homo sapien
agggccgggccaatgttcgtcctgc

SEQ ID NO: 4357407 - DNA, 25 bp, Homo sapien
cacggtctgtgaacactacgcgcaa

SEQ ID NO: 4357408 - DNA, 25 bp, Homo sapien
agcctgttgctggtcgccatctctg

SEQ ID NO: 4357409 - DNA, 25 bp, Homo sapien
taaagacaggaaccacattagatct

SEQ ID NO: 4357410 - DNA, 25 bp, Homo sapien
aacactcagcaagtgctcaccaaat

SEQ ID NO: 4357411 - DNA, 25 bp, Homo sapien
caagtttctgtcgttgcacttccca

SEQ ID NO: 4357412 - DNA, 25 bp, Homo sapien
ctgttgcccacatgaattaaactca

SEQ ID NO: 4357413 - DNA, 25 bp, Homo sapien
aatgaaagaaatactcactgtacac

SEQ ID NO: 4357414 - DNA, 25 bp, Homo sapien
aagaaatactcactgtacactgctt

SEQ ID NO: 4357415 - DNA, 25 bp, Homo sapien
gaaagaaatactcactgtacactgc

SEQ ID NO: 4357416 - DNA, 25 bp, Homo sapien
gggcctggcgtctcttcaatttcat

SEQ ID NO: 4357417 - DNA, 25 bp, Homo sapien
caggtacagcctatgatcatctcct

SEQ ID NO: 4357418 - DNA, 25 bp, Homo sapien
gtccttggggcctggcgtctcttca

SEQ ID NO: 4357419 - DNA, 25 bp, Homo sapien
gctggtgtgcctgggtcacaggtac

SEQ ID NO: 4357420 - DNA, 25 bp, Homo sapien
ttgatcacctttctccgcttttgaa

SEQ ID NO: 4357421 - DNA, 25 bp, Homo sapien
ggtcttgtcttgtgctgcctgtgct

SEQ ID NO: 4357422 - DNA, 25 bp, Homo sapien
atcacctttctccgcttttgaaaag

SEQ ID NO: 4357423 - DNA, 25 bp, Homo sapien
tggtcttgtcttgtgctgcctgtgc

SEQ ID NO: 4357424 - DNA, 25 bp, Homo sapien
gatgtggtcaagctacagcccttag

SEQ ID NO: 4357425 - DNA, 25 bp, Homo sapien
tcacagtgtgtgcaaacgggtaccc

SEQ ID NO: 4357426 - DNA, 25 bp, Homo sapien
taatacagggctcatacaggacatc

SEQ ID NO: 4357427 - DNA, 25 bp, Homo sapien
gttagaaagccaacgcacacaggga

SEQ ID NO: 4357428 - DNA, 25 bp, Homo sapien
tattactaaggacaaccgggcaggc

SEQ ID NO: 4357429 - DNA, 25 bp, Homo sapien
atgatccgagttggcctcgcgccgg

SEQ ID NO: 4357430 - DNA, 25 bp, Homo sapien
gaggtcccaacgtggatgatccgag

SEQ ID NO: 4357431 - DNA, 25 bp, Homo sapien
gcccggcagtcgagagcaccctgtg

SEQ ID NO: 4357432 - DNA, 25 bp, Homo sapien
tagctgttaaagaggacaccaggct

SEQ ID NO: 4357433 - DNA, 25 bp, Homo sapien
cctgactaaacaggccaggtctttg

SEQ ID NO: 4357434 - DNA, 25 bp, Homo sapien
aagcctgtgcggcaaacagcctgtg

SEQ ID NO: 4357435 - DNA, 25 bp, Homo sapien
aggtctttgcctcatgctgcacagg

SEQ ID NO: 4357436 - DNA, 25 bp, Homo sapien
agcatcagtggcagctaggctcagc

SEQ ID NO: 4357437 - DNA, 25 bp, Homo sapien
gggaggctctcccttactacgcagc

SEQ ID NO: 4357438 - DNA, 25 bp, Homo sapien
gaggctctcccttactactcctggg

SEQ ID NO: 4357439 - DNA, 25 bp, Homo sapien
tactacgcagctcccttgagcatca

SEQ ID NO: 4357440 - DNA, 25 bp, Homo sapien
gacccaggaaaccctcactgattgc

SEQ ID NO: 4357441 - DNA, 25 bp, Homo sapien
ctccttcaatccctgtgtagaccca

SEQ ID NO: 4357442 - DNA, 25 bp, Homo sapien
ccctcactgattgcttcattttgtc

SEQ ID NO: 4357443 - DNA, 25 bp, Homo sapien
ctcactgattgcttcattttgtctt

SEQ ID NO: 4357444 - DNA, 25 bp, Homo sapien
ttctctgcttgagacggcagttggg

SEQ ID NO: 4357445 - DNA, 25 bp, Homo sapien
actggaggtgggctgctacctgccc

SEQ ID NO: 4357446 - DNA, 25 bp, Homo sapien
gagacaggctggtccttcattgctg

SEQ ID NO: 4357447 - DNA, 25 bp, Homo sapien
cctttcagttctcggggaggagaca

SEQ ID NO: 4357448 - DNA, 25 bp, Homo sapien
cttgtgaacgaaccacggcagaaaa

SEQ ID NO: 4357449 - DNA, 25 bp, Homo sapien
gtcgcgccttgtgaacgaaccacgg

SEQ ID NO: 4357450 - DNA, 25 bp, Homo sapien
gcgccttgtgaacgaaccacggcag

SEQ ID NO: 4357451 - DNA, 25 bp, Homo sapien
ctacagtcgcgccttgtgaacgaac

SEQ ID NO: 4357452 - DNA, 25 bp, Homo sapien
tgtaaaccgagtacaggccgtggag

SEQ ID NO: 4357453 - DNA, 25 bp, Homo sapien
aacagcttcaagagggttcgcggag

SEQ ID NO: 4357454 - DNA, 25 bp, Homo sapien
gactgatagcggaggaaacgcagcc

SEQ ID NO: 4357455 - DNA, 25 bp, Homo sapien
gttcgcggagcaaacacacgtattg

SEQ ID NO: 4357456 - DNA, 25 bp, Homo sapien
tcgtggtcccagtaagagcaatgca

SEQ ID NO: 4357457 - DNA, 25 bp, Homo sapien
tcagagatcgaggcgcgaatgcagc

SEQ ID NO: 4357458 - DNA, 25 bp, Homo sapien
gcgccggtcttgctgtcgtggtccc

SEQ ID NO: 4357459 - DNA, 25 bp, Homo sapien
gcaatgcatcatggcgagctcgggc

SEQ ID NO: 4357460 - DNA, 25 bp, Homo sapien
gggcgcggcggtggctgggctggca

SEQ ID NO: 4357461 - DNA, 25 bp, Homo sapien
ccgggggcgcggcggtggctgggct

SEQ ID NO: 4357462 - DNA, 25 bp, Homo sapien
gcgcggcggtggctgggctggcagg

SEQ ID NO: 4357463 - DNA, 25 bp, Homo sapien
gggggcgcggcggtggctgggctgg

SEQ ID NO: 4357464 - DNA, 25 bp, Homo sapien
tgcagatggtgtgcgtgcggatgcg

SEQ ID NO: 4357465 - DNA, 25 bp, Homo sapien
ctcccaggccattgtacgagttcac

SEQ ID NO: 4357466 - DNA, 25 bp, Homo sapien
ggcctcccaggccattgtacgagtt

SEQ ID NO: 4357467 - DNA, 25 bp, Homo sapien
tgcggcggccgcgtgcagatggtgt

SEQ ID NO: 4357468 - DNA, 25 bp, Homo sapien
ccatgctctgcacgcgtgtgtacgg

SEQ ID NO: 4357469 - DNA, 25 bp, Homo sapien
cacgcgtgtgtacggcccgtacgag

SEQ ID NO: 4357470 - DNA, 25 bp, Homo sapien
tctgcacgcgtgtgtacggcccgta

SEQ ID NO: 4357471 - DNA, 25 bp, Homo sapien
gcagcgccatgctctgcacgcgtgt

SEQ ID NO: 4357472 - DNA, 25 bp, Homo sapien
ggaggctgcggtagcggccacgagt

SEQ ID NO: 4357473 - DNA, 25 bp, Homo sapien
aagccagactgcaggtacttggggg

SEQ ID NO: 4357474 - DNA, 25 bp, Homo sapien
cggtagcggccacgagttgttgagg

SEQ ID NO: 4357475 - DNA, 25 bp, Homo sapien
gggcgccaggtagccgtagccgtcg

SEQ ID NO: 4357476 - DNA, 25 bp, Homo sapien
tagttgcccttgcgctcgccgccgc

SEQ ID NO: 4357477 - DNA, 25 bp, Homo sapien
agttgcccttgcgctcgccgccgcc

SEQ ID NO: 4357478 - DNA, 25 bp, Homo sapien
tcttctcgtagaacgggaacttcgc

SEQ ID NO: 4357479 - DNA, 25 bp, Homo sapien
cttgactgtgcgaccggtctctggg

SEQ ID NO: 4357480 - DNA, 25 bp, Homo sapien
ggaacttcgcgatgatgtactggta

SEQ ID NO: 4357481 - DNA, 25 bp, Homo sapien
tgtactggtagatgccggacagcgt

SEQ ID NO: 4357482 - DNA, 25 bp, Homo sapien
ggagtggagctcagcctctggccat

SEQ ID NO: 4357483 - DNA, 25 bp, Homo sapien
cacgagtccgcttacggccaagtct

SEQ ID NO: 4357484 - DNA, 25 bp, Homo sapien
ctggagtccctagtgcgccaggagc

SEQ ID NO: 4357485 - DNA, 25 bp, Homo sapien
aacttctggagactgcggatgccgc

SEQ ID NO: 4357486 - DNA, 25 bp, Homo sapien
gtcacctaccttaagcagaattctg

SEQ ID NO: 4357487 - DNA, 25 bp, Homo sapien
aatcaggagttagttgtcacctacc

SEQ ID NO: 4357488 - DNA, 25 bp, Homo sapien
tcagcatgtacagagattgtttcag

SEQ ID NO: 4357489 - DNA, 25 bp, Homo sapien
taacagtgtgctccttaacagtgcc

SEQ ID NO: 4357490 - DNA, 25 bp, Homo sapien
actcaatgcctgtcactgcctcttc

SEQ ID NO: 4357491 - DNA, 25 bp, Homo sapien
tcaatgcctgtcactgcctcttcct

SEQ ID NO: 4357492 - DNA, 25 bp, Homo sapien
tcactgcctcttcctcccaggctgt

SEQ ID NO: 4357493 - DNA, 25 bp, Homo sapien
tgtcactgcctcttcctcccaggct

SEQ ID NO: 4357494 - DNA, 25 bp, Homo sapien
acaagtgttgtctgctgctcactca

SEQ ID NO: 4357495 - DNA, 25 bp, Homo sapien
gccatctacaagtgttgtctgctgc

SEQ ID NO: 4357496 - DNA, 25 bp, Homo sapien
tagactctgagggttctcctgaagc

SEQ ID NO: 4357497 - DNA, 25 bp, Homo sapien
actctgagggttctcctgaagccca

SEQ ID NO: 4357498 - DNA, 25 bp, Homo sapien
tggtagggctctttggaattcagca

SEQ ID NO: 4357499 - DNA, 25 bp, Homo sapien
gtagggctctttggaattcagcatc

SEQ ID NO: 4357500 - DNA, 25 bp, Homo sapien
gtggtagggctctttggaattcagc

SEQ ID NO: 4357501 - DNA, 25 bp, Homo sapien
ggtagggctctttggaattcagcat

SEQ ID NO: 4357502 - DNA, 25 bp, Homo sapien
agattggcctcagtgcctatcctcc

SEQ ID NO: 4357503 - DNA, 25 bp, Homo sapien
tgattactttcaggtcccctccagg

SEQ ID NO: 4357504 - DNA, 25 bp, Homo sapien
cattcgaaggctcagaaaacaggca

SEQ ID NO: 4357505 - DNA, 25 bp, Homo sapien
tggaatcggtctccccaagatgtgc

SEQ ID NO: 4357506 - DNA, 25 bp, Homo sapien
tcacatggctgtccggcattcgaag

SEQ ID NO: 4357507 - DNA, 25 bp, Homo sapien
tcctgaccgtggtcccaccgtagcg

SEQ ID NO: 4357508 - DNA, 25 bp, Homo sapien
ggcgcctcctgaccgtggtcccacc

SEQ ID NO: 4357509 - DNA, 25 bp, Homo sapien
gctgcaattcagcagccaccggcgc

SEQ ID NO: 4357510 - DNA, 25 bp, Homo sapien
tgaccgtggtcccaccgtagcgccg

SEQ ID NO: 4357511 - DNA, 25 bp, Homo sapien
ggttccagtgaaccgccgattgagc

SEQ ID NO: 4357512 - DNA, 25 bp, Homo sapien
ctgcggatacggttccagtgaaccg

SEQ ID NO: 4357513 - DNA, 25 bp, Homo sapien
accgccgattgagcgcagtctcagc

SEQ ID NO: 4357514 - DNA, 25 bp, Homo sapien
cagtgaaccgccgattgagcgcagt

SEQ ID NO: 4357515 - DNA, 25 bp, Homo sapien
tgatacagacgcttttctccccagg

SEQ ID NO: 4357516 - DNA, 25 bp, Homo sapien
aatcctgcaacagcggcagaagccg

SEQ ID NO: 4357517 - DNA, 25 bp, Homo sapien
gacagccggcgcgagcaatctacac

SEQ ID NO: 4357518 - DNA, 25 bp, Homo sapien
ggccgggaatcctgcaacagcggca

SEQ ID NO: 4357519 - DNA, 25 bp, Homo sapien
gcttcgctagaaccactcagctcgt

SEQ ID NO: 4357520 - DNA, 25 bp, Homo sapien
caggttccgctgtcccctttcctag

SEQ ID NO: 4357521 - DNA, 25 bp, Homo sapien
cggcttcccgctcctgagcgggaga

SEQ ID NO: 4357522 - DNA, 25 bp, Homo sapien
gccgccggctgcctgaaccaggttc

SEQ ID NO: 4357523 - DNA, 25 bp, Homo sapien
cagattttgcacatgttggtggaaa

SEQ ID NO: 4357524 - DNA, 25 bp, Homo sapien
tcaccagctacacgtactaattcag

SEQ ID NO: 4357525 - DNA, 25 bp, Homo sapien
tcaagccaatgtgcagaccctaagg

SEQ ID NO: 4357526 - DNA, 25 bp, Homo sapien
gcttttcacacgctgctcactttcg

SEQ ID NO: 4357527 - DNA, 25 bp, Homo sapien
gagctgtttcctgttgttaagtgtc

SEQ ID NO: 4357528 - DNA, 25 bp, Homo sapien
gctgtttcctgttgttaagtgtctc

SEQ ID NO: 4357529 - DNA, 25 bp, Homo sapien
acatgagagctgtttcctgttgtta

SEQ ID NO: 4357530 - DNA, 25 bp, Homo sapien
tgtttcctgttgttaagtgtctcac

SEQ ID NO: 4357531 - DNA, 25 bp, Homo sapien
tgagaggcagtagaccagagctctg

SEQ ID NO: 4357532 - DNA, 25 bp, Homo sapien
ttgagaggcagtagaccagagctct

SEQ ID NO: 4357533 - DNA, 25 bp, Homo sapien
gcttgagaggcagtagaccagagct

SEQ ID NO: 4357534 - DNA, 25 bp, Homo sapien
cttgagaggcagtagaccagagctc

SEQ ID NO: 4357535 - DNA, 25 bp, Homo sapien
ccaaggagtatgtgccccatcgtca

SEQ ID NO: 4357536 - DNA, 25 bp, Homo sapien
aggcagaatgcagggcagttgtcgg

SEQ ID NO: 4357537 - DNA, 25 bp, Homo sapien
gtgccccatcgtcaatcaggcagaa

SEQ ID NO: 4357538 - DNA, 25 bp, Homo sapien
gctgatgttggggtatgagtcctcc

SEQ ID NO: 4357539 - DNA, 25 bp, Homo sapien
tcccggtgttgttccaggcctgacg

SEQ ID NO: 4357540 - DNA, 25 bp, Homo sapien
tgttcatggatagtgaggcagtagc

SEQ ID NO: 4357541 - DNA, 25 bp, Homo sapien
gcaggacaaagactgcgggcagtcc

SEQ ID NO: 4357542 - DNA, 25 bp, Homo sapien
cctgtcttcctgatgcccgatggct

SEQ ID NO: 4357543 - DNA, 25 bp, Homo sapien
ccttgtttctactggcagagtcctg

SEQ ID NO: 4357544 - DNA, 25 bp, Homo sapien
tgttcccttgtttctactggcagag

SEQ ID NO: 4357545 - DNA, 25 bp, Homo sapien
cagtttgatgtctaggttgggatta

SEQ ID NO: 4357546 - DNA, 25 bp, Homo sapien
ttgatgtctaggttgggattagcca

SEQ ID NO: 4357547 - DNA, 25 bp, Homo sapien
gagagcagaattctttcttcgctct

SEQ ID NO: 4357548 - DNA, 25 bp, Homo sapien
agagagcagaattctttcttcgctc

SEQ ID NO: 4357549 - DNA, 25 bp, Homo sapien
agagcagaattctttcttcgctctc

SEQ ID NO: 4357550 - DNA, 25 bp, Homo sapien
gagagagcagaattctttcttcgct

SEQ ID NO: 4357551 - DNA, 25 bp, Homo sapien
tggcagctaccaccaaaaccttgaa

SEQ ID NO: 4357552 - DNA, 25 bp, Homo sapien
caggaggtaagggtgatgctggagc

SEQ ID NO: 4357553 - DNA, 25 bp, Homo sapien
ggcggttgaggaggtcattgtgcca

SEQ ID NO: 4357554 - DNA, 25 bp, Homo sapien
gccattttggcagctaccaccaaaa

SEQ ID NO: 4357555 - DNA, 25 bp, Homo sapien
gcagggagccaggtggtcccgggaa

SEQ ID NO: 4357556 - DNA, 25 bp, Homo sapien
gaagcagcagggagccatgggaaca

SEQ ID NO: 4357557 - DNA, 25 bp, Homo sapien
ctgccagggtagtggaaggaagcag

SEQ ID NO: 4357558 - DNA, 25 bp, Homo sapien
ggagccatgggaacaggggagggca

SEQ ID NO: 4357559 - DNA, 25 bp, Homo sapien
aacagctttagttagaccactttct

SEQ ID NO: 4357560 - DNA, 25 bp, Homo sapien
tagattgtgactggtcaacgtgcac

SEQ ID NO: 4357561 - DNA, 25 bp, Homo sapien
cactgagcatttggggctgaacgtt

SEQ ID NO: 4357562 - DNA, 25 bp, Homo sapien
aaatgcaaataactgccagcaaggg

SEQ ID NO: 4357563 - DNA, 25 bp, Homo sapien
tctaagtcgctgtaccaaatccatc

SEQ ID NO: 4357564 - DNA, 25 bp, Homo sapien
ccttctaagtcgctgtaccaaatcc

SEQ ID NO: 4357565 - DNA, 25 bp, Homo sapien
ttctaagtcgctgtaccaaatccat

SEQ ID NO: 4357566 - DNA, 25 bp, Homo sapien
ttccttctaagtcgctgtaccaaat

SEQ ID NO: 4357567 - DNA, 25 bp, Homo sapien
gagtcataatgcctttctgcccttg

SEQ ID NO: 4357568 - DNA, 25 bp, Homo sapien
gtcataatgcctttctgcccttggg

SEQ ID NO: 4357569 - DNA, 25 bp, Homo sapien
tcacttggcattgcctcatggtctc

SEQ ID NO: 4357570 - DNA, 25 bp, Homo sapien
gacatcagttctctcctccgtgtgg

SEQ ID NO: 4357571 - DNA, 25 bp, Homo sapien
ttcagaaaccctgggagtggtccag

SEQ ID NO: 4357572 - DNA, 25 bp, Homo sapien
tgtcctcggggattctctaacccca

SEQ ID NO: 4357573 - DNA, 25 bp, Homo sapien
tcagtttcagaaaccctgggagtgg

SEQ ID NO: 4357574 - DNA, 25 bp, Homo sapien
gggattctctaaccccagatcagtt

SEQ ID NO: 4357575 - DNA, 25 bp, Homo sapien
tgaaggtgagtgagtacccctgaga

SEQ ID NO: 4357576 - DNA, 25 bp, Homo sapien
actttgtgtcatgatgtgaatcccc

SEQ ID NO: 4357577 - DNA, 25 bp, Homo sapien
gaaataacgactgccaattcagggt

SEQ ID NO: 4357578 - DNA, 25 bp, Homo sapien
ccaaatgtccatgcggtgaaggtga

SEQ ID NO: 4357579 - DNA, 25 bp, Homo sapien
tgttgggagaaatcgtataggtaaa

SEQ ID NO: 4357580 - DNA, 25 bp, Homo sapien
tatcttgattgtccaggtccaggaa

SEQ ID NO: 4357581 - DNA, 25 bp, Homo sapien
gtggtcagaagcacctcagaggatg

SEQ ID NO: 4357582 - DNA, 25 bp, Homo sapien
cagaagcacctcagaggatgttggg

SEQ ID NO: 4357583 - DNA, 25 bp, Homo sapien
acctggactccccacgcgcggagag

SEQ ID NO: 4357584 - DNA, 25 bp, Homo sapien
gccttgcacggagggcgtttcggga

SEQ ID NO: 4357585 - DNA, 25 bp, Homo sapien
cattcctggaacagtcgtctgcggg

SEQ ID NO: 4357586 - DNA, 25 bp, Homo sapien
gggcctggagagtgtccctctgaac

SEQ ID NO: 4357587 - DNA, 25 bp, Homo sapien
atcaggatgagggtgtgtccatcga

SEQ ID NO: 4357588 - DNA, 25 bp, Homo sapien
tctgggacagatgcgcagaagactt

SEQ ID NO: 4357589 - DNA, 25 bp, Homo sapien
gctgagccggctgcggagtccatct

SEQ ID NO: 4357590 - DNA, 25 bp, Homo sapien
cagaagacttcctgctcaacgacga

SEQ ID NO: 4357591 - DNA, 25 bp, Homo sapien
gaccgcagtccgtgctgctgagaga

SEQ ID NO: 4357592 - DNA, 25 bp, Homo sapien
tttttgaggtaacaggtgtcggtgc

SEQ ID NO: 4357593 - DNA, 25 bp, Homo sapien
ctgagagagcctcgcgcgatggaat

SEQ ID NO: 4357594 - DNA, 25 bp, Homo sapien
gcgcgggcagcgaagtcctttttga

SEQ ID NO: 4357595 - DNA, 25 bp, Homo sapien
ctaataacgtgggacgtcaggtgac

SEQ ID NO: 4357596 - DNA, 25 bp, Homo sapien
gagattcccgcaatcctagagggcc

SEQ ID NO: 4357597 - DNA, 25 bp, Homo sapien
gaaaaagcaattgtccgaacacgcg

SEQ ID NO: 4357598 - DNA, 25 bp, Homo sapien
caactgatgcaaaacgagggagaat

SEQ ID NO: 4357599 - DNA, 25 bp, Homo sapien
gaatatgaccttgtaaagaagccca

SEQ ID NO: 4357600 - DNA, 25 bp, Homo sapien
ctatgcctggaacaggcgtctccgg

SEQ ID NO: 4357601 - DNA, 25 bp, Homo sapien
gccttgcacggagggcgttccggga

SEQ ID NO: 4357602 - DNA, 25 bp, Homo sapien
gcctggaacaggcgtctccgggcct

SEQ ID NO: 4357603 - DNA, 25 bp, Homo sapien
cgggccttgcacggagggcgttccg

SEQ ID NO: 4357604 - DNA, 25 bp, Homo sapien
caggctccagaaggcggaattccag

SEQ ID NO: 4357605 - DNA, 25 bp, Homo sapien
gccctcccggtaggggatgaacata

SEQ ID NO: 4357606 - DNA, 25 bp, Homo sapien
gtggagaacgtctctctgaactggg

SEQ ID NO: 4357607 - DNA, 25 bp, Homo sapien
aagatggggcgtggagaacgtctct

SEQ ID NO: 4357608 - DNA, 25 bp, Homo sapien
ctctgggacagatgcgcagaattcc

SEQ ID NO: 4357609 - DNA, 25 bp, Homo sapien
caggaaaacgtccacttccagcccg

SEQ ID NO: 4357610 - DNA, 25 bp, Homo sapien
ttggggagtccatccggagctccgg

SEQ ID NO: 4357611 - DNA, 25 bp, Homo sapien
aattccagctcgacgacgacgtcct

SEQ ID NO: 4357612 - DNA, 25 bp, Homo sapien
cagcaccaggtcgacgtcgtccagg

SEQ ID NO: 4357613 - DNA, 25 bp, Homo sapien
agcccgcggccaggaccactatgga

SEQ ID NO: 4357614 - DNA, 25 bp, Homo sapien
tcgacgtcgtccaggggcacacgca

SEQ ID NO: 4357615 - DNA, 25 bp, Homo sapien
ccaggaccactatggaggtgagcgc

SEQ ID NO: 4357616 - DNA, 25 bp, Homo sapien
aatcggaggcgcttggcagggccgg

SEQ ID NO: 4357617 - DNA, 25 bp, Homo sapien
caatcggaggcgcttggcagggccg

SEQ ID NO: 4357618 - DNA, 25 bp, Homo sapien
cctccaatcggaggcgcttggcagg

SEQ ID NO: 4357619 - DNA, 25 bp, Homo sapien
tcctccaatcggaggcgcttggcag

SEQ ID NO: 4357620 - DNA, 25 bp, Homo sapien
ggagcgcggcggtgaagtcctcttt

SEQ ID NO: 4357621 - DNA, 25 bp, Homo sapien
taacagatgtcggtggtaggggagg

SEQ ID NO: 4357622 - DNA, 25 bp, Homo sapien
gaagtaacagatgtcggtggtaggg

SEQ ID NO: 4357623 - DNA, 25 bp, Homo sapien
ctgggcctagcagcggacgtgggga

SEQ ID NO: 4357624 - DNA, 25 bp, Homo sapien
tgctggtggtgcctcgccggccacc

SEQ ID NO: 4357625 - DNA, 25 bp, Homo sapien
gctcagcttagctcgttggaccctt

SEQ ID NO: 4357626 - DNA, 25 bp, Homo sapien
gccaccgggctcagcttagctcgtt

SEQ ID NO: 4357627 - DNA, 25 bp, Homo sapien
tagctcgttggacccttgggccttc

SEQ ID NO: 4357628 - DNA, 25 bp, Homo sapien
taaatgcaccctacagttactgcct

SEQ ID NO: 4357629 - DNA, 25 bp, Homo sapien
ggaatgcccatattaaccatactgt

SEQ ID NO: 4357630 - DNA, 25 bp, Homo sapien
cattagcgctcttgccaggtttctg

SEQ ID NO: 4357631 - DNA, 25 bp, Homo sapien
taacacaaggcataaaacaggaatg

SEQ ID NO: 4357632 - DNA, 25 bp, Homo sapien
gaaggtcgtcataaactagcccaga

SEQ ID NO: 4357633 - DNA, 25 bp, Homo sapien
tatgtgcaagatcacccaaaagggc

SEQ ID NO: 4357634 - DNA, 25 bp, Homo sapien
cacaacggctatcaggagacggtct

SEQ ID NO: 4357635 - DNA, 25 bp, Homo sapien
gattgtgggaggcaactcattcctg

SEQ ID NO: 4357636 - DNA, 25 bp, Homo sapien
gccctcccggtaggggctgaacata

SEQ ID NO: 4357637 - DNA, 25 bp, Homo sapien
tcagcctcgcgcgatggaaacttgg

SEQ ID NO: 4357638 - DNA, 25 bp, Homo sapien
tctctgggacagatgcgcagacttc

SEQ ID NO: 4357639 - DNA, 25 bp, Homo sapien
ctctttgaggtaacaggtgtcggca

SEQ ID NO: 4357640 - DNA, 25 bp, Homo sapien
gggaacctcgcacgctgtgtggctc

SEQ ID NO: 4357641 - DNA, 25 bp, Homo sapien
cccagggaaggccatttcatgacgg

SEQ ID NO: 4357642 - DNA, 25 bp, Homo sapien
gaagtccattctattattggtagca

SEQ ID NO: 4357643 - DNA, 25 bp, Homo sapien
tccacttttaggctctgggggatga

SEQ ID NO: 4357644 - DNA, 25 bp, Homo sapien
ctatttcagttggaggatgagctga

SEQ ID NO: 4357645 - DNA, 25 bp, Homo sapien
tactctcagggtgaacacttctgaa

SEQ ID NO: 4357646 - DNA, 25 bp, Homo sapien
gaatgacttcttatcaacttgaatg

SEQ ID NO: 4357647 - DNA, 25 bp, Homo sapien
tgtgcagtgtgcagttactctcagg

SEQ ID NO: 4357648 - DNA, 25 bp, Homo sapien
ctggaaatcccaagtatgtgctaat

SEQ ID NO: 4357649 - DNA, 25 bp, Homo sapien
cttgagtaggagtggtccaaaagtc

SEQ ID NO: 4357650 - DNA, 25 bp, Homo sapien
gttccttgagtaggagtggtccaaa

SEQ ID NO: 4357651 - DNA, 25 bp, Homo sapien
tgaggttccttgagtaggagtggtc

SEQ ID NO: 4357652 - DNA, 25 bp, Homo sapien
tccttgagtaggagtggtccaaaag

SEQ ID NO: 4357653 - DNA, 25 bp, Homo sapien
gctgtgctgccatcatcagactaac

SEQ ID NO: 4357654 - DNA, 25 bp, Homo sapien
ccagccctggtcgctgtgctgccat

SEQ ID NO: 4357655 - DNA, 25 bp, Homo sapien
cttcctgattcttaggatctgcagc

SEQ ID NO: 4357656 - DNA, 25 bp, Homo sapien
cctgattcttaggatctgcagctgg

SEQ ID NO: 4357657 - DNA, 25 bp, Homo sapien
tggtggtcctctgagggactgaggg

SEQ ID NO: 4357658 - DNA, 25 bp, Homo sapien
gtcctctgagggactgagggttaat

SEQ ID NO: 4357659 - DNA, 25 bp, Homo sapien
cagagccacattcgggcttgtcttc

SEQ ID NO: 4357660 - DNA, 25 bp, Homo sapien
ctttgcccagagccacattcgggct

SEQ ID NO: 4357661 - DNA, 25 bp, Homo sapien
ttgcccagagccacattcgggcttg

SEQ ID NO: 4357662 - DNA, 25 bp, Homo sapien
gccacattcgggcttgtcttcctct

SEQ ID NO: 4357663 - DNA, 25 bp, Homo sapien
ggcttgtgcacatcccttgccattc

SEQ ID NO: 4357664 - DNA, 25 bp, Homo sapien
tgtagtttccatagccccacaggag

SEQ ID NO: 4357665 - DNA, 25 bp, Homo sapien
ctggaatgtgtgtccaaatgataca

SEQ ID NO: 4357666 - DNA, 25 bp, Homo sapien
caaatgatacagcattcgggcccat

SEQ ID NO: 4357667 - DNA, 25 bp, Homo sapien
aagttgagtttggacgtggttgctt

SEQ ID NO: 4357668 - DNA, 25 bp, Homo sapien
tgcttcagtatccagcggtccttcc

SEQ ID NO: 4357669 - DNA, 25 bp, Homo sapien
cagcgaatgaatgagcgttgaagtt

SEQ ID NO: 4357670 - DNA, 25 bp, Homo sapien
ttttgcctagccacgaagcttcctt

SEQ ID NO: 4357671 - DNA, 25 bp, Homo sapien
caggacgttttcaccccggagctct

SEQ ID NO: 4357672 - DNA, 25 bp, Homo sapien
gcaggacgttttcaccccggagctc

SEQ ID NO: 4357673 - DNA, 25 bp, Homo sapien
ctagatggcactgttgcaggacgtt

SEQ ID NO: 4357674 - DNA, 25 bp, Homo sapien
gagctggacagagagcgtgggtgtg

SEQ ID NO: 4357675 - DNA, 25 bp, Homo sapien
gctggacagagagcgtgggtgtggt

SEQ ID NO: 4357676 - DNA, 25 bp, Homo sapien
gacagagagcgtgggtgtggtgtgc

SEQ ID NO: 4357677 - DNA, 25 bp, Homo sapien
acagagagcgtgggtgtggtgtgcg

SEQ ID NO: 4357678 - DNA, 25 bp, Homo sapien
ctctggaatttttccttaggacaga

SEQ ID NO: 4357679 - DNA, 25 bp, Homo sapien
tctggaatttttccttaggacagaa

SEQ ID NO: 4357680 - DNA, 25 bp, Homo sapien
ctggaatttttccttaggacagaag

SEQ ID NO: 4357681 - DNA, 25 bp, Homo sapien
tctctggaatttttccttaggacag

SEQ ID NO: 4357682 - DNA, 25 bp, Homo sapien
tccaggaccttgtacccatttccaa

SEQ ID NO: 4357683 - DNA, 25 bp, Homo sapien
aggaccttgtacccatttccaactg

SEQ ID NO: 4357684 - DNA, 25 bp, Homo sapien
gaccttgtacccatttccaactgta

SEQ ID NO: 4357685 - DNA, 25 bp, Homo sapien
gtgactgaaaggaggactgtggcca

SEQ ID NO: 4357686 - DNA, 25 bp, Homo sapien
tgactgaaaggaggactgtggccat

SEQ ID NO: 4357687 - DNA, 25 bp, Homo sapien
ccgggtgactgaaaggaggactgtg

SEQ ID NO: 4357688 - DNA, 25 bp, Homo sapien
gggtgactgaaaggaggactgtggc

SEQ ID NO: 4357689 - DNA, 25 bp, Homo sapien
tgtaatagcccatcacatgaacttg

SEQ ID NO: 4357690 - DNA, 25 bp, Homo sapien
cccttactgtaatagcccatcacat

SEQ ID NO: 4357691 - DNA, 25 bp, Homo sapien
cccatgagcccccttactgtaatag

SEQ ID NO: 4357692 - DNA, 25 bp, Homo sapien
tagcccatcacatgaacttgaactt

SEQ ID NO: 4357693 - DNA, 25 bp, Homo sapien
ctcctagtggaccagagaaagctga

SEQ ID NO: 4357694 - DNA, 25 bp, Homo sapien
gggtttcataacaatcacgattgca

SEQ ID NO: 4357695 - DNA, 25 bp, Homo sapien
ggaaatatctgcaccattttgctcc

SEQ ID NO: 4357696 - DNA, 25 bp, Homo sapien
cacacaagtatatgggccacaggga

SEQ ID NO: 4357697 - DNA, 25 bp, Homo sapien
cttctcaggaaacaaggccttggag

SEQ ID NO: 4357698 - DNA, 25 bp, Homo sapien
agaaatcagtgcctgtgtgaagatg

SEQ ID NO: 4357699 - DNA, 25 bp, Homo sapien
acaaggccttggagaaatcagtgcc

SEQ ID NO: 4357700 - DNA, 25 bp, Homo sapien
aaatcagtgcctgtgtgaagatggt

SEQ ID NO: 4357701 - DNA, 25 bp, Homo sapien
catgtagggacaatggttgtgccca

SEQ ID NO: 4357702 - DNA, 25 bp, Homo sapien
cagacagtggttgggacatgtaggg

SEQ ID NO: 4357703 - DNA, 25 bp, Homo sapien
tggttgggacatgtagggacaatgg

SEQ ID NO: 4357704 - DNA, 25 bp, Homo sapien
gacatgtagggacaatggttgtgcc

SEQ ID NO: 4357705 - DNA, 25 bp, Homo sapien
tgtgctgggagtctgtgccgtttct

SEQ ID NO: 4357706 - DNA, 25 bp, Homo sapien
ctgtgctgggagtctgtgccgtttc

SEQ ID NO: 4357707 - DNA, 25 bp, Homo sapien
tgctgggagtctgtgccgtttcttc

SEQ ID NO: 4357708 - DNA, 25 bp, Homo sapien
gctgggagtctgtgccgtttcttcc

SEQ ID NO: 4357709 - DNA, 25 bp, Homo sapien
gttggtgtgaccaaagatccacggg

SEQ ID NO: 4357710 - DNA, 25 bp, Homo sapien
taaccatgtggccattgtggcagag

SEQ ID NO: 4357711 - DNA, 25 bp, Homo sapien
ctcctgggtgtggtgcaagtaacca

SEQ ID NO: 4357712 - DNA, 25 bp, Homo sapien
agcttcgtggtgttggtgtgaccaa

SEQ ID NO: 4357713 - DNA, 25 bp, Homo sapien
tggaagggtggcttctgcacactgc

SEQ ID NO: 4357714 - DNA, 25 bp, Homo sapien
cctgaaagccctggaagggtggctt

SEQ ID NO: 4357715 - DNA, 25 bp, Homo sapien
ctggaagggtggcttctgcacactg

SEQ ID NO: 4357716 - DNA, 25 bp, Homo sapien
gctggctgtcatgtgtcagcttgga

SEQ ID NO: 4357717 - DNA, 25 bp, Homo sapien
tggctgtcatgtgtcagcttggatg

SEQ ID NO: 4357718 - DNA, 25 bp, Homo sapien
ggctgtcatgtgtcagcttggatga

SEQ ID NO: 4357719 - DNA, 25 bp, Homo sapien
ctggctgtcatgtgtcagcttggat

SEQ ID NO: 4357720 - DNA, 25 bp, Homo sapien
tccctcatggagggcaggtctctct

SEQ ID NO: 4357721 - DNA, 25 bp, Homo sapien
gtccctcatggagggcaggtctctc

SEQ ID NO: 4357722 - DNA, 25 bp, Homo sapien
gggactcttcatgcttgtcttcaag

SEQ ID NO: 4357723 - DNA, 25 bp, Homo sapien
aggcttttcagcatcgggctctttt

SEQ ID NO: 4357724 - DNA, 25 bp, Homo sapien
aggggactcttcatgcttgtcttca

SEQ ID NO: 4357725 - DNA, 25 bp, Homo sapien
ttcaaggcttttcagcatcgggctc

SEQ ID NO: 4357726 - DNA, 25 bp, Homo sapien
ctggtggtggccttcagttagcaag

SEQ ID NO: 4357727 - DNA, 25 bp, Homo sapien
tggtggtggccttcagttagcaaga

SEQ ID NO: 4357728 - DNA, 25 bp, Homo sapien
cagtatcagaggaagctggagttag

SEQ ID NO: 4357729 - DNA, 25 bp, Homo sapien
gtgacaggaggaggactgatgcacc

SEQ ID NO: 4357730 - DNA, 25 bp, Homo sapien
tacagtgtttctgcctggatgaagc

SEQ ID NO: 4357731 - DNA, 25 bp, Homo sapien
cctgggcctttgatgagtattacag

SEQ ID NO: 4357732 - DNA, 25 bp, Homo sapien
gtattcccataatgctgcagtagca

SEQ ID NO: 4357733 - DNA, 25 bp, Homo sapien
ctgggtctctggtattcccataatg

SEQ ID NO: 4357734 - DNA, 25 bp, Homo sapien
tctggtattcccataatgctgcagt

SEQ ID NO: 4357735 - DNA, 25 bp, Homo sapien
gtctctggtattcccataatgctgc

SEQ ID NO: 4357736 - DNA, 25 bp, Homo sapien
gcctgtgtgtacctcctttgcacag

SEQ ID NO: 4357737 - DNA, 25 bp, Homo sapien
cctgtgtgtacctcctttgcacagg

SEQ ID NO: 4357738 - DNA, 25 bp, Homo sapien
ctgtgtgtacctcctttgcacaggc

SEQ ID NO: 4357739 - DNA, 25 bp, Homo sapien
acaggggtgaatggctcagcgaggc

SEQ ID NO: 4357740 - DNA, 25 bp, Homo sapien
ctgcacaggggtgaatggctcagcg

SEQ ID NO: 4357741 - DNA, 25 bp, Homo sapien
cacaggggtgaatggctcagcgagg

SEQ ID NO: 4357742 - DNA, 25 bp, Homo sapien
tgcacaggggtgaatggctcagcga

SEQ ID NO: 4357743 - DNA, 25 bp, Homo sapien
gcacctgctgtagcacttgagatgt

SEQ ID NO: 4357744 - DNA, 25 bp, Homo sapien
tggacccaggttagcacctgctgta

SEQ ID NO: 4357745 - DNA, 25 bp, Homo sapien
ggttagcacctgctgtagcacttga

SEQ ID NO: 4357746 - DNA, 25 bp, Homo sapien
cctgctgtagcacttgagatgtcat

SEQ ID NO: 4357747 - DNA, 25 bp, Homo sapien
tgttgtttgagtatcagtgtttgcc

SEQ ID NO: 4357748 - DNA, 25 bp, Homo sapien
cttgggccacttcaccgtgctgtga

SEQ ID NO: 4357749 - DNA, 25 bp, Homo sapien
gaaagcctttgcagcaatgcttcga

SEQ ID NO: 4357750 - DNA, 25 bp, Homo sapien
tctctgtcaaatagaggccttgtgc

SEQ ID NO: 4357751 - DNA, 25 bp, Homo sapien
catcatggtatcaattgccctgggt

SEQ ID NO: 4357752 - DNA, 25 bp, Homo sapien
ctctgcatgggacactctgtgagga

SEQ ID NO: 4357753 - DNA, 25 bp, Homo sapien
gacactctgtgaggaagtcctcaga

SEQ ID NO: 4357754 - DNA, 25 bp, Homo sapien
gacatcatggtatcaattgccctgg

SEQ ID NO: 4357755 - DNA, 25 bp, Homo sapien
gaaaggtggtcaagatgctctctgc

SEQ ID NO: 4357756 - DNA, 25 bp, Homo sapien
cagcaaaggcatgagcgtgcactga

SEQ ID NO: 4357757 - DNA, 25 bp, Homo sapien
gtggtcaagatgctctctgcaattg

SEQ ID NO: 4357758 - DNA, 25 bp, Homo sapien
caggttgaaaggtggtcaagatgct

SEQ ID NO: 4357759 - DNA, 25 bp, Homo sapien
atttgagtgttctctattttgttga

SEQ ID NO: 4357760 - DNA, 25 bp, Homo sapien
gtatccattgttatcacattgattg

SEQ ID NO: 4357761 - DNA, 25 bp, Homo sapien
cagaactgtatccattgttatcaca

SEQ ID NO: 4357762 - DNA, 25 bp, Homo sapien
tttgtcagtcttgatggatttgtcc

SEQ ID NO: 4357763 - DNA, 25 bp, Homo sapien
ccagagacacgccaaatgtgctggc

SEQ ID NO: 4357764 - DNA, 25 bp, Homo sapien
ggcgtatagctcaccaggcgatgct

SEQ ID NO: 4357765 - DNA, 25 bp, Homo sapien
catgagcaagagtttaaaacaatat

SEQ ID NO: 4357766 - DNA, 25 bp, Homo sapien
tgtaatctaattgcccatgagcaag

SEQ ID NO: 4357767 - DNA, 25 bp, Homo sapien
taagcatccccagagatgagcggga

SEQ ID NO: 4357768 - DNA, 25 bp, Homo sapien
tatgacactggttgatagctgatga

SEQ ID NO: 4357769 - DNA, 25 bp, Homo sapien
agttgtgtcctcatggccactacca

SEQ ID NO: 4357770 - DNA, 25 bp, Homo sapien
cactgagtaccattcagttgtgtcc

SEQ ID NO: 4357771 - DNA, 25 bp, Homo sapien
ggtcaagtggcaggatcccttctag

SEQ ID NO: 4357772 - DNA, 25 bp, Homo sapien
cagagaactctgaggcccattggtg

SEQ ID NO: 4357773 - DNA, 25 bp, Homo sapien
gccattgctcctatatcaccctggg

SEQ ID NO: 4357774 - DNA, 25 bp, Homo sapien
cctgggcttgggtcatcggcagacc

SEQ ID NO: 4357775 - DNA, 25 bp, Homo sapien
taaacttgtggtcaggtaacacttc

SEQ ID NO: 4357776 - DNA, 25 bp, Homo sapien
catagtgttggagcttgggcccgtt

SEQ ID NO: 4357777 - DNA, 25 bp, Homo sapien
gcccgttgcttgtgctgcagaggaa

SEQ ID NO: 4357778 - DNA, 25 bp, Homo sapien
ggccattggtttgagtaaacttgtg

SEQ ID NO: 4357779 - DNA, 25 bp, Homo sapien
ctccccgccccctgccatggccggc

SEQ ID NO: 4357780 - DNA, 25 bp, Homo sapien
gccccctgccatggccggcactgac

SEQ ID NO: 4357781 - DNA, 25 bp, Homo sapien
cccgccccctgccatggccggcact

SEQ ID NO: 4357782 - DNA, 25 bp, Homo sapien
cgccccctgccatggccggcactga

SEQ ID NO: 4357783 - DNA, 25 bp, Homo sapien
tgcctctgacgctgaggatacgcac

SEQ ID NO: 4357784 - DNA, 25 bp, Homo sapien
ctcctggaggcaaagttctggcaga

SEQ ID NO: 4357785 - DNA, 25 bp, Homo sapien
agttctggcagaacgaggcaatttc

SEQ ID NO: 4357786 - DNA, 25 bp, Homo sapien
gcaaagttctggcagaacgaggcaa

SEQ ID NO: 4357787 - DNA, 25 bp, Homo sapien
tggaggcaaagttctggcagaacga

SEQ ID NO: 4357788 - DNA, 25 bp, Homo sapien
gtggatgaccaaagatccaagtgct

SEQ ID NO: 4357789 - DNA, 25 bp, Homo sapien
cagctcatcttggacgtagaggtca

SEQ ID NO: 4357790 - DNA, 25 bp, Homo sapien
gaggtcatgtacaggctttgtggat

SEQ ID NO: 4357791 - DNA, 25 bp, Homo sapien
tggacgtagaggtcatgtacaggct

SEQ ID NO: 4357792 - DNA, 25 bp, Homo sapien
gaactgtggatctcactcaggaaga

SEQ ID NO: 4357793 - DNA, 25 bp, Homo sapien
tagacggcagcacctgtactagaca

SEQ ID NO: 4357794 - DNA, 25 bp, Homo sapien
ggaagacatatgcagacatcacctg

SEQ ID NO: 4357795 - DNA, 25 bp, Homo sapien
caggcagctccatgcagtgtagacg

SEQ ID NO: 4357796 - DNA, 25 bp, Homo sapien
tctgacagggctttgaagtcaagtg

SEQ ID NO: 4357797 - DNA, 25 bp, Homo sapien
gacagggctttgaagtcaagtgcct

SEQ ID NO: 4357798 - DNA, 25 bp, Homo sapien
ggctttgaagtcaagtgcctgtgtc

SEQ ID NO: 4357799 - DNA, 25 bp, Homo sapien
ttgaagtcaagtgcctgtgtctccc

SEQ ID NO: 4357800 - DNA, 25 bp, Homo sapien
tgccggccggctggccaggacggct

SEQ ID NO: 4357801 - DNA, 25 bp, Homo sapien
gcctctcccagtctgtaatgctgtg

SEQ ID NO: 4357802 - DNA, 25 bp, Homo sapien
ccggctggccaggacggctgcctct

SEQ ID NO: 4357803 - DNA, 25 bp, Homo sapien
tggccaggacggctgcctctcccag

SEQ ID NO: 4357804 - DNA, 25 bp, Homo sapien
gaggccccaagacatagtctgaagc

SEQ ID NO: 4357805 - DNA, 25 bp, Homo sapien
ccaagacatagtctgaagccccagc

SEQ ID NO: 4357806 - DNA, 25 bp, Homo sapien
ggccccaagacatagtctgaagccc

SEQ ID NO: 4357807 - DNA, 25 bp, Homo sapien
ggaagaggccccaagacatagtctg

SEQ ID NO: 4357808 - DNA, 25 bp, Homo sapien
aaggccactgccagatagcttgggc

SEQ ID NO: 4357809 - DNA, 25 bp, Homo sapien
gaagcattgagtttcagagccgccc

SEQ ID NO: 4357810 - DNA, 25 bp, Homo sapien
ccagcaagccgagttcagacaatct

SEQ ID NO: 4357811 - DNA, 25 bp, Homo sapien
tgataaccacctggtgaagcggcct

SEQ ID NO: 4357812 - DNA, 25 bp, Homo sapien
cagggcctaggtactggcagggtat

SEQ ID NO: 4357813 - DNA, 25 bp, Homo sapien
tctcttgggctgtagcagcctctga

SEQ ID NO: 4357814 - DNA, 25 bp, Homo sapien
ggcagggtatgaggcggtggcccac

SEQ ID NO: 4357815 - DNA, 25 bp, Homo sapien
gacagcagtgaggagttatcccaga

SEQ ID NO: 4357816 - DNA, 25 bp, Homo sapien
agcttgtgacagataccagttcctc

SEQ ID NO: 4357817 - DNA, 25 bp, Homo sapien
acacagtaggcagtagccttgcagc

SEQ ID NO: 4357818 - DNA, 25 bp, Homo sapien
gcttgtgacagataccagttcctcc

SEQ ID NO: 4357819 - DNA, 25 bp, Homo sapien
gcagtagccttgcagcctgaggaca

SEQ ID NO: 4357820 - DNA, 25 bp, Homo sapien
cccatagggagcacatgagctgatg

SEQ ID NO: 4357821 - DNA, 25 bp, Homo sapien
ctcctctcccatagggagcacatga

SEQ ID NO: 4357822 - DNA, 25 bp, Homo sapien
tctcccatagggagcacatgagctg

SEQ ID NO: 4357823 - DNA, 25 bp, Homo sapien
catagggagcacatgagctgatggt

SEQ ID NO: 4357824 - DNA, 25 bp, Homo sapien
ttgggaggaaaggtgctgaaactga

SEQ ID NO: 4357825 - DNA, 25 bp, Homo sapien
cttgggaggaaaggtgctgaaactg

SEQ ID NO: 4357826 - DNA, 25 bp, Homo sapien
tgggaggaaaggtgctgaaactgac

SEQ ID NO: 4357827 - DNA, 25 bp, Homo sapien
ctattaatcagaaaagccttgacag

SEQ ID NO: 4357828 - DNA, 25 bp, Homo sapien
gccttgacagatgtaagcaatttgt

SEQ ID NO: 4357829 - DNA, 25 bp, Homo sapien
aaaagcctctgaacccctgatgaca

SEQ ID NO: 4357830 - DNA, 25 bp, Homo sapien
tgataaatgaaccagcagggatgtg

SEQ ID NO: 4357831 - DNA, 25 bp, Homo sapien
ctggaggaatctggagttgtcctcc

SEQ ID NO: 4357832 - DNA, 25 bp, Homo sapien
tggaggaatctggagttgtcctcca

SEQ ID NO: 4357833 - DNA, 25 bp, Homo sapien
aatgaagacatctataatcatataa

SEQ ID NO: 4357834 - DNA, 25 bp, Homo sapien
gaagacatctataatcatataagca

SEQ ID NO: 4357835 - DNA, 25 bp, Homo sapien
catctataatcatataagcaggttt

SEQ ID NO: 4357836 - DNA, 25 bp, Homo sapien
cttccctgaaatgaagacatctata

SEQ ID NO: 4357837 - DNA, 25 bp, Homo sapien
ggaactaaggcttagttccctgcac

SEQ ID NO: 4357838 - DNA, 25 bp, Homo sapien
ggctgcagtcattattgcaaccctg

SEQ ID NO: 4357839 - DNA, 25 bp, Homo sapien
tctgctaggaacacttcaaagcagc

SEQ ID NO: 4357840 - DNA, 25 bp, Homo sapien
ccctggctgttggtgtggtctgcta

SEQ ID NO: 4357841 - DNA, 25 bp, Homo sapien
actgcaagttcttggaggtgagaac

SEQ ID NO: 4357842 - DNA, 25 bp, Homo sapien
gaactcaactgagcttgcctcctct

SEQ ID NO: 4357843 - DNA, 25 bp, Homo sapien
ctcctcttgcatgtgaagggtgaag

SEQ ID NO: 4357844 - DNA, 25 bp, Homo sapien
ttgttccatgggcatcggtcctgcc

SEQ ID NO: 4357845 - DNA, 25 bp, Homo sapien
accccagggtggcagttgcatctcg

SEQ ID NO: 4357846 - DNA, 25 bp, Homo sapien
ggcagttgcatctcgatgatatgtt

SEQ ID NO: 4357847 - DNA, 25 bp, Homo sapien
agccagagagctgtgaccccagggt

SEQ ID NO: 4357848 - DNA, 25 bp, Homo sapien
tatgtttgtatctgttggaacaggg

SEQ ID NO: 4357849 - DNA, 25 bp, Homo sapien
gggatcaacggctcctcttgtccaa

SEQ ID NO: 4357850 - DNA, 25 bp, Homo sapien
ccaagatgtccatgaggggatcaac

SEQ ID NO: 4357851 - DNA, 25 bp, Homo sapien
ggatgaacccagtgcccaagatgtc

SEQ ID NO: 4357852 - DNA, 25 bp, Homo sapien
aagccagatcataacagcttgagcc

SEQ ID NO: 4357853 - DNA, 25 bp, Homo sapien
gaggctgatgttgtagctggaaggg

SEQ ID NO: 4357854 - DNA, 25 bp, Homo sapien
acatgtggatgtgggcccgggatcg

SEQ ID NO: 4357855 - DNA, 25 bp, Homo sapien
tcattaggggacctgaaagcttggg

SEQ ID NO: 4357856 - DNA, 25 bp, Homo sapien
tgaaagcttggggtacaggtctccc

SEQ ID NO: 4357857 - DNA, 25 bp, Homo sapien
gcagccccatcatagagaggagaga

SEQ ID NO: 4357858 - DNA, 25 bp, Homo sapien
ctccatccccagatatactttgtct

SEQ ID NO: 4357859 - DNA, 25 bp, Homo sapien
tccccagatatactttgtcttgaaa

SEQ ID NO: 4357860 - DNA, 25 bp, Homo sapien
ccatccccagatatactttgtcttg

SEQ ID NO: 4357861 - DNA, 25 bp, Homo sapien
catccccagatatactttgtcttga

SEQ ID NO: 4357862 - DNA, 25 bp, Homo sapien
accgcaggggttcttgcgttgtcca

SEQ ID NO: 4357863 - DNA, 25 bp, Homo sapien
agtgtggttgctggagaccgcaggg

SEQ ID NO: 4357864 - DNA, 25 bp, Homo sapien
agaccgcaggggttcttgcgttgtc

SEQ ID NO: 4357865 - DNA, 25 bp, Homo sapien
gcaggggttcttgcgttgtccagac

SEQ ID NO: 4357866 - DNA, 25 bp, Homo sapien
tcgattggcagtgttgatggaagtt

SEQ ID NO: 4357867 - DNA, 25 bp, Homo sapien
gacataatgaacatgagtcacagag

SEQ ID NO: 4357868 - DNA, 25 bp, Homo sapien
tatgtttgcagtgctgtgcatgttg

SEQ ID NO: 4357869 - DNA, 25 bp, Homo sapien
aacgatttgagctatgttcaacacc

SEQ ID NO: 4357870 - DNA, 25 bp, Homo sapien
tagatgagcctcagtataagcccag

SEQ ID NO: 4357871 - DNA, 25 bp, Homo sapien
tacatgctggtgaagtaagctggcc

SEQ ID NO: 4357872 - DNA, 25 bp, Homo sapien
tgtatcacgtgctccatccagatgg

SEQ ID NO: 4357873 - DNA, 25 bp, Homo sapien
taagcatgaacctaatgaagccctg

SEQ ID NO: 4357874 - DNA, 25 bp, Homo sapien
cagggtagaggactaagtagcacat

SEQ ID NO: 4357875 - DNA, 25 bp, Homo sapien
catggttttgtggaactggcttcta

SEQ ID NO: 4357876 - DNA, 25 bp, Homo sapien
tagtttggtaactcttagcctccag

SEQ ID NO: 4357877 - DNA, 25 bp, Homo sapien
tgcatctgaggtgttcaagccacca

SEQ ID NO: 4357878 - DNA, 25 bp, Homo sapien
aactttataaatagcatatgtccta

SEQ ID NO: 4357879 - DNA, 25 bp, Homo sapien
aaactttataaatagcatatgtcct

SEQ ID NO: 4357880 - DNA, 25 bp, Homo sapien
caagacctgtggaatgatgcaatga

SEQ ID NO: 4357881 - DNA, 25 bp, Homo sapien
ggaacagaggtttcacatcctgact

SEQ ID NO: 4357882 - DNA, 25 bp, Homo sapien
cctaggcaaggtgtagtttcggctc

SEQ ID NO: 4357883 - DNA, 25 bp, Homo sapien
tactcacttttcgtaggctacaagg

SEQ ID NO: 4357884 - DNA, 25 bp, Homo sapien
tgtggtcagggtagcaatcaatacc

SEQ ID NO: 4357885 - DNA, 25 bp, Homo sapien
ctgtttagtcaggtaaatggaaagc

SEQ ID NO: 4357886 - DNA, 25 bp, Homo sapien
tttctcatagtccaaagcactgtgg

SEQ ID NO: 4357887 - DNA, 25 bp, Homo sapien
tcttaagatgatgtgggcattgtgc

SEQ ID NO: 4357888 - DNA, 25 bp, Homo sapien
atccagattgatatctgttgtgtca

SEQ ID NO: 4357889 - DNA, 25 bp, Homo sapien
ttatccaaatctacttctagttcga

SEQ ID NO: 4357890 - DNA, 25 bp, Homo sapien
ccaaatctacttctagttcgagtaa

SEQ ID NO: 4357891 - DNA, 25 bp, Homo sapien
aatctacttctagttcgagtaaact

SEQ ID NO: 4357892 - DNA, 25 bp, Homo sapien
acaataaccggagtaggagaagcag

SEQ ID NO: 4357893 - DNA, 25 bp, Homo sapien
tgtgtgggaggccacaataaccgga

SEQ ID NO: 4357894 - DNA, 25 bp, Homo sapien
tgggaggccacaataaccggagtag

SEQ ID NO: 4357895 - DNA, 25 bp, Homo sapien
gaggccacaataaccggagtaggag

SEQ ID NO: 4357896 - DNA, 25 bp, Homo sapien
ctgttgagctgtagatcttgagggc

SEQ ID NO: 4357897 - DNA, 25 bp, Homo sapien
gttgagctgtagatcttgagggctg

SEQ ID NO: 4357898 - DNA, 25 bp, Homo sapien
tgttgagctgtagatcttgagggct

SEQ ID NO: 4357899 - DNA, 25 bp, Homo sapien
taatccagggaacaggttttcatac

SEQ ID NO: 4357900 - DNA, 25 bp, Homo sapien
caacaaaggcttcttttaatccagg

SEQ ID NO: 4357901 - DNA, 25 bp, Homo sapien
tcatactctgttgggtcagcaaggg

SEQ ID NO: 4357902 - DNA, 25 bp, Homo sapien
caagtgggtattgtttggctggcca

SEQ ID NO: 4357903 - DNA, 25 bp, Homo sapien
cagcttctggcagccgtccagttct

SEQ ID NO: 4357904 - DNA, 25 bp, Homo sapien
tgactgggtaagtaagttcgggcca

SEQ ID NO: 4357905 - DNA, 25 bp, Homo sapien
ttctaattaagagctctaggcaggc

SEQ ID NO: 4357906 - DNA, 25 bp, Homo sapien
gcagccgtccagttctaattaagag

SEQ ID NO: 4357907 - DNA, 25 bp, Homo sapien
ctccaacatgggaagggccagacaa

SEQ ID NO: 4357908 - DNA, 25 bp, Homo sapien
caagacaaatatctagggcagtgtc

SEQ ID NO: 4357909 - DNA, 25 bp, Homo sapien
gtattaccttacatcctcagcatga

SEQ ID NO: 4357910 - DNA, 25 bp, Homo sapien
gattttcgaaaggtgatacagtatg

SEQ ID NO: 4357911 - DNA, 25 bp, Homo sapien
tgggctaggccaaactgacatttac

SEQ ID NO: 4357912 - DNA, 25 bp, Homo sapien
aaaaagtagctcatgaatgccacat

SEQ ID NO: 4357913 - DNA, 25 bp, Homo sapien
gacatttactaatggcaagttcagc

SEQ ID NO: 4357914 - DNA, 25 bp, Homo sapien
ttcaccatattagcatttccagagg

SEQ ID NO: 4357915 - DNA, 25 bp, Homo sapien
gtggatactgtaagagcttgctgct

SEQ ID NO: 4357916 - DNA, 25 bp, Homo sapien
gctcaaaacgatgctcaggatctgt

SEQ ID NO: 4357917 - DNA, 25 bp, Homo sapien
tctgcttccactgctaactggtatg

SEQ ID NO: 4357918 - DNA, 25 bp, Homo sapien
gagcaagctcaaaacgatgctcagg

SEQ ID NO: 4357919 - DNA, 25 bp, Homo sapien
gaagtctaaaatttccttcccatgc

SEQ ID NO: 4357920 - DNA, 25 bp, Homo sapien
gtctcaagtccagttcctcagcaag

SEQ ID NO: 4357921 - DNA, 25 bp, Homo sapien
gggtctcccaaacaaccagtctgtg

SEQ ID NO: 4357922 - DNA, 25 bp, Homo sapien
ctattcctttattgttggtctcaag

SEQ ID NO: 4357923 - DNA, 25 bp, Homo sapien
aaccagcagggaatagctaatgatg

SEQ ID NO: 4357924 - DNA, 25 bp, Homo sapien
tgctaaagtccctccgcatgacagc

SEQ ID NO: 4357925 - DNA, 25 bp, Homo sapien
ttggaatggtaggaaggaccttatc

SEQ ID NO: 4357926 - DNA, 25 bp, Homo sapien
ttccaaaaagtgtgcaactctggtc

SEQ ID NO: 4357927 - DNA, 25 bp, Homo sapien
taatctgttcacagaacttgtgtaa

SEQ ID NO: 4357928 - DNA, 25 bp, Homo sapien
gtgactatttctcctccaacataat

SEQ ID NO: 4357929 - DNA, 25 bp, Homo sapien
gaacttgtgtaaatgaagcaatcgc

SEQ ID NO: 4357930 - DNA, 25 bp, Homo sapien
aaatgaagcaatcgcctacccaaag

SEQ ID NO: 4357931 - DNA, 25 bp, Homo sapien
gcaatacagactagctctccagagt

SEQ ID NO: 4357932 - DNA, 25 bp, Homo sapien
aaatgattcctcagtagcaatacag

SEQ ID NO: 4357933 - DNA, 25 bp, Homo sapien
cagtagcaatacagactagctctcc

SEQ ID NO: 4357934 - DNA, 25 bp, Homo sapien
aaaatgattcctcagtagcaataca

SEQ ID NO: 4357935 - DNA, 25 bp, Homo sapien
ggctaagccatttacagatctgact

SEQ ID NO: 4357936 - DNA, 25 bp, Homo sapien
cttcgtatgagttctgtattgtccc

SEQ ID NO: 4357937 - DNA, 25 bp, Homo sapien
agatctgactcccaataagaagccg

SEQ ID NO: 4357938 - DNA, 25 bp, Homo sapien
tgtattgtcccagtcatagaaggct

SEQ ID NO: 4357939 - DNA, 25 bp, Homo sapien
cataaaaagagttttgcttaggcat

SEQ ID NO: 4357940 - DNA, 25 bp, Homo sapien
tgtatcatatgtagatcacactcac

SEQ ID NO: 4357941 - DNA, 25 bp, Homo sapien
tttttgagccattacaaagaattta

SEQ ID NO: 4357942 - DNA, 25 bp, Homo sapien
aaaatgtatcatatgtagatcacac

SEQ ID NO: 4357943 - DNA, 25 bp, Homo sapien
gttcttaaatatctttacaatgctg

SEQ ID NO: 4357944 - DNA, 25 bp, Homo sapien
agttcttaaatatctttacaatgct

SEQ ID NO: 4357945 - DNA, 25 bp, Homo sapien
actaaatcatagttctaccaaatgt

SEQ ID NO: 4357946 - DNA, 25 bp, Homo sapien
gggaaggcaaacataacatgttata

SEQ ID NO: 4357947 - DNA, 25 bp, Homo sapien
gagaactccttacagttggacaaat

SEQ ID NO: 4357948 - DNA, 25 bp, Homo sapien
tactgtgtatgacatgaattactag

SEQ ID NO: 4357949 - DNA, 25 bp, Homo sapien
tctgaagaatcgtgggcccatgcaa

SEQ ID NO: 4357950 - DNA, 25 bp, Homo sapien
tagatgatatactccccatcaccac

SEQ ID NO: 4357951 - DNA, 25 bp, Homo sapien
attgctgtgtagatgatatactccc

SEQ ID NO: 4357952 - DNA, 25 bp, Homo sapien
tcctgagcagatccaaagctcttgt

SEQ ID NO: 4357953 - DNA, 25 bp, Homo sapien
tctgagggtatatttcacaactgcc

SEQ ID NO: 4357954 - DNA, 25 bp, Homo sapien
tggacatggcaggttcctcccgacc

SEQ ID NO: 4357955 - DNA, 25 bp, Homo sapien
tgcttttaggttggcctgctggact

SEQ ID NO: 4357956 - DNA, 25 bp, Homo sapien
gattgtgctgaatagtctgagggta

SEQ ID NO: 4357957 - DNA, 25 bp, Homo sapien
ttcatcatagcccaaagcgacattg

SEQ ID NO: 4357958 - DNA, 25 bp, Homo sapien
tcagtgtgctctcaagccggtaggt

SEQ ID NO: 4357959 - DNA, 25 bp, Homo sapien
ttgaccctcttagactggccacgca

SEQ ID NO: 4357960 - DNA, 25 bp, Homo sapien
gccggtaggtgcttgaatgccaaat

SEQ ID NO: 4357961 - DNA, 25 bp, Homo sapien
tcaggatgaaagctggcacaagaca

SEQ ID NO: 4357962 - DNA, 25 bp, Homo sapien
tgattggcaactcaggatgaaagct

SEQ ID NO: 4357963 - DNA, 25 bp, Homo sapien
tcttctgaacctgtgataatgattg

SEQ ID NO: 4357964 - DNA, 25 bp, Homo sapien
attttgggcatgtccttccagtgtc

SEQ ID NO: 4357965 - DNA, 25 bp, Homo sapien
ctgtaattaagacatagaaaacatg

SEQ ID NO: 4357966 - DNA, 25 bp, Homo sapien
gtccccaccactgtagtaatcaatg

SEQ ID NO: 4357967 - DNA, 25 bp, Homo sapien
tgcacctgaaatgaggtatggcttg

SEQ ID NO: 4357968 - DNA, 25 bp, Homo sapien
gcaattcacgcctttctcatgtcct

SEQ ID NO: 4357969 - DNA, 25 bp, Homo sapien
taacaagacggtcatctgcacctga

SEQ ID NO: 4357970 - DNA, 25 bp, Homo sapien
tcaaacacttgtgagcaagaccatt

SEQ ID NO: 4357971 - DNA, 25 bp, Homo sapien
gggttgatcacaatctgcataacat

SEQ ID NO: 4357972 - DNA, 25 bp, Homo sapien
tctgcataacataatgggtgtgtcc

SEQ ID NO: 4357973 - DNA, 25 bp, Homo sapien
cagtcccagagcttaataagcatgt

SEQ ID NO: 4357974 - DNA, 25 bp, Homo sapien
tatgtagagaacaagcatttgccct

SEQ ID NO: 4357975 - DNA, 25 bp, Homo sapien
gcagttaaagcatagcatgtctcag

SEQ ID NO: 4357976 - DNA, 25 bp, Homo sapien
tgaattacccaaagagacgcacatg

SEQ ID NO: 4357977 - DNA, 25 bp, Homo sapien
gaatagggtctatggcaatctgcca

SEQ ID NO: 4357978 - DNA, 25 bp, Homo sapien
gtaattgaacactctaatctgcatg

SEQ ID NO: 4357979 - DNA, 25 bp, Homo sapien
tggatgaacagcaatacagcgaatg

SEQ ID NO: 4357980 - DNA, 25 bp, Homo sapien
tctctccagagtattgtaattgaac

SEQ ID NO: 4357981 - DNA, 25 bp, Homo sapien
cactgctagttagaatgaaaggctg

SEQ ID NO: 4357982 - DNA, 25 bp, Homo sapien
gatcacatacttcaaatgtcttcac

SEQ ID NO: 4357983 - DNA, 25 bp, Homo sapien
gctcgaacaggaagatcacatactt

SEQ ID NO: 4357984 - DNA, 25 bp, Homo sapien
caaactttgcagctcgaacaggaag

SEQ ID NO: 4357985 - DNA, 25 bp, Homo sapien
catacttcaaatgtcttcaccagtg

SEQ ID NO: 4357986 - DNA, 25 bp, Homo sapien
aaatgtaacaagaatacacaaattg

SEQ ID NO: 4357987 - DNA, 25 bp, Homo sapien
atgtaacaagaatacacaaattgag

SEQ ID NO: 4357988 - DNA, 25 bp, Homo sapien
taaaatgtaacaagaatacacaaat

SEQ ID NO: 4357989 - DNA, 25 bp, Homo sapien
tttaaaatgtaacaagaatacacaa

SEQ ID NO: 4357990 - DNA, 25 bp, Homo sapien
aaatccacccatggaaacttgtact

SEQ ID NO: 4357991 - DNA, 25 bp, Homo sapien
aatccacccatggaaacttgtactt

SEQ ID NO: 4357992 - DNA, 25 bp, Homo sapien
gaaaatccacccatggaaacttgta

SEQ ID NO: 4357993 - DNA, 25 bp, Homo sapien
tgaaaatccacccatggaaacttgt

SEQ ID NO: 4357994 - DNA, 25 bp, Homo sapien
gacttatatgttcctccgagctgct

SEQ ID NO: 4357995 - DNA, 25 bp, Homo sapien
gagaccctcctagaaagagcagaga

SEQ ID NO: 4357996 - DNA, 25 bp, Homo sapien
cataggataaaggtagagaccctcc

SEQ ID NO: 4357997 - DNA, 25 bp, Homo sapien
gaaatagccaaggttcaacgccatg

SEQ ID NO: 4357998 - DNA, 25 bp, Homo sapien
cacactgccattgtaaagacttgcc

SEQ ID NO: 4357999 - DNA, 25 bp, Homo sapien
cgatcagatctagcagttagctttc

SEQ ID NO: 4358000 - DNA, 25 bp, Homo sapien
taaagacttgccaacatccatggct

SEQ ID NO: 4358001 - DNA, 25 bp, Homo sapien
ccatggctctgtaggatgcagatcc

SEQ ID NO: 4358002 - DNA, 25 bp, Homo sapien
agtgcagtggcgaagtctcgctctg

SEQ ID NO: 4358003 - DNA, 25 bp, Homo sapien
ggagtgcagtggcgaagtctcgctc

SEQ ID NO: 4358004 - DNA, 25 bp, Homo sapien
tacaggcgcatgctaccatgcccag

SEQ ID NO: 4358005 - DNA, 25 bp, Homo sapien
actacaggcgcatgctaccatgccc

SEQ ID NO: 4358006 - DNA, 25 bp, Homo sapien
tgtgcccaggtcaatagtgtcatat

SEQ ID NO: 4358007 - DNA, 25 bp, Homo sapien
tattcacaaatcacaattttgtgcc

SEQ ID NO: 4358008 - DNA, 25 bp, Homo sapien
caggtcaatagtgtcatatcaggaa

SEQ ID NO: 4358009 - DNA, 25 bp, Homo sapien
attttgtgcccaggtcaatagtgtc

SEQ ID NO: 4358010 - DNA, 25 bp, Homo sapien
caggaatcggccgtaacctatggga

SEQ ID NO: 4358011 - DNA, 25 bp, Homo sapien
tcccttctacgggatctggacctac

SEQ ID NO: 4358012 - DNA, 25 bp, Homo sapien
accccgctcccttctacgggatctg

SEQ ID NO: 4358013 - DNA, 25 bp, Homo sapien
tccaggaatcggccgtaacctatgg

SEQ ID NO: 4358014 - DNA, 25 bp, Homo sapien
ccctcgtttgttaccggctactcag

SEQ ID NO: 4358015 - DNA, 25 bp, Homo sapien
ggctgcgtcggtccaatcccgggaa

SEQ ID NO: 4358016 - DNA, 25 bp, Homo sapien
ggctactcaggccttgagataaacc

SEQ ID NO: 4358017 - DNA, 25 bp, Homo sapien
tttgttaccggctactcaggccttg

SEQ ID NO: 4358018 - DNA, 25 bp, Homo sapien
gactgactgacgtggaacttccggg

SEQ ID NO: 4358019 - DNA, 25 bp, Homo sapien
tgttgtagttgtgtttcggaggccg

SEQ ID NO: 4358020 - DNA, 25 bp, Homo sapien
gctatcgggcttcctcggactctgg

SEQ ID NO: 4358021 - DNA, 25 bp, Homo sapien
tttcggaggccgagaaccgctatcg

SEQ ID NO: 4358022 - DNA, 25 bp, Homo sapien
taatccccgctggacgctaactgca

SEQ ID NO: 4358023 - DNA, 25 bp, Homo sapien
agtaggagccttgagctaatgtgac

SEQ ID NO: 4358024 - DNA, 25 bp, Homo sapien
tgccctctggttacacgtacaaacg

SEQ ID NO: 4358025 - DNA, 25 bp, Homo sapien
tctggaactggagtttagtgccagc

SEQ ID NO: 4358026 - DNA, 25 bp, Homo sapien
aacatgtggaccatagaaaacttgc

SEQ ID NO: 4358027 - DNA, 25 bp, Homo sapien
tcttttctgattgatacgtactggt

SEQ ID NO: 4358028 - DNA, 25 bp, Homo sapien
gattgatacgtactggtacttagca

SEQ ID NO: 4358029 - DNA, 25 bp, Homo sapien
tttctgattgatacgtactggtact

SEQ ID NO: 4358030 - DNA, 25 bp, Homo sapien
tctgattgatacgtactggtactta

SEQ ID NO: 4358031 - DNA, 25 bp, Homo sapien
ctactgctggtcctgaagaggagtc

SEQ ID NO: 4358032 - DNA, 25 bp, Homo sapien
catcaccacatattcattagatgac

SEQ ID NO: 4358033 - DNA, 25 bp, Homo sapien
tgttgacaaagatatggagcagctg

SEQ ID NO: 4358034 - DNA, 25 bp, Homo sapien
tttaaaagacaagaccaagtgttga

SEQ ID NO: 4358035 - DNA, 25 bp, Homo sapien
gcaaaatagtaaggccactttggta

SEQ ID NO: 4358036 - DNA, 25 bp, Homo sapien
ggttatcctggcttgaccttatggg

SEQ ID NO: 4358037 - DNA, 25 bp, Homo sapien
gcttgtagtacctcagctcccagaa

SEQ ID NO: 4358038 - DNA, 25 bp, Homo sapien
gaattgtacagagacctggcttttc

SEQ ID NO: 4358039 - DNA, 25 bp, Homo sapien
tgatgtagaggtggcctgacttgca

SEQ ID NO: 4358040 - DNA, 25 bp, Homo sapien
tctctgcagcggaaaatgaggtgcc

SEQ ID NO: 4358041 - DNA, 25 bp, Homo sapien
cagacactgaaagggtctgcttccc

SEQ ID NO: 4358042 - DNA, 25 bp, Homo sapien
gaggcaaagcacaatcaggaggcat

SEQ ID NO: 4358043 - DNA, 25 bp, Homo sapien
gacttgtatggcagcgagaggcaaa

SEQ ID NO: 4358044 - DNA, 25 bp, Homo sapien
ttgtgtaactctttaggacccagga

SEQ ID NO: 4358045 - DNA, 25 bp, Homo sapien
gttctagatgtcacacccagacttg

SEQ ID NO: 4358046 - DNA, 25 bp, Homo sapien
gaccttatggctgtagcagttctag

SEQ ID NO: 4358047 - DNA, 25 bp, Homo sapien
acatgataagaattccacaggtggg

SEQ ID NO: 4358048 - DNA, 25 bp, Homo sapien
gtgctggagtgaagcattcctgcca

SEQ ID NO: 4358049 - DNA, 25 bp, Homo sapien
taatcttttctactgtattcccgac

SEQ ID NO: 4358050 - DNA, 25 bp, Homo sapien
gaagcattcctgccatggtttggtt

SEQ ID NO: 4358051 - DNA, 25 bp, Homo sapien
tattcccgactaggcttgttggtgc

SEQ ID NO: 4358052 - DNA, 25 bp, Homo sapien
cagaatacttcacagtgagtcccca

SEQ ID NO: 4358053 - DNA, 25 bp, Homo sapien
tgggcttcagacacaacctcattca

SEQ ID NO: 4358054 - DNA, 25 bp, Homo sapien
atacttcacagtgagtccccagtgg

SEQ ID NO: 4358055 - DNA, 25 bp, Homo sapien
gacacaacctcattcaatagggttt

SEQ ID NO: 4358056 - DNA, 25 bp, Homo sapien
gggacagatgagaggtcatttgagc

SEQ ID NO: 4358057 - DNA, 25 bp, Homo sapien
agggacagatgagaggtcatttgag

SEQ ID NO: 4358058 - DNA, 25 bp, Homo sapien
aagagtgggaaggtccccacagctg

SEQ ID NO: 4358059 - DNA, 25 bp, Homo sapien
ccagtagaccactcagtgtgggcag

SEQ ID NO: 4358060 - DNA, 25 bp, Homo sapien
tatcactgctacataggcattctgt

SEQ ID NO: 4358061 - DNA, 25 bp, Homo sapien
catttaatgctaggtttcaaaggag

SEQ ID NO: 4358062 - DNA, 25 bp, Homo sapien
tttttgaacacttgacggcacacct

SEQ ID NO: 4358063 - DNA, 25 bp, Homo sapien
ttgaacacttgacggcacacctggt

SEQ ID NO: 4358064 - DNA, 25 bp, Homo sapien
ttctttttgaacacttgacggcaca

SEQ ID NO: 4358065 - DNA, 25 bp, Homo sapien
tttgaacacttgacggcacacctgg

SEQ ID NO: 4358066 - DNA, 25 bp, Homo sapien
gagtgcagggccatttttcttgtca

SEQ ID NO: 4358067 - DNA, 25 bp, Homo sapien
gggaatggctttctgactatatgac

SEQ ID NO: 4358068 - DNA, 25 bp, Homo sapien
tgaccacatgcatttggctggagct

SEQ ID NO: 4358069 - DNA, 25 bp, Homo sapien
ggctttctgactatatgaccacatg

SEQ ID NO: 4358070 - DNA, 25 bp, Homo sapien
caggtacagcttgtccccctcaatc

SEQ ID NO: 4358071 - DNA, 25 bp, Homo sapien
gcttgtccccctcaatccactgctt

SEQ ID NO: 4358072 - DNA, 25 bp, Homo sapien
atccactgcttccagccgcggttct

SEQ ID NO: 4358073 - DNA, 25 bp, Homo sapien
tccactgcttccagccgcggttctc

SEQ ID NO: 4358074 - DNA, 25 bp, Homo sapien
cttgtaagggtgaccaagtagttga

SEQ ID NO: 4358075 - DNA, 25 bp, Homo sapien
gtaagggtgaccaagtagttgagac

SEQ ID NO: 4358076 - DNA, 25 bp, Homo sapien
ccagagggcttgtaagggtgaccaa

SEQ ID NO: 4358077 - DNA, 25 bp, Homo sapien
tttccagagggcttgtaagggtgac

SEQ ID NO: 4358078 - DNA, 25 bp, Homo sapien
agtgagacgtactgcaatcttgcgg

SEQ ID NO: 4358079 - DNA, 25 bp, Homo sapien
agtgaaatccacatcatagttgcgg

SEQ ID NO: 4358080 - DNA, 25 bp, Homo sapien
ttaacatgccggttatccaggctct

SEQ ID NO: 4358081 - DNA, 25 bp, Homo sapien
gatcaataaccttcgtctgagtgag

SEQ ID NO: 4358082 - DNA, 25 bp, Homo sapien
cgtgagcacgtccaagtcacatagc

SEQ ID NO: 4358083 - DNA, 25 bp, Homo sapien
ctctgtggcttatggaattgtacgt

SEQ ID NO: 4358084 - DNA, 25 bp, Homo sapien
tgtacgtgagcacgtccaagtcaca

SEQ ID NO: 4358085 - DNA, 25 bp, Homo sapien
tatggaattgtacgtgagcacgtcc

SEQ ID NO: 4358086 - DNA, 25 bp, Homo sapien
ggccttgcaatcatacctatttaat

SEQ ID NO: 4358087 - DNA, 25 bp, Homo sapien
gacacatgtatctcagccaccttgg

SEQ ID NO: 4358088 - DNA, 25 bp, Homo sapien
accttggccttgcaatcatacctat

SEQ ID NO: 4358089 - DNA, 25 bp, Homo sapien
ttggccttgcaatcatacctattta

SEQ ID NO: 4358090 - DNA, 25 bp, Homo sapien
tccaggccaaacagttttactgctc

SEQ ID NO: 4358091 - DNA, 25 bp, Homo sapien
caggccaaacagttttactgctccc

SEQ ID NO: 4358092 - DNA, 25 bp, Homo sapien
tatccaggccaaacagttttactgc

SEQ ID NO: 4358093 - DNA, 25 bp, Homo sapien
tgctatccaggccaaacagttttac

SEQ ID NO: 4358094 - DNA, 25 bp, Homo sapien
tagaaccaggtcttgagctaggcaa

SEQ ID NO: 4358095 - DNA, 25 bp, Homo sapien
ggctggcagcagcattagcacctgg

SEQ ID NO: 4358096 - DNA, 25 bp, Homo sapien
tatggattagctaatggaggcagca

SEQ ID NO: 4358097 - DNA, 25 bp, Homo sapien
tataaagtaggagctctgttggcca

SEQ ID NO: 4358098 - DNA, 25 bp, Homo sapien
gttccagcgaagttaccccatatgt

SEQ ID NO: 4358099 - DNA, 25 bp, Homo sapien
gaagttccagcgaagttaccccata

SEQ ID NO: 4358100 - DNA, 25 bp, Homo sapien
accccatatgtggagaactttaaag

SEQ ID NO: 4358101 - DNA, 25 bp, Homo sapien
gcgaagttaccccatatgtggagaa

SEQ ID NO: 4358102 - DNA, 25 bp, Homo sapien
gggccttcatgtagccctcaaagtt

SEQ ID NO: 4358103 - DNA, 25 bp, Homo sapien
ccagggccttcatgtagccctcaaa

SEQ ID NO: 4358104 - DNA, 25 bp, Homo sapien
atctcccaggttccattctggtccc

SEQ ID NO: 4358105 - DNA, 25 bp, Homo sapien
ggccttcatgtagccctcaaagttt

SEQ ID NO: 4358106 - DNA, 25 bp, Homo sapien
gttcggtgagggtttgtggtggatg

SEQ ID NO: 4358107 - DNA, 25 bp, Homo sapien
tgagggtttgtggtggatggcaagg

SEQ ID NO: 4358108 - DNA, 25 bp, Homo sapien
actggttcggtgagggtttgtggtg

SEQ ID NO: 4358109 - DNA, 25 bp, Homo sapien
tggtggccactggttcggtgagggt

SEQ ID NO: 4358110 - DNA, 25 bp, Homo sapien
ggaaaatgatcaactataaccaatc

SEQ ID NO: 4358111 - DNA, 25 bp, Homo sapien
gacttttaagatggaggaaaatgat

SEQ ID NO: 4358112 - DNA, 25 bp, Homo sapien
ccaggttacaagaagctttctggag

SEQ ID NO: 4358113 - DNA, 25 bp, Homo sapien
ccttgtggaattcttcaggtgactt

SEQ ID NO: 4358114 - DNA, 25 bp, Homo sapien
ccttgggagcatctgactgcagcag

SEQ ID NO: 4358115 - DNA, 25 bp, Homo sapien
acacagatcactttattggcatggc

SEQ ID NO: 4358116 - DNA, 25 bp, Homo sapien
tgggacaaggttgtctgcctgggcc

SEQ ID NO: 4358117 - DNA, 25 bp, Homo sapien
tggctggacatttttgcctcatgct

SEQ ID NO: 4358118 - DNA, 25 bp, Homo sapien
aaagccaagagacagactctgctaa

SEQ ID NO: 4358119 - DNA, 25 bp, Homo sapien
cctgctgattccttgggacaaggtt

SEQ ID NO: 4358120 - DNA, 25 bp, Homo sapien
cttcttgaatacttgcttgcagacc

SEQ ID NO: 4358121 - DNA, 25 bp, Homo sapien
tctgcagcaccctacagacagagct

SEQ ID NO: 4358122 - DNA, 25 bp, Homo sapien
taaactgtatagtggagtgctctgc

SEQ ID NO: 4358123 - DNA, 25 bp, Homo sapien
tggctcagagctgaccaacaggacc

SEQ ID NO: 4358124 - DNA, 25 bp, Homo sapien
gagtcacacttacggcaagaactct

SEQ ID NO: 4358125 - DNA, 25 bp, Homo sapien
caccctcgatccactgggtccagcc

SEQ ID NO: 4358126 - DNA, 25 bp, Homo sapien
cactggagcttgtctccgtcccagc

SEQ ID NO: 4358127 - DNA, 25 bp, Homo sapien
actggagcttgtctccgtcccagct

SEQ ID NO: 4358128 - DNA, 25 bp, Homo sapien
tggagcttgtctccgtcccagctca

SEQ ID NO: 4358129 - DNA, 25 bp, Homo sapien
cagctcccaaacttgataatctggg

SEQ ID NO: 4358130 - DNA, 25 bp, Homo sapien
ggcagctcccaaacttgataatctg

SEQ ID NO: 4358131 - DNA, 25 bp, Homo sapien
catttgtcaatcctgagcaagcggg

SEQ ID NO: 4358132 - DNA, 25 bp, Homo sapien
agagacacatttgtcaatcctgagc

SEQ ID NO: 4358133 - DNA, 25 bp, Homo sapien
caaagcgctcttcatctcacaggga

SEQ ID NO: 4358134 - DNA, 25 bp, Homo sapien
gtttcaacctatgctaagtcctggg

SEQ ID NO: 4358135 - DNA, 25 bp, Homo sapien
ggcagacttctcagagtgtaccctg

SEQ ID NO: 4358136 - DNA, 25 bp, Homo sapien
ccagtgaaggtacaaatggcagctg

SEQ ID NO: 4358137 - DNA, 25 bp, Homo sapien
ggcctgctgatcactactgccccct

SEQ ID NO: 4358138 - DNA, 25 bp, Homo sapien
cacgagggaggcaggtggagccaca

SEQ ID NO: 4358139 - DNA, 25 bp, Homo sapien
gcacgagggaggcaggtggagccac

SEQ ID NO: 4358140 - DNA, 25 bp, Homo sapien
acgagggaggcaggtggagccacat

SEQ ID NO: 4358141 - DNA, 25 bp, Homo sapien
gaacaagcatgatggaagtagtgcc

SEQ ID NO: 4358142 - DNA, 25 bp, Homo sapien
tatgttaaggcagtccaggatattc

SEQ ID NO: 4358143 - DNA, 25 bp, Homo sapien
tggtttggccacgtgactagctctg

SEQ ID NO: 4358144 - DNA, 25 bp, Homo sapien
gaagtctcttcctacatcggcttgg

SEQ ID NO: 4358145 - DNA, 25 bp, Homo sapien
caagggactgttacttcagaagcca

SEQ ID NO: 4358146 - DNA, 25 bp, Homo sapien
tctgggaccgccttagaaatgaagc

SEQ ID NO: 4358147 - DNA, 25 bp, Homo sapien
gccggcagtttacccagagacatgt

SEQ ID NO: 4358148 - DNA, 25 bp, Homo sapien
caaccaggagggatggccatcttca

SEQ ID NO: 4358149 - DNA, 25 bp, Homo sapien
tagtatagccacaacaaagcttttg

SEQ ID NO: 4358150 - DNA, 25 bp, Homo sapien
taaaccattggagtgctcaaggcca

SEQ ID NO: 4358151 - DNA, 25 bp, Homo sapien
gacacctctgtgctatatgctggga

SEQ ID NO: 4358152 - DNA, 25 bp, Homo sapien
tcatcccagggacctagcacttagg

SEQ ID NO: 4358153 - DNA, 25 bp, Homo sapien
atgagatttggctctagagctcatg

SEQ ID NO: 4358154 - DNA, 25 bp, Homo sapien
tggctctagagctcatgctcttgat

SEQ ID NO: 4358155 - DNA, 25 bp, Homo sapien
gagctcatgctcttgatgactgtgc

SEQ ID NO: 4358156 - DNA, 25 bp, Homo sapien
gatttggctctagagctcatgctct

SEQ ID NO: 4358157 - DNA, 25 bp, Homo sapien
tctgtgcaagggaacggcattcagc

SEQ ID NO: 4358158 - DNA, 25 bp, Homo sapien
gcattcagcaatcatgggtttcaca

SEQ ID NO: 4358159 - DNA, 25 bp, Homo sapien
aataggaattcaccacgtggttctg

SEQ ID NO: 4358160 - DNA, 25 bp, Homo sapien
acctcctatgcaccagctgtaggtg

SEQ ID NO: 4358161 - DNA, 25 bp, Homo sapien
tggaagtcagaaggcacctcgacag

SEQ ID NO: 4358162 - DNA, 25 bp, Homo sapien
taagtactggtagacaaatgctgga

SEQ ID NO: 4358163 - DNA, 25 bp, Homo sapien
gaagtaaggtcagtggcctgctctt

SEQ ID NO: 4358164 - DNA, 25 bp, Homo sapien
ccagaaaacaccatgggagttagca

SEQ ID NO: 4358165 - DNA, 25 bp, Homo sapien
tggcaggccgtgctggatctgctac

SEQ ID NO: 4358166 - DNA, 25 bp, Homo sapien
ctggcaggccgtgctggatctgcta

SEQ ID NO: 4358167 - DNA, 25 bp, Homo sapien
tcctcgggagtgagaaaacactatc

SEQ ID NO: 4358168 - DNA, 25 bp, Homo sapien
caaatcattttgaggcgctcgcttc

SEQ ID NO: 4358169 - DNA, 25 bp, Homo sapien
caacgatggatatgaagctgaggct

SEQ ID NO: 4358170 - DNA, 25 bp, Homo sapien
tggttccttgctgggcctgatcgca

SEQ ID NO: 4358171 - DNA, 25 bp, Homo sapien
cacaacaggtgagcgaatggctatc

SEQ ID NO: 4358172 - DNA, 25 bp, Homo sapien
tactgcttgatgctcgattgacgct

SEQ ID NO: 4358173 - DNA, 25 bp, Homo sapien
ggctgaatctgcacggtctgctcga

SEQ ID NO: 4358174 - DNA, 25 bp, Homo sapien
tagtaaccatgcatcctagaccagt

SEQ ID NO: 4358175 - DNA, 25 bp, Homo sapien
catgtgcataaagcaccgggcagag

SEQ ID NO: 4358176 - DNA, 25 bp, Homo sapien
ccagtgtagatagagcaggatgctt

SEQ ID NO: 4358177 - DNA, 25 bp, Homo sapien
gaagagttttcagtccctcaggccc

SEQ ID NO: 4358178 - DNA, 25 bp, Homo sapien
cagagtgcctgaacgcagtggagac

SEQ ID NO: 4358179 - DNA, 25 bp, Homo sapien
agacaccaggtggacgcgaatcctc

SEQ ID NO: 4358180 - DNA, 25 bp, Homo sapien
aggagacaccaggtggacgcgaatc

SEQ ID NO: 4358181 - DNA, 25 bp, Homo sapien
gagacaccaggtggacgcgaatcct

SEQ ID NO: 4358182 - DNA, 25 bp, Homo sapien
acaccaggtggacgcgaatcctcac

SEQ ID NO: 4358183 - DNA, 25 bp, Homo sapien
tcagcgtgcggatgatcatatggtc

SEQ ID NO: 4358184 - DNA, 25 bp, Homo sapien
gcgattttgcgcaaggccacattga

SEQ ID NO: 4358185 - DNA, 25 bp, Homo sapien
agttcctaaaagtgctcagcgtgcg

SEQ ID NO: 4358186 - DNA, 25 bp, Homo sapien
catatggtcaccgtcctgcacgatc

SEQ ID NO: 4358187 - DNA, 25 bp, Homo sapien
cagacatttgccaccggttaaccta

SEQ ID NO: 4358188 - DNA, 25 bp, Homo sapien
cgaggacgccctttctggcgtccgg

SEQ ID NO: 4358189 - DNA, 25 bp, Homo sapien
ctccagggccaacgagcagacattt

SEQ ID NO: 4358190 - DNA, 25 bp, Homo sapien
ggctgccctgggagcggtggccgag

SEQ ID NO: 4358191 - DNA, 25 bp, Homo sapien
ctcgccgggatggaggcaggcaggc

SEQ ID NO: 4358192 - DNA, 25 bp, Homo sapien
caggcaggcagcgtctcgggagggc

SEQ ID NO: 4358193 - DNA, 25 bp, Homo sapien
aggcaggcaggcagcgtctcgggag

SEQ ID NO: 4358194 - DNA, 25 bp, Homo sapien
aggcaggcagcgtctcgggagggct

SEQ ID NO: 4358195 - DNA, 25 bp, Homo sapien
cagtacccagtgaagtcgactggca

SEQ ID NO: 4358196 - DNA, 25 bp, Homo sapien
gaccaacatcttccagtacccagtg

SEQ ID NO: 4358197 - DNA, 25 bp, Homo sapien
cgagggcgcgcaggtactcctcgaa

SEQ ID NO: 4358198 - DNA, 25 bp, Homo sapien
tcctcgaaattctcgttgaccaaca

SEQ ID NO: 4358199 - DNA, 25 bp, Homo sapien
gctggattcccagcgcgcacaaagc

SEQ ID NO: 4358200 - DNA, 25 bp, Homo sapien
gatgtcgaagggtcaggtttgtcca

SEQ ID NO: 4358201 - DNA, 25 bp, Homo sapien
gcgccaccttcgtttcagacgttca

SEQ ID NO: 4358202 - DNA, 25 bp, Homo sapien
gaggatccattgtagcggtcgctcc

SEQ ID NO: 4358203 - DNA, 25 bp, Homo sapien
cactcgggagttgggaaacaatctc

SEQ ID NO: 4358204 - DNA, 25 bp, Homo sapien
gacgtttgctttgttggccgaactc

SEQ ID NO: 4358205 - DNA, 25 bp, Homo sapien
tttgtctaaagcctcgcgccggtgg

SEQ ID NO: 4358206 - DNA, 25 bp, Homo sapien
gaaagaggccacttacaggcctttg

SEQ ID NO: 4358207 - DNA, 25 bp, Homo sapien
gatgacataatcacatgggctgact

SEQ ID NO: 4358208 - DNA, 25 bp, Homo sapien
cgtttcacctaatggcagcactgta

SEQ ID NO: 4358209 - DNA, 25 bp, Homo sapien
gcactgtactccacggtgttctgga

SEQ ID NO: 4358210 - DNA, 25 bp, Homo sapien
cctaagtgacagcagataacatttt

SEQ ID NO: 4358211 - DNA, 25 bp, Homo sapien
taagacacctcgcaaggatggatgg

SEQ ID NO: 4358212 - DNA, 25 bp, Homo sapien
caaaggcttaagcagtgaactggcc

SEQ ID NO: 4358213 - DNA, 25 bp, Homo sapien
ggttctgtaaggcatcccaccaggg

SEQ ID NO: 4358214 - DNA, 25 bp, Homo sapien
cacataagtctttgttacaggagcc

SEQ ID NO: 4358215 - DNA, 25 bp, Homo sapien
gatggtttatgccaaatgctcagca

SEQ ID NO: 4358216 - DNA, 25 bp, Homo sapien
ccaaacttctccctttatgctgaat

SEQ ID NO: 4358217 - DNA, 25 bp, Homo sapien
acctgagatggtttatgccaaatgc

SEQ ID NO: 4358218 - DNA, 25 bp, Homo sapien
aaacttctccctttatgctgaatca

SEQ ID NO: 4358219 - DNA, 25 bp, Homo sapien
ggtccttgtgttccaactccaccat

SEQ ID NO: 4358220 - DNA, 25 bp, Homo sapien
caaggtccttgtgttccaactccac

SEQ ID NO: 4358221 - DNA, 25 bp, Homo sapien
aggtccttgtgttccaactccacca

SEQ ID NO: 4358222 - DNA, 25 bp, Homo sapien
cagccacggaaatgggaaaaccagg

SEQ ID NO: 4358223 - DNA, 25 bp, Homo sapien
aaaacaagtgtgacctcatactggg

SEQ ID NO: 4358224 - DNA, 25 bp, Homo sapien
taaaatctgggaatgagcatgcagc

SEQ ID NO: 4358225 - DNA, 25 bp, Homo sapien
tgtcaccaggtacacagtcaggcca

SEQ ID NO: 4358226 - DNA, 25 bp, Homo sapien
accctagtctactgcctctagcaaa

SEQ ID NO: 4358227 - DNA, 25 bp, Homo sapien
caggagtaagaggatatatgcacaa

SEQ ID NO: 4358228 - DNA, 25 bp, Homo sapien
atgccaggttacttgggttactttg

SEQ ID NO: 4358229 - DNA, 25 bp, Homo sapien
caggttacttgggttactttgtgat

SEQ ID NO: 4358230 - DNA, 25 bp, Homo sapien
gcactggcttctaagggtttatgca

SEQ ID NO: 4358231 - DNA, 25 bp, Homo sapien
tgagaattttagcagctctatggga

SEQ ID NO: 4358232 - DNA, 25 bp, Homo sapien
acatagcaataaacactcctgggaa

SEQ ID NO: 4358233 - DNA, 25 bp, Homo sapien
ccgtgaattgctatctctttgtggc

SEQ ID NO: 4358234 - DNA, 25 bp, Homo sapien
gagaagcaagaaagcgtgccaggca

SEQ ID NO: 4358235 - DNA, 25 bp, Homo sapien
gagaaagccccatggatgaagcaga

SEQ ID NO: 4358236 - DNA, 25 bp, Homo sapien
cagagaggcttcctgcgagacgtga

SEQ ID NO: 4358237 - DNA, 25 bp, Homo sapien
agaagagtcaacagtttcaggagtc

SEQ ID NO: 4358238 - DNA, 25 bp, Homo sapien
tattctgaaaccagggcgttgacaa

SEQ ID NO: 4358239 - DNA, 25 bp, Homo sapien
tagaaacctggaaatcaggagcccc

SEQ ID NO: 4358240 - DNA, 25 bp, Homo sapien
tcaagactagcatgctgcacctggt

SEQ ID NO: 4358241 - DNA, 25 bp, Homo sapien
gaaaagctggttaggcaggcagaca

SEQ ID NO: 4358242 - DNA, 25 bp, Homo sapien
caggtactgcccttggtgtagaggc

SEQ ID NO: 4358243 - DNA, 25 bp, Homo sapien
catggtccttgatgtacgtgatgac

SEQ ID NO: 4358244 - DNA, 25 bp, Homo sapien
cagcatcgggaatcaggtactttac

SEQ ID NO: 4358245 - DNA, 25 bp, Homo sapien
caaggctcgcctgatgtatgtggca

SEQ ID NO: 4358246 - DNA, 25 bp, Homo sapien
tgagaccaacaagccatgggccttg

SEQ ID NO: 4358247 - DNA, 25 bp, Homo sapien
catttcagcccttgtgttactagga

SEQ ID NO: 4358248 - DNA, 25 bp, Homo sapien
attgggagattactgtgggcactac

SEQ ID NO: 4358249 - DNA, 25 bp, Homo sapien
aaaaggtctctaagactccagctgg

SEQ ID NO: 4358250 - DNA, 25 bp, Homo sapien
tgtgcggccagagccaagacctttc

SEQ ID NO: 4358251 - DNA, 25 bp, Homo sapien
gcactatccgtgtccctcttggtga

SEQ ID NO: 4358252 - DNA, 25 bp, Homo sapien
tcatggagaagtctgagtcctggcc

SEQ ID NO: 4358253 - DNA, 25 bp, Homo sapien
cacaaagtctgagtaaagagaggct

SEQ ID NO: 4358254 - DNA, 25 bp, Homo sapien
ggctgagctgtgcttggttccatca

SEQ ID NO: 4358255 - DNA, 25 bp, Homo sapien
tggaacattcagtataaaacggaaa

SEQ ID NO: 4358256 - DNA, 25 bp, Homo sapien
cattcagtataaaacggaaacagat

SEQ ID NO: 4358257 - DNA, 25 bp, Homo sapien
aaacagataaagggcctgctctgtt

SEQ ID NO: 4358258 - DNA, 25 bp, Homo sapien
tatttttgccttcatttcattattt

SEQ ID NO: 4358259 - DNA, 25 bp, Homo sapien
agtctgcttggtgcagagctcagtt

SEQ ID NO: 4358260 - DNA, 25 bp, Homo sapien
attaagtctgcttggtgcagagctc

SEQ ID NO: 4358261 - DNA, 25 bp, Homo sapien
taagtctgcttggtgcagagctcag

SEQ ID NO: 4358262 - DNA, 25 bp, Homo sapien
cttctacattcgtcaggtagctctc

SEQ ID NO: 4358263 - DNA, 25 bp, Homo sapien
tctacattcgtcaggtagctctcgt

SEQ ID NO: 4358264 - DNA, 25 bp, Homo sapien
ttctacattcgtcaggtagctctcg

SEQ ID NO: 4358265 - DNA, 25 bp, Homo sapien
cgccccactgggggatgcctcccag

SEQ ID NO: 4358266 - DNA, 25 bp, Homo sapien
ccgccccactgggggatgcctccca

SEQ ID NO: 4358267 - DNA, 25 bp, Homo sapien
gtccgccccactgggggatgcctcc

SEQ ID NO: 4358268 - DNA, 25 bp, Homo sapien
gccccactgggggatgcctcccagt

SEQ ID NO: 4358269 - DNA, 25 bp, Homo sapien
tgtctctgttctcagcctgagccca

SEQ ID NO: 4358270 - DNA, 25 bp, Homo sapien
tccattcataccctgtctccagctt

SEQ ID NO: 4358271 - DNA, 25 bp, Homo sapien
ctccattcataccctgtctccagct

SEQ ID NO: 4358272 - DNA, 25 bp, Homo sapien
ggggtcgagaagagtgccttgccat

SEQ ID NO: 4358273 - DNA, 25 bp, Homo sapien
gtcgagaagagtgccttgccatggt

SEQ ID NO: 4358274 - DNA, 25 bp, Homo sapien
caggggtcgagaagagtgccttgcc

SEQ ID NO: 4358275 - DNA, 25 bp, Homo sapien
ctgcaggggtcgagaagagtgcctt

SEQ ID NO: 4358276 - DNA, 25 bp, Homo sapien
taatgctgggcttatctacactgag

SEQ ID NO: 4358277 - DNA, 25 bp, Homo sapien
ccttggattggcatgggctctcaca

SEQ ID NO: 4358278 - DNA, 25 bp, Homo sapien
taattgaaacgcttagcaccagccc

SEQ ID NO: 4358279 - DNA, 25 bp, Homo sapien
gcttttttgctgaatgaccctgaca

SEQ ID NO: 4358280 - DNA, 25 bp, Homo sapien
taccttgggcctgtggattgaccct

SEQ ID NO: 4358281 - DNA, 25 bp, Homo sapien
cgtgattaacgtagcctctctgagc

SEQ ID NO: 4358282 - DNA, 25 bp, Homo sapien
tgaaggtcctagttcaggttgaccc

SEQ ID NO: 4358283 - DNA, 25 bp, Homo sapien
catttgccagggacttccactgcgc

SEQ ID NO: 4358284 - DNA, 25 bp, Homo sapien
gaaggaatcctcagtaagctctaca

SEQ ID NO: 4358285 - DNA, 25 bp, Homo sapien
cggactttatcaagaggacactaaa

SEQ ID NO: 4358286 - DNA, 25 bp, Homo sapien
tatgtcactatgatgcagattcact

SEQ ID NO: 4358287 - DNA, 25 bp, Homo sapien
cagtgaatttacatcatagagatgt

SEQ ID NO: 4358288 - DNA, 25 bp, Homo sapien
tctgcagacacaagctagtgaccca

SEQ ID NO: 4358289 - DNA, 25 bp, Homo sapien
aacacattatgaacaggcctgtcag

SEQ ID NO: 4358290 - DNA, 25 bp, Homo sapien
gcaatttgcaatcccttccagcaga

SEQ ID NO: 4358291 - DNA, 25 bp, Homo sapien
tagtgacccactgccctaacatgca

SEQ ID NO: 4358292 - DNA, 25 bp, Homo sapien
agcaccttcactgtctccatccact

SEQ ID NO: 4358293 - DNA, 25 bp, Homo sapien
gcaccttcactgtctccatccactg

SEQ ID NO: 4358294 - DNA, 25 bp, Homo sapien
actgtctccatccactgtgcctgct

SEQ ID NO: 4358295 - DNA, 25 bp, Homo sapien
ctcagcaccttcactgtctccatcc

SEQ ID NO: 4358296 - DNA, 25 bp, Homo sapien
agggtccacccggatccagtcggat

SEQ ID NO: 4358297 - DNA, 25 bp, Homo sapien
gaagctgcgaggtctttcttcccat

SEQ ID NO: 4358298 - DNA, 25 bp, Homo sapien
ccactcggtgatgagaagctgcgag

SEQ ID NO: 4358299 - DNA, 25 bp, Homo sapien
tcttcccataggtgtcgttgacagg

SEQ ID NO: 4358300 - DNA, 25 bp, Homo sapien
taggatcaggatatagttgaggaac

SEQ ID NO: 4358301 - DNA, 25 bp, Homo sapien
gatcaggatatagttgaggaacagc

SEQ ID NO: 4358302 - DNA, 25 bp, Homo sapien
agttaggatcaggatatagttgagg

SEQ ID NO: 4358303 - DNA, 25 bp, Homo sapien
aggctgtgagggtggcgctcaggca

SEQ ID NO: 4358304 - DNA, 25 bp, Homo sapien
gtttggttccaggtgctatctataa

SEQ ID NO: 4358305 - DNA, 25 bp, Homo sapien
gaagtcgctcatcagtgaatatttt

SEQ ID NO: 4358306 - DNA, 25 bp, Homo sapien
ttgtttgtttggttccaggtgctat

SEQ ID NO: 4358307 - DNA, 25 bp, Homo sapien
aagtcgctcatcagtgaatattttg

SEQ ID NO: 4358308 - DNA, 25 bp, Homo sapien
attcaaatcacagaacgcttgttct

SEQ ID NO: 4358309 - DNA, 25 bp, Homo sapien
cacagaacgcttgttcttcagttct

SEQ ID NO: 4358310 - DNA, 25 bp, Homo sapien
aatcacagaacgcttgttcttcagt

SEQ ID NO: 4358311 - DNA, 25 bp, Homo sapien
caaatcacagaacgcttgttcttca

SEQ ID NO: 4358312 - DNA, 25 bp, Homo sapien
tattttgaatccttttttgcagatg

SEQ ID NO: 4358313 - DNA, 25 bp, Homo sapien
attattttgaatccttttttgcaga

SEQ ID NO: 4358314 - DNA, 25 bp, Homo sapien
tttgaatccttttttgcagatgaaa

SEQ ID NO: 4358315 - DNA, 25 bp, Homo sapien
aagaaatatcttttattgagataga

SEQ ID NO: 4358316 - DNA, 25 bp, Homo sapien
atacaagaaaacgtgtaaatgtttg

SEQ ID NO: 4358317 - DNA, 25 bp, Homo sapien
tggaatacaagaaaacgtgtaaatg

SEQ ID NO: 4358318 - DNA, 25 bp, Homo sapien
caagaaaacgtgtaaatgtttgcaa

SEQ ID NO: 4358319 - DNA, 25 bp, Homo sapien
ctggaatacaagaaaacgtgtaaat

SEQ ID NO: 4358320 - DNA, 25 bp, Homo sapien
catctgtttcatttggatgtttaat

SEQ ID NO: 4358321 - DNA, 25 bp, Homo sapien
ttcatttggatgtttaatgatgtca

SEQ ID NO: 4358322 - DNA, 25 bp, Homo sapien
tgtttcatttggatgtttaatgatg

SEQ ID NO: 4358323 - DNA, 25 bp, Homo sapien
catttggatgtttaatgatgtcaat

SEQ ID NO: 4358324 - DNA, 25 bp, Homo sapien
ggaatctgttcaataggtacatttt

SEQ ID NO: 4358325 - DNA, 25 bp, Homo sapien
agtggaatctgttcaataggtacat

SEQ ID NO: 4358326 - DNA, 25 bp, Homo sapien
aagtggaatctgttcaataggtaca

SEQ ID NO: 4358327 - DNA, 25 bp, Homo sapien
gtggaatctgttcaataggtacatt

SEQ ID NO: 4358328 - DNA, 25 bp, Homo sapien
ggaatgtaacatgtagagcagtaga

SEQ ID NO: 4358329 - DNA, 25 bp, Homo sapien
ctggaatgtaacatgtagagcagta

SEQ ID NO: 4358330 - DNA, 25 bp, Homo sapien
aatgtaacatgtagagcagtagaac

SEQ ID NO: 4358331 - DNA, 25 bp, Homo sapien
tgtaacatgtagagcagtagaacat

SEQ ID NO: 4358332 - DNA, 25 bp, Homo sapien
gatcttctgaagctatggaagtagt

SEQ ID NO: 4358333 - DNA, 25 bp, Homo sapien
gaagctatggaagtagtttgtgact

SEQ ID NO: 4358334 - DNA, 25 bp, Homo sapien
ccaccacatttgagacattttgatc

SEQ ID NO: 4358335 - DNA, 25 bp, Homo sapien
gaaggggatcttctgaagctatgga

SEQ ID NO: 4358336 - DNA, 25 bp, Homo sapien
agaaatataggtggattgagagaca

SEQ ID NO: 4358337 - DNA, 25 bp, Homo sapien
gaaatataggtggattgagagacat

SEQ ID NO: 4358338 - DNA, 25 bp, Homo sapien
ttgagaaatataggtggattgagag

SEQ ID NO: 4358339 - DNA, 25 bp, Homo sapien
gagaaatataggtggattgagagac

SEQ ID NO: 4358340 - DNA, 25 bp, Homo sapien
tatgtgcactgcgagtcctcgaaca

SEQ ID NO: 4358341 - DNA, 25 bp, Homo sapien
tcatatgtgcactgcgagtcctcga

SEQ ID NO: 4358342 - DNA, 25 bp, Homo sapien
catatgtgcactgcgagtcctcgaa

SEQ ID NO: 4358343 - DNA, 25 bp, Homo sapien
atatgtgcactgcgagtcctcgaac

SEQ ID NO: 4358344 - DNA, 25 bp, Homo sapien
gaaggggaacccgtctaggcagcca

SEQ ID NO: 4358345 - DNA, 25 bp, Homo sapien
aggggaacccgtctaggcagccaga

SEQ ID NO: 4358346 - DNA, 25 bp, Homo sapien
ctcttcagccgagcacgcagctttg

SEQ ID NO: 4358347 - DNA, 25 bp, Homo sapien
gggaacccgtctaggcagccagatc

SEQ ID NO: 4358348 - DNA, 25 bp, Homo sapien
tgtatgccgttgataatttgtagtt

SEQ ID NO: 4358349 - DNA, 25 bp, Homo sapien
aataaactgcttattcttgtatgcc

SEQ ID NO: 4358350 - DNA, 25 bp, Homo sapien
tgcttattcttgtatgccgttgata

SEQ ID NO: 4358351 - DNA, 25 bp, Homo sapien
tcttgtatgccgttgataatttgta

SEQ ID NO: 4358352 - DNA, 25 bp, Homo sapien
tctgtgggcacaagcacagtctggc

SEQ ID NO: 4358353 - DNA, 25 bp, Homo sapien
aactacatgtgtcaaaacaattgag

SEQ ID NO: 4358354 - DNA, 25 bp, Homo sapien
tttgctgggagaagcttggtgtttc

SEQ ID NO: 4358355 - DNA, 25 bp, Homo sapien
tagcacagaatgattactaatttgc

SEQ ID NO: 4358356 - DNA, 25 bp, Homo sapien
gagtctcagacatgtggcactggtt

SEQ ID NO: 4358357 - DNA, 25 bp, Homo sapien
tctcagacatgtggcactggttggc

SEQ ID NO: 4358358 - DNA, 25 bp, Homo sapien
tgaggacaggttgtaatcaggcagt

SEQ ID NO: 4358359 - DNA, 25 bp, Homo sapien
ggctgggcataaagtctgctcctgc

SEQ ID NO: 4358360 - DNA, 25 bp, Homo sapien
cagtgaggacaggttgtaatcaggc

SEQ ID NO: 4358361 - DNA, 25 bp, Homo sapien
gcagttctggctgggcataaagtct

SEQ ID NO: 4358362 - DNA, 25 bp, Homo sapien
tgaagctcgatgatgccttgattct

SEQ ID NO: 4358363 - DNA, 25 bp, Homo sapien
gctcgatgatgccttgattctgcat

SEQ ID NO: 4358364 - DNA, 25 bp, Homo sapien
tgatgccttgattctgcattaacat

SEQ ID NO: 4358365 - DNA, 25 bp, Homo sapien
cgatgatgccttgattctgcattaa

SEQ ID NO: 4358366 - DNA, 25 bp, Homo sapien
aacagacttttactgcagattgcgg

SEQ ID NO: 4358367 - DNA, 25 bp, Homo sapien
tagtttttatggatccctctgctgg

SEQ ID NO: 4358368 - DNA, 25 bp, Homo sapien
tgagagcccttaatgtgcacagtaa

SEQ ID NO: 4358369 - DNA, 25 bp, Homo sapien
cagattgcggatcctttgagagccc

SEQ ID NO: 4358370 - DNA, 25 bp, Homo sapien
tctgttttatctgaggcatcctggg

SEQ ID NO: 4358371 - DNA, 25 bp, Homo sapien
ctgtttagcaaagaagccaactgct

SEQ ID NO: 4358372 - DNA, 25 bp, Homo sapien
tctaaacactagtcccttgtcggat

SEQ ID NO: 4358373 - DNA, 25 bp, Homo sapien
tgtaatcatcgccacagtcaaggca

SEQ ID NO: 4358374 - DNA, 25 bp, Homo sapien
gcagtttctcggcattccttccaaa

SEQ ID NO: 4358375 - DNA, 25 bp, Homo sapien
taaatgcctgtgagtgcaactgctg

SEQ ID NO: 4358376 - DNA, 25 bp, Homo sapien
gctctgtttctaaccaggacctgtt

SEQ ID NO: 4358377 - DNA, 25 bp, Homo sapien
ttctaaccaggacctgttcaccact

SEQ ID NO: 4358378 - DNA, 25 bp, Homo sapien
ctatcccactattaatcagcccagg

SEQ ID NO: 4358379 - DNA, 25 bp, Homo sapien
tatcccactattaatcagcccagga

SEQ ID NO: 4358380 - DNA, 25 bp, Homo sapien
ggtgctagaggacatgccatgaaaa

SEQ ID NO: 4358381 - DNA, 25 bp, Homo sapien
tatatcagcagtagtgaggcagtga

SEQ ID NO: 4358382 - DNA, 25 bp, Homo sapien
cctggtgcagtcaagtctggtgcta

SEQ ID NO: 4358383 - DNA, 25 bp, Homo sapien
agtgctgtttatcccctgacctggt

SEQ ID NO: 4358384 - DNA, 25 bp, Homo sapien
ccttgaagcctcacatgatatgaaa

SEQ ID NO: 4358385 - DNA, 25 bp, Homo sapien
aacatgtgtagcctcaaatccttga

SEQ ID NO: 4358386 - DNA, 25 bp, Homo sapien
caaaacaattgttggagtaattcaa

SEQ ID NO: 4358387 - DNA, 25 bp, Homo sapien
gaatttggaatctaacatgtgtagc

SEQ ID NO: 4358388 - DNA, 25 bp, Homo sapien
taggttttgacatacgtatataccc

SEQ ID NO: 4358389 - DNA, 25 bp, Homo sapien
tactattccgttgtatgcataaacc

SEQ ID NO: 4358390 - DNA, 25 bp, Homo sapien
tgtttaactattcacatgttgatgg

SEQ ID NO: 4358391 - DNA, 25 bp, Homo sapien
aaattcatgtctactgctggttcat

SEQ ID NO: 4358392 - DNA, 25 bp, Homo sapien
aggatgccctgattgtggcacaggt

SEQ ID NO: 4358393 - DNA, 25 bp, Homo sapien
aggaaggatgccctgattgtggcac

SEQ ID NO: 4358394 - DNA, 25 bp, Homo sapien
acctattcatctggctgtgtaggta

SEQ ID NO: 4358395 - DNA, 25 bp, Homo sapien
cttctgttggactcagggccccctg

SEQ ID NO: 4358396 - DNA, 25 bp, Homo sapien
agttcttctgttggactcagggccc

SEQ ID NO: 4358397 - DNA, 25 bp, Homo sapien
gttcttctgttggactcagggcccc

SEQ ID NO: 4358398 - DNA, 25 bp, Homo sapien
ttcttctgttggactcagggccccc

SEQ ID NO: 4358399 - DNA, 25 bp, Homo sapien
cacctcaaacatgcgcaggtgcatg

SEQ ID NO: 4358400 - DNA, 25 bp, Homo sapien
tctggccacctcaaacatgcgcagg

SEQ ID NO: 4358401 - DNA, 25 bp, Homo sapien
tgtttggtgtaggtgatctctggcc

SEQ ID NO: 4358402 - DNA, 25 bp, Homo sapien
gcaccacaggtattcggctcttcat

SEQ ID NO: 4358403 - DNA, 25 bp, Homo sapien
caaaatatacattgttagcaccatt

SEQ ID NO: 4358404 - DNA, 25 bp, Homo sapien
aaaatatacattgttagcaccatta

SEQ ID NO: 4358405 - DNA, 25 bp, Homo sapien
ttctctagggcaatcaaccttcatg

SEQ ID NO: 4358406 - DNA, 25 bp, Homo sapien
tcaggactcggtgaaatcatttcca

SEQ ID NO: 4358407 - DNA, 25 bp, Homo sapien
taacccgctgttgctacgggcacac

SEQ ID NO: 4358408 - DNA, 25 bp, Homo sapien
ctgtgtgagcgtgtcgacttctcta

SEQ ID NO: 4358409 - DNA, 25 bp, Homo sapien
cttccttgtcggtgtaaggatcctc

SEQ ID NO: 4358410 - DNA, 25 bp, Homo sapien
tcggtgtaaggatcctctgccagcc

SEQ ID NO: 4358411 - DNA, 25 bp, Homo sapien
ccttgtcggtgtaaggatcctctgc

SEQ ID NO: 4358412 - DNA, 25 bp, Homo sapien
tgtcggtgtaaggatcctctgccag

SEQ ID NO: 4358413 - DNA, 25 bp, Homo sapien
tgaaaagcagatcagagtgggagcc

SEQ ID NO: 4358414 - DNA, 25 bp, Homo sapien
cttcatggcaggatctaggctgaag

SEQ ID NO: 4358415 - DNA, 25 bp, Homo sapien
gaaaagcagatcagagtgggagcca

SEQ ID NO: 4358416 - DNA, 25 bp, Homo sapien
catggcaggatctaggctgaagcag

SEQ ID NO: 4358417 - DNA, 25 bp, Homo sapien
ctggactgcatccagtgtcccatgg

SEQ ID NO: 4358418 - DNA, 25 bp, Homo sapien
caccatggggacattgatgagggca

SEQ ID NO: 4358419 - DNA, 25 bp, Homo sapien
cagccctgcatctggtagaatggtc

SEQ ID NO: 4358420 - DNA, 25 bp, Homo sapien
ggtagaatggtctccacattcttga

SEQ ID NO: 4358421 - DNA, 25 bp, Homo sapien
cagcctttatgaaagggagatttcc

SEQ ID NO: 4358422 - DNA, 25 bp, Homo sapien
tcaagaggcataaatactgtcagcg

SEQ ID NO: 4358423 - DNA, 25 bp, Homo sapien
tactgtcagcgtgtcagcctttatg

SEQ ID NO: 4358424 - DNA, 25 bp, Homo sapien
catgtactttcaagaggcataaata

SEQ ID NO: 4358425 - DNA, 25 bp, Homo sapien
tctctggtgataaggtctacatctg

SEQ ID NO: 4358426 - DNA, 25 bp, Homo sapien
ccgactaagagtagcatgggggcct

SEQ ID NO: 4358427 - DNA, 25 bp, Homo sapien
ggccttttcaatctctgtgcagtga

SEQ ID NO: 4358428 - DNA, 25 bp, Homo sapien
ctaagagtagcatgggggccttttc

SEQ ID NO: 4358429 - DNA, 25 bp, Homo sapien
acagagctgagaagtgccaggtctg

SEQ ID NO: 4358430 - DNA, 25 bp, Homo sapien
cagagctgagaagtgccaggtctgt

SEQ ID NO: 4358431 - DNA, 25 bp, Homo sapien
gagctgagaagtgccaggtctgtga

SEQ ID NO: 4358432 - DNA, 25 bp, Homo sapien
agctgagaagtgccaggtctgtgac

SEQ ID NO: 4358433 - DNA, 25 bp, Homo sapien
ctgctatttgcagggctcagcaacg

SEQ ID NO: 4358434 - DNA, 25 bp, Homo sapien
ttggtctcgggactcaaggctgcct

SEQ ID NO: 4358435 - DNA, 25 bp, Homo sapien
tagatcccctagtacctgagctgga

SEQ ID NO: 4358436 - DNA, 25 bp, Homo sapien
aaggcgaacttgaccttgcgctccc

SEQ ID NO: 4358437 - DNA, 25 bp, Homo sapien
taacctaagcggtgaagacgcaatg

SEQ ID NO: 4358438 - DNA, 25 bp, Homo sapien
ggcaatgacttcctcatgcaaggga

SEQ ID NO: 4358439 - DNA, 25 bp, Homo sapien
aagtagcgtccccttgtgctggaag

SEQ ID NO: 4358440 - DNA, 25 bp, Homo sapien
tagtaccacaggttgattagaggcc

SEQ ID NO: 4358441 - DNA, 25 bp, Homo sapien
cttggttaggttcctctcaaactga

SEQ ID NO: 4358442 - DNA, 25 bp, Homo sapien
tattaaatgcagctaagcaatgagt

SEQ ID NO: 4358443 - DNA, 25 bp, Homo sapien
tttgagaccccaagatggcaactgg

SEQ ID NO: 4358444 - DNA, 25 bp, Homo sapien
taagcaaaggttagcttgagaggct

SEQ ID NO: 4358445 - DNA, 25 bp, Homo sapien
caaagacagagtgcaaaggaggtcc

SEQ ID NO: 4358446 - DNA, 25 bp, Homo sapien
gaagtcttcgtgataccttgatgca

SEQ ID NO: 4358447 - DNA, 25 bp, Homo sapien
tagcttatacgagggccaagtctcc

SEQ ID NO: 4358448 - DNA, 25 bp, Homo sapien
cagaccctgccaagctagtgggaga

SEQ ID NO: 4358449 - DNA, 25 bp, Homo sapien
tcgtcactagctggccaaagaacag

SEQ ID NO: 4358450 - DNA, 25 bp, Homo sapien
tctgtgccttcccttcgcttcgtca

SEQ ID NO: 4358451 - DNA, 25 bp, Homo sapien
aatggccttggcttgaaaacttgag

SEQ ID NO: 4358452 - DNA, 25 bp, Homo sapien
ttgagcagaaatggccgggcttctg

SEQ ID NO: 4358453 - DNA, 25 bp, Homo sapien
taatgggcttattagctcccctccc

SEQ ID NO: 4358454 - DNA, 25 bp, Homo sapien
tcttgccaaccaaagacaaccagtg

SEQ ID NO: 4358455 - DNA, 25 bp, Homo sapien
tgtttgggaagacaccttaatgggc

SEQ ID NO: 4358456 - DNA, 25 bp, Homo sapien
ttagtcctttgttgacagcagagaa

SEQ ID NO: 4358457 - DNA, 25 bp, Homo sapien
gcttccttaggaacgatgtgccagg

SEQ ID NO: 4358458 - DNA, 25 bp, Homo sapien
cagaagccggatttttggttcccag

SEQ ID NO: 4358459 - DNA, 25 bp, Homo sapien
ccaggcaaatcttgcctgggcccat

SEQ ID NO: 4358460 - DNA, 25 bp, Homo sapien
tgggcccatcacgtccaatcaactt

SEQ ID NO: 4358461 - DNA, 25 bp, Homo sapien
tgtcccctaggtctataatgcactg

SEQ ID NO: 4358462 - DNA, 25 bp, Homo sapien
gcagtaccataattagccctttgga

SEQ ID NO: 4358463 - DNA, 25 bp, Homo sapien
gagcacaacatgtaggcagtaccat

SEQ ID NO: 4358464 - DNA, 25 bp, Homo sapien
gatgaaattggagcctatgagcaca

SEQ ID NO: 4358465 - DNA, 25 bp, Homo sapien
aaaaggtgtattctcgcactctctg

SEQ ID NO: 4358466 - DNA, 25 bp, Homo sapien
aaaggtgtattctcgcactctctga

SEQ ID NO: 4358467 - DNA, 25 bp, Homo sapien
gtcaggctggctgggttagtgtatg

SEQ ID NO: 4358468 - DNA, 25 bp, Homo sapien
agttgatcctcgtcaggctggctgg

SEQ ID NO: 4358469 - DNA, 25 bp, Homo sapien
caggctggctgggttagtgtatgta

SEQ ID NO: 4358470 - DNA, 25 bp, Homo sapien
atagttgatcctcgtcaggctggct

SEQ ID NO: 4358471 - DNA, 25 bp, Homo sapien
gttagtctcaaaggcaatgttagga

SEQ ID NO: 4358472 - DNA, 25 bp, Homo sapien
tagggttagtctcaaaggcaatgtt

SEQ ID NO: 4358473 - DNA, 25 bp, Homo sapien
cagggatagggttagtctcaaaggc

SEQ ID NO: 4358474 - DNA, 25 bp, Homo sapien
caaaccagggatagggttagtctca

SEQ ID NO: 4358475 - DNA, 25 bp, Homo sapien
ctactgaaggtaaacttctgaccct

SEQ ID NO: 4358476 - DNA, 25 bp, Homo sapien
aggtaaacttctgaccctctgagga

SEQ ID NO: 4358477 - DNA, 25 bp, Homo sapien
gaccctctgaggaggactttcccac

SEQ ID NO: 4358478 - DNA, 25 bp, Homo sapien
tgaccctctgaggaggactttccca

SEQ ID NO: 4358479 - DNA, 25 bp, Homo sapien
ttctaccccgtgtttggcatctcct

SEQ ID NO: 4358480 - DNA, 25 bp, Homo sapien
caggaaccattgagcttctaccccg

SEQ ID NO: 4358481 - DNA, 25 bp, Homo sapien
tctcgtttcacaggaaccattgagc

SEQ ID NO: 4358482 - DNA, 25 bp, Homo sapien
tcatttcaaccagttctcgtttcac

SEQ ID NO: 4358483 - DNA, 25 bp, Homo sapien
tacttatatgtccagacctgggcat

SEQ ID NO: 4358484 - DNA, 25 bp, Homo sapien
ctacttatatgtccagacctgggca

SEQ ID NO: 4358485 - DNA, 25 bp, Homo sapien
gcctttttgcccagtcggcatttcc

SEQ ID NO: 4358486 - DNA, 25 bp, Homo sapien
cagtaatcgccattgacggctattg

SEQ ID NO: 4358487 - DNA, 25 bp, Homo sapien
tttccctgcttcttcacagtaatcg

SEQ ID NO: 4358488 - DNA, 25 bp, Homo sapien
cactgcctttttgcccagtcggcat

SEQ ID NO: 4358489 - DNA, 25 bp, Homo sapien
ccagtgcaaaggactggtttttgta

SEQ ID NO: 4358490 - DNA, 25 bp, Homo sapien
tgcaaaggactggtttttgtagtaa

SEQ ID NO: 4358491 - DNA, 25 bp, Homo sapien
tggttccagtgcaaaggactggttt

SEQ ID NO: 4358492 - DNA, 25 bp, Homo sapien
agtcagccctgcgtcaaggtcacac

SEQ ID NO: 4358493 - DNA, 25 bp, Homo sapien
actcagtcagccctgcgtcaaggtc

SEQ ID NO: 4358494 - DNA, 25 bp, Homo sapien
caaggtcacaccacatagggccatg

SEQ ID NO: 4358495 - DNA, 25 bp, Homo sapien
tcacaccacatagggccatgagtca

SEQ ID NO: 4358496 - DNA, 25 bp, Homo sapien
gacagagtcccggagactagcttga

SEQ ID NO: 4358497 - DNA, 25 bp, Homo sapien
tagcttgacttgtgcacacgcccag

SEQ ID NO: 4358498 - DNA, 25 bp, Homo sapien
ggaggaaaggatgtatgctcctaac

SEQ ID NO: 4358499 - DNA, 25 bp, Homo sapien
ggatgtatgctcctaactggtactt

SEQ ID NO: 4358500 - DNA, 25 bp, Homo sapien
tcagacagaaattgaaccagaattt

SEQ ID NO: 4358501 - DNA, 25 bp, Homo sapien
cagacagaaattgaaccagaattta

SEQ ID NO: 4358502 - DNA, 25 bp, Homo sapien
agacagaaattgaaccagaatttac

SEQ ID NO: 4358503 - DNA, 25 bp, Homo sapien
tctgtgaaatccgtgggagtcccag

SEQ ID NO: 4358504 - DNA, 25 bp, Homo sapien
taaatggagccaagtttccctgtgc

SEQ ID NO: 4358505 - DNA, 25 bp, Homo sapien
tctaagtacaggctgcgcggcctct

SEQ ID NO: 4358506 - DNA, 25 bp, Homo sapien
tcaaagcggtatgcagacggctctg

SEQ ID NO: 4358507 - DNA, 25 bp, Homo sapien
taaaatgaggtacgaggagagatcc

SEQ ID NO: 4358508 - DNA, 25 bp, Homo sapien
tattgtggtcattcttggtggagac

SEQ ID NO: 4358509 - DNA, 25 bp, Homo sapien
tggatcatcatatcaaccttgacta

SEQ ID NO: 4358510 - DNA, 25 bp, Homo sapien
tggtggagacatgcactggatcatc

SEQ ID NO: 4358511 - DNA, 25 bp, Homo sapien
tataaacaaaatcttgactttcaag

SEQ ID NO: 4358512 - DNA, 25 bp, Homo sapien
gtgggccatccggagtgtgtttttc

SEQ ID NO: 4358513 - DNA, 25 bp, Homo sapien
accagtgggccatccggagtgtgtt

SEQ ID NO: 4358514 - DNA, 25 bp, Homo sapien
ccttggaccagtgggccatccggag

SEQ ID NO: 4358515 - DNA, 25 bp, Homo sapien
ctccttggaccagtgggccatccgg

SEQ ID NO: 4358516 - DNA, 25 bp, Homo sapien
gcatgaccgaatggcagaaacaagg

SEQ ID NO: 4358517 - DNA, 25 bp, Homo sapien
actgcattatgccagcacccatcag

SEQ ID NO: 4358518 - DNA, 25 bp, Homo sapien
aacaaggaggctctagttgagtctg

SEQ ID NO: 4358519 - DNA, 25 bp, Homo sapien
gggacctcttcccatcagtaaacta

SEQ ID NO: 4358520 - DNA, 25 bp, Homo sapien
actggggtgcccacatatccctggg

SEQ ID NO: 4358521 - DNA, 25 bp, Homo sapien
gactggggtgcccacatatccctgg

SEQ ID NO: 4358522 - DNA, 25 bp, Homo sapien
ggtgcccacatatccctgggggact

SEQ ID NO: 4358523 - DNA, 25 bp, Homo sapien
agaaggactggggtgcccacatatc

SEQ ID NO: 4358524 - DNA, 25 bp, Homo sapien
ggattcagcaatgactctgggaaga

SEQ ID NO: 4358525 - DNA, 25 bp, Homo sapien
ttgtagatcagagcatgcaaggtgg

SEQ ID NO: 4358526 - DNA, 25 bp, Homo sapien
gaaggatcaggattcagcaatgact

SEQ ID NO: 4358527 - DNA, 25 bp, Homo sapien
gctgctgggtgggttgtagatcaga

SEQ ID NO: 4358528 - DNA, 25 bp, Homo sapien
aggagaaaatcacatcatcaaagtt

SEQ ID NO: 4358529 - DNA, 25 bp, Homo sapien
tcatcaaagttgcattgttgtttgt

SEQ ID NO: 4358530 - DNA, 25 bp, Homo sapien
tcacatcatcaaagttgcattgttg

SEQ ID NO: 4358531 - DNA, 25 bp, Homo sapien
cctgattattaaggagaaaatcaca

SEQ ID NO: 4358532 - DNA, 25 bp, Homo sapien
tgtgttgtcgtctcttgtggctgtc

SEQ ID NO: 4358533 - DNA, 25 bp, Homo sapien
gctgtagctgtgttgtcgtctcttg

SEQ ID NO: 4358534 - DNA, 25 bp, Homo sapien
gttgtcgtctcttgtggctgtcccc

SEQ ID NO: 4358535 - DNA, 25 bp, Homo sapien
tagctgtgttgtcgtctcttgtggc

SEQ ID NO: 4358536 - DNA, 25 bp, Homo sapien
ctgctgccaaaactctgtcataact

SEQ ID NO: 4358537 - DNA, 25 bp, Homo sapien
ctatgtatgcccatgagacgggagc

SEQ ID NO: 4358538 - DNA, 25 bp, Homo sapien
gctgccaaaactctgtcataactgc

SEQ ID NO: 4358539 - DNA, 25 bp, Homo sapien
cccatgagacgggagcctggcttct

SEQ ID NO: 4358540 - DNA, 25 bp, Homo sapien
aaagggactctacatattgattaca

SEQ ID NO: 4358541 - DNA, 25 bp, Homo sapien
agaaatgggcaagctatacctataa

SEQ ID NO: 4358542 - DNA, 25 bp, Homo sapien
tgtgtaacatttccaacatgaagaa

SEQ ID NO: 4358543 - DNA, 25 bp, Homo sapien
ttagacaatgaaatacatcgcgaca

SEQ ID NO: 4358544 - DNA, 25 bp, Homo sapien
atgactgcagctgagatgccagaaa

SEQ ID NO: 4358545 - DNA, 25 bp, Homo sapien
acagtcaaggcaaaattcctccaca

SEQ ID NO: 4358546 - DNA, 25 bp, Homo sapien
aaacagtcaaggcaaaattcctcca

SEQ ID NO: 4358547 - DNA, 25 bp, Homo sapien
catgactgcagctgagatgccagaa

SEQ ID NO: 4358548 - DNA, 25 bp, Homo sapien
ttcaattgttcatatgcaatatctg

SEQ ID NO: 4358549 - DNA, 25 bp, Homo sapien
tcttcaattgttcatatgcaatatc

SEQ ID NO: 4358550 - DNA, 25 bp, Homo sapien
caattgttcatatgcaatatctggc

SEQ ID NO: 4358551 - DNA, 25 bp, Homo sapien
tcaattgttcatatgcaatatctgg

SEQ ID NO: 4358552 - DNA, 25 bp, Homo sapien
acaaacatctcctgttttgacagac

SEQ ID NO: 4358553 - DNA, 25 bp, Homo sapien
ctcacaaacatctcctgttttgaca

SEQ ID NO: 4358554 - DNA, 25 bp, Homo sapien
tcacaaacatctcctgttttgacag

SEQ ID NO: 4358555 - DNA, 25 bp, Homo sapien
cacaaacatctcctgttttgacaga

SEQ ID NO: 4358556 - DNA, 25 bp, Homo sapien
cggaagcctggctcatagctctcta

SEQ ID NO: 4358557 - DNA, 25 bp, Homo sapien
gctggagccagcagttcagtttgac

SEQ ID NO: 4358558 - DNA, 25 bp, Homo sapien
gcttgaagctcaaccctgcaatgaa

SEQ ID NO: 4358559 - DNA, 25 bp, Homo sapien
tgacacagcttgaagctcaaccctg

SEQ ID NO: 4358560 - DNA, 25 bp, Homo sapien
tcagtctcatcacctcaacactaag

SEQ ID NO: 4358561 - DNA, 25 bp, Homo sapien
tgttccacttcagtctcatcacctc

SEQ ID NO: 4358562 - DNA, 25 bp, Homo sapien
cctcaacactaagaggagaggcttc

SEQ ID NO: 4358563 - DNA, 25 bp, Homo sapien
ctcatcacctcaacactaagaggag

SEQ ID NO: 4358564 - DNA, 25 bp, Homo sapien
ctgcagctcttgaacaagaccttgg

SEQ ID NO: 4358565 - DNA, 25 bp, Homo sapien
actgcagctcttgaacaagaccttg

SEQ ID NO: 4358566 - DNA, 25 bp, Homo sapien
gactgcagctcttgaacaagacctt

SEQ ID NO: 4358567 - DNA, 25 bp, Homo sapien
agactgcagctcttgaacaagacct

SEQ ID NO: 4358568 - DNA, 25 bp, Homo sapien
tggagggcaaggatcagccagaaga

SEQ ID NO: 4358569 - DNA, 25 bp, Homo sapien
agggcaaggatcagccagaagaaga

SEQ ID NO: 4358570 - DNA, 25 bp, Homo sapien
gatggagggcaaggatcagccagaa

SEQ ID NO: 4358571 - DNA, 25 bp, Homo sapien
gggcaaggatcagccagaagaagac

SEQ ID NO: 4358572 - DNA, 25 bp, Homo sapien
aaaatgagtgatgttgatctgctgg

SEQ ID NO: 4358573 - DNA, 25 bp, Homo sapien
tatgcaacaaagttaggtgaaaatg

SEQ ID NO: 4358574 - DNA, 25 bp, Homo sapien
taaggtgtagatagaagcagagttt

SEQ ID NO: 4358575 - DNA, 25 bp, Homo sapien
cttaaggtgtagatagaagcagagt

SEQ ID NO: 4358576 - DNA, 25 bp, Homo sapien
tcacgatatcagcagccgtactctc

SEQ ID NO: 4358577 - DNA, 25 bp, Homo sapien
acgatatcagcagccgtactctcct

SEQ ID NO: 4358578 - DNA, 25 bp, Homo sapien
tcagatcacgatatcagcagccgta

SEQ ID NO: 4358579 - DNA, 25 bp, Homo sapien
gatcacgatatcagcagccgtactc

SEQ ID NO: 4358580 - DNA, 25 bp, Homo sapien
gcagggagtgcccttgggacctcct

SEQ ID NO: 4358581 - DNA, 25 bp, Homo sapien
tgcagggagtgcccttgggacctcc

SEQ ID NO: 4358582 - DNA, 25 bp, Homo sapien
catgcagggagtgcccttgggacct

SEQ ID NO: 4358583 - DNA, 25 bp, Homo sapien
ccttgggacctcctagtctcatggg

SEQ ID NO: 4358584 - DNA, 25 bp, Homo sapien
tgattgattgaactggctgcgcttc

SEQ ID NO: 4358585 - DNA, 25 bp, Homo sapien
aactagtgggcactgttgtctgcca

SEQ ID NO: 4358586 - DNA, 25 bp, Homo sapien
gctgcgcttctatcatacttctggg

SEQ ID NO: 4358587 - DNA, 25 bp, Homo sapien
taaagttatacccactaaggtgtga

SEQ ID NO: 4358588 - DNA, 25 bp, Homo sapien
atttcattcatgagcaggaaggtac

SEQ ID NO: 4358589 - DNA, 25 bp, Homo sapien
cattcatgagcaggaaggtaccttg

SEQ ID NO: 4358590 - DNA, 25 bp, Homo sapien
taccttgaattctgaacccacacat

SEQ ID NO: 4358591 - DNA, 25 bp, Homo sapien
gaaggtaccttgaattctgaaccca

SEQ ID NO: 4358592 - DNA, 25 bp, Homo sapien
tccaggccagtcttggtgactgtgg

SEQ ID NO: 4358593 - DNA, 25 bp, Homo sapien
tggcacccctgcatcttttgtgagg

SEQ ID NO: 4358594 - DNA, 25 bp, Homo sapien
gactgtgggcctccgtgcctttcca

SEQ ID NO: 4358595 - DNA, 25 bp, Homo sapien
caatacgtgaccaggattccaggcc

SEQ ID NO: 4358596 - DNA, 25 bp, Homo sapien
ctggtaaaccgaaatagcccatcct

SEQ ID NO: 4358597 - DNA, 25 bp, Homo sapien
tgaactggtaaaccgaaatagccca

SEQ ID NO: 4358598 - DNA, 25 bp, Homo sapien
tgatatgctggatggtggcgtaggt

SEQ ID NO: 4358599 - DNA, 25 bp, Homo sapien
gtttggtccagaaggcataactgct

SEQ ID NO: 4358600 - DNA, 25 bp, Homo sapien
aaggcataactgctaaaataccatg

SEQ ID NO: 4358601 - DNA, 25 bp, Homo sapien
tgaatgtcaataagtttggtccaga

SEQ ID NO: 4358602 - DNA, 25 bp, Homo sapien
ccttcgtttcctaatacgtactgct

SEQ ID NO: 4358603 - DNA, 25 bp, Homo sapien
tttcctaatacgtactgcttcctcc

SEQ ID NO: 4358604 - DNA, 25 bp, Homo sapien
ttgtactgtcgacccctgtcctggg

SEQ ID NO: 4358605 - DNA, 25 bp, Homo sapien
tcctggggatactgggtggcccttc

SEQ ID NO: 4358606 - DNA, 25 bp, Homo sapien
tctgtgtacagaacttacccactgt

SEQ ID NO: 4358607 - DNA, 25 bp, Homo sapien
ccatacgttttgtcccaggtgacta

SEQ ID NO: 4358608 - DNA, 25 bp, Homo sapien
caggtgactatctggagagctgtgt

SEQ ID NO: 4358609 - DNA, 25 bp, Homo sapien
gaatttgaagtcttggcaggtccat

SEQ ID NO: 4358610 - DNA, 25 bp, Homo sapien
ggaaattgccgatcttcaattgcat

SEQ ID NO: 4358611 - DNA, 25 bp, Homo sapien
gatggcagacaggaactttaataga

SEQ ID NO: 4358612 - DNA, 25 bp, Homo sapien
tggaagttttggaaattgccgatct

SEQ ID NO: 4358613 - DNA, 25 bp, Homo sapien
tggccacaagtctctaatctgcagc

SEQ ID NO: 4358614 - DNA, 25 bp, Homo sapien
aggcatcagccacttgaggcggtct

SEQ ID NO: 4358615 - DNA, 25 bp, Homo sapien
gaggcggtctgtggtgatggcccca

SEQ ID NO: 4358616 - DNA, 25 bp, Homo sapien
ctggtgccagccctttggagagggg

SEQ ID NO: 4358617 - DNA, 25 bp, Homo sapien
cttgaggcggtctgtggtgatggcc

SEQ ID NO: 4358618 - DNA, 25 bp, Homo sapien
ggaccctgtgggttatctgcttggt

SEQ ID NO: 4358619 - DNA, 25 bp, Homo sapien
tggggaccctgtgggttatctgctt

SEQ ID NO: 4358620 - DNA, 25 bp, Homo sapien
gggaccctgtgggttatctgcttgg

SEQ ID NO: 4358621 - DNA, 25 bp, Homo sapien
accctgtgggttatctgcttggtca

SEQ ID NO: 4358622 - DNA, 25 bp, Homo sapien
cttcctacatgctttgactgctggg

SEQ ID NO: 4358623 - DNA, 25 bp, Homo sapien
gcctggttcttcctacatgctttga

SEQ ID NO: 4358624 - DNA, 25 bp, Homo sapien
gtcctaacataagcctggttcttcc

SEQ ID NO: 4358625 - DNA, 25 bp, Homo sapien
ctttggttcttgtgtcctaacataa

SEQ ID NO: 4358626 - DNA, 25 bp, Homo sapien
aattgctgacaccagggtcccagtg

SEQ ID NO: 4358627 - DNA, 25 bp, Homo sapien
ttgctgacaccagggtcccagtgac

SEQ ID NO: 4358628 - DNA, 25 bp, Homo sapien
tgacaccagggtcccagtgacaggc

SEQ ID NO: 4358629 - DNA, 25 bp, Homo sapien
tcgggggggattgaattgctgacac

SEQ ID NO: 4358630 - DNA, 25 bp, Homo sapien
gcatgtcaaattgggtggaacctct

SEQ ID NO: 4358631 - DNA, 25 bp, Homo sapien
caataggtcggggaaggtgatgaat

SEQ ID NO: 4358632 - DNA, 25 bp, Homo sapien
cctgagggtgcagatgaaggcaata

SEQ ID NO: 4358633 - DNA, 25 bp, Homo sapien
gatgaatgttctgtggggcatgtca

SEQ ID NO: 4358634 - DNA, 25 bp, Homo sapien
cttctaattgccgatggaaaatgga

SEQ ID NO: 4358635 - DNA, 25 bp, Homo sapien
tgccgatggaaaatggatgccgatc

SEQ ID NO: 4358636 - DNA, 25 bp, Homo sapien
gcttggcagactgcttcgtcttcta

SEQ ID NO: 4358637 - DNA, 25 bp, Homo sapien
gactgcttcgtcttctaattgccga

SEQ ID NO: 4358638 - DNA, 25 bp, Homo sapien
gcatcattgctagctacatagacca

SEQ ID NO: 4358639 - DNA, 25 bp, Homo sapien
ggtctccgtccatgggggaagcatc

SEQ ID NO: 4358640 - DNA, 25 bp, Homo sapien
aagcatcattgctagctacatagac

SEQ ID NO: 4358641 - DNA, 25 bp, Homo sapien
catcattgctagctacatagaccat

SEQ ID NO: 4358642 - DNA, 25 bp, Homo sapien
caaaaccagtgggttcgtttcactg

SEQ ID NO: 4358643 - DNA, 25 bp, Homo sapien
tcaccttcagggtaagaggccatgt

SEQ ID NO: 4358644 - DNA, 25 bp, Homo sapien
gagaggttgtcttgcaggtggaagt

SEQ ID NO: 4358645 - DNA, 25 bp, Homo sapien
gggttcgtttcactgatctcacccc

SEQ ID NO: 4358646 - DNA, 25 bp, Homo sapien
catgtgggcggcctgggaagtgtgc

SEQ ID NO: 4358647 - DNA, 25 bp, Homo sapien
cctcacacatgtgggcggcctggga

SEQ ID NO: 4358648 - DNA, 25 bp, Homo sapien
tcctcacacatgtgggcggcctggg

SEQ ID NO: 4358649 - DNA, 25 bp, Homo sapien
acacatgtgggcggcctgggaagtg

SEQ ID NO: 4358650 - DNA, 25 bp, Homo sapien
caaccgaatttcaaagttgccagaa

SEQ ID NO: 4358651 - DNA, 25 bp, Homo sapien
gctgatacctctgtatcacttggtt

SEQ ID NO: 4358652 - DNA, 25 bp, Homo sapien
cgaatttcaaagttgccagaatgca

SEQ ID NO: 4358653 - DNA, 25 bp, Homo sapien
aattggaggcaaccgaatttcaaag

SEQ ID NO: 4358654 - DNA, 25 bp, Homo sapien
ccagctctggagtggaataaatcac

SEQ ID NO: 4358655 - DNA, 25 bp, Homo sapien
ggccagctctggagtggaataaatc

SEQ ID NO: 4358656 - DNA, 25 bp, Homo sapien
catccctgaagagggccagctctgg

SEQ ID NO: 4358657 - DNA, 25 bp, Homo sapien
cagcatccctgaagagggccagctc

SEQ ID NO: 4358658 - DNA, 25 bp, Homo sapien
ttcttcgtcttcctgaaagctgttg

SEQ ID NO: 4358659 - DNA, 25 bp, Homo sapien
ttcgctgatcgtgtgaacagcttca

SEQ ID NO: 4358660 - DNA, 25 bp, Homo sapien
tgtgggatgtgtaatttgcacaagt

SEQ ID NO: 4358661 - DNA, 25 bp, Homo sapien
cagaccttcaggactgtttctgata

SEQ ID NO: 4358662 - DNA, 25 bp, Homo sapien
gctgtctggagaagccatcaatctt

SEQ ID NO: 4358663 - DNA, 25 bp, Homo sapien
tgtctgaggataaactcgctggtca

SEQ ID NO: 4358664 - DNA, 25 bp, Homo sapien
gtctgaggataaactcgctggtcag

SEQ ID NO: 4358665 - DNA, 25 bp, Homo sapien
gtgtctgaggataaactcgctggtc

SEQ ID NO: 4358666 - DNA, 25 bp, Homo sapien
gacgtcagtcctccctaaacatgtg

SEQ ID NO: 4358667 - DNA, 25 bp, Homo sapien
cagcaagtctcaggtagcagcaaaa

SEQ ID NO: 4358668 - DNA, 25 bp, Homo sapien
aacatgtgaacatcctcttctgaga

SEQ ID NO: 4358669 - DNA, 25 bp, Homo sapien
gagccccgggtactcagtttgcaaa

SEQ ID NO: 4358670 - DNA, 25 bp, Homo sapien
gcaagaggtaggctgccatctccca

SEQ ID NO: 4358671 - DNA, 25 bp, Homo sapien
gcacttgagtggtgtctgcttttgc

SEQ ID NO: 4358672 - DNA, 25 bp, Homo sapien
tctggcacttgagtggtgtctgctt

SEQ ID NO: 4358673 - DNA, 25 bp, Homo sapien
tctgcttttgcaagaggtaggctgc

SEQ ID NO: 4358674 - DNA, 25 bp, Homo sapien
caagtctaacagtgacccctgggtg

SEQ ID NO: 4358675 - DNA, 25 bp, Homo sapien
gaacagcacggccatttgaccctct

SEQ ID NO: 4358676 - DNA, 25 bp, Homo sapien
gatggagcagtaaccattggctacc

SEQ ID NO: 4358677 - DNA, 25 bp, Homo sapien
gagtgcttgtgttcaatcccagaag

SEQ ID NO: 4358678 - DNA, 25 bp, Homo sapien
atttatagctgccaaaccctttgct

SEQ ID NO: 4358679 - DNA, 25 bp, Homo sapien
accctttgctccagtattagaggaa

SEQ ID NO: 4358680 - DNA, 25 bp, Homo sapien
attctatttatagctgccaaaccct

SEQ ID NO: 4358681 - DNA, 25 bp, Homo sapien
ggaaaggcttgggtagccaatgacc

SEQ ID NO: 4358682 - DNA, 25 bp, Homo sapien
tggtgttcgtgttggcggagggaca

SEQ ID NO: 4358683 - DNA, 25 bp, Homo sapien
cttctccgcatggcacagtcactgg

SEQ ID NO: 4358684 - DNA, 25 bp, Homo sapien
ttctccgcatggcacagtcactggg

SEQ ID NO: 4358685 - DNA, 25 bp, Homo sapien
gatgtgaacaagttggtgttcgtgt

SEQ ID NO: 4358686 - DNA, 25 bp, Homo sapien
tatatctttatagctctctctggcc

SEQ ID NO: 4358687 - DNA, 25 bp, Homo sapien
tttaaacactgccttgcacggtggg

SEQ ID NO: 4358688 - DNA, 25 bp, Homo sapien
gaatttacaaggacgactagctcta

SEQ ID NO: 4358689 - DNA, 25 bp, Homo sapien
ggatgccatgaagggtgagaacacc

SEQ ID NO: 4358690 - DNA, 25 bp, Homo sapien
ccccatgaatcagattcaaaatgca

SEQ ID NO: 4358691 - DNA, 25 bp, Homo sapien
tgccagtgctttccccatgaatcag

SEQ ID NO: 4358692 - DNA, 25 bp, Homo sapien
ctgccagtgctttccccatgaatca

SEQ ID NO: 4358693 - DNA, 25 bp, Homo sapien
tttccccatgaatcagattcaaaat

SEQ ID NO: 4358694 - DNA, 25 bp, Homo sapien
caagcctattagaggtgctaaaaca

SEQ ID NO: 4358695 - DNA, 25 bp, Homo sapien
acaagcctattagaggtgctaaaac

SEQ ID NO: 4358696 - DNA, 25 bp, Homo sapien
taatgtcaagcagggcatttctctc

SEQ ID NO: 4358697 - DNA, 25 bp, Homo sapien
gagttaatgtcaagcagggcatttc

SEQ ID NO: 4358698 - DNA, 25 bp, Homo sapien
gattcctttaactcttgcaggcatt

SEQ ID NO: 4358699 - DNA, 25 bp, Homo sapien
gggctggctgattcctttaactctt

SEQ ID NO: 4358700 - DNA, 25 bp, Homo sapien
ttagcatcaattccatgtattcaag

SEQ ID NO: 4358701 - DNA, 25 bp, Homo sapien
ttttaattagcatcaattccatgta

SEQ ID NO: 4358702 - DNA, 25 bp, Homo sapien
acaagggctctgtgatctcttcgtc

SEQ ID NO: 4358703 - DNA, 25 bp, Homo sapien
ggctctgtgatctcttcgtctggaa

SEQ ID NO: 4358704 - DNA, 25 bp, Homo sapien
tgtgatctcttcgtctggaatagga

SEQ ID NO: 4358705 - DNA, 25 bp, Homo sapien
tcttcgtctggaataggaggctgtg

SEQ ID NO: 4358706 - DNA, 25 bp, Homo sapien
caagtacttggctactaacacagca

SEQ ID NO: 4358707 - DNA, 25 bp, Homo sapien
tcacaagtacttggctactaacaca

SEQ ID NO: 4358708 - DNA, 25 bp, Homo sapien
acaagtacttggctactaacacagc

SEQ ID NO: 4358709 - DNA, 25 bp, Homo sapien
agtacttggctactaacacagcatt

SEQ ID NO: 4358710 - DNA, 25 bp, Homo sapien
ttttaatgagaaatctcaaagctga

SEQ ID NO: 4358711 - DNA, 25 bp, Homo sapien
ttaatgagaaatctcaaagctgatt

SEQ ID NO: 4358712 - DNA, 25 bp, Homo sapien
aatgagaaatctcaaagctgatttc

SEQ ID NO: 4358713 - DNA, 25 bp, Homo sapien
tgagaaatctcaaagctgatttctc

SEQ ID NO: 4358714 - DNA, 25 bp, Homo sapien
gtttgatgttaaatccttcagcaag

SEQ ID NO: 4358715 - DNA, 25 bp, Homo sapien
gaattgtttgatgttaaatccttca

SEQ ID NO: 4358716 - DNA, 25 bp, Homo sapien
tttgatgttaaatccttcagcaaga

SEQ ID NO: 4358717 - DNA, 25 bp, Homo sapien
caagattccgtaaatcctgaagtga

SEQ ID NO: 4358718 - DNA, 25 bp, Homo sapien
ctgctgtagagtgttggcaagattc

SEQ ID NO: 4358719 - DNA, 25 bp, Homo sapien
taacacgccgggagacgcatcatca

SEQ ID NO: 4358720 - DNA, 25 bp, Homo sapien
gcatcatcagccagaaggctgctgt

SEQ ID NO: 4358721 - DNA, 25 bp, Homo sapien
tgccttgcccataaggctcaaaaca

SEQ ID NO: 4358722 - DNA, 25 bp, Homo sapien
gcccataaggctcaaaacaccccat

SEQ ID NO: 4358723 - DNA, 25 bp, Homo sapien
gccttgcccataaggctcaaaacac

SEQ ID NO: 4358724 - DNA, 25 bp, Homo sapien
ccttgccttgcccataaggctcaaa

SEQ ID NO: 4358725 - DNA, 25 bp, Homo sapien
tctccctatagaggactgtcccatg

SEQ ID NO: 4358726 - DNA, 25 bp, Homo sapien
ttctggttaccagccccactttgaa

SEQ ID NO: 4358727 - DNA, 25 bp, Homo sapien
tgtatatcgtaagaccacagctatc

SEQ ID NO: 4358728 - DNA, 25 bp, Homo sapien
catcgtactttggagatcttagaga

SEQ ID NO: 4358729 - DNA, 25 bp, Homo sapien
gatgaattaggattcagtctggcaa

SEQ ID NO: 4358730 - DNA, 25 bp, Homo sapien
tacattaaggtttctgatagatagc

SEQ ID NO: 4358731 - DNA, 25 bp, Homo sapien
tatgatacatatcgctattctgcat

SEQ ID NO: 4358732 - DNA, 25 bp, Homo sapien
gatagatagctcacatggagaactg

SEQ ID NO: 4358733 - DNA, 25 bp, Homo sapien
tacactgtacaacggcgatcatcag

SEQ ID NO: 4358734 - DNA, 25 bp, Homo sapien
acggcgatcatcagtgtgaagctgg

SEQ ID NO: 4358735 - DNA, 25 bp, Homo sapien
ggccaccaggcaatacactgtacaa

SEQ ID NO: 4358736 - DNA, 25 bp, Homo sapien
caggcaatacactgtacaacggcga

SEQ ID NO: 4358737 - DNA, 25 bp, Homo sapien
aaccagggccagcaaagtaggagct

SEQ ID NO: 4358738 - DNA, 25 bp, Homo sapien
cctgaggtaagtgcatattccaggg

SEQ ID NO: 4358739 - DNA, 25 bp, Homo sapien
tggagtccacctgaggtaagtgcat

SEQ ID NO: 4358740 - DNA, 25 bp, Homo sapien
cagggccagcaaagtaggagctcca

SEQ ID NO: 4358741 - DNA, 25 bp, Homo sapien
aaagtcaatacgacctctgaggttc

SEQ ID NO: 4358742 - DNA, 25 bp, Homo sapien
gtcaatacgacctctgaggttctcc

SEQ ID NO: 4358743 - DNA, 25 bp, Homo sapien
caaagtcaatacgacctctgaggtt

SEQ ID NO: 4358744 - DNA, 25 bp, Homo sapien
aagtcaatacgacctctgaggttct

SEQ ID NO: 4358745 - DNA, 25 bp, Homo sapien
tctgcctcttgctttgaccagatgg

SEQ ID NO: 4358746 - DNA, 25 bp, Homo sapien
gatggaaactgcttgccatcagcag

SEQ ID NO: 4358747 - DNA, 25 bp, Homo sapien
tttgaccagatggaaactgcttgcc

SEQ ID NO: 4358748 - DNA, 25 bp, Homo sapien
aaactgcttgccatcagcagaagtg

SEQ ID NO: 4358749 - DNA, 25 bp, Homo sapien
tagtctgcgacttataaagaggatc

SEQ ID NO: 4358750 - DNA, 25 bp, Homo sapien
cgacttataaagaggatcacagtaa

SEQ ID NO: 4358751 - DNA, 25 bp, Homo sapien
ttttgatagtctgcgacttataaag

SEQ ID NO: 4358752 - DNA, 25 bp, Homo sapien
accaggggggatgcggatgtagctc

SEQ ID NO: 4358753 - DNA, 25 bp, Homo sapien
ggaggaacaagtacacccgttggca

SEQ ID NO: 4358754 - DNA, 25 bp, Homo sapien
cacagtgtgggacttgttaaactcc

SEQ ID NO: 4358755 - DNA, 25 bp, Homo sapien
ggttggtgtgcgaacattttggaac

SEQ ID NO: 4358756 - DNA, 25 bp, Homo sapien
cgaacattttggaactgagtaccag

SEQ ID NO: 4358757 - DNA, 25 bp, Homo sapien
tccttgcagtgagaatttggcggga

SEQ ID NO: 4358758 - DNA, 25 bp, Homo sapien
tgagtgtgtaactcttcaaggctgg

SEQ ID NO: 4358759 - DNA, 25 bp, Homo sapien
catgagcatgctctcctattgagtg

SEQ ID NO: 4358760 - DNA, 25 bp, Homo sapien
tgtcctacacgaaaacatgagcatg

SEQ ID NO: 4358761 - DNA, 25 bp, Homo sapien
cagtggaggttgtaattgtcaggtc

SEQ ID NO: 4358762 - DNA, 25 bp, Homo sapien
gcagtggaggttgtaattgtcaggt

SEQ ID NO: 4358763 - DNA, 25 bp, Homo sapien
tgaagggcaacgtgagccttcttga

SEQ ID NO: 4358764 - DNA, 25 bp, Homo sapien
tgcagtggaggttgtaattgtcagg

SEQ ID NO: 4358765 - DNA, 25 bp, Homo sapien
tcaatggacttgcttgtgtgagatt

SEQ ID NO: 4358766 - DNA, 25 bp, Homo sapien
gggccagaatgcattcaatggactt

SEQ ID NO: 4358767 - DNA, 25 bp, Homo sapien
gaatgcattcaatggacttgcttgt

SEQ ID NO: 4358768 - DNA, 25 bp, Homo sapien
cattcaatggacttgcttgtgtgag

SEQ ID NO: 4358769 - DNA, 25 bp, Homo sapien
tcagaattagtttcagattgatatt

SEQ ID NO: 4358770 - DNA, 25 bp, Homo sapien
ttggcaaccttcagaattagtttca

SEQ ID NO: 4358771 - DNA, 25 bp, Homo sapien
aaccttcagaattagtttcagattg

SEQ ID NO: 4358772 - DNA, 25 bp, Homo sapien
ggcaaccttcagaattagtttcaga

SEQ ID NO: 4358773 - DNA, 25 bp, Homo sapien
tttccttcatgtggccgtagataat

SEQ ID NO: 4358774 - DNA, 25 bp, Homo sapien
gtggccgtagataatggaaaaggtc

SEQ ID NO: 4358775 - DNA, 25 bp, Homo sapien
cttcatgtggccgtagataatggaa

SEQ ID NO: 4358776 - DNA, 25 bp, Homo sapien
cattatttccttcatgtggccgtag

SEQ ID NO: 4358777 - DNA, 25 bp, Homo sapien
caaacagctgatggctcggtgcatc

SEQ ID NO: 4358778 - DNA, 25 bp, Homo sapien
gatggctcggtgcatcattgctccc

SEQ ID NO: 4358779 - DNA, 25 bp, Homo sapien
ggtgcatcattgctccccagtcaaa

SEQ ID NO: 4358780 - DNA, 25 bp, Homo sapien
cattgctccccagtcaaatggattt

SEQ ID NO: 4358781 - DNA, 25 bp, Homo sapien
catcttgagagagggaagtgtatct

SEQ ID NO: 4358782 - DNA, 25 bp, Homo sapien
ttcccagcattagtgtaagtagcat

SEQ ID NO: 4358783 - DNA, 25 bp, Homo sapien
ggatggcgcacagagtgggcagttt

SEQ ID NO: 4358784 - DNA, 25 bp, Homo sapien
tagtgtaagtagcatcttgagagag

SEQ ID NO: 4358785 - DNA, 25 bp, Homo sapien
catgggtacaggttgatcctacaga

SEQ ID NO: 4358786 - DNA, 25 bp, Homo sapien
tcaggtcggcttgcatgggtacagg

SEQ ID NO: 4358787 - DNA, 25 bp, Homo sapien
ggtacaggttgatcctacagacacc

SEQ ID NO: 4358788 - DNA, 25 bp, Homo sapien
cggcttgcatgggtacaggttgatc

SEQ ID NO: 4358789 - DNA, 25 bp, Homo sapien
aggagctgatgggatactcctgtgt

SEQ ID NO: 4358790 - DNA, 25 bp, Homo sapien
agctgatgggatactcctgtgtaaa

SEQ ID NO: 4358791 - DNA, 25 bp, Homo sapien
ctcctgtgtaaagctggcagcaaca

SEQ ID NO: 4358792 - DNA, 25 bp, Homo sapien
gatactcctgtgtaaagctggcagc

SEQ ID NO: 4358793 - DNA, 25 bp, Homo sapien
ttatcgatcgtcctttctgttcagt

SEQ ID NO: 4358794 - DNA, 25 bp, Homo sapien
tatcgatcgtcctttctgttcagtc

SEQ ID NO: 4358795 - DNA, 25 bp, Homo sapien
tcctggtactcagctcagagtgtgg

SEQ ID NO: 4358796 - DNA, 25 bp, Homo sapien
tgaagaaaggaggagcctgctccac

SEQ ID NO: 4358797 - DNA, 25 bp, Homo sapien
ggcagtcagaggcttgtccttgaag

SEQ ID NO: 4358798 - DNA, 25 bp, Homo sapien
cacatgctgtgttgtgagacaaata

SEQ ID NO: 4358799 - DNA, 25 bp, Homo sapien
tcttttgctgcgttgattatgctgt

SEQ ID NO: 4358800 - DNA, 25 bp, Homo sapien
tggctgctccttgagtatggtacat

SEQ ID NO: 4358801 - DNA, 25 bp, Homo sapien
ctggctgctccttgagtatggtaca

SEQ ID NO: 4358802 - DNA, 25 bp, Homo sapien
cgttgattatgctgtgttgaaatcc

SEQ ID NO: 4358803 - DNA, 25 bp, Homo sapien
gaagtctctttgatcagcctactag

SEQ ID NO: 4358804 - DNA, 25 bp, Homo sapien
tctgtggcacagcattaactgggtc

SEQ ID NO: 4358805 - DNA, 25 bp, Homo sapien
tatgtggcatgtaaaagggtctcag

SEQ ID NO: 4358806 - DNA, 25 bp, Homo sapien
gatacatctgtatgagggctcagag

SEQ ID NO: 4358807 - DNA, 25 bp, Homo sapien
tcacattcgtttttctgttagttcc

SEQ ID NO: 4358808 - DNA, 25 bp, Homo sapien
tttctgttagttcctcataacctcc

SEQ ID NO: 4358809 - DNA, 25 bp, Homo sapien
gagctttgtaatttagatgcttatt

SEQ ID NO: 4358810 - DNA, 25 bp, Homo sapien
tagatgcttattaattctaggtttg

SEQ ID NO: 4358811 - DNA, 25 bp, Homo sapien
tttgttctacatggtgagctttgta

SEQ ID NO: 4358812 - DNA, 25 bp, Homo sapien
gtttgcataggagctctttgaaaaa

SEQ ID NO: 4358813 - DNA, 25 bp, Homo sapien
gatgcacacagcatagcaggcaaga

SEQ ID NO: 4358814 - DNA, 25 bp, Homo sapien
catctctgtccagccccgcgatgca

SEQ ID NO: 4358815 - DNA, 25 bp, Homo sapien
ggactgtgattcctccgccattgct

SEQ ID NO: 4358816 - DNA, 25 bp, Homo sapien
caagagcaagatcaaggtccctgcc

SEQ ID NO: 4358817 - DNA, 25 bp, Homo sapien
catcctggacagccatagtccttac

SEQ ID NO: 4358818 - DNA, 25 bp, Homo sapien
ctttccatcctggacagccatagtc

SEQ ID NO: 4358819 - DNA, 25 bp, Homo sapien
tttccatcctggacagccatagtcc

SEQ ID NO: 4358820 - DNA, 25 bp, Homo sapien
tccatcctggacagccatagtcctt

SEQ ID NO: 4358821 - DNA, 25 bp, Homo sapien
gatcctccccaggagatggtcccag

SEQ ID NO: 4358822 - DNA, 25 bp, Homo sapien
ggagatggtcccaggtaaggctggt

SEQ ID NO: 4358823 - DNA, 25 bp, Homo sapien
atcctccccaggagatggtcccagg

SEQ ID NO: 4358824 - DNA, 25 bp, Homo sapien
caggagatggtcccaggtaaggctg

SEQ ID NO: 4358825 - DNA, 25 bp, Homo sapien
cacagtatcatggagggcaagtgtt

SEQ ID NO: 4358826 - DNA, 25 bp, Homo sapien
catggagggcaagtgttatcacaag

SEQ ID NO: 4358827 - DNA, 25 bp, Homo sapien
caataacatcacagtatcatggagg

SEQ ID NO: 4358828 - DNA, 25 bp, Homo sapien
taacatcacagtatcatggagggca

SEQ ID NO: 4358829 - DNA, 25 bp, Homo sapien
gctgctgacagtagggtgacaccga

SEQ ID NO: 4358830 - DNA, 25 bp, Homo sapien
tagggtgacaccgagcaggcctgac

SEQ ID NO: 4358831 - DNA, 25 bp, Homo sapien
tgacaccgagcaggcctgacctgca

SEQ ID NO: 4358832 - DNA, 25 bp, Homo sapien
acagtagggtgacaccgagcaggcc

SEQ ID NO: 4358833 - DNA, 25 bp, Homo sapien
gaaaatcatgtacattatctgaatt

SEQ ID NO: 4358834 - DNA, 25 bp, Homo sapien
cccagaaaatcatgtacattatctg

SEQ ID NO: 4358835 - DNA, 25 bp, Homo sapien
cagaaaatcatgtacattatctgaa

SEQ ID NO: 4358836 - DNA, 25 bp, Homo sapien
ccccagaaaatcatgtacattatct

SEQ ID NO: 4358837 - DNA, 25 bp, Homo sapien
gtgtgctggcagacgtgacccacag

SEQ ID NO: 4358838 - DNA, 25 bp, Homo sapien
gatgctggctcatgtgtgggctcaa

SEQ ID NO: 4358839 - DNA, 25 bp, Homo sapien
tgctccttggatgctggctcatgtg

SEQ ID NO: 4358840 - DNA, 25 bp, Homo sapien
tggttctcagaacgttggtaccttg

SEQ ID NO: 4358841 - DNA, 25 bp, Homo sapien
cttgattcctgctaagtgtgcctct

SEQ ID NO: 4358842 - DNA, 25 bp, Homo sapien
ccttgattcctgctaagtgtgcctc

SEQ ID NO: 4358843 - DNA, 25 bp, Homo sapien
gcgaatttggccactggccttgatt

SEQ ID NO: 4358844 - DNA, 25 bp, Homo sapien
tcagctgcgaatttggccactggcc

SEQ ID NO: 4358845 - DNA, 25 bp, Homo sapien
gaagaagaaggtttctatccagcca

SEQ ID NO: 4358846 - DNA, 25 bp, Homo sapien
gcaacttccaatagtgtcgatggtg

SEQ ID NO: 4358847 - DNA, 25 bp, Homo sapien
ggtgtatccggcagagcaacttcca

SEQ ID NO: 4358848 - DNA, 25 bp, Homo sapien
gagcaggcccataaatcagccaggg

SEQ ID NO: 4358849 - DNA, 25 bp, Homo sapien
tccctttccatagtgactcttggcc

SEQ ID NO: 4358850 - DNA, 25 bp, Homo sapien
ccctttccatagtgactcttggcca

SEQ ID NO: 4358851 - DNA, 25 bp, Homo sapien
tctccctttccatagtgactcttgg

SEQ ID NO: 4358852 - DNA, 25 bp, Homo sapien
ctctccctttccatagtgactcttg

SEQ ID NO: 4358853 - DNA, 25 bp, Homo sapien
tctctcatagattgaatgcgtcatc

SEQ ID NO: 4358854 - DNA, 25 bp, Homo sapien
agattgaatgcgtcatctggatgac

SEQ ID NO: 4358855 - DNA, 25 bp, Homo sapien
tgacatctctcatagattgaatgcg

SEQ ID NO: 4358856 - DNA, 25 bp, Homo sapien
accaccttgttgacatctctcatag

SEQ ID NO: 4358857 - DNA, 25 bp, Homo sapien
cagcccctgggccaacaacatcaga

SEQ ID NO: 4358858 - DNA, 25 bp, Homo sapien
agcccctgggccaacaacatcagag

SEQ ID NO: 4358859 - DNA, 25 bp, Homo sapien
cctccagacgtctttccaatggaca

SEQ ID NO: 4358860 - DNA, 25 bp, Homo sapien
gacaccccctccagacgtctttcca

SEQ ID NO: 4358861 - DNA, 25 bp, Homo sapien
tgtgattagagaccatgaccctttc

SEQ ID NO: 4358862 - DNA, 25 bp, Homo sapien
gccatggaaatgtgattagagacca

SEQ ID NO: 4358863 - DNA, 25 bp, Homo sapien
tgcatatttgaatctctgcacagac

SEQ ID NO: 4358864 - DNA, 25 bp, Homo sapien
tagagaccatgaccctttcttgggt

SEQ ID NO: 4358865 - DNA, 25 bp, Homo sapien
gattcacaaagctgctgggaaacat

SEQ ID NO: 4358866 - DNA, 25 bp, Homo sapien
ttatgattcacaaagctgctgggaa

SEQ ID NO: 4358867 - DNA, 25 bp, Homo sapien
tgattcacaaagctgctgggaaaca

SEQ ID NO: 4358868 - DNA, 25 bp, Homo sapien
tatgattcacaaagctgctgggaaa

SEQ ID NO: 4358869 - DNA, 25 bp, Homo sapien
tagagagaaatcgaggaacaacccc

SEQ ID NO: 4358870 - DNA, 25 bp, Homo sapien
gagagaaatcgaggaacaaccccac

SEQ ID NO: 4358871 - DNA, 25 bp, Homo sapien
ctagagagaaatcgaggaacaaccc

SEQ ID NO: 4358872 - DNA, 25 bp, Homo sapien
gagaaatcgaggaacaaccccacac

SEQ ID NO: 4358873 - DNA, 25 bp, Homo sapien
acgctccagggcgtctcctcactgg

SEQ ID NO: 4358874 - DNA, 25 bp, Homo sapien
ggccagaaaccctctccacgcacag

SEQ ID NO: 4358875 - DNA, 25 bp, Homo sapien
cagggcgtctcctcactggcattct

SEQ ID NO: 4358876 - DNA, 25 bp, Homo sapien
ctgagcttgcatagagggcctccca

SEQ ID NO: 4358877 - DNA, 25 bp, Homo sapien
ggccaaggacaagctgacacaggag

SEQ ID NO: 4358878 - DNA, 25 bp, Homo sapien
ctactagctggccaaggacaagctg

SEQ ID NO: 4358879 - DNA, 25 bp, Homo sapien
aggggaacaagccacagtgcccttg

SEQ ID NO: 4358880 - DNA, 25 bp, Homo sapien
ggaacaagccacagtgcccttgcca

SEQ ID NO: 4358881 - DNA, 25 bp, Homo sapien
cctaggaggttgacatcagagtagt

SEQ ID NO: 4358882 - DNA, 25 bp, Homo sapien
cagagtagtggagtgctgaagatgc

SEQ ID NO: 4358883 - DNA, 25 bp, Homo sapien
tggtggcatccaccccatgaattgg

SEQ ID NO: 4358884 - DNA, 25 bp, Homo sapien
tcagccagggtcttcgaccactatg

SEQ ID NO: 4358885 - DNA, 25 bp, Homo sapien
ggtgttcgctccaggaagaccgcct

SEQ ID NO: 4358886 - DNA, 25 bp, Homo sapien
cttggccaggtgttcgctccaggaa

SEQ ID NO: 4358887 - DNA, 25 bp, Homo sapien
aaggagaggctttataagagccagc

SEQ ID NO: 4358888 - DNA, 25 bp, Homo sapien
taagagccagctatttcctcaaacc

SEQ ID NO: 4358889 - DNA, 25 bp, Homo sapien
ccagaagtgggtggtgaacctcctg

SEQ ID NO: 4358890 - DNA, 25 bp, Homo sapien
caatggccgtggaattgagaagcag

SEQ ID NO: 4358891 - DNA, 25 bp, Homo sapien
gaacctcctggaatcagtagtaccg

SEQ ID NO: 4358892 - DNA, 25 bp, Homo sapien
tggcaattgtcaactgtcgtggtgc

SEQ ID NO: 4358893 - DNA, 25 bp, Homo sapien
tgagatggcgccacaagaaaggagg

SEQ ID NO: 4358894 - DNA, 25 bp, Homo sapien
ttggctgtgagatggcgccacaaga

SEQ ID NO: 4358895 - DNA, 25 bp, Homo sapien
ctgtgagatggcgccacaagaaagg

SEQ ID NO: 4358896 - DNA, 25 bp, Homo sapien
tggctgtgagatggcgccacaagaa

SEQ ID NO: 4358897 - DNA, 25 bp, Homo sapien
cctcagagggtcatcatggaaatct

SEQ ID NO: 4358898 - DNA, 25 bp, Homo sapien
tgtagtcgtgcagtaacctagccac

SEQ ID NO: 4358899 - DNA, 25 bp, Homo sapien
cctgcagtctagaccccattaggag

SEQ ID NO: 4358900 - DNA, 25 bp, Homo sapien
tagccacggatatctcctcagaggg

SEQ ID NO: 4358901 - DNA, 25 bp, Homo sapien
tgttgtgtggagtgaagaacactga

SEQ ID NO: 4358902 - DNA, 25 bp, Homo sapien
tcctgcacatgatgtctgggtcagc

SEQ ID NO: 4358903 - DNA, 25 bp, Homo sapien
atgatgtctgggtcagctgtgttgt

SEQ ID NO: 4358904 - DNA, 25 bp, Homo sapien
gcacatgatgtctgggtcagctgtg

SEQ ID NO: 4358905 - DNA, 25 bp, Homo sapien
tgaagcaaaacctagtttccttcac

SEQ ID NO: 4358906 - DNA, 25 bp, Homo sapien
ggccaaccacccagatgaagcaaaa

SEQ ID NO: 4358907 - DNA, 25 bp, Homo sapien
ctaggtatccatggctctcactcag

SEQ ID NO: 4358908 - DNA, 25 bp, Homo sapien
gctggaaagcaactaggtatccatg

SEQ ID NO: 4358909 - DNA, 25 bp, Homo sapien
ccttggaggaactcctcttttctag

SEQ ID NO: 4358910 - DNA, 25 bp, Homo sapien
ctggcaatccaagtttctgattcca

SEQ ID NO: 4358911 - DNA, 25 bp, Homo sapien
tccagggccttggaggaactcctct

SEQ ID NO: 4358912 - DNA, 25 bp, Homo sapien
tgattccagggccttggaggaactc

SEQ ID NO: 4358913 - DNA, 25 bp, Homo sapien
taggatccaggaaaatggaacagct

SEQ ID NO: 4358914 - DNA, 25 bp, Homo sapien
cgccatgttagctccccactaggat

SEQ ID NO: 4358915 - DNA, 25 bp, Homo sapien
cacatgtccttggattggctgtggc

SEQ ID NO: 4358916 - DNA, 25 bp, Homo sapien
gtggctctgcgccatgttagctccc

SEQ ID NO: 4358917 - DNA, 25 bp, Homo sapien
gcaagaagttcacggcttggtggtt

SEQ ID NO: 4358918 - DNA, 25 bp, Homo sapien
gataggcttttcagcatgctgagcc

SEQ ID NO: 4358919 - DNA, 25 bp, Homo sapien
tgtgcaagaagttcacggcttggtg

SEQ ID NO: 4358920 - DNA, 25 bp, Homo sapien
attcgataggcttttcagcatgctg

SEQ ID NO: 4358921 - DNA, 25 bp, Homo sapien
ggtttgggacgcagttcagtagcct

SEQ ID NO: 4358922 - DNA, 25 bp, Homo sapien
ttacacactgctacaagaacgccac

SEQ ID NO: 4358923 - DNA, 25 bp, Homo sapien
gaagctcggcctctgctattggaca

SEQ ID NO: 4358924 - DNA, 25 bp, Homo sapien
ttttctttgggaccttcacgcagga

SEQ ID NO: 4358925 - DNA, 25 bp, Homo sapien
cagcagccccacatgggtctggagg

SEQ ID NO: 4358926 - DNA, 25 bp, Homo sapien
tctactttgcccagaacactcagta

SEQ ID NO: 4358927 - DNA, 25 bp, Homo sapien
ccagcagccccacatgggtctggag

SEQ ID NO: 4358928 - DNA, 25 bp, Homo sapien
ctggagggtaggcaagctctacttt

SEQ ID NO: 4358929 - DNA, 25 bp, Homo sapien
ggagcttccactaacccactatgga

SEQ ID NO: 4358930 - DNA, 25 bp, Homo sapien
caaggtttgccttttcaactgcatg

SEQ ID NO: 4358931 - DNA, 25 bp, Homo sapien
tgactctgaaaagcagggagcttcc

SEQ ID NO: 4358932 - DNA, 25 bp, Homo sapien
gactcaactattaccagctgtggct

SEQ ID NO: 4358933 - DNA, 25 bp, Homo sapien
cactcggtataacactcaggcattt

SEQ ID NO: 4358934 - DNA, 25 bp, Homo sapien
actgtcagaggctggtccaaaaagc

SEQ ID NO: 4358935 - DNA, 25 bp, Homo sapien
tcttttcttttgtccactcggtata

SEQ ID NO: 4358936 - DNA, 25 bp, Homo sapien
tcagagtcagcttgtaagccttgag

SEQ ID NO: 4358937 - DNA, 25 bp, Homo sapien
tgcatactttctagcttgccaataa

SEQ ID NO: 4358938 - DNA, 25 bp, Homo sapien
tcctgcatactttctagcttgccaa

SEQ ID NO: 4358939 - DNA, 25 bp, Homo sapien
tctctctcctgcatactttctagct

SEQ ID NO: 4358940 - DNA, 25 bp, Homo sapien
actttctagcttgccaataattaag

SEQ ID NO: 4358941 - DNA, 25 bp, Homo sapien
gacaggctgtgtttacagatggcca

SEQ ID NO: 4358942 - DNA, 25 bp, Homo sapien
ccggaatccgtggtgagaagagttt

SEQ ID NO: 4358943 - DNA, 25 bp, Homo sapien
tctttcgaacacacactcctgagga

SEQ ID NO: 4358944 - DNA, 25 bp, Homo sapien
gatggccagcctcgatattctgagt

SEQ ID NO: 4358945 - DNA, 25 bp, Homo sapien
tttgatcccgttgtggctaaaaggc

SEQ ID NO: 4358946 - DNA, 25 bp, Homo sapien
cactaggtacccaggatttgatccc

SEQ ID NO: 4358947 - DNA, 25 bp, Homo sapien
taaaaggctcggtgcccagtaacag

SEQ ID NO: 4358948 - DNA, 25 bp, Homo sapien
gggatggtaatttagcactaggtac

SEQ ID NO: 4358949 - DNA, 25 bp, Homo sapien
cacttcccctccacgctctcatttg

SEQ ID NO: 4358950 - DNA, 25 bp, Homo sapien
ccctccacgctctcatttgtgacca

SEQ ID NO: 4358951 - DNA, 25 bp, Homo sapien
atgaccaccattcatcgatccactt

SEQ ID NO: 4358952 - DNA, 25 bp, Homo sapien
ctgcagaacatgaccaccattcatc

SEQ ID NO: 4358953 - DNA, 25 bp, Homo sapien
taggagagccattagtcacctgtga

SEQ ID NO: 4358954 - DNA, 25 bp, Homo sapien
tcttgaatatgtgagggaccgggat

SEQ ID NO: 4358955 - DNA, 25 bp, Homo sapien
ggatcaaagagtcaagagctgggct

SEQ ID NO: 4358956 - DNA, 25 bp, Homo sapien
gagctgggctataacccataggaga

SEQ ID NO: 4358957 - DNA, 25 bp, Homo sapien
acatcgggggttgagcctcttcctg

SEQ ID NO: 4358958 - DNA, 25 bp, Homo sapien
gatgaggaacatcgggggttgagcc

SEQ ID NO: 4358959 - DNA, 25 bp, Homo sapien
atcgggggttgagcctcttcctgga

SEQ ID NO: 4358960 - DNA, 25 bp, Homo sapien
ggaacatcgggggttgagcctcttc

SEQ ID NO: 4358961 - DNA, 25 bp, Homo sapien
tcacctaagggaaagagctatgtct

SEQ ID NO: 4358962 - DNA, 25 bp, Homo sapien
ccagggtcgctagctcttaatgcaa

SEQ ID NO: 4358963 - DNA, 25 bp, Homo sapien
agacatggccttatccccaggaacg

SEQ ID NO: 4358964 - DNA, 25 bp, Homo sapien
gaagagggctcatgccgagaaccat

SEQ ID NO: 4358965 - DNA, 25 bp, Homo sapien
tgtggcatgtcctgcaagcaaaaac

SEQ ID NO: 4358966 - DNA, 25 bp, Homo sapien
tctgtggcatgtcctgcaagcaaaa

SEQ ID NO: 4358967 - DNA, 25 bp, Homo sapien
aaaatatccctagatgaattctgtg

SEQ ID NO: 4358968 - DNA, 25 bp, Homo sapien
atatccctagatgaattctgtggca

SEQ ID NO: 4358969 - DNA, 25 bp, Homo sapien
tgtctttggactaggcaaggcctca

SEQ ID NO: 4358970 - DNA, 25 bp, Homo sapien
ccgtgggagtacatctgcaggtgtc

SEQ ID NO: 4358971 - DNA, 25 bp, Homo sapien
ggtgtccagagattcatgtgtcttt

SEQ ID NO: 4358972 - DNA, 25 bp, Homo sapien
tgcctgccgtgggagtacatctgca

SEQ ID NO: 4358973 - DNA, 25 bp, Homo sapien
tgtcagacattcttggagcttggac

SEQ ID NO: 4358974 - DNA, 25 bp, Homo sapien
tcagacattcttggagcttggacat

SEQ ID NO: 4358975 - DNA, 25 bp, Homo sapien
tggtgtcagacattcttggagcttg

SEQ ID NO: 4358976 - DNA, 25 bp, Homo sapien
ggtgtcagacattcttggagcttgg

SEQ ID NO: 4358977 - DNA, 25 bp, Homo sapien
gcagcagggttcctatcaagtcata

SEQ ID NO: 4358978 - DNA, 25 bp, Homo sapien
tacccaagggcgagtgagcaatgcc

SEQ ID NO: 4358979 - DNA, 25 bp, Homo sapien
tacttaatatggaccatgggcaggc

SEQ ID NO: 4358980 - DNA, 25 bp, Homo sapien
caagaactatgctgatggctaggcc

SEQ ID NO: 4358981 - DNA, 25 bp, Homo sapien
cagagctggtccctagttaagtggc

SEQ ID NO: 4358982 - DNA, 25 bp, Homo sapien
caccaattggtttggcacaggcaca

SEQ ID NO: 4358983 - DNA, 25 bp, Homo sapien
gctaatgaggtcaaacgtaggcttc

SEQ ID NO: 4358984 - DNA, 25 bp, Homo sapien
catgtattagaaacgcacgagctcc

SEQ ID NO: 4358985 - DNA, 25 bp, Homo sapien
tgctccaccgtcgaggtcatgggca

SEQ ID NO: 4358986 - DNA, 25 bp, Homo sapien
accgtcgaggtcatgggcagcatcc

SEQ ID NO: 4358987 - DNA, 25 bp, Homo sapien
ctgcttgctccaccgtcgaggtcat

SEQ ID NO: 4358988 - DNA, 25 bp, Homo sapien
tccaccgtcgaggtcatgggcagca

SEQ ID NO: 4358989 - DNA, 25 bp, Homo sapien
tgagtataccccaaattgaatgagc

SEQ ID NO: 4358990 - DNA, 25 bp, Homo sapien
cttgtcgtgagagtgaaggcatgct

SEQ ID NO: 4358991 - DNA, 25 bp, Homo sapien
cacagtgggtttgcatgcacctaga

SEQ ID NO: 4358992 - DNA, 25 bp, Homo sapien
catgcaatattcagccagccgcaga

SEQ ID NO: 4358993 - DNA, 25 bp, Homo sapien
ggcctaactgagctgtcatatccaa

SEQ ID NO: 4358994 - DNA, 25 bp, Homo sapien
cagctgtggcttgtaaatgcctaca

SEQ ID NO: 4358995 - DNA, 25 bp, Homo sapien
tgtcttctcagtcaacaaggttgcc

SEQ ID NO: 4358996 - DNA, 25 bp, Homo sapien
ctaatttcagaagagcgcactgtct

SEQ ID NO: 4358997 - DNA, 25 bp, Homo sapien
caggtaacgtgcagtgaggatgctc

SEQ ID NO: 4358998 - DNA, 25 bp, Homo sapien
tgtattctcctgttggctgcctgag

SEQ ID NO: 4358999 - DNA, 25 bp, Homo sapien
tgatttagcatagccaggccttcac

SEQ ID NO: 4359000 - DNA, 25 bp, Homo sapien
gctgattctttgcacaggtaacgtg

SEQ ID NO: 4359001 - DNA, 25 bp, Homo sapien
caagcccaaaattcattgctgctgg

SEQ ID NO: 4359002 - DNA, 25 bp, Homo sapien
attgctgctggtgttcaggcctgag

SEQ ID NO: 4359003 - DNA, 25 bp, Homo sapien
tgctggtgttcaggcctgagctcag

SEQ ID NO: 4359004 - DNA, 25 bp, Homo sapien
caaaattcattgctgctggtgttca

SEQ ID NO: 4359005 - DNA, 25 bp, Homo sapien
cagctgatcatagcccacataacca

SEQ ID NO: 4359006 - DNA, 25 bp, Homo sapien
gacagctgatcatagcccacataac

SEQ ID NO: 4359007 - DNA, 25 bp, Homo sapien
gagacagctgatcatagcccacata

SEQ ID NO: 4359008 - DNA, 25 bp, Homo sapien
atagcccacataaccactgctccag

SEQ ID NO: 4359009 - DNA, 25 bp, Homo sapien
gattgagagacaactaggtaggcta

SEQ ID NO: 4359010 - DNA, 25 bp, Homo sapien
gaccagatgggtccacagctgattg

SEQ ID NO: 4359011 - DNA, 25 bp, Homo sapien
aaagatcagcgaaaccaaaagttgg

SEQ ID NO: 4359012 - DNA, 25 bp, Homo sapien
tgacaaagggaacattaccaccaac

SEQ ID NO: 4359013 - DNA, 25 bp, Homo sapien
ggaatttgccttatctatccatcta

SEQ ID NO: 4359014 - DNA, 25 bp, Homo sapien
tgaccctgtaatcattgcctttgct

SEQ ID NO: 4359015 - DNA, 25 bp, Homo sapien
aactatcaatgacgtttttcactga

SEQ ID NO: 4359016 - DNA, 25 bp, Homo sapien
taccgcaaggctatggtaaccaaaa

SEQ ID NO: 4359017 - DNA, 25 bp, Homo sapien
gggaccactggccaactaatacagg

SEQ ID NO: 4359018 - DNA, 25 bp, Homo sapien
gacactgggaggtatatcgccaccc

SEQ ID NO: 4359019 - DNA, 25 bp, Homo sapien
cttacagtgtcaggttacacccagg

SEQ ID NO: 4359020 - DNA, 25 bp, Homo sapien
ggagctgcttcacccagagacactg

SEQ ID NO: 4359021 - DNA, 25 bp, Homo sapien
tctgtcctgttggtgaagaggcctg

SEQ ID NO: 4359022 - DNA, 25 bp, Homo sapien
taagataaagccagcatgttgagag

SEQ ID NO: 4359023 - DNA, 25 bp, Homo sapien
gagatgcccagactttttcccactt

SEQ ID NO: 4359024 - DNA, 25 bp, Homo sapien
aaaacctgttttggctgcagcacat

SEQ ID NO: 4359025 - DNA, 25 bp, Homo sapien
tctccatggatttcaactggcttag

SEQ ID NO: 4359026 - DNA, 25 bp, Homo sapien
tagctaaggttccctgaattttata

SEQ ID NO: 4359027 - DNA, 25 bp, Homo sapien
catggatttcaactggcttagctaa

SEQ ID NO: 4359028 - DNA, 25 bp, Homo sapien
tagacatgagccagaactgggtcat

SEQ ID NO: 4359029 - DNA, 25 bp, Homo sapien
gaaatcccagcgattcatagtccaa

SEQ ID NO: 4359030 - DNA, 25 bp, Homo sapien
attttgaaatcccagcgattcatag

SEQ ID NO: 4359031 - DNA, 25 bp, Homo sapien
tcccagcgattcatagtccaatcga

SEQ ID NO: 4359032 - DNA, 25 bp, Homo sapien
cagcgattcatagtccaatcgaaca

SEQ ID NO: 4359033 - DNA, 25 bp, Homo sapien
ttaactccacgggactccagaagct

SEQ ID NO: 4359034 - DNA, 25 bp, Homo sapien
ccctgagggacctggattaactcca

SEQ ID NO: 4359035 - DNA, 25 bp, Homo sapien
ggttcagagcctgtaactgggcatc

SEQ ID NO: 4359036 - DNA, 25 bp, Homo sapien
cagaagctgaagatcaggaggcatc

SEQ ID NO: 4359037 - DNA, 25 bp, Homo sapien
tgctggcaggctacacttcaccatc

SEQ ID NO: 4359038 - DNA, 25 bp, Homo sapien
gactctgtaggggactttggaccca

SEQ ID NO: 4359039 - DNA, 25 bp, Homo sapien
ggactttggacccaaagcacagctt

SEQ ID NO: 4359040 - DNA, 25 bp, Homo sapien
gggccactcaaaggcccactgacag

SEQ ID NO: 4359041 - DNA, 25 bp, Homo sapien
ggatctgtgagactagctggtgacc

SEQ ID NO: 4359042 - DNA, 25 bp, Homo sapien
caagactcaaggttcttaagcagga

SEQ ID NO: 4359043 - DNA, 25 bp, Homo sapien
gaaaaagactaagcgtggaggcagc

SEQ ID NO: 4359044 - DNA, 25 bp, Homo sapien
taagcaggaccttagaggagatagc

SEQ ID NO: 4359045 - DNA, 25 bp, Homo sapien
accacatcctttactgaagacacca

SEQ ID NO: 4359046 - DNA, 25 bp, Homo sapien
ctgcgtccccgactgctagagctcc

SEQ ID NO: 4359047 - DNA, 25 bp, Homo sapien
tgaagacaccaactgtaagcaaatg

SEQ ID NO: 4359048 - DNA, 25 bp, Homo sapien
caaatgtaaccagagagtcctgcgt

SEQ ID NO: 4359049 - DNA, 25 bp, Homo sapien
aacagatttttggcctgcatgctgg

SEQ ID NO: 4359050 - DNA, 25 bp, Homo sapien
cagatttttggcctgcatgctggcc

SEQ ID NO: 4359051 - DNA, 25 bp, Homo sapien
acagatttttggcctgcatgctggc

SEQ ID NO: 4359052 - DNA, 25 bp, Homo sapien
agatttttggcctgcatgctggcct

SEQ ID NO: 4359053 - DNA, 25 bp, Homo sapien
cagagagtcctccttggtccttgca

SEQ ID NO: 4359054 - DNA, 25 bp, Homo sapien
ttcagagagtcctccttggtccttg

SEQ ID NO: 4359055 - DNA, 25 bp, Homo sapien
taaatcacagtatttccctaatcct

SEQ ID NO: 4359056 - DNA, 25 bp, Homo sapien
cagtatttccctaatcctattgatt

SEQ ID NO: 4359057 - DNA, 25 bp, Homo sapien
gctcgtcctaaaggctgtgcttgcc

SEQ ID NO: 4359058 - DNA, 25 bp, Homo sapien
cacaagaccatcagctcgtcctaaa

SEQ ID NO: 4359059 - DNA, 25 bp, Homo sapien
attctatcaccgttctggaagacag

SEQ ID NO: 4359060 - DNA, 25 bp, Homo sapien
tattctatcaccgttctggaagaca

SEQ ID NO: 4359061 - DNA, 25 bp, Homo sapien
ttattctatcaccgttctggaagac

SEQ ID NO: 4359062 - DNA, 25 bp, Homo sapien
catcggagcagccattagaagggtg

SEQ ID NO: 4359063 - DNA, 25 bp, Homo sapien
tttactgttttcatcggagcagcca

SEQ ID NO: 4359064 - DNA, 25 bp, Homo sapien
gaagggtgcacacctgatgaatttc

SEQ ID NO: 4359065 - DNA, 25 bp, Homo sapien
taagtaggtcactcctcttggtctg

SEQ ID NO: 4359066 - DNA, 25 bp, Homo sapien
aagcacattcctccctggcactaaa

SEQ ID NO: 4359067 - DNA, 25 bp, Homo sapien
gatctgggtggtaaggcaccctcct

SEQ ID NO: 4359068 - DNA, 25 bp, Homo sapien
catgtaactgcaagacagcaagcac

SEQ ID NO: 4359069 - DNA, 25 bp, Homo sapien
ggcactaaaaaccatccgtagccag

SEQ ID NO: 4359070 - DNA, 25 bp, Homo sapien
acatttgctgtttaataagagtgag

SEQ ID NO: 4359071 - DNA, 25 bp, Homo sapien
caaatatgaaggtggaacatttgct

SEQ ID NO: 4359072 - DNA, 25 bp, Homo sapien
cccactgagaggtgaatgatgcaaa

SEQ ID NO: 4359073 - DNA, 25 bp, Homo sapien
gtctcatagcaattaaaacggtcag

SEQ ID NO: 4359074 - DNA, 25 bp, Homo sapien
agagggatttaaagtatgatccaga

SEQ ID NO: 4359075 - DNA, 25 bp, Homo sapien
aaggaatagagggatttaaagtatg

SEQ ID NO: 4359076 - DNA, 25 bp, Homo sapien
ggaatagagggatttaaagtatgat

SEQ ID NO: 4359077 - DNA, 25 bp, Homo sapien
aatagagggatttaaagtatgatcc

SEQ ID NO: 4359078 - DNA, 25 bp, Homo sapien
ctgacagctgtgttcatcacggctg

SEQ ID NO: 4359079 - DNA, 25 bp, Homo sapien
cggctgcttatatgggattctttga

SEQ ID NO: 4359080 - DNA, 25 bp, Homo sapien
gctgtgttcatcacggctgcttata

SEQ ID NO: 4359081 - DNA, 25 bp, Homo sapien
tcttctcggcccacaggcagctgac

SEQ ID NO: 4359082 - DNA, 25 bp, Homo sapien
tctgccattgggttgtggacagcat

SEQ ID NO: 4359083 - DNA, 25 bp, Homo sapien
tgatcgacattccataacttcccat

SEQ ID NO: 4359084 - DNA, 25 bp, Homo sapien
ttgtggacagcattgatgatgatcg

SEQ ID NO: 4359085 - DNA, 25 bp, Homo sapien
gatgatgatcgacattccataactt

SEQ ID NO: 4359086 - DNA, 25 bp, Homo sapien
tctgttgaaaacactccacgggctt

SEQ ID NO: 4359087 - DNA, 25 bp, Homo sapien
tcatcatccccagggttaaagccaa

SEQ ID NO: 4359088 - DNA, 25 bp, Homo sapien
caggcacactggtctgctcaacact

SEQ ID NO: 4359089 - DNA, 25 bp, Homo sapien
tctggtctagccacttcttccgctg

SEQ ID NO: 4359090 - DNA, 25 bp, Homo sapien
tagccttattgtgtgcctgaaccat

SEQ ID NO: 4359091 - DNA, 25 bp, Homo sapien
cagtcatatagggactcctcgcaga

SEQ ID NO: 4359092 - DNA, 25 bp, Homo sapien
tcgcagatcgcctcattctaatgtc

SEQ ID NO: 4359093 - DNA, 25 bp, Homo sapien
ttccccaggtcatagccttattgtg

SEQ ID NO: 4359094 - DNA, 25 bp, Homo sapien
gccaccaggtggtcacaaggctgta

SEQ ID NO: 4359095 - DNA, 25 bp, Homo sapien
caactctggagtaccatggtctgaa

SEQ ID NO: 4359096 - DNA, 25 bp, Homo sapien
ggctgtattctgcacaactctggag

SEQ ID NO: 4359097 - DNA, 25 bp, Homo sapien
tctgaatcaacatagcagccctgct

SEQ ID NO: 4359098 - DNA, 25 bp, Homo sapien
tcggccaccagagtcagtcgtgttg

SEQ ID NO: 4359099 - DNA, 25 bp, Homo sapien
cggccaccagagtcagtcgtgttgt

SEQ ID NO: 4359100 - DNA, 25 bp, Homo sapien
gcatgaatagtgttctcggccacca

SEQ ID NO: 4359101 - DNA, 25 bp, Homo sapien
ctcggccaccagagtcagtcgtgtt

SEQ ID NO: 4359102 - DNA, 25 bp, Homo sapien
cattggaggttttcactgacactgt

SEQ ID NO: 4359103 - DNA, 25 bp, Homo sapien
aactgcattggaggttttcactgac

SEQ ID NO: 4359104 - DNA, 25 bp, Homo sapien
ctgcattggaggttttcactgacac

SEQ ID NO: 4359105 - DNA, 25 bp, Homo sapien
ggaggttttcactgacactgtaacc

SEQ ID NO: 4359106 - DNA, 25 bp, Homo sapien
tctgcaggcccgataacttgagcaa

SEQ ID NO: 4359107 - DNA, 25 bp, Homo sapien
ctctgcaggcccgataacttgagca

SEQ ID NO: 4359108 - DNA, 25 bp, Homo sapien
tgcaggcccgataacttgagcaaat

SEQ ID NO: 4359109 - DNA, 25 bp, Homo sapien
caggcccgataacttgagcaaatga

SEQ ID NO: 4359110 - DNA, 25 bp, Homo sapien
gtgtctttcctataaccttctagca

SEQ ID NO: 4359111 - DNA, 25 bp, Homo sapien
tatgtgttgatcttaacaaaccttt

SEQ ID NO: 4359112 - DNA, 25 bp, Homo sapien
tccacaccaaatccttatgtgttga

SEQ ID NO: 4359113 - DNA, 25 bp, Homo sapien
caaatccttatgtgttgatcttaac

SEQ ID NO: 4359114 - DNA, 25 bp, Homo sapien
gagagtccttggtaatttgattgga

SEQ ID NO: 4359115 - DNA, 25 bp, Homo sapien
gcctcagtggtccagtcactagacc

SEQ ID NO: 4359116 - DNA, 25 bp, Homo sapien
gaccgagagacagcagctctatttt

SEQ ID NO: 4359117 - DNA, 25 bp, Homo sapien
gggtctgacagagagtccttggtaa

SEQ ID NO: 4359118 - DNA, 25 bp, Homo sapien
gcaggcagggcatcctcgaccagca

SEQ ID NO: 4359119 - DNA, 25 bp, Homo sapien
caattgcattctcgggggatctgag

SEQ ID NO: 4359120 - DNA, 25 bp, Homo sapien
gcagggcatcctcgaccagcagagc

SEQ ID NO: 4359121 - DNA, 25 bp, Homo sapien
aaagagtctgcacttcattatccaa

SEQ ID NO: 4359122 - DNA, 25 bp, Homo sapien
actggcatggaggaacacaagtggc

SEQ ID NO: 4359123 - DNA, 25 bp, Homo sapien
tggctccactctgactactgaccat

SEQ ID NO: 4359124 - DNA, 25 bp, Homo sapien
gactccaactggcatggaggaacac

SEQ ID NO: 4359125 - DNA, 25 bp, Homo sapien
cacaagtggctccactctgactact

SEQ ID NO: 4359126 - DNA, 25 bp, Homo sapien
agtcaagagaccttgagccctcacc

SEQ ID NO: 4359127 - DNA, 25 bp, Homo sapien
tgaggccagtcaagagaccttgagc

SEQ ID NO: 4359128 - DNA, 25 bp, Homo sapien
cccctgaggccagtcaagagacctt

SEQ ID NO: 4359129 - DNA, 25 bp, Homo sapien
ggccagtcaagagaccttgagccct

SEQ ID NO: 4359130 - DNA, 25 bp, Homo sapien
cttggctttctctggaatcccctct

SEQ ID NO: 4359131 - DNA, 25 bp, Homo sapien
ccttgaatagccttccttggctttc

SEQ ID NO: 4359132 - DNA, 25 bp, Homo sapien
gctttctctggaatcccctctcttc

SEQ ID NO: 4359133 - DNA, 25 bp, Homo sapien
agtccttgaatagccttccttggct

SEQ ID NO: 4359134 - DNA, 25 bp, Homo sapien
caagggtatcgaatattaagtgtgg

SEQ ID NO: 4359135 - DNA, 25 bp, Homo sapien
tccaagggtatcgaatattaagtgt

SEQ ID NO: 4359136 - DNA, 25 bp, Homo sapien
tctgggctgtagtttccaagggtat

SEQ ID NO: 4359137 - DNA, 25 bp, Homo sapien
gctgtagtttccaagggtatcgaat

SEQ ID NO: 4359138 - DNA, 25 bp, Homo sapien
ctctacaccaggacataagtctttc

SEQ ID NO: 4359139 - DNA, 25 bp, Homo sapien
tcaaacctctccaagtaacctctct

SEQ ID NO: 4359140 - DNA, 25 bp, Homo sapien
tctccaagtaacctctctctcccac

SEQ ID NO: 4359141 - DNA, 25 bp, Homo sapien
tctctacaccaggacataagtcttt

SEQ ID NO: 4359142 - DNA, 25 bp, Homo sapien
tgctttcaagatcgggggactggac

SEQ ID NO: 4359143 - DNA, 25 bp, Homo sapien
ctgagcaccatgagatggcccctgg

SEQ ID NO: 4359144 - DNA, 25 bp, Homo sapien
aaacagccttgcaggtagtctgctt

SEQ ID NO: 4359145 - DNA, 25 bp, Homo sapien
ggatcctgaccacacgtggagaaaa

SEQ ID NO: 4359146 - DNA, 25 bp, Homo sapien
aattattggttttgtgtcgccacct

SEQ ID NO: 4359147 - DNA, 25 bp, Homo sapien
gttttgtgtcgccacctgctggcaa

SEQ ID NO: 4359148 - DNA, 25 bp, Homo sapien
gaaagcgccgagattggtatcctga

SEQ ID NO: 4359149 - DNA, 25 bp, Homo sapien
gacacagtggcaagtcccattccgt

SEQ ID NO: 4359150 - DNA, 25 bp, Homo sapien
cctgtgaagcctgctgatacctgac

SEQ ID NO: 4359151 - DNA, 25 bp, Homo sapien
tggctgccgtatgggcaaaggtttt

SEQ ID NO: 4359152 - DNA, 25 bp, Homo sapien
gctgatacctgactagttgataatc

SEQ ID NO: 4359153 - DNA, 25 bp, Homo sapien
ttcccaaacctcctgtgaagcctgc

SEQ ID NO: 4359154 - DNA, 25 bp, Homo sapien
cttgttaagagaccccgatgcattc

SEQ ID NO: 4359155 - DNA, 25 bp, Homo sapien
tcaaataggctatctccgagctcac

SEQ ID NO: 4359156 - DNA, 25 bp, Homo sapien
tctaattgctccagctaggacgtcc

SEQ ID NO: 4359157 - DNA, 25 bp, Homo sapien
caatctttgcccagtccagtgctag

SEQ ID NO: 4359158 - DNA, 25 bp, Homo sapien
gcttgaccactatgccgtcaagatt

SEQ ID NO: 4359159 - DNA, 25 bp, Homo sapien
tatgccgtcaagattcccctgacca

SEQ ID NO: 4359160 - DNA, 25 bp, Homo sapien
ccactatgccgtcaagattcccctg

SEQ ID NO: 4359161 - DNA, 25 bp, Homo sapien
cttgaccactatgccgtcaagattc

SEQ ID NO: 4359162 - DNA, 25 bp, Homo sapien
caatcttaaggccaactctgctcag

SEQ ID NO: 4359163 - DNA, 25 bp, Homo sapien
ctgcaatcttaaggccaactctgct

SEQ ID NO: 4359164 - DNA, 25 bp, Homo sapien
aatcttaaggccaactctgctcagc

SEQ ID NO: 4359165 - DNA, 25 bp, Homo sapien
ctgcctgcaatcttaaggccaactc

SEQ ID NO: 4359166 - DNA, 25 bp, Homo sapien
ttccctaaagccaatggcccatctg

SEQ ID NO: 4359167 - DNA, 25 bp, Homo sapien
tccctaaagccaatggcccatctga

SEQ ID NO: 4359168 - DNA, 25 bp, Homo sapien
cctaaagccaatggcccatctgatt

SEQ ID NO: 4359169 - DNA, 25 bp, Homo sapien
taaagccaatggcccatctgattct

SEQ ID NO: 4359170 - DNA, 25 bp, Homo sapien
tttaacctggaactgcacaaatacc

SEQ ID NO: 4359171 - DNA, 25 bp, Homo sapien
cctccgtatttaacctggaactgca

SEQ ID NO: 4359172 - DNA, 25 bp, Homo sapien
cttggattccagtacctccgtattt

SEQ ID NO: 4359173 - DNA, 25 bp, Homo sapien
cacatcttcatcaagacacatggag

SEQ ID NO: 4359174 - DNA, 25 bp, Homo sapien
aagatgagaatgccaaaggcagagg

SEQ ID NO: 4359175 - DNA, 25 bp, Homo sapien
tgaagatgagaatgccaaaggcaga

SEQ ID NO: 4359176 - DNA, 25 bp, Homo sapien
gtgaagatgagaatgccaaaggcag

SEQ ID NO: 4359177 - DNA, 25 bp, Homo sapien
gaagatgagaatgccaaaggcagag

SEQ ID NO: 4359178 - DNA, 25 bp, Homo sapien
ttctctcctctttattgattgtctc

SEQ ID NO: 4359179 - DNA, 25 bp, Homo sapien
taaaagtgatgaccacctctgtttg

SEQ ID NO: 4359180 - DNA, 25 bp, Homo sapien
tgtttggtgtccagagctgacattc

SEQ ID NO: 4359181 - DNA, 25 bp, Homo sapien
ggcaatgtgtgttgtggaccaagta

SEQ ID NO: 4359182 - DNA, 25 bp, Homo sapien
gctttccttaagagatcaggatgga

SEQ ID NO: 4359183 - DNA, 25 bp, Homo sapien
agagtcctctaggtggagtagttat

SEQ ID NO: 4359184 - DNA, 25 bp, Homo sapien
taagagatcaggatggagttgagca

SEQ ID NO: 4359185 - DNA, 25 bp, Homo sapien
agagagtcctctaggtggagtagtt

SEQ ID NO: 4359186 - DNA, 25 bp, Homo sapien
gaaacctcacgtttgtactgatctt

SEQ ID NO: 4359187 - DNA, 25 bp, Homo sapien
aacctcacgtttgtactgatcttga

SEQ ID NO: 4359188 - DNA, 25 bp, Homo sapien
aaacctcacgtttgtactgatcttg

SEQ ID NO: 4359189 - DNA, 25 bp, Homo sapien
cctcacgtttgtactgatcttgatg

SEQ ID NO: 4359190 - DNA, 25 bp, Homo sapien
gcgtcgctttcagcctctggtgaag

SEQ ID NO: 4359191 - DNA, 25 bp, Homo sapien
gtgcgtctccagtccgggaccgaag

SEQ ID NO: 4359192 - DNA, 25 bp, Homo sapien
agggcggcgcgcttaggcaggcggt

SEQ ID NO: 4359193 - DNA, 25 bp, Homo sapien
agggctgtgccggttgctttctgca

SEQ ID NO: 4359194 - DNA, 25 bp, Homo sapien
tccgcgtcccgcctcagcggccgga

SEQ ID NO: 4359195 - DNA, 25 bp, Homo sapien
agagaatgagccagagggacacgct

SEQ ID NO: 4359196 - DNA, 25 bp, Homo sapien
gagagaatgagccagagggacacgc

SEQ ID NO: 4359197 - DNA, 25 bp, Homo sapien
cagcggccggaggacatgcgggaga

SEQ ID NO: 4359198 - DNA, 25 bp, Homo sapien
gcggggcgtgcgcactggggctgag

SEQ ID NO: 4359199 - DNA, 25 bp, Homo sapien
ctggcggggcgtgcgcactggggct

SEQ ID NO: 4359200 - DNA, 25 bp, Homo sapien
ggcggggcgtgcgcactggggctga

SEQ ID NO: 4359201 - DNA, 25 bp, Homo sapien
cggggcgtgcgcactggggctgagg

SEQ ID NO: 4359202 - DNA, 25 bp, Homo sapien
tttgaggagcctggcttcggatttc

SEQ ID NO: 4359203 - DNA, 25 bp, Homo sapien
gatccagggccgctttgaggagcct

SEQ ID NO: 4359204 - DNA, 25 bp, Homo sapien
acgccgcaatctagcaggcgtcggg

SEQ ID NO: 4359205 - DNA, 25 bp, Homo sapien
tttcgcgtaggttgcatggcccaag

SEQ ID NO: 4359206 - DNA, 25 bp, Homo sapien
gctcatttccgggctcggctttgca

SEQ ID NO: 4359207 - DNA, 25 bp, Homo sapien
ctcgggccgctcatttccgggctcg

SEQ ID NO: 4359208 - DNA, 25 bp, Homo sapien
tcgggccgctcatttccgggctcgg

SEQ ID NO: 4359209 - DNA, 25 bp, Homo sapien
catttccgggctcggctttgcaagg

SEQ ID NO: 4359210 - DNA, 25 bp, Homo sapien
aatggggtgcaaagctttccagtac

SEQ ID NO: 4359211 - DNA, 25 bp, Homo sapien
ggttgctgtagggtgtttctagccc

SEQ ID NO: 4359212 - DNA, 25 bp, Homo sapien
ctacgggatcgagcggggaaggctt

SEQ ID NO: 4359213 - DNA, 25 bp, Homo sapien
ctgtagggtgtttctagcccttgga

SEQ ID NO: 4359214 - DNA, 25 bp, Homo sapien
ggtcagattcctttcgagaaaacca

SEQ ID NO: 4359215 - DNA, 25 bp, Homo sapien
cctcttgaacaccgcttgcttttct

SEQ ID NO: 4359216 - DNA, 25 bp, Homo sapien
cccctcttgaacaccgcttgctttt

SEQ ID NO: 4359217 - DNA, 25 bp, Homo sapien
tcgagaaaaccacccctcttgaaca

SEQ ID NO: 4359218 - DNA, 25 bp, Homo sapien
tgttattctcaagcacgcattgctg

SEQ ID NO: 4359219 - DNA, 25 bp, Homo sapien
ccagtcttggttacactgtgcctag

SEQ ID NO: 4359220 - DNA, 25 bp, Homo sapien
ggctgtatgatacggcttgcttcca

SEQ ID NO: 4359221 - DNA, 25 bp, Homo sapien
tgtgcctagctttacgaaaaccaaa

SEQ ID NO: 4359222 - DNA, 25 bp, Homo sapien
tttaaaaaatttagctgtgcatggt

SEQ ID NO: 4359223 - DNA, 25 bp, Homo sapien
aatttaaaaaatttagctgtgcatg

SEQ ID NO: 4359224 - DNA, 25 bp, Homo sapien
gaagcaggaggactgtttgaaccca

SEQ ID NO: 4359225 - DNA, 25 bp, Homo sapien
caagaccagtttgtgcaacatagca

SEQ ID NO: 4359226 - DNA, 25 bp, Homo sapien
catactggtgtataaaaactgccgc

SEQ ID NO: 4359227 - DNA, 25 bp, Homo sapien
ctgctttagcaggtagtgacattaa

SEQ ID NO: 4359228 - DNA, 25 bp, Homo sapien
tcctagtttcctgcgtggtaaatca

SEQ ID NO: 4359229 - DNA, 25 bp, Homo sapien
aaagacttcgcctatgccatactgg

SEQ ID NO: 4359230 - DNA, 25 bp, Homo sapien
aatgacgcttcgtgaaagcactttg

SEQ ID NO: 4359231 - DNA, 25 bp, Homo sapien
aagaatgacgcttcgtgaaagcact

SEQ ID NO: 4359232 - DNA, 25 bp, Homo sapien
ctaaaagaatgacgcttcgtgaaag

SEQ ID NO: 4359233 - DNA, 25 bp, Homo sapien
aaaagaatgacgcttcgtgaaagca

SEQ ID NO: 4359234 - DNA, 25 bp, Homo sapien
cccaacattatagaatattgcagcg

SEQ ID NO: 4359235 - DNA, 25 bp, Homo sapien
tattgcagcgtgtcattgcaagctt

SEQ ID NO: 4359236 - DNA, 25 bp, Homo sapien
tgtgatcaacagtaactggatgttt

SEQ ID NO: 4359237 - DNA, 25 bp, Homo sapien
gtcaccagtgaaacatagtgccctg

SEQ ID NO: 4359238 - DNA, 25 bp, Homo sapien
cccctttggagctgataagtacagt

SEQ ID NO: 4359239 - DNA, 25 bp, Homo sapien
tctagatgggtccaccacagtgaat

SEQ ID NO: 4359240 - DNA, 25 bp, Homo sapien
cagactgttagtaatctagggaccc

SEQ ID NO: 4359241 - DNA, 25 bp, Homo sapien
tgatttcgggataccatgcagtggt

SEQ ID NO: 4359242 - DNA, 25 bp, Homo sapien
gctgactgccttaatatgtattgaa

SEQ ID NO: 4359243 - DNA, 25 bp, Homo sapien
caattcaagatttatgttcatagag

SEQ ID NO: 4359244 - DNA, 25 bp, Homo sapien
gtttctttattttcgcactgtgtag

SEQ ID NO: 4359245 - DNA, 25 bp, Homo sapien
ttttcgcactgtgtagaccagctga

SEQ ID NO: 4359246 - DNA, 25 bp, Homo sapien
tacttggaccatatctcactccctt

SEQ ID NO: 4359247 - DNA, 25 bp, Homo sapien
aaccttgcgctagatgtctatctct

SEQ ID NO: 4359248 - DNA, 25 bp, Homo sapien
tgttctaccacttagtgcatttgcc

SEQ ID NO: 4359249 - DNA, 25 bp, Homo sapien
ctatatactagtttcccctgatttt

SEQ ID NO: 4359250 - DNA, 25 bp, Homo sapien
ttctccactcatctggtgaacaagc

SEQ ID NO: 4359251 - DNA, 25 bp, Homo sapien
tccactcatctggtgaacaagcatc

SEQ ID NO: 4359252 - DNA, 25 bp, Homo sapien
catctggtgaacaagcatcccatct

SEQ ID NO: 4359253 - DNA, 25 bp, Homo sapien
cactcatctggtgaacaagcatccc

SEQ ID NO: 4359254 - DNA, 25 bp, Homo sapien
ggcatggagccactgtctggatgtc

SEQ ID NO: 4359255 - DNA, 25 bp, Homo sapien
ggagccactgtctggatgtccacag

SEQ ID NO: 4359256 - DNA, 25 bp, Homo sapien
tgagaaccttcagaacctggagaca

SEQ ID NO: 4359257 - DNA, 25 bp, Homo sapien
ggatgtccacagtggttcttcccct

SEQ ID NO: 4359258 - DNA, 25 bp, Homo sapien
gagcaggtctgcaggaaaacaccag

SEQ ID NO: 4359259 - DNA, 25 bp, Homo sapien
gagagcaggtctgcaggaaaacacc

SEQ ID NO: 4359260 - DNA, 25 bp, Homo sapien
gagagagcaggtctgcaggaaaaca

SEQ ID NO: 4359261 - DNA, 25 bp, Homo sapien
gcaggtctgcaggaaaacaccagcc

SEQ ID NO: 4359262 - DNA, 25 bp, Homo sapien
gaacatagtgaagtcgctttgcagc

SEQ ID NO: 4359263 - DNA, 25 bp, Homo sapien
tccatggtcctttccggcagggcca

SEQ ID NO: 4359264 - DNA, 25 bp, Homo sapien
tgaagtcgctttgcagcatctgcct

SEQ ID NO: 4359265 - DNA, 25 bp, Homo sapien
ggccaaaatcttgaacatagtgaag

SEQ ID NO: 4359266 - DNA, 25 bp, Homo sapien
tccaccctcactgttggttctactg

SEQ ID NO: 4359267 - DNA, 25 bp, Homo sapien
tgtggagacagagcttgtgctacag

SEQ ID NO: 4359268 - DNA, 25 bp, Homo sapien
tcactgttggttctactgctattac

SEQ ID NO: 4359269 - DNA, 25 bp, Homo sapien
tgtgctacaggctccctttgagttg

SEQ ID NO: 4359270 - DNA, 25 bp, Homo sapien
tgctcgtgcattccatagacgttca

SEQ ID NO: 4359271 - DNA, 25 bp, Homo sapien
ccaagttgccccagtccgatgggag

SEQ ID NO: 4359272 - DNA, 25 bp, Homo sapien
gagacatcatgtccccttgtgataa

SEQ ID NO: 4359273 - DNA, 25 bp, Homo sapien
cactttctctaagccaggtccatgg

SEQ ID NO: 4359274 - DNA, 25 bp, Homo sapien
ctgtggtgggcacaagtacaagggc

SEQ ID NO: 4359275 - DNA, 25 bp, Homo sapien
tgtggtgggcacaagtacaagggct

SEQ ID NO: 4359276 - DNA, 25 bp, Homo sapien
gtgtaggctgtctccctaagggaaa

SEQ ID NO: 4359277 - DNA, 25 bp, Homo sapien
gcatcattactgctggctagatgaa

SEQ ID NO: 4359278 - DNA, 25 bp, Homo sapien
gatctctcgtggagtctgacccctt

SEQ ID NO: 4359279 - DNA, 25 bp, Homo sapien
tctataaaggaattccagtggtatc

SEQ ID NO: 4359280 - DNA, 25 bp, Homo sapien
gagaagggcatttcacgcagtcact

SEQ ID NO: 4359281 - DNA, 25 bp, Homo sapien
gggcatttcacgcagtcactaccaa

SEQ ID NO: 4359282 - DNA, 25 bp, Homo sapien
ggctccagcaagtccaaagccagag

SEQ ID NO: 4359283 - DNA, 25 bp, Homo sapien
cagagagaagggcatttcacgcagt

SEQ ID NO: 4359284 - DNA, 25 bp, Homo sapien
aggaagatggatcctgttgtatgtc

SEQ ID NO: 4359285 - DNA, 25 bp, Homo sapien
gagatgatggtattcctgtcaggaa

SEQ ID NO: 4359286 - DNA, 25 bp, Homo sapien
cagctccccgtggtgacttgcctgg

SEQ ID NO: 4359287 - DNA, 25 bp, Homo sapien
cggcgtccacctctgcgaaaatagt

SEQ ID NO: 4359288 - DNA, 25 bp, Homo sapien
tagtgacttggtctagttgtgggct

SEQ ID NO: 4359289 - DNA, 25 bp, Homo sapien
tggacatgcattcacaaggataccc

SEQ ID NO: 4359290 - DNA, 25 bp, Homo sapien
atgagaaaccgctcaggcaccccat

SEQ ID NO: 4359291 - DNA, 25 bp, Homo sapien
tcaaggaagtggtgagcataaggct

SEQ ID NO: 4359292 - DNA, 25 bp, Homo sapien
aggaatgagaaaccgctcaggcacc

SEQ ID NO: 4359293 - DNA, 25 bp, Homo sapien
aagttgcctcaaggaagtggtgagc

SEQ ID NO: 4359294 - DNA, 25 bp, Homo sapien
ctgcatcaactgcacgtctgccatg

SEQ ID NO: 4359295 - DNA, 25 bp, Homo sapien
tgcatcaactgcacgtctgccatgg

SEQ ID NO: 4359296 - DNA, 25 bp, Homo sapien
cttaggcgaatgtcaaaggtctttg

SEQ ID NO: 4359297 - DNA, 25 bp, Homo sapien
gtggggggtagccactgacaggagg

SEQ ID NO: 4359298 - DNA, 25 bp, Homo sapien
aaccttaggcgaatgtcaaaggtct

SEQ ID NO: 4359299 - DNA, 25 bp, Homo sapien
ggtggggggtagccactgacaggag

SEQ ID NO: 4359300 - DNA, 25 bp, Homo sapien
tgggggacagcaggggccaggagct

SEQ ID NO: 4359301 - DNA, 25 bp, Homo sapien
ctgggggacagcaggggccaggagc

SEQ ID NO: 4359302 - DNA, 25 bp, Homo sapien
catctggctgggtctggttgtcatt

SEQ ID NO: 4359303 - DNA, 25 bp, Homo sapien
ggccatattcctgccccaagagttg

SEQ ID NO: 4359304 - DNA, 25 bp, Homo sapien
gaacacattccttgtccctgacaca

SEQ ID NO: 4359305 - DNA, 25 bp, Homo sapien
ggtctggttgtcatttgctgaaccc

SEQ ID NO: 4359306 - DNA, 25 bp, Homo sapien
tgtgcacagtagtatggctgcagta

SEQ ID NO: 4359307 - DNA, 25 bp, Homo sapien
agctctctgagcctatcttgaaggg

SEQ ID NO: 4359308 - DNA, 25 bp, Homo sapien
ttgcatgcaggaccccgacccttat

SEQ ID NO: 4359309 - DNA, 25 bp, Homo sapien
ccccgacccttattcaggaggatga

SEQ ID NO: 4359310 - DNA, 25 bp, Homo sapien
gctgccggatgcgttctggccttgt

SEQ ID NO: 4359311 - DNA, 25 bp, Homo sapien
agttgctgccggatgcgttctggcc

SEQ ID NO: 4359312 - DNA, 25 bp, Homo sapien
tgatggcaattgtctctagtcgcct

SEQ ID NO: 4359313 - DNA, 25 bp, Homo sapien
tagtcgcctgtgaggagttgctgcc

SEQ ID NO: 4359314 - DNA, 25 bp, Homo sapien
atgcttctgtactttacaaccttaa

SEQ ID NO: 4359315 - DNA, 25 bp, Homo sapien
tactttacaaccttaaatgatagac

SEQ ID NO: 4359316 - DNA, 25 bp, Homo sapien
cttctgtactttacaaccttaaatg

SEQ ID NO: 4359317 - DNA, 25 bp, Homo sapien
ctttacaaccttaaatgatagactt

SEQ ID NO: 4359318 - DNA, 25 bp, Homo sapien
cagtaaggaccccaggtgcccacag

SEQ ID NO: 4359319 - DNA, 25 bp, Homo sapien
cgtccagcaggagtagaacagtgca

SEQ ID NO: 4359320 - DNA, 25 bp, Homo sapien
aacagtgcagtaaggaccccaggtg

SEQ ID NO: 4359321 - DNA, 25 bp, Homo sapien
gattggccaaaacggttccagccca

SEQ ID NO: 4359322 - DNA, 25 bp, Homo sapien
tcccttcagcaaagcctgtgtctct

SEQ ID NO: 4359323 - DNA, 25 bp, Homo sapien
tggagcctgctcagcccagatgctg

SEQ ID NO: 4359324 - DNA, 25 bp, Homo sapien
gatgctgcttttctcagtagtcagt

SEQ ID NO: 4359325 - DNA, 25 bp, Homo sapien
tagtcagtgtaacatggaacacagc

SEQ ID NO: 4359326 - DNA, 25 bp, Homo sapien
tggccctttagaggcttgactggca

SEQ ID NO: 4359327 - DNA, 25 bp, Homo sapien
tgccctaccagctggccctttagag

SEQ ID NO: 4359328 - DNA, 25 bp, Homo sapien
tggactctgccagaataactctggg

SEQ ID NO: 4359329 - DNA, 25 bp, Homo sapien
tgctcaggcagctaccacctttgcc

SEQ ID NO: 4359330 - DNA, 25 bp, Homo sapien
catgttcaggaagggatttccgggc

SEQ ID NO: 4359331 - DNA, 25 bp, Homo sapien
tatcatatgagagaaaaggctccac

SEQ ID NO: 4359332 - DNA, 25 bp, Homo sapien
ttcagccaccgtgcagaaaggtgcc

SEQ ID NO: 4359333 - DNA, 25 bp, Homo sapien
aaaggtgcctgcgtcctaggtgtgc

SEQ ID NO: 4359334 - DNA, 25 bp, Homo sapien
cagtcagaagccttttatatgcttc

SEQ ID NO: 4359335 - DNA, 25 bp, Homo sapien
tcagtcagaagccttttatatgctt

SEQ ID NO: 4359336 - DNA, 25 bp, Homo sapien
agtcagaagccttttatatgcttcc

SEQ ID NO: 4359337 - DNA, 25 bp, Homo sapien
ttctgcctcagtcagaagcctttta

SEQ ID NO: 4359338 - DNA, 25 bp, Homo sapien
ataggccattgctgtagtctggcca

SEQ ID NO: 4359339 - DNA, 25 bp, Homo sapien
ctttgttggcccttggacccgccat

SEQ ID NO: 4359340 - DNA, 25 bp, Homo sapien
tttttacgtagttacggacatcata

SEQ ID NO: 4359341 - DNA, 25 bp, Homo sapien
ttttacgtagttacggacatcatag

SEQ ID NO: 4359342 - DNA, 25 bp, Homo sapien
gattcctggatccaactgcgtttgg

SEQ ID NO: 4359343 - DNA, 25 bp, Homo sapien
gatccgatctctggcagcttactga

SEQ ID NO: 4359344 - DNA, 25 bp, Homo sapien
tactgacatccctaacggtggtgga

SEQ ID NO: 4359345 - DNA, 25 bp, Homo sapien
cagctgtccccagtggcgttggcag

SEQ ID NO: 4359346 - DNA, 25 bp, Homo sapien
actgtcagctcagtgctggatctgg

SEQ ID NO: 4359347 - DNA, 25 bp, Homo sapien
gctccctacaccagccgcctatttt

SEQ ID NO: 4359348 - DNA, 25 bp, Homo sapien
tttcaccttgtcccgaagaacacta

SEQ ID NO: 4359349 - DNA, 25 bp, Homo sapien
gtcctcagctccctacaccagccgc

SEQ ID NO: 4359350 - DNA, 25 bp, Homo sapien
cttgtcccgaagaacactaacttct

SEQ ID NO: 4359351 - DNA, 25 bp, Homo sapien
tatgccagtaccactcaatgtcatt

SEQ ID NO: 4359352 - DNA, 25 bp, Homo sapien
tatctggtagacaagtcctgctgtc

SEQ ID NO: 4359353 - DNA, 25 bp, Homo sapien
taagtaacctgatatctggtagaca

SEQ ID NO: 4359354 - DNA, 25 bp, Homo sapien
cattgctacagtgttaagtaacctg

SEQ ID NO: 4359355 - DNA, 25 bp, Homo sapien
acaagggctgtcccatccaaggcca

SEQ ID NO: 4359356 - DNA, 25 bp, Homo sapien
caagggctgtcccatccaaggccag

SEQ ID NO: 4359357 - DNA, 25 bp, Homo sapien
ctgcatcagaggacctgggctgcat

SEQ ID NO: 4359358 - DNA, 25 bp, Homo sapien
gggctgcattttcctttgtagagat

SEQ ID NO: 4359359 - DNA, 25 bp, Homo sapien
gaggacctgggctgcattttccttt

SEQ ID NO: 4359360 - DNA, 25 bp, Homo sapien
ttcctttgtagagatgcaggctcat

SEQ ID NO: 4359361 - DNA, 25 bp, Homo sapien
ctcctctctcccgaacactgggttt

SEQ ID NO: 4359362 - DNA, 25 bp, Homo sapien
tcctctctcccgaacactgggtttc

SEQ ID NO: 4359363 - DNA, 25 bp, Homo sapien
gcctcctctctcccgaacactgggt

SEQ ID NO: 4359364 - DNA, 25 bp, Homo sapien
cctctctcccgaacactgggtttct

SEQ ID NO: 4359365 - DNA, 25 bp, Homo sapien
gatcaaggctcctggatccgagtcc

SEQ ID NO: 4359366 - DNA, 25 bp, Homo sapien
aaggctcctggatccgagtccagtc

SEQ ID NO: 4359367 - DNA, 25 bp, Homo sapien
tccgagtccagtcctctgtttttct

SEQ ID NO: 4359368 - DNA, 25 bp, Homo sapien
cctggatccgagtccagtcctctgt

SEQ ID NO: 4359369 - DNA, 25 bp, Homo sapien
ccaagagtgatatttttcgaaggac

SEQ ID NO: 4359370 - DNA, 25 bp, Homo sapien
gagtgatatttttcgaaggacacca

SEQ ID NO: 4359371 - DNA, 25 bp, Homo sapien
gatatttttcgaaggacaccatctg

SEQ ID NO: 4359372 - DNA, 25 bp, Homo sapien
atttttcgaaggacaccatctgccc

SEQ ID NO: 4359373 - DNA, 25 bp, Homo sapien
gttttccagcactcttatcctgtcc

SEQ ID NO: 4359374 - DNA, 25 bp, Homo sapien
tcttcctggaatttaccataatgtc

SEQ ID NO: 4359375 - DNA, 25 bp, Homo sapien
ccaccatcctgttgcacctgcttcc

SEQ ID NO: 4359376 - DNA, 25 bp, Homo sapien
cgttgcttgatttctccaccatcct

SEQ ID NO: 4359377 - DNA, 25 bp, Homo sapien
tgtggatgacgcttgttggcacaga

SEQ ID NO: 4359378 - DNA, 25 bp, Homo sapien
cagtgaagcttgtcaacagaaaacg

SEQ ID NO: 4359379 - DNA, 25 bp, Homo sapien
gctgtagtcacaaccctttttgctg

SEQ ID NO: 4359380 - DNA, 25 bp, Homo sapien
cttcctagatgggagctgaggtctc

SEQ ID NO: 4359381 - DNA, 25 bp, Homo sapien
tgagtctgcatagacaatctttgaa

SEQ ID NO: 4359382 - DNA, 25 bp, Homo sapien
gttcatcagttgagtctgcatagac

SEQ ID NO: 4359383 - DNA, 25 bp, Homo sapien
gaatcaccacagctgtttgagcaaa

SEQ ID NO: 4359384 - DNA, 25 bp, Homo sapien
caatctttgaatcaccacagctgtt

SEQ ID NO: 4359385 - DNA, 25 bp, Homo sapien
gagatccatccgctcggccctgggc

SEQ ID NO: 4359386 - DNA, 25 bp, Homo sapien
tgtgccggagatccatccgctcggc

SEQ ID NO: 4359387 - DNA, 25 bp, Homo sapien
ctgtgccggagatccatccgctcgg

SEQ ID NO: 4359388 - DNA, 25 bp, Homo sapien
gccggagatccatccgctcggccct

SEQ ID NO: 4359389 - DNA, 25 bp, Homo sapien
tggaaatcctgccaccaaccaggac

SEQ ID NO: 4359390 - DNA, 25 bp, Homo sapien
aagtcagacacctccttcggagcca

SEQ ID NO: 4359391 - DNA, 25 bp, Homo sapien
acacagcagccaccgtattgatcag

SEQ ID NO: 4359392 - DNA, 25 bp, Homo sapien
ccaccgtattgatcagagagcctgt

SEQ ID NO: 4359393 - DNA, 25 bp, Homo sapien
tccgagcctggtcctctcgcaggaa

SEQ ID NO: 4359394 - DNA, 25 bp, Homo sapien
ttatatgtttcagacactctctgcc

SEQ ID NO: 4359395 - DNA, 25 bp, Homo sapien
tcttatatgtttcagacactctctg

SEQ ID NO: 4359396 - DNA, 25 bp, Homo sapien
ctggtcctctcgcaggaatgctgct

SEQ ID NO: 4359397 - DNA, 25 bp, Homo sapien
ggacctttgacgggcagggcctctg

SEQ ID NO: 4359398 - DNA, 25 bp, Homo sapien
tggacctttgacgggcagggcctct

SEQ ID NO: 4359399 - DNA, 25 bp, Homo sapien
gtggacctttgacgggcagggcctc

SEQ ID NO: 4359400 - DNA, 25 bp, Homo sapien
gatgagcagcgggtaggctagagcc

SEQ ID NO: 4359401 - DNA, 25 bp, Homo sapien
tgggaagatgctgagtactgaagaa

SEQ ID NO: 4359402 - DNA, 25 bp, Homo sapien
aagggacccagtaattgagggtgat

SEQ ID NO: 4359403 - DNA, 25 bp, Homo sapien
agccagggagcaaaagggacccagt

SEQ ID NO: 4359404 - DNA, 25 bp, Homo sapien
gcttgtgcaattgtgctccctgcag

SEQ ID NO: 4359405 - DNA, 25 bp, Homo sapien
gacacacacacgaccaagggcctct

SEQ ID NO: 4359406 - DNA, 25 bp, Homo sapien
gcaggcatgcaagtgcacccacaca

SEQ ID NO: 4359407 - DNA, 25 bp, Homo sapien
ctccaggcttgcttgtgcaattgtg

SEQ ID NO: 4359408 - DNA, 25 bp, Homo sapien
tttcttggacttcttcaacattctc

SEQ ID NO: 4359409 - DNA, 25 bp, Homo sapien
tcttcaacattctcttggcttctct

SEQ ID NO: 4359410 - DNA, 25 bp, Homo sapien
ttcttggacttcttcaacattctct

SEQ ID NO: 4359411 - DNA, 25 bp, Homo sapien
ctcttggcttctctttttaccaaag

SEQ ID NO: 4359412 - DNA, 25 bp, Homo sapien
catttgtcccactggctgatcctgt

SEQ ID NO: 4359413 - DNA, 25 bp, Homo sapien
tgttcctggccactatgatgtgatg

SEQ ID NO: 4359414 - DNA, 25 bp, Homo sapien
agcactgtcacccctggattccttt

SEQ ID NO: 4359415 - DNA, 25 bp, Homo sapien
gagtatgagcatctttgccttcaag

SEQ ID NO: 4359416 - DNA, 25 bp, Homo sapien
aatttcagctcctggtaacagaccc

SEQ ID NO: 4359417 - DNA, 25 bp, Homo sapien
ttctggtctaaacaagaggtgaacc

SEQ ID NO: 4359418 - DNA, 25 bp, Homo sapien
tcgtttcactgggataggacatgca

SEQ ID NO: 4359419 - DNA, 25 bp, Homo sapien
gatgacctgaatcactgccctgaga

SEQ ID NO: 4359420 - DNA, 25 bp, Homo sapien
tctacagtacgggacaaaggaggct

SEQ ID NO: 4359421 - DNA, 25 bp, Homo sapien
tattctctggatactgtgatgggca

SEQ ID NO: 4359422 - DNA, 25 bp, Homo sapien
tctgtcataagtcaagactgcaggc

SEQ ID NO: 4359423 - DNA, 25 bp, Homo sapien
cctttggaacttagaacatggtgca

SEQ ID NO: 4359424 - DNA, 25 bp, Homo sapien
ttacaggaactaatgtgtgaggtcc

SEQ ID NO: 4359425 - DNA, 25 bp, Homo sapien
ggagcaaatgctgcctagcggaata

SEQ ID NO: 4359426 - DNA, 25 bp, Homo sapien
tacagttaccaaagaggatggcttg

SEQ ID NO: 4359427 - DNA, 25 bp, Homo sapien
tgtgaggtcctatgctagaggctta

SEQ ID NO: 4359428 - DNA, 25 bp, Homo sapien
ccggtactgacgagccattaaggca

SEQ ID NO: 4359429 - DNA, 25 bp, Homo sapien
gcggacaggcagcaaagtccggtac

SEQ ID NO: 4359430 - DNA, 25 bp, Homo sapien
aaaaaggcccgggatagcgctgcat

SEQ ID NO: 4359431 - DNA, 25 bp, Homo sapien
atagcgctgcatcgggggaatacca

SEQ ID NO: 4359432 - DNA, 25 bp, Homo sapien
catattttcccgcttcggctgtgag

SEQ ID NO: 4359433 - DNA, 25 bp, Homo sapien
ttcacggtgcaggacgtggagccat

SEQ ID NO: 4359434 - DNA, 25 bp, Homo sapien
tcggctgtgagttcagcgattgcga

SEQ ID NO: 4359435 - DNA, 25 bp, Homo sapien
ctgtggatggtaaaggattcacggt

SEQ ID NO: 4359436 - DNA, 25 bp, Homo sapien
aggtgttggtgcccaatcgggacat

SEQ ID NO: 4359437 - DNA, 25 bp, Homo sapien
tgatgagtcgctgtcagatgcccca

SEQ ID NO: 4359438 - DNA, 25 bp, Homo sapien
gggctcagtagggtctctctgtcca

SEQ ID NO: 4359439 - DNA, 25 bp, Homo sapien
gccctccctacaccgctctgtgatg

SEQ ID NO: 4359440 - DNA, 25 bp, Homo sapien
tctctgtccagaaattcccgtgggc

SEQ ID NO: 4359441 - DNA, 25 bp, Homo sapien
ctactattttggactggactggctc

SEQ ID NO: 4359442 - DNA, 25 bp, Homo sapien
ggttgacagaatgctgccctggcta

SEQ ID NO: 4359443 - DNA, 25 bp, Homo sapien
ctaactggtgctggaaagagaggac

SEQ ID NO: 4359444 - DNA, 25 bp, Homo sapien
catttcctgtgtctgccgtagctag

SEQ ID NO: 4359445 - DNA, 25 bp, Homo sapien
gagagctccctgttttcaagtgccc

SEQ ID NO: 4359446 - DNA, 25 bp, Homo sapien
tcaaccttccaaagcttctcttcct

SEQ ID NO: 4359447 - DNA, 25 bp, Homo sapien
atgagagctccctgttttcaagtgc

SEQ ID NO: 4359448 - DNA, 25 bp, Homo sapien
agctccctgttttcaagtgcccctg

SEQ ID NO: 4359449 - DNA, 25 bp, Homo sapien
tgctgcttgctctgctgtctctcca

SEQ ID NO: 4359450 - DNA, 25 bp, Homo sapien
gcttgctctgctgtctctccaccca

SEQ ID NO: 4359451 - DNA, 25 bp, Homo sapien
ctgttgagcacctgctgcttgctct

SEQ ID NO: 4359452 - DNA, 25 bp, Homo sapien
gctgcttgctctgctgtctctccac

SEQ ID NO: 4359453 - DNA, 25 bp, Homo sapien
tccaacactgctgtgccatggggcc

SEQ ID NO: 4359454 - DNA, 25 bp, Homo sapien
gctgtgccatggggcctggccttac

SEQ ID NO: 4359455 - DNA, 25 bp, Homo sapien
ccgtccaacactgctgtgccatggg

SEQ ID NO: 4359456 - DNA, 25 bp, Homo sapien
tgctgtgccatggggcctggcctta

SEQ ID NO: 4359457 - DNA, 25 bp, Homo sapien
tgagaggggatgagtctgcagagga

SEQ ID NO: 4359458 - DNA, 25 bp, Homo sapien
catggaactcatgggctggctgtga

SEQ ID NO: 4359459 - DNA, 25 bp, Homo sapien
ctgcagaggagtttgggccagaatc

SEQ ID NO: 4359460 - DNA, 25 bp, Homo sapien
gactctgctctaaagggtctgctgc

SEQ ID NO: 4359461 - DNA, 25 bp, Homo sapien
tgtactggttgtgcttgttactcac

SEQ ID NO: 4359462 - DNA, 25 bp, Homo sapien
tggaatatgtactggttgtgcttgt

SEQ ID NO: 4359463 - DNA, 25 bp, Homo sapien
tatgtactggttgtgcttgttactc

SEQ ID NO: 4359464 - DNA, 25 bp, Homo sapien
aatatgtactggttgtgcttgttac

SEQ ID NO: 4359465 - DNA, 25 bp, Homo sapien
ccaaatgagggctcgccttgccaca

SEQ ID NO: 4359466 - DNA, 25 bp, Homo sapien
gtccatcaggtgttcatgtcccata

SEQ ID NO: 4359467 - DNA, 25 bp, Homo sapien
tgaaatgaacgctcaatcctgaaat

SEQ ID NO: 4359468 - DNA, 25 bp, Homo sapien
catacatgccctcgaggacacattg

SEQ ID NO: 4359469 - DNA, 25 bp, Homo sapien
agcatgctccttggggtcttacctc

SEQ ID NO: 4359470 - DNA, 25 bp, Homo sapien
gtccagtggcgttatgtgctggctc

SEQ ID NO: 4359471 - DNA, 25 bp, Homo sapien
tcaggcagctccaagagtaacaggt

SEQ ID NO: 4359472 - DNA, 25 bp, Homo sapien
aaaggcagtccagtggcgttatgtg

SEQ ID NO: 4359473 - DNA, 25 bp, Homo sapien
tgggtctgggagaggcataatgtga

SEQ ID NO: 4359474 - DNA, 25 bp, Homo sapien
aagtgaggctgcactggtaggtggg

SEQ ID NO: 4359475 - DNA, 25 bp, Homo sapien
tatttggttgacatccatggagcat

SEQ ID NO: 4359476 - DNA, 25 bp, Homo sapien
tgtgagggcttgaagtgaggctgca

SEQ ID NO: 4359477 - DNA, 25 bp, Homo sapien
aggctctggaatctgcgcatcttca

SEQ ID NO: 4359478 - DNA, 25 bp, Homo sapien
tcttcatcagacttcaaggttggtt

SEQ ID NO: 4359479 - DNA, 25 bp, Homo sapien
aggttggtttttcttgggcaagcat

SEQ ID NO: 4359480 - DNA, 25 bp, Homo sapien
gccccttcatcccaggtgccttcct

SEQ ID NO: 4359481 - DNA, 25 bp, Homo sapien
gagtcacctgtaggtagttgtgaag

SEQ ID NO: 4359482 - DNA, 25 bp, Homo sapien
caggaacccaatccagcttggagtt

SEQ ID NO: 4359483 - DNA, 25 bp, Homo sapien
gagttcatcctttaaagaaagcagg

SEQ ID NO: 4359484 - DNA, 25 bp, Homo sapien
tgagagactagagtacaggaaccca

SEQ ID NO: 4359485 - DNA, 25 bp, Homo sapien
cattgttaacctaagagttctgtca

SEQ ID NO: 4359486 - DNA, 25 bp, Homo sapien
tgttcagctggagacaaaaagtatg

SEQ ID NO: 4359487 - DNA, 25 bp, Homo sapien
gtcatatcgccatctcttcattgtg

SEQ ID NO: 4359488 - DNA, 25 bp, Homo sapien
tgtccagttgccacatagagttaaa

SEQ ID NO: 4359489 - DNA, 25 bp, Homo sapien
tggaagctgctattgcccggtaaga

SEQ ID NO: 4359490 - DNA, 25 bp, Homo sapien
ttagagaccactgggaaaagccgga

SEQ ID NO: 4359491 - DNA, 25 bp, Homo sapien
tatctggaaaaggagcagcgtcgtc

SEQ ID NO: 4359492 - DNA, 25 bp, Homo sapien
caagtgcgctgttctgctctggaag

SEQ ID NO: 4359493 - DNA, 25 bp, Homo sapien
cacttcaaggtaattaagacccatc

SEQ ID NO: 4359494 - DNA, 25 bp, Homo sapien
tgtcagctttccctgtaccagaaat

SEQ ID NO: 4359495 - DNA, 25 bp, Homo sapien
tgtgttgacatggagcacttcaagg

SEQ ID NO: 4359496 - DNA, 25 bp, Homo sapien
gctttccctgtaccagaaatggctg

SEQ ID NO: 4359497 - DNA, 25 bp, Homo sapien
ttatggctcattccctttgacaagc

SEQ ID NO: 4359498 - DNA, 25 bp, Homo sapien
ttcttgaagcccgactgccagcgga

SEQ ID NO: 4359499 - DNA, 25 bp, Homo sapien
caaggccactgaactgaatgtttgg

SEQ ID NO: 4359500 - DNA, 25 bp, Homo sapien
agagcatctgggcaggacttcttga

SEQ ID NO: 4359501 - DNA, 25 bp, Homo sapien
tgctgaagaggaagcggctgaatac

SEQ ID NO: 4359502 - DNA, 25 bp, Homo sapien
attaaacattcctcacaggggtcta

SEQ ID NO: 4359503 - DNA, 25 bp, Homo sapien
tactcatagtcattatatcattata

SEQ ID NO: 4359504 - DNA, 25 bp, Homo sapien
gtctacagaaagcatgtgtgatggc

SEQ ID NO: 4359505 - DNA, 25 bp, Homo sapien
tcctcacaggggtctacagaaagca

SEQ ID NO: 4359506 - DNA, 25 bp, Homo sapien
tccctaagggcctccctgagtacat

SEQ ID NO: 4359507 - DNA, 25 bp, Homo sapien
tacattcatgacagcgtaaatcaaa

SEQ ID NO: 4359508 - DNA, 25 bp, Homo sapien
gagtacatggactgcagttgttgat

SEQ ID NO: 4359509 - DNA, 25 bp, Homo sapien
taaatagttctctccggcatgtata

SEQ ID NO: 4359510 - DNA, 25 bp, Homo sapien
tggagcctcaagcaaggtacccagg

SEQ ID NO: 4359511 - DNA, 25 bp, Homo sapien
cagtgtgatcacctagaaaaagagc

SEQ ID NO: 4359512 - DNA, 25 bp, Homo sapien
cagttgaaaccagaatgacagccct

SEQ ID NO: 4359513 - DNA, 25 bp, Homo sapien
gattgacaggatctccgagaggaca

SEQ ID NO: 4359514 - DNA, 25 bp, Homo sapien
aagcagaagactgaaccgtgacttg

SEQ ID NO: 4359515 - DNA, 25 bp, Homo sapien
ggacacgtcttttactgcatgcagc

SEQ ID NO: 4359516 - DNA, 25 bp, Homo sapien
tatccatatgcaggacagaaccttg

SEQ ID NO: 4359517 - DNA, 25 bp, Homo sapien
tgaagtctcctcaaggacacgtctt

SEQ ID NO: 4359518 - DNA, 25 bp, Homo sapien
aaacagtaactaatctatcgattct

SEQ ID NO: 4359519 - DNA, 25 bp, Homo sapien
tctgtgattcagtctgccagggtgt

SEQ ID NO: 4359520 - DNA, 25 bp, Homo sapien
ctatcgattcttctgtgattcagtc

SEQ ID NO: 4359521 - DNA, 25 bp, Homo sapien
cacacatttgtacgaaaggggaggg

SEQ ID NO: 4359522 - DNA, 25 bp, Homo sapien
cggcaggcacttcggcgatgcccgg

SEQ ID NO: 4359523 - DNA, 25 bp, Homo sapien
gctgcagctcgatgcagggaaggaa

SEQ ID NO: 4359524 - DNA, 25 bp, Homo sapien
gctccgctccctttctgttgatagt

SEQ ID NO: 4359525 - DNA, 25 bp, Homo sapien
tgtaggcgtcatttctggcagctgc

SEQ ID NO: 4359526 - DNA, 25 bp, Homo sapien
agctccctaagctgacaatctttgg

SEQ ID NO: 4359527 - DNA, 25 bp, Homo sapien
agagctccctaagctgacaatcttt

SEQ ID NO: 4359528 - DNA, 25 bp, Homo sapien
cagagctccctaagctgacaatctt

SEQ ID NO: 4359529 - DNA, 25 bp, Homo sapien
gctccctaagctgacaatctttggg

SEQ ID NO: 4359530 - DNA, 25 bp, Homo sapien
aataataggcatcagagactcccat

SEQ ID NO: 4359531 - DNA, 25 bp, Homo sapien
gcatcagagactcccatggcctcca

SEQ ID NO: 4359532 - DNA, 25 bp, Homo sapien
taggcatcagagactcccatggcct

SEQ ID NO: 4359533 - DNA, 25 bp, Homo sapien
taataggcatcagagactcccatgg

SEQ ID NO: 4359534 - DNA, 25 bp, Homo sapien
agacacagcggtcacaaatcacaca

SEQ ID NO: 4359535 - DNA, 25 bp, Homo sapien
aatcacacacttgccgtcagttttc

SEQ ID NO: 4359536 - DNA, 25 bp, Homo sapien
catcatataagcataccagggtgaa

SEQ ID NO: 4359537 - DNA, 25 bp, Homo sapien
tataagcataccagggtgaagggac

SEQ ID NO: 4359538 - DNA, 25 bp, Homo sapien
tgaggttcttaaccagggcccgaca

SEQ ID NO: 4359539 - DNA, 25 bp, Homo sapien
ggaggtcacacttcgcccaagatag

SEQ ID NO: 4359540 - DNA, 25 bp, Homo sapien
aagtaggagctacaacgcattggcc

SEQ ID NO: 4359541 - DNA, 25 bp, Homo sapien
tacgccctaggatgggaagtccttc

SEQ ID NO: 4359542 - DNA, 25 bp, Homo sapien
tcattgcaaaagaacccacctaaag

SEQ ID NO: 4359543 - DNA, 25 bp, Homo sapien
aaacatagtttgtacagagtcaggc

SEQ ID NO: 4359544 - DNA, 25 bp, Homo sapien
gattctttcttcagcaacccgggta

SEQ ID NO: 4359545 - DNA, 25 bp, Homo sapien
tcaggctgttaagactaagggattc

SEQ ID NO: 4359546 - DNA, 25 bp, Homo sapien
taagggtaccatggaacgtcctctg

SEQ ID NO: 4359547 - DNA, 25 bp, Homo sapien
tggctgcagctgcaattaatgcgct

SEQ ID NO: 4359548 - DNA, 25 bp, Homo sapien
ttaatgcgctctcctgactaagggt

SEQ ID NO: 4359549 - DNA, 25 bp, Homo sapien
caccctgtggagttgttggaaagaa

SEQ ID NO: 4359550 - DNA, 25 bp, Homo sapien
gggacttcaaatgagtcactgtgct

SEQ ID NO: 4359551 - DNA, 25 bp, Homo sapien
ctggtgatcatgcatctgtgcttgg

SEQ ID NO: 4359552 - DNA, 25 bp, Homo sapien
gataatgcacttgccttcagtctgg

SEQ ID NO: 4359553 - DNA, 25 bp, Homo sapien
ccgatgaacaagtgtctggtgatca

SEQ ID NO: 4359554 - DNA, 25 bp, Homo sapien
tataatatgtaatgggtgctccatg

SEQ ID NO: 4359555 - DNA, 25 bp, Homo sapien
tgtatttccagagcttgtcaggggc

SEQ ID NO: 4359556 - DNA, 25 bp, Homo sapien
atgaaacgatctgccgccctgagca

SEQ ID NO: 4359557 - DNA, 25 bp, Homo sapien
aatgcttgttcctggcgcccttggc

SEQ ID NO: 4359558 - DNA, 25 bp, Homo sapien
tgcagagggtggacaagtagagccc

SEQ ID NO: 4359559 - DNA, 25 bp, Homo sapien
gcagagggtggacaagtagagccca

SEQ ID NO: 4359560 - DNA, 25 bp, Homo sapien
ctgcagagggtggacaagtagagcc

SEQ ID NO: 4359561 - DNA, 25 bp, Homo sapien
caatgctggtgctaccggtcagcca

SEQ ID NO: 4359562 - DNA, 25 bp, Homo sapien
gctgccgacactaccgcttctgctg

SEQ ID NO: 4359563 - DNA, 25 bp, Homo sapien
actgccaggtctgccccactcaatg

SEQ ID NO: 4359564 - DNA, 25 bp, Homo sapien
cttctgctgccgtcaccactgccag

SEQ ID NO: 4359565 - DNA, 25 bp, Homo sapien
tgctgccttggccactgatggcaca

SEQ ID NO: 4359566 - DNA, 25 bp, Homo sapien
agaggcacctctgctgaactctcca

SEQ ID NO: 4359567 - DNA, 25 bp, Homo sapien
gaggcacctctgctgaactctccat

SEQ ID NO: 4359568 - DNA, 25 bp, Homo sapien
ccagaggcacctctgctgaactctc

SEQ ID NO: 4359569 - DNA, 25 bp, Homo sapien
ctcccagaggcacctctgctgaact

SEQ ID NO: 4359570 - DNA, 25 bp, Homo sapien
gagaggacaggtcttttaagctagg

SEQ ID NO: 4359571 - DNA, 25 bp, Homo sapien
gaagccactaagaagctaaagatgg

SEQ ID NO: 4359572 - DNA, 25 bp, Homo sapien
cctgcaatgtcaatatatggagctg

SEQ ID NO: 4359573 - DNA, 25 bp, Homo sapien
aactgaatgagcacgaacaaacctg

SEQ ID NO: 4359574 - DNA, 25 bp, Homo sapien
gcctggacagctgatgttggactac

SEQ ID NO: 4359575 - DNA, 25 bp, Homo sapien
gggcctggacagctgatgttggact

SEQ ID NO: 4359576 - DNA, 25 bp, Homo sapien
ggcctggacagctgatgttggacta

SEQ ID NO: 4359577 - DNA, 25 bp, Homo sapien
cctggacagctgatgttggactaca

SEQ ID NO: 4359578 - DNA, 25 bp, Homo sapien
tcagaaactgtggtcatatagccaa

SEQ ID NO: 4359579 - DNA, 25 bp, Homo sapien
taaagatcatacactctagtgggaa

SEQ ID NO: 4359580 - DNA, 25 bp, Homo sapien
tcatctgagagaccgtggtgagaac

SEQ ID NO: 4359581 - DNA, 25 bp, Homo sapien
gaaaagatgtttcccaataaagatc

SEQ ID NO: 4359582 - DNA, 25 bp, Homo sapien
gaagttactccttctccaagtgttg

SEQ ID NO: 4359583 - DNA, 25 bp, Homo sapien
ttcatccctaggacttaaggtctcc

SEQ ID NO: 4359584 - DNA, 25 bp, Homo sapien
ccaaatacttcactactgatggagc

SEQ ID NO: 4359585 - DNA, 25 bp, Homo sapien
ccaagtgttgtaaattacaggaaag

SEQ ID NO: 4359586 - DNA, 25 bp, Homo sapien
ggccactgagtctttggggaaacag

SEQ ID NO: 4359587 - DNA, 25 bp, Homo sapien
cataaaccacagagggagaagctac

SEQ ID NO: 4359588 - DNA, 25 bp, Homo sapien
tcataaaccacagagggagaagcta

SEQ ID NO: 4359589 - DNA, 25 bp, Homo sapien
cacagccattgccaggactcttcct

SEQ ID NO: 4359590 - DNA, 25 bp, Homo sapien
cattcttatgctgggcccagatacc

SEQ ID NO: 4359591 - DNA, 25 bp, Homo sapien
tgggcccagataccccgataagcag

SEQ ID NO: 4359592 - DNA, 25 bp, Homo sapien
gataccccgataagcagatgttctc

SEQ ID NO: 4359593 - DNA, 25 bp, Homo sapien
caggtccagatctgttcccaatccc

SEQ ID NO: 4359594 - DNA, 25 bp, Homo sapien
tcaggtccagatctgttcccaatcc

SEQ ID NO: 4359595 - DNA, 25 bp, Homo sapien
aggtccagatctgttcccaatccct

SEQ ID NO: 4359596 - DNA, 25 bp, Homo sapien
aagacaagcgtggactctggctccc

SEQ ID NO: 4359597 - DNA, 25 bp, Homo sapien
ggcaacaaagacaagcgtggactct

SEQ ID NO: 4359598 - DNA, 25 bp, Homo sapien
ccatgaggccagaaggcaacaaaga

SEQ ID NO: 4359599 - DNA, 25 bp, Homo sapien
tggctcccgccgaggtactctgtac

SEQ ID NO: 4359600 - DNA, 25 bp, Homo sapien
atgccacaggcttgcgtccatccga

SEQ ID NO: 4359601 - DNA, 25 bp, Homo sapien
ggctctcggattttgcatctaccac

SEQ ID NO: 4359602 - DNA, 25 bp, Homo sapien
acctgatgactgattcgccctcctg

SEQ ID NO: 4359603 - DNA, 25 bp, Homo sapien
ggctacgctgagtaagccacccact

SEQ ID NO: 4359604 - DNA, 25 bp, Homo sapien
ccggcttctaagtcatcccctgagt

SEQ ID NO: 4359605 - DNA, 25 bp, Homo sapien
gagtcagcatctagtcttcgtatag

SEQ ID NO: 4359606 - DNA, 25 bp, Homo sapien
cggcttctaagtcatcccctgagtc

SEQ ID NO: 4359607 - DNA, 25 bp, Homo sapien
tcttcgtatagctgacgtaccaggg

SEQ ID NO: 4359608 - DNA, 25 bp, Homo sapien
cccagttcacgttcaggttcttgaa

SEQ ID NO: 4359609 - DNA, 25 bp, Homo sapien
tcttgaaatcaactttagtttcctc

SEQ ID NO: 4359610 - DNA, 25 bp, Homo sapien
cgccccagttcacgttcaggttctt

SEQ ID NO: 4359611 - DNA, 25 bp, Homo sapien
tgaaatcaactttagtttcctccat

SEQ ID NO: 4359612 - DNA, 25 bp, Homo sapien
tacatctatgctgatcccctgcaaa

SEQ ID NO: 4359613 - DNA, 25 bp, Homo sapien
caaatacctttttgccagacttggc

SEQ ID NO: 4359614 - DNA, 25 bp, Homo sapien
cttttaacagcgctgctgtctctgg

SEQ ID NO: 4359615 - DNA, 25 bp, Homo sapien
ttgaagcatttacgtccctgtcaaa

SEQ ID NO: 4359616 - DNA, 25 bp, Homo sapien
catttacgtccctgtcaaatacctt

SEQ ID NO: 4359617 - DNA, 25 bp, Homo sapien
ctgtgaaacacgctctgccactgag

SEQ ID NO: 4359618 - DNA, 25 bp, Homo sapien
ttaattctgtgaaacacgctctgcc

SEQ ID NO: 4359619 - DNA, 25 bp, Homo sapien
cctgaggaaatgttgaggtattctt

SEQ ID NO: 4359620 - DNA, 25 bp, Homo sapien
gcagtgttgtcaggccactcttatt

SEQ ID NO: 4359621 - DNA, 25 bp, Homo sapien
agaagaggtgcattgttgtggccct

SEQ ID NO: 4359622 - DNA, 25 bp, Homo sapien
aggtgcattgttgtggccctttctg

SEQ ID NO: 4359623 - DNA, 25 bp, Homo sapien
agaggtgcattgttgtggccctttc

SEQ ID NO: 4359624 - DNA, 25 bp, Homo sapien
tgactgagaagaggtgcattgttgt

SEQ ID NO: 4359625 - DNA, 25 bp, Homo sapien
ccagtaggggacctgaccacattca

SEQ ID NO: 4359626 - DNA, 25 bp, Homo sapien
gtaccagtaggggacctgaccacat

SEQ ID NO: 4359627 - DNA, 25 bp, Homo sapien
atctggcttacaagtaccagtaggg

SEQ ID NO: 4359628 - DNA, 25 bp, Homo sapien
ggcatctggcttacaagtaccagta

SEQ ID NO: 4359629 - DNA, 25 bp, Homo sapien
catcatgtgcaagcaacttgggttc

SEQ ID NO: 4359630 - DNA, 25 bp, Homo sapien
tcaatgctggtatcagtggtttgat

SEQ ID NO: 4359631 - DNA, 25 bp, Homo sapien
caaatgtgacagtggcctttgcagt

SEQ ID NO: 4359632 - DNA, 25 bp, Homo sapien
tttaactcttatgcactccatcatg

SEQ ID NO: 4359633 - DNA, 25 bp, Homo sapien
tcctaataagccaccgtatgtctgg

SEQ ID NO: 4359634 - DNA, 25 bp, Homo sapien
tcttcaagctggtccgcctgcattg

SEQ ID NO: 4359635 - DNA, 25 bp, Homo sapien
taacggctgccacttttgcattcat

SEQ ID NO: 4359636 - DNA, 25 bp, Homo sapien
cgcctgcattgccaggtgacctcaa

SEQ ID NO: 4359637 - DNA, 25 bp, Homo sapien
cctggttgacagtggggggtctcca

SEQ ID NO: 4359638 - DNA, 25 bp, Homo sapien
tccctggttgacagtggggggtctc

SEQ ID NO: 4359639 - DNA, 25 bp, Homo sapien
acacctgtccattattcgtgcatta

SEQ ID NO: 4359640 - DNA, 25 bp, Homo sapien
ccattattcgtgcattagctccaca

SEQ ID NO: 4359641 - DNA, 25 bp, Homo sapien
attattcgtgcattagctccacatg

SEQ ID NO: 4359642 - DNA, 25 bp, Homo sapien
tgtccattattcgtgcattagctcc

SEQ ID NO: 4359643 - DNA, 25 bp, Homo sapien
gccacgttgggaaaaatctatctag

SEQ ID NO: 4359644 - DNA, 25 bp, Homo sapien
tgaaatagtttctgtgccacgttgg

SEQ ID NO: 4359645 - DNA, 25 bp, Homo sapien
ggactgggtcttttgcgtgaaatag

SEQ ID NO: 4359646 - DNA, 25 bp, Homo sapien
atctatctaggcctctcttgacggc

SEQ ID NO: 4359647 - DNA, 25 bp, Homo sapien
gccttgttctgacagtcaccaggct

SEQ ID NO: 4359648 - DNA, 25 bp, Homo sapien
ccgaggccttgttctgacagtcacc

SEQ ID NO: 4359649 - DNA, 25 bp, Homo sapien
gcggcccgaggccttgttctgacag

SEQ ID NO: 4359650 - DNA, 25 bp, Homo sapien
gaggccttgttctgacagtcaccag

SEQ ID NO: 4359651 - DNA, 25 bp, Homo sapien
ctgaggccgctgcctccttggtggg

SEQ ID NO: 4359652 - DNA, 25 bp, Homo sapien
gctgaggccgctgcctccttggtgg

SEQ ID NO: 4359653 - DNA, 25 bp, Homo sapien
tgaggccgctgcctccttggtgggg

SEQ ID NO: 4359654 - DNA, 25 bp, Homo sapien
ccgccctcctgaggcctggtccttg

SEQ ID NO: 4359655 - DNA, 25 bp, Homo sapien
cgccgccctcctgaggcctggtcct

SEQ ID NO: 4359656 - DNA, 25 bp, Homo sapien
gccgccgccctcctgaggcctggtc

SEQ ID NO: 4359657 - DNA, 25 bp, Homo sapien
cgccgccgccctcctgaggcctggt

SEQ ID NO: 4359658 - DNA, 25 bp, Homo sapien
tcacgggtccggaagcaccatggac

SEQ ID NO: 4359659 - DNA, 25 bp, Homo sapien
ccgtaagtgcccctcgcagggtctt

SEQ ID NO: 4359660 - DNA, 25 bp, Homo sapien
cgagccgccggcgtccattttctgg

SEQ ID NO: 4359661 - DNA, 25 bp, Homo sapien
cgtccattttctgggcggtgctgtg

SEQ ID NO: 4359662 - DNA, 25 bp, Homo sapien
tgcaaacgcagcagaaccgagctgc

SEQ ID NO: 4359663 - DNA, 25 bp, Homo sapien
cggggaggaagcgcccgcaggtgcc

SEQ ID NO: 4359664 - DNA, 25 bp, Homo sapien
ggaagcgcccgcaggtgcccggact

SEQ ID NO: 4359665 - DNA, 25 bp, Homo sapien
ctgcaaacgcagcagaaccgagctg

SEQ ID NO: 4359666 - DNA, 25 bp, Homo sapien
gggttcggctggagagtgcgggcag

SEQ ID NO: 4359667 - DNA, 25 bp, Homo sapien
cgaggaggaatgcgctcccggggct

SEQ ID NO: 4359668 - DNA, 25 bp, Homo sapien
tagtcctgaccctatgggaacttga

SEQ ID NO: 4359669 - DNA, 25 bp, Homo sapien
ggtttgcagtctcagccgcctactt

SEQ ID NO: 4359670 - DNA, 25 bp, Homo sapien
ttgatgcaacaccaagcccctggaa

SEQ ID NO: 4359671 - DNA, 25 bp, Homo sapien
tcctggattgggaatcggaccctag

SEQ ID NO: 4359672 - DNA, 25 bp, Homo sapien
tcagctgccacaaaaatctggtctc

SEQ ID NO: 4359673 - DNA, 25 bp, Homo sapien
cgcaagacttgaatactacctgtaa

SEQ ID NO: 4359674 - DNA, 25 bp, Homo sapien
tttatccctggcagtcaagagactc

SEQ ID NO: 4359675 - DNA, 25 bp, Homo sapien
gatatgcagaaataaccacgtgata

SEQ ID NO: 4359676 - DNA, 25 bp, Homo sapien
cagtgaatttttatgggacccttgt

SEQ ID NO: 4359677 - DNA, 25 bp, Homo sapien
taggtggtgaaaagggaggtgtagc

SEQ ID NO: 4359678 - DNA, 25 bp, Homo sapien
aggggtggtctgctctcagtgaatt

SEQ ID NO: 4359679 - DNA, 25 bp, Homo sapien
cagtataaaaacgaggggtggtctg

SEQ ID NO: 4359680 - DNA, 25 bp, Homo sapien
ttgagggagccacctgcattttcct

SEQ ID NO: 4359681 - DNA, 25 bp, Homo sapien
ggctcctgacctgttagtagcacat

SEQ ID NO: 4359682 - DNA, 25 bp, Homo sapien
gagggagcacagacttcacaacctt

SEQ ID NO: 4359683 - DNA, 25 bp, Homo sapien
ccattttggatgtctgttgattgag

SEQ ID NO: 4359684 - DNA, 25 bp, Homo sapien
ttggattcagggtgttgacaagccc

SEQ ID NO: 4359685 - DNA, 25 bp, Homo sapien
tgaccggcaggtccctagcatgagc

SEQ ID NO: 4359686 - DNA, 25 bp, Homo sapien
ctgaccagtctccactctgtattgg

SEQ ID NO: 4359687 - DNA, 25 bp, Homo sapien
gcctccatcatggaggaggttcaca

SEQ ID NO: 4359688 - DNA, 25 bp, Homo sapien
cagacagatgaaaattgtaattggc

SEQ ID NO: 4359689 - DNA, 25 bp, Homo sapien
gcaatatttatggtgaccatcctca

SEQ ID NO: 4359690 - DNA, 25 bp, Homo sapien
ccaggtgcttaagatatgtcagtga

SEQ ID NO: 4359691 - DNA, 25 bp, Homo sapien
aatactgagggcctgttctgtgtca

SEQ ID NO: 4359692 - DNA, 25 bp, Homo sapien
gataacatacaaaccggtgtggaaa

SEQ ID NO: 4359693 - DNA, 25 bp, Homo sapien
aggataacatacaaaccggtgtgga

SEQ ID NO: 4359694 - DNA, 25 bp, Homo sapien
aaaatgttgtcctttgagtggcaag

SEQ ID NO: 4359695 - DNA, 25 bp, Homo sapien
agttatgatttaagtttagtttcat

SEQ ID NO: 4359696 - DNA, 25 bp, Homo sapien
cagaatccggaatgcagtttcagcg

SEQ ID NO: 4359697 - DNA, 25 bp, Homo sapien
cctggaaagccggaactcatgattc

SEQ ID NO: 4359698 - DNA, 25 bp, Homo sapien
taagaaagcatttaaacgcccagga

SEQ ID NO: 4359699 - DNA, 25 bp, Homo sapien
tgaagaagtagctcaaaggactccg

SEQ ID NO: 4359700 - DNA, 25 bp, Homo sapien
gctgttttagcatctgtattttggt

SEQ ID NO: 4359701 - DNA, 25 bp, Homo sapien
gaacatactgtatgctgtacaagat

SEQ ID NO: 4359702 - DNA, 25 bp, Homo sapien
taagtatgcattgagtacatgacca

SEQ ID NO: 4359703 - DNA, 25 bp, Homo sapien
tatagcagagccgttttaagacagc

SEQ ID NO: 4359704 - DNA, 25 bp, Homo sapien
gaaagggaggttccacacattgatt

SEQ ID NO: 4359705 - DNA, 25 bp, Homo sapien
tggaagagcatcaggccatgtccca

SEQ ID NO: 4359706 - DNA, 25 bp, Homo sapien
catgtcccaggtctttccaaatcag

SEQ ID NO: 4359707 - DNA, 25 bp, Homo sapien
cacattgatttggacgtgctcgaca

SEQ ID NO: 4359708 - DNA, 25 bp, Homo sapien
tcagggccgccattttcgtcgtctc

SEQ ID NO: 4359709 - DNA, 25 bp, Homo sapien
cacgatgggaatcagcgttctctgc

SEQ ID NO: 4359710 - DNA, 25 bp, Homo sapien
ggaactgctcgggactcagtatcat

SEQ ID NO: 4359711 - DNA, 25 bp, Homo sapien
tgctcctgctgaacacgacgacatt

SEQ ID NO: 4359712 - DNA, 25 bp, Homo sapien
aatcagtgagtacaagtcttccact

SEQ ID NO: 4359713 - DNA, 25 bp, Homo sapien
gaatttttgatagcgtccaccctaa

SEQ ID NO: 4359714 - DNA, 25 bp, Homo sapien
gcctctcagaatttttgatagcgtc

SEQ ID NO: 4359715 - DNA, 25 bp, Homo sapien
tagcgtccaccctaaaaatcagtga

SEQ ID NO: 4359716 - DNA, 25 bp, Homo sapien
ttttctatgtttatgggtgaaagca

SEQ ID NO: 4359717 - DNA, 25 bp, Homo sapien
gtgtggaggaaagctacaggttttc

SEQ ID NO: 4359718 - DNA, 25 bp, Homo sapien
ttatgggtgaaagcacctgaatttc

SEQ ID NO: 4359719 - DNA, 25 bp, Homo sapien
tgtggaggaaagctacaggttttcc

SEQ ID NO: 4359720 - DNA, 25 bp, Homo sapien
aggcaaaggaatccacggccctcct

SEQ ID NO: 4359721 - DNA, 25 bp, Homo sapien
agggacagagccctatagtagaaga

SEQ ID NO: 4359722 - DNA, 25 bp, Homo sapien
cccatgatctgatgagctctggtga

SEQ ID NO: 4359723 - DNA, 25 bp, Homo sapien
cagagccctatagtagaagatagct

SEQ ID NO: 4359724 - DNA, 25 bp, Homo sapien
ccctatagtagaagatagctgcagg

SEQ ID NO: 4359725 - DNA, 25 bp, Homo sapien
caacttggctgtctagctttctagc

SEQ ID NO: 4359726 - DNA, 25 bp, Homo sapien
tgggaatggccatcaagtgccacca

SEQ ID NO: 4359727 - DNA, 25 bp, Homo sapien
cccaaggacaaacacggtgatcaga

SEQ ID NO: 4359728 - DNA, 25 bp, Homo sapien
agccatcacgatggcttcaacttgg

SEQ ID NO: 4359729 - DNA, 25 bp, Homo sapien
tgaagcaagggtaagaatctgtctc

SEQ ID NO: 4359730 - DNA, 25 bp, Homo sapien
gagtaacgtaaagaagccatatgtg

SEQ ID NO: 4359731 - DNA, 25 bp, Homo sapien
caagggtaagaatctgtctcaactc

SEQ ID NO: 4359732 - DNA, 25 bp, Homo sapien
gaaaatgagtaacgtaaagaagcca

SEQ ID NO: 4359733 - DNA, 25 bp, Homo sapien
cactaaccaagtgtgcgtgggccat

SEQ ID NO: 4359734 - DNA, 25 bp, Homo sapien
gagggaactcctactctctgtgcac

SEQ ID NO: 4359735 - DNA, 25 bp, Homo sapien
catcatcccaataaggctgtgcccg

SEQ ID NO: 4359736 - DNA, 25 bp, Homo sapien
cctctccgtgagcatcagtcttggg

SEQ ID NO: 4359737 - DNA, 25 bp, Homo sapien
gcttgttcccgtgcaaacatctagg

SEQ ID NO: 4359738 - DNA, 25 bp, Homo sapien
tgggcaatggatgtgtgatatgctt

SEQ ID NO: 4359739 - DNA, 25 bp, Homo sapien
caagcaccaggtaattgagcagcca

SEQ ID NO: 4359740 - DNA, 25 bp, Homo sapien
gaaccttacagcctttgggcaatgg

SEQ ID NO: 4359741 - DNA, 25 bp, Homo sapien
cacagattcgctgcagcaaatgcag

SEQ ID NO: 4359742 - DNA, 25 bp, Homo sapien
agattcgctgcagcaaatgcagaca

SEQ ID NO: 4359743 - DNA, 25 bp, Homo sapien
gacacttggtaagtgtgcttggcct

SEQ ID NO: 4359744 - DNA, 25 bp, Homo sapien
ttggtaagtgtgcttggcctcttcc

SEQ ID NO: 4359745 - DNA, 25 bp, Homo sapien
aggtgtgtttggggtcatcattgct

SEQ ID NO: 4359746 - DNA, 25 bp, Homo sapien
gaggtcatgggaccaacttggtaaa

SEQ ID NO: 4359747 - DNA, 25 bp, Homo sapien
gtgtgtttggggtcatcattgctgt

SEQ ID NO: 4359748 - DNA, 25 bp, Homo sapien
ggaggaggtcatgggaccaacttgg

SEQ ID NO: 4359749 - DNA, 25 bp, Homo sapien
tccttttgccgtgactctgcattgg

SEQ ID NO: 4359750 - DNA, 25 bp, Homo sapien
tccatccttttgccgtgactctgca

SEQ ID NO: 4359751 - DNA, 25 bp, Homo sapien
cttttgccgtgactctgcattggct

SEQ ID NO: 4359752 - DNA, 25 bp, Homo sapien
tttgccgtgactctgcattggctgc

SEQ ID NO: 4359753 - DNA, 25 bp, Homo sapien
ttgacctctgaactttttattggcc

SEQ ID NO: 4359754 - DNA, 25 bp, Homo sapien
tggcctcctgctccccaaagggcat

SEQ ID NO: 4359755 - DNA, 25 bp, Homo sapien
caaagggcatcctgcttctgctgtc

SEQ ID NO: 4359756 - DNA, 25 bp, Homo sapien
tttgacctctgaactttttattggc

SEQ ID NO: 4359757 - DNA, 25 bp, Homo sapien
tgccaaccactatctggcagatggt

SEQ ID NO: 4359758 - DNA, 25 bp, Homo sapien
gcaggcggcggtgggtggtgctctc

SEQ ID NO: 4359759 - DNA, 25 bp, Homo sapien
actttgccaaccactatctggcaga

SEQ ID NO: 4359760 - DNA, 25 bp, Homo sapien
tttgccaaccactatctggcagatg

SEQ ID NO: 4359761 - DNA, 25 bp, Homo sapien
gatgttcagcagggcctcatactcc

SEQ ID NO: 4359762 - DNA, 25 bp, Homo sapien
ttcagcagggcctcatactcctggg

SEQ ID NO: 4359763 - DNA, 25 bp, Homo sapien
tcagcagggcctcatactcctgggc

SEQ ID NO: 4359764 - DNA, 25 bp, Homo sapien
cttgatgttcagcagggcctcatac

SEQ ID NO: 4359765 - DNA, 25 bp, Homo sapien
ctgtgactccagatacagcaggatc

SEQ ID NO: 4359766 - DNA, 25 bp, Homo sapien
ctgtgccagctgtgactccagatac

SEQ ID NO: 4359767 - DNA, 25 bp, Homo sapien
cagctgtgactccagatacagcagg

SEQ ID NO: 4359768 - DNA, 25 bp, Homo sapien
tgtgccagctgtgactccagataca

SEQ ID NO: 4359769 - DNA, 25 bp, Homo sapien
gcagctctaatctcagcggactgcg

SEQ ID NO: 4359770 - DNA, 25 bp, Homo sapien
acagacattgttgatctgaagaacc

SEQ ID NO: 4359771 - DNA, 25 bp, Homo sapien
tgttgatctgaagaaccatgggagc

SEQ ID NO: 4359772 - DNA, 25 bp, Homo sapien
gaaccatgggagcattgtccacaat

SEQ ID NO: 4359773 - DNA, 25 bp, Homo sapien
tctgaagaaccatgggagcattgtc

SEQ ID NO: 4359774 - DNA, 25 bp, Homo sapien
gccaggcagttgttcaggctttgca

SEQ ID NO: 4359775 - DNA, 25 bp, Homo sapien
caggcagttgttcaggctttgcacg

SEQ ID NO: 4359776 - DNA, 25 bp, Homo sapien
ggcagttgttcaggctttgcacggt

SEQ ID NO: 4359777 - DNA, 25 bp, Homo sapien
agttgttcaggctttgcacggtctc

SEQ ID NO: 4359778 - DNA, 25 bp, Homo sapien
gggtgcctggacagaccccagggac

SEQ ID NO: 4359779 - DNA, 25 bp, Homo sapien
gtgcctggacagaccccagggacca

SEQ ID NO: 4359780 - DNA, 25 bp, Homo sapien
gccaggtgctgtagctgggtgcctg

SEQ ID NO: 4359781 - DNA, 25 bp, Homo sapien
cagccaggtgctgtagctgggtgcc

SEQ ID NO: 4359782 - DNA, 25 bp, Homo sapien
gccttggaatgaccttgtttatctc

SEQ ID NO: 4359783 - DNA, 25 bp, Homo sapien
ccatgcaaatcctgtgggcaaagaa

SEQ ID NO: 4359784 - DNA, 25 bp, Homo sapien
gaagtatacctactagccttggaat

SEQ ID NO: 4359785 - DNA, 25 bp, Homo sapien
tccaggacatgctccggcgtccttt

SEQ ID NO: 4359786 - DNA, 25 bp, Homo sapien
tctctgtctctatggggtcatttag

SEQ ID NO: 4359787 - DNA, 25 bp, Homo sapien
tatggggtcatttagccacaactcc

SEQ ID NO: 4359788 - DNA, 25 bp, Homo sapien
tcatttagccacaactccatcaaaa

SEQ ID NO: 4359789 - DNA, 25 bp, Homo sapien
gtctctatggggtcatttagccaca

SEQ ID NO: 4359790 - DNA, 25 bp, Homo sapien
ggccatcactatgtctgaccctcaa

SEQ ID NO: 4359791 - DNA, 25 bp, Homo sapien
attaccctgcccgattaagtcacag

SEQ ID NO: 4359792 - DNA, 25 bp, Homo sapien
ttgccctggaaaagaattaccctgc

SEQ ID NO: 4359793 - DNA, 25 bp, Homo sapien
cagcctttgcacaggcggcgcgttt

SEQ ID NO: 4359794 - DNA, 25 bp, Homo sapien
acagtcgcgaggttcgagtgttgca

SEQ ID NO: 4359795 - DNA, 25 bp, Homo sapien
agcggcgagtgcgactgcagagccc

SEQ ID NO: 4359796 - DNA, 25 bp, Homo sapien
agcctgcggggcaagatctgtaagc

SEQ ID NO: 4359797 - DNA, 25 bp, Homo sapien
tgcggcggcttcttccgaggcgcca

SEQ ID NO: 4359798 - DNA, 25 bp, Homo sapien
ggagactcactggtacgtaactgca

SEQ ID NO: 4359799 - DNA, 25 bp, Homo sapien
ttcttagtgccacttgatgctaggc

SEQ ID NO: 4359800 - DNA, 25 bp, Homo sapien
tatacacatgtcttggaattgaggg

SEQ ID NO: 4359801 - DNA, 25 bp, Homo sapien
gcaggttttaccatggaactacata

SEQ ID NO: 4359802 - DNA, 25 bp, Homo sapien
tttagtagaggcggcatttcgccat

SEQ ID NO: 4359803 - DNA, 25 bp, Homo sapien
ttagtagaggcggcatttcgccatg

SEQ ID NO: 4359804 - DNA, 25 bp, Homo sapien
ttttagtagaggcggcatttcgcca

SEQ ID NO: 4359805 - DNA, 25 bp, Homo sapien
ggcttgcttgtgtcatatcttagca

SEQ ID NO: 4359806 - DNA, 25 bp, Homo sapien
aggcacccaaaatggtgcacacgat

SEQ ID NO: 4359807 - DNA, 25 bp, Homo sapien
ggtgcacacgatttgaatgttaaga

SEQ ID NO: 4359808 - DNA, 25 bp, Homo sapien
tagggtcaaactatgatttgtgaat

SEQ ID NO: 4359809 - DNA, 25 bp, Homo sapien
gtctttctgatagaatcaggatcca

SEQ ID NO: 4359810 - DNA, 25 bp, Homo sapien
ctcattgtaccaggcaaagagagga

SEQ ID NO: 4359811 - DNA, 25 bp, Homo sapien
aggatccagattctaactgtcttct

SEQ ID NO: 4359812 - DNA, 25 bp, Homo sapien
gatccagattctaactgtcttctaa

SEQ ID NO: 4359813 - DNA, 25 bp, Homo sapien
atctgtagaactgaccatggcaggt

SEQ ID NO: 4359814 - DNA, 25 bp, Homo sapien
tctgtagaactgaccatggcaggtt

SEQ ID NO: 4359815 - DNA, 25 bp, Homo sapien
agtctccgggaatgccataggcgtg

SEQ ID NO: 4359816 - DNA, 25 bp, Homo sapien
aaagtctccgggaatgccataggcg

SEQ ID NO: 4359817 - DNA, 25 bp, Homo sapien
tgaaagtctccgggaatgccatagg

SEQ ID NO: 4359818 - DNA, 25 bp, Homo sapien
gtgctcgggaggtgcaaggtcagcc

SEQ ID NO: 4359819 - DNA, 25 bp, Homo sapien
tacctctgtgcttgagatgcggggc

SEQ ID NO: 4359820 - DNA, 25 bp, Homo sapien
tgtgatacttcttcaccccgtacac

SEQ ID NO: 4359821 - DNA, 25 bp, Homo sapien
cccgtacacttcacgctcaagaaat

SEQ ID NO: 4359822 - DNA, 25 bp, Homo sapien
aactctggacttcctggctactcca

SEQ ID NO: 4359823 - DNA, 25 bp, Homo sapien
cctccaacatctgactcagttttct

SEQ ID NO: 4359824 - DNA, 25 bp, Homo sapien
ccaacatctgactcagttttctgcc

SEQ ID NO: 4359825 - DNA, 25 bp, Homo sapien
tccatgtgaccatacagcttcctca

SEQ ID NO: 4359826 - DNA, 25 bp, Homo sapien
tttgagtccatgtgaccatacagct

SEQ ID NO: 4359827 - DNA, 25 bp, Homo sapien
ttattattgctgatactgttatact

SEQ ID NO: 4359828 - DNA, 25 bp, Homo sapien
ttattgctgatactgttatacttgt

SEQ ID NO: 4359829 - DNA, 25 bp, Homo sapien
attattgctgatactgttatacttg

SEQ ID NO: 4359830 - DNA, 25 bp, Homo sapien
tattgctgatactgttatacttgtc

SEQ ID NO: 4359831 - DNA, 25 bp, Homo sapien
taacttcctcacataacctgtgagc

SEQ ID NO: 4359832 - DNA, 25 bp, Homo sapien
cttgtaacttcctcacataacctgt

SEQ ID NO: 4359833 - DNA, 25 bp, Homo sapien
cataacctgtgagccttacttcttt

SEQ ID NO: 4359834 - DNA, 25 bp, Homo sapien
cctcacataacctgtgagccttact

SEQ ID NO: 4359835 - DNA, 25 bp, Homo sapien
tagttgactcttaaaccgctaatgc

SEQ ID NO: 4359836 - DNA, 25 bp, Homo sapien
taaaccgctaatgcaagagggacct

SEQ ID NO: 4359837 - DNA, 25 bp, Homo sapien
ttcagtttctgtccgcctcaaagga

SEQ ID NO: 4359838 - DNA, 25 bp, Homo sapien
tggaattttacttagagagcttagc

SEQ ID NO: 4359839 - DNA, 25 bp, Homo sapien
tgttccaactctaacaatcactaga

SEQ ID NO: 4359840 - DNA, 25 bp, Homo sapien
acacaatagtgttccaactctaaca

SEQ ID NO: 4359841 - DNA, 25 bp, Homo sapien
ctctcacgtgcacagatctgcatag

SEQ ID NO: 4359842 - DNA, 25 bp, Homo sapien
tagtgttccaactctaacaatcact

SEQ ID NO: 4359843 - DNA, 25 bp, Homo sapien
ttgtgaaccatagccagagatggca

SEQ ID NO: 4359844 - DNA, 25 bp, Homo sapien
taaaggaggcatttcaatttgtgaa

SEQ ID NO: 4359845 - DNA, 25 bp, Homo sapien
ttgccacagatatacatgacctcct

SEQ ID NO: 4359846 - DNA, 25 bp, Homo sapien
ttcattcagtctaatacttctggat

SEQ ID NO: 4359847 - DNA, 25 bp, Homo sapien
ttgactccaaacacatgaatcggtt

SEQ ID NO: 4359848 - DNA, 25 bp, Homo sapien
agttgactccaaacacatgaatcgg

SEQ ID NO: 4359849 - DNA, 25 bp, Homo sapien
acagttgactccaaacacatgaatc

SEQ ID NO: 4359850 - DNA, 25 bp, Homo sapien
ctccaaacacatgaatcggtttctt

SEQ ID NO: 4359851 - DNA, 25 bp, Homo sapien
gtggccatgtcatcgtagtgctctg

SEQ ID NO: 4359852 - DNA, 25 bp, Homo sapien
ggtggccatgtcatcgtagtgctct

SEQ ID NO: 4359853 - DNA, 25 bp, Homo sapien
tggccatgtcatcgtagtgctctgc

SEQ ID NO: 4359854 - DNA, 25 bp, Homo sapien
cctatgcggtttttcatgagtaaac

SEQ ID NO: 4359855 - DNA, 25 bp, Homo sapien
tgagtaaacttatcaccgttggttg

SEQ ID NO: 4359856 - DNA, 25 bp, Homo sapien
gcccagttttatacacccatctttc

SEQ ID NO: 4359857 - DNA, 25 bp, Homo sapien
taacaatttgcccagttttatacac

SEQ ID NO: 4359858 - DNA, 25 bp, Homo sapien
caagctgggaaagaacattatcatg

SEQ ID NO: 4359859 - DNA, 25 bp, Homo sapien
tatctagtgaggaaacttgactatc

SEQ ID NO: 4359860 - DNA, 25 bp, Homo sapien
cagataggctttatggctgataagt

SEQ ID NO: 4359861 - DNA, 25 bp, Homo sapien
gcatctccctaaagaagtcatctgg

SEQ ID NO: 4359862 - DNA, 25 bp, Homo sapien
ttccttaaccactcctacttttgca

SEQ ID NO: 4359863 - DNA, 25 bp, Homo sapien
tccttaaccactcctacttttgcag

SEQ ID NO: 4359864 - DNA, 25 bp, Homo sapien
cttaaccactcctacttttgcagat

SEQ ID NO: 4359865 - DNA, 25 bp, Homo sapien
cgattaatcatcctgatgtatgtct

SEQ ID NO: 4359866 - DNA, 25 bp, Homo sapien
tcgaaagaatcttcctagaaaagct

SEQ ID NO: 4359867 - DNA, 25 bp, Homo sapien
catttggcatgagagattatccagg

SEQ ID NO: 4359868 - DNA, 25 bp, Homo sapien
ccaattgttgggaaagcatcttaga

SEQ ID NO: 4359869 - DNA, 25 bp, Homo sapien
gaactcctccgtagcaagaaaccat

SEQ ID NO: 4359870 - DNA, 25 bp, Homo sapien
ccttattgcctgctagccaaatgga

SEQ ID NO: 4359871 - DNA, 25 bp, Homo sapien
gccaaatggaatttgggcaagcaac

SEQ ID NO: 4359872 - DNA, 25 bp, Homo sapien
taagcagtcgaagcaagttgccacc

SEQ ID NO: 4359873 - DNA, 25 bp, Homo sapien
ccaccttgaagttgagggatacact

SEQ ID NO: 4359874 - DNA, 25 bp, Homo sapien
gagaccatgtaagtaggaccctaag

SEQ ID NO: 4359875 - DNA, 25 bp, Homo sapien
tttgccataaatgccggttctggtt

SEQ ID NO: 4359876 - DNA, 25 bp, Homo sapien
gaaaggaggagagttcagccatcta

SEQ ID NO: 4359877 - DNA, 25 bp, Homo sapien
ccctaagacaaccaaggaatttgct

SEQ ID NO: 4359878 - DNA, 25 bp, Homo sapien
gacacagtccctcgggaaaaggagc

SEQ ID NO: 4359879 - DNA, 25 bp, Homo sapien
gatgcagtcagcttatgagggacca

SEQ ID NO: 4359880 - DNA, 25 bp, Homo sapien
ggtgcgcccctgagctctaagcagg

SEQ ID NO: 4359881 - DNA, 25 bp, Homo sapien
gcctcagtaaggacttggccccaag

SEQ ID NO: 4359882 - DNA, 25 bp, Homo sapien
ccaggtgattctgacggtgactcaa

SEQ ID NO: 4359883 - DNA, 25 bp, Homo sapien
ccccgagctgaatccaagtggcatg

SEQ ID NO: 4359884 - DNA, 25 bp, Homo sapien
tagaaatgcatctttgcaggcccca

SEQ ID NO: 4359885 - DNA, 25 bp, Homo sapien
cctgctgccaaagggaaatcggccg

SEQ ID NO: 4359886 - DNA, 25 bp, Homo sapien
gaggccagaaatgtgagggcaaggg

SEQ ID NO: 4359887 - DNA, 25 bp, Homo sapien
aatgtgagggcaagggtgtaaagct

SEQ ID NO: 4359888 - DNA, 25 bp, Homo sapien
atgggaaggatcaagagctcttcca

SEQ ID NO: 4359889 - DNA, 25 bp, Homo sapien
gtaaagctggcctgagccggcagga

SEQ ID NO: 4359890 - DNA, 25 bp, Homo sapien
atgaggcatctacaaggcaagtagg

SEQ ID NO: 4359891 - DNA, 25 bp, Homo sapien
ttctcatctatgtggacaatcattc

SEQ ID NO: 4359892 - DNA, 25 bp, Homo sapien
cagcttctcatctatgtggacaatc

SEQ ID NO: 4359893 - DNA, 25 bp, Homo sapien
gaggcatctacaaggcaagtaggcc

SEQ ID NO: 4359894 - DNA, 25 bp, Homo sapien
gctgtgtttccttacggaggctttg

SEQ ID NO: 4359895 - DNA, 25 bp, Homo sapien
gataacttatgtgccagatatggag

SEQ ID NO: 4359896 - DNA, 25 bp, Homo sapien
taaaggcttcaacaggtcgcaaaat

SEQ ID NO: 4359897 - DNA, 25 bp, Homo sapien
gatatggagggcagaaatcccacac

SEQ ID NO: 4359898 - DNA, 25 bp, Homo sapien
aaaaggttctcaatgtcacgttctc

SEQ ID NO: 4359899 - DNA, 25 bp, Homo sapien
tccttatctctctctgacctaacct

SEQ ID NO: 4359900 - DNA, 25 bp, Homo sapien
cacctgggtaatcaaggataaccat

SEQ ID NO: 4359901 - DNA, 25 bp, Homo sapien
gactcctgtgattagacagggccca

SEQ ID NO: 4359902 - DNA, 25 bp, Homo sapien
gacgttggctgcgacaagtttgacc

SEQ ID NO: 4359903 - DNA, 25 bp, Homo sapien
agaaaaactcctgtatagtccctga

SEQ ID NO: 4359904 - DNA, 25 bp, Homo sapien
aagtttgacctgcagcgaggacacc

SEQ ID NO: 4359905 - DNA, 25 bp, Homo sapien
gaaatcgtgttagcggctccagggc

SEQ ID NO: 4359906 - DNA, 25 bp, Homo sapien
cagaccgaggctctgagatgcctct

SEQ ID NO: 4359907 - DNA, 25 bp, Homo sapien
agagcagaccgaggctctgagatgc

SEQ ID NO: 4359908 - DNA, 25 bp, Homo sapien
agagagcagaccgaggctctgagat

SEQ ID NO: 4359909 - DNA, 25 bp, Homo sapien
tcagagagcagaccgaggctctgag

SEQ ID NO: 4359910 - DNA, 25 bp, Homo sapien
gccatcaggattcatattttcatca

SEQ ID NO: 4359911 - DNA, 25 bp, Homo sapien
ttagcaaggatgtgcttgatgtatt

SEQ ID NO: 4359912 - DNA, 25 bp, Homo sapien
gaaattagcaaggatgtgcttgatg

SEQ ID NO: 4359913 - DNA, 25 bp, Homo sapien
ctggtagtttttgaaattagcaagg

SEQ ID NO: 4359914 - DNA, 25 bp, Homo sapien
aattagcaaggatgtgcttgatgta

SEQ ID NO: 4359915 - DNA, 25 bp, Homo sapien
tcaagttcgcctttcattgatttcg

SEQ ID NO: 4359916 - DNA, 25 bp, Homo sapien
tcttcttcaagttcgcctttcattg

SEQ ID NO: 4359917 - DNA, 25 bp, Homo sapien
tctcttcttcaagttcgcctttcat

SEQ ID NO: 4359918 - DNA, 25 bp, Homo sapien
cttcttcaagttcgcctttcattga

SEQ ID NO: 4359919 - DNA, 25 bp, Homo sapien
caccaatagatgactttgggtgctt

SEQ ID NO: 4359920 - DNA, 25 bp, Homo sapien
aacaccaatagatgactttgggtgc

SEQ ID NO: 4359921 - DNA, 25 bp, Homo sapien
atatcaacaccaatagatgactttg

SEQ ID NO: 4359922 - DNA, 25 bp, Homo sapien
tcaacaccaatagatgactttgggt

SEQ ID NO: 4359923 - DNA, 25 bp, Homo sapien
aatgtcagagggcttctcatcgtgt

SEQ ID NO: 4359924 - DNA, 25 bp, Homo sapien
tctgtcctggtgattatcttctcct

SEQ ID NO: 4359925 - DNA, 25 bp, Homo sapien
tcaggcacagtctatccacaatctc

SEQ ID NO: 4359926 - DNA, 25 bp, Homo sapien
ttctcatcgtgtctgacgaggtccg

SEQ ID NO: 4359927 - DNA, 25 bp, Homo sapien
ctaataaaaccaaaagatgggccag

SEQ ID NO: 4359928 - DNA, 25 bp, Homo sapien
aaaccaaaagatgggccagtgttca

SEQ ID NO: 4359929 - DNA, 25 bp, Homo sapien
aaccaaaagatgggccagtgttcat

SEQ ID NO: 4359930 - DNA, 25 bp, Homo sapien
ataaaaccaaaagatgggccagtgt

SEQ ID NO: 4359931 - DNA, 25 bp, Homo sapien
tagttctcctcgagggacgcaggaa

SEQ ID NO: 4359932 - DNA, 25 bp, Homo sapien
taagacgggtcagatagcactagcg

SEQ ID NO: 4359933 - DNA, 25 bp, Homo sapien
taaaggccgtgattcagcagtgaac

SEQ ID NO: 4359934 - DNA, 25 bp, Homo sapien
gcatttccggattagcttaccgccg

SEQ ID NO: 4359935 - DNA, 25 bp, Homo sapien
tcaccagtttgtatcatccccactt

SEQ ID NO: 4359936 - DNA, 25 bp, Homo sapien
taaatacctcacagtattgtccctt

SEQ ID NO: 4359937 - DNA, 25 bp, Homo sapien
cagtttgtatcatccccacttaata

SEQ ID NO: 4359938 - DNA, 25 bp, Homo sapien
attacaggcgagcattttcttacaa

SEQ ID NO: 4359939 - DNA, 25 bp, Homo sapien
tatgccctagttcttgaggtgatca

SEQ ID NO: 4359940 - DNA, 25 bp, Homo sapien
gagtcttagactacaaaagttgtcg

SEQ ID NO: 4359941 - DNA, 25 bp, Homo sapien
catggtgtacgtagaacacaaatac

SEQ ID NO: 4359942 - DNA, 25 bp, Homo sapien
tcttcctcctgaaacgcttagaatg

SEQ ID NO: 4359943 - DNA, 25 bp, Homo sapien
aagccctgtttatgccacacaccag

SEQ ID NO: 4359944 - DNA, 25 bp, Homo sapien
gaaagcagtagaatgtcaggttact

SEQ ID NO: 4359945 - DNA, 25 bp, Homo sapien
tacatggctttgcattgaagaggaa

SEQ ID NO: 4359946 - DNA, 25 bp, Homo sapien
taaaatgtgaaccagatacatggct

SEQ ID NO: 4359947 - DNA, 25 bp, Homo sapien
tagatattcagggtacagggctatg

SEQ ID NO: 4359948 - DNA, 25 bp, Homo sapien
gaacctgggaggaaactgctctgac

SEQ ID NO: 4359949 - DNA, 25 bp, Homo sapien
tccttagggcctctgggaacacatc

SEQ ID NO: 4359950 - DNA, 25 bp, Homo sapien
tctcgggactcaaagctcacaacat

SEQ ID NO: 4359951 - DNA, 25 bp, Homo sapien
ggcagacaatcgttaccggtataca

SEQ ID NO: 4359952 - DNA, 25 bp, Homo sapien
catgggcagacaatcgttaccggta

SEQ ID NO: 4359953 - DNA, 25 bp, Homo sapien
gcagacaatcgttaccggtatacaa

SEQ ID NO: 4359954 - DNA, 25 bp, Homo sapien
tgggcagacaatcgttaccggtata

SEQ ID NO: 4359955 - DNA, 25 bp, Homo sapien
acagcttttcatgagtcaatcctga

SEQ ID NO: 4359956 - DNA, 25 bp, Homo sapien
ctcaatgggaagagtatagaatgag

SEQ ID NO: 4359957 - DNA, 25 bp, Homo sapien
gaagagtatagaatgagggttgaca

SEQ ID NO: 4359958 - DNA, 25 bp, Homo sapien
gtcttcattcgatgctctcaatggg

SEQ ID NO: 4359959 - DNA, 25 bp, Homo sapien
caggcttagcagacaacctcacgga

SEQ ID NO: 4359960 - DNA, 25 bp, Homo sapien
ggcttagcagacaacctcacggatc

SEQ ID NO: 4359961 - DNA, 25 bp, Homo sapien
gcttagcagacaacctcacggatct

SEQ ID NO: 4359962 - DNA, 25 bp, Homo sapien
gagcaggcttagcagacaacctcac

SEQ ID NO: 4359963 - DNA, 25 bp, Homo sapien
ttatcctgtcgctgagtctgagggc

SEQ ID NO: 4359964 - DNA, 25 bp, Homo sapien
gctaataaaacggaggcagagcttt

SEQ ID NO: 4359965 - DNA, 25 bp, Homo sapien
catctcgcggaggaaaacgctaccg

SEQ ID NO: 4359966 - DNA, 25 bp, Homo sapien
ggagctttcagttgccaggaccctt

SEQ ID NO: 4359967 - DNA, 25 bp, Homo sapien
cccgcagagcgtcctgtaggaacgt

SEQ ID NO: 4359968 - DNA, 25 bp, Homo sapien
cagaacagcagtgcaccgtgtacat

SEQ ID NO: 4359969 - DNA, 25 bp, Homo sapien
gcaccgtgtacattgtgggagcccc

SEQ ID NO: 4359970 - DNA, 25 bp, Homo sapien
cctgtaggaacgtcacagagcccag

SEQ ID NO: 4359971 - DNA, 25 bp, Homo sapien
cacaccatgacgaagaacgagaaga

SEQ ID NO: 4359972 - DNA, 25 bp, Homo sapien
gaacgagaagaagtccctcaaccag

SEQ ID NO: 4359973 - DNA, 25 bp, Homo sapien
gtccgcgcgcacaccatgacgaaga

SEQ ID NO: 4359974 - DNA, 25 bp, Homo sapien
ccttcactgccgtctccgggctgcg

SEQ ID NO: 4359975 - DNA, 25 bp, Homo sapien
gcttagaactatttgggcacaacat

SEQ ID NO: 4359976 - DNA, 25 bp, Homo sapien
ccttcagggtgaaaaggcgacttga

SEQ ID NO: 4359977 - DNA, 25 bp, Homo sapien
gaagtcttatcacaagctgaaaggg

SEQ ID NO: 4359978 - DNA, 25 bp, Homo sapien
tggtgcagactgaaatggactcctt

SEQ ID NO: 4359979 - DNA, 25 bp, Homo sapien
ccttcatcagcactgaggctatttt

SEQ ID NO: 4359980 - DNA, 25 bp, Homo sapien
atttataccgatgggatttctaggc

SEQ ID NO: 4359981 - DNA, 25 bp, Homo sapien
tattctgagtatattgtgggcatct

SEQ ID NO: 4359982 - DNA, 25 bp, Homo sapien
tcccaacggtatgtagtggtgtctc

SEQ ID NO: 4359983 - DNA, 25 bp, Homo sapien
tacttagcactggttttcaagctga

SEQ ID NO: 4359984 - DNA, 25 bp, Homo sapien
ctagtagtgggccaagtgttgccat

SEQ ID NO: 4359985 - DNA, 25 bp, Homo sapien
agccaactagttgggtgatccaagt

SEQ ID NO: 4359986 - DNA, 25 bp, Homo sapien
aaaattgagcacctagtggctgatg

SEQ ID NO: 4359987 - DNA, 25 bp, Homo sapien
ggccaatggtacatgtggtgacagc

SEQ ID NO: 4359988 - DNA, 25 bp, Homo sapien
gagaaagtacttcctggattgtcca

SEQ ID NO: 4359989 - DNA, 25 bp, Homo sapien
tgtgtgcaggctataaacgcaggcc

SEQ ID NO: 4359990 - DNA, 25 bp, Homo sapien
actgagccattatctagcaggagaa

SEQ ID NO: 4359991 - DNA, 25 bp, Homo sapien
tactgagtcatttgtggagctagct

SEQ ID NO: 4359992 - DNA, 25 bp, Homo sapien
acttcttaggattttgctggtgctg

SEQ ID NO: 4359993 - DNA, 25 bp, Homo sapien
ttggaagtgaccttcctgcaaggca

SEQ ID NO: 4359994 - DNA, 25 bp, Homo sapien
ggagctagctcttatttgtgacttc

SEQ ID NO: 4359995 - DNA, 25 bp, Homo sapien
caattttagttaatacgcatgctga

SEQ ID NO: 4359996 - DNA, 25 bp, Homo sapien
gacgtgacggaactttcagggtgat

SEQ ID NO: 4359997 - DNA, 25 bp, Homo sapien
tctgtatcttgaatagggctttgga

SEQ ID NO: 4359998 - DNA, 25 bp, Homo sapien
gggctttggatcataagtgaatgca

SEQ ID NO: 4359999 - DNA, 25 bp, Homo sapien
ttgagtgttggagaatatgaataca

SEQ ID NO: 4360000 - DNA, 25 bp, Homo sapien
gaatatgaatacattcgtgtgtttc

SEQ ID NO: 4360001 - DNA, 25 bp, Homo sapien
ttttctgtgcatgggtaaacattcc

SEQ ID NO: 4360002 - DNA, 25 bp, Homo sapien
tgggtaaacattcctaattgagtgt

SEQ ID NO: 4360003 - DNA, 25 bp, Homo sapien
tcctacagatgactatcaggtttcc

SEQ ID NO: 4360004 - DNA, 25 bp, Homo sapien
tgtttcctacagatgactatcaggt

SEQ ID NO: 4360005 - DNA, 25 bp, Homo sapien
gtctcagagtgtttcctacagatga

SEQ ID NO: 4360006 - DNA, 25 bp, Homo sapien
agatgactatcaggtttcctgtcag

SEQ ID NO: 4360007 - DNA, 25 bp, Homo sapien
gctgcagtgcaactttttatctagg

SEQ ID NO: 4360008 - DNA, 25 bp, Homo sapien
tggagcacagtgacaaatcatatca

SEQ ID NO: 4360009 - DNA, 25 bp, Homo sapien
tattgttctgagtgggcacaatagc

SEQ ID NO: 4360010 - DNA, 25 bp, Homo sapien
tggaattgccagtttataatatgta

SEQ ID NO: 4360011 - DNA, 25 bp, Homo sapien
gaatttctatcaccctgagtaacac

SEQ ID NO: 4360012 - DNA, 25 bp, Homo sapien
ccagacatggagagatactggtcta

SEQ ID NO: 4360013 - DNA, 25 bp, Homo sapien
actgaactcttgtagagaagcagca

SEQ ID NO: 4360014 - DNA, 25 bp, Homo sapien
gacaatagagcttgagactccctgg

SEQ ID NO: 4360015 - DNA, 25 bp, Homo sapien
gtatatgtgctgccaaagtgagcac

SEQ ID NO: 4360016 - DNA, 25 bp, Homo sapien
ctctgtatcgttccactgttagtat

SEQ ID NO: 4360017 - DNA, 25 bp, Homo sapien
catgtcatccttgcacaagggccat

SEQ ID NO: 4360018 - DNA, 25 bp, Homo sapien
aaatatggaacgactcacaaatttg

SEQ ID NO: 4360019 - DNA, 25 bp, Homo sapien
caacgatgaggttccaaaataccgt

SEQ ID NO: 4360020 - DNA, 25 bp, Homo sapien
cactcttctcattcacgatgtgggt

SEQ ID NO: 4360021 - DNA, 25 bp, Homo sapien
acgatgtgggttatgcttcagactc

SEQ ID NO: 4360022 - DNA, 25 bp, Homo sapien
ctcaacgatgaggttccaaaatacc

SEQ ID NO: 4360023 - DNA, 25 bp, Homo sapien
ctgatggtcttgagccgtgatggcc

SEQ ID NO: 4360024 - DNA, 25 bp, Homo sapien
gaaaaatcctgccaagatcacgtct

SEQ ID NO: 4360025 - DNA, 25 bp, Homo sapien
gatcacgtcttaggcacacacagag

SEQ ID NO: 4360026 - DNA, 25 bp, Homo sapien
agagagcagttgagcgtctgccaca

SEQ ID NO: 4360027 - DNA, 25 bp, Homo sapien
tgctgcattctaggttggcaccttg

SEQ ID NO: 4360028 - DNA, 25 bp, Homo sapien
catcggtcctaaacctgctggtgca

SEQ ID NO: 4360029 - DNA, 25 bp, Homo sapien
tacatgagttaaagaagggactctc

SEQ ID NO: 4360030 - DNA, 25 bp, Homo sapien
tcccctctggttgcagttctggtta

SEQ ID NO: 4360031 - DNA, 25 bp, Homo sapien
tattgccaggttgggtatctacagc

SEQ ID NO: 4360032 - DNA, 25 bp, Homo sapien
gttagccagtgtgactatgcaccta

SEQ ID NO: 4360033 - DNA, 25 bp, Homo sapien
tacatgctgaattagcctcgatctt

SEQ ID NO: 4360034 - DNA, 25 bp, Homo sapien
cctcgatctttttgattaagagcac

SEQ ID NO: 4360035 - DNA, 25 bp, Homo sapien
ggtgtggaaagatagagtttcctga

SEQ ID NO: 4360036 - DNA, 25 bp, Homo sapien
tggtgtggaaagatagagtttcctg

SEQ ID NO: 4360037 - DNA, 25 bp, Homo sapien
tgagcggccgtatggcagtgtggac

SEQ ID NO: 4360038 - DNA, 25 bp, Homo sapien
agggaactgggatgtcctgagcggc

SEQ ID NO: 4360039 - DNA, 25 bp, Homo sapien
actgggatgtcctgagcggccgtat

SEQ ID NO: 4360040 - DNA, 25 bp, Homo sapien
tggcagtgtggacggtgggcgatgg

SEQ ID NO: 4360041 - DNA, 25 bp, Homo sapien
gacttcctcagggcttgtgacactt

SEQ ID NO: 4360042 - DNA, 25 bp, Homo sapien
cttcctcagggcttgtgacacttcc

SEQ ID NO: 4360043 - DNA, 25 bp, Homo sapien
aaaagcagtcgggttattgttcgtg

SEQ ID NO: 4360044 - DNA, 25 bp, Homo sapien
aaagcagtcgggttattgttcgtgt

SEQ ID NO: 4360045 - DNA, 25 bp, Homo sapien
aagcagtcgggttattgttcgtgtg

SEQ ID NO: 4360046 - DNA, 25 bp, Homo sapien
tgacagaggctcgtaagaggccaat

SEQ ID NO: 4360047 - DNA, 25 bp, Homo sapien
cacactttgcgactttgaactcttc

SEQ ID NO: 4360048 - DNA, 25 bp, Homo sapien
ttctaccgtcccatgacttctgagg

SEQ ID NO: 4360049 - DNA, 25 bp, Homo sapien
tgaggtaaggcaagaccacactttg

SEQ ID NO: 4360050 - DNA, 25 bp, Homo sapien
aaggagaaatctggcgtcttgctgg

SEQ ID NO: 4360051 - DNA, 25 bp, Homo sapien
tcttgctggcgggctactgccctgc

SEQ ID NO: 4360052 - DNA, 25 bp, Homo sapien
tctggcgtcttgctggcgggctact

SEQ ID NO: 4360053 - DNA, 25 bp, Homo sapien
aaatctggcgtcttgctggcgggct

SEQ ID NO: 4360054 - DNA, 25 bp, Homo sapien
ttggcagccgtccacagtaagaccg

SEQ ID NO: 4360055 - DNA, 25 bp, Homo sapien
gcggtgtcgtcaggtgcaagcttca

SEQ ID NO: 4360056 - DNA, 25 bp, Homo sapien
taagaccggcagatggagccttcat

SEQ ID NO: 4360057 - DNA, 25 bp, Homo sapien
gtttcagcaagaggctggaaaggcc

SEQ ID NO: 4360058 - DNA, 25 bp, Homo sapien
cttctgattgtccacgtgctcaact

SEQ ID NO: 4360059 - DNA, 25 bp, Homo sapien
agctatctagggttccggcctctcc

SEQ ID NO: 4360060 - DNA, 25 bp, Homo sapien
cgtgctcaacttgttggaacatagg

SEQ ID NO: 4360061 - DNA, 25 bp, Homo sapien
cataggagataagctatctagggtt

SEQ ID NO: 4360062 - DNA, 25 bp, Homo sapien
ccagagtacccactaccctcacccg

SEQ ID NO: 4360063 - DNA, 25 bp, Homo sapien
taccctcacccgaacagcccaccat

SEQ ID NO: 4360064 - DNA, 25 bp, Homo sapien
tacccactaccctcacccgaacagc

SEQ ID NO: 4360065 - DNA, 25 bp, Homo sapien
ctggcagagccccagagtacccact

SEQ ID NO: 4360066 - DNA, 25 bp, Homo sapien
ttttctcaagaacaacttacactca

SEQ ID NO: 4360067 - DNA, 25 bp, Homo sapien
caacctagtggtttgggctcatggc

SEQ ID NO: 4360068 - DNA, 25 bp, Homo sapien
gaactgcaacaagcccagaggagct

SEQ ID NO: 4360069 - DNA, 25 bp, Homo sapien
gaacctgccatggaactactgggaa

SEQ ID NO: 4360070 - DNA, 25 bp, Homo sapien
tcagtactgaaacgtgatccccgga

SEQ ID NO: 4360071 - DNA, 25 bp, Homo sapien
gcctctggaacttaggagagattcc

SEQ ID NO: 4360072 - DNA, 25 bp, Homo sapien
caatctgcacgtgttccatctgtga

SEQ ID NO: 4360073 - DNA, 25 bp, Homo sapien
gtgatcaagtttccccaataggagg

SEQ ID NO: 4360074 - DNA, 25 bp, Homo sapien
aggagaacccaacatcggcagggct

SEQ ID NO: 4360075 - DNA, 25 bp, Homo sapien
taaaaagctaaatagagccgggtgc

SEQ ID NO: 4360076 - DNA, 25 bp, Homo sapien
gtctctatgacccaagtagccaaaa

SEQ ID NO: 4360077 - DNA, 25 bp, Homo sapien
tcagtgtggttatggcaggaatagc

SEQ ID NO: 4360078 - DNA, 25 bp, Homo sapien
gctggagggagcctaagtcacattt

SEQ ID NO: 4360079 - DNA, 25 bp, Homo sapien
taaaatttgctaatggaaggagtta

SEQ ID NO: 4360080 - DNA, 25 bp, Homo sapien
ttatcctgctaaaatggtagaaacc

SEQ ID NO: 4360081 - DNA, 25 bp, Homo sapien
tggtagaaaccacatagctttttct

SEQ ID NO: 4360082 - DNA, 25 bp, Homo sapien
gaaggagttatcctctttatcctgc

SEQ ID NO: 4360083 - DNA, 25 bp, Homo sapien
caggaaataagcacgtggaggacac

SEQ ID NO: 4360084 - DNA, 25 bp, Homo sapien
cataaggcacaaggtatacaaacac

SEQ ID NO: 4360085 - DNA, 25 bp, Homo sapien
tggaggaccgccatgttggtcgctc

SEQ ID NO: 4360086 - DNA, 25 bp, Homo sapien
taaattgaaggacgccaaacttgtg

SEQ ID NO: 4360087 - DNA, 25 bp, Homo sapien
ccgtaagcgctgctgtgtgcctagg

SEQ ID NO: 4360088 - DNA, 25 bp, Homo sapien
acctggggcccgtaagcgctgctgt

SEQ ID NO: 4360089 - DNA, 25 bp, Homo sapien
gccaggcacgcaggtcctagtgcca

SEQ ID NO: 4360090 - DNA, 25 bp, Homo sapien
gcagcaccgccctacccactgaggg

SEQ ID NO: 4360091 - DNA, 25 bp, Homo sapien
gctcaacctagtttctaaaggcaag

SEQ ID NO: 4360092 - DNA, 25 bp, Homo sapien
ggcaagattttactccagcgacatg

SEQ ID NO: 4360093 - DNA, 25 bp, Homo sapien
cagcgacatgtactggtgaccatga

SEQ ID NO: 4360094 - DNA, 25 bp, Homo sapien
tcagtgctgagctttagacccagat

SEQ ID NO: 4360095 - DNA, 25 bp, Homo sapien
cagtaacccaaacacaacgctgagg

SEQ ID NO: 4360096 - DNA, 25 bp, Homo sapien
acacaacgctgaggaaggagaccat

SEQ ID NO: 4360097 - DNA, 25 bp, Homo sapien
aacccaaacacaacgctgaggaagg

SEQ ID NO: 4360098 - DNA, 25 bp, Homo sapien
ccaaacacaacgctgaggaaggaga

SEQ ID NO: 4360099 - DNA, 25 bp, Homo sapien
gagggaaatcccaatccgtgcagct

SEQ ID NO: 4360100 - DNA, 25 bp, Homo sapien
caaaggtagcagtggctgttggcct

SEQ ID NO: 4360101 - DNA, 25 bp, Homo sapien
gagttagtaaaagaggaggctgccc

SEQ ID NO: 4360102 - DNA, 25 bp, Homo sapien
tccagaacccacgataagaccgagt

SEQ ID NO: 4360103 - DNA, 25 bp, Homo sapien
gaaatgcaattgaccccaggagtag

SEQ ID NO: 4360104 - DNA, 25 bp, Homo sapien
taaggcagctgatgcgtaaagcacc

SEQ ID NO: 4360105 - DNA, 25 bp, Homo sapien
tacttaagaagtagcgctcgctcct

SEQ ID NO: 4360106 - DNA, 25 bp, Homo sapien
aacacgatcgtcaaggactgctccg

SEQ ID NO: 4360107 - DNA, 25 bp, Homo sapien
ttctgcatccaagcataacccttgg

SEQ ID NO: 4360108 - DNA, 25 bp, Homo sapien
catcttcatcattgaacgaacaggg

SEQ ID NO: 4360109 - DNA, 25 bp, Homo sapien
gtctcgcctcgggactcggagcagt

SEQ ID NO: 4360110 - DNA, 25 bp, Homo sapien
gaactgcccagttgctaaggccact

SEQ ID NO: 4360111 - DNA, 25 bp, Homo sapien
caggctcattaatgtggtataaaca

SEQ ID NO: 4360112 - DNA, 25 bp, Homo sapien
cacaggctcattaatgtggtataaa

SEQ ID NO: 4360113 - DNA, 25 bp, Homo sapien
ggctcattaatgtggtataaacagt

SEQ ID NO: 4360114 - DNA, 25 bp, Homo sapien
gctcattaatgtggtataaacagtt

SEQ ID NO: 4360115 - DNA, 25 bp, Homo sapien
ggcagtaacatgaccccggctcacc

SEQ ID NO: 4360116 - DNA, 25 bp, Homo sapien
agcaggacctgtgctggcagtaaca

SEQ ID NO: 4360117 - DNA, 25 bp, Homo sapien
ctcacccctacacagacagtcaggg

SEQ ID NO: 4360118 - DNA, 25 bp, Homo sapien
ctacacagacagtcagggctctggg

SEQ ID NO: 4360119 - DNA, 25 bp, Homo sapien
taaggtggcaccagtggtcaggtct

SEQ ID NO: 4360120 - DNA, 25 bp, Homo sapien
ggtagagttcagaagtagtccctga

SEQ ID NO: 4360121 - DNA, 25 bp, Homo sapien
tagagttcagaagtagtccctgatt

SEQ ID NO: 4360122 - DNA, 25 bp, Homo sapien
cagtggtcaggtctaaatttgaaac

SEQ ID NO: 4360123 - DNA, 25 bp, Homo sapien
tacatgaggtaagaaggccaccctg

SEQ ID NO: 4360124 - DNA, 25 bp, Homo sapien
tttcttagataagccctccagagca

SEQ ID NO: 4360125 - DNA, 25 bp, Homo sapien
aatgtcggtcctgcaagttctgtgg

SEQ ID NO: 4360126 - DNA, 25 bp, Homo sapien
gcagcttacggagagaaggtattca

SEQ ID NO: 4360127 - DNA, 25 bp, Homo sapien
aacgacattcccatccgctttagta

SEQ ID NO: 4360128 - DNA, 25 bp, Homo sapien
ggcaccagggatttcgcaagtttca

SEQ ID NO: 4360129 - DNA, 25 bp, Homo sapien
cagagagcatttgcctgactccagg

SEQ ID NO: 4360130 - DNA, 25 bp, Homo sapien
catggatctcaaaggtgttgtcaaa

SEQ ID NO: 4360131 - DNA, 25 bp, Homo sapien
aaagttgcctacagctttgccacaa

SEQ ID NO: 4360132 - DNA, 25 bp, Homo sapien
tacgatatccctattccgagttggc

SEQ ID NO: 4360133 - DNA, 25 bp, Homo sapien
ttagccctaactctgttacaaacag

SEQ ID NO: 4360134 - DNA, 25 bp, Homo sapien
tattctaaatccagtacttctcaaa

SEQ ID NO: 4360135 - DNA, 25 bp, Homo sapien
ctgtaccaggtttttgaaagcgatt

SEQ ID NO: 4360136 - DNA, 25 bp, Homo sapien
tgaatggtagagttcagagccggcg

SEQ ID NO: 4360137 - DNA, 25 bp, Homo sapien
gtagagttcagagccggcgggccct

SEQ ID NO: 4360138 - DNA, 25 bp, Homo sapien
gcttgtattgatgattatgaatggc

SEQ ID NO: 4360139 - DNA, 25 bp, Homo sapien
tctgctttatccgttctatccgcct

SEQ ID NO: 4360140 - DNA, 25 bp, Homo sapien
gcccgcttctgctttatccgttcta

SEQ ID NO: 4360141 - DNA, 25 bp, Homo sapien
gggcccgcttctgctttatccgttc

SEQ ID NO: 4360142 - DNA, 25 bp, Homo sapien
ttatccgttctatccgcctctgctt

SEQ ID NO: 4360143 - DNA, 25 bp, Homo sapien
cataggtagactataaaatatcgtt

SEQ ID NO: 4360144 - DNA, 25 bp, Homo sapien
taatatgaacataggtagactataa

SEQ ID NO: 4360145 - DNA, 25 bp, Homo sapien
tatcgttcactttccaggtccctat

SEQ ID NO: 4360146 - DNA, 25 bp, Homo sapien
ctataaaatatcgttcactttccag

SEQ ID NO: 4360147 - DNA, 25 bp, Homo sapien
tcattgccattagcacatttaaagc

SEQ ID NO: 4360148 - DNA, 25 bp, Homo sapien
agcatcataaactcttcgcctaatg

SEQ ID NO: 4360149 - DNA, 25 bp, Homo sapien
cctgagcagaattggtaggcaggcc

SEQ ID NO: 4360150 - DNA, 25 bp, Homo sapien
ggcaggccaatccacttgatttctt

SEQ ID NO: 4360151 - DNA, 25 bp, Homo sapien
caaaacttggaactataagaactct

SEQ ID NO: 4360152 - DNA, 25 bp, Homo sapien
taaggcaatccttaggtcaaagaac

SEQ ID NO: 4360153 - DNA, 25 bp, Homo sapien
gaatcaataggatagggctaaatca

SEQ ID NO: 4360154 - DNA, 25 bp, Homo sapien
ggatagggctaaatcagtgctctag

SEQ ID NO: 4360155 - DNA, 25 bp, Homo sapien
ttatttgaattggtgaactctgaca

SEQ ID NO: 4360156 - DNA, 25 bp, Homo sapien
tcagcgacttcattgtacgatgttg

SEQ ID NO: 4360157 - DNA, 25 bp, Homo sapien
tcgttgaactttctcacacactttc

SEQ ID NO: 4360158 - DNA, 25 bp, Homo sapien
tacgatgttgtaccttttcgttgaa

SEQ ID NO: 4360159 - DNA, 25 bp, Homo sapien
ttttactccattatacatattagag

SEQ ID NO: 4360160 - DNA, 25 bp, Homo sapien
ccattatacatattagagactttct

SEQ ID NO: 4360161 - DNA, 25 bp, Homo sapien
tactccattatacatattagagact

SEQ ID NO: 4360162 - DNA, 25 bp, Homo sapien
tacatattagagactttctttacaa

SEQ ID NO: 4360163 - DNA, 25 bp, Homo sapien
cttccaagtagttagaattacaggt

SEQ ID NO: 4360164 - DNA, 25 bp, Homo sapien
tgcctcgctaatttcttttttgtag

SEQ ID NO: 4360165 - DNA, 25 bp, Homo sapien
aagtgttgggttataagtgtgagcc

SEQ ID NO: 4360166 - DNA, 25 bp, Homo sapien
gccaccctgcccagccacgtctcag

SEQ ID NO: 4360167 - DNA, 25 bp, Homo sapien
tcaagtagtctttaccccctactca

SEQ ID NO: 4360168 - DNA, 25 bp, Homo sapien
aatgccagtatgaggaaaacctgtt

SEQ ID NO: 4360169 - DNA, 25 bp, Homo sapien
ggagggctaaccacaacttctctgg

SEQ ID NO: 4360170 - DNA, 25 bp, Homo sapien
aaattcttaaaccagctgaagcagg

SEQ ID NO: 4360171 - DNA, 25 bp, Homo sapien
tgtttccctgggatcagttctccaa

SEQ ID NO: 4360172 - DNA, 25 bp, Homo sapien
gctgacttcttccacgcaatatgcg

SEQ ID NO: 4360173 - DNA, 25 bp, Homo sapien
cattcttgctttctacgcaggtcaa

SEQ ID NO: 4360174 - DNA, 25 bp, Homo sapien
ggtcaactttaagcctggagcctct

SEQ ID NO: 4360175 - DNA, 25 bp, Homo sapien
ctctctgtgacaatgtagggtacaa

SEQ ID NO: 4360176 - DNA, 25 bp, Homo sapien
tgaaacagcactagtgtcagggcaa

SEQ ID NO: 4360177 - DNA, 25 bp, Homo sapien
tgatacagcagctcctcagaagtga

SEQ ID NO: 4360178 - DNA, 25 bp, Homo sapien
caatcttcgtggtttgacagacggg

SEQ ID NO: 4360179 - DNA, 25 bp, Homo sapien
taggagtttctgacatggcaggcat

SEQ ID NO: 4360180 - DNA, 25 bp, Homo sapien
aatcagagtctataaattttctagc

SEQ ID NO: 4360181 - DNA, 25 bp, Homo sapien
tctgaaaaatcagagtctataaatt

SEQ ID NO: 4360182 - DNA, 25 bp, Homo sapien
tcagagtctataaattttctagccc

SEQ ID NO: 4360183 - DNA, 25 bp, Homo sapien
agagtctataaattttctagcccgt

SEQ ID NO: 4360184 - DNA, 25 bp, Homo sapien
atctgcttgctcaaactcacatatg

SEQ ID NO: 4360185 - DNA, 25 bp, Homo sapien
caaactcacatatgacagaatcacc

SEQ ID NO: 4360186 - DNA, 25 bp, Homo sapien
catatgacagaatcaccaatgcagt

SEQ ID NO: 4360187 - DNA, 25 bp, Homo sapien
ccaatgcagtattccaccatgtaaa

SEQ ID NO: 4360188 - DNA, 25 bp, Homo sapien
taataaaagtagtcctattccagag

SEQ ID NO: 4360189 - DNA, 25 bp, Homo sapien
gtgacaaattagtaacagaagggat

SEQ ID NO: 4360190 - DNA, 25 bp, Homo sapien
aaaagtcacagggtttagttatgag

SEQ ID NO: 4360191 - DNA, 25 bp, Homo sapien
caattgttcagcgtttaaaaagaag

SEQ ID NO: 4360192 - DNA, 25 bp, Homo sapien
ctgctatgtgtgtctgagtaaccat

SEQ ID NO: 4360193 - DNA, 25 bp, Homo sapien
ggacccagccagtagcttctgctat

SEQ ID NO: 4360194 - DNA, 25 bp, Homo sapien
cagggacccagccagtagcttctgc

SEQ ID NO: 4360195 - DNA, 25 bp, Homo sapien
tctgctatgtgtgtctgagtaacca

SEQ ID NO: 4360196 - DNA, 25 bp, Homo sapien
gggtatatggactcccaatcagaac

SEQ ID NO: 4360197 - DNA, 25 bp, Homo sapien
gttagtctctgtggtgtgcttataa

SEQ ID NO: 4360198 - DNA, 25 bp, Homo sapien
tatggactcccaatcagaacacttc

SEQ ID NO: 4360199 - DNA, 25 bp, Homo sapien
gaacacttcctgaactggttagtct

SEQ ID NO: 4360200 - DNA, 25 bp, Homo sapien
tgaaagtgccggcagattcagtgcc

SEQ ID NO: 4360201 - DNA, 25 bp, Homo sapien
tgcctggtgagggtttattctctgc

SEQ ID NO: 4360202 - DNA, 25 bp, Homo sapien
gcctggtgagggtttattctctgct

SEQ ID NO: 4360203 - DNA, 25 bp, Homo sapien
gaggttgctgagaggtccaaaatga

SEQ ID NO: 4360204 - DNA, 25 bp, Homo sapien
tctgttcatgaccacggaggtaatc

SEQ ID NO: 4360205 - DNA, 25 bp, Homo sapien
gcctttaccatccatatttgtgcca

SEQ ID NO: 4360206 - DNA, 25 bp, Homo sapien
taggtgtttgttatggccacacccc

SEQ ID NO: 4360207 - DNA, 25 bp, Homo sapien
taatggtccattcatctcaagaggc

SEQ ID NO: 4360208 - DNA, 25 bp, Homo sapien
agtctcttgatctcatgacccgccc

SEQ ID NO: 4360209 - DNA, 25 bp, Homo sapien
cttgatctcatgacccgcccaccat

SEQ ID NO: 4360210 - DNA, 25 bp, Homo sapien
atctcatgacccgcccaccatggcc

SEQ ID NO: 4360211 - DNA, 25 bp, Homo sapien
gactacatgtgtgtcaccatgcttg

SEQ ID NO: 4360212 - DNA, 25 bp, Homo sapien
catttgcacctatagtagtggctga

SEQ ID NO: 4360213 - DNA, 25 bp, Homo sapien
catgtctagaatgtgtcctgaagtc

SEQ ID NO: 4360214 - DNA, 25 bp, Homo sapien
gcatttaacatagtccacagtgctg

SEQ ID NO: 4360215 - DNA, 25 bp, Homo sapien
gaggccatttagacatagtttcaga

SEQ ID NO: 4360216 - DNA, 25 bp, Homo sapien
cattcacatttattggtcctaaggt

SEQ ID NO: 4360217 - DNA, 25 bp, Homo sapien
tattggaaactggaaatgcaacaaa

SEQ ID NO: 4360218 - DNA, 25 bp, Homo sapien
tggtaaaatctttgtaggtgagttg

SEQ ID NO: 4360219 - DNA, 25 bp, Homo sapien
ctttgtaggtgagttggtattggaa

SEQ ID NO: 4360220 - DNA, 25 bp, Homo sapien
gaaaagattactgttgagacctcac

SEQ ID NO: 4360221 - DNA, 25 bp, Homo sapien
ccattcataagtcccgcaagctgga

SEQ ID NO: 4360222 - DNA, 25 bp, Homo sapien
tgctgaagtcccagaacactaggct

SEQ ID NO: 4360223 - DNA, 25 bp, Homo sapien
gcaataggttcctgacgcagctcca

SEQ ID NO: 4360224 - DNA, 25 bp, Homo sapien
catgttcgccaaaagtcactaagat

SEQ ID NO: 4360225 - DNA, 25 bp, Homo sapien
gttctaaatggagatcaggcatccc

SEQ ID NO: 4360226 - DNA, 25 bp, Homo sapien
catcccattgtgcaaagataaggac

SEQ ID NO: 4360227 - DNA, 25 bp, Homo sapien
gcagctgccagaacatagagaactt

SEQ ID NO: 4360228 - DNA, 25 bp, Homo sapien
aaaacctcaaccattacatgttgct

SEQ ID NO: 4360229 - DNA, 25 bp, Homo sapien
ttaagcctgtctattccatcaaaat

SEQ ID NO: 4360230 - DNA, 25 bp, Homo sapien
catgttgctattccttaagataagc

SEQ ID NO: 4360231 - DNA, 25 bp, Homo sapien
tgtattacatgtggagtgaccaact

SEQ ID NO: 4360232 - DNA, 25 bp, Homo sapien
ctaaggaagcatgcctctcactgca

SEQ ID NO: 4360233 - DNA, 25 bp, Homo sapien
ctggtctaaggaagcatgcctctca

SEQ ID NO: 4360234 - DNA, 25 bp, Homo sapien
tctcactgcagtaccaacaacattc

SEQ ID NO: 4360235 - DNA, 25 bp, Homo sapien
caacattctacagtctttgttacca

SEQ ID NO: 4360236 - DNA, 25 bp, Homo sapien
ttatacatatcagagtatctgctgg

SEQ ID NO: 4360237 - DNA, 25 bp, Homo sapien
aaagcagtcacaaagcaggagactt

SEQ ID NO: 4360238 - DNA, 25 bp, Homo sapien
caaagcagtcacaaagcaggagact

SEQ ID NO: 4360239 - DNA, 25 bp, Homo sapien
tacatatcagagtatctgctggctc

SEQ ID NO: 4360240 - DNA, 25 bp, Homo sapien
agcaaaagcaccacgagtttcaggg

SEQ ID NO: 4360241 - DNA, 25 bp, Homo sapien
aagcagagcaaaagcaccacgagtt

SEQ ID NO: 4360242 - DNA, 25 bp, Homo sapien
gcagagcaaaagcaccacgagtttc

SEQ ID NO: 4360243 - DNA, 25 bp, Homo sapien
gagcaaaagcaccacgagtttcagg

SEQ ID NO: 4360244 - DNA, 25 bp, Homo sapien
acaattttaaactccccatcctgct

SEQ ID NO: 4360245 - DNA, 25 bp, Homo sapien
caattttaaactccccatcctgctt

SEQ ID NO: 4360246 - DNA, 25 bp, Homo sapien
tatcacaacttagtggggcccacag

SEQ ID NO: 4360247 - DNA, 25 bp, Homo sapien
gcttcacaaagataagggaggccta

SEQ ID NO: 4360248 - DNA, 25 bp, Homo sapien
tgtgttaacgttatcttctaccaaa

SEQ ID NO: 4360249 - DNA, 25 bp, Homo sapien
taccaaaacccctatgcatgcttta

SEQ ID NO: 4360250 - DNA, 25 bp, Homo sapien
ctcttcagaaactttaatatttctc

SEQ ID NO: 4360251 - DNA, 25 bp, Homo sapien
taatatttctcttcccactgagttc

SEQ ID NO: 4360252 - DNA, 25 bp, Homo sapien
aactttaatatttctcttcccactg

SEQ ID NO: 4360253 - DNA, 25 bp, Homo sapien
tcagaaactttaatatttctcttcc

SEQ ID NO: 4360254 - DNA, 25 bp, Homo sapien
ttcttggcctgcaggcgttcttcac

SEQ ID NO: 4360255 - DNA, 25 bp, Homo sapien
tgatctatgtaatcacggaggccag

SEQ ID NO: 4360256 - DNA, 25 bp, Homo sapien
cggaggccagtatgtacagacaaag

SEQ ID NO: 4360257 - DNA, 25 bp, Homo sapien
atttatttttacaagcagataaagg

SEQ ID NO: 4360258 - DNA, 25 bp, Homo sapien
tgcttgcgtgcttccttggtcttag

SEQ ID NO: 4360259 - DNA, 25 bp, Homo sapien
cgtgcttgcgtgcttccttggtctt

SEQ ID NO: 4360260 - DNA, 25 bp, Homo sapien
cttgcgtgcttccttggtcttagac

SEQ ID NO: 4360261 - DNA, 25 bp, Homo sapien
gcttgcgtgcttccttggtcttaga

SEQ ID NO: 4360262 - DNA, 25 bp, Homo sapien
cggcgcagaatccacatgaccttct

SEQ ID NO: 4360263 - DNA, 25 bp, Homo sapien
agaatccacatgaccttctctggca

SEQ ID NO: 4360264 - DNA, 25 bp, Homo sapien
tctaagcagccggcgcagaatccac

SEQ ID NO: 4360265 - DNA, 25 bp, Homo sapien
agccggcgcagaatccacatgacct

SEQ ID NO: 4360266 - DNA, 25 bp, Homo sapien
caggaatggactgtcaacaggcttg

SEQ ID NO: 4360267 - DNA, 25 bp, Homo sapien
aggaatggactgtcaacaggcttgc

SEQ ID NO: 4360268 - DNA, 25 bp, Homo sapien
cacaagccagacctagtattgagca

SEQ ID NO: 4360269 - DNA, 25 bp, Homo sapien
ctatggctctcacctatttggagga

SEQ ID NO: 4360270 - DNA, 25 bp, Homo sapien
taaggaagatcttctgaccctgttg

SEQ ID NO: 4360271 - DNA, 25 bp, Homo sapien
tactatggcgctgataaactaagga

SEQ ID NO: 4360272 - DNA, 25 bp, Homo sapien
caggttgtaatcctcaagtttggcc

SEQ ID NO: 4360273 - DNA, 25 bp, Homo sapien
ccagtgagaattcctagcaaacaac

SEQ ID NO: 4360274 - DNA, 25 bp, Homo sapien
aatagcttctcatgtgctcttgccc

SEQ ID NO: 4360275 - DNA, 25 bp, Homo sapien
ctagcacacattcaacctgggaaaa

SEQ ID NO: 4360276 - DNA, 25 bp, Homo sapien
ccaggctccagtgcagtcagtggcg

SEQ ID NO: 4360277 - DNA, 25 bp, Homo sapien
ggctccagtgcagtcagtggcgcga

SEQ ID NO: 4360278 - DNA, 25 bp, Homo sapien
gcccaggctccagtgcagtcagtgg

SEQ ID NO: 4360279 - DNA, 25 bp, Homo sapien
caggctccagtgcagtcagtggcgc

SEQ ID NO: 4360280 - DNA, 25 bp, Homo sapien
agcaattccacttctaggtatttac

SEQ ID NO: 4360281 - DNA, 25 bp, Homo sapien
ggagttagcccagacctcacagact

SEQ ID NO: 4360282 - DNA, 25 bp, Homo sapien
tgctagccacagatgacatgcccag

SEQ ID NO: 4360283 - DNA, 25 bp, Homo sapien
tcgaagagaaacgtaagacagggca

SEQ ID NO: 4360284 - DNA, 25 bp, Homo sapien
aaggctactacaactcaggaaggca

SEQ ID NO: 4360285 - DNA, 25 bp, Homo sapien
gcactgactcagaccaaggcaggaa

SEQ ID NO: 4360286 - DNA, 25 bp, Homo sapien
ggtcaaggcagcagcaagctgtaat

SEQ ID NO: 4360287 - DNA, 25 bp, Homo sapien
gaggtgaggagattacctgagccca

SEQ ID NO: 4360288 - DNA, 25 bp, Homo sapien
gtaatctcagcactgactcagacca

SEQ ID NO: 4360289 - DNA, 25 bp, Homo sapien
tacatatgccttatgaatgaggttg

SEQ ID NO: 4360290 - DNA, 25 bp, Homo sapien
caccaatcttatagagtgaaatacg

SEQ ID NO: 4360291 - DNA, 25 bp, Homo sapien
ccagccctcagtgtaattttaaagt

SEQ ID NO: 4360292 - DNA, 25 bp, Homo sapien
tagaggcaatgcctccctgtgctgc

SEQ ID NO: 4360293 - DNA, 25 bp, Homo sapien
ctttcttatcagtgctgctggacaa

SEQ ID NO: 4360294 - DNA, 25 bp, Homo sapien
tgctgctggacaaaagtagtcgacc

SEQ ID NO: 4360295 - DNA, 25 bp, Homo sapien
tagtcgacctcctggatttaatatc

SEQ ID NO: 4360296 - DNA, 25 bp, Homo sapien
tgcccagaccagctatctttcttat

SEQ ID NO: 4360297 - DNA, 25 bp, Homo sapien
tcttgggcctgtaacaaatattaac

SEQ ID NO: 4360298 - DNA, 25 bp, Homo sapien
gcacaatgaaacagtatgaagctct

SEQ ID NO: 4360299 - DNA, 25 bp, Homo sapien
gctactccagaggtttgaactccag

SEQ ID NO: 4360300 - DNA, 25 bp, Homo sapien
ggtgttaacatctgtccagggctaa

SEQ ID NO: 4360301 - DNA, 25 bp, Homo sapien
attctgatctataaatcctcttact

SEQ ID NO: 4360302 - DNA, 25 bp, Homo sapien
cttctgcatttgtggaagtcaaacc

SEQ ID NO: 4360303 - DNA, 25 bp, Homo sapien
acttctgcatttgtggaagtcaaac

SEQ ID NO: 4360304 - DNA, 25 bp, Homo sapien
tctgatctataaatcctcttacttc

SEQ ID NO: 4360305 - DNA, 25 bp, Homo sapien
tatttaagattctgtaaagccatta

SEQ ID NO: 4360306 - DNA, 25 bp, Homo sapien
ttctatttaagattctgtaaagcca

SEQ ID NO: 4360307 - DNA, 25 bp, Homo sapien
gtattctatttaagattctgtaaag

SEQ ID NO: 4360308 - DNA, 25 bp, Homo sapien
tctatttaagattctgtaaagccat

SEQ ID NO: 4360309 - DNA, 25 bp, Homo sapien
atcgaagtaaaacctgaaccacaat

SEQ ID NO: 4360310 - DNA, 25 bp, Homo sapien
atgctatatctgttctacatttatc

SEQ ID NO: 4360311 - DNA, 25 bp, Homo sapien
gtacaatgtctattatgacctaatc

SEQ ID NO: 4360312 - DNA, 25 bp, Homo sapien
aaataaagttcctatgctatatctg

SEQ ID NO: 4360313 - DNA, 25 bp, Homo sapien
ggccagctacatagtgttttgaatg

SEQ ID NO: 4360314 - DNA, 25 bp, Homo sapien
cagctacatagtgttttgaatgtca

SEQ ID NO: 4360315 - DNA, 25 bp, Homo sapien
cctggccagctacatagtgttttga

SEQ ID NO: 4360316 - DNA, 25 bp, Homo sapien
tgcacctggccagctacatagtgtt

SEQ ID NO: 4360317 - DNA, 25 bp, Homo sapien
gaccctgccaagaacctaatagaaa

SEQ ID NO: 4360318 - DNA, 25 bp, Homo sapien
tgttctacaataacacctaaaggct

SEQ ID NO: 4360319 - DNA, 25 bp, Homo sapien
gaagcaatattagatgagagcacac

SEQ ID NO: 4360320 - DNA, 25 bp, Homo sapien
ggccttaagacatcctcttgtctca

SEQ ID NO: 4360321 - DNA, 25 bp, Homo sapien
gaaatgagtaagagctgattaaaga

SEQ ID NO: 4360322 - DNA, 25 bp, Homo sapien
gaagaagcactctcaaattaggaac

SEQ ID NO: 4360323 - DNA, 25 bp, Homo sapien
agcagaccatatgcatacaaatgta

SEQ ID NO: 4360324 - DNA, 25 bp, Homo sapien
gaagaccttgaatcggaagtacaaa

SEQ ID NO: 4360325 - DNA, 25 bp, Homo sapien
tctcccatgagctcatcagacagag

SEQ ID NO: 4360326 - DNA, 25 bp, Homo sapien
aacgactgctttaccagcagctctg

SEQ ID NO: 4360327 - DNA, 25 bp, Homo sapien
gaattctaaagctgcaacgactgct

SEQ ID NO: 4360328 - DNA, 25 bp, Homo sapien
taatttatttggattgtagaacgga

SEQ ID NO: 4360329 - DNA, 25 bp, Homo sapien
attgggaactcaatgaaagaggcag

SEQ ID NO: 4360330 - DNA, 25 bp, Homo sapien
gatattgggaactcaatgaaagagg

SEQ ID NO: 4360331 - DNA, 25 bp, Homo sapien
tgcagatattgggaactcaatgaaa

SEQ ID NO: 4360332 - DNA, 25 bp, Homo sapien
ctgcagatattgggaactcaatgaa

SEQ ID NO: 4360333 - DNA, 25 bp, Homo sapien
ttgttttcttaatgcaagcagaaat

SEQ ID NO: 4360334 - DNA, 25 bp, Homo sapien
agatattttagatagaaccctttct

SEQ ID NO: 4360335 - DNA, 25 bp, Homo sapien
taaagtaacagacatattttaagat

SEQ ID NO: 4360336 - DNA, 25 bp, Homo sapien
tattttccttcacatagaaacaata

SEQ ID NO: 4360337 - DNA, 25 bp, Homo sapien
taaattagtctgtcaaatgctgagc

SEQ ID NO: 4360338 - DNA, 25 bp, Homo sapien
taaagtagacaaggcctcagaaacc

SEQ ID NO: 4360339 - DNA, 25 bp, Homo sapien
ggaggaacctgtcaatacgagtaac

SEQ ID NO: 4360340 - DNA, 25 bp, Homo sapien
tccatccaggaggtccaactacatg

SEQ ID NO: 4360341 - DNA, 25 bp, Homo sapien
agtctatcaaggctctgtttaacag

SEQ ID NO: 4360342 - DNA, 25 bp, Homo sapien
gtctatcaaggctctgtttaacagt

SEQ ID NO: 4360343 - DNA, 25 bp, Homo sapien
tctatcaaggctctgtttaacagtt

SEQ ID NO: 4360344 - DNA, 25 bp, Homo sapien
atagtctatcaaggctctgtttaac

SEQ ID NO: 4360345 - DNA, 25 bp, Homo sapien
atgaagtacaatcgtttttccagac

SEQ ID NO: 4360346 - DNA, 25 bp, Homo sapien
gccacagcatttccatgaagtacaa

SEQ ID NO: 4360347 - DNA, 25 bp, Homo sapien
cagcatttccatgaagtacaatcgt

SEQ ID NO: 4360348 - DNA, 25 bp, Homo sapien
ttccatgaagtacaatcgtttttcc

SEQ ID NO: 4360349 - DNA, 25 bp, Homo sapien
gaaacatgacaagcatgcccactgt

SEQ ID NO: 4360350 - DNA, 25 bp, Homo sapien
gaacacaccccaacataataaaagc

SEQ ID NO: 4360351 - DNA, 25 bp, Homo sapien
ctagaaagcctttcctcaaagatct

SEQ ID NO: 4360352 - DNA, 25 bp, Homo sapien
gatctgaaacatgacaagcatgccc

SEQ ID NO: 4360353 - DNA, 25 bp, Homo sapien
cacaatgggagatagcacaggctgg

SEQ ID NO: 4360354 - DNA, 25 bp, Homo sapien
gagtctgggcccaaaaagcgatcct

SEQ ID NO: 4360355 - DNA, 25 bp, Homo sapien
gaagaaaccgagatcacacaatggg

SEQ ID NO: 4360356 - DNA, 25 bp, Homo sapien
tactgtctctcagcgagatcctagg

SEQ ID NO: 4360357 - DNA, 25 bp, Homo sapien
tcttcgggcgccgccgcttctgtgg

SEQ ID NO: 4360358 - DNA, 25 bp, Homo sapien
ggccaagcgaggctgtcgggccgag

SEQ ID NO: 4360359 - DNA, 25 bp, Homo sapien
tgcagaagaactggcggccaagcga

SEQ ID NO: 4360360 - DNA, 25 bp, Homo sapien
cttctgtggcgcccgcgcttaggcg

SEQ ID NO: 4360361 - DNA, 25 bp, Homo sapien
gccctcgagcctgcccaaagatgaa

SEQ ID NO: 4360362 - DNA, 25 bp, Homo sapien
gagatcgctaccgatttcgtccgcc

SEQ ID NO: 4360363 - DNA, 25 bp, Homo sapien
ttgaggccccagaacgccaaccgtg

SEQ ID NO: 4360364 - DNA, 25 bp, Homo sapien
ctgcccggtcaaggcccaggagttt

SEQ ID NO: 4360365 - DNA, 25 bp, Homo sapien
gggcagttccattcggtccccaggc

SEQ ID NO: 4360366 - DNA, 25 bp, Homo sapien
ttttccaactgaccccgaagccaga

SEQ ID NO: 4360367 - DNA, 25 bp, Homo sapien
atctcttttccaactgaccccgaag

SEQ ID NO: 4360368 - DNA, 25 bp, Homo sapien
tcttttccaactgaccccgaagcca

SEQ ID NO: 4360369 - DNA, 25 bp, Homo sapien
tgaaaggatatgagaactccctggg

SEQ ID NO: 4360370 - DNA, 25 bp, Homo sapien
cagactcttctcagttcttgacggt

SEQ ID NO: 4360371 - DNA, 25 bp, Homo sapien
gatgtgtgaaggaaatgctcagatc

SEQ ID NO: 4360372 - DNA, 25 bp, Homo sapien
ccaagctggtgaggctttttaagca

SEQ ID NO: 4360373 - DNA, 25 bp, Homo sapien
taaggcccaagtttacctagagtca

SEQ ID NO: 4360374 - DNA, 25 bp, Homo sapien
cctcaattggcaaatgggcaaaaga

SEQ ID NO: 4360375 - DNA, 25 bp, Homo sapien
gaaacctttacacaaatcagcctgc

SEQ ID NO: 4360376 - DNA, 25 bp, Homo sapien
gctatacacattttgcctggaaaga

SEQ ID NO: 4360377 - DNA, 25 bp, Homo sapien
attaaagactggtcccttacaggag

SEQ ID NO: 4360378 - DNA, 25 bp, Homo sapien
gggtacattcaagtcttctaggcca

SEQ ID NO: 4360379 - DNA, 25 bp, Homo sapien
tcttgcaagattcctgggctggact

SEQ ID NO: 4360380 - DNA, 25 bp, Homo sapien
gaactccagggtatatctacatctc

SEQ ID NO: 4360381 - DNA, 25 bp, Homo sapien
tacactgaaatcatggacctactcc

SEQ ID NO: 4360382 - DNA, 25 bp, Homo sapien
ggataacgtgtacaaacaaagttgc

SEQ ID NO: 4360383 - DNA, 25 bp, Homo sapien
cctactccagtaattaaggctgcag

SEQ ID NO: 4360384 - DNA, 25 bp, Homo sapien
cttccagtctggtagagatttacac

SEQ ID NO: 4360385 - DNA, 25 bp, Homo sapien
caccgtgtttgaccaggttggactc

SEQ ID NO: 4360386 - DNA, 25 bp, Homo sapien
tcaccgtgtttgaccaggttggact

SEQ ID NO: 4360387 - DNA, 25 bp, Homo sapien
ttcaccgtgtttgaccaggttggac

SEQ ID NO: 4360388 - DNA, 25 bp, Homo sapien
ccgtgtttgaccaggttggactcct

SEQ ID NO: 4360389 - DNA, 25 bp, Homo sapien
tatgaaattacacccattggctggg

SEQ ID NO: 4360390 - DNA, 25 bp, Homo sapien
tttcctatgaaattacacccattgg

SEQ ID NO: 4360391 - DNA, 25 bp, Homo sapien
tgaaattacacccattggctgggtg

SEQ ID NO: 4360392 - DNA, 25 bp, Homo sapien
tcctatgaaattacacccattggct

SEQ ID NO: 4360393 - DNA, 25 bp, Homo sapien
aactgtccttgttgctccctgtgga

SEQ ID NO: 4360394 - DNA, 25 bp, Homo sapien
gtgccaaatcctgaccaagagagaa

SEQ ID NO: 4360395 - DNA, 25 bp, Homo sapien
caatatgtgcatggtacttgaccca

SEQ ID NO: 4360396 - DNA, 25 bp, Homo sapien
taaagggcaatcctgagcatagaca

SEQ ID NO: 4360397 - DNA, 25 bp, Homo sapien
aattcatggagcgtttcactgcttt

SEQ ID NO: 4360398 - DNA, 25 bp, Homo sapien
gtggcttgaaaaccacttcactttg

SEQ ID NO: 4360399 - DNA, 25 bp, Homo sapien
gaaaaccacttcactttgtctcagt

SEQ ID NO: 4360400 - DNA, 25 bp, Homo sapien
ctttagttcctccttgtcagtccaa

SEQ ID NO: 4360401 - DNA, 25 bp, Homo sapien
accatctatgtttaaaggtattaat

SEQ ID NO: 4360402 - DNA, 25 bp, Homo sapien
ttatttacagtcaacattttagacc

SEQ ID NO: 4360403 - DNA, 25 bp, Homo sapien
taaaggtattaatgtaggccaggtg

SEQ ID NO: 4360404 - DNA, 25 bp, Homo sapien
tgtttaaaggtattaatgtaggcca

SEQ ID NO: 4360405 - DNA, 25 bp, Homo sapien
tgtagataaaactcaagtcactgtg

SEQ ID NO: 4360406 - DNA, 25 bp, Homo sapien
tcttataaggtgaaaagtgtagaag

SEQ ID NO: 4360407 - DNA, 25 bp, Homo sapien
aaatacagaggatatacatagtctc

SEQ ID NO: 4360408 - DNA, 25 bp, Homo sapien
caagagaatctgacttatttagtct

SEQ ID NO: 4360409 - DNA, 25 bp, Homo sapien
gcacctggctcaccttattgttctt

SEQ ID NO: 4360410 - DNA, 25 bp, Homo sapien
cctggctcaccttattgttctttaa

SEQ ID NO: 4360411 - DNA, 25 bp, Homo sapien
tgcacctggctcaccttattgttct

SEQ ID NO: 4360412 - DNA, 25 bp, Homo sapien
tggctcaccttattgttctttaata

SEQ ID NO: 4360413 - DNA, 25 bp, Homo sapien
aatggacgccaaggctttccagact

SEQ ID NO: 4360414 - DNA, 25 bp, Homo sapien
ggctttccagactctctagaatttt

SEQ ID NO: 4360415 - DNA, 25 bp, Homo sapien
tggagtttaatggacgccaaggctt

SEQ ID NO: 4360416 - DNA, 25 bp, Homo sapien
tttaatggacgccaaggctttccag

SEQ ID NO: 4360417 - DNA, 25 bp, Homo sapien
catgacatgtcaatgtcggcaggtc

SEQ ID NO: 4360418 - DNA, 25 bp, Homo sapien
ggcaggtctgtctatattctcatta

SEQ ID NO: 4360419 - DNA, 25 bp, Homo sapien
gaagctgcacccaggcatgacatgt

SEQ ID NO: 4360420 - DNA, 25 bp, Homo sapien
gcaaggccagctagagaagctgcac

SEQ ID NO: 4360421 - DNA, 25 bp, Homo sapien
cttacaggaatatgaatctctttct

SEQ ID NO: 4360422 - DNA, 25 bp, Homo sapien
cttcatcatctcatataactgtttg

SEQ ID NO: 4360423 - DNA, 25 bp, Homo sapien
gatttttcttacaggaatatgaatc

SEQ ID NO: 4360424 - DNA, 25 bp, Homo sapien
caggaatatgaatctctttcttcat

SEQ ID NO: 4360425 - DNA, 25 bp, Homo sapien
tatttactggtagaaggcttcaaac

SEQ ID NO: 4360426 - DNA, 25 bp, Homo sapien
catgcccaggggtcatttaatggag

SEQ ID NO: 4360427 - DNA, 25 bp, Homo sapien
ggcttcaaacccataaaagaggcac

SEQ ID NO: 4360428 - DNA, 25 bp, Homo sapien
caatattgctcgtacaagatggtat

SEQ ID NO: 4360429 - DNA, 25 bp, Homo sapien
agaatcctccaaacttttggccatt

SEQ ID NO: 4360430 - DNA, 25 bp, Homo sapien
tccactaaaagatggaacaaaacaa

SEQ ID NO: 4360431 - DNA, 25 bp, Homo sapien
atccactaaaagatggaacaaaaca

SEQ ID NO: 4360432 - DNA, 25 bp, Homo sapien
caaaaggtaccagggagattactga

SEQ ID NO: 4360433 - DNA, 25 bp, Homo sapien
cagactgaccactgggtggcacaaa

SEQ ID NO: 4360434 - DNA, 25 bp, Homo sapien
tagtctcactcttgagcagcacatg

SEQ ID NO: 4360435 - DNA, 25 bp, Homo sapien
tgccactaagctagggaggtagaag

SEQ ID NO: 4360436 - DNA, 25 bp, Homo sapien
taactgctgagcccattttatggca

SEQ ID NO: 4360437 - DNA, 25 bp, Homo sapien
taagcatacgacttcttgcccaatc

SEQ ID NO: 4360438 - DNA, 25 bp, Homo sapien
tttatggcagtaccagtgtctcctg

SEQ ID NO: 4360439 - DNA, 25 bp, Homo sapien
cattgctttcagctaagcatacgac

SEQ ID NO: 4360440 - DNA, 25 bp, Homo sapien
ataaataggataaatcctaactact

SEQ ID NO: 4360441 - DNA, 25 bp, Homo sapien
ctccagtagtctgttgaaggctatt

SEQ ID NO: 4360442 - DNA, 25 bp, Homo sapien
cacatcacctgtctggaagcagcac

SEQ ID NO: 4360443 - DNA, 25 bp, Homo sapien
tctggaagcagcactctccaaacat

SEQ ID NO: 4360444 - DNA, 25 bp, Homo sapien
tccagctaattctttttcattgaga

SEQ ID NO: 4360445 - DNA, 25 bp, Homo sapien
cacatccagctaattctttttcatt

SEQ ID NO: 4360446 - DNA, 25 bp, Homo sapien
cagctaattctttttcattgagacg

SEQ ID NO: 4360447 - DNA, 25 bp, Homo sapien
catccagctaattctttttcattga

SEQ ID NO: 4360448 - DNA, 25 bp, Homo sapien
taaccctgcacctatgcctagattg

SEQ ID NO: 4360449 - DNA, 25 bp, Homo sapien
ggcagaaggccccagtctaggagtt

SEQ ID NO: 4360450 - DNA, 25 bp, Homo sapien
acatcttgcaacaggtggtctctac

SEQ ID NO: 4360451 - DNA, 25 bp, Homo sapien
cctagattgaataagaccgatcctc

SEQ ID NO: 4360452 - DNA, 25 bp, Homo sapien
catgatagaatactggctcaatggt

SEQ ID NO: 4360453 - DNA, 25 bp, Homo sapien
ccttcccaaaaatatagcagatatt

SEQ ID NO: 4360454 - DNA, 25 bp, Homo sapien
tggctcaatggtccccttcccaaaa

SEQ ID NO: 4360455 - DNA, 25 bp, Homo sapien
gatattctggtcatatccagggacc

SEQ ID NO: 4360456 - DNA, 25 bp, Homo sapien
attggtataggcacaccaaatatct

SEQ ID NO: 4360457 - DNA, 25 bp, Homo sapien
ggtataggcacaccaaatatctctt

SEQ ID NO: 4360458 - DNA, 25 bp, Homo sapien
tcttcatccactgatccaaaattgt

SEQ ID NO: 4360459 - DNA, 25 bp, Homo sapien
ctcttcatccactgatccaaaattg

SEQ ID NO: 4360460 - DNA, 25 bp, Homo sapien
gtaggagagaaagtggtatcgaaat

SEQ ID NO: 4360461 - DNA, 25 bp, Homo sapien
ggtatcgaaattagagaggtaatca

SEQ ID NO: 4360462 - DNA, 25 bp, Homo sapien
gagaggtaatcatcccactccaaca

SEQ ID NO: 4360463 - DNA, 25 bp, Homo sapien
gaaagtggtatcgaaattagagagg

SEQ ID NO: 4360464 - DNA, 25 bp, Homo sapien
cttatatgggtcaaaaagtccagtt

SEQ ID NO: 4360465 - DNA, 25 bp, Homo sapien
tatatgggtcaaaaagtccagttgt

SEQ ID NO: 4360466 - DNA, 25 bp, Homo sapien
ccagttgtactagcatttgaaaaat

SEQ ID NO: 4360467 - DNA, 25 bp, Homo sapien
aaaagtccagttgtactagcatttg

SEQ ID NO: 4360468 - DNA, 25 bp, Homo sapien
cttttgtgagcttatataacaacca

SEQ ID NO: 4360469 - DNA, 25 bp, Homo sapien
gagcttatataacaaccaggtatca

SEQ ID NO: 4360470 - DNA, 25 bp, Homo sapien
taacaaccaggtatcaatagtccca

SEQ ID NO: 4360471 - DNA, 25 bp, Homo sapien
caggtatcaatagtcccaaagcagc

SEQ ID NO: 4360472 - DNA, 25 bp, Homo sapien
gtaaaatccagaccaatctcaaaga

SEQ ID NO: 4360473 - DNA, 25 bp, Homo sapien
tctcaaagaagtctgctgggttgtg

SEQ ID NO: 4360474 - DNA, 25 bp, Homo sapien
ggttgtgaaagtgaacaaactggct

SEQ ID NO: 4360475 - DNA, 25 bp, Homo sapien
gaagcactcggcaagaactgtgaaa

SEQ ID NO: 4360476 - DNA, 25 bp, Homo sapien
tctttgtagtgacggaactgttcag

SEQ ID NO: 4360477 - DNA, 25 bp, Homo sapien
cagtatcttgcatatgctcctggat

SEQ ID NO: 4360478 - DNA, 25 bp, Homo sapien
tagttacagaagaacaacacaagag

SEQ ID NO: 4360479 - DNA, 25 bp, Homo sapien
aacaacttgaatgaatctccaggga

SEQ ID NO: 4360480 - DNA, 25 bp, Homo sapien
agccatcatgcctgtaatgataaga

SEQ ID NO: 4360481 - DNA, 25 bp, Homo sapien
atgataagagcttctaacagtctgc

SEQ ID NO: 4360482 - DNA, 25 bp, Homo sapien
aacagtctgctagttatctataata

SEQ ID NO: 4360483 - DNA, 25 bp, Homo sapien
taatatctcaatatccatcctgagc

SEQ ID NO: 4360484 - DNA, 25 bp, Homo sapien
taacatgtgaaactctggtccacca

SEQ ID NO: 4360485 - DNA, 25 bp, Homo sapien
tgtgaaactctggtccaccacaaac

SEQ ID NO: 4360486 - DNA, 25 bp, Homo sapien
ttctcactaacatgtgaaactctgg

SEQ ID NO: 4360487 - DNA, 25 bp, Homo sapien
cactaacatgtgaaactctggtcca

SEQ ID NO: 4360488 - DNA, 25 bp, Homo sapien
gaacttcctgaggtacaagtactga

SEQ ID NO: 4360489 - DNA, 25 bp, Homo sapien
caagtactgaagtctaccacatacg

SEQ ID NO: 4360490 - DNA, 25 bp, Homo sapien
cacatacgcctttgattggctatta

SEQ ID NO: 4360491 - DNA, 25 bp, Homo sapien
ttggctattattaaacttcactgga

SEQ ID NO: 4360492 - DNA, 25 bp, Homo sapien
ataagaagagaattattccaagatt

SEQ ID NO: 4360493 - DNA, 25 bp, Homo sapien
agtcttgccaacttataaagttgtg

SEQ ID NO: 4360494 - DNA, 25 bp, Homo sapien
taaagttgtgaaaatgatttcctgt

SEQ ID NO: 4360495 - DNA, 25 bp, Homo sapien
caagattttacaagttcaacagctc

SEQ ID NO: 4360496 - DNA, 25 bp, Homo sapien
gatttgccataaccaaggccagtgc

SEQ ID NO: 4360497 - DNA, 25 bp, Homo sapien
gaggaactgcagatgtaggcatcaa

SEQ ID NO: 4360498 - DNA, 25 bp, Homo sapien
ttgttccacgtaataaaagttgctc

SEQ ID NO: 4360499 - DNA, 25 bp, Homo sapien
gtaataaaagttgctctctgtgttg

SEQ ID NO: 4360500 - DNA, 25 bp, Homo sapien
aatgccaagaccaacaatttgattc

SEQ ID NO: 4360501 - DNA, 25 bp, Homo sapien
caatttgattcatctgtattcctgc

SEQ ID NO: 4360502 - DNA, 25 bp, Homo sapien
ttttattacggcaacaaattgaatc

SEQ ID NO: 4360503 - DNA, 25 bp, Homo sapien
aaattgaatccaaagaacatcagga

SEQ ID NO: 4360504 - DNA, 25 bp, Homo sapien
tcaatttctacccagccaatttgag

SEQ ID NO: 4360505 - DNA, 25 bp, Homo sapien
aagaacatcaggatcaatttctacc

SEQ ID NO: 4360506 - DNA, 25 bp, Homo sapien
cacctctaaggtggtgggaagaaga

SEQ ID NO: 4360507 - DNA, 25 bp, Homo sapien
cttgctcctgggcaagtgctacaaa

SEQ ID NO: 4360508 - DNA, 25 bp, Homo sapien
gctcctgggcaagtgctacaaagaa

SEQ ID NO: 4360509 - DNA, 25 bp, Homo sapien
ggcactctagctggaccttgctcct

SEQ ID NO: 4360510 - DNA, 25 bp, Homo sapien
gacgtggcagcggatcacagaactg

SEQ ID NO: 4360511 - DNA, 25 bp, Homo sapien
cgccgcccggtcatagacgtggcag

SEQ ID NO: 4360512 - DNA, 25 bp, Homo sapien
tctctgctccgggtccgtgagcagc

SEQ ID NO: 4360513 - DNA, 25 bp, Homo sapien
cttctgcacgctggagccgcagacc

SEQ ID NO: 4360514 - DNA, 25 bp, Homo sapien
ccgcacgcctctccgctacagccgc

SEQ ID NO: 4360515 - DNA, 25 bp, Homo sapien
tcccgcacgcctctccgctacagcc

SEQ ID NO: 4360516 - DNA, 25 bp, Homo sapien
gatcccgcacgcctctccgctacag

SEQ ID NO: 4360517 - DNA, 25 bp, Homo sapien
cccgatcccgcacgcctctccgcta

SEQ ID NO: 4360518 - DNA, 25 bp, Homo sapien
ctacccagagggcgcgctacaaatc

SEQ ID NO: 4360519 - DNA, 25 bp, Homo sapien
caacccggctcagccggagagccta

SEQ ID NO: 4360520 - DNA, 25 bp, Homo sapien
gccccaacccggctcagccggagag

SEQ ID NO: 4360521 - DNA, 25 bp, Homo sapien
tacaaatcccaatgctccagagtcc

SEQ ID NO: 4360522 - DNA, 25 bp, Homo sapien
tcgaaccagaaggaatgagacccag

SEQ ID NO: 4360523 - DNA, 25 bp, Homo sapien
tgaagcagtcgaaccagaaggaatg

SEQ ID NO: 4360524 - DNA, 25 bp, Homo sapien
tcacttcctgaagcagtcgaaccag

SEQ ID NO: 4360525 - DNA, 25 bp, Homo sapien
cagtcgaaccagaaggaatgagacc

SEQ ID NO: 4360526 - DNA, 25 bp, Homo sapien
cataaatcaaacgaataaacactga

SEQ ID NO: 4360527 - DNA, 25 bp, Homo sapien
taaatcaaacgaataaacactgagt

SEQ ID NO: 4360528 - DNA, 25 bp, Homo sapien
ccaaagcatgaaagggagtatgaat

SEQ ID NO: 4360529 - DNA, 25 bp, Homo sapien
aaccaaagcatgaaagggagtatga

SEQ ID NO: 4360530 - DNA, 25 bp, Homo sapien
gatatgtttgtgcaaacttgacagc

SEQ ID NO: 4360531 - DNA, 25 bp, Homo sapien
cctgccacccagatatgtttgtgca

SEQ ID NO: 4360532 - DNA, 25 bp, Homo sapien
tgccactgtgtccaaggctggcttt

SEQ ID NO: 4360533 - DNA, 25 bp, Homo sapien
gagagctgagtagcgacttgcctgc

SEQ ID NO: 4360534 - DNA, 25 bp, Homo sapien
ttatgtttatgaacagccaaagcct

SEQ ID NO: 4360535 - DNA, 25 bp, Homo sapien
tttatgaacagccaaagcctggaaa

SEQ ID NO: 4360536 - DNA, 25 bp, Homo sapien
cgatctgtacaggtcgtgggcagga

SEQ ID NO: 4360537 - DNA, 25 bp, Homo sapien
cacttggggcacaggttttgtggac

SEQ ID NO: 4360538 - DNA, 25 bp, Homo sapien
gaggccactgcctaagaagagcatc

SEQ ID NO: 4360539 - DNA, 25 bp, Homo sapien
taaagagaggccactgcctaagaag

SEQ ID NO: 4360540 - DNA, 25 bp, Homo sapien
aagagaggccactgcctaagaagag

SEQ ID NO: 4360541 - DNA, 25 bp, Homo sapien
agagaggccactgcctaagaagagc

SEQ ID NO: 4360542 - DNA, 25 bp, Homo sapien
taaatacgtcaaggaaagatgcaac

SEQ ID NO: 4360543 - DNA, 25 bp, Homo sapien
ctttgagtttagctaaaccattttg

SEQ ID NO: 4360544 - DNA, 25 bp, Homo sapien
gatctagacagtaagctttcagagt

SEQ ID NO: 4360545 - DNA, 25 bp, Homo sapien
gtattgtcaccaaccacacagcagg

SEQ ID NO: 4360546 - DNA, 25 bp, Homo sapien
ctaaatatgtcactgtgaacttcct

SEQ ID NO: 4360547 - DNA, 25 bp, Homo sapien
ctcaacagtttgaattcgtcagaca

SEQ ID NO: 4360548 - DNA, 25 bp, Homo sapien
cttcctctcgtagaatgataatcaa

SEQ ID NO: 4360549 - DNA, 25 bp, Homo sapien
gctgctgctgggattgatgttttta

SEQ ID NO: 4360550 - DNA, 25 bp, Homo sapien
atgtttttgccaccggttctgataa

SEQ ID NO: 4360551 - DNA, 25 bp, Homo sapien
caccggttctgataataggatttaa

SEQ ID NO: 4360552 - DNA, 25 bp, Homo sapien
ttttgccaccggttctgataatagg

SEQ ID NO: 4360553 - DNA, 25 bp, Homo sapien
tatttctccattgtgtttaacttct

SEQ ID NO: 4360554 - DNA, 25 bp, Homo sapien
gagcctcaggtctagaactgggagg

SEQ ID NO: 4360555 - DNA, 25 bp, Homo sapien
agtcagctagatctccacacctgca

SEQ ID NO: 4360556 - DNA, 25 bp, Homo sapien
tccattaaattgtgggagtccacac

SEQ ID NO: 4360557 - DNA, 25 bp, Homo sapien
tcttggcactaccattgcaagtcag

SEQ ID NO: 4360558 - DNA, 25 bp, Homo sapien
tttgagccgtgtcacaagttttccc

SEQ ID NO: 4360559 - DNA, 25 bp, Homo sapien
gaactcctttgagccgtgtcacaag

SEQ ID NO: 4360560 - DNA, 25 bp, Homo sapien
gagccgtgtcacaagttttcccttc

SEQ ID NO: 4360561 - DNA, 25 bp, Homo sapien
tcctttgagccgtgtcacaagtttt

SEQ ID NO: 4360562 - DNA, 25 bp, Homo sapien
ggcctgcctgctcttacatgtcata

SEQ ID NO: 4360563 - DNA, 25 bp, Homo sapien
gtcataggcccagtaacctgagtca

SEQ ID NO: 4360564 - DNA, 25 bp, Homo sapien
tggaagaagcctatgtgaagagccc

SEQ ID NO: 4360565 - DNA, 25 bp, Homo sapien
gacgtgggaacatactcctggaaga

SEQ ID NO: 4360566 - DNA, 25 bp, Homo sapien
aatactatgtgggactaggcaagtt

SEQ ID NO: 4360567 - DNA, 25 bp, Homo sapien
tccctgtgggctatgtaaacatcaa

SEQ ID NO: 4360568 - DNA, 25 bp, Homo sapien
cagtgggctttaccaagcctgccta

SEQ ID NO: 4360569 - DNA, 25 bp, Homo sapien
aacatcaaacctgattgaacggatc

SEQ ID NO: 4360570 - DNA, 25 bp, Homo sapien
catccctcctctggataaatgaaca

SEQ ID NO: 4360571 - DNA, 25 bp, Homo sapien
agattccgtaagagaagttgtccac

SEQ ID NO: 4360572 - DNA, 25 bp, Homo sapien
tcctctggataaatgaacaaagacc

SEQ ID NO: 4360573 - DNA, 25 bp, Homo sapien
ctgcctgtccagattccgtaagaga

SEQ ID NO: 4360574 - DNA, 25 bp, Homo sapien
tcatgctagaaatctacggataacg

SEQ ID NO: 4360575 - DNA, 25 bp, Homo sapien
actctttcagtgactctcatatttt

SEQ ID NO: 4360576 - DNA, 25 bp, Homo sapien
cacagcatcgtgaggctaacttcat

SEQ ID NO: 4360577 - DNA, 25 bp, Homo sapien
ttaaaatcctttgcacagcatcgtg

SEQ ID NO: 4360578 - DNA, 25 bp, Homo sapien
tacggtatagtccaaaaatgcagtg

SEQ ID NO: 4360579 - DNA, 25 bp, Homo sapien
tgtctgtgaaacttaacggcctgtc

SEQ ID NO: 4360580 - DNA, 25 bp, Homo sapien
ctcaaagaagcagttggatacaggc

SEQ ID NO: 4360581 - DNA, 25 bp, Homo sapien
aaggaagctcctgcaaaactgatgg

SEQ ID NO: 4360582 - DNA, 25 bp, Homo sapien
agtagctgggactaaaggcatgtgc

SEQ ID NO: 4360583 - DNA, 25 bp, Homo sapien
actaaaggcatgtgccatcacgccc

SEQ ID NO: 4360584 - DNA, 25 bp, Homo sapien
cagactctgcctcgcgggttcaaat

SEQ ID NO: 4360585 - DNA, 25 bp, Homo sapien
atgattctcatgcctcagcctcccg

SEQ ID NO: 4360586 - DNA, 25 bp, Homo sapien
ggtgccgcttcttctatgctctaaa

SEQ ID NO: 4360587 - DNA, 25 bp, Homo sapien
caggatgcttcaatcatgaggccaa

SEQ ID NO: 4360588 - DNA, 25 bp, Homo sapien
cataggccctgctgagaaatcgtca

SEQ ID NO: 4360589 - DNA, 25 bp, Homo sapien
gagaatcccagcatcattgaacagt

SEQ ID NO: 4360590 - DNA, 25 bp, Homo sapien
attaacttaattctaagagccaaat

SEQ ID NO: 4360591 - DNA, 25 bp, Homo sapien
cagcatgaaaagtgcctgataactt

SEQ ID NO: 4360592 - DNA, 25 bp, Homo sapien
aatttgatacacagtcttttaaaca

SEQ ID NO: 4360593 - DNA, 25 bp, Homo sapien
tttttatgagacatagatatgtatt

SEQ ID NO: 4360594 - DNA, 25 bp, Homo sapien
gattggtgttgacttatggtgagat

SEQ ID NO: 4360595 - DNA, 25 bp, Homo sapien
caatcggagaggacttcaaagaagc

SEQ ID NO: 4360596 - DNA, 25 bp, Homo sapien
aagatgcaggttgagcaatcggaga

SEQ ID NO: 4360597 - DNA, 25 bp, Homo sapien
gagatatactatggccttgagaggc

SEQ ID NO: 4360598 - DNA, 25 bp, Homo sapien
gaactctgggcttccttattctcaa

SEQ ID NO: 4360599 - DNA, 25 bp, Homo sapien
aactgattgtgcacaccccctggta

SEQ ID NO: 4360600 - DNA, 25 bp, Homo sapien
tgattgtgcacaccccctggtattc

SEQ ID NO: 4360601 - DNA, 25 bp, Homo sapien
taaactgattgtgcacaccccctgg

SEQ ID NO: 4360602 - DNA, 25 bp, Homo sapien
ctgcagaggtataaactgattgtgc

SEQ ID NO: 4360603 - DNA, 25 bp, Homo sapien
aactggcaccgatggtccccatggc

SEQ ID NO: 4360604 - DNA, 25 bp, Homo sapien
gagatgagacgacgaaggcattata

SEQ ID NO: 4360605 - DNA, 25 bp, Homo sapien
ttcccaggaactggcaccgatggtc

SEQ ID NO: 4360606 - DNA, 25 bp, Homo sapien
attgagccaaagagatgagacgacg

SEQ ID NO: 4360607 - DNA, 25 bp, Homo sapien
ggactgtgtggactatctacacaaa

SEQ ID NO: 4360608 - DNA, 25 bp, Homo sapien
tggcaaaaggcctacacttacttca

SEQ ID NO: 4360609 - DNA, 25 bp, Homo sapien
caggatcctttcctaggactgtgtg

SEQ ID NO: 4360610 - DNA, 25 bp, Homo sapien
gacctccttctgctagcctttttgg

SEQ ID NO: 4360611 - DNA, 25 bp, Homo sapien
tagttgcttccatagtgatcccagc

SEQ ID NO: 4360612 - DNA, 25 bp, Homo sapien
caatgcatagttgcttccatagtga

SEQ ID NO: 4360613 - DNA, 25 bp, Homo sapien
tgcccccaatgcatagttgcttcca

SEQ ID NO: 4360614 - DNA, 25 bp, Homo sapien
tgcatagttgcttccatagtgatcc

SEQ ID NO: 4360615 - DNA, 25 bp, Homo sapien
aacctcttcttactactctagccat

SEQ ID NO: 4360616 - DNA, 25 bp, Homo sapien
caacctcttcttactactctagcca

SEQ ID NO: 4360617 - DNA, 25 bp, Homo sapien
tcaacctcttcttactactctagcc

SEQ ID NO: 4360618 - DNA, 25 bp, Homo sapien
aggaatggttccaggtggtacagct

SEQ ID NO: 4360619 - DNA, 25 bp, Homo sapien
aagggaaattcatgcctaaggagcc

SEQ ID NO: 4360620 - DNA, 25 bp, Homo sapien
aatggttccaggtggtacagctgaa

SEQ ID NO: 4360621 - DNA, 25 bp, Homo sapien
tacagctgaaggataatttgcaaat

SEQ ID NO: 4360622 - DNA, 25 bp, Homo sapien
attttacttggcaaacggtcattgt

SEQ ID NO: 4360623 - DNA, 25 bp, Homo sapien
cactgtggcccatgtaccagtaagc

SEQ ID NO: 4360624 - DNA, 25 bp, Homo sapien
taaagcaaaaagtgcagctttctct

SEQ ID NO: 4360625 - DNA, 25 bp, Homo sapien
ccagtaagccattagataattttac

SEQ ID NO: 4360626 - DNA, 25 bp, Homo sapien
taaaatgtagagcaggacgggcatg

SEQ ID NO: 4360627 - DNA, 25 bp, Homo sapien
aacacgtatcactagggattgacag

SEQ ID NO: 4360628 - DNA, 25 bp, Homo sapien
gcttctcctattactactgtggtga

SEQ ID NO: 4360629 - DNA, 25 bp, Homo sapien
tattaagcagacaggagaatctagc

SEQ ID NO: 4360630 - DNA, 25 bp, Homo sapien
gtgatgcacccgttaactctttatt

SEQ ID NO: 4360631 - DNA, 25 bp, Homo sapien
gatgcacccgttaactctttattta

SEQ ID NO: 4360632 - DNA, 25 bp, Homo sapien
tgtgatgcacccgttaactctttat

SEQ ID NO: 4360633 - DNA, 25 bp, Homo sapien
ggtgtgatgcacccgttaactcttt

SEQ ID NO: 4360634 - DNA, 25 bp, Homo sapien
catcggtattttgagaggagttgca

SEQ ID NO: 4360635 - DNA, 25 bp, Homo sapien
atttaaacatccttgcatacctggg

SEQ ID NO: 4360636 - DNA, 25 bp, Homo sapien
tctttcagcgtttggcagaattcag

SEQ ID NO: 4360637 - DNA, 25 bp, Homo sapien
gaattcagtagcgaaaacaccaggt

SEQ ID NO: 4360638 - DNA, 25 bp, Homo sapien
tgccaggatacctgctgcccagttc

SEQ ID NO: 4360639 - DNA, 25 bp, Homo sapien
tattagtttgaggaatcttgccagg

SEQ ID NO: 4360640 - DNA, 25 bp, Homo sapien
ggtaagaagcataaatctatgctgc

SEQ ID NO: 4360641 - DNA, 25 bp, Homo sapien
aagatccctggctctattagtttga

SEQ ID NO: 4360642 - DNA, 25 bp, Homo sapien
ggttgtggcattccaacaagggaac

SEQ ID NO: 4360643 - DNA, 25 bp, Homo sapien
gggcaggccaacacatattgtccat

SEQ ID NO: 4360644 - DNA, 25 bp, Homo sapien
ttcgagaaagttcagttactggtgt

SEQ ID NO: 4360645 - DNA, 25 bp, Homo sapien
catagactgaacattatggtactca

SEQ ID NO: 4360646 - DNA, 25 bp, Homo sapien
gattatctataacactacaattaag

SEQ ID NO: 4360647 - DNA, 25 bp, Homo sapien
tagatctattggttacatggttgta

SEQ ID NO: 4360648 - DNA, 25 bp, Homo sapien
cactacaattaagtaatcacaagaa

SEQ ID NO: 4360649 - DNA, 25 bp, Homo sapien
caagaagacatttagtgactgtaga

SEQ ID NO: 4360650 - DNA, 25 bp, Homo sapien
taggctgagagggtaatccatattc

SEQ ID NO: 4360651 - DNA, 25 bp, Homo sapien
tttgtttaggctgagagggtaatcc

SEQ ID NO: 4360652 - DNA, 25 bp, Homo sapien
gagagggtaatccatattcatctct

SEQ ID NO: 4360653 - DNA, 25 bp, Homo sapien
ttattttgtttaggctgagagggta

SEQ ID NO: 4360654 - DNA, 25 bp, Homo sapien
cagtgttagagccatcaatttttag

SEQ ID NO: 4360655 - DNA, 25 bp, Homo sapien
gggatttcattagcaatctgtttga

SEQ ID NO: 4360656 - DNA, 25 bp, Homo sapien
tcattcttatggtccacagtgttag

SEQ ID NO: 4360657 - DNA, 25 bp, Homo sapien
ttagaatttctttaagcatccgtgt

SEQ ID NO: 4360658 - DNA, 25 bp, Homo sapien
aaagtatggctaaattgcccagggc

SEQ ID NO: 4360659 - DNA, 25 bp, Homo sapien
tacagaaacgatacttatcctcctg

SEQ ID NO: 4360660 - DNA, 25 bp, Homo sapien
tcatcccagttacctagtagcaatg

SEQ ID NO: 4360661 - DNA, 25 bp, Homo sapien
ggtttcctcacaagatgacaataat

SEQ ID NO: 4360662 - DNA, 25 bp, Homo sapien
gcatgggatatgtctgcatggtcaa

SEQ ID NO: 4360663 - DNA, 25 bp, Homo sapien
gtttgaacacttgcatgggatatgt

SEQ ID NO: 4360664 - DNA, 25 bp, Homo sapien
tggtcaacagtcgagaaattaccac

SEQ ID NO: 4360665 - DNA, 25 bp, Homo sapien
cagcctccatgatggaagtgtttga

SEQ ID NO: 4360666 - DNA, 25 bp, Homo sapien
tccccatgatgagatgactgtactt

SEQ ID NO: 4360667 - DNA, 25 bp, Homo sapien
catggcaaatgactgtggtgacaaa

SEQ ID NO: 4360668 - DNA, 25 bp, Homo sapien
tcaaagatgctaaaaagttctcaat

SEQ ID NO: 4360669 - DNA, 25 bp, Homo sapien
aaagatgctaaaaagttctcaattc

SEQ ID NO: 4360670 - DNA, 25 bp, Homo sapien
aaatggtcattcgattttcactcaa

SEQ ID NO: 4360671 - DNA, 25 bp, Homo sapien
atgtacaaaaatggtcattcgattt

SEQ ID NO: 4360672 - DNA, 25 bp, Homo sapien
gaacgtataatacaagaacacacaa

SEQ ID NO: 4360673 - DNA, 25 bp, Homo sapien
cactcaatcatcttcccaggtgtta

SEQ ID NO: 4360674 - DNA, 25 bp, Homo sapien
tatcaatagcatttggataaccagt

SEQ ID NO: 4360675 - DNA, 25 bp, Homo sapien
atttggataaccagtcacaaccttt

SEQ ID NO: 4360676 - DNA, 25 bp, Homo sapien
cttatcaatagcatttggataacca

SEQ ID NO: 4360677 - DNA, 25 bp, Homo sapien
tggataaccagtcacaaccttttgg

SEQ ID NO: 4360678 - DNA, 25 bp, Homo sapien
tcatttctcttcaatagcttaatat

SEQ ID NO: 4360679 - DNA, 25 bp, Homo sapien
ctgagacttctggactttcatttct

SEQ ID NO: 4360680 - DNA, 25 bp, Homo sapien
ttatatttggcaggcccttctaaag

SEQ ID NO: 4360681 - DNA, 25 bp, Homo sapien
ttaatattatatttggcaggccctt

SEQ ID NO: 4360682 - DNA, 25 bp, Homo sapien
tcatgggttcaagtgattctcctgc

SEQ ID NO: 4360683 - DNA, 25 bp, Homo sapien
tgccaccacgcctggctgatttttt

SEQ ID NO: 4360684 - DNA, 25 bp, Homo sapien
taactgggactacagcaggcacatg

SEQ ID NO: 4360685 - DNA, 25 bp, Homo sapien
agctcactgcgacctttgcctcatg

SEQ ID NO: 4360686 - DNA, 25 bp, Homo sapien
ttttgggaccaacactcagctttag

SEQ ID NO: 4360687 - DNA, 25 bp, Homo sapien
ctcagctttaggactcttacactct

SEQ ID NO: 4360688 - DNA, 25 bp, Homo sapien
cattttttgggaccaacactcagct

SEQ ID NO: 4360689 - DNA, 25 bp, Homo sapien
cactcagctttaggactcttacact

SEQ ID NO: 4360690 - DNA, 25 bp, Homo sapien
tcactagactgttcattaagccagt

SEQ ID NO: 4360691 - DNA, 25 bp, Homo sapien
atcactagactgttcattaagccag

SEQ ID NO: 4360692 - DNA, 25 bp, Homo sapien
tatcactagactgttcattaagcca

SEQ ID NO: 4360693 - DNA, 25 bp, Homo sapien
ctatcactagactgttcattaagcc

SEQ ID NO: 4360694 - DNA, 25 bp, Homo sapien
ccttgggagttcatcagcaacagcc

SEQ ID NO: 4360695 - DNA, 25 bp, Homo sapien
cagtactccccatgggcgtgtggtt

SEQ ID NO: 4360696 - DNA, 25 bp, Homo sapien
ccttgggccagagggaaccccactg

SEQ ID NO: 4360697 - DNA, 25 bp, Homo sapien
gggaaatactcttctgcccgcagaa

SEQ ID NO: 4360698 - DNA, 25 bp, Homo sapien
ttggcttatttcttgaggtagaact

SEQ ID NO: 4360699 - DNA, 25 bp, Homo sapien
ttatttcttgaggtagaactgcacc

SEQ ID NO: 4360700 - DNA, 25 bp, Homo sapien
gatttatgatgttgatttacttggc

SEQ ID NO: 4360701 - DNA, 25 bp, Homo sapien
tgtcattaaagccagatttatgatg

SEQ ID NO: 4360702 - DNA, 25 bp, Homo sapien
caacatgtcctaactggtagtgggc

SEQ ID NO: 4360703 - DNA, 25 bp, Homo sapien
catggacagaaacactcaagactct

SEQ ID NO: 4360704 - DNA, 25 bp, Homo sapien
gggctttggactacagcagtacatt

SEQ ID NO: 4360705 - DNA, 25 bp, Homo sapien
tgcatgggagtaccaaggaagacct

SEQ ID NO: 4360706 - DNA, 25 bp, Homo sapien
aatgggcattctaagtggaaggaac

SEQ ID NO: 4360707 - DNA, 25 bp, Homo sapien
cacagaagcctagggaaataagcct

SEQ ID NO: 4360708 - DNA, 25 bp, Homo sapien
gaaagataaagtaaagagaccagtc

SEQ ID NO: 4360709 - DNA, 25 bp, Homo sapien
caaatgggaatcatctgtgggaaag

SEQ ID NO: 4360710 - DNA, 25 bp, Homo sapien
caagatttaatccagtatctgcaac

SEQ ID NO: 4360711 - DNA, 25 bp, Homo sapien
aatgcttagagtcaaaaatttttgc

SEQ ID NO: 4360712 - DNA, 25 bp, Homo sapien
aaaggtcccagaatcggcctcacct

SEQ ID NO: 4360713 - DNA, 25 bp, Homo sapien
ccattcctcaggcatataatctaaa

SEQ ID NO: 4360714 - DNA, 25 bp, Homo sapien
aaaatccaggaaataccacttggag

SEQ ID NO: 4360715 - DNA, 25 bp, Homo sapien
ggtgaggactccctatacatgatgc

SEQ ID NO: 4360716 - DNA, 25 bp, Homo sapien
acctgacttcacgttatactgtaag

SEQ ID NO: 4360717 - DNA, 25 bp, Homo sapien
ccacttggagtatcagccttgaaaa

SEQ ID NO: 4360718 - DNA, 25 bp, Homo sapien
ttctttaaattaattgtccatcaaa

SEQ ID NO: 4360719 - DNA, 25 bp, Homo sapien
attaattgtccatcaaaacaaggaa

SEQ ID NO: 4360720 - DNA, 25 bp, Homo sapien
tctttaaattaattgtccatcaaaa

SEQ ID NO: 4360721 - DNA, 25 bp, Homo sapien
taaattaattgtccatcaaaacaag

SEQ ID NO: 4360722 - DNA, 25 bp, Homo sapien
ctgccaaatgttgcagaattcatca

SEQ ID NO: 4360723 - DNA, 25 bp, Homo sapien
cttctcttgtatagttggctgaaag

SEQ ID NO: 4360724 - DNA, 25 bp, Homo sapien
gactgccaaatgttgcagaattcat

SEQ ID NO: 4360725 - DNA, 25 bp, Homo sapien
tatagttggctgaaagtattgcatc

SEQ ID NO: 4360726 - DNA, 25 bp, Homo sapien
gctcagcatagtaatcacaaaagta

SEQ ID NO: 4360727 - DNA, 25 bp, Homo sapien
cataggtgattgtaacctcgaattc

SEQ ID NO: 4360728 - DNA, 25 bp, Homo sapien
gatgggttgccatgttttgctgtgt

SEQ ID NO: 4360729 - DNA, 25 bp, Homo sapien
ttctatgagagtgaaactggtgttc

SEQ ID NO: 4360730 - DNA, 25 bp, Homo sapien
tagcagatagcataggacatttgga

SEQ ID NO: 4360731 - DNA, 25 bp, Homo sapien
gataaacgtgatataatccttgccc

SEQ ID NO: 4360732 - DNA, 25 bp, Homo sapien
tagcagaggtagaatgctagcaata

SEQ ID NO: 4360733 - DNA, 25 bp, Homo sapien
tgtatggtagaaacttgaaaattgc

SEQ ID NO: 4360734 - DNA, 25 bp, Homo sapien
gttgagggctcccaaatgcccagag

SEQ ID NO: 4360735 - DNA, 25 bp, Homo sapien
tgagggctcccaaatgcccagagga

SEQ ID NO: 4360736 - DNA, 25 bp, Homo sapien
caaaaagtgattgaggggaatggtt

SEQ ID NO: 4360737 - DNA, 25 bp, Homo sapien
gggctcccaaatgcccagaggaaac

SEQ ID NO: 4360738 - DNA, 25 bp, Homo sapien
tgagctatgttgatgtacagctggt

SEQ ID NO: 4360739 - DNA, 25 bp, Homo sapien
ttgagctatgttgatgtacagctgg

SEQ ID NO: 4360740 - DNA, 25 bp, Homo sapien
gagctatgttgatgtacagctggtt

SEQ ID NO: 4360741 - DNA, 25 bp, Homo sapien
cacttgttggcagtcgataacctct

SEQ ID NO: 4360742 - DNA, 25 bp, Homo sapien
cagtcgataacctctaccaggtgag

SEQ ID NO: 4360743 - DNA, 25 bp, Homo sapien
caaggcacttgttggcagtcgataa

SEQ ID NO: 4360744 - DNA, 25 bp, Homo sapien
aaggttcaccaaggcacttgttggc

SEQ ID NO: 4360745 - DNA, 25 bp, Homo sapien
ataatacttcaaatagtacatcggc

SEQ ID NO: 4360746 - DNA, 25 bp, Homo sapien
tcaaatagtacatcggcttctctat

SEQ ID NO: 4360747 - DNA, 25 bp, Homo sapien
ttaaccctccaggaaattcttcatc

SEQ ID NO: 4360748 - DNA, 25 bp, Homo sapien
tgttaaccctccaggaaattcttca

SEQ ID NO: 4360749 - DNA, 25 bp, Homo sapien
cttttattcctatgatggtgcctcg

SEQ ID NO: 4360750 - DNA, 25 bp, Homo sapien
tcacatttacaacacggtcaaaaag

SEQ ID NO: 4360751 - DNA, 25 bp, Homo sapien
cgaaggccaactggaactgagaagt

SEQ ID NO: 4360752 - DNA, 25 bp, Homo sapien
gacaaaattctgcatcccgatcagg

SEQ ID NO: 4360753 - DNA, 25 bp, Homo sapien
gggtttcactgttactcgcaccttc

SEQ ID NO: 4360754 - DNA, 25 bp, Homo sapien
cactgttactcgcaccttcttatta

SEQ ID NO: 4360755 - DNA, 25 bp, Homo sapien
tttcactgttactcgcaccttctta

SEQ ID NO: 4360756 - DNA, 25 bp, Homo sapien
gttactcgcaccttcttattattct

SEQ ID NO: 4360757 - DNA, 25 bp, Homo sapien
attcaaaatatgatcacctaagagc

SEQ ID NO: 4360758 - DNA, 25 bp, Homo sapien
tcataataggcccaacccatatcta

SEQ ID NO: 4360759 - DNA, 25 bp, Homo sapien
ctggctattcaaaatatgatcacct

SEQ ID NO: 4360760 - DNA, 25 bp, Homo sapien
ctaatgtatgagaagtttggggact

SEQ ID NO: 4360761 - DNA, 25 bp, Homo sapien
tttctcaacaatagctgcatccaga

SEQ ID NO: 4360762 - DNA, 25 bp, Homo sapien
cgagataaagtactgacaggatgtc

SEQ ID NO: 4360763 - DNA, 25 bp, Homo sapien
tgcacttttcgacttcttcctcaat

SEQ ID NO: 4360764 - DNA, 25 bp, Homo sapien
acaggatgtccttttagccaagtaa

SEQ ID NO: 4360765 - DNA, 25 bp, Homo sapien
ttttggctatataactaaatagttc

SEQ ID NO: 4360766 - DNA, 25 bp, Homo sapien
taagtactctgccagaagttgttct

SEQ ID NO: 4360767 - DNA, 25 bp, Homo sapien
ttccaactttcttagtatatccagg

SEQ ID NO: 4360768 - DNA, 25 bp, Homo sapien
ttagtatatccaggtacctcctcat

SEQ ID NO: 4360769 - DNA, 25 bp, Homo sapien
tctgctgcagatgaatacatccatt

SEQ ID NO: 4360770 - DNA, 25 bp, Homo sapien
aatttaaaccacacatgcgcacacg

SEQ ID NO: 4360771 - DNA, 25 bp, Homo sapien
atttaaaccacacatgcgcacacgt

SEQ ID NO: 4360772 - DNA, 25 bp, Homo sapien
ttaaaccacacatgcgcacacgtgc

SEQ ID NO: 4360773 - DNA, 25 bp, Homo sapien
tttaaaccacacatgcgcacacgtg

SEQ ID NO: 4360774 - DNA, 25 bp, Homo sapien
aaccacctaaaacatgtgccattca

SEQ ID NO: 4360775 - DNA, 25 bp, Homo sapien
aaggttcaatttattagctgctaaa

SEQ ID NO: 4360776 - DNA, 25 bp, Homo sapien
tcagatgaaagattaccatcagaga

SEQ ID NO: 4360777 - DNA, 25 bp, Homo sapien
ccatcagagaaatttatgcacaatt

SEQ ID NO: 4360778 - DNA, 25 bp, Homo sapien
tatcctgggttgtactttatagaat

SEQ ID NO: 4360779 - DNA, 25 bp, Homo sapien
tgtaaaccttgaaacaaggtatcca

SEQ ID NO: 4360780 - DNA, 25 bp, Homo sapien
actccaaggcgactggccaacacat

SEQ ID NO: 4360781 - DNA, 25 bp, Homo sapien
aacaaggtatccactcactccaagg

SEQ ID NO: 4360782 - DNA, 25 bp, Homo sapien
agaacagaagtataacaatatagga

SEQ ID NO: 4360783 - DNA, 25 bp, Homo sapien
aatggaagggcatcagttgcaagcc

SEQ ID NO: 4360784 - DNA, 25 bp, Homo sapien
gattgaactaaaaggattcccagaa

SEQ ID NO: 4360785 - DNA, 25 bp, Homo sapien
caatccagaaggtctaagattgaac

SEQ ID NO: 4360786 - DNA, 25 bp, Homo sapien
atgctggttctgtattaaagcatca

SEQ ID NO: 4360787 - DNA, 25 bp, Homo sapien
tcaagattgggttcacatggaatgc

SEQ ID NO: 4360788 - DNA, 25 bp, Homo sapien
tggaatgctgaaaatcacacgaatc

SEQ ID NO: 4360789 - DNA, 25 bp, Homo sapien
cacacgaatcctaccttctgtaatc

SEQ ID NO: 4360790 - DNA, 25 bp, Homo sapien
tttgatattggagaaacgggagtcg

SEQ ID NO: 4360791 - DNA, 25 bp, Homo sapien
ccagcataaagaccatacttctcag

SEQ ID NO: 4360792 - DNA, 25 bp, Homo sapien
aacgggagtcgaaagctcggatgtc

SEQ ID NO: 4360793 - DNA, 25 bp, Homo sapien
tccagtgcagccataatagggagtt

SEQ ID NO: 4360794 - DNA, 25 bp, Homo sapien
tatttgatatttacgacctgtgagt

SEQ ID NO: 4360795 - DNA, 25 bp, Homo sapien
gtttctctagacgaacttcaccatt

SEQ ID NO: 4360796 - DNA, 25 bp, Homo sapien
aaggaacaacttgttttgaccactg

SEQ ID NO: 4360797 - DNA, 25 bp, Homo sapien
gagtaactgagcatacacaactgca

SEQ ID NO: 4360798 - DNA, 25 bp, Homo sapien
caaaatatgcgttatcaactactta

SEQ ID NO: 4360799 - DNA, 25 bp, Homo sapien
acactgttcaaagatcaactgtact

SEQ ID NO: 4360800 - DNA, 25 bp, Homo sapien
tctgatgaacagtaggcttttagca

SEQ ID NO: 4360801 - DNA, 25 bp, Homo sapien
tatgttatcggcaagtcttctgatg

SEQ ID NO: 4360802 - DNA, 25 bp, Homo sapien
aagatgaaccactttagatggtggg

SEQ ID NO: 4360803 - DNA, 25 bp, Homo sapien
ttgcccagttagattgttctttatc

SEQ ID NO: 4360804 - DNA, 25 bp, Homo sapien
aattccttgtacttcttttgcccag

SEQ ID NO: 4360805 - DNA, 25 bp, Homo sapien
gtgttcctggaggttcttccaagta

SEQ ID NO: 4360806 - DNA, 25 bp, Homo sapien
caggaaatatgtgggatagacgaca

SEQ ID NO: 4360807 - DNA, 25 bp, Homo sapien
aattcagctactagccctaacttct

SEQ ID NO: 4360808 - DNA, 25 bp, Homo sapien
tcaccaaaacagtttaacctgaatc

SEQ ID NO: 4360809 - DNA, 25 bp, Homo sapien
gctactagccctaacttctagctta

SEQ ID NO: 4360810 - DNA, 25 bp, Homo sapien
tccatctgatacagccacgactcta

SEQ ID NO: 4360811 - DNA, 25 bp, Homo sapien
ttttccaagcactgatgaagctaca

SEQ ID NO: 4360812 - DNA, 25 bp, Homo sapien
tgaggccaattaacaaagacagatt

SEQ ID NO: 4360813 - DNA, 25 bp, Homo sapien
cacgactctagcttcctcaaggtga

SEQ ID NO: 4360814 - DNA, 25 bp, Homo sapien
aattctgcttccaccaatctaccga

SEQ ID NO: 4360815 - DNA, 25 bp, Homo sapien
tattcttcagatttatgcagcttac

SEQ ID NO: 4360816 - DNA, 25 bp, Homo sapien
tacttcccgtctacacaatcttagc

SEQ ID NO: 4360817 - DNA, 25 bp, Homo sapien
gaccaagggcttaatacttgctacc

SEQ ID NO: 4360818 - DNA, 25 bp, Homo sapien
tccacgactgctttgctggaatact

SEQ ID NO: 4360819 - DNA, 25 bp, Homo sapien
tctgcatccactaagatttccaaca

SEQ ID NO: 4360820 - DNA, 25 bp, Homo sapien
gctggaatacttgaacaccactttt

SEQ ID NO: 4360821 - DNA, 25 bp, Homo sapien
tgttttctccacgactgctttgctg

SEQ ID NO: 4360822 - DNA, 25 bp, Homo sapien
tgctttctggtcaattctggttatt

SEQ ID NO: 4360823 - DNA, 25 bp, Homo sapien
tgtttttgtttatgtctacacgcca

SEQ ID NO: 4360824 - DNA, 25 bp, Homo sapien
cacgccaagcatctaaggatattat

SEQ ID NO: 4360825 - DNA, 25 bp, Homo sapien
tgtctacacgccaagcatctaagga

SEQ ID NO: 4360826 - DNA, 25 bp, Homo sapien
taaactctgtgtctctatcatacca

SEQ ID NO: 4360827 - DNA, 25 bp, Homo sapien
tatcataccagcacattaggcactc

SEQ ID NO: 4360828 - DNA, 25 bp, Homo sapien
tacaacatcgttctatggcagggaa

SEQ ID NO: 4360829 - DNA, 25 bp, Homo sapien
gcagggaacttttctggccatggag

SEQ ID NO: 4360830 - DNA, 25 bp, Homo sapien
tgagcacaacagttgttaagatata

SEQ ID NO: 4360831 - DNA, 25 bp, Homo sapien
gtatatcatgcttgcgcaagggcca

SEQ ID NO: 4360832 - DNA, 25 bp, Homo sapien
tgaatttgtatatcatgcttgcgca

SEQ ID NO: 4360833 - DNA, 25 bp, Homo sapien
gggaacctgccattggcgcatctgg

SEQ ID NO: 4360834 - DNA, 25 bp, Homo sapien
agtgagtaatgcacataggcctggg

SEQ ID NO: 4360835 - DNA, 25 bp, Homo sapien
tgtcaacactatcttcacaccagac

SEQ ID NO: 4360836 - DNA, 25 bp, Homo sapien
cacaccagactaaagaataagcgaa

SEQ ID NO: 4360837 - DNA, 25 bp, Homo sapien
tatttccttaggagtttttgcatct

SEQ ID NO: 4360838 - DNA, 25 bp, Homo sapien
ctacttttaggaggagtatcagtca

SEQ ID NO: 4360839 - DNA, 25 bp, Homo sapien
tatgctagtctaataaaatgttggg

SEQ ID NO: 4360840 - DNA, 25 bp, Homo sapien
ttagtggagacgagatttaatcttg

SEQ ID NO: 4360841 - DNA, 25 bp, Homo sapien
gacatctgggcctagaatacacaaa

SEQ ID NO: 4360842 - DNA, 25 bp, Homo sapien
ccaatattggtaatttatttctgcc

SEQ ID NO: 4360843 - DNA, 25 bp, Homo sapien
tatgaaggaactataagatagctcc

SEQ ID NO: 4360844 - DNA, 25 bp, Homo sapien
tgaccataacattccttaactaacc

SEQ ID NO: 4360845 - DNA, 25 bp, Homo sapien
tcttgtttagcgtctagaaccttaa

SEQ ID NO: 4360846 - DNA, 25 bp, Homo sapien
tcgtatcatactgaccatggatccc

SEQ ID NO: 4360847 - DNA, 25 bp, Homo sapien
tctttcatcataggctatttagaag

SEQ ID NO: 4360848 - DNA, 25 bp, Homo sapien
tgctcagctcccattatgatgtatt

SEQ ID NO: 4360849 - DNA, 25 bp, Homo sapien
tattctataattggtgagtcttcat

SEQ ID NO: 4360850 - DNA, 25 bp, Homo sapien
aataaaagggattaacaccacagct

SEQ ID NO: 4360851 - DNA, 25 bp, Homo sapien
taaaagggattaacaccacagcttc

SEQ ID NO: 4360852 - DNA, 25 bp, Homo sapien
aaatcaggtgggtaatattctataa

SEQ ID NO: 4360853 - DNA, 25 bp, Homo sapien
gatgttgtgtatatcagacaggaaa

SEQ ID NO: 4360854 - DNA, 25 bp, Homo sapien
caggaagtaaatttttgctggctgc

SEQ ID NO: 4360855 - DNA, 25 bp, Homo sapien
cagacaggaaaggtgcataatgata

SEQ ID NO: 4360856 - DNA, 25 bp, Homo sapien
gaagctgttcaaatggcttaaaagg

SEQ ID NO: 4360857 - DNA, 25 bp, Homo sapien
gaatcaggtaattgaaaaacacgta

SEQ ID NO: 4360858 - DNA, 25 bp, Homo sapien
gaaaatttaggtcatccgatggcaa

SEQ ID NO: 4360859 - DNA, 25 bp, Homo sapien
gaaataatgaggtagtcagaagact

SEQ ID NO: 4360860 - DNA, 25 bp, Homo sapien
catttctgaaattgggatgaatcag

SEQ ID NO: 4360861 - DNA, 25 bp, Homo sapien
caggactgaactccatgatagtaat

SEQ ID NO: 4360862 - DNA, 25 bp, Homo sapien
tgcaaaatccactgtattgcctgaa

SEQ ID NO: 4360863 - DNA, 25 bp, Homo sapien
catgcagcttgatcagccagaaagt

SEQ ID NO: 4360864 - DNA, 25 bp, Homo sapien
tgtattgcctgaacataacatgcag

SEQ ID NO: 4360865 - DNA, 25 bp, Homo sapien
tgaagctttccatagtgacactacc

SEQ ID NO: 4360866 - DNA, 25 bp, Homo sapien
tcagttaatgtaccactcccttggt

SEQ ID NO: 4360867 - DNA, 25 bp, Homo sapien
gagcacggtatctgctgatacaaca

SEQ ID NO: 4360868 - DNA, 25 bp, Homo sapien
gacaggcccgtgtctttagagcacg

SEQ ID NO: 4360869 - DNA, 25 bp, Homo sapien
cagtggccaattatgatgaaccttc

SEQ ID NO: 4360870 - DNA, 25 bp, Homo sapien
tcttctccaaaaccagactagttga

SEQ ID NO: 4360871 - DNA, 25 bp, Homo sapien
cagttctgcagattccggagatgga

SEQ ID NO: 4360872 - DNA, 25 bp, Homo sapien
caagtaccagtttagcagttctgca

SEQ ID NO: 4360873 - DNA, 25 bp, Homo sapien
aacccccatcttcgtcatgtaatat

SEQ ID NO: 4360874 - DNA, 25 bp, Homo sapien
tcagatactacgtcaacccccatct

SEQ ID NO: 4360875 - DNA, 25 bp, Homo sapien
catcttcgtcatgtaatatgttctt

SEQ ID NO: 4360876 - DNA, 25 bp, Homo sapien
ccccatcttcgtcatgtaatatgtt

SEQ ID NO: 4360877 - DNA, 25 bp, Homo sapien
tcatttcgccttcatttttgtctaa

SEQ ID NO: 4360878 - DNA, 25 bp, Homo sapien
tgtctaaagcagtccaacacagaga

SEQ ID NO: 4360879 - DNA, 25 bp, Homo sapien
catttttgtctaaagcagtccaaca

SEQ ID NO: 4360880 - DNA, 25 bp, Homo sapien
ccttagaagttatcatttcgccttc

SEQ ID NO: 4360881 - DNA, 25 bp, Homo sapien
tggcgaaatcgcagggcatcagcac

SEQ ID NO: 4360882 - DNA, 25 bp, Homo sapien
catttggcgaaatcgcagggcatca

SEQ ID NO: 4360883 - DNA, 25 bp, Homo sapien
taagtcacgcagttcagtttcccac

SEQ ID NO: 4360884 - DNA, 25 bp, Homo sapien
ctccactaccataagtcacgcagtt

SEQ ID NO: 4360885 - DNA, 25 bp, Homo sapien
tgcgacacctgctgcttcattgagg

SEQ ID NO: 4360886 - DNA, 25 bp, Homo sapien
gcttcattgaggtacttgttaccaa

SEQ ID NO: 4360887 - DNA, 25 bp, Homo sapien
cctgctgcttcattgaggtacttgt

SEQ ID NO: 4360888 - DNA, 25 bp, Homo sapien
tgaggtacttgttaccaactttgct

SEQ ID NO: 4360889 - DNA, 25 bp, Homo sapien
ggtaagttgaggtgcccactttcat

SEQ ID NO: 4360890 - DNA, 25 bp, Homo sapien
tttctcaaatcgaggtaagttgagg

SEQ ID NO: 4360891 - DNA, 25 bp, Homo sapien
aatcgaggtaagttgaggtgcccac

SEQ ID NO: 4360892 - DNA, 25 bp, Homo sapien
atctgatagtttcacaaggtatttc

SEQ ID NO: 4360893 - DNA, 25 bp, Homo sapien
tagatgagggataaaatcattacca

SEQ ID NO: 4360894 - DNA, 25 bp, Homo sapien
catatgttccataaagaagaggcag

SEQ ID NO: 4360895 - DNA, 25 bp, Homo sapien
gaagaggcagtgcatcatgattaat

SEQ ID NO: 4360896 - DNA, 25 bp, Homo sapien
tctggcaggatggtaacatatgttc

SEQ ID NO: 4360897 - DNA, 25 bp, Homo sapien
caagtgtagaaggtgaaatgtagtt

SEQ ID NO: 4360898 - DNA, 25 bp, Homo sapien
taaagacaagtgtagaaggtgaaat

SEQ ID NO: 4360899 - DNA, 25 bp, Homo sapien
ctctctcattaaagacaagtgtaga

SEQ ID NO: 4360900 - DNA, 25 bp, Homo sapien
gtcaatatactctctcattaaagac

SEQ ID NO: 4360901 - DNA, 25 bp, Homo sapien
tttgccaccaaatcgaacttcttct

SEQ ID NO: 4360902 - DNA, 25 bp, Homo sapien
catgacttgttaatccaagcataat

SEQ ID NO: 4360903 - DNA, 25 bp, Homo sapien
aatgtgcctcatgacttgttaatcc

SEQ ID NO: 4360904 - DNA, 25 bp, Homo sapien
agaaaaatgtgcctcatgacttgtt

SEQ ID NO: 4360905 - DNA, 25 bp, Homo sapien
tctcggatctgataaattccatgat

SEQ ID NO: 4360906 - DNA, 25 bp, Homo sapien
taaaccataaagacagtgtctggtg

SEQ ID NO: 4360907 - DNA, 25 bp, Homo sapien
tctggtgtttggatcatgatctggc

SEQ ID NO: 4360908 - DNA, 25 bp, Homo sapien
gctttctcggatctgataaattcca

SEQ ID NO: 4360909 - DNA, 25 bp, Homo sapien
ccatgacttgtctgtggaaattttc

SEQ ID NO: 4360910 - DNA, 25 bp, Homo sapien
tcatggcctgagaagtagatggtaa

SEQ ID NO: 4360911 - DNA, 25 bp, Homo sapien
aaaatacttcagatgttcatgtaac

SEQ ID NO: 4360912 - DNA, 25 bp, Homo sapien
aagtagatggtaactccttgccatg

SEQ ID NO: 4360913 - DNA, 25 bp, Homo sapien
aatttatatttcaattctgtcataa

SEQ ID NO: 4360914 - DNA, 25 bp, Homo sapien
ggcctctgtaggaagagtttctccc

SEQ ID NO: 4360915 - DNA, 25 bp, Homo sapien
tacagttggaatcaaatctggcctc

SEQ ID NO: 4360916 - DNA, 25 bp, Homo sapien
ggaatcaaatctggcctctgtagga

SEQ ID NO: 4360917 - DNA, 25 bp, Homo sapien
ggtgtgatacagttggaatcaaatc

SEQ ID NO: 4360918 - DNA, 25 bp, Homo sapien
caggtaggttagaaagttctcaggc

SEQ ID NO: 4360919 - DNA, 25 bp, Homo sapien
cattaggatgggagcactgatgtat

SEQ ID NO: 4360920 - DNA, 25 bp, Homo sapien
tcatttttgctcgaggagccacacc

SEQ ID NO: 4360921 - DNA, 25 bp, Homo sapien
cagccataaagaacactttcctggg

SEQ ID NO: 4360922 - DNA, 25 bp, Homo sapien
aatgcgaaacaacacctccaggtag

SEQ ID NO: 4360923 - DNA, 25 bp, Homo sapien
taaatgtttgtgaggatggggaaca

SEQ ID NO: 4360924 - DNA, 25 bp, Homo sapien
agtaaatgtttgtgaggatggggaa

SEQ ID NO: 4360925 - DNA, 25 bp, Homo sapien
aaaagtaaatgtttgtgaggatggg

SEQ ID NO: 4360926 - DNA, 25 bp, Homo sapien
aaaaaagtaaatgtttgtgaggatg

SEQ ID NO: 4360927 - DNA, 25 bp, Homo sapien
cacgtgtctgttctagctacttgag

SEQ ID NO: 4360928 - DNA, 25 bp, Homo sapien
gtgagagaatctttgaacccatagg

SEQ ID NO: 4360929 - DNA, 25 bp, Homo sapien
gcatcaccaaactccagcgtgggag

SEQ ID NO: 4360930 - DNA, 25 bp, Homo sapien
caaaggaaatttgccctagataagt

SEQ ID NO: 4360931 - DNA, 25 bp, Homo sapien
gaaccagagtgccaatattccccga

SEQ ID NO: 4360932 - DNA, 25 bp, Homo sapien
ccaaacggtccaaaggagacagaca

SEQ ID NO: 4360933 - DNA, 25 bp, Homo sapien
tcagagtctacctccctattccagt

SEQ ID NO: 4360934 - DNA, 25 bp, Homo sapien
aggaggagaattcggcccagccaga

SEQ ID NO: 4360935 - DNA, 25 bp, Homo sapien
gccacgtcggaaagtctaggctccg

SEQ ID NO: 4360936 - DNA, 25 bp, Homo sapien
atgaccatcagccacgtcggaaagt

SEQ ID NO: 4360937 - DNA, 25 bp, Homo sapien
cacgtcggaaagtctaggctccggg

SEQ ID NO: 4360938 - DNA, 25 bp, Homo sapien
catcagccacgtcggaaagtctagg

SEQ ID NO: 4360939 - DNA, 25 bp, Homo sapien
gtctgtaagtgggtctgccgctctg

SEQ ID NO: 4360940 - DNA, 25 bp, Homo sapien
aaacaaggtgactgcgtgcggaagc

SEQ ID NO: 4360941 - DNA, 25 bp, Homo sapien
tgttatcgtctgtaagtgggtctgc

SEQ ID NO: 4360942 - DNA, 25 bp, Homo sapien
tagatcagggaaagtaaacaaggtg

SEQ ID NO: 4360943 - DNA, 25 bp, Homo sapien
ccacttcgctgagacagggataccg

SEQ ID NO: 4360944 - DNA, 25 bp, Homo sapien
catctgtaaaacttggggactccca

SEQ ID NO: 4360945 - DNA, 25 bp, Homo sapien
cagggataccgctctgagatccatc

SEQ ID NO: 4360946 - DNA, 25 bp, Homo sapien
ttcgctgagacagggataccgctct

SEQ ID NO: 4360947 - DNA, 25 bp, Homo sapien
gcggatgacaacacaccgcccggcc

SEQ ID NO: 4360948 - DNA, 25 bp, Homo sapien
ggatgacaacacaccgcccggccga

SEQ ID NO: 4360949 - DNA, 25 bp, Homo sapien
ccggtcgtcgctccgcggatgacaa

SEQ ID NO: 4360950 - DNA, 25 bp, Homo sapien
cgcagcctccggtcgtcgctccgcg

SEQ ID NO: 4360951 - DNA, 25 bp, Homo sapien
agaattgaacagatacaaccacaga

SEQ ID NO: 4360952 - DNA, 25 bp, Homo sapien
caaccacagattcataccaaatgca

SEQ ID NO: 4360953 - DNA, 25 bp, Homo sapien
gagagaaataacagttgctgagaac

SEQ ID NO: 4360954 - DNA, 25 bp, Homo sapien
tacatataattaatgatcagagaga

SEQ ID NO: 4360955 - DNA, 25 bp, Homo sapien
ggtaatgcacatgtccttcaataga

SEQ ID NO: 4360956 - DNA, 25 bp, Homo sapien
tgtagtcgctgctcaatgtcaagaa

SEQ ID NO: 4360957 - DNA, 25 bp, Homo sapien
gagtcttgattacaccttgtagtcg

SEQ ID NO: 4360958 - DNA, 25 bp, Homo sapien
ggcagtcctgtcactctatttcgag

SEQ ID NO: 4360959 - DNA, 25 bp, Homo sapien
caaatgggtgttctaagtgagctac

SEQ ID NO: 4360960 - DNA, 25 bp, Homo sapien
tgtgatactgatttggaggctcgca

SEQ ID NO: 4360961 - DNA, 25 bp, Homo sapien
actgcttggacatgtttctggacta

SEQ ID NO: 4360962 - DNA, 25 bp, Homo sapien
ggaggctcgcaagattgattcaaca

SEQ ID NO: 4360963 - DNA, 25 bp, Homo sapien
cattgagactacatcaccacagagc

SEQ ID NO: 4360964 - DNA, 25 bp, Homo sapien
ccatgtgcgtgaaccaaacccagtt

SEQ ID NO: 4360965 - DNA, 25 bp, Homo sapien
tgtgacaagtttagctcattgagac

SEQ ID NO: 4360966 - DNA, 25 bp, Homo sapien
gacagtgtttaagttactttgccag

SEQ ID NO: 4360967 - DNA, 25 bp, Homo sapien
gaaaatcagatcaagggaagtaccc

SEQ ID NO: 4360968 - DNA, 25 bp, Homo sapien
gagttcatcaggatccttgtgaggc

SEQ ID NO: 4360969 - DNA, 25 bp, Homo sapien
taatgaggtccactaaagagagagt

SEQ ID NO: 4360970 - DNA, 25 bp, Homo sapien
tgaggctatttctcatatccagaaa

SEQ ID NO: 4360971 - DNA, 25 bp, Homo sapien
tatcacactgcgtggacagaacatg

SEQ ID NO: 4360972 - DNA, 25 bp, Homo sapien
gaagtgttctccgaccaagcagaca

SEQ ID NO: 4360973 - DNA, 25 bp, Homo sapien
gacagagcttccgttcagttgccat

SEQ ID NO: 4360974 - DNA, 25 bp, Homo sapien
tccagatgcaggtgtgcaagctcca

SEQ ID NO: 4360975 - DNA, 25 bp, Homo sapien
ctggtttactccattccacaagagg

SEQ ID NO: 4360976 - DNA, 25 bp, Homo sapien
ccacaagaggatcatgtagaaaagt

SEQ ID NO: 4360977 - DNA, 25 bp, Homo sapien
cattccacaagaggatcatgtagaa

SEQ ID NO: 4360978 - DNA, 25 bp, Homo sapien
tttcactggtttactccattccaca

SEQ ID NO: 4360979 - DNA, 25 bp, Homo sapien
cattaaaggctctcgctgatcacgc

SEQ ID NO: 4360980 - DNA, 25 bp, Homo sapien
tgctcttcgaaaaagaccctctgtt

SEQ ID NO: 4360981 - DNA, 25 bp, Homo sapien
tgttcccataggacccattccatta

SEQ ID NO: 4360982 - DNA, 25 bp, Homo sapien
tatgagtcaggcgaaatggcacaat

SEQ ID NO: 4360983 - DNA, 25 bp, Homo sapien
gataagtggacttacctttcactga

SEQ ID NO: 4360984 - DNA, 25 bp, Homo sapien
gcagccaagggtcagatgctcacat

SEQ ID NO: 4360985 - DNA, 25 bp, Homo sapien
tagaagtttgtaacatgaaggagcc

SEQ ID NO: 4360986 - DNA, 25 bp, Homo sapien
gaactgaaaccatacttgatcttgg

SEQ ID NO: 4360987 - DNA, 25 bp, Homo sapien
tgtatggtttaacccatgccagtat

SEQ ID NO: 4360988 - DNA, 25 bp, Homo sapien
tggatctatgatctttcttggtttc

SEQ ID NO: 4360989 - DNA, 25 bp, Homo sapien
tggtttcttgtgacagcacaaggca

SEQ ID NO: 4360990 - DNA, 25 bp, Homo sapien
gatttgttctcagttggatctatga

SEQ ID NO: 4360991 - DNA, 25 bp, Homo sapien
cactctggacctacagaatctgaat

SEQ ID NO: 4360992 - DNA, 25 bp, Homo sapien
aattgagtcagaacctaaacctatg

SEQ ID NO: 4360993 - DNA, 25 bp, Homo sapien
gtaaaatgaactgatctgcccttat

SEQ ID NO: 4360994 - DNA, 25 bp, Homo sapien
taaagatgggtccaattgcctcaat

SEQ ID NO: 4360995 - DNA, 25 bp, Homo sapien
tattttcaccatgacggtctccaag

SEQ ID NO: 4360996 - DNA, 25 bp, Homo sapien
catgtacgcattcaccagtcaaaga

SEQ ID NO: 4360997 - DNA, 25 bp, Homo sapien
cattgacattactgcagtggaacgg

SEQ ID NO: 4360998 - DNA, 25 bp, Homo sapien
gacaattgaaatctacatgtacgca

SEQ ID NO: 4360999 - DNA, 25 bp, Homo sapien
gagtttttcagataaagctgctgac

SEQ ID NO: 4361000 - DNA, 25 bp, Homo sapien
gactttggtagcatacactggcgaa

SEQ ID NO: 4361001 - DNA, 25 bp, Homo sapien
cactggcgaagttcttttcctgtca

SEQ ID NO: 4361002 - DNA, 25 bp, Homo sapien
gatgtaggatcagggaatgttctca

SEQ ID NO: 4361003 - DNA, 25 bp, Homo sapien
tatagtttggtcagaataggtctca

SEQ ID NO: 4361004 - DNA, 25 bp, Homo sapien
tatatagtttggtcagaataggtct

SEQ ID NO: 4361005 - DNA, 25 bp, Homo sapien
atatagtttggtcagaataggtctc

SEQ ID NO: 4361006 - DNA, 25 bp, Homo sapien
ttatatagtttggtcagaataggtc

SEQ ID NO: 4361007 - DNA, 25 bp, Homo sapien
ggaataactgcatatgttcgaatat

SEQ ID NO: 4361008 - DNA, 25 bp, Homo sapien
catatgttcgaatatgaagttctct

SEQ ID NO: 4361009 - DNA, 25 bp, Homo sapien
taatcccacattcatcatttagtgg

SEQ ID NO: 4361010 - DNA, 25 bp, Homo sapien
gaagttctcttctacgagactctgc

SEQ ID NO: 4361011 - DNA, 25 bp, Homo sapien
gctcctcttgcggtttatcacaacc

SEQ ID NO: 4361012 - DNA, 25 bp, Homo sapien
ttctagacctgtatgaagtaagcac

SEQ ID NO: 4361013 - DNA, 25 bp, Homo sapien
gagcatgagttctatgacatcctca

SEQ ID NO: 4361014 - DNA, 25 bp, Homo sapien
tatttctaaagctatcccttagcag

SEQ ID NO: 4361015 - DNA, 25 bp, Homo sapien
tggttaaaccaagcagactataact

SEQ ID NO: 4361016 - DNA, 25 bp, Homo sapien
tacctggttacagaataattcaaaa

SEQ ID NO: 4361017 - DNA, 25 bp, Homo sapien
aagtttcatctttccacagtataga

SEQ ID NO: 4361018 - DNA, 25 bp, Homo sapien
tctttgagatagaaatcaaatacca

SEQ ID NO: 4361019 - DNA, 25 bp, Homo sapien
gaattccattagtctacaatccttt

SEQ ID NO: 4361020 - DNA, 25 bp, Homo sapien
tctcaggtcatcttttggcttacac

SEQ ID NO: 4361021 - DNA, 25 bp, Homo sapien
tggcttacacatcatgatgtagaac

SEQ ID NO: 4361022 - DNA, 25 bp, Homo sapien
acacatcatgatgtagaactttcca

SEQ ID NO: 4361023 - DNA, 25 bp, Homo sapien
gttacactaacacttgggaaggctg

SEQ ID NO: 4361024 - DNA, 25 bp, Homo sapien
cataaaaagattacttcatcgccaa

SEQ ID NO: 4361025 - DNA, 25 bp, Homo sapien
taattatctatgacctatgaaaaga

SEQ ID NO: 4361026 - DNA, 25 bp, Homo sapien
aattaagtgtacctaatgaagtgag

SEQ ID NO: 4361027 - DNA, 25 bp, Homo sapien
atcatagtcatataaaactgaagtt

SEQ ID NO: 4361028 - DNA, 25 bp, Homo sapien
cttcacaaataagattcacgtagat

SEQ ID NO: 4361029 - DNA, 25 bp, Homo sapien
tactaaaacaacaggagcatttgaa

SEQ ID NO: 4361030 - DNA, 25 bp, Homo sapien
caaaacgttacggtgaatgtgaatc

SEQ ID NO: 4361031 - DNA, 25 bp, Homo sapien
tagcatggttagcatgggtacccag

SEQ ID NO: 4361032 - DNA, 25 bp, Homo sapien
tccaggaaatggttcatggctagca

SEQ ID NO: 4361033 - DNA, 25 bp, Homo sapien
gcaatataggcccaatgtccaggaa

SEQ ID NO: 4361034 - DNA, 25 bp, Homo sapien
tgagtgctcatgcttaatgtggaac

SEQ ID NO: 4361035 - DNA, 25 bp, Homo sapien
tagaagcttatctgttaggcgagtt

SEQ ID NO: 4361036 - DNA, 25 bp, Homo sapien
tgttcacacgcatgggataagatga

SEQ ID NO: 4361037 - DNA, 25 bp, Homo sapien
gttaggcgagttgcatctccaacaa

SEQ ID NO: 4361038 - DNA, 25 bp, Homo sapien
cggtttattgcacaattctagaagc

SEQ ID NO: 4361039 - DNA, 25 bp, Homo sapien
tcatcgtgagaatgacaaattcgag

SEQ ID NO: 4361040 - DNA, 25 bp, Homo sapien
cttgttgaggataggctagaaatac

SEQ ID NO: 4361041 - DNA, 25 bp, Homo sapien
tcgagagatcaattgtgaaaaagca

SEQ ID NO: 4361042 - DNA, 25 bp, Homo sapien
catttgtacacgatcggagcggcca

SEQ ID NO: 4361043 - DNA, 25 bp, Homo sapien
tcccattcatatgcctttgtaccat

SEQ ID NO: 4361044 - DNA, 25 bp, Homo sapien
tggcattgactgatatatgaactga

SEQ ID NO: 4361045 - DNA, 25 bp, Homo sapien
catagagttaacattcgtggcattg

SEQ ID NO: 4361046 - DNA, 25 bp, Homo sapien
tgtaccataatcaagccatagagtt

SEQ ID NO: 4361047 - DNA, 25 bp, Homo sapien
tccatagcttggctgttgtgaagat

SEQ ID NO: 4361048 - DNA, 25 bp, Homo sapien
tttagatatataccccataatggga

SEQ ID NO: 4361049 - DNA, 25 bp, Homo sapien
aacatattgatttaatttcctttag

SEQ ID NO: 4361050 - DNA, 25 bp, Homo sapien
ttcattcccatgttgatggacactt

SEQ ID NO: 4361051 - DNA, 25 bp, Homo sapien
ttcgtcacgtagttcctgtgccgtg

SEQ ID NO: 4361052 - DNA, 25 bp, Homo sapien
cgtcacgtagttcctgtgccgtgga

SEQ ID NO: 4361053 - DNA, 25 bp, Homo sapien
tcacgtagttcctgtgccgtggatt

SEQ ID NO: 4361054 - DNA, 25 bp, Homo sapien
cgtagttcctgtgccgtggatttca

SEQ ID NO: 4361055 - DNA, 25 bp, Homo sapien
cagctttccagccactttgtttacc

SEQ ID NO: 4361056 - DNA, 25 bp, Homo sapien
gaccttcagagccatgcacgggata

SEQ ID NO: 4361057 - DNA, 25 bp, Homo sapien
cagttccagctttccagccactttg

SEQ ID NO: 4361058 - DNA, 25 bp, Homo sapien
ctccacccagttccagctttccagc

SEQ ID NO: 4361059 - DNA, 25 bp, Homo sapien
gaagatatccttccatgtaaagcaa

SEQ ID NO: 4361060 - DNA, 25 bp, Homo sapien
tggaatgggctagaaggaagtactc

SEQ ID NO: 4361061 - DNA, 25 bp, Homo sapien
cacccgtggcttacagatattgctt

SEQ ID NO: 4361062 - DNA, 25 bp, Homo sapien
taaaatataaccacaaaggctgagt

SEQ ID NO: 4361063 - DNA, 25 bp, Homo sapien
ctcagaagggtgagccagagtcgct

SEQ ID NO: 4361064 - DNA, 25 bp, Homo sapien
gaatgctacatagaaaaggccaaga

SEQ ID NO: 4361065 - DNA, 25 bp, Homo sapien
ttaatgtcagggcactttaggcctc

SEQ ID NO: 4361066 - DNA, 25 bp, Homo sapien
tgaagaagacctcatccacgtgcca

SEQ ID NO: 4361067 - DNA, 25 bp, Homo sapien
tgtgaccatgggcatcaatttgtca

SEQ ID NO: 4361068 - DNA, 25 bp, Homo sapien
gaagaactatataccggatgagatc

SEQ ID NO: 4361069 - DNA, 25 bp, Homo sapien
taccggatgagatcaccttgctttt

SEQ ID NO: 4361070 - DNA, 25 bp, Homo sapien
tggcaaggtaaaaatgcccatcctc

SEQ ID NO: 4361071 - DNA, 25 bp, Homo sapien
tagggttctctataatttagctaca

SEQ ID NO: 4361072 - DNA, 25 bp, Homo sapien
tgtgcctagcctcacagatctttaa

SEQ ID NO: 4361073 - DNA, 25 bp, Homo sapien
caaatcctctgtcatatatgtatta

SEQ ID NO: 4361074 - DNA, 25 bp, Homo sapien
tctccaagtctatggcttacctttt

SEQ ID NO: 4361075 - DNA, 25 bp, Homo sapien
ttgtctatcatatgaggcagaggtt

SEQ ID NO: 4361076 - DNA, 25 bp, Homo sapien
aaattcctttcttgttgtcatatag

SEQ ID NO: 4361077 - DNA, 25 bp, Homo sapien
catcaggcaatcttgtttaattcac

SEQ ID NO: 4361078 - DNA, 25 bp, Homo sapien
ggcaatcttgtttaattcactcaat

SEQ ID NO: 4361079 - DNA, 25 bp, Homo sapien
aacaccatctatataaagtttaata

SEQ ID NO: 4361080 - DNA, 25 bp, Homo sapien
acaccatctatataaagtttaatac

SEQ ID NO: 4361081 - DNA, 25 bp, Homo sapien
tttcataattgcattgctttcaaag

SEQ ID NO: 4361082 - DNA, 25 bp, Homo sapien
ttgctttcaaagttagctgtttctt

SEQ ID NO: 4361083 - DNA, 25 bp, Homo sapien
tttcaaagttagctgtttcttccat

SEQ ID NO: 4361084 - DNA, 25 bp, Homo sapien
ctgtttcttccataaatcggcccac

SEQ ID NO: 4361085 - DNA, 25 bp, Homo sapien
tagcatagctcgaccatggattaac

SEQ ID NO: 4361086 - DNA, 25 bp, Homo sapien
tagtagcatagctcgaccatggatt

SEQ ID NO: 4361087 - DNA, 25 bp, Homo sapien
tagctcgaccatggattaacatgtt

SEQ ID NO: 4361088 - DNA, 25 bp, Homo sapien
cgaccatggattaacatgttcttac

SEQ ID NO: 4361089 - DNA, 25 bp, Homo sapien
agaacaattagtgcctggtgaacat

SEQ ID NO: 4361090 - DNA, 25 bp, Homo sapien
cctcaggtggggtttcattttcagg

SEQ ID NO: 4361091 - DNA, 25 bp, Homo sapien
ttttgaagaacaattagtgcctggt

SEQ ID NO: 4361092 - DNA, 25 bp, Homo sapien
gaagaacaattagtgcctggtgaac

SEQ ID NO: 4361093 - DNA, 25 bp, Homo sapien
taaggagagcattgtaggctgtctg

SEQ ID NO: 4361094 - DNA, 25 bp, Homo sapien
tttgccctttccacgtacagttcag

SEQ ID NO: 4361095 - DNA, 25 bp, Homo sapien
ttcagcgagtcgtgattcccctgca

SEQ ID NO: 4361096 - DNA, 25 bp, Homo sapien
tgaccagcctttctagctaccctgg

SEQ ID NO: 4361097 - DNA, 25 bp, Homo sapien
ttagtaaagccctccggagagccag

SEQ ID NO: 4361098 - DNA, 25 bp, Homo sapien
tctgggtcatttctagtcgagctac

SEQ ID NO: 4361099 - DNA, 25 bp, Homo sapien
gagctacccagtttagagaatcttc

SEQ ID NO: 4361100 - DNA, 25 bp, Homo sapien
aaagtggtttgatgctatgctccaa

SEQ ID NO: 4361101 - DNA, 25 bp, Homo sapien
tattcatatcctcgttggtaggagc

SEQ ID NO: 4361102 - DNA, 25 bp, Homo sapien
agaggtacaatttgttctgctctca

SEQ ID NO: 4361103 - DNA, 25 bp, Homo sapien
gacactccatgttgtagattttcca

SEQ ID NO: 4361104 - DNA, 25 bp, Homo sapien
gctctcactagtttcagtgagtcat

SEQ ID NO: 4361105 - DNA, 25 bp, Homo sapien
ccactctgtacgtgtttaattcatc

SEQ ID NO: 4361106 - DNA, 25 bp, Homo sapien
actctgtacgtgtttaattcatctg

SEQ ID NO: 4361107 - DNA, 25 bp, Homo sapien
ctgcttccactctgtacgtgtttaa

SEQ ID NO: 4361108 - DNA, 25 bp, Homo sapien
gcttccactctgtacgtgtttaatt

SEQ ID NO: 4361109 - DNA, 25 bp, Homo sapien
agtgtgccatatattagagcagagt

SEQ ID NO: 4361110 - DNA, 25 bp, Homo sapien
taaattcagaggtaagcaattccaa

SEQ ID NO: 4361111 - DNA, 25 bp, Homo sapien
cccattgtaaaaatagctgcatgct

SEQ ID NO: 4361112 - DNA, 25 bp, Homo sapien
tatctctatccagaaactatccaga

SEQ ID NO: 4361113 - DNA, 25 bp, Homo sapien
gagcaaaagaaagttacaatgattt

SEQ ID NO: 4361114 - DNA, 25 bp, Homo sapien
gcaaaagaaagttacaatgatttgt

SEQ ID NO: 4361115 - DNA, 25 bp, Homo sapien
aagagcaaaagaaagttacaatgat

SEQ ID NO: 4361116 - DNA, 25 bp, Homo sapien
ctagaacaataccaagagcaaaaga

SEQ ID NO: 4361117 - DNA, 25 bp, Homo sapien
tcctaggctaggtacaattttccat

SEQ ID NO: 4361118 - DNA, 25 bp, Homo sapien
gactacacagaaaccgctaggcttt

SEQ ID NO: 4361119 - DNA, 25 bp, Homo sapien
ctacttaggtgacattaggatgacc

SEQ ID NO: 4361120 - DNA, 25 bp, Homo sapien
gatatttgagatcatgactacacag

SEQ ID NO: 4361121 - DNA, 25 bp, Homo sapien
gctgaccaagacctaacatggactt

SEQ ID NO: 4361122 - DNA, 25 bp, Homo sapien
gagtgataacagtagacagctgacc

SEQ ID NO: 4361123 - DNA, 25 bp, Homo sapien
tggactttactacaccatgataatg

SEQ ID NO: 4361124 - DNA, 25 bp, Homo sapien
tgataacagtagacagctgaccaag

SEQ ID NO: 4361125 - DNA, 25 bp, Homo sapien
tcagcaagccaaggctttcatgttc

SEQ ID NO: 4361126 - DNA, 25 bp, Homo sapien
tgaatagccctgtcataacaagcag

SEQ ID NO: 4361127 - DNA, 25 bp, Homo sapien
aagcagtggcatccctcagcaagcc

SEQ ID NO: 4361128 - DNA, 25 bp, Homo sapien
tcttttagagatggttctgcctttc

SEQ ID NO: 4361129 - DNA, 25 bp, Homo sapien
ccactaatctataagcttctaagca

SEQ ID NO: 4361130 - DNA, 25 bp, Homo sapien
ttccacatggatgagttaagtgtcc

SEQ ID NO: 4361131 - DNA, 25 bp, Homo sapien
accaaattgatgtttatctctcccc

SEQ ID NO: 4361132 - DNA, 25 bp, Homo sapien
ccttcctcagggtacatgtgtgtta

SEQ ID NO: 4361133 - DNA, 25 bp, Homo sapien
tctagaaaacgggttacactctgat

SEQ ID NO: 4361134 - DNA, 25 bp, Homo sapien
aagtgcattacagctcgtgtgtatg

SEQ ID NO: 4361135 - DNA, 25 bp, Homo sapien
taataaatgattcaaagtgcattac

SEQ ID NO: 4361136 - DNA, 25 bp, Homo sapien
tttggagcgaaaggaagctactgcc

SEQ ID NO: 4361137 - DNA, 25 bp, Homo sapien
cagtgcctgaaatttgtgccttgcc

SEQ ID NO: 4361138 - DNA, 25 bp, Homo sapien
tggtcaagcatggagaacacagtct

SEQ ID NO: 4361139 - DNA, 25 bp, Homo sapien
acacagatcagatgcaatgtcttgg

SEQ ID NO: 4361140 - DNA, 25 bp, Homo sapien
tgctgatcgtcatgctttagaactg

SEQ ID NO: 4361141 - DNA, 25 bp, Homo sapien
ttttactggcaagatcatgtcgaac

SEQ ID NO: 4361142 - DNA, 25 bp, Homo sapien
ttcttgattacaacccagtaagaca

SEQ ID NO: 4361143 - DNA, 25 bp, Homo sapien
gatagatggtcactttgaaatcatg

SEQ ID NO: 4361144 - DNA, 25 bp, Homo sapien
catcataatgctacagcaggtgaaa

SEQ ID NO: 4361145 - DNA, 25 bp, Homo sapien
gaccaatcggttgacttctgagaac

SEQ ID NO: 4361146 - DNA, 25 bp, Homo sapien
tctgcaaagttactacccaatttac

SEQ ID NO: 4361147 - DNA, 25 bp, Homo sapien
gataacctgcccaagatgctgacca

SEQ ID NO: 4361148 - DNA, 25 bp, Homo sapien
ttctttactccagaccaatcggttg

SEQ ID NO: 4361149 - DNA, 25 bp, Homo sapien
tcctccacaattggtgacctgggcc

SEQ ID NO: 4361150 - DNA, 25 bp, Homo sapien
tggtctccatctctctacagtcata

SEQ ID NO: 4361151 - DNA, 25 bp, Homo sapien
tagtatttcccgaacatgctcagga

SEQ ID NO: 4361152 - DNA, 25 bp, Homo sapien
gacctgggccgttggtctccatctc

SEQ ID NO: 4361153 - DNA, 25 bp, Homo sapien
ggtaagctcttgttagctccatcaa

SEQ ID NO: 4361154 - DNA, 25 bp, Homo sapien
tgagctcggctattatcagcatacg

SEQ ID NO: 4361155 - DNA, 25 bp, Homo sapien
tattatcagcatacgcaaggtaagc

SEQ ID NO: 4361156 - DNA, 25 bp, Homo sapien
agctgaatcttgagctcggctatta

SEQ ID NO: 4361157 - DNA, 25 bp, Homo sapien
tctaatcgacctggatctatcgccc

SEQ ID NO: 4361158 - DNA, 25 bp, Homo sapien
attccccacagagcaaccgagcttg

SEQ ID NO: 4361159 - DNA, 25 bp, Homo sapien
gcactgtcaccaactgtgagataat

SEQ ID NO: 4361160 - DNA, 25 bp, Homo sapien
tcttggcaacctttcaaaagcactg

SEQ ID NO: 4361161 - DNA, 25 bp, Homo sapien
gaggaggaactgtcatcaattcaca

SEQ ID NO: 4361162 - DNA, 25 bp, Homo sapien
ttttcagagactacaaacgttgggc

SEQ ID NO: 4361163 - DNA, 25 bp, Homo sapien
tatccacgtcagcatagtgaagtgc

SEQ ID NO: 4361164 - DNA, 25 bp, Homo sapien
caagtaccttccctgtagccagtag

SEQ ID NO: 4361165 - DNA, 25 bp, Homo sapien
ggttcaaccaacttgtagagctgca

SEQ ID NO: 4361166 - DNA, 25 bp, Homo sapien
gcatctgttgtctcatggactctta

SEQ ID NO: 4361167 - DNA, 25 bp, Homo sapien
agtactgactacaaagactctggcc

SEQ ID NO: 4361168 - DNA, 25 bp, Homo sapien
tggcctctcatcctcttatcttatg

SEQ ID NO: 4361169 - DNA, 25 bp, Homo sapien
tgatttttatacaaggtttccttca

SEQ ID NO: 4361170 - DNA, 25 bp, Homo sapien
gaatggccttcatagagagctgaag

SEQ ID NO: 4361171 - DNA, 25 bp, Homo sapien
gaatacgaacatcgacattttcatg

SEQ ID NO: 4361172 - DNA, 25 bp, Homo sapien
caagcttgtaagagcatgaatacga

SEQ ID NO: 4361173 - DNA, 25 bp, Homo sapien
tctggatgatcaggtaaaaaatata

SEQ ID NO: 4361174 - DNA, 25 bp, Homo sapien
attcctggagaacggcttttatctt

SEQ ID NO: 4361175 - DNA, 25 bp, Homo sapien
tattcctggagaacggcttttatct

SEQ ID NO: 4361176 - DNA, 25 bp, Homo sapien
tcaactaaggtaagctgcagaaagt

SEQ ID NO: 4361177 - DNA, 25 bp, Homo sapien
gaagcaatgccacaactgaaatagc

SEQ ID NO: 4361178 - DNA, 25 bp, Homo sapien
gcctttgtatgctggaatgacacca

SEQ ID NO: 4361179 - DNA, 25 bp, Homo sapien
gaggctggttcaaagcttaacgcaa

SEQ ID NO: 4361180 - DNA, 25 bp, Homo sapien
tgtgtataagaggtaacaaagctac

SEQ ID NO: 4361181 - DNA, 25 bp, Homo sapien
gacaagcatgatccaggcagcgaac

SEQ ID NO: 4361182 - DNA, 25 bp, Homo sapien
tattacatgactgagaagggagccc

SEQ ID NO: 4361183 - DNA, 25 bp, Homo sapien
gatagctgcagtttctttaggctgg

SEQ ID NO: 4361184 - DNA, 25 bp, Homo sapien
catccttgaatcgaaggccagttct

SEQ ID NO: 4361185 - DNA, 25 bp, Homo sapien
acatgtttgggtcccattaacttca

SEQ ID NO: 4361186 - DNA, 25 bp, Homo sapien
catcttcaccctcacagaactgaca

SEQ ID NO: 4361187 - DNA, 25 bp, Homo sapien
cacaattcaggaaaatcatccttga

SEQ ID NO: 4361188 - DNA, 25 bp, Homo sapien
cagagccaacccagatgaatctgag

SEQ ID NO: 4361189 - DNA, 25 bp, Homo sapien
gtgttcaaaaacaccatgagccatg

SEQ ID NO: 4361190 - DNA, 25 bp, Homo sapien
gttgtgatgacgtgagcttgaagcc

SEQ ID NO: 4361191 - DNA, 25 bp, Homo sapien
ccaacggtggccaactgttgcagca

SEQ ID NO: 4361192 - DNA, 25 bp, Homo sapien
ttcttatcttcaatgccaacactag

SEQ ID NO: 4361193 - DNA, 25 bp, Homo sapien
caatgccaacactagagctcagtaa

SEQ ID NO: 4361194 - DNA, 25 bp, Homo sapien
tatcttcaatgccaacactagagct

SEQ ID NO: 4361195 - DNA, 25 bp, Homo sapien
ttcaatgccaacactagagctcagt

SEQ ID NO: 4361196 - DNA, 25 bp, Homo sapien
aaaagccaaaatgcccaacaatttg

SEQ ID NO: 4361197 - DNA, 25 bp, Homo sapien
atgcccaacaatttgggttgtaaat

SEQ ID NO: 4361198 - DNA, 25 bp, Homo sapien
acaatttgggttgtaaataatcagc

SEQ ID NO: 4361199 - DNA, 25 bp, Homo sapien
caaaatgcccaacaatttgggttgt

SEQ ID NO: 4361200 - DNA, 25 bp, Homo sapien
gatagtgttctccaatacgcagcaa

SEQ ID NO: 4361201 - DNA, 25 bp, Homo sapien
tgatatgatatctctcgggccctga

SEQ ID NO: 4361202 - DNA, 25 bp, Homo sapien
aacaggctccccagttcaatttctg

SEQ ID NO: 4361203 - DNA, 25 bp, Homo sapien
tggaaatcttgtctcaacaggctcc

SEQ ID NO: 4361204 - DNA, 25 bp, Homo sapien
attcatctttggaacaagaacagac

SEQ ID NO: 4361205 - DNA, 25 bp, Homo sapien
tattaaaatctctctacgattgaca

SEQ ID NO: 4361206 - DNA, 25 bp, Homo sapien
cctaaagttcgaatgagagcagaag

SEQ ID NO: 4361207 - DNA, 25 bp, Homo sapien
gctttggcagcaagatcaggtagta

SEQ ID NO: 4361208 - DNA, 25 bp, Homo sapien
gtcgaaaacgttggcaatttcagac

SEQ ID NO: 4361209 - DNA, 25 bp, Homo sapien
ttctctctggtgagccacatcttgt

SEQ ID NO: 4361210 - DNA, 25 bp, Homo sapien
gaaaacgattaagatcaggaaagtc

SEQ ID NO: 4361211 - DNA, 25 bp, Homo sapien
tcagacaacgtatttaaagccattt

SEQ ID NO: 4361212 - DNA, 25 bp, Homo sapien
agtattcggaagtgctgtcatctga

SEQ ID NO: 4361213 - DNA, 25 bp, Homo sapien
gcatggagtattcggaagtgctgtc

SEQ ID NO: 4361214 - DNA, 25 bp, Homo sapien
ctggcatggagtattcggaagtgct

SEQ ID NO: 4361215 - DNA, 25 bp, Homo sapien
atggagtattcggaagtgctgtcat

SEQ ID NO: 4361216 - DNA, 25 bp, Homo sapien
tagagtgaagggattctaccaaaaa

SEQ ID NO: 4361217 - DNA, 25 bp, Homo sapien
ctagagtgaagggattctaccaaaa

SEQ ID NO: 4361218 - DNA, 25 bp, Homo sapien
caaccagagctctaatttctgtgta

SEQ ID NO: 4361219 - DNA, 25 bp, Homo sapien
cagagctctaatttctgtgtatgct

SEQ ID NO: 4361220 - DNA, 25 bp, Homo sapien
gatgggtttcttatactggctgaaa

SEQ ID NO: 4361221 - DNA, 25 bp, Homo sapien
tgggtttcttatactggctgaaaaa

SEQ ID NO: 4361222 - DNA, 25 bp, Homo sapien
gtaagagtgcaaatggtaccaaatc

SEQ ID NO: 4361223 - DNA, 25 bp, Homo sapien
agtgtaagagtgcaaatggtaccaa

SEQ ID NO: 4361224 - DNA, 25 bp, Homo sapien
taagtgtaagagtgcaaatggtacc

SEQ ID NO: 4361225 - DNA, 25 bp, Homo sapien
tgcaataagtgtaagagtgcaaatg

SEQ ID NO: 4361226 - DNA, 25 bp, Homo sapien
ttccaatatcccctgttgtaagaat

SEQ ID NO: 4361227 - DNA, 25 bp, Homo sapien
tgttgtaagaatcaaggtatccttc

SEQ ID NO: 4361228 - DNA, 25 bp, Homo sapien
tcccctgttgtaagaatcaaggtat

SEQ ID NO: 4361229 - DNA, 25 bp, Homo sapien
caaggtatccttcagctcattattt

SEQ ID NO: 4361230 - DNA, 25 bp, Homo sapien
agctaggttgacgtaaactcaaatg

SEQ ID NO: 4361231 - DNA, 25 bp, Homo sapien
ctaggttgacgtaaactcaaatgtt

SEQ ID NO: 4361232 - DNA, 25 bp, Homo sapien
gctaggttgacgtaaactcaaatgt

SEQ ID NO: 4361233 - DNA, 25 bp, Homo sapien
taggttgacgtaaactcaaatgtta

SEQ ID NO: 4361234 - DNA, 25 bp, Homo sapien
aagccactctaacatctttgtctgg

SEQ ID NO: 4361235 - DNA, 25 bp, Homo sapien
gagtccaaggattccaatatgtgct

SEQ ID NO: 4361236 - DNA, 25 bp, Homo sapien
tataaatccatcttcagagtccaag

SEQ ID NO: 4361237 - DNA, 25 bp, Homo sapien
caagatgcttacaaagatgatgtag

SEQ ID NO: 4361238 - DNA, 25 bp, Homo sapien
tcctaagttctcttataatgtcaat

SEQ ID NO: 4361239 - DNA, 25 bp, Homo sapien
tactgtaaaaatattgtcaacaaat

SEQ ID NO: 4361240 - DNA, 25 bp, Homo sapien
gagtatacaatacctaatttaacat

SEQ ID NO: 4361241 - DNA, 25 bp, Homo sapien
atgccatgaagaatcctaagttctc

SEQ ID NO: 4361242 - DNA, 25 bp, Homo sapien
tacagaagaggtccacatgtccgtg

SEQ ID NO: 4361243 - DNA, 25 bp, Homo sapien
cagataaaacatgccgtgaagagta

SEQ ID NO: 4361244 - DNA, 25 bp, Homo sapien
tgagaagtggctttcaagttcctac

SEQ ID NO: 4361245 - DNA, 25 bp, Homo sapien
catgtccgtgttcagagaaaggttc

SEQ ID NO: 4361246 - DNA, 25 bp, Homo sapien
ccggattacttcatgggagctctgc

SEQ ID NO: 4361247 - DNA, 25 bp, Homo sapien
gaaacacacatcgtgattgtgcctg

SEQ ID NO: 4361248 - DNA, 25 bp, Homo sapien
tgcagggcccagttgtaaactgctg

SEQ ID NO: 4361249 - DNA, 25 bp, Homo sapien
taaactgctgttctccactcaagga

SEQ ID NO: 4361250 - DNA, 25 bp, Homo sapien
taccacataaatcttccaggatatg

SEQ ID NO: 4361251 - DNA, 25 bp, Homo sapien
gattagcggcaaatgtggtcaactt

SEQ ID NO: 4361252 - DNA, 25 bp, Homo sapien
tccatggaagtgagagcataccaca

SEQ ID NO: 4361253 - DNA, 25 bp, Homo sapien
tttaaacagccatcatcagaatggg

SEQ ID NO: 4361254 - DNA, 25 bp, Homo sapien
ggtccagtttctgaacagattctaa

SEQ ID NO: 4361255 - DNA, 25 bp, Homo sapien
ccaccttatcaatggttgcctccag

SEQ ID NO: 4361256 - DNA, 25 bp, Homo sapien
caaagcatcataaattttcaccacc

SEQ ID NO: 4361257 - DNA, 25 bp, Homo sapien
gtgtaaaaatccaatgacatccaag

SEQ ID NO: 4361258 - DNA, 25 bp, Homo sapien
aaaaacattggaattaagatgaatt

SEQ ID NO: 4361259 - DNA, 25 bp, Homo sapien
aacattggaattaagatgaattttg

SEQ ID NO: 4361260 - DNA, 25 bp, Homo sapien
aaaacattggaattaagatgaattt

SEQ ID NO: 4361261 - DNA, 25 bp, Homo sapien
taaaaacattggaattaagatgaat

SEQ ID NO: 4361262 - DNA, 25 bp, Homo sapien
ttaggccactgtattcaagggaaat

SEQ ID NO: 4361263 - DNA, 25 bp, Homo sapien
gttgtaagacaacagcaattccttc

SEQ ID NO: 4361264 - DNA, 25 bp, Homo sapien
caataacaggattctttaggccact

SEQ ID NO: 4361265 - DNA, 25 bp, Homo sapien
gaacagtacacagagcagtcagttg

SEQ ID NO: 4361266 - DNA, 25 bp, Homo sapien
tcagtgcactccataatatgctctt

SEQ ID NO: 4361267 - DNA, 25 bp, Homo sapien
cagtgcactccataatatgctcttt

SEQ ID NO: 4361268 - DNA, 25 bp, Homo sapien
ttcagtgcactccataatatgctct

SEQ ID NO: 4361269 - DNA, 25 bp, Homo sapien
agtgcactccataatatgctctttt

SEQ ID NO: 4361270 - DNA, 25 bp, Homo sapien
acaaactgaatgaaggtcatcatac

SEQ ID NO: 4361271 - DNA, 25 bp, Homo sapien
aaatacaaactgaatgaaggtcatc

SEQ ID NO: 4361272 - DNA, 25 bp, Homo sapien
atacaaactgaatgaaggtcatcat

SEQ ID NO: 4361273 - DNA, 25 bp, Homo sapien
ctaaatacaaactgaatgaaggtca

SEQ ID NO: 4361274 - DNA, 25 bp, Homo sapien
ctgagacgacgccttttgggtgata

SEQ ID NO: 4361275 - DNA, 25 bp, Homo sapien
ctcagtctgttttggtgctctttta

SEQ ID NO: 4361276 - DNA, 25 bp, Homo sapien
tttagaagggtttagagacgagctg

SEQ ID NO: 4361277 - DNA, 25 bp, Homo sapien
tattccatcactattactgctgagg

SEQ ID NO: 4361278 - DNA, 25 bp, Homo sapien
gaccttcctgacttgtaaagcagat

SEQ ID NO: 4361279 - DNA, 25 bp, Homo sapien
aagcagattcatacccagctggcac

SEQ ID NO: 4361280 - DNA, 25 bp, Homo sapien
caattccaagcacatccaaaagagc

SEQ ID NO: 4361281 - DNA, 25 bp, Homo sapien
tatttctcacatagaccttcctgac

SEQ ID NO: 4361282 - DNA, 25 bp, Homo sapien
taaaaatcggctcatgaccactggc

SEQ ID NO: 4361283 - DNA, 25 bp, Homo sapien
gaacacaacctatctgccaaagtaa

SEQ ID NO: 4361284 - DNA, 25 bp, Homo sapien
ttttagcaaatcagacttaagccgc

SEQ ID NO: 4361285 - DNA, 25 bp, Homo sapien
ttaagccgcatgagcacaccgtctt

SEQ ID NO: 4361286 - DNA, 25 bp, Homo sapien
agtaccccaaaaatagcaggactct

SEQ ID NO: 4361287 - DNA, 25 bp, Homo sapien
tgagtaccccaaaaatagcaggact

SEQ ID NO: 4361288 - DNA, 25 bp, Homo sapien
taccccaaaaatagcaggactcttg

SEQ ID NO: 4361289 - DNA, 25 bp, Homo sapien
ttgtgagtaccccaaaaatagcagg

SEQ ID NO: 4361290 - DNA, 25 bp, Homo sapien
gagttgctgcaatccgcagaagtct

SEQ ID NO: 4361291 - DNA, 25 bp, Homo sapien
ctgcaatccgcagaagtctcgttat

SEQ ID NO: 4361292 - DNA, 25 bp, Homo sapien
gagggagttgctgcaatccgcagaa

SEQ ID NO: 4361293 - DNA, 25 bp, Homo sapien
tgctgcaatccgcagaagtctcgtt

SEQ ID NO: 4361294 - DNA, 25 bp, Homo sapien
tattaaataaacaagtatatccgaa

SEQ ID NO: 4361295 - DNA, 25 bp, Homo sapien
aaataaacaagtatatccgaagtgc

SEQ ID NO: 4361296 - DNA, 25 bp, Homo sapien
agatattaaataaacaagtatatcc

SEQ ID NO: 4361297 - DNA, 25 bp, Homo sapien
taaataaacaagtatatccgaagtg

SEQ ID NO: 4361298 - DNA, 25 bp, Homo sapien
aaacttcttggaggacatgctatca

SEQ ID NO: 4361299 - DNA, 25 bp, Homo sapien
caatatatagaatagcggtcagcaa

SEQ ID NO: 4361300 - DNA, 25 bp, Homo sapien
caagttgcctttgtagtagtcacag

SEQ ID NO: 4361301 - DNA, 25 bp, Homo sapien
ttatgaagacaccaatgaagggaca

SEQ ID NO: 4361302 - DNA, 25 bp, Homo sapien
caatacaactgcctttggcctcatg

SEQ ID NO: 4361303 - DNA, 25 bp, Homo sapien
actgcctttggcctcatggcttcca

SEQ ID NO: 4361304 - DNA, 25 bp, Homo sapien
caactgcctttggcctcatggcttc

SEQ ID NO: 4361305 - DNA, 25 bp, Homo sapien
tacaactgcctttggcctcatggct

SEQ ID NO: 4361306 - DNA, 25 bp, Homo sapien
tcaagcaacatcacggaggttggct

SEQ ID NO: 4361307 - DNA, 25 bp, Homo sapien
catcacggaggttggctgagagtca

SEQ ID NO: 4361308 - DNA, 25 bp, Homo sapien
gggaggatttcatgatatgctggat

SEQ ID NO: 4361309 - DNA, 25 bp, Homo sapien
gaaatcaagcaacatcacggaggtt

SEQ ID NO: 4361310 - DNA, 25 bp, Homo sapien
catttacatctgtaagtatccggtc

SEQ ID NO: 4361311 - DNA, 25 bp, Homo sapien
gtacaactgtattatattcctctgg

SEQ ID NO: 4361312 - DNA, 25 bp, Homo sapien
tgtcttggcttctgtacaactgtat

SEQ ID NO: 4361313 - DNA, 25 bp, Homo sapien
tatccggtcaatgaattgacacaga

SEQ ID NO: 4361314 - DNA, 25 bp, Homo sapien
aatgagcaggtatagagacacacac

SEQ ID NO: 4361315 - DNA, 25 bp, Homo sapien
tataagctcctacaggtggcagact

SEQ ID NO: 4361316 - DNA, 25 bp, Homo sapien
taaagtgccattagaccgtaagctc

SEQ ID NO: 4361317 - DNA, 25 bp, Homo sapien
taaaagaactgatactggtcgggca

SEQ ID NO: 4361318 - DNA, 25 bp, Homo sapien
tggagaactaagtgaatatggtgcc

SEQ ID NO: 4361319 - DNA, 25 bp, Homo sapien
gaaccttaactacacataggacact

SEQ ID NO: 4361320 - DNA, 25 bp, Homo sapien
gaagagcagcccataaattagaaca

SEQ ID NO: 4361321 - DNA, 25 bp, Homo sapien
tggtgccatgtactgagatatctct

SEQ ID NO: 4361322 - DNA, 25 bp, Homo sapien
cagttacgacaagaatggtcccttc

SEQ ID NO: 4361323 - DNA, 25 bp, Homo sapien
aaagagaagtagctatcccattggc

SEQ ID NO: 4361324 - DNA, 25 bp, Homo sapien
ttttattaacaggactcacggagga

SEQ ID NO: 4361325 - DNA, 25 bp, Homo sapien
gattatttggatggccaaccagtgg

SEQ ID NO: 4361326 - DNA, 25 bp, Homo sapien
caatacgagggaggtcacatcttca

SEQ ID NO: 4361327 - DNA, 25 bp, Homo sapien
cacgctgagattttgtggacccagg

SEQ ID NO: 4361328 - DNA, 25 bp, Homo sapien
gaccagaaagcgatcagcagggact

SEQ ID NO: 4361329 - DNA, 25 bp, Homo sapien
gactgccccatgtgctatcaacggg

SEQ ID NO: 4361330 - DNA, 25 bp, Homo sapien
tgagggagaagcgcccaaatcagcc

SEQ ID NO: 4361331 - DNA, 25 bp, Homo sapien
aatcagccacggagcatctccacaa

SEQ ID NO: 4361332 - DNA, 25 bp, Homo sapien
ggatcccagccatagcgcagcaggg

SEQ ID NO: 4361333 - DNA, 25 bp, Homo sapien
aaacccaagccggaatcagcggagg

SEQ ID NO: 4361334 - DNA, 25 bp, Homo sapien
cagggcggggatcatggaagccagc

SEQ ID NO: 4361335 - DNA, 25 bp, Homo sapien
gcagggcggggatcatggaagccag

SEQ ID NO: 4361336 - DNA, 25 bp, Homo sapien
gaggctgcgaggcactagtcaacca

SEQ ID NO: 4361337 - DNA, 25 bp, Homo sapien
gtctccaaagctaccgctgccggaa

SEQ ID NO: 4361338 - DNA, 25 bp, Homo sapien
aaagctaccgctgccggaagagcgc

SEQ ID NO: 4361339 - DNA, 25 bp, Homo sapien
gagccgtgtggaggccaaaactcct

SEQ ID NO: 4361340 - DNA, 25 bp, Homo sapien
cacacgagatcgagagtgttcaggg

SEQ ID NO: 4361341 - DNA, 25 bp, Homo sapien
atcacacgagatcgagagtgttcag

SEQ ID NO: 4361342 - DNA, 25 bp, Homo sapien
agatcacacgagatcgagagtgttc

SEQ ID NO: 4361343 - DNA, 25 bp, Homo sapien
acacgagatcgagagtgttcagggt

SEQ ID NO: 4361344 - DNA, 25 bp, Homo sapien
cagctgtgctgcataaatttcttga

SEQ ID NO: 4361345 - DNA, 25 bp, Homo sapien
tacacttgtatgaggcttcagctgt

SEQ ID NO: 4361346 - DNA, 25 bp, Homo sapien
tataccgtgatatctttccctccag

SEQ ID NO: 4361347 - DNA, 25 bp, Homo sapien
ctccagccacggtgttggatacact

SEQ ID NO: 4361348 - DNA, 25 bp, Homo sapien
cctttccattgagctgcacacagcg

SEQ ID NO: 4361349 - DNA, 25 bp, Homo sapien
tgccattgacttgcacactgtggtt

SEQ ID NO: 4361350 - DNA, 25 bp, Homo sapien
tccttgccattgacttgcacactgt

SEQ ID NO: 4361351 - DNA, 25 bp, Homo sapien
tgcacacagcgatgagggagctgtt

SEQ ID NO: 4361352 - DNA, 25 bp, Homo sapien
ttctctgggtacaccattaaagcca

SEQ ID NO: 4361353 - DNA, 25 bp, Homo sapien
tctggagtgaccaggtataaggatt

SEQ ID NO: 4361354 - DNA, 25 bp, Homo sapien
aagctcctggaatatctatggatca

SEQ ID NO: 4361355 - DNA, 25 bp, Homo sapien
ttgtgtaggagcctaagaactctgg

SEQ ID NO: 4361356 - DNA, 25 bp, Homo sapien
ggagcctaagaactctggagtgacc

SEQ ID NO: 4361357 - DNA, 25 bp, Homo sapien
ctatggccataaacccccaggaaga

SEQ ID NO: 4361358 - DNA, 25 bp, Homo sapien
taatcttaggcctttgaactatggc

SEQ ID NO: 4361359 - DNA, 25 bp, Homo sapien
tgaactatggccataaacccccagg

SEQ ID NO: 4361360 - DNA, 25 bp, Homo sapien
gactctaatcttaggcctttgaact

SEQ ID NO: 4361361 - DNA, 25 bp, Homo sapien
cccttgggtacatacagccttaact

SEQ ID NO: 4361362 - DNA, 25 bp, Homo sapien
tggatgccagcctcttgtaaacacg

SEQ ID NO: 4361363 - DNA, 25 bp, Homo sapien
gtaaacacgctcaagtccttgcagt

SEQ ID NO: 4361364 - DNA, 25 bp, Homo sapien
ccttaactagacatggatgccagcc

SEQ ID NO: 4361365 - DNA, 25 bp, Homo sapien
tcccttgagaacctgattcatgaca

SEQ ID NO: 4361366 - DNA, 25 bp, Homo sapien
gattcatgacatcattgcttttggc

SEQ ID NO: 4361367 - DNA, 25 bp, Homo sapien
ttcccttgagaacctgattcatgac

SEQ ID NO: 4361368 - DNA, 25 bp, Homo sapien
tgattcatgacatcattgcttttgg

SEQ ID NO: 4361369 - DNA, 25 bp, Homo sapien
aaatgatgtagatgtcttttgcttg

SEQ ID NO: 4361370 - DNA, 25 bp, Homo sapien
aaatccactgataaggataaaattc

SEQ ID NO: 4361371 - DNA, 25 bp, Homo sapien
gtaaaaatgatgtagatgtcttttg

SEQ ID NO: 4361372 - DNA, 25 bp, Homo sapien
aaaaatgatgtagatgtcttttgct

SEQ ID NO: 4361373 - DNA, 25 bp, Homo sapien
tgttaaacgaagtcctcaaggcaga

SEQ ID NO: 4361374 - DNA, 25 bp, Homo sapien
caaatgttaaacgaagtcctcaagg

SEQ ID NO: 4361375 - DNA, 25 bp, Homo sapien
ctgacaaatgttaaacgaagtcctc

SEQ ID NO: 4361376 - DNA, 25 bp, Homo sapien
tgcctgacaaatgttaaacgaagtc

SEQ ID NO: 4361377 - DNA, 25 bp, Homo sapien
taatccattccctgagtatcataag

SEQ ID NO: 4361378 - DNA, 25 bp, Homo sapien
cgacaagtcaggttctagggcagct

SEQ ID NO: 4361379 - DNA, 25 bp, Homo sapien
accctggcagttctgtaccgacaag

SEQ ID NO: 4361380 - DNA, 25 bp, Homo sapien
tctagggcagcttctaacaggagaa

SEQ ID NO: 4361381 - DNA, 25 bp, Homo sapien
ttggtaggatgttggataaatctgc

SEQ ID NO: 4361382 - DNA, 25 bp, Homo sapien
taggatgttggataaatctgcaaac

SEQ ID NO: 4361383 - DNA, 25 bp, Homo sapien
tttttggtaggatgttggataaatc

SEQ ID NO: 4361384 - DNA, 25 bp, Homo sapien
tgtttttggtaggatgttggataaa

SEQ ID NO: 4361385 - DNA, 25 bp, Homo sapien
tcatctcctcttgtcagttggtggc

SEQ ID NO: 4361386 - DNA, 25 bp, Homo sapien
gaatgaagagaactggttattgacg

SEQ ID NO: 4361387 - DNA, 25 bp, Homo sapien
cagttggtggcacatttcccataaa

SEQ ID NO: 4361388 - DNA, 25 bp, Homo sapien
ggttattgacgtatagaaactcttc

SEQ ID NO: 4361389 - DNA, 25 bp, Homo sapien
gagattgctagacatatagatgaaa

SEQ ID NO: 4361390 - DNA, 25 bp, Homo sapien
tgatacagctccctgttgtgaaatg

SEQ ID NO: 4361391 - DNA, 25 bp, Homo sapien
ccctgttgtgaaatgttgttgaata

SEQ ID NO: 4361392 - DNA, 25 bp, Homo sapien
tgttgaataaggagattgctagaca

SEQ ID NO: 4361393 - DNA, 25 bp, Homo sapien
caatagattgtagtgagggagctgc

SEQ ID NO: 4361394 - DNA, 25 bp, Homo sapien
gctctgctaggtacaaaaccccaac

SEQ ID NO: 4361395 - DNA, 25 bp, Homo sapien
aacaaaaccttgtgttgagggctga

SEQ ID NO: 4361396 - DNA, 25 bp, Homo sapien
gctgctctgctaggtacaaaacccc

SEQ ID NO: 4361397 - DNA, 25 bp, Homo sapien
tcatttgacaggcttcttcactggt

SEQ ID NO: 4361398 - DNA, 25 bp, Homo sapien
ggtatcatactgtagtggcctttca

SEQ ID NO: 4361399 - DNA, 25 bp, Homo sapien
tcttcccgaaggctctgcaaccatt

SEQ ID NO: 4361400 - DNA, 25 bp, Homo sapien
tcatagttgtgcaattgtcatcact

SEQ ID NO: 4361401 - DNA, 25 bp, Homo sapien
tatgccacccaatatagatcactgt

SEQ ID NO: 4361402 - DNA, 25 bp, Homo sapien
gcttcctgagttgttagggctataa

SEQ ID NO: 4361403 - DNA, 25 bp, Homo sapien
ttaatgaacacctgtttgatgccag

SEQ ID NO: 4361404 - DNA, 25 bp, Homo sapien
gaagattcaaggtactttggatgca

SEQ ID NO: 4361405 - DNA, 25 bp, Homo sapien
tacattcagctgtcagttgggctca

SEQ ID NO: 4361406 - DNA, 25 bp, Homo sapien
cataaggcctgtccaaattaaagag

SEQ ID NO: 4361407 - DNA, 25 bp, Homo sapien
tggaaagtacacaaaggcctcagtc

SEQ ID NO: 4361408 - DNA, 25 bp, Homo sapien
taagatttgggcgtggaagccccag

SEQ ID NO: 4361409 - DNA, 25 bp, Homo sapien
gccaactggctatcatgacggaaga

SEQ ID NO: 4361410 - DNA, 25 bp, Homo sapien
tacaagcagcattccccagtagagc

SEQ ID NO: 4361411 - DNA, 25 bp, Homo sapien
gaagttttttccatgcccaaggctc

SEQ ID NO: 4361412 - DNA, 25 bp, Homo sapien
gcaaggcaattggaactcaccaggg

SEQ ID NO: 4361413 - DNA, 25 bp, Homo sapien
cattcttaggagttcaagcaaagga

SEQ ID NO: 4361414 - DNA, 25 bp, Homo sapien
aaaaccctattgactccaggataga

SEQ ID NO: 4361415 - DNA, 25 bp, Homo sapien
gacctaactggacttatatcactgg

SEQ ID NO: 4361416 - DNA, 25 bp, Homo sapien
tcagattcttactttaggcagggca

SEQ ID NO: 4361417 - DNA, 25 bp, Homo sapien
acttggaaatcgctacagcttggac

SEQ ID NO: 4361418 - DNA, 25 bp, Homo sapien
tagtttaggtctctatagaagccct

SEQ ID NO: 4361419 - DNA, 25 bp, Homo sapien
tggctagaacatcccaagatatgct

SEQ ID NO: 4361420 - DNA, 25 bp, Homo sapien
tttcacagcccgttacaaattggca

SEQ ID NO: 4361421 - DNA, 25 bp, Homo sapien
gtcttcctcagactgcggttcacct

SEQ ID NO: 4361422 - DNA, 25 bp, Homo sapien
ggacgattgagcgaagtcttcctca

SEQ ID NO: 4361423 - DNA, 25 bp, Homo sapien
gaaagggacgattgagcgaagtctt

SEQ ID NO: 4361424 - DNA, 25 bp, Homo sapien
gagcgaagtcttcctcagactgcgg

SEQ ID NO: 4361425 - DNA, 25 bp, Homo sapien
tgacgtgaggacagagtcgcgaaca

SEQ ID NO: 4361426 - DNA, 25 bp, Homo sapien
ctggagcccaacgtgcgcagaagcg

SEQ ID NO: 4361427 - DNA, 25 bp, Homo sapien
aacatctcctcggagcgcagctggg

SEQ ID NO: 4361428 - DNA, 25 bp, Homo sapien
gcagctgggccagcggttcccacag

SEQ ID NO: 4361429 - DNA, 25 bp, Homo sapien
ctaggccgccccaggcgcggcccct

SEQ ID NO: 4361430 - DNA, 25 bp, Homo sapien
caggcgcggcccctgcgactcctgg

SEQ ID NO: 4361431 - DNA, 25 bp, Homo sapien
cccaggcgcggcccctgcgactcct

SEQ ID NO: 4361432 - DNA, 25 bp, Homo sapien
ggcgcggcccctgcgactcctggca

SEQ ID NO: 4361433 - DNA, 25 bp, Homo sapien
gcgcggaccggctcggccggggcgc

SEQ ID NO: 4361434 - DNA, 25 bp, Homo sapien
ccacactgtcgtccccggacgggcg

SEQ ID NO: 4361435 - DNA, 25 bp, Homo sapien
ctggcgcgcgccacactgtcgtccc

SEQ ID NO: 4361436 - DNA, 25 bp, Homo sapien
gcgcgccacactgtcgtccccggac

SEQ ID NO: 4361437 - DNA, 25 bp, Homo sapien
ttggggctgtcagtggagggcgagt

SEQ ID NO: 4361438 - DNA, 25 bp, Homo sapien
tggggctgtcagtggagggcgagtg

SEQ ID NO: 4361439 - DNA, 25 bp, Homo sapien
cagtgggaacgactcatcctttttc

SEQ ID NO: 4361440 - DNA, 25 bp, Homo sapien
gttctcaggggaggcgacgcccttc

SEQ ID NO: 4361441 - DNA, 25 bp, Homo sapien
caacgggcctcgagccgaggcagca

SEQ ID NO: 4361442 - DNA, 25 bp, Homo sapien
gcagcagtgggaacgactcatcctt

SEQ ID NO: 4361443 - DNA, 25 bp, Homo sapien
cgcctctgccctgtgagtgtggagc

SEQ ID NO: 4361444 - DNA, 25 bp, Homo sapien
caccgtcgggggtggctctggcctt

SEQ ID NO: 4361445 - DNA, 25 bp, Homo sapien
gagctggcgggagagtggagctggg

SEQ ID NO: 4361446 - DNA, 25 bp, Homo sapien
tgcgccctcggagcgctgcaccgtc

SEQ ID NO: 4361447 - DNA, 25 bp, Homo sapien
tctctggatttacggaacgcctttg

SEQ ID NO: 4361448 - DNA, 25 bp, Homo sapien
gaaattctgccttagttgccaaaac

SEQ ID NO: 4361449 - DNA, 25 bp, Homo sapien
tacatgaagtaaggacgggacggaa

SEQ ID NO: 4361450 - DNA, 25 bp, Homo sapien
gactggcattaataacggaatatcc

SEQ ID NO: 4361451 - DNA, 25 bp, Homo sapien
ctgtgtattacatttgttcaatgaa

SEQ ID NO: 4361452 - DNA, 25 bp, Homo sapien
taaaccttgatttctgtgtattaca

SEQ ID NO: 4361453 - DNA, 25 bp, Homo sapien
ttgttcaatgaagggtaaaaagcaa

SEQ ID NO: 4361454 - DNA, 25 bp, Homo sapien
tctttgtatggatgctttataaacc

SEQ ID NO: 4361455 - DNA, 25 bp, Homo sapien
ggcactcagcacaccaaggacctgc

SEQ ID NO: 4361456 - DNA, 25 bp, Homo sapien
cagcacaccaaggacctgcaccggc

SEQ ID NO: 4361457 - DNA, 25 bp, Homo sapien
gcactcagcacaccaaggacctgca

SEQ ID NO: 4361458 - DNA, 25 bp, Homo sapien
actcagcacaccaaggacctgcacc

SEQ ID NO: 4361459 - DNA, 25 bp, Homo sapien
ataacaaggcaatattactgcaaac

SEQ ID NO: 4361460 - DNA, 25 bp, Homo sapien
ggagaaggtcaacaaaatacatgtg

SEQ ID NO: 4361461 - DNA, 25 bp, Homo sapien
aagaataacaaggcaatattactgc

SEQ ID NO: 4361462 - DNA, 25 bp, Homo sapien
gaataacaaggcaatattactgcaa

SEQ ID NO: 4361463 - DNA, 25 bp, Homo sapien
tcaaacagctgatcttcaagcagaa

SEQ ID NO: 4361464 - DNA, 25 bp, Homo sapien
tatttatcccttgttcttgctctgc

SEQ ID NO: 4361465 - DNA, 25 bp, Homo sapien
tctaagaccttcctgtacgtggata

SEQ ID NO: 4361466 - DNA, 25 bp, Homo sapien
caacattgttcaagctgagggccaa

SEQ ID NO: 4361467 - DNA, 25 bp, Homo sapien
ggagatctgcagttgtctcccttga

SEQ ID NO: 4361468 - DNA, 25 bp, Homo sapien
ctattgtgcagagtgggtcagtgca

SEQ ID NO: 4361469 - DNA, 25 bp, Homo sapien
tagatatcaggcagtaaacaacagt

SEQ ID NO: 4361470 - DNA, 25 bp, Homo sapien
cagccaacatggagtaataaggatt

SEQ ID NO: 4361471 - DNA, 25 bp, Homo sapien
gcaggtaacccttggtctgtaagca

SEQ ID NO: 4361472 - DNA, 25 bp, Homo sapien
tctcgcagcatttccagttaagagg

SEQ ID NO: 4361473 - DNA, 25 bp, Homo sapien
cagatggtcttacgccacagggtgc

SEQ ID NO: 4361474 - DNA, 25 bp, Homo sapien
ctgtaagcaccaccgatccagggat

SEQ ID NO: 4361475 - DNA, 25 bp, Homo sapien
aagtccaaagtcaagggcccacatc

SEQ ID NO: 4361476 - DNA, 25 bp, Homo sapien
aagtcaagggcccacatctggtgac

SEQ ID NO: 4361477 - DNA, 25 bp, Homo sapien
ccaaagtcaagggcccacatctggt

SEQ ID NO: 4361478 - DNA, 25 bp, Homo sapien
gtcaagggcccacatctggtgacgg

SEQ ID NO: 4361479 - DNA, 25 bp, Homo sapien
cagtttttaccccactgtgactcaa

SEQ ID NO: 4361480 - DNA, 25 bp, Homo sapien
tcagtttttaccccactgtgactca

SEQ ID NO: 4361481 - DNA, 25 bp, Homo sapien
agtttttaccccactgtgactcaag

SEQ ID NO: 4361482 - DNA, 25 bp, Homo sapien
gtttttaccccactgtgactcaagc

SEQ ID NO: 4361483 - DNA, 25 bp, Homo sapien
cagcatgctgcttgtaattcaccaa

SEQ ID NO: 4361484 - DNA, 25 bp, Homo sapien
ctgaagaagtctttccgctggtcat

SEQ ID NO: 4361485 - DNA, 25 bp, Homo sapien
gcagaagcttgatacccgccagcat

SEQ ID NO: 4361486 - DNA, 25 bp, Homo sapien
aagtctttccgctggtcatgcagaa

SEQ ID NO: 4361487 - DNA, 25 bp, Homo sapien
tgtcgtttccttaggctcacccagc

SEQ ID NO: 4361488 - DNA, 25 bp, Homo sapien
gagcagtttctgacctgcctgtcag

SEQ ID NO: 4361489 - DNA, 25 bp, Homo sapien
attttgccaccctttaaatgtctgg

SEQ ID NO: 4361490 - DNA, 25 bp, Homo sapien
tgcctgtcagcccaattttgtcgtt

SEQ ID NO: 4361491 - DNA, 25 bp, Homo sapien
tgacatcttcacacaactcaattct

SEQ ID NO: 4361492 - DNA, 25 bp, Homo sapien
aacactataaatattgcacttctaa

SEQ ID NO: 4361493 - DNA, 25 bp, Homo sapien
acacctcagggcaaaggcttgaagg

SEQ ID NO: 4361494 - DNA, 25 bp, Homo sapien
tgatttagaaaacgcaagacaagat

SEQ ID NO: 4361495 - DNA, 25 bp, Homo sapien
tataaataaacgcttccaagctgtc

SEQ ID NO: 4361496 - DNA, 25 bp, Homo sapien
agcttcctatcaccgcactaagtcg

SEQ ID NO: 4361497 - DNA, 25 bp, Homo sapien
agaacttccctcagctatctcggag

SEQ ID NO: 4361498 - DNA, 25 bp, Homo sapien
cactaagtcggcaggtttccaatca

SEQ ID NO: 4361499 - DNA, 25 bp, Homo sapien
ccatcatgtgaagagtcaaccagtc

SEQ ID NO: 4361500 - DNA, 25 bp, Homo sapien
tgaagagtcaaccagtcccatcttt

SEQ ID NO: 4361501 - DNA, 25 bp, Homo sapien
tcatgtgaagagtcaaccagtccca

SEQ ID NO: 4361502 - DNA, 25 bp, Homo sapien
cagtcccatctttcggaatcctctt

SEQ ID NO: 4361503 - DNA, 25 bp, Homo sapien
tctactgagagaacatagatctttc

SEQ ID NO: 4361504 - DNA, 25 bp, Homo sapien
tttctactgagagaacatagatctt

SEQ ID NO: 4361505 - DNA, 25 bp, Homo sapien
ttttttctactgagagaacatagat

SEQ ID NO: 4361506 - DNA, 25 bp, Homo sapien
tactgagagaacatagatctttcaa

SEQ ID NO: 4361507 - DNA, 25 bp, Homo sapien
tcttcacctacttggcccataataa

SEQ ID NO: 4361508 - DNA, 25 bp, Homo sapien
gtcttgaacatcatgataaagctgt

SEQ ID NO: 4361509 - DNA, 25 bp, Homo sapien
gcccatcttcacctacttggcccat

SEQ ID NO: 4361510 - DNA, 25 bp, Homo sapien
gcatgattttgcctcgcccatcttc

SEQ ID NO: 4361511 - DNA, 25 bp, Homo sapien
gatgatcgagactgtggcgtgcaaa

SEQ ID NO: 4361512 - DNA, 25 bp, Homo sapien
gcccgcctgctgaatcgccaaattt

SEQ ID NO: 4361513 - DNA, 25 bp, Homo sapien
tgatggttgtgataacagtgccggc

SEQ ID NO: 4361514 - DNA, 25 bp, Homo sapien
ggcgtgcaaactcccatcgcgagtg

SEQ ID NO: 4361515 - DNA, 25 bp, Homo sapien
tgacacaaggccacggtgggtttta

SEQ ID NO: 4361516 - DNA, 25 bp, Homo sapien
ccgtccgtctacacttttgttgaca

SEQ ID NO: 4361517 - DNA, 25 bp, Homo sapien
aaagtcacttgaacaataattgccc

SEQ ID NO: 4361518 - DNA, 25 bp, Homo sapien
aataattgccctccagagtccccgt

SEQ ID NO: 4361519 - DNA, 25 bp, Homo sapien
ccagggactttcctagacactcagt

SEQ ID NO: 4361520 - DNA, 25 bp, Homo sapien
tttagacctgctggcaaccaggaca

SEQ ID NO: 4361521 - DNA, 25 bp, Homo sapien
gcgatcgtttctatgggtccaccct

SEQ ID NO: 4361522 - DNA, 25 bp, Homo sapien
cctggctgtgttcccgcgatcgttt

SEQ ID NO: 4361523 - DNA, 25 bp, Homo sapien
tgcacagtcttggttccccagagac

SEQ ID NO: 4361524 - DNA, 25 bp, Homo sapien
ttggttccccagagacgtccagtct

SEQ ID NO: 4361525 - DNA, 25 bp, Homo sapien
ccagagacgtccagtctggcgggca

SEQ ID NO: 4361526 - DNA, 25 bp, Homo sapien
tttctcctgcacagtcttggttccc

SEQ ID NO: 4361527 - DNA, 25 bp, Homo sapien
ccattttgcagccagcagggtcatc

SEQ ID NO: 4361528 - DNA, 25 bp, Homo sapien
cattttgcagccagcagggtcatct

SEQ ID NO: 4361529 - DNA, 25 bp, Homo sapien
gcggaggggatgccgatgtgctggt

SEQ ID NO: 4361530 - DNA, 25 bp, Homo sapien
gatggcggaggggatgccgatgtgc

SEQ ID NO: 4361531 - DNA, 25 bp, Homo sapien
ctgagatggcggaggggatgccgat

SEQ ID NO: 4361532 - DNA, 25 bp, Homo sapien
tggcggaggggatgccgatgtgctg

SEQ ID NO: 4361533 - DNA, 25 bp, Homo sapien
ctccaaaaggatgctccatagggtt

SEQ ID NO: 4361534 - DNA, 25 bp, Homo sapien
gctccatagggttcatggccacatc

SEQ ID NO: 4361535 - DNA, 25 bp, Homo sapien
caaaaggatgctccatagggttcat

SEQ ID NO: 4361536 - DNA, 25 bp, Homo sapien
tgctccatagggttcatggccacat

SEQ ID NO: 4361537 - DNA, 25 bp, Homo sapien
aggacagcttgctacggcctccagg

SEQ ID NO: 4361538 - DNA, 25 bp, Homo sapien
gacagcttgctacggcctccaggct

SEQ ID NO: 4361539 - DNA, 25 bp, Homo sapien
tggtaggcttggcaagccttcaaga

SEQ ID NO: 4361540 - DNA, 25 bp, Homo sapien
tttgtggtaggcttggcaagccttc

SEQ ID NO: 4361541 - DNA, 25 bp, Homo sapien
ggtgcccacagggagcacactgcca

SEQ ID NO: 4361542 - DNA, 25 bp, Homo sapien
tgcccacagggagcacactgccaat

SEQ ID NO: 4361543 - DNA, 25 bp, Homo sapien
gagctgggccttcttgccgcaatac

SEQ ID NO: 4361544 - DNA, 25 bp, Homo sapien
cccacagggagcacactgccaatgt

SEQ ID NO: 4361545 - DNA, 25 bp, Homo sapien
gcagcaatgaaaagctccgtccgct

SEQ ID NO: 4361546 - DNA, 25 bp, Homo sapien
tgccctcggcagcaatgaaaagctc

SEQ ID NO: 4361547 - DNA, 25 bp, Homo sapien
tggcccgtgtgaatgccctcggcag

SEQ ID NO: 4361548 - DNA, 25 bp, Homo sapien
gtgtgaatgccctcggcagcaatga

SEQ ID NO: 4361549 - DNA, 25 bp, Homo sapien
ctagctcaatgggtgtgaccagata

SEQ ID NO: 4361550 - DNA, 25 bp, Homo sapien
tcaatgggtgtgaccagataattca

SEQ ID NO: 4361551 - DNA, 25 bp, Homo sapien
cactagctcaatgggtgtgaccaga

SEQ ID NO: 4361552 - DNA, 25 bp, Homo sapien
agctcaatgggtgtgaccagataat

SEQ ID NO: 4361553 - DNA, 25 bp, Homo sapien
gggtttggatttttagatctgaggc

SEQ ID NO: 4361554 - DNA, 25 bp, Homo sapien
ctgggtttggatttttagatctgag

SEQ ID NO: 4361555 - DNA, 25 bp, Homo sapien
tgggtttggatttttagatctgagg

SEQ ID NO: 4361556 - DNA, 25 bp, Homo sapien
cgtggttacagggaatgtggtggtg

SEQ ID NO: 4361557 - DNA, 25 bp, Homo sapien
acagggaatgtggtggtgacaggct

SEQ ID NO: 4361558 - DNA, 25 bp, Homo sapien
ttacagggaatgtggtggtgacagg

SEQ ID NO: 4361559 - DNA, 25 bp, Homo sapien
ggttacagggaatgtggtggtgaca

SEQ ID NO: 4361560 - DNA, 25 bp, Homo sapien
cccatctgcagttaaacttaagtct

SEQ ID NO: 4361561 - DNA, 25 bp, Homo sapien
atatgtagtgaccaataaacccatc

SEQ ID NO: 4361562 - DNA, 25 bp, Homo sapien
gcagttaaacttaagtctgataaaa

SEQ ID NO: 4361563 - DNA, 25 bp, Homo sapien
tagtgaccaataaacccatctgcag

SEQ ID NO: 4361564 - DNA, 25 bp, Homo sapien
gaaagccatgcaaaggacttccatt

SEQ ID NO: 4361565 - DNA, 25 bp, Homo sapien
tccactccgggctaagaaagccatg

SEQ ID NO: 4361566 - DNA, 25 bp, Homo sapien
ttcaatggcagttcttcggtatgtc

SEQ ID NO: 4361567 - DNA, 25 bp, Homo sapien
ggcagttcttcggtatgtctgaaat

SEQ ID NO: 4361568 - DNA, 25 bp, Homo sapien
gcaggtggactatcaccacaatact

SEQ ID NO: 4361569 - DNA, 25 bp, Homo sapien
catcgttgacttccccgccattaaa

SEQ ID NO: 4361570 - DNA, 25 bp, Homo sapien
tcatatcggcagtagttatctcgct

SEQ ID NO: 4361571 - DNA, 25 bp, Homo sapien
taaacacagccacataatcatatcg

SEQ ID NO: 4361572 - DNA, 25 bp, Homo sapien
aagcacaatagaagtgtcaaatatt

SEQ ID NO: 4361573 - DNA, 25 bp, Homo sapien
caatagaagtgtcaaatattaatag

SEQ ID NO: 4361574 - DNA, 25 bp, Homo sapien
aaagcacaatagaagtgtcaaatat

SEQ ID NO: 4361575 - DNA, 25 bp, Homo sapien
tagaagtgtcaaatattaatagcat

SEQ ID NO: 4361576 - DNA, 25 bp, Homo sapien
gggctacaatgtgccacacacaagt

SEQ ID NO: 4361577 - DNA, 25 bp, Homo sapien
taaaagagccggaaggtctgtcaag

SEQ ID NO: 4361578 - DNA, 25 bp, Homo sapien
aagtgactcctgcagggtaatcccg

SEQ ID NO: 4361579 - DNA, 25 bp, Homo sapien
agggtaatcccggtctggccagttg

SEQ ID NO: 4361580 - DNA, 25 bp, Homo sapien
agtttatgtaggttacagcaataca

SEQ ID NO: 4361581 - DNA, 25 bp, Homo sapien
agcccacaagtttatgtaggttaca

SEQ ID NO: 4361582 - DNA, 25 bp, Homo sapien
cagcaatacaaccatgtggagatta

SEQ ID NO: 4361583 - DNA, 25 bp, Homo sapien
acagcaatacaaccatgtggagatt

SEQ ID NO: 4361584 - DNA, 25 bp, Homo sapien
tagcatagcaacacgagagagggga

SEQ ID NO: 4361585 - DNA, 25 bp, Homo sapien
catagcatagcaacacgagagaggg

SEQ ID NO: 4361586 - DNA, 25 bp, Homo sapien
gacatagcatagcaacacgagagag

SEQ ID NO: 4361587 - DNA, 25 bp, Homo sapien
catagcaacacgagagaggggagaa

SEQ ID NO: 4361588 - DNA, 25 bp, Homo sapien
tttttttctgccatctcccatctac

SEQ ID NO: 4361589 - DNA, 25 bp, Homo sapien
gattgagtaatttctatttaagttc

SEQ ID NO: 4361590 - DNA, 25 bp, Homo sapien
gtaatttctatttaagttcactgac

SEQ ID NO: 4361591 - DNA, 25 bp, Homo sapien
gagtaatttctatttaagttcactg

SEQ ID NO: 4361592 - DNA, 25 bp, Homo sapien
ggcatcagaaatcatctgcaccatc

SEQ ID NO: 4361593 - DNA, 25 bp, Homo sapien
cgtttggttcagcagcggagaacat

SEQ ID NO: 4361594 - DNA, 25 bp, Homo sapien
cagctgtgttggcatcagaaatcat

SEQ ID NO: 4361595 - DNA, 25 bp, Homo sapien
catggccatgaagccattgccagct

SEQ ID NO: 4361596 - DNA, 25 bp, Homo sapien
gaaagtgccacagaagcggccaatg

SEQ ID NO: 4361597 - DNA, 25 bp, Homo sapien
ggcatggccattgtacacatccaca

SEQ ID NO: 4361598 - DNA, 25 bp, Homo sapien
cactctcgaggtctatgaatcggaa

SEQ ID NO: 4361599 - DNA, 25 bp, Homo sapien
tccacaaagtcatagcggcacaggt

SEQ ID NO: 4361600 - DNA, 25 bp, Homo sapien
agcaaacgtgccaaagctctcgatg

SEQ ID NO: 4361601 - DNA, 25 bp, Homo sapien
acaagcaaacgtgccaaagctctcg

SEQ ID NO: 4361602 - DNA, 25 bp, Homo sapien
aacgtgccaaagctctcgatgccgg

SEQ ID NO: 4361603 - DNA, 25 bp, Homo sapien
tgtcacaagcaaacgtgccaaagct

SEQ ID NO: 4361604 - DNA, 25 bp, Homo sapien
tgatctacgtaaagctcgaggtgac

SEQ ID NO: 4361605 - DNA, 25 bp, Homo sapien
gacctccaaaggtagtccagaaaga

SEQ ID NO: 4361606 - DNA, 25 bp, Homo sapien
ctttgggaacgtgcattctaaaatg

SEQ ID NO: 4361607 - DNA, 25 bp, Homo sapien
agttgatctacgtaaagctcgaggc

SEQ ID NO: 4361608 - DNA, 25 bp, Homo sapien
caagacaggacttcaggttatgcct

SEQ ID NO: 4361609 - DNA, 25 bp, Homo sapien
gatgttcgaaagatcccagctgcga

SEQ ID NO: 4361610 - DNA, 25 bp, Homo sapien
tggctacaaaacgaacaagacagga

SEQ ID NO: 4361611 - DNA, 25 bp, Homo sapien
cgaacaggcccttcggcattgggag

SEQ ID NO: 4361612 - DNA, 25 bp, Homo sapien
ggacaacaaagccgaacccacagaa

SEQ ID NO: 4361613 - DNA, 25 bp, Homo sapien
caacaaagccgaacccacagaagca

SEQ ID NO: 4361614 - DNA, 25 bp, Homo sapien
tgaagggacaacaaagccgaaccca

SEQ ID NO: 4361615 - DNA, 25 bp, Homo sapien
agggacaacaaagccgaacccacag

SEQ ID NO: 4361616 - DNA, 25 bp, Homo sapien
atcctctcccatccaattcctagac

SEQ ID NO: 4361617 - DNA, 25 bp, Homo sapien
tacaccttctcgaggaactcatcct

SEQ ID NO: 4361618 - DNA, 25 bp, Homo sapien
cctggggggatgttatcttccctct

SEQ ID NO: 4361619 - DNA, 25 bp, Homo sapien
tcctagacctggggggatgttatct

SEQ ID NO: 4361620 - DNA, 25 bp, Homo sapien
ccctctcccctttggtgcctcctcg

SEQ ID NO: 4361621 - DNA, 25 bp, Homo sapien
ttgcacagacaggagtgttctagtc

SEQ ID NO: 4361622 - DNA, 25 bp, Homo sapien
gcacagacaggagtgttctagtcat

SEQ ID NO: 4361623 - DNA, 25 bp, Homo sapien
tgcacagacaggagtgttctagtca

SEQ ID NO: 4361624 - DNA, 25 bp, Homo sapien
cttgcacagacaggagtgttctagt

SEQ ID NO: 4361625 - DNA, 25 bp, Homo sapien
tgttttcagtgccacacctgggcct

SEQ ID NO: 4361626 - DNA, 25 bp, Homo sapien
taagattgttccatgcctcgcctga

SEQ ID NO: 4361627 - DNA, 25 bp, Homo sapien
gaccttgctgcagctttcatcggag

SEQ ID NO: 4361628 - DNA, 25 bp, Homo sapien
tgggcctcccaaatgtcagtatctg

SEQ ID NO: 4361629 - DNA, 25 bp, Homo sapien
ccacaagtttcaggccagggtcctg

SEQ ID NO: 4361630 - DNA, 25 bp, Homo sapien
cagactgcgtgaaactggcacagat

SEQ ID NO: 4361631 - DNA, 25 bp, Homo sapien
gagaatacccaagtttcaccaagca

SEQ ID NO: 4361632 - DNA, 25 bp, Homo sapien
tcctgcatggcgacctggtatactg

SEQ ID NO: 4361633 - DNA, 25 bp, Homo sapien
gcaggacacgactagatctattata

SEQ ID NO: 4361634 - DNA, 25 bp, Homo sapien
ccactgggaatttatgaaggcacga

SEQ ID NO: 4361635 - DNA, 25 bp, Homo sapien
cctaatgagcatagagtagtcaaag

SEQ ID NO: 4361636 - DNA, 25 bp, Homo sapien
tttgtaatcactaatgcaggacacg

SEQ ID NO: 4361637 - DNA, 25 bp, Homo sapien
ataaatccagactctccagtaagaa

SEQ ID NO: 4361638 - DNA, 25 bp, Homo sapien
tttgctatttggagggtacactcca

SEQ ID NO: 4361639 - DNA, 25 bp, Homo sapien
tacatttgctatttggagggtacac

SEQ ID NO: 4361640 - DNA, 25 bp, Homo sapien
aatccagactctccagtaagaatgc

SEQ ID NO: 4361641 - DNA, 25 bp, Homo sapien
ggcagagtggcgcccaggcgttcgc

SEQ ID NO: 4361642 - DNA, 25 bp, Homo sapien
tggggactgctgccgcgagagctgg

SEQ ID NO: 4361643 - DNA, 25 bp, Homo sapien
agagtggcgcccaggcgttcgcgcc

SEQ ID NO: 4361644 - DNA, 25 bp, Homo sapien
ctggggactgctgccgcgagagctg

SEQ ID NO: 4361645 - DNA, 25 bp, Homo sapien
cagcgtagacgctcggggtttgcac

SEQ ID NO: 4361646 - DNA, 25 bp, Homo sapien
gacgcttagtttcccctgaggagct

SEQ ID NO: 4361647 - DNA, 25 bp, Homo sapien
gcggaggcacttttaaaggcgatta

SEQ ID NO: 4361648 - DNA, 25 bp, Homo sapien
gattatggtgccgtctgactcgacg

SEQ ID NO: 4361649 - DNA, 25 bp, Homo sapien
caagcacatgaaagcgggccaagct

SEQ ID NO: 4361650 - DNA, 25 bp, Homo sapien
ccataatgaatcgtcattatcatca

SEQ ID NO: 4361651 - DNA, 25 bp, Homo sapien
gaaactttgtttagtggagtctctc

SEQ ID NO: 4361652 - DNA, 25 bp, Homo sapien
aaaggcaagcacatgaaagcgggcc

SEQ ID NO: 4361653 - DNA, 25 bp, Homo sapien
cacttatccaaaatactagctccat

SEQ ID NO: 4361654 - DNA, 25 bp, Homo sapien
gctccattacgttcattttgaaaca

SEQ ID NO: 4361655 - DNA, 25 bp, Homo sapien
tcttgaagttgaatctccacttatc

SEQ ID NO: 4361656 - DNA, 25 bp, Homo sapien
tactagctccattacgttcattttg

SEQ ID NO: 4361657 - DNA, 25 bp, Homo sapien
agttggggagcctctcaagactgca

SEQ ID NO: 4361658 - DNA, 25 bp, Homo sapien
gagagttggggagcctctcaagact

SEQ ID NO: 4361659 - DNA, 25 bp, Homo sapien
ggtctgtgggtaagccagggctccc

SEQ ID NO: 4361660 - DNA, 25 bp, Homo sapien
ctatgtctgggtctgtgggtaagcc

SEQ ID NO: 4361661 - DNA, 25 bp, Homo sapien
gtgagatgacagaaatcggtccttc

SEQ ID NO: 4361662 - DNA, 25 bp, Homo sapien
cagaaatcggtccttctggagaatc

SEQ ID NO: 4361663 - DNA, 25 bp, Homo sapien
gagaatctgacttggtgctggtcac

SEQ ID NO: 4361664 - DNA, 25 bp, Homo sapien
tggagccctatggtgttgagctgct

SEQ ID NO: 4361665 - DNA, 25 bp, Homo sapien
caagactggtgctgagacgaaggtt

SEQ ID NO: 4361666 - DNA, 25 bp, Homo sapien
actggtgctgagacgaaggtttgtt

SEQ ID NO: 4361667 - DNA, 25 bp, Homo sapien
cgaaggtttgttgtcaacgctccct

SEQ ID NO: 4361668 - DNA, 25 bp, Homo sapien
gctgagacgaaggtttgttgtcaac

SEQ ID NO: 4361669 - DNA, 25 bp, Homo sapien
cttgtaagaacagtgcccagattgt

SEQ ID NO: 4361670 - DNA, 25 bp, Homo sapien
ttgtaagaacagtgcccagattgtc

SEQ ID NO: 4361671 - DNA, 25 bp, Homo sapien
tttgtagcaactattgccgaactgc

SEQ ID NO: 4361672 - DNA, 25 bp, Homo sapien
tgatttttgtagcaactattgccga

SEQ ID NO: 4361673 - DNA, 25 bp, Homo sapien
gctctggacaaccagaggcataaaa

SEQ ID NO: 4361674 - DNA, 25 bp, Homo sapien
aactattgccgaactgctcccaggt

SEQ ID NO: 4361675 - DNA, 25 bp, Homo sapien
gccttgaggacggtaccctcactct

SEQ ID NO: 4361676 - DNA, 25 bp, Homo sapien
ttgaggacggtaccctcactctcat

SEQ ID NO: 4361677 - DNA, 25 bp, Homo sapien
aagtgccttgaggacggtaccctca

SEQ ID NO: 4361678 - DNA, 25 bp, Homo sapien
ttctccaagtgccttgaggacggta

SEQ ID NO: 4361679 - DNA, 25 bp, Homo sapien
tgggcctggaactacggatgaagca

SEQ ID NO: 4361680 - DNA, 25 bp, Homo sapien
ggcctggaactacggatgaagcaca

SEQ ID NO: 4361681 - DNA, 25 bp, Homo sapien
tggaactacggatgaagcacagctg

SEQ ID NO: 4361682 - DNA, 25 bp, Homo sapien
aactacggatgaagcacagctgcgg

SEQ ID NO: 4361683 - DNA, 25 bp, Homo sapien
tcttcccagtggtgacaatcggctc

SEQ ID NO: 4361684 - DNA, 25 bp, Homo sapien
ctgtgttctagactggcaaggacca

SEQ ID NO: 4361685 - DNA, 25 bp, Homo sapien
ggaaggtgtgctcccaattggccct

SEQ ID NO: 4361686 - DNA, 25 bp, Homo sapien
ccttgtccagactagtttacttgct

SEQ ID NO: 4361687 - DNA, 25 bp, Homo sapien
ccttgtgcgaatccagccgtctgtg

SEQ ID NO: 4361688 - DNA, 25 bp, Homo sapien
gaacatgaccggttagcattcccac

SEQ ID NO: 4361689 - DNA, 25 bp, Homo sapien
cagaacatgaccggttagcattccc

SEQ ID NO: 4361690 - DNA, 25 bp, Homo sapien
tacagaacatgaccggttagcattc

SEQ ID NO: 4361691 - DNA, 25 bp, Homo sapien
ctacagaacatgaccggttagcatt

SEQ ID NO: 4361692 - DNA, 25 bp, Homo sapien
agaccttcagagtgaccttcacagc

SEQ ID NO: 4361693 - DNA, 25 bp, Homo sapien
cacagctctgcctaactttctgtca

SEQ ID NO: 4361694 - DNA, 25 bp, Homo sapien
aaccccagtgctacactgactgtct

SEQ ID NO: 4361695 - DNA, 25 bp, Homo sapien
cgatggactttgctccttgctgcct

SEQ ID NO: 4361696 - DNA, 25 bp, Homo sapien
tatactttttcacaacccagagcag

SEQ ID NO: 4361697 - DNA, 25 bp, Homo sapien
ctgagtcatcccacaaaccaatctg

SEQ ID NO: 4361698 - DNA, 25 bp, Homo sapien
catctctgggagctacactttgaaa

SEQ ID NO: 4361699 - DNA, 25 bp, Homo sapien
taacctacagactaagcataacttc

SEQ ID NO: 4361700 - DNA, 25 bp, Homo sapien
catcgtgggccaaaaggtaacagaa

SEQ ID NO: 4361701 - DNA, 25 bp, Homo sapien
tgtccgtatcacagagatcttaggg

SEQ ID NO: 4361702 - DNA, 25 bp, Homo sapien
aacaattggcagtatctttgctgga

SEQ ID NO: 4361703 - DNA, 25 bp, Homo sapien
tggagtttggccattcagcagtgga

SEQ ID NO: 4361704 - DNA, 25 bp, Homo sapien
ctcccgcgcctggaaagcacgacat

SEQ ID NO: 4361705 - DNA, 25 bp, Homo sapien
tgcccgcgaccgaggagctcaggga

SEQ ID NO: 4361706 - DNA, 25 bp, Homo sapien
gcctggaaagcacgacatcccgcag

SEQ ID NO: 4361707 - DNA, 25 bp, Homo sapien
aaagcacgacatcccgcaggcagca

SEQ ID NO: 4361708 - DNA, 25 bp, Homo sapien
gagctggagtaaaaactaggccatt

SEQ ID NO: 4361709 - DNA, 25 bp, Homo sapien
agaatggacattatgggagcaggca

SEQ ID NO: 4361710 - DNA, 25 bp, Homo sapien
tagatcctaccctcaaaacagatag

SEQ ID NO: 4361711 - DNA, 25 bp, Homo sapien
tcatcctgaagtagtaaagtagctc

SEQ ID NO: 4361712 - DNA, 25 bp, Homo sapien
gacttcatgtctctgatggacccaa

SEQ ID NO: 4361713 - DNA, 25 bp, Homo sapien
tgtaattgccccacggttcttgaat

SEQ ID NO: 4361714 - DNA, 25 bp, Homo sapien
gattctttactcagcagggtctagc

SEQ ID NO: 4361715 - DNA, 25 bp, Homo sapien
ggtctagcctagtaatgagcccatc

SEQ ID NO: 4361716 - DNA, 25 bp, Homo sapien
caggaagccactgaccaaagtcctt

SEQ ID NO: 4361717 - DNA, 25 bp, Homo sapien
ctagaagaattacaggagtggactc

SEQ ID NO: 4361718 - DNA, 25 bp, Homo sapien
caaagtccttcagctataccggtat

SEQ ID NO: 4361719 - DNA, 25 bp, Homo sapien
ggttggcttacaaactcactagaag

SEQ ID NO: 4361720 - DNA, 25 bp, Homo sapien
ccaatccaatcttccgtgatttgtc

SEQ ID NO: 4361721 - DNA, 25 bp, Homo sapien
ccaatcttccgtgatttgtcccctt

SEQ ID NO: 4361722 - DNA, 25 bp, Homo sapien
atccaatcttccgtgatttgtcccc

SEQ ID NO: 4361723 - DNA, 25 bp, Homo sapien
caatccaatcttccgtgatttgtcc

SEQ ID NO: 4361724 - DNA, 25 bp, Homo sapien
aagccagagggcaagagagctgaga

SEQ ID NO: 4361725 - DNA, 25 bp, Homo sapien
gagggcaagagagctgagaatcagc

SEQ ID NO: 4361726 - DNA, 25 bp, Homo sapien
agctgagaatcagctccaatacaga

SEQ ID NO: 4361727 - DNA, 25 bp, Homo sapien
taacaaaaagccagagggcaagaga

SEQ ID NO: 4361728 - DNA, 25 bp, Homo sapien
acacactcttcaggagtgtggatta

SEQ ID NO: 4361729 - DNA, 25 bp, Homo sapien
cttcaggagtgtggattatagtgga

SEQ ID NO: 4361730 - DNA, 25 bp, Homo sapien
tcaggagtgtggattatagtggaat

SEQ ID NO: 4361731 - DNA, 25 bp, Homo sapien
cactcttcaggagtgtggattatag

SEQ ID NO: 4361732 - DNA, 25 bp, Homo sapien
ggtaggccaatctgatactcttttc

SEQ ID NO: 4361733 - DNA, 25 bp, Homo sapien
ccaggaatttgaattggggacagac

SEQ ID NO: 4361734 - DNA, 25 bp, Homo sapien
caggtaggccaatctgatactcttt

SEQ ID NO: 4361735 - DNA, 25 bp, Homo sapien
ggccaatctgatactcttttccagg

SEQ ID NO: 4361736 - DNA, 25 bp, Homo sapien
cacatgttagtccatgcctggaagc

SEQ ID NO: 4361737 - DNA, 25 bp, Homo sapien
gaaaaatttctttgtgcgcgcatca

SEQ ID NO: 4361738 - DNA, 25 bp, Homo sapien
agagagttcagagcgaccacatggt

SEQ ID NO: 4361739 - DNA, 25 bp, Homo sapien
ttgcaaatccaagaacagtcaccgt

SEQ ID NO: 4361740 - DNA, 25 bp, Homo sapien
gcctgtttgaaaagtagaccttctg

SEQ ID NO: 4361741 - DNA, 25 bp, Homo sapien
gccatgagacacacctaaaacctat

SEQ ID NO: 4361742 - DNA, 25 bp, Homo sapien
tgattaaactcaccggataaagatg

SEQ ID NO: 4361743 - DNA, 25 bp, Homo sapien
ccttggtactcagttgattggcgag

SEQ ID NO: 4361744 - DNA, 25 bp, Homo sapien
taaaaacagattatgctttccaact

SEQ ID NO: 4361745 - DNA, 25 bp, Homo sapien
tccaactagagatggaactaagaag

SEQ ID NO: 4361746 - DNA, 25 bp, Homo sapien
gattatgctttccaactagagatgg

SEQ ID NO: 4361747 - DNA, 25 bp, Homo sapien
gagatggaactaagaagaaatgaaa

SEQ ID NO: 4361748 - DNA, 25 bp, Homo sapien
tctcaaaagctcaaagagcaggctg

SEQ ID NO: 4361749 - DNA, 25 bp, Homo sapien
tacaattggctggtgctatcccgta

SEQ ID NO: 4361750 - DNA, 25 bp, Homo sapien
tcaggtcaaacgctacaagatgtgg

SEQ ID NO: 4361751 - DNA, 25 bp, Homo sapien
tcaataagaaaacgtgtggcctctc

SEQ ID NO: 4361752 - DNA, 25 bp, Homo sapien
caataggcctaggagcacacagaaa

SEQ ID NO: 4361753 - DNA, 25 bp, Homo sapien
tatgccgactatcccctcacttgga

SEQ ID NO: 4361754 - DNA, 25 bp, Homo sapien
tctatggattgcacttatgctagca

SEQ ID NO: 4361755 - DNA, 25 bp, Homo sapien
caatttaggcactttggatgatcca

SEQ ID NO: 4361756 - DNA, 25 bp, Homo sapien
tgcccaatgtcttacacacagtagg

SEQ ID NO: 4361757 - DNA, 25 bp, Homo sapien
tgctgttagtcctcagagttggcac

SEQ ID NO: 4361758 - DNA, 25 bp, Homo sapien
tgacaggcaccgaagtcaaacacct

SEQ ID NO: 4361759 - DNA, 25 bp, Homo sapien
cacagttgagcagacaatggtctcc

SEQ ID NO: 4361760 - DNA, 25 bp, Homo sapien
gcttattcttactactctccccatg

SEQ ID NO: 4361761 - DNA, 25 bp, Homo sapien
aagcttattcttactactctcccca

SEQ ID NO: 4361762 - DNA, 25 bp, Homo sapien
agaaaagcttattcttactactctc

SEQ ID NO: 4361763 - DNA, 25 bp, Homo sapien
agaaactgtgtttgaggaccagtca

SEQ ID NO: 4361764 - DNA, 25 bp, Homo sapien
gttgtatcatgacacacgccttcag

SEQ ID NO: 4361765 - DNA, 25 bp, Homo sapien
caaagaaaattcagtgcgtaccaca

SEQ ID NO: 4361766 - DNA, 25 bp, Homo sapien
aaccagtagtctcctccaaggcgga

SEQ ID NO: 4361767 - DNA, 25 bp, Homo sapien
gggctactccttattaccaatggca

SEQ ID NO: 4361768 - DNA, 25 bp, Homo sapien
agtacacctggtcgtagatgctgag

SEQ ID NO: 4361769 - DNA, 25 bp, Homo sapien
tgtagcccacagtacccgagaaagt

SEQ ID NO: 4361770 - DNA, 25 bp, Homo sapien
tactgcagaattcggagctgtttag

SEQ ID NO: 4361771 - DNA, 25 bp, Homo sapien
ggaacttcctgattaccagccccag

SEQ ID NO: 4361772 - DNA, 25 bp, Homo sapien
gatgaagcactccacgaagtcgtcg

SEQ ID NO: 4361773 - DNA, 25 bp, Homo sapien
taatgtcgaaaagacccggctggat

SEQ ID NO: 4361774 - DNA, 25 bp, Homo sapien
gaagtgcgtccagaagttgagcgtc

SEQ ID NO: 4361775 - DNA, 25 bp, Homo sapien
catgacgaagacgaaggtgcgcagc

SEQ ID NO: 4361776 - DNA, 25 bp, Homo sapien
gaggcggcagagtgggagttccggg

SEQ ID NO: 4361777 - DNA, 25 bp, Homo sapien
gccggagggccttttgtgcccgcgc

SEQ ID NO: 4361778 - DNA, 25 bp, Homo sapien
cgggaggcggcagagtgggagttcc

SEQ ID NO: 4361779 - DNA, 25 bp, Homo sapien
gcagagtgggagttccgggcggccc

SEQ ID NO: 4361780 - DNA, 25 bp, Homo sapien
tcgctgcaggtttaggagaagaccc

SEQ ID NO: 4361781 - DNA, 25 bp, Homo sapien
gaatcaattaataggcagcgctgcg

SEQ ID NO: 4361782 - DNA, 25 bp, Homo sapien
gagcagccgctcctaaaaattaaat

SEQ ID NO: 4361783 - DNA, 25 bp, Homo sapien
gtcggagcctttgtgcccacgccgg

SEQ ID NO: 4361784 - DNA, 25 bp, Homo sapien
ttagttgcataatcagctcgcttac

SEQ ID NO: 4361785 - DNA, 25 bp, Homo sapien
gacaaagaatggtgagattgactct

SEQ ID NO: 4361786 - DNA, 25 bp, Homo sapien
accagagctgtcacgtgtaaaaatg

SEQ ID NO: 4361787 - DNA, 25 bp, Homo sapien
tgcttgaggcacaaaaccagttgat

SEQ ID NO: 4361788 - DNA, 25 bp, Homo sapien
agttagctatctgtaaaaccagcag

SEQ ID NO: 4361789 - DNA, 25 bp, Homo sapien
aagtatatgtaaaaatgccactgca

SEQ ID NO: 4361790 - DNA, 25 bp, Homo sapien
ggtaatgttcttgtagaccaactac

SEQ ID NO: 4361791 - DNA, 25 bp, Homo sapien
tgttgaaactgtagcaaaagggatg

SEQ ID NO: 4361792 - DNA, 25 bp, Homo sapien
catgcaaagagctaatgaacccgtt

SEQ ID NO: 4361793 - DNA, 25 bp, Homo sapien
tgaacccgttgactccactgataac

SEQ ID NO: 4361794 - DNA, 25 bp, Homo sapien
tgataaccacattctgtagttggag

SEQ ID NO: 4361795 - DNA, 25 bp, Homo sapien
tagttggcaactgatgattctggca

SEQ ID NO: 4361796 - DNA, 25 bp, Homo sapien
tcctcctcctaatctgcgttccaca

SEQ ID NO: 4361797 - DNA, 25 bp, Homo sapien
ctgtcctcctcctaatctgcgttcc

SEQ ID NO: 4361798 - DNA, 25 bp, Homo sapien
ctaatctgcgttccacactgctcat

SEQ ID NO: 4361799 - DNA, 25 bp, Homo sapien
tcctcctaatctgcgttccacactg

SEQ ID NO: 4361800 - DNA, 25 bp, Homo sapien
ggccagtgcacgtctttaaaaagcg

SEQ ID NO: 4361801 - DNA, 25 bp, Homo sapien
tcaagttgggtcaaacggctcctct

SEQ ID NO: 4361802 - DNA, 25 bp, Homo sapien
taagagggtgaagtatcagctggcc

SEQ ID NO: 4361803 - DNA, 25 bp, Homo sapien
aagaacagcgtttccgtccatcgag

SEQ ID NO: 4361804 - DNA, 25 bp, Homo sapien
ggtcttgatctcctctgactttgtg

SEQ ID NO: 4361805 - DNA, 25 bp, Homo sapien
gtcgcccaggcctgcagtagtgcta

SEQ ID NO: 4361806 - DNA, 25 bp, Homo sapien
tcgcccaggcctgcagtagtgctat

SEQ ID NO: 4361807 - DNA, 25 bp, Homo sapien
cccaggcctgcagtagtgctatctc

SEQ ID NO: 4361808 - DNA, 25 bp, Homo sapien
taggaatttgctcgccctgatacat

SEQ ID NO: 4361809 - DNA, 25 bp, Homo sapien
tcggtgttagtcagcagaataatca

SEQ ID NO: 4361810 - DNA, 25 bp, Homo sapien
tagatggctgtaataacatgcaggc

SEQ ID NO: 4361811 - DNA, 25 bp, Homo sapien
tacgtgaagggccaatgtttgaagc

SEQ ID NO: 4361812 - DNA, 25 bp, Homo sapien
cagacaccagcccatgtttactata

SEQ ID NO: 4361813 - DNA, 25 bp, Homo sapien
caccagcccatgtttactataggtg

SEQ ID NO: 4361814 - DNA, 25 bp, Homo sapien
agacaccagcccatgtttactatag

SEQ ID NO: 4361815 - DNA, 25 bp, Homo sapien
gacaccagcccatgtttactatagg

SEQ ID NO: 4361816 - DNA, 25 bp, Homo sapien
tattgtaacttatggaaagggcagt

SEQ ID NO: 4361817 - DNA, 25 bp, Homo sapien
tagttagagggatcacttttactga

SEQ ID NO: 4361818 - DNA, 25 bp, Homo sapien
cagtgtaattggtacttgtttccca

SEQ ID NO: 4361819 - DNA, 25 bp, Homo sapien
cattgttagctttttctgattggaa

SEQ ID NO: 4361820 - DNA, 25 bp, Homo sapien
agtaaacctacttaatactcccatg

SEQ ID NO: 4361821 - DNA, 25 bp, Homo sapien
gatcagaaattggtgacttataagg

SEQ ID NO: 4361822 - DNA, 25 bp, Homo sapien
gtattattagataggttatttccag

SEQ ID NO: 4361823 - DNA, 25 bp, Homo sapien
tattcatgtttcttgtctgaaggac

SEQ ID NO: 4361824 - DNA, 25 bp, Homo sapien
catggtggcgtaagttctgaaaaat

SEQ ID NO: 4361825 - DNA, 25 bp, Homo sapien
tcttgagcacttgaaaatacttttg

SEQ ID NO: 4361826 - DNA, 25 bp, Homo sapien
tatatgaccgtgacaatagtttatc

SEQ ID NO: 4361827 - DNA, 25 bp, Homo sapien
ctgtacacatttgcctccatggtgg

SEQ ID NO: 4361828 - DNA, 25 bp, Homo sapien
gagatcttcagtgttgccagctgcc

SEQ ID NO: 4361829 - DNA, 25 bp, Homo sapien
ctccactgtggagatcttcagtgtt

SEQ ID NO: 4361830 - DNA, 25 bp, Homo sapien
tctctgcattccgatgatttgctcc

SEQ ID NO: 4361831 - DNA, 25 bp, Homo sapien
gatgatttgctccagagcagtcctg

SEQ ID NO: 4361832 - DNA, 25 bp, Homo sapien
tctgaagccgtctattctttgtacc

SEQ ID NO: 4361833 - DNA, 25 bp, Homo sapien
gcctcttctgaagccgtctattctt

SEQ ID NO: 4361834 - DNA, 25 bp, Homo sapien
tgaagccgtctattctttgtacctt

SEQ ID NO: 4361835 - DNA, 25 bp, Homo sapien
tcttctgaagccgtctattctttgt

SEQ ID NO: 4361836 - DNA, 25 bp, Homo sapien
ccagagctaacagactcattatctt

SEQ ID NO: 4361837 - DNA, 25 bp, Homo sapien
ctggcaccagagctaacagactcat

SEQ ID NO: 4361838 - DNA, 25 bp, Homo sapien
atgtctgttttcaggctccgctggt

SEQ ID NO: 4361839 - DNA, 25 bp, Homo sapien
tgttttcaggctccgctggtttcat

SEQ ID NO: 4361840 - DNA, 25 bp, Homo sapien
acatgagctccggaaggagttctgg

SEQ ID NO: 4361841 - DNA, 25 bp, Homo sapien
ggttcagacatgagctccggaagga

SEQ ID NO: 4361842 - DNA, 25 bp, Homo sapien
tcagcggttcagacatgagctccgg

SEQ ID NO: 4361843 - DNA, 25 bp, Homo sapien
cctgtagtaattctgtaagtctccc

SEQ ID NO: 4361844 - DNA, 25 bp, Homo sapien
tatttgctgccaatcaggtggcatt

SEQ ID NO: 4361845 - DNA, 25 bp, Homo sapien
atttgctgccaatcaggtggcattt

SEQ ID NO: 4361846 - DNA, 25 bp, Homo sapien
cttatttgctgccaatcaggtggca

SEQ ID NO: 4361847 - DNA, 25 bp, Homo sapien
ttatttgctgccaatcaggtggcat

SEQ ID NO: 4361848 - DNA, 25 bp, Homo sapien
taggagagcgcttccttctgtcatc

SEQ ID NO: 4361849 - DNA, 25 bp, Homo sapien
tgttcctgcttcgttggtgctgcca

SEQ ID NO: 4361850 - DNA, 25 bp, Homo sapien
tccaggcagtggcaatggctataca

SEQ ID NO: 4361851 - DNA, 25 bp, Homo sapien
aaatttgcattcttcgggcacagag

SEQ ID NO: 4361852 - DNA, 25 bp, Homo sapien
cttctaaaaactctactgggacagg

SEQ ID NO: 4361853 - DNA, 25 bp, Homo sapien
tggaagaataatggcgcaaacagca

SEQ ID NO: 4361854 - DNA, 25 bp, Homo sapien
tctgaaaagtctgcccgaaacgcta

SEQ ID NO: 4361855 - DNA, 25 bp, Homo sapien
gaggcaacaaaactccggatcagcg

SEQ ID NO: 4361856 - DNA, 25 bp, Homo sapien
ggagattcccttttcggcacttgga

SEQ ID NO: 4361857 - DNA, 25 bp, Homo sapien
caggtctaacctttcgtgtgcgcgc

SEQ ID NO: 4361858 - DNA, 25 bp, Homo sapien
tcaaccaccgttcagtctccggagg

SEQ ID NO: 4361859 - DNA, 25 bp, Homo sapien
gtgtgcgcgctctgatactcaacca

SEQ ID NO: 4361860 - DNA, 25 bp, Homo sapien
tattacttccttcgagagggcgcag

SEQ ID NO: 4361861 - DNA, 25 bp, Homo sapien
gcacaatgaaacaagagcagccccg

SEQ ID NO: 4361862 - DNA, 25 bp, Homo sapien
gtcaatcacagtggacgcagcaccg

SEQ ID NO: 4361863 - DNA, 25 bp, Homo sapien
ctttgcgcgcagagctaagccttcg

SEQ ID NO: 4361864 - DNA, 25 bp, Homo sapien
tgcggcggggtctttctttgcttaa

SEQ ID NO: 4361865 - DNA, 25 bp, Homo sapien
gggagtcgggtagcagcatcctcct

SEQ ID NO: 4361866 - DNA, 25 bp, Homo sapien
tggtccgagcgcgttgcgggcgccc

SEQ ID NO: 4361867 - DNA, 25 bp, Homo sapien
gcaggagccgcgcagaggctggtcc

SEQ ID NO: 4361868 - DNA, 25 bp, Homo sapien
ctcccggtgatggaagcagccgccg

SEQ ID NO: 4361869 - DNA, 25 bp, Homo sapien
atcctcccggtgatggaagcagccg

SEQ ID NO: 4361870 - DNA, 25 bp, Homo sapien
gcgggggttgcctgcgctgtccgcc

SEQ ID NO: 4361871 - DNA, 25 bp, Homo sapien
ggcatcctcccggtgatggaagcag

SEQ ID NO: 4361872 - DNA, 25 bp, Homo sapien
tacacagtacagttgcagctggatt

SEQ ID NO: 4361873 - DNA, 25 bp, Homo sapien
tcctattgtggatgctgagcgagac

SEQ ID NO: 4361874 - DNA, 25 bp, Homo sapien
tgttttgagtgctgtgaatgtgtag

SEQ ID NO: 4361875 - DNA, 25 bp, Homo sapien
aatagattttctgcaggtgtaggga

SEQ ID NO: 4361876 - DNA, 25 bp, Homo sapien
caaagaggtcagtgcatacatgaca

SEQ ID NO: 4361877 - DNA, 25 bp, Homo sapien
gagcgtgtgttgttcctgggattcc

SEQ ID NO: 4361878 - DNA, 25 bp, Homo sapien
caatccttgatgattgcagcaagag

SEQ ID NO: 4361879 - DNA, 25 bp, Homo sapien
cattggttgggcttgagaacactca

SEQ ID NO: 4361880 - DNA, 25 bp, Homo sapien
gctctcccttgatttgcgtagtatg

SEQ ID NO: 4361881 - DNA, 25 bp, Homo sapien
tcagatgtcttgcatgaggatgaag

SEQ ID NO: 4361882 - DNA, 25 bp, Homo sapien
tctgtaacttttgtagggctctccc

SEQ ID NO: 4361883 - DNA, 25 bp, Homo sapien
gatttgcgtagtatgtaatagagac

SEQ ID NO: 4361884 - DNA, 25 bp, Homo sapien
gactgcctcctgcatagatctgtca

SEQ ID NO: 4361885 - DNA, 25 bp, Homo sapien
tgtgtgctgctacagattggaattg

SEQ ID NO: 4361886 - DNA, 25 bp, Homo sapien
tcagccctgctccaagatgcagaaa

SEQ ID NO: 4361887 - DNA, 25 bp, Homo sapien
tgtcctgttattcctccgactgcct

SEQ ID NO: 4361888 - DNA, 25 bp, Homo sapien
gagccagggagtaaaagctgcttgc

SEQ ID NO: 4361889 - DNA, 25 bp, Homo sapien
gaggagccagggatattgatgacat

SEQ ID NO: 4361890 - DNA, 25 bp, Homo sapien
aggagccagggatattgatgacatc

SEQ ID NO: 4361891 - DNA, 25 bp, Homo sapien
ccagggagtaaaagctgcttgcaga

SEQ ID NO: 4361892 - DNA, 25 bp, Homo sapien
ttgtttaagctgttgctgccgactt

SEQ ID NO: 4361893 - DNA, 25 bp, Homo sapien
ttaagctgttgctgccgactttgtt

SEQ ID NO: 4361894 - DNA, 25 bp, Homo sapien
gtttaagctgttgctgccgactttg

SEQ ID NO: 4361895 - DNA, 25 bp, Homo sapien
tgtttaagctgttgctgccgacttt

SEQ ID NO: 4361896 - DNA, 25 bp, Homo sapien
tctgcagtagtccagtcccacagag

SEQ ID NO: 4361897 - DNA, 25 bp, Homo sapien
tggcatctgcagtagtccagtccca

SEQ ID NO: 4361898 - DNA, 25 bp, Homo sapien
tagtccagtcccacagagtgaggga

SEQ ID NO: 4361899 - DNA, 25 bp, Homo sapien
ccacaggattccataaatttacaga

SEQ ID NO: 4361900 - DNA, 25 bp, Homo sapien
ccaggcagaaacataagtcaagagc

SEQ ID NO: 4361901 - DNA, 25 bp, Homo sapien
tcctttctctcataagcagtgggtc

SEQ ID NO: 4361902 - DNA, 25 bp, Homo sapien
caaaggcttttaaccatctgtgctg

SEQ ID NO: 4361903 - DNA, 25 bp, Homo sapien
gctgatttccttgcgggaggtgtca

SEQ ID NO: 4361904 - DNA, 25 bp, Homo sapien
cctccgtgtgagtgatggtgttcct

SEQ ID NO: 4361905 - DNA, 25 bp, Homo sapien
agagtccctttaggcaatgtcttgc

SEQ ID NO: 4361906 - DNA, 25 bp, Homo sapien
ggtgttcctcagcaaatactgccca

SEQ ID NO: 4361907 - DNA, 25 bp, Homo sapien
catttagggagccagtgtggttcgt

SEQ ID NO: 4361908 - DNA, 25 bp, Homo sapien
gctttgctgttgtctgagtggtgtt

SEQ ID NO: 4361909 - DNA, 25 bp, Homo sapien
ttgctgttgtctgagtggtgttctg

SEQ ID NO: 4361910 - DNA, 25 bp, Homo sapien
ttgtctgagtggtgttctgggccat

SEQ ID NO: 4361911 - DNA, 25 bp, Homo sapien
gagtggtgttctgggccatccttca

SEQ ID NO: 4361912 - DNA, 25 bp, Homo sapien
gctgcatttcctggggttctttgag

SEQ ID NO: 4361913 - DNA, 25 bp, Homo sapien
tcactgtgttaccctctcggtgggc

SEQ ID NO: 4361914 - DNA, 25 bp, Homo sapien
tgtgttaccctctcggtgggcccca

SEQ ID NO: 4361915 - DNA, 25 bp, Homo sapien
cactgtgttaccctctcggtgggcc

SEQ ID NO: 4361916 - DNA, 25 bp, Homo sapien
catctgaacacttggggactggggc

SEQ ID NO: 4361917 - DNA, 25 bp, Homo sapien
tagctgggggcataaacccatctga

SEQ ID NO: 4361918 - DNA, 25 bp, Homo sapien
ggggcataaacccatctgaacactt

SEQ ID NO: 4361919 - DNA, 25 bp, Homo sapien
ctggctatccaaatagctgggggca

SEQ ID NO: 4361920 - DNA, 25 bp, Homo sapien
tgtttgttgaactgacggtgactgg

SEQ ID NO: 4361921 - DNA, 25 bp, Homo sapien
tttgattcagactggactgggcctg

SEQ ID NO: 4361922 - DNA, 25 bp, Homo sapien
tgagaaggctgagtattgaatccca

SEQ ID NO: 4361923 - DNA, 25 bp, Homo sapien
actgggcctgaaagtgagtcttgat

SEQ ID NO: 4361924 - DNA, 25 bp, Homo sapien
ccatcgaaagttcagcgccatccag

SEQ ID NO: 4361925 - DNA, 25 bp, Homo sapien
atcgaaagttcagcgccatccagat

SEQ ID NO: 4361926 - DNA, 25 bp, Homo sapien
tcgaaagttcagcgccatccagatg

SEQ ID NO: 4361927 - DNA, 25 bp, Homo sapien
catcgaaagttcagcgccatccaga

SEQ ID NO: 4361928 - DNA, 25 bp, Homo sapien
ccaggggggccacagcagcaccagc

SEQ ID NO: 4361929 - DNA, 25 bp, Homo sapien
agcagcaccagctccccgacacccc

SEQ ID NO: 4361930 - DNA, 25 bp, Homo sapien
acagcagcaccagctccccgacacc

SEQ ID NO: 4361931 - DNA, 25 bp, Homo sapien
ccacagcagcaccagctccccgaca

SEQ ID NO: 4361932 - DNA, 25 bp, Homo sapien
gaattcactcttccacgacaccaga

SEQ ID NO: 4361933 - DNA, 25 bp, Homo sapien
cattgcacagaatactaccctggtg

SEQ ID NO: 4361934 - DNA, 25 bp, Homo sapien
gacaccagaggaccatttagtaaat

SEQ ID NO: 4361935 - DNA, 25 bp, Homo sapien
tctctggaagtaaacttgtgacctg

SEQ ID NO: 4361936 - DNA, 25 bp, Homo sapien
aacgtcacaggcatccgcagaaact

SEQ ID NO: 4361937 - DNA, 25 bp, Homo sapien
atagttcactgcaccaacgtcacag

SEQ ID NO: 4361938 - DNA, 25 bp, Homo sapien
cgtcacaggcatccgcagaaacttg

SEQ ID NO: 4361939 - DNA, 25 bp, Homo sapien
acaggcatccgcagaaacttgattg

SEQ ID NO: 4361940 - DNA, 25 bp, Homo sapien
ggaggaggccacctgaaagtcaatt

SEQ ID NO: 4361941 - DNA, 25 bp, Homo sapien
gggattgcctattccaagggctgct

SEQ ID NO: 4361942 - DNA, 25 bp, Homo sapien
cagagctgacatttgatggtggttt

SEQ ID NO: 4361943 - DNA, 25 bp, Homo sapien
gggctgcttgcagctttgcaaagaa

SEQ ID NO: 4361944 - DNA, 25 bp, Homo sapien
gctcatacgtatatagagacgcttc

SEQ ID NO: 4361945 - DNA, 25 bp, Homo sapien
cttctgctcatacgtatatagagac

SEQ ID NO: 4361946 - DNA, 25 bp, Homo sapien
tatatagagacgcttctaggctggc

SEQ ID NO: 4361947 - DNA, 25 bp, Homo sapien
tacgtatatagagacgcttctaggc

SEQ ID NO: 4361948 - DNA, 25 bp, Homo sapien
cagaatatagcttataatctgttgt

SEQ ID NO: 4361949 - DNA, 25 bp, Homo sapien
cccagaatatagcttataatctgtt

SEQ ID NO: 4361950 - DNA, 25 bp, Homo sapien
tcccagaatatagcttataatctgt

SEQ ID NO: 4361951 - DNA, 25 bp, Homo sapien
ctcccagaatatagcttataatctg

SEQ ID NO: 4361952 - DNA, 25 bp, Homo sapien
ttcactgagaaggaaataacaagca

SEQ ID NO: 4361953 - DNA, 25 bp, Homo sapien
tctgcagctcctttcactgagaagg

SEQ ID NO: 4361954 - DNA, 25 bp, Homo sapien
tcctttcactgagaaggaaataaca

SEQ ID NO: 4361955 - DNA, 25 bp, Homo sapien
gctcctttcactgagaaggaaataa

SEQ ID NO: 4361956 - DNA, 25 bp, Homo sapien
tcagaactaggttacaggcccactt

SEQ ID NO: 4361957 - DNA, 25 bp, Homo sapien
catgaaatgagagccacccttttaa

SEQ ID NO: 4361958 - DNA, 25 bp, Homo sapien
catgccttttggtgctcggaagcta

SEQ ID NO: 4361959 - DNA, 25 bp, Homo sapien
cacatctgctacagggtggtcatgc

SEQ ID NO: 4361960 - DNA, 25 bp, Homo sapien
gacttttttctcaggtgacaccagc

SEQ ID NO: 4361961 - DNA, 25 bp, Homo sapien
gacctcctttaaagctgactcaaga

SEQ ID NO: 4361962 - DNA, 25 bp, Homo sapien
gacacggtaaatgggactcacagct

SEQ ID NO: 4361963 - DNA, 25 bp, Homo sapien
taaatgccgatttggactcaatgtc

SEQ ID NO: 4361964 - DNA, 25 bp, Homo sapien
atatctgagctccaagggtgcgcac

SEQ ID NO: 4361965 - DNA, 25 bp, Homo sapien
caagaactgtaacctgaagagctgc

SEQ ID NO: 4361966 - DNA, 25 bp, Homo sapien
cattggcctggagacctcatgttgc

SEQ ID NO: 4361967 - DNA, 25 bp, Homo sapien
ccatggaattcaagcgggagctgat

SEQ ID NO: 4361968 - DNA, 25 bp, Homo sapien
gctacttgagttgtgctagtcacca

SEQ ID NO: 4361969 - DNA, 25 bp, Homo sapien
gttgtgctagtcaccacttccccga

SEQ ID NO: 4361970 - DNA, 25 bp, Homo sapien
actgtccacttgcttgttcactggg

SEQ ID NO: 4361971 - DNA, 25 bp, Homo sapien
cagcaggtgcaggtaaaaactgtcc

SEQ ID NO: 4361972 - DNA, 25 bp, Homo sapien
catggcggaatagacgtccttggtg

SEQ ID NO: 4361973 - DNA, 25 bp, Homo sapien
agacgtccttggtgttatggagctg

SEQ ID NO: 4361974 - DNA, 25 bp, Homo sapien
tgcaccatggcggaatagacgtcct

SEQ ID NO: 4361975 - DNA, 25 bp, Homo sapien
ggaatagacgtccttggtgttatgg

SEQ ID NO: 4361976 - DNA, 25 bp, Homo sapien
gagaaatacgatctgaacgttctgg

SEQ ID NO: 4361977 - DNA, 25 bp, Homo sapien
tcacaaacctatatgagaaatacga

SEQ ID NO: 4361978 - DNA, 25 bp, Homo sapien
tacgatctgaacgttctggtacaac

SEQ ID NO: 4361979 - DNA, 25 bp, Homo sapien
gaacgttctggtacaactcaactga

SEQ ID NO: 4361980 - DNA, 25 bp, Homo sapien
cagctcttcccatacctggttcaga

SEQ ID NO: 4361981 - DNA, 25 bp, Homo sapien
tacccatgttctttactccaatcag

SEQ ID NO: 4361982 - DNA, 25 bp, Homo sapien
cgtctatcttccatgcttgcactga

SEQ ID NO: 4361983 - DNA, 25 bp, Homo sapien
gggctgcccgtgtattacagcttct

SEQ ID NO: 4361984 - DNA, 25 bp, Homo sapien
ctatgaatggtggaagaggaaccac

SEQ ID NO: 4361985 - DNA, 25 bp, Homo sapien
ctccaagattttgcttcagggccat

SEQ ID NO: 4361986 - DNA, 25 bp, Homo sapien
caagtactccaagattttgcttcag

SEQ ID NO: 4361987 - DNA, 25 bp, Homo sapien
tcaaatgcttcaagtactccaagat

SEQ ID NO: 4361988 - DNA, 25 bp, Homo sapien
tgaatgcttcaaatgcttcaagtac

SEQ ID NO: 4361989 - DNA, 25 bp, Homo sapien
ctagtgggaaaggcggcatctgtgc

SEQ ID NO: 4361990 - DNA, 25 bp, Homo sapien
ggatccctgcatgtcccatacatta

SEQ ID NO: 4361991 - DNA, 25 bp, Homo sapien
ccacaggatccctgcatgtcccata

SEQ ID NO: 4361992 - DNA, 25 bp, Homo sapien
caggatccctgcatgtcccatacat

SEQ ID NO: 4361993 - DNA, 25 bp, Homo sapien
aaaacttcatgctccaccacttgtc

SEQ ID NO: 4361994 - DNA, 25 bp, Homo sapien
agaaaacttcatgctccaccacttg

SEQ ID NO: 4361995 - DNA, 25 bp, Homo sapien
aaacttcatgctccaccacttgtca

SEQ ID NO: 4361996 - DNA, 25 bp, Homo sapien
gaaaacttcatgctccaccacttgt

SEQ ID NO: 4361997 - DNA, 25 bp, Homo sapien
tatacttagcttgagtgtaaaactt

SEQ ID NO: 4361998 - DNA, 25 bp, Homo sapien
aagttatacttagcttgagtgtaaa

SEQ ID NO: 4361999 - DNA, 25 bp, Homo sapien
cttagcttgagtgtaaaacttgtgc

SEQ ID NO: 4362000 - DNA, 25 bp, Homo sapien
agcttgagtgtaaaacttgtgcccc

SEQ ID NO: 4362001 - DNA, 25 bp, Homo sapien
taaggcctaacaaacagtggtcagc

SEQ ID NO: 4362002 - DNA, 25 bp, Homo sapien
tagcagtgtgcctgataccaccaca

SEQ ID NO: 4362003 - DNA, 25 bp, Homo sapien
taaaaggcacaggtcatgcagctga

SEQ ID NO: 4362004 - DNA, 25 bp, Homo sapien
gctgccaggtagagagcaacacagg

SEQ ID NO: 4362005 - DNA, 25 bp, Homo sapien
tgaaagtggtgctgcatttagggca

SEQ ID NO: 4362006 - DNA, 25 bp, Homo sapien
tggtcctactaagcttgaaagtggt

SEQ ID NO: 4362007 - DNA, 25 bp, Homo sapien
ggcttgttcttcaggcacaacgtgg

SEQ ID NO: 4362008 - DNA, 25 bp, Homo sapien
ttttcttggaatggtcctactaagc

SEQ ID NO: 4362009 - DNA, 25 bp, Homo sapien
ggagagccgcattcgcagcagaaat

SEQ ID NO: 4362010 - DNA, 25 bp, Homo sapien
gggcattcccttcagcttaggagca

SEQ ID NO: 4362011 - DNA, 25 bp, Homo sapien
catcagcagtgggtacggaacactt

SEQ ID NO: 4362012 - DNA, 25 bp, Homo sapien
gcaccagaggatccatgtgacaagg

SEQ ID NO: 4362013 - DNA, 25 bp, Homo sapien
gaggaggcttgctcctggtaattta

SEQ ID NO: 4362014 - DNA, 25 bp, Homo sapien
cctggtttacaatgcattccacatc

SEQ ID NO: 4362015 - DNA, 25 bp, Homo sapien
caaagtttgctcaagcttgagttca

SEQ ID NO: 4362016 - DNA, 25 bp, Homo sapien
tttctggtccagacctagccttgca

SEQ ID NO: 4362017 - DNA, 25 bp, Homo sapien
gactggtaagcagcctggaaatcgg

SEQ ID NO: 4362018 - DNA, 25 bp, Homo sapien
cagagtgggttaaaattggtttcag

SEQ ID NO: 4362019 - DNA, 25 bp, Homo sapien
taatgttgtagtcagcggaggacca

SEQ ID NO: 4362020 - DNA, 25 bp, Homo sapien
tggaaatcggaccacaccattcagg

SEQ ID NO: 4362021 - DNA, 25 bp, Homo sapien
taatgatgggaaaacgatactgaag

SEQ ID NO: 4362022 - DNA, 25 bp, Homo sapien
tccagtcatttggtgtagcacccag

SEQ ID NO: 4362023 - DNA, 25 bp, Homo sapien
gaaaccggtgtctcattgttcgata

SEQ ID NO: 4362024 - DNA, 25 bp, Homo sapien
tgtctgagtaatgttttctggagaa

SEQ ID NO: 4362025 - DNA, 25 bp, Homo sapien
gaaccctgtggagctgtgttctatt

SEQ ID NO: 4362026 - DNA, 25 bp, Homo sapien
gcagcccaagtagactaagacatca

SEQ ID NO: 4362027 - DNA, 25 bp, Homo sapien
catagctagggttatgttgaagccc

SEQ ID NO: 4362028 - DNA, 25 bp, Homo sapien
tgagaagcaaaaaccccaacgatcc

SEQ ID NO: 4362029 - DNA, 25 bp, Homo sapien
agtttctcctcagtatagggccctg

SEQ ID NO: 4362030 - DNA, 25 bp, Homo sapien
atcctgctcaattctaattcctcca

SEQ ID NO: 4362031 - DNA, 25 bp, Homo sapien
tctcctcagtatagggccctgtcct

SEQ ID NO: 4362032 - DNA, 25 bp, Homo sapien
cagtatagggccctgtcctaggagg

SEQ ID NO: 4362033 - DNA, 25 bp, Homo sapien
aattagggtcctgccataggaatga

SEQ ID NO: 4362034 - DNA, 25 bp, Homo sapien
acaattagggtcctgccataggaat

SEQ ID NO: 4362035 - DNA, 25 bp, Homo sapien
caattagggtcctgccataggaatg

SEQ ID NO: 4362036 - DNA, 25 bp, Homo sapien
aattcgttagaatgcatgccctgca

SEQ ID NO: 4362037 - DNA, 25 bp, Homo sapien
gcatgagtcaccagggcctgcctag

SEQ ID NO: 4362038 - DNA, 25 bp, Homo sapien
cccattgagtttgttatacgaatcc

SEQ ID NO: 4362039 - DNA, 25 bp, Homo sapien
ctgcctagaactcccctttcttatg

SEQ ID NO: 4362040 - DNA, 25 bp, Homo sapien
ggcctatgtgccttgagaatccaga

SEQ ID NO: 4362041 - DNA, 25 bp, Homo sapien
ggaatcaggctcaatgtcacttatg

SEQ ID NO: 4362042 - DNA, 25 bp, Homo sapien
ggttacgtccttgctagatactaga

SEQ ID NO: 4362043 - DNA, 25 bp, Homo sapien
tatgtttcactatctctctgggcct

SEQ ID NO: 4362044 - DNA, 25 bp, Homo sapien
gttctggacctcacgaggtgtgcgt

SEQ ID NO: 4362045 - DNA, 25 bp, Homo sapien
cacgaggtgtgcgtcagcaaaactc

SEQ ID NO: 4362046 - DNA, 25 bp, Homo sapien
aggtgtgcgtcagcaaaactctcca

SEQ ID NO: 4362047 - DNA, 25 bp, Homo sapien
gacctcacgaggtgtgcgtcagcaa

SEQ ID NO: 4362048 - DNA, 25 bp, Homo sapien
tccctctgcacgttgatgacactgt

SEQ ID NO: 4362049 - DNA, 25 bp, Homo sapien
gtcttaactgagacacatgcctggg

SEQ ID NO: 4362050 - DNA, 25 bp, Homo sapien
tctcttgcaaaatgtaggaccttgg

SEQ ID NO: 4362051 - DNA, 25 bp, Homo sapien
gaccaagtggcatatatgatccccg

SEQ ID NO: 4362052 - DNA, 25 bp, Homo sapien
caattgttgtttacagcacgaaagc

SEQ ID NO: 4362053 - DNA, 25 bp, Homo sapien
agcaacacctttagtagggcaaagc

SEQ ID NO: 4362054 - DNA, 25 bp, Homo sapien
caacacctttagtagggcaaagcta

SEQ ID NO: 4362055 - DNA, 25 bp, Homo sapien
cacactgaatttaggcaactgaggg

SEQ ID NO: 4362056 - DNA, 25 bp, Homo sapien
tatcatcacctacaccctcttgtag

SEQ ID NO: 4362057 - DNA, 25 bp, Homo sapien
aattgtgctttcagaccatttccaa

SEQ ID NO: 4362058 - DNA, 25 bp, Homo sapien
cctcttgtaggtcatttctcccttc

SEQ ID NO: 4362059 - DNA, 25 bp, Homo sapien
tccaatatacctgtaattacatggc

SEQ ID NO: 4362060 - DNA, 25 bp, Homo sapien
tccttcttgactttaagagtcagcc

SEQ ID NO: 4362061 - DNA, 25 bp, Homo sapien
tctaattcataaacacagcatgtgt

SEQ ID NO: 4362062 - DNA, 25 bp, Homo sapien
cagccatgattgtgatgtatgtgcc

SEQ ID NO: 4362063 - DNA, 25 bp, Homo sapien
cacctgcttgtttaagtttatgcct

SEQ ID NO: 4362064 - DNA, 25 bp, Homo sapien
tcttatactttgagagcagcttcca

SEQ ID NO: 4362065 - DNA, 25 bp, Homo sapien
gcattggcaatgctagacctgctgc

SEQ ID NO: 4362066 - DNA, 25 bp, Homo sapien
gagaacacagaacataacagcacag

SEQ ID NO: 4362067 - DNA, 25 bp, Homo sapien
ccaagtctgaggtgtggcaaataca

SEQ ID NO: 4362068 - DNA, 25 bp, Homo sapien
gatgaggagcacgttgccttgagca

SEQ ID NO: 4362069 - DNA, 25 bp, Homo sapien
gagcacgttgccttgagcattaaag

SEQ ID NO: 4362070 - DNA, 25 bp, Homo sapien
gaggagcacgttgccttgagcatta

SEQ ID NO: 4362071 - DNA, 25 bp, Homo sapien
ggatgaggagcacgttgccttgagc

SEQ ID NO: 4362072 - DNA, 25 bp, Homo sapien
caggtgtctggttttaagcaaggga

SEQ ID NO: 4362073 - DNA, 25 bp, Homo sapien
ccaatattgctggtgtgttcttgca

SEQ ID NO: 4362074 - DNA, 25 bp, Homo sapien
gatgagaatgaggttagactaggta

SEQ ID NO: 4362075 - DNA, 25 bp, Homo sapien
gaaacagcatgctatccaatattgc

SEQ ID NO: 4362076 - DNA, 25 bp, Homo sapien
cctaggaggcgcatatgtttgactc

SEQ ID NO: 4362077 - DNA, 25 bp, Homo sapien
gatgtattcccctgttaagacaagg

SEQ ID NO: 4362078 - DNA, 25 bp, Homo sapien
gaaacacccacgttaatggctgtgc

SEQ ID NO: 4362079 - DNA, 25 bp, Homo sapien
gatttctcctagatagatggcctca

SEQ ID NO: 4362080 - DNA, 25 bp, Homo sapien
actgattctgtttctgtatctccat

SEQ ID NO: 4362081 - DNA, 25 bp, Homo sapien
cactgattctgtttctgtatctcca

SEQ ID NO: 4362082 - DNA, 25 bp, Homo sapien
ccacttccgtggttgttgtagagcc

SEQ ID NO: 4362083 - DNA, 25 bp, Homo sapien
gctcagacacataggcactcacaga

SEQ ID NO: 4362084 - DNA, 25 bp, Homo sapien
ggaaaacaagtaccatgccagggac

SEQ ID NO: 4362085 - DNA, 25 bp, Homo sapien
tgtcttgcagattctaaagctgtgc

SEQ ID NO: 4362086 - DNA, 25 bp, Homo sapien
cttatgtggatcacgttccttgctg

SEQ ID NO: 4362087 - DNA, 25 bp, Homo sapien
cgttccttgctgctaggatcacaaa

SEQ ID NO: 4362088 - DNA, 25 bp, Homo sapien
ggatcacaaactgctgtatctcatc

SEQ ID NO: 4362089 - DNA, 25 bp, Homo sapien
taggatcacaaactgctgtatctca

SEQ ID NO: 4362090 - DNA, 25 bp, Homo sapien
ttcagaatgggacaagttgcttgcc

SEQ ID NO: 4362091 - DNA, 25 bp, Homo sapien
ccacggtaggaaaagctgtgccaaa

SEQ ID NO: 4362092 - DNA, 25 bp, Homo sapien
gataccaaattgcaagttaaacttc

SEQ ID NO: 4362093 - DNA, 25 bp, Homo sapien
cattagcttcagataccaaattgca

SEQ ID NO: 4362094 - DNA, 25 bp, Homo sapien
tctggtagctcatgagcttgttggc

SEQ ID NO: 4362095 - DNA, 25 bp, Homo sapien
gtggtaatatgtgaagctggcagcc

SEQ ID NO: 4362096 - DNA, 25 bp, Homo sapien
agcttgttggcagcctgcaaatatc

SEQ ID NO: 4362097 - DNA, 25 bp, Homo sapien
catggcccatgctgataatgtgtct

SEQ ID NO: 4362098 - DNA, 25 bp, Homo sapien
cttaggcactgaaaatcatccactg

SEQ ID NO: 4362099 - DNA, 25 bp, Homo sapien
tataagtttggctgtgaattcactt

SEQ ID NO: 4362100 - DNA, 25 bp, Homo sapien
ttataagtttggctgtgaattcact

SEQ ID NO: 4362101 - DNA, 25 bp, Homo sapien
aagtttggctgtgaattcactttac

SEQ ID NO: 4362102 - DNA, 25 bp, Homo sapien
taagtttggctgtgaattcacttta

SEQ ID NO: 4362103 - DNA, 25 bp, Homo sapien
gcaggatctgtgagatcgttattat

SEQ ID NO: 4362104 - DNA, 25 bp, Homo sapien
agcaggagtgcacacttcaatgatt

SEQ ID NO: 4362105 - DNA, 25 bp, Homo sapien
ctgtgagatcgttattatcaaagga

SEQ ID NO: 4362106 - DNA, 25 bp, Homo sapien
gcacacttcaatgattaagagctta

SEQ ID NO: 4362107 - DNA, 25 bp, Homo sapien
accacattctgaagagccgagcact

SEQ ID NO: 4362108 - DNA, 25 bp, Homo sapien
ttgtggtcaaagctataccacattc

SEQ ID NO: 4362109 - DNA, 25 bp, Homo sapien
ggtcaaagctataccacattctgaa

SEQ ID NO: 4362110 - DNA, 25 bp, Homo sapien
tgaagagccgagcactctctgcttt

SEQ ID NO: 4362111 - DNA, 25 bp, Homo sapien
actgtttgtcaacagcatattgggg

SEQ ID NO: 4362112 - DNA, 25 bp, Homo sapien
tgtcaacagcatattggggttcatc

SEQ ID NO: 4362113 - DNA, 25 bp, Homo sapien
tttgtcaacagcatattggggttca

SEQ ID NO: 4362114 - DNA, 25 bp, Homo sapien
caacagcatattggggttcatctgg

SEQ ID NO: 4362115 - DNA, 25 bp, Homo sapien
ttccattatttagtattttgtatgt

SEQ ID NO: 4362116 - DNA, 25 bp, Homo sapien
ccattatttagtattttgtatgtgt

SEQ ID NO: 4362117 - DNA, 25 bp, Homo sapien
gtgtagatttgtgattccattattt

SEQ ID NO: 4362118 - DNA, 25 bp, Homo sapien
gattccattatttagtattttgtat

SEQ ID NO: 4362119 - DNA, 25 bp, Homo sapien
aatcatttgtaggtagcagcagttc

SEQ ID NO: 4362120 - DNA, 25 bp, Homo sapien
aatgaaatcatttgtaggtagcagc

SEQ ID NO: 4362121 - DNA, 25 bp, Homo sapien
gtagcagcagttcaggaggcgccat

SEQ ID NO: 4362122 - DNA, 25 bp, Homo sapien
catttgtaggtagcagcagttcagg

SEQ ID NO: 4362123 - DNA, 25 bp, Homo sapien
tatagcccaccagtgtaaggagatg

SEQ ID NO: 4362124 - DNA, 25 bp, Homo sapien
tgtggaaactgcctggccttggaac

SEQ ID NO: 4362125 - DNA, 25 bp, Homo sapien
tgtgtgccaggaaagcagtgtcttg

SEQ ID NO: 4362126 - DNA, 25 bp, Homo sapien
tgagagccaggatcatcaccaactt

SEQ ID NO: 4362127 - DNA, 25 bp, Homo sapien
gggaagaactcattgttctaaacaa

SEQ ID NO: 4362128 - DNA, 25 bp, Homo sapien
gaagaactcattgttctaaacaatt

SEQ ID NO: 4362129 - DNA, 25 bp, Homo sapien
ctcattgttctaaacaattacccca

SEQ ID NO: 4362130 - DNA, 25 bp, Homo sapien
gaactcattgttctaaacaattacc

SEQ ID NO: 4362131 - DNA, 25 bp, Homo sapien
atttcactgagttggctagctagca

SEQ ID NO: 4362132 - DNA, 25 bp, Homo sapien
tcctgctgccatagagaggcttgca

SEQ ID NO: 4362133 - DNA, 25 bp, Homo sapien
tatgctagaagttatcaacaccctg

SEQ ID NO: 4362134 - DNA, 25 bp, Homo sapien
gaactatgaagtgcctcattccaag

SEQ ID NO: 4362135 - DNA, 25 bp, Homo sapien
catggaacagcctatggaacagaac

SEQ ID NO: 4362136 - DNA, 25 bp, Homo sapien
agaggaagctccgtttagaaatagc

SEQ ID NO: 4362137 - DNA, 25 bp, Homo sapien
ggaacagaacaatcatatctctata

SEQ ID NO: 4362138 - DNA, 25 bp, Homo sapien
catatctctatataatgtgcattgg

SEQ ID NO: 4362139 - DNA, 25 bp, Homo sapien
cagattttcatccaggtccacgcca

SEQ ID NO: 4362140 - DNA, 25 bp, Homo sapien
cctccttcagattttcatccaggtc

SEQ ID NO: 4362141 - DNA, 25 bp, Homo sapien
cttcagattttcatccaggtccacg

SEQ ID NO: 4362142 - DNA, 25 bp, Homo sapien
attttcatccaggtccacgccaact

SEQ ID NO: 4362143 - DNA, 25 bp, Homo sapien
gacacgcttgctatgtgcctcactg

SEQ ID NO: 4362144 - DNA, 25 bp, Homo sapien
acagacacgcttgctatgtgcctca

SEQ ID NO: 4362145 - DNA, 25 bp, Homo sapien
cgcttgctatgtgcctcactgctac

SEQ ID NO: 4362146 - DNA, 25 bp, Homo sapien
cacgcttgctatgtgcctcactgct

SEQ ID NO: 4362147 - DNA, 25 bp, Homo sapien
ttttgatgaggcatcaatgaaaact

SEQ ID NO: 4362148 - DNA, 25 bp, Homo sapien
ttccattttgatgaggcatcaatga

SEQ ID NO: 4362149 - DNA, 25 bp, Homo sapien
ttgatgaggcatcaatgaaaactgc

SEQ ID NO: 4362150 - DNA, 25 bp, Homo sapien
tgaatatattcctgaatttccattt

SEQ ID NO: 4362151 - DNA, 25 bp, Homo sapien
tcctgtaagctgttcctactccggg

SEQ ID NO: 4362152 - DNA, 25 bp, Homo sapien
ccagtctggctcagtccatctcaaa

SEQ ID NO: 4362153 - DNA, 25 bp, Homo sapien
tgatgccaggcaccataggacacgt

SEQ ID NO: 4362154 - DNA, 25 bp, Homo sapien
cagccttgtgcattattcctgtaag

SEQ ID NO: 4362155 - DNA, 25 bp, Homo sapien
gcttcattgctggataaacccagat

SEQ ID NO: 4362156 - DNA, 25 bp, Homo sapien
ggccgtgaactgaactgaggatcat

SEQ ID NO: 4362157 - DNA, 25 bp, Homo sapien
tgcttagggcctttttctaggtctc

SEQ ID NO: 4362158 - DNA, 25 bp, Homo sapien
agctgtgtggtggatcagagccctc

SEQ ID NO: 4362159 - DNA, 25 bp, Homo sapien
tgatctggacagtgtcctgggtccg

SEQ ID NO: 4362160 - DNA, 25 bp, Homo sapien
tggccatacaataatctgccagttt

SEQ ID NO: 4362161 - DNA, 25 bp, Homo sapien
ctgagctctggccatacaataatct

SEQ ID NO: 4362162 - DNA, 25 bp, Homo sapien
cagtgtcctgggtccggtaactgga

SEQ ID NO: 4362163 - DNA, 25 bp, Homo sapien
gaacttgtgcgataccctgccttct

SEQ ID NO: 4362164 - DNA, 25 bp, Homo sapien
gccacgctggctaccactgaacttg

SEQ ID NO: 4362165 - DNA, 25 bp, Homo sapien
gctggctaccactgaacttgtgcga

SEQ ID NO: 4362166 - DNA, 25 bp, Homo sapien
ggtattttgggccacgctggctacc

SEQ ID NO: 4362167 - DNA, 25 bp, Homo sapien
caatataggttaaagacaagagcgg

SEQ ID NO: 4362168 - DNA, 25 bp, Homo sapien
cagatgctaggatataaaggtcaat

SEQ ID NO: 4362169 - DNA, 25 bp, Homo sapien
agacaagagcggcttttccataaat

SEQ ID NO: 4362170 - DNA, 25 bp, Homo sapien
aaggtcaatgataggattcctgcca

SEQ ID NO: 4362171 - DNA, 25 bp, Homo sapien
ttcttgtgatttctgattccagtgg

SEQ ID NO: 4362172 - DNA, 25 bp, Homo sapien
gattccagtggaggcttgtttatga

SEQ ID NO: 4362173 - DNA, 25 bp, Homo sapien
gatttctgattccagtggaggcttg

SEQ ID NO: 4362174 - DNA, 25 bp, Homo sapien
tccagtggaggcttgtttatgatgg

SEQ ID NO: 4362175 - DNA, 25 bp, Homo sapien
gctgctctttgatgtgctcaggctt

SEQ ID NO: 4362176 - DNA, 25 bp, Homo sapien
tgctgctctttgatgtgctcaggct

SEQ ID NO: 4362177 - DNA, 25 bp, Homo sapien
attgctgctctttgatgtgctcagg

SEQ ID NO: 4362178 - DNA, 25 bp, Homo sapien
tgctctttgatgtgctcaggcttca

SEQ ID NO: 4362179 - DNA, 25 bp, Homo sapien
aaggagcatattctccccatgaaca

SEQ ID NO: 4362180 - DNA, 25 bp, Homo sapien
gcattctcttgatgcaaggagcata

SEQ ID NO: 4362181 - DNA, 25 bp, Homo sapien
ggaaggagccttaatgggaatgcat

SEQ ID NO: 4362182 - DNA, 25 bp, Homo sapien
aaggagccttaatgggaatgcattc

SEQ ID NO: 4362183 - DNA, 25 bp, Homo sapien
atgcaatggaaccagaagtcctgaa

SEQ ID NO: 4362184 - DNA, 25 bp, Homo sapien
tgaacttgctctccctgacaggtcc

SEQ ID NO: 4362185 - DNA, 25 bp, Homo sapien
gaagtcctgaacttgctctccctga

SEQ ID NO: 4362186 - DNA, 25 bp, Homo sapien
ctggctgccaggtgttgcaagatgc

SEQ ID NO: 4362187 - DNA, 25 bp, Homo sapien
tgttggcccccgagaaggaagtgaa

SEQ ID NO: 4362188 - DNA, 25 bp, Homo sapien
ttgttggcccccgagaaggaagtga

SEQ ID NO: 4362189 - DNA, 25 bp, Homo sapien
catgtgtaaattaccagtttacggt

SEQ ID NO: 4362190 - DNA, 25 bp, Homo sapien
tacatgtgtaaattaccagtttacg

SEQ ID NO: 4362191 - DNA, 25 bp, Homo sapien
tcccttgatactacatgtgtaaatt

SEQ ID NO: 4362192 - DNA, 25 bp, Homo sapien
gatactacatgtgtaaattaccagt

SEQ ID NO: 4362193 - DNA, 25 bp, Homo sapien
gaaggcctaccctgtgttagcgtgg

SEQ ID NO: 4362194 - DNA, 25 bp, Homo sapien
tgcaagaggtcacacagagagtatc

SEQ ID NO: 4362195 - DNA, 25 bp, Homo sapien
catgtcctaggtgtgtttctggcca

SEQ ID NO: 4362196 - DNA, 25 bp, Homo sapien
taaatgggacatggccagagttcca

SEQ ID NO: 4362197 - DNA, 25 bp, Homo sapien
aatatcacagttgccctgggagctt

SEQ ID NO: 4362198 - DNA, 25 bp, Homo sapien
gaaaatgccttcaatatgcgactta

SEQ ID NO: 4362199 - DNA, 25 bp, Homo sapien
aaagttcttagtacaataggcatcc

SEQ ID NO: 4362200 - DNA, 25 bp, Homo sapien
gagcagtcatctaccatcctagttc

SEQ ID NO: 4362201 - DNA, 25 bp, Homo sapien
acagccagtgagtatcagagccagt

SEQ ID NO: 4362202 - DNA, 25 bp, Homo sapien
gaaacaggtattattgtcacagcta

SEQ ID NO: 4362203 - DNA, 25 bp, Homo sapien
tggccctgtgctcttccctatacag

SEQ ID NO: 4362204 - DNA, 25 bp, Homo sapien
tgctcttccctatacagccttctga

SEQ ID NO: 4362205 - DNA, 25 bp, Homo sapien
ttgagcctcctagtggcacgcaata

SEQ ID NO: 4362206 - DNA, 25 bp, Homo sapien
cagagaagggagttaaaaatatgga

SEQ ID NO: 4362207 - DNA, 25 bp, Homo sapien
tatggaaaggaagagactagaatga

SEQ ID NO: 4362208 - DNA, 25 bp, Homo sapien
ggctattaggtttttcactgccaga

SEQ ID NO: 4362209 - DNA, 25 bp, Homo sapien
aacatatatgtaaatctctacttac

SEQ ID NO: 4362210 - DNA, 25 bp, Homo sapien
gtaaatctctacttaccctcacaca

SEQ ID NO: 4362211 - DNA, 25 bp, Homo sapien
tatatgtaaatctctacttaccctc

SEQ ID NO: 4362212 - DNA, 25 bp, Homo sapien
tatgtaaatctctacttaccctcac

SEQ ID NO: 4362213 - DNA, 25 bp, Homo sapien
gagcacacctagcaccatatcttgg

SEQ ID NO: 4362214 - DNA, 25 bp, Homo sapien
cttcatgtaaaggaaccagggatcc

SEQ ID NO: 4362215 - DNA, 25 bp, Homo sapien
caaaatggttgattccaaggtctgg

SEQ ID NO: 4362216 - DNA, 25 bp, Homo sapien
gctcctagtggccaaattaaagaca

SEQ ID NO: 4362217 - DNA, 25 bp, Homo sapien
tgtgacaagaagaatgcagcactgc

SEQ ID NO: 4362218 - DNA, 25 bp, Homo sapien
caaaatgcaggtcactagtaacagg

SEQ ID NO: 4362219 - DNA, 25 bp, Homo sapien
caggacaagtccaaatcacgtgcca

SEQ ID NO: 4362220 - DNA, 25 bp, Homo sapien
gggacaccagtaaatgtaacacatg

SEQ ID NO: 4362221 - DNA, 25 bp, Homo sapien
tatttgaaagtgatgaaggatcaag

SEQ ID NO: 4362222 - DNA, 25 bp, Homo sapien
tgaaggatcaagtgaacaacttact

SEQ ID NO: 4362223 - DNA, 25 bp, Homo sapien
ttagtgtatttgaaagtgatgaagg

SEQ ID NO: 4362224 - DNA, 25 bp, Homo sapien
ggatcaagtgaacaacttactgtga

SEQ ID NO: 4362225 - DNA, 25 bp, Homo sapien
ttaaagtttgatatttttcacaata

SEQ ID NO: 4362226 - DNA, 25 bp, Homo sapien
tgatatttttcacaataaaaagtta

SEQ ID NO: 4362227 - DNA, 25 bp, Homo sapien
taaagtttgatatttttcacaataa

SEQ ID NO: 4362228 - DNA, 25 bp, Homo sapien
tataatcagtgctgaatactgtttg

SEQ ID NO: 4362229 - DNA, 25 bp, Homo sapien
tttattagagggaggcaaaatatga

SEQ ID NO: 4362230 - DNA, 25 bp, Homo sapien
gaattggcaaccacacagtacttaa

SEQ ID NO: 4362231 - DNA, 25 bp, Homo sapien
atagcaccaacctagggtccttgtg

SEQ ID NO: 4362232 - DNA, 25 bp, Homo sapien
tccagttagcttcggttgacatgag

SEQ ID NO: 4362233 - DNA, 25 bp, Homo sapien
tgaactctgaccttgacccagggat

SEQ ID NO: 4362234 - DNA, 25 bp, Homo sapien
gaatggctgtcggttaacaatgaac

SEQ ID NO: 4362235 - DNA, 25 bp, Homo sapien
tactggctggaatggaaatatagac

SEQ ID NO: 4362236 - DNA, 25 bp, Homo sapien
tgccacgcatgacagcagctaagcg

SEQ ID NO: 4362237 - DNA, 25 bp, Homo sapien
ctgcatcaatgccacgcatgacagc

SEQ ID NO: 4362238 - DNA, 25 bp, Homo sapien
ctagtcctcagagcgtgtgtaggat

SEQ ID NO: 4362239 - DNA, 25 bp, Homo sapien
gcgtgtgtaggatgaggcttctgca

SEQ ID NO: 4362240 - DNA, 25 bp, Homo sapien
gaggcagattccattgctggcatag

SEQ ID NO: 4362241 - DNA, 25 bp, Homo sapien
gcagattccattgctggcatagggc

SEQ ID NO: 4362242 - DNA, 25 bp, Homo sapien
gacttggaggccctagctagtctac

SEQ ID NO: 4362243 - DNA, 25 bp, Homo sapien
caggcatgcaggaaaggcgggactt

SEQ ID NO: 4362244 - DNA, 25 bp, Homo sapien
agggcagtgatagccatagtggaga

SEQ ID NO: 4362245 - DNA, 25 bp, Homo sapien
cagtgatagccatagtggagagtgg

SEQ ID NO: 4362246 - DNA, 25 bp, Homo sapien
gagggggaggccaatgaagctgcat

SEQ ID NO: 4362247 - DNA, 25 bp, Homo sapien
atagccatagtggagagtgggtgct

SEQ ID NO: 4362248 - DNA, 25 bp, Homo sapien
tctctttttataataacgtccaata

SEQ ID NO: 4362249 - DNA, 25 bp, Homo sapien
acatttagtgttcaatttcacactg

SEQ ID NO: 4362250 - DNA, 25 bp, Homo sapien
ttataataacgtccaatacatttag

SEQ ID NO: 4362251 - DNA, 25 bp, Homo sapien
taataacgtccaatacatttagtgt

SEQ ID NO: 4362252 - DNA, 25 bp, Homo sapien
gagatcagtcccacttaattgtaat

SEQ ID NO: 4362253 - DNA, 25 bp, Homo sapien
tgatattctagtattctgtgcaaga

SEQ ID NO: 4362254 - DNA, 25 bp, Homo sapien
aatgagttggaagatattgttctgc

SEQ ID NO: 4362255 - DNA, 25 bp, Homo sapien
tatttacctactaaaccagacttgc

SEQ ID NO: 4362256 - DNA, 25 bp, Homo sapien
caggttttggtcatcgatttttctc

SEQ ID NO: 4362257 - DNA, 25 bp, Homo sapien
tttaatagatacaggatgattcagt

SEQ ID NO: 4362258 - DNA, 25 bp, Homo sapien
ccttatcatcagtttaatggctgta

SEQ ID NO: 4362259 - DNA, 25 bp, Homo sapien
tgtcagcgtcactagaagtatatca

SEQ ID NO: 4362260 - DNA, 25 bp, Homo sapien
tctccactagcggtaggaagtctaa

SEQ ID NO: 4362261 - DNA, 25 bp, Homo sapien
ggaagtctaaaccagcgattctcaa

SEQ ID NO: 4362262 - DNA, 25 bp, Homo sapien
taatgagccctctaagtggttctga

SEQ ID NO: 4362263 - DNA, 25 bp, Homo sapien
caggccttgaccaagacctactgga

SEQ ID NO: 4362264 - DNA, 25 bp, Homo sapien
ctgtgttccgaatagctaaggcaaa

SEQ ID NO: 4362265 - DNA, 25 bp, Homo sapien
ctccaaatacccagacagtgaagaa

SEQ ID NO: 4362266 - DNA, 25 bp, Homo sapien
taaggcaaatgcgatcgctcctcgc

SEQ ID NO: 4362267 - DNA, 25 bp, Homo sapien
ggagcagcgtagtggtaaacatcat

SEQ ID NO: 4362268 - DNA, 25 bp, Homo sapien
catttgaacgatctttcttccctca

SEQ ID NO: 4362269 - DNA, 25 bp, Homo sapien
ttcacccatttgaacgatctttctt

SEQ ID NO: 4362270 - DNA, 25 bp, Homo sapien
acttcacccatttgaacgatctttc

SEQ ID NO: 4362271 - DNA, 25 bp, Homo sapien
cacccatttgaacgatctttcttcc

SEQ ID NO: 4362272 - DNA, 25 bp, Homo sapien
tatggatggatacttagcacaaggc

SEQ ID NO: 4362273 - DNA, 25 bp, Homo sapien
gattatccacaagatctcgctagtg

SEQ ID NO: 4362274 - DNA, 25 bp, Homo sapien
taaggtttcgtctacccaatgccaa

SEQ ID NO: 4362275 - DNA, 25 bp, Homo sapien
tgcaccacctcaatacgtaggacgg

SEQ ID NO: 4362276 - DNA, 25 bp, Homo sapien
aaactgtgcttctatagaacactgg

SEQ ID NO: 4362277 - DNA, 25 bp, Homo sapien
cttaaaaactgtgcttctatagaac

SEQ ID NO: 4362278 - DNA, 25 bp, Homo sapien
tggcaggggctcttaaaaactgtgc

SEQ ID NO: 4362279 - DNA, 25 bp, Homo sapien
gaacactggggttccatgagctgca

SEQ ID NO: 4362280 - DNA, 25 bp, Homo sapien
cacatattggctttgctgtgaactg

SEQ ID NO: 4362281 - DNA, 25 bp, Homo sapien
catgagggacatgttagacatgctg

SEQ ID NO: 4362282 - DNA, 25 bp, Homo sapien
gattcatcacctgatacctgatggg

SEQ ID NO: 4362283 - DNA, 25 bp, Homo sapien
tgttgtccacatattggctttgctg

SEQ ID NO: 4362284 - DNA, 25 bp, Homo sapien
gaaaacactgggtcgcattctctgg

SEQ ID NO: 4362285 - DNA, 25 bp, Homo sapien
ggcccaagatgattgtgcccttgag

SEQ ID NO: 4362286 - DNA, 25 bp, Homo sapien
gataagctgtaactaacggtgccaa

SEQ ID NO: 4362287 - DNA, 25 bp, Homo sapien
gccagcagatgatatggatgctcag

SEQ ID NO: 4362288 - DNA, 25 bp, Homo sapien
aaacatcatcatgtgctgaaagttc

SEQ ID NO: 4362289 - DNA, 25 bp, Homo sapien
ttccaggggatcttctgttttcggc

SEQ ID NO: 4362290 - DNA, 25 bp, Homo sapien
catcatcatgtgctgaaagttccag

SEQ ID NO: 4362291 - DNA, 25 bp, Homo sapien
gaaaacatcatcatgtgctgaaagt

SEQ ID NO: 4362292 - DNA, 25 bp, Homo sapien
aaggagaggggatatatgttgcagg

SEQ ID NO: 4362293 - DNA, 25 bp, Homo sapien
ggagaggggatatatgttgcaggct

SEQ ID NO: 4362294 - DNA, 25 bp, Homo sapien
gaaggagaggggatatatgttgcag

SEQ ID NO: 4362295 - DNA, 25 bp, Homo sapien
aggagaggggatatatgttgcaggc

SEQ ID NO: 4362296 - DNA, 25 bp, Homo sapien
tgattctggaacgtgaacagtgcca

SEQ ID NO: 4362297 - DNA, 25 bp, Homo sapien
aacagaagatgacgttctccgccaa

SEQ ID NO: 4362298 - DNA, 25 bp, Homo sapien
gccaaaaagttcataaattcaaaca

SEQ ID NO: 4362299 - DNA, 25 bp, Homo sapien
taaagatatgattctggaacgtgaa

SEQ ID NO: 4362300 - DNA, 25 bp, Homo sapien
aactgtatttgacaactgactgggt

SEQ ID NO: 4362301 - DNA, 25 bp, Homo sapien
tttgacaactgactgggtctccttt

SEQ ID NO: 4362302 - DNA, 25 bp, Homo sapien
ctgtatttgacaactgactgggtct

SEQ ID NO: 4362303 - DNA, 25 bp, Homo sapien
tatttgacaactgactgggtctcct

SEQ ID NO: 4362304 - DNA, 25 bp, Homo sapien
ctgaaggaggatggaggccctggct

SEQ ID NO: 4362305 - DNA, 25 bp, Homo sapien
cattgaagagatcacgaaatcactt

SEQ ID NO: 4362306 - DNA, 25 bp, Homo sapien
aatcactttttgatttgaagtaggg

SEQ ID NO: 4362307 - DNA, 25 bp, Homo sapien
tgcattgaagagatcacgaaatcac

SEQ ID NO: 4362308 - DNA, 25 bp, Homo sapien
gaagagatcacgaaatcactttttg

SEQ ID NO: 4362309 - DNA, 25 bp, Homo sapien
tccaccatccaattttaatctattc

SEQ ID NO: 4362310 - DNA, 25 bp, Homo sapien
cctccaccatccaattttaatctat

SEQ ID NO: 4362311 - DNA, 25 bp, Homo sapien
cacctccaccatccaattttaatct

SEQ ID NO: 4362312 - DNA, 25 bp, Homo sapien
gtccccctcacctccaccatccaat

SEQ ID NO: 4362313 - DNA, 25 bp, Homo sapien
cttgaggggaccctccaaagcctgc

SEQ ID NO: 4362314 - DNA, 25 bp, Homo sapien
catcatatttggcacaagtctctcc

SEQ ID NO: 4362315 - DNA, 25 bp, Homo sapien
catatttggcacaagtctctccaga

SEQ ID NO: 4362316 - DNA, 25 bp, Homo sapien
tttggcacaagtctctccagatggc

SEQ ID NO: 4362317 - DNA, 25 bp, Homo sapien
gggaacatggaaggatatgccaatg

SEQ ID NO: 4362318 - DNA, 25 bp, Homo sapien
gaacatggaaggatatgccaatgag

SEQ ID NO: 4362319 - DNA, 25 bp, Homo sapien
ggaacatggaaggatatgccaatga

SEQ ID NO: 4362320 - DNA, 25 bp, Homo sapien
tgggaacatggaaggatatgccaat

SEQ ID NO: 4362321 - DNA, 25 bp, Homo sapien
tgatggtactgtggaacttgccatg

SEQ ID NO: 4362322 - DNA, 25 bp, Homo sapien
aagatggttatgggatttccactga

SEQ ID NO: 4362323 - DNA, 25 bp, Homo sapien
gatggttatgggatttccactgatg

SEQ ID NO: 4362324 - DNA, 25 bp, Homo sapien
ctcagccttgatggtactgtggaac

SEQ ID NO: 4362325 - DNA, 25 bp, Homo sapien
ggtgcccaatacagccaaattcatt

SEQ ID NO: 4362326 - DNA, 25 bp, Homo sapien
gttgttgatggcagcaatatccact

SEQ ID NO: 4362327 - DNA, 25 bp, Homo sapien
gaaacatgtaggccatgcagttgag

SEQ ID NO: 4362328 - DNA, 25 bp, Homo sapien
ggggttgttgatggcagcaatatcc

SEQ ID NO: 4362329 - DNA, 25 bp, Homo sapien
tttccttcagcaagggctttattta

SEQ ID NO: 4362330 - DNA, 25 bp, Homo sapien
tcagcaagggctttatttatcagaa

SEQ ID NO: 4362331 - DNA, 25 bp, Homo sapien
tccttcagcaagggctttatttatc

SEQ ID NO: 4362332 - DNA, 25 bp, Homo sapien
cttcagcaagggctttatttatcag

SEQ ID NO: 4362333 - DNA, 25 bp, Homo sapien
ctcctcttgagccttcttaactcgt

SEQ ID NO: 4362334 - DNA, 25 bp, Homo sapien
ggcattcctccaggaaaattaccag

SEQ ID NO: 4362335 - DNA, 25 bp, Homo sapien
gctctctcatgctcctcttgagcct

SEQ ID NO: 4362336 - DNA, 25 bp, Homo sapien
cttgagccttcttaactcgttctgt

SEQ ID NO: 4362337 - DNA, 25 bp, Homo sapien
aagatcatgggctgcttcttcctac

SEQ ID NO: 4362338 - DNA, 25 bp, Homo sapien
gcaagatcatgggctgcttcttcct

SEQ ID NO: 4362339 - DNA, 25 bp, Homo sapien
caatttacaggcaagggcaagatca

SEQ ID NO: 4362340 - DNA, 25 bp, Homo sapien
taatccaatttacaggcaagggcaa

SEQ ID NO: 4362341 - DNA, 25 bp, Homo sapien
agtctgtgtgctttcgcccgccact

SEQ ID NO: 4362342 - DNA, 25 bp, Homo sapien
acagtcttggatggcagcacttggc

SEQ ID NO: 4362343 - DNA, 25 bp, Homo sapien
tgtcacagtcttggatggcagcact

SEQ ID NO: 4362344 - DNA, 25 bp, Homo sapien
tgctttcgcccgccacttgtaaggc

SEQ ID NO: 4362345 - DNA, 25 bp, Homo sapien
ccactttttaatcatttgcctgatc

SEQ ID NO: 4362346 - DNA, 25 bp, Homo sapien
tcctccgttatctccgcattttcat

SEQ ID NO: 4362347 - DNA, 25 bp, Homo sapien
ttcaatagcagccactttttaatca

SEQ ID NO: 4362348 - DNA, 25 bp, Homo sapien
gcagccactttttaatcatttgcct

SEQ ID NO: 4362349 - DNA, 25 bp, Homo sapien
aaggagcatcagtgtctggttcaat

SEQ ID NO: 4362350 - DNA, 25 bp, Homo sapien
gagcatcagtgtctggttcaatcac

SEQ ID NO: 4362351 - DNA, 25 bp, Homo sapien
ttaaggagcatcagtgtctggttca

SEQ ID NO: 4362352 - DNA, 25 bp, Homo sapien
gcatcagtgtctggttcaatcacac

SEQ ID NO: 4362353 - DNA, 25 bp, Homo sapien
tcttcacttgacggttcttctgcct

SEQ ID NO: 4362354 - DNA, 25 bp, Homo sapien
ttcttcacttgacggttcttctgcc

SEQ ID NO: 4362355 - DNA, 25 bp, Homo sapien
tttcttcacttgacggttcttctgc

SEQ ID NO: 4362356 - DNA, 25 bp, Homo sapien
agaacgctcggatcctccttacaca

SEQ ID NO: 4362357 - DNA, 25 bp, Homo sapien
cggtgtgcagaacgctcggatcctc

SEQ ID NO: 4362358 - DNA, 25 bp, Homo sapien
atttcctcggtgtgcagaacgctcg

SEQ ID NO: 4362359 - DNA, 25 bp, Homo sapien
cgaagcttgttcactttgcgggggt

SEQ ID NO: 4362360 - DNA, 25 bp, Homo sapien
gctcaggggctgcagcccggttcca

SEQ ID NO: 4362361 - DNA, 25 bp, Homo sapien
aggtggtgggcgaagctcaggggct

SEQ ID NO: 4362362 - DNA, 25 bp, Homo sapien
cagggaggtggtgggcgaagctcag

SEQ ID NO: 4362363 - DNA, 25 bp, Homo sapien
agcccggttccaggcccaggcgctg

SEQ ID NO: 4362364 - DNA, 25 bp, Homo sapien
tattgacgttgtagcatgcactgta

SEQ ID NO: 4362365 - DNA, 25 bp, Homo sapien
gttgaagctattgacgttgtagcat

SEQ ID NO: 4362366 - DNA, 25 bp, Homo sapien
cagttttaggtttggcttgttgaag

SEQ ID NO: 4362367 - DNA, 25 bp, Homo sapien
taggtttggcttgttgaagctattg

SEQ ID NO: 4362368 - DNA, 25 bp, Homo sapien
tgcaaaaatagaaagtgtgatttat

SEQ ID NO: 4362369 - DNA, 25 bp, Homo sapien
ataatccagctgccttccattaaac

SEQ ID NO: 4362370 - DNA, 25 bp, Homo sapien
caaaaatagaaagtgtgatttatgt

SEQ ID NO: 4362371 - DNA, 25 bp, Homo sapien
aaatagaaagtgtgatttatgttaa

SEQ ID NO: 4362372 - DNA, 25 bp, Homo sapien
cagtttggctctgatctgctgaatc

SEQ ID NO: 4362373 - DNA, 25 bp, Homo sapien
aatttcaggactgcctcactcctta

SEQ ID NO: 4362374 - DNA, 25 bp, Homo sapien
ctgcaatttcaggactgcctcactc

SEQ ID NO: 4362375 - DNA, 25 bp, Homo sapien
ctgcctctggcagcttaagctccat

SEQ ID NO: 4362376 - DNA, 25 bp, Homo sapien
tttccattcaatggcgataaacact

SEQ ID NO: 4362377 - DNA, 25 bp, Homo sapien
ccattcaatggcgataaacactata

SEQ ID NO: 4362378 - DNA, 25 bp, Homo sapien
attcaatggcgataaacactataaa

SEQ ID NO: 4362379 - DNA, 25 bp, Homo sapien
tccattcaatggcgataaacactat

SEQ ID NO: 4362380 - DNA, 25 bp, Homo sapien
tatccccggtaccttgagcaatggc

SEQ ID NO: 4362381 - DNA, 25 bp, Homo sapien
tctaaaacgtacgtacatgcctgta

SEQ ID NO: 4362382 - DNA, 25 bp, Homo sapien
catgcctgtacttaaaggtctcaag

SEQ ID NO: 4362383 - DNA, 25 bp, Homo sapien
gttcactccataccagccacattgg

SEQ ID NO: 4362384 - DNA, 25 bp, Homo sapien
ttattttggaatccgaagacagatt

SEQ ID NO: 4362385 - DNA, 25 bp, Homo sapien
tagttcttattttggaatccgaaga

SEQ ID NO: 4362386 - DNA, 25 bp, Homo sapien
tcttattttggaatccgaagacaga

SEQ ID NO: 4362387 - DNA, 25 bp, Homo sapien
gttcttattttggaatccgaagaca

SEQ ID NO: 4362388 - DNA, 25 bp, Homo sapien
ccttgaaagtaaactggtctgttct

SEQ ID NO: 4362389 - DNA, 25 bp, Homo sapien
cagtggaccttcagttgcttcttga

SEQ ID NO: 4362390 - DNA, 25 bp, Homo sapien
gttcttgtgtgattcctaccaacag

SEQ ID NO: 4362391 - DNA, 25 bp, Homo sapien
caacgctcctacttgccaagcaaga

SEQ ID NO: 4362392 - DNA, 25 bp, Homo sapien
ttcccatggatcttagcctttaatg

SEQ ID NO: 4362393 - DNA, 25 bp, Homo sapien
gcagctcagtaaggatatcaggttg

SEQ ID NO: 4362394 - DNA, 25 bp, Homo sapien
attcacccatcccatgatgctggct

SEQ ID NO: 4362395 - DNA, 25 bp, Homo sapien
caaggatcaagcaaactagcaattt

SEQ ID NO: 4362396 - DNA, 25 bp, Homo sapien
cactgaagggacatggctactgttt

SEQ ID NO: 4362397 - DNA, 25 bp, Homo sapien
cagctacctccttaataaagtggca

SEQ ID NO: 4362398 - DNA, 25 bp, Homo sapien
gaaatgcataagctttccagctacc

SEQ ID NO: 4362399 - DNA, 25 bp, Homo sapien
tattaggtgagttaagatacttcct

SEQ ID NO: 4362400 - DNA, 25 bp, Homo sapien
tacaaaggcctggtagggtggaatc

SEQ ID NO: 4362401 - DNA, 25 bp, Homo sapien
cccttgaagccaacgggaatagctt

SEQ ID NO: 4362402 - DNA, 25 bp, Homo sapien
tattggcagcaaacacccttgaagc

SEQ ID NO: 4362403 - DNA, 25 bp, Homo sapien
tgtcataagaactggtgggtggctt

SEQ ID NO: 4362404 - DNA, 25 bp, Homo sapien
gtccgttaagatgtaatgagcagaa

SEQ ID NO: 4362405 - DNA, 25 bp, Homo sapien
attcgaatgtccgttaagatgtaat

SEQ ID NO: 4362406 - DNA, 25 bp, Homo sapien
gaatgtccgttaagatgtaatgagc

SEQ ID NO: 4362407 - DNA, 25 bp, Homo sapien
tgtccgttaagatgtaatgagcaga

SEQ ID NO: 4362408 - DNA, 25 bp, Homo sapien
cagggaacgtggcttgaggagagaa

SEQ ID NO: 4362409 - DNA, 25 bp, Homo sapien
agcagggaacgtggcttgaggagag

SEQ ID NO: 4362410 - DNA, 25 bp, Homo sapien
agaagcagggaacgtggcttgagga

SEQ ID NO: 4362411 - DNA, 25 bp, Homo sapien
ggagaagcagggaacgtggcttgag

SEQ ID NO: 4362412 - DNA, 25 bp, Homo sapien
gcacccaattgttgcagtaacccaa

SEQ ID NO: 4362413 - DNA, 25 bp, Homo sapien
catggaaaagcacccaattgttgca

SEQ ID NO: 4362414 - DNA, 25 bp, Homo sapien
gaaaagcacccaattgttgcagtaa

SEQ ID NO: 4362415 - DNA, 25 bp, Homo sapien
tgcatggaaaagcacccaattgttg

SEQ ID NO: 4362416 - DNA, 25 bp, Homo sapien
catccatcacactataaatcagtct

SEQ ID NO: 4362417 - DNA, 25 bp, Homo sapien
caaagcagttgtgggtatcctttca

SEQ ID NO: 4362418 - DNA, 25 bp, Homo sapien
gttgtgggtatcctttcacactctc

SEQ ID NO: 4362419 - DNA, 25 bp, Homo sapien
tcacactctcaatgaagacttccat

SEQ ID NO: 4362420 - DNA, 25 bp, Homo sapien
ctcggcagacaggaaggcactccaa

SEQ ID NO: 4362421 - DNA, 25 bp, Homo sapien
cacacagcttggtaaatttggtcaa

SEQ ID NO: 4362422 - DNA, 25 bp, Homo sapien
actcacacagcttggtaaatttggt

SEQ ID NO: 4362423 - DNA, 25 bp, Homo sapien
cgggaactcacacagcttggtaaat

SEQ ID NO: 4362424 - DNA, 25 bp, Homo sapien
gggaactcacacagcttggtaaatt

SEQ ID NO: 4362425 - DNA, 25 bp, Homo sapien
tgaggaagataagttaagggaaaca

SEQ ID NO: 4362426 - DNA, 25 bp, Homo sapien
agcacgagttccatgcttcaccggg

SEQ ID NO: 4362427 - DNA, 25 bp, Homo sapien
agttccatgcttcaccgggggctga

SEQ ID NO: 4362428 - DNA, 25 bp, Homo sapien
ccagcacgagttccatgcttcaccg

SEQ ID NO: 4362429 - DNA, 25 bp, Homo sapien
cgagttccatgcttcaccgggggct

SEQ ID NO: 4362430 - DNA, 25 bp, Homo sapien
cctagcctcatcccttgggatgcac

SEQ ID NO: 4362431 - DNA, 25 bp, Homo sapien
ggcctagcctcatcccttgggatgc

SEQ ID NO: 4362432 - DNA, 25 bp, Homo sapien
tgggcctagcctcatcccttgggat

SEQ ID NO: 4362433 - DNA, 25 bp, Homo sapien
gggcctagcctcatcccttgggatg

SEQ ID NO: 4362434 - DNA, 25 bp, Homo sapien
agtgcagtctgtgggcagacgacct

SEQ ID NO: 4362435 - DNA, 25 bp, Homo sapien
cagacgacctggtagagtcttctct

SEQ ID NO: 4362436 - DNA, 25 bp, Homo sapien
ccctcaggaaaggtgtagcaggcac

SEQ ID NO: 4362437 - DNA, 25 bp, Homo sapien
tgtcagtaccaaggagcgctgctcc

SEQ ID NO: 4362438 - DNA, 25 bp, Homo sapien
catcatcagaaatattccatggata

SEQ ID NO: 4362439 - DNA, 25 bp, Homo sapien
tggaggttgtccatcatcagaaata

SEQ ID NO: 4362440 - DNA, 25 bp, Homo sapien
ggttgtccatcatcagaaatattcc

SEQ ID NO: 4362441 - DNA, 25 bp, Homo sapien
ttatgggcctggaggttgtccatca

SEQ ID NO: 4362442 - DNA, 25 bp, Homo sapien
gagccagcgaagattcccaggaaat

SEQ ID NO: 4362443 - DNA, 25 bp, Homo sapien
gtgatgatggcatacgcagacccca

SEQ ID NO: 4362444 - DNA, 25 bp, Homo sapien
gactggaagaatgctgcggcatcaa

SEQ ID NO: 4362445 - DNA, 25 bp, Homo sapien
gaccccattgcaaatgagccagcga

SEQ ID NO: 4362446 - DNA, 25 bp, Homo sapien
ggagaggtatctttccctgtaatgt

SEQ ID NO: 4362447 - DNA, 25 bp, Homo sapien
ggatctatatattgctgccagtcag

SEQ ID NO: 4362448 - DNA, 25 bp, Homo sapien
tgtttctgagcaaactaggcattaa

SEQ ID NO: 4362449 - DNA, 25 bp, Homo sapien
aacatttttatattggaagggtcat

SEQ ID NO: 4362450 - DNA, 25 bp, Homo sapien
ctgtggttgccactagtagatctga

SEQ ID NO: 4362451 - DNA, 25 bp, Homo sapien
gcttctggaattctgagcgctccca

SEQ ID NO: 4362452 - DNA, 25 bp, Homo sapien
aagcacggctttatccttctctcca

SEQ ID NO: 4362453 - DNA, 25 bp, Homo sapien
tgacccatagaacaagcacggcttt

SEQ ID NO: 4362454 - DNA, 25 bp, Homo sapien
tagagacctctgttggcatgatggc

SEQ ID NO: 4362455 - DNA, 25 bp, Homo sapien
tcctcacacctggtgccagtgtctg

SEQ ID NO: 4362456 - DNA, 25 bp, Homo sapien
gctttgtccctgtcttagagacctc

SEQ ID NO: 4362457 - DNA, 25 bp, Homo sapien
tatgggcgtaactgcttgtcagcgg

SEQ ID NO: 4362458 - DNA, 25 bp, Homo sapien
caggtctatacacttccagcctatt

SEQ ID NO: 4362459 - DNA, 25 bp, Homo sapien
ccaggtctatacacttccagcctat

SEQ ID NO: 4362460 - DNA, 25 bp, Homo sapien
aggtctatacacttccagcctattt

SEQ ID NO: 4362461 - DNA, 25 bp, Homo sapien
ggtctatacacttccagcctatttc

SEQ ID NO: 4362462 - DNA, 25 bp, Homo sapien
caggtcaaccagaatgtgtgaaaca

SEQ ID NO: 4362463 - DNA, 25 bp, Homo sapien
tcaaccagaatgtgtgaaacactgc

SEQ ID NO: 4362464 - DNA, 25 bp, Homo sapien
tctctccaggtcaaccagaatgtgt

SEQ ID NO: 4362465 - DNA, 25 bp, Homo sapien
tctccaggtcaaccagaatgtgtga

SEQ ID NO: 4362466 - DNA, 25 bp, Homo sapien
gcagctgttgccatggcgattttca

SEQ ID NO: 4362467 - DNA, 25 bp, Homo sapien
agacaggcaacgcagctgtttccat

SEQ ID NO: 4362468 - DNA, 25 bp, Homo sapien
gataccagcgtcatttccactgctc

SEQ ID NO: 4362469 - DNA, 25 bp, Homo sapien
tctgtaataagtagctgcagctgtt

SEQ ID NO: 4362470 - DNA, 25 bp, Homo sapien
ggtataggccctcatggacactggg

SEQ ID NO: 4362471 - DNA, 25 bp, Homo sapien
cacagtgatgcctgcttggtgctgc

SEQ ID NO: 4362472 - DNA, 25 bp, Homo sapien
tccaggggtgtgctacccacagtga

SEQ ID NO: 4362473 - DNA, 25 bp, Homo sapien
cactggtcctcttgcaaataagaag

SEQ ID NO: 4362474 - DNA, 25 bp, Homo sapien
tgctgtacaggttagagtgaggcaa

SEQ ID NO: 4362475 - DNA, 25 bp, Homo sapien
aaggactgtgctgtacaggttagag

SEQ ID NO: 4362476 - DNA, 25 bp, Homo sapien
tgtacaggttagagtgaggcaacct

SEQ ID NO: 4362477 - DNA, 25 bp, Homo sapien
gactgtgctgtacaggttagagtga

SEQ ID NO: 4362478 - DNA, 25 bp, Homo sapien
tgagaactgaattggtcccattggc

SEQ ID NO: 4362479 - DNA, 25 bp, Homo sapien
gtcatttcctactggatggtgtgaa

SEQ ID NO: 4362480 - DNA, 25 bp, Homo sapien
tcaaaacccaacaccagttgagaac

SEQ ID NO: 4362481 - DNA, 25 bp, Homo sapien
tgcactgctctgaattccctatgaa

SEQ ID NO: 4362482 - DNA, 25 bp, Homo sapien
ctgtgaatgagaccaacacaaataa

SEQ ID NO: 4362483 - DNA, 25 bp, Homo sapien
caccattaggaaaatacggctttct

SEQ ID NO: 4362484 - DNA, 25 bp, Homo sapien
caaatagttggaagctggtaatgaa

SEQ ID NO: 4362485 - DNA, 25 bp, Homo sapien
gcttgggtggaggtgaacatttact

SEQ ID NO: 4362486 - DNA, 25 bp, Homo sapien
ttcttagggctgtaaatctgaagga

SEQ ID NO: 4362487 - DNA, 25 bp, Homo sapien
gaccaatggaggatgtcaagacaca

SEQ ID NO: 4362488 - DNA, 25 bp, Homo sapien
gaacagaagcactccttgtcttctt

SEQ ID NO: 4362489 - DNA, 25 bp, Homo sapien
ggattcagtggtgaccagaacagaa

SEQ ID NO: 4362490 - DNA, 25 bp, Homo sapien
gactattaactgatcaacacatgtg

SEQ ID NO: 4362491 - DNA, 25 bp, Homo sapien
ttacaaatgagtctgccaaggcgca

SEQ ID NO: 4362492 - DNA, 25 bp, Homo sapien
tgcccaaggtaacgtaaataatgaa

SEQ ID NO: 4362493 - DNA, 25 bp, Homo sapien
tgatgataggagtaacagcaacagc

SEQ ID NO: 4362494 - DNA, 25 bp, Homo sapien
ctagaagcagacttatctttagtaa

SEQ ID NO: 4362495 - DNA, 25 bp, Homo sapien
aatggttattctctaagtttcctgg

SEQ ID NO: 4362496 - DNA, 25 bp, Homo sapien
tcactagaagcagacttatctttag

SEQ ID NO: 4362497 - DNA, 25 bp, Homo sapien
gtttcctggatcataaaatgccata

SEQ ID NO: 4362498 - DNA, 25 bp, Homo sapien
tgtgtacaggtcagggtcgacgtgc

SEQ ID NO: 4362499 - DNA, 25 bp, Homo sapien
actatggccactgcatcattcaaca

SEQ ID NO: 4362500 - DNA, 25 bp, Homo sapien
tggccactgcatcattcaacacact

SEQ ID NO: 4362501 - DNA, 25 bp, Homo sapien
cagggtcgacgtgcagttcatggaa

SEQ ID NO: 4362502 - DNA, 25 bp, Homo sapien
atgcaggttagcttggatgcaggca

SEQ ID NO: 4362503 - DNA, 25 bp, Homo sapien
catgcaggttagcttggatgcaggc

SEQ ID NO: 4362504 - DNA, 25 bp, Homo sapien
acatgcaggttagcttggatgcagg

SEQ ID NO: 4362505 - DNA, 25 bp, Homo sapien
gaagatggactcaatgatcttaaga

SEQ ID NO: 4362506 - DNA, 25 bp, Homo sapien
ccttccctagaatctccattagcag

SEQ ID NO: 4362507 - DNA, 25 bp, Homo sapien
atgatattttaatgtggcagctctc

SEQ ID NO: 4362508 - DNA, 25 bp, Homo sapien
tctcagcaacctagcacaagatctg

SEQ ID NO: 4362509 - DNA, 25 bp, Homo sapien
gcagctctatgacccctattttcta

SEQ ID NO: 4362510 - DNA, 25 bp, Homo sapien
ccctttaatagaggtgttgcccagg

SEQ ID NO: 4362511 - DNA, 25 bp, Homo sapien
ttccccaaggccacggatgctgtct

SEQ ID NO: 4362512 - DNA, 25 bp, Homo sapien
cataaagcatggaactcagagtctc

SEQ ID NO: 4362513 - DNA, 25 bp, Homo sapien
ttttgaggagactagccccttgtga

SEQ ID NO: 4362514 - DNA, 25 bp, Homo sapien
agaggcaagccacattttgtagttc

SEQ ID NO: 4362515 - DNA, 25 bp, Homo sapien
gaaaaactacttatcgagcacctgc

SEQ ID NO: 4362516 - DNA, 25 bp, Homo sapien
tcagtgtcttacaaggtcaggcaag

SEQ ID NO: 4362517 - DNA, 25 bp, Homo sapien
caatctcaaggagtggaaccatcac

SEQ ID NO: 4362518 - DNA, 25 bp, Homo sapien
tgtccatggagctgttgaactgctt

SEQ ID NO: 4362519 - DNA, 25 bp, Homo sapien
aacacctggagccttgcttgatcca

SEQ ID NO: 4362520 - DNA, 25 bp, Homo sapien
taaacggagacattctgttccccaa

SEQ ID NO: 4362521 - DNA, 25 bp, Homo sapien
tgaactgcttcaaacggttttcagt

SEQ ID NO: 4362522 - DNA, 25 bp, Homo sapien
gttggagaattcatacagggaaaac

SEQ ID NO: 4362523 - DNA, 25 bp, Homo sapien
tggagaattcatacagggaaaaccc

SEQ ID NO: 4362524 - DNA, 25 bp, Homo sapien
gagaattcatacagggaaaacccca

SEQ ID NO: 4362525 - DNA, 25 bp, Homo sapien
gccaagttggagaattcatacaggg

SEQ ID NO: 4362526 - DNA, 25 bp, Homo sapien
tgagaagctggacgagaaggcatat

SEQ ID NO: 4362527 - DNA, 25 bp, Homo sapien
gctatggttagtgatgattgtcgac

SEQ ID NO: 4362528 - DNA, 25 bp, Homo sapien
gacgagaaggcatattctgtgtcca

SEQ ID NO: 4362529 - DNA, 25 bp, Homo sapien
tgtccatgcactcagtgagaggatg

SEQ ID NO: 4362530 - DNA, 25 bp, Homo sapien
tcagaatatagttagcaggcttcgg

SEQ ID NO: 4362531 - DNA, 25 bp, Homo sapien
gcaggcttcgggttgactttcattt

SEQ ID NO: 4362532 - DNA, 25 bp, Homo sapien
ttgatttgaggttggaacctcagaa

SEQ ID NO: 4362533 - DNA, 25 bp, Homo sapien
gaggttggaacctcagaatatagtt

SEQ ID NO: 4362534 - DNA, 25 bp, Homo sapien
tattattatgtagacgcaggtgatg

SEQ ID NO: 4362535 - DNA, 25 bp, Homo sapien
tggttggacaagcttattctagaga

SEQ ID NO: 4362536 - DNA, 25 bp, Homo sapien
cactaacgatacctgatgagcaaat

SEQ ID NO: 4362537 - DNA, 25 bp, Homo sapien
gataattgctgaagggcatatgcca

SEQ ID NO: 4362538 - DNA, 25 bp, Homo sapien
ggccagcatgtatcatagccttcac

SEQ ID NO: 4362539 - DNA, 25 bp, Homo sapien
ttttcagctggccagcatgtatcat

SEQ ID NO: 4362540 - DNA, 25 bp, Homo sapien
ctgtagcagacatcagtgaaccaaa

SEQ ID NO: 4362541 - DNA, 25 bp, Homo sapien
tcatagccttcacaaaaccatacat

SEQ ID NO: 4362542 - DNA, 25 bp, Homo sapien
taaacccatgctatcataagccaca

SEQ ID NO: 4362543 - DNA, 25 bp, Homo sapien
catcaagatgaaccctgtgtaaacc

SEQ ID NO: 4362544 - DNA, 25 bp, Homo sapien
aaacatcaagatgaaccctgtgtaa

SEQ ID NO: 4362545 - DNA, 25 bp, Homo sapien
cctgtgtaaacccatgctatcataa

SEQ ID NO: 4362546 - DNA, 25 bp, Homo sapien
tagtaatccagggaaccatcgccat

SEQ ID NO: 4362547 - DNA, 25 bp, Homo sapien
gaaagcgctaagtgtcctacgagag

SEQ ID NO: 4362548 - DNA, 25 bp, Homo sapien
gctacccattacagagatcgatcgg

SEQ ID NO: 4362549 - DNA, 25 bp, Homo sapien
tgcaaaatctgtcctaccgtaggtg

SEQ ID NO: 4362550 - DNA, 25 bp, Homo sapien
tatcggatatcttgaacaaggatcc

SEQ ID NO: 4362551 - DNA, 25 bp, Homo sapien
cccgtccaaatcctgtatcggatat

SEQ ID NO: 4362552 - DNA, 25 bp, Homo sapien
tgtggtgacaggtgagtccccgtcc

SEQ ID NO: 4362553 - DNA, 25 bp, Homo sapien
gtaaaacagggagccaagtgaagcc

SEQ ID NO: 4362554 - DNA, 25 bp, Homo sapien
ctgctgctatagcaacccacacagc

SEQ ID NO: 4362555 - DNA, 25 bp, Homo sapien
agcctcccttctgtgaagtgcttca

SEQ ID NO: 4362556 - DNA, 25 bp, Homo sapien
tgcaggggatcaagcctcccttctg

SEQ ID NO: 4362557 - DNA, 25 bp, Homo sapien
cccttctgtgaagtgcttcaaggtt

SEQ ID NO: 4362558 - DNA, 25 bp, Homo sapien
taaagcacacccaggggagaagaat

SEQ ID NO: 4362559 - DNA, 25 bp, Homo sapien
gagcaatgaaggcagtgcgagactc

SEQ ID NO: 4362560 - DNA, 25 bp, Homo sapien
gcgagactcggtcacattcactaaa

SEQ ID NO: 4362561 - DNA, 25 bp, Homo sapien
aagaatgagaggagcaatgaaggca

SEQ ID NO: 4362562 - DNA, 25 bp, Homo sapien
cacctgtaagtctgaacaaaggctc

SEQ ID NO: 4362563 - DNA, 25 bp, Homo sapien
acaaaggctcttatccagaaccctg

SEQ ID NO: 4362564 - DNA, 25 bp, Homo sapien
cctggcattattccagtgtctcttt

SEQ ID NO: 4362565 - DNA, 25 bp, Homo sapien
ttatccagaaccctggcattattcc

SEQ ID NO: 4362566 - DNA, 25 bp, Homo sapien
caattcccacccagaaaactgaagt

SEQ ID NO: 4362567 - DNA, 25 bp, Homo sapien
attcccacccagaaaactgaagtca

SEQ ID NO: 4362568 - DNA, 25 bp, Homo sapien
gcaccaattcccacccagaaaactg

SEQ ID NO: 4362569 - DNA, 25 bp, Homo sapien
ccaattcccacccagaaaactgaag

SEQ ID NO: 4362570 - DNA, 25 bp, Homo sapien
tgagggcagcatcgagcgtcctctc

SEQ ID NO: 4362571 - DNA, 25 bp, Homo sapien
gcagcatcgagcgtcctctcactgt

SEQ ID NO: 4362572 - DNA, 25 bp, Homo sapien
tcgagcgtcctctcactgtcataga

SEQ ID NO: 4362573 - DNA, 25 bp, Homo sapien
tcaagtgagggcagcatcgagcgtc

SEQ ID NO: 4362574 - DNA, 25 bp, Homo sapien
tcacataagtgttactttgagccat

SEQ ID NO: 4362575 - DNA, 25 bp, Homo sapien
aagccaccatcgtccatagcaactt

SEQ ID NO: 4362576 - DNA, 25 bp, Homo sapien
catcgtccatagcaacttcactgta

SEQ ID NO: 4362577 - DNA, 25 bp, Homo sapien
actgtatttcacataagtgttactt

SEQ ID NO: 4362578 - DNA, 25 bp, Homo sapien
tcagccaagccaagttttcaagtcc

SEQ ID NO: 4362579 - DNA, 25 bp, Homo sapien
gtgtcaaagcaaaggccataaagga

SEQ ID NO: 4362580 - DNA, 25 bp, Homo sapien
aagcctaggttttgagtgtcaaagc

SEQ ID NO: 4362581 - DNA, 25 bp, Homo sapien
aaggaccaggtcacaatgcataaat

SEQ ID NO: 4362582 - DNA, 25 bp, Homo sapien
gcaagggagcccacctcattgaggt

SEQ ID NO: 4362583 - DNA, 25 bp, Homo sapien
tagacttggagcaatttgagagcac

SEQ ID NO: 4362584 - DNA, 25 bp, Homo sapien
tgagagcacaggactaatgaattgt

SEQ ID NO: 4362585 - DNA, 25 bp, Homo sapien
tttctaggtggaccccagcaaggga

SEQ ID NO: 4362586 - DNA, 25 bp, Homo sapien
gcctgaggcaacttttcccatacac

SEQ ID NO: 4362587 - DNA, 25 bp, Homo sapien
gagcctgaggcaacttttcccatac

SEQ ID NO: 4362588 - DNA, 25 bp, Homo sapien
atgagcctgaggcaacttttcccat

SEQ ID NO: 4362589 - DNA, 25 bp, Homo sapien
agatgagcctgaggcaacttttccc

SEQ ID NO: 4362590 - DNA, 25 bp, Homo sapien
gaataattcagctctccatttccct

SEQ ID NO: 4362591 - DNA, 25 bp, Homo sapien
taattaaagcactaattgaacttcc

SEQ ID NO: 4362592 - DNA, 25 bp, Homo sapien
gcactaattgaacttcccattactg

SEQ ID NO: 4362593 - DNA, 25 bp, Homo sapien
cacctgtgtagacaaatctgcctgc

SEQ ID NO: 4362594 - DNA, 25 bp, Homo sapien
ttcctaatgggcctgaattgtaggc

SEQ ID NO: 4362595 - DNA, 25 bp, Homo sapien
acagtaatacgaagaagcaaggggg

SEQ ID NO: 4362596 - DNA, 25 bp, Homo sapien
agtaatacgaagaagcaagggggct

SEQ ID NO: 4362597 - DNA, 25 bp, Homo sapien
cctaatgggcctgaattgtaggctg

SEQ ID NO: 4362598 - DNA, 25 bp, Homo sapien
gctcaagtacagctaaagacgctga

SEQ ID NO: 4362599 - DNA, 25 bp, Homo sapien
tgatgttaaccgaagaaggaaggtg

SEQ ID NO: 4362600 - DNA, 25 bp, Homo sapien
tgccatgggagaaaggttagaatct

SEQ ID NO: 4362601 - DNA, 25 bp, Homo sapien
tactggaatttggagtacacttggt

SEQ ID NO: 4362602 - DNA, 25 bp, Homo sapien
aaatgctcaggacggtcagagggtc

SEQ ID NO: 4362603 - DNA, 25 bp, Homo sapien
cacatctcattcttgaggggatgga

SEQ ID NO: 4362604 - DNA, 25 bp, Homo sapien
gggaccacatctcattcttgagggg

SEQ ID NO: 4362605 - DNA, 25 bp, Homo sapien
ggaaatgctcaggacggtcagaggg

SEQ ID NO: 4362606 - DNA, 25 bp, Homo sapien
atgccaatttcagaagcgtcatatc

SEQ ID NO: 4362607 - DNA, 25 bp, Homo sapien
gaagcgtcatatcagctctccattt

SEQ ID NO: 4362608 - DNA, 25 bp, Homo sapien
ccaatttcagaagcgtcatatcagc

SEQ ID NO: 4362609 - DNA, 25 bp, Homo sapien
tttcagaagcgtcatatcagctctc

SEQ ID NO: 4362610 - DNA, 25 bp, Homo sapien
taactaagtatgaaaagcatttgca

SEQ ID NO: 4362611 - DNA, 25 bp, Homo sapien
aagtatgcaccacatgcctcgccaa

SEQ ID NO: 4362612 - DNA, 25 bp, Homo sapien
tcagtttcaagggagggtaggcctc

SEQ ID NO: 4362613 - DNA, 25 bp, Homo sapien
gttttgaatgattaataggacagtc

SEQ ID NO: 4362614 - DNA, 25 bp, Homo sapien
tactttgtacttttgaggataatgt

SEQ ID NO: 4362615 - DNA, 25 bp, Homo sapien
ctgtaattgtatttaaccctgtgga

SEQ ID NO: 4362616 - DNA, 25 bp, Homo sapien
taccttttcctacactctcgatttc

SEQ ID NO: 4362617 - DNA, 25 bp, Homo sapien
tctctgtgctgggataatgctgtaa

SEQ ID NO: 4362618 - DNA, 25 bp, Homo sapien
tggctactgtgatggaataaatgct

SEQ ID NO: 4362619 - DNA, 25 bp, Homo sapien
gaagtaattaggttataagccctca

SEQ ID NO: 4362620 - DNA, 25 bp, Homo sapien
tcatctgcaatcgtgaagagggccc

SEQ ID NO: 4362621 - DNA, 25 bp, Homo sapien
cacccaagttgattgtattaggagg

SEQ ID NO: 4362622 - DNA, 25 bp, Homo sapien
tgaaaatatagtggctctgcagctg

SEQ ID NO: 4362623 - DNA, 25 bp, Homo sapien
tatgcagcttgggttgtacttgaca

SEQ ID NO: 4362624 - DNA, 25 bp, Homo sapien
ccagtgacagctataactgtgccca

SEQ ID NO: 4362625 - DNA, 25 bp, Homo sapien
gcatatgagaaaccacactgctatg

SEQ ID NO: 4362626 - DNA, 25 bp, Homo sapien
aatactggcgacatcactcttggca

SEQ ID NO: 4362627 - DNA, 25 bp, Homo sapien
tactggcgacatcactcttggcact

SEQ ID NO: 4362628 - DNA, 25 bp, Homo sapien
ggcgacatcactcttggcacttttt

SEQ ID NO: 4362629 - DNA, 25 bp, Homo sapien
aggaatactggcgacatcactcttg

SEQ ID NO: 4362630 - DNA, 25 bp, Homo sapien
acagaagaatcagagtttcccagaa

SEQ ID NO: 4362631 - DNA, 25 bp, Homo sapien
cagaagaatcagagtttcccagaaa

SEQ ID NO: 4362632 - DNA, 25 bp, Homo sapien
acaacagaagaatcagagtttccca

SEQ ID NO: 4362633 - DNA, 25 bp, Homo sapien
aaaacaacagaagaatcagagtttc

SEQ ID NO: 4362634 - DNA, 25 bp, Homo sapien
gctgcaagccagagtatataacgtg

SEQ ID NO: 4362635 - DNA, 25 bp, Homo sapien
gcaatgcgcttcacataactcaagg

SEQ ID NO: 4362636 - DNA, 25 bp, Homo sapien
tattggacgggattatcagaggctg

SEQ ID NO: 4362637 - DNA, 25 bp, Homo sapien
tataacgtgtgacttagggctcagt

SEQ ID NO: 4362638 - DNA, 25 bp, Homo sapien
cctatgacgatgcaggagatggcag

SEQ ID NO: 4362639 - DNA, 25 bp, Homo sapien
gacgatgcaggagatggcagttccc

SEQ ID NO: 4362640 - DNA, 25 bp, Homo sapien
ggcatacgttaaaatagatcctaag

SEQ ID NO: 4362641 - DNA, 25 bp, Homo sapien
tcccaagaaggcatacgttaaaata

SEQ ID NO: 4362642 - DNA, 25 bp, Homo sapien
tctttagactatatcctgcatgaaa

SEQ ID NO: 4362643 - DNA, 25 bp, Homo sapien
tcctgcatgaaatataattggtggc

SEQ ID NO: 4362644 - DNA, 25 bp, Homo sapien
cttctttagactatatcctgcatga

SEQ ID NO: 4362645 - DNA, 25 bp, Homo sapien
aatataattggtggcagtaaaacat

SEQ ID NO: 4362646 - DNA, 25 bp, Homo sapien
tagtcatcttgactgaggaaaaatg

SEQ ID NO: 4362647 - DNA, 25 bp, Homo sapien
aatggcagaccaagtacctcccctt

SEQ ID NO: 4362648 - DNA, 25 bp, Homo sapien
ttagtcatcttgactgaggaaaaat

SEQ ID NO: 4362649 - DNA, 25 bp, Homo sapien
gaggaaaaatggcagaccaagtacc

SEQ ID NO: 4362650 - DNA, 25 bp, Homo sapien
cttccagtaactgaagccgttcaca

SEQ ID NO: 4362651 - DNA, 25 bp, Homo sapien
ttccttccagtaactgaagccgttc

SEQ ID NO: 4362652 - DNA, 25 bp, Homo sapien
ccagtaactgaagccgttcacaaat

SEQ ID NO: 4362653 - DNA, 25 bp, Homo sapien
tccagtaactgaagccgttcacaaa

SEQ ID NO: 4362654 - DNA, 25 bp, Homo sapien
caatatcagttggtgctgtagcata

SEQ ID NO: 4362655 - DNA, 25 bp, Homo sapien
tggtcagtgatattaaccagcagag

SEQ ID NO: 4362656 - DNA, 25 bp, Homo sapien
ccagcagagttgatggactgaaagt

SEQ ID NO: 4362657 - DNA, 25 bp, Homo sapien
tgtagcatatcgtaaaattagtccc

SEQ ID NO: 4362658 - DNA, 25 bp, Homo sapien
tagatccagtccaagaatgcagcca

SEQ ID NO: 4362659 - DNA, 25 bp, Homo sapien
tcatggcaatctgataactgtgggc

SEQ ID NO: 4362660 - DNA, 25 bp, Homo sapien
taggtgttgaaggacatcacagagc

SEQ ID NO: 4362661 - DNA, 25 bp, Homo sapien
gcagaagacagaacctaggtgttga

SEQ ID NO: 4362662 - DNA, 25 bp, Homo sapien
gcctcattgttcgagaagaagcaca

SEQ ID NO: 4362663 - DNA, 25 bp, Homo sapien
ttcgagaagaagcacattgaagtga

SEQ ID NO: 4362664 - DNA, 25 bp, Homo sapien
ctaaatggccctgactatccctctg

SEQ ID NO: 4362665 - DNA, 25 bp, Homo sapien
ctgcactagctctggcctcattgtt

SEQ ID NO: 4362666 - DNA, 25 bp, Homo sapien
agggtgttggcaaggtggtcggcaa

SEQ ID NO: 4362667 - DNA, 25 bp, Homo sapien
gatgggcacttagggcagtgcaggc

SEQ ID NO: 4362668 - DNA, 25 bp, Homo sapien
caagcagtttgcgatgggcacttag

SEQ ID NO: 4362669 - DNA, 25 bp, Homo sapien
acgcacatcaagcagtttgcgatgg

SEQ ID NO: 4362670 - DNA, 25 bp, Homo sapien
gaggaagaatcgagcgagttccttg

SEQ ID NO: 4362671 - DNA, 25 bp, Homo sapien
ctcgaggaagaatcgagcgagttcc

SEQ ID NO: 4362672 - DNA, 25 bp, Homo sapien
agaatcgagcgagttccttgttggg

SEQ ID NO: 4362673 - DNA, 25 bp, Homo sapien
gaagaatcgagcgagttccttgttg

SEQ ID NO: 4362674 - DNA, 25 bp, Homo sapien
ggaggagggtaaaatggatcaggag

SEQ ID NO: 4362675 - DNA, 25 bp, Homo sapien
tgtagccaacatgtccaacaaccca

SEQ ID NO: 4362676 - DNA, 25 bp, Homo sapien
aatggatcaggagggtgtagccaac

SEQ ID NO: 4362677 - DNA, 25 bp, Homo sapien
ccaacaacccaatttaatcctgagg

SEQ ID NO: 4362678 - DNA, 25 bp, Homo sapien
gagaaggctgctctttgtgactgca

SEQ ID NO: 4362679 - DNA, 25 bp, Homo sapien
aatgttcatcggtgcagccagtgag

SEQ ID NO: 4362680 - DNA, 25 bp, Homo sapien
tactccaggcattttgaagtgatgt

SEQ ID NO: 4362681 - DNA, 25 bp, Homo sapien
tgatataagaggaattactccaggc

SEQ ID NO: 4362682 - DNA, 25 bp, Homo sapien
ttacaaaaacaaacagctcgccctc

SEQ ID NO: 4362683 - DNA, 25 bp, Homo sapien
aaacagctcgccctcgactccccac

SEQ ID NO: 4362684 - DNA, 25 bp, Homo sapien
aaaaacaaacagctcgccctcgact

SEQ ID NO: 4362685 - DNA, 25 bp, Homo sapien
acaaaaacaaacagctcgccctcga

SEQ ID NO: 4362686 - DNA, 25 bp, Homo sapien
ccgcatctgtcaacagacttgcatt

SEQ ID NO: 4362687 - DNA, 25 bp, Homo sapien
tgacatggcaaatttcggcggcttg

SEQ ID NO: 4362688 - DNA, 25 bp, Homo sapien
tatgtgccgtgtgagaacatgactg

SEQ ID NO: 4362689 - DNA, 25 bp, Homo sapien
caacagacttgcattatgtgccgtg

SEQ ID NO: 4362690 - DNA, 25 bp, Homo sapien
tccaccgctccctgatgttgaaact

SEQ ID NO: 4362691 - DNA, 25 bp, Homo sapien
taaccagattgtcaaaatggtaagg

SEQ ID NO: 4362692 - DNA, 25 bp, Homo sapien
tcctccagtttcatgcaagaagcgg

SEQ ID NO: 4362693 - DNA, 25 bp, Homo sapien
tgcaagaagcggaatcgatgatttt

SEQ ID NO: 4362694 - DNA, 25 bp, Homo sapien
gacataacccttgactgtctctcca

SEQ ID NO: 4362695 - DNA, 25 bp, Homo sapien
ctgacataacccttgactgtctctc

SEQ ID NO: 4362696 - DNA, 25 bp, Homo sapien
tgacataacccttgactgtctctcc

SEQ ID NO: 4362697 - DNA, 25 bp, Homo sapien
cagtctgactgcctgagaatttcag

SEQ ID NO: 4362698 - DNA, 25 bp, Homo sapien
tagataaaaacctggataaaggcta

SEQ ID NO: 4362699 - DNA, 25 bp, Homo sapien
tagttgctacttcacaagcattctg

SEQ ID NO: 4362700 - DNA, 25 bp, Homo sapien
ttatcaagatttgcctaagacagtc

SEQ ID NO: 4362701 - DNA, 25 bp, Homo sapien
agtgtgccctgtctcagcttgccca

SEQ ID NO: 4362702 - DNA, 25 bp, Homo sapien
ctgctggctactgcaagatgcgaca

SEQ ID NO: 4362703 - DNA, 25 bp, Homo sapien
gatgcgacacgcaagtgagaagcag

SEQ ID NO: 4362704 - DNA, 25 bp, Homo sapien
ttgcagtcagtgtgccctgtctcag

SEQ ID NO: 4362705 - DNA, 25 bp, Homo sapien
ttatctcaactgtaggtcgagtgac

SEQ ID NO: 4362706 - DNA, 25 bp, Homo sapien
tgaaatttatctcaactgtaggtcg

SEQ ID NO: 4362707 - DNA, 25 bp, Homo sapien
atttatctcaactgtaggtcgagtg

SEQ ID NO: 4362708 - DNA, 25 bp, Homo sapien
aaatttatctcaactgtaggtcgag

SEQ ID NO: 4362709 - DNA, 25 bp, Homo sapien
gactgacaaagtccaaaagctccag

SEQ ID NO: 4362710 - DNA, 25 bp, Homo sapien
actgacaaagtccaaaagctccagc

SEQ ID NO: 4362711 - DNA, 25 bp, Homo sapien
cagactgacaaagtccaaaagctcc

SEQ ID NO: 4362712 - DNA, 25 bp, Homo sapien
agactgacaaagtccaaaagctcca

SEQ ID NO: 4362713 - DNA, 25 bp, Homo sapien
cgcacacacatttgttcgtgtagaa

SEQ ID NO: 4362714 - DNA, 25 bp, Homo sapien
acatttgttcgtgtagaagtcgttg

SEQ ID NO: 4362715 - DNA, 25 bp, Homo sapien
gatctcgcacacacatttgttcgtg

SEQ ID NO: 4362716 - DNA, 25 bp, Homo sapien
taatggcgatctcgcacacacattt

SEQ ID NO: 4362717 - DNA, 25 bp, Homo sapien
aaacctgttggagcagggctggtcc

SEQ ID NO: 4362718 - DNA, 25 bp, Homo sapien
tggccatgtgagtgaagggctccct

SEQ ID NO: 4362719 - DNA, 25 bp, Homo sapien
ttctttaaacctgttggagcagggc

SEQ ID NO: 4362720 - DNA, 25 bp, Homo sapien
tggtccactcgggagagcaagcctg

SEQ ID NO: 4362721 - DNA, 25 bp, Homo sapien
aagagggttttagccttgcactgca

SEQ ID NO: 4362722 - DNA, 25 bp, Homo sapien
tccaagagggttttagccttgcact

SEQ ID NO: 4362723 - DNA, 25 bp, Homo sapien
caagagggttttagccttgcactgc

SEQ ID NO: 4362724 - DNA, 25 bp, Homo sapien
attccaagagggttttagccttgca

SEQ ID NO: 4362725 - DNA, 25 bp, Homo sapien
ctgtcttcagcagggatttctgact

SEQ ID NO: 4362726 - DNA, 25 bp, Homo sapien
gggatttctgactatggaagaacat

SEQ ID NO: 4362727 - DNA, 25 bp, Homo sapien
gcagggatttctgactatggaagaa

SEQ ID NO: 4362728 - DNA, 25 bp, Homo sapien
cttcagcagggatttctgactatgg

SEQ ID NO: 4362729 - DNA, 25 bp, Homo sapien
cagctgcagtttgggggatgccttg

SEQ ID NO: 4362730 - DNA, 25 bp, Homo sapien
ccagctgcagtttgggggatgcctt

SEQ ID NO: 4362731 - DNA, 25 bp, Homo sapien
tgttttataatcttgctgctccagt

SEQ ID NO: 4362732 - DNA, 25 bp, Homo sapien
acgtgatgaaataccaccagtgttc

SEQ ID NO: 4362733 - DNA, 25 bp, Homo sapien
tcttcagctgcataccgtaaagacc

SEQ ID NO: 4362734 - DNA, 25 bp, Homo sapien
cggaaaacgtgatgaaataccacca

SEQ ID NO: 4362735 - DNA, 25 bp, Homo sapien
agagtgtaaggatccggaaaacgtg

SEQ ID NO: 4362736 - DNA, 25 bp, Homo sapien
ggtctgatcactccagtagcctgtg

SEQ ID NO: 4362737 - DNA, 25 bp, Homo sapien
gagactggggctcaaatgagaaggc

SEQ ID NO: 4362738 - DNA, 25 bp, Homo sapien
gaggagactggggctcaaatgagaa

SEQ ID NO: 4362739 - DNA, 25 bp, Homo sapien
actggggctcaaatgagaaggcttg

SEQ ID NO: 4362740 - DNA, 25 bp, Homo sapien
gactggggctcaaatgagaaggctt

SEQ ID NO: 4362741 - DNA, 25 bp, Homo sapien
catgggtccatttgccgagttttaa

SEQ ID NO: 4362742 - DNA, 25 bp, Homo sapien
cacagtgtgatgcagggaatatgaa

SEQ ID NO: 4362743 - DNA, 25 bp, Homo sapien
aaaggagccaacatggcaggtttgc

SEQ ID NO: 4362744 - DNA, 25 bp, Homo sapien
gaaagcatggaaaggactgactccc

SEQ ID NO: 4362745 - DNA, 25 bp, Homo sapien
tgttgattcctctggaaagattcca

SEQ ID NO: 4362746 - DNA, 25 bp, Homo sapien
gttgattcctctggaaagattccat

SEQ ID NO: 4362747 - DNA, 25 bp, Homo sapien
tctgttgattcctctggaaagattc

SEQ ID NO: 4362748 - DNA, 25 bp, Homo sapien
tctctgttgattcctctggaaagat

SEQ ID NO: 4362749 - DNA, 25 bp, Homo sapien
ccggaatctgaatgaactcgcctct

SEQ ID NO: 4362750 - DNA, 25 bp, Homo sapien
tggtgaaatttcagccccgcagaaa

SEQ ID NO: 4362751 - DNA, 25 bp, Homo sapien
gaatgaactcgcctctggtgaaatt

SEQ ID NO: 4362752 - DNA, 25 bp, Homo sapien
aaaattgggtctggcttcactctga

SEQ ID NO: 4362753 - DNA, 25 bp, Homo sapien
tagtgatacttgattacgaaggcca

SEQ ID NO: 4362754 - DNA, 25 bp, Homo sapien
cctgttgccatagtgatacttgatt

SEQ ID NO: 4362755 - DNA, 25 bp, Homo sapien
ggctcctgttgccatagtgatactt

SEQ ID NO: 4362756 - DNA, 25 bp, Homo sapien
tgccatagtgatacttgattacgaa

SEQ ID NO: 4362757 - DNA, 25 bp, Homo sapien
tatgttgatgttgtatgacgcagtc

SEQ ID NO: 4362758 - DNA, 25 bp, Homo sapien
gacgcagtctgagattactgtgcca

SEQ ID NO: 4362759 - DNA, 25 bp, Homo sapien
cactcctttaggaagttgcaaagca

SEQ ID NO: 4362760 - DNA, 25 bp, Homo sapien
tatttggttgttattttgtgcagag

SEQ ID NO: 4362761 - DNA, 25 bp, Homo sapien
ctatgggattatactgtctgctttg

SEQ ID NO: 4362762 - DNA, 25 bp, Homo sapien
tatcagcaaacaatcttatatcctt

SEQ ID NO: 4362763 - DNA, 25 bp, Homo sapien
agtttatcagcaaacaatcttatat

SEQ ID NO: 4362764 - DNA, 25 bp, Homo sapien
tatgggattatactgtctgctttga

SEQ ID NO: 4362765 - DNA, 25 bp, Homo sapien
tactttcaaactttaccagagccac

SEQ ID NO: 4362766 - DNA, 25 bp, Homo sapien
taacatccaataaggtactttcaaa

SEQ ID NO: 4362767 - DNA, 25 bp, Homo sapien
gtaacaagggatgctttaacatcca

SEQ ID NO: 4362768 - DNA, 25 bp, Homo sapien
ttacaagtgtaacaagggatgcttt

SEQ ID NO: 4362769 - DNA, 25 bp, Homo sapien
ttatccggatgaatgcttttgctct

SEQ ID NO: 4362770 - DNA, 25 bp, Homo sapien
gaaggtggcacttttgttatccgga

SEQ ID NO: 4362771 - DNA, 25 bp, Homo sapien
cacttttgttatccggatgaatgct

SEQ ID NO: 4362772 - DNA, 25 bp, Homo sapien
gaaagaaggtggcacttttgttatc

SEQ ID NO: 4362773 - DNA, 25 bp, Homo sapien
tatccctaaacacagtgctttcgtg

SEQ ID NO: 4362774 - DNA, 25 bp, Homo sapien
taaacacagtgctttcgtgcggcat

SEQ ID NO: 4362775 - DNA, 25 bp, Homo sapien
cagtgctttcgtgcggcatctgcgc

SEQ ID NO: 4362776 - DNA, 25 bp, Homo sapien
ccctgaaacttatccctaaacacag

SEQ ID NO: 4362777 - DNA, 25 bp, Homo sapien
ggcggcaccgggaaatcagctttgc

SEQ ID NO: 4362778 - DNA, 25 bp, Homo sapien
gtgaccgtgcggagcaccaagcagc

SEQ ID NO: 4362779 - DNA, 25 bp, Homo sapien
tttgcggagaggaaccgcagggctc

SEQ ID NO: 4362780 - DNA, 25 bp, Homo sapien
ggtgactgagtcaacgtgaccgtgc

SEQ ID NO: 4362781 - DNA, 25 bp, Homo sapien
gaggagcacgagctgaggggaacac

SEQ ID NO: 4362782 - DNA, 25 bp, Homo sapien
ctgaggggaacacaagcccccgtcg

SEQ ID NO: 4362783 - DNA, 25 bp, Homo sapien
accccctaccgcgaggagcacgagc

SEQ ID NO: 4362784 - DNA, 25 bp, Homo sapien
agctgaggggaacacaagcccccgt

SEQ ID NO: 4362785 - DNA, 25 bp, Homo sapien
agaccaaggactcgggcagcttcct

SEQ ID NO: 4362786 - DNA, 25 bp, Homo sapien
agctggcgcagctcgaccagagcat

SEQ ID NO: 4362787 - DNA, 25 bp, Homo sapien
ttcgcaacctcaaggactcggagcg

SEQ ID NO: 4362788 - DNA, 25 bp, Homo sapien
gcctcaacggcgacgtgcgtctgct

SEQ ID NO: 4362789 - DNA, 25 bp, Homo sapien
tctcttaaggcaaactgcaaagcta

SEQ ID NO: 4362790 - DNA, 25 bp, Homo sapien
aacacatctcttggtctgtacttat

SEQ ID NO: 4362791 - DNA, 25 bp, Homo sapien
acaaaaatcagtcttgcatggtaac

SEQ ID NO: 4362792 - DNA, 25 bp, Homo sapien
tggaatattatgaggtaatgaagta

SEQ ID NO: 4362793 - DNA, 25 bp, Homo sapien
tgcgccatgggaaaaacgagttgac

SEQ ID NO: 4362794 - DNA, 25 bp, Homo sapien
gttgacctcgcttggcaattaatgg

SEQ ID NO: 4362795 - DNA, 25 bp, Homo sapien
ttttccgtctgatgaaggttggcca

SEQ ID NO: 4362796 - DNA, 25 bp, Homo sapien
tacctcctggacgtcagctttgaca

SEQ ID NO: 4362797 - DNA, 25 bp, Homo sapien
ataaacctgaaaattgggatgtatg

SEQ ID NO: 4362798 - DNA, 25 bp, Homo sapien
cctgaaaattgggatgtatggtatg

SEQ ID NO: 4362799 - DNA, 25 bp, Homo sapien
ggatgtatggtatgaaagcaagttt

SEQ ID NO: 4362800 - DNA, 25 bp, Homo sapien
aaattgggatgtatggtatgaaagc

SEQ ID NO: 4362801 - DNA, 25 bp, Homo sapien
caccaaaaaacgatctgaaaaaatg

SEQ ID NO: 4362802 - DNA, 25 bp, Homo sapien
tccatcaaaataagacattacttca

SEQ ID NO: 4362803 - DNA, 25 bp, Homo sapien
gcactgatagatcttaatgttaaca

SEQ ID NO: 4362804 - DNA, 25 bp, Homo sapien
tacattcagaggatgataaacttgc

SEQ ID NO: 4362805 - DNA, 25 bp, Homo sapien
aattagccagtcagcacactttggt

SEQ ID NO: 4362806 - DNA, 25 bp, Homo sapien
taacagttatatccctctatgccaa

SEQ ID NO: 4362807 - DNA, 25 bp, Homo sapien
cattgtttgaatttaatcgggcatc

SEQ ID NO: 4362808 - DNA, 25 bp, Homo sapien
ccaagatagtaatgcatatgccaaa

SEQ ID NO: 4362809 - DNA, 25 bp, Homo sapien
gaagtgtgattgcaattgcagaaca

SEQ ID NO: 4362810 - DNA, 25 bp, Homo sapien
ccagtcacaaagaggttgtctgtct

SEQ ID NO: 4362811 - DNA, 25 bp, Homo sapien
tgcccattaatagacgcagtaaaat

SEQ ID NO: 4362812 - DNA, 25 bp, Homo sapien
gtgagaaaacactgccagcggtgat

SEQ ID NO: 4362813 - DNA, 25 bp, Homo sapien
actttcggcatggttcaatgtatga

SEQ ID NO: 4362814 - DNA, 25 bp, Homo sapien
ttagtgtgtccggtgtctggttagt

SEQ ID NO: 4362815 - DNA, 25 bp, Homo sapien
tctggttagtgaagcacaaagcttc

SEQ ID NO: 4362816 - DNA, 25 bp, Homo sapien
caatgtatgaagtatgtctgctgag

SEQ ID NO: 4362817 - DNA, 25 bp, Homo sapien
tgtaccaggccttgagctaaacaaa

SEQ ID NO: 4362818 - DNA, 25 bp, Homo sapien
tatgttttgacgctaaaaagttagc

SEQ ID NO: 4362819 - DNA, 25 bp, Homo sapien
gctaaacaaaatgtgttctcatgca

SEQ ID NO: 4362820 - DNA, 25 bp, Homo sapien
gctaaaaagttagcttgtaccaggc

SEQ ID NO: 4362821 - DNA, 25 bp, Homo sapien
ttttctcctcaaagattttctccat

SEQ ID NO: 4362822 - DNA, 25 bp, Homo sapien
gttttctcctcaaagattttctcca

SEQ ID NO: 4362823 - DNA, 25 bp, Homo sapien
cctccagcagttggcaagattttct

SEQ ID NO: 4362824 - DNA, 25 bp, Homo sapien
tttccagtccatgaagttcctcttc

SEQ ID NO: 4362825 - DNA, 25 bp, Homo sapien
tccagtccatgaagttcctcttcct

SEQ ID NO: 4362826 - DNA, 25 bp, Homo sapien
tctggtgattaacagaatgttctgt

SEQ ID NO: 4362827 - DNA, 25 bp, Homo sapien
gcacgtatagacacttgtcctgagc

SEQ ID NO: 4362828 - DNA, 25 bp, Homo sapien
ctgcacgtatagacacttgtcctga

SEQ ID NO: 4362829 - DNA, 25 bp, Homo sapien
tgcacgtatagacacttgtcctgag

SEQ ID NO: 4362830 - DNA, 25 bp, Homo sapien
tgtgcctctccagagggctaaccac

SEQ ID NO: 4362831 - DNA, 25 bp, Homo sapien
ctttgtgcctctccagagggctaac

SEQ ID NO: 4362832 - DNA, 25 bp, Homo sapien
tttgtgcctctccagagggctaacc

SEQ ID NO: 4362833 - DNA, 25 bp, Homo sapien
ttgtgcctctccagagggctaacca

SEQ ID NO: 4362834 - DNA, 25 bp, Homo sapien
tgccctcctgttaacctggaacaag

SEQ ID NO: 4362835 - DNA, 25 bp, Homo sapien
cacaactgggaaactccatggcata

SEQ ID NO: 4362836 - DNA, 25 bp, Homo sapien
gagaagactatcttgcagcctgccc

SEQ ID NO: 4362837 - DNA, 25 bp, Homo sapien
caaaccgaagggaatgctgtggaca

SEQ ID NO: 4362838 - DNA, 25 bp, Homo sapien
aattgtctgtgtcatgggctaagcc

SEQ ID NO: 4362839 - DNA, 25 bp, Homo sapien
taattgctgctaagatggagcttcc

SEQ ID NO: 4362840 - DNA, 25 bp, Homo sapien
aacattcaggcaggaacaaacttgc

SEQ ID NO: 4362841 - DNA, 25 bp, Homo sapien
gaagagtggcaagaaactaattccc

SEQ ID NO: 4362842 - DNA, 25 bp, Homo sapien
gaatcccaaacataatgctgcttta

SEQ ID NO: 4362843 - DNA, 25 bp, Homo sapien
acataatgctgctttacacgtagag

SEQ ID NO: 4362844 - DNA, 25 bp, Homo sapien
tggagtagaagtaaccaagagatgc

SEQ ID NO: 4362845 - DNA, 25 bp, Homo sapien
gtagaagtaaccaagagatgcaggg

SEQ ID NO: 4362846 - DNA, 25 bp, Homo sapien
ctcccactgtcttccccaaaaagca

SEQ ID NO: 4362847 - DNA, 25 bp, Homo sapien
tcccactgtcttccccaaaaagcac

SEQ ID NO: 4362848 - DNA, 25 bp, Homo sapien
tactgaccccttccctattgagctt

SEQ ID NO: 4362849 - DNA, 25 bp, Homo sapien
taactgttgccttggattccatggc

SEQ ID NO: 4362850 - DNA, 25 bp, Homo sapien
ccgatgtccccatcaatacttttga

SEQ ID NO: 4362851 - DNA, 25 bp, Homo sapien
tgcaacaacactactttactgaccc

SEQ ID NO: 4362852 - DNA, 25 bp, Homo sapien
ggttcataatattcttggcaacttc

SEQ ID NO: 4362853 - DNA, 25 bp, Homo sapien
atattcttggcaacttccatctgca

SEQ ID NO: 4362854 - DNA, 25 bp, Homo sapien
cataatattcttggcaacttccatc

SEQ ID NO: 4362855 - DNA, 25 bp, Homo sapien
taatattcttggcaacttccatctg

SEQ ID NO: 4362856 - DNA, 25 bp, Homo sapien
catctgataaacactggttgggtgg

SEQ ID NO: 4362857 - DNA, 25 bp, Homo sapien
ctatcttgggactgtcttcagatga

SEQ ID NO: 4362858 - DNA, 25 bp, Homo sapien
tgggatgctcagaaggttcttctcc

SEQ ID NO: 4362859 - DNA, 25 bp, Homo sapien
cttcagatgagactgagacacatct

SEQ ID NO: 4362860 - DNA, 25 bp, Homo sapien
taatgacattggtacagtgtgcaat

SEQ ID NO: 4362861 - DNA, 25 bp, Homo sapien
cagtaatgacattggtacagtgtgc

SEQ ID NO: 4362862 - DNA, 25 bp, Homo sapien
tggatccagtaatgacattggtaca

SEQ ID NO: 4362863 - DNA, 25 bp, Homo sapien
cattggtacagtgtgcaatgtaacc

SEQ ID NO: 4362864 - DNA, 25 bp, Homo sapien
caatgaggccagattgcttagcttc

SEQ ID NO: 4362865 - DNA, 25 bp, Homo sapien
agccctcggtacccaaggtgatctc

SEQ ID NO: 4362866 - DNA, 25 bp, Homo sapien
acaatgaggccagattgcttagctt

SEQ ID NO: 4362867 - DNA, 25 bp, Homo sapien
aacaatgaggccagattgcttagct

SEQ ID NO: 4362868 - DNA, 25 bp, Homo sapien
gtaagaagagagtcctgagctagca

SEQ ID NO: 4362869 - DNA, 25 bp, Homo sapien
gagctagcaggttcaatcccctctg

SEQ ID NO: 4362870 - DNA, 25 bp, Homo sapien
tacactgacaccaaactctgcagag

SEQ ID NO: 4362871 - DNA, 25 bp, Homo sapien
tctgtcatgtggtgccctacactga

SEQ ID NO: 4362872 - DNA, 25 bp, Homo sapien
ttctgtgtgaagttgtggaaatctt

SEQ ID NO: 4362873 - DNA, 25 bp, Homo sapien
cattctgtgtgaagttgtggaaatc

SEQ ID NO: 4362874 - DNA, 25 bp, Homo sapien
ctgtgtgaagttgtggaaatctttt

SEQ ID NO: 4362875 - DNA, 25 bp, Homo sapien
ccattctgtgtgaagttgtggaaat

SEQ ID NO: 4362876 - DNA, 25 bp, Homo sapien
tacttgctggtcagccgcttcattg

SEQ ID NO: 4362877 - DNA, 25 bp, Homo sapien
acttgctggtcagccgcttcattgt

SEQ ID NO: 4362878 - DNA, 25 bp, Homo sapien
ttacttgctggtcagccgcttcatt

SEQ ID NO: 4362879 - DNA, 25 bp, Homo sapien
taaccttggatgttgatcactcaaa

SEQ ID NO: 4362880 - DNA, 25 bp, Homo sapien
tgttgtttatatctagaagcgcaag

SEQ ID NO: 4362881 - DNA, 25 bp, Homo sapien
ttgatcactcaaacttttattgttg

SEQ ID NO: 4362882 - DNA, 25 bp, Homo sapien
tcaatcctcctggtgacatataacc

SEQ ID NO: 4362883 - DNA, 25 bp, Homo sapien
caggtgacactcagttttaccttgg

SEQ ID NO: 4362884 - DNA, 25 bp, Homo sapien
ttcaccaggtgacactcagttttac

SEQ ID NO: 4362885 - DNA, 25 bp, Homo sapien
ccaggtgacactcagttttaccttg

SEQ ID NO: 4362886 - DNA, 25 bp, Homo sapien
aggaaggcctaactccacggatgtg

SEQ ID NO: 4362887 - DNA, 25 bp, Homo sapien
taactccacggatgtgtggaaggct

SEQ ID NO: 4362888 - DNA, 25 bp, Homo sapien
gaaggcctaactccacggatgtgtg

SEQ ID NO: 4362889 - DNA, 25 bp, Homo sapien
cggatgtgtggaaggctatgctcac

SEQ ID NO: 4362890 - DNA, 25 bp, Homo sapien
ctctggaaactgttgtgtaaagaca

SEQ ID NO: 4362891 - DNA, 25 bp, Homo sapien
tgtgtgatactctgcccgggagcaa

SEQ ID NO: 4362892 - DNA, 25 bp, Homo sapien
gcccgggagcaatggtgaaaatgtt

SEQ ID NO: 4362893 - DNA, 25 bp, Homo sapien
cagctgttccgtctgagcatgagcc

SEQ ID NO: 4362894 - DNA, 25 bp, Homo sapien
acaaaagccctaagcattgagctgg

SEQ ID NO: 4362895 - DNA, 25 bp, Homo sapien
gctgctctagtactggattcatatg

SEQ ID NO: 4362896 - DNA, 25 bp, Homo sapien
tccctgcagtaaaagtaagatacca

SEQ ID NO: 4362897 - DNA, 25 bp, Homo sapien
tccaaaagagagtaaaacaccctga

SEQ ID NO: 4362898 - DNA, 25 bp, Homo sapien
agtgagtactccacaacttttggca

SEQ ID NO: 4362899 - DNA, 25 bp, Homo sapien
tttggcattgctttaaatcgattgc

SEQ ID NO: 4362900 - DNA, 25 bp, Homo sapien
ctgaagagaccccagtgagtactcc

SEQ ID NO: 4362901 - DNA, 25 bp, Homo sapien
tgcctttatgaacaaggttgtcctt

SEQ ID NO: 4362902 - DNA, 25 bp, Homo sapien
taaatggctaaaatcctagtgctgc

SEQ ID NO: 4362903 - DNA, 25 bp, Homo sapien
tgctctgaggcatcgttaatacaca

SEQ ID NO: 4362904 - DNA, 25 bp, Homo sapien
taggtagaacccgatcattggcaac

SEQ ID NO: 4362905 - DNA, 25 bp, Homo sapien
tactcgtacagacattacaggttgg

SEQ ID NO: 4362906 - DNA, 25 bp, Homo sapien
agtggaaggccgcttccccatggga

SEQ ID NO: 4362907 - DNA, 25 bp, Homo sapien
gaatctgaacgtgctcttctgtaag

SEQ ID NO: 4362908 - DNA, 25 bp, Homo sapien
gatgcaactagattccaccagctct

SEQ ID NO: 4362909 - DNA, 25 bp, Homo sapien
aaagatgcaactagattccaccagc

SEQ ID NO: 4362910 - DNA, 25 bp, Homo sapien
tcaataaggaagtaggttttctcac

SEQ ID NO: 4362911 - DNA, 25 bp, Homo sapien
ttcaataaggaagtaggttttctca

SEQ ID NO: 4362912 - DNA, 25 bp, Homo sapien
ggctgctacatgagtagctttcact

SEQ ID NO: 4362913 - DNA, 25 bp, Homo sapien
acatgagtagctttcactgtacact

SEQ ID NO: 4362914 - DNA, 25 bp, Homo sapien
gtagctttcactgtacactccattg

SEQ ID NO: 4362915 - DNA, 25 bp, Homo sapien
gctttcactgtacactccattgtcc

SEQ ID NO: 4362916 - DNA, 25 bp, Homo sapien
tagggcctgcaagagtaggctccat

SEQ ID NO: 4362917 - DNA, 25 bp, Homo sapien
tagtccccatagggcctgcaagagt

SEQ ID NO: 4362918 - DNA, 25 bp, Homo sapien
tccccatagggcctgcaagagtagg

SEQ ID NO: 4362919 - DNA, 25 bp, Homo sapien
catagggcctgcaagagtaggctcc

SEQ ID NO: 4362920 - DNA, 25 bp, Homo sapien
cagtatatgcgggaggatctctgac

SEQ ID NO: 4362921 - DNA, 25 bp, Homo sapien
cccaggatgaggtacaagtgacgat

SEQ ID NO: 4362922 - DNA, 25 bp, Homo sapien
tgttccaagttagtaagtgcagggc

SEQ ID NO: 4362923 - DNA, 25 bp, Homo sapien
caatatcctggcgtttctctgctgg

SEQ ID NO: 4362924 - DNA, 25 bp, Homo sapien
gaagcttccaatgcttttaagcaaa

SEQ ID NO: 4362925 - DNA, 25 bp, Homo sapien
ctgggaagcttccaatgcttttaag

SEQ ID NO: 4362926 - DNA, 25 bp, Homo sapien
gggaagcttccaatgcttttaagca

SEQ ID NO: 4362927 - DNA, 25 bp, Homo sapien
gcttccaatgcttttaagcaaaaag

SEQ ID NO: 4362928 - DNA, 25 bp, Homo sapien
gtagctcccaaaacacagaccgtga

SEQ ID NO: 4362929 - DNA, 25 bp, Homo sapien
aatgacattgttaggactgatcccc

SEQ ID NO: 4362930 - DNA, 25 bp, Homo sapien
tctgtttggtaaggaagggtccaca

SEQ ID NO: 4362931 - DNA, 25 bp, Homo sapien
aatggcaatttgtaggcaggagcac

SEQ ID NO: 4362932 - DNA, 25 bp, Homo sapien
gaaaatatctcaagtcaagtaacag

SEQ ID NO: 4362933 - DNA, 25 bp, Homo sapien
cagaatgggtcctaccagttatcaa

SEQ ID NO: 4362934 - DNA, 25 bp, Homo sapien
tctttttcgtgcttatctgcagtca

SEQ ID NO: 4362935 - DNA, 25 bp, Homo sapien
taacagaatgacttttcgcaggttg

SEQ ID NO: 4362936 - DNA, 25 bp, Homo sapien
ggttaggacctatctgtttagtgga

SEQ ID NO: 4362937 - DNA, 25 bp, Homo sapien
tacagtctagtttttgctatcaagg

SEQ ID NO: 4362938 - DNA, 25 bp, Homo sapien
tgttctctagaacaaggttaggacc

SEQ ID NO: 4362939 - DNA, 25 bp, Homo sapien
tggaacttgcctgtaaaatcatctt

SEQ ID NO: 4362940 - DNA, 25 bp, Homo sapien
ttttctgcacgaatcccccgttgac

SEQ ID NO: 4362941 - DNA, 25 bp, Homo sapien
tcccattatttttctgcacgaatcc

SEQ ID NO: 4362942 - DNA, 25 bp, Homo sapien
cgaatcccccgttgaccttgaatga

SEQ ID NO: 4362943 - DNA, 25 bp, Homo sapien
atttttctgcacgaatcccccgttg

SEQ ID NO: 4362944 - DNA, 25 bp, Homo sapien
tggctattaccactaacgctcaatt

SEQ ID NO: 4362945 - DNA, 25 bp, Homo sapien
ctaacgctcaattgtgatgctctct

SEQ ID NO: 4362946 - DNA, 25 bp, Homo sapien
taccactaacgctcaattgtgatgc

SEQ ID NO: 4362947 - DNA, 25 bp, Homo sapien
tattaccactaacgctcaattgtga

SEQ ID NO: 4362948 - DNA, 25 bp, Homo sapien
cattcaaagatccattatatcttcg

SEQ ID NO: 4362949 - DNA, 25 bp, Homo sapien
catggcaccattcaaagatccatta

SEQ ID NO: 4362950 - DNA, 25 bp, Homo sapien
ctacatggcaccattcaaagatcca

SEQ ID NO: 4362951 - DNA, 25 bp, Homo sapien
attcaaagatccattatatcttcgc

SEQ ID NO: 4362952 - DNA, 25 bp, Homo sapien
gaggtgatgctttccgaccagagca

SEQ ID NO: 4362953 - DNA, 25 bp, Homo sapien
gatagctcaagaatcagggcagaga

SEQ ID NO: 4362954 - DNA, 25 bp, Homo sapien
taggaacgtttccaagacctccagc

SEQ ID NO: 4362955 - DNA, 25 bp, Homo sapien
tgccataatcaagatgggcaaggga

SEQ ID NO: 4362956 - DNA, 25 bp, Homo sapien
ttcaatactcataataatcctgggt

SEQ ID NO: 4362957 - DNA, 25 bp, Homo sapien
gatcactgacaagttgcgggactca

SEQ ID NO: 4362958 - DNA, 25 bp, Homo sapien
gcatctttagttccttgatcactga

SEQ ID NO: 4362959 - DNA, 25 bp, Homo sapien
caggtcagctgagtccacttcagca

SEQ ID NO: 4362960 - DNA, 25 bp, Homo sapien
tccccagatgttccacaacttccct

SEQ ID NO: 4362961 - DNA, 25 bp, Homo sapien
aaggaaacagctggcggtccccaga

SEQ ID NO: 4362962 - DNA, 25 bp, Homo sapien
cggtccccagatgttccacaacttc

SEQ ID NO: 4362963 - DNA, 25 bp, Homo sapien
aaaggaaacagctggcggtccccag

SEQ ID NO: 4362964 - DNA, 25 bp, Homo sapien
agtcaccaactgcagaagcacatgc

SEQ ID NO: 4362965 - DNA, 25 bp, Homo sapien
tttccgtatgattgcatatgagtgt

SEQ ID NO: 4362966 - DNA, 25 bp, Homo sapien
cgtatgattgcatatgagtgtgcgc

SEQ ID NO: 4362967 - DNA, 25 bp, Homo sapien
tatgattgcatatgagtgtgcgcat

SEQ ID NO: 4362968 - DNA, 25 bp, Homo sapien
ttgcatatgagtgtgcgcatttctg

SEQ ID NO: 4362969 - DNA, 25 bp, Homo sapien
aatcagcttaagatcaatcataact

SEQ ID NO: 4362970 - DNA, 25 bp, Homo sapien
aagatcaatcataactttcactgtg

SEQ ID NO: 4362971 - DNA, 25 bp, Homo sapien
ggatgatggcccttaacacggttgt

SEQ ID NO: 4362972 - DNA, 25 bp, Homo sapien
tgtgggagcagacagtgttaaaagt

SEQ ID NO: 4362973 - DNA, 25 bp, Homo sapien
tgttgagatcagtgcaacagaggga

SEQ ID NO: 4362974 - DNA, 25 bp, Homo sapien
ttcttcgtgtagaaaggagctgttg

SEQ ID NO: 4362975 - DNA, 25 bp, Homo sapien
tactaatctccagttcttcgtgtag

SEQ ID NO: 4362976 - DNA, 25 bp, Homo sapien
tgccatctcctactaatctccagtt

SEQ ID NO: 4362977 - DNA, 25 bp, Homo sapien
agtcctcagcagatgctgtagattc

SEQ ID NO: 4362978 - DNA, 25 bp, Homo sapien
ctttcaatgcaacttctatatctga

SEQ ID NO: 4362979 - DNA, 25 bp, Homo sapien
aacttctatatctgaagtcctcagc

SEQ ID NO: 4362980 - DNA, 25 bp, Homo sapien
ctcagcagatgctgtagattcctta

SEQ ID NO: 4362981 - DNA, 25 bp, Homo sapien
tagatggttttaggccaaagatctg

SEQ ID NO: 4362982 - DNA, 25 bp, Homo sapien
tcataccaattttcaggatagatgg

SEQ ID NO: 4362983 - DNA, 25 bp, Homo sapien
gctgtgagatctctgaatatcccat

SEQ ID NO: 4362984 - DNA, 25 bp, Homo sapien
tacatgatgctgtgagatctctgaa

SEQ ID NO: 4362985 - DNA, 25 bp, Homo sapien
ggattacagacataactgccagaaa

SEQ ID NO: 4362986 - DNA, 25 bp, Homo sapien
ctgacaggccttgtgctcatgctgc

SEQ ID NO: 4362987 - DNA, 25 bp, Homo sapien
tattgtattacagggtttcagtaac

SEQ ID NO: 4362988 - DNA, 25 bp, Homo sapien
taactccgatttaggattacagaca

SEQ ID NO: 4362989 - DNA, 25 bp, Homo sapien
caattacactggcacatatcaggtt

SEQ ID NO: 4362990 - DNA, 25 bp, Homo sapien
acaaggagcactcatccccaaatct

SEQ ID NO: 4362991 - DNA, 25 bp, Homo sapien
cagggaccagtccactctttccctc

SEQ ID NO: 4362992 - DNA, 25 bp, Homo sapien
ttttccacggcacccctttatatgc

SEQ ID NO: 4362993 - DNA, 25 bp, Homo sapien
tcctcttggtaacacatgactgcag

SEQ ID NO: 4362994 - DNA, 25 bp, Homo sapien
gactgcagcgttcatcttaacatgg

SEQ ID NO: 4362995 - DNA, 25 bp, Homo sapien
aaggacctcacagtctcctcttggt

SEQ ID NO: 4362996 - DNA, 25 bp, Homo sapien
cagtgagtatggcagttctacaggt

SEQ ID NO: 4362997 - DNA, 25 bp, Homo sapien
acatagtcaaagtcaggtagtctct

SEQ ID NO: 4362998 - DNA, 25 bp, Homo sapien
ttccttgcagttggaactatcttct

SEQ ID NO: 4362999 - DNA, 25 bp, Homo sapien
tcagaccgtgggcagtctttcatgc

SEQ ID NO: 4363000 - DNA, 25 bp, Homo sapien
gatgccagcagagattaacttctga

SEQ ID NO: 4363001 - DNA, 25 bp, Homo sapien
tgctgtaggagcaactgaatagaag

SEQ ID NO: 4363002 - DNA, 25 bp, Homo sapien
taggagcaactgaatagaagctctc

SEQ ID NO: 4363003 - DNA, 25 bp, Homo sapien
gcaggcaaatcccatttgaagatac

SEQ ID NO: 4363004 - DNA, 25 bp, Homo sapien
gagcaactgaatagaagctctcagt

SEQ ID NO: 4363005 - DNA, 25 bp, Homo sapien
cttttcagctcaaaagctttaatta

SEQ ID NO: 4363006 - DNA, 25 bp, Homo sapien
ctcaaaagctttaattatagcatag

SEQ ID NO: 4363007 - DNA, 25 bp, Homo sapien
tcaaaagctttaattatagcatagg

SEQ ID NO: 4363008 - DNA, 25 bp, Homo sapien
tcagctcaaaagctttaattatagc

SEQ ID NO: 4363009 - DNA, 25 bp, Homo sapien
gatatccaacaccaatctctccttt

SEQ ID NO: 4363010 - DNA, 25 bp, Homo sapien
gagagaaagcgggtgtccaagatat

SEQ ID NO: 4363011 - DNA, 25 bp, Homo sapien
aagatatccaacaccaatctctcct

SEQ ID NO: 4363012 - DNA, 25 bp, Homo sapien
agaaagcgggtgtccaagatatcca

SEQ ID NO: 4363013 - DNA, 25 bp, Homo sapien
ccaggaagttcagccggcttcacca

SEQ ID NO: 4363014 - DNA, 25 bp, Homo sapien
gtctacaaattcaaaggctaactgc

SEQ ID NO: 4363015 - DNA, 25 bp, Homo sapien
tcaatattagtgaggttggctcttc

SEQ ID NO: 4363016 - DNA, 25 bp, Homo sapien
cctgagtgggttgccgcccatggct

SEQ ID NO: 4363017 - DNA, 25 bp, Homo sapien
tgctccgtgagctgtctgctctcgg

SEQ ID NO: 4363018 - DNA, 25 bp, Homo sapien
ggcctgtgacttcttacatctcgag

SEQ ID NO: 4363019 - DNA, 25 bp, Homo sapien
accaccacatgtgctccgtgagctg

SEQ ID NO: 4363020 - DNA, 25 bp, Homo sapien
catctcgaggcttaggctgcttctc

SEQ ID NO: 4363021 - DNA, 25 bp, Homo sapien
caggctaccagtcactataccttta

SEQ ID NO: 4363022 - DNA, 25 bp, Homo sapien
tttcttgtatgactctggtccaggc

SEQ ID NO: 4363023 - DNA, 25 bp, Homo sapien
actatacctttataagcaataatga

SEQ ID NO: 4363024 - DNA, 25 bp, Homo sapien
cgctccgctaatgtataaagcaact

SEQ ID NO: 4363025 - DNA, 25 bp, Homo sapien
accagctgctgctcagaggactcca

SEQ ID NO: 4363026 - DNA, 25 bp, Homo sapien
tcaccagctgctgctcagaggactc

SEQ ID NO: 4363027 - DNA, 25 bp, Homo sapien
cttcaccagctgctgctcagaggac

SEQ ID NO: 4363028 - DNA, 25 bp, Homo sapien
ccagctgctgctcagaggactccat

SEQ ID NO: 4363029 - DNA, 25 bp, Homo sapien
cacatgcatgtaaccttgaaattat

SEQ ID NO: 4363030 - DNA, 25 bp, Homo sapien
tccagttctgctaagtcctcgccat

SEQ ID NO: 4363031 - DNA, 25 bp, Homo sapien
cagaggtgtaaaatatgcatgatgg

SEQ ID NO: 4363032 - DNA, 25 bp, Homo sapien
ctcagtcatagccttcagaggtgta

SEQ ID NO: 4363033 - DNA, 25 bp, Homo sapien
gacatattctttccgtataggcaag

SEQ ID NO: 4363034 - DNA, 25 bp, Homo sapien
tctttccgtataggcaagacagctt

SEQ ID NO: 4363035 - DNA, 25 bp, Homo sapien
gaaaagacatattctttccgtatag

SEQ ID NO: 4363036 - DNA, 25 bp, Homo sapien
ttggaaaagacatattctttccgta

SEQ ID NO: 4363037 - DNA, 25 bp, Homo sapien
tttaacagagggcattcaagctttt

SEQ ID NO: 4363038 - DNA, 25 bp, Homo sapien
ccgatcttctagaatcctgcagact

SEQ ID NO: 4363039 - DNA, 25 bp, Homo sapien
aaagtccccgatcttctagaatcct

SEQ ID NO: 4363040 - DNA, 25 bp, Homo sapien
gagggcattcaagctttttaatcct

SEQ ID NO: 4363041 - DNA, 25 bp, Homo sapien
tagactttgccattatgataactat

SEQ ID NO: 4363042 - DNA, 25 bp, Homo sapien
gactttgccattatgataactatat

SEQ ID NO: 4363043 - DNA, 25 bp, Homo sapien
caaatagactttgccattatgataa

SEQ ID NO: 4363044 - DNA, 25 bp, Homo sapien
aatagactttgccattatgataact

SEQ ID NO: 4363045 - DNA, 25 bp, Homo sapien
ttagatcacacttcagggttcctgg

SEQ ID NO: 4363046 - DNA, 25 bp, Homo sapien
tacttttgggatatatgcagccctc

SEQ ID NO: 4363047 - DNA, 25 bp, Homo sapien
caaatagccccagcatacttttggg

SEQ ID NO: 4363048 - DNA, 25 bp, Homo sapien
caaaaagaaggctgcacttgcccac

SEQ ID NO: 4363049 - DNA, 25 bp, Homo sapien
tgattatacttgcattggaaaggta

SEQ ID NO: 4363050 - DNA, 25 bp, Homo sapien
cctgattatacttgcattggaaagg

SEQ ID NO: 4363051 - DNA, 25 bp, Homo sapien
ctgattatacttgcattggaaaggt

SEQ ID NO: 4363052 - DNA, 25 bp, Homo sapien
tgtgagtcacagtcgtaaatgccaa

SEQ ID NO: 4363053 - DNA, 25 bp, Homo sapien
gagtcacagtcgtaaatgccaaact

SEQ ID NO: 4363054 - DNA, 25 bp, Homo sapien
ttgtgagtcacagtcgtaaatgcca

SEQ ID NO: 4363055 - DNA, 25 bp, Homo sapien
tgagtcacagtcgtaaatgccaaac

SEQ ID NO: 4363056 - DNA, 25 bp, Homo sapien
aggatgaagttctggctctttgaaa

SEQ ID NO: 4363057 - DNA, 25 bp, Homo sapien
tgaaattatatccaatctcctccat

SEQ ID NO: 4363058 - DNA, 25 bp, Homo sapien
gttctggctctttgaaattatatcc

SEQ ID NO: 4363059 - DNA, 25 bp, Homo sapien
tctggctctttgaaattatatccaa

SEQ ID NO: 4363060 - DNA, 25 bp, Homo sapien
atccttttctggggagtgtatgcca

SEQ ID NO: 4363061 - DNA, 25 bp, Homo sapien
tatccttttctggggagtgtatgcc

SEQ ID NO: 4363062 - DNA, 25 bp, Homo sapien
tccttttctggggagtgtatgccat

SEQ ID NO: 4363063 - DNA, 25 bp, Homo sapien
tccatacaacaagatcaaaattaga

SEQ ID NO: 4363064 - DNA, 25 bp, Homo sapien
ttagatggagattgcgagtgttcca

SEQ ID NO: 4363065 - DNA, 25 bp, Homo sapien
tccagaataagatccatacaacaag

SEQ ID NO: 4363066 - DNA, 25 bp, Homo sapien
tctattcagggatttcaagttccag

SEQ ID NO: 4363067 - DNA, 25 bp, Homo sapien
atatcagcttttgacgaattttggg

SEQ ID NO: 4363068 - DNA, 25 bp, Homo sapien
atcagcttttgacgaattttgggtc

SEQ ID NO: 4363069 - DNA, 25 bp, Homo sapien
tatcagcttttgacgaattttgggt

SEQ ID NO: 4363070 - DNA, 25 bp, Homo sapien
tcagcttttgacgaattttgggtcc

SEQ ID NO: 4363071 - DNA, 25 bp, Homo sapien
ctcctcaaagcaagggagccccagt

SEQ ID NO: 4363072 - DNA, 25 bp, Homo sapien
cccagttttctgggaaaatgtcagt

SEQ ID NO: 4363073 - DNA, 25 bp, Homo sapien
tcaaagcaagggagccccagttttc

SEQ ID NO: 4363074 - DNA, 25 bp, Homo sapien
cagtaaaaattggtgtctttgtggt

SEQ ID NO: 4363075 - DNA, 25 bp, Homo sapien
tactggttccctcttccacttagct

SEQ ID NO: 4363076 - DNA, 25 bp, Homo sapien
tcttccacttagctggcacttctgc

SEQ ID NO: 4363077 - DNA, 25 bp, Homo sapien
ggcacttctgctaattccaatggct

SEQ ID NO: 4363078 - DNA, 25 bp, Homo sapien
gctggcacttctgctaattccaatg

SEQ ID NO: 4363079 - DNA, 25 bp, Homo sapien
tagaggagcccatatctaggttttg

SEQ ID NO: 4363080 - DNA, 25 bp, Homo sapien
tgtgggagccgcgtattttctttaa

SEQ ID NO: 4363081 - DNA, 25 bp, Homo sapien
agccgcgtattttctttaaatgttg

SEQ ID NO: 4363082 - DNA, 25 bp, Homo sapien
tggttatcatctcttatagaggagc

SEQ ID NO: 4363083 - DNA, 25 bp, Homo sapien
ctgagccttgtagtctaaagggaca

SEQ ID NO: 4363084 - DNA, 25 bp, Homo sapien
ctgatgttcgcccttagcctgagcc

SEQ ID NO: 4363085 - DNA, 25 bp, Homo sapien
agccttgtagtctaaagggacagga

SEQ ID NO: 4363086 - DNA, 25 bp, Homo sapien
taatctaacttctgatgttcgccct

SEQ ID NO: 4363087 - DNA, 25 bp, Homo sapien
ctctggagctggttaatttcaaagt

SEQ ID NO: 4363088 - DNA, 25 bp, Homo sapien
gagattgagactgtactcttggcac

SEQ ID NO: 4363089 - DNA, 25 bp, Homo sapien
ggcacataaggatcccaaatcttag

SEQ ID NO: 4363090 - DNA, 25 bp, Homo sapien
gagctggttaatttcaaagtcctga

SEQ ID NO: 4363091 - DNA, 25 bp, Homo sapien
ttatcttttcatttcggagaaggtc

SEQ ID NO: 4363092 - DNA, 25 bp, Homo sapien
taaacagcgcttattatttttgata

SEQ ID NO: 4363093 - DNA, 25 bp, Homo sapien
cccatggaagtgaggtattattttt

SEQ ID NO: 4363094 - DNA, 25 bp, Homo sapien
gattgctctggcatgtaaacagcgc

SEQ ID NO: 4363095 - DNA, 25 bp, Homo sapien
gggtcacctgcacagttgcagcagc

SEQ ID NO: 4363096 - DNA, 25 bp, Homo sapien
tgggtcacctgcacagttgcagcag

SEQ ID NO: 4363097 - DNA, 25 bp, Homo sapien
ctgggtcacctgcacagttgcagca

SEQ ID NO: 4363098 - DNA, 25 bp, Homo sapien
tccgcctctcttctaaattgcaaat

SEQ ID NO: 4363099 - DNA, 25 bp, Homo sapien
gcctctcttctaaattgcaaatcca

SEQ ID NO: 4363100 - DNA, 25 bp, Homo sapien
catccgcctctcttctaaattgcaa

SEQ ID NO: 4363101 - DNA, 25 bp, Homo sapien
tgctccatccgcctctcttctaaat

SEQ ID NO: 4363102 - DNA, 25 bp, Homo sapien
gatactgacatctaaattgggctgt

SEQ ID NO: 4363103 - DNA, 25 bp, Homo sapien
tgatgaaaaagtcatgctctcaaaa

SEQ ID NO: 4363104 - DNA, 25 bp, Homo sapien
tgacaacttaatgtggctaacaatg

SEQ ID NO: 4363105 - DNA, 25 bp, Homo sapien
taatattaactaccctggctctatg

SEQ ID NO: 4363106 - DNA, 25 bp, Homo sapien
gtatgtttatatgcccatctgtaca

SEQ ID NO: 4363107 - DNA, 25 bp, Homo sapien
tcaaggattcagttactcttttcag

SEQ ID NO: 4363108 - DNA, 25 bp, Homo sapien
gacagtatcttataatgtatgcaac

SEQ ID NO: 4363109 - DNA, 25 bp, Homo sapien
tcccgcaagatgagagacagtatct

SEQ ID NO: 4363110 - DNA, 25 bp, Homo sapien
tcagctgcatatggatgtgtctttt

SEQ ID NO: 4363111 - DNA, 25 bp, Homo sapien
ttttcagctgcatatggatgtgtct

SEQ ID NO: 4363112 - DNA, 25 bp, Homo sapien
tttcagctgcatatggatgtgtctt

SEQ ID NO: 4363113 - DNA, 25 bp, Homo sapien
ttcagctgcatatggatgtgtcttt

SEQ ID NO: 4363114 - DNA, 25 bp, Homo sapien
tcagcttgaagtaggattctgctca

SEQ ID NO: 4363115 - DNA, 25 bp, Homo sapien
gatacagcatagtggtaaccttgag

SEQ ID NO: 4363116 - DNA, 25 bp, Homo sapien
caggagaaatgctttgagtcagata

SEQ ID NO: 4363117 - DNA, 25 bp, Homo sapien
caaagctggcaacatcttgcagttg

SEQ ID NO: 4363118 - DNA, 25 bp, Homo sapien
agtgaattaatctttaggaaactca

SEQ ID NO: 4363119 - DNA, 25 bp, Homo sapien
gtgaattaatctttaggaaactcat

SEQ ID NO: 4363120 - DNA, 25 bp, Homo sapien
acctgatttgcatagtggaaaaagc

SEQ ID NO: 4363121 - DNA, 25 bp, Homo sapien
tgaaactgaaggcaactagtacctc

SEQ ID NO: 4363122 - DNA, 25 bp, Homo sapien
gagtatgaatgactatactacctga

SEQ ID NO: 4363123 - DNA, 25 bp, Homo sapien
tgctgtgttaaggatggctaatcaa

SEQ ID NO: 4363124 - DNA, 25 bp, Homo sapien
tcttatagctgacagccaaaatgaa

SEQ ID NO: 4363125 - DNA, 25 bp, Homo sapien
gccaaaatgaatgtttgcctcagtg

SEQ ID NO: 4363126 - DNA, 25 bp, Homo sapien
ttccaagttcttatagctgacagcc

SEQ ID NO: 4363127 - DNA, 25 bp, Homo sapien
tgaatgtttgcctcagtgctggcac

SEQ ID NO: 4363128 - DNA, 25 bp, Homo sapien
gtagattgctctgggcaatatgacc

SEQ ID NO: 4363129 - DNA, 25 bp, Homo sapien
gaaaagcctgaccaggaacagtggt

SEQ ID NO: 4363130 - DNA, 25 bp, Homo sapien
agaaaagcctgaccaggaacagtgg

SEQ ID NO: 4363131 - DNA, 25 bp, Homo sapien
tctgtgtccctcaccaacttgcttc

SEQ ID NO: 4363132 - DNA, 25 bp, Homo sapien
agctgtcgtaactgtgctctgtgtc

SEQ ID NO: 4363133 - DNA, 25 bp, Homo sapien
ctagctgtcgtaactgtgctctgtg

SEQ ID NO: 4363134 - DNA, 25 bp, Homo sapien
gacaccagaccaaagccaaacagct

SEQ ID NO: 4363135 - DNA, 25 bp, Homo sapien
ttcgcaacgcaatccctgacgcaga

SEQ ID NO: 4363136 - DNA, 25 bp, Homo sapien
tgggcttgcttctcgcgcccctgtg

SEQ ID NO: 4363137 - DNA, 25 bp, Homo sapien
ctgacgcagacttcgctccagatcg

SEQ ID NO: 4363138 - DNA, 25 bp, Homo sapien
ttcgctccagatcgccctgggcttg

SEQ ID NO: 4363139 - DNA, 25 bp, Homo sapien
gaggcgtaactctggagcctgaccc

SEQ ID NO: 4363140 - DNA, 25 bp, Homo sapien
gaccctgcggtgatcagaggcgtaa

SEQ ID NO: 4363141 - DNA, 25 bp, Homo sapien
ttccggagaacgtgaccctcagtct

SEQ ID NO: 4363142 - DNA, 25 bp, Homo sapien
gaccccatcattcttccggagaacg

SEQ ID NO: 4363143 - DNA, 25 bp, Homo sapien
tacggcatagagagcgtcctgagca

SEQ ID NO: 4363144 - DNA, 25 bp, Homo sapien
agctggctcaccacagggaactacg

SEQ ID NO: 4363145 - DNA, 25 bp, Homo sapien
gcgggaagcgtctgagctgcatcaa

SEQ ID NO: 4363146 - DNA, 25 bp, Homo sapien
tctgagctgcatcaagatcgctgcc

SEQ ID NO: 4363147 - DNA, 25 bp, Homo sapien
ctgtaaagggcatatagcacggcat

SEQ ID NO: 4363148 - DNA, 25 bp, Homo sapien
tgtaaagggcatatagcacggcatc

SEQ ID NO: 4363149 - DNA, 25 bp, Homo sapien
aaagggcatatagcacggcatccat

SEQ ID NO: 4363150 - DNA, 25 bp, Homo sapien
taaagggcatatagcacggcatcca

SEQ ID NO: 4363151 - DNA, 25 bp, Homo sapien
catagagtctgatcccaaggagaag

SEQ ID NO: 4363152 - DNA, 25 bp, Homo sapien
gggatcacgaagctgcgtgccccag

SEQ ID NO: 4363153 - DNA, 25 bp, Homo sapien
ggatcacgaagctgcgtgccccagt

SEQ ID NO: 4363154 - DNA, 25 bp, Homo sapien
caaagccatagagtctgatcccaag

SEQ ID NO: 4363155 - DNA, 25 bp, Homo sapien
tgaaggtgtctgcctttatgacact

SEQ ID NO: 4363156 - DNA, 25 bp, Homo sapien
ttgaaggtgtctgcctttatgacac

SEQ ID NO: 4363157 - DNA, 25 bp, Homo sapien
tattgaaggtgtctgcctttatgac

SEQ ID NO: 4363158 - DNA, 25 bp, Homo sapien
cttattgaaggtgtctgcctttatg

SEQ ID NO: 4363159 - DNA, 25 bp, Homo sapien
gattttaggtatgtggcttcaacac

SEQ ID NO: 4363160 - DNA, 25 bp, Homo sapien
gaataccgataaaattatagtattg

SEQ ID NO: 4363161 - DNA, 25 bp, Homo sapien
tcatggataatttgaataccgataa

SEQ ID NO: 4363162 - DNA, 25 bp, Homo sapien
tatagtattgattgtcatcaggaga

SEQ ID NO: 4363163 - DNA, 25 bp, Homo sapien
tgtaaatttgcactatcagttcaga

SEQ ID NO: 4363164 - DNA, 25 bp, Homo sapien
gctcatcctagattcataaatgcac

SEQ ID NO: 4363165 - DNA, 25 bp, Homo sapien
attttggcttataatcagaagttct

SEQ ID NO: 4363166 - DNA, 25 bp, Homo sapien
tctcattcttacaggatagcagctg

SEQ ID NO: 4363167 - DNA, 25 bp, Homo sapien
cctggtttccttgcagcagtgtgtt

SEQ ID NO: 4363168 - DNA, 25 bp, Homo sapien
gcctggtttccttgcagcagtgtgt

SEQ ID NO: 4363169 - DNA, 25 bp, Homo sapien
cgtccacaagctgaacatcattttc

SEQ ID NO: 4363170 - DNA, 25 bp, Homo sapien
atcgtccacaagctgaacatcattt

SEQ ID NO: 4363171 - DNA, 25 bp, Homo sapien
gaatcgtccacaagctgaacatcat

SEQ ID NO: 4363172 - DNA, 25 bp, Homo sapien
cagaatcgtccacaagctgaacatc

SEQ ID NO: 4363173 - DNA, 25 bp, Homo sapien
aaaacctaggaactgtgagctcatg

SEQ ID NO: 4363174 - DNA, 25 bp, Homo sapien
gcagcatctgaacgtatgatcaggg

SEQ ID NO: 4363175 - DNA, 25 bp, Homo sapien
cagggttctgtaccaagtgttcaca

SEQ ID NO: 4363176 - DNA, 25 bp, Homo sapien
tgttcacatgccgataaaaatcccc

SEQ ID NO: 4363177 - DNA, 25 bp, Homo sapien
atagcccagaggtcctttatttatt

SEQ ID NO: 4363178 - DNA, 25 bp, Homo sapien
tatagcccagaggtcctttatttat

SEQ ID NO: 4363179 - DNA, 25 bp, Homo sapien
ttatagcccagaggtcctttattta

SEQ ID NO: 4363180 - DNA, 25 bp, Homo sapien
ggagcaggctggaactttagttgaa

SEQ ID NO: 4363181 - DNA, 25 bp, Homo sapien
gtggagcaggctggaactttagttg

SEQ ID NO: 4363182 - DNA, 25 bp, Homo sapien
caggctggaactttagttgaaccca

SEQ ID NO: 4363183 - DNA, 25 bp, Homo sapien
agcaggctggaactttagttgaacc

SEQ ID NO: 4363184 - DNA, 25 bp, Homo sapien
ggaagctatctcggctcttagagtg

SEQ ID NO: 4363185 - DNA, 25 bp, Homo sapien
tcaggaagctatctcggctcttaga

SEQ ID NO: 4363186 - DNA, 25 bp, Homo sapien
catttcaggaagctatctcggctct

SEQ ID NO: 4363187 - DNA, 25 bp, Homo sapien
gcatttcaggaagctatctcggctc

SEQ ID NO: 4363188 - DNA, 25 bp, Homo sapien
catatacgtcgccaaaggaacagct

SEQ ID NO: 4363189 - DNA, 25 bp, Homo sapien
gcatatacgtcgccaaaggaacagc

SEQ ID NO: 4363190 - DNA, 25 bp, Homo sapien
tacgtcgccaaaggaacagctccat

SEQ ID NO: 4363191 - DNA, 25 bp, Homo sapien
tatacgtcgccaaaggaacagctcc

SEQ ID NO: 4363192 - DNA, 25 bp, Homo sapien
gatgaattgttcaggccctaaggag

SEQ ID NO: 4363193 - DNA, 25 bp, Homo sapien
aaggaggttgccaccagtgctccag

SEQ ID NO: 4363194 - DNA, 25 bp, Homo sapien
cagaagatttcactagtaataattc

SEQ ID NO: 4363195 - DNA, 25 bp, Homo sapien
tctttctttgtaacaattcagcata

SEQ ID NO: 4363196 - DNA, 25 bp, Homo sapien
gtcctcgctatgagatttcccacca

SEQ ID NO: 4363197 - DNA, 25 bp, Homo sapien
cattgatgcaattataatgtcctcg

SEQ ID NO: 4363198 - DNA, 25 bp, Homo sapien
ttccctgggtatgcacattgatgca

SEQ ID NO: 4363199 - DNA, 25 bp, Homo sapien
gggcagttccctgggtatgcacatt

SEQ ID NO: 4363200 - DNA, 25 bp, Homo sapien
tggtcagtaagacaggcttggattt

SEQ ID NO: 4363201 - DNA, 25 bp, Homo sapien
gtttgctccaggatggtcagtaaga

SEQ ID NO: 4363202 - DNA, 25 bp, Homo sapien
aagacaggcttggattttctaatgg

SEQ ID NO: 4363203 - DNA, 25 bp, Homo sapien
atgtttgctccaggatggtcagtaa

SEQ ID NO: 4363204 - DNA, 25 bp, Homo sapien
cacagctccacaggatttctcacat

SEQ ID NO: 4363205 - DNA, 25 bp, Homo sapien
tttctggttcagctgctctccacag

SEQ ID NO: 4363206 - DNA, 25 bp, Homo sapien
catcaaattccctgtttctggttca

SEQ ID NO: 4363207 - DNA, 25 bp, Homo sapien
caatgaaggaactgaaagacaaaag

SEQ ID NO: 4363208 - DNA, 25 bp, Homo sapien
ccgaatcattagaccggcgagaggt

SEQ ID NO: 4363209 - DNA, 25 bp, Homo sapien
cttagtgtgcttatattgctcgggc

SEQ ID NO: 4363210 - DNA, 25 bp, Homo sapien
gggcagcatcctcccctttgggtag

SEQ ID NO: 4363211 - DNA, 25 bp, Homo sapien
gcaaaaaccaagcagtgtggccgaa

SEQ ID NO: 4363212 - DNA, 25 bp, Homo sapien
tgtagttctttcgtgcatcctgcca

SEQ ID NO: 4363213 - DNA, 25 bp, Homo sapien
gaagaggtactttaggtcaactgca

SEQ ID NO: 4363214 - DNA, 25 bp, Homo sapien
gcattgttttcctgcagcctataga

SEQ ID NO: 4363215 - DNA, 25 bp, Homo sapien
tttggcagaccgattgaagaggtac

SEQ ID NO: 4363216 - DNA, 25 bp, Homo sapien
cacaccattgtaacaatcttgcatc

SEQ ID NO: 4363217 - DNA, 25 bp, Homo sapien
ccattgtaacaatcttgcatctgca

SEQ ID NO: 4363218 - DNA, 25 bp, Homo sapien
tcagatactgtcaatcacaccattg

SEQ ID NO: 4363219 - DNA, 25 bp, Homo sapien
cagatactgtcaatcacaccattgt

SEQ ID NO: 4363220 - DNA, 25 bp, Homo sapien
taaatatctagaaacctcattgctg

SEQ ID NO: 4363221 - DNA, 25 bp, Homo sapien
ttaggtctaaatatctagaaacctc

SEQ ID NO: 4363222 - DNA, 25 bp, Homo sapien
tagaaacctcattgctgctacatgc

SEQ ID NO: 4363223 - DNA, 25 bp, Homo sapien
tgctgctacatgcatgctctaccat

SEQ ID NO: 4363224 - DNA, 25 bp, Homo sapien
tcctttcaaaataaatgcgctgctc

SEQ ID NO: 4363225 - DNA, 25 bp, Homo sapien
ctttttttctacatcctgaagcaca

SEQ ID NO: 4363226 - DNA, 25 bp, Homo sapien
tctacatcctgaagcacattttctc

SEQ ID NO: 4363227 - DNA, 25 bp, Homo sapien
ctttgcctggaagtaccaaactata

SEQ ID NO: 4363228 - DNA, 25 bp, Homo sapien
acttagccacagacaaagctctagg

SEQ ID NO: 4363229 - DNA, 25 bp, Homo sapien
gacaaagctctaggttcctctttta

SEQ ID NO: 4363230 - DNA, 25 bp, Homo sapien
ctttgaatggacttagccacagaca

SEQ ID NO: 4363231 - DNA, 25 bp, Homo sapien
cacagacaaagctctaggttcctct

SEQ ID NO: 4363232 - DNA, 25 bp, Homo sapien
cattttaggacttatgtgagctgga

SEQ ID NO: 4363233 - DNA, 25 bp, Homo sapien
catatgttggcagttcaaaagaaga

SEQ ID NO: 4363234 - DNA, 25 bp, Homo sapien
tctgccacctacaaggaaaatctgg

SEQ ID NO: 4363235 - DNA, 25 bp, Homo sapien
tatgatagttaaaagggaaagccag

SEQ ID NO: 4363236 - DNA, 25 bp, Homo sapien
accaaggattgcatatacatggtgg

SEQ ID NO: 4363237 - DNA, 25 bp, Homo sapien
catttcagtcaaccaaggattgcat

SEQ ID NO: 4363238 - DNA, 25 bp, Homo sapien
aggattgcatatacatggtggtccc

SEQ ID NO: 4363239 - DNA, 25 bp, Homo sapien
cagtcaaccaaggattgcatataca

SEQ ID NO: 4363240 - DNA, 25 bp, Homo sapien
cacaggatggtgttcggtgcgtatg

SEQ ID NO: 4363241 - DNA, 25 bp, Homo sapien
gctgttggttgaaccatcattcagg

SEQ ID NO: 4363242 - DNA, 25 bp, Homo sapien
ggtgcgtatggcttttccagacaca

SEQ ID NO: 4363243 - DNA, 25 bp, Homo sapien
tccacccttgcagcagatttctacc

SEQ ID NO: 4363244 - DNA, 25 bp, Homo sapien
gaaaattgccctcataatataaatc

SEQ ID NO: 4363245 - DNA, 25 bp, Homo sapien
aatttgaaaattgccctcataatat

SEQ ID NO: 4363246 - DNA, 25 bp, Homo sapien
tgacaattgccttcagtcaatagtc

SEQ ID NO: 4363247 - DNA, 25 bp, Homo sapien
tcaatagtctaagcagaaatttgaa

SEQ ID NO: 4363248 - DNA, 25 bp, Homo sapien
tatcagcagtacaatacagttgccc

SEQ ID NO: 4363249 - DNA, 25 bp, Homo sapien
taataggaggctaaggctgacaacc

SEQ ID NO: 4363250 - DNA, 25 bp, Homo sapien
taataggtctaggtagggtcacaac

SEQ ID NO: 4363251 - DNA, 25 bp, Homo sapien
ttaaatcaacgtggtatgaccgcgg

SEQ ID NO: 4363252 - DNA, 25 bp, Homo sapien
tgaacagagtcctacaggtccataa

SEQ ID NO: 4363253 - DNA, 25 bp, Homo sapien
tcagattgggcaattcacttaccaa

SEQ ID NO: 4363254 - DNA, 25 bp, Homo sapien
ggacttcacaagaacctcaagagag

SEQ ID NO: 4363255 - DNA, 25 bp, Homo sapien
catttttaagaccagactgaataga

SEQ ID NO: 4363256 - DNA, 25 bp, Homo sapien
gtacatatcaaagctacactttcct

SEQ ID NO: 4363257 - DNA, 25 bp, Homo sapien
ccaatgggcaatcgaatctgtaact

SEQ ID NO: 4363258 - DNA, 25 bp, Homo sapien
gggtaacaacactagttccagagtc

SEQ ID NO: 4363259 - DNA, 25 bp, Homo sapien
atgggcaatcgaatctgtaactggg

SEQ ID NO: 4363260 - DNA, 25 bp, Homo sapien
tctgggtatatatcaagcactggaa

SEQ ID NO: 4363261 - DNA, 25 bp, Homo sapien
gcagatattgcttcggcacactgat

SEQ ID NO: 4363262 - DNA, 25 bp, Homo sapien
ggctgtctccaaatcttacctattg

SEQ ID NO: 4363263 - DNA, 25 bp, Homo sapien
caacagcagtggtcccaatgtggag

SEQ ID NO: 4363264 - DNA, 25 bp, Homo sapien
gatgaacagtgatgttgcgtacatt

SEQ ID NO: 4363265 - DNA, 25 bp, Homo sapien
taagacattctaattagggtgagat

SEQ ID NO: 4363266 - DNA, 25 bp, Homo sapien
taaagttcacaaatccctagcctgt

SEQ ID NO: 4363267 - DNA, 25 bp, Homo sapien
ggcttgctattctaaaagaccacaa

SEQ ID NO: 4363268 - DNA, 25 bp, Homo sapien
gactacatgtgcttaaactacgcgg

SEQ ID NO: 4363269 - DNA, 25 bp, Homo sapien
aactacgcgggctcatgtgtatgcc

SEQ ID NO: 4363270 - DNA, 25 bp, Homo sapien
tactcagcgcgaagacaacaaggat

SEQ ID NO: 4363271 - DNA, 25 bp, Homo sapien
gatcagtgcctctaacgcccatatt

SEQ ID NO: 4363272 - DNA, 25 bp, Homo sapien
catcaacatatccttggtgcctgga

SEQ ID NO: 4363273 - DNA, 25 bp, Homo sapien
ggtattaagtgtcgccaaagaagag

SEQ ID NO: 4363274 - DNA, 25 bp, Homo sapien
ggcatctacatcataccaggtgtta

SEQ ID NO: 4363275 - DNA, 25 bp, Homo sapien
gcttgcactggtaggaacgaaccga

SEQ ID NO: 4363276 - DNA, 25 bp, Homo sapien
gagggaagttaacatagacactcag

SEQ ID NO: 4363277 - DNA, 25 bp, Homo sapien
taaggagcgagacaaagggcaaaac

SEQ ID NO: 4363278 - DNA, 25 bp, Homo sapien
gttttcaactgtatacgctcctcgg

SEQ ID NO: 4363279 - DNA, 25 bp, Homo sapien
gaagaagcaaggctcaacaactttg

SEQ ID NO: 4363280 - DNA, 25 bp, Homo sapien
tttggcccaaagtgaagttgttctg

SEQ ID NO: 4363281 - DNA, 25 bp, Homo sapien
tctgtgttttaaggctcagagcaga

SEQ ID NO: 4363282 - DNA, 25 bp, Homo sapien
cgtgttcatgccagtcattcatcca

SEQ ID NO: 4363283 - DNA, 25 bp, Homo sapien
agccacaacttcaaagacgtgttca

SEQ ID NO: 4363284 - DNA, 25 bp, Homo sapien
gtctcccaggatgcatgaagctcca

SEQ ID NO: 4363285 - DNA, 25 bp, Homo sapien
aagctccagccttttcgtggtgact

SEQ ID NO: 4363286 - DNA, 25 bp, Homo sapien
catgcaaatgtgtgagtctcccagg

SEQ ID NO: 4363287 - DNA, 25 bp, Homo sapien
gacactgcaatgtatcttgttccat

SEQ ID NO: 4363288 - DNA, 25 bp, Homo sapien
caaagtccttttcataatgatatat

SEQ ID NO: 4363289 - DNA, 25 bp, Homo sapien
ggcaaagtccttttcataatgatat

SEQ ID NO: 4363290 - DNA, 25 bp, Homo sapien
agtccttttcataatgatatatttc

SEQ ID NO: 4363291 - DNA, 25 bp, Homo sapien
ctaaggcaaagtccttttcataatg

SEQ ID NO: 4363292 - DNA, 25 bp, Homo sapien
atgaggacgaagagaacgctgtcgt

SEQ ID NO: 4363293 - DNA, 25 bp, Homo sapien
ctacaaaattcagtagtgcaaatcc

SEQ ID NO: 4363294 - DNA, 25 bp, Homo sapien
cccacgttattaagtgcaatgttta

SEQ ID NO: 4363295 - DNA, 25 bp, Homo sapien
aagtcttctcccacgttattaagtg

SEQ ID NO: 4363296 - DNA, 25 bp, Homo sapien
tataatagcctgcaaagaccttcag

SEQ ID NO: 4363297 - DNA, 25 bp, Homo sapien
gaactcccggataaaatgaagccat

SEQ ID NO: 4363298 - DNA, 25 bp, Homo sapien
catgtggatatcatcagttgggaca

SEQ ID NO: 4363299 - DNA, 25 bp, Homo sapien
tgtaactggtgcaatgaactcccgg

SEQ ID NO: 4363300 - DNA, 25 bp, Homo sapien
ttcttctaccaattcatcacaggct

SEQ ID NO: 4363301 - DNA, 25 bp, Homo sapien
catttcttctaccaattcatcacag

SEQ ID NO: 4363302 - DNA, 25 bp, Homo sapien
ttcccccagaccatttgccgtaatg

SEQ ID NO: 4363303 - DNA, 25 bp, Homo sapien
gaccatttgccgtaatgttccattt

SEQ ID NO: 4363304 - DNA, 25 bp, Homo sapien
tttgaataatcacggtttatatact

SEQ ID NO: 4363305 - DNA, 25 bp, Homo sapien
tgaataatcacggtttatatacttt

SEQ ID NO: 4363306 - DNA, 25 bp, Homo sapien
ttgaataatcacggtttatatactt

SEQ ID NO: 4363307 - DNA, 25 bp, Homo sapien
atgattatgtatagtggacaaaata

SEQ ID NO: 4363308 - DNA, 25 bp, Homo sapien
aatgattatgtatagtggacaaaat

SEQ ID NO: 4363309 - DNA, 25 bp, Homo sapien
aaatgattatgtatagtggacaaaa

SEQ ID NO: 4363310 - DNA, 25 bp, Homo sapien
tacttcactgaaaagtataaagcat

SEQ ID NO: 4363311 - DNA, 25 bp, Homo sapien
gaccaacaacgtacaagcattccct

SEQ ID NO: 4363312 - DNA, 25 bp, Homo sapien
taaggtttagggtatgactgatccc

SEQ ID NO: 4363313 - DNA, 25 bp, Homo sapien
gagcacagtacccattagttggttt

SEQ ID NO: 4363314 - DNA, 25 bp, Homo sapien
tcactcctctagtgatccccagggt

SEQ ID NO: 4363315 - DNA, 25 bp, Homo sapien
taatgggaagtattgtaattagcag

SEQ ID NO: 4363316 - DNA, 25 bp, Homo sapien
gccttccaaattcatgtctattaga

SEQ ID NO: 4363317 - DNA, 25 bp, Homo sapien
tagcagtggataatagccttccaaa

SEQ ID NO: 4363318 - DNA, 25 bp, Homo sapien
aaatctgccagaggtcattgttata

SEQ ID NO: 4363319 - DNA, 25 bp, Homo sapien
ccaagctaaatgcaaataaggccct

SEQ ID NO: 4363320 - DNA, 25 bp, Homo sapien
taaaggctaacacgcaaatgagtca

SEQ ID NO: 4363321 - DNA, 25 bp, Homo sapien
gtttaactttgtcacctgtcagcca

SEQ ID NO: 4363322 - DNA, 25 bp, Homo sapien
gttgactatcacacaagacccatgc

SEQ ID NO: 4363323 - DNA, 25 bp, Homo sapien
gctgagcatttggaatgtttccgga

SEQ ID NO: 4363324 - DNA, 25 bp, Homo sapien
gcatttggaatgtttccggagtagg

SEQ ID NO: 4363325 - DNA, 25 bp, Homo sapien
catttggaatgtttccggagtaggg

SEQ ID NO: 4363326 - DNA, 25 bp, Homo sapien
gagcatttggaatgtttccggagta

SEQ ID NO: 4363327 - DNA, 25 bp, Homo sapien
tcggaaataaaatagccccatcatt

SEQ ID NO: 4363328 - DNA, 25 bp, Homo sapien
gggtcaaacataagtctaagctcat

SEQ ID NO: 4363329 - DNA, 25 bp, Homo sapien
gatgcgctgttgagtcaaattagcc

SEQ ID NO: 4363330 - DNA, 25 bp, Homo sapien
taagagaggccattccatgatgcgc

SEQ ID NO: 4363331 - DNA, 25 bp, Homo sapien
tcggcaaagagccatatcaggatcc

SEQ ID NO: 4363332 - DNA, 25 bp, Homo sapien
caggatccagtttatcacgaacaaa

SEQ ID NO: 4363333 - DNA, 25 bp, Homo sapien
taagtacacattagccatatatggg

SEQ ID NO: 4363334 - DNA, 25 bp, Homo sapien
tctctgatcggagtgtctttccttt

SEQ ID NO: 4363335 - DNA, 25 bp, Homo sapien
cttcagatcgtgcatagtatccatc

SEQ ID NO: 4363336 - DNA, 25 bp, Homo sapien
gtatccatcaggactcaatgctccc

SEQ ID NO: 4363337 - DNA, 25 bp, Homo sapien
tgacgagttacaagaggagcaatga

SEQ ID NO: 4363338 - DNA, 25 bp, Homo sapien
acagctttccatgacgagttacaag

SEQ ID NO: 4363339 - DNA, 25 bp, Homo sapien
gcatccacactaaagtaataatcac

SEQ ID NO: 4363340 - DNA, 25 bp, Homo sapien
cacacttttcatcctgacggcaaaa

SEQ ID NO: 4363341 - DNA, 25 bp, Homo sapien
aacaacatctgcatccacactaaag

SEQ ID NO: 4363342 - DNA, 25 bp, Homo sapien
taaagtccttggatttgtcaaaaca

SEQ ID NO: 4363343 - DNA, 25 bp, Homo sapien
gatcaaaatagtggaacaatatctg

SEQ ID NO: 4363344 - DNA, 25 bp, Homo sapien
cagggagctcacctctaaaatttta

SEQ ID NO: 4363345 - DNA, 25 bp, Homo sapien
tgcaacttacatatcccacaactca

SEQ ID NO: 4363346 - DNA, 25 bp, Homo sapien
tttaacacggatattcacagggagc

SEQ ID NO: 4363347 - DNA, 25 bp, Homo sapien
gctttccctggtacagtttgtaaca

SEQ ID NO: 4363348 - DNA, 25 bp, Homo sapien
cctggtacagtttgtaacattatca

SEQ ID NO: 4363349 - DNA, 25 bp, Homo sapien
tttgctttccctggtacagtttgta

SEQ ID NO: 4363350 - DNA, 25 bp, Homo sapien
ttccctggtacagtttgtaacatta

SEQ ID NO: 4363351 - DNA, 25 bp, Homo sapien
ttccctctgggctcccctccctcac

SEQ ID NO: 4363352 - DNA, 25 bp, Homo sapien
ttgggttatcaacttccctctgggc

SEQ ID NO: 4363353 - DNA, 25 bp, Homo sapien
tcaacttccctctgggctcccctcc

SEQ ID NO: 4363354 - DNA, 25 bp, Homo sapien
tgggttatcaacttccctctgggct

SEQ ID NO: 4363355 - DNA, 25 bp, Homo sapien
tttgctgttgtcagtgtgtgtctcc

SEQ ID NO: 4363356 - DNA, 25 bp, Homo sapien
tgtcggtcccagtcagcactttttg

SEQ ID NO: 4363357 - DNA, 25 bp, Homo sapien
tcccagtcagcactttttgctgttg

SEQ ID NO: 4363358 - DNA, 25 bp, Homo sapien
ttttgctgttgtcagtgtgtgtctc

SEQ ID NO: 4363359 - DNA, 25 bp, Homo sapien
gactaactggagagtaagagcacct

SEQ ID NO: 4363360 - DNA, 25 bp, Homo sapien
gcattaacagggctaaacaaaaggc

SEQ ID NO: 4363361 - DNA, 25 bp, Homo sapien
caaaataccagacagaagcactagg

SEQ ID NO: 4363362 - DNA, 25 bp, Homo sapien
tgattaaatatgtggactcgtagcc

SEQ ID NO: 4363363 - DNA, 25 bp, Homo sapien
tgatttcatgcttagctttatcaaa

SEQ ID NO: 4363364 - DNA, 25 bp, Homo sapien
ttcccatgtttctggcttccgcttg

SEQ ID NO: 4363365 - DNA, 25 bp, Homo sapien
tggcttccgcttgacttagattttc

SEQ ID NO: 4363366 - DNA, 25 bp, Homo sapien
aaataccttgatgtccttttcatga

SEQ ID NO: 4363367 - DNA, 25 bp, Homo sapien
aatccagtgtcaacaatatgtccag

SEQ ID NO: 4363368 - DNA, 25 bp, Homo sapien
atgtccagaaaccgaggtagaaaag

SEQ ID NO: 4363369 - DNA, 25 bp, Homo sapien
aagtgcttcttttgggtaatccagt

SEQ ID NO: 4363370 - DNA, 25 bp, Homo sapien
cacctattgatacgtttggatggac

SEQ ID NO: 4363371 - DNA, 25 bp, Homo sapien
ccatgaattgggtacatagtttcca

SEQ ID NO: 4363372 - DNA, 25 bp, Homo sapien
ctgcagacaagtcgactgtatcgaa

SEQ ID NO: 4363373 - DNA, 25 bp, Homo sapien
aaagagtgcagccattatcctgtgt

SEQ ID NO: 4363374 - DNA, 25 bp, Homo sapien
gactgtatcgaattcacaaagagtg

SEQ ID NO: 4363375 - DNA, 25 bp, Homo sapien
aaaatgtattcttagctctggcttt

SEQ ID NO: 4363376 - DNA, 25 bp, Homo sapien
aattgccactggtaatgtttcataa

SEQ ID NO: 4363377 - DNA, 25 bp, Homo sapien
cttggtgggtccatttccattaatt

SEQ ID NO: 4363378 - DNA, 25 bp, Homo sapien
catttccattaattgccactggtaa

SEQ ID NO: 4363379 - DNA, 25 bp, Homo sapien
gtttgtatacgtaagcaatccggta

SEQ ID NO: 4363380 - DNA, 25 bp, Homo sapien
gcaatccggtatttaggaagcatac

SEQ ID NO: 4363381 - DNA, 25 bp, Homo sapien
tacgtaagcaatccggtatttagga

SEQ ID NO: 4363382 - DNA, 25 bp, Homo sapien
tgtttgtttgtatacgtaagcaatc

SEQ ID NO: 4363383 - DNA, 25 bp, Homo sapien
tgtgatccaatgtgatgttaatagc

SEQ ID NO: 4363384 - DNA, 25 bp, Homo sapien
gatccaatgtgatgttaatagcttc

SEQ ID NO: 4363385 - DNA, 25 bp, Homo sapien
gcatttgtgatccaatgtgatgtta

SEQ ID NO: 4363386 - DNA, 25 bp, Homo sapien
catttgtgatccaatgtgatgttaa

SEQ ID NO: 4363387 - DNA, 25 bp, Homo sapien
cttatatcttaagtgtctaatcaaa

SEQ ID NO: 4363388 - DNA, 25 bp, Homo sapien
gctttactgtactccagagtttcac

SEQ ID NO: 4363389 - DNA, 25 bp, Homo sapien
aactgcgatagttgcaactcattgc

SEQ ID NO: 4363390 - DNA, 25 bp, Homo sapien
tgtttcctaatgacagcaactacaa

SEQ ID NO: 4363391 - DNA, 25 bp, Homo sapien
caatgaccagggcttttggcttcaa

SEQ ID NO: 4363392 - DNA, 25 bp, Homo sapien
aacacccataatctccaggctccaa

SEQ ID NO: 4363393 - DNA, 25 bp, Homo sapien
gaacaatgaccagggcttttggctt

SEQ ID NO: 4363394 - DNA, 25 bp, Homo sapien
cacttgaacaatgaccagggctttt

SEQ ID NO: 4363395 - DNA, 25 bp, Homo sapien
ccattgttgaactatacggttgaca

SEQ ID NO: 4363396 - DNA, 25 bp, Homo sapien
tagtgtaaaagagctgatcatcatc

SEQ ID NO: 4363397 - DNA, 25 bp, Homo sapien
gacatatggagcatagccaataaat

SEQ ID NO: 4363398 - DNA, 25 bp, Homo sapien
tgtaaactttagtgtaaaagagctg

SEQ ID NO: 4363399 - DNA, 25 bp, Homo sapien
tgcaaagaccactttgtggtttgcc

SEQ ID NO: 4363400 - DNA, 25 bp, Homo sapien
tctgctagtcttttatctggccaca

SEQ ID NO: 4363401 - DNA, 25 bp, Homo sapien
tgtgcacaacaggatacttgtctgc

SEQ ID NO: 4363402 - DNA, 25 bp, Homo sapien
tcctgaattcagatagcgtttccca

SEQ ID NO: 4363403 - DNA, 25 bp, Homo sapien
taaaataagtgcgttcagacaactg

SEQ ID NO: 4363404 - DNA, 25 bp, Homo sapien
caatgcaagattaatacctgtgcca

SEQ ID NO: 4363405 - DNA, 25 bp, Homo sapien
gatagaatcatttacggaagttgcc

SEQ ID NO: 4363406 - DNA, 25 bp, Homo sapien
cagacaactgcaggtttttaaagct

SEQ ID NO: 4363407 - DNA, 25 bp, Homo sapien
gcatagtgttccatgacttctttca

SEQ ID NO: 4363408 - DNA, 25 bp, Homo sapien
ttgatcagcatagtgttccatgact

SEQ ID NO: 4363409 - DNA, 25 bp, Homo sapien
accagatcatcttgatcagcatagt

SEQ ID NO: 4363410 - DNA, 25 bp, Homo sapien
tctggccccctccaatactattaat

SEQ ID NO: 4363411 - DNA, 25 bp, Homo sapien
agacttggctgacagatccttcttt

SEQ ID NO: 4363412 - DNA, 25 bp, Homo sapien
gaaaagacttggctgacagatcctt

SEQ ID NO: 4363413 - DNA, 25 bp, Homo sapien
aaagacttggctgacagatccttct

SEQ ID NO: 4363414 - DNA, 25 bp, Homo sapien
agaaaagacttggctgacagatcct

SEQ ID NO: 4363415 - DNA, 25 bp, Homo sapien
gatggaatccatcactttcttttgt

SEQ ID NO: 4363416 - DNA, 25 bp, Homo sapien
actgcataaatcgatggaatccatc

SEQ ID NO: 4363417 - DNA, 25 bp, Homo sapien
aatatttggctgactgcataaatcg

SEQ ID NO: 4363418 - DNA, 25 bp, Homo sapien
tgttgctacagttatgactaataat

SEQ ID NO: 4363419 - DNA, 25 bp, Homo sapien
tataaagttaacagcaaggatttca

SEQ ID NO: 4363420 - DNA, 25 bp, Homo sapien
gtataaagttaacagcaaggatttc

SEQ ID NO: 4363421 - DNA, 25 bp, Homo sapien
cagtataaagttaacagcaaggatt

SEQ ID NO: 4363422 - DNA, 25 bp, Homo sapien
ccagtataaagttaacagcaaggat

SEQ ID NO: 4363423 - DNA, 25 bp, Homo sapien
aaacatttgtagttgtctggctggc

SEQ ID NO: 4363424 - DNA, 25 bp, Homo sapien
ggcaaagtaaagcttaaatcccagc

SEQ ID NO: 4363425 - DNA, 25 bp, Homo sapien
gccagaattggcctaagggtcataa

SEQ ID NO: 4363426 - DNA, 25 bp, Homo sapien
ccatatggatctgaaggcaaagtaa

SEQ ID NO: 4363427 - DNA, 25 bp, Homo sapien
acatctaaatctacagagctgttta

SEQ ID NO: 4363428 - DNA, 25 bp, Homo sapien
caatgatagggtacttccccagaac

SEQ ID NO: 4363429 - DNA, 25 bp, Homo sapien
catattttccaatgatagggtactt

SEQ ID NO: 4363430 - DNA, 25 bp, Homo sapien
tccccagaacatctaaatctacaga

SEQ ID NO: 4363431 - DNA, 25 bp, Homo sapien
agctgcaggaaaggtgttggtgccc

SEQ ID NO: 4363432 - DNA, 25 bp, Homo sapien
gcctcgtccatcaaggataaatcca

SEQ ID NO: 4363433 - DNA, 25 bp, Homo sapien
ccatgccaactctcggaaaggaggg

SEQ ID NO: 4363434 - DNA, 25 bp, Homo sapien
taggtcacagaaggagtactgcctc

SEQ ID NO: 4363435 - DNA, 25 bp, Homo sapien
tgcaagtccaaaaggaaactccaac

SEQ ID NO: 4363436 - DNA, 25 bp, Homo sapien
ctgcaagtccaaaaggaaactccaa

SEQ ID NO: 4363437 - DNA, 25 bp, Homo sapien
cgggcacgctgagttcaccgagaac

SEQ ID NO: 4363438 - DNA, 25 bp, Homo sapien
caacgagggcgggtgcccctacact

SEQ ID NO: 4363439 - DNA, 25 bp, Homo sapien
ctgcagggaaattcgggcacgctga

SEQ ID NO: 4363440 - DNA, 25 bp, Homo sapien
cgagaactccaaggagtcaacgagg

SEQ ID NO: 4363441 - DNA, 25 bp, Homo sapien
tctccgagtccgcacccagacaggg

SEQ ID NO: 4363442 - DNA, 25 bp, Homo sapien
atgctcgagggcttctccgagtccg

SEQ ID NO: 4363443 - DNA, 25 bp, Homo sapien
ctccgagtccgcacccagacaggga

SEQ ID NO: 4363444 - DNA, 25 bp, Homo sapien
gggatgctcgagggcttctccgagt

SEQ ID NO: 4363445 - DNA, 25 bp, Homo sapien
gcagcgccgcgcttctcgcgagaac

SEQ ID NO: 4363446 - DNA, 25 bp, Homo sapien
ttctcgcgagaacgcagagacccgg

SEQ ID NO: 4363447 - DNA, 25 bp, Homo sapien
cgcgcttctcgcgagaacgcagaga

SEQ ID NO: 4363448 - DNA, 25 bp, Homo sapien
gagaacgcagagacccgggtccgcc

SEQ ID NO: 4363449 - DNA, 25 bp, Homo sapien
cctgggccccacgtctggactgttt

SEQ ID NO: 4363450 - DNA, 25 bp, Homo sapien
tggactgtttgctcagcgcggacgc

SEQ ID NO: 4363451 - DNA, 25 bp, Homo sapien
cgtaacgcagctgagtgaggtcgtc

SEQ ID NO: 4363452 - DNA, 25 bp, Homo sapien
ttaaggagctgcctgcggctacgtg

SEQ ID NO: 4363453 - DNA, 25 bp, Homo sapien
ggaagcctgcacttagctttgggag

SEQ ID NO: 4363454 - DNA, 25 bp, Homo sapien
gacttggatactccacccagtctga

SEQ ID NO: 4363455 - DNA, 25 bp, Homo sapien
cagcctcgaagggtgagaatttgct

SEQ ID NO: 4363456 - DNA, 25 bp, Homo sapien
gtgttcccgtctgggttcctctctg

SEQ ID NO: 4363457 - DNA, 25 bp, Homo sapien
atcttgtcattttttcccttcatgt

SEQ ID NO: 4363458 - DNA, 25 bp, Homo sapien
aaatcttgtcattttttcccttcat

SEQ ID NO: 4363459 - DNA, 25 bp, Homo sapien
agagccggactccaaatcttgtcat

SEQ ID NO: 4363460 - DNA, 25 bp, Homo sapien
agccggactccaaatcttgtcattt

SEQ ID NO: 4363461 - DNA, 25 bp, Homo sapien
catccttcagggtcagcaatcactg

SEQ ID NO: 4363462 - DNA, 25 bp, Homo sapien
tttgaccaaagttccacacgatgac

SEQ ID NO: 4363463 - DNA, 25 bp, Homo sapien
tcatccttcagggtcagcaatcact

SEQ ID NO: 4363464 - DNA, 25 bp, Homo sapien
tatgtttgaccaaagttccacacga

SEQ ID NO: 4363465 - DNA, 25 bp, Homo sapien
gctggttctgatcatccctattctg

SEQ ID NO: 4363466 - DNA, 25 bp, Homo sapien
tcagggtaaatgtgtccttaggtcc

SEQ ID NO: 4363467 - DNA, 25 bp, Homo sapien
tgctttttaggaagtgagacaattt

SEQ ID NO: 4363468 - DNA, 25 bp, Homo sapien
gaaaacgttcaggttagaatcttca

SEQ ID NO: 4363469 - DNA, 25 bp, Homo sapien
cagctaaatccaaattggaccagaa

SEQ ID NO: 4363470 - DNA, 25 bp, Homo sapien
cactggagtccacaagaagcaggaa

SEQ ID NO: 4363471 - DNA, 25 bp, Homo sapien
tagcagcaaaagatacacaccactt

SEQ ID NO: 4363472 - DNA, 25 bp, Homo sapien
tctaggaatcatatggcagctctgt

SEQ ID NO: 4363473 - DNA, 25 bp, Homo sapien
tacacctagctgaaaggaaatactg

SEQ ID NO: 4363474 - DNA, 25 bp, Homo sapien
gagagacaagcctctaccaggaacc

SEQ ID NO: 4363475 - DNA, 25 bp, Homo sapien
cattctgcaaacctattgttgccag

SEQ ID NO: 4363476 - DNA, 25 bp, Homo sapien
gaaagttacagagctatcattgaag

SEQ ID NO: 4363477 - DNA, 25 bp, Homo sapien
gaagtaaacgatataatctctccct

SEQ ID NO: 4363478 - DNA, 25 bp, Homo sapien
tataaattaaatccgaccttgaaca

SEQ ID NO: 4363479 - DNA, 25 bp, Homo sapien
agcaagggccttgaataaacctaat

SEQ ID NO: 4363480 - DNA, 25 bp, Homo sapien
ccttgaataaacctaataatcaata

SEQ ID NO: 4363481 - DNA, 25 bp, Homo sapien
gcaagggccttgaataaacctaata

SEQ ID NO: 4363482 - DNA, 25 bp, Homo sapien
gggccttgaataaacctaataatca

SEQ ID NO: 4363483 - DNA, 25 bp, Homo sapien
gaatacgaaaaagcatgaacgcaca

SEQ ID NO: 4363484 - DNA, 25 bp, Homo sapien
aagaatacgaaaaagcatgaacgca

SEQ ID NO: 4363485 - DNA, 25 bp, Homo sapien
aatacgaaaaagcatgaacgcacaa

SEQ ID NO: 4363486 - DNA, 25 bp, Homo sapien
taaagaatacgaaaaagcatgaacg

SEQ ID NO: 4363487 - DNA, 25 bp, Homo sapien
aatatcattaagaaacatagaaatc

SEQ ID NO: 4363488 - DNA, 25 bp, Homo sapien
atcaatccgatcaattttacacaac

SEQ ID NO: 4363489 - DNA, 25 bp, Homo sapien
ttttacacaacaaaatatcattaag

SEQ ID NO: 4363490 - DNA, 25 bp, Homo sapien
tttttaatcaatccgatcaatttta

SEQ ID NO: 4363491 - DNA, 25 bp, Homo sapien
gaactgtaggctaagaccctcatct

SEQ ID NO: 4363492 - DNA, 25 bp, Homo sapien
gcagcagcagaagaatacatcccat

SEQ ID NO: 4363493 - DNA, 25 bp, Homo sapien
gatgcagcaggttttggaatacagg

SEQ ID NO: 4363494 - DNA, 25 bp, Homo sapien
tagtctacttacgattgcaatggca

SEQ ID NO: 4363495 - DNA, 25 bp, Homo sapien
tattaagcagcggtggaatttgtcg

SEQ ID NO: 4363496 - DNA, 25 bp, Homo sapien
caagtagtaccttcttagtgcaaga

SEQ ID NO: 4363497 - DNA, 25 bp, Homo sapien
tagattgtgttcttgcaagcccact

SEQ ID NO: 4363498 - DNA, 25 bp, Homo sapien
tataaggcatctgtgaccaagagac

SEQ ID NO: 4363499 - DNA, 25 bp, Homo sapien
ttaaccatagttgatggcttgctgt

SEQ ID NO: 4363500 - DNA, 25 bp, Homo sapien
taaccatagttgatggcttgctgtg

SEQ ID NO: 4363501 - DNA, 25 bp, Homo sapien
atagttgatggcttgctgtgtctct

SEQ ID NO: 4363502 - DNA, 25 bp, Homo sapien
accatagttgatggcttgctgtgtc

SEQ ID NO: 4363503 - DNA, 25 bp, Homo sapien
gtggtggagatctttcaaaatacat

SEQ ID NO: 4363504 - DNA, 25 bp, Homo sapien
ggagatctttcaaaatacatgaagt

SEQ ID NO: 4363505 - DNA, 25 bp, Homo sapien
gttgtggtggagatctttcaaaata

SEQ ID NO: 4363506 - DNA, 25 bp, Homo sapien
gagatctttcaaaatacatgaagtc

SEQ ID NO: 4363507 - DNA, 25 bp, Homo sapien
taatactgccgatgttggatatgcc

SEQ ID NO: 4363508 - DNA, 25 bp, Homo sapien
attccacttccggataatactgccg

SEQ ID NO: 4363509 - DNA, 25 bp, Homo sapien
tggatatgccatcaagggatttgac

SEQ ID NO: 4363510 - DNA, 25 bp, Homo sapien
catccaggtctagtgggaagtgaat

SEQ ID NO: 4363511 - DNA, 25 bp, Homo sapien
cctcaatctactcacaataacttta

SEQ ID NO: 4363512 - DNA, 25 bp, Homo sapien
tgatgtcaactggttaattaactct

SEQ ID NO: 4363513 - DNA, 25 bp, Homo sapien
ccatggtctgttaatatgagtagga

SEQ ID NO: 4363514 - DNA, 25 bp, Homo sapien
agatctttccatggtctgttaatat

SEQ ID NO: 4363515 - DNA, 25 bp, Homo sapien
gcacaggttccaatgttccgcaaca

SEQ ID NO: 4363516 - DNA, 25 bp, Homo sapien
tcattttggatgctgtacaccgccc

SEQ ID NO: 4363517 - DNA, 25 bp, Homo sapien
ttgagcatggcccacgaactctcat

SEQ ID NO: 4363518 - DNA, 25 bp, Homo sapien
caaagccaatggtgacaccaggagg

SEQ ID NO: 4363519 - DNA, 25 bp, Homo sapien
gagtactatactatttgctaggaac

SEQ ID NO: 4363520 - DNA, 25 bp, Homo sapien
gcctactatatccaaaaggatcaag

SEQ ID NO: 4363521 - DNA, 25 bp, Homo sapien
aaaatgatcatcctatccgataggt

SEQ ID NO: 4363522 - DNA, 25 bp, Homo sapien
tgtgcagaagaattgacttaatccc

SEQ ID NO: 4363523 - DNA, 25 bp, Homo sapien
agagttagatcagaagcaagctgtg

SEQ ID NO: 4363524 - DNA, 25 bp, Homo sapien
agaagcaagctgtggatcagacttc

SEQ ID NO: 4363525 - DNA, 25 bp, Homo sapien
tacaatcagtgacccggaggacgaa

SEQ ID NO: 4363526 - DNA, 25 bp, Homo sapien
ggcattcctggtaaagtcatctgtg

SEQ ID NO: 4363527 - DNA, 25 bp, Homo sapien
gacgaagggccttagtgtccgatag

SEQ ID NO: 4363528 - DNA, 25 bp, Homo sapien
tgtcatgatttctcggcccatacaa

SEQ ID NO: 4363529 - DNA, 25 bp, Homo sapien
tcatatctattattagtttcaaaac

SEQ ID NO: 4363530 - DNA, 25 bp, Homo sapien
ctggtctgagttgtttttaatatca

SEQ ID NO: 4363531 - DNA, 25 bp, Homo sapien
tatctattattagtttcaaaacatg

SEQ ID NO: 4363532 - DNA, 25 bp, Homo sapien
ctattattagtttcaaaacatgtca

SEQ ID NO: 4363533 - DNA, 25 bp, Homo sapien
gctgaagaacatgtatgttgtccaa

SEQ ID NO: 4363534 - DNA, 25 bp, Homo sapien
aatgctgaagaacatgtatgttgtc

SEQ ID NO: 4363535 - DNA, 25 bp, Homo sapien
tttccagaggctcaaaatgctgaag

SEQ ID NO: 4363536 - DNA, 25 bp, Homo sapien
tccagaggctcaaaatgctgaagaa

SEQ ID NO: 4363537 - DNA, 25 bp, Homo sapien
aactggtgctagaagactagctttt

SEQ ID NO: 4363538 - DNA, 25 bp, Homo sapien
atgttcattggagtaatatcacttt

SEQ ID NO: 4363539 - DNA, 25 bp, Homo sapien
gcaattaggctcttttacttttcac

SEQ ID NO: 4363540 - DNA, 25 bp, Homo sapien
gttcattggagtaatatcactttca

SEQ ID NO: 4363541 - DNA, 25 bp, Homo sapien
gaaactggtatcactgttcttatag

SEQ ID NO: 4363542 - DNA, 25 bp, Homo sapien
actgttcttatagtttcacaaatgg

SEQ ID NO: 4363543 - DNA, 25 bp, Homo sapien
tttgttggatccctatggtcacatt

SEQ ID NO: 4363544 - DNA, 25 bp, Homo sapien
ccctatggtcacatttcataagaaa

SEQ ID NO: 4363545 - DNA, 25 bp, Homo sapien
actaagtattccagaccaggagggc

SEQ ID NO: 4363546 - DNA, 25 bp, Homo sapien
agggcagtttgccataggagttggc

SEQ ID NO: 4363547 - DNA, 25 bp, Homo sapien
ggcagtttgccataggagttggccc

SEQ ID NO: 4363548 - DNA, 25 bp, Homo sapien
cagtttgccataggagttggccctg

SEQ ID NO: 4363549 - DNA, 25 bp, Homo sapien
gataccggacaggatggataccacc

SEQ ID NO: 4363550 - DNA, 25 bp, Homo sapien
tgtagtatcccataggcaagcctcc

SEQ ID NO: 4363551 - DNA, 25 bp, Homo sapien
tggaacagactgatttggcatagga

SEQ ID NO: 4363552 - DNA, 25 bp, Homo sapien
gcataggatatttgccaggctgata

SEQ ID NO: 4363553 - DNA, 25 bp, Homo sapien
tcttgatcttagatgaaatgaacgt

SEQ ID NO: 4363554 - DNA, 25 bp, Homo sapien
cataggtactcttttatcagattga

SEQ ID NO: 4363555 - DNA, 25 bp, Homo sapien
tgagggagttcctcctatttctagt

SEQ ID NO: 4363556 - DNA, 25 bp, Homo sapien
aagtggcaagaaagataccctgtct

SEQ ID NO: 4363557 - DNA, 25 bp, Homo sapien
gcaacacggcagcattctgtctcaa

SEQ ID NO: 4363558 - DNA, 25 bp, Homo sapien
caaataactgggtcctggatactac

SEQ ID NO: 4363559 - DNA, 25 bp, Homo sapien
tggatactacccagatctggaagaa

SEQ ID NO: 4363560 - DNA, 25 bp, Homo sapien
cattagctgacgtatcaggagtaga

SEQ ID NO: 4363561 - DNA, 25 bp, Homo sapien
ggagcatcaggccttggatctggtg

SEQ ID NO: 4363562 - DNA, 25 bp, Homo sapien
tgagaattgtattcaggaggagcat

SEQ ID NO: 4363563 - DNA, 25 bp, Homo sapien
gaattgtattcaggaggagcatcag

SEQ ID NO: 4363564 - DNA, 25 bp, Homo sapien
agcatcaggccttggatctggtggt

SEQ ID NO: 4363565 - DNA, 25 bp, Homo sapien
gttgtacggtgccctatgtgtctcc

SEQ ID NO: 4363566 - DNA, 25 bp, Homo sapien
ttgttgtacggtgccctatgtgtct

SEQ ID NO: 4363567 - DNA, 25 bp, Homo sapien
tgtacggtgccctatgtgtctccaa

SEQ ID NO: 4363568 - DNA, 25 bp, Homo sapien
gtacggtgccctatgtgtctccaag

SEQ ID NO: 4363569 - DNA, 25 bp, Homo sapien
cctgtctgtctccagtgcctttaac

SEQ ID NO: 4363570 - DNA, 25 bp, Homo sapien
aaactctgggtcctgtctgtctcca

SEQ ID NO: 4363571 - DNA, 25 bp, Homo sapien
ctaaaactctgggtcctgtctgtct

SEQ ID NO: 4363572 - DNA, 25 bp, Homo sapien
ctgtctgtctccagtgcctttaacc

SEQ ID NO: 4363573 - DNA, 25 bp, Homo sapien
agttgctgccttctccttcataccc

SEQ ID NO: 4363574 - DNA, 25 bp, Homo sapien
tagttgctgccttctccttcatacc

SEQ ID NO: 4363575 - DNA, 25 bp, Homo sapien
cttctatatagttgctgccttctcc

SEQ ID NO: 4363576 - DNA, 25 bp, Homo sapien
tgctgccttctccttcataccccat

SEQ ID NO: 4363577 - DNA, 25 bp, Homo sapien
taatgggaaagtaggctgttctgct

SEQ ID NO: 4363578 - DNA, 25 bp, Homo sapien
ggttttgaaatatagttcgaagaga

SEQ ID NO: 4363579 - DNA, 25 bp, Homo sapien
tactataccctataatgggaaagta

SEQ ID NO: 4363580 - DNA, 25 bp, Homo sapien
tagttcgaagagaaattacccatga

SEQ ID NO: 4363581 - DNA, 25 bp, Homo sapien
gcagagttcgggcacataaaatgct

SEQ ID NO: 4363582 - DNA, 25 bp, Homo sapien
tgcaaagtgcctatagatgacatgg

SEQ ID NO: 4363583 - DNA, 25 bp, Homo sapien
catcatgatcctgactatgctccaa

SEQ ID NO: 4363584 - DNA, 25 bp, Homo sapien
tgtatagactaagcaaccctaatcc

SEQ ID NO: 4363585 - DNA, 25 bp, Homo sapien
tatgcttcccatcaaatttcagtgt

SEQ ID NO: 4363586 - DNA, 25 bp, Homo sapien
ttatgcttcccatcaaatttcagtg

SEQ ID NO: 4363587 - DNA, 25 bp, Homo sapien
gcttcccatcaaatttcagtgtttc

SEQ ID NO: 4363588 - DNA, 25 bp, Homo sapien
tcacttatgcttcccatcaaatttc

SEQ ID NO: 4363589 - DNA, 25 bp, Homo sapien
ccgtagaaacgccagagacccatga

SEQ ID NO: 4363590 - DNA, 25 bp, Homo sapien
cctggcctgagtccgtgagagccgc

SEQ ID NO: 4363591 - DNA, 25 bp, Homo sapien
gagagccgcgccgtagaaacgccag

SEQ ID NO: 4363592 - DNA, 25 bp, Homo sapien
catgagaaacccaatcaagcgagac

SEQ ID NO: 4363593 - DNA, 25 bp, Homo sapien
aaccctctgcgtctgcagtgcagac

SEQ ID NO: 4363594 - DNA, 25 bp, Homo sapien
gacaccacggaacttctgcaaccac

SEQ ID NO: 4363595 - DNA, 25 bp, Homo sapien
acgcagagcgaaacgaaagggccgc

SEQ ID NO: 4363596 - DNA, 25 bp, Homo sapien
gggcaggaaactgctcgctcccaaa

SEQ ID NO: 4363597 - DNA, 25 bp, Homo sapien
actgctagcgcaggacgccgcgcaa

SEQ ID NO: 4363598 - DNA, 25 bp, Homo sapien
ctgaggatgcgacgcgagcgcagtg

SEQ ID NO: 4363599 - DNA, 25 bp, Homo sapien
gacgcgagcgcagtgtccgggaact

SEQ ID NO: 4363600 - DNA, 25 bp, Homo sapien
tgtccgggaactgctagcgcaggac

SEQ ID NO: 4363601 - DNA, 25 bp, Homo sapien
acgccagacgccgggtctagttgta

SEQ ID NO: 4363602 - DNA, 25 bp, Homo sapien
ggacgccagacgccgggtctagttg

SEQ ID NO: 4363603 - DNA, 25 bp, Homo sapien
gacgccagacgccgggtctagttgt

SEQ ID NO: 4363604 - DNA, 25 bp, Homo sapien
gttataaacaaagtaagcgcgcgga

SEQ ID NO: 4363605 - DNA, 25 bp, Homo sapien
aagggagggctaggcgcgggttctg

SEQ ID NO: 4363606 - DNA, 25 bp, Homo sapien
gcgcgcggaagggagggctaggcgc

SEQ ID NO: 4363607 - DNA, 25 bp, Homo sapien
gcgggtccggcacgcctggaccctc

SEQ ID NO: 4363608 - DNA, 25 bp, Homo sapien
tagccttggcaatgccgtgctggct

SEQ ID NO: 4363609 - DNA, 25 bp, Homo sapien
gtccttggcttggtgatttagcctt

SEQ ID NO: 4363610 - DNA, 25 bp, Homo sapien
ggaaggcgggagagacgccaataaa

SEQ ID NO: 4363611 - DNA, 25 bp, Homo sapien
tgatttagccttggcaatgccgtgc

SEQ ID NO: 4363612 - DNA, 25 bp, Homo sapien
gcagtatccctttcacaattgcagc

SEQ ID NO: 4363613 - DNA, 25 bp, Homo sapien
gcttcctgagaacattggaaaaata

SEQ ID NO: 4363614 - DNA, 25 bp, Homo sapien
gctaatgggctttgtcaaagaagag

SEQ ID NO: 4363615 - DNA, 25 bp, Homo sapien
atctcttcattcatcccgctgctaa

SEQ ID NO: 4363616 - DNA, 25 bp, Homo sapien
tcaaaacccagttgctagcaaatgc

SEQ ID NO: 4363617 - DNA, 25 bp, Homo sapien
catcaaaacccagttgctagcaaat

SEQ ID NO: 4363618 - DNA, 25 bp, Homo sapien
cccagttgctagcaaatgccccatg

SEQ ID NO: 4363619 - DNA, 25 bp, Homo sapien
atcaaaacccagttgctagcaaatg

SEQ ID NO: 4363620 - DNA, 25 bp, Homo sapien
tcacgtaatgtacgtaagaactcac

SEQ ID NO: 4363621 - DNA, 25 bp, Homo sapien
ctcttccaaagaccgggagcagcac

SEQ ID NO: 4363622 - DNA, 25 bp, Homo sapien
acagcagcaagcatcacgtaatgta

SEQ ID NO: 4363623 - DNA, 25 bp, Homo sapien
tccaaagaccgggagcagcacacag

SEQ ID NO: 4363624 - DNA, 25 bp, Homo sapien
tgctagagagttgtgattggaccat

SEQ ID NO: 4363625 - DNA, 25 bp, Homo sapien
gtcagcaggaatgagggtctcttgt

SEQ ID NO: 4363626 - DNA, 25 bp, Homo sapien
atatgctagagagttgtgattggac

SEQ ID NO: 4363627 - DNA, 25 bp, Homo sapien
cagcaggaatgagggtctcttgttt

SEQ ID NO: 4363628 - DNA, 25 bp, Homo sapien
cttgtttcttcttgcggcctctgtc

SEQ ID NO: 4363629 - DNA, 25 bp, Homo sapien
caggccatgtgtcgtcctacattct

SEQ ID NO: 4363630 - DNA, 25 bp, Homo sapien
ctcaggccatgtgtcgtcctacatt

SEQ ID NO: 4363631 - DNA, 25 bp, Homo sapien
ggccatgtgtcgtcctacattctaa

SEQ ID NO: 4363632 - DNA, 25 bp, Homo sapien
gaggacaagctccaccaaaggtggg

SEQ ID NO: 4363633 - DNA, 25 bp, Homo sapien
tatactggctatatcctccaccctg

SEQ ID NO: 4363634 - DNA, 25 bp, Homo sapien
gggcagctacagcagttaagttcac

SEQ ID NO: 4363635 - DNA, 25 bp, Homo sapien
ccagcctgacaacttggtgctgatt

SEQ ID NO: 4363636 - DNA, 25 bp, Homo sapien
aaatgtgtcatcactagaaaataaa

SEQ ID NO: 4363637 - DNA, 25 bp, Homo sapien
cattcctggtaaagatatgtgtgtc

SEQ ID NO: 4363638 - DNA, 25 bp, Homo sapien
tcagcccatgcattcagtgatctgg

SEQ ID NO: 4363639 - DNA, 25 bp, Homo sapien
aagggccttaatgtccaatacacat

SEQ ID NO: 4363640 - DNA, 25 bp, Homo sapien
tttcatattttgtggacacgattcc

SEQ ID NO: 4363641 - DNA, 25 bp, Homo sapien
cgattccatcttgattgaccctctg

SEQ ID NO: 4363642 - DNA, 25 bp, Homo sapien
tctctctggtttctatactttggaa

SEQ ID NO: 4363643 - DNA, 25 bp, Homo sapien
ttaaacaatggcatgtgtattttca

SEQ ID NO: 4363644 - DNA, 25 bp, Homo sapien
acatttttgatgtagtttattaggc

SEQ ID NO: 4363645 - DNA, 25 bp, Homo sapien
ttcagggtaattcttatggccacag

SEQ ID NO: 4363646 - DNA, 25 bp, Homo sapien
tctctgacatattctttcagggtaa

SEQ ID NO: 4363647 - DNA, 25 bp, Homo sapien
gccagtaatctctgacatattcttt

SEQ ID NO: 4363648 - DNA, 25 bp, Homo sapien
aagttgcttagttttgttgagggct

SEQ ID NO: 4363649 - DNA, 25 bp, Homo sapien
gaaaatataattttcagctaaatag

SEQ ID NO: 4363650 - DNA, 25 bp, Homo sapien
ctaaatagagtaaaaatagactcac

SEQ ID NO: 4363651 - DNA, 25 bp, Homo sapien
taattttcagctaaatagagtaaaa

SEQ ID NO: 4363652 - DNA, 25 bp, Homo sapien
cagctaaatagagtaaaaatagact

SEQ ID NO: 4363653 - DNA, 25 bp, Homo sapien
ttaacatcaagatcaaatggaaact

SEQ ID NO: 4363654 - DNA, 25 bp, Homo sapien
gaaactggatcccaaatttctcacc

SEQ ID NO: 4363655 - DNA, 25 bp, Homo sapien
taatattccccttacaaatccagag

SEQ ID NO: 4363656 - DNA, 25 bp, Homo sapien
ggaaagttgctccaagcatcaatgc

SEQ ID NO: 4363657 - DNA, 25 bp, Homo sapien
ttgtttcacctggtggagcttcaac

SEQ ID NO: 4363658 - DNA, 25 bp, Homo sapien
tttcacctggtggagcttcaacttt

SEQ ID NO: 4363659 - DNA, 25 bp, Homo sapien
tggcaagaatgggtgaaagtatcga

SEQ ID NO: 4363660 - DNA, 25 bp, Homo sapien
gtatcgataaacatatccaattgtt

SEQ ID NO: 4363661 - DNA, 25 bp, Homo sapien
caaaggtgtcgaaggaagcaattat

SEQ ID NO: 4363662 - DNA, 25 bp, Homo sapien
agagccttatgcagagcaagtacat

SEQ ID NO: 4363663 - DNA, 25 bp, Homo sapien
ttttgtaagctacatttcagagcct

SEQ ID NO: 4363664 - DNA, 25 bp, Homo sapien
gattgttcaagatttcatacgtttt

SEQ ID NO: 4363665 - DNA, 25 bp, Homo sapien
tacacagtgttctatttaagggcac

SEQ ID NO: 4363666 - DNA, 25 bp, Homo sapien
cctgacttgcctctggcagaaatga

SEQ ID NO: 4363667 - DNA, 25 bp, Homo sapien
cagaaatgacaggactgtggtgacc

SEQ ID NO: 4363668 - DNA, 25 bp, Homo sapien
gaacttgctgtcacaccagaaaatg

SEQ ID NO: 4363669 - DNA, 25 bp, Homo sapien
tgaagaatctggaattattgcttct

SEQ ID NO: 4363670 - DNA, 25 bp, Homo sapien
gaatctggaattattgcttctctga

SEQ ID NO: 4363671 - DNA, 25 bp, Homo sapien
ctgcattctgcttctattaacaaaa

SEQ ID NO: 4363672 - DNA, 25 bp, Homo sapien
tgcttctattaacaaaatttctgaa

SEQ ID NO: 4363673 - DNA, 25 bp, Homo sapien
ctcccagaggatcaaaatgttgaca

SEQ ID NO: 4363674 - DNA, 25 bp, Homo sapien
ccagaggatcaaaatgttgacacac

SEQ ID NO: 4363675 - DNA, 25 bp, Homo sapien
aaatgttgacacactgttaactgat

SEQ ID NO: 4363676 - DNA, 25 bp, Homo sapien
gttgacacactgttaactgatttat

SEQ ID NO: 4363677 - DNA, 25 bp, Homo sapien
caaatactctaatccaagtggacag

SEQ ID NO: 4363678 - DNA, 25 bp, Homo sapien
caagtggacagctggttattgtctc

SEQ ID NO: 4363679 - DNA, 25 bp, Homo sapien
tattgtctctggtgtagacaaccag

SEQ ID NO: 4363680 - DNA, 25 bp, Homo sapien
cagggtcgtaggtcataaatagcca

SEQ ID NO: 4363681 - DNA, 25 bp, Homo sapien
gtaaatcttgcatcggttgtgactg

SEQ ID NO: 4363682 - DNA, 25 bp, Homo sapien
tggttcccctaaaggactagctatc

SEQ ID NO: 4363683 - DNA, 25 bp, Homo sapien
ctcattaggaggcttgtaattacat

SEQ ID NO: 4363684 - DNA, 25 bp, Homo sapien
catttgatccactcagataacacag

SEQ ID NO: 4363685 - DNA, 25 bp, Homo sapien
atgaggagtttctctgagagaactt

SEQ ID NO: 4363686 - DNA, 25 bp, Homo sapien
gagagaacttcattcacatcattca

SEQ ID NO: 4363687 - DNA, 25 bp, Homo sapien
tctggctggcacctccatgaggagt

SEQ ID NO: 4363688 - DNA, 25 bp, Homo sapien
ctttttctacccattctggctggca

SEQ ID NO: 4363689 - DNA, 25 bp, Homo sapien
cacagatagtgtgcgagtttttcct

SEQ ID NO: 4363690 - DNA, 25 bp, Homo sapien
gaaggaaccgtttagatcagttata

SEQ ID NO: 4363691 - DNA, 25 bp, Homo sapien
tttgcctagccaaagatccggaatc

SEQ ID NO: 4363692 - DNA, 25 bp, Homo sapien
tacatcttccttgcacagtagaaga

SEQ ID NO: 4363693 - DNA, 25 bp, Homo sapien
ggttattggctttggtagagttctg

SEQ ID NO: 4363694 - DNA, 25 bp, Homo sapien
ttattggctttggtagagttctgct

SEQ ID NO: 4363695 - DNA, 25 bp, Homo sapien
atccatcatttgccatttggggtta

SEQ ID NO: 4363696 - DNA, 25 bp, Homo sapien
ggtcatctagacattgctttttctg

SEQ ID NO: 4363697 - DNA, 25 bp, Homo sapien
ttcctagtatcaatggtctttataa

SEQ ID NO: 4363698 - DNA, 25 bp, Homo sapien
ggattctcctgtattggatgcatat

SEQ ID NO: 4363699 - DNA, 25 bp, Homo sapien
aatctggattctcctgtattggatg

SEQ ID NO: 4363700 - DNA, 25 bp, Homo sapien
cctagtatcaatggtctttataatt

SEQ ID NO: 4363701 - DNA, 25 bp, Homo sapien
attaatccactcccacactctgaca

SEQ ID NO: 4363702 - DNA, 25 bp, Homo sapien
aatccactcccacactctgacattc

SEQ ID NO: 4363703 - DNA, 25 bp, Homo sapien
ctagttctttcaaaaaacatgtagt

SEQ ID NO: 4363704 - DNA, 25 bp, Homo sapien
tagttctttcaaaaaacatgtagtc

SEQ ID NO: 4363705 - DNA, 25 bp, Homo sapien
cctagttctttcaaaaaacatgtag

SEQ ID NO: 4363706 - DNA, 25 bp, Homo sapien
aaggtctctagggaattggattcca

SEQ ID NO: 4363707 - DNA, 25 bp, Homo sapien
ttccaaagttgtcagcatcagtaaa

SEQ ID NO: 4363708 - DNA, 25 bp, Homo sapien
tgaggaaacaggcaccaatcatcac

SEQ ID NO: 4363709 - DNA, 25 bp, Homo sapien
aaaacccagaccagtgcttagaaat

SEQ ID NO: 4363710 - DNA, 25 bp, Homo sapien
tgctattgagacatcagtacacaat

SEQ ID NO: 4363711 - DNA, 25 bp, Homo sapien
tacacaatactaatttaaggcattc

SEQ ID NO: 4363712 - DNA, 25 bp, Homo sapien
tgagacatcagtacacaatactaat

SEQ ID NO: 4363713 - DNA, 25 bp, Homo sapien
ttatcttgctattgagacatcagta

SEQ ID NO: 4363714 - DNA, 25 bp, Homo sapien
aatcaacacccgcaatacagctgca

SEQ ID NO: 4363715 - DNA, 25 bp, Homo sapien
tcaaaatcaacacccgcaatacagc

SEQ ID NO: 4363716 - DNA, 25 bp, Homo sapien
gctgcacacgatacatggaccacta

SEQ ID NO: 4363717 - DNA, 25 bp, Homo sapien
ggtctgagtaacataacctactggt

SEQ ID NO: 4363718 - DNA, 25 bp, Homo sapien
tccagagttatgacttctcgaccca

SEQ ID NO: 4363719 - DNA, 25 bp, Homo sapien
tcttgatttcatacatgttactact

SEQ ID NO: 4363720 - DNA, 25 bp, Homo sapien
tagaccgcccacagcaatttcggat

SEQ ID NO: 4363721 - DNA, 25 bp, Homo sapien
tacagaaattagtatcttctgctgc

SEQ ID NO: 4363722 - DNA, 25 bp, Homo sapien
ttccagaagttcaatttgctgatga

SEQ ID NO: 4363723 - DNA, 25 bp, Homo sapien
tcctggcggacagtttaatggtggt

SEQ ID NO: 4363724 - DNA, 25 bp, Homo sapien
ccaatcctggcggacagtttaatgg

SEQ ID NO: 4363725 - DNA, 25 bp, Homo sapien
tattccaatcctggcggacagttta

SEQ ID NO: 4363726 - DNA, 25 bp, Homo sapien
aatcctggcggacagtttaatggtg

SEQ ID NO: 4363727 - DNA, 25 bp, Homo sapien
gattttgaacaggaatgccagctgt

SEQ ID NO: 4363728 - DNA, 25 bp, Homo sapien
tgctgacgtcctgggtagaaggcct

SEQ ID NO: 4363729 - DNA, 25 bp, Homo sapien
ccagcaggtgggactaggtagtcat

SEQ ID NO: 4363730 - DNA, 25 bp, Homo sapien
tccagcctggtgcttagggtagaca

SEQ ID NO: 4363731 - DNA, 25 bp, Homo sapien
tcacattcacttctattttgagggt

SEQ ID NO: 4363732 - DNA, 25 bp, Homo sapien
gaagcttgaggtatgtttttatctt

SEQ ID NO: 4363733 - DNA, 25 bp, Homo sapien
agctcagaagtcctatatctgtgaa

SEQ ID NO: 4363734 - DNA, 25 bp, Homo sapien
tctgtgaagcttgaggtatgttttt

SEQ ID NO: 4363735 - DNA, 25 bp, Homo sapien
cattatagacagagggaagctcact

SEQ ID NO: 4363736 - DNA, 25 bp, Homo sapien
gaaactgggcttattcgggaaatga

SEQ ID NO: 4363737 - DNA, 25 bp, Homo sapien
cactagtagaagtcctaagctgcag

SEQ ID NO: 4363738 - DNA, 25 bp, Homo sapien
tggcattgtcaggaaagtcagagcg

SEQ ID NO: 4363739 - DNA, 25 bp, Homo sapien
cattcccggtgctgttctcccgatt

SEQ ID NO: 4363740 - DNA, 25 bp, Homo sapien
tcccggtgctgttctcccgattacc

SEQ ID NO: 4363741 - DNA, 25 bp, Homo sapien
attcccggtgctgttctcccgatta

SEQ ID NO: 4363742 - DNA, 25 bp, Homo sapien
ttcccggtgctgttctcccgattac

SEQ ID NO: 4363743 - DNA, 25 bp, Homo sapien
gaagagctataaagtgaatccaggt

SEQ ID NO: 4363744 - DNA, 25 bp, Homo sapien
tggatcaaaatatgagcctcagaga

SEQ ID NO: 4363745 - DNA, 25 bp, Homo sapien
tttgtaggtcaactctgatcccagt

SEQ ID NO: 4363746 - DNA, 25 bp, Homo sapien
aaaattcagactttccatcatgagg

SEQ ID NO: 4363747 - DNA, 25 bp, Homo sapien
attcggcccacaatccagagtctct

SEQ ID NO: 4363748 - DNA, 25 bp, Homo sapien
tccagagtctctcagaattattgct

SEQ ID NO: 4363749 - DNA, 25 bp, Homo sapien
ctccattcggcccacaatccagagt

SEQ ID NO: 4363750 - DNA, 25 bp, Homo sapien
gaattattgctaggaagaatctaag

SEQ ID NO: 4363751 - DNA, 25 bp, Homo sapien
ccttttattgcaaggcaattgacaa

SEQ ID NO: 4363752 - DNA, 25 bp, Homo sapien
cactacccaacccataggtggcctg

SEQ ID NO: 4363753 - DNA, 25 bp, Homo sapien
ctttgttaactgagactccctgttc

SEQ ID NO: 4363754 - DNA, 25 bp, Homo sapien
gatagatttaattgaaagactcctt

SEQ ID NO: 4363755 - DNA, 25 bp, Homo sapien
gaagcagcaattttactcataagga

SEQ ID NO: 4363756 - DNA, 25 bp, Homo sapien
gacagatcccaagcagaccattttt

SEQ ID NO: 4363757 - DNA, 25 bp, Homo sapien
gatgtttagacccttagaagcagca

SEQ ID NO: 4363758 - DNA, 25 bp, Homo sapien
ttaaaccacaatagagtcactcatg

SEQ ID NO: 4363759 - DNA, 25 bp, Homo sapien
cattgcagagctttgagggcacaac

SEQ ID NO: 4363760 - DNA, 25 bp, Homo sapien
caaaaaagccttgcaggacatgggt

SEQ ID NO: 4363761 - DNA, 25 bp, Homo sapien
gagcctcaagatctaatggcatttg

SEQ ID NO: 4363762 - DNA, 25 bp, Homo sapien
gggtctcaaagacagagcatcaaac

SEQ ID NO: 4363763 - DNA, 25 bp, Homo sapien
gacctgaaacgtaaatcgattcaca

SEQ ID NO: 4363764 - DNA, 25 bp, Homo sapien
tgtaaatttgaaagatagataattc

SEQ ID NO: 4363765 - DNA, 25 bp, Homo sapien
catctcctcagataaatggactttg

SEQ ID NO: 4363766 - DNA, 25 bp, Homo sapien
tacacaactaattattaataccatc

SEQ ID NO: 4363767 - DNA, 25 bp, Homo sapien
tctgaaaaggctagactagttccta

SEQ ID NO: 4363768 - DNA, 25 bp, Homo sapien
gctagactagttcctagagaacaat

SEQ ID NO: 4363769 - DNA, 25 bp, Homo sapien
atgagggagataccaaatcaccatg

SEQ ID NO: 4363770 - DNA, 25 bp, Homo sapien
tgagaaaacttctgtgtagacaaag

SEQ ID NO: 4363771 - DNA, 25 bp, Homo sapien
tactggcccagtgtagaagctccgt

SEQ ID NO: 4363772 - DNA, 25 bp, Homo sapien
cagggtgccatcttagaaacagaga

SEQ ID NO: 4363773 - DNA, 25 bp, Homo sapien
gctttagagaagtccaccacctgat

SEQ ID NO: 4363774 - DNA, 25 bp, Homo sapien
catggtttaaaggtatgtgtgcccc

SEQ ID NO: 4363775 - DNA, 25 bp, Homo sapien
tttgttccctatcactgccagacag

SEQ ID NO: 4363776 - DNA, 25 bp, Homo sapien
tgccagacagaataacctcaatgtg

SEQ ID NO: 4363777 - DNA, 25 bp, Homo sapien
taaataggccaatgtttgttcccta

SEQ ID NO: 4363778 - DNA, 25 bp, Homo sapien
tagtaggcaagcagatcaattttcc

SEQ ID NO: 4363779 - DNA, 25 bp, Homo sapien
tctgaacctgcattagaacactgaa

SEQ ID NO: 4363780 - DNA, 25 bp, Homo sapien
tgatggcagcgattctctacagagg

SEQ ID NO: 4363781 - DNA, 25 bp, Homo sapien
tagctaacttgatgccgggagccca

SEQ ID NO: 4363782 - DNA, 25 bp, Homo sapien
catggccctagaaactcaggcggtg

SEQ ID NO: 4363783 - DNA, 25 bp, Homo sapien
tcattttgcttaaccaaagatccag

SEQ ID NO: 4363784 - DNA, 25 bp, Homo sapien
cattttgcttaaccaaagatccaga

SEQ ID NO: 4363785 - DNA, 25 bp, Homo sapien
ttttgcttaaccaaagatccagaat

SEQ ID NO: 4363786 - DNA, 25 bp, Homo sapien
tttcattttgcttaaccaaagatcc

SEQ ID NO: 4363787 - DNA, 25 bp, Homo sapien
tatctgagtaatctcaattaccatt

SEQ ID NO: 4363788 - DNA, 25 bp, Homo sapien
tgaatctaatagatcattatttagg

SEQ ID NO: 4363789 - DNA, 25 bp, Homo sapien
ctaggaaggatagagtgtaagagct

SEQ ID NO: 4363790 - DNA, 25 bp, Homo sapien
tataataccagagttttagagtgaa

SEQ ID NO: 4363791 - DNA, 25 bp, Homo sapien
tatagattagcttctaggagaagtt

SEQ ID NO: 4363792 - DNA, 25 bp, Homo sapien
tgcaaaataacattagctcttatgc

SEQ ID NO: 4363793 - DNA, 25 bp, Homo sapien
aataacattagctcttatgcatgaa

SEQ ID NO: 4363794 - DNA, 25 bp, Homo sapien
aagttaagtgtagcatgatttcttg

SEQ ID NO: 4363795 - DNA, 25 bp, Homo sapien
gaatcagagatcataattcaaagca

SEQ ID NO: 4363796 - DNA, 25 bp, Homo sapien
ttagatagtctcaatcaatatacag

SEQ ID NO: 4363797 - DNA, 25 bp, Homo sapien
catacaggtatgagtttagatagtc

SEQ ID NO: 4363798 - DNA, 25 bp, Homo sapien
tacaaccagagctacaggccttaca

SEQ ID NO: 4363799 - DNA, 25 bp, Homo sapien
ctggctgccagtgctttcaaaaaac

SEQ ID NO: 4363800 - DNA, 25 bp, Homo sapien
tggctgccagtgctttcaaaaaaca

SEQ ID NO: 4363801 - DNA, 25 bp, Homo sapien
cctggctgccagtgctttcaaaaaa

SEQ ID NO: 4363802 - DNA, 25 bp, Homo sapien
tactaagggatctagtgaaacacag

SEQ ID NO: 4363803 - DNA, 25 bp, Homo sapien
ttatcagatgcagaaatactaaggg

SEQ ID NO: 4363804 - DNA, 25 bp, Homo sapien
gaaatactaagggatctagtgaaac

SEQ ID NO: 4363805 - DNA, 25 bp, Homo sapien
attatcagatgcagaaatactaagg

SEQ ID NO: 4363806 - DNA, 25 bp, Homo sapien
ccagagtgtcaggatcaaatagaat

SEQ ID NO: 4363807 - DNA, 25 bp, Homo sapien
ccctaggtggttctaatgtgaaggc

SEQ ID NO: 4363808 - DNA, 25 bp, Homo sapien
ggtagaaactagtcacctgtgaccc

SEQ ID NO: 4363809 - DNA, 25 bp, Homo sapien
tagttaggtctacacacttgagtga

SEQ ID NO: 4363810 - DNA, 25 bp, Homo sapien
tgaggaaacaggcaccaatcattac

SEQ ID NO: 4363811 - DNA, 25 bp, Homo sapien
gtccagtgcttggaaattttgccaa

SEQ ID NO: 4363812 - DNA, 25 bp, Homo sapien
taacatcaaggtctaaagggaactg

SEQ ID NO: 4363813 - DNA, 25 bp, Homo sapien
gttatcagcgtctgtaaatgcctct

SEQ ID NO: 4363814 - DNA, 25 bp, Homo sapien
tctcaaaattccagtccagtgcttg

SEQ ID NO: 4363815 - DNA, 25 bp, Homo sapien
tcattagataactggaggctcctgt

SEQ ID NO: 4363816 - DNA, 25 bp, Homo sapien
tcaaatttgaagtaagatgaaacaa

SEQ ID NO: 4363817 - DNA, 25 bp, Homo sapien
gcaccatatgtaaccctcattagat

SEQ ID NO: 4363818 - DNA, 25 bp, Homo sapien
aaactgtttcattgtacggagaaat

SEQ ID NO: 4363819 - DNA, 25 bp, Homo sapien
gttaacatgcgcctaagtcagtgct

SEQ ID NO: 4363820 - DNA, 25 bp, Homo sapien
tgacaagccactagaaaagcatgac

SEQ ID NO: 4363821 - DNA, 25 bp, Homo sapien
tctgtagggccagtatacttcctgt

SEQ ID NO: 4363822 - DNA, 25 bp, Homo sapien
gttgacctacacacccataagcatg

SEQ ID NO: 4363823 - DNA, 25 bp, Homo sapien
caattactgtctgtttgctgaaaac

SEQ ID NO: 4363824 - DNA, 25 bp, Homo sapien
ggataaaaggtctactaggctctct

SEQ ID NO: 4363825 - DNA, 25 bp, Homo sapien
tggctccagtgtctatactcttgac

SEQ ID NO: 4363826 - DNA, 25 bp, Homo sapien
tcagatttcaagctcatagacagag

SEQ ID NO: 4363827 - DNA, 25 bp, Homo sapien
tacttcaagtttccatgcccagtga

SEQ ID NO: 4363828 - DNA, 25 bp, Homo sapien
tgttttagaatgactcctgcccctg

SEQ ID NO: 4363829 - DNA, 25 bp, Homo sapien
tagtacacctatgaaatgcctcttg

SEQ ID NO: 4363830 - DNA, 25 bp, Homo sapien
ctatcataatggtcaagaggacaca

SEQ ID NO: 4363831 - DNA, 25 bp, Homo sapien
agaaagactgccagatgaaacataa

SEQ ID NO: 4363832 - DNA, 25 bp, Homo sapien
tttattacatggaatggatgcttta

SEQ ID NO: 4363833 - DNA, 25 bp, Homo sapien
atttattacatggaatggatgcttt

SEQ ID NO: 4363834 - DNA, 25 bp, Homo sapien
tcaagaaagactgccagatgaaaca

SEQ ID NO: 4363835 - DNA, 25 bp, Homo sapien
taatatgttgcagcttctagtgacc

SEQ ID NO: 4363836 - DNA, 25 bp, Homo sapien
gctttggcaatcagacttagatggc

SEQ ID NO: 4363837 - DNA, 25 bp, Homo sapien
ccacagagaagcataactgggtagt

SEQ ID NO: 4363838 - DNA, 25 bp, Homo sapien
tgtcatcacatagaaaccaccacgt

SEQ ID NO: 4363839 - DNA, 25 bp, Homo sapien
ttatattaggaaagcaaatcttata

SEQ ID NO: 4363840 - DNA, 25 bp, Homo sapien
tatattaggaaagcaaatcttataa

SEQ ID NO: 4363841 - DNA, 25 bp, Homo sapien
aagtctgaataacataacctattgg

SEQ ID NO: 4363842 - DNA, 25 bp, Homo sapien
acaacacatggaccacttattttta

SEQ ID NO: 4363843 - DNA, 25 bp, Homo sapien
gcacacaacacatggaccacttatt

SEQ ID NO: 4363844 - DNA, 25 bp, Homo sapien
agtctgaataacataacctattggt

SEQ ID NO: 4363845 - DNA, 25 bp, Homo sapien
cataatgcctaggttcgatgaaagg

SEQ ID NO: 4363846 - DNA, 25 bp, Homo sapien
ttcgatgaaaggttcaatgacaggg

SEQ ID NO: 4363847 - DNA, 25 bp, Homo sapien
taatcataatgcctaggttcgatga

SEQ ID NO: 4363848 - DNA, 25 bp, Homo sapien
cctaggttcgatgaaaggttcaatg

SEQ ID NO: 4363849 - DNA, 25 bp, Homo sapien
gacttcttgacccatattatcaata

SEQ ID NO: 4363850 - DNA, 25 bp, Homo sapien
cagggacaacaacagctgctacatc

SEQ ID NO: 4363851 - DNA, 25 bp, Homo sapien
caacagctgctacatcttagtggtc

SEQ ID NO: 4363852 - DNA, 25 bp, Homo sapien
cagcaatttcgggtacagcaatcag

SEQ ID NO: 4363853 - DNA, 25 bp, Homo sapien
ctgcaaagtaaaccctctgtccaaa

SEQ ID NO: 4363854 - DNA, 25 bp, Homo sapien
ctaaaaacataaaagacgaaatcat

SEQ ID NO: 4363855 - DNA, 25 bp, Homo sapien
tggaacgtctaggtgtaaagcccaa

SEQ ID NO: 4363856 - DNA, 25 bp, Homo sapien
aacgtctaggtgtaaagcccaattg

SEQ ID NO: 4363857 - DNA, 25 bp, Homo sapien
cgtctaggtgtaaagcccaattgta

SEQ ID NO: 4363858 - DNA, 25 bp, Homo sapien
atggaacgtctaggtgtaaagccca

SEQ ID NO: 4363859 - DNA, 25 bp, Homo sapien
tttaagtgtccttggtgggacacag

SEQ ID NO: 4363860 - DNA, 25 bp, Homo sapien
atgaactcctttaagtgtccttggt

SEQ ID NO: 4363861 - DNA, 25 bp, Homo sapien
cacagacagaccctgtactctgcat

SEQ ID NO: 4363862 - DNA, 25 bp, Homo sapien
tgggacacagacagaccctgtactc

SEQ ID NO: 4363863 - DNA, 25 bp, Homo sapien
tatctgcataaacttctactcttta

SEQ ID NO: 4363864 - DNA, 25 bp, Homo sapien
gaaacaggattaaaacaatgaatac

SEQ ID NO: 4363865 - DNA, 25 bp, Homo sapien
tactctttatagaaacaggattaaa

SEQ ID NO: 4363866 - DNA, 25 bp, Homo sapien
tctgcataaacttctactctttata

SEQ ID NO: 4363867 - DNA, 25 bp, Homo sapien
ttccagaagttcaatttgctgatga

SEQ ID NO: 4363868 - DNA, 25 bp, Homo sapien
tatgtgtatagactggacacacaga

SEQ ID NO: 4363869 - DNA, 25 bp, Homo sapien
tcaacctttgtcatatgtgataaca

SEQ ID NO: 4363870 - DNA, 25 bp, Homo sapien
gattatgccacttaagcacattgtg

SEQ ID NO: 4363871 - DNA, 25 bp, Homo sapien
gaaaactggttgaatatcacaagaa

SEQ ID NO: 4363872 - DNA, 25 bp, Homo sapien
tattgagactaaagagcacttcgct

SEQ ID NO: 4363873 - DNA, 25 bp, Homo sapien
tatcaggcatacaacaaaggcagga

SEQ ID NO: 4363874 - DNA, 25 bp, Homo sapien
tctttaggttctcaccccagagtga

SEQ ID NO: 4363875 - DNA, 25 bp, Homo sapien
cttcgctcagtaccaaagtttcggg

SEQ ID NO: 4363876 - DNA, 25 bp, Homo sapien
aagcaagctggaagcacagttctgt

SEQ ID NO: 4363877 - DNA, 25 bp, Homo sapien
gcaagctggaagcacagttctgttt

SEQ ID NO: 4363878 - DNA, 25 bp, Homo sapien
tcatttgctaatctggttaagcaag

SEQ ID NO: 4363879 - DNA, 25 bp, Homo sapien
ctaatctggttaagcaagctggaag

SEQ ID NO: 4363880 - DNA, 25 bp, Homo sapien
aatattctaatccaggtggacagtt

SEQ ID NO: 4363881 - DNA, 25 bp, Homo sapien
tctaatccaggtggacagtttaatg

SEQ ID NO: 4363882 - DNA, 25 bp, Homo sapien
tattctaatccaggtggacagttta

SEQ ID NO: 4363883 - DNA, 25 bp, Homo sapien
ttctaatccaggtggacagtttaat

SEQ ID NO: 4363884 - DNA, 25 bp, Homo sapien
caggacctgaatggccggctggtgg

SEQ ID NO: 4363885 - DNA, 25 bp, Homo sapien
gctccaactggctgattatatactg

SEQ ID NO: 4363886 - DNA, 25 bp, Homo sapien
tatacactggctgatttgggacagg

SEQ ID NO: 4363887 - DNA, 25 bp, Homo sapien
agggtagccactatatcctggaggt

SEQ ID NO: 4363888 - DNA, 25 bp, Homo sapien
gatttgtaactgcaccaaaaatgga

SEQ ID NO: 4363889 - DNA, 25 bp, Homo sapien
tttgtaactgcaccaaaaatggaat

SEQ ID NO: 4363890 - DNA, 25 bp, Homo sapien
atgatttgtaactgcaccaaaaatg

SEQ ID NO: 4363891 - DNA, 25 bp, Homo sapien
aatgatttgtaactgcaccaaaaat

SEQ ID NO: 4363892 - DNA, 25 bp, Homo sapien
tgcccatcattgtttaatgagagag

SEQ ID NO: 4363893 - DNA, 25 bp, Homo sapien
gatgcaatccctgcccatcattgtt

SEQ ID NO: 4363894 - DNA, 25 bp, Homo sapien
agatgcaatccctgcccatcattgt

SEQ ID NO: 4363895 - DNA, 25 bp, Homo sapien
cacggttttatgactagagatgcca

SEQ ID NO: 4363896 - DNA, 25 bp, Homo sapien
agaaaccagaccataggcagaccag

SEQ ID NO: 4363897 - DNA, 25 bp, Homo sapien
ggaggccagagtcacagaaagaaca

SEQ ID NO: 4363898 - DNA, 25 bp, Homo sapien
catttcagagcaacgtcctgggaca

SEQ ID NO: 4363899 - DNA, 25 bp, Homo sapien
ggtggatactgaggaggatacccaa

SEQ ID NO: 4363900 - DNA, 25 bp, Homo sapien
gaggatacccaactggcaagtttgt

SEQ ID NO: 4363901 - DNA, 25 bp, Homo sapien
tgtttccgggtgagaagcattcatc

SEQ ID NO: 4363902 - DNA, 25 bp, Homo sapien
cttggaatgctgtcggtggatactg

SEQ ID NO: 4363903 - DNA, 25 bp, Homo sapien
tcacccttgaattaggctctgtggc

SEQ ID NO: 4363904 - DNA, 25 bp, Homo sapien
gctctgtggctacaatggctctgct

SEQ ID NO: 4363905 - DNA, 25 bp, Homo sapien
tcatacagcttaaggtgcagtagac

SEQ ID NO: 4363906 - DNA, 25 bp, Homo sapien
gacttcagcggaatccagtccatgg

SEQ ID NO: 4363907 - DNA, 25 bp, Homo sapien
gaaattgttggtcagctcatgatgg

SEQ ID NO: 4363908 - DNA, 25 bp, Homo sapien
gcttgactgcattccccttgctgtg

SEQ ID NO: 4363909 - DNA, 25 bp, Homo sapien
taacacactgtctacaaggccacaa

SEQ ID NO: 4363910 - DNA, 25 bp, Homo sapien
tgaatcgggatactctaaaactaca

SEQ ID NO: 4363911 - DNA, 25 bp, Homo sapien
ccagtgctggctaccctttaaatta

SEQ ID NO: 4363912 - DNA, 25 bp, Homo sapien
cactctcaggagttgtcacagccat

SEQ ID NO: 4363913 - DNA, 25 bp, Homo sapien
ccttttagcgacaatgcattaggca

SEQ ID NO: 4363914 - DNA, 25 bp, Homo sapien
tggttaataagtcaagtgatccctc

SEQ ID NO: 4363915 - DNA, 25 bp, Homo sapien
caagaagttcagcaatggttgaata

SEQ ID NO: 4363916 - DNA, 25 bp, Homo sapien
gaagttcagcaatggttgaataatt

SEQ ID NO: 4363917 - DNA, 25 bp, Homo sapien
agttcagcaatggttgaataattca

SEQ ID NO: 4363918 - DNA, 25 bp, Homo sapien
tcagcaatggttgaataattcaaaa

SEQ ID NO: 4363919 - DNA, 25 bp, Homo sapien
tgtggaagacatggaccagtgaagc

SEQ ID NO: 4363920 - DNA, 25 bp, Homo sapien
ttttggcaaacagactactcaactg

SEQ ID NO: 4363921 - DNA, 25 bp, Homo sapien
gctttcaagtcccatgcaagccaga

SEQ ID NO: 4363922 - DNA, 25 bp, Homo sapien
catgctatgcatcctggtaaacagt

SEQ ID NO: 4363923 - DNA, 25 bp, Homo sapien
agaataggtggaggatcttcagcag

SEQ ID NO: 4363924 - DNA, 25 bp, Homo sapien
tcaagtcgttgccaaatgaataaca

SEQ ID NO: 4363925 - DNA, 25 bp, Homo sapien
tctctccttgcacagaaataccgga

SEQ ID NO: 4363926 - DNA, 25 bp, Homo sapien
cagcagggagtgtcatgagtttcaa

SEQ ID NO: 4363927 - DNA, 25 bp, Homo sapien
taagatacgggatgaaactgaggtg

SEQ ID NO: 4363928 - DNA, 25 bp, Homo sapien
tacagaggtaagtcacaaatcaagt

SEQ ID NO: 4363929 - DNA, 25 bp, Homo sapien
aattgcctaagaacaagctccttcc

SEQ ID NO: 4363930 - DNA, 25 bp, Homo sapien
tcttcaagccccaagatagggataa

SEQ ID NO: 4363931 - DNA, 25 bp, Homo sapien
gagccattccataaaaatcctcttg

SEQ ID NO: 4363932 - DNA, 25 bp, Homo sapien
gtaacaaggagccattccataaaaa

SEQ ID NO: 4363933 - DNA, 25 bp, Homo sapien
cttgtaacaaggagccattccataa

SEQ ID NO: 4363934 - DNA, 25 bp, Homo sapien
caaggagccattccataaaaatcct

SEQ ID NO: 4363935 - DNA, 25 bp, Homo sapien
gctcccgagcgagacaaggtccaga

SEQ ID NO: 4363936 - DNA, 25 bp, Homo sapien
gctgtttccgctcccgagcgagaca

SEQ ID NO: 4363937 - DNA, 25 bp, Homo sapien
ttctgcgcctctagactgccgggca

SEQ ID NO: 4363938 - DNA, 25 bp, Homo sapien
cgagcgagacaaggtccagagagcc

SEQ ID NO: 4363939 - DNA, 25 bp, Homo sapien
agaagtcagccggaaaagggtctgg

SEQ ID NO: 4363940 - DNA, 25 bp, Homo sapien
gcggctcctggtttcgtttcctgaa

SEQ ID NO: 4363941 - DNA, 25 bp, Homo sapien
tttgcgccaacacccgcggctcctg

SEQ ID NO: 4363942 - DNA, 25 bp, Homo sapien
tttcccggttcccgcgctggcgctc

SEQ ID NO: 4363943 - DNA, 25 bp, Homo sapien
tgaatcttacgtacacaacacggtt

SEQ ID NO: 4363944 - DNA, 25 bp, Homo sapien
ctggaggagggactgcgcccacccc

SEQ ID NO: 4363945 - DNA, 25 bp, Homo sapien
tggaggagggactgcgcccaccccc

SEQ ID NO: 4363946 - DNA, 25 bp, Homo sapien
tgcgcccaccccctggtgtgaggcc

SEQ ID NO: 4363947 - DNA, 25 bp, Homo sapien
gcgcccaccccctggtgtgaggccc

SEQ ID NO: 4363948 - DNA, 25 bp, Homo sapien
gaggtccagtgcaggccattcatat

SEQ ID NO: 4363949 - DNA, 25 bp, Homo sapien
tgttatgcacagttgaaaccctctg

SEQ ID NO: 4363950 - DNA, 25 bp, Homo sapien
tcttcaatatatggaggttgcacct

SEQ ID NO: 4363951 - DNA, 25 bp, Homo sapien
cattcatatgtgtggaagtgctttg

SEQ ID NO: 4363952 - DNA, 25 bp, Homo sapien
ctatgactgcattgcttccagaatg

SEQ ID NO: 4363953 - DNA, 25 bp, Homo sapien
tttgttcccttctatgactgcattg

SEQ ID NO: 4363954 - DNA, 25 bp, Homo sapien
gattccaggttatgtctattgcata

SEQ ID NO: 4363955 - DNA, 25 bp, Homo sapien
cagtttaaggttgcagcactggcaa

SEQ ID NO: 4363956 - DNA, 25 bp, Homo sapien
gttattataatccagccagtgaatg

SEQ ID NO: 4363957 - DNA, 25 bp, Homo sapien
tggttattataatccagccagtgaa

SEQ ID NO: 4363958 - DNA, 25 bp, Homo sapien
cttggttattataatccagccagtg

SEQ ID NO: 4363959 - DNA, 25 bp, Homo sapien
ataatccagccagtgaatgttcaaa

SEQ ID NO: 4363960 - DNA, 25 bp, Homo sapien
tgtgaagccgtatcttggaaccaga

SEQ ID NO: 4363961 - DNA, 25 bp, Homo sapien
taaccttataccagcagctttctaa

SEQ ID NO: 4363962 - DNA, 25 bp, Homo sapien
tgaggaaataaccttataccagcag

SEQ ID NO: 4363963 - DNA, 25 bp, Homo sapien
ttagatttgtatttaaatgaggaaa

SEQ ID NO: 4363964 - DNA, 25 bp, Homo sapien
aaaacaggcaccgatcattgctgct

SEQ ID NO: 4363965 - DNA, 25 bp, Homo sapien
tgaattccgaaattgtcagcatttg

SEQ ID NO: 4363966 - DNA, 25 bp, Homo sapien
tacatctagatctgcaggaacatga

SEQ ID NO: 4363967 - DNA, 25 bp, Homo sapien
cagcatttgtgaagacatcatttac

SEQ ID NO: 4363968 - DNA, 25 bp, Homo sapien
tcaaaatccacatcgccaaaacagc

SEQ ID NO: 4363969 - DNA, 25 bp, Homo sapien
cgtaaccaactatagtaccaggagg

SEQ ID NO: 4363970 - DNA, 25 bp, Homo sapien
tcccacttctgcgtaacgtaaccaa

SEQ ID NO: 4363971 - DNA, 25 bp, Homo sapien
tggattgtgaatttaggcagaaagg

SEQ ID NO: 4363972 - DNA, 25 bp, Homo sapien
cagaaagtacgattgaagcagatgc

SEQ ID NO: 4363973 - DNA, 25 bp, Homo sapien
cctcagggtgcaagatcgcagagtg

SEQ ID NO: 4363974 - DNA, 25 bp, Homo sapien
cagcagctgttacatctcaagggcc

SEQ ID NO: 4363975 - DNA, 25 bp, Homo sapien
cactgtaatgacctctcgacctgag

SEQ ID NO: 4363976 - DNA, 25 bp, Homo sapien
atttgttggaggtctcagtaccaag

SEQ ID NO: 4363977 - DNA, 25 bp, Homo sapien
gttggaggtctcagtaccaagtatc

SEQ ID NO: 4363978 - DNA, 25 bp, Homo sapien
ttgttggaggtctcagtaccaagta

SEQ ID NO: 4363979 - DNA, 25 bp, Homo sapien
ttggaggtctcagtaccaagtatca

SEQ ID NO: 4363980 - DNA, 25 bp, Homo sapien
tgctggtgtataattatcaggtcta

SEQ ID NO: 4363981 - DNA, 25 bp, Homo sapien
gctggtgtataattatcaggtctaa

SEQ ID NO: 4363982 - DNA, 25 bp, Homo sapien
taaagtacatttgtctgccagtggg

SEQ ID NO: 4363983 - DNA, 25 bp, Homo sapien
ccaggaacatatgctgcgtgcagct

SEQ ID NO: 4363984 - DNA, 25 bp, Homo sapien
gatggtaggtttgcgtttccagctc

SEQ ID NO: 4363985 - DNA, 25 bp, Homo sapien
gccagtgggtttctggagaagacat

SEQ ID NO: 4363986 - DNA, 25 bp, Homo sapien
ttaaatattctagaccaggagggag

SEQ ID NO: 4363987 - DNA, 25 bp, Homo sapien
gcttaaatattctagaccaggaggg

SEQ ID NO: 4363988 - DNA, 25 bp, Homo sapien
cttaaatattctagaccaggaggga

SEQ ID NO: 4363989 - DNA, 25 bp, Homo sapien
atgcttggttccctggattggaaga

SEQ ID NO: 4363990 - DNA, 25 bp, Homo sapien
ctttagaggccatgaagatgtctga

SEQ ID NO: 4363991 - DNA, 25 bp, Homo sapien
gcacaaaacttcagaacgtgtttgt

SEQ ID NO: 4363992 - DNA, 25 bp, Homo sapien
aaacgcagcatgcacaaaacttcag

SEQ ID NO: 4363993 - DNA, 25 bp, Homo sapien
tcagaacgtgtttgtctgcctcttg

SEQ ID NO: 4363994 - DNA, 25 bp, Homo sapien
aagggagtcccttgctgtttctaga

SEQ ID NO: 4363995 - DNA, 25 bp, Homo sapien
ttacatataacagaggaagggagtc

SEQ ID NO: 4363996 - DNA, 25 bp, Homo sapien
ttctagacttctggactttatcagt

SEQ ID NO: 4363997 - DNA, 25 bp, Homo sapien
ctttatcagtttggacaacagagtg

SEQ ID NO: 4363998 - DNA, 25 bp, Homo sapien
gccttcctagaagaacgatggtcat

SEQ ID NO: 4363999 - DNA, 25 bp, Homo sapien
cgatggtcataccatcctcttggct

SEQ ID NO: 4364000 - DNA, 25 bp, Homo sapien
tgtgttcacgcagccaggagatgct

SEQ ID NO: 4364001 - DNA, 25 bp, Homo sapien
tcttggctctgtgccatgaagccct

SEQ ID NO: 4364002 - DNA, 25 bp, Homo sapien
cacgaatatcagaaaccatagggtg

SEQ ID NO: 4364003 - DNA, 25 bp, Homo sapien
ggaaactccctattggtcatcgctc

SEQ ID NO: 4364004 - DNA, 25 bp, Homo sapien
tcacatcgagggcattgctgtaaga

SEQ ID NO: 4364005 - DNA, 25 bp, Homo sapien
tactgaagacttgagatcacatcga

SEQ ID NO: 4364006 - DNA, 25 bp, Homo sapien
taatattgccggacatcttctgttt

SEQ ID NO: 4364007 - DNA, 25 bp, Homo sapien
caagtcatgggagtgtgggaattag

SEQ ID NO: 4364008 - DNA, 25 bp, Homo sapien
aaatagaataatattgccggacatc

SEQ ID NO: 4364009 - DNA, 25 bp, Homo sapien
gtgggaattaggattcctgtgtgtc

SEQ ID NO: 4364010 - DNA, 25 bp, Homo sapien
cttgtgtaagaccagtcatggcctc

SEQ ID NO: 4364011 - DNA, 25 bp, Homo sapien
ttgtgtaagaccagtcatggcctct

SEQ ID NO: 4364012 - DNA, 25 bp, Homo sapien
tgtgtaagaccagtcatggcctctg

SEQ ID NO: 4364013 - DNA, 25 bp, Homo sapien
gtgtaagaccagtcatggcctctgt

SEQ ID NO: 4364014 - DNA, 25 bp, Homo sapien
caaggacgggactctgaagtgccca

SEQ ID NO: 4364015 - DNA, 25 bp, Homo sapien
gaatgttgagagaaggttcagagct

SEQ ID NO: 4364016 - DNA, 25 bp, Homo sapien
ggtcagccatggcacagaaaaataa

SEQ ID NO: 4364017 - DNA, 25 bp, Homo sapien
gtttgcgtcaacataggtcagccat

SEQ ID NO: 4364018 - DNA, 25 bp, Homo sapien
gcaatctgtaaaacaaatccgtttc

SEQ ID NO: 4364019 - DNA, 25 bp, Homo sapien
aagtggcaatctgtaaaacaaatcc

SEQ ID NO: 4364020 - DNA, 25 bp, Homo sapien
gtggcaatctgtaaaacaaatccgt

SEQ ID NO: 4364021 - DNA, 25 bp, Homo sapien
tggcaatctgtaaaacaaatccgtt

SEQ ID NO: 4364022 - DNA, 25 bp, Homo sapien
catcgtccaccttctcaatgaacat

SEQ ID NO: 4364023 - DNA, 25 bp, Homo sapien
cacttggggttccatcgtccacctt

SEQ ID NO: 4364024 - DNA, 25 bp, Homo sapien
ttccatcgtccaccttctcaatgaa

SEQ ID NO: 4364025 - DNA, 25 bp, Homo sapien
gggttccatcgtccaccttctcaat

SEQ ID NO: 4364026 - DNA, 25 bp, Homo sapien
ctttctgagcatgccatgaagtaac

SEQ ID NO: 4364027 - DNA, 25 bp, Homo sapien
ttattaatggggtagctgggtacag

SEQ ID NO: 4364028 - DNA, 25 bp, Homo sapien
catgaagtaacctagaggtaaaagg

SEQ ID NO: 4364029 - DNA, 25 bp, Homo sapien
ttcctttctgagcatgccatgaagt

SEQ ID NO: 4364030 - DNA, 25 bp, Homo sapien
taaaatgtctttgtagacttagcca

SEQ ID NO: 4364031 - DNA, 25 bp, Homo sapien
tacacatttacgtcagagtacttag

SEQ ID NO: 4364032 - DNA, 25 bp, Homo sapien
gaatgacaggctttaattgcacaca

SEQ ID NO: 4364033 - DNA, 25 bp, Homo sapien
caaacagggcacaatgacactcact

SEQ ID NO: 4364034 - DNA, 25 bp, Homo sapien
caatgtggaacggcgtccctgtgca

SEQ ID NO: 4364035 - DNA, 25 bp, Homo sapien
atgtggaacggcgtccctgtgcaga

SEQ ID NO: 4364036 - DNA, 25 bp, Homo sapien
tggaacggcgtccctgtgcagaggc

SEQ ID NO: 4364037 - DNA, 25 bp, Homo sapien
tgtggaacggcgtccctgtgcagag

SEQ ID NO: 4364038 - DNA, 25 bp, Homo sapien
tgttctctccagtcaatagctctaa

SEQ ID NO: 4364039 - DNA, 25 bp, Homo sapien
ccagcagtgactgatgcagcagcaa

SEQ ID NO: 4364040 - DNA, 25 bp, Homo sapien
gggcatcacttatacaatccagcag

SEQ ID NO: 4364041 - DNA, 25 bp, Homo sapien
tcgtctagtctataaaccctctgag

SEQ ID NO: 4364042 - DNA, 25 bp, Homo sapien
ggttccaaatatacgtcatggcaca

SEQ ID NO: 4364043 - DNA, 25 bp, Homo sapien
tctattagaaagttcagctggttcc

SEQ ID NO: 4364044 - DNA, 25 bp, Homo sapien
tcaaaatgatgcgactggtgcttca

SEQ ID NO: 4364045 - DNA, 25 bp, Homo sapien
taggaaactcaatcagtgaccttgg

SEQ ID NO: 4364046 - DNA, 25 bp, Homo sapien
tccagctaaatccactgaaaatttc

SEQ ID NO: 4364047 - DNA, 25 bp, Homo sapien
cgtggcgccacggagagctccatat

SEQ ID NO: 4364048 - DNA, 25 bp, Homo sapien
tcatagctgcgtggtcccgtggcgc

SEQ ID NO: 4364049 - DNA, 25 bp, Homo sapien
catatggtcacccaaatgttccagc

SEQ ID NO: 4364050 - DNA, 25 bp, Homo sapien
catgggttataaatatccactccct

SEQ ID NO: 4364051 - DNA, 25 bp, Homo sapien
actgcattttcatgatccatatcca

SEQ ID NO: 4364052 - DNA, 25 bp, Homo sapien
ttcagaactgcattttcatgatcca

SEQ ID NO: 4364053 - DNA, 25 bp, Homo sapien
aaaaattcagaactgcattttcatg

SEQ ID NO: 4364054 - DNA, 25 bp, Homo sapien
cagaactgcattttcatgatccata

SEQ ID NO: 4364055 - DNA, 25 bp, Homo sapien
tgaatatgcatatcagtctctgcaa

SEQ ID NO: 4364056 - DNA, 25 bp, Homo sapien
agtatgtgacttggtgatagttgcc

SEQ ID NO: 4364057 - DNA, 25 bp, Homo sapien
tgctcagtctatctgctgttaatgg

SEQ ID NO: 4364058 - DNA, 25 bp, Homo sapien
tcatggactatctactcgaaaatgt

SEQ ID NO: 4364059 - DNA, 25 bp, Homo sapien
cactttatgaaagtccatgtcatct

SEQ ID NO: 4364060 - DNA, 25 bp, Homo sapien
gcactctggtagctactagacatac

SEQ ID NO: 4364061 - DNA, 25 bp, Homo sapien
gagacctagtatttcctctgagaaa

SEQ ID NO: 4364062 - DNA, 25 bp, Homo sapien
tcagtagggtattcagaacttctcc

SEQ ID NO: 4364063 - DNA, 25 bp, Homo sapien
tatccatgctcgttataacggcagg

SEQ ID NO: 4364064 - DNA, 25 bp, Homo sapien
agctcaccacctgtcagtgacgagg

SEQ ID NO: 4364065 - DNA, 25 bp, Homo sapien
gacaggtaagcatcttggccactgg

SEQ ID NO: 4364066 - DNA, 25 bp, Homo sapien
cacatgctggacaccgagacaggta

SEQ ID NO: 4364067 - DNA, 25 bp, Homo sapien
aaaagaacactttacagctcaccac

SEQ ID NO: 4364068 - DNA, 25 bp, Homo sapien
agagtattttgacaagacggctggg

SEQ ID NO: 4364069 - DNA, 25 bp, Homo sapien
ttagagtattttgacaagacggctg

SEQ ID NO: 4364070 - DNA, 25 bp, Homo sapien
tagagtattttgacaagacggctgg

SEQ ID NO: 4364071 - DNA, 25 bp, Homo sapien
cttagagtattttgacaagacggct

SEQ ID NO: 4364072 - DNA, 25 bp, Homo sapien
agccagccatagggtcctggtggca

SEQ ID NO: 4364073 - DNA, 25 bp, Homo sapien
gtgctcagtgaatgccaagtcatca

SEQ ID NO: 4364074 - DNA, 25 bp, Homo sapien
accatggtgtgtagaaagctgactc

SEQ ID NO: 4364075 - DNA, 25 bp, Homo sapien
aagctgactctcatgctggtgctca

SEQ ID NO: 4364076 - DNA, 25 bp, Homo sapien
tcttcgtccattcccgtactctgaa

SEQ ID NO: 4364077 - DNA, 25 bp, Homo sapien
tctggtaatattctatcttcgtcca

SEQ ID NO: 4364078 - DNA, 25 bp, Homo sapien
ccgtactctgaaacaaggccatctg

SEQ ID NO: 4364079 - DNA, 25 bp, Homo sapien
ggttctggtaatattctatcttcgt

SEQ ID NO: 4364080 - DNA, 25 bp, Homo sapien
gatgtctagaaaagcgacagtgact

SEQ ID NO: 4364081 - DNA, 25 bp, Homo sapien
gaccaacattgtgcttatgacctga

SEQ ID NO: 4364082 - DNA, 25 bp, Homo sapien
gtacagcatcaagcttcacactgaa

SEQ ID NO: 4364083 - DNA, 25 bp, Homo sapien
gacctgatggtaagcaaaagacaca

SEQ ID NO: 4364084 - DNA, 25 bp, Homo sapien
ctgatccatgcagacttcccaaggg

SEQ ID NO: 4364085 - DNA, 25 bp, Homo sapien
acaaggcccgtttgatccagcacct

SEQ ID NO: 4364086 - DNA, 25 bp, Homo sapien
catggattcctctgatccatgcaga

SEQ ID NO: 4364087 - DNA, 25 bp, Homo sapien
agaacaaggcccgtttgatccagca

SEQ ID NO: 4364088 - DNA, 25 bp, Homo sapien
tttagaaactttaaccagcatggca

SEQ ID NO: 4364089 - DNA, 25 bp, Homo sapien
atttcctactggcagatgcatttgc

SEQ ID NO: 4364090 - DNA, 25 bp, Homo sapien
cagaaatgacagagctagttgcctc

SEQ ID NO: 4364091 - DNA, 25 bp, Homo sapien
atgacagagctagttgcctcagtgc

SEQ ID NO: 4364092 - DNA, 25 bp, Homo sapien
ggcttcagaataattatcctgtcca

SEQ ID NO: 4364093 - DNA, 25 bp, Homo sapien
gacagtaagaatcagtgtcaacagc

SEQ ID NO: 4364094 - DNA, 25 bp, Homo sapien
gcttcagaataattatcctgtccaa

SEQ ID NO: 4364095 - DNA, 25 bp, Homo sapien
ttcagaataattatcctgtccaaaa

SEQ ID NO: 4364096 - DNA, 25 bp, Homo sapien
gacagagcttttgtacatcatggga

SEQ ID NO: 4364097 - DNA, 25 bp, Homo sapien
tctggagtgctgagaaaccatgacc

SEQ ID NO: 4364098 - DNA, 25 bp, Homo sapien
tctatatgataaaccctatctggag

SEQ ID NO: 4364099 - DNA, 25 bp, Homo sapien
tcactatcagattaatgcccaacat

SEQ ID NO: 4364100 - DNA, 25 bp, Homo sapien
agaggttgccctcctgctgtttgaa

SEQ ID NO: 4364101 - DNA, 25 bp, Homo sapien
gttgccaatcactacccaaactggt

SEQ ID NO: 4364102 - DNA, 25 bp, Homo sapien
tctaaattactatggcacgcctaac

SEQ ID NO: 4364103 - DNA, 25 bp, Homo sapien
aggccctgggacagagctagtttga

SEQ ID NO: 4364104 - DNA, 25 bp, Homo sapien
cagaaaatattgtccatgtggccaa

SEQ ID NO: 4364105 - DNA, 25 bp, Homo sapien
caggcagaggttcctatacaagtgc

SEQ ID NO: 4364106 - DNA, 25 bp, Homo sapien
gaaactaaccctcaagaacaggcag

SEQ ID NO: 4364107 - DNA, 25 bp, Homo sapien
gaaagacggtactataggattcaac

SEQ ID NO: 4364108 - DNA, 25 bp, Homo sapien
gctctcacacaacagtgttaataag

SEQ ID NO: 4364109 - DNA, 25 bp, Homo sapien
tctcacacaacagtgttaataagta

SEQ ID NO: 4364110 - DNA, 25 bp, Homo sapien
cacaacagtgttaataagtatttaa

SEQ ID NO: 4364111 - DNA, 25 bp, Homo sapien
cagtgttaataagtatttaacgcct

SEQ ID NO: 4364112 - DNA, 25 bp, Homo sapien
cgcagctcgaatcccctaaacaatg

SEQ ID NO: 4364113 - DNA, 25 bp, Homo sapien
taaacaatgccgagccaagtgcagg

SEQ ID NO: 4364114 - DNA, 25 bp, Homo sapien
gccttcaactttggcggcggcagca

SEQ ID NO: 4364115 - DNA, 25 bp, Homo sapien
cagcagcaggttgcgttgccatgga

SEQ ID NO: 4364116 - DNA, 25 bp, Homo sapien
gagtcgctcctgctaatgaacaaaa

SEQ ID NO: 4364117 - DNA, 25 bp, Homo sapien
gaacaaaatcgcctctgatcagctc

SEQ ID NO: 4364118 - DNA, 25 bp, Homo sapien
gggcagcacatgtttattccacgtt

SEQ ID NO: 4364119 - DNA, 25 bp, Homo sapien
tacaactggtaaagacgtgtttgcc

SEQ ID NO: 4364120 - DNA, 25 bp, Homo sapien
tgagcgtccttttaacactttgagt

SEQ ID NO: 4364121 - DNA, 25 bp, Homo sapien
ttgagtcttcctttagtgttgcagc

SEQ ID NO: 4364122 - DNA, 25 bp, Homo sapien
cacaatactacattttgagcgtcct

SEQ ID NO: 4364123 - DNA, 25 bp, Homo sapien
tttagtgttgcagccttttctttcc

SEQ ID NO: 4364124 - DNA, 25 bp, Homo sapien
tctttctctaccaaaatttcctaca

SEQ ID NO: 4364125 - DNA, 25 bp, Homo sapien
tttctctaccaaaatttcctacaca

SEQ ID NO: 4364126 - DNA, 25 bp, Homo sapien
ggcacaaaagcggatctgcggcgtt

SEQ ID NO: 4364127 - DNA, 25 bp, Homo sapien
cgggagactttgctcgttattcatc

SEQ ID NO: 4364128 - DNA, 25 bp, Homo sapien
catctgtttagtcgcctcagaggca

SEQ ID NO: 4364129 - DNA, 25 bp, Homo sapien
gatctgcggcgttatgaaaaatggc

SEQ ID NO: 4364130 - DNA, 25 bp, Homo sapien
agatcaaacttatagcctgaggccc

SEQ ID NO: 4364131 - DNA, 25 bp, Homo sapien
gaagatcaaacttatagcctgaggc

SEQ ID NO: 4364132 - DNA, 25 bp, Homo sapien
gatcaaacttatagcctgaggccct

SEQ ID NO: 4364133 - DNA, 25 bp, Homo sapien
aggaagatcaaacttatagcctgag

SEQ ID NO: 4364134 - DNA, 25 bp, Homo sapien
gtatggtgggagcgggggccagaga

SEQ ID NO: 4364135 - DNA, 25 bp, Homo sapien
ttgaaggttaacattggggtgacac

SEQ ID NO: 4364136 - DNA, 25 bp, Homo sapien
gggtatggtgggagcgggggccaga

SEQ ID NO: 4364137 - DNA, 25 bp, Homo sapien
attggggtgacactggcttcaaaga

SEQ ID NO: 4364138 - DNA, 25 bp, Homo sapien
gaattcccaggaaagtgttatcgga

SEQ ID NO: 4364139 - DNA, 25 bp, Homo sapien
tgctgctaaggctcctgaccttgta

SEQ ID NO: 4364140 - DNA, 25 bp, Homo sapien
caagagctgcttgcttaggctgcag

SEQ ID NO: 4364141 - DNA, 25 bp, Homo sapien
gaccttgtagatgacggaattccca

SEQ ID NO: 4364142 - DNA, 25 bp, Homo sapien
tcaaagtcgatttgttcttatacct

SEQ ID NO: 4364143 - DNA, 25 bp, Homo sapien
caaagtcgatttgttcttatacctg

SEQ ID NO: 4364144 - DNA, 25 bp, Homo sapien
aaagtcgatttgttcttatacctga

SEQ ID NO: 4364145 - DNA, 25 bp, Homo sapien
tgtcttcattagtctgatctctgaa

SEQ ID NO: 4364146 - DNA, 25 bp, Homo sapien
gatctctgaagactgtcgaacattt

SEQ ID NO: 4364147 - DNA, 25 bp, Homo sapien
gaaaagtatgtaaatatgagcagga

SEQ ID NO: 4364148 - DNA, 25 bp, Homo sapien
taatgtattttctgcgggagatgag

SEQ ID NO: 4364149 - DNA, 25 bp, Homo sapien
gggttaaagtcagtcctcggctcca

SEQ ID NO: 4364150 - DNA, 25 bp, Homo sapien
ggctgtgagttagtttcaaccaggg

SEQ ID NO: 4364151 - DNA, 25 bp, Homo sapien
cgtttccctggacgactgtggctgg

SEQ ID NO: 4364152 - DNA, 25 bp, Homo sapien
ggcctcccggcagtaatcttgcgca

SEQ ID NO: 4364153 - DNA, 25 bp, Homo sapien
agttggccaggacgcgccccttttg

SEQ ID NO: 4364154 - DNA, 25 bp, Homo sapien
tggaaccgtgaaacgctgaagcgtg

SEQ ID NO: 4364155 - DNA, 25 bp, Homo sapien
tgaagcgtgatagcgccagttggcc

SEQ ID NO: 4364156 - DNA, 25 bp, Homo sapien
cccagtgtttgcttagatggaagcc

SEQ ID NO: 4364157 - DNA, 25 bp, Homo sapien
tgggctgctggccgtggaccaggtc

SEQ ID NO: 4364158 - DNA, 25 bp, Homo sapien
cctgggctgctggccgtggaccagg

SEQ ID NO: 4364159 - DNA, 25 bp, Homo sapien
ctgggctgctggccgtggaccaggt

SEQ ID NO: 4364160 - DNA, 25 bp, Homo sapien
tgggtggggcctgctttagtgaggc

SEQ ID NO: 4364161 - DNA, 25 bp, Homo sapien
cctgagagtcccgatctgggatccg

SEQ ID NO: 4364162 - DNA, 25 bp, Homo sapien
tctgggatccgaactgtggcaaagc

SEQ ID NO: 4364163 - DNA, 25 bp, Homo sapien
tcccgatctgggatccgaactgtgg

SEQ ID NO: 4364164 - DNA, 25 bp, Homo sapien
gagtcccgatctgggatccgaactg

SEQ ID NO: 4364165 - DNA, 25 bp, Homo sapien
cctgcattttggctcacgtagtcta

SEQ ID NO: 4364166 - DNA, 25 bp, Homo sapien
gcattttggctcacgtagtctacac

SEQ ID NO: 4364167 - DNA, 25 bp, Homo sapien
attttggctcacgtagtctacactg

SEQ ID NO: 4364168 - DNA, 25 bp, Homo sapien
tgaattgctttccctgcattttggc

SEQ ID NO: 4364169 - DNA, 25 bp, Homo sapien
cacagggacagtaggtgtacaagag

SEQ ID NO: 4364170 - DNA, 25 bp, Homo sapien
tgagcattgtcagttcagggttgga

SEQ ID NO: 4364171 - DNA, 25 bp, Homo sapien
ccaagatcttttcaccaggccagca

SEQ ID NO: 4364172 - DNA, 25 bp, Homo sapien
gatcattagccgactaaagcgcccc

SEQ ID NO: 4364173 - DNA, 25 bp, Homo sapien
aaggacagcggagtctcccgggcac

SEQ ID NO: 4364174 - DNA, 25 bp, Homo sapien
tcaaggacagcggagtctcccgggc

SEQ ID NO: 4364175 - DNA, 25 bp, Homo sapien
caaggacagcggagtctcccgggca

SEQ ID NO: 4364176 - DNA, 25 bp, Homo sapien
aaaagccttgactggaagtctcgag

SEQ ID NO: 4364177 - DNA, 25 bp, Homo sapien
cattctagggaatgatttaggcctc

SEQ ID NO: 4364178 - DNA, 25 bp, Homo sapien
gctggtatcctctctggagccatgg

SEQ ID NO: 4364179 - DNA, 25 bp, Homo sapien
tgggcgccctctcgtgcaaggcttt

SEQ ID NO: 4364180 - DNA, 25 bp, Homo sapien
gccagataagagtgtgcgtgcatcg

SEQ ID NO: 4364181 - DNA, 25 bp, Homo sapien
tgcatcggatgctaaaactcaccag

SEQ ID NO: 4364182 - DNA, 25 bp, Homo sapien
caggcataggccttcgcgcaggtat

SEQ ID NO: 4364183 - DNA, 25 bp, Homo sapien
taggaagatctctgcggccaactgt

SEQ ID NO: 4364184 - DNA, 25 bp, Homo sapien
gattcccaccagctattggactttt

SEQ ID NO: 4364185 - DNA, 25 bp, Homo sapien
ggtggttatttgacgttgctctgag

SEQ ID NO: 4364186 - DNA, 25 bp, Homo sapien
tcaggtcttacagccgaactgtcct

SEQ ID NO: 4364187 - DNA, 25 bp, Homo sapien
ttccttgttttgattcccaccagct

SEQ ID NO: 4364188 - DNA, 25 bp, Homo sapien
gaaaatagccaaatgcagcgccatg

SEQ ID NO: 4364189 - DNA, 25 bp, Homo sapien
tatttccatggcgagcctaacgcgg

SEQ ID NO: 4364190 - DNA, 25 bp, Homo sapien
caaggactggcactaaagaagactc

SEQ ID NO: 4364191 - DNA, 25 bp, Homo sapien
gtgcagagtgaacccctaaacgtgg

SEQ ID NO: 4364192 - DNA, 25 bp, Homo sapien
tccttaatgaaaagcctggacgggc

SEQ ID NO: 4364193 - DNA, 25 bp, Homo sapien
tattatgatcgggtacaagtgccca

SEQ ID NO: 4364194 - DNA, 25 bp, Homo sapien
ccaggcttggcctttcaggatttca

SEQ ID NO: 4364195 - DNA, 25 bp, Homo sapien
gctgagcggcgattcaagcggctct

SEQ ID NO: 4364196 - DNA, 25 bp, Homo sapien
ccgtggcgaagaaacactgctttgt

SEQ ID NO: 4364197 - DNA, 25 bp, Homo sapien
catgaagatgcaccgtggcgaagaa

SEQ ID NO: 4364198 - DNA, 25 bp, Homo sapien
ccctttgatgtagcaggcgcgagat

SEQ ID NO: 4364199 - DNA, 25 bp, Homo sapien
aacactgctttgtgcgcgggccctt

SEQ ID NO: 4364200 - DNA, 25 bp, Homo sapien
gagcgagattaccttgcgagcaacg

SEQ ID NO: 4364201 - DNA, 25 bp, Homo sapien
gattaccttgcgagcaacgcggtgg

SEQ ID NO: 4364202 - DNA, 25 bp, Homo sapien
taccttgcgagcaacgcggtggaca

SEQ ID NO: 4364203 - DNA, 25 bp, Homo sapien
ctgcgcggagcgagattaccttgcg

SEQ ID NO: 4364204 - DNA, 25 bp, Homo sapien
tattttagattgagatagaaagcaa

SEQ ID NO: 4364205 - DNA, 25 bp, Homo sapien
ctaaaggtgtatttggaagactgca

SEQ ID NO: 4364206 - DNA, 25 bp, Homo sapien
taattgtctaattgcgtctgaagag

SEQ ID NO: 4364207 - DNA, 25 bp, Homo sapien
agaaaattcatcagtggcagggcca

SEQ ID NO: 4364208 - DNA, 25 bp, Homo sapien
gaaaatagttccactccagttagga

SEQ ID NO: 4364209 - DNA, 25 bp, Homo sapien
ctaggattttggggcagccgcattc

SEQ ID NO: 4364210 - DNA, 25 bp, Homo sapien
ggtgtgtgcggaagcagcaatcaca

SEQ ID NO: 4364211 - DNA, 25 bp, Homo sapien
gcctcagaaacgtggcctactctgc

SEQ ID NO: 4364212 - DNA, 25 bp, Homo sapien
acagaggcagccctaataccggagg

SEQ ID NO: 4364213 - DNA, 25 bp, Homo sapien
tctgcattcggtgtgtgcggaagca

SEQ ID NO: 4364214 - DNA, 25 bp, Homo sapien
cattcgctcaagtcggcggtacgcg

SEQ ID NO: 4364215 - DNA, 25 bp, Homo sapien
aagtcggcggtacgcgccgccaccg

SEQ ID NO: 4364216 - DNA, 25 bp, Homo sapien
ctcaagtcggcggtacgcgccgcca

SEQ ID NO: 4364217 - DNA, 25 bp, Homo sapien
attcgctcaagtcggcggtacgcgc

SEQ ID NO: 4364218 - DNA, 25 bp, Homo sapien
cctcgaactcgcatctgaagggctt

SEQ ID NO: 4364219 - DNA, 25 bp, Homo sapien
tgtagccgaatcgtagccagagctg

SEQ ID NO: 4364220 - DNA, 25 bp, Homo sapien
tgtgcacgtgcgaatgcttcttacg

SEQ ID NO: 4364221 - DNA, 25 bp, Homo sapien
cgtgtatggcttgtcgctagtgtgc

SEQ ID NO: 4364222 - DNA, 25 bp, Homo sapien
tggcggaggcaacgcagagacatta

SEQ ID NO: 4364223 - DNA, 25 bp, Homo sapien
tcgtgttcccgtcaggtgcttgcca

SEQ ID NO: 4364224 - DNA, 25 bp, Homo sapien
tttccacggcgcctcaggtcgagca

SEQ ID NO: 4364225 - DNA, 25 bp, Homo sapien
cattagtgcttgtgggtcgtgttcc

SEQ ID NO: 4364226 - DNA, 25 bp, Homo sapien
catcctcgaaaatcctgatccactc

SEQ ID NO: 4364227 - DNA, 25 bp, Homo sapien
cttagtcgagtttccatcctcgaaa

SEQ ID NO: 4364228 - DNA, 25 bp, Homo sapien
atcctcgaaaatcctgatccactcg

SEQ ID NO: 4364229 - DNA, 25 bp, Homo sapien
ccatcctcgaaaatcctgatccact

SEQ ID NO: 4364230 - DNA, 25 bp, Homo sapien
cataaagtggattcgtgctgcaggg

SEQ ID NO: 4364231 - DNA, 25 bp, Homo sapien
taatttaaggatgcgcagccgatgc

SEQ ID NO: 4364232 - DNA, 25 bp, Homo sapien
taggttttgcgcaaacgccaaagcg

SEQ ID NO: 4364233 - DNA, 25 bp, Homo sapien
ggaaatacattaacggaggagctca

SEQ ID NO: 4364234 - DNA, 25 bp, Homo sapien
ctggagaccgtgctgtgggcagctg

SEQ ID NO: 4364235 - DNA, 25 bp, Homo sapien
tatttcattacgctgctccagaggc

SEQ ID NO: 4364236 - DNA, 25 bp, Homo sapien
ccacctggctgtcgggcctctcggt

SEQ ID NO: 4364237 - DNA, 25 bp, Homo sapien
tgacttgcgatgtcgaccggtctgc

SEQ ID NO: 4364238 - DNA, 25 bp, Homo sapien
ttgcgatgtcgaccggtctgcccag

SEQ ID NO: 4364239 - DNA, 25 bp, Homo sapien
gatgtcgaccggtctgcccagacca

SEQ ID NO: 4364240 - DNA, 25 bp, Homo sapien
aggccaaatgggatccgaggtgtct

SEQ ID NO: 4364241 - DNA, 25 bp, Homo sapien
atccgaggtgtctaccgcaaccacg

SEQ ID NO: 4364242 - DNA, 25 bp, Homo sapien
ggttggcgcggtagggtccgcacag

SEQ ID NO: 4364243 - DNA, 25 bp, Homo sapien
accacgcccttgagcgctgcggctt

SEQ ID NO: 4364244 - DNA, 25 bp, Homo sapien
ggctgggatcggtggctgcgatgcc

SEQ ID NO: 4364245 - DNA, 25 bp, Homo sapien
gcggctggcataggccggggagggg

SEQ ID NO: 4364246 - DNA, 25 bp, Homo sapien
gaggggctgggatcggtggctgcga

SEQ ID NO: 4364247 - DNA, 25 bp, Homo sapien
caggcggctggcataggccggggag

SEQ ID NO: 4364248 - DNA, 25 bp, Homo sapien
ctgtagagccgagggaaggcgcgag

SEQ ID NO: 4364249 - DNA, 25 bp, Homo sapien
agtgcacgttagagtgacaatattg

SEQ ID NO: 4364250 - DNA, 25 bp, Homo sapien
ggaaggcgcgagtgcacgttagagt

SEQ ID NO: 4364251 - DNA, 25 bp, Homo sapien
gcgcgagtgcacgttagagtgacaa

SEQ ID NO: 4364252 - DNA, 25 bp, Homo sapien
gctgaattcgctgacgtgtaggaga

SEQ ID NO: 4364253 - DNA, 25 bp, Homo sapien
gaagcctagattcctgccggagctg

SEQ ID NO: 4364254 - DNA, 25 bp, Homo sapien
ggagctcacggccagctgaattcgc

SEQ ID NO: 4364255 - DNA, 25 bp, Homo sapien
gagaacccggaagcctagattcctg

SEQ ID NO: 4364256 - DNA, 25 bp, Homo sapien
taagggaccggctacctagcgtcta

SEQ ID NO: 4364257 - DNA, 25 bp, Homo sapien
cccagcgctctgagttaagggaccg

SEQ ID NO: 4364258 - DNA, 25 bp, Homo sapien
gaagacgcgcagctggagaactgtt

SEQ ID NO: 4364259 - DNA, 25 bp, Homo sapien
tctgggcgctttaaacaaatggctg

SEQ ID NO: 4364260 - DNA, 25 bp, Homo sapien
ggctcctgagcccgggtctccggca

SEQ ID NO: 4364261 - DNA, 25 bp, Homo sapien
cgcttctgcgcaatcagcggctcct

SEQ ID NO: 4364262 - DNA, 25 bp, Homo sapien
ctgcgcttctgcgcaatcagcggct

SEQ ID NO: 4364263 - DNA, 25 bp, Homo sapien
cggctcctgagcccgggtctccggc

SEQ ID NO: 4364264 - DNA, 25 bp, Homo sapien
tgaacagtctggaaggtgttggcac

SEQ ID NO: 4364265 - DNA, 25 bp, Homo sapien
gagcacagctagtacactgaacagt

SEQ ID NO: 4364266 - DNA, 25 bp, Homo sapien
ctagtacactgaacagtctggaagg

SEQ ID NO: 4364267 - DNA, 25 bp, Homo sapien
ctacaggagcacagctagtacactg

SEQ ID NO: 4364268 - DNA, 25 bp, Homo sapien
ctgccatttcgcgggacactggcac

SEQ ID NO: 4364269 - DNA, 25 bp, Homo sapien
gccatttcgcgggacactggcacca

SEQ ID NO: 4364270 - DNA, 25 bp, Homo sapien
tgccatttcgcgggacactggcacc

SEQ ID NO: 4364271 - DNA, 25 bp, Homo sapien
ctcgggctagctgggccagcgccat

SEQ ID NO: 4364272 - DNA, 25 bp, Homo sapien
ccggggctgcgctgtgaaagaccca

SEQ ID NO: 4364273 - DNA, 25 bp, Homo sapien
tccgccgaacaaagttcggaagctc

SEQ ID NO: 4364274 - DNA, 25 bp, Homo sapien
tgaagaggcggcgttgggctaggcc

SEQ ID NO: 4364275 - DNA, 25 bp, Homo sapien
tgactcgccctcagacgccggggaa

SEQ ID NO: 4364276 - DNA, 25 bp, Homo sapien
tctcgcacttgtggctggatctggt

SEQ ID NO: 4364277 - DNA, 25 bp, Homo sapien
tggccaggccgagcgcggttgctgg

SEQ ID NO: 4364278 - DNA, 25 bp, Homo sapien
tggatctggttgtcccggcgactgc

SEQ ID NO: 4364279 - DNA, 25 bp, Homo sapien
tgctaaagcgaaagtgagggtccac

SEQ ID NO: 4364280 - DNA, 25 bp, Homo sapien
catgcgacattgtgggaaaccctga

SEQ ID NO: 4364281 - DNA, 25 bp, Homo sapien
tctgctgcgcaattccaaagggaca

SEQ ID NO: 4364282 - DNA, 25 bp, Homo sapien
taacctctcagtccaggtgggccag

SEQ ID NO: 4364283 - DNA, 25 bp, Homo sapien
ccagagggtccgcacgcgacagaca

SEQ ID NO: 4364284 - DNA, 25 bp, Homo sapien
tcagttgggacttgaggaaatccag

SEQ ID NO: 4364285 - DNA, 25 bp, Homo sapien
gacttgaggaaatccagacccgagg

SEQ ID NO: 4364286 - DNA, 25 bp, Homo sapien
acgcgacagacagcgccgaatactg

SEQ ID NO: 4364287 - DNA, 25 bp, Homo sapien
gtgcacgcggatgtgatttacaagt

SEQ ID NO: 4364288 - DNA, 25 bp, Homo sapien
tgtagcggaagaaagcgccaggacc

SEQ ID NO: 4364289 - DNA, 25 bp, Homo sapien
ttttctgatctagcaaagaccttcc

SEQ ID NO: 4364290 - DNA, 25 bp, Homo sapien
gcgcagcgaggttcaccgtcaggtt

SEQ ID NO: 4364291 - DNA, 25 bp, Homo sapien
agccccagacgcaggagtccattca

SEQ ID NO: 4364292 - DNA, 25 bp, Homo sapien
cccagacgcaggagtccattcaaag

SEQ ID NO: 4364293 - DNA, 25 bp, Homo sapien
gacgcaggagtccattcaaaggacg

SEQ ID NO: 4364294 - DNA, 25 bp, Homo sapien
aggagtccattcaaaggacggctgg

SEQ ID NO: 4364295 - DNA, 25 bp, Homo sapien
ctgggggccatggtgtccagagctg

SEQ ID NO: 4364296 - DNA, 25 bp, Homo sapien
tgggggccatggtgtccagagctgc

SEQ ID NO: 4364297 - DNA, 25 bp, Homo sapien
gggccatggtgtccagagctgctac

SEQ ID NO: 4364298 - DNA, 25 bp, Homo sapien
ggggccatggtgtccagagctgcta

SEQ ID NO: 4364299 - DNA, 25 bp, Homo sapien
tcgaaacaaatagcgcgcatgagaa

SEQ ID NO: 4364300 - DNA, 25 bp, Homo sapien
caaatagcgcgcatgagaacgggtg

SEQ ID NO: 4364301 - DNA, 25 bp, Homo sapien
tgtcgaaacaaatagcgcgcatgag

SEQ ID NO: 4364302 - DNA, 25 bp, Homo sapien
ctgttgtcgaaacaaatagcgcgca

SEQ ID NO: 4364303 - DNA, 25 bp, Homo sapien
cagtgaacccggtggacagagcaag

SEQ ID NO: 4364304 - DNA, 25 bp, Homo sapien
agacagcgccagcagtgaacccggt

SEQ ID NO: 4364305 - DNA, 25 bp, Homo sapien
gccattgggccgaattgctgttggg

SEQ ID NO: 4364306 - DNA, 25 bp, Homo sapien
cgaattgctgttgggccaagtcccc

SEQ ID NO: 4364307 - DNA, 25 bp, Homo sapien
ggtagcggcagagtagatgtaaggg

SEQ ID NO: 4364308 - DNA, 25 bp, Homo sapien
ctgtgggttgctgggggttctgctc

SEQ ID NO: 4364309 - DNA, 25 bp, Homo sapien
ctagagagggatggtagcggcagag

SEQ ID NO: 4364310 - DNA, 25 bp, Homo sapien
taaggggtaatggaaggcgcagggc

SEQ ID NO: 4364311 - DNA, 25 bp, Homo sapien
tatatattttcagtgccccgcttgg

SEQ ID NO: 4364312 - DNA, 25 bp, Homo sapien
tgaagcgccccagccatatatattt

SEQ ID NO: 4364313 - DNA, 25 bp, Homo sapien
ggccggctgcttgccgacccacgct

SEQ ID NO: 4364314 - DNA, 25 bp, Homo sapien
gagctccctgtaccgggccgctaac

SEQ ID NO: 4364315 - DNA, 25 bp, Homo sapien
cccttggctattaatgcctacgcga

SEQ ID NO: 4364316 - DNA, 25 bp, Homo sapien
tacgcgaaatcctgcacactacaga

SEQ ID NO: 4364317 - DNA, 25 bp, Homo sapien
ggaacaatcgcctgggtagcccatt

SEQ ID NO: 4364318 - DNA, 25 bp, Homo sapien
cagggcgcgttaggaagtcaataga

SEQ ID NO: 4364319 - DNA, 25 bp, Homo sapien
gctgatgggcagcatcgtgtgcgca

SEQ ID NO: 4364320 - DNA, 25 bp, Homo sapien
ggcggtctcgttgggcagtttgtcc

SEQ ID NO: 4364321 - DNA, 25 bp, Homo sapien
catcgtgtgcgcagagatggcggtc

SEQ ID NO: 4364322 - DNA, 25 bp, Homo sapien
gcagagatggcggtctcgttgggca

SEQ ID NO: 4364323 - DNA, 25 bp, Homo sapien
tataccccgcagtcgtacggagcct

SEQ ID NO: 4364324 - DNA, 25 bp, Homo sapien
agaaacaggttttcgctctcggatc

SEQ ID NO: 4364325 - DNA, 25 bp, Homo sapien
tcagggatcctgagcgctatacccc

SEQ ID NO: 4364326 - DNA, 25 bp, Homo sapien
gatctccctgggcaaatcagggatc

SEQ ID NO: 4364327 - DNA, 25 bp, Homo sapien
ggcctctgtagaaagtgcacgccgc

SEQ ID NO: 4364328 - DNA, 25 bp, Homo sapien
tgtagaaagtgcacgccgcgtttcc

SEQ ID NO: 4364329 - DNA, 25 bp, Homo sapien
tctgtagaaagtgcacgccgcgttt

SEQ ID NO: 4364330 - DNA, 25 bp, Homo sapien
gtggccgcctccgacaagatgcctt

SEQ ID NO: 4364331 - DNA, 25 bp, Homo sapien
tctggctcagtcgagtgtggcaaaa

SEQ ID NO: 4364332 - DNA, 25 bp, Homo sapien
gctcagtcgagtgtggcaaaagccg

SEQ ID NO: 4364333 - DNA, 25 bp, Homo sapien
tcagtcgagtgtggcaaaagccgag

SEQ ID NO: 4364334 - DNA, 25 bp, Homo sapien
gttctggctcagtcgagtgtggcaa

SEQ ID NO: 4364335 - DNA, 25 bp, Homo sapien
gctaaggtcagctgcgtcgtccggc

SEQ ID NO: 4364336 - DNA, 25 bp, Homo sapien
gtcgtccggcgatttaaagggctgc

SEQ ID NO: 4364337 - DNA, 25 bp, Homo sapien
tgccagtctaagtgcttgggcttcc

SEQ ID NO: 4364338 - DNA, 25 bp, Homo sapien
tcgctgcagccgaaaatgccagtct

SEQ ID NO: 4364339 - DNA, 25 bp, Homo sapien
tggcggccataaaaagtgtccccca

SEQ ID NO: 4364340 - DNA, 25 bp, Homo sapien
tagacgcctggaagggaaaatacca

SEQ ID NO: 4364341 - DNA, 25 bp, Homo sapien
tcgtcactaccacattgcagaaggc

SEQ ID NO: 4364342 - DNA, 25 bp, Homo sapien
cacattgtgggaacctcgtcactac

SEQ ID NO: 4364343 - DNA, 25 bp, Homo sapien
tgcagaaggctggtatccctggtaa

SEQ ID NO: 4364344 - DNA, 25 bp, Homo sapien
ttgactctttaagagtgtttcggta

SEQ ID NO: 4364345 - DNA, 25 bp, Homo sapien
tgactctttaagagtgtttcggtaa

SEQ ID NO: 4364346 - DNA, 25 bp, Homo sapien
tgagaagggtagaaataacacctcc

SEQ ID NO: 4364347 - DNA, 25 bp, Homo sapien
aatcgtttggttcaaatcatccaca

SEQ ID NO: 4364348 - DNA, 25 bp, Homo sapien
catccacatttcatagttgagaagg

SEQ ID NO: 4364349 - DNA, 25 bp, Homo sapien
taaagttaccaagccattggccgcc

SEQ ID NO: 4364350 - DNA, 25 bp, Homo sapien
ttggcggcttttacccttccatctc

SEQ ID NO: 4364351 - DNA, 25 bp, Homo sapien
cagaattccaactggcttggcggct

SEQ ID NO: 4364352 - DNA, 25 bp, Homo sapien
tcaacgtccaaccagaattccaact

SEQ ID NO: 4364353 - DNA, 25 bp, Homo sapien
tccaactggcttggcggcttttacc

SEQ ID NO: 4364354 - DNA, 25 bp, Homo sapien
ttgcattcctacagaagggcggcat

SEQ ID NO: 4364355 - DNA, 25 bp, Homo sapien
tttgcattcctacagaagggcggca

SEQ ID NO: 4364356 - DNA, 25 bp, Homo sapien
ggaggcctaactttgcattcctaca

SEQ ID NO: 4364357 - DNA, 25 bp, Homo sapien
caattctttctaaccaaaaggcatt

SEQ ID NO: 4364358 - DNA, 25 bp, Homo sapien
gcgtcctcgctctgaaatttcctca

SEQ ID NO: 4364359 - DNA, 25 bp, Homo sapien
tcctcgctctgaaatttcctcatgg

SEQ ID NO: 4364360 - DNA, 25 bp, Homo sapien
gctgggcgtcctcgctctgaaattt

SEQ ID NO: 4364361 - DNA, 25 bp, Homo sapien
tgggcgtcctcgctctgaaatttcc

SEQ ID NO: 4364362 - DNA, 25 bp, Homo sapien
gagctccagtgattgatagtgccgg

SEQ ID NO: 4364363 - DNA, 25 bp, Homo sapien
gacagtgggtaggtgcaaaaagcac

SEQ ID NO: 4364364 - DNA, 25 bp, Homo sapien
tgctccttactgactagccggcagg

SEQ ID NO: 4364365 - DNA, 25 bp, Homo sapien
ggagcctcggaagctgcaaattgtg

SEQ ID NO: 4364366 - DNA, 25 bp, Homo sapien
ttcgaccctcaagcgccaggagttt

SEQ ID NO: 4364367 - DNA, 25 bp, Homo sapien
tccgggtgcccagaatagagtttgt

SEQ ID NO: 4364368 - DNA, 25 bp, Homo sapien
ggcatttagccctccctttgaatca

SEQ ID NO: 4364369 - DNA, 25 bp, Homo sapien
cagtagatcaggctgggcatttagc

SEQ ID NO: 4364370 - DNA, 25 bp, Homo sapien
tcagatccaacctttgagccagtcc

SEQ ID NO: 4364371 - DNA, 25 bp, Homo sapien
gagtttcctgaagacggtgacggcc

SEQ ID NO: 4364372 - DNA, 25 bp, Homo sapien
tcattggcccctaatttccaatgcc

SEQ ID NO: 4364373 - DNA, 25 bp, Homo sapien
gacatgggccattcatcaaccccaa

SEQ ID NO: 4364374 - DNA, 25 bp, Homo sapien
tcttgttcgcattggagataaagaa

SEQ ID NO: 4364375 - DNA, 25 bp, Homo sapien
gagctagttgctgctcttgttcgca

SEQ ID NO: 4364376 - DNA, 25 bp, Homo sapien
ctggccgcgcgcagagagcagatcc

SEQ ID NO: 4364377 - DNA, 25 bp, Homo sapien
agaaagccaagtcccgaacccactg

SEQ ID NO: 4364378 - DNA, 25 bp, Homo sapien
gggcggagaagttccatcgtcttgc

SEQ ID NO: 4364379 - DNA, 25 bp, Homo sapien
gcggagaagttccatcgtcttgctg

SEQ ID NO: 4364380 - DNA, 25 bp, Homo sapien
ctgccatctgggctaacttggcgct

SEQ ID NO: 4364381 - DNA, 25 bp, Homo sapien
tctgggctaacttggcgctttgacc

SEQ ID NO: 4364382 - DNA, 25 bp, Homo sapien
ccccttgggggcagagcagagatac

SEQ ID NO: 4364383 - DNA, 25 bp, Homo sapien
aagcagagactctcctagccacccc

SEQ ID NO: 4364384 - DNA, 25 bp, Homo sapien
tagccacccccttgggggcagagca

SEQ ID NO: 4364385 - DNA, 25 bp, Homo sapien
gggaagcagagactctcctagccac

SEQ ID NO: 4364386 - DNA, 25 bp, Homo sapien
gccttgctcatttttcgcgagggaa

SEQ ID NO: 4364387 - DNA, 25 bp, Homo sapien
catttttcgcgagggaagctctggg

SEQ ID NO: 4364388 - DNA, 25 bp, Homo sapien
cacggtggggcacccaggcaattca

SEQ ID NO: 4364389 - DNA, 25 bp, Homo sapien
cccaggcaattcacaaggagagaag

SEQ ID NO: 4364390 - DNA, 25 bp, Homo sapien
ccactccacctgttgccaggatcgc

SEQ ID NO: 4364391 - DNA, 25 bp, Homo sapien
tgccaggatcgcctcatttctgcac

SEQ ID NO: 4364392 - DNA, 25 bp, Homo sapien
tgcacatcatttcggggtggctgag

SEQ ID NO: 4364393 - DNA, 25 bp, Homo sapien
cacctgttgccaggatcgcctcatt

SEQ ID NO: 4364394 - DNA, 25 bp, Homo sapien
aatggcttatatgtcacgttggtgc

SEQ ID NO: 4364395 - DNA, 25 bp, Homo sapien
tggctttgaactggagccgttcgcg

SEQ ID NO: 4364396 - DNA, 25 bp, Homo sapien
ttttgtggttccagcgaggcggtca

SEQ ID NO: 4364397 - DNA, 25 bp, Homo sapien
gaggcggtcatccttcacttctcct

SEQ ID NO: 4364398 - DNA, 25 bp, Homo sapien
cctcttgtcaacgtccccgttggat

SEQ ID NO: 4364399 - DNA, 25 bp, Homo sapien
ctcttgtcaacgtccccgttggatt

SEQ ID NO: 4364400 - DNA, 25 bp, Homo sapien
aatgctgggctgctagactcagact

SEQ ID NO: 4364401 - DNA, 25 bp, Homo sapien
tccgaatttatatttcccggcacaa

SEQ ID NO: 4364402 - DNA, 25 bp, Homo sapien
ttcccggcacaagcacaaatgctca

SEQ ID NO: 4364403 - DNA, 25 bp, Homo sapien
gttgatgggaacagaacaattaatt

SEQ ID NO: 4364404 - DNA, 25 bp, Homo sapien
aaatcatcccggatacccaagccga

SEQ ID NO: 4364405 - DNA, 25 bp, Homo sapien
caagccgacttttgagcaagcacag

SEQ ID NO: 4364406 - DNA, 25 bp, Homo sapien
cagcgctggcgtcagggcaaaaaat

SEQ ID NO: 4364407 - DNA, 25 bp, Homo sapien
ggccagccccaagcgagaatctagt

SEQ ID NO: 4364408 - DNA, 25 bp, Homo sapien
ggcgcgctgcgcgaggcggagagag

SEQ ID NO: 4364409 - DNA, 25 bp, Homo sapien
agagagggcgaagcagtcgcggcac

SEQ ID NO: 4364410 - DNA, 25 bp, Homo sapien
ggagaagtaaggaggggcgcgctgc

SEQ ID NO: 4364411 - DNA, 25 bp, Homo sapien
agtcgcggcactggcgctcacattc

SEQ ID NO: 4364412 - DNA, 25 bp, Homo sapien
catgaacgtgaacatggccgcgcat

SEQ ID NO: 4364413 - DNA, 25 bp, Homo sapien
cctaacgtggtcaacgggcagatga

SEQ ID NO: 4364414 - DNA, 25 bp, Homo sapien
tggcccggagcagagtaatcacatc

SEQ ID NO: 4364415 - DNA, 25 bp, Homo sapien
gagctagttacgcacgtcaccgtgg

SEQ ID NO: 4364416 - DNA, 25 bp, Homo sapien
tcctagtttccatatttatccgcat

SEQ ID NO: 4364417 - DNA, 25 bp, Homo sapien
taattcctagtttccatatttatcc

SEQ ID NO: 4364418 - DNA, 25 bp, Homo sapien
ctataactgtccgttacttttggca

SEQ ID NO: 4364419 - DNA, 25 bp, Homo sapien
tataactgtccgttacttttggcaa

SEQ ID NO: 4364420 - DNA, 25 bp, Homo sapien
ttaatgactgtagcagaatgccttt

SEQ ID NO: 4364421 - DNA, 25 bp, Homo sapien
agattgtctttcttgcagtttagtt

SEQ ID NO: 4364422 - DNA, 25 bp, Homo sapien
taatgactgtagcagaatgcctttt

SEQ ID NO: 4364423 - DNA, 25 bp, Homo sapien
tgcagtttagtttgatagatttgca

SEQ ID NO: 4364424 - DNA, 25 bp, Homo sapien
ccattaggcagacaacgtagccgga

SEQ ID NO: 4364425 - DNA, 25 bp, Homo sapien
cgctggtaggaacgcaggcttcttt

SEQ ID NO: 4364426 - DNA, 25 bp, Homo sapien
tggttgtagcttgcatgatcgcccc

SEQ ID NO: 4364427 - DNA, 25 bp, Homo sapien
cgtagccggagatcacaaatcaggc

SEQ ID NO: 4364428 - DNA, 25 bp, Homo sapien
cagacatctctgtaagcatatccag

SEQ ID NO: 4364429 - DNA, 25 bp, Homo sapien
tgtcaactgtccacaatactttggc

SEQ ID NO: 4364430 - DNA, 25 bp, Homo sapien
tgcctctgatggttgtcagacatct

SEQ ID NO: 4364431 - DNA, 25 bp, Homo sapien
caggaaaatccaccggttgtgaaag

SEQ ID NO: 4364432 - DNA, 25 bp, Homo sapien
ctgccattggaacggcgagttgagc

SEQ ID NO: 4364433 - DNA, 25 bp, Homo sapien
tgctgccattggaacggcgagttga

SEQ ID NO: 4364434 - DNA, 25 bp, Homo sapien
ttggaacggcgagttgagcgggcct

SEQ ID NO: 4364435 - DNA, 25 bp, Homo sapien
acggcgagttgagcgggcctgtcag

SEQ ID NO: 4364436 - DNA, 25 bp, Homo sapien
taaatccaaacgtgcttaggtagcg

SEQ ID NO: 4364437 - DNA, 25 bp, Homo sapien
caccgccccatttgagatactagga

SEQ ID NO: 4364438 - DNA, 25 bp, Homo sapien
ttaggtagcgcaaacgtcgggactg

SEQ ID NO: 4364439 - DNA, 25 bp, Homo sapien
gagacacctgggttcagtcgctgga

SEQ ID NO: 4364440 - DNA, 25 bp, Homo sapien
ttggcggagccatgcaggcgcggtt

SEQ ID NO: 4364441 - DNA, 25 bp, Homo sapien
cacctgcgtgttgttttttgccgcc

SEQ ID NO: 4364442 - DNA, 25 bp, Homo sapien
gtgccgatcgctgcggcagacgcaa

SEQ ID NO: 4364443 - DNA, 25 bp, Homo sapien
agacgcaattttccgcacctgcgtg

SEQ ID NO: 4364444 - DNA, 25 bp, Homo sapien
gttctgtagactcagtcccaagcat

SEQ ID NO: 4364445 - DNA, 25 bp, Homo sapien
agtcccaagcatgcgccgatggctt

SEQ ID NO: 4364446 - DNA, 25 bp, Homo sapien
aggatagggcccatgagagctgcag

SEQ ID NO: 4364447 - DNA, 25 bp, Homo sapien
agcatgcgccgatggcttcccaaac

SEQ ID NO: 4364448 - DNA, 25 bp, Homo sapien
ggcaactgcgggtgattgaacacac

SEQ ID NO: 4364449 - DNA, 25 bp, Homo sapien
atcttgataactctccagtgtggga

SEQ ID NO: 4364450 - DNA, 25 bp, Homo sapien
cacacttttctggacgatagaggcc

SEQ ID NO: 4364451 - DNA, 25 bp, Homo sapien
ttagtacatgggcaactgcgggtga

SEQ ID NO: 4364452 - DNA, 25 bp, Homo sapien
taactgcgacaggactttcgagcga

SEQ ID NO: 4364453 - DNA, 25 bp, Homo sapien
gaaagcccctttcgacagttctgag

SEQ ID NO: 4364454 - DNA, 25 bp, Homo sapien
tttcgagcgagtgcgaggaaagccc

SEQ ID NO: 4364455 - DNA, 25 bp, Homo sapien
tctgaggttttatccgaccctgccc

SEQ ID NO: 4364456 - DNA, 25 bp, Homo sapien
ccgagtccaggccacaggcgcccgg

SEQ ID NO: 4364457 - DNA, 25 bp, Homo sapien
agtccaggccacaggcgcccggcgt

SEQ ID NO: 4364458 - DNA, 25 bp, Homo sapien
ggaacccgagtccaggccacaggcg

SEQ ID NO: 4364459 - DNA, 25 bp, Homo sapien
ctggaacccgagtccaggccacagg

SEQ ID NO: 4364460 - DNA, 25 bp, Homo sapien
ttgttcttgtgggaacggcattgct

SEQ ID NO: 4364461 - DNA, 25 bp, Homo sapien
tgccccttgggtccactcttttgta

SEQ ID NO: 4364462 - DNA, 25 bp, Homo sapien
gattcctagtggaagtgccaatatt

SEQ ID NO: 4364463 - DNA, 25 bp, Homo sapien
taggtatgagctccgcactttccac

SEQ ID NO: 4364464 - DNA, 25 bp, Homo sapien
cattcgctcttggttcgagttccaa

SEQ ID NO: 4364465 - DNA, 25 bp, Homo sapien
ttggttcgagttccaatgcattttc

SEQ ID NO: 4364466 - DNA, 25 bp, Homo sapien
tcaaaatcacattcgctcttggttc

SEQ ID NO: 4364467 - DNA, 25 bp, Homo sapien
ttttaggcagcaataaagtcttcaa

SEQ ID NO: 4364468 - DNA, 25 bp, Homo sapien
aaaatgtcattcataacggaattcc

SEQ ID NO: 4364469 - DNA, 25 bp, Homo sapien
tcattcataacggaattccacaggt

SEQ ID NO: 4364470 - DNA, 25 bp, Homo sapien
tgaagtgaattctctcttgggctct

SEQ ID NO: 4364471 - DNA, 25 bp, Homo sapien
agcagggtcattgtgaagtgaattc

SEQ ID NO: 4364472 - DNA, 25 bp, Homo sapien
tttattgtccactgaatgtgaggga

SEQ ID NO: 4364473 - DNA, 25 bp, Homo sapien
gtgttttgttttcagcgactggcac

SEQ ID NO: 4364474 - DNA, 25 bp, Homo sapien
gtcaggaagctgattgatatctgga

SEQ ID NO: 4364475 - DNA, 25 bp, Homo sapien
ggcactgccgagttacaaccatcta

SEQ ID NO: 4364476 - DNA, 25 bp, Homo sapien
tatagaatattgaggtatcttcggc

SEQ ID NO: 4364477 - DNA, 25 bp, Homo sapien
taccgcaaactcctagaatatagaa

SEQ ID NO: 4364478 - DNA, 25 bp, Homo sapien
cggcatctggtgtagtgtcaggccc

SEQ ID NO: 4364479 - DNA, 25 bp, Homo sapien
tgtcaggcccatagaagtcattcat

SEQ ID NO: 4364480 - DNA, 25 bp, Homo sapien
gccatctttggttcctgctgttctt

SEQ ID NO: 4364481 - DNA, 25 bp, Homo sapien
caagtgagcagttcacaatgtctct

SEQ ID NO: 4364482 - DNA, 25 bp, Homo sapien
tcttagtgccatctttggttcctgc

SEQ ID NO: 4364483 - DNA, 25 bp, Homo sapien
cttgggacagtcattataccaagtg

SEQ ID NO: 4364484 - DNA, 25 bp, Homo sapien
gggaacctgagtcaagtgcacatag

SEQ ID NO: 4364485 - DNA, 25 bp, Homo sapien
taggagtcaaaagagtgggccacat

SEQ ID NO: 4364486 - DNA, 25 bp, Homo sapien
tgagtcatatgtaagatctgctgcc

SEQ ID NO: 4364487 - DNA, 25 bp, Homo sapien
cccaagtgtgtagtagagtttctga

SEQ ID NO: 4364488 - DNA, 25 bp, Homo sapien
gcacccacagatcattgtgaacatc

SEQ ID NO: 4364489 - DNA, 25 bp, Homo sapien
tcagcacccacagatcattgtgaac

SEQ ID NO: 4364490 - DNA, 25 bp, Homo sapien
atgttctccacctattgaaatatcc

SEQ ID NO: 4364491 - DNA, 25 bp, Homo sapien
ccttcagcacccacagatcattgtg

SEQ ID NO: 4364492 - DNA, 25 bp, Homo sapien
catcttccgactgtgtgtctttctc

SEQ ID NO: 4364493 - DNA, 25 bp, Homo sapien
ccttccagacatgcctaagagtttc

SEQ ID NO: 4364494 - DNA, 25 bp, Homo sapien
gcagtaagttttactttatcctgtg

SEQ ID NO: 4364495 - DNA, 25 bp, Homo sapien
ggcagattgccttccagacatgcct

SEQ ID NO: 4364496 - DNA, 25 bp, Homo sapien
tcgcctctgcctcaacaatgtgtaa

SEQ ID NO: 4364497 - DNA, 25 bp, Homo sapien
atcgcctctgcctcaacaatgtgta

SEQ ID NO: 4364498 - DNA, 25 bp, Homo sapien
catcgcctctgcctcaacaatgtgt

SEQ ID NO: 4364499 - DNA, 25 bp, Homo sapien
cgcctctgcctcaacaatgtgtaat

SEQ ID NO: 4364500 - DNA, 25 bp, Homo sapien
ttaaggatatctggcgctcattttc

SEQ ID NO: 4364501 - DNA, 25 bp, Homo sapien
attcttaaggatatctggcgctcat

SEQ ID NO: 4364502 - DNA, 25 bp, Homo sapien
tcattatctacttcaaagtgatcat

SEQ ID NO: 4364503 - DNA, 25 bp, Homo sapien
tctacttcaaagtgatcatcttttt

SEQ ID NO: 4364504 - DNA, 25 bp, Homo sapien
gaaaacaaccgcacaggatagaatc

SEQ ID NO: 4364505 - DNA, 25 bp, Homo sapien
acaggatagaatcacaagaaggaac

SEQ ID NO: 4364506 - DNA, 25 bp, Homo sapien
caaccgcacaggatagaatcacaag

SEQ ID NO: 4364507 - DNA, 25 bp, Homo sapien
ccagaaaacaaccgcacaggataga

SEQ ID NO: 4364508 - DNA, 25 bp, Homo sapien
gctaccagattcttaacagctgggt

SEQ ID NO: 4364509 - DNA, 25 bp, Homo sapien
taacagctgggttgatattcaccat

SEQ ID NO: 4364510 - DNA, 25 bp, Homo sapien
ttaacagctgggttgatattcacca

SEQ ID NO: 4364511 - DNA, 25 bp, Homo sapien
ttggggctaccagattcttaacagc

SEQ ID NO: 4364512 - DNA, 25 bp, Homo sapien
gtggatgtggagaagatgtaatgtt

SEQ ID NO: 4364513 - DNA, 25 bp, Homo sapien
atgtggagaagatgtaatgtttgtc

SEQ ID NO: 4364514 - DNA, 25 bp, Homo sapien
tttatctgagcattggggaagtgtg

SEQ ID NO: 4364515 - DNA, 25 bp, Homo sapien
ttggttggagtttatctgagcattg

SEQ ID NO: 4364516 - DNA, 25 bp, Homo sapien
gtgacagagaatattaagcaagtga

SEQ ID NO: 4364517 - DNA, 25 bp, Homo sapien
gagatgacatttatcagtgtgacag

SEQ ID NO: 4364518 - DNA, 25 bp, Homo sapien
tttctggcaactggtctgctgttca

SEQ ID NO: 4364519 - DNA, 25 bp, Homo sapien
gatagacagttattagctgaagtcc

SEQ ID NO: 4364520 - DNA, 25 bp, Homo sapien
caaatttctgattggattcatattc

SEQ ID NO: 4364521 - DNA, 25 bp, Homo sapien
ctcaaatttctgattggattcatat

SEQ ID NO: 4364522 - DNA, 25 bp, Homo sapien
catattcaactttcagaaatgctgt

SEQ ID NO: 4364523 - DNA, 25 bp, Homo sapien
ttctgattggattcatattcaactt

SEQ ID NO: 4364524 - DNA, 25 bp, Homo sapien
agggctctgttagtacttaatctgc

SEQ ID NO: 4364525 - DNA, 25 bp, Homo sapien
tctgttagtacttaatctgctgctg

SEQ ID NO: 4364526 - DNA, 25 bp, Homo sapien
agtacttaatctgctgctggccacc

SEQ ID NO: 4364527 - DNA, 25 bp, Homo sapien
tctttagggctctgttagtacttaa

SEQ ID NO: 4364528 - DNA, 25 bp, Homo sapien
ctttgagggcaaaaatagatgagaa

SEQ ID NO: 4364529 - DNA, 25 bp, Homo sapien
tccaaaatgccagaataaaacactt

SEQ ID NO: 4364530 - DNA, 25 bp, Homo sapien
atagatgagaataaaccttaaaagg

SEQ ID NO: 4364531 - DNA, 25 bp, Homo sapien
aatattctgtttggcatcatgtatc

SEQ ID NO: 4364532 - DNA, 25 bp, Homo sapien
catcttgtctttttgtttcccaagt

SEQ ID NO: 4364533 - DNA, 25 bp, Homo sapien
tcatcttgtctttttgtttcccaag

SEQ ID NO: 4364534 - DNA, 25 bp, Homo sapien
tcctgagccaatgtcggaaaactca

SEQ ID NO: 4364535 - DNA, 25 bp, Homo sapien
gccaaatcttcaagagtattgttgt

SEQ ID NO: 4364536 - DNA, 25 bp, Homo sapien
ctgagccaatgtcggaaaactcatc

SEQ ID NO: 4364537 - DNA, 25 bp, Homo sapien
ctgccaaatcttcaagagtattgtt

SEQ ID NO: 4364538 - DNA, 25 bp, Homo sapien
cttctgctgaagcaggacataggca

SEQ ID NO: 4364539 - DNA, 25 bp, Homo sapien
ttctgctgaagcaggacataggcag

SEQ ID NO: 4364540 - DNA, 25 bp, Homo sapien
acttctgctgaagcaggacataggc

SEQ ID NO: 4364541 - DNA, 25 bp, Homo sapien
tagctgatgaatgcttggcttaata

SEQ ID NO: 4364542 - DNA, 25 bp, Homo sapien
agctgatgaatgcttggcttaataa

SEQ ID NO: 4364543 - DNA, 25 bp, Homo sapien
atgaatgcttggcttaataactggg

SEQ ID NO: 4364544 - DNA, 25 bp, Homo sapien
aatgcttggcttaataactgggtga

SEQ ID NO: 4364545 - DNA, 25 bp, Homo sapien
gaacaggacttaaccctctatggaa

SEQ ID NO: 4364546 - DNA, 25 bp, Homo sapien
ctatttgacttccagaaccagatct

SEQ ID NO: 4364547 - DNA, 25 bp, Homo sapien
gatctaaaatctgcaccctgaggct

SEQ ID NO: 4364548 - DNA, 25 bp, Homo sapien
tatgtgttaagctgtatttcaggcc

SEQ ID NO: 4364549 - DNA, 25 bp, Homo sapien
aaagaattcatctcccacgatcagc

SEQ ID NO: 4364550 - DNA, 25 bp, Homo sapien
ctcccacgatcagcaaagaaagcag

SEQ ID NO: 4364551 - DNA, 25 bp, Homo sapien
cagatctgtacaccacatctgtcat

SEQ ID NO: 4364552 - DNA, 25 bp, Homo sapien
ggttctggctaaccctcatagacca

SEQ ID NO: 4364553 - DNA, 25 bp, Homo sapien
ttccacactgtttgcgctaatgagc

SEQ ID NO: 4364554 - DNA, 25 bp, Homo sapien
ctgattaggacggtggctcgccaat

SEQ ID NO: 4364555 - DNA, 25 bp, Homo sapien
caactgtactgattaggacggtggc

SEQ ID NO: 4364556 - DNA, 25 bp, Homo sapien
ggctcgccaattccacactgtttgc

SEQ ID NO: 4364557 - DNA, 25 bp, Homo sapien
aagcaaaaggagttcagacttctct

SEQ ID NO: 4364558 - DNA, 25 bp, Homo sapien
caaagcaaaaggagttcagacttct

SEQ ID NO: 4364559 - DNA, 25 bp, Homo sapien
aaagcaaaaggagttcagacttctc

SEQ ID NO: 4364560 - DNA, 25 bp, Homo sapien
ccaaagcaaaaggagttcagacttc

SEQ ID NO: 4364561 - DNA, 25 bp, Homo sapien
ctttgattgtatccggataaataca

SEQ ID NO: 4364562 - DNA, 25 bp, Homo sapien
tttgattgtatccggataaatacat

SEQ ID NO: 4364563 - DNA, 25 bp, Homo sapien
ttctttgattgtatccggataaata

SEQ ID NO: 4364564 - DNA, 25 bp, Homo sapien
tctttgattgtatccggataaatac

SEQ ID NO: 4364565 - DNA, 25 bp, Homo sapien
cttccgccttctcttccacctattc

SEQ ID NO: 4364566 - DNA, 25 bp, Homo sapien
ccgccttctcttccacctattccca

SEQ ID NO: 4364567 - DNA, 25 bp, Homo sapien
cgccttctcttccacctattcccat

SEQ ID NO: 4364568 - DNA, 25 bp, Homo sapien
ttccgccttctcttccacctattcc

SEQ ID NO: 4364569 - DNA, 25 bp, Homo sapien
tggcattctcacgaagaattagtgc

SEQ ID NO: 4364570 - DNA, 25 bp, Homo sapien
ttagcctttaagacataaacattgc

SEQ ID NO: 4364571 - DNA, 25 bp, Homo sapien
ggtaatatcatctagcattttggca

SEQ ID NO: 4364572 - DNA, 25 bp, Homo sapien
accacactatataaagaagcttccc

SEQ ID NO: 4364573 - DNA, 25 bp, Homo sapien
tcaagaagaaaatgttggaaaagaa

SEQ ID NO: 4364574 - DNA, 25 bp, Homo sapien
tcagtgttctgacggagaaaaccag

SEQ ID NO: 4364575 - DNA, 25 bp, Homo sapien
ttatatccgatattcagtgttctga

SEQ ID NO: 4364576 - DNA, 25 bp, Homo sapien
ttctgacggagaaaaccagtgaggg

SEQ ID NO: 4364577 - DNA, 25 bp, Homo sapien
ccgatattcagtgttctgacggaga

SEQ ID NO: 4364578 - DNA, 25 bp, Homo sapien
taggcgaggcctttctcattgacat

SEQ ID NO: 4364579 - DNA, 25 bp, Homo sapien
tctggattaggcgaggcctttctca

SEQ ID NO: 4364580 - DNA, 25 bp, Homo sapien
tgcttctggattaggcgaggccttt

SEQ ID NO: 4364581 - DNA, 25 bp, Homo sapien
cccagtgcttctggattaggcgagg

SEQ ID NO: 4364582 - DNA, 25 bp, Homo sapien
gccagctgagggagacttgtgtctt

SEQ ID NO: 4364583 - DNA, 25 bp, Homo sapien
gtctttctccggccgtcctctccca

SEQ ID NO: 4364584 - DNA, 25 bp, Homo sapien
cttgtgtctttctccggccgtcctc

SEQ ID NO: 4364585 - DNA, 25 bp, Homo sapien
tcccagcagagctttagaggagagt

SEQ ID NO: 4364586 - DNA, 25 bp, Homo sapien
ctacccctgctccccatttgtcttt

SEQ ID NO: 4364587 - DNA, 25 bp, Homo sapien
ttgccacagagcgtctctcagcacg

SEQ ID NO: 4364588 - DNA, 25 bp, Homo sapien
tggagtgaagataggacatgcacac

SEQ ID NO: 4364589 - DNA, 25 bp, Homo sapien
tctgttatccatcaaagcctcctta

SEQ ID NO: 4364590 - DNA, 25 bp, Homo sapien
ttggaccagcaaccctcactaaggt

SEQ ID NO: 4364591 - DNA, 25 bp, Homo sapien
gacactccgaagaccagaatttcat

SEQ ID NO: 4364592 - DNA, 25 bp, Homo sapien
aaagggagtgaagtctgaactacca

SEQ ID NO: 4364593 - DNA, 25 bp, Homo sapien
cattcttggacactccgaagaccag

SEQ ID NO: 4364594 - DNA, 25 bp, Homo sapien
tacttactgaactgtcagggttgga

SEQ ID NO: 4364595 - DNA, 25 bp, Homo sapien
agtcaaagcttctccccctttccag

SEQ ID NO: 4364596 - DNA, 25 bp, Homo sapien
gcagctgctttaggcacaggacaga

SEQ ID NO: 4364597 - DNA, 25 bp, Homo sapien
gaacttcacataaagtcaaagcttc

SEQ ID NO: 4364598 - DNA, 25 bp, Homo sapien
cctgaacttcacataaagtcaaagc

SEQ ID NO: 4364599 - DNA, 25 bp, Homo sapien
gatggattgaattcggcttccttcc

SEQ ID NO: 4364600 - DNA, 25 bp, Homo sapien
aacttcaattctcacggcatgggca

SEQ ID NO: 4364601 - DNA, 25 bp, Homo sapien
gactcttactgatgaggcttcatta

SEQ ID NO: 4364602 - DNA, 25 bp, Homo sapien
cacatagactcttactgatgaggct

SEQ ID NO: 4364603 - DNA, 25 bp, Homo sapien
ctctgggattggctctcctgtaaga

SEQ ID NO: 4364604 - DNA, 25 bp, Homo sapien
tgtgcctctgcaattggctcaacac

SEQ ID NO: 4364605 - DNA, 25 bp, Homo sapien
gcaattggctcaacacaatgctcag

SEQ ID NO: 4364606 - DNA, 25 bp, Homo sapien
cctgtaagattcatggctaaggcaa

SEQ ID NO: 4364607 - DNA, 25 bp, Homo sapien
caatggtaattgtcgccaaaagggt

SEQ ID NO: 4364608 - DNA, 25 bp, Homo sapien
tagtactctcccatgtaaattcgga

SEQ ID NO: 4364609 - DNA, 25 bp, Homo sapien
tatgttcaatctcacacaaaggctt

SEQ ID NO: 4364610 - DNA, 25 bp, Homo sapien
gaccttgcatgactgaaatggacac

SEQ ID NO: 4364611 - DNA, 25 bp, Homo sapien
atcgacatctggtctggttttcacc

SEQ ID NO: 4364612 - DNA, 25 bp, Homo sapien
tttaggtgaagtcagcagattaggc

SEQ ID NO: 4364613 - DNA, 25 bp, Homo sapien
ggcttcaacataaaggacaatgtat

SEQ ID NO: 4364614 - DNA, 25 bp, Homo sapien
gataaatcccatctccatttaggtg

SEQ ID NO: 4364615 - DNA, 25 bp, Homo sapien
atttgctttgtagttgggaatgcta

SEQ ID NO: 4364616 - DNA, 25 bp, Homo sapien
ctaaagtgcacaaggtggattatgc

SEQ ID NO: 4364617 - DNA, 25 bp, Homo sapien
gaatgctaactttggaagccatgct

SEQ ID NO: 4364618 - DNA, 25 bp, Homo sapien
tgaagaacggatccacaactttttg

SEQ ID NO: 4364619 - DNA, 25 bp, Homo sapien
ctctacaggaatgcttagcatgcat

SEQ ID NO: 4364620 - DNA, 25 bp, Homo sapien
ttttactgacatatagagcgccagt

SEQ ID NO: 4364621 - DNA, 25 bp, Homo sapien
gaacttgtgggcaattacattataa

SEQ ID NO: 4364622 - DNA, 25 bp, Homo sapien
tatagagcgccagtgcattttaagt

SEQ ID NO: 4364623 - DNA, 25 bp, Homo sapien
tataattatgtctttgtaggtgctt

SEQ ID NO: 4364624 - DNA, 25 bp, Homo sapien
gatggcaagggtttacattcggata

SEQ ID NO: 4364625 - DNA, 25 bp, Homo sapien
ctctccattaaacgggaaacaagca

SEQ ID NO: 4364626 - DNA, 25 bp, Homo sapien
taaaaccatttcacccatgcaagcc

SEQ ID NO: 4364627 - DNA, 25 bp, Homo sapien
gccttcaggccagttacttattgat

SEQ ID NO: 4364628 - DNA, 25 bp, Homo sapien
gctgtcgttcaaggggcagtagtgt

SEQ ID NO: 4364629 - DNA, 25 bp, Homo sapien
ttagctgtcgttcaaggggcagtag

SEQ ID NO: 4364630 - DNA, 25 bp, Homo sapien
tagctgtcgttcaaggggcagtagt

SEQ ID NO: 4364631 - DNA, 25 bp, Homo sapien
ctgtcgttcaaggggcagtagtgtc

SEQ ID NO: 4364632 - DNA, 25 bp, Homo sapien
tgacagttcggcattgctgtgggaa

SEQ ID NO: 4364633 - DNA, 25 bp, Homo sapien
agctgtgatgacagttcggcattgc

SEQ ID NO: 4364634 - DNA, 25 bp, Homo sapien
tgaacttgggcaggacattaagaag

SEQ ID NO: 4364635 - DNA, 25 bp, Homo sapien
tcggcattgctgtgggaatagccca

SEQ ID NO: 4364636 - DNA, 25 bp, Homo sapien
tgagtagccgttcagagaaagtaga

SEQ ID NO: 4364637 - DNA, 25 bp, Homo sapien
cagcaaaatctccagtgtcactcat

SEQ ID NO: 4364638 - DNA, 25 bp, Homo sapien
tatttgctaggatcgcagcaaaatc

SEQ ID NO: 4364639 - DNA, 25 bp, Homo sapien
aatatgtctttactcgctcttctga

SEQ ID NO: 4364640 - DNA, 25 bp, Homo sapien
gcagctcctcatgttcaaagtagaa

SEQ ID NO: 4364641 - DNA, 25 bp, Homo sapien
gatctggtaagggtgtctgcgacat

SEQ ID NO: 4364642 - DNA, 25 bp, Homo sapien
caaccaaagtttacaatcatcgcag

SEQ ID NO: 4364643 - DNA, 25 bp, Homo sapien
tctgcgacataggaagcaaggcacc

SEQ ID NO: 4364644 - DNA, 25 bp, Homo sapien
ccaaattctctcactatcactggca

SEQ ID NO: 4364645 - DNA, 25 bp, Homo sapien
ctgaggggaccaaattctctcacta

SEQ ID NO: 4364646 - DNA, 25 bp, Homo sapien
ggggaccaaattctctcactatcac

SEQ ID NO: 4364647 - DNA, 25 bp, Homo sapien
tctcactatcactggcagaacaaac

SEQ ID NO: 4364648 - DNA, 25 bp, Homo sapien
ttgcattcttgccctcaattttctc

SEQ ID NO: 4364649 - DNA, 25 bp, Homo sapien
gaaagacttttagtcgtatgatcat

SEQ ID NO: 4364650 - DNA, 25 bp, Homo sapien
tccggaaagacttttagtcgtatga

SEQ ID NO: 4364651 - DNA, 25 bp, Homo sapien
cggaaagacttttagtcgtatgatc

SEQ ID NO: 4364652 - DNA, 25 bp, Homo sapien
tggcattggaagagcccagtgagta

SEQ ID NO: 4364653 - DNA, 25 bp, Homo sapien
tatcagcatcaatcaacaaagcctt

SEQ ID NO: 4364654 - DNA, 25 bp, Homo sapien
tattgcagaagtcacctatgctccc

SEQ ID NO: 4364655 - DNA, 25 bp, Homo sapien
gaagcaatagactcataagcaggga

SEQ ID NO: 4364656 - DNA, 25 bp, Homo sapien
ttgaaggcttccccttctcaaccat

SEQ ID NO: 4364657 - DNA, 25 bp, Homo sapien
gactgtctgtaagcatgggctagga

SEQ ID NO: 4364658 - DNA, 25 bp, Homo sapien
tctaggcactgccaacactgtcagg

SEQ ID NO: 4364659 - DNA, 25 bp, Homo sapien
gttgtgtctcattgcccaaattggg

SEQ ID NO: 4364660 - DNA, 25 bp, Homo sapien
catatgggcgcttccttatggagct

SEQ ID NO: 4364661 - DNA, 25 bp, Homo sapien
caaaagagtggataagggctaggta

SEQ ID NO: 4364662 - DNA, 25 bp, Homo sapien
taagggctaggtatatacaattaac

SEQ ID NO: 4364663 - DNA, 25 bp, Homo sapien
cattaacaaaagagtggataagggc

SEQ ID NO: 4364664 - DNA, 25 bp, Homo sapien
gactctaaacatattccagaatcta

SEQ ID NO: 4364665 - DNA, 25 bp, Homo sapien
aaataggtcaccatcccaaaatatg

SEQ ID NO: 4364666 - DNA, 25 bp, Homo sapien
gatgtaacattacattgcctttaca

SEQ ID NO: 4364667 - DNA, 25 bp, Homo sapien
tctgagagacagcataaagagtaaa

SEQ ID NO: 4364668 - DNA, 25 bp, Homo sapien
tattaaccagcagatttctgagaga

SEQ ID NO: 4364669 - DNA, 25 bp, Homo sapien
tcaggattgctggtatctttaggaa

SEQ ID NO: 4364670 - DNA, 25 bp, Homo sapien
gaaagctaaggccaattagagacct

SEQ ID NO: 4364671 - DNA, 25 bp, Homo sapien
gcgaataaatactgcaactttgatg

SEQ ID NO: 4364672 - DNA, 25 bp, Homo sapien
ggaattgtgattcagaaaaggcctc

SEQ ID NO: 4364673 - DNA, 25 bp, Homo sapien
tggtcactccttctttagggcccca

SEQ ID NO: 4364674 - DNA, 25 bp, Homo sapien
ttccccagtgagtgtgggttatgga

SEQ ID NO: 4364675 - DNA, 25 bp, Homo sapien
tgaaaatgtctcacatcggtgatgg

SEQ ID NO: 4364676 - DNA, 25 bp, Homo sapien
tatgaaaatctttccccagtgagtg

SEQ ID NO: 4364677 - DNA, 25 bp, Homo sapien
acttggacctccatggtcaggatta

SEQ ID NO: 4364678 - DNA, 25 bp, Homo sapien
cttggacctccatggtcaggattac

SEQ ID NO: 4364679 - DNA, 25 bp, Homo sapien
tatgaacatcggcagtgtcttcctc

SEQ ID NO: 4364680 - DNA, 25 bp, Homo sapien
gcgtccaaaagagtaatggtggcat

SEQ ID NO: 4364681 - DNA, 25 bp, Homo sapien
ccttgggctaatggcagctgttgga

SEQ ID NO: 4364682 - DNA, 25 bp, Homo sapien
tggtggcatatgaacatcggcagtg

SEQ ID NO: 4364683 - DNA, 25 bp, Homo sapien
ggccccagcatgagaataagatgac

SEQ ID NO: 4364684 - DNA, 25 bp, Homo sapien
gaagtggccccagcatgagaataag

SEQ ID NO: 4364685 - DNA, 25 bp, Homo sapien
cagaagtggccccagcatgagaata

SEQ ID NO: 4364686 - DNA, 25 bp, Homo sapien
cagcatgagaataagatgacagggc

SEQ ID NO: 4364687 - DNA, 25 bp, Homo sapien
ctgggcaaaccaattcacatagaca

SEQ ID NO: 4364688 - DNA, 25 bp, Homo sapien
tagacattaggttcctgtttgcact

SEQ ID NO: 4364689 - DNA, 25 bp, Homo sapien
aattcacatagacattaggttcctg

SEQ ID NO: 4364690 - DNA, 25 bp, Homo sapien
gggcaaaccaattcacatagacatt

SEQ ID NO: 4364691 - DNA, 25 bp, Homo sapien
tcattgttctagttgagtcaggagg

SEQ ID NO: 4364692 - DNA, 25 bp, Homo sapien
catagattccggtgtgtgttccaca

SEQ ID NO: 4364693 - DNA, 25 bp, Homo sapien
tattgccggagattaaactgcttga

SEQ ID NO: 4364694 - DNA, 25 bp, Homo sapien
ggtggtccttccaacgggaatagca

SEQ ID NO: 4364695 - DNA, 25 bp, Homo sapien
ttttcagccaattaaagacttcgga

SEQ ID NO: 4364696 - DNA, 25 bp, Homo sapien
ttcggaaaaaggcagtacaagtgtc

SEQ ID NO: 4364697 - DNA, 25 bp, Homo sapien
ggctcaagctaccaaacccaatctg

SEQ ID NO: 4364698 - DNA, 25 bp, Homo sapien
catgtgttgtcgaggaggctcaagc

SEQ ID NO: 4364699 - DNA, 25 bp, Homo sapien
tctctttgtgcaatttgtctaccat

SEQ ID NO: 4364700 - DNA, 25 bp, Homo sapien
tgttgctcgaaaacagtattcttcc

SEQ ID NO: 4364701 - DNA, 25 bp, Homo sapien
ttctaggagtagcaacatgagtttc

SEQ ID NO: 4364702 - DNA, 25 bp, Homo sapien
tgtctaccatttgcccagaggtcac

SEQ ID NO: 4364703 - DNA, 25 bp, Homo sapien
gctgttcaagaaaatatatagatat

SEQ ID NO: 4364704 - DNA, 25 bp, Homo sapien
tgttcctgctgttcaagaaaatata

SEQ ID NO: 4364705 - DNA, 25 bp, Homo sapien
tgctgttcaagaaaatatatagata

SEQ ID NO: 4364706 - DNA, 25 bp, Homo sapien
gttcctgttcctgctgttcaagaaa

SEQ ID NO: 4364707 - DNA, 25 bp, Homo sapien
agctcttttattagggttctgggca

SEQ ID NO: 4364708 - DNA, 25 bp, Homo sapien
ctcttgccaagtgctttctctgctg

SEQ ID NO: 4364709 - DNA, 25 bp, Homo sapien
gtgcctctcatcttccgaaaggtac

SEQ ID NO: 4364710 - DNA, 25 bp, Homo sapien
gaaaggtacatttgctactgcttct

SEQ ID NO: 4364711 - DNA, 25 bp, Homo sapien
tctactttgcagtatgtaggctatg

SEQ ID NO: 4364712 - DNA, 25 bp, Homo sapien
atgtctactttgcagtatgtaggct

SEQ ID NO: 4364713 - DNA, 25 bp, Homo sapien
ttgcagtatgtaggctatggttgca

SEQ ID NO: 4364714 - DNA, 25 bp, Homo sapien
tactttgcagtatgtaggctatggt

SEQ ID NO: 4364715 - DNA, 25 bp, Homo sapien
tcaagtagttgtgttaactgcagca

SEQ ID NO: 4364716 - DNA, 25 bp, Homo sapien
tctgtgcagttgtccttgcggaact

SEQ ID NO: 4364717 - DNA, 25 bp, Homo sapien
tcagaaggcaaatctagagaggcct

SEQ ID NO: 4364718 - DNA, 25 bp, Homo sapien
agaggcctctactggcgaatctgtc

SEQ ID NO: 4364719 - DNA, 25 bp, Homo sapien
catgttgtggcagattaatatcagc

SEQ ID NO: 4364720 - DNA, 25 bp, Homo sapien
taatatcagcttagcccaaacatcc

SEQ ID NO: 4364721 - DNA, 25 bp, Homo sapien
ccaaagttatgctgttggcaatgta

SEQ ID NO: 4364722 - DNA, 25 bp, Homo sapien
atcagcttagcccaaacatccaaag

SEQ ID NO: 4364723 - DNA, 25 bp, Homo sapien
aagttttccccttaggatagcatat

SEQ ID NO: 4364724 - DNA, 25 bp, Homo sapien
tgaagataaatagccataatcaatc

SEQ ID NO: 4364725 - DNA, 25 bp, Homo sapien
taaatagccataatcaatccaagtt

SEQ ID NO: 4364726 - DNA, 25 bp, Homo sapien
tccccttaggatagcatattttaat

SEQ ID NO: 4364727 - DNA, 25 bp, Homo sapien
agtgagctaatggcatcctcttgct

SEQ ID NO: 4364728 - DNA, 25 bp, Homo sapien
ctcagtgagctaatggcatcctctt

SEQ ID NO: 4364729 - DNA, 25 bp, Homo sapien
tcagtgagctaatggcatcctcttg

SEQ ID NO: 4364730 - DNA, 25 bp, Homo sapien
cagtgagctaatggcatcctcttgc

SEQ ID NO: 4364731 - DNA, 25 bp, Homo sapien
aaaatctctaccacagctatggcta

SEQ ID NO: 4364732 - DNA, 25 bp, Homo sapien
atctctaccacagctatggctactg

SEQ ID NO: 4364733 - DNA, 25 bp, Homo sapien
ctctaccacagctatggctactgct

SEQ ID NO: 4364734 - DNA, 25 bp, Homo sapien
aaatctctaccacagctatggctac

SEQ ID NO: 4364735 - DNA, 25 bp, Homo sapien
aagaagcactaagccatctcctgct

SEQ ID NO: 4364736 - DNA, 25 bp, Homo sapien
tggctagaagaagcactaagccatc

SEQ ID NO: 4364737 - DNA, 25 bp, Homo sapien
tatccactgaatcatggtcatcagt

SEQ ID NO: 4364738 - DNA, 25 bp, Homo sapien
agcactaagccatctcctgctttga

SEQ ID NO: 4364739 - DNA, 25 bp, Homo sapien
agcacttggtgtttgactcactcat

SEQ ID NO: 4364740 - DNA, 25 bp, Homo sapien
cacttggtgtttgactcactcatta

SEQ ID NO: 4364741 - DNA, 25 bp, Homo sapien
gcacttggtgtttgactcactcatt

SEQ ID NO: 4364742 - DNA, 25 bp, Homo sapien
taatgatgcctccttggcggcgtcc

SEQ ID NO: 4364743 - DNA, 25 bp, Homo sapien
ctttaatgatgcctccttggcggcg

SEQ ID NO: 4364744 - DNA, 25 bp, Homo sapien
agactttaatgatgcctccttggcg

SEQ ID NO: 4364745 - DNA, 25 bp, Homo sapien
tgatgcctccttggcggcgtccacg

SEQ ID NO: 4364746 - DNA, 25 bp, Homo sapien
ggtcagatggtcaatctcaggtcaa

SEQ ID NO: 4364747 - DNA, 25 bp, Homo sapien
atccaccggagtaggacatgctcac

SEQ ID NO: 4364748 - DNA, 25 bp, Homo sapien
tatagctcaggtcagatggtcaatc

SEQ ID NO: 4364749 - DNA, 25 bp, Homo sapien
aaatccaccggagtaggacatgctc

SEQ ID NO: 4364750 - DNA, 25 bp, Homo sapien
gaagccattctcaaaaggttacgta

SEQ ID NO: 4364751 - DNA, 25 bp, Homo sapien
ttagcaacagaacgtatccgactca

SEQ ID NO: 4364752 - DNA, 25 bp, Homo sapien
tcaaaagcatcacgttgagtgaagg

SEQ ID NO: 4364753 - DNA, 25 bp, Homo sapien
aaaaagagctggcaactgatgccca

SEQ ID NO: 4364754 - DNA, 25 bp, Homo sapien
atggcaccaaaatatgtaaccagag

SEQ ID NO: 4364755 - DNA, 25 bp, Homo sapien
ggcaccaaaatatgtaaccagaggc

SEQ ID NO: 4364756 - DNA, 25 bp, Homo sapien
ttgtctcctcataagaaagaatatg

SEQ ID NO: 4364757 - DNA, 25 bp, Homo sapien
gtctcctcataagaaagaatatgac

SEQ ID NO: 4364758 - DNA, 25 bp, Homo sapien
gaatctaaatcatgacttgttaagc

SEQ ID NO: 4364759 - DNA, 25 bp, Homo sapien
ttctgaatctaaatcatgacttgtt

SEQ ID NO: 4364760 - DNA, 25 bp, Homo sapien
ttgttaagctttgtaatcctggtgc

SEQ ID NO: 4364761 - DNA, 25 bp, Homo sapien
aatcatgacttgttaagctttgtaa

SEQ ID NO: 4364762 - DNA, 25 bp, Homo sapien
tcataccatattagcttcttctcac

SEQ ID NO: 4364763 - DNA, 25 bp, Homo sapien
tataggtcaaaaaccgagatgggtg

SEQ ID NO: 4364764 - DNA, 25 bp, Homo sapien
actataggtcaaaaaccgagatggg

SEQ ID NO: 4364765 - DNA, 25 bp, Homo sapien
tgggtgcatttcataccatattagc

SEQ ID NO: 4364766 - DNA, 25 bp, Homo sapien
cttagcattgagagagtaacgaaac

SEQ ID NO: 4364767 - DNA, 25 bp, Homo sapien
cattgagagagtaacgaaacaggcc

SEQ ID NO: 4364768 - DNA, 25 bp, Homo sapien
ttgagagagtaacgaaacaggccaa

SEQ ID NO: 4364769 - DNA, 25 bp, Homo sapien
agagtaacgaaacaggccaacacca

SEQ ID NO: 4364770 - DNA, 25 bp, Homo sapien
cagtcttcggcatttcctgtgcctt

SEQ ID NO: 4364771 - DNA, 25 bp, Homo sapien
gcttaaatccactagtttctattcc

SEQ ID NO: 4364772 - DNA, 25 bp, Homo sapien
catggtggctgctaccttttagggc

SEQ ID NO: 4364773 - DNA, 25 bp, Homo sapien
tcaaaaagttgtactgccagtcttc

SEQ ID NO: 4364774 - DNA, 25 bp, Homo sapien
tgctctatgggatactaaccagttt

SEQ ID NO: 4364775 - DNA, 25 bp, Homo sapien
ggatggccttattgaaaggatggca

SEQ ID NO: 4364776 - DNA, 25 bp, Homo sapien
tacttgcatgacagctatgctttct

SEQ ID NO: 4364777 - DNA, 25 bp, Homo sapien
taaccagttttacatctaacatagc

SEQ ID NO: 4364778 - DNA, 25 bp, Homo sapien
ctccactgctagagttcctctagag

SEQ ID NO: 4364779 - DNA, 25 bp, Homo sapien
gatatgatcccctccactgctagag

SEQ ID NO: 4364780 - DNA, 25 bp, Homo sapien
gcaagatatgatcccctccactgct

SEQ ID NO: 4364781 - DNA, 25 bp, Homo sapien
catttgcaagatatgatcccctcca

SEQ ID NO: 4364782 - DNA, 25 bp, Homo sapien
tctggaataggaacaggtggtagca

SEQ ID NO: 4364783 - DNA, 25 bp, Homo sapien
ctggacacatctggaataggaacag

SEQ ID NO: 4364784 - DNA, 25 bp, Homo sapien
gacacatctggaataggaacaggtg

SEQ ID NO: 4364785 - DNA, 25 bp, Homo sapien
acacatctggaataggaacaggtgg

SEQ ID NO: 4364786 - DNA, 25 bp, Homo sapien
ccttgtgtagtcaaaatccaggagt

SEQ ID NO: 4364787 - DNA, 25 bp, Homo sapien
gttgcgctatccttaaacctccagg

SEQ ID NO: 4364788 - DNA, 25 bp, Homo sapien
aacctccaggatttaggtccttgtg

SEQ ID NO: 4364789 - DNA, 25 bp, Homo sapien
gcattttagtcgtaacctcctctgg

SEQ ID NO: 4364790 - DNA, 25 bp, Homo sapien
cttcctgttgggtgttatcacctcc

SEQ ID NO: 4364791 - DNA, 25 bp, Homo sapien
tacctttaacaacattagcaaattc

SEQ ID NO: 4364792 - DNA, 25 bp, Homo sapien
ctgttgggtgttatcacctcccaag

SEQ ID NO: 4364793 - DNA, 25 bp, Homo sapien
ctcccaagtatctatgctctatcat

SEQ ID NO: 4364794 - DNA, 25 bp, Homo sapien
tgcttgcaaacttggacctcaggtc

SEQ ID NO: 4364795 - DNA, 25 bp, Homo sapien
gcaaacttggacctcaggtctatat

SEQ ID NO: 4364796 - DNA, 25 bp, Homo sapien
cttgcaaacttggacctcaggtcta

SEQ ID NO: 4364797 - DNA, 25 bp, Homo sapien
aacttggacctcaggtctatattct

SEQ ID NO: 4364798 - DNA, 25 bp, Homo sapien
caaaacctcgcctgagtgttacggt

SEQ ID NO: 4364799 - DNA, 25 bp, Homo sapien
actgactccaagaatgagactgcaa

SEQ ID NO: 4364800 - DNA, 25 bp, Homo sapien
tgagactgcaaaacctcgcctgagt

SEQ ID NO: 4364801 - DNA, 25 bp, Homo sapien
gactgcaaaacctcgcctgagtgtt

SEQ ID NO: 4364802 - DNA, 25 bp, Homo sapien
atgccagctggttgggaaccaaatc

SEQ ID NO: 4364803 - DNA, 25 bp, Homo sapien
acctgctggacgatgccagctggtt

SEQ ID NO: 4364804 - DNA, 25 bp, Homo sapien
tgccagctggttgggaaccaaatct

SEQ ID NO: 4364805 - DNA, 25 bp, Homo sapien
tgcttcacctgctggacgatgccag

SEQ ID NO: 4364806 - DNA, 25 bp, Homo sapien
attacatgttggaaaaactgaacca

SEQ ID NO: 4364807 - DNA, 25 bp, Homo sapien
tattacatgttggaaaaactgaacc

SEQ ID NO: 4364808 - DNA, 25 bp, Homo sapien
tggtctgaatcaataggtgagttct

SEQ ID NO: 4364809 - DNA, 25 bp, Homo sapien
tttggtctgaatcaataggtgagtt

SEQ ID NO: 4364810 - DNA, 25 bp, Homo sapien
ttggtctgaatcaataggtgagttc

SEQ ID NO: 4364811 - DNA, 25 bp, Homo sapien
gccttgtgaattctgaagtacgtgt

SEQ ID NO: 4364812 - DNA, 25 bp, Homo sapien
gttgccttgtgaattctgaagtacg

SEQ ID NO: 4364813 - DNA, 25 bp, Homo sapien
tggttcacatgagtccaacacatgt

SEQ ID NO: 4364814 - DNA, 25 bp, Homo sapien
cacatgtcacagttcaccaactttc

SEQ ID NO: 4364815 - DNA, 25 bp, Homo sapien
atctggaagtacttattaaagggca

SEQ ID NO: 4364816 - DNA, 25 bp, Homo sapien
tctggaagtacttattaaagggcat

SEQ ID NO: 4364817 - DNA, 25 bp, Homo sapien
gaaacgatgaacataatatcacaaa

SEQ ID NO: 4364818 - DNA, 25 bp, Homo sapien
ctgaagaaacgatgaacataatatc

SEQ ID NO: 4364819 - DNA, 25 bp, Homo sapien
gcaaacccctctaagtcaactagta

SEQ ID NO: 4364820 - DNA, 25 bp, Homo sapien
aaatattggatcatatcatgcctac

SEQ ID NO: 4364821 - DNA, 25 bp, Homo sapien
taatctactacatatccgtttatag

SEQ ID NO: 4364822 - DNA, 25 bp, Homo sapien
taatcaataatacctaggacatgac

SEQ ID NO: 4364823 - DNA, 25 bp, Homo sapien
cattactgtggatattggataaggc

SEQ ID NO: 4364824 - DNA, 25 bp, Homo sapien
ctgtggatattggataaggctctgc

SEQ ID NO: 4364825 - DNA, 25 bp, Homo sapien
cagaacaaggtttcattactgtgga

SEQ ID NO: 4364826 - DNA, 25 bp, Homo sapien
tctccagaacaaggtttcattactg

SEQ ID NO: 4364827 - DNA, 25 bp, Homo sapien
aatattccagtaaaggtgctcatcc

SEQ ID NO: 4364828 - DNA, 25 bp, Homo sapien
tcaactacaaccccatagtttctaa

SEQ ID NO: 4364829 - DNA, 25 bp, Homo sapien
caaaggctccctctcatgtgactct

SEQ ID NO: 4364830 - DNA, 25 bp, Homo sapien
tctcatgtgactctgtgatgtgtgt

SEQ ID NO: 4364831 - DNA, 25 bp, Homo sapien
aattgtcctcctttttgcgaggcca

SEQ ID NO: 4364832 - DNA, 25 bp, Homo sapien
tccagagtggtctgatgcaggctcc

SEQ ID NO: 4364833 - DNA, 25 bp, Homo sapien
gatgcaggctccaattgtcctcctt

SEQ ID NO: 4364834 - DNA, 25 bp, Homo sapien
tggtctgatgcaggctccaattgtc

SEQ ID NO: 4364835 - DNA, 25 bp, Homo sapien
gtgacatccaacatgtgcatggaac

SEQ ID NO: 4364836 - DNA, 25 bp, Homo sapien
tgacatccaacatgtgcatggaacg

SEQ ID NO: 4364837 - DNA, 25 bp, Homo sapien
agtgacatccaacatgtgcatggaa

SEQ ID NO: 4364838 - DNA, 25 bp, Homo sapien
gacatccaacatgtgcatggaacgc

SEQ ID NO: 4364839 - DNA, 25 bp, Homo sapien
gagctcattgtgcattggagcataa

SEQ ID NO: 4364840 - DNA, 25 bp, Homo sapien
tttgatgtcattttgagctcattgt

SEQ ID NO: 4364841 - DNA, 25 bp, Homo sapien
ttgtgcattggagcataaaaggaag

SEQ ID NO: 4364842 - DNA, 25 bp, Homo sapien
gatgtcattttgagctcattgtgca

SEQ ID NO: 4364843 - DNA, 25 bp, Homo sapien
gcttttggaatactactttatctaa

SEQ ID NO: 4364844 - DNA, 25 bp, Homo sapien
tcttttccgacttctcagattttta

SEQ ID NO: 4364845 - DNA, 25 bp, Homo sapien
catgcagactcatttaacggtagtt

SEQ ID NO: 4364846 - DNA, 25 bp, Homo sapien
ctatgcttcttgtgttgatttctct

SEQ ID NO: 4364847 - DNA, 25 bp, Homo sapien
caagatgaaaagaactcttagcttc

SEQ ID NO: 4364848 - DNA, 25 bp, Homo sapien
ccatggttgggttagctggctgcca

SEQ ID NO: 4364849 - DNA, 25 bp, Homo sapien
agaactcttagcttcagctcatcag

SEQ ID NO: 4364850 - DNA, 25 bp, Homo sapien
tggttggagaaaatagggccatggt

SEQ ID NO: 4364851 - DNA, 25 bp, Homo sapien
cactgataatataagagcttgtgca

SEQ ID NO: 4364852 - DNA, 25 bp, Homo sapien
atataagagcttgtgcatatttgac

SEQ ID NO: 4364853 - DNA, 25 bp, Homo sapien
ctgataatataagagcttgtgcata

SEQ ID NO: 4364854 - DNA, 25 bp, Homo sapien
aagacactgataatataagagcttg

SEQ ID NO: 4364855 - DNA, 25 bp, Homo sapien
aataaaatagtggcccagaaactgg

SEQ ID NO: 4364856 - DNA, 25 bp, Homo sapien
tattttgtgggtaaaacgtgtgaga

SEQ ID NO: 4364857 - DNA, 25 bp, Homo sapien
aaggacatattggtaaaagctttag

SEQ ID NO: 4364858 - DNA, 25 bp, Homo sapien
aaagctttagattggcgtattttgt

SEQ ID NO: 4364859 - DNA, 25 bp, Homo sapien
tgatatcaaggtcatagtagccaat

SEQ ID NO: 4364860 - DNA, 25 bp, Homo sapien
cagtatcaacccctgatagcctggt

SEQ ID NO: 4364861 - DNA, 25 bp, Homo sapien
tccagtgtgatatcaaggtcatagt

SEQ ID NO: 4364862 - DNA, 25 bp, Homo sapien
cccctgatagcctggtgtccagtgt

SEQ ID NO: 4364863 - DNA, 25 bp, Homo sapien
tttgtgactgagtactgattgtcat

SEQ ID NO: 4364864 - DNA, 25 bp, Homo sapien
tcagtttgtgactgagtactgattg

SEQ ID NO: 4364865 - DNA, 25 bp, Homo sapien
gtttgtgactgagtactgattgtca

SEQ ID NO: 4364866 - DNA, 25 bp, Homo sapien
agtttgtgactgagtactgattgtc

SEQ ID NO: 4364867 - DNA, 25 bp, Homo sapien
ctgcttgtctactggcatgacaacc

SEQ ID NO: 4364868 - DNA, 25 bp, Homo sapien
tatagggagttggtgggactatgaa

SEQ ID NO: 4364869 - DNA, 25 bp, Homo sapien
ctgctcttcagctacaagggatgcc

SEQ ID NO: 4364870 - DNA, 25 bp, Homo sapien
tgctcttcagctacaagggatgcca

SEQ ID NO: 4364871 - DNA, 25 bp, Homo sapien
aaagtctgctcttcagctacaaggg

SEQ ID NO: 4364872 - DNA, 25 bp, Homo sapien
gctcttcagctacaagggatgccat

SEQ ID NO: 4364873 - DNA, 25 bp, Homo sapien
gagacattgcaatcaagatgagcag

SEQ ID NO: 4364874 - DNA, 25 bp, Homo sapien
tgacatcatagcacaccaatgagac

SEQ ID NO: 4364875 - DNA, 25 bp, Homo sapien
tcttgaaagcaattcgctgtgccac

SEQ ID NO: 4364876 - DNA, 25 bp, Homo sapien
gcagatcggttaggacagttcacac

SEQ ID NO: 4364877 - DNA, 25 bp, Homo sapien
tggttttaattctttcttgctgcag

SEQ ID NO: 4364878 - DNA, 25 bp, Homo sapien
aagccttccccattccatctgttgt

SEQ ID NO: 4364879 - DNA, 25 bp, Homo sapien
ctgttgtcttctctttaattggttt

SEQ ID NO: 4364880 - DNA, 25 bp, Homo sapien
tttaattctttcttgctgcagttca

SEQ ID NO: 4364881 - DNA, 25 bp, Homo sapien
ctggagacttaattcagaatcttag

SEQ ID NO: 4364882 - DNA, 25 bp, Homo sapien
tagcagcggtgggattgaaaaccac

SEQ ID NO: 4364883 - DNA, 25 bp, Homo sapien
ttagcagcggtgggattgaaaacca

SEQ ID NO: 4364884 - DNA, 25 bp, Homo sapien
agagactggagacttaattcagaat

SEQ ID NO: 4364885 - DNA, 25 bp, Homo sapien
cctcctgctctatgatccagataca

SEQ ID NO: 4364886 - DNA, 25 bp, Homo sapien
tgctctatgatccagatacaagtta

SEQ ID NO: 4364887 - DNA, 25 bp, Homo sapien
ctctatgatccagatacaagttact

SEQ ID NO: 4364888 - DNA, 25 bp, Homo sapien
tcctgctctatgatccagatacaag

SEQ ID NO: 4364889 - DNA, 25 bp, Homo sapien
tcctgaccataaagacaataacttt

SEQ ID NO: 4364890 - DNA, 25 bp, Homo sapien
caataacttttgctatcactagaaa

SEQ ID NO: 4364891 - DNA, 25 bp, Homo sapien
agaaacatggaattaatcattaagc

SEQ ID NO: 4364892 - DNA, 25 bp, Homo sapien
tgctatcactagaaacatggaatta

SEQ ID NO: 4364893 - DNA, 25 bp, Homo sapien
tgtatacctggaaagatactttttc

SEQ ID NO: 4364894 - DNA, 25 bp, Homo sapien
tacctggaaagatactttttcttca

SEQ ID NO: 4364895 - DNA, 25 bp, Homo sapien
cctggaaagatactttttcttcaag

SEQ ID NO: 4364896 - DNA, 25 bp, Homo sapien
cttttgtatacctggaaagatactt

SEQ ID NO: 4364897 - DNA, 25 bp, Homo sapien
caggaaatcttgagtaattccttca

SEQ ID NO: 4364898 - DNA, 25 bp, Homo sapien
tactgtagtcaaggcagtgttgtcc

SEQ ID NO: 4364899 - DNA, 25 bp, Homo sapien
cttgagtaattccttcaatctgact

SEQ ID NO: 4364900 - DNA, 25 bp, Homo sapien
tgctcttctactgtagtcaaggcag

SEQ ID NO: 4364901 - DNA, 25 bp, Homo sapien
ttttcttgtgatgcaccaccctttc

SEQ ID NO: 4364902 - DNA, 25 bp, Homo sapien
ttcccacaggatagtgagcatccat

SEQ ID NO: 4364903 - DNA, 25 bp, Homo sapien
ggatagtgagcatccatcctcagtg

SEQ ID NO: 4364904 - DNA, 25 bp, Homo sapien
taccttaaatactttccagatgtcc

SEQ ID NO: 4364905 - DNA, 25 bp, Homo sapien
acttctcctcttccccccaggaatg

SEQ ID NO: 4364906 - DNA, 25 bp, Homo sapien
ctcctcttccccccaggaatgagct

SEQ ID NO: 4364907 - DNA, 25 bp, Homo sapien
ttctcctcttccccccaggaatgag

SEQ ID NO: 4364908 - DNA, 25 bp, Homo sapien
tctcctcttccccccaggaatgagc

SEQ ID NO: 4364909 - DNA, 25 bp, Homo sapien
tctgaaccatccagacaagtggtcc

SEQ ID NO: 4364910 - DNA, 25 bp, Homo sapien
taagtccctgaaggagtacttccat

SEQ ID NO: 4364911 - DNA, 25 bp, Homo sapien
tctctggtccacagggtatcttgca

SEQ ID NO: 4364912 - DNA, 25 bp, Homo sapien
cttacgaaataaaactctgggcttg

SEQ ID NO: 4364913 - DNA, 25 bp, Homo sapien
tatggcatgcttaaggctaactttg

SEQ ID NO: 4364914 - DNA, 25 bp, Homo sapien
tcagccccaggacatgatgggttcc

SEQ ID NO: 4364915 - DNA, 25 bp, Homo sapien
ggctctccttgtcccaaactctgag

SEQ ID NO: 4364916 - DNA, 25 bp, Homo sapien
caggtgcctcggctgcctgaagagc

SEQ ID NO: 4364917 - DNA, 25 bp, Homo sapien
tcactggactattggaatatccaca

SEQ ID NO: 4364918 - DNA, 25 bp, Homo sapien
cactggactattggaatatccacac

SEQ ID NO: 4364919 - DNA, 25 bp, Homo sapien
tagcaagtcatacttgggtacattc

SEQ ID NO: 4364920 - DNA, 25 bp, Homo sapien
ctgtaggacctgttacattggtaac

SEQ ID NO: 4364921 - DNA, 25 bp, Homo sapien
agggctgtaggacctgttacattgg

SEQ ID NO: 4364922 - DNA, 25 bp, Homo sapien
catacttgggtacattctgagatgg

SEQ ID NO: 4364923 - DNA, 25 bp, Homo sapien
ctgctaagtcataacggcctctcaa

SEQ ID NO: 4364924 - DNA, 25 bp, Homo sapien
tcataacggcctctcaagttgtcca

SEQ ID NO: 4364925 - DNA, 25 bp, Homo sapien
cattaaggggtgttctttggctgct

SEQ ID NO: 4364926 - DNA, 25 bp, Homo sapien
tcactggcatccaaaatggtcaaca

SEQ ID NO: 4364927 - DNA, 25 bp, Homo sapien
tggcagagcctaaacacatccagaa

SEQ ID NO: 4364928 - DNA, 25 bp, Homo sapien
tgccttctcccggtataacccagac

SEQ ID NO: 4364929 - DNA, 25 bp, Homo sapien
gaaatggatgtcttgccccttgcct

SEQ ID NO: 4364930 - DNA, 25 bp, Homo sapien
acatccagaaagctatccacaaagg

SEQ ID NO: 4364931 - DNA, 25 bp, Homo sapien
taagtgtgatgtacctgaaaatgac

SEQ ID NO: 4364932 - DNA, 25 bp, Homo sapien
tgtgatgtacctgaaaatgacaggg

SEQ ID NO: 4364933 - DNA, 25 bp, Homo sapien
gaataagtgtgatgtacctgaaaat

SEQ ID NO: 4364934 - DNA, 25 bp, Homo sapien
agtgtgatgtacctgaaaatgacag

SEQ ID NO: 4364935 - DNA, 25 bp, Homo sapien
attgagagtgacttcttgactaagt

SEQ ID NO: 4364936 - DNA, 25 bp, Homo sapien
cattgagagtgacttcttgactaag

SEQ ID NO: 4364937 - DNA, 25 bp, Homo sapien
aatgatgtagaacccagatatttgt

SEQ ID NO: 4364938 - DNA, 25 bp, Homo sapien
tgtagaacccagatatttgtctgaa

SEQ ID NO: 4364939 - DNA, 25 bp, Homo sapien
tgatgtagaacccagatatttgtct

SEQ ID NO: 4364940 - DNA, 25 bp, Homo sapien
tccaatgatgtagaacccagatatt

SEQ ID NO: 4364941 - DNA, 25 bp, Homo sapien
agctttaacaagagtgtttgaactt

SEQ ID NO: 4364942 - DNA, 25 bp, Homo sapien
ctttttggccctttaggctctgact

SEQ ID NO: 4364943 - DNA, 25 bp, Homo sapien
gacctcattgatttgtggctgaaat

SEQ ID NO: 4364944 - DNA, 25 bp, Homo sapien
tggctgaaataaggaacatgttccc

SEQ ID NO: 4364945 - DNA, 25 bp, Homo sapien
tactacacaaactcagacctcattg

SEQ ID NO: 4364946 - DNA, 25 bp, Homo sapien
aaatgtttatactacacaaactcag

SEQ ID NO: 4364947 - DNA, 25 bp, Homo sapien
catggttgctgtggccacaacacag

SEQ ID NO: 4364948 - DNA, 25 bp, Homo sapien
tttgaaccatggttgctgtggccac

SEQ ID NO: 4364949 - DNA, 25 bp, Homo sapien
gtgctaaccactatacagtcactgc

SEQ ID NO: 4364950 - DNA, 25 bp, Homo sapien
cagagtgctaaccactatacagtca

SEQ ID NO: 4364951 - DNA, 25 bp, Homo sapien
cgtgtaaacgaaaagagacatctta

SEQ ID NO: 4364952 - DNA, 25 bp, Homo sapien
gggacctgacataagaaacgtgtaa

SEQ ID NO: 4364953 - DNA, 25 bp, Homo sapien
tataaagcagggaaagtgaactttc

SEQ ID NO: 4364954 - DNA, 25 bp, Homo sapien
aaaaggagcaattggtaattcttga

SEQ ID NO: 4364955 - DNA, 25 bp, Homo sapien
gacctcgtctgcacacctagtttct

SEQ ID NO: 4364956 - DNA, 25 bp, Homo sapien
gaacacgctaactccctctctagat

SEQ ID NO: 4364957 - DNA, 25 bp, Homo sapien
gccaccttaaaagttgatgctcctg

SEQ ID NO: 4364958 - DNA, 25 bp, Homo sapien
tgtttctccagctgacctaacttca

SEQ ID NO: 4364959 - DNA, 25 bp, Homo sapien
tctttatcacaagcagattttacca

SEQ ID NO: 4364960 - DNA, 25 bp, Homo sapien
cttcttgtctttatcacaagcagat

SEQ ID NO: 4364961 - DNA, 25 bp, Homo sapien
cttgtctttatcacaagcagatttt

SEQ ID NO: 4364962 - DNA, 25 bp, Homo sapien
ctttatcacaagcagattttaccat

SEQ ID NO: 4364963 - DNA, 25 bp, Homo sapien
taattactaattctgcgggttgcgc

SEQ ID NO: 4364964 - DNA, 25 bp, Homo sapien
catgtgcacatttgctacgtgggta

SEQ ID NO: 4364965 - DNA, 25 bp, Homo sapien
aatagcctggcaataggagagaagc

SEQ ID NO: 4364966 - DNA, 25 bp, Homo sapien
tcccttgagttaatggtctccagct

SEQ ID NO: 4364967 - DNA, 25 bp, Homo sapien
agagagatttaccaagggatccaaa

SEQ ID NO: 4364968 - DNA, 25 bp, Homo sapien
ttacagtgttacactttagagagag

SEQ ID NO: 4364969 - DNA, 25 bp, Homo sapien
tcctattcaagtatgctttttgcaa

SEQ ID NO: 4364970 - DNA, 25 bp, Homo sapien
gaaaatagcccagcaattatataat

SEQ ID NO: 4364971 - DNA, 25 bp, Homo sapien
tgcaatgtcaaagtaatgctgagca

SEQ ID NO: 4364972 - DNA, 25 bp, Homo sapien
tcatacagatttcagaggctattaa

SEQ ID NO: 4364973 - DNA, 25 bp, Homo sapien
tgtactgtggtatgcattaaaatcc

SEQ ID NO: 4364974 - DNA, 25 bp, Homo sapien
cacatcttgattgggaattagcacc

SEQ ID NO: 4364975 - DNA, 25 bp, Homo sapien
cctgatcttagacataaaaacgttg

SEQ ID NO: 4364976 - DNA, 25 bp, Homo sapien
cgttgtcttccgttattatgtgtga

SEQ ID NO: 4364977 - DNA, 25 bp, Homo sapien
tacactttttaggtacatgcaataa

SEQ ID NO: 4364978 - DNA, 25 bp, Homo sapien
taaacttcacagtttgaggaagttc

SEQ ID NO: 4364979 - DNA, 25 bp, Homo sapien
aatgcaacttgggtagcatgtccaa

SEQ ID NO: 4364980 - DNA, 25 bp, Homo sapien
ggaacaaatgagtgtccacccttga

SEQ ID NO: 4364981 - DNA, 25 bp, Homo sapien
ttaccaaagttcgagttactcatag

SEQ ID NO: 4364982 - DNA, 25 bp, Homo sapien
gaacacgaatctccgcaggaaatga

SEQ ID NO: 4364983 - DNA, 25 bp, Homo sapien
ataccacaggaatcaaattttgggc

SEQ ID NO: 4364984 - DNA, 25 bp, Homo sapien
aattatgcgggaaaggctgtgtgcc

SEQ ID NO: 4364985 - DNA, 25 bp, Homo sapien
tcagtatacagaaaaggctgcactc

SEQ ID NO: 4364986 - DNA, 25 bp, Homo sapien
aaatgtctcactaaaatgttaccca

SEQ ID NO: 4364987 - DNA, 25 bp, Homo sapien
tgggcacactttacgccagtcctga

SEQ ID NO: 4364988 - DNA, 25 bp, Homo sapien
tagggtctcatagcacctccagatc

SEQ ID NO: 4364989 - DNA, 25 bp, Homo sapien
gctcagaggaggtaaatcatgtgct

SEQ ID NO: 4364990 - DNA, 25 bp, Homo sapien
catgatctcattcggtgtttccaac

SEQ ID NO: 4364991 - DNA, 25 bp, Homo sapien
tatatacgttgttcagatttgccct

SEQ ID NO: 4364992 - DNA, 25 bp, Homo sapien
tggaagcatacattataccctgggt

SEQ ID NO: 4364993 - DNA, 25 bp, Homo sapien
gctgtaaatactctgaggaccaaag

SEQ ID NO: 4364994 - DNA, 25 bp, Homo sapien
gccccagtgtgatgagcacttgaaa

SEQ ID NO: 4364995 - DNA, 25 bp, Homo sapien
ccggtatagaggcaaatacaacctg

SEQ ID NO: 4364996 - DNA, 25 bp, Homo sapien
ctcttcgtggctgccaggattcccg

SEQ ID NO: 4364997 - DNA, 25 bp, Homo sapien
cccatggtgccaggtggtctgccat

SEQ ID NO: 4364998 - DNA, 25 bp, Homo sapien
cctgtaaaggctcaaacgcttcatc

SEQ ID NO: 4364999 - DNA, 25 bp, Homo sapien
taagcagtagtcgtcaagttgcaga

SEQ ID NO: 4365000 - DNA, 25 bp, Homo sapien
actacttgtaaaggtgctgcactgg

SEQ ID NO: 4365001 - DNA, 25 bp, Homo sapien
cagatgacggctgctcgaagaacaa

SEQ ID NO: 4365002 - DNA, 25 bp, Homo sapien
aatgcattatgtggactgaaccgac

SEQ ID NO: 4365003 - DNA, 25 bp, Homo sapien
cacagagggatcgtttgtaagcatc

SEQ ID NO: 4365004 - DNA, 25 bp, Homo sapien
taaaacccaagagcatgacaccaat

SEQ ID NO: 4365005 - DNA, 25 bp, Homo sapien
gatgtaagggtatccagcactgtga

SEQ ID NO: 4365006 - DNA, 25 bp, Homo sapien
ggtgtacttgacaggcacagcaatg

SEQ ID NO: 4365007 - DNA, 25 bp, Homo sapien
gtcccttggaacatttctcctctgg

SEQ ID NO: 4365008 - DNA, 25 bp, Homo sapien
tttgtcccttggaacatttctcctc

SEQ ID NO: 4365009 - DNA, 25 bp, Homo sapien
tgtcccttggaacatttctcctctg

SEQ ID NO: 4365010 - DNA, 25 bp, Homo sapien
ctttgtcccttggaacatttctcct

SEQ ID NO: 4365011 - DNA, 25 bp, Homo sapien
gatatactacctacacgcatttggg

SEQ ID NO: 4365012 - DNA, 25 bp, Homo sapien
gccactctcattagatccaggtaaa

SEQ ID NO: 4365013 - DNA, 25 bp, Homo sapien
ggtaaaactgctgtgactccacctc

SEQ ID NO: 4365014 - DNA, 25 bp, Homo sapien
taactaacacctggagtcttctgcc

SEQ ID NO: 4365015 - DNA, 25 bp, Homo sapien
gaatggccgtgcacagttacaccag

SEQ ID NO: 4365016 - DNA, 25 bp, Homo sapien
ggagatgatctcaacgcaggtctga

SEQ ID NO: 4365017 - DNA, 25 bp, Homo sapien
agtctgtggatgtggtctgccctca

SEQ ID NO: 4365018 - DNA, 25 bp, Homo sapien
gcaggtctgagacaatcccacaggg

SEQ ID NO: 4365019 - DNA, 25 bp, Homo sapien
aaagacacaagaacaattgggagga

SEQ ID NO: 4365020 - DNA, 25 bp, Homo sapien
acaagaacaattgggaggatgccaa

SEQ ID NO: 4365021 - DNA, 25 bp, Homo sapien
gaacaattgggaggatgccaaacac

SEQ ID NO: 4365022 - DNA, 25 bp, Homo sapien
gacacaagaacaattgggaggatgc

SEQ ID NO: 4365023 - DNA, 25 bp, Homo sapien
ggcatggccacaggtcaaatggatc

SEQ ID NO: 4365024 - DNA, 25 bp, Homo sapien
atcgattactttggaggcatgcagc

SEQ ID NO: 4365025 - DNA, 25 bp, Homo sapien
tatgcccctgttatgcaaattgaac

SEQ ID NO: 4365026 - DNA, 25 bp, Homo sapien
gaaattgcaccagtcttgagtatga

SEQ ID NO: 4365027 - DNA, 25 bp, Homo sapien
cacaaaatgagcgataaattcttta

SEQ ID NO: 4365028 - DNA, 25 bp, Homo sapien
attcacaaaatgagcgataaattct

SEQ ID NO: 4365029 - DNA, 25 bp, Homo sapien
gacacaatttgctccttattgaata

SEQ ID NO: 4365030 - DNA, 25 bp, Homo sapien
tgttcctagacacaatttgctcctt

SEQ ID NO: 4365031 - DNA, 25 bp, Homo sapien
aaagtgtggacttatgttggttaat

SEQ ID NO: 4365032 - DNA, 25 bp, Homo sapien
gataaagtgtggacttatgttggtt

SEQ ID NO: 4365033 - DNA, 25 bp, Homo sapien
gttttagaagatgtgtatggctgag

SEQ ID NO: 4365034 - DNA, 25 bp, Homo sapien
tagttttagaagatgtgtatggctg

SEQ ID NO: 4365035 - DNA, 25 bp, Homo sapien
tcagcagtcaactattgttaaacat

SEQ ID NO: 4365036 - DNA, 25 bp, Homo sapien
ctagaaacaatatacttctctggtc

SEQ ID NO: 4365037 - DNA, 25 bp, Homo sapien
cttaagtagaagtagaagatgaaac

SEQ ID NO: 4365038 - DNA, 25 bp, Homo sapien
tttctaacctaatatgtcacaagca

SEQ ID NO: 4365039 - DNA, 25 bp, Homo sapien
cagtctacaacccaagacactggga

SEQ ID NO: 4365040 - DNA, 25 bp, Homo sapien
ttataagccctacatagaaatgagc

SEQ ID NO: 4365041 - DNA, 25 bp, Homo sapien
gaactgaagatggtagagcggtcta

SEQ ID NO: 4365042 - DNA, 25 bp, Homo sapien
aatgagccacgttgaagcacagtga

SEQ ID NO: 4365043 - DNA, 25 bp, Homo sapien
tcataacctcagcttaaccacggga

SEQ ID NO: 4365044 - DNA, 25 bp, Homo sapien
tctaatgctggtgaaaattgttgcc

SEQ ID NO: 4365045 - DNA, 25 bp, Homo sapien
tattaatcttaagtactgctgcctg

SEQ ID NO: 4365046 - DNA, 25 bp, Homo sapien
tcacggagcgttttcctgacagagc

SEQ ID NO: 4365047 - DNA, 25 bp, Homo sapien
ttaagcattcattgccgctgacaca

SEQ ID NO: 4365048 - DNA, 25 bp, Homo sapien
cattcattgccgctgacacagggct

SEQ ID NO: 4365049 - DNA, 25 bp, Homo sapien
taagcattcattgccgctgacacag

SEQ ID NO: 4365050 - DNA, 25 bp, Homo sapien
agcattcattgccgctgacacaggg

SEQ ID NO: 4365051 - DNA, 25 bp, Homo sapien
taggctacaatgagaacacaacatc

SEQ ID NO: 4365052 - DNA, 25 bp, Homo sapien
gagaacacaacatcataagcacatc

SEQ ID NO: 4365053 - DNA, 25 bp, Homo sapien
acaacatcataagcacatcactggg

SEQ ID NO: 4365054 - DNA, 25 bp, Homo sapien
aggaaaagccctaggctacaatgag

SEQ ID NO: 4365055 - DNA, 25 bp, Homo sapien
tcatctcacaaatccgtagctgcct

SEQ ID NO: 4365056 - DNA, 25 bp, Homo sapien
catctcacaaatccgtagctgcctc

SEQ ID NO: 4365057 - DNA, 25 bp, Homo sapien
atctcacaaatccgtagctgcctcc

SEQ ID NO: 4365058 - DNA, 25 bp, Homo sapien
agaagaatctattgcagcaagcaat

SEQ ID NO: 4365059 - DNA, 25 bp, Homo sapien
gaagaatctattgcagcaagcaatg

SEQ ID NO: 4365060 - DNA, 25 bp, Homo sapien
aagaatctattgcagcaagcaatgt

SEQ ID NO: 4365061 - DNA, 25 bp, Homo sapien
gctggcatttaagtgcctcagtgtc

SEQ ID NO: 4365062 - DNA, 25 bp, Homo sapien
gtgcctcagtgtctctggtattgtc

SEQ ID NO: 4365063 - DNA, 25 bp, Homo sapien
aagtgcctcagtgtctctggtattg

SEQ ID NO: 4365064 - DNA, 25 bp, Homo sapien
tttaagtgcctcagtgtctctggta

SEQ ID NO: 4365065 - DNA, 25 bp, Homo sapien
atctgtgtccacaatcatactgaag

SEQ ID NO: 4365066 - DNA, 25 bp, Homo sapien
caatcatactgaagttcatgtaagc

SEQ ID NO: 4365067 - DNA, 25 bp, Homo sapien
catctgtgtccacaatcatactgaa

SEQ ID NO: 4365068 - DNA, 25 bp, Homo sapien
tccatctgtgtccacaatcatactg

SEQ ID NO: 4365069 - DNA, 25 bp, Homo sapien
gggcacattaggatccttgaacttt

SEQ ID NO: 4365070 - DNA, 25 bp, Homo sapien
tgagaaatcgactgaagcatctgtg

SEQ ID NO: 4365071 - DNA, 25 bp, Homo sapien
tctttagcagagagggtcttccact

SEQ ID NO: 4365072 - DNA, 25 bp, Homo sapien
gccctgtctgccgttgccatgtatt

SEQ ID NO: 4365073 - DNA, 25 bp, Homo sapien
tatagattggaatcaagtcactgca

SEQ ID NO: 4365074 - DNA, 25 bp, Homo sapien
taaggtccagggattagatgacttt

SEQ ID NO: 4365075 - DNA, 25 bp, Homo sapien
taggcaaaactatgaccttgatctt

SEQ ID NO: 4365076 - DNA, 25 bp, Homo sapien
tagtgctgactaaaatcattgttcc

SEQ ID NO: 4365077 - DNA, 25 bp, Homo sapien
acaaactcggtgagaacaatgctga

SEQ ID NO: 4365078 - DNA, 25 bp, Homo sapien
caaactcggtgagaacaatgctgag

SEQ ID NO: 4365079 - DNA, 25 bp, Homo sapien
tacaaactcggtgagaacaatgctg

SEQ ID NO: 4365080 - DNA, 25 bp, Homo sapien
cttacaaactcggtgagaacaatgc

SEQ ID NO: 4365081 - DNA, 25 bp, Homo sapien
tatcgagtgttctccttagggaaga

SEQ ID NO: 4365082 - DNA, 25 bp, Homo sapien
caggcttgctcagtacatggcttat

SEQ ID NO: 4365083 - DNA, 25 bp, Homo sapien
gggcaagggccaatcaatgaggtaa

SEQ ID NO: 4365084 - DNA, 25 bp, Homo sapien
tagaagagggtcatcctgtatcgag

SEQ ID NO: 4365085 - DNA, 25 bp, Homo sapien
tctctaccattcttagcaggggtca

SEQ ID NO: 4365086 - DNA, 25 bp, Homo sapien
gggttgattggaacattcccactga

SEQ ID NO: 4365087 - DNA, 25 bp, Homo sapien
tctgggttgattggaacattcccac

SEQ ID NO: 4365088 - DNA, 25 bp, Homo sapien
tgggttgattggaacattcccactg

SEQ ID NO: 4365089 - DNA, 25 bp, Homo sapien
caagtacacatatggcccgggagct

SEQ ID NO: 4365090 - DNA, 25 bp, Homo sapien
actgtgaaagaacttgcctcactgc

SEQ ID NO: 4365091 - DNA, 25 bp, Homo sapien
tcactgcacggcaccaagtacacat

SEQ ID NO: 4365092 - DNA, 25 bp, Homo sapien
catatggcccgggagctacaacaat

SEQ ID NO: 4365093 - DNA, 25 bp, Homo sapien
gacgactgggcttatgaccaaggaa

SEQ ID NO: 4365094 - DNA, 25 bp, Homo sapien
gtatgttgccagctacgtcctggaa

SEQ ID NO: 4365095 - DNA, 25 bp, Homo sapien
gctacctgcgaggagaccttcctgg

SEQ ID NO: 4365096 - DNA, 25 bp, Homo sapien
cctggaacacctgtactagttgaga

SEQ ID NO: 4365097 - DNA, 25 bp, Homo sapien
gatcagtttaaaatggcagcccact

SEQ ID NO: 4365098 - DNA, 25 bp, Homo sapien
cattacacatacaggtggatgacca

SEQ ID NO: 4365099 - DNA, 25 bp, Homo sapien
cccacagatagtcttagaggcaaag

SEQ ID NO: 4365100 - DNA, 25 bp, Homo sapien
tcttgctacaacctagccatgctgg

SEQ ID NO: 4365101 - DNA, 25 bp, Homo sapien
acttcccattagaatcatcaggaag

SEQ ID NO: 4365102 - DNA, 25 bp, Homo sapien
ctgacttcccattagaatcatcagg

SEQ ID NO: 4365103 - DNA, 25 bp, Homo sapien
caatgatctattccatggttctcaa

SEQ ID NO: 4365104 - DNA, 25 bp, Homo sapien
tgacttcccattagaatcatcagga

SEQ ID NO: 4365105 - DNA, 25 bp, Homo sapien
gcaaaccaccgctgatgatgtcagc

SEQ ID NO: 4365106 - DNA, 25 bp, Homo sapien
agcaaaggtctggctttcagaggtc

SEQ ID NO: 4365107 - DNA, 25 bp, Homo sapien
aaccaccgctgatgatgtcagctcc

SEQ ID NO: 4365108 - DNA, 25 bp, Homo sapien
gttgatctgtgggagcaaaggtctg

SEQ ID NO: 4365109 - DNA, 25 bp, Homo sapien
ttccagctgtctcacaatgattcct

SEQ ID NO: 4365110 - DNA, 25 bp, Homo sapien
gtcctcccatacagggcctttcttc

SEQ ID NO: 4365111 - DNA, 25 bp, Homo sapien
cttccagctgtctcacaatgattcc

SEQ ID NO: 4365112 - DNA, 25 bp, Homo sapien
agtcctcccatacagggcctttctt

SEQ ID NO: 4365113 - DNA, 25 bp, Homo sapien
tagaagcgtgcactttatgactccc

SEQ ID NO: 4365114 - DNA, 25 bp, Homo sapien
gaaacagctcccactcgagcatctt

SEQ ID NO: 4365115 - DNA, 25 bp, Homo sapien
cattaatttgccatgaaacagctcc

SEQ ID NO: 4365116 - DNA, 25 bp, Homo sapien
cttccattccactagaagcgtgcac

SEQ ID NO: 4365117 - DNA, 25 bp, Homo sapien
cacaattatggtggaaggcaaggaa

SEQ ID NO: 4365118 - DNA, 25 bp, Homo sapien
tcacaattatggtggaaggcaagga

SEQ ID NO: 4365119 - DNA, 25 bp, Homo sapien
tatggtggaaggcaaggaagaacaa

SEQ ID NO: 4365120 - DNA, 25 bp, Homo sapien
aattatggtggaaggcaaggaagaa

SEQ ID NO: 4365121 - DNA, 25 bp, Homo sapien
tggattggcttgaatcacataaaaa

SEQ ID NO: 4365122 - DNA, 25 bp, Homo sapien
accatgaatttggaaatagctaaag

SEQ ID NO: 4365123 - DNA, 25 bp, Homo sapien
tagtgttgttatgctctggattggc

SEQ ID NO: 4365124 - DNA, 25 bp, Homo sapien
catgaatttggaaatagctaaagag

SEQ ID NO: 4365125 - DNA, 25 bp, Homo sapien
caccctcctaccaccgggtctcctg

SEQ ID NO: 4365126 - DNA, 25 bp, Homo sapien
ggagatccgtacaggtttacctcta

SEQ ID NO: 4365127 - DNA, 25 bp, Homo sapien
caagccctcatgtggcctcagtaaa

SEQ ID NO: 4365128 - DNA, 25 bp, Homo sapien
tgtgtgctaggacaaaagtaccagc

SEQ ID NO: 4365129 - DNA, 25 bp, Homo sapien
cctcttgtgtaagataggagatccg

SEQ ID NO: 4365130 - DNA, 25 bp, Homo sapien
cagtccaagaaaacgtagatcagct

SEQ ID NO: 4365131 - DNA, 25 bp, Homo sapien
aagaaaacgtagatcagcttcatcc

SEQ ID NO: 4365132 - DNA, 25 bp, Homo sapien
tggacagtccaagaaaacgtagatc

SEQ ID NO: 4365133 - DNA, 25 bp, Homo sapien
tgtttgtggacagtccaagaaaacg

SEQ ID NO: 4365134 - DNA, 25 bp, Homo sapien
cacacccgatacagacagcacgatg

SEQ ID NO: 4365135 - DNA, 25 bp, Homo sapien
gacagcacgatgtgttccctgcctg

SEQ ID NO: 4365136 - DNA, 25 bp, Homo sapien
taaggacagctgtatgtgcgctggc

SEQ ID NO: 4365137 - DNA, 25 bp, Homo sapien
gacagctgtatgtgcgctggctgtt

SEQ ID NO: 4365138 - DNA, 25 bp, Homo sapien
tagtttatatctatcacagctcatt

SEQ ID NO: 4365139 - DNA, 25 bp, Homo sapien
gatagtttatatctatcacagctca

SEQ ID NO: 4365140 - DNA, 25 bp, Homo sapien
atagtttatatctatcacagctcat

SEQ ID NO: 4365141 - DNA, 25 bp, Homo sapien
gcagcttttgagcagtggacacccc

SEQ ID NO: 4365142 - DNA, 25 bp, Homo sapien
gcttttgagcagtggacaccccata

SEQ ID NO: 4365143 - DNA, 25 bp, Homo sapien
tgcagcttttgagcagtggacaccc

SEQ ID NO: 4365144 - DNA, 25 bp, Homo sapien
tttgagcagtggacaccccatacat

SEQ ID NO: 4365145 - DNA, 25 bp, Homo sapien
gaaccgaatgctgacatcgagggag

SEQ ID NO: 4365146 - DNA, 25 bp, Homo sapien
gactatgttccagtaaaccagagag

SEQ ID NO: 4365147 - DNA, 25 bp, Homo sapien
aagtagcactgctcaaggagaccag

SEQ ID NO: 4365148 - DNA, 25 bp, Homo sapien
taaagccaatatgaccccttgtggg

SEQ ID NO: 4365149 - DNA, 25 bp, Homo sapien
ggagcccagcagtctctcgatagct

SEQ ID NO: 4365150 - DNA, 25 bp, Homo sapien
ccagcagtctctcgatagctgcgtt

SEQ ID NO: 4365151 - DNA, 25 bp, Homo sapien
tagctgcgttgatgtcccctcctgt

SEQ ID NO: 4365152 - DNA, 25 bp, Homo sapien
tctctcgatagctgcgttgatgtcc

SEQ ID NO: 4365153 - DNA, 25 bp, Homo sapien
ggtccgggacatcccgaaggagaca

SEQ ID NO: 4365154 - DNA, 25 bp, Homo sapien
tccgggacatcccgaaggagacaag

SEQ ID NO: 4365155 - DNA, 25 bp, Homo sapien
gggacatcccgaaggagacaaggct

SEQ ID NO: 4365156 - DNA, 25 bp, Homo sapien
ccgggacatcccgaaggagacaagg

SEQ ID NO: 4365157 - DNA, 25 bp, Homo sapien
tgggggttccccgcgaagagcggca

SEQ ID NO: 4365158 - DNA, 25 bp, Homo sapien
tgcagttgggggttccccgcgaaga

SEQ ID NO: 4365159 - DNA, 25 bp, Homo sapien
ctgcagttgggggttccccgcgaag

SEQ ID NO: 4365160 - DNA, 25 bp, Homo sapien
gggttctgggcaagcgtctgcatca

SEQ ID NO: 4365161 - DNA, 25 bp, Homo sapien
catcatgctgcgcatgtagggtgct

SEQ ID NO: 4365162 - DNA, 25 bp, Homo sapien
gcgcatgtagggtgctgagatcaca

SEQ ID NO: 4365163 - DNA, 25 bp, Homo sapien
ggctagccgcattgatcccaaaggg

SEQ ID NO: 4365164 - DNA, 25 bp, Homo sapien
tggtccccgatcctccggtgccctc

SEQ ID NO: 4365165 - DNA, 25 bp, Homo sapien
ctggtccccgatcctccggtgccct

SEQ ID NO: 4365166 - DNA, 25 bp, Homo sapien
tcgattctcagtccgcagaggctgg

SEQ ID NO: 4365167 - DNA, 25 bp, Homo sapien
tacatgcggcggagggcattatacc

SEQ ID NO: 4365168 - DNA, 25 bp, Homo sapien
tcctggatgtccgtgtacatgcggc

SEQ ID NO: 4365169 - DNA, 25 bp, Homo sapien
catgtggctgatctcagggttccgc

SEQ ID NO: 4365170 - DNA, 25 bp, Homo sapien
cttgagccttctgaggggtcttgat

SEQ ID NO: 4365171 - DNA, 25 bp, Homo sapien
gagccttctgaggggtcttgatgac

SEQ ID NO: 4365172 - DNA, 25 bp, Homo sapien
ttgagccttctgaggggtcttgatg

SEQ ID NO: 4365173 - DNA, 25 bp, Homo sapien
tgagccttctgaggggtcttgatga

SEQ ID NO: 4365174 - DNA, 25 bp, Homo sapien
ccttgaccgaggctcgatcgcagat

SEQ ID NO: 4365175 - DNA, 25 bp, Homo sapien
gaccagctgatcctgctgagcctta

SEQ ID NO: 4365176 - DNA, 25 bp, Homo sapien
gctgagccttaaacctccgggagat

SEQ ID NO: 4365177 - DNA, 25 bp, Homo sapien
gacagtgagcccgtccttgattccg

SEQ ID NO: 4365178 - DNA, 25 bp, Homo sapien
gggcctcgtctcggccccgctcggc

SEQ ID NO: 4365179 - DNA, 25 bp, Homo sapien
ggcctcgtctcggccccgctcggct

SEQ ID NO: 4365180 - DNA, 25 bp, Homo sapien
gctaagtccagcctgagatagtagg

SEQ ID NO: 4365181 - DNA, 25 bp, Homo sapien
tcaccacatccctggctaagtccag

SEQ ID NO: 4365182 - DNA, 25 bp, Homo sapien
ctttgccctttcagccccatcacca

SEQ ID NO: 4365183 - DNA, 25 bp, Homo sapien
catccctggctaagtccagcctgag

SEQ ID NO: 4365184 - DNA, 25 bp, Homo sapien
cgcgcggttgacaagggcaggcgcc

SEQ ID NO: 4365185 - DNA, 25 bp, Homo sapien
ttaactcccaggtttagcggcgaca

SEQ ID NO: 4365186 - DNA, 25 bp, Homo sapien
cttcttggggagtttgatgccgcac

SEQ ID NO: 4365187 - DNA, 25 bp, Homo sapien
gtttgatgccgcactcagccccaaa

SEQ ID NO: 4365188 - DNA, 25 bp, Homo sapien
agacgctcggttccccgccgtgcct

SEQ ID NO: 4365189 - DNA, 25 bp, Homo sapien
ggcagacgctcggttccccgccgtg

SEQ ID NO: 4365190 - DNA, 25 bp, Homo sapien
tctgagtcaccaacctgaggctgcc

SEQ ID NO: 4365191 - DNA, 25 bp, Homo sapien
tcccggtgccggcttctctgagtca

SEQ ID NO: 4365192 - DNA, 25 bp, Homo sapien
gatcgcctggaacctggacttcatt

SEQ ID NO: 4365193 - DNA, 25 bp, Homo sapien
tccatgatcgcctggaacctggact

SEQ ID NO: 4365194 - DNA, 25 bp, Homo sapien
tcatttgagttagatgatcattcat

SEQ ID NO: 4365195 - DNA, 25 bp, Homo sapien
tttttctccatgatcgcctggaacc

SEQ ID NO: 4365196 - DNA, 25 bp, Homo sapien
tatactcctacctcccggcatttaa

SEQ ID NO: 4365197 - DNA, 25 bp, Homo sapien
tatttataacctaagcagcatctct

SEQ ID NO: 4365198 - DNA, 25 bp, Homo sapien
tcagaaaacacctgccgtttattta

SEQ ID NO: 4365199 - DNA, 25 bp, Homo sapien
gcagcatctctatatactcctacct

SEQ ID NO: 4365200 - DNA, 25 bp, Homo sapien
tgtacaatgggaacaagcagactct

SEQ ID NO: 4365201 - DNA, 25 bp, Homo sapien
tacaccacggtaataagcatgtctg

SEQ ID NO: 4365202 - DNA, 25 bp, Homo sapien
caccaactgtgttctgagtaaagca

SEQ ID NO: 4365203 - DNA, 25 bp, Homo sapien
catcctccagataaggattagaagc

SEQ ID NO: 4365204 - DNA, 25 bp, Homo sapien
gctctacgtttctgtgataaggctg

SEQ ID NO: 4365205 - DNA, 25 bp, Homo sapien
gctcagagccatgctttgtcttgcc

SEQ ID NO: 4365206 - DNA, 25 bp, Homo sapien
agttgggaacaactccgtccattag

SEQ ID NO: 4365207 - DNA, 25 bp, Homo sapien
cattagccggatttcagctggccca

SEQ ID NO: 4365208 - DNA, 25 bp, Homo sapien
gccacaggccatatggagaggtatt

SEQ ID NO: 4365209 - DNA, 25 bp, Homo sapien
tctgtgtgcaggtggattggaccat

SEQ ID NO: 4365210 - DNA, 25 bp, Homo sapien
taaccggcatggagctggtatccag

SEQ ID NO: 4365211 - DNA, 25 bp, Homo sapien
gaatcctcttgaaccagtcgtgtgg

SEQ ID NO: 4365212 - DNA, 25 bp, Homo sapien
gggagatcccagctatggcacagcc

SEQ ID NO: 4365213 - DNA, 25 bp, Homo sapien
gtctcaggagccatatcacatctgt

SEQ ID NO: 4365214 - DNA, 25 bp, Homo sapien
agctatggcacagccgtttgtatcc

SEQ ID NO: 4365215 - DNA, 25 bp, Homo sapien
gaagatgtctcaggagccatatcac

SEQ ID NO: 4365216 - DNA, 25 bp, Homo sapien
aaatcagtcactcccttcagaagca

SEQ ID NO: 4365217 - DNA, 25 bp, Homo sapien
tctgtgtacagtaaggcagcatgct

SEQ ID NO: 4365218 - DNA, 25 bp, Homo sapien
aattttagaattgcccagtgctgcc

SEQ ID NO: 4365219 - DNA, 25 bp, Homo sapien
tctctgatggttacctgcagtggca

SEQ ID NO: 4365220 - DNA, 25 bp, Homo sapien
ataaagtcaaaattatggcaccgag

SEQ ID NO: 4365221 - DNA, 25 bp, Homo sapien
gataaagtcaaaattatggcaccga

SEQ ID NO: 4365222 - DNA, 25 bp, Homo sapien
agataaagtcaaaattatggcaccg

SEQ ID NO: 4365223 - DNA, 25 bp, Homo sapien
taaatgtctgggcaaagaagcaagc

SEQ ID NO: 4365224 - DNA, 25 bp, Homo sapien
ctttgagcaagaaaacggcacaggg

SEQ ID NO: 4365225 - DNA, 25 bp, Homo sapien
caactgctcctaatgctagcgggct

SEQ ID NO: 4365226 - DNA, 25 bp, Homo sapien
tgctactgcctcaaaaagggaccag

SEQ ID NO: 4365227 - DNA, 25 bp, Homo sapien
tatttatacctcagacacagcaagt

SEQ ID NO: 4365228 - DNA, 25 bp, Homo sapien
aaatatgccccttttagaagacgtg

SEQ ID NO: 4365229 - DNA, 25 bp, Homo sapien
caaacactgcatcacaaatcggagg

SEQ ID NO: 4365230 - DNA, 25 bp, Homo sapien
tatttcaggccacagtatataacgg

SEQ ID NO: 4365231 - DNA, 25 bp, Homo sapien
tttcttcaacagagtcctttacaat

SEQ ID NO: 4365232 - DNA, 25 bp, Homo sapien
tggcttgtttcatttcgtcagcatt

SEQ ID NO: 4365233 - DNA, 25 bp, Homo sapien
gcttgtttcatttcgtcagcatttg

SEQ ID NO: 4365234 - DNA, 25 bp, Homo sapien
attttcttcaacagagtcctttaca

SEQ ID NO: 4365235 - DNA, 25 bp, Homo sapien
acttcttgcttctgaccaagtctat

SEQ ID NO: 4365236 - DNA, 25 bp, Homo sapien
caagtctatggcatctgtcaaagca

SEQ ID NO: 4365237 - DNA, 25 bp, Homo sapien
tctgaccaagtctatggcatctgtc

SEQ ID NO: 4365238 - DNA, 25 bp, Homo sapien
tgcttctgaccaagtctatggcatc

SEQ ID NO: 4365239 - DNA, 25 bp, Homo sapien
taaaaacactcgagaagctgcagac

SEQ ID NO: 4365240 - DNA, 25 bp, Homo sapien
ttgggccatggaaccatccaaacga

SEQ ID NO: 4365241 - DNA, 25 bp, Homo sapien
gacagattcaaaccaactccacctg

SEQ ID NO: 4365242 - DNA, 25 bp, Homo sapien
gaagcattatagttggagatcctgc

SEQ ID NO: 4365243 - DNA, 25 bp, Homo sapien
tgaaagtgaaaaacactgtggaact

SEQ ID NO: 4365244 - DNA, 25 bp, Homo sapien
cagtcaatgcgtgcattagcgcatt

SEQ ID NO: 4365245 - DNA, 25 bp, Homo sapien
tttcttaagtcagtcaatgcgtgca

SEQ ID NO: 4365246 - DNA, 25 bp, Homo sapien
aagtcagtcaatgcgtgcattagcg

SEQ ID NO: 4365247 - DNA, 25 bp, Homo sapien
tcaatgcgtgcattagcgcattaat

SEQ ID NO: 4365248 - DNA, 25 bp, Homo sapien
aaattaagactgaaagaacactcta

SEQ ID NO: 4365249 - DNA, 25 bp, Homo sapien
gaacactctaataatctgaacccat

SEQ ID NO: 4365250 - DNA, 25 bp, Homo sapien
caacagaacactaaaatgacaggaa

SEQ ID NO: 4365251 - DNA, 25 bp, Homo sapien
gaatgaaagcagaattacgattttg

SEQ ID NO: 4365252 - DNA, 25 bp, Homo sapien
ggatgtccattccatatcagacttt

SEQ ID NO: 4365253 - DNA, 25 bp, Homo sapien
ggaggacattctaataaattatctt

SEQ ID NO: 4365254 - DNA, 25 bp, Homo sapien
ttttctcactgtcacgtgctaattc

SEQ ID NO: 4365255 - DNA, 25 bp, Homo sapien
tcactgtcacgtgctaattcttctg

SEQ ID NO: 4365256 - DNA, 25 bp, Homo sapien
gaaagaacgaagtatgagcaacact

SEQ ID NO: 4365257 - DNA, 25 bp, Homo sapien
atataagaaagaacgaagtatgagc

SEQ ID NO: 4365258 - DNA, 25 bp, Homo sapien
taagaaagaacgaagtatgagcaac

SEQ ID NO: 4365259 - DNA, 25 bp, Homo sapien
aagaacgaagtatgagcaacactta

SEQ ID NO: 4365260 - DNA, 25 bp, Homo sapien
gagctcagaattaacttcatcttcc

SEQ ID NO: 4365261 - DNA, 25 bp, Homo sapien
caatgtgttatcacaggaactgtta

SEQ ID NO: 4365262 - DNA, 25 bp, Homo sapien
atgtgcacaatgtgttatcacagga

SEQ ID NO: 4365263 - DNA, 25 bp, Homo sapien
gaacctgagctcagaattaacttca

SEQ ID NO: 4365264 - DNA, 25 bp, Homo sapien
tttgtaagaaggtaagtatggcaac

SEQ ID NO: 4365265 - DNA, 25 bp, Homo sapien
caggacatctgcataatgtgccagg

SEQ ID NO: 4365266 - DNA, 25 bp, Homo sapien
tgcataatgtgccaggacagtccct

SEQ ID NO: 4365267 - DNA, 25 bp, Homo sapien
ccgcagtctaagcaaaagacccagg

SEQ ID NO: 4365268 - DNA, 25 bp, Homo sapien
tccaatagtggctctgccttcattt

SEQ ID NO: 4365269 - DNA, 25 bp, Homo sapien
ttccaatagtggctctgccttcatt

SEQ ID NO: 4365270 - DNA, 25 bp, Homo sapien
cttccaatagtggctctgccttcat

SEQ ID NO: 4365271 - DNA, 25 bp, Homo sapien
ccaatagtggctctgccttcatttt

SEQ ID NO: 4365272 - DNA, 25 bp, Homo sapien
tttaaagaattctggattggagtac

SEQ ID NO: 4365273 - DNA, 25 bp, Homo sapien
tgttctatgccaccattctctatca

SEQ ID NO: 4365274 - DNA, 25 bp, Homo sapien
aaggaaagaagagaccacaagtcct

SEQ ID NO: 4365275 - DNA, 25 bp, Homo sapien
ctcccattgtgacaggacgctgtat

SEQ ID NO: 4365276 - DNA, 25 bp, Homo sapien
agcttttgtctgctgagcatttgga

SEQ ID NO: 4365277 - DNA, 25 bp, Homo sapien
gattctaagtcaagtacagcttttg

SEQ ID NO: 4365278 - DNA, 25 bp, Homo sapien
ggatcactcttagccaccttatgct

SEQ ID NO: 4365279 - DNA, 25 bp, Homo sapien
catttggatttcgtatggcatgtcc

SEQ ID NO: 4365280 - DNA, 25 bp, Homo sapien
aattcaagtgtacatctgattttat

SEQ ID NO: 4365281 - DNA, 25 bp, Homo sapien
tacgatcaggaccataataaacata

SEQ ID NO: 4365282 - DNA, 25 bp, Homo sapien
tagtcatgagttaaaatattatacg

SEQ ID NO: 4365283 - DNA, 25 bp, Homo sapien
agtaaggccggttctctaatacgat

SEQ ID NO: 4365284 - DNA, 25 bp, Homo sapien
ttctttgacccctccactgcacaag

SEQ ID NO: 4365285 - DNA, 25 bp, Homo sapien
cttaacacagaaagcggacagatga

SEQ ID NO: 4365286 - DNA, 25 bp, Homo sapien
acagaaagcggacagatgatcagtg

SEQ ID NO: 4365287 - DNA, 25 bp, Homo sapien
acacagaaagcggacagatgatcag

SEQ ID NO: 4365288 - DNA, 25 bp, Homo sapien
aggaacagatgaagttaatgcacat

SEQ ID NO: 4365289 - DNA, 25 bp, Homo sapien
acatgcaaatgccacatcttctata

SEQ ID NO: 4365290 - DNA, 25 bp, Homo sapien
gcaaatgccacatcttctataacct

SEQ ID NO: 4365291 - DNA, 25 bp, Homo sapien
gaacagatgaagttaatgcacatgc

SEQ ID NO: 4365292 - DNA, 25 bp, Homo sapien
tagtttcagactgtacatttttcag

SEQ ID NO: 4365293 - DNA, 25 bp, Homo sapien
ttagtttcagactgtacatttttca

SEQ ID NO: 4365294 - DNA, 25 bp, Homo sapien
ctttagtttcagactgtacattttt

SEQ ID NO: 4365295 - DNA, 25 bp, Homo sapien
ttttctgcggcaattcacttgtttc

SEQ ID NO: 4365296 - DNA, 25 bp, Homo sapien
cattttctgcggcaattcacttgtt

SEQ ID NO: 4365297 - DNA, 25 bp, Homo sapien
ttcattttctgcggcaattcacttg

SEQ ID NO: 4365298 - DNA, 25 bp, Homo sapien
tttctgcggcaattcacttgtttca

SEQ ID NO: 4365299 - DNA, 25 bp, Homo sapien
gggcgggagctagacaattctgaca

SEQ ID NO: 4365300 - DNA, 25 bp, Homo sapien
gacaattctgacatgcgaaacttac

SEQ ID NO: 4365301 - DNA, 25 bp, Homo sapien
ggagctagacaattctgacatgcga

SEQ ID NO: 4365302 - DNA, 25 bp, Homo sapien
cttttggggcgggagctagacaatt

SEQ ID NO: 4365303 - DNA, 25 bp, Homo sapien
tactgggttgttcactacatctaga

SEQ ID NO: 4365304 - DNA, 25 bp, Homo sapien
ggttgttcactacatctagatgcgt

SEQ ID NO: 4365305 - DNA, 25 bp, Homo sapien
tgaaatactgggttgttcactacat

SEQ ID NO: 4365306 - DNA, 25 bp, Homo sapien
tgggttgttcactacatctagatgc

SEQ ID NO: 4365307 - DNA, 25 bp, Homo sapien
tcatagagtcatcgttaacattata

SEQ ID NO: 4365308 - DNA, 25 bp, Homo sapien
tgtttcctccaagtttcatagagtc

SEQ ID NO: 4365309 - DNA, 25 bp, Homo sapien
tttgcttagtccatctgccttttca

SEQ ID NO: 4365310 - DNA, 25 bp, Homo sapien
tccaagtttcatagagtcatcgtta

SEQ ID NO: 4365311 - DNA, 25 bp, Homo sapien
taatatataatagtacaggtcccag

SEQ ID NO: 4365312 - DNA, 25 bp, Homo sapien
gctacccaattctggagcaactgaa

SEQ ID NO: 4365313 - DNA, 25 bp, Homo sapien
gaaaggaataccgaaagcaaatctc

SEQ ID NO: 4365314 - DNA, 25 bp, Homo sapien
tttccaaaggcaccaatgtacatga

SEQ ID NO: 4365315 - DNA, 25 bp, Homo sapien
attattgactggcaaaattgttcaa

SEQ ID NO: 4365316 - DNA, 25 bp, Homo sapien
caagaatgtgatacctgctggtggc

SEQ ID NO: 4365317 - DNA, 25 bp, Homo sapien
caaattatcaattgttctcaagaat

SEQ ID NO: 4365318 - DNA, 25 bp, Homo sapien
gcgaaatcccacgacttgagcctgg

SEQ ID NO: 4365319 - DNA, 25 bp, Homo sapien
ggtttcacataaagcgcacttacta

SEQ ID NO: 4365320 - DNA, 25 bp, Homo sapien
aaagatttcacaataaactggaggt

SEQ ID NO: 4365321 - DNA, 25 bp, Homo sapien
tttcacaataaactggaggtttcac

SEQ ID NO: 4365322 - DNA, 25 bp, Homo sapien
taaagcgcacttactactactttac

SEQ ID NO: 4365323 - DNA, 25 bp, Homo sapien
actgcaatggccgtaagagttttac

SEQ ID NO: 4365324 - DNA, 25 bp, Homo sapien
ctgcaatggccgtaagagttttacc

SEQ ID NO: 4365325 - DNA, 25 bp, Homo sapien
tcaataggaagaggtctgccatcat

SEQ ID NO: 4365326 - DNA, 25 bp, Homo sapien
catcatggaagttggtaaggattac

SEQ ID NO: 4365327 - DNA, 25 bp, Homo sapien
tatcaaatatcattcaaggtcacaa

SEQ ID NO: 4365328 - DNA, 25 bp, Homo sapien
taaaatcaagtaatcgaatatcaaa

SEQ ID NO: 4365329 - DNA, 25 bp, Homo sapien
gataaatggtcagattgtgaaaccc

SEQ ID NO: 4365330 - DNA, 25 bp, Homo sapien
tacaagtatctctgagaagtgtcat

SEQ ID NO: 4365331 - DNA, 25 bp, Homo sapien
caggagcccttcacgaaaatgcaaa

SEQ ID NO: 4365332 - DNA, 25 bp, Homo sapien
tttaaagcagtgtaaataacagcag

SEQ ID NO: 4365333 - DNA, 25 bp, Homo sapien
gcagcttaattcatagttggcaata

SEQ ID NO: 4365334 - DNA, 25 bp, Homo sapien
taagacagaccttactctgttaaca

SEQ ID NO: 4365335 - DNA, 25 bp, Homo sapien
ctttctagaaaatcataatcacaaa

SEQ ID NO: 4365336 - DNA, 25 bp, Homo sapien
actttctagaaaatcataatcacaa

SEQ ID NO: 4365337 - DNA, 25 bp, Homo sapien
tctagaaaatcataatcacaaaatt

SEQ ID NO: 4365338 - DNA, 25 bp, Homo sapien
aatcataatcacaaaattagatttt

SEQ ID NO: 4365339 - DNA, 25 bp, Homo sapien
gaagttctttgctattttcccgtga

SEQ ID NO: 4365340 - DNA, 25 bp, Homo sapien
gtgacaccatccaagctagagcttg

SEQ ID NO: 4365341 - DNA, 25 bp, Homo sapien
tataagtcatttcgctgttcccaga

SEQ ID NO: 4365342 - DNA, 25 bp, Homo sapien
ccatggacattttctggtcggtcct

SEQ ID NO: 4365343 - DNA, 25 bp, Homo sapien
ctcagctggttccatttcatgggtt

SEQ ID NO: 4365344 - DNA, 25 bp, Homo sapien
catttcatgggttttatcatcttct

SEQ ID NO: 4365345 - DNA, 25 bp, Homo sapien
ttttaaatcttcaaacaatttgtca

SEQ ID NO: 4365346 - DNA, 25 bp, Homo sapien
gctggttccatttcatgggttttat

SEQ ID NO: 4365347 - DNA, 25 bp, Homo sapien
ggcatactatagcttggtccagctc

SEQ ID NO: 4365348 - DNA, 25 bp, Homo sapien
catgcactggcatactatagcttgg

SEQ ID NO: 4365349 - DNA, 25 bp, Homo sapien
catctgtactgcagcatgcactggc

SEQ ID NO: 4365350 - DNA, 25 bp, Homo sapien
tcagttgtcatctgtactgcagcat

SEQ ID NO: 4365351 - DNA, 25 bp, Homo sapien
taaaagcattgtttgcaccaaaagg

SEQ ID NO: 4365352 - DNA, 25 bp, Homo sapien
caactgatctgaaaccgcttttcta

SEQ ID NO: 4365353 - DNA, 25 bp, Homo sapien
aaagtcatatgcagaggcatggtaa

SEQ ID NO: 4365354 - DNA, 25 bp, Homo sapien
ggtgcaggacccaatttaaatccat

SEQ ID NO: 4365355 - DNA, 25 bp, Homo sapien
tattaggatctcgttgtaatgcaac

SEQ ID NO: 4365356 - DNA, 25 bp, Homo sapien
tgtgccaatttgttgtccatgatat

SEQ ID NO: 4365357 - DNA, 25 bp, Homo sapien
cattcttatcataagggttattagg

SEQ ID NO: 4365358 - DNA, 25 bp, Homo sapien
tctttaaatggccaacttgatttcc

SEQ ID NO: 4365359 - DNA, 25 bp, Homo sapien
gatatgagaggcgtggaaaatttcc

SEQ ID NO: 4365360 - DNA, 25 bp, Homo sapien
catctggagggataacatcttggaa

SEQ ID NO: 4365361 - DNA, 25 bp, Homo sapien
tgtaatagcgtagtccaaccacatg

SEQ ID NO: 4365362 - DNA, 25 bp, Homo sapien
catcactagttagaaagtcatctgg

SEQ ID NO: 4365363 - DNA, 25 bp, Homo sapien
ctgcaagtacttccaaactggatcc

SEQ ID NO: 4365364 - DNA, 25 bp, Homo sapien
taacacgggactcgccctaggagcc

SEQ ID NO: 4365365 - DNA, 25 bp, Homo sapien
ggccacatatgcgaccaacagaacg

SEQ ID NO: 4365366 - DNA, 25 bp, Homo sapien
tactcgccagcgaagacaatgcatt

SEQ ID NO: 4365367 - DNA, 25 bp, Homo sapien
aatgcatttatttctccggcggcca

SEQ ID NO: 4365368 - DNA, 25 bp, Homo sapien
gacaaattccgagcgccggatcagg

SEQ ID NO: 4365369 - DNA, 25 bp, Homo sapien
tcaggagcgcacgactgaaaggtaa

SEQ ID NO: 4365370 - DNA, 25 bp, Homo sapien
tgaaaggtaagtcgccgcgagtcca

SEQ ID NO: 4365371 - DNA, 25 bp, Homo sapien
tcggctcccctggatcgttttcgag

SEQ ID NO: 4365372 - DNA, 25 bp, Homo sapien
gacgccgtctccttctgcaacaatc

SEQ ID NO: 4365373 - DNA, 25 bp, Homo sapien
acgtcgacgccgtctccttctgcaa

SEQ ID NO: 4365374 - DNA, 25 bp, Homo sapien
tcagacgtcgacgccgtctccttct

SEQ ID NO: 4365375 - DNA, 25 bp, Homo sapien
gccgtctccttctgcaacaatctgg

SEQ ID NO: 4365376 - DNA, 25 bp, Homo sapien
tgcagccgacgcctggcagggctgg

SEQ ID NO: 4365377 - DNA, 25 bp, Homo sapien
tcgctttgcgttgaggaggctgctg

SEQ ID NO: 4365378 - DNA, 25 bp, Homo sapien
ccttttaatcgcacagggcaggaag

SEQ ID NO: 4365379 - DNA, 25 bp, Homo sapien
cccgaagctggccttttaatcgcac

SEQ ID NO: 4365380 - DNA, 25 bp, Homo sapien
tgagataactcactaacttcggacc

SEQ ID NO: 4365381 - DNA, 25 bp, Homo sapien
tttaattgctgcagtgagaaggagg

SEQ ID NO: 4365382 - DNA, 25 bp, Homo sapien
gaaagagtagaacaaggagttcgat

SEQ ID NO: 4365383 - DNA, 25 bp, Homo sapien
ataactcactaacttcggaccagcc

SEQ ID NO: 4365384 - DNA, 25 bp, Homo sapien
gaatttgccggatggtctccctggg

SEQ ID NO: 4365385 - DNA, 25 bp, Homo sapien
taggtatgagcttgcttctgtcggg

SEQ ID NO: 4365386 - DNA, 25 bp, Homo sapien
ttgagctatgcggttgtcgcggcaa

SEQ ID NO: 4365387 - DNA, 25 bp, Homo sapien
tgggtctggccgctgattgcttgaa

SEQ ID NO: 4365388 - DNA, 25 bp, Homo sapien
cacaccattgcgaacatcggaggat

SEQ ID NO: 4365389 - DNA, 25 bp, Homo sapien
tctggagattgtctaagaggcagcc

SEQ ID NO: 4365390 - DNA, 25 bp, Homo sapien
catgtctcccagatgtggtacttca

SEQ ID NO: 4365391 - DNA, 25 bp, Homo sapien
gctgtgatattcagcccagctgtcg

SEQ ID NO: 4365392 - DNA, 25 bp, Homo sapien
taggcatactcaggagacttggagg

SEQ ID NO: 4365393 - DNA, 25 bp, Homo sapien
acttggagggaatgcctgcctctgc

SEQ ID NO: 4365394 - DNA, 25 bp, Homo sapien
ctgatgatggttggaacacctgtgc

SEQ ID NO: 4365395 - DNA, 25 bp, Homo sapien
tgtaggtggatgaacgaacttcacc

SEQ ID NO: 4365396 - DNA, 25 bp, Homo sapien
cattccttggtagatatttggaata

SEQ ID NO: 4365397 - DNA, 25 bp, Homo sapien
tggtcattccttggtagatatttgg

SEQ ID NO: 4365398 - DNA, 25 bp, Homo sapien
ccttggtagatatttggaataaaat

SEQ ID NO: 4365399 - DNA, 25 bp, Homo sapien
cactgactgtgattgggtagatcac

SEQ ID NO: 4365400 - DNA, 25 bp, Homo sapien
tcatgtaggaagttaagatcattac

SEQ ID NO: 4365401 - DNA, 25 bp, Homo sapien
cttaacaaattatcacagtcataga

SEQ ID NO: 4365402 - DNA, 25 bp, Homo sapien
cgtaccctccccttgacatttgata

SEQ ID NO: 4365403 - DNA, 25 bp, Homo sapien
tgtgagtagtcattaaggcaattac

SEQ ID NO: 4365404 - DNA, 25 bp, Homo sapien
aagaattcctcaaagaagccataca

SEQ ID NO: 4365405 - DNA, 25 bp, Homo sapien
tctagaatgtaaaaagtctttaaga

SEQ ID NO: 4365406 - DNA, 25 bp, Homo sapien
gaatgtaaaaagtctttaagacata

SEQ ID NO: 4365407 - DNA, 25 bp, Homo sapien
gtctttaagacataagaattcctca

SEQ ID NO: 4365408 - DNA, 25 bp, Homo sapien
tcatgtgacatctgccacaggtcta

SEQ ID NO: 4365409 - DNA, 25 bp, Homo sapien
aatggcaatgtttgtccttaccagg

SEQ ID NO: 4365410 - DNA, 25 bp, Homo sapien
gggcagaaattctactcatgtgaca

SEQ ID NO: 4365411 - DNA, 25 bp, Homo sapien
cctctgaatgcagttaaggctgggc

SEQ ID NO: 4365412 - DNA, 25 bp, Homo sapien
taaaaccctaacagcggtgatatca

SEQ ID NO: 4365413 - DNA, 25 bp, Homo sapien
caagtgtcagtcatgtatcattata

SEQ ID NO: 4365414 - DNA, 25 bp, Homo sapien
ttttattacctagtgtacaagtgtc

SEQ ID NO: 4365415 - DNA, 25 bp, Homo sapien
gtgtcagtcatgtatcattatatag

SEQ ID NO: 4365416 - DNA, 25 bp, Homo sapien
ttacctagtgtacaagtgtcagtca

SEQ ID NO: 4365417 - DNA, 25 bp, Homo sapien
cacatacattgttatgaatcattgg

SEQ ID NO: 4365418 - DNA, 25 bp, Homo sapien
atgtttatagtcattccaaagtaac

SEQ ID NO: 4365419 - DNA, 25 bp, Homo sapien
ccaaagtaacattctattttacact

SEQ ID NO: 4365420 - DNA, 25 bp, Homo sapien
gcttccagtcttcttttaatgttta

SEQ ID NO: 4365421 - DNA, 25 bp, Homo sapien
tatatggttagaaattagtagatgg

SEQ ID NO: 4365422 - DNA, 25 bp, Homo sapien
aaattagtagatggttctttaaatg

SEQ ID NO: 4365423 - DNA, 25 bp, Homo sapien
tggttagaaattagtagatggttct

SEQ ID NO: 4365424 - DNA, 25 bp, Homo sapien
aaatctctcattctattgctgcttt

SEQ ID NO: 4365425 - DNA, 25 bp, Homo sapien
gacaccatcttaaccaaagcttgaa

SEQ ID NO: 4365426 - DNA, 25 bp, Homo sapien
ttcagactgataaacatggccactg

SEQ ID NO: 4365427 - DNA, 25 bp, Homo sapien
tctttcacggttgttacacaggagg

SEQ ID NO: 4365428 - DNA, 25 bp, Homo sapien
ccatgatagtcttgccaaaagtgca

SEQ ID NO: 4365429 - DNA, 25 bp, Homo sapien
tctaattacaacaatcctcaactcg

SEQ ID NO: 4365430 - DNA, 25 bp, Homo sapien
tagggaggaaagacatagattggtt

SEQ ID NO: 4365431 - DNA, 25 bp, Homo sapien
tcaactcgaaagacccaggaaagac

SEQ ID NO: 4365432 - DNA, 25 bp, Homo sapien
caatcctcaactcgaaagacccagg

SEQ ID NO: 4365433 - DNA, 25 bp, Homo sapien
tacaagtactggctgtcaggaaatg

SEQ ID NO: 4365434 - DNA, 25 bp, Homo sapien
actggtgctgttacaagtactggct

SEQ ID NO: 4365435 - DNA, 25 bp, Homo sapien
aatgactggtgctgttacaagtact

SEQ ID NO: 4365436 - DNA, 25 bp, Homo sapien
tagaaatgactggtgctgttacaag

SEQ ID NO: 4365437 - DNA, 25 bp, Homo sapien
ttgatgcatcatattgggggaagta

SEQ ID NO: 4365438 - DNA, 25 bp, Homo sapien
tgatgcatcatattgggggaagtat

SEQ ID NO: 4365439 - DNA, 25 bp, Homo sapien
gatgcatcatattgggggaagtatt

SEQ ID NO: 4365440 - DNA, 25 bp, Homo sapien
gcaaagtagttcctttagttatatc

SEQ ID NO: 4365441 - DNA, 25 bp, Homo sapien
tggcagtggagtaaccaaattccag

SEQ ID NO: 4365442 - DNA, 25 bp, Homo sapien
ggcagtggagtaaccaaattccagg

SEQ ID NO: 4365443 - DNA, 25 bp, Homo sapien
cagggaaaatgtcaaagacatcaga

SEQ ID NO: 4365444 - DNA, 25 bp, Homo sapien
gttccagggaaaatgtcaaagacat

SEQ ID NO: 4365445 - DNA, 25 bp, Homo sapien
tttggtatgttccagggaaaatgtc

SEQ ID NO: 4365446 - DNA, 25 bp, Homo sapien
tccagggaaaatgtcaaagacatca

SEQ ID NO: 4365447 - DNA, 25 bp, Homo sapien
tatccacatcaagtgggtgtgaaag

SEQ ID NO: 4365448 - DNA, 25 bp, Homo sapien
catttgttaatgttcagctcaggga

SEQ ID NO: 4365449 - DNA, 25 bp, Homo sapien
tcgagctcgtttctgtgtttaatac

SEQ ID NO: 4365450 - DNA, 25 bp, Homo sapien
tcctaataagtctttggtatccaca

SEQ ID NO: 4365451 - DNA, 25 bp, Homo sapien
gcaagagtaattgccatggatagct

SEQ ID NO: 4365452 - DNA, 25 bp, Homo sapien
aagagtaattgccatggatagctct

SEQ ID NO: 4365453 - DNA, 25 bp, Homo sapien
gagcaagagtaattgccatggatag

SEQ ID NO: 4365454 - DNA, 25 bp, Homo sapien
agtaattgccatggatagctcttac

SEQ ID NO: 4365455 - DNA, 25 bp, Homo sapien
tcccatcagataccagttgacttca

SEQ ID NO: 4365456 - DNA, 25 bp, Homo sapien
tcagataccagttgacttcatctcc

SEQ ID NO: 4365457 - DNA, 25 bp, Homo sapien
attcccatcagataccagttgactt

SEQ ID NO: 4365458 - DNA, 25 bp, Homo sapien
ccatcagataccagttgacttcatc

SEQ ID NO: 4365459 - DNA, 25 bp, Homo sapien
aagtaccaagattcattctcatcaa

SEQ ID NO: 4365460 - DNA, 25 bp, Homo sapien
ctcatcatctttgtttactttctcg

SEQ ID NO: 4365461 - DNA, 25 bp, Homo sapien
actttctcggggtgatcagagtatg

SEQ ID NO: 4365462 - DNA, 25 bp, Homo sapien
agagtatgttttgatgttgtcatct

SEQ ID NO: 4365463 - DNA, 25 bp, Homo sapien
tgaatactttcaagtaaggtcttcg

SEQ ID NO: 4365464 - DNA, 25 bp, Homo sapien
gggccaattaatccactgtagaggt

SEQ ID NO: 4365465 - DNA, 25 bp, Homo sapien
ttccttctgggattgaatactttca

SEQ ID NO: 4365466 - DNA, 25 bp, Homo sapien
taaggtcttcgacaaacaatcaggg

SEQ ID NO: 4365467 - DNA, 25 bp, Homo sapien
atacaagcagaatcctctgttccag

SEQ ID NO: 4365468 - DNA, 25 bp, Homo sapien
gaatacaagcagaatcctctgttcc

SEQ ID NO: 4365469 - DNA, 25 bp, Homo sapien
aatacaagcagaatcctctgttcca

SEQ ID NO: 4365470 - DNA, 25 bp, Homo sapien
ttccatacgtaagtgagagtttcac

SEQ ID NO: 4365471 - DNA, 25 bp, Homo sapien
gattttccatacgtaagtgagagtt

SEQ ID NO: 4365472 - DNA, 25 bp, Homo sapien
ttttccatacgtaagtgagagtttc

SEQ ID NO: 4365473 - DNA, 25 bp, Homo sapien
tgggattttccatacgtaagtgaga

SEQ ID NO: 4365474 - DNA, 25 bp, Homo sapien
gtggctggcacctttcccgtaatct

SEQ ID NO: 4365475 - DNA, 25 bp, Homo sapien
cttgccataccacaaagctaggagg

SEQ ID NO: 4365476 - DNA, 25 bp, Homo sapien
cagataccaagtgatttttccccag

SEQ ID NO: 4365477 - DNA, 25 bp, Homo sapien
cagccttgataactaggacccagga

SEQ ID NO: 4365478 - DNA, 25 bp, Homo sapien
gttggagtaactgtagaactctctg

SEQ ID NO: 4365479 - DNA, 25 bp, Homo sapien
taatgttggagtaactgtagaactc

SEQ ID NO: 4365480 - DNA, 25 bp, Homo sapien
atgttggagtaactgtagaactctc

SEQ ID NO: 4365481 - DNA, 25 bp, Homo sapien
ctggtaatgttggagtaactgtaga

SEQ ID NO: 4365482 - DNA, 25 bp, Homo sapien
gaacaactttgatatatgaaccaag

SEQ ID NO: 4365483 - DNA, 25 bp, Homo sapien
ggtagcatcacatcattaacccaca

SEQ ID NO: 4365484 - DNA, 25 bp, Homo sapien
catgaattgacggttactgcaggta

SEQ ID NO: 4365485 - DNA, 25 bp, Homo sapien
tgaaacccatagacatgaattgacg

SEQ ID NO: 4365486 - DNA, 25 bp, Homo sapien
ctgataaactggagatattaacata

SEQ ID NO: 4365487 - DNA, 25 bp, Homo sapien
tggaacacggaatgtgctatcagta

SEQ ID NO: 4365488 - DNA, 25 bp, Homo sapien
cacggaatgtgctatcagtatactg

SEQ ID NO: 4365489 - DNA, 25 bp, Homo sapien
tctccactggaacacggaatgtgct

SEQ ID NO: 4365490 - DNA, 25 bp, Homo sapien
cactggaacacggaatgtgctatca

SEQ ID NO: 4365491 - DNA, 25 bp, Homo sapien
ccaagtaggaatgcataataagact

SEQ ID NO: 4365492 - DNA, 25 bp, Homo sapien
tagtagttttaaatcatcactcttc

SEQ ID NO: 4365493 - DNA, 25 bp, Homo sapien
gaaagcatacctagccatctgagtg

SEQ ID NO: 4365494 - DNA, 25 bp, Homo sapien
ctaaggttagtatttgtcttaatga

SEQ ID NO: 4365495 - DNA, 25 bp, Homo sapien
tgctgaaattgggaatcagagtctg

SEQ ID NO: 4365496 - DNA, 25 bp, Homo sapien
gctgaaattgggaatcagagtctgg

SEQ ID NO: 4365497 - DNA, 25 bp, Homo sapien
ccactgctgcgatatagtatgtcct

SEQ ID NO: 4365498 - DNA, 25 bp, Homo sapien
tccactgctgcgatatagtatgtcc

SEQ ID NO: 4365499 - DNA, 25 bp, Homo sapien
tgtaatgatcagttgtaaggcattc

SEQ ID NO: 4365500 - DNA, 25 bp, Homo sapien
aatgatcagttgtaaggcattcaac

SEQ ID NO: 4365501 - DNA, 25 bp, Homo sapien
ctgtgtaatgatcagttgtaaggca

SEQ ID NO: 4365502 - DNA, 25 bp, Homo sapien
taatgatcagttgtaaggcattcaa

SEQ ID NO: 4365503 - DNA, 25 bp, Homo sapien
gaagtccttatcatggcctcaggtg

SEQ ID NO: 4365504 - DNA, 25 bp, Homo sapien
tgttttactcgttcagagccaggtc

SEQ ID NO: 4365505 - DNA, 25 bp, Homo sapien
ttaagtagcacctcctgagagaatc

SEQ ID NO: 4365506 - DNA, 25 bp, Homo sapien
tcttagagcagatcaagtgtgtgcc

SEQ ID NO: 4365507 - DNA, 25 bp, Homo sapien
catttccggcgctgaataagtacca

SEQ ID NO: 4365508 - DNA, 25 bp, Homo sapien
gccacatgtggagcgtaagacttgt

SEQ ID NO: 4365509 - DNA, 25 bp, Homo sapien
taagtaccacacgaccgaatctcct

SEQ ID NO: 4365510 - DNA, 25 bp, Homo sapien
gagacccggctgattcccatacatg

SEQ ID NO: 4365511 - DNA, 25 bp, Homo sapien
acttggtagattggtggatgatgca

SEQ ID NO: 4365512 - DNA, 25 bp, Homo sapien
aacttggtagattggtggatgatgc

SEQ ID NO: 4365513 - DNA, 25 bp, Homo sapien
taacttggtagattggtggatgatg

SEQ ID NO: 4365514 - DNA, 25 bp, Homo sapien
aataacttggtagattggtggatga

SEQ ID NO: 4365515 - DNA, 25 bp, Homo sapien
tattagattcctgaaagtcttcatc

SEQ ID NO: 4365516 - DNA, 25 bp, Homo sapien
cctgatcaggtgcagttgtaaacat

SEQ ID NO: 4365517 - DNA, 25 bp, Homo sapien
gatcaggtgcagttgtaaacattct

SEQ ID NO: 4365518 - DNA, 25 bp, Homo sapien
tatccacctgatcaggtgcagttgt

SEQ ID NO: 4365519 - DNA, 25 bp, Homo sapien
gtgcacaatactatttatgcacaaa

SEQ ID NO: 4365520 - DNA, 25 bp, Homo sapien
gacttccatgtgcacaatactattt

SEQ ID NO: 4365521 - DNA, 25 bp, Homo sapien
gaagacttccatgtgcacaatacta

SEQ ID NO: 4365522 - DNA, 25 bp, Homo sapien
ccatgtgcacaatactatttatgca

SEQ ID NO: 4365523 - DNA, 25 bp, Homo sapien
taaagggctctcctaataaagcagt

SEQ ID NO: 4365524 - DNA, 25 bp, Homo sapien
tgtataaactgtagcatgtccacac

SEQ ID NO: 4365525 - DNA, 25 bp, Homo sapien
caagaataaagaccagcagaacagc

SEQ ID NO: 4365526 - DNA, 25 bp, Homo sapien
gataaatatgatccgctcctcgact

SEQ ID NO: 4365527 - DNA, 25 bp, Homo sapien
ttgcatattttcattggcccaataa

SEQ ID NO: 4365528 - DNA, 25 bp, Homo sapien
acaggatctgcattagtgggtccta

SEQ ID NO: 4365529 - DNA, 25 bp, Homo sapien
catattttcattggcccaataagcc

SEQ ID NO: 4365530 - DNA, 25 bp, Homo sapien
cattagtgggtcctacttctttggg

SEQ ID NO: 4365531 - DNA, 25 bp, Homo sapien
tagtatgtgccctcgttgttcttat

SEQ ID NO: 4365532 - DNA, 25 bp, Homo sapien
tgtaatttggggaatagtatgtgcc

SEQ ID NO: 4365533 - DNA, 25 bp, Homo sapien
tgccctcgttgttcttattgaatct

SEQ ID NO: 4365534 - DNA, 25 bp, Homo sapien
gggaatagtatgtgccctcgttgtt

SEQ ID NO: 4365535 - DNA, 25 bp, Homo sapien
gctcctttgttatggaaggttactc

SEQ ID NO: 4365536 - DNA, 25 bp, Homo sapien
tggaaggttactctgatggtgtctc

SEQ ID NO: 4365537 - DNA, 25 bp, Homo sapien
tactgaggggatatgctcctttgtt

SEQ ID NO: 4365538 - DNA, 25 bp, Homo sapien
tctgatggtgtctcccacctctgcc

SEQ ID NO: 4365539 - DNA, 25 bp, Homo sapien
catgcagaatgtataagatagttat

SEQ ID NO: 4365540 - DNA, 25 bp, Homo sapien
ttctctggcaagaactactaggagc

SEQ ID NO: 4365541 - DNA, 25 bp, Homo sapien
cacgcttatttgtggtgaatggaaa

SEQ ID NO: 4365542 - DNA, 25 bp, Homo sapien
tatccttccttggtatgtaacatgc

SEQ ID NO: 4365543 - DNA, 25 bp, Homo sapien
gaaggaggcatctgtgtactcacga

SEQ ID NO: 4365544 - DNA, 25 bp, Homo sapien
tataagagcctccaattcttgtggt

SEQ ID NO: 4365545 - DNA, 25 bp, Homo sapien
agggcctctctcctttcgatttgtg

SEQ ID NO: 4365546 - DNA, 25 bp, Homo sapien
ccttgttcaaaaaacaccgctgagt

SEQ ID NO: 4365547 - DNA, 25 bp, Homo sapien
tgatgaagacttgttacactcctgg

SEQ ID NO: 4365548 - DNA, 25 bp, Homo sapien
cctcagcggcaatgtagtagtgtct

SEQ ID NO: 4365549 - DNA, 25 bp, Homo sapien
ccagagggagcatagttccagatga

SEQ ID NO: 4365550 - DNA, 25 bp, Homo sapien
tcctggacctggaaaaaggcttgca

SEQ ID NO: 4365551 - DNA, 25 bp, Homo sapien
cttgttagtcagtgcttgcccgtga

SEQ ID NO: 4365552 - DNA, 25 bp, Homo sapien
gaaagaggttgattgtgtcaatacg

SEQ ID NO: 4365553 - DNA, 25 bp, Homo sapien
tataagcatcaaacagggtagcagg

SEQ ID NO: 4365554 - DNA, 25 bp, Homo sapien
ttgcccgtgaaagaaagctgcgtgc

SEQ ID NO: 4365555 - DNA, 25 bp, Homo sapien
tcctgggagacttccaaaagtgtat

SEQ ID NO: 4365556 - DNA, 25 bp, Homo sapien
cattttactctgtcttcagcacaca

SEQ ID NO: 4365557 - DNA, 25 bp, Homo sapien
gtcttcagcacacatggagagtcct

SEQ ID NO: 4365558 - DNA, 25 bp, Homo sapien
ggagagtcctgggagacttccaaaa

SEQ ID NO: 4365559 - DNA, 25 bp, Homo sapien
tgagtgcaccacatgtaacactggt

SEQ ID NO: 4365560 - DNA, 25 bp, Homo sapien
ggtggcctgaaaccctcagaagaaa

SEQ ID NO: 4365561 - DNA, 25 bp, Homo sapien
ttctgggaagaatcctgagtgcacc

SEQ ID NO: 4365562 - DNA, 25 bp, Homo sapien
gcttgagatagtgagagttacctct

SEQ ID NO: 4365563 - DNA, 25 bp, Homo sapien
ccacaaattctcggtcaatatgttt

SEQ ID NO: 4365564 - DNA, 25 bp, Homo sapien
tcaccacaaattctcggtcaatatg

SEQ ID NO: 4365565 - DNA, 25 bp, Homo sapien
ctttctctggttctgagcagtaggt

SEQ ID NO: 4365566 - DNA, 25 bp, Homo sapien
aattttcatccaccacagaaaacat

SEQ ID NO: 4365567 - DNA, 25 bp, Homo sapien
aaaatctgtggtgttatcagggtag

SEQ ID NO: 4365568 - DNA, 25 bp, Homo sapien
catcaatgtgggaatggtaaatcct

SEQ ID NO: 4365569 - DNA, 25 bp, Homo sapien
ggtaaatcctagtcacacaattgcc

SEQ ID NO: 4365570 - DNA, 25 bp, Homo sapien
gttcttcagtggcaagcaacatgta

SEQ ID NO: 4365571 - DNA, 25 bp, Homo sapien
gaagcaacatgcaatgaaggtgcaa

SEQ ID NO: 4365572 - DNA, 25 bp, Homo sapien
ctaggaagcaacatgcaatgaaggt

SEQ ID NO: 4365573 - DNA, 25 bp, Homo sapien
aacatgcaatgaaggtgcaaagtga

SEQ ID NO: 4365574 - DNA, 25 bp, Homo sapien
gcaacatgcaatgaaggtgcaaagt

SEQ ID NO: 4365575 - DNA, 25 bp, Homo sapien
taaagggccttcttatatagtctcc

SEQ ID NO: 4365576 - DNA, 25 bp, Homo sapien
tcagctttgataatagggcctaaaa

SEQ ID NO: 4365577 - DNA, 25 bp, Homo sapien
ctatagttgtcctaaaggtttcatc

SEQ ID NO: 4365578 - DNA, 25 bp, Homo sapien
caagccagaccggtttttctatagt

SEQ ID NO: 4365579 - DNA, 25 bp, Homo sapien
gctagagttgttgatgcatgcaatg

SEQ ID NO: 4365580 - DNA, 25 bp, Homo sapien
tcatgttgccatttggcaggaccca

SEQ ID NO: 4365581 - DNA, 25 bp, Homo sapien
tgggatctattcatgggcaacatca

SEQ ID NO: 4365582 - DNA, 25 bp, Homo sapien
gacccacttagattctggcctttgg

SEQ ID NO: 4365583 - DNA, 25 bp, Homo sapien
gtcgcccaggctataatgtaacggc

SEQ ID NO: 4365584 - DNA, 25 bp, Homo sapien
tcgcccaggctataatgtaacggcg

SEQ ID NO: 4365585 - DNA, 25 bp, Homo sapien
cgcccaggctataatgtaacggcgt

SEQ ID NO: 4365586 - DNA, 25 bp, Homo sapien
gcccaggctataatgtaacggcgtg

SEQ ID NO: 4365587 - DNA, 25 bp, Homo sapien
tggtcattaggcctgcttatagtga

SEQ ID NO: 4365588 - DNA, 25 bp, Homo sapien
tgtctagttttttggtcaggatttg

SEQ ID NO: 4365589 - DNA, 25 bp, Homo sapien
atttcttcttggtcattaggcctgc

SEQ ID NO: 4365590 - DNA, 25 bp, Homo sapien
ggcctgcttatagtgacatcttcac

SEQ ID NO: 4365591 - DNA, 25 bp, Homo sapien
tagagacttggagggctcagatgac

SEQ ID NO: 4365592 - DNA, 25 bp, Homo sapien
aaagtgactttggaattgggtagca

SEQ ID NO: 4365593 - DNA, 25 bp, Homo sapien
ggaaagtttgcaatgtaagacatgc

SEQ ID NO: 4365594 - DNA, 25 bp, Homo sapien
ctcagatgacaggaaggtatgggaa

SEQ ID NO: 4365595 - DNA, 25 bp, Homo sapien
tcagaggcataatcccaagtcgttt

SEQ ID NO: 4365596 - DNA, 25 bp, Homo sapien
gaggcataatcccaagtcgtttcaa

SEQ ID NO: 4365597 - DNA, 25 bp, Homo sapien
gcataatcccaagtcgtttcaataa

SEQ ID NO: 4365598 - DNA, 25 bp, Homo sapien
taatcccaagtcgtttcaataattc

SEQ ID NO: 4365599 - DNA, 25 bp, Homo sapien
acagaaaaataccaagtatcaaaat

SEQ ID NO: 4365600 - DNA, 25 bp, Homo sapien
agaaaaataccaagtatcaaaatct

SEQ ID NO: 4365601 - DNA, 25 bp, Homo sapien
aaaataccaagtatcaaaatcttca

SEQ ID NO: 4365602 - DNA, 25 bp, Homo sapien
aaataccaagtatcaaaatcttcat

SEQ ID NO: 4365603 - DNA, 25 bp, Homo sapien
caatttagtgttgcacaagagtaaa

SEQ ID NO: 4365604 - DNA, 25 bp, Homo sapien
aaatcaggagcaggcaattttataa

SEQ ID NO: 4365605 - DNA, 25 bp, Homo sapien
aagactttcttccttatttgcttga

SEQ ID NO: 4365606 - DNA, 25 bp, Homo sapien
tcagttaagttctcgtaaaccacca

SEQ ID NO: 4365607 - DNA, 25 bp, Homo sapien
caaatgtagtcctgatattgagaga

SEQ ID NO: 4365608 - DNA, 25 bp, Homo sapien
tatcggtggctaatcagtttttggt

SEQ ID NO: 4365609 - DNA, 25 bp, Homo sapien
ggatttatttcatggacagcgcacc

SEQ ID NO: 4365610 - DNA, 25 bp, Homo sapien
gaaactgttcatgctgactctcctt

SEQ ID NO: 4365611 - DNA, 25 bp, Homo sapien
taaaataaccaggttccaacatctc

SEQ ID NO: 4365612 - DNA, 25 bp, Homo sapien
gtaagtgctttccattccagcacca

SEQ ID NO: 4365613 - DNA, 25 bp, Homo sapien
cattccagcaccaatgtgctcaaaa

SEQ ID NO: 4365614 - DNA, 25 bp, Homo sapien
caccaatgtgctcaaaaacatggca

SEQ ID NO: 4365615 - DNA, 25 bp, Homo sapien
ggtcataaacatcagattgatacac

SEQ ID NO: 4365616 - DNA, 25 bp, Homo sapien
cataaacatcagattgatacactcc

SEQ ID NO: 4365617 - DNA, 25 bp, Homo sapien
cagttcgatagaccccaggaggaag

SEQ ID NO: 4365618 - DNA, 25 bp, Homo sapien
ttttacagttcgatagaccccagga

SEQ ID NO: 4365619 - DNA, 25 bp, Homo sapien
caagacatcacaggatatggactgt

SEQ ID NO: 4365620 - DNA, 25 bp, Homo sapien
tggtttacaagacatcacaggatat

SEQ ID NO: 4365621 - DNA, 25 bp, Homo sapien
tttacaagacatcacaggatatgga

SEQ ID NO: 4365622 - DNA, 25 bp, Homo sapien
ataactggtttacaagacatcacag

SEQ ID NO: 4365623 - DNA, 25 bp, Homo sapien
actacatccccaacatggaatgtta

SEQ ID NO: 4365624 - DNA, 25 bp, Homo sapien
tgccaatcagataccaattcactac

SEQ ID NO: 4365625 - DNA, 25 bp, Homo sapien
gcttcattccctatgccaatcagat

SEQ ID NO: 4365626 - DNA, 25 bp, Homo sapien
gctatggccatgaaagtgaactgtg

SEQ ID NO: 4365627 - DNA, 25 bp, Homo sapien
gtggagcgaggccctttcatctgtt

SEQ ID NO: 4365628 - DNA, 25 bp, Homo sapien
cagttatatgtagttgaattctata

SEQ ID NO: 4365629 - DNA, 25 bp, Homo sapien
tgtggagcgaggccctttcatctgt

SEQ ID NO: 4365630 - DNA, 25 bp, Homo sapien
agttgaattctataaacagtgtgga

SEQ ID NO: 4365631 - DNA, 25 bp, Homo sapien
tgatactgtcttcgaagtaccagga

SEQ ID NO: 4365632 - DNA, 25 bp, Homo sapien
gagggcctaccagtccactgtgaag

SEQ ID NO: 4365633 - DNA, 25 bp, Homo sapien
tctttgcggcatacagagagagggc

SEQ ID NO: 4365634 - DNA, 25 bp, Homo sapien
atatcatgaagtggagaacacggtg

SEQ ID NO: 4365635 - DNA, 25 bp, Homo sapien
tctgccaagtatatatttgaatctc

SEQ ID NO: 4365636 - DNA, 25 bp, Homo sapien
ttctatcaggtatctgccaagtata

SEQ ID NO: 4365637 - DNA, 25 bp, Homo sapien
agtgaggtaggaccagttctatcag

SEQ ID NO: 4365638 - DNA, 25 bp, Homo sapien
ccacagatacagttgaatagtaaaa

SEQ ID NO: 4365639 - DNA, 25 bp, Homo sapien
cgtagtcctgcataaaagctttggg

SEQ ID NO: 4365640 - DNA, 25 bp, Homo sapien
ttaaaagaacattagcctcgtagtc

SEQ ID NO: 4365641 - DNA, 25 bp, Homo sapien
gcctcgtagtcctgcataaaagctt

SEQ ID NO: 4365642 - DNA, 25 bp, Homo sapien
taaaagaacattagcctcgtagtcc

SEQ ID NO: 4365643 - DNA, 25 bp, Homo sapien
tagaatacggtcttgcggctttatt

SEQ ID NO: 4365644 - DNA, 25 bp, Homo sapien
tggctgagttggaacaacagtggaa

SEQ ID NO: 4365645 - DNA, 25 bp, Homo sapien
actccatgagcatgaatagaatacg

SEQ ID NO: 4365646 - DNA, 25 bp, Homo sapien
gaattatttgaccagggttgagcaa

SEQ ID NO: 4365647 - DNA, 25 bp, Homo sapien
tatcatcatattgacgatataagac

SEQ ID NO: 4365648 - DNA, 25 bp, Homo sapien
tcatattgacgatataagactttct

SEQ ID NO: 4365649 - DNA, 25 bp, Homo sapien
gttccacttctgtccacatacatgc

SEQ ID NO: 4365650 - DNA, 25 bp, Homo sapien
gatttgtgaacgtgttatcatcata

SEQ ID NO: 4365651 - DNA, 25 bp, Homo sapien
ttcgtaagtggtggagttcattctc

SEQ ID NO: 4365652 - DNA, 25 bp, Homo sapien
tctactaggagaataatcccattcc

SEQ ID NO: 4365653 - DNA, 25 bp, Homo sapien
cacattgcctcacgtgatatttatg

SEQ ID NO: 4365654 - DNA, 25 bp, Homo sapien
tatgtttcatgcctcctagattgtg

SEQ ID NO: 4365655 - DNA, 25 bp, Homo sapien
tcctcggctgcaatggtaataatta

SEQ ID NO: 4365656 - DNA, 25 bp, Homo sapien
ttaggcccaccacgtgctgacactg

SEQ ID NO: 4365657 - DNA, 25 bp, Homo sapien
tggtaattttaggcccaccacgtgc

SEQ ID NO: 4365658 - DNA, 25 bp, Homo sapien
taattttaggcccaccacgtgctga

SEQ ID NO: 4365659 - DNA, 25 bp, Homo sapien
ttttaggcccaccacgtgctgacac

SEQ ID NO: 4365660 - DNA, 25 bp, Homo sapien
acagttgatatgctttggaaaagag

SEQ ID NO: 4365661 - DNA, 25 bp, Homo sapien
tgatatgctttggaaaagagaatga

SEQ ID NO: 4365662 - DNA, 25 bp, Homo sapien
gttgatatgctttggaaaagagaat

SEQ ID NO: 4365663 - DNA, 25 bp, Homo sapien
cagttgatatgctttggaaaagaga

SEQ ID NO: 4365664 - DNA, 25 bp, Homo sapien
cacaaggcagtagggtaaggtcgaa

SEQ ID NO: 4365665 - DNA, 25 bp, Homo sapien
gcaaggatcaacctcactgaagcta

SEQ ID NO: 4365666 - DNA, 25 bp, Homo sapien
attgaaagtctaacatatgccaggc

SEQ ID NO: 4365667 - DNA, 25 bp, Homo sapien
gacaagggtggatctactggattaa

SEQ ID NO: 4365668 - DNA, 25 bp, Homo sapien
gtttcaggctgaatgagaagaccca

SEQ ID NO: 4365669 - DNA, 25 bp, Homo sapien
taatgtttcaggctgaatgagaaga

SEQ ID NO: 4365670 - DNA, 25 bp, Homo sapien
ttaatgtttcaggctgaatgagaag

SEQ ID NO: 4365671 - DNA, 25 bp, Homo sapien
aggtgtcatcaaaagcgtctgagaa

SEQ ID NO: 4365672 - DNA, 25 bp, Homo sapien
cacaaaacgttgtctcctaagcacg

SEQ ID NO: 4365673 - DNA, 25 bp, Homo sapien
cctaagcacgtgtccaatccaggca

SEQ ID NO: 4365674 - DNA, 25 bp, Homo sapien
tgatcctacactaaaaacgtgccac

SEQ ID NO: 4365675 - DNA, 25 bp, Homo sapien
tcatcaaatattgtggcaagtaggt

SEQ ID NO: 4365676 - DNA, 25 bp, Homo sapien
tatttgaggcttggcagtctgtatc

SEQ ID NO: 4365677 - DNA, 25 bp, Homo sapien
ttttcatccaagagattactttcat

SEQ ID NO: 4365678 - DNA, 25 bp, Homo sapien
ggctctgtgataaatgttctgatat

SEQ ID NO: 4365679 - DNA, 25 bp, Homo sapien
gccatcgtctccaagacttccattt

SEQ ID NO: 4365680 - DNA, 25 bp, Homo sapien
tgtttgccatcgtctccaagacttc

SEQ ID NO: 4365681 - DNA, 25 bp, Homo sapien
ctgtttgccatcgtctccaagactt

SEQ ID NO: 4365682 - DNA, 25 bp, Homo sapien
tttgccatcgtctccaagacttcca

SEQ ID NO: 4365683 - DNA, 25 bp, Homo sapien
agaaggccactgttgatgtcttttt

SEQ ID NO: 4365684 - DNA, 25 bp, Homo sapien
ggccccagaaggccactgttgatgt

SEQ ID NO: 4365685 - DNA, 25 bp, Homo sapien
ctacatataaggagaggccccagaa

SEQ ID NO: 4365686 - DNA, 25 bp, Homo sapien
ccagaaggccactgttgatgtcttt

SEQ ID NO: 4365687 - DNA, 25 bp, Homo sapien
caattctggttggacttcgttcaaa

SEQ ID NO: 4365688 - DNA, 25 bp, Homo sapien
gaagcatctgtgtattcacggtaaa

SEQ ID NO: 4365689 - DNA, 25 bp, Homo sapien
tgtgtattcacggtaaatcagtttt

SEQ ID NO: 4365690 - DNA, 25 bp, Homo sapien
ccaattctggttggacttcgttcaa

SEQ ID NO: 4365691 - DNA, 25 bp, Homo sapien
tccagctgctgttaaatttttttta

SEQ ID NO: 4365692 - DNA, 25 bp, Homo sapien
cttccagctgctgttaaattttttt

SEQ ID NO: 4365693 - DNA, 25 bp, Homo sapien
gctgctgttaaattttttttagtga

SEQ ID NO: 4365694 - DNA, 25 bp, Homo sapien
cagctgctgttaaattttttttagt

SEQ ID NO: 4365695 - DNA, 25 bp, Homo sapien
cagtaacaaaggcttctgttgaagg

SEQ ID NO: 4365696 - DNA, 25 bp, Homo sapien
ttgaaggtttctggcaattacttac

SEQ ID NO: 4365697 - DNA, 25 bp, Homo sapien
cagatggagcatagttccaaagaat

SEQ ID NO: 4365698 - DNA, 25 bp, Homo sapien
tgtataacatgtgtcccagtaacaa

SEQ ID NO: 4365699 - DNA, 25 bp, Homo sapien
gaagagcataatggtgtcctttctg

SEQ ID NO: 4365700 - DNA, 25 bp, Homo sapien
tgccaacaaaataccactggaccct

SEQ ID NO: 4365701 - DNA, 25 bp, Homo sapien
gagattgggcagatttccatagatg

SEQ ID NO: 4365702 - DNA, 25 bp, Homo sapien
tccgagagatcagagtttgtccgcg

SEQ ID NO: 4365703 - DNA, 25 bp, Homo sapien
ggaatgagcaggctttactagtgat

SEQ ID NO: 4365704 - DNA, 25 bp, Homo sapien
gcatttgcatgtcaacccagtatac

SEQ ID NO: 4365705 - DNA, 25 bp, Homo sapien
cccagtatactctgattgaaacgct

SEQ ID NO: 4365706 - DNA, 25 bp, Homo sapien
gggaaatgactgaatacgatcatag

SEQ ID NO: 4365707 - DNA, 25 bp, Homo sapien
gccagattcagtaaatgcacgaata

SEQ ID NO: 4365708 - DNA, 25 bp, Homo sapien
ctgctttcatcagttgtagaaaaca

SEQ ID NO: 4365709 - DNA, 25 bp, Homo sapien
ttttcatcactataccagcttctgc

SEQ ID NO: 4365710 - DNA, 25 bp, Homo sapien
atgctcatgctctcctcaaaacggg

SEQ ID NO: 4365711 - DNA, 25 bp, Homo sapien
ctcttttactgcaatgagatttttt

SEQ ID NO: 4365712 - DNA, 25 bp, Homo sapien
tattggtccaataagtcccgaagct

SEQ ID NO: 4365713 - DNA, 25 bp, Homo sapien
tcatcttccttttgcaggcctgtcg

SEQ ID NO: 4365714 - DNA, 25 bp, Homo sapien
ggtatattgtttccctggctccaga

SEQ ID NO: 4365715 - DNA, 25 bp, Homo sapien
tcccgaagctacatctcttgcagtg

SEQ ID NO: 4365716 - DNA, 25 bp, Homo sapien
tctttggagtaggtgagcccatgag

SEQ ID NO: 4365717 - DNA, 25 bp, Homo sapien
aactataagctcttgaagcattatt

SEQ ID NO: 4365718 - DNA, 25 bp, Homo sapien
tctctgctttaatcattggacctaa

SEQ ID NO: 4365719 - DNA, 25 bp, Homo sapien
acatgtacataaatgaagtctccag

SEQ ID NO: 4365720 - DNA, 25 bp, Homo sapien
acaaagctcttcctcgcttgacctc

SEQ ID NO: 4365721 - DNA, 25 bp, Homo sapien
caaagctcttcctcgcttgacctcc

SEQ ID NO: 4365722 - DNA, 25 bp, Homo sapien
aaagctcttcctcgcttgacctcct

SEQ ID NO: 4365723 - DNA, 25 bp, Homo sapien
cattgagcatatttttaccagaagg

SEQ ID NO: 4365724 - DNA, 25 bp, Homo sapien
tttcttcaatgcctatgtagcagtg

SEQ ID NO: 4365725 - DNA, 25 bp, Homo sapien
caatgcctatgtagcagtgcctatc

SEQ ID NO: 4365726 - DNA, 25 bp, Homo sapien
atgtagcagtgcctatctattgccc

SEQ ID NO: 4365727 - DNA, 25 bp, Homo sapien
cagtgcctatctattgcccaacctg

SEQ ID NO: 4365728 - DNA, 25 bp, Homo sapien
atctgtcttcattaacatatatgtc

SEQ ID NO: 4365729 - DNA, 25 bp, Homo sapien
tgtcaggtgaggtgaaatgttgcac

SEQ ID NO: 4365730 - DNA, 25 bp, Homo sapien
tgtgtctactgacatacattatctg

SEQ ID NO: 4365731 - DNA, 25 bp, Homo sapien
aacacactggatcgttaggttgccc

SEQ ID NO: 4365732 - DNA, 25 bp, Homo sapien
agttgtgtaaattcaatgacagcca

SEQ ID NO: 4365733 - DNA, 25 bp, Homo sapien
aagttgtgtaaattcaatgacagcc

SEQ ID NO: 4365734 - DNA, 25 bp, Homo sapien
ggaagttgtgtaaattcaatgacag

SEQ ID NO: 4365735 - DNA, 25 bp, Homo sapien
gaagttgtgtaaattcaatgacagc

SEQ ID NO: 4365736 - DNA, 25 bp, Homo sapien
agcctggtgacacagtgaaactcca

SEQ ID NO: 4365737 - DNA, 25 bp, Homo sapien
gcctggtgacacagtgaaactccat

SEQ ID NO: 4365738 - DNA, 25 bp, Homo sapien
aggggactaaatggttcacagttct

SEQ ID NO: 4365739 - DNA, 25 bp, Homo sapien
gaggggactaaatggttcacagttc

SEQ ID NO: 4365740 - DNA, 25 bp, Homo sapien
tctggaactaaaggataccttcttc

SEQ ID NO: 4365741 - DNA, 25 bp, Homo sapien
ctgaggggactaaatggttcacagt

SEQ ID NO: 4365742 - DNA, 25 bp, Homo sapien
tcttcttaggtcttgcagttcaaaa

SEQ ID NO: 4365743 - DNA, 25 bp, Homo sapien
atctgacccaagatgccaggaactg

SEQ ID NO: 4365744 - DNA, 25 bp, Homo sapien
gtccctatgcctacagctgggtcca

SEQ ID NO: 4365745 - DNA, 25 bp, Homo sapien
agttcaaaagaactcatccctagag

SEQ ID NO: 4365746 - DNA, 25 bp, Homo sapien
gcaggactcagccaacatactctag

SEQ ID NO: 4365747 - DNA, 25 bp, Homo sapien
gaagatgaaggactcctccatggca

SEQ ID NO: 4365748 - DNA, 25 bp, Homo sapien
aaaggaaaggcctagagctcagagg

SEQ ID NO: 4365749 - DNA, 25 bp, Homo sapien
tgatggattccctagagcagcagga

SEQ ID NO: 4365750 - DNA, 25 bp, Homo sapien
ctttgctgtccctgtaaccctatga

SEQ ID NO: 4365751 - DNA, 25 bp, Homo sapien
ctgtccctgtaaccctatgaccttt

SEQ ID NO: 4365752 - DNA, 25 bp, Homo sapien
tttgctgtccctgtaaccctatgac

SEQ ID NO: 4365753 - DNA, 25 bp, Homo sapien
tgctgtccctgtaaccctatgacct

SEQ ID NO: 4365754 - DNA, 25 bp, Homo sapien
tcagcctatagcatctggtctccca

SEQ ID NO: 4365755 - DNA, 25 bp, Homo sapien
aaaatttgggctcaaactgcataca

SEQ ID NO: 4365756 - DNA, 25 bp, Homo sapien
gatcaatcctgcttaagtttccaat

SEQ ID NO: 4365757 - DNA, 25 bp, Homo sapien
gcattttcagggtgttgtgaccaca

SEQ ID NO: 4365758 - DNA, 25 bp, Homo sapien
attaacagtccattcaacgtacggt

SEQ ID NO: 4365759 - DNA, 25 bp, Homo sapien
caatgctgtggtggagtcattcagc

SEQ ID NO: 4365760 - DNA, 25 bp, Homo sapien
ttcaacgtacggtgccatgctgaat

SEQ ID NO: 4365761 - DNA, 25 bp, Homo sapien
gtccaatgctgtggtggagtcattc

SEQ ID NO: 4365762 - DNA, 25 bp, Homo sapien
tccccgaggaagacatggcatgtat

SEQ ID NO: 4365763 - DNA, 25 bp, Homo sapien
tccagaagtctgtttacaagagggc

SEQ ID NO: 4365764 - DNA, 25 bp, Homo sapien
tataagatgtggctactgtccccga

SEQ ID NO: 4365765 - DNA, 25 bp, Homo sapien
tcagaggccattagcaagacaatag

SEQ ID NO: 4365766 - DNA, 25 bp, Homo sapien
catttcaatattgccctcaagtcta

SEQ ID NO: 4365767 - DNA, 25 bp, Homo sapien
tgtttgatcaaagggcagaagtatt

SEQ ID NO: 4365768 - DNA, 25 bp, Homo sapien
gaagggtggtatacttgcatgtgca

SEQ ID NO: 4365769 - DNA, 25 bp, Homo sapien
tacttccctagtacagattcttgga

SEQ ID NO: 4365770 - DNA, 25 bp, Homo sapien
ggttccaggcactgaatccatatgc

SEQ ID NO: 4365771 - DNA, 25 bp, Homo sapien
tcacttgaagcccactgagggttat

SEQ ID NO: 4365772 - DNA, 25 bp, Homo sapien
gcatgactactctgatgaggcagat

SEQ ID NO: 4365773 - DNA, 25 bp, Homo sapien
gaatccatatgctagaatctgtaag

SEQ ID NO: 4365774 - DNA, 25 bp, Homo sapien
tcaagggtgcggcaatatggccctt

SEQ ID NO: 4365775 - DNA, 25 bp, Homo sapien
agtgccttcaaaagcatactcccag

SEQ ID NO: 4365776 - DNA, 25 bp, Homo sapien
cagaaaaagcaattccgagggaaga

SEQ ID NO: 4365777 - DNA, 25 bp, Homo sapien
ggcccttggacaagacccaaggcag

SEQ ID NO: 4365778 - DNA, 25 bp, Homo sapien
attattctccagtaccagaagaact

SEQ ID NO: 4365779 - DNA, 25 bp, Homo sapien
attttttgctgcagttttcactctg

SEQ ID NO: 4365780 - DNA, 25 bp, Homo sapien
tttttgctgcagttttcactctggc

SEQ ID NO: 4365781 - DNA, 25 bp, Homo sapien
ttttgctgcagttttcactctggca

SEQ ID NO: 4365782 - DNA, 25 bp, Homo sapien
gattatactccaaagtgcaagcgga

SEQ ID NO: 4365783 - DNA, 25 bp, Homo sapien
cataggaagtttgcccattcgggaa

SEQ ID NO: 4365784 - DNA, 25 bp, Homo sapien
ccttcaaaataccacacgtagttgg

SEQ ID NO: 4365785 - DNA, 25 bp, Homo sapien
gcggaatcagcaaacaacttaggca

SEQ ID NO: 4365786 - DNA, 25 bp, Homo sapien
caagagtatacagtcacagaaagtc

SEQ ID NO: 4365787 - DNA, 25 bp, Homo sapien
agatttcaagagtatacagtcacag

SEQ ID NO: 4365788 - DNA, 25 bp, Homo sapien
ttcaagagtatacagtcacagaaag

SEQ ID NO: 4365789 - DNA, 25 bp, Homo sapien
gagtatacagtcacagaaagtctat

SEQ ID NO: 4365790 - DNA, 25 bp, Homo sapien
atacccgcagccgacaatctcagtg

SEQ ID NO: 4365791 - DNA, 25 bp, Homo sapien
ggaatatacccgcagccgacaatct

SEQ ID NO: 4365792 - DNA, 25 bp, Homo sapien
cgcagccgacaatctcagtgtgaaa

SEQ ID NO: 4365793 - DNA, 25 bp, Homo sapien
gggaattggaatatacccgcagccg

SEQ ID NO: 4365794 - DNA, 25 bp, Homo sapien
gtgccaaaggaatgcggtgtttttc

SEQ ID NO: 4365795 - DNA, 25 bp, Homo sapien
gaatgcggtgtttttcactgctttt

SEQ ID NO: 4365796 - DNA, 25 bp, Homo sapien
aaaggaatgcggtgtttttcactgc

SEQ ID NO: 4365797 - DNA, 25 bp, Homo sapien
ttggagaacaatagacaatgatcaa

SEQ ID NO: 4365798 - DNA, 25 bp, Homo sapien
agaggggaggaaatccgcaggatgc

SEQ ID NO: 4365799 - DNA, 25 bp, Homo sapien
gtcctccagtaactgggaggagcca

SEQ ID NO: 4365800 - DNA, 25 bp, Homo sapien
tggtcctccagtaactgggaggagc

SEQ ID NO: 4365801 - DNA, 25 bp, Homo sapien
tgctggtcctccagtaactgggagg

SEQ ID NO: 4365802 - DNA, 25 bp, Homo sapien
ctgctgcaggaccattgaggaactg

SEQ ID NO: 4365803 - DNA, 25 bp, Homo sapien
atgaaacttgttggcgtgagctcca

SEQ ID NO: 4365804 - DNA, 25 bp, Homo sapien
cacagggaaaccagctggggcaccc

SEQ ID NO: 4365805 - DNA, 25 bp, Homo sapien
cccatgaaacttgttggcgtgagct

SEQ ID NO: 4365806 - DNA, 25 bp, Homo sapien
gggttgaagagatcagcctgcatgt

SEQ ID NO: 4365807 - DNA, 25 bp, Homo sapien
gcctttttctgcgatgtgggttgaa

SEQ ID NO: 4365808 - DNA, 25 bp, Homo sapien
agcctgcatgtttctcctgtgatcc

SEQ ID NO: 4365809 - DNA, 25 bp, Homo sapien
gtgatccccatctacaagcaccaca

SEQ ID NO: 4365810 - DNA, 25 bp, Homo sapien
cactgaaactagtttgataagtctg

SEQ ID NO: 4365811 - DNA, 25 bp, Homo sapien
aagtctgttactaaacagctcctga

SEQ ID NO: 4365812 - DNA, 25 bp, Homo sapien
aaaggctgccctggacagacaactt

SEQ ID NO: 4365813 - DNA, 25 bp, Homo sapien
taaattatttgagctctgtgcactg

SEQ ID NO: 4365814 - DNA, 25 bp, Homo sapien
caccagatttgttcattgggtctct

SEQ ID NO: 4365815 - DNA, 25 bp, Homo sapien
tcttcttcctgtcgtccttgggcag

SEQ ID NO: 4365816 - DNA, 25 bp, Homo sapien
tcttcctgtcgtccttgggcagcat

SEQ ID NO: 4365817 - DNA, 25 bp, Homo sapien
ctgtccttgccaccagatttgttca

SEQ ID NO: 4365818 - DNA, 25 bp, Homo sapien
tctaggatagggatgactaaggctc

SEQ ID NO: 4365819 - DNA, 25 bp, Homo sapien
tatctgagtgccagtgtaggatagg

SEQ ID NO: 4365820 - DNA, 25 bp, Homo sapien
gataggaggaagactctagcccctg

SEQ ID NO: 4365821 - DNA, 25 bp, Homo sapien
ggcctgtcaaagtccccattaggtg

SEQ ID NO: 4365822 - DNA, 25 bp, Homo sapien
ggaagccgttagcaataggggccac

SEQ ID NO: 4365823 - DNA, 25 bp, Homo sapien
aataggggccacataacttgcaaac

SEQ ID NO: 4365824 - DNA, 25 bp, Homo sapien
gccgttagcaataggggccacataa

SEQ ID NO: 4365825 - DNA, 25 bp, Homo sapien
ttaaggataatgaaactaaacaaca

SEQ ID NO: 4365826 - DNA, 25 bp, Homo sapien
tcttcttgcccagtcatcgtagcct

SEQ ID NO: 4365827 - DNA, 25 bp, Homo sapien
tgggaaacatcatacaagcagtgaa

SEQ ID NO: 4365828 - DNA, 25 bp, Homo sapien
gaacacaaggcagttcaaagggcct

SEQ ID NO: 4365829 - DNA, 25 bp, Homo sapien
gggtatttcctcgtggtcctcctgc

SEQ ID NO: 4365830 - DNA, 25 bp, Homo sapien
catcctgtgaagatgccagtcttta

SEQ ID NO: 4365831 - DNA, 25 bp, Homo sapien
aaatttaaacactgacatcctgtga

SEQ ID NO: 4365832 - DNA, 25 bp, Homo sapien
caggcgtttgtaaaagtagactgtg

SEQ ID NO: 4365833 - DNA, 25 bp, Homo sapien
atgccagtctttacaggcgtttgta

SEQ ID NO: 4365834 - DNA, 25 bp, Homo sapien
caatgaaatagaggaagattgtggc

SEQ ID NO: 4365835 - DNA, 25 bp, Homo sapien
tacaaatgaatacaagtgaaatata

SEQ ID NO: 4365836 - DNA, 25 bp, Homo sapien
gtggctctgtcctgggttggttctt

SEQ ID NO: 4365837 - DNA, 25 bp, Homo sapien
tagaggaagattgtggctctgtcct

SEQ ID NO: 4365838 - DNA, 25 bp, Homo sapien
taggagcttttgcacagagcgactc

SEQ ID NO: 4365839 - DNA, 25 bp, Homo sapien
taaatgctaccgagttatggacctg

SEQ ID NO: 4365840 - DNA, 25 bp, Homo sapien
ccagggccagactacgacattttca

SEQ ID NO: 4365841 - DNA, 25 bp, Homo sapien
gaaagggcccatagaaactgcagga

SEQ ID NO: 4365842 - DNA, 25 bp, Homo sapien
gcagcaaaagccacatatgcctcca

SEQ ID NO: 4365843 - DNA, 25 bp, Homo sapien
cactcggaccatgtggaggtatcca

SEQ ID NO: 4365844 - DNA, 25 bp, Homo sapien
tgcttgggttcagtgcactcggacc

SEQ ID NO: 4365845 - DNA, 25 bp, Homo sapien
tccaccaagagccaagaggatagaa

SEQ ID NO: 4365846 - DNA, 25 bp, Homo sapien
gaagtaaactacgagcaaatgcgga

SEQ ID NO: 4365847 - DNA, 25 bp, Homo sapien
cactttctggcaacgtgaccttgga

SEQ ID NO: 4365848 - DNA, 25 bp, Homo sapien
tcatcattgtatatccagccgctag

SEQ ID NO: 4365849 - DNA, 25 bp, Homo sapien
gaagggcatctaacctagtccaggg

SEQ ID NO: 4365850 - DNA, 25 bp, Homo sapien
attccaatgagagcagccaatacag

SEQ ID NO: 4365851 - DNA, 25 bp, Homo sapien
tcagtgctggcaaaggtgtagttcc

SEQ ID NO: 4365852 - DNA, 25 bp, Homo sapien
catagtggtccttctgctaagccaa

SEQ ID NO: 4365853 - DNA, 25 bp, Homo sapien
ccgagggaatcaagacatagtggtc

SEQ ID NO: 4365854 - DNA, 25 bp, Homo sapien
acagctacatcttaggagtcatttt

SEQ ID NO: 4365855 - DNA, 25 bp, Homo sapien
cacagctacatcttaggagtcattt

SEQ ID NO: 4365856 - DNA, 25 bp, Homo sapien
cagctacatcttaggagtcattttc

SEQ ID NO: 4365857 - DNA, 25 bp, Homo sapien
tgttccagcccaatgaagacaaatg

SEQ ID NO: 4365858 - DNA, 25 bp, Homo sapien
tgaagacaaatgctggcaggagcat

SEQ ID NO: 4365859 - DNA, 25 bp, Homo sapien
gccacagttttcatggccacagcag

SEQ ID NO: 4365860 - DNA, 25 bp, Homo sapien
cgcacatcgtttgccacagttttca

SEQ ID NO: 4365861 - DNA, 25 bp, Homo sapien
tcatatgggtcaggttaggcatctc

SEQ ID NO: 4365862 - DNA, 25 bp, Homo sapien
aaatttgaggcagacgggcactgtg

SEQ ID NO: 4365863 - DNA, 25 bp, Homo sapien
acaagagtttatcacacgaccccag

SEQ ID NO: 4365864 - DNA, 25 bp, Homo sapien
caggtcattgtcttgctcaggctca

SEQ ID NO: 4365865 - DNA, 25 bp, Homo sapien
tacgctatactgtaccaatctcgct

SEQ ID NO: 4365866 - DNA, 25 bp, Homo sapien
aatgactgcccgttctagtagaaac

SEQ ID NO: 4365867 - DNA, 25 bp, Homo sapien
cagttcacttttagttgaaagagca

SEQ ID NO: 4365868 - DNA, 25 bp, Homo sapien
tatttttccctatcacagatggctg

SEQ ID NO: 4365869 - DNA, 25 bp, Homo sapien
cagaaaagaaccacacgaagcggct

SEQ ID NO: 4365870 - DNA, 25 bp, Homo sapien
tattagccgcgatgcacaggagggc

SEQ ID NO: 4365871 - DNA, 25 bp, Homo sapien
gccacctcctacgatgccagaaaag

SEQ ID NO: 4365872 - DNA, 25 bp, Homo sapien
gatgcatcgtgcacacttcccatag

SEQ ID NO: 4365873 - DNA, 25 bp, Homo sapien
cattggtcctaatggcaggctctgg

SEQ ID NO: 4365874 - DNA, 25 bp, Homo sapien
gaatgtcccgcccttcagacgaaat

SEQ ID NO: 4365875 - DNA, 25 bp, Homo sapien
gaaagtgtgcccttctggtggagaa

SEQ ID NO: 4365876 - DNA, 25 bp, Homo sapien
tactgcgattcttagtcactgaggg

SEQ ID NO: 4365877 - DNA, 25 bp, Homo sapien
gactccagtgcccaagcagagttga

SEQ ID NO: 4365878 - DNA, 25 bp, Homo sapien
tccagggcacctagggcaactagtg

SEQ ID NO: 4365879 - DNA, 25 bp, Homo sapien
tgtggtctgaagctcaagatgtggc

SEQ ID NO: 4365880 - DNA, 25 bp, Homo sapien
cactgatgtaggtggcccaactttc

SEQ ID NO: 4365881 - DNA, 25 bp, Homo sapien
gtgtcactggtcatgattgcaagtt

SEQ ID NO: 4365882 - DNA, 25 bp, Homo sapien
tgtcactggtcatgattgcaagttg

SEQ ID NO: 4365883 - DNA, 25 bp, Homo sapien
tgtgtcactggtcatgattgcaagt

SEQ ID NO: 4365884 - DNA, 25 bp, Homo sapien
ctgtgtcactggtcatgattgcaag

SEQ ID NO: 4365885 - DNA, 25 bp, Homo sapien
gaacactgttgtcaataccacgggg

SEQ ID NO: 4365886 - DNA, 25 bp, Homo sapien
tcagcacggtaagatttcttgcacg

SEQ ID NO: 4365887 - DNA, 25 bp, Homo sapien
ttgcacggcaacagcacttccagtt

SEQ ID NO: 4365888 - DNA, 25 bp, Homo sapien
attgttgttgttactcccataacca

SEQ ID NO: 4365889 - DNA, 25 bp, Homo sapien
tgaattaattttgacgctgctgctg

SEQ ID NO: 4365890 - DNA, 25 bp, Homo sapien
taattttgacgctgctgctgttttt

SEQ ID NO: 4365891 - DNA, 25 bp, Homo sapien
aattaattttgacgctgctgctgtt

SEQ ID NO: 4365892 - DNA, 25 bp, Homo sapien
ttaattttgacgctgctgctgtttt

SEQ ID NO: 4365893 - DNA, 25 bp, Homo sapien
aaacatgattctgggctgagtcttg

SEQ ID NO: 4365894 - DNA, 25 bp, Homo sapien
cttctgcgctttggcatgatgcaaa

SEQ ID NO: 4365895 - DNA, 25 bp, Homo sapien
cccaatatgggttgtcttctgcgct

SEQ ID NO: 4365896 - DNA, 25 bp, Homo sapien
ggcttcccaaggattacggtcgtca

SEQ ID NO: 4365897 - DNA, 25 bp, Homo sapien
ttcaggggatccagtctgtccttct

SEQ ID NO: 4365898 - DNA, 25 bp, Homo sapien
tgctacaggaggttcaggtttatgc

SEQ ID NO: 4365899 - DNA, 25 bp, Homo sapien
ctgctacaggaggttcaggtttatg

SEQ ID NO: 4365900 - DNA, 25 bp, Homo sapien
acttcaggggatccagtctgtcctt

SEQ ID NO: 4365901 - DNA, 25 bp, Homo sapien
cttcaggagggtgtgcgcgtctcct

SEQ ID NO: 4365902 - DNA, 25 bp, Homo sapien
gccaagcataagcttaaagggcttt

SEQ ID NO: 4365903 - DNA, 25 bp, Homo sapien
gccgcgcttcaggagggtgtgcgcg

SEQ ID NO: 4365904 - DNA, 25 bp, Homo sapien
caagcataagcttaaagggcttttt

SEQ ID NO: 4365905 - DNA, 25 bp, Homo sapien
atgccgcaggcagcgtctgtgatgt

SEQ ID NO: 4365906 - DNA, 25 bp, Homo sapien
cagcgtctgtgatgtctgtttcata

SEQ ID NO: 4365907 - DNA, 25 bp, Homo sapien
ccgcaggcagcgtctgtgatgtctg

SEQ ID NO: 4365908 - DNA, 25 bp, Homo sapien
ccttggatgccgcaggcagcgtctg

SEQ ID NO: 4365909 - DNA, 25 bp, Homo sapien
atcccctttgaacagacgtaccagt

SEQ ID NO: 4365910 - DNA, 25 bp, Homo sapien
catcccctttgaacagacgtaccag

SEQ ID NO: 4365911 - DNA, 25 bp, Homo sapien
cctttgaacagacgtaccagtgact

SEQ ID NO: 4365912 - DNA, 25 bp, Homo sapien
cccctttgaacagacgtaccagtga

SEQ ID NO: 4365913 - DNA, 25 bp, Homo sapien
ggctctgagactgcccgagtgagaa

SEQ ID NO: 4365914 - DNA, 25 bp, Homo sapien
tcatgttggttgtccgggcctctct

SEQ ID NO: 4365915 - DNA, 25 bp, Homo sapien
tcactttcgaagtcgcgggctctga

SEQ ID NO: 4365916 - DNA, 25 bp, Homo sapien
tcacctccgtcagggttacacttca

SEQ ID NO: 4365917 - DNA, 25 bp, Homo sapien
gggtccgcccgtgcagtgtggaagt

SEQ ID NO: 4365918 - DNA, 25 bp, Homo sapien
cagtgcttgagggtccgcccgtgca

SEQ ID NO: 4365919 - DNA, 25 bp, Homo sapien
cattccgccgcctactgccaggcca

SEQ ID NO: 4365920 - DNA, 25 bp, Homo sapien
cttccagtgcttgagggtccgcccg

SEQ ID NO: 4365921 - DNA, 25 bp, Homo sapien
aaagtccttccgcagatagccagtg

SEQ ID NO: 4365922 - DNA, 25 bp, Homo sapien
tgattaagtggaggcaccgtgctag

SEQ ID NO: 4365923 - DNA, 25 bp, Homo sapien
taacagttgtatgtcggtggcagtc

SEQ ID NO: 4365924 - DNA, 25 bp, Homo sapien
tctggcccagaggtaagattagagg

SEQ ID NO: 4365925 - DNA, 25 bp, Homo sapien
ttcctgttgaaagttaacttctcac

SEQ ID NO: 4365926 - DNA, 25 bp, Homo sapien
aagttaacttctcacctataaccat

SEQ ID NO: 4365927 - DNA, 25 bp, Homo sapien
cctgttgaaagttaacttctcacct

SEQ ID NO: 4365928 - DNA, 25 bp, Homo sapien
tgaaagttaacttctcacctataac

SEQ ID NO: 4365929 - DNA, 25 bp, Homo sapien
cagctttgataattacctgaaggga

SEQ ID NO: 4365930 - DNA, 25 bp, Homo sapien
gaacaccgagacatctgtacagctg

SEQ ID NO: 4365931 - DNA, 25 bp, Homo sapien
caagcgggaacatttcagaattctc

SEQ ID NO: 4365932 - DNA, 25 bp, Homo sapien
ggtaaaccttgcaggcaagcgggaa

SEQ ID NO: 4365933 - DNA, 25 bp, Homo sapien
tgactacttatgttttaatttaatc

SEQ ID NO: 4365934 - DNA, 25 bp, Homo sapien
cagaaggctaagtgaatattgttcc

SEQ ID NO: 4365935 - DNA, 25 bp, Homo sapien
ggtagaagaatgacctcagaactgt

SEQ ID NO: 4365936 - DNA, 25 bp, Homo sapien
attgttcctaacacctgccactaca

SEQ ID NO: 4365937 - DNA, 25 bp, Homo sapien
catttggccgttgaagtttaatagt

SEQ ID NO: 4365938 - DNA, 25 bp, Homo sapien
ccatcctgctggtcgtaggaggaat

SEQ ID NO: 4365939 - DNA, 25 bp, Homo sapien
aggaatccagatggttctctgcgcc

SEQ ID NO: 4365940 - DNA, 25 bp, Homo sapien
tcctgctggtcgtaggaggaatcca

SEQ ID NO: 4365941 - DNA, 25 bp, Homo sapien
tctgcgccatccaggtggtcaatgg

SEQ ID NO: 4365942 - DNA, 25 bp, Homo sapien
cacatagcacttggtctctcagcac

SEQ ID NO: 4365943 - DNA, 25 bp, Homo sapien
cctacggttgtcaatggagtgccta

SEQ ID NO: 4365944 - DNA, 25 bp, Homo sapien
gtcttggcccagtcagtagccctca

SEQ ID NO: 4365945 - DNA, 25 bp, Homo sapien
tcagtgaggtagcatagcttcaagt

SEQ ID NO: 4365946 - DNA, 25 bp, Homo sapien
cccgtttaaacctccgagatgagct

SEQ ID NO: 4365947 - DNA, 25 bp, Homo sapien
gactctacagcatgacgactacaat

SEQ ID NO: 4365948 - DNA, 25 bp, Homo sapien
taccaacaggttcaaagcatacttt

SEQ ID NO: 4365949 - DNA, 25 bp, Homo sapien
ccaaccagctttgctcgagttagaa

SEQ ID NO: 4365950 - DNA, 25 bp, Homo sapien
gtcctttgccctgaaataaactgaa

SEQ ID NO: 4365951 - DNA, 25 bp, Homo sapien
tttgttgtgtgaatggaggtgccca

SEQ ID NO: 4365952 - DNA, 25 bp, Homo sapien
tctaagtgaagtagtgtcctttgcc

SEQ ID NO: 4365953 - DNA, 25 bp, Homo sapien
gagacttctgttatgggagttgcca

SEQ ID NO: 4365954 - DNA, 25 bp, Homo sapien
tactcatcttcagatctcatttctg

SEQ ID NO: 4365955 - DNA, 25 bp, Homo sapien
tcttcagatctcatttctgagaaag

SEQ ID NO: 4365956 - DNA, 25 bp, Homo sapien
ctactcatcttcagatctcatttct

SEQ ID NO: 4365957 - DNA, 25 bp, Homo sapien
tcatcttcagatctcatttctgaga

SEQ ID NO: 4365958 - DNA, 25 bp, Homo sapien
ataagcctgtcttcagtaccaccca

SEQ ID NO: 4365959 - DNA, 25 bp, Homo sapien
acataagcctgtcttcagtaccacc

SEQ ID NO: 4365960 - DNA, 25 bp, Homo sapien
aagcctgtcttcagtaccacccaaa

SEQ ID NO: 4365961 - DNA, 25 bp, Homo sapien
ttacataagcctgtcttcagtacca

SEQ ID NO: 4365962 - DNA, 25 bp, Homo sapien
cagtctagatcacttcttctgcaga

SEQ ID NO: 4365963 - DNA, 25 bp, Homo sapien
gatttggctgcatactttcggtacg

SEQ ID NO: 4365964 - DNA, 25 bp, Homo sapien
cagagagcttttcaaccaagttggc

SEQ ID NO: 4365965 - DNA, 25 bp, Homo sapien
catttgatacgccttttctgtgaca

SEQ ID NO: 4365966 - DNA, 25 bp, Homo sapien
tacaacagagtcttccggtataaag

SEQ ID NO: 4365967 - DNA, 25 bp, Homo sapien
ctaggaagcaaacctgacaaggctt

SEQ ID NO: 4365968 - DNA, 25 bp, Homo sapien
ttcatagtgatggaggcaacagcag

SEQ ID NO: 4365969 - DNA, 25 bp, Homo sapien
aaacagttgaggacttcattggcaa

SEQ ID NO: 4365970 - DNA, 25 bp, Homo sapien
tttatcaaaaacatttggctgcctt

SEQ ID NO: 4365971 - DNA, 25 bp, Homo sapien
tatgttgtcctgatgttttcagagt

SEQ ID NO: 4365972 - DNA, 25 bp, Homo sapien
aaaatacagttgccactgatttatc

SEQ ID NO: 4365973 - DNA, 25 bp, Homo sapien
tgtgtggtgtgctatcaggttgaaa

SEQ ID NO: 4365974 - DNA, 25 bp, Homo sapien
taagctacaataggactgtgtgcct

SEQ ID NO: 4365975 - DNA, 25 bp, Homo sapien
tataatctgtcacaagaacgcaggc

SEQ ID NO: 4365976 - DNA, 25 bp, Homo sapien
atttcctggaccaagatgccctcag

SEQ ID NO: 4365977 - DNA, 25 bp, Homo sapien
tgctgctactttcccgctggaggga

SEQ ID NO: 4365978 - DNA, 25 bp, Homo sapien
caggcaatgattaaactggcaacat

SEQ ID NO: 4365979 - DNA, 25 bp, Homo sapien
tggctacatccaagttacaatggta

SEQ ID NO: 4365980 - DNA, 25 bp, Homo sapien
taaaaaggagggagcacgagtcatg

SEQ ID NO: 4365981 - DNA, 25 bp, Homo sapien
taagttactctcaatcaaaaccagg

SEQ ID NO: 4365982 - DNA, 25 bp, Homo sapien
tacagccaggttagaaagggctcac

SEQ ID NO: 4365983 - DNA, 25 bp, Homo sapien
ttacagccaggttagaaagggctca

SEQ ID NO: 4365984 - DNA, 25 bp, Homo sapien
taagtcaacgtttgttcctggaaga

SEQ ID NO: 4365985 - DNA, 25 bp, Homo sapien
tcatgggtgtttgtcctgcgttttc

SEQ ID NO: 4365986 - DNA, 25 bp, Homo sapien
cagtcaaggaaatcagggaaacggg

SEQ ID NO: 4365987 - DNA, 25 bp, Homo sapien
cagagcagactctacatcattgaag

SEQ ID NO: 4365988 - DNA, 25 bp, Homo sapien
tacccaaaggcgctactaggaatgg

SEQ ID NO: 4365989 - DNA, 25 bp, Homo sapien
cgcgtggtccacaggcctgatagat

SEQ ID NO: 4365990 - DNA, 25 bp, Homo sapien
tattaaacataggaaggagccactt

SEQ ID NO: 4365991 - DNA, 25 bp, Homo sapien
taaccaggttaacgtggcactctga

SEQ ID NO: 4365992 - DNA, 25 bp, Homo sapien
catctcatccacattgctgaggaag

SEQ ID NO: 4365993 - DNA, 25 bp, Homo sapien
ctgaggaagtcctccggagttgtgg

SEQ ID NO: 4365994 - DNA, 25 bp, Homo sapien
gtgctctgctccctcgaatgatatg

SEQ ID NO: 4365995 - DNA, 25 bp, Homo sapien
gggacactgtagcaccctaacccca

SEQ ID NO: 4365996 - DNA, 25 bp, Homo sapien
tgaactggggcaagagtctcagctt

SEQ ID NO: 4365997 - DNA, 25 bp, Homo sapien
catcgtgggtgggttgacagcagcc

SEQ ID NO: 4365998 - DNA, 25 bp, Homo sapien
ggatctgagctattattagtgatgg

SEQ ID NO: 4365999 - DNA, 25 bp, Homo sapien
tgatggatctcatgtctggggtcat

SEQ ID NO: 4366000 - DNA, 25 bp, Homo sapien
gggccttgtttgtcatgttcactcc

SEQ ID NO: 4366001 - DNA, 25 bp, Homo sapien
tgtatacaacccaactagccaggtg

SEQ ID NO: 4366002 - DNA, 25 bp, Homo sapien
ctcacataggatgaacaggagggcc

SEQ ID NO: 4366003 - DNA, 25 bp, Homo sapien
tcctcaagaaatggtcctgctgcac

SEQ ID NO: 4366004 - DNA, 25 bp, Homo sapien
aaagtagtgagatgttttacttcac

SEQ ID NO: 4366005 - DNA, 25 bp, Homo sapien
cataaaatttgttcgaatataaatg

SEQ ID NO: 4366006 - DNA, 25 bp, Homo sapien
gaaaatacttccctattccaactca

SEQ ID NO: 4366007 - DNA, 25 bp, Homo sapien
tataatacgagttctatatttagaa

SEQ ID NO: 4366008 - DNA, 25 bp, Homo sapien
tccttctaggtccttggcctgcagc

SEQ ID NO: 4366009 - DNA, 25 bp, Homo sapien
tctccttctaggtccttggcctgca

SEQ ID NO: 4366010 - DNA, 25 bp, Homo sapien
ctcctctccttctaggtccttggcc

SEQ ID NO: 4366011 - DNA, 25 bp, Homo sapien
cctctccttctaggtccttggcctg

SEQ ID NO: 4366012 - DNA, 25 bp, Homo sapien
cccaagaagacaggctgtacaatta

SEQ ID NO: 4366013 - DNA, 25 bp, Homo sapien
agacaggctgtacaattaaggccgc

SEQ ID NO: 4366014 - DNA, 25 bp, Homo sapien
gaagacaggctgtacaattaaggcc

SEQ ID NO: 4366015 - DNA, 25 bp, Homo sapien
caagaagacaggctgtacaattaag

SEQ ID NO: 4366016 - DNA, 25 bp, Homo sapien
ttacaaactgtccactgagcaaggg

SEQ ID NO: 4366017 - DNA, 25 bp, Homo sapien
gagcaagggatattcaggcagttgt

SEQ ID NO: 4366018 - DNA, 25 bp, Homo sapien
caaactgtccactgagcaagggata

SEQ ID NO: 4366019 - DNA, 25 bp, Homo sapien
tgagcaagggatattcaggcagttg

SEQ ID NO: 4366020 - DNA, 25 bp, Homo sapien
gggagcctccaccagacaccatgga

SEQ ID NO: 4366021 - DNA, 25 bp, Homo sapien
ctccaccagacaccatggaaagcca

SEQ ID NO: 4366022 - DNA, 25 bp, Homo sapien
caccagacaccatggaaagccatac

SEQ ID NO: 4366023 - DNA, 25 bp, Homo sapien
catcagctttggcaccaaggccagg

SEQ ID NO: 4366024 - DNA, 25 bp, Homo sapien
tcctcttggcgcattcgaatccttt

SEQ ID NO: 4366025 - DNA, 25 bp, Homo sapien
ggcatactcatgagccctgcgggtg

SEQ ID NO: 4366026 - DNA, 25 bp, Homo sapien
gagtggtcagcgcattgggcatact

SEQ ID NO: 4366027 - DNA, 25 bp, Homo sapien
gattctctgaagccgcagtttctgc

SEQ ID NO: 4366028 - DNA, 25 bp, Homo sapien
ttcacttgtggttgaggttccttaa

SEQ ID NO: 4366029 - DNA, 25 bp, Homo sapien
caccgcttttgacactgagggcaga

SEQ ID NO: 4366030 - DNA, 25 bp, Homo sapien
ttaaaaccaccgcttttgacactga

SEQ ID NO: 4366031 - DNA, 25 bp, Homo sapien
gctcatgagcttcacttgtggttga

SEQ ID NO: 4366032 - DNA, 25 bp, Homo sapien
actgtgtccttggtgaagcaaacag

SEQ ID NO: 4366033 - DNA, 25 bp, Homo sapien
gaagcaaacagtcaacacgggaatg

SEQ ID NO: 4366034 - DNA, 25 bp, Homo sapien
tgtccttggtgaagcaaacagtcaa

SEQ ID NO: 4366035 - DNA, 25 bp, Homo sapien
tggtgaagcaaacagtcaacacggg

SEQ ID NO: 4366036 - DNA, 25 bp, Homo sapien
ttcactggtatctgagaaatataat

SEQ ID NO: 4366037 - DNA, 25 bp, Homo sapien
tcactggtatctgagaaatataata

SEQ ID NO: 4366038 - DNA, 25 bp, Homo sapien
cttcactggtatctgagaaatataa

SEQ ID NO: 4366039 - DNA, 25 bp, Homo sapien
tcttcactggtatctgagaaatata

SEQ ID NO: 4366040 - DNA, 25 bp, Homo sapien
tagccagatgtgtctgccgtgaact

SEQ ID NO: 4366041 - DNA, 25 bp, Homo sapien
gccgtgaactcaccatgtaaatttg

SEQ ID NO: 4366042 - DNA, 25 bp, Homo sapien
gaacatcagagctggaaaaatcaca

SEQ ID NO: 4366043 - DNA, 25 bp, Homo sapien
tatgtgccggtgcactttaggctaa

SEQ ID NO: 4366044 - DNA, 25 bp, Homo sapien
cagcaagccaacttagcaaactgag

SEQ ID NO: 4366045 - DNA, 25 bp, Homo sapien
gcaagccaacttagcaaactgagca

SEQ ID NO: 4366046 - DNA, 25 bp, Homo sapien
agaacagcaagccaacttagcaaac

SEQ ID NO: 4366047 - DNA, 25 bp, Homo sapien
ccaacttagcaaactgagcacagac

SEQ ID NO: 4366048 - DNA, 25 bp, Homo sapien
atcctcccacctcagagccttccaa

SEQ ID NO: 4366049 - DNA, 25 bp, Homo sapien
ggcctcaaactcctatgcccaagag

SEQ ID NO: 4366050 - DNA, 25 bp, Homo sapien
tggcctcaaactcctatgcccaaga

SEQ ID NO: 4366051 - DNA, 25 bp, Homo sapien
tcccacctcagagccttccaagtag

SEQ ID NO: 4366052 - DNA, 25 bp, Homo sapien
cagggtgagcctctttctcaaaata

SEQ ID NO: 4366053 - DNA, 25 bp, Homo sapien
atctggaaactaaggtattttactg

SEQ ID NO: 4366054 - DNA, 25 bp, Homo sapien
gagctacaggtaaatttgtttcaga

SEQ ID NO: 4366055 - DNA, 25 bp, Homo sapien
aatagaaatctggaaactaaggtat

SEQ ID NO: 4366056 - DNA, 25 bp, Homo sapien
tggctaagccacagtatgagggaag

SEQ ID NO: 4366057 - DNA, 25 bp, Homo sapien
tagataaggaactccacagaggttg

SEQ ID NO: 4366058 - DNA, 25 bp, Homo sapien
taaagcagtaggttcagacttcctg

SEQ ID NO: 4366059 - DNA, 25 bp, Homo sapien
gggtgtccaggaataacgcttccat

SEQ ID NO: 4366060 - DNA, 25 bp, Homo sapien
catattatcccacggcaggtatggg

SEQ ID NO: 4366061 - DNA, 25 bp, Homo sapien
tcatgtataaactggagagcctgct

SEQ ID NO: 4366062 - DNA, 25 bp, Homo sapien
aattgtacctgtaggcagtcgccag

SEQ ID NO: 4366063 - DNA, 25 bp, Homo sapien
gaagaaggagcaaacaccgtctggg

SEQ ID NO: 4366064 - DNA, 25 bp, Homo sapien
gatttggctgggatactgccatgga

SEQ ID NO: 4366065 - DNA, 25 bp, Homo sapien
tactgccatggacctctgaggcact

SEQ ID NO: 4366066 - DNA, 25 bp, Homo sapien
atcgccttcctagggtcttgccatg

SEQ ID NO: 4366067 - DNA, 25 bp, Homo sapien
tgattcagaggctgattcatcgcct

SEQ ID NO: 4366068 - DNA, 25 bp, Homo sapien
tgcatcctggttaggccacactggg

SEQ ID NO: 4366069 - DNA, 25 bp, Homo sapien
caagcccaagacatcgctgtccaga

SEQ ID NO: 4366070 - DNA, 25 bp, Homo sapien
caacagcataatagttaatgacact

SEQ ID NO: 4366071 - DNA, 25 bp, Homo sapien
tcatccaaggacatacttgcctatt

SEQ ID NO: 4366072 - DNA, 25 bp, Homo sapien
acttcccctcggcccgtggagcttg

SEQ ID NO: 4366073 - DNA, 25 bp, Homo sapien
cagcacctcagttgcttctcagcca

SEQ ID NO: 4366074 - DNA, 25 bp, Homo sapien
cccgtggagcttgtattccccagca

SEQ ID NO: 4366075 - DNA, 25 bp, Homo sapien
gtgagccccagtgaacttcccctcg

SEQ ID NO: 4366076 - DNA, 25 bp, Homo sapien
agcttctgaacaccacattagtgag

SEQ ID NO: 4366077 - DNA, 25 bp, Homo sapien
caaggtgacaatagggtagctggaa

SEQ ID NO: 4366078 - DNA, 25 bp, Homo sapien
ttgacataatgaggatccctttggc

SEQ ID NO: 4366079 - DNA, 25 bp, Homo sapien
cacagtaggagtgtaaggtatttca

SEQ ID NO: 4366080 - DNA, 25 bp, Homo sapien
agtcgacctgacatcagctgtaagg

SEQ ID NO: 4366081 - DNA, 25 bp, Homo sapien
gcctttcttaagtgagcagttctca

SEQ ID NO: 4366082 - DNA, 25 bp, Homo sapien
gctggagtacaagagggagcctttc

SEQ ID NO: 4366083 - DNA, 25 bp, Homo sapien
tctgagaagaaagcccaaattcctg

SEQ ID NO: 4366084 - DNA, 25 bp, Homo sapien
aggcacatatcccaaggacacctgg

SEQ ID NO: 4366085 - DNA, 25 bp, Homo sapien
ggcccatgaaataacagcacaactc

SEQ ID NO: 4366086 - DNA, 25 bp, Homo sapien
gcagcctactgccagactctgtggg

SEQ ID NO: 4366087 - DNA, 25 bp, Homo sapien
acaactcacataggcatctcccaga

SEQ ID NO: 4366088 - DNA, 25 bp, Homo sapien
actgcccttgttggtaatgagtgcc

SEQ ID NO: 4366089 - DNA, 25 bp, Homo sapien
tgtcagcacaagattttctctccca

SEQ ID NO: 4366090 - DNA, 25 bp, Homo sapien
tgccttggtggtaatgagcatctca

SEQ ID NO: 4366091 - DNA, 25 bp, Homo sapien
caaagctgcgattcctttactgccc

SEQ ID NO: 4366092 - DNA, 25 bp, Homo sapien
aacataaatacaaagcggaacgcca

SEQ ID NO: 4366093 - DNA, 25 bp, Homo sapien
tttggagatgcaaggcaacagctga

SEQ ID NO: 4366094 - DNA, 25 bp, Homo sapien
gcaatgctggaaccctaagccagag

SEQ ID NO: 4366095 - DNA, 25 bp, Homo sapien
tgtgattcttaaggccctgccactt

SEQ ID NO: 4366096 - DNA, 25 bp, Homo sapien
tgattctgccaactgcatctggtat

SEQ ID NO: 4366097 - DNA, 25 bp, Homo sapien
tctacttctccggtaacaaatgctt

SEQ ID NO: 4366098 - DNA, 25 bp, Homo sapien
tgaattcagcaaagggagagacact

SEQ ID NO: 4366099 - DNA, 25 bp, Homo sapien
tctggtatttccacctaaaatctac

SEQ ID NO: 4366100 - DNA, 25 bp, Homo sapien
ataaggcaaatgaacccatgacgct

SEQ ID NO: 4366101 - DNA, 25 bp, Homo sapien
atttgcataaggcaaatgaacccat

SEQ ID NO: 4366102 - DNA, 25 bp, Homo sapien
atgaacccatgacgctggatgttag

SEQ ID NO: 4366103 - DNA, 25 bp, Homo sapien
ggcaaatgaacccatgacgctggat

SEQ ID NO: 4366104 - DNA, 25 bp, Homo sapien
gacctgcttacgtgggtgtgttcaa

SEQ ID NO: 4366105 - DNA, 25 bp, Homo sapien
tacaatatttggtttgagcaagccg

SEQ ID NO: 4366106 - DNA, 25 bp, Homo sapien
tgtagtttccatatagcagaagcct

SEQ ID NO: 4366107 - DNA, 25 bp, Homo sapien
taatcataaagaacccatcgtgtgt

SEQ ID NO: 4366108 - DNA, 25 bp, Homo sapien
caaaagggaaaagaggagcctgaca

SEQ ID NO: 4366109 - DNA, 25 bp, Homo sapien
gggaaaagaggagcctgacagcttc

SEQ ID NO: 4366110 - DNA, 25 bp, Homo sapien
aagggaaaagaggagcctgacagct

SEQ ID NO: 4366111 - DNA, 25 bp, Homo sapien
gccaaaagggaaaagaggagcctga

SEQ ID NO: 4366112 - DNA, 25 bp, Homo sapien
tccctccaagcacctcaagctggga

SEQ ID NO: 4366113 - DNA, 25 bp, Homo sapien
caagctgggacctcagtcctctgtc

SEQ ID NO: 4366114 - DNA, 25 bp, Homo sapien
ctctgtccctccaagcacctcaagc

SEQ ID NO: 4366115 - DNA, 25 bp, Homo sapien
aagctgggacctcagtcctctgtcc

SEQ ID NO: 4366116 - DNA, 25 bp, Homo sapien
tacatttacccacagagattttgcc

SEQ ID NO: 4366117 - DNA, 25 bp, Homo sapien
gctgcctcagaacggaagaaattca

SEQ ID NO: 4366118 - DNA, 25 bp, Homo sapien
aaggatcctccggtctacttgagaa

SEQ ID NO: 4366119 - DNA, 25 bp, Homo sapien
gcagtacagcaagtaagcaagccat

SEQ ID NO: 4366120 - DNA, 25 bp, Homo sapien
cccaccaagtcctcaagaaatgatt

SEQ ID NO: 4366121 - DNA, 25 bp, Homo sapien
tgggctcataaactgcccccctcac

SEQ ID NO: 4366122 - DNA, 25 bp, Homo sapien
tttactaagttcaatcaaggaacca

SEQ ID NO: 4366123 - DNA, 25 bp, Homo sapien
ctaagttcaatcaaggaaccagatt

SEQ ID NO: 4366124 - DNA, 25 bp, Homo sapien
cagtgtttctctgtagggtatgtga

SEQ ID NO: 4366125 - DNA, 25 bp, Homo sapien
gctcagtgtttctctgtagggtatg

SEQ ID NO: 4366126 - DNA, 25 bp, Homo sapien
gctgaagcggtactggcccttcttc

SEQ ID NO: 4366127 - DNA, 25 bp, Homo sapien
tggccttccgtgtgctgcccttcct

SEQ ID NO: 4366128 - DNA, 25 bp, Homo sapien
agtcctctcctgaatctaatatcct

SEQ ID NO: 4366129 - DNA, 25 bp, Homo sapien
taccactgagatactggagaaacaa

SEQ ID NO: 4366130 - DNA, 25 bp, Homo sapien
cactgagatactggagaaacaagag

SEQ ID NO: 4366131 - DNA, 25 bp, Homo sapien
gaatctaatatcctgtccaatacca

SEQ ID NO: 4366132 - DNA, 25 bp, Homo sapien
tatttccatcatcgttaactttaga

SEQ ID NO: 4366133 - DNA, 25 bp, Homo sapien
catcatcgttaactttagaacacgg

SEQ ID NO: 4366134 - DNA, 25 bp, Homo sapien
gcttgctttacacaagcctgtctag

SEQ ID NO: 4366135 - DNA, 25 bp, Homo sapien
caagcctgtctagagtcctctacaa

SEQ ID NO: 4366136 - DNA, 25 bp, Homo sapien
ccattgacgtctgtgagatacccag

SEQ ID NO: 4366137 - DNA, 25 bp, Homo sapien
tcaacccagagatatccaggctgct

SEQ ID NO: 4366138 - DNA, 25 bp, Homo sapien
ctgcttgccaaacaaggaaatccaa

SEQ ID NO: 4366139 - DNA, 25 bp, Homo sapien
agatacccagagacgttcaacccag

SEQ ID NO: 4366140 - DNA, 25 bp, Homo sapien
gggacctagggtcatcagatttagc

SEQ ID NO: 4366141 - DNA, 25 bp, Homo sapien
aatcttaggccaggtaagctaacaa

SEQ ID NO: 4366142 - DNA, 25 bp, Homo sapien
gccaggtaagctaacaaaaaacata

SEQ ID NO: 4366143 - DNA, 25 bp, Homo sapien
taatatcctgcccaccgtgccactc

SEQ ID NO: 4366144 - DNA, 25 bp, Homo sapien
ctggagtaggaggagatcccttcta

SEQ ID NO: 4366145 - DNA, 25 bp, Homo sapien
tcaaaagtgcaaagatgagctactc

SEQ ID NO: 4366146 - DNA, 25 bp, Homo sapien
tagaccaagcatagggatgtaggac

SEQ ID NO: 4366147 - DNA, 25 bp, Homo sapien
gacatatgcagtggcaaccaggcac

SEQ ID NO: 4366148 - DNA, 25 bp, Homo sapien
gctagtcacgctagaccccagagta

SEQ ID NO: 4366149 - DNA, 25 bp, Homo sapien
gaattatgggtaaggctcagccggc

SEQ ID NO: 4366150 - DNA, 25 bp, Homo sapien
tttgagagcaaaaacaccgcagagg

SEQ ID NO: 4366151 - DNA, 25 bp, Homo sapien
cgcagaggctagctcaaacgagaga

SEQ ID NO: 4366152 - DNA, 25 bp, Homo sapien
caagcaaacgtgtggtatacggcaa

SEQ ID NO: 4366153 - DNA, 25 bp, Homo sapien
tgtcctcgtggaaaagtcattcact

SEQ ID NO: 4366154 - DNA, 25 bp, Homo sapien
cctgttatgacctatcctgggaaag

SEQ ID NO: 4366155 - DNA, 25 bp, Homo sapien
cataagaattagtacctcaggccct

SEQ ID NO: 4366156 - DNA, 25 bp, Homo sapien
cctgagacatcccatcaggcattgc

SEQ ID NO: 4366157 - DNA, 25 bp, Homo sapien
tcaaatcccagtctctagatcatgg

SEQ ID NO: 4366158 - DNA, 25 bp, Homo sapien
cagttctccagaatttaatccatgt

SEQ ID NO: 4366159 - DNA, 25 bp, Homo sapien
tagatcatggttaccccgataaggc

SEQ ID NO: 4366160 - DNA, 25 bp, Homo sapien
ggtggatatctacattgatacatgc

SEQ ID NO: 4366161 - DNA, 25 bp, Homo sapien
acactaccattgtgttgtgttgaca

SEQ ID NO: 4366162 - DNA, 25 bp, Homo sapien
tgcatgcttgtactcacaaagagtt

SEQ ID NO: 4366163 - DNA, 25 bp, Homo sapien
gtgtacagtacactaccattgtgtt

SEQ ID NO: 4366164 - DNA, 25 bp, Homo sapien
ggtcgaaaccagctctttggcctgg

SEQ ID NO: 4366165 - DNA, 25 bp, Homo sapien
ggcagctgatccaggctctaggacc

SEQ ID NO: 4366166 - DNA, 25 bp, Homo sapien
taggaccacaggtcgaaaccagctc

SEQ ID NO: 4366167 - DNA, 25 bp, Homo sapien
tgatccaggctctaggaccacaggt

SEQ ID NO: 4366168 - DNA, 25 bp, Homo sapien
ctgcggtgataaagccagccacaca

SEQ ID NO: 4366169 - DNA, 25 bp, Homo sapien
tgcggtgataaagccagccacacat

SEQ ID NO: 4366170 - DNA, 25 bp, Homo sapien
agtcaccttggtggaaatcttgatg

SEQ ID NO: 4366171 - DNA, 25 bp, Homo sapien
actacccatttctggtatatttggg

SEQ ID NO: 4366172 - DNA, 25 bp, Homo sapien
tagacaatggaggtgtactacccat

SEQ ID NO: 4366173 - DNA, 25 bp, Homo sapien
aagattagtggtgtgagtcaccttg

SEQ ID NO: 4366174 - DNA, 25 bp, Homo sapien
tacgaataagatggtcaactttggg

SEQ ID NO: 4366175 - DNA, 25 bp, Homo sapien
gttatgggttcagggctttggcaat

SEQ ID NO: 4366176 - DNA, 25 bp, Homo sapien
gcacaaatacaggttatgggttcag

SEQ ID NO: 4366177 - DNA, 25 bp, Homo sapien
tggaaagcaacattgtcaaaaagtg

SEQ ID NO: 4366178 - DNA, 25 bp, Homo sapien
ctatctgacttagagtggccaagga

SEQ ID NO: 4366179 - DNA, 25 bp, Homo sapien
ctcggtgtcacatcccaaagggcct

SEQ ID NO: 4366180 - DNA, 25 bp, Homo sapien
aatttccacacgattgatttgtcca

SEQ ID NO: 4366181 - DNA, 25 bp, Homo sapien
agctgggagcactatggcctaccaa

SEQ ID NO: 4366182 - DNA, 25 bp, Homo sapien
cgtggaaggacacgcaccatctctc

SEQ ID NO: 4366183 - DNA, 25 bp, Homo sapien
tgtgttttatggtggatgaacttca

SEQ ID NO: 4366184 - DNA, 25 bp, Homo sapien
tgcttctgatcccttacaattccaa

SEQ ID NO: 4366185 - DNA, 25 bp, Homo sapien
tctgtgaaataaccgtggaaggaca

SEQ ID NO: 4366186 - DNA, 25 bp, Homo sapien
tgtctaggtcctgcgtgacgtggat

SEQ ID NO: 4366187 - DNA, 25 bp, Homo sapien
cgagctaggcttcggattcatgaca

SEQ ID NO: 4366188 - DNA, 25 bp, Homo sapien
tgacgtggatcacttgctgcccagg

SEQ ID NO: 4366189 - DNA, 25 bp, Homo sapien
gcagctcgtcggtcacgtcgtagga

SEQ ID NO: 4366190 - DNA, 25 bp, Homo sapien
gagccaactccaccacgtctcgact

SEQ ID NO: 4366191 - DNA, 25 bp, Homo sapien
agcgcgcgagctccagcgggcacta

SEQ ID NO: 4366192 - DNA, 25 bp, Homo sapien
gtctcgactccggaagcccgaggag

SEQ ID NO: 4366193 - DNA, 25 bp, Homo sapien
gaaagaagttcagcccgagccaact

SEQ ID NO: 4366194 - DNA, 25 bp, Homo sapien
ccgaggcttggctgacaaatcccga

SEQ ID NO: 4366195 - DNA, 25 bp, Homo sapien
gtctaagggcttcggctctcacatc

SEQ ID NO: 4366196 - DNA, 25 bp, Homo sapien
tcgctcgggtgagtcccgagattgc

SEQ ID NO: 4366197 - DNA, 25 bp, Homo sapien
cctaaggcgctagtgctgggcgaaa

SEQ ID NO: 4366198 - DNA, 25 bp, Homo sapien
agcagatgccaagataagagtcaga

SEQ ID NO: 4366199 - DNA, 25 bp, Homo sapien
ctggaaaatcactagtaagcgtggc

SEQ ID NO: 4366200 - DNA, 25 bp, Homo sapien
taagcgtggcttatgggtcagttca

SEQ ID NO: 4366201 - DNA, 25 bp, Homo sapien
tgggtcagttcagatccaccaggaa

SEQ ID NO: 4366202 - DNA, 25 bp, Homo sapien
ttccataatggccagtagtacattc

SEQ ID NO: 4366203 - DNA, 25 bp, Homo sapien
cataatggccagtagtacattctgc

SEQ ID NO: 4366204 - DNA, 25 bp, Homo sapien
tggaacacaaactcccctggcagtt

SEQ ID NO: 4366205 - DNA, 25 bp, Homo sapien
ggccagtagtacattctgcttaatt

SEQ ID NO: 4366206 - DNA, 25 bp, Homo sapien
catctgcaagcctgccactagcatt

SEQ ID NO: 4366207 - DNA, 25 bp, Homo sapien
gccactagcatttcccaattttcca

SEQ ID NO: 4366208 - DNA, 25 bp, Homo sapien
gccttccatctgcaagcctgccact

SEQ ID NO: 4366209 - DNA, 25 bp, Homo sapien
gctttgattggaagccgatggcgtc

SEQ ID NO: 4366210 - DNA, 25 bp, Homo sapien
tctaacttcgggttgtcaatcaaga

SEQ ID NO: 4366211 - DNA, 25 bp, Homo sapien
tacagctttcaatacaagaagtaga

SEQ ID NO: 4366212 - DNA, 25 bp, Homo sapien
tggtaacagtcatttcaacaggagt

SEQ ID NO: 4366213 - DNA, 25 bp, Homo sapien
tgcaaagaacatacatctgtagtac

SEQ ID NO: 4366214 - DNA, 25 bp, Homo sapien
cactgtgggagcaagagccattgac

SEQ ID NO: 4366215 - DNA, 25 bp, Homo sapien
cactttaaacatccatcactaagga

SEQ ID NO: 4366216 - DNA, 25 bp, Homo sapien
tactgtagtttgagtggcactgtgg

SEQ ID NO: 4366217 - DNA, 25 bp, Homo sapien
taagcgagtggaaaaccaatgggaa

SEQ ID NO: 4366218 - DNA, 25 bp, Homo sapien
gacctgatcagcctggactttactg

SEQ ID NO: 4366219 - DNA, 25 bp, Homo sapien
tcaggaacttttggttatggcagaa

SEQ ID NO: 4366220 - DNA, 25 bp, Homo sapien
taaccagccttgaagcagttccaaa

SEQ ID NO: 4366221 - DNA, 25 bp, Homo sapien
tcacggttctgctgactatacaagc

SEQ ID NO: 4366222 - DNA, 25 bp, Homo sapien
gactgacaggaaggatctatgtgcc

SEQ ID NO: 4366223 - DNA, 25 bp, Homo sapien
tcataacccttggacacgtatgggc

SEQ ID NO: 4366224 - DNA, 25 bp, Homo sapien
aaagccgtgcccaatacacactggg

SEQ ID NO: 4366225 - DNA, 25 bp, Homo sapien
gactgagtacatacactagcctgcc

SEQ ID NO: 4366226 - DNA, 25 bp, Homo sapien
tgtgtcataaagtgggagcctggat

SEQ ID NO: 4366227 - DNA, 25 bp, Homo sapien
gagtcaatataaggccttgtgtttg

SEQ ID NO: 4366228 - DNA, 25 bp, Homo sapien
gtccatctggagcacacatgttgtt

SEQ ID NO: 4366229 - DNA, 25 bp, Homo sapien
cttgagagtcgccaggatgtgagct

SEQ ID NO: 4366230 - DNA, 25 bp, Homo sapien
cttttcaactaaatctacccatact

SEQ ID NO: 4366231 - DNA, 25 bp, Homo sapien
caactaaatctacccatacttgata

SEQ ID NO: 4366232 - DNA, 25 bp, Homo sapien
tcaactaaatctacccatacttgat

SEQ ID NO: 4366233 - DNA, 25 bp, Homo sapien
tttcaactaaatctacccatacttg

SEQ ID NO: 4366234 - DNA, 25 bp, Homo sapien
tggtgggtgtgttgaaccacaccat

SEQ ID NO: 4366235 - DNA, 25 bp, Homo sapien
tctctggtgggtgtgttgaaccaca

SEQ ID NO: 4366236 - DNA, 25 bp, Homo sapien
tctggtgggtgtgttgaaccacacc

SEQ ID NO: 4366237 - DNA, 25 bp, Homo sapien
gtgggtgtgttgaaccacaccatca

SEQ ID NO: 4366238 - DNA, 25 bp, Homo sapien
gcttcttcgaggtgccagagcaaat

SEQ ID NO: 4366239 - DNA, 25 bp, Homo sapien
gacagcttttgttatgttgagttag

SEQ ID NO: 4366240 - DNA, 25 bp, Homo sapien
aatgctatacggtgaaagtggaaat

SEQ ID NO: 4366241 - DNA, 25 bp, Homo sapien
cagagtttactgagcatttttacca

SEQ ID NO: 4366242 - DNA, 25 bp, Homo sapien
tcacagacagcttttgttatgttga

SEQ ID NO: 4366243 - DNA, 25 bp, Homo sapien
gactactgtaatcttcagctccaga

SEQ ID NO: 4366244 - DNA, 25 bp, Homo sapien
tgatggtaccctacaggtcccttag

SEQ ID NO: 4366245 - DNA, 25 bp, Homo sapien
taggctctgttcacgttcctccagt

SEQ ID NO: 4366246 - DNA, 25 bp, Homo sapien
tctggaattccctcaaggcatatgt

SEQ ID NO: 4366247 - DNA, 25 bp, Homo sapien
attagacagattctactggtaaaat

SEQ ID NO: 4366248 - DNA, 25 bp, Homo sapien
aattattatctaggtgggaagatag

SEQ ID NO: 4366249 - DNA, 25 bp, Homo sapien
aaattattatctaggtgggaagata

SEQ ID NO: 4366250 - DNA, 25 bp, Homo sapien
ttaatcctttccaatggtttgagaa

SEQ ID NO: 4366251 - DNA, 25 bp, Homo sapien
tttccaatggtttgagaatctgatg

SEQ ID NO: 4366252 - DNA, 25 bp, Homo sapien
cctttccaatggtttgagaatctga

SEQ ID NO: 4366253 - DNA, 25 bp, Homo sapien
ctgatgaaagccatggaccataacc

SEQ ID NO: 4366254 - DNA, 25 bp, Homo sapien
tacatagaaatgtaagactgggaga

SEQ ID NO: 4366255 - DNA, 25 bp, Homo sapien
gtaagactgggagagcatccagttc

SEQ ID NO: 4366256 - DNA, 25 bp, Homo sapien
aaatgtaagactgggagagcatcca

SEQ ID NO: 4366257 - DNA, 25 bp, Homo sapien
tagaaatgtaagactgggagagcat

SEQ ID NO: 4366258 - DNA, 25 bp, Homo sapien
ggtgtgcaagccagggatgagaacc

SEQ ID NO: 4366259 - DNA, 25 bp, Homo sapien
gtgtgcaagccagggatgagaaccc

SEQ ID NO: 4366260 - DNA, 25 bp, Homo sapien
tgtgcaagccagggatgagaaccct

SEQ ID NO: 4366261 - DNA, 25 bp, Homo sapien
taactatgagtttgttgcagccaat

SEQ ID NO: 4366262 - DNA, 25 bp, Homo sapien
cagtgaaaccaccagattattgagt

SEQ ID NO: 4366263 - DNA, 25 bp, Homo sapien
gcagccaatgtatgtttatcctaaa

SEQ ID NO: 4366264 - DNA, 25 bp, Homo sapien
tctacaccatgtagggttagaccct

SEQ ID NO: 4366265 - DNA, 25 bp, Homo sapien
agtctcagtgtggatagcagggagc

SEQ ID NO: 4366266 - DNA, 25 bp, Homo sapien
tctcagtgtggatagcagggagcat

SEQ ID NO: 4366267 - DNA, 25 bp, Homo sapien
gtctcagtgtggatagcagggagca

SEQ ID NO: 4366268 - DNA, 25 bp, Homo sapien
cagaaaatatcgaaaggtaaatcca

SEQ ID NO: 4366269 - DNA, 25 bp, Homo sapien
tctttatgacaggactacatctgga

SEQ ID NO: 4366270 - DNA, 25 bp, Homo sapien
aatccatcataagacaaggagcatc

SEQ ID NO: 4366271 - DNA, 25 bp, Homo sapien
ggattggtcctaagactcctgagga

SEQ ID NO: 4366272 - DNA, 25 bp, Homo sapien
aagcaattctagtagacaccagacc

SEQ ID NO: 4366273 - DNA, 25 bp, Homo sapien
cagaccatgccaggaaatcatatcc

SEQ ID NO: 4366274 - DNA, 25 bp, Homo sapien
tatacttgctccaatgaaactcaga

SEQ ID NO: 4366275 - DNA, 25 bp, Homo sapien
tagtcttcgagttaactgagaagcc

SEQ ID NO: 4366276 - DNA, 25 bp, Homo sapien
cagaaaaaggaaactctagagcgct

SEQ ID NO: 4366277 - DNA, 25 bp, Homo sapien
gcaacaactcaagtaaaagcccagt

SEQ ID NO: 4366278 - DNA, 25 bp, Homo sapien
gactcatggctgttgtgcatactta

SEQ ID NO: 4366279 - DNA, 25 bp, Homo sapien
agcctgtttacctgagtcctttggg

SEQ ID NO: 4366280 - DNA, 25 bp, Homo sapien
tattgagttctttgtaaagcctggt

SEQ ID NO: 4366281 - DNA, 25 bp, Homo sapien
tttcaataatggtaaacatttattg

SEQ ID NO: 4366282 - DNA, 25 bp, Homo sapien
acatttattgagttctttgtaaagc

SEQ ID NO: 4366283 - DNA, 25 bp, Homo sapien
atttattgagttctttgtaaagcct

SEQ ID NO: 4366284 - DNA, 25 bp, Homo sapien
tacgagtcaatgtggtaggtaatcc

SEQ ID NO: 4366285 - DNA, 25 bp, Homo sapien
gaaacctgggtcatactggagagaa

SEQ ID NO: 4366286 - DNA, 25 bp, Homo sapien
gaaggtaggcaaactgctcccaact

SEQ ID NO: 4366287 - DNA, 25 bp, Homo sapien
accagccaatcgtgaaaagtcagca

SEQ ID NO: 4366288 - DNA, 25 bp, Homo sapien
tatgacctcagtatcttggaataga

SEQ ID NO: 4366289 - DNA, 25 bp, Homo sapien
tgggactctgatagatgcgtgccac

SEQ ID NO: 4366290 - DNA, 25 bp, Homo sapien
tagttccaacggtagagcatgagac

SEQ ID NO: 4366291 - DNA, 25 bp, Homo sapien
catcttaatgtgtcaagaagaccac

SEQ ID NO: 4366292 - DNA, 25 bp, Homo sapien
tcctacagtgatttgtcttcatctc

SEQ ID NO: 4366293 - DNA, 25 bp, Homo sapien
ttgttccagttgttgaaccaaatgg

SEQ ID NO: 4366294 - DNA, 25 bp, Homo sapien
gtagctttatagtcactgctggttt

SEQ ID NO: 4366295 - DNA, 25 bp, Homo sapien
cactgctggtttaatctgttgcctg

SEQ ID NO: 4366296 - DNA, 25 bp, Homo sapien
taatctgttgcctgagacttctact

SEQ ID NO: 4366297 - DNA, 25 bp, Homo sapien
cattttgattaaggtgtagctttat

SEQ ID NO: 4366298 - DNA, 25 bp, Homo sapien
gcaccatgtgataattcattgagcg

SEQ ID NO: 4366299 - DNA, 25 bp, Homo sapien
gggtgtgagtcacagttaaatgcac

SEQ ID NO: 4366300 - DNA, 25 bp, Homo sapien
gagtcacagttaaatgcaccatgtg

SEQ ID NO: 4366301 - DNA, 25 bp, Homo sapien
gagcggtacattgacctgtgcactt

SEQ ID NO: 4366302 - DNA, 25 bp, Homo sapien
catctagtcgccattcaaggttatg

SEQ ID NO: 4366303 - DNA, 25 bp, Homo sapien
ctagtcgccattcaaggttatgata

SEQ ID NO: 4366304 - DNA, 25 bp, Homo sapien
ctgtacatctagtcgccattcaagg

SEQ ID NO: 4366305 - DNA, 25 bp, Homo sapien
tgtacatctagtcgccattcaaggt

SEQ ID NO: 4366306 - DNA, 25 bp, Homo sapien
caaaaacagagtcttggaaatccag

SEQ ID NO: 4366307 - DNA, 25 bp, Homo sapien
tgtttaattcttcagagaatcccag

SEQ ID NO: 4366308 - DNA, 25 bp, Homo sapien
tcactcagaatcgttctgatctctt

SEQ ID NO: 4366309 - DNA, 25 bp, Homo sapien
tgtccagataaagctgaagcaacaa

SEQ ID NO: 4366310 - DNA, 25 bp, Homo sapien
gaccgttcttaagaatccagccaac

SEQ ID NO: 4366311 - DNA, 25 bp, Homo sapien
ctagctatttatactagcaagaggt

SEQ ID NO: 4366312 - DNA, 25 bp, Homo sapien
tacctgccaggactatgatgtagag

SEQ ID NO: 4366313 - DNA, 25 bp, Homo sapien
gatgtagagtacaccagaccgttct

SEQ ID NO: 4366314 - DNA, 25 bp, Homo sapien
agctctcagtgaggagatacgttaa

SEQ ID NO: 4366315 - DNA, 25 bp, Homo sapien
ggacagtgtcactactcacattgag

SEQ ID NO: 4366316 - DNA, 25 bp, Homo sapien
gatacgttaatccttccacaccatg

SEQ ID NO: 4366317 - DNA, 25 bp, Homo sapien
cacaccatgctggacagtgtcacta

SEQ ID NO: 4366318 - DNA, 25 bp, Homo sapien
actactgtagtatttatcttgttca

SEQ ID NO: 4366319 - DNA, 25 bp, Homo sapien
gccagaggctcctgctccttgtcat

SEQ ID NO: 4366320 - DNA, 25 bp, Homo sapien
acactattcattattacatgttttc

SEQ ID NO: 4366321 - DNA, 25 bp, Homo sapien
gccaaatgcctttggtatttcccac

SEQ ID NO: 4366322 - DNA, 25 bp, Homo sapien
tacagttgacccagctattccacag

SEQ ID NO: 4366323 - DNA, 25 bp, Homo sapien
caataatccgtttctctcccgggag

SEQ ID NO: 4366324 - DNA, 25 bp, Homo sapien
tacaatcggaacaagaccctaggac

SEQ ID NO: 4366325 - DNA, 25 bp, Homo sapien
taagggacgggcaggatttgcaccc

SEQ ID NO: 4366326 - DNA, 25 bp, Homo sapien
agatttttgggtttgcgccgcgtct

SEQ ID NO: 4366327 - DNA, 25 bp, Homo sapien
tttgcgccgcgtctcaggaattcca

SEQ ID NO: 4366328 - DNA, 25 bp, Homo sapien
ggaattccacagcaatccgcccaaa

SEQ ID NO: 4366329 - DNA, 25 bp, Homo sapien
tggcggcgccttcgtagatttttgg

SEQ ID NO: 4366330 - DNA, 25 bp, Homo sapien
gagtgccaggcgctgcctttgacct

SEQ ID NO: 4366331 - DNA, 25 bp, Homo sapien
aagtcagaaggctgttgagtgccag

SEQ ID NO: 4366332 - DNA, 25 bp, Homo sapien
atgaaagtcagaaggctgttgagtg

SEQ ID NO: 4366333 - DNA, 25 bp, Homo sapien
ctgcaatgaaagtcagaaggctgtt

SEQ ID NO: 4366334 - DNA, 25 bp, Homo sapien
gttccttatgctcctcggacaattc

SEQ ID NO: 4366335 - DNA, 25 bp, Homo sapien
ggtgttccttatgctcctcggacaa

SEQ ID NO: 4366336 - DNA, 25 bp, Homo sapien
caggtgttccttatgctcctcggac

SEQ ID NO: 4366337 - DNA, 25 bp, Homo sapien
gtgttccttatgctcctcggacaat

SEQ ID NO: 4366338 - DNA, 25 bp, Homo sapien
tcactgtcctacgatttcacccggc

SEQ ID NO: 4366339 - DNA, 25 bp, Homo sapien
tgtcctacgatttcacccggcagcg

SEQ ID NO: 4366340 - DNA, 25 bp, Homo sapien
actgtcctacgatttcacccggcag

SEQ ID NO: 4366341 - DNA, 25 bp, Homo sapien
cctacgatttcacccggcagcgccg

SEQ ID NO: 4366342 - DNA, 25 bp, Homo sapien
taaaacaatgtccttgccctctagg

SEQ ID NO: 4366343 - DNA, 25 bp, Homo sapien
tgatgctggtagagaacaaggcttc

SEQ ID NO: 4366344 - DNA, 25 bp, Homo sapien
caattcactatactgtcaagaggac

SEQ ID NO: 4366345 - DNA, 25 bp, Homo sapien
gacaataacgtggtgacaagcctca

SEQ ID NO: 4366346 - DNA, 25 bp, Homo sapien
tagagagttttcacacgctgtcaga

SEQ ID NO: 4366347 - DNA, 25 bp, Homo sapien
gcaaaaatagcactaaagtttcact

SEQ ID NO: 4366348 - DNA, 25 bp, Homo sapien
tgaagtctgagaaaacatggtgtta

SEQ ID NO: 4366349 - DNA, 25 bp, Homo sapien
tgtggcattataactgttactagag

SEQ ID NO: 4366350 - DNA, 25 bp, Homo sapien
ctcctcgggtagtcaagttagaaat

SEQ ID NO: 4366351 - DNA, 25 bp, Homo sapien
ttggccaggactcttgctatttcta

SEQ ID NO: 4366352 - DNA, 25 bp, Homo sapien
cgggtagtcaagttagaaatgctct

SEQ ID NO: 4366353 - DNA, 25 bp, Homo sapien
tttggccaggactcttgctatttct

SEQ ID NO: 4366354 - DNA, 25 bp, Homo sapien
gttgcatagaaaaacgatggatgtg

SEQ ID NO: 4366355 - DNA, 25 bp, Homo sapien
cagtagattgcgttctcccatggag

SEQ ID NO: 4366356 - DNA, 25 bp, Homo sapien
gaatatcccactcttgaaactggag

SEQ ID NO: 4366357 - DNA, 25 bp, Homo sapien
ggaggacttcagtaaaaagtcagca

SEQ ID NO: 4366358 - DNA, 25 bp, Homo sapien
gaacttgcattcaccagtggatgaa

SEQ ID NO: 4366359 - DNA, 25 bp, Homo sapien
cttgtgtccggctgtgaaattgcca

SEQ ID NO: 4366360 - DNA, 25 bp, Homo sapien
ttgccaaaggattgacaggtttgct

SEQ ID NO: 4366361 - DNA, 25 bp, Homo sapien
agagatggtagcttgagcacgatgc

SEQ ID NO: 4366362 - DNA, 25 bp, Homo sapien
ttttatgaagactgtgactctgagc

SEQ ID NO: 4366363 - DNA, 25 bp, Homo sapien
cagctcttggaggtcatttttggtt

SEQ ID NO: 4366364 - DNA, 25 bp, Homo sapien
gtgtctccaacttttgccccaaaga

SEQ ID NO: 4366365 - DNA, 25 bp, Homo sapien
ttgctccacaaaactggcttttatg

SEQ ID NO: 4366366 - DNA, 25 bp, Homo sapien
gaatcaacagttggcctgcttctgc

SEQ ID NO: 4366367 - DNA, 25 bp, Homo sapien
cctcattgggactgaaatttttgga

SEQ ID NO: 4366368 - DNA, 25 bp, Homo sapien
aaagcagcaatgtacagggctaccc

SEQ ID NO: 4366369 - DNA, 25 bp, Homo sapien
gtagttgacaaaggccttcagaatc

SEQ ID NO: 4366370 - DNA, 25 bp, Homo sapien
ttgagtactggtccttcttttgata

SEQ ID NO: 4366371 - DNA, 25 bp, Homo sapien
ccagacatccaagcgaagtgttgtg

SEQ ID NO: 4366372 - DNA, 25 bp, Homo sapien
ccaaggagacaacccatcagaaatt

SEQ ID NO: 4366373 - DNA, 25 bp, Homo sapien
ttcttttgataagtagcgttggact

SEQ ID NO: 4366374 - DNA, 25 bp, Homo sapien
cagtgctctcagcaaggttcctccg

SEQ ID NO: 4366375 - DNA, 25 bp, Homo sapien
cccagtgctctcagcaaggttcctc

SEQ ID NO: 4366376 - DNA, 25 bp, Homo sapien
agtgctctcagcaaggttcctccgc

SEQ ID NO: 4366377 - DNA, 25 bp, Homo sapien
tgctctcagcaaggttcctccgctc

SEQ ID NO: 4366378 - DNA, 25 bp, Homo sapien
tatcttccagcttaaaacgtcacat

SEQ ID NO: 4366379 - DNA, 25 bp, Homo sapien
tgcactatagcaaagtactctgagg

SEQ ID NO: 4366380 - DNA, 25 bp, Homo sapien
gcctgaagaatagtcaaccagagtt

SEQ ID NO: 4366381 - DNA, 25 bp, Homo sapien
catgttctaggcagggttcagcctc

SEQ ID NO: 4366382 - DNA, 25 bp, Homo sapien
tagccttaacctcttggcccaagtg

SEQ ID NO: 4366383 - DNA, 25 bp, Homo sapien
taaggatacctacaaagccctatgt

SEQ ID NO: 4366384 - DNA, 25 bp, Homo sapien
tagacccagacccaagaatgaaatg

SEQ ID NO: 4366385 - DNA, 25 bp, Homo sapien
gacttgacagggctatgagaccctc

SEQ ID NO: 4366386 - DNA, 25 bp, Homo sapien
aaataatgcctccatttgttcagat

SEQ ID NO: 4366387 - DNA, 25 bp, Homo sapien
agaggtttccatttagaaataatgc

SEQ ID NO: 4366388 - DNA, 25 bp, Homo sapien
aaatcttcaaaacaataatggttgc

SEQ ID NO: 4366389 - DNA, 25 bp, Homo sapien
tggaaatggttttgattgtaaatct

SEQ ID NO: 4366390 - DNA, 25 bp, Homo sapien
tctggtatcaaaggaccctagtgcc

SEQ ID NO: 4366391 - DNA, 25 bp, Homo sapien
gagagggagggcaacttaccactac

SEQ ID NO: 4366392 - DNA, 25 bp, Homo sapien
cacttctgatatttaaactatgtaa

SEQ ID NO: 4366393 - DNA, 25 bp, Homo sapien
actaagtgcttgtaaggccaggaga

SEQ ID NO: 4366394 - DNA, 25 bp, Homo sapien
tgttgcaatcatacatctccaggcc

SEQ ID NO: 4366395 - DNA, 25 bp, Homo sapien
ccttggggttcggagacagtagaca

SEQ ID NO: 4366396 - DNA, 25 bp, Homo sapien
ctggtagtccttgagggtgttgcaa

SEQ ID NO: 4366397 - DNA, 25 bp, Homo sapien
tccttgagggtgttgcaatcataca

SEQ ID NO: 4366398 - DNA, 25 bp, Homo sapien
tggcattgtgtcttgagttacagca

SEQ ID NO: 4366399 - DNA, 25 bp, Homo sapien
catctcagagttaccagtgttctca

SEQ ID NO: 4366400 - DNA, 25 bp, Homo sapien
aagggaaatgctctccattactggc

SEQ ID NO: 4366401 - DNA, 25 bp, Homo sapien
agcattgaacacgtatagagtaggc

SEQ ID NO: 4366402 - DNA, 25 bp, Homo sapien
tagatgccaattaatagcaacttgc

SEQ ID NO: 4366403 - DNA, 25 bp, Homo sapien
tctaatttggttgtatgacgaggga

SEQ ID NO: 4366404 - DNA, 25 bp, Homo sapien
ccttatccacataagagaaggcatc

SEQ ID NO: 4366405 - DNA, 25 bp, Homo sapien
cccattttgagttctagtgaggcac

SEQ ID NO: 4366406 - DNA, 25 bp, Homo sapien
gcagaagcttgctgaactattccag

SEQ ID NO: 4366407 - DNA, 25 bp, Homo sapien
cataaacttctcctcttgtgtggta

SEQ ID NO: 4366408 - DNA, 25 bp, Homo sapien
ccatggagtcttggacactgaattg

SEQ ID NO: 4366409 - DNA, 25 bp, Homo sapien
ggagttacagcactaagtaagcaga

SEQ ID NO: 4366410 - DNA, 25 bp, Homo sapien
ggccccaccaaagtgatctaatgct

SEQ ID NO: 4366411 - DNA, 25 bp, Homo sapien
caccaaagtgatctaatgctcttct

SEQ ID NO: 4366412 - DNA, 25 bp, Homo sapien
actgccagtaatcactgtggcccca

SEQ ID NO: 4366413 - DNA, 25 bp, Homo sapien
cactgtggccccaccaaagtgatct

SEQ ID NO: 4366414 - DNA, 25 bp, Homo sapien
tccccttacagcacaaagcatgcgt

SEQ ID NO: 4366415 - DNA, 25 bp, Homo sapien
ccttacagcacaaagcatgcgtaag

SEQ ID NO: 4366416 - DNA, 25 bp, Homo sapien
ttacagcacaaagcatgcgtaagac

SEQ ID NO: 4366417 - DNA, 25 bp, Homo sapien
ccccttacagcacaaagcatgcgta

SEQ ID NO: 4366418 - DNA, 25 bp, Homo sapien
agaaagatattccaacatcagcaag

SEQ ID NO: 4366419 - DNA, 25 bp, Homo sapien
ccagataccgcctgccttgtttgtc

SEQ ID NO: 4366420 - DNA, 25 bp, Homo sapien
cagaaagatattccaacatcagcaa

SEQ ID NO: 4366421 - DNA, 25 bp, Homo sapien
tacattaactccagataccgcctgc

SEQ ID NO: 4366422 - DNA, 25 bp, Homo sapien
cagtttcatctgctgaaacatcaaa

SEQ ID NO: 4366423 - DNA, 25 bp, Homo sapien
aaagatccttcaaaggcgatgaaaa

SEQ ID NO: 4366424 - DNA, 25 bp, Homo sapien
catcaaacggttcaaaagatccttc

SEQ ID NO: 4366425 - DNA, 25 bp, Homo sapien
ccttcaaaggcgatgaaaatcctca

SEQ ID NO: 4366426 - DNA, 25 bp, Homo sapien
tctagcctcaaaggtaagttgtaga

SEQ ID NO: 4366427 - DNA, 25 bp, Homo sapien
caaagattctcctggatggctagaa

SEQ ID NO: 4366428 - DNA, 25 bp, Homo sapien
gacaaaaatgatagccagaggcagc

SEQ ID NO: 4366429 - DNA, 25 bp, Homo sapien
aatgtgaagagcctagtcccacagt

SEQ ID NO: 4366430 - DNA, 25 bp, Homo sapien
aaacctgcccggctattactgttcg

SEQ ID NO: 4366431 - DNA, 25 bp, Homo sapien
actgttcgtcagtgatgcagcagaa

SEQ ID NO: 4366432 - DNA, 25 bp, Homo sapien
agctgctcgggtcctctcttgttgc

SEQ ID NO: 4366433 - DNA, 25 bp, Homo sapien
gtgaaaactgatgcattcctttcaa

SEQ ID NO: 4366434 - DNA, 25 bp, Homo sapien
taaggtggctgtgcctccaaagagt

SEQ ID NO: 4366435 - DNA, 25 bp, Homo sapien
aaataagtaaggtggctgtgcctcc

SEQ ID NO: 4366436 - DNA, 25 bp, Homo sapien
atataaataagtaaggtggctgtgc

SEQ ID NO: 4366437 - DNA, 25 bp, Homo sapien
ctgcagtttttgatacaatataaat

SEQ ID NO: 4366438 - DNA, 25 bp, Homo sapien
tgtagatcttcctgaggaaatcagt

SEQ ID NO: 4366439 - DNA, 25 bp, Homo sapien
agttgtttcaacgatgtagatcttc

SEQ ID NO: 4366440 - DNA, 25 bp, Homo sapien
agagaaggtgttccctgaggaaggt

SEQ ID NO: 4366441 - DNA, 25 bp, Homo sapien
atttctagttgtttcaacgatgtag

SEQ ID NO: 4366442 - DNA, 25 bp, Homo sapien
ttataaacgtgtgtgcaaatatctt

SEQ ID NO: 4366443 - DNA, 25 bp, Homo sapien
attgtgaattgtgttgttataaacg

SEQ ID NO: 4366444 - DNA, 25 bp, Homo sapien
ttttctcctgggttgggattgctgg

SEQ ID NO: 4366445 - DNA, 25 bp, Homo sapien
tgacttttctcctgggttgggattg

SEQ ID NO: 4366446 - DNA, 25 bp, Homo sapien
taaaatagatttaaagtggtatctc

SEQ ID NO: 4366447 - DNA, 25 bp, Homo sapien
taactgtttgtgcattatttgtggg

SEQ ID NO: 4366448 - DNA, 25 bp, Homo sapien
cattctggtcttgaaggaaaacaac

SEQ ID NO: 4366449 - DNA, 25 bp, Homo sapien
gatgtgaagaaatagtaactgtttg

SEQ ID NO: 4366450 - DNA, 25 bp, Homo sapien
tacttgtctgtctggccaatctgac

SEQ ID NO: 4366451 - DNA, 25 bp, Homo sapien
ctatttaatcccacatcagtctctg

SEQ ID NO: 4366452 - DNA, 25 bp, Homo sapien
taaatctgagataaactgtgtcctg

SEQ ID NO: 4366453 - DNA, 25 bp, Homo sapien
ggcatgtcctccttctacttgtctg

SEQ ID NO: 4366454 - DNA, 25 bp, Homo sapien
ctaaacagtatcactggaactttcc

SEQ ID NO: 4366455 - DNA, 25 bp, Homo sapien
gcctaaacagtatcactggaacttt

SEQ ID NO: 4366456 - DNA, 25 bp, Homo sapien
tgtgaatagattagagcctaaacag

SEQ ID NO: 4366457 - DNA, 25 bp, Homo sapien
gaatagattagagcctaaacagtat

SEQ ID NO: 4366458 - DNA, 25 bp, Homo sapien
tattccatctacagattatattaaa

SEQ ID NO: 4366459 - DNA, 25 bp, Homo sapien
ccatctacagattatattaaatgag

SEQ ID NO: 4366460 - DNA, 25 bp, Homo sapien
tatatttgcactaattttacattga

SEQ ID NO: 4366461 - DNA, 25 bp, Homo sapien
tcttcataatgagaaagctctatat

SEQ ID NO: 4366462 - DNA, 25 bp, Homo sapien
ggaagttcctgtgttacttgtgaaa

SEQ ID NO: 4366463 - DNA, 25 bp, Homo sapien
gcgctgaacatcaaaattcttactg

SEQ ID NO: 4366464 - DNA, 25 bp, Homo sapien
cacagttacttttcaagtgcaatgg

SEQ ID NO: 4366465 - DNA, 25 bp, Homo sapien
gcctctgctatgttaggatgagaaa

SEQ ID NO: 4366466 - DNA, 25 bp, Homo sapien
aacttgctgaaaatctgacaatttt

SEQ ID NO: 4366467 - DNA, 25 bp, Homo sapien
attaacttgctgaaaatctgacaat

SEQ ID NO: 4366468 - DNA, 25 bp, Homo sapien
ttaacttgctgaaaatctgacaatt

SEQ ID NO: 4366469 - DNA, 25 bp, Homo sapien
taacttgctgaaaatctgacaattt

SEQ ID NO: 4366470 - DNA, 25 bp, Homo sapien
ttcttgcactgcacgggggtcatgc

SEQ ID NO: 4366471 - DNA, 25 bp, Homo sapien
tttcttgcactgcacgggggtcatg

SEQ ID NO: 4366472 - DNA, 25 bp, Homo sapien
tcttgcactgcacgggggtcatgct

SEQ ID NO: 4366473 - DNA, 25 bp, Homo sapien
gtttcttgcactgcacgggggtcat

SEQ ID NO: 4366474 - DNA, 25 bp, Homo sapien
tatttcacatgtatatttttgcctc

SEQ ID NO: 4366475 - DNA, 25 bp, Homo sapien
acatgtatatttttgcctccccacc

SEQ ID NO: 4366476 - DNA, 25 bp, Homo sapien
tcacatgtatatttttgcctcccca

SEQ ID NO: 4366477 - DNA, 25 bp, Homo sapien
tttcacatgtatatttttgcctccc

SEQ ID NO: 4366478 - DNA, 25 bp, Homo sapien
gtcatccggaagcactcctcacata

SEQ ID NO: 4366479 - DNA, 25 bp, Homo sapien
agtcatccggaagcactcctcacat

SEQ ID NO: 4366480 - DNA, 25 bp, Homo sapien
atcgctttccagataaacttgagtt

SEQ ID NO: 4366481 - DNA, 25 bp, Homo sapien
tttccagataaacttgagtttcaca

SEQ ID NO: 4366482 - DNA, 25 bp, Homo sapien
ctttccagataaacttgagtttcac

SEQ ID NO: 4366483 - DNA, 25 bp, Homo sapien
ccagtccctgaaatcaccgttctta

SEQ ID NO: 4366484 - DNA, 25 bp, Homo sapien
cagtccctgaaatcaccgttcttaa

SEQ ID NO: 4366485 - DNA, 25 bp, Homo sapien
tcaaatcttccatggggtggtgaca

SEQ ID NO: 4366486 - DNA, 25 bp, Homo sapien
caaatcttccatggggtggtgacac

SEQ ID NO: 4366487 - DNA, 25 bp, Homo sapien
catcaaatcttccatggggtggtga

SEQ ID NO: 4366488 - DNA, 25 bp, Homo sapien
atcttccatggggtggtgacacgca

SEQ ID NO: 4366489 - DNA, 25 bp, Homo sapien
ctccattttagttattgcagctaaa

SEQ ID NO: 4366490 - DNA, 25 bp, Homo sapien
ctctccattttagttattgcagcta

SEQ ID NO: 4366491 - DNA, 25 bp, Homo sapien
ttagttattgcagctaaagatttgc

SEQ ID NO: 4366492 - DNA, 25 bp, Homo sapien
taattttagctatttcagtcttctc

SEQ ID NO: 4366493 - DNA, 25 bp, Homo sapien
tctgggccacgtgccgtgactcatg

SEQ ID NO: 4366494 - DNA, 25 bp, Homo sapien
tgcctggtccccacgtgtttttaga

SEQ ID NO: 4366495 - DNA, 25 bp, Homo sapien
tgttattgatgactcaaattgcctg

SEQ ID NO: 4366496 - DNA, 25 bp, Homo sapien
tatatgtatggccactcctgctctc

SEQ ID NO: 4366497 - DNA, 25 bp, Homo sapien
atgctatcccagaagtccctcagat

SEQ ID NO: 4366498 - DNA, 25 bp, Homo sapien
gaaagggcacttttgctaaacatag

SEQ ID NO: 4366499 - DNA, 25 bp, Homo sapien
tagcattcttgattggcaccgcttt

SEQ ID NO: 4366500 - DNA, 25 bp, Homo sapien
tctgctaagtctgctgagaatctaa

SEQ ID NO: 4366501 - DNA, 25 bp, Homo sapien
gaaaggccttgttcagaacataatg

SEQ ID NO: 4366502 - DNA, 25 bp, Homo sapien
aattaggacagagcgaagctctcac

SEQ ID NO: 4366503 - DNA, 25 bp, Homo sapien
taggccgttagtcatgttagtagtg

SEQ ID NO: 4366504 - DNA, 25 bp, Homo sapien
ctggagttgggtatcttctgttcca

SEQ ID NO: 4366505 - DNA, 25 bp, Homo sapien
tcatccctagtaaatacgtagctgc

SEQ ID NO: 4366506 - DNA, 25 bp, Homo sapien
tctcccagagttgctaatgcaatgc

SEQ ID NO: 4366507 - DNA, 25 bp, Homo sapien
catctgattgttttagcgcaggcac

SEQ ID NO: 4366508 - DNA, 25 bp, Homo sapien
tctacatacataacctaggaggcaa

SEQ ID NO: 4366509 - DNA, 25 bp, Homo sapien
taatagactggtgctgtaactcaag

SEQ ID NO: 4366510 - DNA, 25 bp, Homo sapien
gggctttatcggaatcccgctcaca

SEQ ID NO: 4366511 - DNA, 25 bp, Homo sapien
ggtgaacgggattacaacatagcaa

SEQ ID NO: 4366512 - DNA, 25 bp, Homo sapien
cagttgcagcctaatggtgaacggg

SEQ ID NO: 4366513 - DNA, 25 bp, Homo sapien
gacagccaagtccacaataatgcaa

SEQ ID NO: 4366514 - DNA, 25 bp, Homo sapien
tcagatgagttagactgtatcccag

SEQ ID NO: 4366515 - DNA, 25 bp, Homo sapien
tccctaaagtagtgccattcgaaag

SEQ ID NO: 4366516 - DNA, 25 bp, Homo sapien
ccagatgtaacaaagtgcagggaaa

SEQ ID NO: 4366517 - DNA, 25 bp, Homo sapien
caaccatgcgctacaaaaggaagac

SEQ ID NO: 4366518 - DNA, 25 bp, Homo sapien
gagattgtacaaccggcaccttgct

SEQ ID NO: 4366519 - DNA, 25 bp, Homo sapien
taaaggtttgtctctgctcaagtgc

SEQ ID NO: 4366520 - DNA, 25 bp, Homo sapien
taattgctaagacaaagtgatgccc

SEQ ID NO: 4366521 - DNA, 25 bp, Homo sapien
ttaagtgtgcctccgtggacacctt

SEQ ID NO: 4366522 - DNA, 25 bp, Homo sapien
cctcaggtataaagcgagttcatat

SEQ ID NO: 4366523 - DNA, 25 bp, Homo sapien
tcctttcccatgactataaccaatg

SEQ ID NO: 4366524 - DNA, 25 bp, Homo sapien
gcgagttcatatgctttcttgttaa

SEQ ID NO: 4366525 - DNA, 25 bp, Homo sapien
ttatagctaggaaagtttaagagca

SEQ ID NO: 4366526 - DNA, 25 bp, Homo sapien
taatacttaacagtctgcctagcag

SEQ ID NO: 4366527 - DNA, 25 bp, Homo sapien
ggagacacaggttcataccccatca

SEQ ID NO: 4366528 - DNA, 25 bp, Homo sapien
ccctgcattgctaataaaatttcca

SEQ ID NO: 4366529 - DNA, 25 bp, Homo sapien
cttcttattcaatccgcctccatgg

SEQ ID NO: 4366530 - DNA, 25 bp, Homo sapien
acccagagtctctcaagtattttgc

SEQ ID NO: 4366531 - DNA, 25 bp, Homo sapien
cagagtctctcaagtattttgccat

SEQ ID NO: 4366532 - DNA, 25 bp, Homo sapien
ttgccattgagtatgccttcttatt

SEQ ID NO: 4366533 - DNA, 25 bp, Homo sapien
gcactgaagtcaagtaggtttccaa

SEQ ID NO: 4366534 - DNA, 25 bp, Homo sapien
taaacttgactgcatcttggaagcc

SEQ ID NO: 4366535 - DNA, 25 bp, Homo sapien
tactcagtatcattcagaaaaggcc

SEQ ID NO: 4366536 - DNA, 25 bp, Homo sapien
gataacttcaccgtagtagccttgt

SEQ ID NO: 4366537 - DNA, 25 bp, Homo sapien
ttaaccaaaagaatgccttactcac

SEQ ID NO: 4366538 - DNA, 25 bp, Homo sapien
tttaaccaaaagaatgccttactca

SEQ ID NO: 4366539 - DNA, 25 bp, Homo sapien
ccggatgtccattgtgcagtcacca

SEQ ID NO: 4366540 - DNA, 25 bp, Homo sapien
gcgccaagagtcaaaccgttggtaa

SEQ ID NO: 4366541 - DNA, 25 bp, Homo sapien
tatagactatctctgatcactgagc

SEQ ID NO: 4366542 - DNA, 25 bp, Homo sapien
actgagcatttcttcgcgccaagag

SEQ ID NO: 4366543 - DNA, 25 bp, Homo sapien
ctacaatcatatctatttctattgg

SEQ ID NO: 4366544 - DNA, 25 bp, Homo sapien
tgacagttgacactagacaaagtgc

SEQ ID NO: 4366545 - DNA, 25 bp, Homo sapien
gcctgaaagtgttcacgtaatggta

SEQ ID NO: 4366546 - DNA, 25 bp, Homo sapien
taggcttatgctaccactgccagat

SEQ ID NO: 4366547 - DNA, 25 bp, Homo sapien
caactctgaacaaagctggtctatc

SEQ ID NO: 4366548 - DNA, 25 bp, Homo sapien
cctcagtgttccagccccgcgctgc

SEQ ID NO: 4366549 - DNA, 25 bp, Homo sapien
ccgcgctgcggtgcccccgcggccg

SEQ ID NO: 4366550 - DNA, 25 bp, Homo sapien
gtggctgcccagacgtatttggcgt

SEQ ID NO: 4366551 - DNA, 25 bp, Homo sapien
tatttggcgtcgcagtagccgacaa

SEQ ID NO: 4366552 - DNA, 25 bp, Homo sapien
gccatcgcacatcaggttatccacg

SEQ ID NO: 4366553 - DNA, 25 bp, Homo sapien
gttatccacgtagctctgccaaccg

SEQ ID NO: 4366554 - DNA, 25 bp, Homo sapien
gcgcgtgcgtgcgatccttccgcgg

SEQ ID NO: 4366555 - DNA, 25 bp, Homo sapien
ttttccgcggacacggctgggcgtg

SEQ ID NO: 4366556 - DNA, 25 bp, Homo sapien
cgaagcggctgtgcctgtggcggct

SEQ ID NO: 4366557 - DNA, 25 bp, Homo sapien
tgagggacgaacctcagagcgcgct

SEQ ID NO: 4366558 - DNA, 25 bp, Homo sapien
taagggcaccgtctttcctggatcc

SEQ ID NO: 4366559 - DNA, 25 bp, Homo sapien
tcttgcgcctcgtccataaaggcag

SEQ ID NO: 4366560 - DNA, 25 bp, Homo sapien
gggttgcccacgctaatctccgagt

SEQ ID NO: 4366561 - DNA, 25 bp, Homo sapien
tgacgggatgcggagcgtttcctcc

SEQ ID NO: 4366562 - DNA, 25 bp, Homo sapien
atcagagcaggcgtccgtggcgctc

SEQ ID NO: 4366563 - DNA, 25 bp, Homo sapien
cttgctgagcttcgccgatctttca

SEQ ID NO: 4366564 - DNA, 25 bp, Homo sapien
tgaaatcagagcaggcgtccgtggc

SEQ ID NO: 4366565 - DNA, 25 bp, Homo sapien
ccgtggcgctcaggaaccttgctga

SEQ ID NO: 4366566 - DNA, 25 bp, Homo sapien
tcatttgggtaccaagggcctctca

SEQ ID NO: 4366567 - DNA, 25 bp, Homo sapien
catttgggtaccaagggcctctcat

SEQ ID NO: 4366568 - DNA, 25 bp, Homo sapien
ttcatttgggtaccaagggcctctc

SEQ ID NO: 4366569 - DNA, 25 bp, Homo sapien
gagatatacaatccagccaccctgt

SEQ ID NO: 4366570 - DNA, 25 bp, Homo sapien
tcctctgatccataagggaatgctg

SEQ ID NO: 4366571 - DNA, 25 bp, Homo sapien
gaagcaacaatttcaggcctctaag

SEQ ID NO: 4366572 - DNA, 25 bp, Homo sapien
tactaatggactacactcgaggctg

SEQ ID NO: 4366573 - DNA, 25 bp, Homo sapien
gaggatgccaccagtcaaagagccg

SEQ ID NO: 4366574 - DNA, 25 bp, Homo sapien
gcagtttccgaccaccatggacagg

SEQ ID NO: 4366575 - DNA, 25 bp, Homo sapien
actgcgcagtttccgaccaccatgg

SEQ ID NO: 4366576 - DNA, 25 bp, Homo sapien
atgccaccagtcaaagagccgaacg

SEQ ID NO: 4366577 - DNA, 25 bp, Homo sapien
tgcaatcctcctgtacacttgctct

SEQ ID NO: 4366578 - DNA, 25 bp, Homo sapien
tcctcctgtacacttgctctttaac

SEQ ID NO: 4366579 - DNA, 25 bp, Homo sapien
aatcctcctgtacacttgctcttta

SEQ ID NO: 4366580 - DNA, 25 bp, Homo sapien
gctgcaatcctcctgtacacttgct

SEQ ID NO: 4366581 - DNA, 25 bp, Homo sapien
agagatcggatcacacaagcccgga

SEQ ID NO: 4366582 - DNA, 25 bp, Homo sapien
tcttacaaatcagggaaaaattcac

SEQ ID NO: 4366583 - DNA, 25 bp, Homo sapien
ctccattgactctggtcgcagacgc

SEQ ID NO: 4366584 - DNA, 25 bp, Homo sapien
gactctggtcgcagacgcaaaggca

SEQ ID NO: 4366585 - DNA, 25 bp, Homo sapien
gaacagcgttggctacggctttctt

SEQ ID NO: 4366586 - DNA, 25 bp, Homo sapien
tacggctttcttgactcgtccagac

SEQ ID NO: 4366587 - DNA, 25 bp, Homo sapien
cagcgttggctacggctttcttgac

SEQ ID NO: 4366588 - DNA, 25 bp, Homo sapien
tggctacggctttcttgactcgtcc

SEQ ID NO: 4366589 - DNA, 25 bp, Homo sapien
gccacggtcactcggccggagcagg

SEQ ID NO: 4366590 - DNA, 25 bp, Homo sapien
gagtcggcgtaatccgccacggtca

SEQ ID NO: 4366591 - DNA, 25 bp, Homo sapien
acgaccgccagatccgagtcggcgt

SEQ ID NO: 4366592 - DNA, 25 bp, Homo sapien
cgtgggcccggaacttgagtcgctt

SEQ ID NO: 4366593 - DNA, 25 bp, Homo sapien
tccggccagagagccggccccggta

SEQ ID NO: 4366594 - DNA, 25 bp, Homo sapien
ggccccggtagccgcaagccagctc

SEQ ID NO: 4366595 - DNA, 25 bp, Homo sapien
gtagccgcaagccagctccgcccgg

SEQ ID NO: 4366596 - DNA, 25 bp, Homo sapien
ccggtagccgcaagccagctccgcc

SEQ ID NO: 4366597 - DNA, 25 bp, Homo sapien
catgggctttaggtcaaacctggtc

SEQ ID NO: 4366598 - DNA, 25 bp, Homo sapien
ggaaatggcagtgctcttttcactt

SEQ ID NO: 4366599 - DNA, 25 bp, Homo sapien
cattgtccctgagctttgattgtcc

SEQ ID NO: 4366600 - DNA, 25 bp, Homo sapien
ttaggtcaaacctggtcttgcagac

SEQ ID NO: 4366601 - DNA, 25 bp, Homo sapien
ggcttcctgataccaagggactgta

SEQ ID NO: 4366602 - DNA, 25 bp, Homo sapien
gactgctgttcctctgacactgtgt

SEQ ID NO: 4366603 - DNA, 25 bp, Homo sapien
tgtggtcatccagcaacaccgtctg

SEQ ID NO: 4366604 - DNA, 25 bp, Homo sapien
tactgtggcctagtcctagaccaga

SEQ ID NO: 4366605 - DNA, 25 bp, Homo sapien
cataaccagagtcctcacgagacag

SEQ ID NO: 4366606 - DNA, 25 bp, Homo sapien
gacaggtctatcactacccggtaga

SEQ ID NO: 4366607 - DNA, 25 bp, Homo sapien
acaatgtcagaagccccataaccag

SEQ ID NO: 4366608 - DNA, 25 bp, Homo sapien
gatgcggttttatgccagtccccac

SEQ ID NO: 4366609 - DNA, 25 bp, Homo sapien
ccaagctcagagttaagacgagcga

SEQ ID NO: 4366610 - DNA, 25 bp, Homo sapien
gagttaagacgagcgagaagcttca

SEQ ID NO: 4366611 - DNA, 25 bp, Homo sapien
agctcagagttaagacgagcgagaa

SEQ ID NO: 4366612 - DNA, 25 bp, Homo sapien
tcagagttaagacgagcgagaagct

SEQ ID NO: 4366613 - DNA, 25 bp, Homo sapien
agcgcagctgatgagctaatgccat

SEQ ID NO: 4366614 - DNA, 25 bp, Homo sapien
tgacagcgcagctgatgagctaatg

SEQ ID NO: 4366615 - DNA, 25 bp, Homo sapien
caatgacagcgcagctgatgagcta

SEQ ID NO: 4366616 - DNA, 25 bp, Homo sapien
acaatgacagcgcagctgatgagct

SEQ ID NO: 4366617 - DNA, 25 bp, Homo sapien
tgctgggtggctttggtgctctgct

SEQ ID NO: 4366618 - DNA, 25 bp, Homo sapien
tgtgctgggtggctttggtgctctg

SEQ ID NO: 4366619 - DNA, 25 bp, Homo sapien
tagcactgggttgtgctgggtggct

SEQ ID NO: 4366620 - DNA, 25 bp, Homo sapien
gcactgggttgtgctgggtggcttt

SEQ ID NO: 4366621 - DNA, 25 bp, Homo sapien
catcccaatgggctccttttattgg

SEQ ID NO: 4366622 - DNA, 25 bp, Homo sapien
atttcttggacactcatgcaaatga

SEQ ID NO: 4366623 - DNA, 25 bp, Homo sapien
gtgcacacacaggaatcctttcttc

SEQ ID NO: 4366624 - DNA, 25 bp, Homo sapien
caatgggctccttttattggtccac

SEQ ID NO: 4366625 - DNA, 25 bp, Homo sapien
cagctataacggtacttggttgaca

SEQ ID NO: 4366626 - DNA, 25 bp, Homo sapien
gaattttactggtaagacagcccca

SEQ ID NO: 4366627 - DNA, 25 bp, Homo sapien
cagctatccttgagaccccagctat

SEQ ID NO: 4366628 - DNA, 25 bp, Homo sapien
acttggttgacaaagaaacattgcc

SEQ ID NO: 4366629 - DNA, 25 bp, Homo sapien
tcttgagacgcggatgcattctccg

SEQ ID NO: 4366630 - DNA, 25 bp, Homo sapien
cgcggatgcattctccgtggaagac

SEQ ID NO: 4366631 - DNA, 25 bp, Homo sapien
gggactccgactcttgagacgcgga

SEQ ID NO: 4366632 - DNA, 25 bp, Homo sapien
tccgactcttgagacgcggatgcat

SEQ ID NO: 4366633 - DNA, 25 bp, Homo sapien
gaacacagggcagtgcaaggccagt

SEQ ID NO: 4366634 - DNA, 25 bp, Homo sapien
taaagatgttcagaaggtaaatggt

SEQ ID NO: 4366635 - DNA, 25 bp, Homo sapien
cagtgcaaggccagtaaagatgttc

SEQ ID NO: 4366636 - DNA, 25 bp, Homo sapien
ctgagcgcagtcctcctggattggg

SEQ ID NO: 4366637 - DNA, 25 bp, Homo sapien
ccattagcttgtattctctctaatg

SEQ ID NO: 4366638 - DNA, 25 bp, Homo sapien
tcttccattagcttgtattctctct

SEQ ID NO: 4366639 - DNA, 25 bp, Homo sapien
aaactccccagtactgtcttgcctc

SEQ ID NO: 4366640 - DNA, 25 bp, Homo sapien
ttagcttgtattctctctaatgtga

SEQ ID NO: 4366641 - DNA, 25 bp, Homo sapien
taaggatctctctggcagttgggat

SEQ ID NO: 4366642 - DNA, 25 bp, Homo sapien
cagtttgctaacactgagttcctct

SEQ ID NO: 4366643 - DNA, 25 bp, Homo sapien
caaaaaagtcgagcccttctgtgac

SEQ ID NO: 4366644 - DNA, 25 bp, Homo sapien
gagttcctctctgtcgcgatcaaaa

SEQ ID NO: 4366645 - DNA, 25 bp, Homo sapien
cttcctcctgatacacagagttcat

SEQ ID NO: 4366646 - DNA, 25 bp, Homo sapien
ttggaaaaatgatatgatgccacag

SEQ ID NO: 4366647 - DNA, 25 bp, Homo sapien
tgctgtgtcaccttcctcctgatac

SEQ ID NO: 4366648 - DNA, 25 bp, Homo sapien
gaaaaatgatatgatgccacagtgc

SEQ ID NO: 4366649 - DNA, 25 bp, Homo sapien
ctattgggcatatgtgagtaaaaac

SEQ ID NO: 4366650 - DNA, 25 bp, Homo sapien
ggctagcacctgcaggctttcatct

SEQ ID NO: 4366651 - DNA, 25 bp, Homo sapien
caagtgagttttagccttgtattac

SEQ ID NO: 4366652 - DNA, 25 bp, Homo sapien
ggcttgtcttcagttgtttacagga

SEQ ID NO: 4366653 - DNA, 25 bp, Homo sapien
gccaacctgtaggaagaaggtttga

SEQ ID NO: 4366654 - DNA, 25 bp, Homo sapien
taagtgtgataccacatcatcatgc

SEQ ID NO: 4366655 - DNA, 25 bp, Homo sapien
cacacgtaagtgtgataccacatca

SEQ ID NO: 4366656 - DNA, 25 bp, Homo sapien
tgccaacctgtaggaagaaggtttg

SEQ ID NO: 4366657 - DNA, 25 bp, Homo sapien
tcaaaagtctcatgtggagagcccc

SEQ ID NO: 4366658 - DNA, 25 bp, Homo sapien
gacatgagctttgtaatggcccaca

SEQ ID NO: 4366659 - DNA, 25 bp, Homo sapien
tgtgtgctctacatcaccggtggtg

SEQ ID NO: 4366660 - DNA, 25 bp, Homo sapien
caggtgtcccgtgaggctgctgaaa

SEQ ID NO: 4366661 - DNA, 25 bp, Homo sapien
cacttagaagaaacgtccacctcct

SEQ ID NO: 4366662 - DNA, 25 bp, Homo sapien
cagatcccttaggactcccacttag

SEQ ID NO: 4366663 - DNA, 25 bp, Homo sapien
ttaaaaatcagcaatcagatccctt

SEQ ID NO: 4366664 - DNA, 25 bp, Homo sapien
gactcccacttagaagaaacgtcca

SEQ ID NO: 4366665 - DNA, 25 bp, Homo sapien
acttgggacattgagacctagtgat

SEQ ID NO: 4366666 - DNA, 25 bp, Homo sapien
gctactgacgtacgcaggcctttca

SEQ ID NO: 4366667 - DNA, 25 bp, Homo sapien
ttctcttggttggtgtggcaactgc

SEQ ID NO: 4366668 - DNA, 25 bp, Homo sapien
tgaaatctcttgcacatattctctt

SEQ ID NO: 4366669 - DNA, 25 bp, Homo sapien
tatatccgataccattctgtgaagc

SEQ ID NO: 4366670 - DNA, 25 bp, Homo sapien
cacctagcggtttcttcctcacagt

SEQ ID NO: 4366671 - DNA, 25 bp, Homo sapien
ggttgtatggcccatgtgaccattc

SEQ ID NO: 4366672 - DNA, 25 bp, Homo sapien
tgtgaagccgccctcgtaaaagtgg

SEQ ID NO: 4366673 - DNA, 25 bp, Homo sapien
tgtctacccaaattttcagtggagg

SEQ ID NO: 4366674 - DNA, 25 bp, Homo sapien
agggctacagttccacagacaagtt

SEQ ID NO: 4366675 - DNA, 25 bp, Homo sapien
caccttctatgggaggtttttcagg

SEQ ID NO: 4366676 - DNA, 25 bp, Homo sapien
tcaggggcacctaaggaagggctac

SEQ ID NO: 4366677 - DNA, 25 bp, Homo sapien
gagctccatctagcgttgttacgaa

SEQ ID NO: 4366678 - DNA, 25 bp, Homo sapien
tctgaagggcgagtaccaaatgaaa

SEQ ID NO: 4366679 - DNA, 25 bp, Homo sapien
ccccagagtaaagacatcgcgaatt

SEQ ID NO: 4366680 - DNA, 25 bp, Homo sapien
tgttacgaaacaagaccagcggcat

SEQ ID NO: 4366681 - DNA, 25 bp, Homo sapien
tagcgcacagtacaagcctgacatc

SEQ ID NO: 4366682 - DNA, 25 bp, Homo sapien
tgtgggaatttagcgcacagtacaa

SEQ ID NO: 4366683 - DNA, 25 bp, Homo sapien
gaatttagcgcacagtacaagcctg

SEQ ID NO: 4366684 - DNA, 25 bp, Homo sapien
cagtacaagcctgacatcacctttg

SEQ ID NO: 4366685 - DNA, 25 bp, Homo sapien
cagattcccacgtggttcaggaacc

SEQ ID NO: 4366686 - DNA, 25 bp, Homo sapien
aatacccctcagattcccacgtggt

SEQ ID NO: 4366687 - DNA, 25 bp, Homo sapien
atacccctcagattcccacgtggtt

SEQ ID NO: 4366688 - DNA, 25 bp, Homo sapien
ccctcagattcccacgtggttcagg

SEQ ID NO: 4366689 - DNA, 25 bp, Homo sapien
gatggcatgcggacggtctggatgg

SEQ ID NO: 4366690 - DNA, 25 bp, Homo sapien
tggatggcatgcggacggtctggat

SEQ ID NO: 4366691 - DNA, 25 bp, Homo sapien
ggcatgcggacggtctggatggcat

SEQ ID NO: 4366692 - DNA, 25 bp, Homo sapien
cctttcattgatgcggaggtttgga

SEQ ID NO: 4366693 - DNA, 25 bp, Homo sapien
agcagaagtgttctcttgtaagtag

SEQ ID NO: 4366694 - DNA, 25 bp, Homo sapien
aagcagaagtgttctcttgtaagta

SEQ ID NO: 4366695 - DNA, 25 bp, Homo sapien
taaagcagaagtgttctcttgtaag

SEQ ID NO: 4366696 - DNA, 25 bp, Homo sapien
ttaaagcagaagtgttctcttgtaa

SEQ ID NO: 4366697 - DNA, 25 bp, Homo sapien
ggcctctcgctttctgagaagcaca

SEQ ID NO: 4366698 - DNA, 25 bp, Homo sapien
ttttgggtggcagcggcctctcgct

SEQ ID NO: 4366699 - DNA, 25 bp, Homo sapien
attttgggtggcagcggcctctcgc

SEQ ID NO: 4366700 - DNA, 25 bp, Homo sapien
tgagaagcacactgcacctcaccat

SEQ ID NO: 4366701 - DNA, 25 bp, Homo sapien
cactccgaagcgcagagactcagaa

SEQ ID NO: 4366702 - DNA, 25 bp, Homo sapien
catggccaccgtagccttgaacgag

SEQ ID NO: 4366703 - DNA, 25 bp, Homo sapien
acttccaagcaagggtaggcagctg

SEQ ID NO: 4366704 - DNA, 25 bp, Homo sapien
ttgaacgagggccaaacactccgaa

SEQ ID NO: 4366705 - DNA, 25 bp, Homo sapien
cagaactagagaggatttaggtgtc

SEQ ID NO: 4366706 - DNA, 25 bp, Homo sapien
agttctcacctctattctcattccc

SEQ ID NO: 4366707 - DNA, 25 bp, Homo sapien
gttctcacctctattctcattccct

SEQ ID NO: 4366708 - DNA, 25 bp, Homo sapien
cagtatcttcagaactagagaggat

SEQ ID NO: 4366709 - DNA, 25 bp, Homo sapien
tcagcatcactgaggtgcacccaat

SEQ ID NO: 4366710 - DNA, 25 bp, Homo sapien
tctgaatctatcacattcctccttg

SEQ ID NO: 4366711 - DNA, 25 bp, Homo sapien
gcatcactgaggtgcacccaatctg

SEQ ID NO: 4366712 - DNA, 25 bp, Homo sapien
cactgaggtgcacccaatctgcctt

SEQ ID NO: 4366713 - DNA, 25 bp, Homo sapien
tgctccccactgctcatataaaccc

SEQ ID NO: 4366714 - DNA, 25 bp, Homo sapien
tctctggcagtcttccacctgaaag

SEQ ID NO: 4366715 - DNA, 25 bp, Homo sapien
taatctgccagtcatcgcacactca

SEQ ID NO: 4366716 - DNA, 25 bp, Homo sapien
tctgccgccaaggagagtgctggca

SEQ ID NO: 4366717 - DNA, 25 bp, Homo sapien
tcctgtgggctgccaggaagaatct

SEQ ID NO: 4366718 - DNA, 25 bp, Homo sapien
ctgtaggagcagccagaccaggtca

SEQ ID NO: 4366719 - DNA, 25 bp, Homo sapien
tgtaggagcagccagaccaggtcat

SEQ ID NO: 4366720 - DNA, 25 bp, Homo sapien
tgagttctcacagcacagtaagcct

SEQ ID NO: 4366721 - DNA, 25 bp, Homo sapien
gcaaagcagcaacactcttcaccgg

SEQ ID NO: 4366722 - DNA, 25 bp, Homo sapien
gcctccatggcactataatcctaat

SEQ ID NO: 4366723 - DNA, 25 bp, Homo sapien
caagagcctgcagtttcagaaggtg

SEQ ID NO: 4366724 - DNA, 25 bp, Homo sapien
ctttgacccgtgtccccattgctac

SEQ ID NO: 4366725 - DNA, 25 bp, Homo sapien
tttgacccgtgtccccattgctacc

SEQ ID NO: 4366726 - DNA, 25 bp, Homo sapien
tgacccgtgtccccattgctaccag

SEQ ID NO: 4366727 - DNA, 25 bp, Homo sapien
ccctttgacccgtgtccccattgct

SEQ ID NO: 4366728 - DNA, 25 bp, Homo sapien
cactggtttggttacagatgtgtcg

SEQ ID NO: 4366729 - DNA, 25 bp, Homo sapien
cagccccacataacacggaagtgca

SEQ ID NO: 4366730 - DNA, 25 bp, Homo sapien
gatgtgtcgatgtcctcaacaccca

SEQ ID NO: 4366731 - DNA, 25 bp, Homo sapien
gctcccactgaggttcactggtttg

SEQ ID NO: 4366732 - DNA, 25 bp, Homo sapien
agaatctaaaatgcattggctgggc

SEQ ID NO: 4366733 - DNA, 25 bp, Homo sapien
gtgtttccctcgtctgcagtaatgg

SEQ ID NO: 4366734 - DNA, 25 bp, Homo sapien
tatgcacccaatgaatgatgactca

SEQ ID NO: 4366735 - DNA, 25 bp, Homo sapien
cacacttggcatgagcgtcagaact

SEQ ID NO: 4366736 - DNA, 25 bp, Homo sapien
cagaagcctgagaaaatagaggagc

SEQ ID NO: 4366737 - DNA, 25 bp, Homo sapien
cttgaatcttgctgtttgatcaccc

SEQ ID NO: 4366738 - DNA, 25 bp, Homo sapien
ttgctgtttgatcacccttatcagg

SEQ ID NO: 4366739 - DNA, 25 bp, Homo sapien
ctgagaaaatagaggagctctccat

SEQ ID NO: 4366740 - DNA, 25 bp, Homo sapien
gaccctccaccgagaatgcaaagaa

SEQ ID NO: 4366741 - DNA, 25 bp, Homo sapien
ttctggggctgtatttccgctggcc

SEQ ID NO: 4366742 - DNA, 25 bp, Homo sapien
cagctccacattcctaaggggagga

SEQ ID NO: 4366743 - DNA, 25 bp, Homo sapien
ggcttcttggtctggataaaaccac

SEQ ID NO: 4366744 - DNA, 25 bp, Homo sapien
tatattcatgtgcagttccgtggag

SEQ ID NO: 4366745 - DNA, 25 bp, Homo sapien
gggtgtagccacagatctggtcatt

SEQ ID NO: 4366746 - DNA, 25 bp, Homo sapien
gaaagtcttggctgtatattttaca

SEQ ID NO: 4366747 - DNA, 25 bp, Homo sapien
tctgagatagtaagcagttgatggg

SEQ ID NO: 4366748 - DNA, 25 bp, Homo sapien
tgtgagcactggagttctctctcgt

SEQ ID NO: 4366749 - DNA, 25 bp, Homo sapien
tacagtaaactttggaagacgacca

SEQ ID NO: 4366750 - DNA, 25 bp, Homo sapien
gaatgttcccctgagactttgaggc

SEQ ID NO: 4366751 - DNA, 25 bp, Homo sapien
cctcagaatgtagacttgggctggt

SEQ ID NO: 4366752 - DNA, 25 bp, Homo sapien
ggtctgaggttaaagataggattta

SEQ ID NO: 4366753 - DNA, 25 bp, Homo sapien
tgaatggtctgaggttaaagatagg

SEQ ID NO: 4366754 - DNA, 25 bp, Homo sapien
tctgaggttaaagataggatttata

SEQ ID NO: 4366755 - DNA, 25 bp, Homo sapien
ctaaacaatgaatggtctgaggtta

SEQ ID NO: 4366756 - DNA, 25 bp, Homo sapien
tcagaggtatatccagcatttgacg

SEQ ID NO: 4366757 - DNA, 25 bp, Homo sapien
tctgagcactttagaacaatcctgg

SEQ ID NO: 4366758 - DNA, 25 bp, Homo sapien
caatcctggttggacgtcctgtact

SEQ ID NO: 4366759 - DNA, 25 bp, Homo sapien
tgttaattgaaaccaccatgcccat

SEQ ID NO: 4366760 - DNA, 25 bp, Homo sapien
ccaaggcacttatgaatgacagaaa

SEQ ID NO: 4366761 - DNA, 25 bp, Homo sapien
caaggcacttatgaatgacagaaag

SEQ ID NO: 4366762 - DNA, 25 bp, Homo sapien
gccaaggcacttatgaatgacagaa

SEQ ID NO: 4366763 - DNA, 25 bp, Homo sapien
gaggcttgattctgaggcttaaatg

SEQ ID NO: 4366764 - DNA, 25 bp, Homo sapien
cagtaactcagaatgtcttgctcca

SEQ ID NO: 4366765 - DNA, 25 bp, Homo sapien
gcaaatagtcgttgctgacatgcat

SEQ ID NO: 4366766 - DNA, 25 bp, Homo sapien
agaactacttgtggctttgctttac

SEQ ID NO: 4366767 - DNA, 25 bp, Homo sapien
gattacttaacccaagccccagtga

SEQ ID NO: 4366768 - DNA, 25 bp, Homo sapien
gcctgactggttgaacactggatga

SEQ ID NO: 4366769 - DNA, 25 bp, Homo sapien
cagtgagtcattccaaacccttgaa

SEQ ID NO: 4366770 - DNA, 25 bp, Homo sapien
gcttctgttgaattactgccttgga

SEQ ID NO: 4366771 - DNA, 25 bp, Homo sapien
ctccccactgctgtataattgagaa

SEQ ID NO: 4366772 - DNA, 25 bp, Homo sapien
cttcaggtagaagagtgaactggcc

SEQ ID NO: 4366773 - DNA, 25 bp, Homo sapien
gtgaactggcccctggacttgtgct

SEQ ID NO: 4366774 - DNA, 25 bp, Homo sapien
cctttactgacctgacctgtgtttg

SEQ ID NO: 4366775 - DNA, 25 bp, Homo sapien
tggacttgtgcttcctttactgacc

SEQ ID NO: 4366776 - DNA, 25 bp, Homo sapien
tctttcctagttgaagagtcacagt

SEQ ID NO: 4366777 - DNA, 25 bp, Homo sapien
agtatctgtagagtcaataagcggg

SEQ ID NO: 4366778 - DNA, 25 bp, Homo sapien
cagaagtgtcgagttgagtaggtta

SEQ ID NO: 4366779 - DNA, 25 bp, Homo sapien
ggagcgccacttgagaacctatgga

SEQ ID NO: 4366780 - DNA, 25 bp, Homo sapien
aggaatctccactctcgctgttaaa

SEQ ID NO: 4366781 - DNA, 25 bp, Homo sapien
tctctccaagatctgctagttaact

SEQ ID NO: 4366782 - DNA, 25 bp, Homo sapien
ttggtaacagatattctcccaggaa

SEQ ID NO: 4366783 - DNA, 25 bp, Homo sapien
cgctgttaaacttcccagcaagttc

SEQ ID NO: 4366784 - DNA, 25 bp, Homo sapien
cctcccagaggctgatttttctcca

SEQ ID NO: 4366785 - DNA, 25 bp, Homo sapien
tgcctttgataatttagcccctccc

SEQ ID NO: 4366786 - DNA, 25 bp, Homo sapien
ctcccagaggctgatttttctccat

SEQ ID NO: 4366787 - DNA, 25 bp, Homo sapien
tttgataatttagcccctcccagag

SEQ ID NO: 4366788 - DNA, 25 bp, Homo sapien
tgcgccaagttaagagagtgctgac

SEQ ID NO: 4366789 - DNA, 25 bp, Homo sapien
gactcatgtcaagttgcgtgcgcca

SEQ ID NO: 4366790 - DNA, 25 bp, Homo sapien
cactggctttgggatcaggcagaac

SEQ ID NO: 4366791 - DNA, 25 bp, Homo sapien
caggaacacaagagttgacgcccaa

SEQ ID NO: 4366792 - DNA, 25 bp, Homo sapien
ctttttggaaccacaatccccagat

SEQ ID NO: 4366793 - DNA, 25 bp, Homo sapien
atccccagattcctcaatgtttggc

SEQ ID NO: 4366794 - DNA, 25 bp, Homo sapien
gcatggaagtatgtgactctcccca

SEQ ID NO: 4366795 - DNA, 25 bp, Homo sapien
agctgccctctagctcatctggctg

SEQ ID NO: 4366796 - DNA, 25 bp, Homo sapien
gagggctgcggttgtacagaatttc

SEQ ID NO: 4366797 - DNA, 25 bp, Homo sapien
gttgtacagaatttctgcaggccat

SEQ ID NO: 4366798 - DNA, 25 bp, Homo sapien
ctgctggagaagtgagagggctgcg

SEQ ID NO: 4366799 - DNA, 25 bp, Homo sapien
tgcccggtggtgtcttgctgctgct

SEQ ID NO: 4366800 - DNA, 25 bp, Homo sapien
gaatccaaatctggagcaacatgct

SEQ ID NO: 4366801 - DNA, 25 bp, Homo sapien
aaaagcatggttcctaccttgatgg

SEQ ID NO: 4366802 - DNA, 25 bp, Homo sapien
tgttactaagagcaccagagtttca

SEQ ID NO: 4366803 - DNA, 25 bp, Homo sapien
gattccttccctcagacggcatttg

SEQ ID NO: 4366804 - DNA, 25 bp, Homo sapien
tctccacatggtgggatcaggtata

SEQ ID NO: 4366805 - DNA, 25 bp, Homo sapien
tagtagaggattgattaagtatgcc

SEQ ID NO: 4366806 - DNA, 25 bp, Homo sapien
gggataatttctacactgcctaagt

SEQ ID NO: 4366807 - DNA, 25 bp, Homo sapien
cagagaactcgctggctagtgagga

SEQ ID NO: 4366808 - DNA, 25 bp, Homo sapien
ttcttttagatgaacgaactttcta

SEQ ID NO: 4366809 - DNA, 25 bp, Homo sapien
ttctaaatatatcttgttgggattg

SEQ ID NO: 4366810 - DNA, 25 bp, Homo sapien
tatcttgttgggattgtaattgaga

SEQ ID NO: 4366811 - DNA, 25 bp, Homo sapien
tgaacgaactttctattcatcttat

SEQ ID NO: 4366812 - DNA, 25 bp, Homo sapien
tatttccaggtattctaaggctttg

SEQ ID NO: 4366813 - DNA, 25 bp, Homo sapien
aatttgtatgttggagctggctcag

SEQ ID NO: 4366814 - DNA, 25 bp, Homo sapien
tgacagacatcaagttggtagcttg

SEQ ID NO: 4366815 - DNA, 25 bp, Homo sapien
caggatttttgcaagctggctgaca

SEQ ID NO: 4366816 - DNA, 25 bp, Homo sapien
tgctttctgctgtcaaggtgaaaaa

SEQ ID NO: 4366817 - DNA, 25 bp, Homo sapien
ctttctgctgtcaaggtgaaaaact

SEQ ID NO: 4366818 - DNA, 25 bp, Homo sapien
tttctgctgtcaaggtgaaaaactt

SEQ ID NO: 4366819 - DNA, 25 bp, Homo sapien
gctttctgctgtcaaggtgaaaaac

SEQ ID NO: 4366820 - DNA, 25 bp, Homo sapien
tccttactaaacgaaggagggcaga

SEQ ID NO: 4366821 - DNA, 25 bp, Homo sapien
ccttacaaggcaagagaactgagca

SEQ ID NO: 4366822 - DNA, 25 bp, Homo sapien
gaactgagcatgtgcaagactcctt

SEQ ID NO: 4366823 - DNA, 25 bp, Homo sapien
ccagagggctgaatatgtgctagaa

SEQ ID NO: 4366824 - DNA, 25 bp, Homo sapien
tgtctccagccaataatcttgtagc

SEQ ID NO: 4366825 - DNA, 25 bp, Homo sapien
taccggaaaggcttacagtccagga

SEQ ID NO: 4366826 - DNA, 25 bp, Homo sapien
gcagtaacagcacaagtcgttcgtt

SEQ ID NO: 4366827 - DNA, 25 bp, Homo sapien
caagtcgttcgttcagataccggaa

SEQ ID NO: 4366828 - DNA, 25 bp, Homo sapien
tatgcaaaggacagtagaggccagt

SEQ ID NO: 4366829 - DNA, 25 bp, Homo sapien
gattacagaggatcagaggaccaca

SEQ ID NO: 4366830 - DNA, 25 bp, Homo sapien
tgtacattaaagtcggcctgggagg

SEQ ID NO: 4366831 - DNA, 25 bp, Homo sapien
gtaaagctgtatcaggaaccctggg

SEQ ID NO: 4366832 - DNA, 25 bp, Homo sapien
cagcggcggcattttagtcggcagc

SEQ ID NO: 4366833 - DNA, 25 bp, Homo sapien
ccatcttggcccagcggagggagct

SEQ ID NO: 4366834 - DNA, 25 bp, Homo sapien
gtcacgacgccggtgcgtcacggaa

SEQ ID NO: 4366835 - DNA, 25 bp, Homo sapien
acgcgaaactgcaggaaaccggagg

SEQ ID NO: 4366836 - DNA, 25 bp, Homo sapien
gatcagcccgtgactcttaacagcg

SEQ ID NO: 4366837 - DNA, 25 bp, Homo sapien
tgcgagcgcagctcttccgaagaga

SEQ ID NO: 4366838 - DNA, 25 bp, Homo sapien
tgaattaggcatctccgactccgga

SEQ ID NO: 4366839 - DNA, 25 bp, Homo sapien
gagattttcgacgtctctcgggcca

SEQ ID NO: 4366840 - DNA, 25 bp, Homo sapien
gcaggcctgagcgagcttactgaaa

SEQ ID NO: 4366841 - DNA, 25 bp, Homo sapien
ggttagcaagtgacagtgctgccac

SEQ ID NO: 4366842 - DNA, 25 bp, Homo sapien
gttgtactccatttctacagaacag

SEQ ID NO: 4366843 - DNA, 25 bp, Homo sapien
gatggtgactaatctgttgtactcc

SEQ ID NO: 4366844 - DNA, 25 bp, Homo sapien
caagattgccaaggattagagtagg

SEQ ID NO: 4366845 - DNA, 25 bp, Homo sapien
tgcatttagataacagaaggaagtc

SEQ ID NO: 4366846 - DNA, 25 bp, Homo sapien
tagagttcaagctttaggaaaggcc

SEQ ID NO: 4366847 - DNA, 25 bp, Homo sapien
aagggtcaagccaggaccttaggca

SEQ ID NO: 4366848 - DNA, 25 bp, Homo sapien
tgtaacctttgtcgtagaagacaga

SEQ ID NO: 4366849 - DNA, 25 bp, Homo sapien
tggtggtatccatagtagctacgta

SEQ ID NO: 4366850 - DNA, 25 bp, Homo sapien
cagtatcaatgctaatggtggtatc

SEQ ID NO: 4366851 - DNA, 25 bp, Homo sapien
taaagtatgtatgcagacagcatgg

SEQ ID NO: 4366852 - DNA, 25 bp, Homo sapien
gaaaggatcaagtgtataaatcatt

SEQ ID NO: 4366853 - DNA, 25 bp, Homo sapien
gagtattatgtaactggcttccact

SEQ ID NO: 4366854 - DNA, 25 bp, Homo sapien
ttaaaaataccaatagcctgtcttc

SEQ ID NO: 4366855 - DNA, 25 bp, Homo sapien
ctgtgtccaacccaaatattcagct

SEQ ID NO: 4366856 - DNA, 25 bp, Homo sapien
tataagtctagaaactcagccaggc

SEQ ID NO: 4366857 - DNA, 25 bp, Homo sapien
taagcacttaaatgatcggtatgga

SEQ ID NO: 4366858 - DNA, 25 bp, Homo sapien
gaaatggaattctgtcttaagcact

SEQ ID NO: 4366859 - DNA, 25 bp, Homo sapien
ggattgttactgatccagccaccca

SEQ ID NO: 4366860 - DNA, 25 bp, Homo sapien
tagtttaacatcaaacagctttccg

SEQ ID NO: 4366861 - DNA, 25 bp, Homo sapien
cagctttccgttggaatattgttcc

SEQ ID NO: 4366862 - DNA, 25 bp, Homo sapien
gattaccggtgtgagaccttacagg

SEQ ID NO: 4366863 - DNA, 25 bp, Homo sapien
tctgggcttactgctctggttggga

SEQ ID NO: 4366864 - DNA, 25 bp, Homo sapien
taaaatctctttcaagcaatgatca

SEQ ID NO: 4366865 - DNA, 25 bp, Homo sapien
tagcaccaagtaggccagaaccaga

SEQ ID NO: 4366866 - DNA, 25 bp, Homo sapien
tttacttgaacgagaaaatgcactg

SEQ ID NO: 4366867 - DNA, 25 bp, Homo sapien
cagaaccagatagcaccacctttat

SEQ ID NO: 4366868 - DNA, 25 bp, Homo sapien
gaatcctggcatatttctaacacta

SEQ ID NO: 4366869 - DNA, 25 bp, Homo sapien
ttctaagagaaattgccacgattcc

SEQ ID NO: 4366870 - DNA, 25 bp, Homo sapien
tagtgcaactgtacaggtagtcacc

SEQ ID NO: 4366871 - DNA, 25 bp, Homo sapien
tggagctgagctagtgtacaataca

SEQ ID NO: 4366872 - DNA, 25 bp, Homo sapien
gtatccacaatgtatacactcatta

SEQ ID NO: 4366873 - DNA, 25 bp, Homo sapien
catagagggtttggtattattcatg

SEQ ID NO: 4366874 - DNA, 25 bp, Homo sapien
tatacccattttataatgcccatta

SEQ ID NO: 4366875 - DNA, 25 bp, Homo sapien
gctactgtaatactatgaaattgga

SEQ ID NO: 4366876 - DNA, 25 bp, Homo sapien
ccatggtatgggttcaagacctttc

SEQ ID NO: 4366877 - DNA, 25 bp, Homo sapien
aaataatggtccttcctacaatcag

SEQ ID NO: 4366878 - DNA, 25 bp, Homo sapien
cataagtattacagctaagacacca

SEQ ID NO: 4366879 - DNA, 25 bp, Homo sapien
gcacatgctatgaaatgcatcctga

SEQ ID NO: 4366880 - DNA, 25 bp, Homo sapien
tcatcctttgggggtaatttcatct

SEQ ID NO: 4366881 - DNA, 25 bp, Homo sapien
ttcatcctttgggggtaatttcatc

SEQ ID NO: 4366882 - DNA, 25 bp, Homo sapien
catacctggcatataagttgttcac

SEQ ID NO: 4366883 - DNA, 25 bp, Homo sapien
ccatagagtttgctgttgaagccaa

SEQ ID NO: 4366884 - DNA, 25 bp, Homo sapien
cagtgtcaggactatgtattcacag

SEQ ID NO: 4366885 - DNA, 25 bp, Homo sapien
tactttgaattacctaagcctaggc

SEQ ID NO: 4366886 - DNA, 25 bp, Homo sapien
tcagtgagaagagtcatggccctgc

SEQ ID NO: 4366887 - DNA, 25 bp, Homo sapien
cctcagtgagaagagtcatggccct

SEQ ID NO: 4366888 - DNA, 25 bp, Homo sapien
agtgagaagagtcatggccctgcag

SEQ ID NO: 4366889 - DNA, 25 bp, Homo sapien
acctcagtgagaagagtcatggccc

SEQ ID NO: 4366890 - DNA, 25 bp, Homo sapien
tttctttaatgtaagtcaaagccca

SEQ ID NO: 4366891 - DNA, 25 bp, Homo sapien
tggaaatcttatttttggaagtcca

SEQ ID NO: 4366892 - DNA, 25 bp, Homo sapien
tgagcaacattatatacaacccaac

SEQ ID NO: 4366893 - DNA, 25 bp, Homo sapien
cacaatgcatcctgttacaatggaa

SEQ ID NO: 4366894 - DNA, 25 bp, Homo sapien
ttcaactggcaaagggagatcaaag

SEQ ID NO: 4366895 - DNA, 25 bp, Homo sapien
catcttgagcttgaattggatgaca

SEQ ID NO: 4366896 - DNA, 25 bp, Homo sapien
tactgtgctcaacattagatgatct

SEQ ID NO: 4366897 - DNA, 25 bp, Homo sapien
caaggagattaggaaatcctaagtg

SEQ ID NO: 4366898 - DNA, 25 bp, Homo sapien
tatagactaggtagcagatttccct

SEQ ID NO: 4366899 - DNA, 25 bp, Homo sapien
catgtttgagggtatcagaagcccc

SEQ ID NO: 4366900 - DNA, 25 bp, Homo sapien
tgctggcccaaggtcagttgattca

SEQ ID NO: 4366901 - DNA, 25 bp, Homo sapien
tacatgaacctataagggagtgtgc

SEQ ID NO: 4366902 - DNA, 25 bp, Homo sapien
atgacacatgaagcatgataggaaa

SEQ ID NO: 4366903 - DNA, 25 bp, Homo sapien
gcactgtggtatggactagaaaact

SEQ ID NO: 4366904 - DNA, 25 bp, Homo sapien
ttttattgctttattcatgtggtgt

SEQ ID NO: 4366905 - DNA, 25 bp, Homo sapien
tatggactagaaaacttggaatgac

SEQ ID NO: 4366906 - DNA, 25 bp, Homo sapien
tcaaccagggtatcaaacatcagga

SEQ ID NO: 4366907 - DNA, 25 bp, Homo sapien
ttcaaccagggtatcaaacatcagg

SEQ ID NO: 4366908 - DNA, 25 bp, Homo sapien
catcctgatactttgaataatctgg

SEQ ID NO: 4366909 - DNA, 25 bp, Homo sapien
gcccatcctgatactttgaataatc

SEQ ID NO: 4366910 - DNA, 25 bp, Homo sapien
catgcccatcctgatactttgaata

SEQ ID NO: 4366911 - DNA, 25 bp, Homo sapien
tcacatgcccatcctgatactttga

SEQ ID NO: 4366912 - DNA, 25 bp, Homo sapien
tataagcatccttttaaggcctggc

SEQ ID NO: 4366913 - DNA, 25 bp, Homo sapien
aactggatcattaccaagacctgac

SEQ ID NO: 4366914 - DNA, 25 bp, Homo sapien
tgagaactacgcaggtaggactcac

SEQ ID NO: 4366915 - DNA, 25 bp, Homo sapien
taggactcactactgaccggtcacc

SEQ ID NO: 4366916 - DNA, 25 bp, Homo sapien
ctgatgggagcccccaagccactta

SEQ ID NO: 4366917 - DNA, 25 bp, Homo sapien
tgatgggagcccccaagccacttac

SEQ ID NO: 4366918 - DNA, 25 bp, Homo sapien
aatgaagagagccaataaccagggt

SEQ ID NO: 4366919 - DNA, 25 bp, Homo sapien
aaaatgaagagagccaataaccagg

SEQ ID NO: 4366920 - DNA, 25 bp, Homo sapien
ccaataaccagggtcctacagacgc

SEQ ID NO: 4366921 - DNA, 25 bp, Homo sapien
gggtcctacagacgccttctcttcg

SEQ ID NO: 4366922 - DNA, 25 bp, Homo sapien
cgaggtcttggcgacgttgccgcgc

SEQ ID NO: 4366923 - DNA, 25 bp, Homo sapien
cttggcgacgttgccgcgctgggtg

SEQ ID NO: 4366924 - DNA, 25 bp, Homo sapien
gacgttgccgcgctgggtgatgttc

SEQ ID NO: 4366925 - DNA, 25 bp, Homo sapien
cgttgccgcgctgggtgatgttctt

SEQ ID NO: 4366926 - DNA, 25 bp, Homo sapien
gcggcgccaccacctgccccggcca

SEQ ID NO: 4366927 - DNA, 25 bp, Homo sapien
gcgccaccacctgccccggccaccc

SEQ ID NO: 4366928 - DNA, 25 bp, Homo sapien
cttcgcggcgccaccacctgccccg

SEQ ID NO: 4366929 - DNA, 25 bp, Homo sapien
tcgcggcgccaccacctgccccggc

SEQ ID NO: 4366930 - DNA, 25 bp, Homo sapien
ctcactcgcctgcctcctctggagc

SEQ ID NO: 4366931 - DNA, 25 bp, Homo sapien
cgccggagcgccgaggttctcaggc

SEQ ID NO: 4366932 - DNA, 25 bp, Homo sapien
gaggctcggctcgtggtgcccgcgc

SEQ ID NO: 4366933 - DNA, 25 bp, Homo sapien
cgctgcgaggctcggctcgtggtgc

SEQ ID NO: 4366934 - DNA, 25 bp, Homo sapien
gagcgccgaggttctcaggccagac

SEQ ID NO: 4366935 - DNA, 25 bp, Homo sapien
aattcgctgtctccacgcatgagga

SEQ ID NO: 4366936 - DNA, 25 bp, Homo sapien
tggctccggaaacaccaattcgctg

SEQ ID NO: 4366937 - DNA, 25 bp, Homo sapien
gaaacgcaacgcaacaacgggaatg

SEQ ID NO: 4366938 - DNA, 25 bp, Homo sapien
tcaagcgtcgccctagatttgcgcg

SEQ ID NO: 4366939 - DNA, 25 bp, Homo sapien
tggtaacacagaggcaagctttcat

SEQ ID NO: 4366940 - DNA, 25 bp, Homo sapien
gcacagctgggatacccaacctaca

SEQ ID NO: 4366941 - DNA, 25 bp, Homo sapien
ccaacctacaactttatgatgtgaa

SEQ ID NO: 4366942 - DNA, 25 bp, Homo sapien
tgtaatagagcaaaaacttgatcct

SEQ ID NO: 4366943 - DNA, 25 bp, Homo sapien
cattaatgtttcatgcctggatgca

SEQ ID NO: 4366944 - DNA, 25 bp, Homo sapien
gatgaaactctttgtgcccgcaatg

SEQ ID NO: 4366945 - DNA, 25 bp, Homo sapien
tgcaagttggctctagagtttcagc

SEQ ID NO: 4366946 - DNA, 25 bp, Homo sapien
gatccaaataaggtactgcacattg

SEQ ID NO: 4366947 - DNA, 25 bp, Homo sapien
gaatcttgttactctggaataccag

SEQ ID NO: 4366948 - DNA, 25 bp, Homo sapien
gttcacacgtaccaaagatggcatg

SEQ ID NO: 4366949 - DNA, 25 bp, Homo sapien
tgtcaaatgaagagggatcaccact

SEQ ID NO: 4366950 - DNA, 25 bp, Homo sapien
tcctgtgtttgaggcgcactgtcac

SEQ ID NO: 4366951 - DNA, 25 bp, Homo sapien
acttacttagctaattatgacggca

SEQ ID NO: 4366952 - DNA, 25 bp, Homo sapien
taaggtaattccattgtagtagctc

SEQ ID NO: 4366953 - DNA, 25 bp, Homo sapien
tgttagtaatatgcaagaggccagg

SEQ ID NO: 4366954 - DNA, 25 bp, Homo sapien
gccatcgttttagaagtgaacttcc

SEQ ID NO: 4366955 - DNA, 25 bp, Homo sapien
taataatatccaagaatgttaccac

SEQ ID NO: 4366956 - DNA, 25 bp, Homo sapien
taatatccaagaatgttaccacttc

SEQ ID NO: 4366957 - DNA, 25 bp, Homo sapien
aataataatatccaagaatgttacc

SEQ ID NO: 4366958 - DNA, 25 bp, Homo sapien
aatatccaagaatgttaccacttca

SEQ ID NO: 4366959 - DNA, 25 bp, Homo sapien
cctagtcactataatcagcagaagt

SEQ ID NO: 4366960 - DNA, 25 bp, Homo sapien
tactgatagcgtcctaattttctca

SEQ ID NO: 4366961 - DNA, 25 bp, Homo sapien
tgaacatgtgtaagtagggtaatct

SEQ ID NO: 4366962 - DNA, 25 bp, Homo sapien
aactatttccattgaagtcagagaa

SEQ ID NO: 4366963 - DNA, 25 bp, Homo sapien
tctgacactaccagatattaaaatg

SEQ ID NO: 4366964 - DNA, 25 bp, Homo sapien
gtcatttctctcttgtcagtctaaa

SEQ ID NO: 4366965 - DNA, 25 bp, Homo sapien
gagttctgacactaccagatattaa

SEQ ID NO: 4366966 - DNA, 25 bp, Homo sapien
aactatgacctttactaagaagaat

SEQ ID NO: 4366967 - DNA, 25 bp, Homo sapien
tgtaggtgtttacaacatggactcc

SEQ ID NO: 4366968 - DNA, 25 bp, Homo sapien
caaatagtcagttatggccgggcgc

SEQ ID NO: 4366969 - DNA, 25 bp, Homo sapien
ggagtgtgccactaccaatgagttt

SEQ ID NO: 4366970 - DNA, 25 bp, Homo sapien
tgaagaaaacaagcgaggcaactgg

SEQ ID NO: 4366971 - DNA, 25 bp, Homo sapien
gatacgtgaattttttagctaagct

SEQ ID NO: 4366972 - DNA, 25 bp, Homo sapien
taaacccattggtatacacagaata

SEQ ID NO: 4366973 - DNA, 25 bp, Homo sapien
cttgacagattgaaagacaagtgtc

SEQ ID NO: 4366974 - DNA, 25 bp, Homo sapien
tatcttgcatcctatatcatgtcaa

SEQ ID NO: 4366975 - DNA, 25 bp, Homo sapien
gaaaattaagtctgttccactacca

SEQ ID NO: 4366976 - DNA, 25 bp, Homo sapien
tgcccagcttatactcaccatagtg

SEQ ID NO: 4366977 - DNA, 25 bp, Homo sapien
ttgtaagagtatcctatgtagtaac

SEQ ID NO: 4366978 - DNA, 25 bp, Homo sapien
gatggcatatactaactgttctgtt

SEQ ID NO: 4366979 - DNA, 25 bp, Homo sapien
acaaaagtatccaggcgtggtagca

SEQ ID NO: 4366980 - DNA, 25 bp, Homo sapien
tacaaaagtatccaggcgtggtagc

SEQ ID NO: 4366981 - DNA, 25 bp, Homo sapien
aatacaaaagtatccaggcgtggta

SEQ ID NO: 4366982 - DNA, 25 bp, Homo sapien
aaaatacaaaagtatccaggcgtgg

SEQ ID NO: 4366983 - DNA, 25 bp, Homo sapien
ttgtttgaacccggcagacagaggt

SEQ ID NO: 4366984 - DNA, 25 bp, Homo sapien
aaattgtttgaacccggcagacaga

SEQ ID NO: 4366985 - DNA, 25 bp, Homo sapien
gaaaattgtttgaacccggcagaca

SEQ ID NO: 4366986 - DNA, 25 bp, Homo sapien
tgcagtgagccgacatcgtgccatt

SEQ ID NO: 4366987 - DNA, 25 bp, Homo sapien
gaagttaatagactgactgtgccac

SEQ ID NO: 4366988 - DNA, 25 bp, Homo sapien
tacataactaatatatggacaggaa

SEQ ID NO: 4366989 - DNA, 25 bp, Homo sapien
tggagctccttctatatgagtctct

SEQ ID NO: 4366990 - DNA, 25 bp, Homo sapien
cctgactaatacagattagctatgt

SEQ ID NO: 4366991 - DNA, 25 bp, Homo sapien
tgtaacccctgcgtcagatcagtgg

SEQ ID NO: 4366992 - DNA, 25 bp, Homo sapien
gacctgctgactgtctgtaacccct

SEQ ID NO: 4366993 - DNA, 25 bp, Homo sapien
cagtggtaagtcataggcccagcca

SEQ ID NO: 4366994 - DNA, 25 bp, Homo sapien
tctgaatttataccccttgccaagt

SEQ ID NO: 4366995 - DNA, 25 bp, Homo sapien
ctgtattcctaaccacttgggaagc

SEQ ID NO: 4366996 - DNA, 25 bp, Homo sapien
tgcttccaaatatgcctaggaaggg

SEQ ID NO: 4366997 - DNA, 25 bp, Homo sapien
gccataacagcgcacccaaaaaatt

SEQ ID NO: 4366998 - DNA, 25 bp, Homo sapien
catagttgcctgtgcctgtattcct

SEQ ID NO: 4366999 - DNA, 25 bp, Homo sapien
tgcctttctcatgccgtcccagagt

SEQ ID NO: 4367000 - DNA, 25 bp, Homo sapien
caggacagtgaaacaggtcggctct

SEQ ID NO: 4367001 - DNA, 25 bp, Homo sapien
tccatccgccaacacttgaatcagg

SEQ ID NO: 4367002 - DNA, 25 bp, Homo sapien
ttccaagtctcaggcaggtaaatgg

SEQ ID NO: 4367003 - DNA, 25 bp, Homo sapien
gcttctcctagtggcggcgtctgcg

SEQ ID NO: 4367004 - DNA, 25 bp, Homo sapien
gcgtgcccagcaagagattaaagat

SEQ ID NO: 4367005 - DNA, 25 bp, Homo sapien
tgagtatgtgcactgggccccggcc

SEQ ID NO: 4367006 - DNA, 25 bp, Homo sapien
gattaaagatgcagtacgccacggg

SEQ ID NO: 4367007 - DNA, 25 bp, Homo sapien
tcttcgctggcctcgtagaactgtg

SEQ ID NO: 4367008 - DNA, 25 bp, Homo sapien
tggccgcatcttcgctggcctcgta

SEQ ID NO: 4367009 - DNA, 25 bp, Homo sapien
ttctcgcggccccttagcgcggtca

SEQ ID NO: 4367010 - DNA, 25 bp, Homo sapien
tggcctcgtagaactgtgccggcgc

SEQ ID NO: 4367011 - DNA, 25 bp, Homo sapien
tgtcttgtgtatccagcagatctcg

SEQ ID NO: 4367012 - DNA, 25 bp, Homo sapien
gcaatgatgcattttatacggtaag

SEQ ID NO: 4367013 - DNA, 25 bp, Homo sapien
cggcagttttcgacagtgttcttta

SEQ ID NO: 4367014 - DNA, 25 bp, Homo sapien
taacctaatcgttagaagcagggca

SEQ ID NO: 4367015 - DNA, 25 bp, Homo sapien
aacaagttgtgctttattaagtcct

SEQ ID NO: 4367016 - DNA, 25 bp, Homo sapien
cactggaatagacctaaagtggcaa

SEQ ID NO: 4367017 - DNA, 25 bp, Homo sapien
agtgaacaccactatcaaccttgag

SEQ ID NO: 4367018 - DNA, 25 bp, Homo sapien
atgagtttccaactaattattagag

SEQ ID NO: 4367019 - DNA, 25 bp, Homo sapien
atcttgaacaggtgaatcacctcca

SEQ ID NO: 4367020 - DNA, 25 bp, Homo sapien
tcttgaacaggtgaatcacctccat

SEQ ID NO: 4367021 - DNA, 25 bp, Homo sapien
agtttttatgataatcacatatgta

SEQ ID NO: 4367022 - DNA, 25 bp, Homo sapien
taagtttttatgataatcacatatg

SEQ ID NO: 4367023 - DNA, 25 bp, Homo sapien
gtttttatgataatcacatatgtaa

SEQ ID NO: 4367024 - DNA, 25 bp, Homo sapien
tgaattaagtttttatgataatcac

SEQ ID NO: 4367025 - DNA, 25 bp, Homo sapien
acagttgccaggagcccggcctggc

SEQ ID NO: 4367026 - DNA, 25 bp, Homo sapien
ctccgcaggcagcacagttgccagg

SEQ ID NO: 4367027 - DNA, 25 bp, Homo sapien
agcacagttgccaggagcccggcct

SEQ ID NO: 4367028 - DNA, 25 bp, Homo sapien
gggcccagccgctgagaccgcccct

SEQ ID NO: 4367029 - DNA, 25 bp, Homo sapien
tccgtcggcggcagttcactctgca

SEQ ID NO: 4367030 - DNA, 25 bp, Homo sapien
atttcccggacgaggcactggcgac

SEQ ID NO: 4367031 - DNA, 25 bp, Homo sapien
tgcatggcagaacaccaactgggcc

SEQ ID NO: 4367032 - DNA, 25 bp, Homo sapien
tggccgctccgtcggcggcagttca

SEQ ID NO: 4367033 - DNA, 25 bp, Homo sapien
ttcttaaattgagatctactaacat

SEQ ID NO: 4367034 - DNA, 25 bp, Homo sapien
aacaagtttgcctggttaagggcag

SEQ ID NO: 4367035 - DNA, 25 bp, Homo sapien
tctgaaagtgagttgcttagagact

SEQ ID NO: 4367036 - DNA, 25 bp, Homo sapien
taagggcagaatgggaataagaacc

SEQ ID NO: 4367037 - DNA, 25 bp, Homo sapien
ccaaatttgaaagtctgtagttcag

SEQ ID NO: 4367038 - DNA, 25 bp, Homo sapien
gtcatgccttgaccaatctaatgaa

SEQ ID NO: 4367039 - DNA, 25 bp, Homo sapien
gggaaatcctatattcagagtactc

SEQ ID NO: 4367040 - DNA, 25 bp, Homo sapien
aatgaattgattaattaactgggcc

SEQ ID NO: 4367041 - DNA, 25 bp, Homo sapien
tgcgtgtgattaccagagaactact

SEQ ID NO: 4367042 - DNA, 25 bp, Homo sapien
agtaatcgacattccactagtgcca

SEQ ID NO: 4367043 - DNA, 25 bp, Homo sapien
gattgtgatagcttcaaggtggaac

SEQ ID NO: 4367044 - DNA, 25 bp, Homo sapien
catactgtaatctccagatgctagg

SEQ ID NO: 4367045 - DNA, 25 bp, Homo sapien
aacttgagccttggatgttcctgtg

SEQ ID NO: 4367046 - DNA, 25 bp, Homo sapien
tgctgctgaactgtcaatagctctg

SEQ ID NO: 4367047 - DNA, 25 bp, Homo sapien
cagtgctgctgaactgtcaatagct

SEQ ID NO: 4367048 - DNA, 25 bp, Homo sapien
gctgaactgtcaatagctctgtgat

SEQ ID NO: 4367049 - DNA, 25 bp, Homo sapien
ctgctgaactgtcaatagctctgtg

SEQ ID NO: 4367050 - DNA, 25 bp, Homo sapien
ggtcattgtggcctccttcagtact

SEQ ID NO: 4367051 - DNA, 25 bp, Homo sapien
gaggtcattgtggcctccttcagta

SEQ ID NO: 4367052 - DNA, 25 bp, Homo sapien
cattgtggcctccttcagtacttgg

SEQ ID NO: 4367053 - DNA, 25 bp, Homo sapien
tcattgtggcctccttcagtacttg

SEQ ID NO: 4367054 - DNA, 25 bp, Homo sapien
tgtgacaaagggcaattagttttag

SEQ ID NO: 4367055 - DNA, 25 bp, Homo sapien
gacaaagggcaattagttttagaga

SEQ ID NO: 4367056 - DNA, 25 bp, Homo sapien
tattgtcttcattatatcttgcttt

SEQ ID NO: 4367057 - DNA, 25 bp, Homo sapien
gggcaattagttttagagaaagtga

SEQ ID NO: 4367058 - DNA, 25 bp, Homo sapien
tgagggaaaattcacacatccttca

SEQ ID NO: 4367059 - DNA, 25 bp, Homo sapien
gcgacggatctttattaaactggcc

SEQ ID NO: 4367060 - DNA, 25 bp, Homo sapien
tgaaacaggcgacggatctttatta

SEQ ID NO: 4367061 - DNA, 25 bp, Homo sapien
ctttattaaactggccagcagaaga

SEQ ID NO: 4367062 - DNA, 25 bp, Homo sapien
ggatctttattaaactggccagcag

SEQ ID NO: 4367063 - DNA, 25 bp, Homo sapien
aggattggaatctcctcagggtttg

SEQ ID NO: 4367064 - DNA, 25 bp, Homo sapien
gattggaatctcctcagggtttggt

SEQ ID NO: 4367065 - DNA, 25 bp, Homo sapien
ttggaatctcctcagggtttggtag

SEQ ID NO: 4367066 - DNA, 25 bp, Homo sapien
gtatcggaggattggaatctcctca

SEQ ID NO: 4367067 - DNA, 25 bp, Homo sapien
aggaaactcagagtccagaagtgga

SEQ ID NO: 4367068 - DNA, 25 bp, Homo sapien
gagaaagagaaggaaactcagagtc

SEQ ID NO: 4367069 - DNA, 25 bp, Homo sapien
aaggaaactcagagtccagaagtgg

SEQ ID NO: 4367070 - DNA, 25 bp, Homo sapien
aaagagaaggaaactcagagtccag

SEQ ID NO: 4367071 - DNA, 25 bp, Homo sapien
gcaggggcggtggtgttattctact

SEQ ID NO: 4367072 - DNA, 25 bp, Homo sapien
gtccactctaattcatccgtaagca

SEQ ID NO: 4367073 - DNA, 25 bp, Homo sapien
tatgtggggttggattccctgatga

SEQ ID NO: 4367074 - DNA, 25 bp, Homo sapien
cactctaattcatccgtaagcaggg

SEQ ID NO: 4367075 - DNA, 25 bp, Homo sapien
ctggcagcgggcactagcgctagcc

SEQ ID NO: 4367076 - DNA, 25 bp, Homo sapien
tttttgtgttgagcactgatgccca

SEQ ID NO: 4367077 - DNA, 25 bp, Homo sapien
cagcgggcactagcgctagccttct

SEQ ID NO: 4367078 - DNA, 25 bp, Homo sapien
ttttgtgttgagcactgatgcccac

SEQ ID NO: 4367079 - DNA, 25 bp, Homo sapien
gagggaacagccacatgctaaatgg

SEQ ID NO: 4367080 - DNA, 25 bp, Homo sapien
aacattttaggttgaggcgacagca

SEQ ID NO: 4367081 - DNA, 25 bp, Homo sapien
tattaaaacgtgtggcaaatgacca

SEQ ID NO: 4367082 - DNA, 25 bp, Homo sapien
aaagaggtccagattgtgtacagca

SEQ ID NO: 4367083 - DNA, 25 bp, Homo sapien
tgttggcccattgctagaaaagtta

SEQ ID NO: 4367084 - DNA, 25 bp, Homo sapien
tgcggactccaatataacggttcaa

SEQ ID NO: 4367085 - DNA, 25 bp, Homo sapien
tccaagcccttattctgttgccggc

SEQ ID NO: 4367086 - DNA, 25 bp, Homo sapien
tgtcttgttctaagatgcggactcc

SEQ ID NO: 4367087 - DNA, 25 bp, Homo sapien
aatggactcactacacaagaggcag

SEQ ID NO: 4367088 - DNA, 25 bp, Homo sapien
ccatctcagggtgcctcggagttca

SEQ ID NO: 4367089 - DNA, 25 bp, Homo sapien
taatgaattgactactgctgtggac

SEQ ID NO: 4367090 - DNA, 25 bp, Homo sapien
tgtgccctcaaggaatgtctgtcaa

SEQ ID NO: 4367091 - DNA, 25 bp, Homo sapien
ccatttaccttgttgggcactcgaa

SEQ ID NO: 4367092 - DNA, 25 bp, Homo sapien
tccagcactgctaggatagcagggt

SEQ ID NO: 4367093 - DNA, 25 bp, Homo sapien
gcactcgaatgatggctaggtttcc

SEQ ID NO: 4367094 - DNA, 25 bp, Homo sapien
cattgggatgatagcaggaacttct

SEQ ID NO: 4367095 - DNA, 25 bp, Homo sapien
tcagataaggtcatataaattgttc

SEQ ID NO: 4367096 - DNA, 25 bp, Homo sapien
gagatcagataaggtcatataaatt

SEQ ID NO: 4367097 - DNA, 25 bp, Homo sapien
gatcagataaggtcatataaattgt

SEQ ID NO: 4367098 - DNA, 25 bp, Homo sapien
ctgagatcagataaggtcatataaa

SEQ ID NO: 4367099 - DNA, 25 bp, Homo sapien
gggaggctctcagttcatgaaaagc

SEQ ID NO: 4367100 - DNA, 25 bp, Homo sapien
ggaggctctcagttcatgaaaagcc

SEQ ID NO: 4367101 - DNA, 25 bp, Homo sapien
ctttcttctacagggggaggctctc

SEQ ID NO: 4367102 - DNA, 25 bp, Homo sapien
caaaaatgactttcttctacagggg

SEQ ID NO: 4367103 - DNA, 25 bp, Homo sapien
ttgtcccatctggaaatgaagtcag

SEQ ID NO: 4367104 - DNA, 25 bp, Homo sapien
gttgtcccatctggaaatgaagtca

SEQ ID NO: 4367105 - DNA, 25 bp, Homo sapien
aaatgaagtcagaaacttgctccca

SEQ ID NO: 4367106 - DNA, 25 bp, Homo sapien
cacatgctatccgagaatcacaaca

SEQ ID NO: 4367107 - DNA, 25 bp, Homo sapien
tgtttttctggaatatccacagaaa

SEQ ID NO: 4367108 - DNA, 25 bp, Homo sapien
tccacagaaagttgataagaaattg

SEQ ID NO: 4367109 - DNA, 25 bp, Homo sapien
ttccacatgctatccgagaatcaca

SEQ ID NO: 4367110 - DNA, 25 bp, Homo sapien
tattgcaaaatgtctggccattcgt

SEQ ID NO: 4367111 - DNA, 25 bp, Homo sapien
tgcaaaatgtctggccattcgttgc

SEQ ID NO: 4367112 - DNA, 25 bp, Homo sapien
gtctggccattcgttgctcctgttt

SEQ ID NO: 4367113 - DNA, 25 bp, Homo sapien
aaaatgtctggccattcgttgctcc

SEQ ID NO: 4367114 - DNA, 25 bp, Homo sapien
tttcttttgccttgagtctgtcgac

SEQ ID NO: 4367115 - DNA, 25 bp, Homo sapien
tgccttgagtctgtcgacctcacta

SEQ ID NO: 4367116 - DNA, 25 bp, Homo sapien
ttttgccttgagtctgtcgacctca

SEQ ID NO: 4367117 - DNA, 25 bp, Homo sapien
cttgagtctgtcgacctcactacca

SEQ ID NO: 4367118 - DNA, 25 bp, Homo sapien
gagggtcaatagcaattaattcagc

SEQ ID NO: 4367119 - DNA, 25 bp, Homo sapien
tatttgctcctcatagatatagtca

SEQ ID NO: 4367120 - DNA, 25 bp, Homo sapien
tagatatagtcaatcagattttgga

SEQ ID NO: 4367121 - DNA, 25 bp, Homo sapien
tttggaaagcaatacaacaggaggc

SEQ ID NO: 4367122 - DNA, 25 bp, Homo sapien
aatgctcttagatcgctgccacaaa

SEQ ID NO: 4367123 - DNA, 25 bp, Homo sapien
gctcttagatcgctgccacaaaatt

SEQ ID NO: 4367124 - DNA, 25 bp, Homo sapien
aaaaaatgctcttagatcgctgcca

SEQ ID NO: 4367125 - DNA, 25 bp, Homo sapien
tcttagatcgctgccacaaaattca

SEQ ID NO: 4367126 - DNA, 25 bp, Homo sapien
aagaagtccccacaaagaggcccag

SEQ ID NO: 4367127 - DNA, 25 bp, Homo sapien
cagagagagaggaaaaaaattaaag

SEQ ID NO: 4367128 - DNA, 25 bp, Homo sapien
agtccccacaaagaggcccagaggc

SEQ ID NO: 4367129 - DNA, 25 bp, Homo sapien
tcagagagagaggaaaaaaattaaa

SEQ ID NO: 4367130 - DNA, 25 bp, Homo sapien
tagagaaggctcgaacagtgttatg

SEQ ID NO: 4367131 - DNA, 25 bp, Homo sapien
taatgcctaaattggagctctcttc

SEQ ID NO: 4367132 - DNA, 25 bp, Homo sapien
gtccgatgctgggtaacgttcttag

SEQ ID NO: 4367133 - DNA, 25 bp, Homo sapien
ccagaatggatggtggtccgatgct

SEQ ID NO: 4367134 - DNA, 25 bp, Homo sapien
aaaatatttagtttcgactcttctg

SEQ ID NO: 4367135 - DNA, 25 bp, Homo sapien
aaatatttagtttcgactcttctgg

SEQ ID NO: 4367136 - DNA, 25 bp, Homo sapien
tatttagtttcgactcttctggatt

SEQ ID NO: 4367137 - DNA, 25 bp, Homo sapien
aatatttagtttcgactcttctgga

SEQ ID NO: 4367138 - DNA, 25 bp, Homo sapien
gctttctctttagaggctttcttcc

SEQ ID NO: 4367139 - DNA, 25 bp, Homo sapien
cttaacttagatgccagacattcag

SEQ ID NO: 4367140 - DNA, 25 bp, Homo sapien
ctcttaacttagatgccagacattc

SEQ ID NO: 4367141 - DNA, 25 bp, Homo sapien
tcaggttcagctttctctttagagg

SEQ ID NO: 4367142 - DNA, 25 bp, Homo sapien
tcttctgtttgtactgatactggaa

SEQ ID NO: 4367143 - DNA, 25 bp, Homo sapien
tatcagacaaatcttggagccaact

SEQ ID NO: 4367144 - DNA, 25 bp, Homo sapien
aatcttggagccaactttcttctgt

SEQ ID NO: 4367145 - DNA, 25 bp, Homo sapien
cctggagacaaattgcgatgaatat

SEQ ID NO: 4367146 - DNA, 25 bp, Homo sapien
gggatcatagcagactctcctatgc

SEQ ID NO: 4367147 - DNA, 25 bp, Homo sapien
agggatcatagcagactctcctatg

SEQ ID NO: 4367148 - DNA, 25 bp, Homo sapien
aaattcacctgaggagtttctccag

SEQ ID NO: 4367149 - DNA, 25 bp, Homo sapien
ttattaacaagtcaagtacaagggc

SEQ ID NO: 4367150 - DNA, 25 bp, Homo sapien
ggtgagccaacccagaaaaactgta

SEQ ID NO: 4367151 - DNA, 25 bp, Homo sapien
gaaatttgactatccgtgagaccta

SEQ ID NO: 4367152 - DNA, 25 bp, Homo sapien
gtctttcctaaatgtctgaaatatt

SEQ ID NO: 4367153 - DNA, 25 bp, Homo sapien
taaatgtctgaaatattttagggaa

SEQ ID NO: 4367154 - DNA, 25 bp, Homo sapien
ttcctaaatgtctgaaatattttag

SEQ ID NO: 4367155 - DNA, 25 bp, Homo sapien
cctaaatgtctgaaatattttaggg

SEQ ID NO: 4367156 - DNA, 25 bp, Homo sapien
accaggtgccccctggagacgagaa

SEQ ID NO: 4367157 - DNA, 25 bp, Homo sapien
tggagacgagaaaccctcgaggaag

SEQ ID NO: 4367158 - DNA, 25 bp, Homo sapien
acgacgcgcaggtcgacgaaggcac

SEQ ID NO: 4367159 - DNA, 25 bp, Homo sapien
ttagaaatcaggcacgacgcgcagg

SEQ ID NO: 4367160 - DNA, 25 bp, Homo sapien
ggcttgcgctcggcgtttcagtgct

SEQ ID NO: 4367161 - DNA, 25 bp, Homo sapien
tgcgctcggcgtttcagtgctggtc

SEQ ID NO: 4367162 - DNA, 25 bp, Homo sapien
cgtttcagtgctggtcgcgctctgg

SEQ ID NO: 4367163 - DNA, 25 bp, Homo sapien
tcggcgtttcagtgctggtcgcgct

SEQ ID NO: 4367164 - DNA, 25 bp, Homo sapien
gcacgtctgggaagtcgtcgtcgta

SEQ ID NO: 4367165 - DNA, 25 bp, Homo sapien
gtcgtcgtagtcaccgatgtccgtg

SEQ ID NO: 4367166 - DNA, 25 bp, Homo sapien
ctagggctgacgatgctggctaagc

SEQ ID NO: 4367167 - DNA, 25 bp, Homo sapien
gaccttccagaggtactcttcgctg

SEQ ID NO: 4367168 - DNA, 25 bp, Homo sapien
actcctcctccaccacctcctcctc

SEQ ID NO: 4367169 - DNA, 25 bp, Homo sapien
tcttcccccaccaactcctcctcca

SEQ ID NO: 4367170 - DNA, 25 bp, Homo sapien
ccgggtctccgaagccgctaggcga

SEQ ID NO: 4367171 - DNA, 25 bp, Homo sapien
cccgggtctccgaagccgctaggcg

SEQ ID NO: 4367172 - DNA, 25 bp, Homo sapien
tctccgaagccgctaggcgagcgca

SEQ ID NO: 4367173 - DNA, 25 bp, Homo sapien
ccgaagccgctaggcgagcgcaagt

SEQ ID NO: 4367174 - DNA, 25 bp, Homo sapien
agccagctctttggccgcggccccg

SEQ ID NO: 4367175 - DNA, 25 bp, Homo sapien
cgggaggcgggattacagccagctc

SEQ ID NO: 4367176 - DNA, 25 bp, Homo sapien
gaggcgggattacagccagctcttt

SEQ ID NO: 4367177 - DNA, 25 bp, Homo sapien
ccagctctttggccgcggccccggt

SEQ ID NO: 4367178 - DNA, 25 bp, Homo sapien
acagagtaggaggtgttcttccttg

SEQ ID NO: 4367179 - DNA, 25 bp, Homo sapien
gctcttctatccatttctggtagta

SEQ ID NO: 4367180 - DNA, 25 bp, Homo sapien
cactgcaatggtaggttctcacaga

SEQ ID NO: 4367181 - DNA, 25 bp, Homo sapien
gatgcagtctttgttctgtcagcca

SEQ ID NO: 4367182 - DNA, 25 bp, Homo sapien
gatgtgacattgaagcactgcacat

SEQ ID NO: 4367183 - DNA, 25 bp, Homo sapien
ctgtagcccgttaaccactctcttc

SEQ ID NO: 4367184 - DNA, 25 bp, Homo sapien
gttgctctgtagcccgttaaccact

SEQ ID NO: 4367185 - DNA, 25 bp, Homo sapien
tctgtagcccgttaaccactctctt

SEQ ID NO: 4367186 - DNA, 25 bp, Homo sapien
caacttcagccactgctgtagcaac

SEQ ID NO: 4367187 - DNA, 25 bp, Homo sapien
ggatgctgcacatcctgttggccca

SEQ ID NO: 4367188 - DNA, 25 bp, Homo sapien
ctttggctgcctgacgtttcctgga

SEQ ID NO: 4367189 - DNA, 25 bp, Homo sapien
cttcagccactgctgtagcaaccag

SEQ ID NO: 4367190 - DNA, 25 bp, Homo sapien
ggaatgtgctatagaggagtctgtc

SEQ ID NO: 4367191 - DNA, 25 bp, Homo sapien
ttaggaatgtgctatagaggagtct

SEQ ID NO: 4367192 - DNA, 25 bp, Homo sapien
atgtgctatagaggagtctgtcaag

SEQ ID NO: 4367193 - DNA, 25 bp, Homo sapien
gaatgtgctatagaggagtctgtca

SEQ ID NO: 4367194 - DNA, 25 bp, Homo sapien
gagaggtcagcgaacgggccctcac

SEQ ID NO: 4367195 - DNA, 25 bp, Homo sapien
ctgggtgcctgctacactccgagag

SEQ ID NO: 4367196 - DNA, 25 bp, Homo sapien
tacactccgagaggtcagcgaacgg

SEQ ID NO: 4367197 - DNA, 25 bp, Homo sapien
tgcctgctacactccgagaggtcag

SEQ ID NO: 4367198 - DNA, 25 bp, Homo sapien
gcttcttttgcgttgatggcctggt

SEQ ID NO: 4367199 - DNA, 25 bp, Homo sapien
taggtggccctctcattgtcgccat

SEQ ID NO: 4367200 - DNA, 25 bp, Homo sapien
ttttgcgttgatggcctggtctgta

SEQ ID NO: 4367201 - DNA, 25 bp, Homo sapien
gtctgtatttctgcactaggtggcc

SEQ ID NO: 4367202 - DNA, 25 bp, Homo sapien
catatgttccccttgtggagtcacc

SEQ ID NO: 4367203 - DNA, 25 bp, Homo sapien
tatggcccttatcttgaaaccaggc

SEQ ID NO: 4367204 - DNA, 25 bp, Homo sapien
ttttagacatgaacacgccgctgtg

SEQ ID NO: 4367205 - DNA, 25 bp, Homo sapien
tgcaagttggtatgtgccggctcct

SEQ ID NO: 4367206 - DNA, 25 bp, Homo sapien
tgtgtgggtgtcaggaacgcgggaa

SEQ ID NO: 4367207 - DNA, 25 bp, Homo sapien
tgggtgtcaggaacgcgggaacaaa

SEQ ID NO: 4367208 - DNA, 25 bp, Homo sapien
cgcgggaacaaaggaagtgtgagag

SEQ ID NO: 4367209 - DNA, 25 bp, Homo sapien
caggaacgcgggaacaaaggaagtg

SEQ ID NO: 4367210 - DNA, 25 bp, Homo sapien
cgtccttgtcttaacttgctttgca

SEQ ID NO: 4367211 - DNA, 25 bp, Homo sapien
tttgaactccatagcaatttgtacg

SEQ ID NO: 4367212 - DNA, 25 bp, Homo sapien
tgctttgcaaacatagttgatgtag

SEQ ID NO: 4367213 - DNA, 25 bp, Homo sapien
atgcacgcgctgctttctcccggaa

SEQ ID NO: 4367214 - DNA, 25 bp, Homo sapien
acacagctttaaatagcaagcatat

SEQ ID NO: 4367215 - DNA, 25 bp, Homo sapien
taaaaaactagtgaatgtggcagaa

SEQ ID NO: 4367216 - DNA, 25 bp, Homo sapien
cacagctttaaatagcaagcatatg

SEQ ID NO: 4367217 - DNA, 25 bp, Homo sapien
aactagtgaatgtggcagaaaaaca

SEQ ID NO: 4367218 - DNA, 25 bp, Homo sapien
caaaacataggtgagtggccaaatc

SEQ ID NO: 4367219 - DNA, 25 bp, Homo sapien
gactgttaaattggcaggctcccta

SEQ ID NO: 4367220 - DNA, 25 bp, Homo sapien
taatgaactttgttgggtcgaagcc

SEQ ID NO: 4367221 - DNA, 25 bp, Homo sapien
aaacagtatcggcagagggcaacct

SEQ ID NO: 4367222 - DNA, 25 bp, Homo sapien
tttattaaacatagagcactatgcc

SEQ ID NO: 4367223 - DNA, 25 bp, Homo sapien
tattaaacatagagcactatgccca

SEQ ID NO: 4367224 - DNA, 25 bp, Homo sapien
taaacatagagcactatgcccaaat

SEQ ID NO: 4367225 - DNA, 25 bp, Homo sapien
aacctttattaaacatagagcacta

SEQ ID NO: 4367226 - DNA, 25 bp, Homo sapien
caaagttctcggcttgcttgcgggt

SEQ ID NO: 4367227 - DNA, 25 bp, Homo sapien
gcccctggcaagttaatgtctgtag

SEQ ID NO: 4367228 - DNA, 25 bp, Homo sapien
gcagtcgctgttcatgatggccgca

SEQ ID NO: 4367229 - DNA, 25 bp, Homo sapien
tgtgtcgaaaacaaggcagtcgctg

SEQ ID NO: 4367230 - DNA, 25 bp, Homo sapien
gataaatcatacctgccgtggcaaa

SEQ ID NO: 4367231 - DNA, 25 bp, Homo sapien
tggagatcagcccacaagtagacac

SEQ ID NO: 4367232 - DNA, 25 bp, Homo sapien
cactgccttaatagggtaggagaac

SEQ ID NO: 4367233 - DNA, 25 bp, Homo sapien
tagacccctggagcacagaatggca

SEQ ID NO: 4367234 - DNA, 25 bp, Homo sapien
tcaagaatgacaaaacctggcttcc

SEQ ID NO: 4367235 - DNA, 25 bp, Homo sapien
agcaagcaggtccagtaggtcactg

SEQ ID NO: 4367236 - DNA, 25 bp, Homo sapien
cactaccagggcaactcaggaatgc

SEQ ID NO: 4367237 - DNA, 25 bp, Homo sapien
gaacatgatcgctagcaaagcacgg

SEQ ID NO: 4367238 - DNA, 25 bp, Homo sapien
gagtccattctacccgttttattca

SEQ ID NO: 4367239 - DNA, 25 bp, Homo sapien
tcactagaagctggatgctcccaga

SEQ ID NO: 4367240 - DNA, 25 bp, Homo sapien
tagaagctggatgctcccagagtgt

SEQ ID NO: 4367241 - DNA, 25 bp, Homo sapien
tacccgttttattcactagaagctg

SEQ ID NO: 4367242 - DNA, 25 bp, Homo sapien
tcccaggctgccccgccagggttct

SEQ ID NO: 4367243 - DNA, 25 bp, Homo sapien
ccaggctgccccgccagggttcttt

SEQ ID NO: 4367244 - DNA, 25 bp, Homo sapien
caggctgccccgccagggttctttc

SEQ ID NO: 4367245 - DNA, 25 bp, Homo sapien
aggctgccccgccagggttctttca

SEQ ID NO: 4367246 - DNA, 25 bp, Homo sapien
tccctgaggaataacgcagcagcat

SEQ ID NO: 4367247 - DNA, 25 bp, Homo sapien
tagggcttgccccacaaaatgtgaa

SEQ ID NO: 4367248 - DNA, 25 bp, Homo sapien
aatcagtaaccagccattaggccct

SEQ ID NO: 4367249 - DNA, 25 bp, Homo sapien
tctctgggatctggcaagaaagtcc

SEQ ID NO: 4367250 - DNA, 25 bp, Homo sapien
tggagcctaccaaatcacctatgag

SEQ ID NO: 4367251 - DNA, 25 bp, Homo sapien
cctatgagtgggtctataaaactgt

SEQ ID NO: 4367252 - DNA, 25 bp, Homo sapien
tagagtagctgtgattggaactcaa

SEQ ID NO: 4367253 - DNA, 25 bp, Homo sapien
tggaactcaagtagccagtgtcctg

SEQ ID NO: 4367254 - DNA, 25 bp, Homo sapien
gaagacactattactcagcactaga

SEQ ID NO: 4367255 - DNA, 25 bp, Homo sapien
caaacagtggtgagagtaaggaaac

SEQ ID NO: 4367256 - DNA, 25 bp, Homo sapien
tgcctaagagaaagtcaacaaacca

SEQ ID NO: 4367257 - DNA, 25 bp, Homo sapien
gagatatcatcaaccaatagtgcag

SEQ ID NO: 4367258 - DNA, 25 bp, Homo sapien
tgagaacaccctgctatcaagggag

SEQ ID NO: 4367259 - DNA, 25 bp, Homo sapien
gagttagcaggtaaccacacattgt

SEQ ID NO: 4367260 - DNA, 25 bp, Homo sapien
catctgtccatagccagagttagca

SEQ ID NO: 4367261 - DNA, 25 bp, Homo sapien
tttagccttacagagactcccaggg

SEQ ID NO: 4367262 - DNA, 25 bp, Homo sapien
ggccatgagtgcatcaaatacttct

SEQ ID NO: 4367263 - DNA, 25 bp, Homo sapien
tctgggcacaggatgtcaaaagttc

SEQ ID NO: 4367264 - DNA, 25 bp, Homo sapien
tcagccagaggtgagtaaaggctgc

SEQ ID NO: 4367265 - DNA, 25 bp, Homo sapien
gctggagtggattagcattgctcac

SEQ ID NO: 4367266 - DNA, 25 bp, Homo sapien
tttttaatgagactgagtttcactc

SEQ ID NO: 4367267 - DNA, 25 bp, Homo sapien
cactgcgcctggccctaatttttgt

SEQ ID NO: 4367268 - DNA, 25 bp, Homo sapien
tttttttaatgagactgagtttcac

SEQ ID NO: 4367269 - DNA, 25 bp, Homo sapien
tttaatgagactgagtttcactctt

SEQ ID NO: 4367270 - DNA, 25 bp, Homo sapien
ggcggcattggttacacaccaggtg

SEQ ID NO: 4367271 - DNA, 25 bp, Homo sapien
acgtcgggcagcagctcaacttctg

SEQ ID NO: 4367272 - DNA, 25 bp, Homo sapien
ccaggttcctgatgctgggcgtcag

SEQ ID NO: 4367273 - DNA, 25 bp, Homo sapien
tagccaggttcctgatgctgggcgt

SEQ ID NO: 4367274 - DNA, 25 bp, Homo sapien
agcagaccggacactcgaagagcga

SEQ ID NO: 4367275 - DNA, 25 bp, Homo sapien
ggacactcgaagagcgaggtcagct

SEQ ID NO: 4367276 - DNA, 25 bp, Homo sapien
gaataggaggcaggacatagtcaaa

SEQ ID NO: 4367277 - DNA, 25 bp, Homo sapien
taggaggcaggacatagtcaaagca

SEQ ID NO: 4367278 - DNA, 25 bp, Homo sapien
gggcgcagccggggacggagtgtgc

SEQ ID NO: 4367279 - DNA, 25 bp, Homo sapien
gggcccgagatcaccgccgccgcgg

SEQ ID NO: 4367280 - DNA, 25 bp, Homo sapien
gggcccgcagccgagatggtggcgg

SEQ ID NO: 4367281 - DNA, 25 bp, Homo sapien
cggcgggcaccgcggacgagccggg

SEQ ID NO: 4367282 - DNA, 25 bp, Homo sapien
ggccggtggaggacgggcggctcat

SEQ ID NO: 4367283 - DNA, 25 bp, Homo sapien
gggccggtggaggacgggcggctca

SEQ ID NO: 4367284 - DNA, 25 bp, Homo sapien
cgctggggccggtggaggacgggcg

SEQ ID NO: 4367285 - DNA, 25 bp, Homo sapien
ttagcgctggggccggtggaggacg

SEQ ID NO: 4367286 - DNA, 25 bp, Homo sapien
aaccatggaactgcgggcgcctgcc

SEQ ID NO: 4367287 - DNA, 25 bp, Homo sapien
cgcgctccgaaccaaccatggaact

SEQ ID NO: 4367288 - DNA, 25 bp, Homo sapien
cgaaccaaccatggaactgcgggcg

SEQ ID NO: 4367289 - DNA, 25 bp, Homo sapien
gggtcaaggcggtgcgcgccccgcg

SEQ ID NO: 4367290 - DNA, 25 bp, Homo sapien
tggaccgcgctgatgcactccgcag

SEQ ID NO: 4367291 - DNA, 25 bp, Homo sapien
ccccgaaccccagcggtgcgcagag

SEQ ID NO: 4367292 - DNA, 25 bp, Homo sapien
ctccgcgtcggaccccgcgcggtgc

SEQ ID NO: 4367293 - DNA, 25 bp, Homo sapien
ccgaggcaacgccacggcgcccagc

SEQ ID NO: 4367294 - DNA, 25 bp, Homo sapien
gacgtgacgcctggacacgtgtgcg

SEQ ID NO: 4367295 - DNA, 25 bp, Homo sapien
ggcgcgcgcggacgtgacgcctgga

SEQ ID NO: 4367296 - DNA, 25 bp, Homo sapien
gcctggacacgtgtgcggccgccca

SEQ ID NO: 4367297 - DNA, 25 bp, Homo sapien
ttctggaacagccgctgacgcaagc

SEQ ID NO: 4367298 - DNA, 25 bp, Homo sapien
agcgccggcgcttcctgctcgggct

SEQ ID NO: 4367299 - DNA, 25 bp, Homo sapien
agggggccgcctagcgccggcgctt

SEQ ID NO: 4367300 - DNA, 25 bp, Homo sapien
gcgggccgggcctgcgccagtgagc

SEQ ID NO: 4367301 - DNA, 25 bp, Homo sapien
cgggccgggcctgcgccagtgagca

SEQ ID NO: 4367302 - DNA, 25 bp, Homo sapien
gggtgcctggctgacgcgtccctca

SEQ ID NO: 4367303 - DNA, 25 bp, Homo sapien
cagctcaaacgagaaaggcaacttc

SEQ ID NO: 4367304 - DNA, 25 bp, Homo sapien
ggaagcgtcgccgaagtcctctggc

SEQ ID NO: 4367305 - DNA, 25 bp, Homo sapien
gctactctcggggaagcgtcgccga

SEQ ID NO: 4367306 - DNA, 25 bp, Homo sapien
gaaatatggcgtaagagcccagaag

SEQ ID NO: 4367307 - DNA, 25 bp, Homo sapien
cctcgcccatcataagcactgttta

SEQ ID NO: 4367308 - DNA, 25 bp, Homo sapien
gggcttctgtagaaagaatacatgc

SEQ ID NO: 4367309 - DNA, 25 bp, Homo sapien
taataggtgtattcaatcgttcagt

SEQ ID NO: 4367310 - DNA, 25 bp, Homo sapien
tgacacgagctttaagtgttccagc

SEQ ID NO: 4367311 - DNA, 25 bp, Homo sapien
gttccagctagataggccctggtca

SEQ ID NO: 4367312 - DNA, 25 bp, Homo sapien
ccttgccccattgacacgagcttta

SEQ ID NO: 4367313 - DNA, 25 bp, Homo sapien
ttaagtgttccagctagataggccc

SEQ ID NO: 4367314 - DNA, 25 bp, Homo sapien
gtaacagtacatggtacccgtacat

SEQ ID NO: 4367315 - DNA, 25 bp, Homo sapien
atgtaacagtacatggtacccgtac

SEQ ID NO: 4367316 - DNA, 25 bp, Homo sapien
tgtaacagtacatggtacccgtaca

SEQ ID NO: 4367317 - DNA, 25 bp, Homo sapien
aatgtaacagtacatggtacccgta

SEQ ID NO: 4367318 - DNA, 25 bp, Homo sapien
ggcgccctagcaggccgctgtcggg

SEQ ID NO: 4367319 - DNA, 25 bp, Homo sapien
ggtccctgcgcatcgagttgggccc

SEQ ID NO: 4367320 - DNA, 25 bp, Homo sapien
tcagcagcggcccttgaggtccctg

SEQ ID NO: 4367321 - DNA, 25 bp, Homo sapien
agcgtgagcttggcgctgccccgct

SEQ ID NO: 4367322 - DNA, 25 bp, Homo sapien
atcggcgtcggcaagcgcctgtgca

SEQ ID NO: 4367323 - DNA, 25 bp, Homo sapien
gccatcggcgtcggcaagcgcctgt

SEQ ID NO: 4367324 - DNA, 25 bp, Homo sapien
caggagacgcagctccgagggcgcc

SEQ ID NO: 4367325 - DNA, 25 bp, Homo sapien
gccgccatcggcgtcggcaagcgcc

SEQ ID NO: 4367326 - DNA, 25 bp, Homo sapien
agcaccagctctccagagttcagag

SEQ ID NO: 4367327 - DNA, 25 bp, Homo sapien
acggcgtcgtggctcaggttgccca

SEQ ID NO: 4367328 - DNA, 25 bp, Homo sapien
tgtcaggcatccgttgcccaggagg

SEQ ID NO: 4367329 - DNA, 25 bp, Homo sapien
ccttgcagtggttgttgaagacggc

SEQ ID NO: 4367330 - DNA, 25 bp, Homo sapien
gtgtagtacgagcagaaccgatccc

SEQ ID NO: 4367331 - DNA, 25 bp, Homo sapien
ccccgacccttgtgggtggtcgctg

SEQ ID NO: 4367332 - DNA, 25 bp, Homo sapien
ctttcttagccatgagcgtggcaac

SEQ ID NO: 4367333 - DNA, 25 bp, Homo sapien
ttcttagccatgagcgtggcaactc

SEQ ID NO: 4367334 - DNA, 25 bp, Homo sapien
caagcctatagtctgatgggcaagg

SEQ ID NO: 4367335 - DNA, 25 bp, Homo sapien
taatcagtggatccccattgctgag

SEQ ID NO: 4367336 - DNA, 25 bp, Homo sapien
caatggtgggatagacatggcttcc

SEQ ID NO: 4367337 - DNA, 25 bp, Homo sapien
agattgatatacagagcagaaccca

SEQ ID NO: 4367338 - DNA, 25 bp, Homo sapien
gactttctgaacctgactgtatccg

SEQ ID NO: 4367339 - DNA, 25 bp, Homo sapien
cctttccgctgatgactttctgaac

SEQ ID NO: 4367340 - DNA, 25 bp, Homo sapien
cctgcaagcctttccgctgatgact

SEQ ID NO: 4367341 - DNA, 25 bp, Homo sapien
tgtatccgataagacactgctttcc

SEQ ID NO: 4367342 - DNA, 25 bp, Homo sapien
ttctcccacactgtggtaactagac

SEQ ID NO: 4367343 - DNA, 25 bp, Homo sapien
tgtggtaactagactctgaggctct

SEQ ID NO: 4367344 - DNA, 25 bp, Homo sapien
ggtggtaaacacattacccacagta

SEQ ID NO: 4367345 - DNA, 25 bp, Homo sapien
aggcttccctcaataaacttcccag

SEQ ID NO: 4367346 - DNA, 25 bp, Homo sapien
tgatgattgtggaagtgggaagtct

SEQ ID NO: 4367347 - DNA, 25 bp, Homo sapien
gaacccagagtcatctgtagctgtg

SEQ ID NO: 4367348 - DNA, 25 bp, Homo sapien
ttgtggaagtgggaagtctttccca

SEQ ID NO: 4367349 - DNA, 25 bp, Homo sapien
ccagagtcatctgtagctgtgggcc

SEQ ID NO: 4367350 - DNA, 25 bp, Homo sapien
gacccgtgaagaaatgaactcttgg

SEQ ID NO: 4367351 - DNA, 25 bp, Homo sapien
tttgcttacactcacgacccgtgaa

SEQ ID NO: 4367352 - DNA, 25 bp, Homo sapien
aaatggaggtggtactctagtgctt

SEQ ID NO: 4367353 - DNA, 25 bp, Homo sapien
agacccgactggctaccctttcaga

SEQ ID NO: 4367354 - DNA, 25 bp, Homo sapien
ccatttcctatccatcagcaacaga

SEQ ID NO: 4367355 - DNA, 25 bp, Homo sapien
gctctccctattaaaggagaaatac

SEQ ID NO: 4367356 - DNA, 25 bp, Homo sapien
tctccacagagttgctctccctatt

SEQ ID NO: 4367357 - DNA, 25 bp, Homo sapien
aaggagaaatacataagtctttgcc

SEQ ID NO: 4367358 - DNA, 25 bp, Homo sapien
ggtgacattcaagctatcaccttcc

SEQ ID NO: 4367359 - DNA, 25 bp, Homo sapien
aagcagctggggtcggtgaccttca

SEQ ID NO: 4367360 - DNA, 25 bp, Homo sapien
ccccattctactgaacctggtgaca

SEQ ID NO: 4367361 - DNA, 25 bp, Homo sapien
ccagacctgccattctctagtgagc

SEQ ID NO: 4367362 - DNA, 25 bp, Homo sapien
gccgagtctgattagttcttgaata

SEQ ID NO: 4367363 - DNA, 25 bp, Homo sapien
ttctgcctggccgagtctgattagt

SEQ ID NO: 4367364 - DNA, 25 bp, Homo sapien
cctggccgagtctgattagttcttg

SEQ ID NO: 4367365 - DNA, 25 bp, Homo sapien
tgaggggtaacctgcatgcttcctg

SEQ ID NO: 4367366 - DNA, 25 bp, Homo sapien
gaaaggaatgccgtccataccagga

SEQ ID NO: 4367367 - DNA, 25 bp, Homo sapien
gcccaaagtctgtagggatccactt

SEQ ID NO: 4367368 - DNA, 25 bp, Homo sapien
gtaaggaccgatacactacccgaca

SEQ ID NO: 4367369 - DNA, 25 bp, Homo sapien
tgagtcatggatcccctagctagac

SEQ ID NO: 4367370 - DNA, 25 bp, Homo sapien
gaggcaccatgcaggccctggtgtg

SEQ ID NO: 4367371 - DNA, 25 bp, Homo sapien
agaaatatggaaacgattggtctcc

SEQ ID NO: 4367372 - DNA, 25 bp, Homo sapien
gctagggatttaccagagacttaaa

SEQ ID NO: 4367373 - DNA, 25 bp, Homo sapien
ctgacagctagggatttaccagaga

SEQ ID NO: 4367374 - DNA, 25 bp, Homo sapien
cacttggttctgattgccatctcca

SEQ ID NO: 4367375 - DNA, 25 bp, Homo sapien
gggaacggtcccattccagttgatg

SEQ ID NO: 4367376 - DNA, 25 bp, Homo sapien
tccactggtgaaaaccgtcgtcttg

SEQ ID NO: 4367377 - DNA, 25 bp, Homo sapien
ggtggcctcgctccacttggttctg

SEQ ID NO: 4367378 - DNA, 25 bp, Homo sapien
tagacccaagcctatgaacaccatt

SEQ ID NO: 4367379 - DNA, 25 bp, Homo sapien
gcatttagacccaagcctatgaaca

SEQ ID NO: 4367380 - DNA, 25 bp, Homo sapien
ccaagcctatgaacaccattccaga

SEQ ID NO: 4367381 - DNA, 25 bp, Homo sapien
caagcctatgaacaccattccagag

SEQ ID NO: 4367382 - DNA, 25 bp, Homo sapien
tgagggttggccactgtaaaagtac

SEQ ID NO: 4367383 - DNA, 25 bp, Homo sapien
tgatgttgcacagccaaataggtaa

SEQ ID NO: 4367384 - DNA, 25 bp, Homo sapien
caaagagacgttccattttccagtc

SEQ ID NO: 4367385 - DNA, 25 bp, Homo sapien
taggtaatttgggagtcttcagcat

SEQ ID NO: 4367386 - DNA, 25 bp, Homo sapien
gatcgcgaccaaaaagcagctctga

SEQ ID NO: 4367387 - DNA, 25 bp, Homo sapien
cattgtgacacatgccgatacatga

SEQ ID NO: 4367388 - DNA, 25 bp, Homo sapien
tcttgttgcacttgtcgcgtgcagg

SEQ ID NO: 4367389 - DNA, 25 bp, Homo sapien
aatatatagattttgccacattgtg

SEQ ID NO: 4367390 - DNA, 25 bp, Homo sapien
acatcactgcgggtcaggactccat

SEQ ID NO: 4367391 - DNA, 25 bp, Homo sapien
aatagccaacatcactgcgggtcag

SEQ ID NO: 4367392 - DNA, 25 bp, Homo sapien
gagtctgtcatcttccgaggcatcc

SEQ ID NO: 4367393 - DNA, 25 bp, Homo sapien
gccattgaagacattgggacttgct

SEQ ID NO: 4367394 - DNA, 25 bp, Homo sapien
tgagtggtggtgacatctaggtcca

SEQ ID NO: 4367395 - DNA, 25 bp, Homo sapien
ggtgacatctaggtccatttgaagc

SEQ ID NO: 4367396 - DNA, 25 bp, Homo sapien
catttggttgtagcagctgagtggt

SEQ ID NO: 4367397 - DNA, 25 bp, Homo sapien
gcctccagcatttggttgtagcagc

SEQ ID NO: 4367398 - DNA, 25 bp, Homo sapien
atcaggctgtacagaaacaggatga

SEQ ID NO: 4367399 - DNA, 25 bp, Homo sapien
agatcaggctgtacagaaacaggat

SEQ ID NO: 4367400 - DNA, 25 bp, Homo sapien
gatcaggctgtacagaaacaggatg

SEQ ID NO: 4367401 - DNA, 25 bp, Homo sapien
aagatcaggctgtacagaaacagga

SEQ ID NO: 4367402 - DNA, 25 bp, Homo sapien
tctaaaagcaacacagacacgtgta

SEQ ID NO: 4367403 - DNA, 25 bp, Homo sapien
aaagaaaagcatgttggtctaaaag

SEQ ID NO: 4367404 - DNA, 25 bp, Homo sapien
gttggtctaaaagcaacacagacac

SEQ ID NO: 4367405 - DNA, 25 bp, Homo sapien
aagaaaagcatgttggtctaaaagc

SEQ ID NO: 4367406 - DNA, 25 bp, Homo sapien
acatagtaagtgatcgtagatgaat

SEQ ID NO: 4367407 - DNA, 25 bp, Homo sapien
tagtaagtgatcgtagatgaatttc

SEQ ID NO: 4367408 - DNA, 25 bp, Homo sapien
gtaagtgatcgtagatgaatttctc

SEQ ID NO: 4367409 - DNA, 25 bp, Homo sapien
agatgaatttctcagcggcttcttt

SEQ ID NO: 4367410 - DNA, 25 bp, Homo sapien
ccggtcacatcaggagcatggatgg

SEQ ID NO: 4367411 - DNA, 25 bp, Homo sapien
gcctctttggaaggcacctccggtc

SEQ ID NO: 4367412 - DNA, 25 bp, Homo sapien
ctttggaaggcacctccggtcacat

SEQ ID NO: 4367413 - DNA, 25 bp, Homo sapien
aaggcacctccggtcacatcaggag

SEQ ID NO: 4367414 - DNA, 25 bp, Homo sapien
gtctattacatgctcaggcttcact

SEQ ID NO: 4367415 - DNA, 25 bp, Homo sapien
aagtctattacatgctcaggcttca

SEQ ID NO: 4367416 - DNA, 25 bp, Homo sapien
actggcctttcatctgccaggacag

SEQ ID NO: 4367417 - DNA, 25 bp, Homo sapien
tctgccaggacagggagaactgcac

SEQ ID NO: 4367418 - DNA, 25 bp, Homo sapien
aattgtccacagagtagtccggagt

SEQ ID NO: 4367419 - DNA, 25 bp, Homo sapien
gcaagcgccgcggccaaggcttgct

SEQ ID NO: 4367420 - DNA, 25 bp, Homo sapien
agtcgacgcaacgtaaatgtcctca

SEQ ID NO: 4367421 - DNA, 25 bp, Homo sapien
tagtccggagtcgacgcaacgtaaa

SEQ ID NO: 4367422 - DNA, 25 bp, Homo sapien
tgatgatggatccttgcacagccat

SEQ ID NO: 4367423 - DNA, 25 bp, Homo sapien
acaacaagtatttgatgatggatcc

SEQ ID NO: 4367424 - DNA, 25 bp, Homo sapien
tgcacagccatctgaatgcttcggg

SEQ ID NO: 4367425 - DNA, 25 bp, Homo sapien
acagccatctgaatgcttcgggccc

SEQ ID NO: 4367426 - DNA, 25 bp, Homo sapien
tcagaagaaggatcatggaacctga

SEQ ID NO: 4367427 - DNA, 25 bp, Homo sapien
ggatcatggaacctgaaataggcct

SEQ ID NO: 4367428 - DNA, 25 bp, Homo sapien
gaaggatcatggaacctgaaatagg

SEQ ID NO: 4367429 - DNA, 25 bp, Homo sapien
gaagaaggatcatggaacctgaaat

SEQ ID NO: 4367430 - DNA, 25 bp, Homo sapien
taaagaggtgtgaatgtgtactgcc

SEQ ID NO: 4367431 - DNA, 25 bp, Homo sapien
gaaccgtctgtgagtgtctcagcca

SEQ ID NO: 4367432 - DNA, 25 bp, Homo sapien
tcaccagcttgggacacattttgta

SEQ ID NO: 4367433 - DNA, 25 bp, Homo sapien
ggttgcctgcacaaaagtcctgtga

SEQ ID NO: 4367434 - DNA, 25 bp, Homo sapien
atccagaggcttgaaggccagtgag

SEQ ID NO: 4367435 - DNA, 25 bp, Homo sapien
taagatacaagttaaggctccatcc

SEQ ID NO: 4367436 - DNA, 25 bp, Homo sapien
tctatcttcgttgcttgaaaggaca

SEQ ID NO: 4367437 - DNA, 25 bp, Homo sapien
cagtgttccgggagctctgcatacc

SEQ ID NO: 4367438 - DNA, 25 bp, Homo sapien
caatggcatctttttgaccatgaca

SEQ ID NO: 4367439 - DNA, 25 bp, Homo sapien
tggtcctttggacatttgccaaggc

SEQ ID NO: 4367440 - DNA, 25 bp, Homo sapien
gcatctttttgaccatgacagctgg

SEQ ID NO: 4367441 - DNA, 25 bp, Homo sapien
tgccaaggcactacctccagctttg

SEQ ID NO: 4367442 - DNA, 25 bp, Homo sapien
tggccattgctagggagataggaaa

SEQ ID NO: 4367443 - DNA, 25 bp, Homo sapien
caaaggccacttgatggcaaatgtc

SEQ ID NO: 4367444 - DNA, 25 bp, Homo sapien
ggaaagccacccaattttgaagaga

SEQ ID NO: 4367445 - DNA, 25 bp, Homo sapien
tgtcctttgggctgagatagtcctg

SEQ ID NO: 4367446 - DNA, 25 bp, Homo sapien
acaaagcaaacagagctggtgatga

SEQ ID NO: 4367447 - DNA, 25 bp, Homo sapien
gcaaatatcacccccacaaaagaca

SEQ ID NO: 4367448 - DNA, 25 bp, Homo sapien
gacaaagcaaacagagctggtgatg

SEQ ID NO: 4367449 - DNA, 25 bp, Homo sapien
aagacaaagcaaacagagctggtga

SEQ ID NO: 4367450 - DNA, 25 bp, Homo sapien
agaaaatgttgtctcacttttaaag

SEQ ID NO: 4367451 - DNA, 25 bp, Homo sapien
ataccagtgttcagaaaatgttgtc

SEQ ID NO: 4367452 - DNA, 25 bp, Homo sapien
ctgaaataccagtgttcagaaaatg

SEQ ID NO: 4367453 - DNA, 25 bp, Homo sapien
aatgttgtctcacttttaaagacgt

SEQ ID NO: 4367454 - DNA, 25 bp, Homo sapien
tgaggagttgaattattggttccca

SEQ ID NO: 4367455 - DNA, 25 bp, Homo sapien
gaggagttgaattattggttcccaa

SEQ ID NO: 4367456 - DNA, 25 bp, Homo sapien
ctgaggagttgaattattggttccc

SEQ ID NO: 4367457 - DNA, 25 bp, Homo sapien
tgttcggagctttgttcctggccca

SEQ ID NO: 4367458 - DNA, 25 bp, Homo sapien
agatctcctctaaatccagctgttc

SEQ ID NO: 4367459 - DNA, 25 bp, Homo sapien
tttccctccatttgtcaaggaatga

SEQ ID NO: 4367460 - DNA, 25 bp, Homo sapien
ccctccatttgtcaaggaatgaaat

SEQ ID NO: 4367461 - DNA, 25 bp, Homo sapien
cttatgatgggagagagaggtcggg

SEQ ID NO: 4367462 - DNA, 25 bp, Homo sapien
tctcctctttcagttaggtcctcca

SEQ ID NO: 4367463 - DNA, 25 bp, Homo sapien
ctcctctttcagttaggtcctccat

SEQ ID NO: 4367464 - DNA, 25 bp, Homo sapien
ggtctctggaatacaccaaggttta

SEQ ID NO: 4367465 - DNA, 25 bp, Homo sapien
tggaatacaccaaggtttaagaatg

SEQ ID NO: 4367466 - DNA, 25 bp, Homo sapien
tctggaatacaccaaggtttaagaa

SEQ ID NO: 4367467 - DNA, 25 bp, Homo sapien
tctctggaatacaccaaggtttaag

SEQ ID NO: 4367468 - DNA, 25 bp, Homo sapien
cccagcatgttgttctgtaatgcaa

SEQ ID NO: 4367469 - DNA, 25 bp, Homo sapien
tctgtaatgcaaatcggactatgtc

SEQ ID NO: 4367470 - DNA, 25 bp, Homo sapien
tcattggttgactaggttctgttcc

SEQ ID NO: 4367471 - DNA, 25 bp, Homo sapien
ttcccttcgtgagctgctggataaa

SEQ ID NO: 4367472 - DNA, 25 bp, Homo sapien
tccacggttggatagatttaaatca

SEQ ID NO: 4367473 - DNA, 25 bp, Homo sapien
gctgctgcagagttagcctccgtca

SEQ ID NO: 4367474 - DNA, 25 bp, Homo sapien
cgagcacctctccacggttggatag

SEQ ID NO: 4367475 - DNA, 25 bp, Homo sapien
aatcagcattgcctgtgccttcctc

SEQ ID NO: 4367476 - DNA, 25 bp, Homo sapien
tccttggaatcgttggccctgtaga

SEQ ID NO: 4367477 - DNA, 25 bp, Homo sapien
gggacccttctggatgcattgataa

SEQ ID NO: 4367478 - DNA, 25 bp, Homo sapien
aataaatgctcctacgatgcgctgc

SEQ ID NO: 4367479 - DNA, 25 bp, Homo sapien
ggtggatcctctttcacgtagtgga

SEQ ID NO: 4367480 - DNA, 25 bp, Homo sapien
tcccaatacacaaaagacacccatg

SEQ ID NO: 4367481 - DNA, 25 bp, Homo sapien
ggaataaatctagttcccaatacac

SEQ ID NO: 4367482 - DNA, 25 bp, Homo sapien
aaaagacacccatgaaattctagat

SEQ ID NO: 4367483 - DNA, 25 bp, Homo sapien
gaataaatctagttcccaatacaca

SEQ ID NO: 4367484 - DNA, 25 bp, Homo sapien
atctgtaggagatgcaagatagatc

SEQ ID NO: 4367485 - DNA, 25 bp, Homo sapien
cctttttacattagccatcccaata

SEQ ID NO: 4367486 - DNA, 25 bp, Homo sapien
tgccttacacacagctacatctgta

SEQ ID NO: 4367487 - DNA, 25 bp, Homo sapien
ccaatatttggtgccttacacacag

SEQ ID NO: 4367488 - DNA, 25 bp, Homo sapien
cagaagagctttcttggagaatggg

SEQ ID NO: 4367489 - DNA, 25 bp, Homo sapien
tgtgccttgggagccctagagaagc

SEQ ID NO: 4367490 - DNA, 25 bp, Homo sapien
ggtgcactggcatagactgtgcctt

SEQ ID NO: 4367491 - DNA, 25 bp, Homo sapien
tttgctaggctaggctaaattagac

SEQ ID NO: 4367492 - DNA, 25 bp, Homo sapien
tgcatgcagcaccagaagaagagag

SEQ ID NO: 4367493 - DNA, 25 bp, Homo sapien
caacatgtcattggtacagccacac

SEQ ID NO: 4367494 - DNA, 25 bp, Homo sapien
ttccatgggtgaaagggtgactgca

SEQ ID NO: 4367495 - DNA, 25 bp, Homo sapien
gaagagcacatcgaatttccatggg

SEQ ID NO: 4367496 - DNA, 25 bp, Homo sapien
tccacataagctagtaaatcccagc

SEQ ID NO: 4367497 - DNA, 25 bp, Homo sapien
tctgacttgggtctttggactttcc

SEQ ID NO: 4367498 - DNA, 25 bp, Homo sapien
caccctggggtctctataactattg

SEQ ID NO: 4367499 - DNA, 25 bp, Homo sapien
gggtctctataactattgcctgata

SEQ ID NO: 4367500 - DNA, 25 bp, Homo sapien
tctggttgccttggtgggaatttat

SEQ ID NO: 4367501 - DNA, 25 bp, Homo sapien
tggttgccttggtgggaatttatca

SEQ ID NO: 4367502 - DNA, 25 bp, Homo sapien
ggttgccttggtgggaatttatcac

SEQ ID NO: 4367503 - DNA, 25 bp, Homo sapien
ctggttgccttggtgggaatttatc

SEQ ID NO: 4367504 - DNA, 25 bp, Homo sapien
cggtgaacacgtcttgccttggctg

SEQ ID NO: 4367505 - DNA, 25 bp, Homo sapien
agcttgctcctcttccggtgaacac

SEQ ID NO: 4367506 - DNA, 25 bp, Homo sapien
catctgttttcgcttcattctgaag

SEQ ID NO: 4367507 - DNA, 25 bp, Homo sapien
cttgctcctcttccggtgaacacgt

SEQ ID NO: 4367508 - DNA, 25 bp, Homo sapien
cttcttgccattctttctggcagca

SEQ ID NO: 4367509 - DNA, 25 bp, Homo sapien
gccattctttctggcagcatcatca

SEQ ID NO: 4367510 - DNA, 25 bp, Homo sapien
tctttctggcagcatcatcagcact

SEQ ID NO: 4367511 - DNA, 25 bp, Homo sapien
cttgccattctttctggcagcatca

SEQ ID NO: 4367512 - DNA, 25 bp, Homo sapien
tggcatggtgttcgcctccccaggg

SEQ ID NO: 4367513 - DNA, 25 bp, Homo sapien
gaccttgtgagaaggctagctgcca

SEQ ID NO: 4367514 - DNA, 25 bp, Homo sapien
aaacaggctccccacctggcatggt

SEQ ID NO: 4367515 - DNA, 25 bp, Homo sapien
ctgagacaattaaacaggctcccca

SEQ ID NO: 4367516 - DNA, 25 bp, Homo sapien
tatgagcgtcctggccagacccttc

SEQ ID NO: 4367517 - DNA, 25 bp, Homo sapien
agtgggagccgcctatgagcgtcct

SEQ ID NO: 4367518 - DNA, 25 bp, Homo sapien
taggcctggggactatgcgtttcat

SEQ ID NO: 4367519 - DNA, 25 bp, Homo sapien
agccgcctatgagcgtcctggccag

SEQ ID NO: 4367520 - DNA, 25 bp, Homo sapien
agaagagagggagaccggtgctgct

SEQ ID NO: 4367521 - DNA, 25 bp, Homo sapien
ttcctgctttattttgtgtgcggtg

SEQ ID NO: 4367522 - DNA, 25 bp, Homo sapien
cagggaccttttgagtgtctgtcac

SEQ ID NO: 4367523 - DNA, 25 bp, Homo sapien
attttgtgtgcggtgtgctctgcag

SEQ ID NO: 4367524 - DNA, 25 bp, Homo sapien
tctttctctttctacggaacagaga

SEQ ID NO: 4367525 - DNA, 25 bp, Homo sapien
ctcattagatttttcagcagctgct

SEQ ID NO: 4367526 - DNA, 25 bp, Homo sapien
cagagaacgattggagacttgtttt

SEQ ID NO: 4367527 - DNA, 25 bp, Homo sapien
gagaggaatccaataagagtgcagg

SEQ ID NO: 4367528 - DNA, 25 bp, Homo sapien
tccttgtcctcctagcccactcatt

SEQ ID NO: 4367529 - DNA, 25 bp, Homo sapien
acgcaggagacggtccttgtcctcc

SEQ ID NO: 4367530 - DNA, 25 bp, Homo sapien
aactcctcacgcaggagacggtcct

SEQ ID NO: 4367531 - DNA, 25 bp, Homo sapien
gggacctccaaccaactcctcacgc

SEQ ID NO: 4367532 - DNA, 25 bp, Homo sapien
aagacttacagaaccgggctctagc

SEQ ID NO: 4367533 - DNA, 25 bp, Homo sapien
ttcagctaaagacttacagaaccgg

SEQ ID NO: 4367534 - DNA, 25 bp, Homo sapien
gctaaagacttacagaaccgggctc

SEQ ID NO: 4367535 - DNA, 25 bp, Homo sapien
cagctaaagacttacagaaccgggc

SEQ ID NO: 4367536 - DNA, 25 bp, Homo sapien
catccttgtaaatagttccaaaggg

SEQ ID NO: 4367537 - DNA, 25 bp, Homo sapien
gaaactcggtgtgttctgatgtctg

SEQ ID NO: 4367538 - DNA, 25 bp, Homo sapien
caagttatttctcaggtatacggtt

SEQ ID NO: 4367539 - DNA, 25 bp, Homo sapien
cgaatagcgaattgacaccagagca

SEQ ID NO: 4367540 - DNA, 25 bp, Homo sapien
ggcctagtgatctgtttgctgtcat

SEQ ID NO: 4367541 - DNA, 25 bp, Homo sapien
tgtggtcagaggcctagtgatctgt

SEQ ID NO: 4367542 - DNA, 25 bp, Homo sapien
tcagaggcctagtgatctgtttgct

SEQ ID NO: 4367543 - DNA, 25 bp, Homo sapien
tgtttgctgtcattctctgcttttt

SEQ ID NO: 4367544 - DNA, 25 bp, Homo sapien
ctggaggacagcaggttgaggatga

SEQ ID NO: 4367545 - DNA, 25 bp, Homo sapien
tggaggacagcaggttgaggatgaa

SEQ ID NO: 4367546 - DNA, 25 bp, Homo sapien
gatgaaggaagggtcagttccaggc

SEQ ID NO: 4367547 - DNA, 25 bp, Homo sapien
tgaggatgaaggaagggtcagttcc

SEQ ID NO: 4367548 - DNA, 25 bp, Homo sapien
tgcagatcaatttgatgggtaattc

SEQ ID NO: 4367549 - DNA, 25 bp, Homo sapien
ctgcagatcaatttgatgggtaatt

SEQ ID NO: 4367550 - DNA, 25 bp, Homo sapien
gccagaacaagaccaagatgataca

SEQ ID NO: 4367551 - DNA, 25 bp, Homo sapien
cgtgaatgtaattgggactcaggca

SEQ ID NO: 4367552 - DNA, 25 bp, Homo sapien
tgtaaacattgtcacgaagggtcct

SEQ ID NO: 4367553 - DNA, 25 bp, Homo sapien
tgcagattttgaccaacagacatgg

SEQ ID NO: 4367554 - DNA, 25 bp, Homo sapien
tgttttaggaaagcgattgcagctc

SEQ ID NO: 4367555 - DNA, 25 bp, Homo sapien
caagtcgtattaggagcccattcag

SEQ ID NO: 4367556 - DNA, 25 bp, Homo sapien
ttaggagcccattcagaaaatgaac

SEQ ID NO: 4367557 - DNA, 25 bp, Homo sapien
gcgtctttagattttgcaaaaggga

SEQ ID NO: 4367558 - DNA, 25 bp, Homo sapien
aactgaaatccagcaagtcgtatta

SEQ ID NO: 4367559 - DNA, 25 bp, Homo sapien
tttttcactttgcgttttgtagaca

SEQ ID NO: 4367560 - DNA, 25 bp, Homo sapien
gtagacataagtcccttctttataa

SEQ ID NO: 4367561 - DNA, 25 bp, Homo sapien
gaggcaaacaatatcatgacaagac

SEQ ID NO: 4367562 - DNA, 25 bp, Homo sapien
tcagaggcaaacaatatcatgacaa

SEQ ID NO: 4367563 - DNA, 25 bp, Homo sapien
agaagtgaaacattatttcctgagc

SEQ ID NO: 4367564 - DNA, 25 bp, Homo sapien
gaaagtaaggtcaccagcaatgatt

SEQ ID NO: 4367565 - DNA, 25 bp, Homo sapien
tctacactgctccagagaccgatgg

SEQ ID NO: 4367566 - DNA, 25 bp, Homo sapien
ttagtaattgaaagtaaggtcacca

SEQ ID NO: 4367567 - DNA, 25 bp, Homo sapien
gttgttctgactctacactgctcca

SEQ ID NO: 4367568 - DNA, 25 bp, Homo sapien
cttgcagatagtaagcaccatttgg

SEQ ID NO: 4367569 - DNA, 25 bp, Homo sapien
gcagatagtaagcaccatttggcac

SEQ ID NO: 4367570 - DNA, 25 bp, Homo sapien
ccttctcccacttgcagatagtaag

SEQ ID NO: 4367571 - DNA, 25 bp, Homo sapien
tcccacttgcagatagtaagcacca

SEQ ID NO: 4367572 - DNA, 25 bp, Homo sapien
tggatgctcactgggattgctttga

SEQ ID NO: 4367573 - DNA, 25 bp, Homo sapien
gaagctcaaaaggtacagccctagg

SEQ ID NO: 4367574 - DNA, 25 bp, Homo sapien
catggttaacacaataaggatggca

SEQ ID NO: 4367575 - DNA, 25 bp, Homo sapien
cattgtacatgaagaaggctgtccc

SEQ ID NO: 4367576 - DNA, 25 bp, Homo sapien
caaatctggcaggaccaatctgggg

SEQ ID NO: 4367577 - DNA, 25 bp, Homo sapien
ttctttcatctggtgaggcatcagc

SEQ ID NO: 4367578 - DNA, 25 bp, Homo sapien
tggcaggaccaatctggggaagttt

SEQ ID NO: 4367579 - DNA, 25 bp, Homo sapien
gaggcatcagcatgcttggcatcag

SEQ ID NO: 4367580 - DNA, 25 bp, Homo sapien
gtgttggaagtagagccataaaaca

SEQ ID NO: 4367581 - DNA, 25 bp, Homo sapien
atggacaagattcctgttgtctcac

SEQ ID NO: 4367582 - DNA, 25 bp, Homo sapien
ggtgttggaagtagagccataaaac

SEQ ID NO: 4367583 - DNA, 25 bp, Homo sapien
ctaggtgttggaagtagagccataa

SEQ ID NO: 4367584 - DNA, 25 bp, Homo sapien
ctggttgctgctgcagggcctgcat

SEQ ID NO: 4367585 - DNA, 25 bp, Homo sapien
cccctgttgggagtcccatgaaggg

SEQ ID NO: 4367586 - DNA, 25 bp, Homo sapien
ctggttcctgcactcgttcactcgt

SEQ ID NO: 4367587 - DNA, 25 bp, Homo sapien
tacccctgttgggagtcccatgaag

SEQ ID NO: 4367588 - DNA, 25 bp, Homo sapien
tcctgcactcgttcactcgtgtgct

SEQ ID NO: 4367589 - DNA, 25 bp, Homo sapien
gaaagtgaaacgagctgacacctga

SEQ ID NO: 4367590 - DNA, 25 bp, Homo sapien
ggtaatgggattttgagtgatctct

SEQ ID NO: 4367591 - DNA, 25 bp, Homo sapien
aaaagaagcacaactgaggcaggaa

SEQ ID NO: 4367592 - DNA, 25 bp, Homo sapien
tgacacctgaatgttgagaaggaaa

SEQ ID NO: 4367593 - DNA, 25 bp, Homo sapien
gtctggtaagcagaaatttctgaca

SEQ ID NO: 4367594 - DNA, 25 bp, Homo sapien
tcaaccctgattcaaagcttgattc

SEQ ID NO: 4367595 - DNA, 25 bp, Homo sapien
tcaaagcttgattccctctccatga

SEQ ID NO: 4367596 - DNA, 25 bp, Homo sapien
cctctccatgaagtctggtaagcag

SEQ ID NO: 4367597 - DNA, 25 bp, Homo sapien
tctgtcctgtcacatagctgcttgc

SEQ ID NO: 4367598 - DNA, 25 bp, Homo sapien
tcctgtcacatagctgcttgccttc

SEQ ID NO: 4367599 - DNA, 25 bp, Homo sapien
cttctgtcctgtcacatagctgctt

SEQ ID NO: 4367600 - DNA, 25 bp, Homo sapien
tgtcctgtcacatagctgcttgcct

SEQ ID NO: 4367601 - DNA, 25 bp, Homo sapien
tcgtctgtactaggaccacaataag

SEQ ID NO: 4367602 - DNA, 25 bp, Homo sapien
ggaccacaataagttcttcatgcat

SEQ ID NO: 4367603 - DNA, 25 bp, Homo sapien
tcacgcatcgtctgtactaggacca

SEQ ID NO: 4367604 - DNA, 25 bp, Homo sapien
cactctcacgcatcgtctgtactag

SEQ ID NO: 4367605 - DNA, 25 bp, Homo sapien
tacttggaatgtttcttcaatgcca

SEQ ID NO: 4367606 - DNA, 25 bp, Homo sapien
ttgcttatgctgttcatttacttgg

SEQ ID NO: 4367607 - DNA, 25 bp, Homo sapien
atttacttggaatgtttcttcaatg

SEQ ID NO: 4367608 - DNA, 25 bp, Homo sapien
tgcttatgctgttcatttacttgga

SEQ ID NO: 4367609 - DNA, 25 bp, Homo sapien
tgcctattcctcacatagagtacct

SEQ ID NO: 4367610 - DNA, 25 bp, Homo sapien
cacatagagtacctctccttcttgg

SEQ ID NO: 4367611 - DNA, 25 bp, Homo sapien
cctatgcctattcctcacatagagt

SEQ ID NO: 4367612 - DNA, 25 bp, Homo sapien
tattcctcacatagagtacctctcc

SEQ ID NO: 4367613 - DNA, 25 bp, Homo sapien
cctcttacactggtaagattctgtg

SEQ ID NO: 4367614 - DNA, 25 bp, Homo sapien
tcctcttacactggtaagattctgt

SEQ ID NO: 4367615 - DNA, 25 bp, Homo sapien
taactcaaatgcaattgctacttac

SEQ ID NO: 4367616 - DNA, 25 bp, Homo sapien
gaaattgctcagagtcataggtttt

SEQ ID NO: 4367617 - DNA, 25 bp, Homo sapien
caccgatttaaaaagtcctgcagta

SEQ ID NO: 4367618 - DNA, 25 bp, Homo sapien
aaatataattcctcgcaacactggg

SEQ ID NO: 4367619 - DNA, 25 bp, Homo sapien
ctccgtggaaaagcccgtactgcat

SEQ ID NO: 4367620 - DNA, 25 bp, Homo sapien
tgtcacaactccgagggcacatgca

SEQ ID NO: 4367621 - DNA, 25 bp, Homo sapien
tgaggcattgacgagcagagctccc

SEQ ID NO: 4367622 - DNA, 25 bp, Homo sapien
tggctttgatccacaacggtgtccc

SEQ ID NO: 4367623 - DNA, 25 bp, Homo sapien
tgattttcttctgttggcttggcat

SEQ ID NO: 4367624 - DNA, 25 bp, Homo sapien
aaaaatgattttcttctgttggctt

SEQ ID NO: 4367625 - DNA, 25 bp, Homo sapien
aatgattttcttctgttggcttggc

SEQ ID NO: 4367626 - DNA, 25 bp, Homo sapien
gcaaaaaatgattttcttctgttgg

SEQ ID NO: 4367627 - DNA, 25 bp, Homo sapien
aaaaggcaacttcaccatcgacggt

SEQ ID NO: 4367628 - DNA, 25 bp, Homo sapien
ggaagggactgcctctttgactgca

SEQ ID NO: 4367629 - DNA, 25 bp, Homo sapien
tttattacggaagctgaacggacag

SEQ ID NO: 4367630 - DNA, 25 bp, Homo sapien
cggttctcgccaggttaaatgtcag

SEQ ID NO: 4367631 - DNA, 25 bp, Homo sapien
taatgtcagcaagttttcaccaagt

SEQ ID NO: 4367632 - DNA, 25 bp, Homo sapien
tgtgatccaccctctgagaatgata

SEQ ID NO: 4367633 - DNA, 25 bp, Homo sapien
gctgcgtagtagtgtgtgtgatcca

SEQ ID NO: 4367634 - DNA, 25 bp, Homo sapien
aatgatataatggaacctggcagtc

SEQ ID NO: 4367635 - DNA, 25 bp, Homo sapien
ataggaatacattcggtgacataag

SEQ ID NO: 4367636 - DNA, 25 bp, Homo sapien
tcctctgacccctttcaggtgctgg

SEQ ID NO: 4367637 - DNA, 25 bp, Homo sapien
gctggataatgatataattcttcag

SEQ ID NO: 4367638 - DNA, 25 bp, Homo sapien
cttaataggaatacattcggtgaca

SEQ ID NO: 4367639 - DNA, 25 bp, Homo sapien
ccagggcactaggtgaaacaaactg

SEQ ID NO: 4367640 - DNA, 25 bp, Homo sapien
tccagggcactaggtgaaacaaact

SEQ ID NO: 4367641 - DNA, 25 bp, Homo sapien
gtccagggcactaggtgaaacaaac

SEQ ID NO: 4367642 - DNA, 25 bp, Homo sapien
ctataaggtttctttccaagataag

SEQ ID NO: 4367643 - DNA, 25 bp, Homo sapien
taaggtttctttccaagataagcag

SEQ ID NO: 4367644 - DNA, 25 bp, Homo sapien
aggtttctttccaagataagcagcc

SEQ ID NO: 4367645 - DNA, 25 bp, Homo sapien
ggtttctttccaagataagcagcca

SEQ ID NO: 4367646 - DNA, 25 bp, Homo sapien
actccagaagacctatgaagagccc

SEQ ID NO: 4367647 - DNA, 25 bp, Homo sapien
caccaactgcggctatcaaaacagt

SEQ ID NO: 4367648 - DNA, 25 bp, Homo sapien
gatgctcaagtttatcctctccagc

SEQ ID NO: 4367649 - DNA, 25 bp, Homo sapien
tatcaaaacagttaacccctgatgc

SEQ ID NO: 4367650 - DNA, 25 bp, Homo sapien
tttgattctgaaaacccacccttga

SEQ ID NO: 4367651 - DNA, 25 bp, Homo sapien
tgttcgataactgaggcgtaaaggc

SEQ ID NO: 4367652 - DNA, 25 bp, Homo sapien
gaggcgtaaaggctgagttttcaaa

SEQ ID NO: 4367653 - DNA, 25 bp, Homo sapien
tccaaagtgttcgataactgaggcg

SEQ ID NO: 4367654 - DNA, 25 bp, Homo sapien
aagctgctccaaagtgttcgataac

SEQ ID NO: 4367655 - DNA, 25 bp, Homo sapien
tctcttctacatgcatatttccctg

SEQ ID NO: 4367656 - DNA, 25 bp, Homo sapien
gtggaggtcccaggtcttctcttct

SEQ ID NO: 4367657 - DNA, 25 bp, Homo sapien
tatttccctgatccaaagggacatc

SEQ ID NO: 4367658 - DNA, 25 bp, Homo sapien
ctgccttcattatcccagtgtggag

SEQ ID NO: 4367659 - DNA, 25 bp, Homo sapien
tatgacggtcccaagttctacctgg

SEQ ID NO: 4367660 - DNA, 25 bp, Homo sapien
gaaaaataacactccggggctatga

SEQ ID NO: 4367661 - DNA, 25 bp, Homo sapien
gtaatatttttaggcacatactgag

SEQ ID NO: 4367662 - DNA, 25 bp, Homo sapien
cacatactgagctaaatgaaagaga

SEQ ID NO: 4367663 - DNA, 25 bp, Homo sapien
actctgaacactagactcttggctg

SEQ ID NO: 4367664 - DNA, 25 bp, Homo sapien
acactagactcttggctgtctgctc

SEQ ID NO: 4367665 - DNA, 25 bp, Homo sapien
tgaacactagactcttggctgtctg

SEQ ID NO: 4367666 - DNA, 25 bp, Homo sapien
ttcactctgaacactagactcttgg

SEQ ID NO: 4367667 - DNA, 25 bp, Homo sapien
tttctattactgtgtcccacagtgg

SEQ ID NO: 4367668 - DNA, 25 bp, Homo sapien
cccacagtggatgatttgcctttag

SEQ ID NO: 4367669 - DNA, 25 bp, Homo sapien
cactgctccacggtgatactgctgg

SEQ ID NO: 4367670 - DNA, 25 bp, Homo sapien
gcctttagtttgacaacaatcattt

SEQ ID NO: 4367671 - DNA, 25 bp, Homo sapien
gtgttcgttgctcttgtctgcttcc

SEQ ID NO: 4367672 - DNA, 25 bp, Homo sapien
tccttggctcatgactggctgctgc

SEQ ID NO: 4367673 - DNA, 25 bp, Homo sapien
gcctgtgttcgttgctcttgtctgc

SEQ ID NO: 4367674 - DNA, 25 bp, Homo sapien
tggctcatgactggctgctgcagtg

SEQ ID NO: 4367675 - DNA, 25 bp, Homo sapien
tgttgcctcagcctcgaaccctgaa

SEQ ID NO: 4367676 - DNA, 25 bp, Homo sapien
tcttctctcctatcagattcttgaa

SEQ ID NO: 4367677 - DNA, 25 bp, Homo sapien
gctaacttcttccagagggactgac

SEQ ID NO: 4367678 - DNA, 25 bp, Homo sapien
ccattcaaggccacaactttgctaa

SEQ ID NO: 4367679 - DNA, 25 bp, Homo sapien
ataaagttcctttgctatgacgtgg

SEQ ID NO: 4367680 - DNA, 25 bp, Homo sapien
aaagttcctttgctatgacgtggcc

SEQ ID NO: 4367681 - DNA, 25 bp, Homo sapien
gttcctttgctatgacgtggccaca

SEQ ID NO: 4367682 - DNA, 25 bp, Homo sapien
cctttgctatgacgtggccacaggc

SEQ ID NO: 4367683 - DNA, 25 bp, Homo sapien
gcctgtaagtagagcaggatccatc

SEQ ID NO: 4367684 - DNA, 25 bp, Homo sapien
taagtagagcaggatccatcttcgt

SEQ ID NO: 4367685 - DNA, 25 bp, Homo sapien
agcaggatccatcttcgtggtgtag

SEQ ID NO: 4367686 - DNA, 25 bp, Homo sapien
agagagcctgtaagtagagcaggat

SEQ ID NO: 4367687 - DNA, 25 bp, Homo sapien
caagattttagtgctgagaatgcac

SEQ ID NO: 4367688 - DNA, 25 bp, Homo sapien
gcacatggccgccttctaaaggaag

SEQ ID NO: 4367689 - DNA, 25 bp, Homo sapien
caaacgccctcagaacaatactttc

SEQ ID NO: 4367690 - DNA, 25 bp, Homo sapien
cacatggccgccttctaaaggaaga

SEQ ID NO: 4367691 - DNA, 25 bp, Homo sapien
aaggctggcactggtgtccatgggc

SEQ ID NO: 4367692 - DNA, 25 bp, Homo sapien
ctggcactggtgtccatgggcccac

SEQ ID NO: 4367693 - DNA, 25 bp, Homo sapien
gctggcactggtgtccatgggccca

SEQ ID NO: 4367694 - DNA, 25 bp, Homo sapien
ctagtcaaggctggcactggtgtcc

SEQ ID NO: 4367695 - DNA, 25 bp, Homo sapien
gactatggttaagtgcccacagaag

SEQ ID NO: 4367696 - DNA, 25 bp, Homo sapien
ggaagaagcaggactatgactatgg

SEQ ID NO: 4367697 - DNA, 25 bp, Homo sapien
aaggtcttggatctaagagggtcca

SEQ ID NO: 4367698 - DNA, 25 bp, Homo sapien
tctctggtcatagaagctttcagtg

SEQ ID NO: 4367699 - DNA, 25 bp, Homo sapien
gcaacaacctttaagagagggctga

SEQ ID NO: 4367700 - DNA, 25 bp, Homo sapien
caacaacctttaagagagggctgat

SEQ ID NO: 4367701 - DNA, 25 bp, Homo sapien
cagcaacaacctttaagagagggct

SEQ ID NO: 4367702 - DNA, 25 bp, Homo sapien
aacaacctttaagagagggctgatc

SEQ ID NO: 4367703 - DNA, 25 bp, Homo sapien
agtggccacttgaaatcagggctca

SEQ ID NO: 4367704 - DNA, 25 bp, Homo sapien
ctggttgtagatggctgttggtatt

SEQ ID NO: 4367705 - DNA, 25 bp, Homo sapien
ttgtagatggctgttggtattggtt

SEQ ID NO: 4367706 - DNA, 25 bp, Homo sapien
gtggccacttgaaatcagggctcat

SEQ ID NO: 4367707 - DNA, 25 bp, Homo sapien
gatgagctgatcttagtctgcttaa

SEQ ID NO: 4367708 - DNA, 25 bp, Homo sapien
agctgatcttagtctgcttaaagac

SEQ ID NO: 4367709 - DNA, 25 bp, Homo sapien
catgatgagctgatcttagtctgct

SEQ ID NO: 4367710 - DNA, 25 bp, Homo sapien
tcatgatgagctgatcttagtctgc

SEQ ID NO: 4367711 - DNA, 25 bp, Homo sapien
gggctttgtacaggaatccgtactc

SEQ ID NO: 4367712 - DNA, 25 bp, Homo sapien
attccatattaggaaaggaagctaa

SEQ ID NO: 4367713 - DNA, 25 bp, Homo sapien
ggaatccgtactctgaggactgtag

SEQ ID NO: 4367714 - DNA, 25 bp, Homo sapien
aagagcctgggaattccatattagg

SEQ ID NO: 4367715 - DNA, 25 bp, Homo sapien
cccggagaggcggattggagcgcgc

SEQ ID NO: 4367716 - DNA, 25 bp, Homo sapien
gagaggcggattggagcgcgctcac

SEQ ID NO: 4367717 - DNA, 25 bp, Homo sapien
ctgcgaaaacccggagaggcggatt

SEQ ID NO: 4367718 - DNA, 25 bp, Homo sapien
tgcgaaaacccggagaggcggattg

SEQ ID NO: 4367719 - DNA, 25 bp, Homo sapien
agtggcaaacttcgcggcgttcccg

SEQ ID NO: 4367720 - DNA, 25 bp, Homo sapien
cccatcccaacccgaatgatggagg

SEQ ID NO: 4367721 - DNA, 25 bp, Homo sapien
ctcgtccgggcgaggcagataccgc

SEQ ID NO: 4367722 - DNA, 25 bp, Homo sapien
tccgccaactcggaagctcgcgctc

SEQ ID NO: 4367723 - DNA, 25 bp, Homo sapien
gcggcggccggagtgaccccgccgc

SEQ ID NO: 4367724 - DNA, 25 bp, Homo sapien
ccccgccgccgccagccccagcccg

SEQ ID NO: 4367725 - DNA, 25 bp, Homo sapien
tgcggcggccggagtgaccccgccg

SEQ ID NO: 4367726 - DNA, 25 bp, Homo sapien
ctgcggcggccggagtgaccccgcc

SEQ ID NO: 4367727 - DNA, 25 bp, Homo sapien
ccactggaacctggcgggcgtctag

SEQ ID NO: 4367728 - DNA, 25 bp, Homo sapien
accgtagctgcggatgcgccactgg

SEQ ID NO: 4367729 - DNA, 25 bp, Homo sapien
cgtctaggaggcaccggccgcttcc

SEQ ID NO: 4367730 - DNA, 25 bp, Homo sapien
cactggcccggtccgtgtccaggtg

SEQ ID NO: 4367731 - DNA, 25 bp, Homo sapien
ccggggctcgagcgcagccgagtac

SEQ ID NO: 4367732 - DNA, 25 bp, Homo sapien
tctgctgccgggcagcggcagcatc

SEQ ID NO: 4367733 - DNA, 25 bp, Homo sapien
cccatcagtgcgtgtctgctgccgg

SEQ ID NO: 4367734 - DNA, 25 bp, Homo sapien
tgctgccgggcagcggcagcatcca

SEQ ID NO: 4367735 - DNA, 25 bp, Homo sapien
ggctgtccccatcagtgcgtgtctg

SEQ ID NO: 4367736 - DNA, 25 bp, Homo sapien
caagttggcccagcgggcatcgccg

SEQ ID NO: 4367737 - DNA, 25 bp, Homo sapien
gccaagttggcccagcgggcatcgc

SEQ ID NO: 4367738 - DNA, 25 bp, Homo sapien
gttggcccagcgggcatcgccggcg

SEQ ID NO: 4367739 - DNA, 25 bp, Homo sapien
aagttggcccagcgggcatcgccgg

SEQ ID NO: 4367740 - DNA, 25 bp, Homo sapien
tgccgcttcggtaaatcgtcgtaaa

SEQ ID NO: 4367741 - DNA, 25 bp, Homo sapien
cactgattttcgtctctagaggcaa

SEQ ID NO: 4367742 - DNA, 25 bp, Homo sapien
tacactgaggtcttgcgttttgctt

SEQ ID NO: 4367743 - DNA, 25 bp, Homo sapien
tggaatgcagtgcatcctacactga

SEQ ID NO: 4367744 - DNA, 25 bp, Homo sapien
ttttgtatacgtaaaagcaggcgag

SEQ ID NO: 4367745 - DNA, 25 bp, Homo sapien
tttgtatacgtaaaagcaggcgagt

SEQ ID NO: 4367746 - DNA, 25 bp, Homo sapien
ctgttttgtatacgtaaaagcaggc

SEQ ID NO: 4367747 - DNA, 25 bp, Homo sapien
tgtatacgtaaaagcaggcgagtta

SEQ ID NO: 4367748 - DNA, 25 bp, Homo sapien
cagaaagggccttgtaaaccaggca

SEQ ID NO: 4367749 - DNA, 25 bp, Homo sapien
tttgtgggcccactgatagcacaga

SEQ ID NO: 4367750 - DNA, 25 bp, Homo sapien
ccattaaaagtttgtgggcccactg

SEQ ID NO: 4367751 - DNA, 25 bp, Homo sapien
cccactgatagcacagaaagggcct

SEQ ID NO: 4367752 - DNA, 25 bp, Homo sapien
cctttatcagtctgagcgaggctga

SEQ ID NO: 4367753 - DNA, 25 bp, Homo sapien
cagttaacatcggtgagattccagc

SEQ ID NO: 4367754 - DNA, 25 bp, Homo sapien
tctagggatagacttcctggactca

SEQ ID NO: 4367755 - DNA, 25 bp, Homo sapien
cagatactaagtgacccaaagagac

SEQ ID NO: 4367756 - DNA, 25 bp, Homo sapien
tcattgaatcgtcatggaactggtt

SEQ ID NO: 4367757 - DNA, 25 bp, Homo sapien
aaaaaattgggagtttctgcgcatg

SEQ ID NO: 4367758 - DNA, 25 bp, Homo sapien
catccctggtggacatttctgtcca

SEQ ID NO: 4367759 - DNA, 25 bp, Homo sapien
tctgtgcgatagagggtgacgctca

SEQ ID NO: 4367760 - DNA, 25 bp, Homo sapien
actttcagagtagcttgcatagtca

SEQ ID NO: 4367761 - DNA, 25 bp, Homo sapien
gaatttagaactgctctactttcag

SEQ ID NO: 4367762 - DNA, 25 bp, Homo sapien
tagcttgcatagtcactttctttgt

SEQ ID NO: 4367763 - DNA, 25 bp, Homo sapien
taatctgtatgtatccgtttctgtt

SEQ ID NO: 4367764 - DNA, 25 bp, Homo sapien
tatcactgcctgaataatatctatg

SEQ ID NO: 4367765 - DNA, 25 bp, Homo sapien
gatgagctatcatgatgtctgggat

SEQ ID NO: 4367766 - DNA, 25 bp, Homo sapien
tatgcttttctactgttacctatag

SEQ ID NO: 4367767 - DNA, 25 bp, Homo sapien
tccagggatatgtcaaaacttgcca

SEQ ID NO: 4367768 - DNA, 25 bp, Homo sapien
gaagtcagttccaggcatttaaatg

SEQ ID NO: 4367769 - DNA, 25 bp, Homo sapien
gaatacctttgggtctatgtcatgg

SEQ ID NO: 4367770 - DNA, 25 bp, Homo sapien
gaattggtagcacaaaaaatcctgt

SEQ ID NO: 4367771 - DNA, 25 bp, Homo sapien
taatgagtagcagcaagcctaacaa

SEQ ID NO: 4367772 - DNA, 25 bp, Homo sapien
tctctttaggtgaggcaaaagtctc

SEQ ID NO: 4367773 - DNA, 25 bp, Homo sapien
ggtctctttaggtgaggcaaaagtc

SEQ ID NO: 4367774 - DNA, 25 bp, Homo sapien
ctctttaggtgaggcaaaagtctca

SEQ ID NO: 4367775 - DNA, 25 bp, Homo sapien
cttggtctctttaggtgaggcaaaa

SEQ ID NO: 4367776 - DNA, 25 bp, Homo sapien
cggtagatcttgcagctgtgtgtca

SEQ ID NO: 4367777 - DNA, 25 bp, Homo sapien
gatcaaagcacaggttcgacacagc

SEQ ID NO: 4367778 - DNA, 25 bp, Homo sapien
gaaggaccattagccacacaacggt

SEQ ID NO: 4367779 - DNA, 25 bp, Homo sapien
aagcatatgatgtagcccgtggtca

SEQ ID NO: 4367780 - DNA, 25 bp, Homo sapien
ctaagaagataattgataaatacat

SEQ ID NO: 4367781 - DNA, 25 bp, Homo sapien
tgccacacccaagtcaacaacaatt

SEQ ID NO: 4367782 - DNA, 25 bp, Homo sapien
caattttcactggtaatgccagagt

SEQ ID NO: 4367783 - DNA, 25 bp, Homo sapien
agatgaggcaggctgttacttggca

SEQ ID NO: 4367784 - DNA, 25 bp, Homo sapien
tacttggcagtggaatatcttcagc

SEQ ID NO: 4367785 - DNA, 25 bp, Homo sapien
aaattaattaagtagatgctcacac

SEQ ID NO: 4367786 - DNA, 25 bp, Homo sapien
ctcacacacctgtgattcgtattct

SEQ ID NO: 4367787 - DNA, 25 bp, Homo sapien
tcacacacctgtgattcgtattctt

SEQ ID NO: 4367788 - DNA, 25 bp, Homo sapien
aggttgcaaaacaacttccaataat

SEQ ID NO: 4367789 - DNA, 25 bp, Homo sapien
gcaaaacaacttccaataattccaa

SEQ ID NO: 4367790 - DNA, 25 bp, Homo sapien
taaaaaaaatacgtgaatggctcca

SEQ ID NO: 4367791 - DNA, 25 bp, Homo sapien
gaatggctccagatctttataaact

SEQ ID NO: 4367792 - DNA, 25 bp, Homo sapien
aggatgactgcttattgaaaagaaa

SEQ ID NO: 4367793 - DNA, 25 bp, Homo sapien
gaaagtaaggatgactgcttattga

SEQ ID NO: 4367794 - DNA, 25 bp, Homo sapien
tgagggaaagtaaggatgactgctt

SEQ ID NO: 4367795 - DNA, 25 bp, Homo sapien
cttgagggaaagtaaggatgactgc

SEQ ID NO: 4367796 - DNA, 25 bp, Homo sapien
ttcaggaaatcccatgcaggtttgc

SEQ ID NO: 4367797 - DNA, 25 bp, Homo sapien
tggtagggatattttcaacctcagg

SEQ ID NO: 4367798 - DNA, 25 bp, Homo sapien
gaccatatggcctggtgagaacata

SEQ ID NO: 4367799 - DNA, 25 bp, Homo sapien
gatgcctgggttttccattgtctga

SEQ ID NO: 4367800 - DNA, 25 bp, Homo sapien
gtctgatctcagaatcacattcaaa

SEQ ID NO: 4367801 - DNA, 25 bp, Homo sapien
agtctgatctcagaatcacattcaa

SEQ ID NO: 4367802 - DNA, 25 bp, Homo sapien
ccagctcagtcagtctgatctcaga

SEQ ID NO: 4367803 - DNA, 25 bp, Homo sapien
gctttaccgatgtccttggcgacca

SEQ ID NO: 4367804 - DNA, 25 bp, Homo sapien
gcatgttcaggcaggactaagatct

SEQ ID NO: 4367805 - DNA, 25 bp, Homo sapien
tagtctaatccccaagtcagttgag

SEQ ID NO: 4367806 - DNA, 25 bp, Homo sapien
ccctaggattttggcttacgcactt

SEQ ID NO: 4367807 - DNA, 25 bp, Homo sapien
gcaagccttgctgcaagtcttcaga

SEQ ID NO: 4367808 - DNA, 25 bp, Homo sapien
gcatgagctgtttggttagccgcag

SEQ ID NO: 4367809 - DNA, 25 bp, Homo sapien
gcagcagtagcaaccccattgcagg

SEQ ID NO: 4367810 - DNA, 25 bp, Homo sapien
tctgtgagcctcagcaagccttgct

SEQ ID NO: 4367811 - DNA, 25 bp, Homo sapien
tttggttgtgaggtgtgactgctat

SEQ ID NO: 4367812 - DNA, 25 bp, Homo sapien
cttttggttgtgaggtgtgactgct

SEQ ID NO: 4367813 - DNA, 25 bp, Homo sapien
gaggtgtgactgctatttggtccat

SEQ ID NO: 4367814 - DNA, 25 bp, Homo sapien
gtgaggtgtgactgctatttggtcc

SEQ ID NO: 4367815 - DNA, 25 bp, Homo sapien
cagtaaagcatgaaatagatacaaa

SEQ ID NO: 4367816 - DNA, 25 bp, Homo sapien
tagatgaatgtcttctagccagtta

SEQ ID NO: 4367817 - DNA, 25 bp, Homo sapien
catttctttattagtatatagacag

SEQ ID NO: 4367818 - DNA, 25 bp, Homo sapien
gaatgtcttctagccagttaatagc

SEQ ID NO: 4367819 - DNA, 25 bp, Homo sapien
aatattctaacaccagaaccccagg

SEQ ID NO: 4367820 - DNA, 25 bp, Homo sapien
catgtctccagaagtaaaatccgtc

SEQ ID NO: 4367821 - DNA, 25 bp, Homo sapien
gatgacaacatgcacacgtggtctt

SEQ ID NO: 4367822 - DNA, 25 bp, Homo sapien
tggtagctcataagtcagtaaccgt

SEQ ID NO: 4367823 - DNA, 25 bp, Homo sapien
catgttgacgtagaagagcacggca

SEQ ID NO: 4367824 - DNA, 25 bp, Homo sapien
gatttccctaaacggctggcataga

SEQ ID NO: 4367825 - DNA, 25 bp, Homo sapien
acaaacacgttcagctgccagggac

SEQ ID NO: 4367826 - DNA, 25 bp, Homo sapien
gaaactcttagagctgggcacgtaa

SEQ ID NO: 4367827 - DNA, 25 bp, Homo sapien
tgtgtaagttagacactcatccctc

SEQ ID NO: 4367828 - DNA, 25 bp, Homo sapien
aggcaaagggcaatgaatatagtca

SEQ ID NO: 4367829 - DNA, 25 bp, Homo sapien
tgtgaactggtcactcatagggcac

SEQ ID NO: 4367830 - DNA, 25 bp, Homo sapien
tagggcacttatggcctccaagaca

SEQ ID NO: 4367831 - DNA, 25 bp, Homo sapien
ggaatctgcatgtgtatgccctggt

SEQ ID NO: 4367832 - DNA, 25 bp, Homo sapien
ggtaaacttctagagcagctttgcc

SEQ ID NO: 4367833 - DNA, 25 bp, Homo sapien
ggactgactgaccaaggtaaacttc

SEQ ID NO: 4367834 - DNA, 25 bp, Homo sapien
cactttgagttggatggaagggact

SEQ ID NO: 4367835 - DNA, 25 bp, Homo sapien
attttggcagttttgatgcaattgc

SEQ ID NO: 4367836 - DNA, 25 bp, Homo sapien
cagatgagcctccagtttagggtgg

SEQ ID NO: 4367837 - DNA, 25 bp, Homo sapien
gatgagcctccagtttagggtggga

SEQ ID NO: 4367838 - DNA, 25 bp, Homo sapien
tgagcctccagtttagggtgggagg

SEQ ID NO: 4367839 - DNA, 25 bp, Homo sapien
cgtttgtcgtcttgaagtggcccaa

SEQ ID NO: 4367840 - DNA, 25 bp, Homo sapien
atgaggtctcttttcagtgaaggtg

SEQ ID NO: 4367841 - DNA, 25 bp, Homo sapien
aggtgttttgcccagtgagcgtttg

SEQ ID NO: 4367842 - DNA, 25 bp, Homo sapien
tgaagtggcccaagtgttttttcat

SEQ ID NO: 4367843 - DNA, 25 bp, Homo sapien
cttagggttacagattagcacggct

SEQ ID NO: 4367844 - DNA, 25 bp, Homo sapien
gactgctcgtgttgaccagtgggaa

SEQ ID NO: 4367845 - DNA, 25 bp, Homo sapien
gaatgtcaggtactacagatgtcca

SEQ ID NO: 4367846 - DNA, 25 bp, Homo sapien
tctcgccaaatgcttgaatgtcagg

SEQ ID NO: 4367847 - DNA, 25 bp, Homo sapien
tatcctggtctagggatggacttga

SEQ ID NO: 4367848 - DNA, 25 bp, Homo sapien
ttatcctggtctagggatggacttg

SEQ ID NO: 4367849 - DNA, 25 bp, Homo sapien
atcctggtctagggatggacttgat

SEQ ID NO: 4367850 - DNA, 25 bp, Homo sapien
gttgttacttgatcccaatgcctgg

SEQ ID NO: 4367851 - DNA, 25 bp, Homo sapien
taaatctggtttcacaacattctgt

SEQ ID NO: 4367852 - DNA, 25 bp, Homo sapien
tactccatctgttatcctgacacat

SEQ ID NO: 4367853 - DNA, 25 bp, Homo sapien
gggcttttgggtctccaatcattct

SEQ ID NO: 4367854 - DNA, 25 bp, Homo sapien
ccaggctgtccaggattactttctg

SEQ ID NO: 4367855 - DNA, 25 bp, Homo sapien
gacacctgactcctaagacttagct

SEQ ID NO: 4367856 - DNA, 25 bp, Homo sapien
gacttagctccactgaaaaaggtct

SEQ ID NO: 4367857 - DNA, 25 bp, Homo sapien
tccttttgctgagagcaatccatgg

SEQ ID NO: 4367858 - DNA, 25 bp, Homo sapien
tttgacagccacgattggaaatcct

SEQ ID NO: 4367859 - DNA, 25 bp, Homo sapien
tatctgtacacatatgcaattgcaa

SEQ ID NO: 4367860 - DNA, 25 bp, Homo sapien
tggcaatggttcagtgttcctcagc

SEQ ID NO: 4367861 - DNA, 25 bp, Homo sapien
tattggatccccatattagcatggg

SEQ ID NO: 4367862 - DNA, 25 bp, Homo sapien
tgaagactgggacgtggaaacaaag

SEQ ID NO: 4367863 - DNA, 25 bp, Homo sapien
cattgtaggctccaaggtaacactg

SEQ ID NO: 4367864 - DNA, 25 bp, Homo sapien
caactacggatgaaaatcaggaact

SEQ ID NO: 4367865 - DNA, 25 bp, Homo sapien
cagaaaccacaagatagtgggtccc

SEQ ID NO: 4367866 - DNA, 25 bp, Homo sapien
catccctacatcatctgatgcacag

SEQ ID NO: 4367867 - DNA, 25 bp, Homo sapien
caaattcaacatgtggtatgaggtg

SEQ ID NO: 4367868 - DNA, 25 bp, Homo sapien
gcagcttcacagtataacgtgcaga

SEQ ID NO: 4367869 - DNA, 25 bp, Homo sapien
ttctgaagcaccctcagaaaattgt

SEQ ID NO: 4367870 - DNA, 25 bp, Homo sapien
gctgcagtgagatctggtaggtaaa

SEQ ID NO: 4367871 - DNA, 25 bp, Homo sapien
cgggccccaatagtcctcactgatg

SEQ ID NO: 4367872 - DNA, 25 bp, Homo sapien
cttgtttagagaagttcgccatttc

SEQ ID NO: 4367873 - DNA, 25 bp, Homo sapien
tagtcactgttgatccttggcaaag

SEQ ID NO: 4367874 - DNA, 25 bp, Homo sapien
aggagccgctagagcctggttatta

SEQ ID NO: 4367875 - DNA, 25 bp, Homo sapien
gccgctagagcctggttattaccag

SEQ ID NO: 4367876 - DNA, 25 bp, Homo sapien
gctagagcctggttattaccagggc

SEQ ID NO: 4367877 - DNA, 25 bp, Homo sapien
agccgctagagcctggttattacca

SEQ ID NO: 4367878 - DNA, 25 bp, Homo sapien
ggaagcttgccagagtcatgggcct

SEQ ID NO: 4367879 - DNA, 25 bp, Homo sapien
gtgtctggaagcttgccagagtcat

SEQ ID NO: 4367880 - DNA, 25 bp, Homo sapien
cagggggacagttgtgtctggaagc

SEQ ID NO: 4367881 - DNA, 25 bp, Homo sapien
ctggaagcttgccagagtcatgggc

SEQ ID NO: 4367882 - DNA, 25 bp, Homo sapien
cacgtctttagacatgtccctaata

SEQ ID NO: 4367883 - DNA, 25 bp, Homo sapien
acgtctttagacatgtccctaatac

SEQ ID NO: 4367884 - DNA, 25 bp, Homo sapien
ttctgatgtggcctgtgtttctgta

SEQ ID NO: 4367885 - DNA, 25 bp, Homo sapien
tttgtacccgtgatgttcactacca

SEQ ID NO: 4367886 - DNA, 25 bp, Homo sapien
tctgtatcatgcctagccgtccttg

SEQ ID NO: 4367887 - DNA, 25 bp, Homo sapien
tggctttgttttgtacccgtgatgt

SEQ ID NO: 4367888 - DNA, 25 bp, Homo sapien
ctttgtacatatcgattccaacaaa

SEQ ID NO: 4367889 - DNA, 25 bp, Homo sapien
ttgtacatatcgattccaacaaaca

SEQ ID NO: 4367890 - DNA, 25 bp, Homo sapien
tgtacatatcgattccaacaaacaa

SEQ ID NO: 4367891 - DNA, 25 bp, Homo sapien
gtacatatcgattccaacaaacaat

SEQ ID NO: 4367892 - DNA, 25 bp, Homo sapien
ggatccaggcaaacattacacgcag

SEQ ID NO: 4367893 - DNA, 25 bp, Homo sapien
gtaaaaggaattctgcacaagtgat

SEQ ID NO: 4367894 - DNA, 25 bp, Homo sapien
catctaaaagcctgtctaagtgact

SEQ ID NO: 4367895 - DNA, 25 bp, Homo sapien
gactgacttatgaattgcctgctgg

SEQ ID NO: 4367896 - DNA, 25 bp, Homo sapien
gctatgtaacatccgatcagaatca

SEQ ID NO: 4367897 - DNA, 25 bp, Homo sapien
ctggatatggctatgtaacatccga

SEQ ID NO: 4367898 - DNA, 25 bp, Homo sapien
tatggctatgtaacatccgatcaga

SEQ ID NO: 4367899 - DNA, 25 bp, Homo sapien
gatatggctatgtaacatccgatca

SEQ ID NO: 4367900 - DNA, 25 bp, Homo sapien
cccaaggaacacgatggaagtatac

SEQ ID NO: 4367901 - DNA, 25 bp, Homo sapien
tcacataggtgactgccgtatgcca

SEQ ID NO: 4367902 - DNA, 25 bp, Homo sapien
gatcaatgcttatcagcccaaggaa

SEQ ID NO: 4367903 - DNA, 25 bp, Homo sapien
tgtacatccgagagtccccaaatgg

SEQ ID NO: 4367904 - DNA, 25 bp, Homo sapien
agatgcttgccacaaatataatgag

SEQ ID NO: 4367905 - DNA, 25 bp, Homo sapien
aagcaccggcaagacaattgtgtca

SEQ ID NO: 4367906 - DNA, 25 bp, Homo sapien
tggtgttctttcctggcccgtcgct

SEQ ID NO: 4367907 - DNA, 25 bp, Homo sapien
gtcgctcctgttgcctgaattgtga

SEQ ID NO: 4367908 - DNA, 25 bp, Homo sapien
caagcatgcccacaggctactaggt

SEQ ID NO: 4367909 - DNA, 25 bp, Homo sapien
agtgcttggcaagcatgcccacagg

SEQ ID NO: 4367910 - DNA, 25 bp, Homo sapien
ggagataggacttcagtgcttggca

SEQ ID NO: 4367911 - DNA, 25 bp, Homo sapien
gataggacttcagtgcttggcaagc

SEQ ID NO: 4367912 - DNA, 25 bp, Homo sapien
aaattattccgattcttactcccat

SEQ ID NO: 4367913 - DNA, 25 bp, Homo sapien
taaattattccgattcttactccca

SEQ ID NO: 4367914 - DNA, 25 bp, Homo sapien
ttggtaattttgcaagcgtcaagtt

SEQ ID NO: 4367915 - DNA, 25 bp, Homo sapien
ggtaattttgcaagcgtcaagttga

SEQ ID NO: 4367916 - DNA, 25 bp, Homo sapien
ttgcaagcgtcaagttgaaccccat

SEQ ID NO: 4367917 - DNA, 25 bp, Homo sapien
aattttgcaagcgtcaagttgaacc

SEQ ID NO: 4367918 - DNA, 25 bp, Homo sapien
ggttcagcataggttattcctggtt

SEQ ID NO: 4367919 - DNA, 25 bp, Homo sapien
acgattgaggcgtgggttcagcata

SEQ ID NO: 4367920 - DNA, 25 bp, Homo sapien
gtaagcaaagatgcgtgtcaggaaa

SEQ ID NO: 4367921 - DNA, 25 bp, Homo sapien
tcttcagttgtgatgcactgtaagc

SEQ ID NO: 4367922 - DNA, 25 bp, Homo sapien
gagcatacaaggaactaatggccat

SEQ ID NO: 4367923 - DNA, 25 bp, Homo sapien
ttgggctttgagggattttcatgga

SEQ ID NO: 4367924 - DNA, 25 bp, Homo sapien
attgggctttgagggattttcatgg

SEQ ID NO: 4367925 - DNA, 25 bp, Homo sapien
aggagcatacaaggaactaatggcc

SEQ ID NO: 4367926 - DNA, 25 bp, Homo sapien
ggcccttgtccttaacccatgtata

SEQ ID NO: 4367927 - DNA, 25 bp, Homo sapien
gcccttgtccttaacccatgtatac

SEQ ID NO: 4367928 - DNA, 25 bp, Homo sapien
taggcccttgtccttaacccatgta

SEQ ID NO: 4367929 - DNA, 25 bp, Homo sapien
tctaggcccttgtccttaacccatg

SEQ ID NO: 4367930 - DNA, 25 bp, Homo sapien
tcttcaagttgaaacaggtttcttg

SEQ ID NO: 4367931 - DNA, 25 bp, Homo sapien
acctcatacggtgtcttcaagttga

SEQ ID NO: 4367932 - DNA, 25 bp, Homo sapien
tgtggtggctggctgtccattcacc

SEQ ID NO: 4367933 - DNA, 25 bp, Homo sapien
tggctgtccattcacctcatacggt

SEQ ID NO: 4367934 - DNA, 25 bp, Homo sapien
ggaacaacttgctctcttgctaatg

SEQ ID NO: 4367935 - DNA, 25 bp, Homo sapien
aattctcctgccaggcgactactgg

SEQ ID NO: 4367936 - DNA, 25 bp, Homo sapien
aaagcatgaaaacgaaacatctccc

SEQ ID NO: 4367937 - DNA, 25 bp, Homo sapien
taccagacaaggtaggtatctccct

SEQ ID NO: 4367938 - DNA, 25 bp, Homo sapien
cgggaatcttcatagcgataatttc

SEQ ID NO: 4367939 - DNA, 25 bp, Homo sapien
taaaagccccgggaatcttcatagc

SEQ ID NO: 4367940 - DNA, 25 bp, Homo sapien
catttcataaaagccccgggaatct

SEQ ID NO: 4367941 - DNA, 25 bp, Homo sapien
gccccgggaatcttcatagcgataa

SEQ ID NO: 4367942 - DNA, 25 bp, Homo sapien
ctccatggcatatgactttttcctc

SEQ ID NO: 4367943 - DNA, 25 bp, Homo sapien
tccatggcatatgactttttcctcc

SEQ ID NO: 4367944 - DNA, 25 bp, Homo sapien
ccatggcatatgactttttcctccc

SEQ ID NO: 4367945 - DNA, 25 bp, Homo sapien
gtttcctcccagtgttggtaggcat

SEQ ID NO: 4367946 - DNA, 25 bp, Homo sapien
tgtttcctcccagtgttggtaggca

SEQ ID NO: 4367947 - DNA, 25 bp, Homo sapien
taagagtcttccaagtgtaccaggg

SEQ ID NO: 4367948 - DNA, 25 bp, Homo sapien
taaatacaagcagggtcaccatcct

SEQ ID NO: 4367949 - DNA, 25 bp, Homo sapien
tgggcttcaccctacgatggtcgtg

SEQ ID NO: 4367950 - DNA, 25 bp, Homo sapien
cctttgaggccatggaagaaaacgt

SEQ ID NO: 4367951 - DNA, 25 bp, Homo sapien
gctgtggtctttctcccttgcatac

SEQ ID NO: 4367952 - DNA, 25 bp, Homo sapien
gtctgtctgactgctatgattttct

SEQ ID NO: 4367953 - DNA, 25 bp, Homo sapien
tcagcctaaggttatgttgtctgtc

SEQ ID NO: 4367954 - DNA, 25 bp, Homo sapien
tgattttcttggcttgatgctgtgg

SEQ ID NO: 4367955 - DNA, 25 bp, Homo sapien
taaacagttgattttgcagtctaca

SEQ ID NO: 4367956 - DNA, 25 bp, Homo sapien
ttaagggatccatacaaatgttagt

SEQ ID NO: 4367957 - DNA, 25 bp, Homo sapien
gaactctggcaaaatgaaatggagc

SEQ ID NO: 4367958 - DNA, 25 bp, Homo sapien
gactgtgagtatatggaactctggc

SEQ ID NO: 4367959 - DNA, 25 bp, Homo sapien
caagcattaggataaaaacagtcca

SEQ ID NO: 4367960 - DNA, 25 bp, Homo sapien
tgcaataaccacataaaacacaagc

SEQ ID NO: 4367961 - DNA, 25 bp, Homo sapien
ttcacagacgatggtgttgcttcct

SEQ ID NO: 4367962 - DNA, 25 bp, Homo sapien
gaagacagccacgacaacaaatact

SEQ ID NO: 4367963 - DNA, 25 bp, Homo sapien
gaatctgtcaaaggctatgagccct

SEQ ID NO: 4367964 - DNA, 25 bp, Homo sapien
gagccaaagtattcagcaggatgcc

SEQ ID NO: 4367965 - DNA, 25 bp, Homo sapien
gaataccagctgtactatccgagtg

SEQ ID NO: 4367966 - DNA, 25 bp, Homo sapien
tgagtgtcattatcaagtcggccac

SEQ ID NO: 4367967 - DNA, 25 bp, Homo sapien
atgtttatagcatattaacatcctg

SEQ ID NO: 4367968 - DNA, 25 bp, Homo sapien
gcccttcatgattttcaaatgctat

SEQ ID NO: 4367969 - DNA, 25 bp, Homo sapien
gactttatgtttatagcatattaac

SEQ ID NO: 4367970 - DNA, 25 bp, Homo sapien
aaaaagcccttcatgattttcaaat

SEQ ID NO: 4367971 - DNA, 25 bp, Homo sapien
ttgggaggatactcagttctctctg

SEQ ID NO: 4367972 - DNA, 25 bp, Homo sapien
tctctctgtcttcttatggcggcag

SEQ ID NO: 4367973 - DNA, 25 bp, Homo sapien
ctttgggaggatactcagttctctc

SEQ ID NO: 4367974 - DNA, 25 bp, Homo sapien
tatggcggcagtcattagttcagcc

SEQ ID NO: 4367975 - DNA, 25 bp, Homo sapien
gacactgtgaagtagtcagtttcag

SEQ ID NO: 4367976 - DNA, 25 bp, Homo sapien
tctcttgtggaaattgtcatctcag

SEQ ID NO: 4367977 - DNA, 25 bp, Homo sapien
tttgtgtcccctctgtagtctccga

SEQ ID NO: 4367978 - DNA, 25 bp, Homo sapien
agtccatgctctaccccaacttgaa

SEQ ID NO: 4367979 - DNA, 25 bp, Homo sapien
atggtgagtcatggtatctaatatc

SEQ ID NO: 4367980 - DNA, 25 bp, Homo sapien
ggtatctaatatctttgaacaaaga

SEQ ID NO: 4367981 - DNA, 25 bp, Homo sapien
gagtcatggtatctaatatctttga

SEQ ID NO: 4367982 - DNA, 25 bp, Homo sapien
catggtatctaatatctttgaacaa

SEQ ID NO: 4367983 - DNA, 25 bp, Homo sapien
gctgtgcaactttgtaatcatattt

SEQ ID NO: 4367984 - DNA, 25 bp, Homo sapien
cctctcagtagttatgctgtgcaac

SEQ ID NO: 4367985 - DNA, 25 bp, Homo sapien
ccaataggtcaggatttggttaggg

SEQ ID NO: 4367986 - DNA, 25 bp, Homo sapien
ttttatacacaccaatacaaacaag

SEQ ID NO: 4367987 - DNA, 25 bp, Homo sapien
tacttagcgctttgctttaacgagt

SEQ ID NO: 4367988 - DNA, 25 bp, Homo sapien
tgcagcatgacaattggatgtcgtt

SEQ ID NO: 4367989 - DNA, 25 bp, Homo sapien
cagctacagtttagattagttttct

SEQ ID NO: 4367990 - DNA, 25 bp, Homo sapien
attaacttagttgcttcttcgtcag

SEQ ID NO: 4367991 - DNA, 25 bp, Homo sapien
attggagtctcttcatttgggtcac

SEQ ID NO: 4367992 - DNA, 25 bp, Homo sapien
tcttcatttgggtcaccaccatcct

SEQ ID NO: 4367993 - DNA, 25 bp, Homo sapien
gagtctcttcatttgggtcaccacc

SEQ ID NO: 4367994 - DNA, 25 bp, Homo sapien
cttcatttgggtcaccaccatcctg

SEQ ID NO: 4367995 - DNA, 25 bp, Homo sapien
tcctgggacagagatgttgcagaat

SEQ ID NO: 4367996 - DNA, 25 bp, Homo sapien
ctgggacagagatgttgcagaattg

SEQ ID NO: 4367997 - DNA, 25 bp, Homo sapien
cttttttcctattgtcctgggacag

SEQ ID NO: 4367998 - DNA, 25 bp, Homo sapien
tgtcctgggacagagatgttgcaga

SEQ ID NO: 4367999 - DNA, 25 bp, Homo sapien
tcagggtgtaaggaattcgggcaaa

SEQ ID NO: 4368000 - DNA, 25 bp, Homo sapien
gcatgcatttaaggaagttaaccac

SEQ ID NO: 4368001 - DNA, 25 bp, Homo sapien
tttcagcagtgcagtcaaagacatc

SEQ ID NO: 4368002 - DNA, 25 bp, Homo sapien
gatgaacggatccaggcatgcattt

SEQ ID NO: 4368003 - DNA, 25 bp, Homo sapien
ggtggtcttctggtagcgatcgata

SEQ ID NO: 4368004 - DNA, 25 bp, Homo sapien
ccaggccatttgtgataagtccaac

SEQ ID NO: 4368005 - DNA, 25 bp, Homo sapien
tcgatagttatcagtcccaggaatg

SEQ ID NO: 4368006 - DNA, 25 bp, Homo sapien
tatgacggaggtaacttgacacaca

SEQ ID NO: 4368007 - DNA, 25 bp, Homo sapien
cagaggtgaggttgtcgacggcttg

SEQ ID NO: 4368008 - DNA, 25 bp, Homo sapien
tggtgcacagactggtgttaccagg

SEQ ID NO: 4368009 - DNA, 25 bp, Homo sapien
cagactggtgttaccaggcgcagag

SEQ ID NO: 4368010 - DNA, 25 bp, Homo sapien
gaggtgaggttgtcgacggcttgca

SEQ ID NO: 4368011 - DNA, 25 bp, Homo sapien
taagtagtagttattgcaacctgca

SEQ ID NO: 4368012 - DNA, 25 bp, Homo sapien
tctggagggtttgaatgtatccagt

SEQ ID NO: 4368013 - DNA, 25 bp, Homo sapien
ttattgcaacctgcagagtggcatc

SEQ ID NO: 4368014 - DNA, 25 bp, Homo sapien
gaatgtatccagtaagtagtagtta

SEQ ID NO: 4368015 - DNA, 25 bp, Homo sapien
tttcgtcagtaaagtcttgagtgct

SEQ ID NO: 4368016 - DNA, 25 bp, Homo sapien
gagttttcgtcagtaaagtcttgag

SEQ ID NO: 4368017 - DNA, 25 bp, Homo sapien
ttcctgagttttcgtcagtaaagtc

SEQ ID NO: 4368018 - DNA, 25 bp, Homo sapien
cctgagttttcgtcagtaaagtctt

SEQ ID NO: 4368019 - DNA, 25 bp, Homo sapien
gaaggagagaaaaagagggcttcac

SEQ ID NO: 4368020 - DNA, 25 bp, Homo sapien
ctagagagaaatagaaggagagaaa

SEQ ID NO: 4368021 - DNA, 25 bp, Homo sapien
aggagagaaaaagagggcttcacaa

SEQ ID NO: 4368022 - DNA, 25 bp, Homo sapien
tagaaggagagaaaaagagggcttc

SEQ ID NO: 4368023 - DNA, 25 bp, Homo sapien
gaatttctatctgtcctcttttagg

SEQ ID NO: 4368024 - DNA, 25 bp, Homo sapien
actcaaagctatgcagacactgaat

SEQ ID NO: 4368025 - DNA, 25 bp, Homo sapien
ctcaaagctatgcagacactgaatt

SEQ ID NO: 4368026 - DNA, 25 bp, Homo sapien
tcaaagctatgcagacactgaattt

SEQ ID NO: 4368027 - DNA, 25 bp, Homo sapien
ttcttcattcctgtaacagtttcct

SEQ ID NO: 4368028 - DNA, 25 bp, Homo sapien
tcattcctgtaacagtttcctcatc

SEQ ID NO: 4368029 - DNA, 25 bp, Homo sapien
attcctgtaacagtttcctcatcca

SEQ ID NO: 4368030 - DNA, 25 bp, Homo sapien
cttcattcctgtaacagtttcctca

SEQ ID NO: 4368031 - DNA, 25 bp, Homo sapien
cagttatctgttccccaatcttgat

SEQ ID NO: 4368032 - DNA, 25 bp, Homo sapien
gaaagataggtctgaaacaagagtc

SEQ ID NO: 4368033 - DNA, 25 bp, Homo sapien
tccatattaatccagctaagaggcc

SEQ ID NO: 4368034 - DNA, 25 bp, Homo sapien
cgatggtcaagtagaaagatgttcc

SEQ ID NO: 4368035 - DNA, 25 bp, Homo sapien
gacttcaggtcagttgacacttttt

SEQ ID NO: 4368036 - DNA, 25 bp, Homo sapien
gaattgaagggagggcgggatgcca

SEQ ID NO: 4368037 - DNA, 25 bp, Homo sapien
tttataatgttagcaagttccaaac

SEQ ID NO: 4368038 - DNA, 25 bp, Homo sapien
cacatcaagtgcttctattaagact

SEQ ID NO: 4368039 - DNA, 25 bp, Homo sapien
ttaccgctgtggatacctctgcttg

SEQ ID NO: 4368040 - DNA, 25 bp, Homo sapien
ccctctgtttattgtggccacacag

SEQ ID NO: 4368041 - DNA, 25 bp, Homo sapien
ggaccattgcagagttcttctaact

SEQ ID NO: 4368042 - DNA, 25 bp, Homo sapien
ctctaagaacaacccacagtagggc

SEQ ID NO: 4368043 - DNA, 25 bp, Homo sapien
taatctgaccctggacatgagaaag

SEQ ID NO: 4368044 - DNA, 25 bp, Homo sapien
accctggacatgagaaagtgttctg

SEQ ID NO: 4368045 - DNA, 25 bp, Homo sapien
tctgaccctggacatgagaaagtgt

SEQ ID NO: 4368046 - DNA, 25 bp, Homo sapien
cttgtaatctgaccctggacatgag

SEQ ID NO: 4368047 - DNA, 25 bp, Homo sapien
cactcagtaacttccaaactaggag

SEQ ID NO: 4368048 - DNA, 25 bp, Homo sapien
taaaccagtatgatgtaatgaccac

SEQ ID NO: 4368049 - DNA, 25 bp, Homo sapien
gattcccaaccaagtcgtatttgag

SEQ ID NO: 4368050 - DNA, 25 bp, Homo sapien
cataccatgtggtgttttagcctaa

SEQ ID NO: 4368051 - DNA, 25 bp, Homo sapien
tcgacaaagcctaagtataccctaa

SEQ ID NO: 4368052 - DNA, 25 bp, Homo sapien
cagcagcccttggtaaggcctgttg

SEQ ID NO: 4368053 - DNA, 25 bp, Homo sapien
aaccatgggcgcactttctaaaata

SEQ ID NO: 4368054 - DNA, 25 bp, Homo sapien
gacccttggtctccaagcaatgcag

SEQ ID NO: 4368055 - DNA, 25 bp, Homo sapien
tacgatgagctggctgaccgctcat

SEQ ID NO: 4368056 - DNA, 25 bp, Homo sapien
ctacgatgagctggctgaccgctca

SEQ ID NO: 4368057 - DNA, 25 bp, Homo sapien
cttgtaaaaagtgactcagggcaga

SEQ ID NO: 4368058 - DNA, 25 bp, Homo sapien
tgctcgttgacgtcatcagctggga

SEQ ID NO: 4368059 - DNA, 25 bp, Homo sapien
tctggtctggacttaatatcaatgc

SEQ ID NO: 4368060 - DNA, 25 bp, Homo sapien
gatgtgtgggacaatgatcatccct

SEQ ID NO: 4368061 - DNA, 25 bp, Homo sapien
cttgtagggacggacgaccatgctt

SEQ ID NO: 4368062 - DNA, 25 bp, Homo sapien
cattcgtcggagcaatctgtggact

SEQ ID NO: 4368063 - DNA, 25 bp, Homo sapien
tacgttgttgttccttccgctgccg

SEQ ID NO: 4368064 - DNA, 25 bp, Homo sapien
tgtggctgagtgcatgcacaaccct

SEQ ID NO: 4368065 - DNA, 25 bp, Homo sapien
ggtatttcctggagaagtggttata

SEQ ID NO: 4368066 - DNA, 25 bp, Homo sapien
gtggttataccatgttgattagtta

SEQ ID NO: 4368067 - DNA, 25 bp, Homo sapien
agagacagaggctcaatcttgtcag

SEQ ID NO: 4368068 - DNA, 25 bp, Homo sapien
aattcagcaaacaatggtatttcct

SEQ ID NO: 4368069 - DNA, 25 bp, Homo sapien
gtattcggtcttgtggttacagcag

SEQ ID NO: 4368070 - DNA, 25 bp, Homo sapien
gctgggtattcggtcttgtggttac

SEQ ID NO: 4368071 - DNA, 25 bp, Homo sapien
ctgacagtagtaagctgggtattcg

SEQ ID NO: 4368072 - DNA, 25 bp, Homo sapien
tagtaagctgggtattcggtcttgt

SEQ ID NO: 4368073 - DNA, 25 bp, Homo sapien
gtatctgaggcaaccactacagtgt

SEQ ID NO: 4368074 - DNA, 25 bp, Homo sapien
taagagattgaggacagttacagct

SEQ ID NO: 4368075 - DNA, 25 bp, Homo sapien
tatgcttgattatggagtgctgtcc

SEQ ID NO: 4368076 - DNA, 25 bp, Homo sapien
gggcagcagtcttaaccagtcagaa

SEQ ID NO: 4368077 - DNA, 25 bp, Homo sapien
aatcctgggctattcttgacaagct

SEQ ID NO: 4368078 - DNA, 25 bp, Homo sapien
tcactgtgctcctatgctccagtct

SEQ ID NO: 4368079 - DNA, 25 bp, Homo sapien
aggagccagccttgttgatgccctc

SEQ ID NO: 4368080 - DNA, 25 bp, Homo sapien
catgatactcatgagctagctggtg

SEQ ID NO: 4368081 - DNA, 25 bp, Homo sapien
taaatgccaactaataacctggagc

SEQ ID NO: 4368082 - DNA, 25 bp, Homo sapien
tacgtctgtagtgtggagttcttca

SEQ ID NO: 4368083 - DNA, 25 bp, Homo sapien
gatgaccaggatctttgagctgctg

SEQ ID NO: 4368084 - DNA, 25 bp, Homo sapien
taagccagcgaaacgtaaagtggcg

SEQ ID NO: 4368085 - DNA, 25 bp, Homo sapien
aagtggcggctctcccaagatggta

SEQ ID NO: 4368086 - DNA, 25 bp, Homo sapien
tacagactggccctgcgagttagtc

SEQ ID NO: 4368087 - DNA, 25 bp, Homo sapien
taagtacccctgtgtgtcatggaac

SEQ ID NO: 4368088 - DNA, 25 bp, Homo sapien
tggttttggcttgaatgcttccttt

SEQ ID NO: 4368089 - DNA, 25 bp, Homo sapien
tttggttttggcttgaatgcttcct

SEQ ID NO: 4368090 - DNA, 25 bp, Homo sapien
ggttttggcttgaatgcttcctttc

SEQ ID NO: 4368091 - DNA, 25 bp, Homo sapien
ttggttttggcttgaatgcttcctt

SEQ ID NO: 4368092 - DNA, 25 bp, Homo sapien
tagtttagttcagagggagacactc

SEQ ID NO: 4368093 - DNA, 25 bp, Homo sapien
tgggccagtaacctaaatcctgcgg

SEQ ID NO: 4368094 - DNA, 25 bp, Homo sapien
caccacaagggtttttcagggcaag

SEQ ID NO: 4368095 - DNA, 25 bp, Homo sapien
tcagggcaaggatagtactctccgg

SEQ ID NO: 4368096 - DNA, 25 bp, Homo sapien
agccacagcaaggagtgactccgta

SEQ ID NO: 4368097 - DNA, 25 bp, Homo sapien
gcagctggtactgagagcagtgaca

SEQ ID NO: 4368098 - DNA, 25 bp, Homo sapien
gagtgactccgtatgggcatccttc

SEQ ID NO: 4368099 - DNA, 25 bp, Homo sapien
gacaagagggtagcatccatctgtg

SEQ ID NO: 4368100 - DNA, 25 bp, Homo sapien
agaagacatgacgttttatgtttgc

SEQ ID NO: 4368101 - DNA, 25 bp, Homo sapien
gaggagaagacatgacgttttatgt

SEQ ID NO: 4368102 - DNA, 25 bp, Homo sapien
ggagaagacatgacgttttatgttt

SEQ ID NO: 4368103 - DNA, 25 bp, Homo sapien
gaagacatgacgttttatgtttgca

SEQ ID NO: 4368104 - DNA, 25 bp, Homo sapien
ttgaatagatgctggagaaattaca

SEQ ID NO: 4368105 - DNA, 25 bp, Homo sapien
tgaatagatgctggagaaattacac

SEQ ID NO: 4368106 - DNA, 25 bp, Homo sapien
tttgaatagatgctggagaaattac

SEQ ID NO: 4368107 - DNA, 25 bp, Homo sapien
aatgcttatagagcaacgattcctg

SEQ ID NO: 4368108 - DNA, 25 bp, Homo sapien
tatatataatagacctagaccctcc

SEQ ID NO: 4368109 - DNA, 25 bp, Homo sapien
tccttataaacagctccaaaccagg

SEQ ID NO: 4368110 - DNA, 25 bp, Homo sapien
tcccatcccataaagaattaatgaa

SEQ ID NO: 4368111 - DNA, 25 bp, Homo sapien
tgtattccccatcaatgaaaatttt

SEQ ID NO: 4368112 - DNA, 25 bp, Homo sapien
gtgaacaaatggtgaatcataagac

SEQ ID NO: 4368113 - DNA, 25 bp, Homo sapien
tgatgtgcaggtattacattgcttt

SEQ ID NO: 4368114 - DNA, 25 bp, Homo sapien
gaatcataagacagttcagtgctta

SEQ ID NO: 4368115 - DNA, 25 bp, Homo sapien
ccatttgttattttatagtgaaccg

SEQ ID NO: 4368116 - DNA, 25 bp, Homo sapien
aaaattcaggtacattagccatttg

SEQ ID NO: 4368117 - DNA, 25 bp, Homo sapien
gacactaggcaactggtattagaag

SEQ ID NO: 4368118 - DNA, 25 bp, Homo sapien
cattgataggaggtggacactaggc

SEQ ID NO: 4368119 - DNA, 25 bp, Homo sapien
tcaaattcatttacatgcctatggc

SEQ ID NO: 4368120 - DNA, 25 bp, Homo sapien
gcccagatgttgttgactttattat

SEQ ID NO: 4368121 - DNA, 25 bp, Homo sapien
ctatggctgcctttgattaaacttc

SEQ ID NO: 4368122 - DNA, 25 bp, Homo sapien
ctgcccagatgttgttgactttatt

SEQ ID NO: 4368123 - DNA, 25 bp, Homo sapien
gctgcataatcactaccaagtgggt

SEQ ID NO: 4368124 - DNA, 25 bp, Homo sapien
tggggattctgaatgactagggtac

SEQ ID NO: 4368125 - DNA, 25 bp, Homo sapien
tgaatatacgttgctgcataatcac

SEQ ID NO: 4368126 - DNA, 25 bp, Homo sapien
ccagaatcggaggtttggggattct

SEQ ID NO: 4368127 - DNA, 25 bp, Homo sapien
tttcgggccacacagataaagtcgg

SEQ ID NO: 4368128 - DNA, 25 bp, Homo sapien
tgggatttcgggctacacatacgta

SEQ ID NO: 4368129 - DNA, 25 bp, Homo sapien
ggattccatcagacacacaatgcag

SEQ ID NO: 4368130 - DNA, 25 bp, Homo sapien
caatgcagtgatagagattctccac

SEQ ID NO: 4368131 - DNA, 25 bp, Homo sapien
aagtagacaccactgtctttttctg

SEQ ID NO: 4368132 - DNA, 25 bp, Homo sapien
aataaacagggatccattagggtag

SEQ ID NO: 4368133 - DNA, 25 bp, Homo sapien
tgtttcttgccacacacaagtagac

SEQ ID NO: 4368134 - DNA, 25 bp, Homo sapien
cattagggtagacgtggatccagct

SEQ ID NO: 4368135 - DNA, 25 bp, Homo sapien
aagccttacgctttccaccatgcta

SEQ ID NO: 4368136 - DNA, 25 bp, Homo sapien
cattctttcctaatgctttctaaaa

SEQ ID NO: 4368137 - DNA, 25 bp, Homo sapien
gctggttctcaagccttacgctttc

SEQ ID NO: 4368138 - DNA, 25 bp, Homo sapien
cacttgtggagtttaaaataataat

SEQ ID NO: 4368139 - DNA, 25 bp, Homo sapien
ccagaatttgacttaatatgtgtgc

SEQ ID NO: 4368140 - DNA, 25 bp, Homo sapien
taaatactgagattgtggaggacca

SEQ ID NO: 4368141 - DNA, 25 bp, Homo sapien
tgctctagaataacaggtggtgctg

SEQ ID NO: 4368142 - DNA, 25 bp, Homo sapien
gaacacaagtactgtccgcggtcct

SEQ ID NO: 4368143 - DNA, 25 bp, Homo sapien
tgccatcagagaggacccagtaaac

SEQ ID NO: 4368144 - DNA, 25 bp, Homo sapien
ctgtttcctcttagataaatcaagt

SEQ ID NO: 4368145 - DNA, 25 bp, Homo sapien
tgtttcctcttagataaatcaagtc

SEQ ID NO: 4368146 - DNA, 25 bp, Homo sapien
gcatctgagttagctggaatagtaa

SEQ ID NO: 4368147 - DNA, 25 bp, Homo sapien
tcggacaggcctgtagtagccaaca

SEQ ID NO: 4368148 - DNA, 25 bp, Homo sapien
tgtccatcccaatctgaaacaagag

SEQ ID NO: 4368149 - DNA, 25 bp, Homo sapien
tgctggcatgggagtagaatgtaac

SEQ ID NO: 4368150 - DNA, 25 bp, Homo sapien
tagagcgagcatgcctgaggaatcg

SEQ ID NO: 4368151 - DNA, 25 bp, Homo sapien
tatctatgccgtcgcagaactggag

SEQ ID NO: 4368152 - DNA, 25 bp, Homo sapien
ttcaaagctttagtggccgggacca

SEQ ID NO: 4368153 - DNA, 25 bp, Homo sapien
taagcccggaaatgggagtcgccac

SEQ ID NO: 4368154 - DNA, 25 bp, Homo sapien
cacgtcgctggagtgttaattcccg

SEQ ID NO: 4368155 - DNA, 25 bp, Homo sapien
gatgtgttgaatctccacgtcgctg

SEQ ID NO: 4368156 - DNA, 25 bp, Homo sapien
tattctccctaaaacgtcgatgtgt

SEQ ID NO: 4368157 - DNA, 25 bp, Homo sapien
tgggtcaattctcctagcagaggga

SEQ ID NO: 4368158 - DNA, 25 bp, Homo sapien
cctgataggcttcgaccaaaggttc

SEQ ID NO: 4368159 - DNA, 25 bp, Homo sapien
gactcatcaagtccagatccctctg

SEQ ID NO: 4368160 - DNA, 25 bp, Homo sapien
taatagaggcatctgggataccagt

SEQ ID NO: 4368161 - DNA, 25 bp, Homo sapien
agatgtacggagttgtgcacctggt

SEQ ID NO: 4368162 - DNA, 25 bp, Homo sapien
caatggttggcttggcacactggaa

SEQ ID NO: 4368163 - DNA, 25 bp, Homo sapien
tattcaaagtgagggagccaaaggg

SEQ ID NO: 4368164 - DNA, 25 bp, Homo sapien
agctagaagccaatccacgtgtggg

SEQ ID NO: 4368165 - DNA, 25 bp, Homo sapien
tgtcttccagaatagtcaggctctt

SEQ ID NO: 4368166 - DNA, 25 bp, Homo sapien
tagggttcatgcaaagtggacactg

SEQ ID NO: 4368167 - DNA, 25 bp, Homo sapien
gggttcatgcaaagtggacactgct

SEQ ID NO: 4368168 - DNA, 25 bp, Homo sapien
ctagggttcatgcaaagtggacact

SEQ ID NO: 4368169 - DNA, 25 bp, Homo sapien
gttcatgcaaagtggacactgctga

SEQ ID NO: 4368170 - DNA, 25 bp, Homo sapien
agggacttctatcttttttgcattt

SEQ ID NO: 4368171 - DNA, 25 bp, Homo sapien
ctatcttttttgcattttattacat

SEQ ID NO: 4368172 - DNA, 25 bp, Homo sapien
tagagggacttctatcttttttgca

SEQ ID NO: 4368173 - DNA, 25 bp, Homo sapien
ctagagggacttctatcttttttgc

SEQ ID NO: 4368174 - DNA, 25 bp, Homo sapien
cacaggtccatgggtttccatgcag

SEQ ID NO: 4368175 - DNA, 25 bp, Homo sapien
tgtatccagtcagacaaccacttta

SEQ ID NO: 4368176 - DNA, 25 bp, Homo sapien
aaggctgtctaggtcaggcatatag

SEQ ID NO: 4368177 - DNA, 25 bp, Homo sapien
ctttaaatggcaatcacaggtccat

SEQ ID NO: 4368178 - DNA, 25 bp, Homo sapien
tcaagctcctgaggccataaaaagt

SEQ ID NO: 4368179 - DNA, 25 bp, Homo sapien
caccaggcggagaaagttgagccca

SEQ ID NO: 4368180 - DNA, 25 bp, Homo sapien
tccatgtgcaatcgtgtcaagctcc

SEQ ID NO: 4368181 - DNA, 25 bp, Homo sapien
tatctggaggtagctcaaagagaca

SEQ ID NO: 4368182 - DNA, 25 bp, Homo sapien
caaaatagttgaatggagcggagaa

SEQ ID NO: 4368183 - DNA, 25 bp, Homo sapien
agaggtgcaggtgagacatctgcta

SEQ ID NO: 4368184 - DNA, 25 bp, Homo sapien
gtccataactattgcagctgggtaa

SEQ ID NO: 4368185 - DNA, 25 bp, Homo sapien
ggtaatggtccattacagttcatta

SEQ ID NO: 4368186 - DNA, 25 bp, Homo sapien
ctgccccctctctccatcagtctca

SEQ ID NO: 4368187 - DNA, 25 bp, Homo sapien
tgccccctctctccatcagtctcac

SEQ ID NO: 4368188 - DNA, 25 bp, Homo sapien
catcaatctaaccaagctgttgtat

SEQ ID NO: 4368189 - DNA, 25 bp, Homo sapien
tctgagaaggtcttgtcagggattg

SEQ ID NO: 4368190 - DNA, 25 bp, Homo sapien
caaatctgagaaggtcttgtcaggg

SEQ ID NO: 4368191 - DNA, 25 bp, Homo sapien
tcagggattgtgtgaatgccattgc

SEQ ID NO: 4368192 - DNA, 25 bp, Homo sapien
gaccagcaagcaggtgattcctctg

SEQ ID NO: 4368193 - DNA, 25 bp, Homo sapien
taggcatataacaggcacagcggcg

SEQ ID NO: 4368194 - DNA, 25 bp, Homo sapien
taaattgatgcgttccacattgggc

SEQ ID NO: 4368195 - DNA, 25 bp, Homo sapien
gaaatgtgcagtgtacctccgtagg

SEQ ID NO: 4368196 - DNA, 25 bp, Homo sapien
cctgttgacaggtgggccttttggt

SEQ ID NO: 4368197 - DNA, 25 bp, Homo sapien
agcagtttcagtggccgcccgttca

SEQ ID NO: 4368198 - DNA, 25 bp, Homo sapien
agtggccgcccgttcatttcctcct

SEQ ID NO: 4368199 - DNA, 25 bp, Homo sapien
ggtttacgtaaatcgccgcaggctg

SEQ ID NO: 4368200 - DNA, 25 bp, Homo sapien
gtgatgtccaaacttggatgcttgc

SEQ ID NO: 4368201 - DNA, 25 bp, Homo sapien
caaacttggatgcttgctttggaaa

SEQ ID NO: 4368202 - DNA, 25 bp, Homo sapien
tggaaatgtggcatatttgtcgggt

SEQ ID NO: 4368203 - DNA, 25 bp, Homo sapien
tggcatatttgtcgggttttggcag

SEQ ID NO: 4368204 - DNA, 25 bp, Homo sapien
tttagtgatgtcagtttggcattgg

SEQ ID NO: 4368205 - DNA, 25 bp, Homo sapien
taatttagtgatgtcagtttggcat

SEQ ID NO: 4368206 - DNA, 25 bp, Homo sapien
aatttagtgatgtcagtttggcatt

SEQ ID NO: 4368207 - DNA, 25 bp, Homo sapien
ttaatttagtgatgtcagtttggca

SEQ ID NO: 4368208 - DNA, 25 bp, Homo sapien
taattccagtttagttgccactctg

SEQ ID NO: 4368209 - DNA, 25 bp, Homo sapien
tcctgtgggccagtagtctgtactc

SEQ ID NO: 4368210 - DNA, 25 bp, Homo sapien
gatgtgttgagatcacggtgccagc

SEQ ID NO: 4368211 - DNA, 25 bp, Homo sapien
tctgacaaattcgagtagtttacgg

SEQ ID NO: 4368212 - DNA, 25 bp, Homo sapien
cactggagaggccaaaactgcctgc

SEQ ID NO: 4368213 - DNA, 25 bp, Homo sapien
ctggagaggccaaaactgcctgcac

SEQ ID NO: 4368214 - DNA, 25 bp, Homo sapien
tggccaccagcttgatcttggtatg

SEQ ID NO: 4368215 - DNA, 25 bp, Homo sapien
ccagcttgatcttggtatgtacata

SEQ ID NO: 4368216 - DNA, 25 bp, Homo sapien
gcagtccagacaaacgctctgcttc

SEQ ID NO: 4368217 - DNA, 25 bp, Homo sapien
ggaggcttgctctgtaacccgagag

SEQ ID NO: 4368218 - DNA, 25 bp, Homo sapien
tctgtaacccgagagaagaccagat

SEQ ID NO: 4368219 - DNA, 25 bp, Homo sapien
gcttgctctgtaacccgagagaaga

SEQ ID NO: 4368220 - DNA, 25 bp, Homo sapien
tgatgtcagtgagattagctagcac

SEQ ID NO: 4368221 - DNA, 25 bp, Homo sapien
tctttacattatatgggaggctaac

SEQ ID NO: 4368222 - DNA, 25 bp, Homo sapien
tacagagctgagtcatgtcaaaaaa

SEQ ID NO: 4368223 - DNA, 25 bp, Homo sapien
tagctagcacactaaagttctttgt

SEQ ID NO: 4368224 - DNA, 25 bp, Homo sapien
gaactgatgtgattccttacctcga

SEQ ID NO: 4368225 - DNA, 25 bp, Homo sapien
gctttaccgcttgatattctgtctg

SEQ ID NO: 4368226 - DNA, 25 bp, Homo sapien
gtgcctgctgtctaccagcccagag

SEQ ID NO: 4368227 - DNA, 25 bp, Homo sapien
cagagaataaacctgtagcctccag

SEQ ID NO: 4368228 - DNA, 25 bp, Homo sapien
ctgggagccgtcgagtggaaaagga

SEQ ID NO: 4368229 - DNA, 25 bp, Homo sapien
aacagcttgtggtgtgtcaagaagt

SEQ ID NO: 4368230 - DNA, 25 bp, Homo sapien
aagggatgagtgctgagcagtttgc

SEQ ID NO: 4368231 - DNA, 25 bp, Homo sapien
cagcagcagctataagggggtaaaa

SEQ ID NO: 4368232 - DNA, 25 bp, Homo sapien
cattgtttcatatgtttaaaggtca

SEQ ID NO: 4368233 - DNA, 25 bp, Homo sapien
tccttttctttgaattgtctgttca

SEQ ID NO: 4368234 - DNA, 25 bp, Homo sapien
gctcattcttcttttgggttaagat

SEQ ID NO: 4368235 - DNA, 25 bp, Homo sapien
tctgttcatgttcttggctcattct

SEQ ID NO: 4368236 - DNA, 25 bp, Homo sapien
agcccaaggagttccctgccaccct

SEQ ID NO: 4368237 - DNA, 25 bp, Homo sapien
actccttagcccaaggagttccctg

SEQ ID NO: 4368238 - DNA, 25 bp, Homo sapien
tgcctgaccactgagactccttagc

SEQ ID NO: 4368239 - DNA, 25 bp, Homo sapien
tcggctgatcagctgcctgaccact

SEQ ID NO: 4368240 - DNA, 25 bp, Homo sapien
tgacagcaatattggtacgctttgg

SEQ ID NO: 4368241 - DNA, 25 bp, Homo sapien
caaaaaagttctgtcggttcaactg

SEQ ID NO: 4368242 - DNA, 25 bp, Homo sapien
cagtgagggactagtatcatctgca

SEQ ID NO: 4368243 - DNA, 25 bp, Homo sapien
tcagaagaatgagatacggctggtg

SEQ ID NO: 4368244 - DNA, 25 bp, Homo sapien
caccaccacatttaacagaacattt

SEQ ID NO: 4368245 - DNA, 25 bp, Homo sapien
gttatataaatggtgtcatgcactc

SEQ ID NO: 4368246 - DNA, 25 bp, Homo sapien
tacttcagacggtttccttgtgccc

SEQ ID NO: 4368247 - DNA, 25 bp, Homo sapien
aatatacaaagcagtgtaaccacca

SEQ ID NO: 4368248 - DNA, 25 bp, Homo sapien
tgatgtgtcccataaaaacgatggg

SEQ ID NO: 4368249 - DNA, 25 bp, Homo sapien
cagtggtgattgaagggtccctaga

SEQ ID NO: 4368250 - DNA, 25 bp, Homo sapien
tcagcatcaacagagttaagagggt

SEQ ID NO: 4368251 - DNA, 25 bp, Homo sapien
gagtcttgaacaatctctgagccca

SEQ ID NO: 4368252 - DNA, 25 bp, Homo sapien
ttgggctattctttgcaaacctcct

SEQ ID NO: 4368253 - DNA, 25 bp, Homo sapien
tgggctattctttgcaaacctcctt

SEQ ID NO: 4368254 - DNA, 25 bp, Homo sapien
tttgggctattctttgcaaacctcc

SEQ ID NO: 4368255 - DNA, 25 bp, Homo sapien
tgtgtgtagatgaacagctgagaac

SEQ ID NO: 4368256 - DNA, 25 bp, Homo sapien
aatctgctgtcaggactttgtgtgt

SEQ ID NO: 4368257 - DNA, 25 bp, Homo sapien
tcctgccttttacactcatgggtat

SEQ ID NO: 4368258 - DNA, 25 bp, Homo sapien
gtacggagctatccttgcccaatgg

SEQ ID NO: 4368259 - DNA, 25 bp, Homo sapien
taattttcgacaacactacagcctc

SEQ ID NO: 4368260 - DNA, 25 bp, Homo sapien
cactcatgggtattagcaaagattt

SEQ ID NO: 4368261 - DNA, 25 bp, Homo sapien
tagttcatctctcggatcaggttta

SEQ ID NO: 4368262 - DNA, 25 bp, Homo sapien
ctgctagttcatctctcggatcagg

SEQ ID NO: 4368263 - DNA, 25 bp, Homo sapien
ttcatctctcggatcaggtttatct

SEQ ID NO: 4368264 - DNA, 25 bp, Homo sapien
gctagttcatctctcggatcaggtt

SEQ ID NO: 4368265 - DNA, 25 bp, Homo sapien
ctcctgcctagatgttgataacacg

SEQ ID NO: 4368266 - DNA, 25 bp, Homo sapien
tttagttttgatatgtagtgctcca

SEQ ID NO: 4368267 - DNA, 25 bp, Homo sapien
gtcaataagtcctaaaaactgcctg

SEQ ID NO: 4368268 - DNA, 25 bp, Homo sapien
gataacacgccagttttatgcctat

SEQ ID NO: 4368269 - DNA, 25 bp, Homo sapien
cttagctgatttatacagttcaaga

SEQ ID NO: 4368270 - DNA, 25 bp, Homo sapien
gatttatacagttcaagaatcaaat

SEQ ID NO: 4368271 - DNA, 25 bp, Homo sapien
tttcaacacttagctgatttataca

SEQ ID NO: 4368272 - DNA, 25 bp, Homo sapien
tcaacacttagctgatttatacagt

SEQ ID NO: 4368273 - DNA, 25 bp, Homo sapien
tccagcaattgaggtcaacccaaat

SEQ ID NO: 4368274 - DNA, 25 bp, Homo sapien
taaattgatcaaccctacctgttag

SEQ ID NO: 4368275 - DNA, 25 bp, Homo sapien
tgtttgacaaggagatgggatcaga

SEQ ID NO: 4368276 - DNA, 25 bp, Homo sapien
ctaagaggagacatgtgacaagagc

SEQ ID NO: 4368277 - DNA, 25 bp, Homo sapien
cccactagtagtttgtgggagtcta

SEQ ID NO: 4368278 - DNA, 25 bp, Homo sapien
taaggtctcccactagtagtttgtg

SEQ ID NO: 4368279 - DNA, 25 bp, Homo sapien
ggtctcccactagtagtttgtggga

SEQ ID NO: 4368280 - DNA, 25 bp, Homo sapien
ccactagtagtttgtgggagtctaa

SEQ ID NO: 4368281 - DNA, 25 bp, Homo sapien
aagcccagtggggaggattacttga

SEQ ID NO: 4368282 - DNA, 25 bp, Homo sapien
ttgaggccaggagttcaagaccact
